United States Patent Application Publication US 2008/0318210 A1 - sequence listing, part 6

SEQ ID NO: 199247 - RNA, 17 nt, Homo sapiens
ggcagcauuuagcacau

SEQ ID NO: 199248 - RNA, 16 nt, Homo sapiens
uaaacgcugucccuag

SEQ ID NO: 199249 - RNA, 19 nt, Homo sapiens
ugcugcugagugcaccacu

SEQ ID NO: 199250 - RNA, 14 nt, Homo sapiens
cagcaucuaaguaa

SEQ ID NO: 199251 - RNA, 13 nt, Homo sapiens
accuaggauuuca

SEQ ID NO: 199252 - RNA, 16 nt, Homo sapiens
cucaagggaugucuca

SEQ ID NO: 199253 - RNA, 13 nt, Homo sapiens
caaagacauucug

SEQ ID NO: 199254 - RNA, 13 nt, Homo sapiens
auuuccugacaga

SEQ ID NO: 199255 - RNA, 20 nt, Homo sapiens
aaagacauucugacaucuua

SEQ ID NO: 199256 - RNA, 16 nt, Homo sapiens
aaggaugagcauuuag

SEQ ID NO: 199257 - RNA, 13 nt, Homo sapiens
gcaccauucugac

SEQ ID NO: 199258 - RNA, 21 nt, Homo sapiens
acacagcugcagagacagaga

SEQ ID NO: 199259 - RNA, 16 nt, Homo sapiens
augaaauaucaugcuc

SEQ ID NO: 199260 - RNA, 13 nt, Homo sapiens
uaccaaucauuuu

SEQ ID NO: 199261 - RNA, 18 nt, Homo sapiens
aucauuuucugcauuuaa

SEQ ID NO: 199262 - RNA, 20 nt, Homo sapiens
acccuaugugggugggacca

SEQ ID NO: 199263 - RNA, 19 nt, Homo sapiens
ucuaugaaauaucaugcuc

SEQ ID NO: 199264 - RNA, 21 nt, Homo sapiens
uccccuggggagucugggcac

SEQ ID NO: 199265 - RNA, 20 nt, Homo sapiens
uuagauuguuaaaauaacua

SEQ ID NO: 199266 - RNA, 13 nt, Homo sapiens
aauaaccaauccu

SEQ ID NO: 199267 - RNA, 16 nt, Homo sapiens
uaacaggauuagacag

SEQ ID NO: 199268 - RNA, 12 nt, Homo sapiens
gcuacaccuuuc

SEQ ID NO: 199269 - RNA, 23 nt, Homo sapiens
uaccucacagagugcauugugag

SEQ ID NO: 199270 - RNA, 18 nt, Homo sapiens
aggcuuaaucacaccguc

SEQ ID NO: 199271 - RNA, 16 nt, Homo sapiens
agccugccucuuccag

SEQ ID NO: 199272 - RNA, 17 nt, Homo sapiens
aaucagcauucucacuc

SEQ ID NO: 199273 - RNA, 14 nt, Homo sapiens
aggaaccucagggc

SEQ ID NO: 199274 - RNA, 13 nt, Homo sapiens
ugcuuacuuugca

SEQ ID NO: 199275 - RNA, 22 nt, Homo sapiens
cccaucccacacccuggaggau

SEQ ID NO: 199276 - RNA, 23 nt, Homo sapiens
aauguuaaguugauggugaugaa

SEQ ID NO: 199277 - RNA, 19 nt, Homo sapiens
gacagagcagaacuuucac

SEQ ID NO: 199278 - RNA, 19 nt, Homo sapiens
cucacagagugcauuguga

SEQ ID NO: 199279 - RNA, 21 nt, Homo sapiens
uauauaaaugugauugcagcu

SEQ ID NO: 199280 - RNA, 19 nt, Homo sapiens
uugagcuuaagaauuuuga

SEQ ID NO: 199281 - RNA, 19 nt, Homo sapiens
uugucccaaguuccacugc

SEQ ID NO: 199282 - RNA, 17 nt, Homo sapiens
auccuuugccucaagga

SEQ ID NO: 199283 - RNA, 14 nt, Homo sapiens
aacaugugcucagg

SEQ ID NO: 199284 - RNA, 13 nt, Homo sapiens
ugaaaucuaugaa

SEQ ID NO: 199285 - RNA, 14 nt, Homo sapiens
auguugcccagugu

SEQ ID NO: 199286 - RNA, 20 nt, Homo sapiens
agaagcacccaggacuucca

SEQ ID NO: 199287 - RNA, 23 nt, Homo sapiens
guaugauccuaaugaaugcauaa

SEQ ID NO: 199288 - RNA, 15 nt, Homo sapiens
aaaguaguccuguga

SEQ ID NO: 199289 - RNA, 15 nt, Homo sapiens
cagcacccaugggaa

SEQ ID NO: 199290 - RNA, 19 nt, Homo sapiens
uaaaugccaggccuggcaa

SEQ ID NO: 199291 - RNA, 23 nt, Homo sapiens
aaagcuuucauguaaacugugca

SEQ ID NO: 199292 - RNA, 20 nt, Homo sapiens
uguaaauacuguuuuuaaca

SEQ ID NO: 199293 - RNA, 21 nt, Homo sapiens
auucucucaggcuugcugcca

SEQ ID NO: 199294 - RNA, 17 nt, Homo sapiens
aaucauuuuaauuauua

SEQ ID NO: 199295 - RNA, 19 nt, Homo sapiens
auuagccuaugugcaugca

SEQ ID NO: 199296 - RNA, 14 nt, Homo sapiens
ggaagcgagcuuug

SEQ ID NO: 199297 - RNA, 14 nt, Homo sapiens
ccugggcaaagccu

SEQ ID NO: 199298 - RNA, 14 nt, Homo sapiens
uaggaaaauuucac

SEQ ID NO: 199299 - RNA, 16 nt, Homo sapiens
auauguucaacuggag

SEQ ID NO: 199300 - RNA, 16 nt, Homo sapiens
ucaugauuucauuuca

SEQ ID NO: 199301 - RNA, 20 nt, Homo sapiens
augggcaaauuaaggcauaa

SEQ ID NO: 199302 - RNA, 13 nt, Homo sapiens
caaagacuuuccu

SEQ ID NO: 199303 - RNA, 12 nt, Homo sapiens
agccucaagucu

SEQ ID NO: 199304 - RNA, 22 nt, Homo sapiens
uauuuugcauaguaccaaucau

SEQ ID NO: 199305 - RNA, 21 nt, Homo sapiens
guauguuugggagacugcuga

SEQ ID NO: 199306 - RNA, 22 nt, Homo sapiens
uggccuccccugccaccaggcc

SEQ ID NO: 199307 - RNA, 21 nt, Homo sapiens
cucuggacacagccccaugua

SEQ ID NO: 199308 - RNA, 17 nt, Homo sapiens
auauuuuugugcacauu

SEQ ID NO: 199309 - RNA, 15 nt, Homo sapiens
uucaugaucaucaca

SEQ ID NO: 199310 - RNA, 18 nt, Homo sapiens
ucacagagugcauuguga

SEQ ID NO: 199311 - RNA, 12 nt, Homo sapiens
aauuaugccaua

SEQ ID NO: 199312 - RNA, 16 nt, Homo sapiens
ucccacaggcccuucc

SEQ ID NO: 199313 - RNA, 16 nt, Homo sapiens
uauggcacccaugcac

SEQ ID NO: 199314 - RNA, 15 nt, Homo sapiens
aggaacauacuucag

SEQ ID NO: 199315 - RNA, 19 nt, Homo sapiens
agccuagcccuucucucau

SEQ ID NO: 199316 - RNA, 16 nt, Homo sapiens
auucugucaaugucuu

SEQ ID NO: 199317 - RNA, 21 nt, Homo sapiens
cuguguugccaagcuccaagc

SEQ ID NO: 199318 - RNA, 21 nt, Homo sapiens
aucgacuuguuuuugcacaug

SEQ ID NO: 199319 - RNA, 19 nt, Homo sapiens
cagaaggaaaaauguguaa

SEQ ID NO: 199320 - RNA, 13 nt, Homo sapiens
uggaauguaauca

SEQ ID NO: 199321 - RNA, 17 nt, Homo sapiens
ggacaugaagauucuuu

SEQ ID NO: 199322 - RNA, 15 nt, Homo sapiens
ccuugaaaagacauc

SEQ ID NO: 199323 - RNA, 18 nt, Homo sapiens
agcauacgguaugauauu

SEQ ID NO: 199324 - RNA, 16 nt, Homo sapiens
ccacaggcagcauuua

SEQ ID NO: 199325 - RNA, 14 nt, Homo sapiens
uccuccaugggaga

SEQ ID NO: 199326 - RNA, 18 nt, Homo sapiens
cuugggagaccuguaauc

SEQ ID NO: 199327 - RNA, 23 nt, Homo sapiens
aaugcauauccaacaugugcuca

SEQ ID NO: 199328 - RNA, 23 nt, Homo sapiens
uguuaccugaaaacacugugcac

SEQ ID NO: 199329 - RNA, 23 nt, Homo sapiens
ucugagcagugaaugauucagug

SEQ ID NO: 199330 - RNA, 16 nt, Homo sapiens
cuuugagugacugggu

SEQ ID NO: 199331 - RNA, 15 nt, Homo sapiens
ggaugcagagucagc

SEQ ID NO: 199332 - RNA, 17 nt, Homo sapiens
ucuguuccccauggcca

SEQ ID NO: 199333 - RNA, 15 nt, Homo sapiens
ccugagguuugccag

SEQ ID NO: 199334 - RNA, 15 nt, Homo sapiens
gcuucccuaaucuau

SEQ ID NO: 199335 - RNA, 16 nt, Homo sapiens
aaacuaacacccaguc

SEQ ID NO: 199336 - RNA, 19 nt, Homo sapiens
cuccauguagaagccacua

SEQ ID NO: 199337 - RNA, 20 nt, Homo sapiens
ugaggcaaccacaggcagca

SEQ ID NO: 199338 - RNA, 15 nt, Homo sapiens
aggucagggugagga

SEQ ID NO: 199339 - RNA, 24 nt, Homo sapiens
ugaacuuggaaagaaaugcccauc

SEQ ID NO: 199340 - RNA, 15 nt, Homo sapiens
agguaaggugaggga

SEQ ID NO: 199341 - RNA, 15 nt, Homo sapiens
aguaacauguguuaa

SEQ ID NO: 199342 - RNA, 13 nt, Homo sapiens
cauuucaaaggga

SEQ ID NO: 199343 - RNA, 21 nt, Homo sapiens
acaggacccugggaccacaga

SEQ ID NO: 199344 - RNA, 15 nt, Homo sapiens
agccaccaagaggga

SEQ ID NO: 199345 - RNA, 16 nt, Homo sapiens
uaccaaaauuauuuca

SEQ ID NO: 199346 - RNA, 19 nt, Homo sapiens
aauugugaucagaccauaa

SEQ ID NO: 199347 - RNA, 17 nt, Homo sapiens
caggauuagacagucaa

SEQ ID NO: 199348 - RNA, 14 nt, Homo sapiens
uuugagacuuagaa

SEQ ID NO: 199349 - RNA, 19 nt, Homo sapiens
cuucucucaccuccuaaag

SEQ ID NO: 199350 - RNA, 18 nt, Homo sapiens
caaaggagggucaggaag

SEQ ID NO: 199351 - RNA, 18 nt, Homo sapiens
aaaacuuuaaucccacuu

SEQ ID NO: 199352 - RNA, 18 nt, Homo sapiens
gauggagccagcucugca

SEQ ID NO: 199353 - RNA, 14 nt, Homo sapiens
ccuauguaugccau

SEQ ID NO: 199354 - RNA, 20 nt, Homo sapiens
ggugcuaucgcaccacugug

SEQ ID NO: 199355 - RNA, 14 nt, Homo sapiens
cacagagugcauug

SEQ ID NO: 199356 - RNA, 21 nt, Homo sapiens
ggacuauggcucuacuuucag

SEQ ID NO: 199357 - RNA, 12 nt, Homo sapiens
augauuaguaaa

SEQ ID NO: 199358 - RNA, 12 nt, Homo sapiens
guuggcuucuaa

SEQ ID NO: 199359 - RNA, 13 nt, Homo sapiens
guagucauuucau

SEQ ID NO: 199360 - RNA, 16 nt, Homo sapiens
cgaacaauucauauau

SEQ ID NO: 199361 - RNA, 20 nt, Homo sapiens
caagucuuuacagaaucaaa

SEQ ID NO: 199362 - RNA, 18 nt, Homo sapiens
ccuuucuucagacacuga

SEQ ID NO: 199363 - RNA, 14 nt, Homo sapiens
ucuaagucuuucca

SEQ ID NO: 199364 - RNA, 19 nt, Homo sapiens
acccuuggagccaauggag

SEQ ID NO: 199365 - RNA, 16 nt, Homo sapiens
gaaccaggcaacuugg

SEQ ID NO: 199366 - RNA, 21 nt, Homo sapiens
agcuuugagcuuaagaauuuu

SEQ ID NO: 199367 - RNA, 15 nt, Homo sapiens
aaauacagucuucca

SEQ ID NO: 199368 - RNA, 20 nt, Homo sapiens
aaauuguaucaaaugugaca

SEQ ID NO: 199369 - RNA, 13 nt, Homo sapiens
uauguaacaugua

SEQ ID NO: 199370 - RNA, 19 nt, Homo sapiens
uuacauuugaaaucuauga

SEQ ID NO: 199371 - RNA, 14 nt, Homo sapiens
ugaggaauguauau

SEQ ID NO: 199372 - RNA, 13 nt, Homo sapiens
uuuucaccccacc

SEQ ID NO: 199373 - RNA, 16 nt, Homo sapiens
cagagcagaacuuuca

SEQ ID NO: 199374 - RNA, 20 nt, Homo sapiens
gccuggaguguaugacugca

SEQ ID NO: 199375 - RNA, 14 nt, Homo sapiens
ugucucagccuccc

SEQ ID NO: 199376 - RNA, 22 nt, Homo sapiens
gacaggacccugggaccacaga

SEQ ID NO: 199377 - RNA, 12 nt, Homo sapiens
agaguugugcac

SEQ ID NO: 199378 - RNA, 18 nt, Homo sapiens
uacagucuuccauuugca

SEQ ID NO: 199379 - RNA, 19 nt, Homo sapiens
caacguggggcagcacaga

SEQ ID NO: 199380 - RNA, 16 nt, Homo sapiens
cguuucugguggucug

SEQ ID NO: 199381 - RNA, 17 nt, Homo sapiens
aucagggaggucauuuu

SEQ ID NO: 199382 - RNA, 18 nt, Homo sapiens
ucagauaccgacuggggc

SEQ ID NO: 199383 - RNA, 17 nt, Homo sapiens
cuuuuacugaagccuuu

SEQ ID NO: 199384 - RNA, 22 nt, Homo sapiens
ccuuagauguucuaagucuuuc

SEQ ID NO: 199385 - RNA, 22 nt, Homo sapiens
acauccucugucuauuugagac

SEQ ID NO: 199386 - RNA, 21 nt, Homo sapiens
ucugcaagcacaucugcauuu

SEQ ID NO: 199387 - RNA, 18 nt, Homo sapiens
caaccugccugacauuug

SEQ ID NO: 199388 - RNA, 12 nt, Homo sapiens
ccauucaggaca

SEQ ID NO: 199389 - RNA, 22 nt, Homo sapiens
accucagggcuguguguacuaa

SEQ ID NO: 199390 - RNA, 21 nt, Homo sapiens
uacaauaaaacuuugcugcca

SEQ ID NO: 199391 - RNA, 13 nt, Homo sapiens
uguuaaaauaacu

SEQ ID NO: 199392 - RNA, 17 nt, Homo sapiens
cugguuagguagaggga

SEQ ID NO: 199393 - RNA, 22 nt, Homo sapiens
ucuuguuucaauuccaccugca

SEQ ID NO: 199394 - RNA, 17 nt, Homo sapiens
cauauguaccauguaca

SEQ ID NO: 199395 - RNA, 19 nt, Homo sapiens
gccaccuccccaggccgug

SEQ ID NO: 199396 - RNA, 13 nt, Homo sapiens
aauauccuuugcc

SEQ ID NO: 199397 - RNA, 18 nt, Homo sapiens
ugugggugggaccacaga

SEQ ID NO: 199398 - RNA, 16 nt, Homo sapiens
gacaaauaauaagcaa

SEQ ID NO: 199399 - RNA, 20 nt, Homo sapiens
ggccucaagggaugucucac

SEQ ID NO: 199400 - RNA, 15 nt, Homo sapiens
augcauaaaauguua

SEQ ID NO: 199401 - RNA, 20 nt, Homo sapiens
ucuagaaccaggcaacuugg

SEQ ID NO: 199402 - RNA, 15 nt, Homo sapiens
cacugauaaaaccau

SEQ ID NO: 199403 - RNA, 21 nt, Homo sapiens
uguugcccaggcuggucucaa

SEQ ID NO: 199404 - RNA, 19 nt, Homo sapiens
auguuaggaaaauuucaca

SEQ ID NO: 199405 - RNA, 20 nt, Homo sapiens
uaacaaguagcacccuggau

SEQ ID NO: 199406 - RNA, 13 nt, Homo sapiens
auuucuucacuca

SEQ ID NO: 199407 - RNA, 17 nt, Homo sapiens
uggcagccgugccuuca

SEQ ID NO: 199408 - RNA, 14 nt, Homo sapiens
auggaggcacacag

SEQ ID NO: 199409 - RNA, 16 nt, Homo sapiens
gugaauaaaccaucau

SEQ ID NO: 199410 - RNA, 16 nt, Homo sapiens
guucccuauuuugcca

SEQ ID NO: 199411 - RNA, 14 nt, Homo sapiens
uucuaugaggcaac

SEQ ID NO: 199412 - RNA, 17 nt, Homo sapiens
aaguugcugaugaacuc

SEQ ID NO: 199413 - RNA, 16 nt, Homo sapiens
cagguuccaaucagaa

SEQ ID NO: 199414 - RNA, 21 nt, Homo sapiens
ucuacuaacaaucagcuccuu

SEQ ID NO: 199415 - RNA, 20 nt, Homo sapiens
aggggucccauagaggugag

SEQ ID NO: 199416 - RNA, 14 nt, Homo sapiens
ccaaguuccacugc

SEQ ID NO: 199417 - RNA, 18 nt, Homo sapiens
cuaaaugaauguuuacac

SEQ ID NO: 199418 - RNA, 17 nt, Homo sapiens
acacagcugcagagaca

SEQ ID NO: 199419 - RNA, 20 nt, Homo sapiens
auuuaugccucuguauuuaa

SEQ ID NO: 199420 - RNA, 16 nt, Homo sapiens
uaguggggucagggcu

SEQ ID NO: 199421 - RNA, 16 nt, Homo sapiens
gugaaugauucagugu

SEQ ID NO: 199422 - RNA, 16 nt, Homo sapiens
cccaaguuccacugcu

SEQ ID NO: 199423 - RNA, 21 nt, Homo sapiens
cacuagcaauaaaaugcuaau

SEQ ID NO: 199424 - RNA, 15 nt, Homo sapiens
ugucacccaaugcau

SEQ ID NO: 199425 - RNA, 20 nt, Homo sapiens
guuccccacugacagccucc

SEQ ID NO: 199426 - RNA, 17 nt, Homo sapiens
uucccacaggacauuuc

SEQ ID NO: 199427 - RNA, 15 nt, Homo sapiens
uguaucaaaugugac

SEQ ID NO: 199428 - RNA, 22 nt, Homo sapiens
cuauguuuuuguucaaagccag

SEQ ID NO: 199429 - RNA, 15 nt, Homo sapiens
augccauagcaagau

SEQ ID NO: 199430 - RNA, 14 nt, Homo sapiens
cugggcacagucag

SEQ ID NO: 199431 - RNA, 23 nt, Homo sapiens
ccaacguggggcagcacagagag

SEQ ID NO: 199432 - RNA, 21 nt, Homo sapiens
cuugauccacuucucucagga

SEQ ID NO: 199433 - RNA, 18 nt, Homo sapiens
uaaaguaguccugugaau

SEQ ID NO: 199434 - RNA, 13 nt, Homo sapiens
guaaaugugcauu

SEQ ID NO: 199435 - RNA, 17 nt, Homo sapiens
acuauuuaucugugcaa

SEQ ID NO: 199436 - RNA, 23 nt, Homo sapiens
uggagaaacccuugaaaagacau

SEQ ID NO: 199437 - RNA, 16 nt, Homo sapiens
uaagcagaccacugau

SEQ ID NO: 199438 - RNA, 15 nt, Homo sapiens
ugucccaaguuccac

SEQ ID NO: 199439 - RNA, 16 nt, Homo sapiens
agacaggacccuggga

SEQ ID NO: 199440 - RNA, 14 nt, Homo sapiens
gguaugauauugca

SEQ ID NO: 199441 - RNA, 14 nt, Homo sapiens
aaccaacacuaaca

SEQ ID NO: 199442 - RNA, 13 nt, Homo sapiens
acuugggaacuag

SEQ ID NO: 199443 - RNA, 15 nt, Homo sapiens
ugaggguuaaugaaa

SEQ ID NO: 199444 - RNA, 21 nt, Homo sapiens
ugagugugaccaggcauccuc

SEQ ID NO: 199445 - RNA, 14 nt, Homo sapiens
aaugaauguuuaca

SEQ ID NO: 199446 - RNA, 21 nt, Homo sapiens
ucugcauuaucugaggucaca

SEQ ID NO: 199447 - RNA, 20 nt, Homo sapiens
ccugagguuugccagcauuu

SEQ ID NO: 199448 - RNA, 17 nt, Homo sapiens
uucuuauguugcccagu

SEQ ID NO: 199449 - RNA, 21 nt, Homo sapiens
ugccucauuaccuugugcuaa

SEQ ID NO: 199450 - RNA, 18 nt, Homo sapiens
uuuaucuauggcacccau

SEQ ID NO: 199451 - RNA, 15 nt, Homo sapiens
ccucuacaauuugcc

SEQ ID NO: 199452 - RNA, 13 nt, Homo sapiens
auucacaguguga

SEQ ID NO: 199453 - RNA, 17 nt, Homo sapiens
cuccacccuuggacuuu

SEQ ID NO: 199454 - RNA, 14 nt, Homo sapiens
ucuucuccacugga

SEQ ID NO: 199455 - RNA, 14 nt, Homo sapiens
gauguagugccucu

SEQ ID NO: 199456 - RNA, 16 nt, Homo sapiens
cuuuugguaugugaca

SEQ ID NO: 199457 - RNA, 14 nt, Homo sapiens
caugaaaacagaaa

SEQ ID NO: 199458 - RNA, 22 nt, Homo sapiens
auccuacaaggcuggcagugac

SEQ ID NO: 199459 - RNA, 23 nt, Homo sapiens
cagagaggacuguugacauccaa

SEQ ID NO: 199460 - RNA, 15 nt, Homo sapiens
uuacuaucaugucaa

SEQ ID NO: 199461 - RNA, 14 nt, Homo sapiens
uagacuaaggccau

SEQ ID NO: 199462 - RNA, 23 nt, Homo sapiens
ugggaccucaguuuuaucauuuu

SEQ ID NO: 199463 - RNA, 14 nt, Homo sapiens
auguucaacuggag

SEQ ID NO: 199464 - RNA, 23 nt, Homo sapiens
ggcaacuugggaacuagacuccc

SEQ ID NO: 199465 - RNA, 20 nt, Homo sapiens
ccuucucucaccuccuaaag

SEQ ID NO: 199466 - RNA, 23 nt, Homo sapiens
cagggacuugaaguuguuacuaa

SEQ ID NO: 199467 - RNA, 13 nt, Homo sapiens
cuguuagagucca

SEQ ID NO: 199468 - RNA, 20 nt, Homo sapiens
uauuacugggacugugcuca

SEQ ID NO: 199469 - RNA, 20 nt, Homo sapiens
auauugcagcuuauauucau

SEQ ID NO: 199470 - RNA, 22 nt, Homo sapiens
uagaguccaacguggggcagca

SEQ ID NO: 199471 - RNA, 16 nt, Homo sapiens
agcauggagcauggga

SEQ ID NO: 199472 - RNA, 22 nt, Homo sapiens
aaaacuguggguagagacuuug

SEQ ID NO: 199473 - RNA, 18 nt, Homo sapiens
uuguaugauccuaaugaa

SEQ ID NO: 199474 - RNA, 13 nt, Homo sapiens
augacugcacaug

SEQ ID NO: 199475 - RNA, 18 nt, Homo sapiens
uuuauaaggcugauguca

SEQ ID NO: 199476 - RNA, 19 nt, Homo sapiens
cuacaaggcuggcagugac

SEQ ID NO: 199477 - RNA, 16 nt, Homo sapiens
cauuuucugcauuuaa

SEQ ID NO: 199478 - RNA, 17 nt, Homo sapiens
uuacauuugaaaucuau

SEQ ID NO: 199479 - RNA, 17 nt, Homo sapiens
accaugucagcaaaaag

SEQ ID NO: 199480 - RNA, 11 nt, Homo sapiens
gucuguuggca

SEQ ID NO: 199481 - RNA, 22 nt, Homo sapiens
caaaucuucuugauccacuucu

SEQ ID NO: 199482 - RNA, 21 nt, Homo sapiens
aauacagucuuccauuugcaa

SEQ ID NO: 199483 - RNA, 18 nt, Homo sapiens
agcuggaaaaaguguccu

SEQ ID NO: 199484 - RNA, 17 nt, Homo sapiens
gagggccacaugggagg

SEQ ID NO: 199485 - RNA, 20 nt, Homo sapiens
gagcuuuugguaugugacau

SEQ ID NO: 199486 - RNA, 13 nt, Homo sapiens
auuagacagucaa

SEQ ID NO: 199487 - RNA, 19 nt, Homo sapiens
cugaaaacacugugcacau

SEQ ID NO: 199488 - RNA, 14 nt, Homo sapiens
caaaaucacacagc

SEQ ID NO: 199489 - RNA, 13 nt, Homo sapiens
uaccggcaauuuc

SEQ ID NO: 199490 - RNA, 13 nt, Homo sapiens
agcucaucucagc

SEQ ID NO: 199491 - RNA, 22 nt, Homo sapiens
cugcauuuauagcauacgguau

SEQ ID NO: 199492 - RNA, 17 nt, Homo sapiens
uuuuaacaacuaugauu

SEQ ID NO: 199493 - RNA, 22 nt, Homo sapiens
acaagaagccacagaccuagga

SEQ ID NO: 199494 - RNA, 15 nt, Homo sapiens
aauauagcuguacaa

SEQ ID NO: 199495 - RNA, 14 nt, Homo sapiens
agaugaaugggagu

SEQ ID NO: 199496 - RNA, 17 nt, Homo sapiens
caccacagccagcaccu

SEQ ID NO: 199497 - RNA, 20 nt, Homo sapiens
ggugaaccuuaguaccuaaa

SEQ ID NO: 199498 - RNA, 16 nt, Homo sapiens
aaaguaguccugugaa

SEQ ID NO: 199499 - RNA, 15 nt, Homo sapiens
cccuccccugccauu

SEQ ID NO: 199500 - RNA, 20 nt, Homo sapiens
aacagccccucuggacacag

SEQ ID NO: 199501 - RNA, 18 nt, Homo sapiens
cugugcaaauccuugaua

SEQ ID NO: 199502 - RNA, 20 nt, Homo sapiens
uuuguuuuguaucauuauga

SEQ ID NO: 199503 - RNA, 13 nt, Homo sapiens
gagagaacuggag

SEQ ID NO: 199504 - RNA, 17 nt, Homo sapiens
acuucucuauuaucuca

SEQ ID NO: 199505 - RNA, 19 nt, Homo sapiens
aguuugcuuuguaugcacu

SEQ ID NO: 199506 - RNA, 13 nt, Homo sapiens
caauaagcaucaa

SEQ ID NO: 199507 - RNA, 21 nt, Homo sapiens
ugcacuguucccccugugcag

SEQ ID NO: 199508 - RNA, 16 nt, Homo sapiens
aguuuacaaucagcca

SEQ ID NO: 199509 - RNA, 21 nt, Homo sapiens
ugccagcauuuagacccugca

SEQ ID NO: 199510 - RNA, 20 nt, Homo sapiens
aauagcaaccuuuuuaucuc

SEQ ID NO: 199511 - RNA, 15 nt, Homo sapiens
agguuugccagcauu

SEQ ID NO: 199512 - RNA, 18 nt, Homo sapiens
ugcccagugaccagucac

SEQ ID NO: 199513 - RNA, 23 nt, Homo sapiens
gagaggagaaggagggagacaug

SEQ ID NO: 199514 - RNA, 19 nt, Homo sapiens
uuugaacccuugcuugcaa

SEQ ID NO: 199515 - RNA, 17 nt, Homo sapiens
aucucuuauuuuacaau

SEQ ID NO: 199516 - RNA, 17 nt, Homo sapiens
aagucuuauuuccucaa

SEQ ID NO: 199517 - RNA, 12 nt, Homo sapiens
uggacacagccc

SEQ ID NO: 199518 - RNA, 12 nt, Homo sapiens
auauucauuuca

SEQ ID NO: 199519 - RNA, 21 nt, Homo sapiens
auaaaauuaaagcugaaaacu

SEQ ID NO: 199520 - RNA, 22 nt, Homo sapiens
ccaagcaggaaaugaaaauguc

SEQ ID NO: 199521 - RNA, 13 nt, Homo sapiens
gaacuugcacaaa

SEQ ID NO: 199522 - RNA, 17 nt, Homo sapiens
ucuuuucgccguggcug

SEQ ID NO: 199523 - RNA, 19 nt, Homo sapiens
gaccaaugucuugaugcau

SEQ ID NO: 199524 - RNA, 23 nt, Homo sapiens
uucaagcagucgugccugugucc

SEQ ID NO: 199525 - RNA, 17 nt, Homo sapiens
ccuucaugaucaucaca

SEQ ID NO: 199526 - RNA, 16 nt, Homo sapiens
ggagcuggcccucucc

SEQ ID NO: 199527 - RNA, 14 nt, Homo sapiens
aauaaagcuugcaa

SEQ ID NO: 199528 - RNA, 23 nt, Homo sapiens
acuaccuugguucccccacugau

SEQ ID NO: 199529 - RNA, 17 nt, Homo sapiens
agacucacauccugacc

SEQ ID NO: 199530 - RNA, 13 nt, Homo sapiens
cuguugacaucca

SEQ ID NO: 199531 - RNA, 16 nt, Homo sapiens
auggcacccaugcacc

SEQ ID NO: 199532 - RNA, 15 nt, Homo sapiens
acagagcagaacuuu

SEQ ID NO: 199533 - RNA, 21 nt, Homo sapiens
agcauacgguaugauauugca

SEQ ID NO: 199534 - RNA, 13 nt, Homo sapiens
uagaguguuauca

SEQ ID NO: 199535 - RNA, 20 nt, Homo sapiens
cagacuucccugaauguauu

SEQ ID NO: 199536 - RNA, 21 nt, Homo sapiens
auugguccgaucuuugacucu

SEQ ID NO: 199537 - RNA, 19 nt, Homo sapiens
cagugaccagucacugacc

SEQ ID NO: 199538 - RNA, 18 nt, Homo sapiens
uauuuugcauaguaccaa

SEQ ID NO: 199539 - RNA, 20 nt, Homo sapiens
acugccuucgcuucuugccu

SEQ ID NO: 199540 - RNA, 15 nt, Homo sapiens
auuuaucugugcaaa

SEQ ID NO: 199541 - RNA, 17 nt, Homo sapiens
augagaaggaauuugag

SEQ ID NO: 199542 - RNA, 15 nt, Homo sapiens
uuuccgaaaucagaa

SEQ ID NO: 199543 - RNA, 14 nt, Homo sapiens
aguggggucagggc

SEQ ID NO: 199544 - RNA, 15 nt, Homo sapiens
uuuuggagguauuca

SEQ ID NO: 199545 - RNA, 15 nt, Homo sapiens
ugaggaacccuuaca

SEQ ID NO: 199546 - RNA, 14 nt, Homo sapiens
ucgcuucuugccuc

SEQ ID NO: 199547 - RNA, 16 nt, Homo sapiens
ccuguaccugugcacg

SEQ ID NO: 199548 - RNA, 24 nt, Homo sapiens
gagggaacccucuaagggaccuca

SEQ ID NO: 199549 - RNA, 15 nt, Homo sapiens
aauccuuuacuguua

SEQ ID NO: 199550 - RNA, 19 nt, Homo sapiens
agauguucuaagucuuucc

SEQ ID NO: 199551 - RNA, 21 nt, Homo sapiens
uuucaggccacauggcuaaag

SEQ ID NO: 199552 - RNA, 18 nt, Homo sapiens
ccuuucuccuuuguacuu

SEQ ID NO: 199553 - RNA, 13 nt, Homo sapiens
aucauuccuugag

SEQ ID NO: 199554 - RNA, 15 nt, Homo sapiens
caaauuaaggcauaa

SEQ ID NO: 199555 - RNA, 13 nt, Homo sapiens
cuacaauuugcca

SEQ ID NO: 199556 - RNA, 14 nt, Homo sapiens
ucgccguggcugcg

SEQ ID NO: 199557 - RNA, 14 nt, Homo sapiens
gccucuuccaggaa

SEQ ID NO: 199558 - RNA, 18 nt, Homo sapiens
aaugcugggacucagccu

SEQ ID NO: 199559 - RNA, 14 nt, Homo sapiens
gaauaauccagaaa

SEQ ID NO: 199560 - RNA, 15 nt, Homo sapiens
guauauucauuucaa

SEQ ID NO: 199561 - RNA, 15 nt, Homo sapiens
cuuuugguaugugac

SEQ ID NO: 199562 - RNA, 16 nt, Homo sapiens
gcauucagccaggaga

SEQ ID NO: 199563 - RNA, 22 nt, Homo sapiens
uuccuaacaggauuagacaguc

SEQ ID NO: 199564 - RNA, 15 nt, Homo sapiens
cuuuguaugcacuuu

SEQ ID NO: 199565 - RNA, 18 nt, Homo sapiens
auugauagaguguuauca

SEQ ID NO: 199566 - RNA, 19 nt, Homo sapiens
agagacuuugacucuccag

SEQ ID NO: 199567 - RNA, 13 nt, Homo sapiens
uccaccugucuca

SEQ ID NO: 199568 - RNA, 20 nt, Homo sapiens
ugcauaagugcaugacauau

SEQ ID NO: 199569 - RNA, 16 nt, Homo sapiens
accaggccaccucccc

SEQ ID NO: 199570 - RNA, 16 nt, Homo sapiens
cauacuacacauucaa

SEQ ID NO: 199571 - RNA, 21 nt, Homo sapiens
uuuaccugaaauaaaauucau

SEQ ID NO: 199572 - RNA, 14 nt, Homo sapiens
augcagcaucuaag

SEQ ID NO: 199573 - RNA, 19 nt, Homo sapiens
acuuaaggauggagccagc

SEQ ID NO: 199574 - RNA, 23 nt, Homo sapiens
auagcaguugaaacaagaagcca

SEQ ID NO: 199575 - RNA, 20 nt, Homo sapiens
uucucucaccuccuaaagua

SEQ ID NO: 199576 - RNA, 21 nt, Homo sapiens
gcaagcaagaaacacugggcu

SEQ ID NO: 199577 - RNA, 15 nt, Homo sapiens
guauauacaauaaca

SEQ ID NO: 199578 - RNA, 17 nt, Homo sapiens
augaaugggagugaggg

SEQ ID NO: 199579 - RNA, 15 nt, Homo sapiens
acagggcauggccag

SEQ ID NO: 199580 - RNA, 17 nt, Homo sapiens
aucaagcccuuuacuug

SEQ ID NO: 199581 - RNA, 20 nt, Homo sapiens
ucuuugaacccuugcuugca

SEQ ID NO: 199582 - RNA, 16 nt, Homo sapiens
uucugucucauaugau

SEQ ID NO: 199583 - RNA, 19 nt, Homo sapiens
auuguaucaaaugugacau

SEQ ID NO: 199584 - RNA, 17 nt, Homo sapiens
gaccugacaccuuucau

SEQ ID NO: 199585 - RNA, 20 nt, Homo sapiens
uugcagcuuauauucaucca

SEQ ID NO: 199586 - RNA, 16 nt, Homo sapiens
ugcggaguugugcacg

SEQ ID NO: 199587 - RNA, 15 nt, Homo sapiens
aucacuucaggucag

SEQ ID NO: 199588 - RNA, 14 nt, Homo sapiens
ugacucuccagaaa

SEQ ID NO: 199589 - RNA, 23 nt, Homo sapiens
ugguuccggaauccuguccucag

SEQ ID NO: 199590 - RNA, 22 nt, Homo sapiens
caagcuaaaauuagaugaacuc

SEQ ID NO: 199591 - RNA, 13 nt, Homo sapiens
aguuugauuucau

SEQ ID NO: 199592 - RNA, 18 nt, Homo sapiens
guuaaggguuaguuuaca

SEQ ID NO: 199593 - RNA, 21 nt, Homo sapiens
accaugagaccacuguuauca

SEQ ID NO: 199594 - RNA, 21 nt, Homo sapiens
gaccaugcucaucugcugguc

SEQ ID NO: 199595 - RNA, 16 nt, Homo sapiens
uuucugaucugaugca

SEQ ID NO: 199596 - RNA, 17 nt, Homo sapiens
caaggugacauuuccau

SEQ ID NO: 199597 - RNA, 16 nt, Homo sapiens
auucagccaggagaug

SEQ ID NO: 199598 - RNA, 15 nt, Homo sapiens
acaauagaaaccugu

SEQ ID NO: 199599 - RNA, 18 nt, Homo sapiens
gcaaagggagcacugggu

SEQ ID NO: 199600 - RNA, 22 nt, Homo sapiens
gcacauuagccuaugugcaugc

SEQ ID NO: 199601 - RNA, 14 nt, Homo sapiens
caucucuuguauau

SEQ ID NO: 199602 - RNA, 12 nt, Homo sapiens
aaacugugcacc

SEQ ID NO: 199603 - RNA, 20 nt, Homo sapiens
ugauccuaaugaaugcauaa

SEQ ID NO: 199604 - RNA, 17 nt, Homo sapiens
gucagcaaaaagcaaaa

SEQ ID NO: 199605 - RNA, 13 nt, Homo sapiens
cuggacucucagu

SEQ ID NO: 199606 - RNA, 18 nt, Homo sapiens
aaccaaaggugaaggaau

SEQ ID NO: 199607 - RNA, 19 nt, Homo sapiens
uggggagaaaagacaugaa

SEQ ID NO: 199608 - RNA, 16 nt, Homo sapiens
uaaagcugaaaacugc

SEQ ID NO: 199609 - RNA, 13 nt, Homo sapiens
uucccccacugau

SEQ ID NO: 199610 - RNA, 20 nt, Homo sapiens
gcugccucuugaaugcaggg

SEQ ID NO: 199611 - RNA, 12 nt, Homo sapiens
ugcauuaucuau

SEQ ID NO: 199612 - RNA, 15 nt, Homo sapiens
uagaguucagacuuu

SEQ ID NO: 199613 - RNA, 15 nt, Homo sapiens
caacagcauuuucaa

SEQ ID NO: 199614 - RNA, 22 nt, Homo sapiens
cccacacccuggaggauuucau

SEQ ID NO: 199615 - RNA, 16 nt, Homo sapiens
aaucagccacauucua

SEQ ID NO: 199616 - RNA, 23 nt, Homo sapiens
uuaaaaaaaacaaaaagaacaaa

SEQ ID NO: 199617 - RNA, 13 nt, Homo sapiens
cugcaagcacugc

SEQ ID NO: 199618 - RNA, 18 nt, Homo sapiens
ucuauggcacccaugcac

SEQ ID NO: 199619 - RNA, 21 nt, Homo sapiens
uauugcugcuggggcucccca

SEQ ID NO: 199620 - RNA, 18 nt, Homo sapiens
ggcugcccacacacccca

SEQ ID NO: 199621 - RNA, 17 nt, Homo sapiens
guacagguaaggugagg

SEQ ID NO: 199622 - RNA, 21 nt, Homo sapiens
cauguuaggaaaauuucacau

SEQ ID NO: 199623 - RNA, 10 nt, Homo sapiens
ccucagggcu

SEQ ID NO: 199624 - RNA, 22 nt, Homo sapiens
caacagcccucaggucagggug

SEQ ID NO: 199625 - RNA, 19 nt, Homo sapiens
uuaaguugauggugaugaa

SEQ ID NO: 199626 - RNA, 12 nt, Homo sapiens
gauuccagagag

SEQ ID NO: 199627 - RNA, 22 nt, Homo sapiens
uuuaaaucaacgaguacuucaa

SEQ ID NO: 199628 - RNA, 18 nt, Homo sapiens
guacaguagauuuuccaa

SEQ ID NO: 199629 - RNA, 15 nt, Homo sapiens
uacaugaauugcauu

SEQ ID NO: 199630 - RNA, 17 nt, Homo sapiens
ugcccccaauccaugaa

SEQ ID NO: 199631 - RNA, 12 nt, Homo sapiens
accaaaggugaa

SEQ ID NO: 199632 - RNA, 19 nt, Homo sapiens
guuuguguguugucucuug

SEQ ID NO: 199633 - RNA, 22 nt, Homo sapiens
aagcuaaaauuagaugaacuca

SEQ ID NO: 199634 - RNA, 19 nt, Homo sapiens
gugaaaugcuggcauuugc

SEQ ID NO: 199635 - RNA, 16 nt, Homo sapiens
ugaaugcugggacuca

SEQ ID NO: 199636 - RNA, 15 nt, Homo sapiens
caaguagcacccugg

SEQ ID NO: 199637 - RNA, 14 nt, Homo sapiens
auccacaugggagc

SEQ ID NO: 199638 - RNA, 22 nt, Homo sapiens
cuuucuuacauuagcaguuugc

SEQ ID NO: 199639 - RNA, 19 nt, Homo sapiens
ugaguuacuaucaugucaa

SEQ ID NO: 199640 - RNA, 18 nt, Homo sapiens
agaaggagggagacauga

SEQ ID NO: 199641 - RNA, 22 nt, Homo sapiens
uaagucaaccugccugacauuu

SEQ ID NO: 199642 - RNA, 14 nt, Homo sapiens
ggccuuaaccauga

SEQ ID NO: 199643 - RNA, 12 nt, Homo sapiens
caugaauaugau

SEQ ID NO: 199644 - RNA, 12 nt, Homo sapiens
aggcucuucucc

SEQ ID NO: 199645 - RNA, 22 nt, Homo sapiens
aauccuguccucagcuucuuaa

SEQ ID NO: 199646 - RNA, 15 nt, Homo sapiens
acuacuggcaauuug

SEQ ID NO: 199647 - RNA, 18 nt, Homo sapiens
caaagcacgaaauguuau

SEQ ID NO: 199648 - RNA, 21 nt, Homo sapiens
uguaaagcaggugcccaggaa

SEQ ID NO: 199649 - RNA, 23 nt, Homo sapiens
aaacuuggcucgaaucucugugc

SEQ ID NO: 199650 - RNA, 20 nt, Homo sapiens
aggauccccucucuuccuac

SEQ ID NO: 199651 - RNA, 21 nt, Homo sapiens
uaaacuuaccugggcauucuu

SEQ ID NO: 199652 - RNA, 17 nt, Homo sapiens
cuggaggaguuccuuga

SEQ ID NO: 199653 - RNA, 14 nt, Homo sapiens
gaauaauaccuaag

SEQ ID NO: 199654 - RNA, 17 nt, Homo sapiens
agccauaugaaugucag

SEQ ID NO: 199655 - RNA, 16 nt, Homo sapiens
gagagccaccaagagg

SEQ ID NO: 199656 - RNA, 21 nt, Homo sapiens
cuaacaggauuagacagucaa

SEQ ID NO: 199657 - RNA, 19 nt, Homo sapiens
caacaaacuucaaggguuu

SEQ ID NO: 199658 - RNA, 13 nt, Homo sapiens
agucugcaaaaug

SEQ ID NO: 199659 - RNA, 19 nt, Homo sapiens
aucacauucgaguguuuca

SEQ ID NO: 199660 - RNA, 23 nt, Homo sapiens
ucaccauuuggcaaugccaucau

SEQ ID NO: 199661 - RNA, 14 nt, Homo sapiens
ucugcucaucauuc

SEQ ID NO: 199662 - RNA, 15 nt, Homo sapiens
ccaucuaugucccuu

SEQ ID NO: 199663 - RNA, 17 nt, Homo sapiens
uccuugauacugcucau

SEQ ID NO: 199664 - RNA, 19 nt, Homo sapiens
accaaaucuggaagccaaa

SEQ ID NO: 199665 - RNA, 13 nt, Homo sapiens
ccucuuucaucca

SEQ ID NO: 199666 - RNA, 13 nt, Homo sapiens
ugagggucagaga

SEQ ID NO: 199667 - RNA, 10 nt, Homo sapiens
gccucugugc

SEQ ID NO: 199668 - RNA, 17 nt, Homo sapiens
caagcugggagcacagg

SEQ ID NO: 199669 - RNA, 12 nt, Homo sapiens
gaaccucagggc

SEQ ID NO: 199670 - RNA, 16 nt, Homo sapiens
aacauacuucagcuca

SEQ ID NO: 199671 - RNA, 13 nt, Homo sapiens
uugaaaagacauc

SEQ ID NO: 199672 - RNA, 17 nt, Homo sapiens
cucaucccgagcaccuc

SEQ ID NO: 199673 - RNA, 18 nt, Homo sapiens
augggaaggguccaucuc

SEQ ID NO: 199674 - RNA, 17 nt, Homo sapiens
accuugacggcauugcu

SEQ ID NO: 199675 - RNA, 13 nt, Homo sapiens
cggaguugugcac

SEQ ID NO: 199676 - RNA, 23 nt, Homo sapiens
auauguugaugaaaaauagcaac

SEQ ID NO: 199677 - RNA, 15 nt, Homo sapiens
cacagugcaucucag

SEQ ID NO: 199678 - RNA, 16 nt, Homo sapiens
aucucuuauuuuacaa

SEQ ID NO: 199679 - RNA, 22 nt, Homo sapiens
caucuaaccucaucuucuucac

SEQ ID NO: 199680 - RNA, 16 nt, Homo sapiens
augugggugggaccac

SEQ ID NO: 199681 - RNA, 21 nt, Homo sapiens
ugucaucucagcuggaucucc

SEQ ID NO: 199682 - RNA, 12 nt, Homo sapiens
cuuuuauuacau

SEQ ID NO: 199683 - RNA, 14 nt, Homo sapiens
uacuggcaauuugu

SEQ ID NO: 199684 - RNA, 15 nt, Homo sapiens
uaaaaauugugauca

SEQ ID NO: 199685 - RNA, 19 nt, Homo sapiens
acagagcuucccugacuca

SEQ ID NO: 199686 - RNA, 18 nt, Homo sapiens
uuugccagugggaacucc

SEQ ID NO: 199687 - RNA, 13 nt, Homo sapiens
aguaaugaugucg

SEQ ID NO: 199688 - RNA, 17 nt, Homo sapiens
gaucugaugcaagcaag

SEQ ID NO: 199689 - RNA, 17 nt, Homo sapiens
agccuagcccuucucuc

SEQ ID NO: 199690 - RNA, 14 nt, Homo sapiens
auauguaccaugua

SEQ ID NO: 199691 - RNA, 12 nt, Homo sapiens
ugacagccuccc

SEQ ID NO: 199692 - RNA, 14 nt, Homo sapiens
aagaugaucaucuc

SEQ ID NO: 199693 - RNA, 17 nt, Homo sapiens
aacaucuuuuacauucu

SEQ ID NO: 199694 - RNA, 20 nt, Homo sapiens
aucccacuugccccuguuac

SEQ ID NO: 199695 - RNA, 13 nt, Homo sapiens
auauaacugccuu

SEQ ID NO: 199696 - RNA, 16 nt, Homo sapiens
accuuggacauccucc

SEQ ID NO: 199697 - RNA, 16 nt, Homo sapiens
ugcuuuggaaaucaca

SEQ ID NO: 199698 - RNA, 20 nt, Homo sapiens
cacacccuggaggauuucau

SEQ ID NO: 199699 - RNA, 21 nt, Homo sapiens
caaagcaggggaguaugcaaa

SEQ ID NO: 199700 - RNA, 20 nt, Homo sapiens
ccccaucugccacguguauu

SEQ ID NO: 199701 - RNA, 18 nt, Homo sapiens
cugcacagugcaucucag

SEQ ID NO: 199702 - RNA, 20 nt, Homo sapiens
ugccaccauggccagccaac

SEQ ID NO: 199703 - RNA, 21 nt, Homo sapiens
ucuugcuauggggagaaaaga

SEQ ID NO: 199704 - RNA, 15 nt, Homo sapiens
ugugggcuccaugua

SEQ ID NO: 199705 - RNA, 15 nt, Homo sapiens
uggggagaaaagaca

SEQ ID NO: 199706 - RNA, 23 nt, Homo sapiens
ccuauguuuuuguucaaagccag

SEQ ID NO: 199707 - RNA, 18 nt, Homo sapiens
acccaauaguuguugauu

SEQ ID NO: 199708 - RNA, 12 nt, Homo sapiens
uccaaucagaac

SEQ ID NO: 199709 - RNA, 15 nt, Homo sapiens
cuugagccaguaauu

SEQ ID NO: 199710 - RNA, 19 nt, Homo sapiens
agcgaggaggcuccagagg

SEQ ID NO: 199711 - RNA, 19 nt, Homo sapiens
gagugcauugugaggguua

SEQ ID NO: 199712 - RNA, 16 nt, Homo sapiens
auguaaacugugcacc

SEQ ID NO: 199713 - RNA, 12 nt, Homo sapiens
cagaagccucac

SEQ ID NO: 199714 - RNA, 22 nt, Homo sapiens
cugagugcaccacuucaaguga

SEQ ID NO: 199715 - RNA, 23 nt, Homo sapiens
ucaugaagaaccuugacggcauu

SEQ ID NO: 199716 - RNA, 14 nt, Homo sapiens
uucuuaggccacau

SEQ ID NO: 199717 - RNA, 20 nt, Homo sapiens
auucuuucccaauucacauc

SEQ ID NO: 199718 - RNA, 21 nt, Homo sapiens
gaguguuccccuuccacugag

SEQ ID NO: 199719 - RNA, 16 nt, Homo sapiens
ucuccagaaagcucau

SEQ ID NO: 199720 - RNA, 21 nt, Homo sapiens
ucaggaaggaugagcauuuag

SEQ ID NO: 199721 - RNA, 23 nt, Homo sapiens
uggcuuacuacaugugggagcuu

SEQ ID NO: 199722 - RNA, 20 nt, Homo sapiens
acuuucagguacuaaauacc

SEQ ID NO: 199723 - RNA, 13 nt, Homo sapiens
ccauggaggcaca

SEQ ID NO: 199724 - RNA, 17 nt, Homo sapiens
ucccccagccucaaguc

SEQ ID NO: 199725 - RNA, 14 nt, Homo sapiens
uccaacaugugcuc

SEQ ID NO: 199726 - RNA, 19 nt, Homo sapiens
augugggugggaccacaga

SEQ ID NO: 199727 - RNA, 23 nt, Homo sapiens
ucaggcgauccaccugucucagc

SEQ ID NO: 199728 - RNA, 16 nt, Homo sapiens
ucaaaguaaaacuugc

SEQ ID NO: 199729 - RNA, 16 nt, Homo sapiens
uucacaucuaaccuca

SEQ ID NO: 199730 - RNA, 19 nt, Homo sapiens
agcaagaucccaucucuuu

SEQ ID NO: 199731 - RNA, 22 nt, Homo sapiens
ccugagguuugccagcauuuag

SEQ ID NO: 199732 - RNA, 19 nt, Homo sapiens
ccugccuguggcgccgucu

SEQ ID NO: 199733 - RNA, 21 nt, Homo sapiens
gauuaccuaguagucauuuca

SEQ ID NO: 199734 - RNA, 12 nt, Homo sapiens
cccugcauuuau

SEQ ID NO: 199735 - RNA, 15 nt, Homo sapiens
aggcuggcagugaca

SEQ ID NO: 199736 - RNA, 14 nt, Homo sapiens
cccaguguguuucu

SEQ ID NO: 199737 - RNA, 21 nt, Homo sapiens
guucaucagacuccugugcaa

SEQ ID NO: 199738 - RNA, 22 nt, Homo sapiens
ccacacccuggaggauuucauc

SEQ ID NO: 199739 - RNA, 20 nt, Homo sapiens
cuggaauguaaucaauguuu

SEQ ID NO: 199740 - RNA, 19 nt, Homo sapiens
agaacaguaacugccauca

SEQ ID NO: 199741 - RNA, 19 nt, Homo sapiens
ucagggggccaggugcaca

SEQ ID NO: 199742 - RNA, 17 nt, Homo sapiens
aaugcuauaacuauguu

SEQ ID NO: 199743 - RNA, 14 nt, Homo sapiens
ugcuuaaucuugcu

SEQ ID NO: 199744 - RNA, 13 nt, Homo sapiens
uccugggcccucu

SEQ ID NO: 199745 - RNA, 22 nt, Homo sapiens
cuaaaauuguaucaaaugugac

SEQ ID NO: 199746 - RNA, 17 nt, Homo sapiens
caugcguuuaaucacau

SEQ ID NO: 199747 - RNA, 15 nt, Homo sapiens
aaggaaaucucaccc

SEQ ID NO: 199748 - RNA, 18 nt, Homo sapiens
caauuugccauuguuucu

SEQ ID NO: 199749 - RNA, 16 nt, Homo sapiens
cuccaucgcaguguuc

SEQ ID NO: 199750 - RNA, 11 nt, Homo sapiens
uccugugcaac

SEQ ID NO: 199751 - RNA, 21 nt, Homo sapiens
cacccuggaggauuucaucuc

SEQ ID NO: 199752 - RNA, 16 nt, Homo sapiens
auggcuaccaaaaaga

SEQ ID NO: 199753 - RNA, 15 nt, Homo sapiens
guauguuugggagac

SEQ ID NO: 199754 - RNA, 20 nt, Homo sapiens
acucacauccugaccuugca

SEQ ID NO: 199755 - RNA, 14 nt, Homo sapiens
auguaaacugugca

SEQ ID NO: 199756 - RNA, 21 nt, Homo sapiens
agcuacaccuuucuccuuugu

SEQ ID NO: 199757 - RNA, 16 nt, Homo sapiens
uauaauugaguuuuca

SEQ ID NO: 199758 - RNA, 22 nt, Homo sapiens
cccuucaaccauuccccauggg

SEQ ID NO: 199759 - RNA, 23 nt, Homo sapiens
accuuucuccuuuguacuuugug

SEQ ID NO: 199760 - RNA, 19 nt, Homo sapiens
uuucauccacuagugcaaa

SEQ ID NO: 199761 - RNA, 16 nt, Homo sapiens
caggggaguaugcaaa

SEQ ID NO: 199762 - RNA, 16 nt, Homo sapiens
gccuugaaaccaccuu

SEQ ID NO: 199763 - RNA, 10 nt, Homo sapiens
agaugcauua

SEQ ID NO: 199764 - RNA, 18 nt, Homo sapiens
auuuggaaaauaaaucaa

SEQ ID NO: 199765 - RNA, 17 nt, Homo sapiens
ucauuuuauaugucaaa

SEQ ID NO: 199766 - RNA, 17 nt, Homo sapiens
gagauuaccuccugaga

SEQ ID NO: 199767 - RNA, 12 nt, Homo sapiens
cagaccacugau

SEQ ID NO: 199768 - RNA, 23 nt, Homo sapiens
ucauguguguccacgacugucuc

SEQ ID NO: 199769 - RNA, 21 nt, Homo sapiens
gcaaagcauugagcaaagggg

SEQ ID NO: 199770 - RNA, 18 nt, Homo sapiens
auuuagacccugcauuua

SEQ ID NO: 199771 - RNA, 19 nt, Homo sapiens
ucuggacacagccccaugu

SEQ ID NO: 199772 - RNA, 19 nt, Homo sapiens
gaauguuugucucauccca

SEQ ID NO: 199773 - RNA, 13 nt, Homo sapiens
ugugcucagggaa

SEQ ID NO: 199774 - RNA, 21 nt, Homo sapiens
aaaucaaguuggcuucuaauc

SEQ ID NO: 199775 - RNA, 22 nt, Homo sapiens
gcuaugugaagaguaagucaac

SEQ ID NO: 199776 - RNA, 19 nt, Homo sapiens
agucauuugcugagcaugu

SEQ ID NO: 199777 - RNA, 14 nt, Homo sapiens
ucucaggaccaaag

SEQ ID NO: 199778 - RNA, 18 nt, Homo sapiens
ugagaacuacucagggaa

SEQ ID NO: 199779 - RNA, 20 nt, Homo sapiens
caaguuggcuucuaaucaaa

SEQ ID NO: 199780 - RNA, 17 nt, Homo sapiens
acaaauugcuugaaaga

SEQ ID NO: 199781 - RNA, 22 nt, Homo sapiens
acggagccacuccucugacuca

SEQ ID NO: 199782 - RNA, 12 nt, Homo sapiens
uauaugcaauau

SEQ ID NO: 199783 - RNA, 12 nt, Homo sapiens
cagggacuugaa

SEQ ID NO: 199784 - RNA, 15 nt, Homo sapiens
aaagcaggugcccag

SEQ ID NO: 199785 - RNA, 19 nt, Homo sapiens
uaugugggugggaccacag

SEQ ID NO: 199786 - RNA, 17 nt, Homo sapiens
uugcuggucacugccau

SEQ ID NO: 199787 - RNA, 14 nt, Homo sapiens
uuucaccuucauau

SEQ ID NO: 199788 - RNA, 13 nt, Homo sapiens
ugggcuucuagaa

SEQ ID NO: 199789 - RNA, 21 nt, Homo sapiens
uucaguauguugucaaagaga

SEQ ID NO: 199790 - RNA, 16 nt, Homo sapiens
ucacagaugugugauu

SEQ ID NO: 199791 - RNA, 23 nt, Homo sapiens
acagagggcaggaacuugcacaa

SEQ ID NO: 199792 - RNA, 22 nt, Homo sapiens
agguaucauuuucugcauuuaa

SEQ ID NO: 199793 - RNA, 12 nt, Homo sapiens
accucaguuuua

SEQ ID NO: 199794 - RNA, 13 nt, Homo sapiens
uagaaccaggcaa

SEQ ID NO: 199795 - RNA, 17 nt, Homo sapiens
auuccaccugcaaucaa

SEQ ID NO: 199796 - RNA, 16 nt, Homo sapiens
auaauguuacauuauu

SEQ ID NO: 199797 - RNA, 12 nt, Homo sapiens
uauuuaccugaa

SEQ ID NO: 199798 - RNA, 17 nt, Homo sapiens
uucuccuccugucuuua

SEQ ID NO: 199799 - RNA, 12 nt, Homo sapiens
uucugcauuuaa

SEQ ID NO: 199800 - RNA, 23 nt, Homo sapiens
aaucacacgucuggcuucacaga

SEQ ID NO: 199801 - RNA, 17 nt, Homo sapiens
acauuaagaaaaucaua

SEQ ID NO: 199802 - RNA, 19 nt, Homo sapiens
cccagggcuccugcacuua

SEQ ID NO: 199803 - RNA, 19 nt, Homo sapiens
gcucagggaauaauccaga

SEQ ID NO: 199804 - RNA, 20 nt, Homo sapiens
gacuauggcucuacuuucag

SEQ ID NO: 199805 - RNA, 19 nt, Homo sapiens
uacaaucagccacauucua

SEQ ID NO: 199806 - RNA, 23 nt, Homo sapiens
uaaaagaugcauuaucuaugaua

SEQ ID NO: 199807 - RNA, 17 nt, Homo sapiens
cacagccuccccugcca

SEQ ID NO: 199808 - RNA, 23 nt, Homo sapiens
aauuucacauuaauauuugcuga

SEQ ID NO: 199809 - RNA, 13 nt, Homo sapiens
accuguauuccca

SEQ ID NO: 199810 - RNA, 19 nt, Homo sapiens
uacuugggagaccuguaau

SEQ ID NO: 199811 - RNA, 23 nt, Homo sapiens
augguggagggccacaugggagg

SEQ ID NO: 199812 - RNA, 18 nt, Homo sapiens
agaaucccuagucuucaa

SEQ ID NO: 199813 - RNA, 16 nt, Homo sapiens
ucccuccccugccauu

SEQ ID NO: 199814 - RNA, 11 nt, Homo sapiens
gcuccacugaa

SEQ ID NO: 199815 - RNA, 22 nt, Homo sapiens
ugaaaaugcuguauuagucaca

SEQ ID NO: 199816 - RNA, 15 nt, Homo sapiens
uggcacccaugcacc

SEQ ID NO: 199817 - RNA, 14 nt, Homo sapiens
aggccguggcugcc

SEQ ID NO: 199818 - RNA, 17 nt, Homo sapiens
cauccugaccuugcaca

SEQ ID NO: 199819 - RNA, 19 nt, Homo sapiens
caaucaucaucauucucau

SEQ ID NO: 199820 - RNA, 15 nt, Homo sapiens
agggucccucugugu

SEQ ID NO: 199821 - RNA, 16 nt, Homo sapiens
uauuuuaaguauugca

SEQ ID NO: 199822 - RNA, 18 nt, Homo sapiens
ccuccugaagccacagca

SEQ ID NO: 199823 - RNA, 16 nt, Homo sapiens
gccacacggcucucac

SEQ ID NO: 199824 - RNA, 14 nt, Homo sapiens
ucucugugccuucg

SEQ ID NO: 199825 - RNA, 18 nt, Homo sapiens
acugcacagugcaucuca

SEQ ID NO: 199826 - RNA, 17 nt, Homo sapiens
cagguaaggugagggaa

SEQ ID NO: 199827 - RNA, 12 nt, Homo sapiens
aguugugcacau

SEQ ID NO: 199828 - RNA, 12 nt, Homo sapiens
augagcauuuag

SEQ ID NO: 199829 - RNA, 16 nt, Homo sapiens
ucacagagugcauugu

SEQ ID NO: 199830 - RNA, 13 nt, Homo sapiens
uugaaaagucaaa

SEQ ID NO: 199831 - RNA, 21 nt, Homo sapiens
cuaauccucuuuuucuagucu

SEQ ID NO: 199832 - RNA, 20 nt, Homo sapiens
ucaaguuggcuucuaaucaa

SEQ ID NO: 199833 - RNA, 21 nt, Homo sapiens
gccacagaccuaggauuucau

SEQ ID NO: 199834 - RNA, 17 nt, Homo sapiens
aaggaugggaaggaggg

SEQ ID NO: 199835 - RNA, 18 nt, Homo sapiens
cuuucaugaguuuuuccc

SEQ ID NO: 199836 - RNA, 12 nt, Homo sapiens
ugugugaucugu

SEQ ID NO: 199837 - RNA, 18 nt, Homo sapiens
uucagcucacacaugaga

SEQ ID NO: 199838 - RNA, 18 nt, Homo sapiens
ucccacccccaucucucc

SEQ ID NO: 199839 - RNA, 17 nt, Homo sapiens
ucgaaucucugugccuu

SEQ ID NO: 199840 - RNA, 14 nt, Homo sapiens
ucaaacuacuggca

SEQ ID NO: 199841 - RNA, 18 nt, Homo sapiens
uaaagcaauaugcauuua

SEQ ID NO: 199842 - RNA, 16 nt, Homo sapiens
ugcaugcagcaucuaa

SEQ ID NO: 199843 - RNA, 21 nt, Homo sapiens
cuuuuaaacccuauugguaaa

SEQ ID NO: 199844 - RNA, 13 nt, Homo sapiens
agaccagaaccag

SEQ ID NO: 199845 - RNA, 22 nt, Homo sapiens
agagaacaaugugcuaugugaa

SEQ ID NO: 199846 - RNA, 19 nt, Homo sapiens
gccccaggcauugccaagg

SEQ ID NO: 199847 - RNA, 13 nt, Homo sapiens
uuggcaaugccau

SEQ ID NO: 199848 - RNA, 18 nt, Homo sapiens
aucaucuccugccuuccu

SEQ ID NO: 199849 - RNA, 17 nt, Homo sapiens
aauugugaucagaccau

SEQ ID NO: 199850 - RNA, 17 nt, Homo sapiens
aagggacauauucauuu

SEQ ID NO: 199851 - RNA, 21 nt, Homo sapiens
uaaaagaugcauuaucuauga

SEQ ID NO: 199852 - RNA, 18 nt, Homo sapiens
auggagccagcucugcau

SEQ ID NO: 199853 - RNA, 15 nt, Homo sapiens
cuauuuuauucccuu

SEQ ID NO: 199854 - RNA, 11 nt, Homo sapiens
uucaacuggag

SEQ ID NO: 199855 - RNA, 15 nt, Homo sapiens
aaauauauaugauau

SEQ ID NO: 199856 - RNA, 14 nt, Homo sapiens
acaaucagcuccuu

SEQ ID NO: 199857 - RNA, 19 nt, Homo sapiens
guauaaugguugacugggu

SEQ ID NO: 199858 - RNA, 20 nt, Homo sapiens
agaugccuucuccagacaaa

SEQ ID NO: 199859 - RNA, 21 nt, Homo sapiens
gauccaccugucucagccucc

SEQ ID NO: 199860 - RNA, 17 nt, Homo sapiens
gcucacacaugagaucu

SEQ ID NO: 199861 - RNA, 18 nt, Homo sapiens
uauaacuauguugauaaa

SEQ ID NO: 199862 - RNA, 17 nt, Homo sapiens
ugaaucuuggugucuac

SEQ ID NO: 199863 - RNA, 20 nt, Homo sapiens
agacuuagaaaaauccuaca

SEQ ID NO: 199864 - RNA, 12 nt, Homo sapiens
uaggaacauacu

SEQ ID NO: 199865 - RNA, 17 nt, Homo sapiens
acuuagcaugucccuac

SEQ ID NO: 199866 - RNA, 21 nt, Homo sapiens
caagggccagcuggaggugaa

SEQ ID NO: 199867 - RNA, 12 nt, Homo sapiens
uauuuuccaaag

SEQ ID NO: 199868 - RNA, 15 nt, Homo sapiens
cucugagcugugcag

SEQ ID NO: 199869 - RNA, 14 nt, Homo sapiens
uccucaauccagcu

SEQ ID NO: 199870 - RNA, 13 nt, Homo sapiens
uguucagaugcuu

SEQ ID NO: 199871 - RNA, 14 nt, Homo sapiens
cacagggacuugaa

SEQ ID NO: 199872 - RNA, 13 nt, Homo sapiens
caauccuauguuu

SEQ ID NO: 199873 - RNA, 13 nt, Homo sapiens
ggcuagaucauga

SEQ ID NO: 199874 - RNA, 15 nt, Homo sapiens
uaugauauugcagcu

SEQ ID NO: 199875 - RNA, 12 nt, Homo sapiens
ugucccuaguaa

SEQ ID NO: 199876 - RNA, 20 nt, Homo sapiens
uguagagauggggucucaca

SEQ ID NO: 199877 - RNA, 11 nt, Homo sapiens
ccgugccuuca

SEQ ID NO: 199878 - RNA, 12 nt, Homo sapiens
auuucaucucuu

SEQ ID NO: 199879 - RNA, 13 nt, Homo sapiens
cguccuacuguau

SEQ ID NO: 199880 - RNA, 17 nt, Homo sapiens
aaaugaaaaugucuugu

SEQ ID NO: 199881 - RNA, 16 nt, Homo sapiens
aucucaccccauccca

SEQ ID NO: 199882 - RNA, 22 nt, Homo sapiens
gccauaugaaugucaguaguuu

SEQ ID NO: 199883 - RNA, 18 nt, Homo sapiens
gcugccagcucuguauca

SEQ ID NO: 199884 - RNA, 14 nt, Homo sapiens
ccaaucauuuuaau

SEQ ID NO: 199885 - RNA, 18 nt, Homo sapiens
guauaaugguugacuggg

SEQ ID NO: 199886 - RNA, 14 nt, Homo sapiens
agcagaacuuucac

SEQ ID NO: 199887 - RNA, 21 nt, Homo sapiens
agccuggcacagggcaguggg

SEQ ID NO: 199888 - RNA, 16 nt, Homo sapiens
accuguaaucauauaa

SEQ ID NO: 199889 - RNA, 15 nt, Homo sapiens
auccacuucucucag

SEQ ID NO: 199890 - RNA, 16 nt, Homo sapiens
guccaggcacugagau

SEQ ID NO: 199891 - RNA, 13 nt, Homo sapiens
cuggagucgggac

SEQ ID NO: 199892 - RNA, 18 nt, Homo sapiens
guauuuuuucacuuguac

SEQ ID NO: 199893 - RNA, 17 nt, Homo sapiens
acaguauacgcuccauc

SEQ ID NO: 199894 - RNA, 20 nt, Homo sapiens
uaugucacccaaugcauauc

SEQ ID NO: 199895 - RNA, 19 nt, Homo sapiens
cuuccuugaagaacugcag

SEQ ID NO: 199896 - RNA, 14 nt, Homo sapiens
cuagggaucccuca

SEQ ID NO: 199897 - RNA, 20 nt, Homo sapiens
cagaucccacuugcagccuc

SEQ ID NO: 199898 - RNA, 15 nt, Homo sapiens
aaauauuuugucuaa

SEQ ID NO: 199899 - RNA, 23 nt, Homo sapiens
gcaaggaaacuauguaacaugua

SEQ ID NO: 199900 - RNA, 14 nt, Homo sapiens
ugccacugccuucg

SEQ ID NO: 199901 - RNA, 21 nt, Homo sapiens
ugggucuucccuguaugauuc

SEQ ID NO: 199902 - RNA, 16 nt, Homo sapiens
cauuuagcacauacua

SEQ ID NO: 199903 - RNA, 15 nt, Homo sapiens
aaaaaucagugaaua

SEQ ID NO: 199904 - RNA, 18 nt, Homo sapiens
cuuguaauucuaaaugaa

SEQ ID NO: 199905 - RNA, 18 nt, Homo sapiens
uaauuuuuuuaaccaaag

SEQ ID NO: 199906 - RNA, 19 nt, Homo sapiens
aggagggguuaaagcugcc

SEQ ID NO: 199907 - RNA, 19 nt, Homo sapiens
uccuaaugaaugcauaaaa

SEQ ID NO: 199908 - RNA, 18 nt, Homo sapiens
cuauauuuagauuguuaa

SEQ ID NO: 199909 - RNA, 14 nt, Homo sapiens
uacuaucaugucaa

SEQ ID NO: 199910 - RNA, 19 nt, Homo sapiens
ucccagcuauuccuacucu

SEQ ID NO: 199911 - RNA, 17 nt, Homo sapiens
ugcaccacuucaaguga

SEQ ID NO: 199912 - RNA, 22 nt, Homo sapiens
aaagaugcauuaucuaugauau

SEQ ID NO: 199913 - RNA, 19 nt, Homo sapiens
uguuuuuuuuuuccacuua

SEQ ID NO: 199914 - RNA, 16 nt, Homo sapiens
ugcccaguguguuucu

SEQ ID NO: 199915 - RNA, 21 nt, Homo sapiens
cucacagagugcauugugagg

SEQ ID NO: 199916 - RNA, 19 nt, Homo sapiens
augccucauuaccuugugc

SEQ ID NO: 199917 - RNA, 14 nt, Homo sapiens
cagaugaaugggag

SEQ ID NO: 199918 - RNA, 22 nt, Homo sapiens
cauaauuuguacauauguaaaa

SEQ ID NO: 199919 - RNA, 13 nt, Homo sapiens
agaaggaaaaaug

SEQ ID NO: 199920 - RNA, 18 nt, Homo sapiens
ugggaacuagacucccaa

SEQ ID NO: 199921 - RNA, 19 nt, Homo sapiens
cacuugggucuucccugua

SEQ ID NO: 199922 - RNA, 14 nt, Homo sapiens
uuucaugugugauu

SEQ ID NO: 199923 - RNA, 16 nt, Homo sapiens
uuaccuugugcuaauc

SEQ ID NO: 199924 - RNA, 23 nt, Homo sapiens
acucuuaguuacucauucaggga

SEQ ID NO: 199925 - RNA, 13 nt, Homo sapiens
aaucaaauagcau

SEQ ID NO: 199926 - RNA, 21 nt, Homo sapiens
gcagagcuugaacacagucuc

SEQ ID NO: 199927 - RNA, 21 nt, Homo sapiens
agcaagugcuggagucgggac

SEQ ID NO: 199928 - RNA, 15 nt, Homo sapiens
ucaaaguaaaacuug

SEQ ID NO: 199929 - RNA, 16 nt, Homo sapiens
caagcuggacuauggc

SEQ ID NO: 199930 - RNA, 21 nt, Homo sapiens
caucucccagauaaugugaaa

SEQ ID NO: 199931 - RNA, 13 nt, Homo sapiens
uauucgugcagca

SEQ ID NO: 199932 - RNA, 13 nt, Homo sapiens
agucacugacccu

SEQ ID NO: 199933 - RNA, 19 nt, Homo sapiens
guuguggagagugcaacag

SEQ ID NO: 199934 - RNA, 16 nt, Homo sapiens
cuguauauacaauaac

SEQ ID NO: 199935 - RNA, 16 nt, Homo sapiens
gacucgguuucuccaa

SEQ ID NO: 199936 - RNA, 19 nt, Homo sapiens
cuggcauuugcaccuaccu

SEQ ID NO: 199937 - RNA, 16 nt, Homo sapiens
guggggcagcacagag

SEQ ID NO: 199938 - RNA, 22 nt, Homo sapiens
ucucauaugauugugcacauac

SEQ ID NO: 199939 - RNA, 23 nt, Homo sapiens
gacaggcacagaugaaugggagu

SEQ ID NO: 199940 - RNA, 16 nt, Homo sapiens
cccaauucacaucuaa

SEQ ID NO: 199941 - RNA, 13 nt, Homo sapiens
ugggcagagccca

SEQ ID NO: 199942 - RNA, 20 nt, Homo sapiens
guaaaauauagcuguacaaa

SEQ ID NO: 199943 - RNA, 11 nt, Homo sapiens
ucuggacacag

SEQ ID NO: 199944 - RNA, 14 nt, Homo sapiens
guucccccacugau

SEQ ID NO: 199945 - RNA, 18 nt, Homo sapiens
uucauuaauacagggcau

SEQ ID NO: 199946 - RNA, 22 nt, Homo sapiens
ugugggugggaccacagacuca

SEQ ID NO: 199947 - RNA, 19 nt, Homo sapiens
auacuucucuauuaucuca

SEQ ID NO: 199948 - RNA, 15 nt, Homo sapiens
augugcccccagacg

SEQ ID NO: 199949 - RNA, 22 nt, Homo sapiens
acccuaugugggugggaccaca

SEQ ID NO: 199950 - RNA, 15 nt, Homo sapiens
augcuggcauuugca

SEQ ID NO: 199951 - RNA, 21 nt, Homo sapiens
ccucuggucgcuccugcccac

SEQ ID NO: 199952 - RNA, 17 nt, Homo sapiens
ugaguguugcucucuag

SEQ ID NO: 199953 - RNA, 17 nt, Homo sapiens
uuugauuaaagacucca

SEQ ID NO: 199954 - RNA, 16 nt, Homo sapiens
ccaguaauugguccga

SEQ ID NO: 199955 - RNA, 18 nt, Homo sapiens
caauccagcuauguuaua

SEQ ID NO: 199956 - RNA, 18 nt, Homo sapiens
gaugucguuugaaucaca

SEQ ID NO: 199957 - RNA, 12 nt, Homo sapiens
aggacaaagccu

SEQ ID NO: 199958 - RNA, 13 nt, Homo sapiens
aauaauccagaaa

SEQ ID NO: 199959 - RNA, 23 nt, Homo sapiens
aucucagcuccugaaaaaugccu

SEQ ID NO: 199960 - RNA, 21 nt, Homo sapiens
guccuucucucaccuccuaaa

SEQ ID NO: 199961 - RNA, 15 nt, Homo sapiens
aggaaaaauguguaa

SEQ ID NO: 199962 - RNA, 22 nt, Homo sapiens
aauguuauuuuuuaauuauuau

SEQ ID NO: 199963 - RNA, 15 nt, Homo sapiens
gagacugcugaguca

SEQ ID NO: 199964 - RNA, 11 nt, Homo sapiens
gcuucacuggu

SEQ ID NO: 199965 - RNA, 23 nt, Homo sapiens
ugccaucaagaugagagaacugg

SEQ ID NO: 199966 - RNA, 13 nt, Homo sapiens
ucuauuaucucaa

SEQ ID NO: 199967 - RNA, 22 nt, Homo sapiens
acagaagcacagcacccauggg

SEQ ID NO: 199968 - RNA, 14 nt, Homo sapiens
caagaucugaauuu

SEQ ID NO: 199969 - RNA, 22 nt, Homo sapiens
ugaagaacaguaacugccauca

SEQ ID NO: 199970 - RNA, 23 nt, Homo sapiens
gugaauaaaccaucaucuugcca

SEQ ID NO: 199971 - RNA, 13 nt, Homo sapiens
gcccagugcacac

SEQ ID NO: 199972 - RNA, 21 nt, Homo sapiens
gagguauucaauauccuuugc

SEQ ID NO: 199973 - RNA, 12 nt, Homo sapiens
ugagcugugcag

SEQ ID NO: 199974 - RNA, 11 nt, Homo sapiens
auaugcaauau

SEQ ID NO: 199975 - RNA, 22 nt, Homo sapiens
ugccuacgaauagccacugcau

SEQ ID NO: 199976 - RNA, 12 nt, Homo sapiens
accuaguacaag

SEQ ID NO: 199977 - RNA, 17 nt, Homo sapiens
caucagugcucccucac

SEQ ID NO: 199978 - RNA, 22 nt, Homo sapiens
cagaucacuucaggucaggagu

SEQ ID NO: 199979 - RNA, 19 nt, Homo sapiens
acaaucaucaucauucuca

SEQ ID NO: 199980 - RNA, 15 nt, Homo sapiens
uuaaucccacuugcc

SEQ ID NO: 199981 - RNA, 12 nt, Homo sapiens
uuaucugugcaa

SEQ ID NO: 199982 - RNA, 11 nt, Homo sapiens
gcugccucuug

SEQ ID NO: 199983 - RNA, 16 nt, Homo sapiens
uuucaaaaccuuuuga

SEQ ID NO: 199984 - RNA, 18 nt, Homo sapiens
aagaugagagaacuggag

SEQ ID NO: 199985 - RNA, 16 nt, Homo sapiens
ccuagcccuucucuca

SEQ ID NO: 199986 - RNA, 21 nt, Homo sapiens
aaauacaauaaacuuacuaua

SEQ ID NO: 199987 - RNA, 20 nt, Homo sapiens
auaugauauauaaaugugau

SEQ ID NO: 199988 - RNA, 12 nt, Homo sapiens
auauaacugccu

SEQ ID NO: 199989 - RNA, 16 nt, Human immunodeficiency virus 1 (HIV-1)
ugaaggagaaauauca

SEQ ID NO: 199990 - RNA, 16 nt, Human immunodeficiency virus 1 (HIV-1)
ugaagaaugauacuaa

SEQ ID NO: 199991 - RNA, 18 nt, Human immunodeficiency virus 1 (HIV-1)
ucccaaagaagacaagau

SEQ ID NO: 199992 - RNA, 18 nt, Human immunodeficiency virus 1 (HIV-1)
uugauuguaacgaggauu

SEQ ID NO: 199993 - RNA, 17 nt, Human immunodeficiency virus 1 (HIV-1)
uuccagucacaccucag

SEQ ID NO: 199994 - RNA, 12 nt, Human immunodeficiency virus 1 (HIV-1)
uuaucugggacg

SEQ ID NO: 199995 - RNA, 23 nt, Human immunodeficiency virus 1 (HIV-1)
uuaagaccaaugacuuacaaggc

SEQ ID NO: 199996 - RNA, 15 nt, Human immunodeficiency virus 1 (HIV-1)
ugguuuuauagacau

SEQ ID NO: 199997 - RNA, 13 nt, Human immunodeficiency virus 1 (HIV-1)
ugguccauaguaa

SEQ ID NO: 199998 - RNA, 19 nt, Human immunodeficiency virus 1 (HIV-1)
uggcauuugggucagggag

SEQ ID NO: 199999 - RNA, 22 nt, Human immunodeficiency virus 1 (HIV-1)
uggaggaaaaagagauauagca

SEQ ID NO: 200000 - RNA, 16 nt, Human immunodeficiency virus 1 (HIV-1)
uggagcaaucacaagu

SEQ ID NO: 200001 - RNA, 23 nt, Human immunodeficiency virus 1 (HIV-1)
uggagcaaucacaaguagcaaua

SEQ ID NO: 200002 - RNA, 16 nt, Human immunodeficiency virus 1 (HIV-1)
uggaagcauccaggaa

SEQ ID NO: 200003 - RNA, 16 nt, Human immunodeficiency virus 1 (HIV-1)
uggaacuucugggacg

SEQ ID NO: 200004 - RNA, 15 nt, Human immunodeficiency virus 1 (HIV-1)
uggacauaaagcuau

SEQ ID NO: 200005 - RNA, 17 nt, Human immunodeficiency virus 1 (HIV-1)
aguacaaggagcuugua

SEQ ID NO: 200006 - RNA, 20 nt, Human immunodeficiency virus 1 (HIV-1)
agguggguuuuccagucaca

SEQ ID NO: 200007 - RNA, 21 nt, Human immunodeficiency virus 1 (HIV-1)
aguagaaauuuguacagagau

SEQ ID NO: 200008 - RNA, 16 nt, Human immunodeficiency virus 1 (HIV-1)
aguuuaaagugcacug

SEQ ID NO: 200009 - RNA, 23 nt, Human immunodeficiency virus 1 (HIV-1)
auaaagcuauagguacaguauua

SEQ ID NO: 200010 - RNA, 22 nt, Human immunodeficiency virus 1 (HIV-1)
auaaaagcauuaguagaaauuu

SEQ ID NO: 200011 - RNA, 13 nt, Human immunodeficiency virus 1 (HIV-1)
agucuccauagaa

SEQ ID NO: 200012 - RNA, 18 nt, Human immunodeficiency virus 1 (HIV-1)
aguuaaacaauggccauu

SEQ ID NO: 200013 - RNA, 24 nt, Human immunodeficiency virus 1 (HIV-1)
auaauguuugggccacacaugccu

SEQ ID NO: 200014 - RNA, 23 nt, Human immunodeficiency virus 1 (HIV-1)
auaagaaaggccuuauuaggaca

SEQ ID NO: 200015 - RNA, 15 nt, Human immunodeficiency virus 1 (HIV-1)
auaauaauagcaaua

SEQ ID NO: 200016 - RNA, 22 nt, Human immunodeficiency virus 1 (HIV-1)
aggaagucagccuaaaacugcu

SEQ ID NO: 200017 - RNA, 15 nt, Human immunodeficiency virus 1 (HIV-1)
aggaagcucuauuag

SEQ ID NO: 200018 - RNA, 23 nt, Human immunodeficiency virus 1 (HIV-1)
agcuugcucaaugccacagccau

SEQ ID NO: 200019 - RNA, 15 nt, Human immunodeficiency virus 1 (HIV-1)
agcuuguagagcuau

SEQ ID NO: 200020 - RNA, 12 nt, Human immunodeficiency virus 1 (HIV-1)
agcagaugauac

SEQ ID NO: 200021 - RNA, 17 nt, Human immunodeficiency virus 1 (HIV-1)
agcagaugauacaguau

SEQ ID NO: 200022 - RNA, 19 nt, Human immunodeficiency virus 1 (HIV-1)
agcauuaguaguagcaaua

SEQ ID NO: 200023 - RNA, 22 nt, Human immunodeficiency virus 1 (HIV-1)
agccuaaaacugcuuguaccaa

SEQ ID NO: 200024 - RNA, 17 nt, Human immunodeficiency virus 1 (HIV-1)
agagcaagaaauggagc

SEQ ID NO: 200025 - RNA, 20 nt, Human immunodeficiency virus 1 (HIV-1)
agagcagaagacaguggcaa

SEQ ID NO: 200026 - RNA, 14 nt, Human immunodeficiency virus 1 (HIV-1)
agauauagcacaca

SEQ ID NO: 200027 - RNA, 15 nt, Human immunodeficiency virus 1 (HIV-1)
agauauagcacacaa

SEQ ID NO: 200028 - RNA, 20 nt, Human immunodeficiency virus 1 (HIV-1)
agauagggugggagcagcau

SEQ ID NO: 200029 - RNA, 23 nt, Human immunodeficiency virus 1 (HIV-1)
agauaggguuauagaaguaguac

SEQ ID NO: 200030 - RNA, 16 nt, Human immunodeficiency virus 1 (HIV-1)
agcaauaguagcauua

SEQ ID NO: 200031 - RNA, 19 nt, Human immunodeficiency virus 1 (HIV-1)
agcaauaauaauagcaaua

SEQ ID NO: 200032 - RNA, 16 nt, Human immunodeficiency virus 1 (HIV-1)
agaugauacaguauua

SEQ ID NO: 200033 - RNA, 17 nt, Human immunodeficiency virus 1 (HIV-1)
acagcagcuaccaaugc

SEQ ID NO: 200034 - RNA, 16 nt, Human immunodeficiency virus 1 (HIV-1)
acauaguuagcccuag

SEQ ID NO: 200035 - RNA, 18 nt, Human immunodeficiency virus 1 (HIV-1)
acacaucccacuagggga

SEQ ID NO: 200036 - RNA, 17 nt, Human immunodeficiency virus 1 (HIV-1)
acacauaguuagcccua

SEQ ID NO: 200037 - RNA, 13 nt, Human immunodeficiency virus 1 (HIV-1)
acaagaaguagua

SEQ ID NO: 200038 - RNA, 21 nt, Human immunodeficiency virus 1 (HIV-1)
acaagauauccuugaucugug

SEQ ID NO: 200039 - RNA, 12 nt, Human immunodeficiency virus 1 (HIV-1)
acaaaagccuua

SEQ ID NO: 200040 - RNA, 15 nt, Human immunodeficiency virus 1 (HIV-1)
aauuuuaacaugugg

SEQ ID NO: 200041 - RNA, 20 nt, Human immunodeficiency virus 1 (HIV-1)
aauuuucccauuagcccuau

SEQ ID NO: 200042 - RNA, 15 nt, Human immunodeficiency virus 1 (HIV-1)
acugcuuaagccuca

SEQ ID NO: 200043 - RNA, 15 nt, Human immunodeficiency virus 1 (HIV-1)
acuaugaaagcccuc

SEQ ID NO: 200044 - RNA, 16 nt, Human immunodeficiency virus 1 (HIV-1)
acuaaaggaagcucua

SEQ ID NO: 200045 - RNA, 15 nt, Human immunodeficiency virus 1 (HIV-1)
acuacacaccagggc

SEQ ID NO: 200046 - RNA, 20 nt, Human immunodeficiency virus 1 (HIV-1)
accuauaccaauaguagcaa

SEQ ID NO: 200047 - RNA, 21 nt, Human immunodeficiency virus 1 (HIV-1)
accuauaccaauaguagcaau

SEQ ID NO: 200048 - RNA, 23 nt, Human immunodeficiency virus 1 (HIV-1)
accuauaccaauaguagcaauag

SEQ ID NO: 200049 - RNA, 15 nt, Human immunodeficiency virus 1 (HIV-1)
augauacaguauuag

SEQ ID NO: 200050 - RNA, 16 nt, Human immunodeficiency virus 1 (HIV-1)
augcaugaggauauaa

SEQ ID NO: 200051 - RNA, 21 nt, Human immunodeficiency virus 1 (HIV-1)
auucacucccaaagaagacaa

SEQ ID NO: 200052 - RNA, 13 nt, Human immunodeficiency virus 1 (HIV-1)
caagaaguaguau

SEQ ID NO: 200053 - RNA, 15 nt, Human immunodeficiency virus 1 (HIV-1)
cacaaguagcaauac

SEQ ID NO: 200054 - RNA, 18 nt, Human immunodeficiency virus 1 (HIV-1)
caauaguagcaauaguag

SEQ ID NO: 200055 - RNA, 14 nt, Human immunodeficiency virus 1 (HIV-1)
caacauaauuggaa

SEQ ID NO: 200056 - RNA, 21 nt, Human immunodeficiency virus 1 (HIV-1)
caacauauuggggucugcaua

SEQ ID NO: 200057 - RNA, 13 nt, Human immunodeficiency virus 1 (HIV-1)
caaaguaagacag

SEQ ID NO: 200058 - RNA, 20 nt, Human immunodeficiency virus 1 (HIV-1)
cauauguauguuucagggaa

SEQ ID NO: 200059 - RNA, 20 nt, Human immunodeficiency virus 1 (HIV-1)
cauaauuggaagaaaucugu

SEQ ID NO: 200060 - RNA, 17 nt, Human immunodeficiency virus 1 (HIV-1)
cagaacuacacaccagg

SEQ ID NO: 200061 - RNA, 18 nt, Human immunodeficiency virus 1 (HIV-1)
cagacucaucaagcuucu

SEQ ID NO: 200062 - RNA, 13 nt, Human immunodeficiency virus 1 (HIV-1)
cagacucugcuau

SEQ ID NO: 200063 - RNA, 21 nt, Human immunodeficiency virus 1 (HIV-1)
cagauacucauagaaaucugu

SEQ ID NO: 200064 - RNA, 15 nt, Human immunodeficiency virus 1 (HIV-1)
cagccuaaaacugcu

SEQ ID NO: 200065 - RNA, 17 nt, Human immunodeficiency virus 1 (HIV-1)
cagccauagcaguagcu

SEQ ID NO: 200066 - RNA, 16 nt, Human immunodeficiency virus 1 (HIV-1)
cagaugauacaguauu

SEQ ID NO: 200067 - RNA, 21 nt, Human immunodeficiency virus 1 (HIV-1)
cagggccaggggucagauauc

SEQ ID NO: 200068 - RNA, 20 nt, Human immunodeficiency virus 1 (HIV-1)
caggaauggauggcccaaaa

SEQ ID NO: 200069 - RNA, 18 nt, Human immunodeficiency virus 1 (HIV-1)
cccaacccacaagaagua

SEQ ID NO: 200070 - RNA, 15 nt, Human immunodeficiency virus 1 (HIV-1)
cauggagcaaucaca

SEQ ID NO: 200071 - RNA, 17 nt, Human immunodeficiency virus 1 (HIV-1)
cauggagcaaucacaag

SEQ ID NO: 200072 - RNA, 21 nt, Human immunodeficiency virus 1 (HIV-1)
ccaaagaagacaagauauccu

SEQ ID NO: 200073 - RNA, 16 nt, Human immunodeficiency virus 1 (HIV-1)
cauuugggucagggag

SEQ ID NO: 200074 - RNA, 21 nt, Human immunodeficiency virus 1 (HIV-1)
ccacacacaaggcuacuuccc

SEQ ID NO: 200075 - RNA, 18 nt, Human immunodeficiency virus 1 (HIV-1)
ccaguagauccuagacua

SEQ ID NO: 200076 - RNA, 13 nt, Human immunodeficiency virus 1 (HIV-1)
guaguagcaauaa

SEQ ID NO: 200077 - RNA, 12 nt, Human immunodeficiency virus 1 (HIV-1)
guaguacaagga

SEQ ID NO: 200078 - RNA, 15 nt, Human immunodeficiency virus 1 (HIV-1)
gguuaauugauagac

SEQ ID NO: 200079 - RNA, 19 nt, Human immunodeficiency virus 1 (HIV-1)
ggaucaaagccuaaagcca

SEQ ID NO: 200080 - RNA, 13 nt, Human immunodeficiency virus 1 (HIV-1)
ggaugacccggag

SEQ ID NO: 200081 - RNA, 22 nt, Human immunodeficiency virus 1 (HIV-1)
ggaugcuagauugguaauaaca

SEQ ID NO: 200082 - RNA, 13 nt, Human immunodeficiency virus 1 (HIV-1)
gcuagaagcacaa

SEQ ID NO: 200083 - RNA, 19 nt, Human immunodeficiency virus 1 (HIV-1)
gcuauagguacaguauuag

SEQ ID NO: 200084 - RNA, 18 nt, Human immunodeficiency virus 1 (HIV-1)
gcuuaagaaugaagcugu

SEQ ID NO: 200085 - RNA, 15 nt, Human immunodeficiency virus 1 (HIV-1)
gcagaugauacagua

SEQ ID NO: 200086 - RNA, 16 nt, Human immunodeficiency virus 1 (HIV-1)
gcagaugauacaguau

SEQ ID NO: 200087 - RNA, 17 nt, Human immunodeficiency virus 1 (HIV-1)
guuuuauagacaucacu

SEQ ID NO: 200088 - RNA, 22 nt, Human immunodeficiency virus 1 (HIV-1)
guuuuauagacaucacuaugaa

SEQ ID NO: 200089 - RNA, 16 nt, Human immunodeficiency virus 1 (HIV-1)
uaacaaaagccuuagg

SEQ ID NO: 200090 - RNA, 21 nt, Human immunodeficiency virus 1 (HIV-1)
guggaucuaccacacacaagg

SEQ ID NO: 200091 - RNA, 14 nt, Human immunodeficiency virus 1 (HIV-1)
gugucgacauagca

SEQ ID NO: 200092 - RNA, 15 nt, Human immunodeficiency virus 1 (HIV-1)
uauaggaaaauauua

SEQ ID NO: 200093 - RNA, 16 nt, Human immunodeficiency virus 1 (HIV-1)
uauccacugaccuuug

SEQ ID NO: 200094 - RNA, 17 nt, Human immunodeficiency virus 1 (HIV-1)
uauaccaauaguagcaa

SEQ ID NO: 200095 - RNA, 12 nt, Human immunodeficiency virus 1 (HIV-1)
uaguagcaauag

SEQ ID NO: 200096 - RNA, 22 nt, Human immunodeficiency virus 1 (HIV-1)
uaguagcgggagaaugauaaug

SEQ ID NO: 200097 - RNA, 18 nt, Human immunodeficiency virus 1 (HIV-1)
uagcugaggggacagaua

SEQ ID NO: 200098 - RNA, 17 nt, Human immunodeficiency virus 1 (HIV-1)
uagcaauaauaauagca

SEQ ID NO: 200099 - RNA, 19 nt, Human immunodeficiency virus 1 (HIV-1)
uagcaauaguagcauuagu

SEQ ID NO: 200100 - RNA, 22 nt, Human immunodeficiency virus 1 (HIV-1)
uagacuaauagaaagagcagaa

SEQ ID NO: 200101 - RNA, 22 nt, Human immunodeficiency virus 1 (HIV-1)
uaauucaucuguauuacuuuga

SEQ ID NO: 200102 - RNA, 18 nt, Human immunodeficiency virus 1 (HIV-1)
uaagcagcugcuuuuugc

SEQ ID NO: 200103 - RNA, 22 nt, Human immunodeficiency virus 1 (HIV-1)
uacaaggcagcuguagaucuua

SEQ ID NO: 200104 - RNA, 21 nt, Human immunodeficiency virus 1 (HIV-1)
gaagcucuauuagauacagga

SEQ ID NO: 200105 - RNA, 22 nt, Human immunodeficiency virus 1 (HIV-1)
gaaguaguauugguaaauguga

SEQ ID NO: 200106 - RNA, 20 nt, Human immunodeficiency virus 1 (HIV-1)
gaaugagacgagcugagcca

SEQ ID NO: 200107 - RNA, 13 nt, Human immunodeficiency virus 1 (HIV-1)
gaaugauaaugga

SEQ ID NO: 200108 - RNA, 21 nt, Human immunodeficiency virus 1 (HIV-1)
cuuguaccaauugcuauugua

SEQ ID NO: 200109 - RNA, 16 nt, Human immunodeficiency virus 1 (HIV-1)
cuuuaagaccaaugac

SEQ ID NO: 200110 - RNA, 21 nt, Human immunodeficiency virus 1 (HIV-1)
gauacaggagcagaugauaca

SEQ ID NO: 200111 - RNA, 16 nt, Human immunodeficiency virus 1 (HIV-1)
gcaauaauaauagcaa

SEQ ID NO: 200112 - RNA, 18 nt, Human immunodeficiency virus 1 (HIV-1)
gagcccuggaagcaucca

SEQ ID NO: 200113 - RNA, 13 nt, Human immunodeficiency virus 1 (HIV-1)
gacuuacaaggca

SEQ ID NO: 200114 - RNA, 13 nt, Human immunodeficiency virus 1 (HIV-1)
gagagaacaccag

SEQ ID NO: 200115 - RNA, 19 nt, Human immunodeficiency virus 1 (HIV-1)
gagagaacaccagcuuguu

SEQ ID NO: 200116 - RNA, 21 nt, Human immunodeficiency virus 1 (HIV-1)
ccuagaagaauaagacagggc

SEQ ID NO: 200117 - RNA, 14 nt, Human immunodeficiency virus 1 (HIV-1)
cgccacauaccuag

SEQ ID NO: 200118 - RNA, 16 nt, Human immunodeficiency virus 1 (HIV-1)
cuguagaucuuagcca

SEQ ID NO: 200119 - RNA, 20 nt, Human immunodeficiency virus 1 (HIV-1)
cugauuugaagaaugauacu

SEQ ID NO: 200120 - RNA, 20 nt, Human immunodeficiency virus 1 (HIV-1)
cugacaucgagcuugcuaca

SEQ ID NO: 200121 - RNA, 22 nt, Human immunodeficiency virus 1 (HIV-1)
cugacaucgagcuugcuacaag

SEQ ID NO: 200122 - RNA, 23 nt, Human immunodeficiency virus 1 (HIV-1)
cucaaugccacagccauagcagu

SEQ ID NO: 200123 - RNA, 16 nt, Human immunodeficiency virus 1 (HIV-1)
aaaaacugcucuuuca

SEQ ID NO: 200124 - RNA, 22 nt, Human immunodeficiency virus 1 (HIV-1)
aaaaauugugggucacagucua

SEQ ID NO: 200125 - RNA, 17 nt, Human immunodeficiency virus 1 (HIV-1)
aucagaugcuaaagcau

SEQ ID NO: 200126 - RNA, 23 nt, Human immunodeficiency virus 1 (HIV-1)
aucaguuuaugggaucaaagccu

SEQ ID NO: 200127 - RNA, 16 nt, Human immunodeficiency virus 1 (HIV-1)
auaucuaugaaacuua

SEQ ID NO: 200128 - RNA, 20 nt, Human immunodeficiency virus 1 (HIV-1)
auccggaguacuucaagaac

SEQ ID NO: 200129 - RNA, 17 nt, Human immunodeficiency virus 1 (HIV-1)
auaccaauaguagcaau

SEQ ID NO: 200130 - RNA, 11 nt, Human immunodeficiency virus 1 (HIV-1)
auacaguauua

SEQ ID NO: 200131 - RNA, 14 nt, Human immunodeficiency virus 1 (HIV-1)
auacaggagcagau

SEQ ID NO: 200132 - RNA, 17 nt, Human immunodeficiency virus 1 (HIV-1)
auagaaguaguacaagg

SEQ ID NO: 200133 - RNA, 20 nt, Human immunodeficiency virus 1 (HIV-1)
auagaaguaguacaaggagc

SEQ ID NO: 200134 - RNA, 20 nt, Human immunodeficiency virus 1 (HIV-1)
auaaaggagagaacaccagc

SEQ ID NO: 200135 - RNA, 23 nt, Human immunodeficiency virus 1 (HIV-1)
agucaggaacuaaagaauagugc

SEQ ID NO: 200136 - RNA, 17 nt, Human immunodeficiency virus 1 (HIV-1)
aguauugguaaauguga

SEQ ID NO: 200137 - RNA, 20 nt, Human immunodeficiency virus 1 (HIV-1)
agcugagccagcagcagaua

SEQ ID NO: 200138 - RNA, 17 nt, Human immunodeficiency virus 1 (HIV-1)
agcugaggggacagaua

SEQ ID NO: 200139 - RNA, 20 nt, Human immunodeficiency virus 1 (HIV-1)
agcucuauuagauacaggag

SEQ ID NO: 200140 - RNA, 16 nt, Human immunodeficiency virus 1 (HIV-1)
aggagagaacaccagc

SEQ ID NO: 200141 - RNA, 22 nt, Human immunodeficiency virus 1 (HIV-1)
agauacaggagcagaugauaca

SEQ ID NO: 200142 - RNA, 13 nt, Human immunodeficiency virus 1 (HIV-1)
agaugauacagua

SEQ ID NO: 200143 - RNA, 12 nt, Human immunodeficiency virus 1 (HIV-1)
agcccucagauc

SEQ ID NO: 200144 - RNA, 16 nt, Human immunodeficiency virus 1 (HIV-1)
agccuuaggcaucucc

SEQ ID NO: 200145 - RNA, 13 nt, Human immunodeficiency virus 1 (HIV-1)
auuagcagaacua

SEQ ID NO: 200146 - RNA, 17 nt, Human immunodeficiency virus 1 (HIV-1)
auuagcagaacuacaca

SEQ ID NO: 200147 - RNA, 20 nt, Human immunodeficiency virus 1 (HIV-1)
auuggggucugcauacagga

SEQ ID NO: 200148 - RNA, 22 nt, Human immunodeficiency virus 1 (HIV-1)
auguuugggccacacaugccug

SEQ ID NO: 200149 - RNA, 17 nt, Human immunodeficiency virus 1 (HIV-1)
auguauguuucagggaa

SEQ ID NO: 200150 - RNA, 19 nt, Human immunodeficiency virus 1 (HIV-1)
augguagaacagaugcaug

SEQ ID NO: 200151 - RNA, 21 nt, Human immunodeficiency virus 1 (HIV-1)
augggauggaugacccggaga

SEQ ID NO: 200152 - RNA, 19 nt, Human immunodeficiency virus 1 (HIV-1)
aucuguggaucuaccacac

SEQ ID NO: 200153 - RNA, 21 nt, Human immunodeficiency virus 1 (HIV-1)
cagaaaauuuuaacaugugga

SEQ ID NO: 200154 - RNA, 21 nt, Human immunodeficiency virus 1 (HIV-1)
cagaagacaguggcaaugaga

SEQ ID NO: 200155 - RNA, 21 nt, Human immunodeficiency virus 1 (HIV-1)
cagaagaaaaaauaaaagcau

SEQ ID NO: 200156 - RNA, 14 nt, Human immunodeficiency virus 1 (HIV-1)
caauacagcagcua

SEQ ID NO: 200157 - RNA, 20 nt, Human immunodeficiency virus 1 (HIV-1)
caacuaauucaucuguauua

SEQ ID NO: 200158 - RNA, 23 nt, Human immunodeficiency virus 1 (HIV-1)
caacauauuggggucugcauaca

SEQ ID NO: 200159 - RNA, 22 nt, Human immunodeficiency virus 1 (HIV-1)
agaauaaguucagaaguacaca

SEQ ID NO: 200160 - RNA, 20 nt, Human immunodeficiency virus 1 (HIV-1)
agaaaugaguuugccaggaa

SEQ ID NO: 200161 - RNA, 21 nt, Human immunodeficiency virus 1 (HIV-1)
agaaaugaguuugccaggaag

SEQ ID NO: 200162 - RNA, 22 nt, Human immunodeficiency virus 1 (HIV-1)
agaaaggccuuauuaggacaca

SEQ ID NO: 200163 - RNA, 18 nt, Human immunodeficiency virus 1 (HIV-1)
agaaauuuguacagagau

SEQ ID NO: 200164 - RNA, 20 nt, Human immunodeficiency virus 1 (HIV-1)
acugauuugaagaaugauac

SEQ ID NO: 200165 - RNA, 17 nt, Human immunodeficiency virus 1 (HIV-1)
acuaugaaagcccucau

SEQ ID NO: 200166 - RNA, 13 nt, Human immunodeficiency virus 1 (HIV-1)
acuacacaccagg

SEQ ID NO: 200167 - RNA, 16 nt, Human immunodeficiency virus 1 (HIV-1)
acaagauauccuugau

SEQ ID NO: 200168 - RNA, 18 nt, Human immunodeficiency virus 1 (HIV-1)
acaucgagcuugcuacaa

SEQ ID NO: 200169 - RNA, 14 nt, Human immunodeficiency virus 1 (HIV-1)
accacacacaaggc

SEQ ID NO: 200170 - RNA, 23 nt, Human immunodeficiency virus 1 (HIV-1)
accuggaaaaacauggagcaauc

SEQ ID NO: 200171 - RNA, 17 nt, Human immunodeficiency virus 1 (HIV-1)
acccugugagccugcau

SEQ ID NO: 200172 - RNA, 20 nt, Human immunodeficiency virus 1 (HIV-1)
aagaacugcugacaucgagc

SEQ ID NO: 200173 - RNA, 14 nt, Human immunodeficiency virus 1 (HIV-1)
aagcauaugauaca

SEQ ID NO: 200174 - RNA, 17 nt, Human immunodeficiency virus 1 (HIV-1)
aagcauccaggaaguca

SEQ ID NO: 200175 - RNA, 13 nt, Human immunodeficiency virus 1 (HIV-1)
aagaaugauacua

SEQ ID NO: 200176 - RNA, 16 nt, Human immunodeficiency virus 1 (HIV-1)
aagcuaguaccaguug

SEQ ID NO: 200177 - RNA, 17 nt, Human immunodeficiency virus 1 (HIV-1)
aagcuauagguacagua

SEQ ID NO: 200178 - RNA, 15 nt, Human immunodeficiency virus 1 (HIV-1)
aaggauuuugcuaua

SEQ ID NO: 200179 - RNA, 13 nt, Human immunodeficiency virus 1 (HIV-1)
aauaguagcaaua

SEQ ID NO: 200180 - RNA, 16 nt, Human immunodeficiency virus 1 (HIV-1)
aauaguagcaauagua

SEQ ID NO: 200181 - RNA, 15 nt, Human immunodeficiency virus 1 (HIV-1)
aaugacuuacaaggc

SEQ ID NO: 200182 - RNA, 20 nt, Human immunodeficiency virus 1 (HIV-1)
aaugacuuacaaggcagcug

SEQ ID NO: 200183 - RNA, 21 nt, Human immunodeficiency virus 1 (HIV-1)
aaugagagugaaggagaaaua

SEQ ID NO: 200184 - RNA, 14 nt, Human immunodeficiency virus 1 (HIV-1)
aaagagcagaagac

SEQ ID NO: 200185 - RNA, 15 nt, Human immunodeficiency virus 1 (HIV-1)
aaagccuaaagccau

SEQ ID NO: 200186 - RNA, 17 nt, Human immunodeficiency virus 1 (HIV-1)
aaagccauguguaaaau

SEQ ID NO: 200187 - RNA, 14 nt, Human immunodeficiency virus 1 (HIV-1)
aaagcccucaucca

SEQ ID NO: 200188 - RNA, 14 nt, Human immunodeficiency virus 1 (HIV-1)
aaagcuaggggaug

SEQ ID NO: 200189 - RNA, 13 nt, Human immunodeficiency virus 1 (HIV-1)
aacaaaagccuua

SEQ ID NO: 200190 - RNA, 19 nt, Human immunodeficiency virus 1 (HIV-1)
aacauguggaaaaaugaca

SEQ ID NO: 200191 - RNA, 18 nt, Human immunodeficiency virus 1 (HIV-1)
aacuaaaggaagcucuau

SEQ ID NO: 200192 - RNA, 16 nt, Human immunodeficiency virus 1 (HIV-1)
gaaaauauuaagacaa

SEQ ID NO: 200193 - RNA, 19 nt, Human immunodeficiency virus 1 (HIV-1)
gaaaauauuaagacaaaga

SEQ ID NO: 200194 - RNA, 13 nt, Human immunodeficiency virus 1 (HIV-1)
gaacuucugggac

SEQ ID NO: 200195 - RNA, 15 nt, Human immunodeficiency virus 1 (HIV-1)
gaaaugaguuugcca

SEQ ID NO: 200196 - RNA, 17 nt, Human immunodeficiency virus 1 (HIV-1)
gaaaggccuuauuagga

SEQ ID NO: 200197 - RNA, 17 nt, Human immunodeficiency virus 1 (HIV-1)
gaagacaguggcaauga

SEQ ID NO: 200198 - RNA, 14 nt, Human immunodeficiency virus 1 (HIV-1)
gaaugaagcuguua

SEQ ID NO: 200199 - RNA, 17 nt, Human immunodeficiency virus 1 (HIV-1)
gaaucuccuacaguauu

SEQ ID NO: 200200 - RNA, 15 nt, Human immunodeficiency virus 1 (HIV-1)
gaaguacacauccca

SEQ ID NO: 200201 - RNA, 17 nt, Human immunodeficiency virus 1 (HIV-1)
gagcuuguagagcuauu

SEQ ID NO: 200202 - RNA, 16 nt, Human immunodeficiency virus 1 (HIV-1)
gagcuugcuacaaggg

SEQ ID NO: 200203 - RNA, 23 nt, Human immunodeficiency virus 1 (HIV-1)
gagcagaagacaguggcaaugag

SEQ ID NO: 200204 - RNA, 20 nt, Human immunodeficiency virus 1 (HIV-1)
gaccuuuggauggugcuaca

SEQ ID NO: 200205 - RNA, 18 nt, Human immunodeficiency virus 1 (HIV-1)
aacaaaagccuuaggcau

SEQ ID NO: 200206 - RNA, 13 nt, Human immunodeficiency virus 1 (HIV-1)
aaauuaaagccag

SEQ ID NO: 200207 - RNA, 21 nt, Human immunodeficiency virus 1 (HIV-1)
ggcgagcccucagauccugca

SEQ ID NO: 200208 - RNA, 16 nt, Human immunodeficiency virus 1 (HIV-1)
ggauggccuacuguaa

SEQ ID NO: 200209 - RNA, 15 nt, Human immunodeficiency virus 1 (HIV-1)
gcuauagguacagua

SEQ ID NO: 200210 - RNA, 16 nt, Human immunodeficiency virus 1 (HIV-1)
gcuauagguacaguau

SEQ ID NO: 200211 - RNA, 14 nt, Human immunodeficiency virus 1 (HIV-1)
gcugagccagcagc

SEQ ID NO: 200212 - RNA, 20 nt, Human immunodeficiency virus 1 (HIV-1)
gcaaugagagugaaggagaa

SEQ ID NO: 200213 - RNA, 18 nt, Human immunodeficiency virus 1 (HIV-1)
gcacuuuaaauuuuccca

SEQ ID NO: 200214 - RNA, 20 nt, Human immunodeficiency virus 1 (HIV-1)
gcaguaaguaguacauguaa

SEQ ID NO: 200215 - RNA, 21 nt, Human immunodeficiency virus 1 (HIV-1)
gcaguagcugaggggacagau

SEQ ID NO: 200216 - RNA, 17 nt, Human immunodeficiency virus 1 (HIV-1)
gcaggaguggaagccau

SEQ ID NO: 200217 - RNA, 15 nt, Human immunodeficiency virus 1 (HIV-1)
gcccucauccaagaa

SEQ ID NO: 200218 - RNA, 22 nt, Human immunodeficiency virus 1 (HIV-1)
gccaggaagauggaaaccaaaa

SEQ ID NO: 200219 - RNA, 21 nt, Human immunodeficiency virus 1 (HIV-1)
cauaacaagguaggaucucua

SEQ ID NO: 200220 - RNA, 18 nt, Human immunodeficiency virus 1 (HIV-1)
caguaaguaguacaugua

SEQ ID NO: 200221 - RNA, 14 nt, Human immunodeficiency virus 1 (HIV-1)
cagacucugcuaua

SEQ ID NO: 200222 - RNA, 15 nt, Human immunodeficiency virus 1 (HIV-1)
cauuaguaguagcaa

SEQ ID NO: 200223 - RNA, 18 nt, Human immunodeficiency virus 1 (HIV-1)
cauuaguaguagcaauaa

SEQ ID NO: 200224 - RNA, 18 nt, Human immunodeficiency virus 1 (HIV-1)
ccaaugacuuacaaggca

SEQ ID NO: 200225 - RNA, 23 nt, Human immunodeficiency virus 1 (HIV-1)
ccaauaaaggagagaacaccagc

SEQ ID NO: 200226 - RNA, 12 nt, Human immunodeficiency virus 1 (HIV-1)
ccauguguaaaa

SEQ ID NO: 200227 - RNA, 22 nt, Human immunodeficiency virus 1 (HIV-1)
ccauauguauguuucagggaaa

SEQ ID NO: 200228 - RNA, 20 nt, Human immunodeficiency virus 1 (HIV-1)
ccaggggucagauauccacu

SEQ ID NO: 200229 - RNA, 14 nt, Human immunodeficiency virus 1 (HIV-1)
cccgagagcugcau

SEQ ID NO: 200230 - RNA, 17 nt, Human immunodeficiency virus 1 (HIV-1)
cccucagauccugcaua

SEQ ID NO: 200231 - RNA, 13 nt, Human immunodeficiency virus 1 (HIV-1)
ccuaaaacugcuu

SEQ ID NO: 200232 - RNA, 13 nt, Human immunodeficiency virus 1 (HIV-1)
ccuacaccuguca

SEQ ID NO: 200233 - RNA, 13 nt, Human immunodeficiency virus 1 (HIV-1)
aaacaauggccau

SEQ ID NO: 200234 - RNA, 15 nt, Human immunodeficiency virus 1 (HIV-1)
cgccacauaccuaga

SEQ ID NO: 200235 - RNA, 21 nt, Human immunodeficiency virus 1 (HIV-1)
ccuuauuaggacacauaguua

SEQ ID NO: 200236 - RNA, 15 nt, Human immunodeficiency virus 1 (HIV-1)
cuaccacacacaagg

SEQ ID NO: 200237 - RNA, 12 nt, Human immunodeficiency virus 1 (HIV-1)
cuacacaccagg

SEQ ID NO: 200238 - RNA, 16 nt, Human immunodeficiency virus 1 (HIV-1)
cuaaagccauguguaa

SEQ ID NO: 200239 - RNA, 15 nt, Human immunodeficiency virus 1 (HIV-1)
cucagguaccuuuaa

SEQ ID NO: 200240 - RNA, 12 nt, Human immunodeficiency virus 1 (HIV-1)
cuguuagacauu

SEQ ID NO: 200241 - RNA, 20 nt, Human immunodeficiency virus 1 (HIV-1)
cuguggaucuaccacacaca

SEQ ID NO: 200242 - RNA, 19 nt, Human immunodeficiency virus 1 (HIV-1)
cugcaacaacugcuguuua

SEQ ID NO: 200243 - RNA, 18 nt, Human immunodeficiency virus 1 (HIV-1)
ucucugguuagaccagau

SEQ ID NO: 200244 - RNA, 15 nt, Human immunodeficiency virus 1 (HIV-1)
ucucgagaccuggaa

SEQ ID NO: 200245 - RNA, 13 nt, Human immunodeficiency virus 1 (HIV-1)
ucccugauuagca

SEQ ID NO: 200246 - RNA, 15 nt, Human immunodeficiency virus 1 (HIV-1)
uauccuugaucugug

SEQ ID NO: 200247 - RNA, 13 nt, Human immunodeficiency virus 1 (HIV-1)
uaugaaacuuaug

SEQ ID NO: 200248 - RNA, 21 nt, Human immunodeficiency virus 1 (HIV-1)
uaucaaaguaagacaguauga

SEQ ID NO: 200249 - RNA, 17 nt, Human immunodeficiency virus 1 (HIV-1)
uaucaagcaggacauaa

SEQ ID NO: 200250 - RNA, 19 nt, Human immunodeficiency virus 1 (HIV-1)
uaucaagcaggacauaaca

SEQ ID NO: 200251 - RNA, 14 nt, Human immunodeficiency virus 1 (HIV-1)
uauagguacaguau

SEQ ID NO: 200252 - RNA, 16 nt, Human immunodeficiency virus 1 (HIV-1)
uauagguacaguauua

SEQ ID NO: 200253 - RNA, 18 nt, Human immunodeficiency virus 1 (HIV-1)
uagaaguaguacaaggag

SEQ ID NO: 200254 - RNA, 17 nt, Human immunodeficiency virus 1 (HIV-1)
uagaagaauaagacagg

SEQ ID NO: 200255 - RNA, 12 nt, Human immunodeficiency virus 1 (HIV-1)
uagaaaucugug

SEQ ID NO: 200256 - RNA, 16 nt, Human immunodeficiency virus 1 (HIV-1)
uagaacagaugcauga

SEQ ID NO: 200257 - RNA, 16 nt, Human immunodeficiency virus 1 (HIV-1)
ucagacucugcuauaa

SEQ ID NO: 200258 - RNA, 19 nt, Human immunodeficiency virus 1 (HIV-1)
ucagggagucuccauagaa

SEQ ID NO: 200259 - RNA, 12 nt, Human immunodeficiency virus 1 (HIV-1)
ucaagcaggaca

SEQ ID NO: 200260 - RNA, 12 nt, Human immunodeficiency virus 1 (HIV-1)
ucaaagcaguaa

SEQ ID NO: 200261 - RNA, 18 nt, Human immunodeficiency virus 1 (HIV-1)
ucaaagcaguaaguagua

SEQ ID NO: 200262 - RNA, 16 nt, Human immunodeficiency virus 1 (HIV-1)
guggacauaaagcuau

SEQ ID NO: 200263 - RNA, 19 nt, Human immunodeficiency virus 1 (HIV-1)
guucagaaguacacauccc

SEQ ID NO: 200264 - RNA, 21 nt, Human immunodeficiency virus 1 (HIV-1)
gugcaucagaugcuaaagcau

SEQ ID NO: 200265 - RNA, 18 nt, Human immunodeficiency virus 1 (HIV-1)
guagagcuauucgccaca

SEQ ID NO: 200266 - RNA, 20 nt, Human immunodeficiency virus 1 (HIV-1)
gggucugcauacaggagaaa

SEQ ID NO: 200267 - RNA, 23 nt, Human immunodeficiency virus 1 (HIV-1)
guauuacuuugacuguuuuucag

SEQ ID NO: 200268 - RNA, 13 nt, Human immunodeficiency virus 1 (HIV-1)
uaaagugcacuga

SEQ ID NO: 200269 - RNA, 18 nt, Human immunodeficiency virus 1 (HIV-1)
uacaaggcagcuguagau

SEQ ID NO: 200270 - RNA, 20 nt, Human immunodeficiency virus 1 (HIV-1)
uaccuagaagaauaagacag

SEQ ID NO: 200271 - RNA, 17 nt, Human immunodeficiency virus 1 (HIV-1)
uugugcaucagaugcua

SEQ ID NO: 200272 - RNA, 23 nt, Human immunodeficiency virus 1 (HIV-1)
uugguggaaucuccuacaguauu

SEQ ID NO: 200273 - RNA, 20 nt, Human immunodeficiency virus 1 (HIV-1)
uuuggauggugcuacaagcu

SEQ ID NO: 200274 - RNA, 12 nt, Human immunodeficiency virus 1 (HIV-1)
uugcuacaaggg

SEQ ID NO: 200275 - RNA, 17 nt, Human immunodeficiency virus 1 (HIV-1)
aacaccagcuuguuaca

SEQ ID NO: 200276 - RNA, 22 nt, Human immunodeficiency virus 1 (HIV-1)
aagauggguggcaaguggucaa

SEQ ID NO: 200277 - RNA, 14 nt, Human immunodeficiency virus 1 (HIV-1)
aagauggaaaccaa

SEQ ID NO: 200278 - RNA, 23 nt, Human immunodeficiency virus 1 (HIV-1)
aagauggaaaccaaaaaugauag

SEQ ID NO: 200279 - RNA, 15 nt, Human immunodeficiency virus 1 (HIV-1)
aauauugguggaauc

SEQ ID NO: 200280 - RNA, 17 nt, Human immunodeficiency virus 1 (HIV-1)
aauacuuggcacuagca

SEQ ID NO: 200281 - RNA, 20 nt, Human immunodeficiency virus 1 (HIV-1)
aauacuuggcacuagcagca

SEQ ID NO: 200282 - RNA, 22 nt, Human immunodeficiency virus 1 (HIV-1)
aauaguugugugguccauagua

SEQ ID NO: 200283 - RNA, 23 nt, Human immunodeficiency virus 1 (HIV-1)
aauaguugugugguccauaguaa

SEQ ID NO: 200284 - RNA, 22 nt, Human immunodeficiency virus 1 (HIV-1)
aauagugcuguuagcuugcuca

SEQ ID NO: 200285 - RNA, 17 nt, Human immunodeficiency virus 1 (HIV-1)
aagcccucauccaagaa

SEQ ID NO: 200286 - RNA, 13 nt, Human immunodeficiency virus 1 (HIV-1)
aagcauaugauac

SEQ ID NO: 200287 - RNA, 17 nt, Human immunodeficiency virus 1 (HIV-1)
aagcaguaaguaguaca

SEQ ID NO: 200288 - RNA, 14 nt, Human immunodeficiency virus 1 (HIV-1)
aaguaagacaguau

SEQ ID NO: 200289 - RNA, 16 nt, Human immunodeficiency virus 1 (HIV-1)
aaggaagggaaaauuu

SEQ ID NO: 200290 - RNA, 17 nt, Human immunodeficiency virus 1 (HIV-1)
ugcaacaacugcuguuu

SEQ ID NO: 200291 - RNA, 18 nt, Human immunodeficiency virus 1 (HIV-1)
ugcaaccuauaccaauag

SEQ ID NO: 200292 - RNA, 13 nt, Human immunodeficiency virus 1 (HIV-1)
ugagccagcagca

SEQ ID NO: 200293 - RNA, 17 nt, Human immunodeficiency virus 1 (HIV-1)
ugagccagcagcagaua

SEQ ID NO: 200294 - RNA, 14 nt, Human immunodeficiency virus 1 (HIV-1)
ugauaauggagaaa

SEQ ID NO: 200295 - RNA, 14 nt, Human immunodeficiency virus 1 (HIV-1)
ugauacaguauuag

SEQ ID NO: 200296 - RNA, 14 nt, Human immunodeficiency virus 1 (HIV-1)
ugauacagagguac

SEQ ID NO: 200297 - RNA, 19 nt, Human immunodeficiency virus 1 (HIV-1)
ugcuuguaccaauugcuau

SEQ ID NO: 200298 - RNA, 12 nt, Human immunodeficiency virus 1 (HIV-1)
ugcuugugccug

SEQ ID NO: 200299 - RNA, 19 nt, Human immunodeficiency virus 1 (HIV-1)
ugcuaaagcauaugauaca

SEQ ID NO: 200300 - RNA, 14 nt, Human immunodeficiency virus 1 (HIV-1)
ugcauacaggagaa

SEQ ID NO: 200301 - RNA, 15 nt, Human immunodeficiency virus 1 (HIV-1)
ugguagaacagaugc

SEQ ID NO: 200302 - RNA, 16 nt, Human immunodeficiency virus 1 (HIV-1)
uggacauaaagcuaua

SEQ ID NO: 200303 - RNA, 15 nt, Human immunodeficiency virus 1 (HIV-1)
uggcaaguggucaaa

SEQ ID NO: 200304 - RNA, 13 nt, Human immunodeficiency virus 1 (HIV-1)
uguaccaguaaaa

SEQ ID NO: 200305 - RNA, 20 nt, Human immunodeficiency virus 1 (HIV-1)
uguggaaaaaugacauggua

SEQ ID NO: 200306 - RNA, 23 nt, Human immunodeficiency virus 1 (HIV-1)
uguggaaaaaugacaugguagaa

SEQ ID NO: 200307 - RNA, 20 nt, Human immunodeficiency virus 1 (HIV-1)
uguggaucuaccacacacaa

SEQ ID NO: 200308 - RNA, 15 nt, Human immunodeficiency virus 1 (HIV-1)
uuaacauguggaaaa

SEQ ID NO: 200309 - RNA, 19 nt, Human immunodeficiency virus 1 (HIV-1)
uuaagaaugaagcuguuag

SEQ ID NO: 200310 - RNA, 12 nt, Human immunodeficiency virus 1 (HIV-1)
uuagaccagauc

SEQ ID NO: 200311 - RNA, 12 nt, Human immunodeficiency virus 1 (HIV-1)
uuauagacauca

SEQ ID NO: 200312 - RNA, 18 nt, Human immunodeficiency virus 1 (HIV-1)
uuauagacaucacuauga

SEQ ID NO: 200313 - RNA, 17 nt, Human immunodeficiency virus 1 (HIV-1)
uuugaagaaugauacua

SEQ ID NO: 200314 - RNA, 20 nt, Human immunodeficiency virus 1 (HIV-1)
uugagacuguaccaguaaaa

SEQ ID NO: 200315 - RNA, 14 nt, Human immunodeficiency virus 1 (HIV-1)
uuaaagugcacuga

SEQ ID NO: 200316 - RNA, 16 nt, Human immunodeficiency virus 1 (HIV-1)
ugugcaucagaugcua

SEQ ID NO: 200317 - RNA, 17 nt, Human immunodeficiency virus 1 (HIV-1)
ugugcaucagaugcuaa

SEQ ID NO: 200318 - RNA, 16 nt, Human immunodeficiency virus 1 (HIV-1)
uguuucauaacaaaag

SEQ ID NO: 200319 - RNA, 18 nt, Human immunodeficiency virus 1 (HIV-1)
uguuugggccacacaugc

SEQ ID NO: 200320 - RNA, 19 nt, Human immunodeficiency virus 1 (HIV-1)
uggcuuagggcaacauauc

SEQ ID NO: 200321 - RNA, 17 nt, Human immunodeficiency virus 1 (HIV-1)
ugggugucgacauagca

SEQ ID NO: 200322 - RNA, 14 nt, Human immunodeficiency virus 1 (HIV-1)
uggauggugcuaca

SEQ ID NO: 200323 - RNA, 15 nt, Human immunodeficiency virus 1 (HIV-1)
uggauggugcuacaa

SEQ ID NO: 200324 - RNA, 18 nt, Human immunodeficiency virus 1 (HIV-1)
uggcuagaagcacaagag

SEQ ID NO: 200325 - RNA, 12 nt, Human immunodeficiency virus 1 (HIV-1)
ugucgacauagc

SEQ ID NO: 200326 - RNA, 16 nt, Human immunodeficiency virus 1 (HIV-1)
uguauguuucagggaa

SEQ ID NO: 200327 - RNA, 15 nt, Human immunodeficiency virus 1 (HIV-1)
uguagaucuuagcca

SEQ ID NO: 200328 - RNA, 18 nt, Human immunodeficiency virus 1 (HIV-1)
ucacaaguagcaauacag

SEQ ID NO: 200329 - RNA, 17 nt, Human immunodeficiency virus 1 (HIV-1)
uccuacaguauuggagu

SEQ ID NO: 200330 - RNA, 18 nt, Human immunodeficiency virus 1 (HIV-1)
uccugcauauaagcagcu

SEQ ID NO: 200331 - RNA, 15 nt, Human immunodeficiency virus 1 (HIV-1)
ucugcaacaacugcu

SEQ ID NO: 200332 - RNA, 13 nt, Human immunodeficiency virus 1 (HIV-1)
ugauacaguauua

SEQ ID NO: 200333 - RNA, 15 nt, Human immunodeficiency virus 1 (HIV-1)
ugauuagcagaacua

SEQ ID NO: 200334 - RNA, 20 nt, Human immunodeficiency virus 1 (HIV-1)
ugacaucgagcuugcuacaa

SEQ ID NO: 200335 - RNA, 20 nt, Human immunodeficiency virus 1 (HIV-1)
ugaaagcccucauccaagaa

SEQ ID NO: 200336 - RNA, 15 nt, Human immunodeficiency virus 1 (HIV-1)
ugcauauaagcagcu

SEQ ID NO: 200337 - RNA, 18 nt, Human immunodeficiency virus 1 (HIV-1)
ugcauauaagcagcugcu

SEQ ID NO: 200338 - RNA, 14 nt, Human immunodeficiency virus 1 (HIV-1)
acuucaagaacugc

SEQ ID NO: 200339 - RNA, 12 nt, Human immunodeficiency virus 1 (HIV-1)
acuguaccagua

SEQ ID NO: 200340 - RNA, 13 nt, Human immunodeficiency virus 1 (HIV-1)
acuguaccaguaa

SEQ ID NO: 200341 - RNA, 18 nt, Human immunodeficiency virus 1 (HIV-1)
acuuacaaggcagcugua

SEQ ID NO: 200342 - RNA, 23 nt, Human immunodeficiency virus 1 (HIV-1)
acucauagaaaucuguggacaua

SEQ ID NO: 200343 - RNA, 12 nt, Human immunodeficiency virus 1 (HIV-1)
acucugcuauaa

SEQ ID NO: 200344 - RNA, 12 nt, Human immunodeficiency virus 1 (HIV-1)
agaacuacacac

SEQ ID NO: 200345 - RNA, 21 nt, Human immunodeficiency virus 1 (HIV-1)
agaacuacacaccagggccag

SEQ ID NO: 200346 - RNA, 21 nt, Human immunodeficiency virus 1 (HIV-1)
agaauucugcaacaacugcug

SEQ ID NO: 200347 - RNA, 22 nt, Human immunodeficiency virus 1 (HIV-1)
agaauagugcuguuagcuugcu

SEQ ID NO: 200348 - RNA, 16 nt, Human immunodeficiency virus 1 (HIV-1)
agaaauuuguacagag

SEQ ID NO: 200349 - RNA, 23 nt, Human immunodeficiency virus 1 (HIV-1)
agaaaggccuuauuaggacacau

SEQ ID NO: 200350 - RNA, 15 nt, Human immunodeficiency virus 1 (HIV-1)
agagaacaccagcuu

SEQ ID NO: 200351 - RNA, 15 nt, Human immunodeficiency virus 1 (HIV-1)
agacaguaugaucag

SEQ ID NO: 200352 - RNA, 21 nt, Human immunodeficiency virus 1 (HIV-1)
agacaagauauccuugaucug

SEQ ID NO: 200353 - RNA, 14 nt, Human immunodeficiency virus 1 (HIV-1)
acccugaacuagca

SEQ ID NO: 200354 - RNA, 20 nt, Human immunodeficiency virus 1 (HIV-1)
accuuuggauggugcuacaa

SEQ ID NO: 200355 - RNA, 17 nt, Human immunodeficiency virus 1 (HIV-1)
accuuuaagaccaauga

SEQ ID NO: 200356 - RNA, 13 nt, Human immunodeficiency virus 1 (HIV-1)
acagagacagauc

SEQ ID NO: 200357 - RNA, 23 nt, Human immunodeficiency virus 1 (HIV-1)
acagccgccuagcauuucaucac

SEQ ID NO: 200358 - RNA, 19 nt, Human immunodeficiency virus 1 (HIV-1)
acagcgacgaagagcucau

SEQ ID NO: 200359 - RNA, 23 nt, Human immunodeficiency virus 1 (HIV-1)
acagcgacgaagagcucaucaga

SEQ ID NO: 200360 - RNA, 22 nt, Human immunodeficiency virus 1 (HIV-1)
acaggagcagaugauacaguau

SEQ ID NO: 200361 - RNA, 15 nt, Human immunodeficiency virus 1 (HIV-1)
auaucaagcaggaca

SEQ ID NO: 200362 - RNA, 18 nt, Human immunodeficiency virus 1 (HIV-1)
aucaagcaggacauaaca

SEQ ID NO: 200363 - RNA, 16 nt, Human immunodeficiency virus 1 (HIV-1)
auagaaguaguacaag

SEQ ID NO: 200364 - RNA, 17 nt, Human immunodeficiency virus 1 (HIV-1)
auacuuggcacuagcag

SEQ ID NO: 200365 - RNA, 20 nt, Human immunodeficiency virus 1 (HIV-1)
auacaguauuagaagaaaug

SEQ ID NO: 200366 - RNA, 21 nt, Human immunodeficiency virus 1 (HIV-1)
aucccacuaggggaugcuaga

SEQ ID NO: 200367 - RNA, 21 nt, Human immunodeficiency virus 1 (HIV-1)
aucgagcuugcuacaagggac

SEQ ID NO: 200368 - RNA, 11 nt, Human immunodeficiency virus 1 (HIV-1)
aucuaccacac

SEQ ID NO: 200369 - RNA, 14 nt, Human immunodeficiency virus 1 (HIV-1)
aucuccuacaguau

SEQ ID NO: 200370 - RNA, 13 nt, Human immunodeficiency virus 1 (HIV-1)
aguggaagccaua

SEQ ID NO: 200371 - RNA, 22 nt, Human immunodeficiency virus 1 (HIV-1)
aguagcaauaauaauagcaaua

SEQ ID NO: 200372 - RNA, 19 nt, Human immunodeficiency virus 1 (HIV-1)
aguagcgggagaaugauaa

SEQ ID NO: 200373 - RNA, 14 nt, Human immunodeficiency virus 1 (HIV-1)
aguaagacaguaug

SEQ ID NO: 200374 - RNA, 15 nt, Human immunodeficiency virus 1 (HIV-1)
aguaagacaguauga

SEQ ID NO: 200375 - RNA, 20 nt, Human immunodeficiency virus 1 (HIV-1)
aguaagacaguaugaucaga

SEQ ID NO: 200376 - RNA, 20 nt, Human immunodeficiency virus 1 (HIV-1)
aguaaaauuaaagccaggaa

SEQ ID NO: 200377 - RNA, 18 nt, Human immunodeficiency virus 1 (HIV-1)
agggacuuuccgcugggg

SEQ ID NO: 200378 - RNA, 13 nt, Human immunodeficiency virus 1 (HIV-1)
agguacaguauua

SEQ ID NO: 200379 - RNA, 14 nt, Human immunodeficiency virus 1 (HIV-1)
agguacaguauuag

SEQ ID NO: 200380 - RNA, 18 nt, Human immunodeficiency virus 1 (HIV-1)
aggagcuuguagagcuau

SEQ ID NO: 200381 - RNA, 12 nt, Human immunodeficiency virus 1 (HIV-1)
aggcagcuguag

SEQ ID NO: 200382 - RNA, 20 nt, Human immunodeficiency virus 1 (HIV-1)
agcucaucagaacagucaga

SEQ ID NO: 200383 - RNA, 20 nt, Human immunodeficiency virus 1 (HIV-1)
caaggagcuuguagagcuau

SEQ ID NO: 200384 - RNA, 18 nt, Human immunodeficiency virus 1 (HIV-1)
caagauauccuugaucug

SEQ ID NO: 200385 - RNA, 17 nt, Human immunodeficiency virus 1 (HIV-1)
caagguaggaucucuac

SEQ ID NO: 200386 - RNA, 19 nt, Human immunodeficiency virus 1 (HIV-1)
cacauaccuagaagaauaa

SEQ ID NO: 200387 - RNA, 16 nt, Human immunodeficiency virus 1 (HIV-1)
cacacaugccugugua

SEQ ID NO: 200388 - RNA, 16 nt, Human immunodeficiency virus 1 (HIV-1)
auggugcuacaagcua

SEQ ID NO: 200389 - RNA, 17 nt, Human immunodeficiency virus 1 (HIV-1)
augguagaacagaugca

SEQ ID NO: 200390 - RNA, 19 nt, Human immunodeficiency virus 1 (HIV-1)
auugggugucgacauagca

SEQ ID NO: 200391 - RNA, 19 nt, Human immunodeficiency virus 1 (HIV-1)
auugguaaaugugacagaa

SEQ ID NO: 200392 - RNA, 17 nt, Human immunodeficiency virus 1 (HIV-1)
auucgccacauaccuag

SEQ ID NO: 200393 - RNA, 15 nt, Human immunodeficiency virus 1 (HIV-1)
auuaguaguagcaau

SEQ ID NO: 200394 - RNA, 14 nt, Human immunodeficiency virus 1 (HIV-1)
auuugggucaggga

SEQ ID NO: 200395 - RNA, 22 nt, Human immunodeficiency virus 1 (HIV-1)
auuguaacgaggauuguggaac

SEQ ID NO: 200396 - RNA, 12 nt, Human immunodeficiency virus 1 (HIV-1)
caacaacugcug

SEQ ID NO: 200397 - RNA, 15 nt, Human immunodeficiency virus 1 (HIV-1)
cauaguaaucauaga

SEQ ID NO: 200398 - RNA, 19 nt, Human immunodeficiency virus 1 (HIV-1)
cauaguaaucauagaauau

SEQ ID NO: 200399 - RNA, 14 nt, Human immunodeficiency virus 1 (HIV-1)
caucuccuauggca

SEQ ID NO: 200400 - RNA, 17 nt, Human immunodeficiency virus 1 (HIV-1)
cauaacaaaagccuuag

SEQ ID NO: 200401 - RNA, 20 nt, Human immunodeficiency virus 1 (HIV-1)
ccacugcuuaagccucaaua

SEQ ID NO: 200402 - RNA, 23 nt, Human immunodeficiency virus 1 (HIV-1)
ccaaaaguuaaacaauggccauu

SEQ ID NO: 200403 - RNA, 17 nt, Human immunodeficiency virus 1 (HIV-1)
cauuagcccuauugaga

SEQ ID NO: 200404 - RNA, 18 nt, Human immunodeficiency virus 1 (HIV-1)
cauuagcccuauugagac

SEQ ID NO: 200405 - RNA, 16 nt, Human immunodeficiency virus 1 (HIV-1)
cauuaguaguagcaau

SEQ ID NO: 200406 - RNA, 16 nt, Human immunodeficiency virus 1 (HIV-1)
ccuggaaaaacaugga

SEQ ID NO: 200407 - RNA, 16 nt, Human immunodeficiency virus 1 (HIV-1)
cccucagauccugcau

SEQ ID NO: 200408 - RNA, 21 nt, Human immunodeficiency virus 1 (HIV-1)
ccauauguauguuucagggaa

SEQ ID NO: 200409 - RNA, 19 nt, Human immunodeficiency virus 1 (HIV-1)
gcauauaagcagcugcuuu

SEQ ID NO: 200410 - RNA, 17 nt, Human immunodeficiency virus 1 (HIV-1)
gcagaacuacacaccag

SEQ ID NO: 200411 - RNA, 18 nt, Human immunodeficiency virus 1 (HIV-1)
gcagaacuacacaccagg

SEQ ID NO: 200412 - RNA, 20 nt, Human immunodeficiency virus 1 (HIV-1)
gaucucuacaauacuuggca

SEQ ID NO: 200413 - RNA, 18 nt, Human immunodeficiency virus 1 (HIV-1)
gauaggguuauagaagua

SEQ ID NO: 200414 - RNA, 12 nt, Human immunodeficiency virus 1 (HIV-1)
gauauagcacac

SEQ ID NO: 200415 - RNA, 20 nt, Human immunodeficiency virus 1 (HIV-1)
cuugaucuguggaucuacca

SEQ ID NO: 200416 - RNA, 13 nt, Human immunodeficiency virus 1 (HIV-1)
cuuggcacuagca

SEQ ID NO: 200417 - RNA, 15 nt, Human immunodeficiency virus 1 (HIV-1)
gaacuacacaccagg

SEQ ID NO: 200418 - RNA, 20 nt, Human immunodeficiency virus 1 (HIV-1)
gaacuacacaccagggccag

SEQ ID NO: 200419 - RNA, 12 nt, Human immunodeficiency virus 1 (HIV-1)
gaacugcugaca

SEQ ID NO: 200420 - RNA, 20 nt, Human immunodeficiency virus 1 (HIV-1)
gaagaaugauacuaauacca

SEQ ID NO: 200421 - RNA, 20 nt, Human immunodeficiency virus 1 (HIV-1)
gaauaucaagcaggacauaa

SEQ ID NO: 200422 - RNA, 22 nt, Human immunodeficiency virus 1 (HIV-1)
gaauaucaagcaggacauaaca

SEQ ID NO: 200423 - RNA, 15 nt, Human immunodeficiency virus 1 (HIV-1)
gacaguaugaucaga

SEQ ID NO: 200424 - RNA, 14 nt, Human immunodeficiency virus 1 (HIV-1)
gacauaaagcuaua

SEQ ID NO: 200425 - RNA, 16 nt, Human immunodeficiency virus 1 (HIV-1)
gagauauagcacacaa

SEQ ID NO: 200426 - RNA, 15 nt, Human immunodeficiency virus 1 (HIV-1)
gagcaaucacaagua

SEQ ID NO: 200427 - RNA, 13 nt, Human immunodeficiency virus 1 (HIV-1)
gagcagaugauac

SEQ ID NO: 200428 - RNA, 13 nt, Human immunodeficiency virus 1 (HIV-1)
gagccugcauggg

SEQ ID NO: 200429 - RNA, 16 nt, Human immunodeficiency virus 1 (HIV-1)
gagccugcaugggaug

SEQ ID NO: 200430 - RNA, 15 nt, Human immunodeficiency virus 1 (HIV-1)
gagcuuguagagcua

SEQ ID NO: 200431 - RNA, 18 nt, Human immunodeficiency virus 1 (HIV-1)
gagcugagccagcagcag

SEQ ID NO: 200432 - RNA, 21 nt, Human immunodeficiency virus 1 (HIV-1)
gaggagcuuaagaaugaagcu

SEQ ID NO: 200433 - RNA, 12 nt, Human immunodeficiency virus 1 (HIV-1)
gacuaauagaaa

SEQ ID NO: 200434 - RNA, 17 nt, Human immunodeficiency virus 1 (HIV-1)
gacgagcugagccagca

SEQ ID NO: 200435 - RNA, 15 nt, Human immunodeficiency virus 1 (HIV-1)
gacccugaacuagca

SEQ ID NO: 200436 - RNA, 16 nt, Human immunodeficiency virus 1 (HIV-1)
gacccugaacuagcag

SEQ ID NO: 200437 - RNA, 15 nt, Human immunodeficiency virus 1 (HIV-1)
gaccuacaccuguca

SEQ ID NO: 200438 - RNA, 17 nt, Human immunodeficiency virus 1 (HIV-1)
gacaugguagaacagau

SEQ ID NO: 200439 - RNA, 17 nt, Human immunodeficiency virus 1 (HIV-1)
cuacaauacuuggcacu

SEQ ID NO: 200440 - RNA, 23 nt, Human immunodeficiency virus 1 (HIV-1)
cuaguaccaguugagccagauaa

SEQ ID NO: 200441 - RNA, 21 nt, Human immunodeficiency virus 1 (HIV-1)
cuauaccaauaguagcaauag

SEQ ID NO: 200442 - RNA, 15 nt, Human immunodeficiency virus 1 (HIV-1)
cuaucaaagcaguaa

SEQ ID NO: 200443 - RNA, 22 nt, Human immunodeficiency virus 1 (HIV-1)
cuaaaggaagcucuauuagaua

SEQ ID NO: 200444 - RNA, 16 nt, Human immunodeficiency virus 1 (HIV-1)
cugcauacaggagaaa

SEQ ID NO: 200445 - RNA, 19 nt, Human immunodeficiency virus 1 (HIV-1)
cuggaagggcuaauucacu

SEQ ID NO: 200446 - RNA, 14 nt, Human immunodeficiency virus 1 (HIV-1)
cugagccagcagca

SEQ ID NO: 200447 - RNA, 23 nt, Human immunodeficiency virus 1 (HIV-1)
cugagccagcagcagauagggug

SEQ ID NO: 200448 - RNA, 15 nt, Human immunodeficiency virus 1 (HIV-1)
cuucucuaucaaagc

SEQ ID NO: 200449 - RNA, 19 nt, Human immunodeficiency virus 1 (HIV-1)
cuuaagaaugaagcuguua

SEQ ID NO: 200450 - RNA, 13 nt, Human immunodeficiency virus 1 (HIV-1)
uaaguaguacaug

SEQ ID NO: 200451 - RNA, 19 nt, Human immunodeficiency virus 1 (HIV-1)
uaagggaaagaaugagacg

SEQ ID NO: 200452 - RNA, 21 nt, Human immunodeficiency virus 1 (HIV-1)
uaagacaaagaaaaauagaca

SEQ ID NO: 200453 - RNA, 20 nt, Human immunodeficiency virus 1 (HIV-1)
uaagacaguaugaucagaua

SEQ ID NO: 200454 - RNA, 18 nt, Human immunodeficiency virus 1 (HIV-1)
uaaaagcauuaguagaaa

SEQ ID NO: 200455 - RNA, 21 nt, Human immunodeficiency virus 1 (HIV-1)
uaaagcuauagguacaguauu

SEQ ID NO: 200456 - RNA, 23 nt, Human immunodeficiency virus 1 (HIV-1)
uaaagcuauagguacaguauuag

SEQ ID NO: 200457 - RNA, 14 nt, Human immunodeficiency virus 1 (HIV-1)
uaauaacaacauau

SEQ ID NO: 200458 - RNA, 15 nt, Human immunodeficiency virus 1 (HIV-1)
uaauaauagcaauag

SEQ ID NO: 200459 - RNA, 21 nt, Human immunodeficiency virus 1 (HIV-1)
uaaucaguuuaugggaucaaa

SEQ ID NO: 200460 - RNA, 20 nt, Human immunodeficiency virus 1 (HIV-1)
uaccaauaguagcaauagua

SEQ ID NO: 200461 - RNA, 17 nt, Human immunodeficiency virus 1 (HIV-1)
uaccaaugcugcuugug

SEQ ID NO: 200462 - RNA, 13 nt, Human immunodeficiency virus 1 (HIV-1)
uacacccugugag

SEQ ID NO: 200463 - RNA, 20 nt, Human immunodeficiency virus 1 (HIV-1)
uacaagcuaguaccaguuga

SEQ ID NO: 200464 - RNA, 11 nt, Human immunodeficiency virus 1 (HIV-1)
uaguagcaaua

SEQ ID NO: 200465 - RNA, 23 nt, Human immunodeficiency virus 1 (HIV-1)
uaguagcaauaauaauagcaaua

SEQ ID NO: 200466 - RNA, 21 nt, Human immunodeficiency virus 1 (HIV-1)
uaguugugugguccauaguaa

SEQ ID NO: 200467 - RNA, 21 nt, Human immunodeficiency virus 1 (HIV-1)
uauaaucaguuuaugggauca

SEQ ID NO: 200468 - RNA, 14 nt, Human immunodeficiency virus 1 (HIV-1)
uauguauguuucag

SEQ ID NO: 200469 - RNA, 13 nt, Human immunodeficiency virus 1 (HIV-1)
ucaaaaaguagug

SEQ ID NO: 200470 - RNA, 18 nt, Human immunodeficiency virus 1 (HIV-1)
ucaagaacugcugacauc

SEQ ID NO: 200471 - RNA, 17 nt, Human immunodeficiency virus 1 (HIV-1)
ucaaagccuaaagccau

SEQ ID NO: 200472 - RNA, 16 nt, Human immunodeficiency virus 1 (HIV-1)
ggaguggaagccauaa

SEQ ID NO: 200473 - RNA, 14 nt, Human immunodeficiency virus 1 (HIV-1)
ggagucuccauaga

SEQ ID NO: 200474 - RNA, 19 nt, Human immunodeficiency virus 1 (HIV-1)
ggccugggcgggacugggg

SEQ ID NO: 200475 - RNA, 18 nt, Human immunodeficiency virus 1 (HIV-1)
ggccuuauuaggacacau

SEQ ID NO: 200476 - RNA, 18 nt, Human immunodeficiency virus 1 (HIV-1)
ggagaaagagacuggcau

SEQ ID NO: 200477 - RNA, 18 nt, Human immunodeficiency virus 1 (HIV-1)
ggaaucuccuacaguauu

SEQ ID NO: 200478 - RNA, 14 nt, Human immunodeficiency virus 1 (HIV-1)
ggacagauaggguu

SEQ ID NO: 200479 - RNA, 18 nt, Human immunodeficiency virus 1 (HIV-1)
gccauugacagaagaaaa

SEQ ID NO: 200480 - RNA, 14 nt, Human immunodeficiency virus 1 (HIV-1)
gucugcauacagga

SEQ ID NO: 200481 - RNA, 15 nt, Human immunodeficiency virus 1 (HIV-1)
guauguuucagggaa

SEQ ID NO: 200482 - RNA, 13 nt, Human immunodeficiency virus 1 (HIV-1)
guauuacuuugac

SEQ ID NO: 200483 - RNA, 20 nt, Human immunodeficiency virus 1 (HIV-1)
guagaaauuuguacagagau

SEQ ID NO: 200484 - RNA, 19 nt, Human immunodeficiency virus 1 (HIV-1)
guagcaauacagcagcuac

SEQ ID NO: 200485 - RNA, 12 nt, Human immunodeficiency virus 1 (HIV-1)
aaaaacauggag

SEQ ID NO: 200486 - RNA, 13 nt, Human immunodeficiency virus 1 (HIV-1)
aaaaacauggagc

SEQ ID NO: 200487 - RNA, 22 nt, Human immunodeficiency virus 1 (HIV-1)
aaacaauggccauugacagaag

SEQ ID NO: 200488 - RNA, 15 nt, Human immunodeficiency virus 1 (HIV-1)
aaaaguagugugauu

SEQ ID NO: 200489 - RNA, 22 nt, Human immunodeficiency virus 1 (HIV-1)
aacaagguaggaucucuacaau

SEQ ID NO: 200490 - RNA, 22 nt, Human immunodeficiency virus 1 (HIV-1)
aacaacauauuggggucugcau

SEQ ID NO: 200491 - RNA, 14 nt, Human immunodeficiency virus 1 (HIV-1)
aaauuaaagccagg

SEQ ID NO: 200492 - RNA, 15 nt, Human immunodeficiency virus 1 (HIV-1)
aaauuaaccccacuc

SEQ ID NO: 200493 - RNA, 22 nt, Human immunodeficiency virus 1 (HIV-1)
aaagugcacugauuugaagaau

SEQ ID NO: 200494 - RNA, 21 nt, Human immunodeficiency virus 1 (HIV-1)
aagauauccuugaucugugga

SEQ ID NO: 200495 - RNA, 17 nt, Human immunodeficiency virus 1 (HIV-1)
aagauagaagaggccaa

SEQ ID NO: 200496 - RNA, 18 nt, Human immunodeficiency virus 1 (HIV-1)
aagacaguaugaucagau

SEQ ID NO: 200497 - RNA, 19 nt, Human immunodeficiency virus 1 (HIV-1)
aagaaaucuguugacucag

SEQ ID NO: 200498 - RNA, 20 nt, Human immunodeficiency virus 1 (HIV-1)
aagaaaugaguuugccagga

SEQ ID NO: 200499 - RNA, 13 nt, Human immunodeficiency virus 1 (HIV-1)
aagcagcugcuuu

SEQ ID NO: 200500 - RNA, 20 nt, Human immunodeficiency virus 1 (HIV-1)
aagcagcugcuuuuugccug

SEQ ID NO: 200501 - RNA, 20 nt, Human immunodeficiency virus 1 (HIV-1)
aagggacuuuccgcugggga

SEQ ID NO: 200502 - RNA, 14 nt, Human immunodeficiency virus 1 (HIV-1)
aaguaguacaagga

SEQ ID NO: 200503 - RNA, 21 nt, Human immunodeficiency virus 1 (HIV-1)
aauaaaggagagaacaccagc

SEQ ID NO: 200504 - RNA, 13 nt, Human immunodeficiency virus 1 (HIV-1)
aauaauagcaaua

SEQ ID NO: 200505 - RNA, 14 nt, Human immunodeficiency virus 1 (HIV-1)
aauuaaagccagga

SEQ ID NO: 200506 - RNA, 23 nt, Human immunodeficiency virus 1 (HIV-1)
acaaguagacccugaacuagcag

SEQ ID NO: 200507 - RNA, 18 nt, Human immunodeficiency virus 1 (HIV-1)
acucccaaagaagacaag

SEQ ID NO: 200508 - RNA, 21 nt, Human immunodeficiency virus 1 (HIV-1)
agaaaauuuuaacauguggaa

SEQ ID NO: 200509 - RNA, 14 nt, Human immunodeficiency virus 1 (HIV-1)
agacucugcuauaa

SEQ ID NO: 200510 - RNA, 17 nt, Human immunodeficiency virus 1 (HIV-1)
agcaauacagcagcuac

SEQ ID NO: 200511 - RNA, 14 nt, Human immunodeficiency virus 1 (HIV-1)
agcagaauaggcgu

SEQ ID NO: 200512 - RNA, 19 nt, Human immunodeficiency virus 1 (HIV-1)
agcagaugauacaguauua

SEQ ID NO: 200513 - RNA, 16 nt, Human immunodeficiency virus 1 (HIV-1)
acacaaggcuacuucc

SEQ ID NO: 200514 - RNA, 16 nt, Human immunodeficiency virus 1 (HIV-1)
acagccgccuagcauu

SEQ ID NO: 200515 - RNA, 20 nt, Human immunodeficiency virus 1 (HIV-1)
acacaucccacuaggggaug

SEQ ID NO: 200516 - RNA, 14 nt, Human immunodeficiency virus 1 (HIV-1)
acacaugccugugu

SEQ ID NO: 200517 - RNA, 20 nt, Human immunodeficiency virus 1 (HIV-1)
acauaguuagcccuaggugu

SEQ ID NO: 200518 - RNA, 16 nt, Human immunodeficiency virus 1 (HIV-1)
acaguaugaucagaua

SEQ ID NO: 200519 - RNA, 14 nt, Human immunodeficiency virus 1 (HIV-1)
acagucagacucau

SEQ ID NO: 200520 - RNA, 18 nt, Human immunodeficiency virus 1 (HIV-1)
acagucagacucaucaag

SEQ ID NO: 200521 - RNA, 23 nt, Human immunodeficiency virus 1 (HIV-1)
acagucagacucaucaagcuucu

SEQ ID NO: 200522 - RNA, 16 nt, Human immunodeficiency virus 1 (HIV-1)
accaauaguagcaaua

SEQ ID NO: 200523 - RNA, 16 nt, Human immunodeficiency virus 1 (HIV-1)
caagcuaguaccaguu

SEQ ID NO: 200524 - RNA, 18 nt, Human immunodeficiency virus 1 (HIV-1)
cacuaggggaugcuagau

SEQ ID NO: 200525 - RNA, 22 nt, Human immunodeficiency virus 1 (HIV-1)
cacuaugaaagcccucauccaa

SEQ ID NO: 200526 - RNA, 20 nt, Human immunodeficiency virus 1 (HIV-1)
caggaagauggaaaccaaaa

SEQ ID NO: 200527 - RNA, 22 nt, Human immunodeficiency virus 1 (HIV-1)
cagcuuguuacacccugugagc

SEQ ID NO: 200528 - RNA, 17 nt, Human immunodeficiency virus 1 (HIV-1)
cagcugcuuuuugccug

SEQ ID NO: 200529 - RNA, 19 nt, Human immunodeficiency virus 1 (HIV-1)
cagcaucucgagaccugga

SEQ ID NO: 200530 - RNA, 20 nt, Human immunodeficiency virus 1 (HIV-1)
cagccauagcaguagcugag

SEQ ID NO: 200531 - RNA, 16 nt, Human immunodeficiency virus 1 (HIV-1)
cagccuaaaacugcuu

SEQ ID NO: 200532 - RNA, 18 nt, Human immunodeficiency virus 1 (HIV-1)
cagcgacgaagagcucau

SEQ ID NO: 200533 - RNA, 22 nt, Human immunodeficiency virus 1 (HIV-1)
cagcgacgaagagcucaucaga

SEQ ID NO: 200534 - RNA, 16 nt, Human immunodeficiency virus 1 (HIV-1)
cagcagcagauagggu

SEQ ID NO: 200535 - RNA, 23 nt, Human immunodeficiency virus 1 (HIV-1)
cagauaggguuauagaaguagua

SEQ ID NO: 200536 - RNA, 16 nt, Human immunodeficiency virus 1 (HIV-1)
cagauccugcauauaa

SEQ ID NO: 200537 - RNA, 15 nt, Human immunodeficiency virus 1 (HIV-1)
cagaugauacaguau

SEQ ID NO: 200538 - RNA, 14 nt, Human immunodeficiency virus 1 (HIV-1)
caaaguaagacagu

SEQ ID NO: 200539 - RNA, 16 nt, Human immunodeficiency virus 1 (HIV-1)
caaaguaagacaguau

SEQ ID NO: 200540 - RNA, 17 nt, Human immunodeficiency virus 1 (HIV-1)
auuuuaacauguggaaa

SEQ ID NO: 200541 - RNA, 18 nt, Human immunodeficiency virus 1 (HIV-1)
caagaaguaguauuggua

SEQ ID NO: 200542 - RNA, 18 nt, Human immunodeficiency virus 1 (HIV-1)
caagaaauggagccagua

SEQ ID NO: 200543 - RNA, 19 nt, Human immunodeficiency virus 1 (HIV-1)
agguggagagagagacaga

SEQ ID NO: 200544 - RNA, 17 nt, Human immunodeficiency virus 1 (HIV-1)
aggagcuuguagagcua

SEQ ID NO: 200545 - RNA, 19 nt, Human immunodeficiency virus 1 (HIV-1)
aggagcuuguagagcuauu

SEQ ID NO: 200546 - RNA, 15 nt, Human immunodeficiency virus 1 (HIV-1)
auaacaaaagccuua

SEQ ID NO: 200547 - RNA, 22 nt, Human immunodeficiency virus 1 (HIV-1)
aguuaaacaauggccauugaca

SEQ ID NO: 200548 - RNA, 20 nt, Human immunodeficiency virus 1 (HIV-1)
agugcuguuagcuugcucaa

SEQ ID NO: 200549 - RNA, 19 nt, Human immunodeficiency virus 1 (HIV-1)
aguggucaaaaaguagugu

SEQ ID NO: 200550 - RNA, 19 nt, Human immunodeficiency virus 1 (HIV-1)
aguagcaauacagcagcua

SEQ ID NO: 200551 - RNA, 17 nt, Human immunodeficiency virus 1 (HIV-1)
aguagcaauaguagcau

SEQ ID NO: 200552 - RNA, 21 nt, Human immunodeficiency virus 1 (HIV-1)
aguaaaauuaaagccaggaau

SEQ ID NO: 200553 - RNA, 12 nt, Human immunodeficiency virus 1 (HIV-1)
augaagcuguua

SEQ ID NO: 200554 - RNA, 14 nt, Human immunodeficiency virus 1 (HIV-1)
augauacaguauua

SEQ ID NO: 200555 - RNA, 23 nt, Human immunodeficiency virus 1 (HIV-1)
auccuugaucuguggaucuacca

SEQ ID NO: 200556 - RNA, 19 nt, Human immunodeficiency virus 1 (HIV-1)
auaguugugugguccauag

SEQ ID NO: 200557 - RNA, 20 nt, Human immunodeficiency virus 1 (HIV-1)
auaggguuauagaaguagua

SEQ ID NO: 200558 - RNA, 12 nt, Human immunodeficiency virus 1 (HIV-1)
auaguagcaaua

SEQ ID NO: 200559 - RNA, 15 nt, Human immunodeficiency virus 1 (HIV-1)
auaauguuugggcca

SEQ ID NO: 200560 - RNA, 13 nt, Human immunodeficiency virus 1 (HIV-1)
auaaucaguuuau

SEQ ID NO: 200561 - RNA, 23 nt, Human immunodeficiency virus 1 (HIV-1)
cgagcccucagauccugcauaua

SEQ ID NO: 200562 - RNA, 18 nt, Human immunodeficiency virus 1 (HIV-1)
ccuggcuagaagcacaag

SEQ ID NO: 200563 - RNA, 22 nt, Human immunodeficiency virus 1 (HIV-1)
ccuauugagacuguaccaguaa

SEQ ID NO: 200564 - RNA, 19 nt, Human immunodeficiency virus 1 (HIV-1)
ccuauaccaauaguagcaa

SEQ ID NO: 200565 - RNA, 20 nt, Human immunodeficiency virus 1 (HIV-1)
cccacucuguguuaguuuaa

SEQ ID NO: 200566 - RNA, 14 nt, Human immunodeficiency virus 1 (HIV-1)
caucagaacaguca

SEQ ID NO: 200567 - RNA, 22 nt, Human immunodeficiency virus 1 (HIV-1)
caucacguggcccgagagcugc

SEQ ID NO: 200568 - RNA, 21 nt, Human immunodeficiency virus 1 (HIV-1)
caggagcagaugauacaguau

SEQ ID NO: 200569 - RNA, 17 nt, Human immunodeficiency virus 1 (HIV-1)
caggaguggaagccaua

SEQ ID NO: 200570 - RNA, 18 nt, Human immunodeficiency virus 1 (HIV-1)
caggaguggaagccauaa

SEQ ID NO: 200571 - RNA, 23 nt, Human immunodeficiency virus 1 (HIV-1)
caucccacuaggggaugcuagau

SEQ ID NO: 200572 - RNA, 13 nt, Human immunodeficiency virus 1 (HIV-1)
ccacucuguguua

SEQ ID NO: 200573 - RNA, 17 nt, Human immunodeficiency virus 1 (HIV-1)
ccaguugagccagauaa

SEQ ID NO: 200574 - RNA, 17 nt, Human immunodeficiency virus 1 (HIV-1)
ccacagccauagcagua

SEQ ID NO: 200575 - RNA, 20 nt, Human immunodeficiency virus 1 (HIV-1)
ccaccacucuauuuugugca

SEQ ID NO: 200576 - RNA, 14 nt, Human immunodeficiency virus 1 (HIV-1)
cuucaagaacugcu

SEQ ID NO: 200577 - RNA, 18 nt, Human immunodeficiency virus 1 (HIV-1)
cuucaagaacugcugaca

SEQ ID NO: 200578 - RNA, 16 nt, Human immunodeficiency virus 1 (HIV-1)
cugcuuuuugccugua

SEQ ID NO: 200579 - RNA, 21 nt, Human immunodeficiency virus 1 (HIV-1)
cugauuagcagaacuacacac

SEQ ID NO: 200580 - RNA, 20 nt, Human immunodeficiency virus 1 (HIV-1)
cuggcauuugggucagggag

SEQ ID NO: 200581 - RNA, 17 nt, Human immunodeficiency virus 1 (HIV-1)
cuggcuagaagcacaag

SEQ ID NO: 200582 - RNA, 23 nt, Human immunodeficiency virus 1 (HIV-1)
cuggggaguggcgagcccucaga

SEQ ID NO: 200583 - RNA, 23 nt, Human immunodeficiency virus 1 (HIV-1)
cugaccuuuggauggugcuacaa

SEQ ID NO: 200584 - RNA, 19 nt, Human immunodeficiency virus 1 (HIV-1)
cugagccugggagcucucu

SEQ ID NO: 200585 - RNA, 19 nt, Human immunodeficiency virus 1 (HIV-1)
cuaauaccaauaguaguag

SEQ ID NO: 200586 - RNA, 20 nt, Human immunodeficiency virus 1 (HIV-1)
cuauaagaaaggccuuauua

SEQ ID NO: 200587 - RNA, 12 nt, Human immunodeficiency virus 1 (HIV-1)
cuagaagcacaa

SEQ ID NO: 200588 - RNA, 19 nt, Human immunodeficiency virus 1 (HIV-1)
cuaauucacucccaaagaa

SEQ ID NO: 200589 - RNA, 14 nt, Human immunodeficiency virus 1 (HIV-1)
gccuguacuggguc

SEQ ID NO: 200590 - RNA, 18 nt, Human immunodeficiency virus 1 (HIV-1)
gccauagcaguagcugag

SEQ ID NO: 200591 - RNA, 17 nt, Human immunodeficiency virus 1 (HIV-1)
gcauccggaguacuuca

SEQ ID NO: 200592 - RNA, 13 nt, Human immunodeficiency virus 1 (HIV-1)
gcgggacugggga

SEQ ID NO: 200593 - RNA, 22 nt, Human immunodeficiency virus 1 (HIV-1)
gcggagacagcgacgaagagcu

SEQ ID NO: 200594 - RNA, 18 nt, Human immunodeficiency virus 1 (HIV-1)
gccuuaggcaucuccuau

SEQ ID NO: 200595 - RNA, 14 nt, Human immunodeficiency virus 1 (HIV-1)
gccuugagugcuuc

SEQ ID NO: 200596 - RNA, 20 nt, Human immunodeficiency virus 1 (HIV-1)
gcuauucgccacauaccuag

SEQ ID NO: 200597 - RNA, 15 nt, Human immunodeficiency virus 1 (HIV-1)
gcucaaugccacagc

SEQ ID NO: 200598 - RNA, 15 nt, Human immunodeficiency virus 1 (HIV-1)
ggcccgagagcugca

SEQ ID NO: 200599 - RNA, 22 nt, Human immunodeficiency virus 1 (HIV-1)
ggcccgagagcugcauccggag

SEQ ID NO: 200600 - RNA, 15 nt, Human immunodeficiency virus 1 (HIV-1)
ggacuuuccagggag

SEQ ID NO: 200601 - RNA, 16 nt, Human immunodeficiency virus 1 (HIV-1)
ggacuggaagggcuaa

SEQ ID NO: 200602 - RNA, 20 nt, Human immunodeficiency virus 1 (HIV-1)
ggaucaaagccuaaagccau

SEQ ID NO: 200603 - RNA, 20 nt, Human immunodeficiency virus 1 (HIV-1)
gguccauaguaaucauagaa

SEQ ID NO: 200604 - RNA, 16 nt, Human immunodeficiency virus 1 (HIV-1)
gguaccuguguggaag

SEQ ID NO: 200605 - RNA, 18 nt, Human immunodeficiency virus 1 (HIV-1)
guaaaugugacagaaaau

SEQ ID NO: 200606 - RNA, 17 nt, Human immunodeficiency virus 1 (HIV-1)
guaaaauuaaagccagg

SEQ ID NO: 200607 - RNA, 23 nt, Human immunodeficiency virus 1 (HIV-1)
gauccuuggcacuuaucugggac

SEQ ID NO: 200608 - RNA, 18 nt, Human immunodeficiency virus 1 (HIV-1)
gaucuaccacacacaagg

SEQ ID NO: 200609 - RNA, 13 nt, Human immunodeficiency virus 1 (HIV-1)
gauacaguauuag

SEQ ID NO: 200610 - RNA, 20 nt, Human immunodeficiency virus 1 (HIV-1)
gauggugcuacaagcuagua

SEQ ID NO: 200611 - RNA, 22 nt, Human immunodeficiency virus 1 (HIV-1)
gauugguaauaacaacauauug

SEQ ID NO: 200612 - RNA, 13 nt, Human immunodeficiency virus 1 (HIV-1)
gacuguaccagua

SEQ ID NO: 200613 - RNA, 18 nt, Human immunodeficiency virus 1 (HIV-1)
aaauauuaagacaaagaa

SEQ ID NO: 200614 - RNA, 17 nt, Human immunodeficiency virus 1 (HIV-1)
gagagacagagacagau

SEQ ID NO: 200615 - RNA, 14 nt, Human immunodeficiency virus 1 (HIV-1)
gagagaacaccagc

SEQ ID NO: 200616 - RNA, 12 nt, Human immunodeficiency virus 1 (HIV-1)
gagaacaccagc

SEQ ID NO: 200617 - RNA, 16 nt, Human immunodeficiency virus 1 (HIV-1)
gaagcaaccaccacuc

SEQ ID NO: 200618 - RNA, 16 nt, Human immunodeficiency virus 1 (HIV-1)
gaagcccucaaauauu

SEQ ID NO: 200619 - RNA, 14 nt, Human immunodeficiency virus 1 (HIV-1)
gaauagugcuguua

SEQ ID NO: 200620 - RNA, 12 nt, Human immunodeficiency virus 1 (HIV-1)
aaauaaaagcau

SEQ ID NO: 200621 - RNA, 22 nt, Human immunodeficiency virus 1 (HIV-1)
aaagccaggaauggauggccca

SEQ ID NO: 200622 - RNA, 13 nt, Human immunodeficiency virus 1 (HIV-1)
aaaggauuuugcu

SEQ ID NO: 200623 - RNA, 16 nt, Human immunodeficiency virus 1 (HIV-1)
aaaggauuuugcuaua

SEQ ID NO: 200624 - RNA, 13 nt, Human immunodeficiency virus 1 (HIV-1)
aaaguaagacagu

SEQ ID NO: 200625 - RNA, 22 nt, Human immunodeficiency virus 1 (HIV-1)
aaugauacuaauaccaauagua

SEQ ID NO: 200626 - RNA, 14 nt, Human immunodeficiency virus 1 (HIV-1)
aaugccacagccau

SEQ ID NO: 200627 - RNA, 17 nt, Human immunodeficiency virus 1 (HIV-1)
aauucacucccaaagaa

SEQ ID NO: 200628 - RNA, 16 nt, Human immunodeficiency virus 1 (HIV-1)
aagggcuaauucacuc

SEQ ID NO: 200629 - RNA, 14 nt, Human immunodeficiency virus 1 (HIV-1)
aaguacacauccca

SEQ ID NO: 200630 - RNA, 19 nt, Human immunodeficiency virus 1 (HIV-1)
aaguggucaaaaaguagug

SEQ ID NO: 200631 - RNA, 20 nt, Human immunodeficiency virus 1 (HIV-1)
aagucagccuaaaacugcuu

SEQ ID NO: 200632 - RNA, 13 nt, Human immunodeficiency virus 1 (HIV-1)
aagccuaaagcca

SEQ ID NO: 200633 - RNA, 21 nt, Human immunodeficiency virus 1 (HIV-1)
aagacaagauauccuugaucu

SEQ ID NO: 200634 - RNA, 21 nt, Human immunodeficiency virus 1 (HIV-1)
aagaauucugcaacaacugcu

SEQ ID NO: 200635 - RNA, 14 nt, Human immunodeficiency virus 1 (HIV-1)
aagaauagugcugu

SEQ ID NO: 200636 - RNA, 18 nt, Human immunodeficiency virus 1 (HIV-1)
aagcuauagguacaguau

SEQ ID NO: 200637 - RNA, 19 nt, Human immunodeficiency virus 1 (HIV-1)
aaggagagaacaccagcuu

SEQ ID NO: 200638 - RNA, 16 nt, Human immunodeficiency virus 1 (HIV-1)
aauauuaagacaaaga

SEQ ID NO: 200639 - RNA, 14 nt, Human immunodeficiency virus 1 (HIV-1)
aauaucaagcagga

SEQ ID NO: 200640 - RNA, 22 nt, Human immunodeficiency virus 1 (HIV-1)
aauaucaagcaggacauaacaa

SEQ ID NO: 200641 - RNA, 13 nt, Human immunodeficiency virus 1 (HIV-1)
aauacagcagcua

SEQ ID NO: 200642 - RNA, 19 nt, Human immunodeficiency virus 1 (HIV-1)
aauacagcagcuaccaaug

SEQ ID NO: 200643 - RNA, 20 nt, Human immunodeficiency virus 1 (HIV-1)
aauacagcagcuaccaaugc

SEQ ID NO: 200644 - RNA, 17 nt, Human immunodeficiency virus 1 (HIV-1)
aacuaauucaucuguau

SEQ ID NO: 200645 - RNA, 23 nt, Human immunodeficiency virus 1 (HIV-1)
aaccuauaccaauaguagcaaua

SEQ ID NO: 200646 - RNA, 18 nt, Human immunodeficiency virus 1 (HIV-1)
aagaaaugaguuugccag

SEQ ID NO: 200647 - RNA, 13 nt, Human immunodeficiency virus 1 (HIV-1)
aaccccacucugu

SEQ ID NO: 200648 - RNA, 19 nt, Human immunodeficiency virus 1 (HIV-1)
aacauauuggggucugcau

SEQ ID NO: 200649 - RNA, 18 nt, Human immunodeficiency virus 1 (HIV-1)
aacauggagcaaucacaa

SEQ ID NO: 200650 - RNA, 20 nt, Human immunodeficiency virus 1 (HIV-1)
uggcuuagggcaacauaucu

SEQ ID NO: 200651 - RNA, 12 nt, Human immunodeficiency virus 1 (HIV-1)
ugggucagggag

SEQ ID NO: 200652 - RNA, 18 nt, Human immunodeficiency virus 1 (HIV-1)
uggagaaaggagagauaa

SEQ ID NO: 200653 - RNA, 16 nt, Human immunodeficiency virus 1 (HIV-1)
uggaagaaaucuguug

SEQ ID NO: 200654 - RNA, 19 nt, Human immunodeficiency virus 1 (HIV-1)
ugcaucagaugcuaaagca

SEQ ID NO: 200655 - RNA, 18 nt, Human immunodeficiency virus 1 (HIV-1)
ugcauccggaguacuuca

SEQ ID NO: 200656 - RNA, 20 nt, Human immunodeficiency virus 1 (HIV-1)
uucugcaacaacugcuguuu

SEQ ID NO: 200657 - RNA, 23 nt, Human immunodeficiency virus 1 (HIV-1)
uccauggcuuagggcaacauauc

SEQ ID NO: 200658 - RNA, 22 nt, Human immunodeficiency virus 1 (HIV-1)
uccgcuggggacuuuccaggga

SEQ ID NO: 200659 - RNA, 23 nt, Human immunodeficiency virus 1 (HIV-1)
ucacguggcccgagagcugcauc

SEQ ID NO: 200660 - RNA, 16 nt, Human immunodeficiency virus 1 (HIV-1)
ucagaugcuaaagcau

SEQ ID NO: 200661 - RNA, 13 nt, Human immunodeficiency virus 1 (HIV-1)
ucacaaguagcaa

SEQ ID NO: 200662 - RNA, 24 nt, Human immunodeficiency virus 1 (HIV-1)
ucacaaguagcaauacagcagcua

SEQ ID NO: 200663 - RNA, 17 nt, Human immunodeficiency virus 1 (HIV-1)
ucaaaaaguagugugau

SEQ ID NO: 200664 - RNA, 22 nt, Human immunodeficiency virus 1 (HIV-1)
guaccaguaaaauuaaagccag

SEQ ID NO: 200665 - RNA, 22 nt, Human immunodeficiency virus 1 (HIV-1)
uaaagcuauagguacaguauua

SEQ ID NO: 200666 - RNA, 14 nt, Human immunodeficiency virus 1 (HIV-1)
uaaaggaagcucua

SEQ ID NO: 200667 - RNA, 15 nt, Human immunodeficiency virus 1 (HIV-1)
uaaaauuaaagccag

SEQ ID NO: 200668 - RNA, 16 nt, Human immunodeficiency virus 1 (HIV-1)
uaaaaaguguugcuuu

SEQ ID NO: 200669 - RNA, 13 nt, Human immunodeficiency virus 1 (HIV-1)
uaaaacaccauau

SEQ ID NO: 200670 - RNA, 20 nt, Human immunodeficiency virus 1 (HIV-1)
uacacccugugagccugcau

SEQ ID NO: 200671 - RNA, 12 nt, Human immunodeficiency virus 1 (HIV-1)
uaaucauagaau

SEQ ID NO: 200672 - RNA, 14 nt, Human immunodeficiency virus 1 (HIV-1)
uaccaauaguagua

SEQ ID NO: 200673 - RNA, 14 nt, Human immunodeficiency virus 1 (HIV-1)
uagacuaauagaaa

SEQ ID NO: 200674 - RNA, 16 nt, Human immunodeficiency virus 1 (HIV-1)
uacuucaagaacugcu

SEQ ID NO: 200675 - RNA, 21 nt, Human immunodeficiency virus 1 (HIV-1)
uacuucaagaacugcugacau

SEQ ID NO: 200676 - RNA, 17 nt, Human immunodeficiency virus 1 (HIV-1)
uagauugguaauaacaa

SEQ ID NO: 200677 - RNA, 14 nt, Human immunodeficiency virus 1 (HIV-1)
uagcagaacuacac

SEQ ID NO: 200678 - RNA, 15 nt, Human immunodeficiency virus 1 (HIV-1)
uagcauuaguaguag

SEQ ID NO: 200679 - RNA, 18 nt, Human immunodeficiency virus 1 (HIV-1)
uagcauuaguaguagcaa

SEQ ID NO: 200680 - RNA, 16 nt, Human immunodeficiency virus 1 (HIV-1)
uagcaauacagcagcu

SEQ ID NO: 200681 - RNA, 22 nt, Human immunodeficiency virus 1 (HIV-1)
uagcaauacagcagcuaccaau

SEQ ID NO: 200682 - RNA, 16 nt, Human immunodeficiency virus 1 (HIV-1)
uaggugugaauaucaa

SEQ ID NO: 200683 - RNA, 18 nt, Human immunodeficiency virus 1 (HIV-1)
uaguacaaggagcuugua

SEQ ID NO: 200684 - RNA, 20 nt, Human immunodeficiency virus 1 (HIV-1)
uagugugauuggauggccua

SEQ ID NO: 200685 - RNA, 15 nt, Human immunodeficiency virus 1 (HIV-1)
uagggcaacauaucu

SEQ ID NO: 200686 - RNA, 22 nt, Human immunodeficiency virus 1 (HIV-1)
uaggcaucuccuauggcaggaa

SEQ ID NO: 200687 - RNA, 13 nt, Human immunodeficiency virus 1 (HIV-1)
uagcuugcucaau

SEQ ID NO: 200688 - RNA, 10 nt, Homo sapiens
ucucauuucu

SEQ ID NO: 200689 - RNA, 18 nt, Homo sapiens
aaaacauuaagaaaauca

SEQ ID NO: 200690 - RNA, 16 nt, Homo sapiens
agguaaggugagggaa

SEQ ID NO: 200691 - RNA, 20 nt, Homo sapiens
uacauucugcaagcacaucu

SEQ ID NO: 200692 - RNA, 14 nt, Homo sapiens
caugaucaucacaa

SEQ ID NO: 200693 - RNA, 12 nt, Homo sapiens
uaguaacaugug

SEQ ID NO: 200694 - RNA, 13 nt, Homo sapiens
agcucaucucagc

SEQ ID NO: 200695 - RNA, 18 nt, Homo sapiens
uucauauauuuguaugau

SEQ ID NO: 200696 - RNA, 13 nt, Homo sapiens
agacuaaggccau

SEQ ID NO: 200697 - RNA, 22 nt, Homo sapiens
aggaauauauggcagaguugua

SEQ ID NO: 200698 - RNA, 16 nt, Homo sapiens
ucagggauagcacuga

SEQ ID NO: 200699 - RNA, 22 nt, Homo sapiens
agaaauugcauuuccugacaga

SEQ ID NO: 200700 - RNA, 23 nt, Homo sapiens
gagacacuauuuaucugugcaaa

SEQ ID NO: 200701 - RNA, 18 nt, Homo sapiens
ucaaccugggcaaagccu

SEQ ID NO: 200702 - RNA, 14 nt, Homo sapiens
cugggcacagucag

SEQ ID NO: 200703 - RNA, 14 nt, Homo sapiens
guuccccacugaca

SEQ ID NO: 200704 - RNA, 14 nt, Homo sapiens
cagucuuccauuug

SEQ ID NO: 200705 - RNA, 19 nt, Homo sapiens
aggagggguuaaagcugcc

SEQ ID NO: 200706 - RNA, 16 nt, Homo sapiens
uuguuccccacugaca

SEQ ID NO: 200707 - RNA, 14 nt, Homo sapiens
gcggaguugugcac

SEQ ID NO: 200708 - RNA, 18 nt, Homo sapiens
aauguuacauuauuauca

SEQ ID NO: 200709 - RNA, 20 nt, Homo sapiens
acccggcugcagaggccaga

SEQ ID NO: 200710 - RNA, 22 nt, Homo sapiens
caauucauauauuugaagugga

SEQ ID NO: 200711 - RNA, 13 nt, Homo sapiens
cccauggccacuu

SEQ ID NO: 200712 - RNA, 16 nt, Homo sapiens
agacugggcugaggga

SEQ ID NO: 200713 - RNA, 10 nt, Homo sapiens
uaugcaaaag

SEQ ID NO: 200714 - RNA, 19 nt, Homo sapiens
uugccauuaaacuuaccug

SEQ ID NO: 200715 - RNA, 15 nt, Homo sapiens
uguacuugccuuauu

SEQ ID NO: 200716 - RNA, 16 nt, Homo sapiens
ugggaccacagacuca

SEQ ID NO: 200717 - RNA, 19 nt, Homo sapiens
gcacugagcaaagcauuga

SEQ ID NO: 200718 - RNA, 20 nt, Homo sapiens
caaagcaggggaguaugcaa

SEQ ID NO: 200719 - RNA, 12 nt, Homo sapiens
ucaauccagcua

SEQ ID NO: 200720 - RNA, 14 nt, Homo sapiens
gauucaguguuaaa

SEQ ID NO: 200721 - RNA, 14 nt, Homo sapiens
acuuccauuugcuu

SEQ ID NO: 200722 - RNA, 22 nt, Homo sapiens
uccuaacaggauuagacaguca

SEQ ID NO: 200723 - RNA, 16 nt, Homo sapiens
ugauccacuucucuca

SEQ ID NO: 200724 - RNA, 22 nt, Homo sapiens
cugaagaacaguaacugccauc

SEQ ID NO: 200725 - RNA, 14 nt, Homo sapiens
aaaauuaugccaua

SEQ ID NO: 200726 - RNA, 13 nt, Homo sapiens
uaccggcaauuuc

SEQ ID NO: 200727 - RNA, 22 nt, Homo sapiens
uaacauaauuuguacauaugua

SEQ ID NO: 200728 - RNA, 14 nt, Homo sapiens
cuuaguauuugcau

SEQ ID NO: 200729 - RNA, 15 nt, Homo sapiens
aucgcugucaucuca

SEQ ID NO: 200730 - RNA, 20 nt, Homo sapiens
gccugcggaguugugcacgu

SEQ ID NO: 200731 - RNA, 16 nt, Homo sapiens
cucuaagggaccucaa

SEQ ID NO: 200732 - RNA, 13 nt, Homo sapiens
agcccucaucccg

SEQ ID NO: 200733 - RNA, 20 nt, Homo sapiens
aaucuucuugauccacuucu

SEQ ID NO: 200734 - RNA, 19 nt, Homo sapiens
gcaguccugccucagccuc

SEQ ID NO: 200735 - RNA, 20 nt, Homo sapiens
ggaaaauaaaucaaugcuau

SEQ ID NO: 200736 - RNA, 24 nt, Homo sapiens
ucuucaccauuuggcaaugccauc

SEQ ID NO: 200737 - RNA, 15 nt, Homo sapiens
caggaaccucagggc

SEQ ID NO: 200738 - RNA, 15 nt, Homo sapiens
cucuuuuucuagucu

SEQ ID NO: 200739 - RNA, 13 nt, Homo sapiens
ucuucaagcagau

SEQ ID NO: 200740 - RNA, 17 nt, Homo sapiens
gaccuguaaucauauaa

SEQ ID NO: 200741 - RNA, 19 nt, Homo sapiens
cugucucuuucaugaguuu

SEQ ID NO: 200742 - RNA, 15 nt, Homo sapiens
gaucuuugacucuuu

SEQ ID NO: 200743 - RNA, 22 nt, Homo sapiens
uauuuugccagugggaacuccu

SEQ ID NO: 200744 - RNA, 14 nt, Homo sapiens
aauauaacugccuu

SEQ ID NO: 200745 - RNA, 10 nt, Homo sapiens
ucaaagccag

SEQ ID NO: 200746 - RNA, 20 nt, Homo sapiens
gaaucaggaauauuuuccaa

SEQ ID NO: 200747 - RNA, 19 nt, Homo sapiens
ugcccaggaaccucagggc

SEQ ID NO: 200748 - RNA, 13 nt, Homo sapiens
cacugcauaccaa

SEQ ID NO: 200749 - RNA, 15 nt, Homo sapiens
caaauuaaggcauaa

SEQ ID NO: 200750 - RNA, 16 nt, Homo sapiens
uucauaaguauuucaa

SEQ ID NO: 200751 - RNA, 20 nt, Homo sapiens
uuuguaucauuaugaaguca

SEQ ID NO: 200752 - RNA, 22 nt, Homo sapiens
aacaugguaaacgcugucccua

SEQ ID NO: 200753 - RNA, 13 nt, Homo sapiens
uaaguuucacuga

SEQ ID NO: 200754 - RNA, 17 nt, Homo sapiens
auaguggggucagggcu

SEQ ID NO: 200755 - RNA, 18 nt, Homo sapiens
ucaagaugagagaacugg

SEQ ID NO: 200756 - RNA, 17 nt, Homo sapiens
acagagugcauugugag

SEQ ID NO: 200757 - RNA, 16 nt, Homo sapiens
auggcacccaugcacc

SEQ ID NO: 200758 - RNA, 16 nt, Homo sapiens
uaaacgcugucccuag

SEQ ID NO: 200759 - RNA, 17 nt, Homo sapiens
cggcucucaccaguggc

SEQ ID NO: 200760 - RNA, 14 nt, Homo sapiens
gguuuaggucaaga

SEQ ID NO: 200761 - RNA, 17 nt, Homo sapiens
cauagcaagauugcuua

SEQ ID NO: 200762 - RNA, 16 nt, Homo sapiens
uaucucaaacuacugg

SEQ ID NO: 200763 - RNA, 12 nt, Homo sapiens
cccccugugcag

SEQ ID NO: 200764 - RNA, 23 nt, Homo sapiens
cagagaggacuguugacauccaa

SEQ ID NO: 200765 - RNA, 19 nt, Homo sapiens
agaccugacaccuuucaua

SEQ ID NO: 200766 - RNA, 21 nt, Homo sapiens
ugguauaaacguccuacugua

SEQ ID NO: 200767 - RNA, 16 nt, Homo sapiens
acagaacuaagaugau

SEQ ID NO: 200768 - RNA, 16 nt, Homo sapiens
ugucccucacuguuga

SEQ ID NO: 200769 - RNA, 22 nt, Homo sapiens
augccacacggcucucaccagu

SEQ ID NO: 200770 - RNA, 12 nt, Homo sapiens
ugcccagugugu

SEQ ID NO: 200771 - RNA, 18 nt, Homo sapiens
aaaucuaugaaauaucau

SEQ ID NO: 200772 - RNA, 19 nt, Homo sapiens
cauuaccgcguuguaaaau

SEQ ID NO: 200773 - RNA, 14 nt, Homo sapiens
aaaacacugugcac

SEQ ID NO: 200774 - RNA, 14 nt, Homo sapiens
uauccaacaugugc

SEQ ID NO: 200775 - RNA, 16 nt, Homo sapiens
gucgaacaauucauau

SEQ ID NO: 200776 - RNA, 22 nt, Homo sapiens
ucaaguuggcuucuaaucaaag

SEQ ID NO: 200777 - RNA, 22 nt, Homo sapiens
acauccucugucuauuugagac

SEQ ID NO: 200778 - RNA, 20 nt, Homo sapiens
aaagaccugacaccuuucau

SEQ ID NO: 200779 - RNA, 21 nt, Homo sapiens
acccagucagaguugugcaca

SEQ ID NO: 200780 - RNA, 17 nt, Homo sapiens
auguuugucucauccca

SEQ ID NO: 200781 - RNA, 21 nt, Homo sapiens
uacuuuugcccuuugauuaaa

SEQ ID NO: 200782 - RNA, 20 nt, Homo sapiens
ccucuuuuucuagucuucau

SEQ ID NO: 200783 - RNA, 9 nt, Homo sapiens
gauggagcu

SEQ ID NO: 200784 - RNA, 16 nt, Homo sapiens
uaaagcugaaaacugc

SEQ ID NO: 200785 - RNA, 21 nt, Homo sapiens
uacugggacugugcucagaga

SEQ ID NO: 200786 - RNA, 10 nt, Homo sapiens
cccagugugu

SEQ ID NO: 200787 - RNA, 20 nt, Homo sapiens
gcagguggggagacugggcu

SEQ ID NO: 200788 - RNA, 15 nt, Homo sapiens
ugauauugcagcuua

SEQ ID NO: 200789 - RNA, 18 nt, Homo sapiens
ugugugaucugugggcac

SEQ ID NO: 200790 - RNA, 15 nt, Homo sapiens
cugucuuucacugaa

SEQ ID NO: 200791 - RNA, 14 nt, Homo sapiens
auggaggcacacag

SEQ ID NO: 200792 - RNA, 20 nt, Homo sapiens
acacgagguaugaggucuag

SEQ ID NO: 200793 - RNA, 19 nt, Homo sapiens
gugaaaugcuggcauuugc

SEQ ID NO: 200794 - RNA, 20 nt, Homo sapiens
caacccaauaguuguugauu

SEQ ID NO: 200795 - RNA, 20 nt, Homo sapiens
uaugugggugggaccacaga

SEQ ID NO: 200796 - RNA, 17 nt, Homo sapiens
cccuguaccugugcacg

SEQ ID NO: 200797 - RNA, 18 nt, Homo sapiens
caaccugccugacauuug

SEQ ID NO: 200798 - RNA, 15 nt, Homo sapiens
cuuuugaacccagga

SEQ ID NO: 200799 - RNA, 18 nt, Homo sapiens
uacagucuuccauuugca

SEQ ID NO: 200800 - RNA, 17 nt, Homo sapiens
cauucagggauagcacu

SEQ ID NO: 200801 - RNA, 22 nt, Homo sapiens
gugggagcuuuugguaugugac

SEQ ID NO: 200802 - RNA, 20 nt, Homo sapiens
accgucaauaggcaaagggg

SEQ ID NO: 200803 - RNA, 18 nt, Homo sapiens
ccucuguccaggcacuga

SEQ ID NO: 200804 - RNA, 21 nt, Homo sapiens
aagcugucccucacuguugaa

SEQ ID NO: 200805 - RNA, 14 nt, Homo sapiens
accaggucagggag

SEQ ID NO: 200806 - RNA, 21 nt, Homo sapiens
uaucuauggcacccaugcacc

SEQ ID NO: 200807 - RNA, 17 nt, Homo sapiens
uuguuacuucugaggua

SEQ ID NO: 200808 - RNA, 17 nt, Homo sapiens
aaagagagggcuuuaau

SEQ ID NO: 200809 - RNA, 21 nt, Homo sapiens
cgaacaauucauauauuugaa

SEQ ID NO: 200810 - RNA, 16 nt, Homo sapiens
cacccuggaggauuuc

SEQ ID NO: 200811 - RNA, 18 nt, Homo sapiens
uuaaugaagaaaguggaa

SEQ ID NO: 200812 - RNA, 13 nt, Homo sapiens
ccugugaaugcca

SEQ ID NO: 200813 - RNA, 16 nt, Homo sapiens
ccucagucccaacucc

SEQ ID NO: 200814 - RNA, 21 nt, Homo sapiens
cugugaaaugcuggcauuugc

SEQ ID NO: 200815 - RNA, 16 nt, Homo sapiens
uuggcuucuaaucaaa

SEQ ID NO: 200816 - RNA, 15 nt, Homo sapiens
gauccacuucucuca

SEQ ID NO: 200817 - RNA, 17 nt, Homo sapiens
auaauguuacauuauua

SEQ ID NO: 200818 - RNA, 21 nt, Homo sapiens
cgugggucuucagggggccag

SEQ ID NO: 200819 - RNA, 19 nt, Homo sapiens
cucuuccuacccuuccuca

SEQ ID NO: 200820 - RNA, 19 nt, Homo sapiens
caaggcuggcagugacaga

SEQ ID NO: 200821 - RNA, 16 nt, Homo sapiens
auauguucaacuggag

SEQ ID NO: 200822 - RNA, 18 nt, Homo sapiens
cuccugccccaugcugcc

SEQ ID NO: 200823 - RNA, 15 nt, Homo sapiens
augcauaaaauguua

SEQ ID NO: 200824 - RNA, 19 nt, Homo sapiens
cagucaaggaguggcuuac

SEQ ID NO: 200825 - RNA, 18 nt, Homo sapiens
ucuauggcacccaugcac

SEQ ID NO: 200826 - RNA, 17 nt, Homo sapiens
uguccaggcacugagau

SEQ ID NO: 200827 - RNA, 17 nt, Homo sapiens
ggauggaugcagaucca

SEQ ID NO: 200828 - RNA, 18 nt, Homo sapiens
gacuguucuuuuacaaga

SEQ ID NO: 200829 - RNA, 23 nt, Homo sapiens
aucauauaauaaauguacauuaa

SEQ ID NO: 200830 - RNA, 21 nt, Homo sapiens
caucgcaguguucaaggccau

SEQ ID NO: 200831 - RNA, 18 nt, Homo sapiens
acacagccaagccaguca

SEQ ID NO: 200832 - RNA, 17 nt, Homo sapiens
guacagguaaggugagg

SEQ ID NO: 200833 - RNA, 17 nt, Homo sapiens
cagccaaaaaggacuuu

SEQ ID NO: 200834 - RNA, 17 nt, Homo sapiens
uggcagccgugccuuca

SEQ ID NO: 200835 - RNA, 17 nt, Homo sapiens
aagucuuauuuccucaa

SEQ ID NO: 200836 - RNA, 17 nt, Homo sapiens
cagaaucaaaugcaauu

SEQ ID NO: 200837 - RNA, 18 nt, Homo sapiens
ucauaauuucuucacuca

SEQ ID NO: 200838 - RNA, 20 nt, Homo sapiens
uugcccaggcuggucucaaa

SEQ ID NO: 200839 - RNA, 19 nt, Homo sapiens
gaggacuguugacauccaa

SEQ ID NO: 200840 - RNA, 11 nt, Homo sapiens
gccaagccagu

SEQ ID NO: 200841 - RNA, 18 nt, Homo sapiens
guauuuuuucacuuguac

SEQ ID NO: 200842 - RNA, 19 nt, Homo sapiens
uauugcagcuuauauucau

SEQ ID NO: 200843 - RNA, 13 nt, Homo sapiens
cuaagaugaucau

SEQ ID NO: 200844 - RNA, 16 nt, Homo sapiens
agccgaggccuacccc

SEQ ID NO: 200845 - RNA, 21 nt, Homo sapiens
agugauaucccccagccucaa

SEQ ID NO: 200846 - RNA, 17 nt, Homo sapiens
aaguaaguuugauuuca

SEQ ID NO: 200847 - RNA, 11 nt, Homo sapiens
gccacauggga

SEQ ID NO: 200848 - RNA, 23 nt, Homo sapiens
uuggagaaacccuugaaaagaca

SEQ ID NO: 200849 - RNA, 13 nt, Homo sapiens
uagaguguuauca

SEQ ID NO: 200850 - RNA, 15 nt, Homo sapiens
ucuaggaacauacuu

SEQ ID NO: 200851 - RNA, 19 nt, Homo sapiens
ucagucucugagcagugaa

SEQ ID NO: 200852 - RNA, 17 nt, Homo sapiens
uauuuccuucuccuccu

SEQ ID NO: 200853 - RNA, 21 nt, Homo sapiens
ucauucucugucucauccauc

SEQ ID NO: 200854 - RNA, 23 nt, Homo sapiens
aaggauggagccagcucugcauu

SEQ ID NO: 200855 - RNA, 15 nt, Homo sapiens
cucuggacacagccc

SEQ ID NO: 200856 - RNA, 18 nt, Homo sapiens
cugaguggcaggggacag

SEQ ID NO: 200857 - RNA, 23 nt, Homo sapiens
cuuaaguuguggagagugcaaca

SEQ ID NO: 200858 - RNA, 22 nt, Homo sapiens
uggagguauucaauauccuuug

SEQ ID NO: 200859 - RNA, 15 nt, Homo sapiens
cagcacccaugggaa

SEQ ID NO: 200860 - RNA, 21 nt, Homo sapiens
cuguaaucccagcacuuuggg

SEQ ID NO: 200861 - RNA, 15 nt, Homo sapiens
ugaggaacccuuaca

SEQ ID NO: 200862 - RNA, 14 nt, Homo sapiens
cugucucagccucc

SEQ ID NO: 200863 - RNA, 12 nt, Homo sapiens
auucgugcagca

SEQ ID NO: 200864 - RNA, 17 nt, Homo sapiens
ugaauaugauuaguaaa

SEQ ID NO: 200865 - RNA, 15 nt, Homo sapiens
uacuuugugcuugua

SEQ ID NO: 200866 - RNA, 16 nt, Homo sapiens
aggcccccacuugccu

SEQ ID NO: 200867 - RNA, 14 nt, Homo sapiens
gauuagacagucaa

SEQ ID NO: 200868 - RNA, 23 nt, Homo sapiens
caggaguuggaagugugugaucu

SEQ ID NO: 200869 - RNA, 15 nt, Homo sapiens
uaaauacagucuucc

SEQ ID NO: 200870 - RNA, 13 nt, Homo sapiens
uggaauguaauca

SEQ ID NO: 200871 - RNA, 13 nt, Homo sapiens
caauaagcaucaa

SEQ ID NO: 200872 - RNA, 18 nt, Homo sapiens
ucaggaguucgagaccag

SEQ ID NO: 200873 - RNA, 17 nt, Homo sapiens
ucuuguuccccacugac

SEQ ID NO: 200874 - RNA, 14 nt, Homo sapiens
gcuucuugccucug

SEQ ID NO: 200875 - RNA, 19 nt, Homo sapiens
cacuauuuaucugugcaaa

SEQ ID NO: 200876 - RNA, 20 nt, Homo sapiens
augggcaaauuaaggcauaa

SEQ ID NO: 200877 - RNA, 22 nt, Homo sapiens
ccacgagcuguuuacuagggau

SEQ ID NO: 200878 - RNA, 13 nt, Homo sapiens
gauauugcagcuu

SEQ ID NO: 200879 - RNA, 16 nt, Homo sapiens
gaaucaaaugcaauuu

SEQ ID NO: 200880 - RNA, 14 nt, Homo sapiens
aguggggucagggc

SEQ ID NO: 200881 - RNA, 14 nt, Homo sapiens
gccucuuccaggaa

SEQ ID NO: 200882 - RNA, 20 nt, Homo sapiens
aagccuagcccuucucucau

SEQ ID NO: 200883 - RNA, 16 nt, Homo sapiens
ucagaguugugcacau

SEQ ID NO: 200884 - RNA, 14 nt, Homo sapiens
uguggguaccugua

SEQ ID NO: 200885 - RNA, 19 nt, Homo sapiens
gccuggcaagugggugaaa

SEQ ID NO: 200886 - RNA, 20 nt, Homo sapiens
ccgggaagagggugauugcu

SEQ ID NO: 200887 - RNA, 19 nt, Homo sapiens
agacugucucaagagggca

SEQ ID NO: 200888 - RNA, 22 nt, Homo sapiens
gagggauaguggggucagggcu

SEQ ID NO: 200889 - RNA, 17 nt, Homo sapiens
auggcacccaugcaccu

SEQ ID NO: 200890 - RNA, 20 nt, Homo sapiens
ccuucucucaccuccuaaag

SEQ ID NO: 200891 - RNA, 14 nt, Homo sapiens
agugcaucucagcc

SEQ ID NO: 200892 - RNA, 21 nt, Homo sapiens
caucuuucuucuauuuuauuc

SEQ ID NO: 200893 - RNA, 17 nt, Homo sapiens
acgacugucuccauggc

SEQ ID NO: 200894 - RNA, 13 nt, Homo sapiens
cagucaaccuggg

SEQ ID NO: 200895 - RNA, 19 nt, Homo sapiens
ggaacuuuuauuacugggg

SEQ ID NO: 200896 - RNA, 14 nt, Homo sapiens
auaugauugugcac

SEQ ID NO: 200897 - RNA, 14 nt, Homo sapiens
uagggaucccucau

SEQ ID NO: 200898 - RNA, 17 nt, Homo sapiens
aucucuuauuuuacaau

SEQ ID NO: 200899 - RNA, 14 nt, Homo sapiens
uccacuagugcaaa

SEQ ID NO: 200900 - RNA, 14 nt, Homo sapiens
uaggaaaauuucac

SEQ ID NO: 200901 - RNA, 18 nt, Homo sapiens
auuaucuaugauaugcua

SEQ ID NO: 200902 - RNA, 17 nt, Homo sapiens
cccauaucugugaaaug

SEQ ID NO: 200903 - RNA, 12 nt, Homo sapiens
gggagucugggc

SEQ ID NO: 200904 - RNA, 16 nt, Homo sapiens
caugauuucauuucaa

SEQ ID NO: 200905 - RNA, 14 nt, Homo sapiens
uccuccagaccauu

SEQ ID NO: 200906 - RNA, 20 nt, Homo sapiens
cuccauuguucagaugcuuc

SEQ ID NO: 200907 - RNA, 15 nt, Homo sapiens
auuuccggccaacag

SEQ ID NO: 200908 - RNA, 17 nt, Homo sapiens
acagacuaugucaccca

SEQ ID NO: 200909 - RNA, 21 nt, Homo sapiens
caaacuacuggcaauuuguaa

SEQ ID NO: 200910 - RNA, 16 nt, Homo sapiens
gugagcaaagggcuca

SEQ ID NO: 200911 - RNA, 17 nt, Homo sapiens
gacaucaagcacagaag

SEQ ID NO: 200912 - RNA, 12 nt, Homo sapiens
acaagaagccac

SEQ ID NO: 200913 - RNA, 13 nt, Homo sapiens
gagagggggccac

SEQ ID NO: 200914 - RNA, 23 nt, Homo sapiens
uuuuacaauaaaacuuugcugcc

SEQ ID NO: 200915 - RNA, 12 nt, Homo sapiens
gaugagcauuua

SEQ ID NO: 200916 - RNA, 19 nt, Homo sapiens
gauugauagaguguuauca

SEQ ID NO: 200917 - RNA, 22 nt, Homo sapiens
cagguucaugccaccauggcca

SEQ ID NO: 200918 - RNA, 22 nt, Homo sapiens
gcccuucucucauuauuucucu

SEQ ID NO: 200919 - RNA, 21 nt, Homo sapiens
agcagaugaccccuccccuaa

SEQ ID NO: 200920 - RNA, 17 nt, Homo sapiens
cuugcaguuaaggguua

SEQ ID NO: 200921 - RNA, 19 nt, Homo sapiens
uccacccuuggacuuucuu

SEQ ID NO: 200922 - RNA, 20 nt, Homo sapiens
agagauggggucucacagug

SEQ ID NO: 200923 - RNA, 20 nt, Homo sapiens
gccuccuccagaauggagcu

SEQ ID NO: 200924 - RNA, 23 nt, Homo sapiens
ggacucagguugucugaagucac

SEQ ID NO: 200925 - RNA, 17 nt, Homo sapiens
accacagguucaugcca

SEQ ID NO: 200926 - RNA, 21 nt, Homo sapiens
ccucugggccaagucaaagac

SEQ ID NO: 200927 - RNA, 23 nt, Homo sapiens
uaccucacagagugcauugugag

SEQ ID NO: 200928 - RNA, 21 nt, Homo sapiens
ugagcauuguggcugucagca

SEQ ID NO: 200929 - RNA, 13 nt, Homo sapiens
acuuccauuugcu

SEQ ID NO: 200930 - RNA, 18 nt, Homo sapiens
cuugaggaaaacaagcau

SEQ ID NO: 200931 - RNA, 20 nt, Homo sapiens
gaucggagccuccucucuca

SEQ ID NO: 200932 - RNA, 21 nt, Homo sapiens
acugccuucgcuucuugccuc

SEQ ID NO: 200933 - RNA, 21 nt, Homo sapiens
guagcagauccccagccucug

SEQ ID NO: 200934 - RNA, 23 nt, Homo sapiens
uggagaaacccuugaaaagacau

SEQ ID NO: 200935 - RNA, 19 nt, Homo sapiens
uccaaacuaccuuccaguu

SEQ ID NO: 200936 - RNA, 15 nt, Homo sapiens
gccccuguuaccuaa

SEQ ID NO: 200937 - RNA, 17 nt, Homo sapiens
gugggaccacagacuca

SEQ ID NO: 200938 - RNA, 21 nt, Homo sapiens
aauacagucuuccauuugcaa

SEQ ID NO: 200939 - RNA, 12 nt, Homo sapiens
aggcaagcacuu

SEQ ID NO: 200940 - RNA, 20 nt, Homo sapiens
uagcaaaauacaugacauuu

SEQ ID NO: 200941 - RNA, 18 nt, Homo sapiens
aagaaaauaugcaucuaa

SEQ ID NO: 200942 - RNA, 13 nt, Homo sapiens
agacaugaauaug

SEQ ID NO: 200943 - RNA, 22 nt, Homo sapiens
cuucccugucugccagggccag

SEQ ID NO: 200944 - RNA, 19 nt, Homo sapiens
acuauggcucuacuuucag

SEQ ID NO: 200945 - RNA, 13 nt, Homo sapiens
aagcacagcaccc

SEQ ID NO: 200946 - RNA, 19 nt, Homo sapiens
gaauuuucucuaacuucaa

SEQ ID NO: 200947 - RNA, 19 nt, Homo sapiens
auauuuuaaaaucugucac

SEQ ID NO: 200948 - RNA, 16 nt, Homo sapiens
auaugauuaguaaaga

SEQ ID NO: 200949 - RNA, 15 nt, Homo sapiens
gcgcaagcugggagc

SEQ ID NO: 200950 - RNA, 22 nt, Homo sapiens
aagacauggggaggaaggacaa

SEQ ID NO: 200951 - RNA, 21 nt, Homo sapiens
agcuggguuggaaaacaguau

SEQ ID NO: 200952 - RNA, 22 nt, Homo sapiens
gccaguaccuccugccccaugc

SEQ ID NO: 200953 - RNA, 14 nt, Homo sapiens
cauauccaacaugu

SEQ ID NO: 200954 - RNA, 18 nt, Homo sapiens
uguacuugccuuauuaga

SEQ ID NO: 200955 - RNA, 18 nt, Homo sapiens
uggccuugaaaccaccuu

SEQ ID NO: 200956 - RNA, 21 nt, Homo sapiens
agcaguugaaacaagaagcca

SEQ ID NO: 200957 - RNA, 21 nt, Homo sapiens
uaaacuuaccugggcauucuu

SEQ ID NO: 200958 - RNA, 22 nt, Homo sapiens
uaauauauguauaugcaauaua

SEQ ID NO: 200959 - RNA, 19 nt, Homo sapiens
gggucucacaguguugccc

SEQ ID NO: 200960 - RNA, 15 nt, Homo sapiens
gggaaaucaggguua

SEQ ID NO: 200961 - RNA, 14 nt, Homo sapiens
aauguuuacacucu

SEQ ID NO: 200962 - RNA, 18 nt, Homo sapiens
auuaugccauagcaagau

SEQ ID NO: 200963 - RNA, 21 nt, Homo sapiens
agaccacgcccguccugccug

SEQ ID NO: 200964 - RNA, 14 nt, Homo sapiens
ccuauguaugccau

SEQ ID NO: 200965 - RNA, 18 nt, Homo sapiens
auuuuguucuaguuuuca

SEQ ID NO: 200966 - RNA, 20 nt, Homo sapiens
accuugcacaaacagccccu

SEQ ID NO: 200967 - RNA, 14 nt, Homo sapiens
ggaauaauccagaa

SEQ ID NO: 200968 - RNA, 19 nt, Homo sapiens
gggagacugggcugaggga

SEQ ID NO: 200969 - RNA, 20 nt, Homo sapiens
uucucauuucuguagccuga

SEQ ID NO: 200970 - RNA, 12 nt, Homo sapiens
aaacugugcacc

SEQ ID NO: 200971 - RNA, 18 nt, Homo sapiens
ccucaucccgagcaccuc

SEQ ID NO: 200972 - RNA, 13 nt, Homo sapiens
accagaggacaaa

SEQ ID NO: 200973 - RNA, 22 nt, Homo sapiens
ggaugaaggccucccugucuaa

SEQ ID NO: 200974 - RNA, 15 nt, Homo sapiens
ggacuuccauuugcu

SEQ ID NO: 200975 - RNA, 16 nt, Homo sapiens
gagaacaaugugcuau

SEQ ID NO: 200976 - RNA, 21 nt, Homo sapiens
guacuaauacagacuauguca

SEQ ID NO: 200977 - RNA, 15 nt, Homo sapiens
ccucuggacacagcc

SEQ ID NO: 200978 - RNA, 13 nt, Homo sapiens
accaaugucuuga

SEQ ID NO: 200979 - RNA, 17 nt, Homo sapiens
gccuaaaaaugcaacuu

SEQ ID NO: 200980 - RNA, 16 nt, Homo sapiens
cugcccccaauccaug

SEQ ID NO: 200981 - RNA, 12 nt, Homo sapiens
guagcuagccug

SEQ ID NO: 200982 - RNA, 21 nt, Homo sapiens
gguauaaugguugacuggguu

SEQ ID NO: 200983 - RNA, 16 nt, Homo sapiens
uauaauugaguuuuca

SEQ ID NO: 200984 - RNA, 13 nt, Homo sapiens
aggaguuccuuga

SEQ ID NO: 200985 - RNA, 19 nt, Homo sapiens
cuuuacuguuagucauuug

SEQ ID NO: 200986 - RNA, 12 nt, Homo sapiens
agaguugugcac

SEQ ID NO: 200987 - RNA, 15 nt, Homo sapiens
auaagugcaugacau

SEQ ID NO: 200988 - RNA, 16 nt, Homo sapiens
acagagcuucccugac

SEQ ID NO: 200989 - RNA, 18 nt, Homo sapiens
gggagguauucgugcagc

SEQ ID NO: 200990 - RNA, 21 nt, Homo sapiens
ccuuguguacaguuauuuaug

SEQ ID NO: 200991 - RNA, 15 nt, Homo sapiens
caaaaaaaucugcag

SEQ ID NO: 200992 - RNA, 22 nt, Homo sapiens
uugggcagagcuggcucugagc

SEQ ID NO: 200993 - RNA, 22 nt, Homo sapiens
ucaaaggugauugugccaggcu

SEQ ID NO: 200994 - RNA, 15 nt, Homo sapiens
cccuccccugccauu

SEQ ID NO: 200995 - RNA, 15 nt, Homo sapiens
cucucuaguuuccag

SEQ ID NO: 200996 - RNA, 14 nt, Homo sapiens
agcuugcaacaaaa

SEQ ID NO: 200997 - RNA, 15 nt, Homo sapiens
aucauuaugaaguca

SEQ ID NO: 200998 - RNA, 19 nt, Homo sapiens
gaacaauauugacuuuguc

SEQ ID NO: 200999 - RNA, 18 nt, Homo sapiens
caauuugccauuguuucu

SEQ ID NO: 201000 - RNA, 10 nt, Homo sapiens
cgaguacuuc

SEQ ID NO: 201001 - RNA, 22 nt, Homo sapiens
gucaaaguaaaacuugcugccu

SEQ ID NO: 201002 - RNA, 15 nt, Homo sapiens
gaaaacacugugcac

SEQ ID NO: 201003 - RNA, 14 nt, Homo sapiens
agggccacauggga

SEQ ID NO: 201004 - RNA, 17 nt, Homo sapiens
ucacaugucaguaccuu

SEQ ID NO: 201005 - RNA, 16 nt, Homo sapiens
agguuugccagcauuu

SEQ ID NO: 201006 - RNA, 15 nt, Homo sapiens
ccucccuggucccuu

SEQ ID NO: 201007 - RNA, 13 nt, Homo sapiens
gagggaagccuga

SEQ ID NO: 201008 - RNA, 22 nt, Homo sapiens
cccuucaaccauuccccauggg

SEQ ID NO: 201009 - RNA, 18 nt, Homo sapiens
cugugcaaauccuugaua

SEQ ID NO: 201010 - RNA, 12 nt, Homo sapiens
uaugccauagca

SEQ ID NO: 201011 - RNA, 20 nt, Homo sapiens
guuucugaucugaugcaagc

SEQ ID NO: 201012 - RNA, 17 nt, Homo sapiens
ugaugucguuugaauca

SEQ ID NO: 201013 - RNA, 19 nt, Homo sapiens
ugaagaagagaaugugaca

SEQ ID NO: 201014 - RNA, 23 nt, Homo sapiens
augucccuugcugugagcaagaa

SEQ ID NO: 201015 - RNA, 20 nt, Homo sapiens
uauuacugggacugugcuca

SEQ ID NO: 201016 - RNA, 18 nt, Homo sapiens
uuaguauuugcauauucu

SEQ ID NO: 201017 - RNA, 23 nt, Homo sapiens
uacaauaacauaauuuguacaua

SEQ ID NO: 201018 - RNA, 20 nt, Homo sapiens
aaaaauguauaugcacuuau

SEQ ID NO: 201019 - RNA, 16 nt, Homo sapiens
cauuuucugcauuuaa

SEQ ID NO: 201020 - RNA, 21 nt, Homo sapiens
uggaauauuguccauugucca

SEQ ID NO: 201021 - RNA, 13 nt, Homo sapiens
auuagacagucaa

SEQ ID NO: 201022 - RNA, 17 nt, Homo sapiens
acagagcagaacuuuca

SEQ ID NO: 201023 - RNA, 19 nt, Homo sapiens
auuugcugagcauguacug

SEQ ID NO: 201024 - RNA, 18 nt, Homo sapiens
caauauagcaagauccca

SEQ ID NO: 201025 - RNA, 15 nt, Homo sapiens
uuacgagcagggaug

SEQ ID NO: 201026 - RNA, 21 nt, Homo sapiens
gcuuucauguaaacugugcac

SEQ ID NO: 201027 - RNA, 13 nt, Homo sapiens
aguuccacugcug

SEQ ID NO: 201028 - RNA, 16 nt, Homo sapiens
uggggugggcacauug

SEQ ID NO: 201029 - RNA, 18 nt, Homo sapiens
ccuuucuccuuuguacuu

SEQ ID NO: 201030 - RNA, 21 nt, Homo sapiens
gaagauggauugguguaaaag

SEQ ID NO: 201031 - RNA, 16 nt, Homo sapiens
cacagaugugugauuc

SEQ ID NO: 201032 - RNA, 19 nt, Homo sapiens
agauguucuaagucuuucc

SEQ ID NO: 201033 - RNA, 14 nt, Homo sapiens
ucauuucaaaggga

SEQ ID NO: 201034 - RNA, 12 nt, Homo sapiens
uccuauguguaa

SEQ ID NO: 201035 - RNA, 16 nt, Homo sapiens
ugaaugcugggacuca

SEQ ID NO: 201036 - RNA, 15 nt, Homo sapiens
ucagagccaccccua

SEQ ID NO: 201037 - RNA, 16 nt, Homo sapiens
cacaggcacugcagga

SEQ ID NO: 201038 - RNA, 14 nt, Homo sapiens
ucgccguggcugcg

SEQ ID NO: 201039 - RNA, 15 nt, Homo sapiens
aggauuucaugauuu

SEQ ID NO: 201040 - RNA, 21 nt, Homo sapiens
cuucucacccuaugugggugg

SEQ ID NO: 201041 - RNA, 19 nt, Homo sapiens
acuuaaggauggagccagc

SEQ ID NO: 201042 - RNA, 23 nt, Homo sapiens
accuuucuccuuuguacuuugug

SEQ ID NO: 201043 - RNA, 22 nt, Homo sapiens
cuccaggcugucuuucacugaa

SEQ ID NO: 201044 - RNA, 20 nt, Homo sapiens
caggcgauccaccugucuca

SEQ ID NO: 201045 - RNA, 17 nt, Homo sapiens
aguguuaucagucauaa

SEQ ID NO: 201046 - RNA, 15 nt, Homo sapiens
gagaucuaggugagg

SEQ ID NO: 201047 - RNA, 22 nt, Homo sapiens
augaucaucacaaucaucauca

SEQ ID NO: 201048 - RNA, 19 nt, Homo sapiens
ugacuauggcuaccaaaaa

SEQ ID NO: 201049 - RNA, 18 nt, Homo sapiens
ugaagaacaguaacugcc

SEQ ID NO: 201050 - RNA, 17 nt, Homo sapiens
cagaaucuguuaccaga

SEQ ID NO: 201051 - RNA, 18 nt, Homo sapiens
cuaaauccuuuacuguua

SEQ ID NO: 201052 - RNA, 18 nt, Homo sapiens
ucuuaauauaacugccuu

SEQ ID NO: 201053 - RNA, 19 nt, Homo sapiens
aguggcaggggacaggagu

SEQ ID NO: 201054 - RNA, 14 nt, Homo sapiens
gcugggcagcuguu

SEQ ID NO: 201055 - RNA, 21 nt, Homo sapiens
cuugauccacuucucucagga

SEQ ID NO: 201056 - RNA, 22 nt, Homo sapiens
acacagcugcagagacagagag

SEQ ID NO: 201057 - RNA, 17 nt, Homo sapiens
ugcaccaccaagccaag

SEQ ID NO: 201058 - RNA, 14 nt, Homo sapiens
agagagggggccac

SEQ ID NO: 201059 - RNA, 15 nt, Homo sapiens
gcccaguguguuucu

SEQ ID NO: 201060 - RNA, 15 nt, Homo sapiens
ucccucaucuguccc

SEQ ID NO: 201061 - RNA, 21 nt, Homo sapiens
ucagugcuucgcagauguccu

SEQ ID NO: 201062 - RNA, 15 nt, Homo sapiens
agaaagcucaucuca

SEQ ID NO: 201063 - RNA, 21 nt, Homo sapiens
gguaucauuuucugcauuuaa

SEQ ID NO: 201064 - RNA, 22 nt, Homo sapiens
ggacuauuauaauuuaaugcau

SEQ ID NO: 201065 - RNA, 12 nt, Homo sapiens
aguguugcccag

SEQ ID NO: 201066 - RNA, 17 nt, Homo sapiens
acuucucuauuaucuca

SEQ ID NO: 201067 - RNA, 20 nt, Homo sapiens
ccugagguuugccagcauuu

SEQ ID NO: 201068 - RNA, 20 nt, Homo sapiens
ccccaucugccacguguauu

SEQ ID NO: 201069 - RNA, 18 nt, Homo sapiens
aguuugauuauucagugu

SEQ ID NO: 201070 - RNA, 12 nt, Homo sapiens
uauuuauagucg

SEQ ID NO: 201071 - RNA, 21 nt, Homo sapiens
agguaugguuaauaaguuuca

SEQ ID NO: 201072 - RNA, 16 nt, Homo sapiens
cugaaguaagcaaaga

SEQ ID NO: 201073 - RNA, 18 nt, Homo sapiens
agucguggggugugcugg

SEQ ID NO: 201074 - RNA, 14 nt, Homo sapiens
ucaaacuacuggca

SEQ ID NO: 201075 - RNA, 15 nt, Homo sapiens
aacuugcugcugagu

SEQ ID NO: 201076 - RNA, 13 nt, Homo sapiens
acugggcuucuag

SEQ ID NO: 201077 - RNA, 17 nt, Homo sapiens
ccaagugccggacuagc

SEQ ID NO: 201078 - RNA, 16 nt, Homo sapiens
auucagccaggagaug

SEQ ID NO: 201079 - RNA, 18 nt, Homo sapiens
aaccaaaggugaaggaau

SEQ ID NO: 201080 - RNA, 16 nt, Homo sapiens
aucaucaucauucuca

SEQ ID NO: 201081 - RNA, 20 nt, Homo sapiens
cucacaccuguaaucccagc

SEQ ID NO: 201082 - RNA, 18 nt, Homo sapiens
augugggugggaccacag

SEQ ID NO: 201083 - RNA, 16 nt, Homo sapiens
auuuggcaaugccauc

SEQ ID NO: 201084 - RNA, 18 nt, Homo sapiens
auugauagaguguuauca

SEQ ID NO: 201085 - RNA, 19 nt, Homo sapiens
aaugcauauccaacaugug

SEQ ID NO: 201086 - RNA, 15 nt, Homo sapiens
uguaucaaaugugac

SEQ ID NO: 201087 - RNA, 20 nt, Homo sapiens
cuagguucuaaaaauuguga

SEQ ID NO: 201088 - RNA, 20 nt, Homo sapiens
cagauguccuugaugcucau

SEQ ID NO: 201089 - RNA, 19 nt, Homo sapiens
cugguggcccgacagccug

SEQ ID NO: 201090 - RNA, 20 nt, Homo sapiens
accuaaauggccucaugugg

SEQ ID NO: 201091 - RNA, 14 nt, Homo sapiens
gccucugaagccua

SEQ ID NO: 201092 - RNA, 21 nt, Homo sapiens
augcaaaaguucugacuugac

SEQ ID NO: 201093 - RNA, 14 nt, Homo sapiens
ugacucuccagaaa

SEQ ID NO: 201094 - RNA, 16 nt, Homo sapiens
uucagugcuucgcaga

SEQ ID NO: 201095 - RNA, 21 nt, Homo sapiens
auuuacaugaauugcauuuua

SEQ ID NO: 201096 - RNA, 18 nt, Homo sapiens
aggacuguugacauccaa

SEQ ID NO: 201097 - RNA, 22 nt, Homo sapiens
agcuuucauguaaacugugcac

SEQ ID NO: 201098 - RNA, 18 nt, Homo sapiens
ggcaauauagcaagaucc

SEQ ID NO: 201099 - RNA, 19 nt, Homo sapiens
uuaccuaguagucauuuca

SEQ ID NO: 201100 - RNA, 14 nt, Homo sapiens
aucaucauucucau

SEQ ID NO: 201101 - RNA, 12 nt, Homo sapiens
auaaucuuugcu

SEQ ID NO: 201102 - RNA, 15 nt, Homo sapiens
ggcugaccaugcuca

SEQ ID NO: 201103 - RNA, 17 nt, Homo sapiens
cacauacuugagacugu

SEQ ID NO: 201104 - RNA, 14 nt, Homo sapiens
uccuacaagcuaaa

SEQ ID NO: 201105 - RNA, 22 nt, Homo sapiens
ccaagcaggaaaugaaaauguc

SEQ ID NO: 201106 - RNA, 19 nt, Homo sapiens
ccugcggaguugugcacgu

SEQ ID NO: 201107 - RNA, 15 nt, Homo sapiens
auguauaugcaauau

SEQ ID NO: 201108 - RNA, 20 nt, Homo sapiens
auauauuuuugugcacauuu

SEQ ID NO: 201109 - RNA, 23 nt, Homo sapiens
caccugguuccggaauccugucc

SEQ ID NO: 201110 - RNA, 20 nt, Homo sapiens
ucuagaaccaggcaacuugg

SEQ ID NO: 201111 - RNA, 20 nt, Homo sapiens
uuuugcuggucacugccaug

SEQ ID NO: 201112 - RNA, 14 nt, Homo sapiens
agcccuuuacuuga

SEQ ID NO: 201113 - RNA, 21 nt, Homo sapiens
cuccauguagaagccacuauu

SEQ ID NO: 201114 - RNA, 22 nt, Homo sapiens
gccugaucagcgccgcaccagc

SEQ ID NO: 201115 - RNA, 19 nt, Homo sapiens
ugagggagccuggccccau

SEQ ID NO: 201116 - RNA, 13 nt, Homo sapiens
cugaucugaugca

SEQ ID NO: 201117 - RNA, 22 nt, Homo sapiens
gguuccagggucccucugugua

SEQ ID NO: 201118 - RNA, 12 nt, Homo sapiens
uuccccacugac

SEQ ID NO: 201119 - RNA, 22 nt, Homo sapiens
gccauaugaaugucaguaguuu

SEQ ID NO: 201120 - RNA, 21 nt, Homo sapiens
guaccuucaaacuagggccaa

SEQ ID NO: 201121 - RNA, 17 nt, Homo sapiens
uccuugauacugcucau

SEQ ID NO: 201122 - RNA, 17 nt, Homo sapiens
caucagugcucccucac

SEQ ID NO: 201123 - RNA, 17 nt, Homo sapiens
uagucgaacaauucaua

SEQ ID NO: 201124 - RNA, 15 nt, Homo sapiens
auguaaacugugcac

SEQ ID NO: 201125 - RNA, 20 nt, Homo sapiens
ucuggccuugaaaccaccuu

SEQ ID NO: 201126 - RNA, 20 nt, Homo sapiens
acccaggacuuccauuugcu

SEQ ID NO: 201127 - RNA, 14 nt, Homo sapiens
ccacaggacauuuc

SEQ ID NO: 201128 - RNA, 20 nt, Homo sapiens
aauccuguccucagcuucuu

SEQ ID NO: 201129 - RNA, 23 nt, Homo sapiens
ugggaccucaguuuuaucauuuu

SEQ ID NO: 201130 - RNA, 14 nt, Homo sapiens
cauugaucugggau

SEQ ID NO: 201131 - RNA, 21 nt, Homo sapiens
ucagugcucccucacauguca

SEQ ID NO: 201132 - RNA, 22 nt, Homo sapiens
uugcaaccucgcuggacucuca

SEQ ID NO: 201133 - RNA, 15 nt, Homo sapiens
uuuccgaaaucagaa

SEQ ID NO: 201134 - RNA, 14 nt, Homo sapiens
gcuuuguugcccag

SEQ ID NO: 201135 - RNA, 12 nt, Homo sapiens
uuuguugcccag

SEQ ID NO: 201136 - RNA, 15 nt, Homo sapiens
uaaaaauugugauca

SEQ ID NO: 201137 - RNA, 21 nt, Homo sapiens
agcauacgguaugauauugca

SEQ ID NO: 201138 - RNA, 17 nt, Homo sapiens
uaccuugagccaguaau

SEQ ID NO: 201139 - RNA, 15 nt, Homo sapiens
caaaggauacuguaa

SEQ ID NO: 201140 - RNA, 15 nt, Homo sapiens
uacuaucaugucaaa

SEQ ID NO: 201141 - RNA, 14 nt, Homo sapiens
aagaagauggauug

SEQ ID NO: 201142 - RNA, 14 nt, Homo sapiens
gacuguacuccucc

SEQ ID NO: 201143 - RNA, 16 nt, Homo sapiens
cuuguuccccacugac

SEQ ID NO: 201144 - RNA, 14 nt, Homo sapiens
uugauggugaugaa

SEQ ID NO: 201145 - RNA, 16 nt, Homo sapiens
augagaaggaauuuga

SEQ ID NO: 201146 - RNA, 19 nt, Homo sapiens
gccccaggcauugccaagg

SEQ ID NO: 201147 - RNA, 19 nt, Homo sapiens
gugcccugcaucccucucc

SEQ ID NO: 201148 - RNA, 14 nt, Homo sapiens
ugaggaauguauau

SEQ ID NO: 201149 - RNA, 15 nt, Homo sapiens
ugcugagcauguacu

SEQ ID NO: 201150 - RNA, 21 nt, Homo sapiens
uuggaacuuuuauuacugggg

SEQ ID NO: 201151 - RNA, 11 nt, Homo sapiens
aaauccuugau

SEQ ID NO: 201152 - RNA, 11 nt, Homo sapiens
auaugcaauau

SEQ ID NO: 201153 - RNA, 18 nt, Homo sapiens
uccagggucccucugugu

SEQ ID NO: 201154 - RNA, 15 nt, Homo sapiens
gagacugcugaguca

SEQ ID NO: 201155 - RNA, 14 nt, Homo sapiens
gaauaauaccuaag

SEQ ID NO: 201156 - RNA, 15 nt, Homo sapiens
cacugcuugaggaaa

SEQ ID NO: 201157 - RNA, 18 nt, Homo sapiens
cucagucucugagcagug

SEQ ID NO: 201158 - RNA, 23 nt, Homo sapiens
uggguucacagaagcacagcacc

SEQ ID NO: 201159 - RNA, 23 nt, Homo sapiens
ucuucagggggccaggugcacag

SEQ ID NO: 201160 - RNA, 14 nt, Homo sapiens
uccagaccauucag

SEQ ID NO: 201161 - RNA, 16 nt, Homo sapiens
cgaacaauucauauau

SEQ ID NO: 201162 - RNA, 21 nt, Homo sapiens
uuuggcucuucuaaucagagc

SEQ ID NO: 201163 - RNA, 21 nt, Homo sapiens
gcaaauccuugauacugcuca

SEQ ID NO: 201164 - RNA, 23 nt, Homo sapiens
guaugauccuaaugaaugcauaa

SEQ ID NO: 201165 - RNA, 20 nt, Homo sapiens
uaaagaccugacaccuuuca

SEQ ID NO: 201166 - RNA, 21 nt, Homo sapiens
aagaacaauauugacuuuguc

SEQ ID NO: 201167 - RNA, 20 nt, Homo sapiens
ggcauuugcaccuaccucac

SEQ ID NO: 201168 - RNA, 22 nt, Homo sapiens
uuuaaaucaacgaguacuucaa

SEQ ID NO: 201169 - RNA, 15 nt, Homo sapiens
uacucauucagggau

SEQ ID NO: 201170 - RNA, 22 nt, Homo sapiens
cuuuauuacaguuuaucuaugg

SEQ ID NO: 201171 - RNA, 19 nt, Homo sapiens
gcugagugcaccacuucaa

SEQ ID NO: 201172 - RNA, 14 nt, Homo sapiens
agcagggaugaagg

SEQ ID NO: 201173 - RNA, 14 nt, Homo sapiens
uuucaugugugauu

SEQ ID NO: 201174 - RNA, 21 nt, Homo sapiens
uccccuggggagucugggcac

SEQ ID NO: 201175 - RNA, 14 nt, Homo sapiens
gcagaccacugaua

SEQ ID NO: 201176 - RNA, 19 nt, Homo sapiens
caucaucuccugccuuccu

SEQ ID NO: 201177 - RNA, 19 nt, Homo sapiens
aauguuugucucaucccau

SEQ ID NO: 201178 - RNA, 24 nt, Homo sapiens
gaccagucacugacccugugcaga

SEQ ID NO: 201179 - RNA, 13 nt, Homo sapiens
cuucuagaaccag

SEQ ID NO: 201180 - RNA, 16 nt, Homo sapiens
uggaggcacacagcug

SEQ ID NO: 201181 - RNA, 14 nt, Homo sapiens
ggaccucaguuuua

SEQ ID NO: 201182 - RNA, 13 nt, Homo sapiens
agggucauagcau

SEQ ID NO: 201183 - RNA, 14 nt, Homo sapiens
cagaugaaugggag

SEQ ID NO: 201184 - RNA, 13 nt, Homo sapiens
accagagcucaga

SEQ ID NO: 201185 - RNA, 23 nt, Homo sapiens
aaucacacgucuggcuucacaga

SEQ ID NO: 201186 - RNA, 22 nt, Homo sapiens
uaugcucagggucaauuucuuu

SEQ ID NO: 201187 - RNA, 15 nt, Homo sapiens
cagagaggagucaga

SEQ ID NO: 201188 - RNA, 16 nt, Homo sapiens
uuaccuugugcuaauc

SEQ ID NO: 201189 - RNA, 18 nt, Homo sapiens
caaaggagggucaggaag

SEQ ID NO: 201190 - RNA, 20 nt, Homo sapiens
uguagagauggggucucaca

SEQ ID NO: 201191 - RNA, 15 nt, Homo sapiens
uaugauauugcagcu

SEQ ID NO: 201192 - RNA, 15 nt, Homo sapiens
cacugauaaaaccau

SEQ ID NO: 201193 - RNA, 14 nt, Homo sapiens
aguacuggcauggu

SEQ ID NO: 201194 - RNA, 14 nt, Homo sapiens
uaacaaacucugag

SEQ ID NO: 201195 - RNA, 18 nt, Homo sapiens
aucugcauuuucacccca

SEQ ID NO: 201196 - RNA, 16 nt, Homo sapiens
auaugauugugcacau

SEQ ID NO: 201197 - RNA, 14 nt, Homo sapiens
aucgcaguguucaa

SEQ ID NO: 201198 - RNA, 15 nt, Homo sapiens
gggcugcccuggugc

SEQ ID NO: 201199 - RNA, 13 nt, Homo sapiens
gcugucaucucag

SEQ ID NO: 201200 - RNA, 16 nt, Homo sapiens
cuguauauacaauaac

SEQ ID NO: 201201 - RNA, 17 nt, Homo sapiens
auauuuuugugcacauu

SEQ ID NO: 201202 - RNA, 23 nt, Homo sapiens
ggagacacuauuuaucugugcaa

SEQ ID NO: 201203 - RNA, 19 nt, Homo sapiens
ggcugcccacacaccccaa

SEQ ID NO: 201204 - RNA, 16 nt, Homo sapiens
cucgagcaguccugcc

SEQ ID NO: 201205 - RNA, 19 nt, Homo sapiens
agucacugacccugugcag

SEQ ID NO: 201206 - RNA, 21 nt, Homo sapiens
caaacuggggccucccugguc

SEQ ID NO: 201207 - RNA, 23 nt, Homo sapiens
gaucugaacagaaauaccaaaau

SEQ ID NO: 201208 - RNA, 16 nt, Homo sapiens
cugggccgcugccacg

SEQ ID NO: 201209 - RNA, 21 nt, Homo sapiens
aucucaaacuacuggcaauuu

SEQ ID NO: 201210 - RNA, 15 nt, Homo sapiens
uaaaacauuaagaaa

SEQ ID NO: 201211 - RNA, 22 nt, Homo sapiens
ugccuacgaauagccacugcau

SEQ ID NO: 201212 - RNA, 13 nt, Homo sapiens
ggaaaacaguauu

SEQ ID NO: 201213 - RNA, 16 nt, Homo sapiens
cgaauagccacugcau

SEQ ID NO: 201214 - RNA, 13 nt, Homo sapiens
uccucuccacugc

SEQ ID NO: 201215 - RNA, 21 nt, Homo sapiens
ucuacuaacaaucagcuccuu

SEQ ID NO: 201216 - RNA, 21 nt, Homo sapiens
cuaacaggauuagacagucaa

SEQ ID NO: 201217 - RNA, 18 nt, Homo sapiens
ccuccugaagccacagca

SEQ ID NO: 201218 - RNA, 12 nt, Homo sapiens
acagaagguccu

SEQ ID NO: 201219 - RNA, 19 nt, Homo sapiens
augccucauuaccuugugc

SEQ ID NO: 201220 - RNA, 15 nt, Homo sapiens
ucugaagucacugca

SEQ ID NO: 201221 - RNA, 20 nt, Homo sapiens
acagcucgggcccucuguga

SEQ ID NO: 201222 - RNA, 15 nt, Homo sapiens
ucuucagggggccag

SEQ ID NO: 201223 - RNA, 18 nt, Homo sapiens
agcgaggaggcuccagag

SEQ ID NO: 201224 - RNA, 17 nt, Homo sapiens
aagauacagaacucuuu

SEQ ID NO: 201225 - RNA, 17 nt, Homo sapiens
aagggacauauucauuu

SEQ ID NO: 201226 - RNA, 22 nt, Homo sapiens
aggguucaccaggucagggaga

SEQ ID NO: 201227 - RNA, 19 nt, Homo sapiens
auaaugguugacuggguuu

SEQ ID NO: 201228 - RNA, 17 nt, Homo sapiens
cucccugaaguaagcaa

SEQ ID NO: 201229 - RNA, 22 nt, Homo sapiens
agaccacgcccguccugccugu

SEQ ID NO: 201230 - RNA, 21 nt, Homo sapiens
uuuauagaccagaaccagagc

SEQ ID NO: 201231 - RNA, 20 nt, Homo sapiens
aucucauuggacccuuccau

SEQ ID NO: 201232 - RNA, 20 nt, Homo sapiens
gugcaugcagcaucuaagua

SEQ ID NO: 201233 - RNA, 17 nt, Homo sapiens
ugcccccaauccaugaa

SEQ ID NO: 201234 - RNA, 13 nt, Homo sapiens
uucuaaucaaagc

SEQ ID NO: 201235 - RNA, 16 nt, Homo sapiens
uccaacaugugcucag

SEQ ID NO: 201236 - RNA, 16 nt, Homo sapiens
acuucucucaggaucc

SEQ ID NO: 201237 - RNA, 12 nt, Homo sapiens
accaaaggugaa

SEQ ID NO: 201238 - RNA, 21 nt, Homo sapiens
caagggaauucggugugcacc

SEQ ID NO: 201239 - RNA, 14 nt, Homo sapiens
caguagauuuucca

SEQ ID NO: 201240 - RNA, 19 nt, Homo sapiens
caacguggggcagcacaga

SEQ ID NO: 201241 - RNA, 23 nt, Homo sapiens
cuccacaauagcagacaguguuu

SEQ ID NO: 201242 - RNA, 22 nt, Homo sapiens
ugccucauuaccuugugcuaau

SEQ ID NO: 201243 - RNA, 22 nt, Homo sapiens
cauacgguaugauauugcagcu

SEQ ID NO: 201244 - RNA, 20 nt, Homo sapiens
cucuucuaaucagagcgcaa

SEQ ID NO: 201245 - RNA, 12 nt, Homo sapiens
guuggcuucuaa

SEQ ID NO: 201246 - RNA, 12 nt, Homo sapiens
uauuuuccaaag

SEQ ID NO: 201247 - RNA, 17 nt, Homo sapiens
cauagaguucagacuuu

SEQ ID NO: 201248 - RNA, 16 nt, Homo sapiens
agggcaggaacuugca

SEQ ID NO: 201249 - RNA, 23 nt, Homo sapiens
aauuucacauuaauauuugcuga

SEQ ID NO: 201250 - RNA, 16 nt, Homo sapiens
cuccaucgcaguguuc

SEQ ID NO: 201251 - RNA, 17 nt, Homo sapiens
acuauuuaucugugcaa

SEQ ID NO: 201252 - RNA, 16 nt, Homo sapiens
agacaggacccuggga

SEQ ID NO: 201253 - RNA, 19 nt, Homo sapiens
cauucuuuuaaaagacaag

SEQ ID NO: 201254 - RNA, 13 nt, Homo sapiens
gcuccauguagaa

SEQ ID NO: 201255 - RNA, 23 nt, Homo sapiens
ugacucuccagaaagcucaucuc

SEQ ID NO: 201256 - RNA, 15 nt, Homo sapiens
cuugaaugcagggac

SEQ ID NO: 201257 - RNA, 18 nt, Homo sapiens
uauugacaauaauuucag

SEQ ID NO: 201258 - RNA, 16 nt, Homo sapiens
cauuaccuugugcuaa

SEQ ID NO: 201259 - RNA, 14 nt, Homo sapiens
uugaugcaugcacu

SEQ ID NO: 201260 - RNA, 15 nt, Homo sapiens
guauguuugggagac

SEQ ID NO: 201261 - RNA, 15 nt, Homo sapiens
ucgaacaauucauau

SEQ ID NO: 201262 - RNA, 16 nt, Homo sapiens
cagagcagaacuuuca

SEQ ID NO: 201263 - RNA, 16 nt, Homo sapiens
ggaacccucuaaggga

SEQ ID NO: 201264 - RNA, 15 nt, Homo sapiens
ccuucuccagacaaa

SEQ ID NO: 201265 - RNA, 21 nt, Homo sapiens
gcaggaagcaacgaagggaaa

SEQ ID NO: 201266 - RNA, 11 nt, Homo sapiens
uccugugcaac

SEQ ID NO: 201267 - RNA, 21 nt, Homo sapiens
gaugaucuggauccaccaaga

SEQ ID NO: 201268 - RNA, 14 nt, Homo sapiens
cauuuucaccccac

SEQ ID NO: 201269 - RNA, 16 nt, Homo sapiens
cauaagaaaacuaaga

SEQ ID NO: 201270 - RNA, 20 nt, Homo sapiens
gccacuccagaccccuggcu

SEQ ID NO: 201271 - RNA, 20 nt, Homo sapiens
gcagcuuagacuaaggccau

SEQ ID NO: 201272 - RNA, 13 nt, Homo sapiens
acucauucaggga

SEQ ID NO: 201273 - RNA, 22 nt, Homo sapiens
cuaaagaagguuucagaaagaa

SEQ ID NO: 201274 - RNA, 14 nt, Homo sapiens
aaggaugggaagga

SEQ ID NO: 201275 - RNA, 13 nt, Homo sapiens
cauuucaaaggga

SEQ ID NO: 201276 - RNA, 22 nt, Homo sapiens
ccacguccagcuggaaggguca

SEQ ID NO: 201277 - RNA, 12 nt, Homo sapiens
augagcauuuag

SEQ ID NO: 201278 - RNA, 17 nt, Homo sapiens
gagauuaccuccugaga

SEQ ID NO: 201279 - RNA, 20 nt, Homo sapiens
aaauauaaaacugcguuaaa

SEQ ID NO: 201280 - RNA, 17 nt, Homo sapiens
ugaaucuuggugucuac

SEQ ID NO: 201281 - RNA, 16 nt, Homo sapiens
ccucuuuuucuagucu

SEQ ID NO: 201282 - RNA, 14 nt, Homo sapiens
ucuaagggaccuca

SEQ ID NO: 201283 - RNA, 18 nt, Homo sapiens
cauaagugcaugacauau

SEQ ID NO: 201284 - RNA, 13 nt, Homo sapiens
auuucuguguugc

SEQ ID NO: 201285 - RNA, 22 nt, Homo sapiens
aauguuauuuuuuaauuauuau

SEQ ID NO: 201286 - RNA, 16 nt, Homo sapiens
aaagaaaugcccaucu

SEQ ID NO: 201287 - RNA, 22 nt, Homo sapiens
agguaucauuuucugcauuuaa

SEQ ID NO: 201288 - RNA, 22 nt, Homo sapiens
uucccugaauguauugaacuug

SEQ ID NO: 201289 - RNA, 11 nt, Homo sapiens
acuugcacaaa

SEQ ID NO: 201290 - RNA, 16 nt, Homo sapiens
ugauugugccuacgaa

SEQ ID NO: 201291 - RNA, 16 nt, Homo sapiens
uauagcaagaucccau

SEQ ID NO: 201292 - RNA, 18 nt, Homo sapiens
acuguucccccugugcag

SEQ ID NO: 201293 - RNA, 19 nt, Homo sapiens
acccucuccccacugcuca

SEQ ID NO: 201294 - RNA, 12 nt, Homo sapiens
ugcauuaucuau

SEQ ID NO: 201295 - RNA, 14 nt, Homo sapiens
ugccagggccaguc

SEQ ID NO: 201296 - RNA, 20 nt, Homo sapiens
caguuugcuuuguaugcacu

SEQ ID NO: 201297 - RNA, 22 nt, Homo sapiens
cuucauccucugagugugacca

SEQ ID NO: 201298 - RNA, 22 nt, Homo sapiens
uuaaaagacaagacuucaguau

SEQ ID NO: 201299 - RNA, 21 nt, Homo sapiens
ucuugcuauggggagaaaaga

SEQ ID NO: 201300 - RNA, 15 nt, Homo sapiens
cauaugauugugcac

SEQ ID NO: 201301 - RNA, 14 nt, Homo sapiens
accagaggacaaag

SEQ ID NO: 201302 - RNA, 22 nt, Homo sapiens
acaagaagccacagaccuagga

SEQ ID NO: 201303 - RNA, 16 nt, Homo sapiens
uuucaaaaccuuuuga

SEQ ID NO: 201304 - RNA, 13 nt, Homo sapiens
gccaggcagaucc

SEQ ID NO: 201305 - RNA, 14 nt, Homo sapiens
ugggagcacaggca

SEQ ID NO: 201306 - RNA, 14 nt, Homo sapiens
acaauguucauccc

SEQ ID NO: 201307 - RNA, 21 nt, Homo sapiens
accaugagaccacuguuauca

SEQ ID NO: 201308 - RNA, 19 nt, Homo sapiens
gcuucacagaugugugauu

SEQ ID NO: 201309 - RNA, 23 nt, Homo sapiens
gagaggagaaggagggagacaug

SEQ ID NO: 201310 - RNA, 14 nt, Homo sapiens
uucuccagacaaac

SEQ ID NO: 201311 - RNA, 17 nt, Homo sapiens
ucgaaucucugugccuu

SEQ ID NO: 201312 - RNA, 15 nt, Homo sapiens
auaaaauuaugccau

SEQ ID NO: 201313 - RNA, 16 nt, Homo sapiens
gaauguagcagauccc

SEQ ID NO: 201314 - RNA, 14 nt, Homo sapiens
ucgcuucuugccuc

SEQ ID NO: 201315 - RNA, 16 nt, Homo sapiens
ccagcuacaccuuucu

SEQ ID NO: 201316 - RNA, 14 nt, Homo sapiens
ugccacugccuucg

SEQ ID NO: 201317 - RNA, 12 nt, Homo sapiens
ugugagcaagaa

SEQ ID NO: 201318 - RNA, 18 nt, Homo sapiens
ucagugaauaaaccauca

SEQ ID NO: 201319 - RNA, 20 nt, Homo sapiens
caguguguuucugaucugau

SEQ ID NO: 201320 - RNA, 18 nt, Homo sapiens
acccaauaguuguugauu

SEQ ID NO: 201321 - RNA, 11 nt, Homo sapiens
aaccucagggc

SEQ ID NO: 201322 - RNA, 21 nt, Homo sapiens
ggcuuuuacugaagccuuucu

SEQ ID NO: 201323 - RNA, 21 nt, Homo sapiens
agacuuagaaaaauccuacaa

SEQ ID NO: 201324 - RNA, 22 nt, Homo sapiens
gaucucugcuuuggaaaucaca

SEQ ID NO: 201325 - RNA, 20 nt, Homo sapiens
gugaaaugcuggcauuugca

SEQ ID NO: 201326 - RNA, 17 nt, Homo sapiens
agccuagcccuucucuc

SEQ ID NO: 201327 - RNA, 21 nt, Homo sapiens
uuuaccugaaauaaaauucau

SEQ ID NO: 201328 - RNA, 22 nt, Homo sapiens
aaccaugagaccacuguuauca

SEQ ID NO: 201329 - RNA, 11 nt, Homo sapiens
aaaugcaacuu

SEQ ID NO: 201330 - RNA, 17 nt, Homo sapiens
auccaacaugugcucag

SEQ ID NO: 201331 - RNA, 20 nt, Homo sapiens
aauaauaagaggugcuacug

SEQ ID NO: 201332 - RNA, 16 nt, Homo sapiens
uacuucaagaucugaa

SEQ ID NO: 201333 - RNA, 13 nt, Homo sapiens
ucaauaggcaaag

SEQ ID NO: 201334 - RNA, 17 nt, Homo sapiens
uguguggggugggcaca

SEQ ID NO: 201335 - RNA, 18 nt, Homo sapiens
uaaagcaauaugcauuua

SEQ ID NO: 201336 - RNA, 20 nt, Homo sapiens
acugcauaccaaccugggca

SEQ ID NO: 201337 - RNA, 23 nt, Homo sapiens
caagcaguuaguuccuucaugau

SEQ ID NO: 201338 - RNA, 18 nt, Homo sapiens
ucacagaagcacagcacc

SEQ ID NO: 201339 - RNA, 23 nt, Homo sapiens
caaugcuauaacuauguugauaa

SEQ ID NO: 201340 - RNA, 22 nt, Homo sapiens
aggcgauccaccugucucagcc

SEQ ID NO: 201341 - RNA, 21 nt, Homo sapiens
cauaugauugugcacauacuu

SEQ ID NO: 201342 - RNA, 19 nt, Homo sapiens
agaguguuaucagucauaa

SEQ ID NO: 201343 - RNA, 21 nt, Homo sapiens
uuuaucuauggcacccaugca

SEQ ID NO: 201344 - RNA, 20 nt, Homo sapiens
agcagugaaugauucagugu

SEQ ID NO: 201345 - RNA, 22 nt, Homo sapiens
ugugggugggaccacagacuca

SEQ ID NO: 201346 - RNA, 15 nt, Homo sapiens
acuacuggcaauuug

SEQ ID NO: 201347 - RNA, 20 nt, Homo sapiens
uguugcucucuaguuuccag

SEQ ID NO: 201348 - RNA, 11 nt, Homo sapiens
gugaaggaaua

SEQ ID NO: 201349 - RNA, 18 nt, Homo sapiens
acagagcuucccugacuc

SEQ ID NO: 201350 - RNA, 13 nt, Homo sapiens
ucagucucugagc

SEQ ID NO: 201351 - RNA, 13 nt, Homo sapiens
uuacaauugugag

SEQ ID NO: 201352 - RNA, 16 nt, Homo sapiens
augcuucugacuucau

SEQ ID NO: 201353 - RNA, 23 nt, Homo sapiens
uacaagacaggacccugggacca

SEQ ID NO: 201354 - RNA, 20 nt, Homo sapiens
ccuaggauuucaugauuuca

SEQ ID NO: 201355 - RNA, 12 nt, Homo sapiens
ggggcagcacag

SEQ ID NO: 201356 - RNA, 17 nt, Homo sapiens
aguccuacaagcuaaaa

SEQ ID NO: 201357 - RNA, 22 nt, Homo sapiens
gagacacuauuuaucugugcaa

SEQ ID NO: 201358 - RNA, 17 nt, Homo sapiens
ccacuugccccuguuac

SEQ ID NO: 201359 - RNA, 23 nt, Homo sapiens
aggucccuugucccaaguuccac

SEQ ID NO: 201360 - RNA, 13 nt, Homo sapiens
cagaugugugauu

SEQ ID NO: 201361 - RNA, 17 nt, Homo sapiens
gauucuuucccaauuca

SEQ ID NO: 201362 - RNA, 17 nt, Homo sapiens
cucacugcaagcacugc

SEQ ID NO: 201363 - RNA, 16 nt, Homo sapiens
auuaccuccugagaaa

SEQ ID NO: 201364 - RNA, 21 nt, Homo sapiens
gcacccuggauugaucggagc

SEQ ID NO: 201365 - RNA, 22 nt, Homo sapiens
acagaagcacagcacccauggg

SEQ ID NO: 201366 - RNA, 14 nt, Homo sapiens
uagugauggagcuu

SEQ ID NO: 201367 - RNA, 21 nt, Homo sapiens
gcaguuugcuuuguaugcacu

SEQ ID NO: 201368 - RNA, 18 nt, Homo sapiens
auguacaugaagaagcua

SEQ ID NO: 201369 - RNA, 16 nt, Homo sapiens
auugaguuuucagugg

SEQ ID NO: 201370 - RNA, 13 nt, Homo sapiens
ccagaggacaaag

SEQ ID NO: 201371 - RNA, 14 nt, Homo sapiens
uuugaaaucuauga

SEQ ID NO: 201372 - RNA, 15 nt, Homo sapiens
cagucaaggauggau

SEQ ID NO: 201373 - RNA, 16 nt, Homo sapiens
ccauggugugaucguc

SEQ ID NO: 201374 - RNA, 14 nt, Homo sapiens
agccucugaauaug

SEQ ID NO: 201375 - RNA, 18 nt, Homo sapiens
accugaaauaaaauucau

SEQ ID NO: 201376 - RNA, 19 nt, Homo sapiens
cccagggcuccugcacuua

SEQ ID NO: 201377 - RNA, 14 nt, Homo sapiens
gaaaacacugugca

SEQ ID NO: 201378 - RNA, 21 nt, Homo sapiens
uuuucacugcuggcugccuua

SEQ ID NO: 201379 - RNA, 21 nt, Homo sapiens
agccuggcacagggcaguggg

SEQ ID NO: 201380 - RNA, 14 nt, Homo sapiens
cagaauaauaagag

SEQ ID NO: 201381 - RNA, 23 nt, Homo sapiens
uggauuuggguuggaagugaggg

SEQ ID NO: 201382 - RNA, 20 nt, Homo sapiens
acuucagcucacacaugaga

SEQ ID NO: 201383 - RNA, 15 nt, Homo sapiens
agagaggacuguuga

SEQ ID NO: 201384 - RNA, 19 nt, Homo sapiens
acaucuuuuacauucugca

SEQ ID NO: 201385 - RNA, 20 nt, Homo sapiens
gcuacaccuuucuccuuugu

SEQ ID NO: 201386 - RNA, 22 nt, Homo sapiens
aggcuggcagugacagaacuaa

SEQ ID NO: 201387 - RNA, 16 nt, Homo sapiens
ccauaucugugaaaug

SEQ ID NO: 201388 - RNA, 14 nt, Homo sapiens
ucugguuugcagag

SEQ ID NO: 201389 - RNA, 20 nt, Homo sapiens
cuuucaagcagucgugccug

SEQ ID NO: 201390 - RNA, 17 nt, Homo sapiens
ucagacuccugugcaac

SEQ ID NO: 201391 - RNA, 23 nt, Homo sapiens
uguucccuauuuugccaguggga

SEQ ID NO: 201392 - RNA, 21 nt, Homo sapiens
agucauuugcugagcauguac

SEQ ID NO: 201393 - RNA, 21 nt, Homo sapiens
ugauggagauauuuacaugaa

SEQ ID NO: 201394 - RNA, 22 nt, Homo sapiens
uuaccugggcauucuuguuuca

SEQ ID NO: 201395 - RNA, 15 nt, Homo sapiens
cuuuugguaugugac

SEQ ID NO: 201396 - RNA, 17 nt, Homo sapiens
uuuugaaauuaaccucu

SEQ ID NO: 201397 - RNA, 19 nt, Homo sapiens
uaugucacccaaugcauau

SEQ ID NO: 201398 - RNA, 13 nt, Homo sapiens
guagucauuucau

SEQ ID NO: 201399 - RNA, 18 nt, Homo sapiens
uccaucgcugucaucuca

SEQ ID NO: 201400 - RNA, 16 nt, Homo sapiens
uccucugugaccaaug

SEQ ID NO: 201401 - RNA, 21 nt, Homo sapiens
caagggccagcuggaggugaa

SEQ ID NO: 201402 - RNA, 17 nt, Homo sapiens
cucuuaaucaaauagca

SEQ ID NO: 201403 - RNA, 15 nt, Homo sapiens
acuuguuuuaugcuc

SEQ ID NO: 201404 - RNA, 11 nt, Homo sapiens
gagauccuccu

SEQ ID NO: 201405 - RNA, 13 nt, Homo sapiens
auauucauuucaa

SEQ ID NO: 201406 - RNA, 15 nt, Homo sapiens
auauuuucaccauuu

SEQ ID NO: 201407 - RNA, 14 nt, Homo sapiens
auuuaucugugcaa

SEQ ID NO: 201408 - RNA, 23 nt, Homo sapiens
ugccaucaagaugagagaacugg

SEQ ID NO: 201409 - RNA, 19 nt, Homo sapiens
aauccaauggguuuuuccc

SEQ ID NO: 201410 - RNA, 23 nt, Homo sapiens
acuugcugcugagugcaccacuu

SEQ ID NO: 201411 - RNA, 19 nt, Homo sapiens
cugaaaacacugugcacau

SEQ ID NO: 201412 - RNA, 13 nt, Homo sapiens
caugaauaugauu

SEQ ID NO: 201413 - RNA, 22 nt, Homo sapiens
cuggguuuuguauucucugagc

SEQ ID NO: 201414 - RNA, 15 nt, Homo sapiens
cauauauuuguauga

SEQ ID NO: 201415 - RNA, 18 nt, Homo sapiens
caucuuuuacauucugca

SEQ ID NO: 201416 - RNA, 17 nt, Homo sapiens
ugggaacuccuaaauca

SEQ ID NO: 201417 - RNA, 21 nt, Homo sapiens
gcaaagcauugagcaaagggg

SEQ ID NO: 201418 - RNA, 16 nt, Homo sapiens
cagcuguuagagucca

SEQ ID NO: 201419 - RNA, 14 nt, Homo sapiens
ccuggagauccucc

SEQ ID NO: 201420 - RNA, 16 nt, Homo sapiens
guucugucucauauga

SEQ ID NO: 201421 - RNA, 15 nt, Homo sapiens
ugugggcuccaugua

SEQ ID NO: 201422 - RNA, 19 nt, Homo sapiens
aguuugcuuuguaugcacu

SEQ ID NO: 201423 - RNA, 13 nt, Homo sapiens
ucccacaggacau

SEQ ID NO: 201424 - RNA, 18 nt, Homo sapiens
aaagaaauuguauuauca

SEQ ID NO: 201425 - RNA, 18 nt, Homo sapiens
acguggggcagcacagag

SEQ ID NO: 201426 - RNA, 13 nt, Homo sapiens
auuuuugugcaca

SEQ ID NO: 201427 - RNA, 13 nt, Homo sapiens
cagccacauucua

SEQ ID NO: 201428 - RNA, 23 nt, Homo sapiens
gcauuuaaccgucaauaggcaaa

SEQ ID NO: 201429 - RNA, 13 nt, Homo sapiens
gagucgggacuaa

SEQ ID NO: 201430 - RNA, 14 nt, Homo sapiens
agaugaaugggagu

SEQ ID NO: 201431 - RNA, 13 nt, Homo sapiens
augacugcacaug

SEQ ID NO: 201432 - RNA, 21 nt, Homo sapiens
gaaguaagcaaagacuuuccu

SEQ ID NO: 201433 - RNA, 13 nt, Homo sapiens
ugauucacagugu

SEQ ID NO: 201434 - RNA, 15 nt, Homo sapiens
augccauagcaagau

SEQ ID NO: 201435 - RNA, 12 nt, Homo sapiens
uucugcauuuaa

SEQ ID NO: 201436 - RNA, 15 nt, Homo sapiens
aacuacuggcaauuu

SEQ ID NO: 201437 - RNA, 13 nt, Homo sapiens
uaguuuucauaca

SEQ ID NO: 201438 - RNA, 18 nt, Homo sapiens
uaagaugaucaucuccag

SEQ ID NO: 201439 - RNA, 13 nt, Homo sapiens
gcagaacuuucac

SEQ ID NO: 201440 - RNA, 12 nt, Homo sapiens
cuggaagccaaa

SEQ ID NO: 201441 - RNA, 18 nt, Homo sapiens
uuguaugauccuaaugaa

SEQ ID NO: 201442 - RNA, 22 nt, Homo sapiens
uccccuggggagucugggcaca

SEQ ID NO: 201443 - RNA, 19 nt, Homo sapiens
agacaguguuuucugggau

SEQ ID NO: 201444 - RNA, 14 nt, Homo sapiens
aucuuaaaugccag

SEQ ID NO: 201445 - RNA, 16 nt, Homo sapiens
ugaggaugcagaguca

SEQ ID NO: 201446 - RNA, 20 nt, Homo sapiens
uauauauuuuugugcacauu

SEQ ID NO: 201447 - RNA, 23 nt, Homo sapiens
auguaacauguaggaaguaggaa

SEQ ID NO: 201448 - RNA, 19 nt, Homo sapiens
uuacaaucagccacauucu

SEQ ID NO: 201449 - RNA, 23 nt, Homo sapiens
caucucucccuccccugccauuu

SEQ ID NO: 201450 - RNA, 16 nt, Homo sapiens
aacuaguguugcuugg

SEQ ID NO: 201451 - RNA, 15 nt, Homo sapiens
cagagcuucccugac

SEQ ID NO: 201452 - RNA, 23 nt, Homo sapiens
ucaggccacauggcuaaagaagg

SEQ ID NO: 201453 - RNA, 13 nt, Homo sapiens
gauuauucagugu

SEQ ID NO: 201454 - RNA, 23 nt, Homo sapiens
uaaaagaugcauuaucuaugaua

SEQ ID NO: 201455 - RNA, 13 nt, Homo sapiens
aagcucaucucag

SEQ ID NO: 201456 - RNA, 21 nt, Homo sapiens
gccaaggagggcagaucacuu

SEQ ID NO: 201457 - RNA, 16 nt, Homo sapiens
gccuugaaaccaccuu

SEQ ID NO: 201458 - RNA, 21 nt, Homo sapiens
caugggaaggguccaucucag

SEQ ID NO: 201459 - RNA, 13 nt, Homo sapiens
acaauuuaccagc

SEQ ID NO: 201460 - RNA, 14 nt, Homo sapiens
uucagccaggagau

SEQ ID NO: 201461 - RNA, 22 nt, Homo sapiens
accuuacauuugaaaucuauga

SEQ ID NO: 201462 - RNA, 22 nt, Homo sapiens
aaggguucaccaggucagggag

SEQ ID NO: 201463 - RNA, 13 nt, Homo sapiens
ggccagguggcca

SEQ ID NO: 201464 - RNA, 15 nt, Homo sapiens
aauaucaugcuccau

SEQ ID NO: 201465 - RNA, 19 nt, Homo sapiens
auuuaucugugcaaauccu

SEQ ID NO: 201466 - RNA, 15 nt, Homo sapiens
agguuuuaaagaccu

SEQ ID NO: 201467 - RNA, 13 nt, Homo sapiens
cuguuagagucca

SEQ ID NO: 201468 - RNA, 15 nt, Homo sapiens
gauacagaacucuuu

SEQ ID NO: 201469 - RNA, 18 nt, Homo sapiens
ggugggaccacagacuca

SEQ ID NO: 201470 - RNA, 12 nt, Homo sapiens
ugugugaucugu

SEQ ID NO: 201471 - RNA, 13 nt, Homo sapiens
caauccuauguuu

SEQ ID NO: 201472 - RNA, 13 nt, Homo sapiens
auucucauucuca

SEQ ID NO: 201473 - RNA, 20 nt, Homo sapiens
ucaaguuggcuucuaaucaa

SEQ ID NO: 201474 - RNA, 16 nt, Homo sapiens
augugggugggaccac

SEQ ID NO: 201475 - RNA, 20 nt, Homo sapiens
uucauauguaccauguacau

SEQ ID NO: 201476 - RNA, 14 nt, Homo sapiens
caggcagcauuuag

SEQ ID NO: 201477 - RNA, 15 nt, Homo sapiens
uguaaagcaggugcc

SEQ ID NO: 201478 - RNA, 15 nt, Homo sapiens
auauacaauaacaua

SEQ ID NO: 201479 - RNA, 21 nt, Homo sapiens
ccugaucagagccgugguccu

SEQ ID NO: 201480 - RNA, 18 nt, Homo sapiens
auuuggaaaauaaaucaa

SEQ ID NO: 201481 - RNA, 17 nt, Homo sapiens
ucauuuuauaugucaaa

SEQ ID NO: 201482 - RNA, 17 nt, Homo sapiens
gcuggagucgggacuaa

SEQ ID NO: 201483 - RNA, 16 nt, Homo sapiens
ucaagaagaagaugga

SEQ ID NO: 201484 - RNA, 17 nt, Homo sapiens
ggaagugugugaucugu

SEQ ID NO: 201485 - RNA, 20 nt, Homo sapiens
ugcauaagugcaugacauau

SEQ ID NO: 201486 - RNA, 19 nt, Homo sapiens
uacuugggagaccuguaau

SEQ ID NO: 201487 - RNA, 17 nt, Homo sapiens
aguguaugacugcacau

SEQ ID NO: 201488 - RNA, 19 nt, Homo sapiens
agcugucccucacuguuga

SEQ ID NO: 201489 - RNA, 20 nt, Homo sapiens
cguccagggagcauuuuccu

SEQ ID NO: 201490 - RNA, 18 nt, Homo sapiens
augagaucuaggugagga

SEQ ID NO: 201491 - RNA, 17 nt, Homo sapiens
uuagagugucuuuccac

SEQ ID NO: 201492 - RNA, 13 nt, Homo sapiens
gcccagugcacac

SEQ ID NO: 201493 - RNA, 21 nt, Homo sapiens
aaaucaaguuggcuucuaauc

SEQ ID NO: 201494 - RNA, 13 nt, Homo sapiens
gagagaacuggag

SEQ ID NO: 201495 - RNA, 18 nt, Homo sapiens
uaugccauagcaagauug

SEQ ID NO: 201496 - RNA, 16 nt, Homo sapiens
augcauaaaugcgauc

SEQ ID NO: 201497 - RNA, 16 nt, Homo sapiens
ccugcccagugcacac

SEQ ID NO: 201498 - RNA, 13 nt, Homo sapiens
aagcacaucugca

SEQ ID NO: 201499 - RNA, 23 nt, Homo sapiens
gguggcagaaucuguuaccagag

SEQ ID NO: 201500 - RNA, 21 nt, Homo sapiens
cuucaugaucaucacaaucau

SEQ ID NO: 201501 - RNA, 16 nt, Homo sapiens
uccaggagaaggccaa

SEQ ID NO: 201502 - RNA, 18 nt, Homo sapiens
ucagcuggaucuccauuc

SEQ ID NO: 201503 - RNA, 19 nt, Homo sapiens
gagugcauugugaggguua

SEQ ID NO: 201504 - RNA, 21 nt, Homo sapiens
cacagagauaauucuagcuuu

SEQ ID NO: 201505 - RNA, 14 nt, Homo sapiens
cccaguguguuucu

SEQ ID NO: 201506 - RNA, 22 nt, Homo sapiens
ucuguuggcaggcuggccaguc

SEQ ID NO: 201507 - RNA, 17 nt, Homo sapiens
uucccacaggacauuuc

SEQ ID NO: 201508 - RNA, 15 nt, Homo sapiens
uccagagaguggcuc

SEQ ID NO: 201509 - RNA, 15 nt, Homo sapiens
cuaucgcaccacugu

SEQ ID NO: 201510 - RNA, 20 nt, Homo sapiens
acucacauccugaccuugca

SEQ ID NO: 201511 - RNA, 18 nt, Homo sapiens
gcaagaucccaucucuuu

SEQ ID NO: 201512 - RNA, 21 nt, Homo sapiens
uguuuggguauauucauuuca

SEQ ID NO: 201513 - RNA, 14 nt, Homo sapiens
uuucaccuucauau

SEQ ID NO: 201514 - RNA, 16 nt, Homo sapiens
cauaugauugugcaca

SEQ ID NO: 201515 - RNA, 17 nt, Homo sapiens
aacaucuuuuacauucu

SEQ ID NO: 201516 - RNA, 22 nt, Homo sapiens
gucaaggauggaugcagaucca

SEQ ID NO: 201517 - RNA, 13 nt, Homo sapiens
augcugacuguac

SEQ ID NO: 201518 - RNA, 14 nt, Homo sapiens
caggaguucagggu

SEQ ID NO: 201519 - RNA, 12 nt, Homo sapiens
ggagcacugggu

SEQ ID NO: 201520 - RNA, 13 nt, Homo sapiens
aaaacacugugca

SEQ ID NO: 201521 - RNA, 23 nt, Homo sapiens
aguguuuggguauauucauuuca

SEQ ID NO: 201522 - RNA, 12 nt, Homo sapiens
agacuuugacuc

SEQ ID NO: 201523 - RNA, 15 nt, Homo sapiens
cuaaagcaauaugca

SEQ ID NO: 201524 - RNA, 15 nt, Homo sapiens
cuuuuauuacugggg

SEQ ID NO: 201525 - RNA, 14 nt, Homo sapiens
uaagaaaacuaaga

SEQ ID NO: 201526 - RNA, 22 nt, Homo sapiens
gcuaugugaagaguaagucaac

SEQ ID NO: 201527 - RNA, 17 nt, Homo sapiens
cuucuaaucaaagcuuu

SEQ ID NO: 201528 - RNA, 11 nt, Homo sapiens
caacagcauuu

SEQ ID NO: 201529 - RNA, 22 nt, Homo sapiens
aucgcugucaucucagcuggau

SEQ ID NO: 201530 - RNA, 14 nt, Homo sapiens
gaaugauucagugu

SEQ ID NO: 201531 - RNA, 23 nt, Homo sapiens
uucuaaaugaauguuuacacucu

SEQ ID NO: 201532 - RNA, 18 nt, Homo sapiens
acugacuuucucagccuc

SEQ ID NO: 201533 - RNA, 14 nt, Homo sapiens
aacuaaauaaagcu

SEQ ID NO: 201534 - RNA, 18 nt, Homo sapiens
gcccgacagccuggcaca

SEQ ID NO: 201535 - RNA, 17 nt, Homo sapiens
agggaauaauccagaaa

SEQ ID NO: 201536 - RNA, 21 nt, Homo sapiens
caaggauggaugcagauccag

SEQ ID NO: 201537 - RNA, 14 nt, Homo sapiens
cacugggcuucuag

SEQ ID NO: 201538 - RNA, 12 nt, Homo sapiens
ggccucaaggga

SEQ ID NO: 201539 - RNA, 12 nt, Homo sapiens
gaaaucaagggc

SEQ ID NO: 201540 - RNA, 23 nt, Homo sapiens
cugggucucgcuuuguugcccag

SEQ ID NO: 201541 - RNA, 15 nt, Homo sapiens
caccccuaaagagau

SEQ ID NO: 201542 - RNA, 21 nt, Homo sapiens
cuuucaggccacauggcuaaa

SEQ ID NO: 201543 - RNA, 23 nt, Homo sapiens
agaauguucuuauguugcccagu

SEQ ID NO: 201544 - RNA, 17 nt, Homo sapiens
aacagcccucaggucag

SEQ ID NO: 201545 - RNA, 17 nt, Homo sapiens
uuuggguuuugggucuu

SEQ ID NO: 201546 - RNA, 14 nt, Homo sapiens
ugguccgaucuuug

SEQ ID NO: 201547 - RNA, 14 nt, Homo sapiens
uggcugccuuagaa

SEQ ID NO: 201548 - RNA, 16 nt, Homo sapiens
ccuccacgccauuucc

SEQ ID NO: 201549 - RNA, 19 nt, Homo sapiens
auccagguaauccaagaua

SEQ ID NO: 201550 - RNA, 17 nt, Homo sapiens
augaaauaucaugcucc

SEQ ID NO: 201551 - RNA, 20 nt, Homo sapiens
accauguacaugaagaagcu

SEQ ID NO: 201552 - RNA, 22 nt, Homo sapiens
cugagugcaccacuucaaguga

SEQ ID NO: 201553 - RNA, 13 nt, Homo sapiens
gucuaagucauga

SEQ ID NO: 201554 - RNA, 12 nt, Homo sapiens
ugacagaucucu

SEQ ID NO: 201555 - RNA, 22 nt, Homo sapiens
ugcaaaaggacucucaggacca

SEQ ID NO: 201556 - RNA, 15 nt, Homo sapiens
auaacuauguugaua

SEQ ID NO: 201557 - RNA, 20 nt, Homo sapiens
ugugaaaguuacaaauugcu

SEQ ID NO: 201558 - RNA, 20 nt, Homo sapiens
cuagaugauugauuaccaag

SEQ ID NO: 201559 - RNA, 14 nt, Homo sapiens
acugaagccuuucu

SEQ ID NO: 201560 - RNA, 12 nt, Homo sapiens
acaaaaucacac

SEQ ID NO: 201561 - RNA, 14 nt, Homo sapiens
gaggucuaaucuag

SEQ ID NO: 201562 - RNA, 14 nt, Homo sapiens
augcagggacaaau

SEQ ID NO: 201563 - RNA, 17 nt, Homo sapiens
cuguauuagucacagag

SEQ ID NO: 201564 - RNA, 16 nt, Homo sapiens
uaagcagaccacugau

SEQ ID NO: 201565 - RNA, 19 nt, Homo sapiens
ugcaagcacaucugcauuu

SEQ ID NO: 201566 - RNA, 18 nt, Homo sapiens
uauuauucuucauaacaa

SEQ ID NO: 201567 - RNA, 19 nt, Homo sapiens
ugggccaagucaaagacau

SEQ ID NO: 201568 - RNA, 18 nt, Homo sapiens
ucagcauucucacuccua

SEQ ID NO: 201569 - RNA, 13 nt, Homo sapiens
uugaaaucuauga

SEQ ID NO: 201570 - RNA, 17 nt, Homo sapiens
cuagugguggguacuca

SEQ ID NO: 201571 - RNA, 18 nt, Homo sapiens
cuuauauucauccaugcc

SEQ ID NO: 201572 - RNA, 18 nt, Homo sapiens
aaacuccugggcucaggc

SEQ ID NO: 201573 - RNA, 20 nt, Homo sapiens
agcucgggcccucugugaga

SEQ ID NO: 201574 - RNA, 21 nt, Homo sapiens
cuguauucccaguuacuuggg

SEQ ID NO: 201575 - RNA, 16 nt, Homo sapiens
uucugucucauaugau

SEQ ID NO: 201576 - RNA, 22 nt, Homo sapiens
uuaucaccgugggcucccugac

SEQ ID NO: 201577 - RNA, 14 nt, Homo sapiens
caaacuaccuucca

SEQ ID NO: 201578 - RNA, 13 nt, Homo sapiens
aguuugauuucau

SEQ ID NO: 201579 - RNA, 20 nt, Homo sapiens
cuccgucuaagucaugagcu

SEQ ID NO: 201580 - RNA, 23 nt, Homo sapiens
auagcaguugaaacaagaagcca

SEQ ID NO: 201581 - RNA, 16 nt, Homo sapiens
ucuuuuacauucugca

SEQ ID NO: 201582 - RNA, 18 nt, Homo sapiens
cuuguaauucuaaaugaa

SEQ ID NO: 201583 - RNA, 23 nt, Homo sapiens
aucacacgucuggcuucacagau

SEQ ID NO: 201584 - RNA, 22 nt, Homo sapiens
gucuucauaauuucuucacuca

SEQ ID NO: 201585 - RNA, 14 nt, Homo sapiens
gaaggcaaacccau

SEQ ID NO: 201586 - RNA, 19 nt, Homo sapiens
cuuggacuauuauaauuua

SEQ ID NO: 201587 - RNA, 21 nt, Homo sapiens
uguauucucugagcugugcag

SEQ ID NO: 201588 - RNA, 20 nt, Homo sapiens
cccagccaaacccugucuga

SEQ ID NO: 201589 - RNA, 22 nt, Homo sapiens
ccuuacauuugaaaucuaugaa

SEQ ID NO: 201590 - RNA, 11 nt, Homo sapiens
cuuaaucacac

SEQ ID NO: 201591 - RNA, 21 nt, Homo sapiens
aaguggugagaacuacucagg

SEQ ID NO: 201592 - RNA, 23 nt, Homo sapiens
uacaacuuuuuaccuaguacaag

SEQ ID NO: 201593 - RNA, 16 nt, Homo sapiens
ccuccugggcccucuc

SEQ ID NO: 201594 - RNA, 15 nt, Homo sapiens
agcagucgugccugu

SEQ ID NO: 201595 - RNA, 18 nt, Homo sapiens
ugcagccuccccaggugu

SEQ ID NO: 201596 - RNA, 19 nt, Homo sapiens
uuguuguuuauaaagggag

SEQ ID NO: 201597 - RNA, 16 nt, Homo sapiens
uccuuggcuuuuacug

SEQ ID NO: 201598 - RNA, 15 nt, Homo sapiens
caaguagcacccugg

SEQ ID NO: 201599 - RNA, 16 nt, Homo sapiens
gcauugagcaaagggg

SEQ ID NO: 201600 - RNA, 15 nt, Homo sapiens
cacaggcagcauuua

SEQ ID NO: 201601 - RNA, 19 nt, Homo sapiens
cauucagggauagcacuga

SEQ ID NO: 201602 - RNA, 13 nt, Homo sapiens
cacagugcaucuc

SEQ ID NO: 201603 - RNA, 17 nt, Homo sapiens
acaguauacgcuccauc

SEQ ID NO: 201604 - RNA, 17 nt, Homo sapiens
ucccccagccucaaguc

SEQ ID NO: 201605 - RNA, 16 nt, Homo sapiens
accuguaaucauauaa

SEQ ID NO: 201606 - RNA, 22 nt, Homo sapiens
aucucauuggacccuuccaugg

SEQ ID NO: 201607 - RNA, 13 nt, Homo sapiens
uuuuccacuuaga

SEQ ID NO: 201608 - RNA, 18 nt, Homo sapiens
guggcuucccgcucagcc

SEQ ID NO: 201609 - RNA, 19 nt, Homo sapiens
uauuuuauucccuuucaca

SEQ ID NO: 201610 - RNA, 15 nt, Homo sapiens
cacuucucucaggau

SEQ ID NO: 201611 - RNA, 14 nt, Homo sapiens
cauuugcuuugucc

SEQ ID NO: 201612 - RNA, 22 nt, Homo sapiens
cuaccuugguucccccacugau

SEQ ID NO: 201613 - RNA, 14 nt, Homo sapiens
aaugcccagugacc

SEQ ID NO: 201614 - RNA, 16 nt, Homo sapiens
ugcaccaagcaggaaa

SEQ ID NO: 201615 - RNA, 18 nt, Homo sapiens
cugcacagugcaucucag

SEQ ID NO: 201616 - RNA, 13 nt, Homo sapiens
gcaccuaccucac

SEQ ID NO: 201617 - RNA, 19 nt, Homo sapiens
ucguuugaaucacaguaua

SEQ ID NO: 201618 - RNA, 19 nt, Homo sapiens
aaucaggaauauuuuccaa

SEQ ID NO: 201619 - RNA, 19 nt, Homo sapiens
aucccccgcugguggcaga

SEQ ID NO: 201620 - RNA, 23 nt, Homo sapiens
cuuugucccggggcuccacugaa

SEQ ID NO: 201621 - RNA, 21 nt, Homo sapiens
agccuauguaugccauggagg

SEQ ID NO: 201622 - RNA, 18 nt, Homo sapiens
uagcauacgguaugauau

SEQ ID NO: 201623 - RNA, 21 nt, Homo sapiens
gguauauucauuucaaaggga

SEQ ID NO: 201624 - RNA, 14 nt, Homo sapiens
agucuucaagcaga

SEQ ID NO: 201625 - RNA, 16 nt, Homo sapiens
ucuugaguuuagugau

SEQ ID NO: 201626 - RNA, 21 nt, Homo sapiens
ccacauccuccacguucugcu

SEQ ID NO: 201627 - RNA, 22 nt, Homo sapiens
uaugguuaauaaguuucacuga

SEQ ID NO: 201628 - RNA, 15 nt, Homo sapiens
ccgagucucuucucc

SEQ ID NO: 201629 - RNA, 20 nt, Homo sapiens
cagggaaaucaggguuacaa

SEQ ID NO: 201630 - RNA, 23 nt, Homo sapiens
uuacaguaggagcccagcucuga

SEQ ID NO: 201631 - RNA, 14 nt, Homo sapiens
acugcaagcacugc

SEQ ID NO: 201632 - RNA, 13 nt, Homo sapiens
cggaguugugcac

SEQ ID NO: 201633 - RNA, 19 nt, Homo sapiens
ggcccgacagccuggcaca

SEQ ID NO: 201634 - RNA, 13 nt, Homo sapiens
uuuagauuguuaa

SEQ ID NO: 201635 - RNA, 15 nt, Homo sapiens
caauaguuguugauu

SEQ ID NO: 201636 - RNA, 18 nt, Homo sapiens
ugauaucccccagccuca

SEQ ID NO: 201637 - RNA, 13 nt, Homo sapiens
uaaugaaugcaua

SEQ ID NO: 201638 - RNA, 16 nt, Homo sapiens
aguauuugcauauucu

SEQ ID NO: 201639 - RNA, 18 nt, Homo sapiens
acccucuccccacugcuc

SEQ ID NO: 201640 - RNA, 16 nt, Homo sapiens
cacaggcagcauuuag

SEQ ID NO: 201641 - RNA, 15 nt, Homo sapiens
acuauguaacaugua

SEQ ID NO: 201642 - RNA, 18 nt, Homo sapiens
uaccuaguagucauuuca

SEQ ID NO: 201643 - RNA, 13 nt, Homo sapiens
uugaaaagucaaa

SEQ ID NO: 201644 - RNA, 15 nt, Homo sapiens
uuuggagguauucaa

SEQ ID NO: 201645 - RNA, 20 nt, Homo sapiens
cuaugaaauaucaugcucca

SEQ ID NO: 201646 - RNA, 23 nt, Homo sapiens
cccuaugugggugggaccacaga

SEQ ID NO: 201647 - RNA, 22 nt, Homo sapiens
uaaucagggaggucauuuuggu

SEQ ID NO: 201648 - RNA, 17 nt, Homo sapiens
agggcauggccaggugg

SEQ ID NO: 201649 - RNA, 18 nt, Homo sapiens
gcaaagggagcacugggu

SEQ ID NO: 201650 - RNA, 12 nt, Homo sapiens
uguaugcacuuu

SEQ ID NO: 201651 - RNA, 19 nt, Homo sapiens
caaucaucaucauucucau

SEQ ID NO: 201652 - RNA, 15 nt, Homo sapiens
aaaaaucagugaaua

SEQ ID NO: 201653 - RNA, 19 nt, Homo sapiens
guccuccacgccauuuccu

SEQ ID NO: 201654 - RNA, 21 nt, Homo sapiens
ucuucauaauuucuucacuca

SEQ ID NO: 201655 - RNA, 21 nt, Homo sapiens
gagacaaaaucuuaaaugcca

SEQ ID NO: 201656 - RNA, 11 nt, Homo sapiens
auucuaugagg

SEQ ID NO: 201657 - RNA, 18 nt, Homo sapiens
agaaucuguuaccagagg

SEQ ID NO: 201658 - RNA, 17 nt, Homo sapiens
gaccuggugcugccucu

SEQ ID NO: 201659 - RNA, 20 nt, Homo sapiens
auaaaauuaugccauagcaa

SEQ ID NO: 201660 - RNA, 17 nt, Homo sapiens
cugaaguaagcaaagac

SEQ ID NO: 201661 - RNA, 18 nt, Homo sapiens
aauaccaaaauuauuuca

SEQ ID NO: 201662 - RNA, 21 nt, Homo sapiens
uaccugaaaacacugugcaca

SEQ ID NO: 201663 - RNA, 19 nt, Homo sapiens
cugggccaagucaaagaca

SEQ ID NO: 201664 - RNA, 18 nt, Homo sapiens
cuaaaugaauguuuacac

SEQ ID NO: 201665 - RNA, 17 nt, Homo sapiens
gacuccugugcaacuuu

SEQ ID NO: 201666 - RNA, 16 nt, Homo sapiens
uaauucuagcuuugag

SEQ ID NO: 201667 - RNA, 15 nt, Homo sapiens
acccuuccucaccac

SEQ ID NO: 201668 - RNA, 16 nt, Homo sapiens
cuugauccacuucucu

SEQ ID NO: 201669 - RNA, 15 nt, Homo sapiens
cugcccagugcacac

SEQ ID NO: 201670 - RNA, 17 nt, Homo sapiens
accucaaccuaugguau

SEQ ID NO: 201671 - RNA, 17 nt, Homo sapiens
uguagaagccacuauua

SEQ ID NO: 201672 - RNA, 13 nt, Homo sapiens
uaccugggcauuc

SEQ ID NO: 201673 - RNA, 19 nt, Homo sapiens
ucaccauuuggcaaugcca

SEQ ID NO: 201674 - RNA, 13 nt, Homo sapiens
uagaaccaggcaa

SEQ ID NO: 201675 - RNA, 14 nt, Homo sapiens
aaugaauguuuaca

SEQ ID NO: 201676 - RNA, 11 nt, Homo sapiens
ccgugccuuca

SEQ ID NO: 201677 - RNA, 21 nt, Homo sapiens
uucaguauguugucaaagaga

SEQ ID NO: 201678 - RNA, 16 nt, Homo sapiens
gagagccaccaagagg

SEQ ID NO: 201679 - RNA, 14 nt, Homo sapiens
gauccacuucucuc

SEQ ID NO: 201680 - RNA, 14 nt, Homo sapiens
uccucaccacuucc

SEQ ID NO: 201681 - RNA, 16 nt, Homo sapiens
ugccacacggcucuca

SEQ ID NO: 201682 - RNA, 22 nt, Homo sapiens
gcauuaucuaugauaugcuaau

SEQ ID NO: 201683 - RNA, 15 nt, Homo sapiens
augagagaacuggag

SEQ ID NO: 201684 - RNA, 21 nt, Homo sapiens
uauauauuuuugugcacauuu

SEQ ID NO: 201685 - RNA, 13 nt, Homo sapiens
accaggucaggga

SEQ ID NO: 201686 - RNA, 12 nt, Homo sapiens
cauuaucuauga

SEQ ID NO: 201687 - RNA, 17 nt, Homo sapiens
auccaugaaccaagacc

SEQ ID NO: 201688 - RNA, 17 nt, Homo sapiens
uugucgcucaugugugc

SEQ ID NO: 201689 - RNA, 21 nt, Homo sapiens
acaggacccugggaccacaga

SEQ ID NO: 201690 - RNA, 17 nt, Homo sapiens
gugguccuuugggguga

SEQ ID NO: 201691 - RNA, 16 nt, Homo sapiens
uucacagaugugugau

SEQ ID NO: 201692 - RNA, 20 nt, Homo sapiens
augggaaggguccaucucag

SEQ ID NO: 201693 - RNA, 17 nt, Homo sapiens
cucgcuuuguugcccag

SEQ ID NO: 201694 - RNA, 17 nt, Homo sapiens
caaagcuuucauguaaa

SEQ ID NO: 201695 - RNA, 22 nt, Homo sapiens
auugcugccccaucagugcucc

SEQ ID NO: 201696 - RNA, 16 nt, Homo sapiens
auguuugucucauccc

SEQ ID NO: 201697 - RNA, 13 nt, Homo sapiens
uugcccagugugu

SEQ ID NO: 201698 - RNA, 20 nt, Homo sapiens
ugguugaguguugcucucua

SEQ ID NO: 201699 - RNA, 17 nt, Homo sapiens
agauaauuauaauauac

SEQ ID NO: 201700 - RNA, 22 nt, Homo sapiens
ccuaaucuauggucgggagaca

SEQ ID NO: 201701 - RNA, 16 nt, Homo sapiens
aguucauauguaccau

SEQ ID NO: 201702 - RNA, 19 nt, Homo sapiens
uuacauuugaaaucuauga

SEQ ID NO: 201703 - RNA, 14 nt, Homo sapiens
ugcauuaucuauga

SEQ ID NO: 201704 - RNA, 19 nt, Homo sapiens
auuccuauauaguuuauug

SEQ ID NO: 201705 - RNA, 14 nt, Homo sapiens
gugaaaugcuggca

SEQ ID NO: 201706 - RNA, 16 nt, Homo sapiens
uauuuuaaguauugca

SEQ ID NO: 201707 - RNA, 20 nt, Homo sapiens
cccuuucugugugaagauca

SEQ ID NO: 201708 - RNA, 21 nt, Homo sapiens
gauccaccugucucagccucc

SEQ ID NO: 201709 - RNA, 17 nt, Homo sapiens
gcuauaacuauguugau

SEQ ID NO: 201710 - RNA, 21 nt, Homo sapiens
ugugcaguguugacaguucau

SEQ ID NO: 201711 - RNA, 13 nt, Homo sapiens
uguucagaugcuu

SEQ ID NO: 201712 - RNA, 14 nt, Homo sapiens
uuucuuacauuagc

SEQ ID NO: 201713 - RNA, 23 nt, Homo sapiens
aagucacugcacagugcaucuca

SEQ ID NO: 201714 - RNA, 15 nt, Homo sapiens
uaauacagggcauuu

SEQ ID NO: 201715 - RNA, 19 nt, Homo sapiens
gaucccaggggaguguuca

SEQ ID NO: 201716 - RNA, 11 nt, Homo sapiens
aaaauaugcau

SEQ ID NO: 201717 - RNA, 12 nt, Homo sapiens
auuucaucucuu

SEQ ID NO: 201718 - RNA, 18 nt, Homo sapiens
ugaagccuauguaugcca

SEQ ID NO: 201719 - RNA, 21 nt, Homo sapiens
gauccgucuuuggccuccucc

SEQ ID NO: 201720 - RNA, 22 nt, Homo sapiens
acuuagaaauugcauuuccuga

SEQ ID NO: 201721 - RNA, 15 nt, Homo sapiens
aagugugugaucugu

SEQ ID NO: 201722 - RNA, 18 nt, Homo sapiens
accacaggcagcauuuag

SEQ ID NO: 201723 - RNA, 14 nt, Homo sapiens
aacucugcauucua

SEQ ID NO: 201724 - RNA, 16 nt, Homo sapiens
ucauccacuagugcaa

SEQ ID NO: 201725 - RNA, 21 nt, Homo sapiens
aggccugggccgcugccacgu

SEQ ID NO: 201726 - RNA, 18 nt, Homo sapiens
aaagacaccuacugagug

SEQ ID NO: 201727 - RNA, 20 nt, Homo sapiens
acuccgagagcaugcuuaau

SEQ ID NO: 201728 - RNA, 19 nt, Homo sapiens
augggcagagcccaaggga

SEQ ID NO: 201729 - RNA, 18 nt, Homo sapiens
gucuaggaacauacuuca

SEQ ID NO: 201730 - RNA, 23 nt, Homo sapiens
agcucugaaaccaguguuaggga

SEQ ID NO: 201731 - RNA, 12 nt, Homo sapiens
cguuuaaucaca

SEQ ID NO: 201732 - RNA, 23 nt, Homo sapiens
cauagaggugagggaagccugaa

SEQ ID NO: 201733 - RNA, 13 nt, Homo sapiens
auaucaugcucca

SEQ ID NO: 201734 - RNA, 11 nt, Homo sapiens
agaauggagcu

SEQ ID NO: 201735 - RNA, 13 nt, Homo sapiens
aauguucauccca

SEQ ID NO: 201736 - RNA, 19 nt, Homo sapiens
uguguuuuguuuuguauca

SEQ ID NO: 201737 - RNA, 20 nt, Homo sapiens
aagggaauucggugugcacc

SEQ ID NO: 201738 - RNA, 17 nt, Homo sapiens
caugagaucuaggugag

SEQ ID NO: 201739 - RNA, 15 nt, Homo sapiens
cucugagcugugcag

SEQ ID NO: 201740 - RNA, 16 nt, Homo sapiens
cuuucaaccucaguga

SEQ ID NO: 201741 - RNA, 23 nt, Homo sapiens
ugaucggagccuccucucucaaa

SEQ ID NO: 201742 - RNA, 13 nt, Homo sapiens
caggugcacagac

SEQ ID NO: 201743 - RNA, 14 nt, Homo sapiens
uguuaucagucaua

SEQ ID NO: 201744 - RNA, 12 nt, Homo sapiens
aggcucuucucc

SEQ ID NO: 201745 - RNA, 20 nt, Homo sapiens
ggccucaagggaugucucac

SEQ ID NO: 201746 - RNA, 14 nt, Homo sapiens
ucagccacauucua

SEQ ID NO: 201747 - RNA, 11 nt, Homo sapiens
cccagcacugc

SEQ ID NO: 201748 - RNA, 13 nt, Homo sapiens
acucaaucucuga

SEQ ID NO: 201749 - RNA, 13 nt, Homo sapiens
auccuuuacuguu

SEQ ID NO: 201750 - RNA, 16 nt, Homo sapiens
ucccauagccaggaaa

SEQ ID NO: 201751 - RNA, 14 nt, Homo sapiens
gcucacaccuguaa

SEQ ID NO: 201752 - RNA, 16 nt, Homo sapiens
auguugcccagugugu

SEQ ID NO: 201753 - RNA, 14 nt, Homo sapiens
gcgcucagggccau

SEQ ID NO: 201754 - RNA, 16 nt, Homo sapiens
ugcauugugaggguua

SEQ ID NO: 201755 - RNA, 18 nt, Homo sapiens
uuggcuuguuuggagcau

SEQ ID NO: 201756 - RNA, 16 nt, Homo sapiens
ccuccagaauggagcu

SEQ ID NO: 201757 - RNA, 14 nt, Homo sapiens
ccugacaccuuuca

SEQ ID NO: 201758 - RNA, 16 nt, Homo sapiens
aaaggagggucaggaa

SEQ ID NO: 201759 - RNA, 13 nt, Homo sapiens
aaaauagcaacac

SEQ ID NO: 201760 - RNA, 17 nt, Homo sapiens
caaggugacauuuccau

SEQ ID NO: 201761 - RNA, 17 nt, Homo sapiens
acuuuuaaguugcugau

SEQ ID NO: 201762 - RNA, 20 nt, Homo sapiens
gcugccucuugaaugcaggg

SEQ ID NO: 201763 - RNA, 21 nt, Homo sapiens
gcaggaacuugcacaaaauca

SEQ ID NO: 201764 - RNA, 16 nt, Homo sapiens
augccucuguauuuaa

SEQ ID NO: 201765 - RNA, 11 nt, Homo sapiens
uucaacuggag

SEQ ID NO: 201766 - RNA, 17 nt, Homo sapiens
ugaaaacacugugcaca

SEQ ID NO: 201767 - RNA, 18 nt, Homo sapiens
acuucucuauuaucucaa

SEQ ID NO: 201768 - RNA, 19 nt, Homo sapiens
augaugucguuugaaucac

SEQ ID NO: 201769 - RNA, 19 nt, Homo sapiens
uacagaaucaaaugcaauu

SEQ ID NO: 201770 - RNA, 16 nt, Homo sapiens
acaguagauuuuccaa

SEQ ID NO: 201771 - RNA, 12 nt, Homo sapiens
ggcgugaucuug

SEQ ID NO: 201772 - RNA, 15 nt, Homo sapiens
gcugucuuucacuga

SEQ ID NO: 201773 - RNA, 20 nt, Homo sapiens
aauucuagcuuugagcuuaa

SEQ ID NO: 201774 - RNA, 23 nt, Homo sapiens
aaggcucgauuuuguaucugcag

SEQ ID NO: 201775 - RNA, 19 nt, Homo sapiens
uggccuaaaaaugcaacuu

SEQ ID NO: 201776 - RNA, 15 nt, Homo sapiens
ccagagggcacucug

SEQ ID NO: 201777 - RNA, 23 nt, Homo sapiens
auuuaucugugcaaauccuugau

SEQ ID NO: 201778 - RNA, 16 nt, Homo sapiens
cauuuggcaaugccau

SEQ ID NO: 201779 - RNA, 15 nt, Homo sapiens
guaaggugagggaau

SEQ ID NO: 201780 - RNA, 18 nt, Homo sapiens
gcaagaagucaaaguaaa

SEQ ID NO: 201781 - RNA, 22 nt, Homo sapiens
cugauucugucaaugucuugaa

SEQ ID NO: 201782 - RNA, 13 nt, Homo sapiens
auggccagccaac

SEQ ID NO: 201783 - RNA, 15 nt, Homo sapiens
guauauacaauaaca

SEQ ID NO: 201784 - RNA, 13 nt, Homo sapiens
accauucaggaca

SEQ ID NO: 201785 - RNA, 19 nt, Homo sapiens
uuauuacauggggucuaga

SEQ ID NO: 201786 - RNA, 21 nt, Homo sapiens
uuguagagauggggucucaca

SEQ ID NO: 201787 - RNA, 23 nt, Homo sapiens
ucgccuccucuacaauuugccau

SEQ ID NO: 201788 - RNA, 19 nt, Homo sapiens
uaucauuuucugcauuuaa

SEQ ID NO: 201789 - RNA, 17 nt, Homo sapiens
aagccuuuggcucuucu

SEQ ID NO: 201790 - RNA, 19 nt, Homo sapiens
aucaggaauauuuuccaaa

SEQ ID NO: 201791 - RNA, 21 nt, Homo sapiens
cccugacugggaguugaucgc

SEQ ID NO: 201792 - RNA, 21 nt, Homo sapiens
uuguuuuaugcucagggucaa

SEQ ID NO: 201793 - RNA, 19 nt, Homo sapiens
gugacauuuccaugcauaa

SEQ ID NO: 201794 - RNA, 14 nt, Homo sapiens
guaaacugugcacc

SEQ ID NO: 201795 - RNA, 19 nt, Homo sapiens
agggggccaggugcacaga

SEQ ID NO: 201796 - RNA, 23 nt, Homo sapiens
ccaaggagggcagaucacuucag

SEQ ID NO: 201797 - RNA, 22 nt, Homo sapiens
caagcuaaaauuagaugaacuc

SEQ ID NO: 201798 - RNA, 15 nt, Homo sapiens
gcaagcacaucugca

SEQ ID NO: 201799 - RNA, 15 nt, Homo sapiens
gucuuuacagaauca

SEQ ID NO: 201800 - RNA, 21 nt, Homo sapiens
gaccucaaaggugauugugcc

SEQ ID NO: 201801 - RNA, 15 nt, Homo sapiens
acaucugugucuugu

SEQ ID NO: 201802 - RNA, 12 nt, Homo sapiens
gaagaagcuaaa

SEQ ID NO: 201803 - RNA, 13 nt, Homo sapiens
gcaaggugacauu

SEQ ID NO: 201804 - RNA, 15 nt, Homo sapiens
ugguggagggccaca

SEQ ID NO: 201805 - RNA, 15 nt, Homo sapiens
aucuuuuaagcccau

SEQ ID NO: 201806 - RNA, 16 nt, Homo sapiens
uggggagaaaagacau

SEQ ID NO: 201807 - RNA, 12 nt, Homo sapiens
gcuuauauucau

SEQ ID NO: 201808 - RNA, 18 nt, Homo sapiens
ugucuacguuaccaggca

SEQ ID NO: 201809 - RNA, 14 nt, Homo sapiens
cuaaaaccaucaua

SEQ ID NO: 201810 - RNA, 20 nt, Homo sapiens
aaggagggcagaucacuuca

SEQ ID NO: 201811 - RNA, 14 nt, Homo sapiens
uuuaaucacauucg

SEQ ID NO: 201812 - RNA, 18 nt, Homo sapiens
uccuucaagccuagcccu

SEQ ID NO: 201813 - RNA, 19 nt, Homo sapiens
acuguuggcaaggugacau

SEQ ID NO: 201814 - RNA, 21 nt, Homo sapiens
uaccugcccccaauccaugaa

SEQ ID NO: 201815 - RNA, 14 nt, Homo sapiens
acacuaacauauaa

SEQ ID NO: 201816 - RNA, 22 nt, Homo sapiens
uuuggaaaucacacgucuggcu

SEQ ID NO: 201817 - RNA, 16 nt, Homo sapiens
guccaggcacugagau

SEQ ID NO: 201818 - RNA, 14 nt, Homo sapiens
cagcucacacauga

SEQ ID NO: 201819 - RNA, 15 nt, Homo sapiens
gcagugacagaacua

SEQ ID NO: 201820 - RNA, 15 nt, Homo sapiens
uuaaucccacuugcc

SEQ ID NO: 201821 - RNA, 21 nt, Homo sapiens
ucuacccaaaggauacuguaa

SEQ ID NO: 201822 - RNA, 19 nt, Homo sapiens
auuugcauaacaauuccuc

SEQ ID NO: 201823 - RNA, 18 nt, Homo sapiens
cuugccccuguuaccuaa

SEQ ID NO: 201824 - RNA, 13 nt, Homo sapiens
ucgcuucuugccu

SEQ ID NO: 201825 - RNA, 17 nt, Homo sapiens
uccuaaaguagacuuca

SEQ ID NO: 201826 - RNA, 20 nt, Homo sapiens
ucauucagggauagcacuga

SEQ ID NO: 201827 - RNA, 15 nt, Homo sapiens
agucgaacaauucau

SEQ ID NO: 201828 - RNA, 16 nt, Homo sapiens
aacucaacuuugacaa

SEQ ID NO: 201829 - RNA, 19 nt, Homo sapiens
aacuuggauguaccugccc

SEQ ID NO: 201830 - RNA, 14 nt, Homo sapiens
cacuauuacuggga

SEQ ID NO: 201831 - RNA, 15 nt, Homo sapiens
ggccugcacuggugu

SEQ ID NO: 201832 - RNA, 22 nt, Homo sapiens
uuccugccugcggaccagauga

SEQ ID NO: 201833 - RNA, 14 nt, Homo sapiens
aagaaaaucauauu

SEQ ID NO: 201834 - RNA, 14 nt, Homo sapiens
ugaguuuucagugg

SEQ ID NO: 201835 - RNA, 14 nt, Homo sapiens
ugaaugcagggaca

SEQ ID NO: 201836 - RNA, 12 nt, Homo sapiens
acugucucaaga

SEQ ID NO: 201837 - RNA, 17 nt, Homo sapiens
caugaucaucacaauca

SEQ ID NO: 201838 - RNA, 15 nt, Homo sapiens
aucccccagccucaa

SEQ ID NO: 201839 - RNA, 14 nt, Homo sapiens
caagaucugaauuu

SEQ ID NO: 201840 - RNA, 21 nt, Homo sapiens
ucacuaggcccccacuugccu

SEQ ID NO: 201841 - RNA, 21 nt, Homo sapiens
agauggggucucacaguguug

SEQ ID NO: 201842 - RNA, 17 nt, Homo sapiens
gaccugacaccuuucau

SEQ ID NO: 201843 - RNA, 14 nt, Homo sapiens
gaccagaaccagag

SEQ ID NO: 201844 - RNA, 20 nt, Homo sapiens
ugauuaguaaagaaaugaca

SEQ ID NO: 201845 - RNA, 23 nt, Homo sapiens
cuucgauacaccgggccuggaga

SEQ ID NO: 201846 - RNA, 15 nt, Homo sapiens
aauucggugugcacc

SEQ ID NO: 201847 - RNA, 12 nt, Homo sapiens
cuccccauuugc

SEQ ID NO: 201848 - RNA, 15 nt, Homo sapiens
uugggaacugcaaua

SEQ ID NO: 201849 - RNA, 21 nt, Homo sapiens
uauaguuuauugacaauaauu

SEQ ID NO: 201850 - RNA, 16 nt, Homo sapiens
gcagaaccuccuggaa

SEQ ID NO: 201851 - RNA, 20 nt, Homo sapiens
gccauaaaacauuaagaaaa

SEQ ID NO: 201852 - RNA, 20 nt, Homo sapiens
cucauaugauugugcacaua

SEQ ID NO: 201853 - RNA, 13 nt, Homo sapiens
ccuccacgccauu

SEQ ID NO: 201854 - RNA, 15 nt, Homo sapiens
gaauaguaaguggug

SEQ ID NO: 201855 - RNA, 23 nt, Homo sapiens
cuucaagccuagcccuucucuca

SEQ ID NO: 201856 - RNA, 17 nt, Homo sapiens
uucagggauagcacuga

SEQ ID NO: 201857 - RNA, 20 nt, Homo sapiens
ugguuaauaaguuucacuga

SEQ ID NO: 201858 - RNA, 19 nt, Homo sapiens
ugauauguucaacuggaga

SEQ ID NO: 201859 - RNA, 18 nt, Homo sapiens
agcaagaucccaucucuu

SEQ ID NO: 201860 - RNA, 13 nt, Homo sapiens
agaaggaaaaaug

SEQ ID NO: 201861 - RNA, 18 nt, Homo sapiens
ccuuccucaccacuuccc

SEQ ID NO: 201862 - RNA, 14 nt, Homo sapiens
gcacccuugcgcuu

SEQ ID NO: 201863 - RNA, 21 nt, Homo sapiens
cauaauguuacauuauuauca

SEQ ID NO: 201864 - RNA, 19 nt, Homo sapiens
cacuugggucuucccugua

SEQ ID NO: 201865 - RNA, 17 nt, Homo sapiens
gcugaaauaaaaauaca

SEQ ID NO: 201866 - RNA, 14 nt, Homo sapiens
ucucugugccuucg

SEQ ID NO: 201867 - RNA, 14 nt, Homo sapiens
aguaaguggugaga

SEQ ID NO: 201868 - RNA, 21 nt, Homo sapiens
caaaaucauuuuauaugucaa

SEQ ID NO: 201869 - RNA, 20 nt, Homo sapiens
caaagcauugagcaaagggg

SEQ ID NO: 201870 - RNA, 22 nt, Homo sapiens
ucucauaugauugugcacauac

SEQ ID NO: 201871 - RNA, 19 nt, Homo sapiens
uuucauccacuagugcaaa

SEQ ID NO: 201872 - RNA, 19 nt, Homo sapiens
agucauuugcugagcaugu

SEQ ID NO: 201873 - RNA, 20 nt, Homo sapiens
accuucuguggcucacagaa

SEQ ID NO: 201874 - RNA, 19 nt, Homo sapiens
auucucugucucauccauc

SEQ ID NO: 201875 - RNA, 12 nt, Homo sapiens
aagcacuugugg

SEQ ID NO: 201876 - RNA, 20 nt, Homo sapiens
ucuauggcacccaugcaccu

SEQ ID NO: 201877 - RNA, 22 nt, Homo sapiens
agccucacugcaagcacugcau

SEQ ID NO: 201878 - RNA, 23 nt, Homo sapiens
aauauuguccauuguccaauccu

SEQ ID NO: 201879 - RNA, 20 nt, Homo sapiens
uguuaucagucauaacuaaa

SEQ ID NO: 201880 - RNA, 19 nt, Homo sapiens
aguuuauacuucucuauua

SEQ ID NO: 201881 - RNA, 23 nt, Homo sapiens
ucuucccuguaugauuccuugau

SEQ ID NO: 201882 - RNA, 16 nt, Homo sapiens
aucucaccccauccca

SEQ ID NO: 201883 - RNA, 15 nt, Homo sapiens
cuugaaaagacauca

SEQ ID NO: 201884 - RNA, 14 nt, Homo sapiens
auuuuugugcacau

SEQ ID NO: 201885 - RNA, 17 nt, Homo sapiens
cauccugaccuugcaca

SEQ ID NO: 201886 - RNA, 16 nt, Homo sapiens
aggacuuccauuugcu

SEQ ID NO: 201887 - RNA, 12 nt, Homo sapiens
gugagacccagc

SEQ ID NO: 201888 - RNA, 13 nt, Homo sapiens
agucacagagaua

SEQ ID NO: 201889 - RNA, 18 nt, Homo sapiens
aacaccaacauguuggga

SEQ ID NO: 201890 - RNA, 18 nt, Homo sapiens
gcucauauuguucccuau

SEQ ID NO: 201891 - RNA, 16 nt, Homo sapiens
ugccauaaaacauuaa

SEQ ID NO: 201892 - RNA, 15 nt, Homo sapiens
aaggaaaucucaccc

SEQ ID NO: 201893 - RNA, 14 nt, Homo sapiens
uuuaaaaucuguca

SEQ ID NO: 201894 - RNA, 22 nt, Homo sapiens
aggcuccagagggcacucugcu

SEQ ID NO: 201895 - RNA, 22 nt, Homo sapiens
ucacaaucaucaucauucucau

SEQ ID NO: 201896 - RNA, 17 nt, Homo sapiens
ugcauuaucuaugauau

SEQ ID NO: 201897 - RNA, 13 nt, Homo sapiens
ugaagccacagca

SEQ ID NO: 201898 - RNA, 16 nt, Homo sapiens
gaauaugauuaguaaa

SEQ ID NO: 201899 - RNA, 12 nt, Homo sapiens
cagaccacugau

SEQ ID NO: 201900 - RNA, 15 nt, Homo sapiens
cagagcccaagggaa

SEQ ID NO: 201901 - RNA, 14 nt, Homo sapiens
ucucaggaccaaag

SEQ ID NO: 201902 - RNA, 16 nt, Homo sapiens
augcguuuaaucacau

SEQ ID NO: 201903 - RNA, 19 nt, Homo sapiens
gcauagaguucagacuuuu

SEQ ID NO: 201904 - RNA, 20 nt, Homo sapiens
uuaguuuacaaucagccaca

SEQ ID NO: 201905 - RNA, 12 nt, Homo sapiens
ccuuccacugag

SEQ ID NO: 201906 - RNA, 18 nt, Homo sapiens
ccacuagugcaaaucaua

SEQ ID NO: 201907 - RNA, 19 nt, Homo sapiens
cuugaaagaaaauaugcau

SEQ ID NO: 201908 - RNA, 19 nt, Homo sapiens
aucaauuauagaaagccaa

SEQ ID NO: 201909 - RNA, 23 nt, Homo sapiens
gcauacgguaugauauugcagcu

SEQ ID NO: 201910 - RNA, 13 nt, Homo sapiens
aucaucauucuca

SEQ ID NO: 201911 - RNA, 13 nt, Homo sapiens
gaguuuucagugg

SEQ ID NO: 201912 - RNA, 20 nt, Homo sapiens
uguuucaauugcaucuccca

SEQ ID NO: 201913 - RNA, 14 nt, Homo sapiens
cuauguuauauuga

SEQ ID NO: 201914 - RNA, 13 nt, Homo sapiens
guaccugugcacg

SEQ ID NO: 201915 - RNA, 18 nt, Homo sapiens
gcugccagcucuguauca

SEQ ID NO: 201916 - RNA, 17 nt, Homo sapiens
uauuuaugccucuguau

SEQ ID NO: 201917 - RNA, 17 nt, Homo sapiens
cccaugggaagggucca

SEQ ID NO: 201918 - RNA, 12 nt, Homo sapiens
uauuuaccugaa

SEQ ID NO: 201919 - RNA, 23 nt, Homo sapiens
gcaggagagaaugcccagugacc

SEQ ID NO: 201920 - RNA, 19 nt, Homo sapiens
cagggaaaauuauuugcau

SEQ ID NO: 201921 - RNA, 19 nt, Homo sapiens
cuggcauuugcaccuaccu

SEQ ID NO: 201922 - RNA, 19 nt, Homo sapiens
ggcagaucccacuugcagc

SEQ ID NO: 201923 - RNA, 21 nt, Homo sapiens
agcaagugcuggagucgggac

SEQ ID NO: 201924 - RNA, 21 nt, Homo sapiens
guaggaccaagcaucuugggg

SEQ ID NO: 201925 - RNA, 23 nt, Homo sapiens
cacagagugcauugugaggguua

SEQ ID NO: 201926 - RNA, 17 nt, Homo sapiens
auuccaccugcaaucaa

SEQ ID NO: 201927 - RNA, 21 nt, Homo sapiens
gcagaccacugauaaaaccau

SEQ ID NO: 201928 - RNA, 14 nt, Homo sapiens
uuugacaaccauga

SEQ ID NO: 201929 - RNA, 20 nt, Homo sapiens
gcauuuagacccugcauuua

SEQ ID NO: 201930 - RNA, 21 nt, Homo sapiens
cuugacuuuagucugcaaaau

SEQ ID NO: 201931 - RNA, 13 nt, Homo sapiens
ccaggucagggag

SEQ ID NO: 201932 - RNA, 19 nt, Homo sapiens
uauauuugaaguggagcca

SEQ ID NO: 201933 - RNA, 18 nt, Homo sapiens
acuccaggcugucuuuca

SEQ ID NO: 201934 - RNA, 21 nt, Homo sapiens
caggagggguuaaagcugccg

SEQ ID NO: 201935 - RNA, 17 nt, Homo sapiens
gacuucugccuggagac

SEQ ID NO: 201936 - RNA, 15 nt, Homo sapiens
ucucugagcagugaa

SEQ ID NO: 201937 - RNA, 15 nt, Homo sapiens
acauuagccuaugug

SEQ ID NO: 201938 - RNA, 12 nt, Homo sapiens
uaggaacauacu

SEQ ID NO: 201939 - RNA, 15 nt, Homo sapiens
caggcuggccagucc

SEQ ID NO: 201940 - RNA, 12 nt, Homo sapiens
ugaaaagucaaa

SEQ ID NO: 201941 - RNA, 14 nt, Homo sapiens
uccgcccugccacu

SEQ ID NO: 201942 - RNA, 21 nt, Homo sapiens
ugcaaauccuugauacugcuc

SEQ ID NO: 201943 - RNA, 22 nt, Homo sapiens
uacagcuaaucagcauucucac

SEQ ID NO: 201944 - RNA, 18 nt, Homo sapiens
uggaggaaagugauaucc

SEQ ID NO: 201945 - RNA, 18 nt, Homo sapiens
aggagggcagaucacuuc

SEQ ID NO: 201946 - RNA, 15 nt, Homo sapiens
aaaaauccuacaagg

SEQ ID NO: 201947 - RNA, 14 nt, Homo sapiens
gaaaauuauuugca

SEQ ID NO: 201948 - RNA, 20 nt, Homo sapiens
aauaaaccaucaucuugcca

SEQ ID NO: 201949 - RNA, 17 nt, Homo sapiens
acaucuuuuacauucug

SEQ ID NO: 201950 - RNA, 13 nt, Homo sapiens
cggaaguuuucaa

SEQ ID NO: 201951 - RNA, 20 nt, Homo sapiens
cuccgagaggugggccaguc

SEQ ID NO: 201952 - RNA, 20 nt, Homo sapiens
ccauauuuucaccauuugau

SEQ ID NO: 201953 - RNA, 19 nt, Homo sapiens
aucucagcuggaucuccau

SEQ ID NO: 201954 - RNA, 13 nt, Homo sapiens
ugggcagcuguua

SEQ ID NO: 201955 - RNA, 18 nt, Homo sapiens
ccaggcaacuugggaacu

SEQ ID NO: 201956 - RNA, 22 nt, Homo sapiens
uggggacagagcagaacuuuca

SEQ ID NO: 201957 - RNA, 21 nt, Homo sapiens
cuaugaaauaucaugcuccau

SEQ ID NO: 201958 - RNA, 17 nt, Homo sapiens
agacucccaagcuggac

SEQ ID NO: 201959 - RNA, 18 nt, Homo sapiens
uguuccccuuccacugag

SEQ ID NO: 201960 - RNA, 13 nt, Homo sapiens
agaggggguagcu

SEQ ID NO: 201961 - RNA, 17 nt, Homo sapiens
ucauguaaacugugcac

SEQ ID NO: 201962 - RNA, 20 nt, Homo sapiens
caggacuuccauuugcuuug

SEQ ID NO: 201963 - RNA, 17 nt, Homo sapiens
ggaagagggugauugcu

SEQ ID NO: 201964 - RNA, 15 nt, Homo sapiens
augggaaggguccau

SEQ ID NO: 201965 - RNA, 15 nt, Homo sapiens
aacaaauguauuuca

SEQ ID NO: 201966 - RNA, 19 nt, Homo sapiens
aggugcuaucgcaccacug

SEQ ID NO: 201967 - RNA, 21 nt, Homo sapiens
uacuucagcucacacaugaga

SEQ ID NO: 201968 - RNA, 21 nt, Homo sapiens
guaaagaaauauauaugauau

SEQ ID NO: 201969 - RNA, 15 nt, Homo sapiens
gaaaacugcaacuug

SEQ ID NO: 201970 - RNA, 17 nt, Homo sapiens
ugcuauaacuauguuga

SEQ ID NO: 201971 - RNA, 22 nt, Homo sapiens
ucuagguaggggcccacuucac

SEQ ID NO: 201972 - RNA, 17 nt, Homo sapiens
uucuucacucaaucucu

SEQ ID NO: 201973 - RNA, 18 nt, Homo sapiens
ugugcucagagaccccuc

SEQ ID NO: 201974 - RNA, 16 nt, Homo sapiens
auuaccuaguagucau

SEQ ID NO: 201975 - RNA, 15 nt, Homo sapiens
uuagacccugcauuu

SEQ ID NO: 201976 - RNA, 22 nt, Homo sapiens
gcaguugaaacaagaagccaca

SEQ ID NO: 201977 - RNA, 22 nt, Homo sapiens
caaggcccauaucugugaaaug

SEQ ID NO: 201978 - RNA, 14 nt, Homo sapiens
auccacuucucuca

SEQ ID NO: 201979 - RNA, 12 nt, Homo sapiens
cccccuugaggg

SEQ ID NO: 201980 - RNA, 23 nt, Homo sapiens
cuaaugccugcggaguugugcac

SEQ ID NO: 201981 - RNA, 20 nt, Homo sapiens
gggaguaggacauaccagcu

SEQ ID NO: 201982 - RNA, 22 nt, Homo sapiens
ugugacauuauaugcacuagca

SEQ ID NO: 201983 - RNA, 15 nt, Homo sapiens
ucuacuaacaaucag

SEQ ID NO: 201984 - RNA, 17 nt, Homo sapiens
uaagaugaucaucucca

SEQ ID NO: 201985 - RNA, 23 nt, Homo sapiens
auagugauugauagaguguuauc

SEQ ID NO: 201986 - RNA, 22 nt, Homo sapiens
uacaguaggagcccagcucuga

SEQ ID NO: 201987 - RNA, 18 nt, Homo sapiens
aguguaugacugcacaug

SEQ ID NO: 201988 - RNA, 17 nt, Homo sapiens
caaaaauugucccuuaa

SEQ ID NO: 201989 - RNA, 15 nt, Homo sapiens
aagaagccacagacc

SEQ ID NO: 201990 - RNA, 22 nt, Homo sapiens
uuggcuguagaaggagacagag

SEQ ID NO: 201991 - RNA, 20 nt, Homo sapiens
cuggagaacuagagaaggac

SEQ ID NO: 201992 - RNA, 22 nt, Homo sapiens
uaaaacuuuaaucccacuugcc

SEQ ID NO: 201993 - RNA, 23 nt, Homo sapiens
aacacuuuacaauguucauccca

SEQ ID NO: 201994 - RNA, 20 nt, Homo sapiens
agcacugagcaaagcauuga

SEQ ID NO: 201995 - RNA, 15 nt, Homo sapiens
cuagggaucccucau

SEQ ID NO: 201996 - RNA, 18 nt, Homo sapiens
acuuuuuaccuaguacaa

SEQ ID NO: 201997 - RNA, 16 nt, Homo sapiens
ggggccaggugcacag

SEQ ID NO: 201998 - RNA, 23 nt, Homo sapiens
acacccuauauuuugcauaguac

SEQ ID NO: 201999 - RNA, 13 nt, Homo sapiens
gaagaacaguaac

SEQ ID NO: 202000 - RNA, 18 nt, Homo sapiens
uggaucuccauucucuca

SEQ ID NO: 202001 - RNA, 11 nt, Homo sapiens
ugucaucucag

SEQ ID NO: 202002 - RNA, 12 nt, Homo sapiens
cuugcacaaaca

SEQ ID NO: 202003 - RNA, 14 nt, Homo sapiens
acagccuggcacag

SEQ ID NO: 202004 - RNA, 17 nt, Homo sapiens
aaaucccuccuucaucc

SEQ ID NO: 202005 - RNA, 14 nt, Homo sapiens
aggaccaagcaucu

SEQ ID NO: 202006 - RNA, 22 nt, Homo sapiens
aguguuaucagucauaacuaaa

SEQ ID NO: 202007 - RNA, 20 nt, Homo sapiens
cugggagcacaggcacugca

SEQ ID NO: 202008 - RNA, 12 nt, Homo sapiens
gucuuucacuga

SEQ ID NO: 202009 - RNA, 20 nt, Homo sapiens
acccuaugugggugggacca

SEQ ID NO: 202010 - RNA, 11 nt, Homo sapiens
uggcaaagaca

SEQ ID NO: 202011 - RNA, 17 nt, Homo sapiens
cauccuccacaauagca

SEQ ID NO: 202012 - RNA, 19 nt, Homo sapiens
cuccucuacaauuugccau

SEQ ID NO: 202013 - RNA, 14 nt, Homo sapiens
gcagaggccagagg

SEQ ID NO: 202014 - RNA, 15 nt, Homo sapiens
cuggugacccaguca

SEQ ID NO: 202015 - RNA, 22 nt, Homo sapiens
cccugaaguaagcaaagacuuu

SEQ ID NO: 202016 - RNA, 19 nt, Homo sapiens
aagcauucacaacuuguuu

SEQ ID NO: 202017 - RNA, 14 nt, Homo sapiens
cucugugaccaaug

SEQ ID NO: 202018 - RNA, 16 nt, Homo sapiens
cugacuguacuccucc

SEQ ID NO: 202019 - RNA, 14 nt, Homo sapiens
cucacagagugcau

SEQ ID NO: 202020 - RNA, 14 nt, Homo sapiens
cacccaaugcauau

SEQ ID NO: 202021 - RNA, 19 nt, Homo sapiens
gaggcuggguucauuugug

SEQ ID NO: 202022 - RNA, 14 nt, Homo sapiens
aagaguggaaccaa

SEQ ID NO: 202023 - RNA, 22 nt, Homo sapiens
ccagaugccuucuccagacaaa

SEQ ID NO: 202024 - RNA, 12 nt, Homo sapiens
uucacaguguga

SEQ ID NO: 202025 - RNA, 11 nt, Homo sapiens
aaggacucuca

SEQ ID NO: 202026 - RNA, 22 nt, Homo sapiens
cauuuccuuuuccuucaagccu

SEQ ID NO: 202027 - RNA, 19 nt, Homo sapiens
gcauuugugcccacucucc

SEQ ID NO: 202028 - RNA, 14 nt, Homo sapiens
gaaagaaaugccca

SEQ ID NO: 202029 - RNA, 23 nt, Homo sapiens
gugagggauaguggggucagggc

SEQ ID NO: 202030 - RNA, 13 nt, Homo sapiens
gaauaauccagaa

SEQ ID NO: 202031 - RNA, 17 nt, Homo sapiens
ugcuuuguaugcacuuu

SEQ ID NO: 202032 - RNA, 16 nt, Homo sapiens
uggcagccgugccuuc

SEQ ID NO: 202033 - RNA, 17 nt, Homo sapiens
cucauaugauugugcac

SEQ ID NO: 202034 - RNA, 22 nt, Homo sapiens
cccuaugugggugggaccacag

SEQ ID NO: 202035 - RNA, 12 nt, Homo sapiens
agcucaucucag

SEQ ID NO: 202036 - RNA, 15 nt, Homo sapiens
aucaggacccagagg

SEQ ID NO: 202037 - RNA, 17 nt, Homo sapiens
guacaaauauaagaaua

SEQ ID NO: 202038 - RNA, 20 nt, Homo sapiens
gagugcaccacuucaaguga

SEQ ID NO: 202039 - RNA, 23 nt, Homo sapiens
ccuuaguguuuggguauauucau

SEQ ID NO: 202040 - RNA, 23 nt, Homo sapiens
ccgcaacaguuuuuuaugcuaau

SEQ ID NO: 202041 - RNA, 15 nt, Homo sapiens
auugugagccaccac

SEQ ID NO: 202042 - RNA, 21 nt, Homo sapiens
cucauucagggauagcacuga

SEQ ID NO: 202043 - RNA, 15 nt, Homo sapiens
uauuaagccacuuaa

SEQ ID NO: 202044 - RNA, 17 nt, Homo sapiens
ccuagcccuucucucau

SEQ ID NO: 202045 - RNA, 18 nt, Homo sapiens
cagccaaacccugucuga

SEQ ID NO: 202046 - RNA, 13 nt, Homo sapiens
uuuugugauugcc

SEQ ID NO: 202047 - RNA, 21 nt, Homo sapiens
caauuuccggccaacaguuaa

SEQ ID NO: 202048 - RNA, 20 nt, Homo sapiens
ccaugcugcccgcuucucac

SEQ ID NO: 202049 - RNA, 17 nt, Homo sapiens
cucgaaucucugugccu

SEQ ID NO: 202050 - RNA, 16 nt, Homo sapiens
cauccacuagugcaaa

SEQ ID NO: 202051 - RNA, 19 nt, Homo sapiens
gcauaagaaaacuaagaaa

SEQ ID NO: 202052 - RNA, 18 nt, Homo sapiens
uauauauuuuugugcaca

SEQ ID NO: 202053 - RNA, 16 nt, Homo sapiens
agacucccaagcugga

SEQ ID NO: 202054 - RNA, 20 nt, Homo sapiens
aaguaaaacuugcugccuga

SEQ ID NO: 202055 - RNA, 17 nt, Homo sapiens
cuagguaggggcccacu

SEQ ID NO: 202056 - RNA, 14 nt, Homo sapiens
uaugauugugcaca

SEQ ID NO: 202057 - RNA, 15 nt, Homo sapiens
aaaguaguccuguga

SEQ ID NO: 202058 - RNA, 20 nt, Homo sapiens
aaaauauagcuguacaaaua

SEQ ID NO: 202059 - RNA, 23 nt, Homo sapiens
aagacaggacccugggaccacag

SEQ ID NO: 202060 - RNA, 18 nt, Homo sapiens
auaaaguaguccugugaa

SEQ ID NO: 202061 - RNA, 20 nt, Homo sapiens
acagagauaauucuagcuuu

SEQ ID NO: 202062 - RNA, 15 nt, Homo sapiens
uucuguacucaaaug

SEQ ID NO: 202063 - RNA, 20 nt, Homo sapiens
uuauagaccagaaccagagc

SEQ ID NO: 202064 - RNA, 18 nt, Homo sapiens
ucaucauucucugucuca

SEQ ID NO: 202065 - RNA, 16 nt, Homo sapiens
gaguuaguuugaguua

SEQ ID NO: 202066 - RNA, 16 nt, Homo sapiens
uuccauuugcaaggga

SEQ ID NO: 202067 - RNA, 14 nt, Homo sapiens
aauaauaccuaagc

SEQ ID NO: 202068 - RNA, 18 nt, Homo sapiens
ugagaaagagcacuuaag

SEQ ID NO: 202069 - RNA, 12 nt, Homo sapiens
ugguaugugaca

SEQ ID NO: 202070 - RNA, 14 nt, Homo sapiens
cagcaucuaaguaa

SEQ ID NO: 202071 - RNA, 12 nt, Homo sapiens
auucaguguuaa

SEQ ID NO: 202072 - RNA, 22 nt, Homo sapiens
ucugugcaaauccuugauacug

SEQ ID NO: 202073 - RNA, 17 nt, Homo sapiens
aaaauugugaucagacc

SEQ ID NO: 202074 - RNA, 17 nt, Homo sapiens
aaauagagccugaggga

SEQ ID NO: 202075 - RNA, 16 nt, Homo sapiens
aucauucucauucuca

SEQ ID NO: 202076 - RNA, 16 nt, Homo sapiens
ucuuuugaacccagga

SEQ ID NO: 202077 - RNA, 17 nt, Homo sapiens
cuccagaccauucagga

SEQ ID NO: 202078 - RNA, 13 nt, Homo sapiens
acuguacuccucc

SEQ ID NO: 202079 - RNA, 22 nt, Homo sapiens
agcuggguuggaaaacaguauu

SEQ ID NO: 202080 - RNA, 22 nt, Homo sapiens
ugaaccaagaccauugaauucu

SEQ ID NO: 202081 - RNA, 16 nt, Homo sapiens
uccucuuucaaccuca

SEQ ID NO: 202082 - RNA, 17 nt, Homo sapiens
gucccuugcugugagca

SEQ ID NO: 202083 - RNA, 14 nt, Homo sapiens
uaacuauguugaua

SEQ ID NO: 202084 - RNA, 16 nt, Homo sapiens
aaauauuuugucuaaa

SEQ ID NO: 202085 - RNA, 17 nt, Homo sapiens
aucugugcaaauccuug

SEQ ID NO: 202086 - RNA, 19 nt, Homo sapiens
ucugagcagugaaugauuc

SEQ ID NO: 202087 - RNA, 14 nt, Homo sapiens
ugagucugugccac

SEQ ID NO: 202088 - RNA, 13 nt, Homo sapiens
caaagacauucug

SEQ ID NO: 202089 - RNA, 16 nt, Homo sapiens
ccaggaaccucagggc

SEQ ID NO: 202090 - RNA, 20 nt, Homo sapiens
auccaacaugugcucaggga

SEQ ID NO: 202091 - RNA, 14 nt, Homo sapiens
agucacugcacagu

SEQ ID NO: 202092 - RNA, 19 nt, Homo sapiens
cauccugaccuugcacaaa

SEQ ID NO: 202093 - RNA, 20 nt, Homo sapiens
ugacacucccuugggcuccc

SEQ ID NO: 202094 - RNA, 17 nt, Homo sapiens
gaccacuguuaucaaaa

SEQ ID NO: 202095 - RNA, 22 nt, Homo sapiens
ugagaaagagcacuuaagagaa

SEQ ID NO: 202096 - RNA, 19 nt, Homo sapiens
aaccacaggcagcauuuag

SEQ ID NO: 202097 - RNA, 11 nt, Homo sapiens
caguguugccc

SEQ ID NO: 202098 - RNA, 16 nt, Homo sapiens
cucagcuggaucucca

SEQ ID NO: 202099 - RNA, 18 nt, Homo sapiens
cucaacguugcuccccau

SEQ ID NO: 202100 - RNA, 15 nt, Homo sapiens
cagccaacuuuugca

SEQ ID NO: 202101 - RNA, 22 nt, Homo sapiens
aaucuucuugauccacuucucu

SEQ ID NO: 202102 - RNA, 16 nt, Homo sapiens
guacaacguguccuca

SEQ ID NO: 202103 - RNA, 17 nt, Homo sapiens
ccuccuaaaguagacuu

SEQ ID NO: 202104 - RNA, 23 nt, Homo sapiens
uuccacuuagaaauugcauuucc

SEQ ID NO: 202105 - RNA, 15 nt, Homo sapiens
aggugcuacugacuu

SEQ ID NO: 202106 - RNA, 17 nt, Homo sapiens
caucuuaguauuugcau

SEQ ID NO: 202107 - RNA, 15 nt, Homo sapiens
ugaagcuuccuuggc

SEQ ID NO: 202108 - RNA, 22 nt, Homo sapiens
aagugauaucccccagccucaa

SEQ ID NO: 202109 - RNA, 14 nt, Homo sapiens
caacgaguacuuca

SEQ ID NO: 202110 - RNA, 23 nt, Homo sapiens
cagagguuucuggcagccaguac

SEQ ID NO: 202111 - RNA, 23 nt, Homo sapiens
cuucagggggccaggugcacaga

SEQ ID NO: 202112 - RNA, 15 nt, Homo sapiens
ugggucuucccugua

SEQ ID NO: 202113 - RNA, 23 nt, Homo sapiens
aaagcuuucauguaaacugugca

SEQ ID NO: 202114 - RNA, 13 nt, Homo sapiens
augcagcaucuaa

SEQ ID NO: 202115 - RNA, 15 nt, Homo sapiens
ggcuaaaaccaucau

SEQ ID NO: 202116 - RNA, 18 nt, Homo sapiens
uuaaaaucugucacguag

SEQ ID NO: 202117 - RNA, 21 nt, Homo sapiens
ugugaccaaugucuugaugca

SEQ ID NO: 202118 - RNA, 13 nt, Homo sapiens
aaaauacaugaca

SEQ ID NO: 202119 - RNA, 12 nt, Homo sapiens
ucggugugcacc

SEQ ID NO: 202120 - RNA, 13 nt, Homo sapiens
gacuccaguuaaa

SEQ ID NO: 202121 - RNA, 13 nt, Homo sapiens
gagccauaugaau

SEQ ID NO: 202122 - RNA, 19 nt, Homo sapiens
uugucccaaguuccacugc

SEQ ID NO: 202123 - RNA, 17 nt, Homo sapiens
ucuuucccaauucacau

SEQ ID NO: 202124 - RNA, 21 nt, Homo sapiens
uguaugauccuaaugaaugca

SEQ ID NO: 202125 - RNA, 20 nt, Homo sapiens
ucaacaucuuuuacauucug

SEQ ID NO: 202126 - RNA, 17 nt, Homo sapiens
ugauauauaaaugugau

SEQ ID NO: 202127 - RNA, 23 nt, Homo sapiens
gaaaugcccaucuaugucccuug

SEQ ID NO: 202128 - RNA, 18 nt, Homo sapiens
uuuacaauguucauccca

SEQ ID NO: 202129 - RNA, 21 nt, Homo sapiens
auucucucaggcuugcugcca

SEQ ID NO: 202130 - RNA, 17 nt, Homo sapiens
uaucaccgugggcuccc

SEQ ID NO: 202131 - RNA, 19 nt, Homo sapiens
agccuagcccuucucucau

SEQ ID NO: 202132 - RNA, 19 nt, Homo sapiens
caguccugccucagccucc

SEQ ID NO: 202133 - RNA, 14 nt, Homo sapiens
aagcaaaaucauuu

SEQ ID NO: 202134 - RNA, 17 nt, Homo sapiens
ggguccaucucagagaa

SEQ ID NO: 202135 - RNA, 21 nt, Homo sapiens
gagaauuuacgagcagggaug

SEQ ID NO: 202136 - RNA, 19 nt, Homo sapiens
agcugguugggaagacaug

SEQ ID NO: 202137 - RNA, 19 nt, Homo sapiens
aacuaagaaauaugcacaa

SEQ ID NO: 202138 - RNA, 20 nt, Homo sapiens
ucugcgugucaccugugcuu

SEQ ID NO: 202139 - RNA, 15 nt, Homo sapiens
auccccucucuuccu

SEQ ID NO: 202140 - RNA, 22 nt, Homo sapiens
agcccagggcuccugcacuuac

SEQ ID NO: 202141 - RNA, 22 nt, Homo sapiens
agugauugauagaguguuauca

SEQ ID NO: 202142 - RNA, 13 nt, Homo sapiens
ccaacuuuugcau

SEQ ID NO: 202143 - RNA, 15 nt, Homo sapiens
uucaugaucaucaca

SEQ ID NO: 202144 - RNA, 14 nt, Homo sapiens
gcaacaguagcaua

SEQ ID NO: 202145 - RNA, 18 nt, Homo sapiens
uuacaauuuacaaagugu

SEQ ID NO: 202146 - RNA, 23 nt, Homo sapiens
gacucuccagaaagcucaucuca

SEQ ID NO: 202147 - RNA, 16 nt, Homo sapiens
cacaucuaaccucauc

SEQ ID NO: 202148 - RNA, 17 nt, Homo sapiens
agcacugagcaaagcau

SEQ ID NO: 202149 - RNA, 21 nt, Homo sapiens
gucucauaugauugugcacau

SEQ ID NO: 202150 - RNA, 17 nt, Homo sapiens
ggcccacuucaccguac

SEQ ID NO: 202151 - RNA, 16 nt, Homo sapiens
ccggggcuccacugaa

SEQ ID NO: 202152 - RNA, 14 nt, Homo sapiens
guguuaaaugugau

SEQ ID NO: 202153 - RNA, 18 nt, Homo sapiens
ucauaugauugugcacau

SEQ ID NO: 202154 - RNA, 14 nt, Homo sapiens
auguugcccagugu

SEQ ID NO: 202155 - RNA, 19 nt, Homo sapiens
aacaggauuagacagucaa

SEQ ID NO: 202156 - RNA, 18 nt, Homo sapiens
aggcuuaaucacaccguc

SEQ ID NO: 202157 - RNA, 23 nt, Homo sapiens
ccuggaguguaugacugcacaug

SEQ ID NO: 202158 - RNA, 17 nt, Homo sapiens
uuaaguugauggugaug

SEQ ID NO: 202159 - RNA, 23 nt, Homo sapiens
aaugcauauccaacaugugcuca

SEQ ID NO: 202160 - RNA, 20 nt, Homo sapiens
acggagccacuccucugacu

SEQ ID NO: 202161 - RNA, 14 nt, Homo sapiens
ugacauuauaugca

SEQ ID NO: 202162 - RNA, 13 nt, Homo sapiens
uacaauuugccau

SEQ ID NO: 202163 - RNA, 18 nt, Homo sapiens
uaauacagacuaugucac

SEQ ID NO: 202164 - RNA, 17 nt, Homo sapiens
gccugaagaacaguaac

SEQ ID NO: 202165 - RNA, 15 nt, Homo sapiens
uauagacaaauaaua

SEQ ID NO: 202166 - RNA, 17 nt, Homo sapiens
cuaaaaggaaaucucac

SEQ ID NO: 202167 - RNA, 23 nt, Homo sapiens
uucgauacaccgggccuggagaa

SEQ ID NO: 202168 - RNA, 14 nt, Homo sapiens
caccuguaauccca

SEQ ID NO: 202169 - RNA, 23 nt, Homo sapiens
ugccacagccuccccugccaggg

SEQ ID NO: 202170 - RNA, 13 nt, Homo sapiens
ccugggaccacag

SEQ ID NO: 202171 - RNA, 23 nt, Homo sapiens
gccuucuccagacaaaccagaag

SEQ ID NO: 202172 - RNA, 15 nt, Homo sapiens
uuuggccuccuccag

SEQ ID NO: 202173 - RNA, 12 nt, Homo sapiens
gaccuugcacaa

SEQ ID NO: 202174 - RNA, 21 nt, Homo sapiens
uguacaguagauuuuccaaau

SEQ ID NO: 202175 - RNA, 19 nt, Homo sapiens
uuguagagauggggucuca

SEQ ID NO: 202176 - RNA, 23 nt, Homo sapiens
aguggcucacaccuguaauccca

SEQ ID NO: 202177 - RNA, 20 nt, Homo sapiens
gacuuuuuuuaaauaguaaa

SEQ ID NO: 202178 - RNA, 19 nt, Homo sapiens
ccaugaaccaagaccauug

SEQ ID NO: 202179 - RNA, 19 nt, Homo sapiens
uggaucuccauucucucag

SEQ ID NO: 202180 - RNA, 20 nt, Homo sapiens
ugaaaaugcuguauuaguca

SEQ ID NO: 202181 - RNA, 23 nt, Homo sapiens
ggcccuuccucuccacugccuuc

SEQ ID NO: 202182 - RNA, 20 nt, Homo sapiens
uguuuuuguucaaagccagc

SEQ ID NO: 202183 - RNA, 12 nt, Homo sapiens
uggagagccacc

SEQ ID NO: 202184 - RNA, 18 nt, Homo sapiens
auagcaguugaaacaaga

SEQ ID NO: 202185 - RNA, 13 nt, Homo sapiens
caaaugcaauuuu

SEQ ID NO: 202186 - RNA, 21 nt, Homo sapiens
cagcauuuagacccugcauuu

SEQ ID NO: 202187 - RNA, 19 nt, Homo sapiens
aaagacuuuccucuuaguc

SEQ ID NO: 202188 - RNA, 17 nt, Homo sapiens
gagcaguccugccucag

SEQ ID NO: 202189 - RNA, 18 nt, Homo sapiens
ucaaucucugauucuguc

SEQ ID NO: 202190 - RNA, 15 nt, Homo sapiens
ucagcuggaucucca

SEQ ID NO: 202191 - RNA, 19 nt, Homo sapiens
aaaccaagccguggcuucc

SEQ ID NO: 202192 - RNA, 18 nt, Homo sapiens
aauccuuuacuguuaguc

SEQ ID NO: 202193 - RNA, 15 nt, Homo sapiens
gcauggagcauggga

SEQ ID NO: 202194 - RNA, 14 nt, Homo sapiens
aaaacuugcugccu

SEQ ID NO: 202195 - RNA, 20 nt, Homo sapiens
gcaaugugcccccagacgca

SEQ ID NO: 202196 - RNA, 17 nt, Homo sapiens
gagggccacaugggagg

SEQ ID NO: 202197 - RNA, 23 nt, Homo sapiens
accacaggcagcauuuagcacau

SEQ ID NO: 202198 - RNA, 16 nt, Homo sapiens
auucugucaaugucuu

SEQ ID NO: 202199 - RNA, 17 nt, Homo sapiens
acaaaguguguauuaaa

SEQ ID NO: 202200 - RNA, 20 nt, Homo sapiens
aggugggccagucuguggau

SEQ ID NO: 202201 - RNA, 13 nt, Homo sapiens
acauuuccaugca

SEQ ID NO: 202202 - RNA, 20 nt, Homo sapiens
uucccuguaugauuccuuga

SEQ ID NO: 202203 - RNA, 14 nt, Homo sapiens
cauaaaauguuaag

SEQ ID NO: 202204 - RNA, 15 nt, Homo sapiens
aucugccacguguau

SEQ ID NO: 202205 - RNA, 23 nt, Homo sapiens
aacuuugacaaccaugagaccac

SEQ ID NO: 202206 - RNA, 20 nt, Homo sapiens
cagcugaccuuugucaucuu

SEQ ID NO: 202207 - RNA, 16 nt, Homo sapiens
ugaaaugcuggcauuu

SEQ ID NO: 202208 - RNA, 16 nt, Homo sapiens
ucaaguuggcuucuaa

SEQ ID NO: 202209 - RNA, 14 nt, Homo sapiens
cgaacaauucauau

SEQ ID NO: 202210 - RNA, 19 nt, Homo sapiens
uaaaugccaggccuggcaa

SEQ ID NO: 202211 - RNA, 16 nt, Homo sapiens
ccacuccucugacuca

SEQ ID NO: 202212 - RNA, 21 nt, Homo sapiens
gcuucuuaauauaacugccuu

SEQ ID NO: 202213 - RNA, 13 nt, Homo sapiens
gaugcaagcaaga

SEQ ID NO: 202214 - RNA, 18 nt, Homo sapiens
aucagcgccgcaccagcc

SEQ ID NO: 202215 - RNA, 20 nt, Homo sapiens
gcuuuugcuggucacugcca

SEQ ID NO: 202216 - RNA, 14 nt, Homo sapiens
ucuggacacagccc

SEQ ID NO: 202217 - RNA, 19 nt, Homo sapiens
aaauacuucuugaagccga

SEQ ID NO: 202218 - RNA, 20 nt, Homo sapiens
gcuauggggagaaaagacau

SEQ ID NO: 202219 - RNA, 14 nt, Homo sapiens
guccuugaugcuca

SEQ ID NO: 202220 - RNA, 16 nt, Homo sapiens
accacuguguauuuaa

SEQ ID NO: 202221 - RNA, 16 nt, Homo sapiens
aguaaguggugagaac

SEQ ID NO: 202222 - RNA, 13 nt, Homo sapiens
aagucacugcaca

SEQ ID NO: 202223 - RNA, 16 nt, Homo sapiens
ucaccaggucagggag

SEQ ID NO: 202224 - RNA, 19 nt, Homo sapiens
aaguccuacaagcuaaaau

SEQ ID NO: 202225 - RNA, 13 nt, Homo sapiens
aguugaaacaaga

SEQ ID NO: 202226 - RNA, 18 nt, Homo sapiens
uuaucaccgugggcuccc

SEQ ID NO: 202227 - RNA, 21 nt, Homo sapiens
auaaaauguugaaaagucaaa

SEQ ID NO: 202228 - RNA, 20 nt, Homo sapiens
gcuaaaauuagaugaacuca

SEQ ID NO: 202229 - RNA, 13 nt, Homo sapiens
cugggccaaguca

SEQ ID NO: 202230 - RNA, 14 nt, Homo sapiens
cuguauuagucaca

SEQ ID NO: 202231 - RNA, 18 nt, Homo sapiens
acagucuuccauuugcaa

SEQ ID NO: 202232 - RNA, 20 nt, Homo sapiens
ccagaggauugcugccccau

SEQ ID NO: 202233 - RNA, 15 nt, Homo sapiens
aauuaguaacaugug

SEQ ID NO: 202234 - RNA, 16 nt, Homo sapiens
ccaagucaaagacauu

SEQ ID NO: 202235 - RNA, 18 nt, Homo sapiens
cugcugagugcaccacuu

SEQ ID NO: 202236 - RNA, 17 nt, Homo sapiens
uucuuauguugcccagu

SEQ ID NO: 202237 - RNA, 15 nt, Homo sapiens
aacugggguggauuu

SEQ ID NO: 202238 - RNA, 14 nt, Homo sapiens
cugucugacaaccu

SEQ ID NO: 202239 - RNA, 14 nt, Homo sapiens
cccuguuaccuaau

SEQ ID NO: 202240 - RNA, 21 nt, Homo sapiens
ggguuaguuuacaaucagcca

SEQ ID NO: 202241 - RNA, 17 nt, Homo sapiens
uguauuagucacagaga

SEQ ID NO: 202242 - RNA, 19 nt, Homo sapiens
gcaaggagaccaccaacag

SEQ ID NO: 202243 - RNA, 18 nt, Homo sapiens
aagccuauguaugccaug

SEQ ID NO: 202244 - RNA, 24 nt, Homo sapiens
uccagacaaaccagaagcaacaga

SEQ ID NO: 202245 - RNA, 17 nt, Homo sapiens
gucucgcuuuguugccc

SEQ ID NO: 202246 - RNA, 16 nt, Homo sapiens
ccacaggcagcauuua

SEQ ID NO: 202247 - RNA, 20 nt, Homo sapiens
gcauuccagccccucugguc

SEQ ID NO: 202248 - RNA, 19 nt, Homo sapiens
cccuauugguaaagaaugg

SEQ ID NO: 202249 - RNA, 23 nt, Homo sapiens
aagguuuuauaaggcugauguca

SEQ ID NO: 202250 - RNA, 22 nt, Homo sapiens
gugaucagaccauaauguuaca

SEQ ID NO: 202251 - RNA, 14 nt, Homo sapiens
gcaagaaacacugg

SEQ ID NO: 202252 - RNA, 12 nt, Homo sapiens
ugaucugaugca

SEQ ID NO: 202253 - RNA, 23 nt, Homo sapiens
acuacacauucaauaagcaucaa

SEQ ID NO: 202254 - RNA, 23 nt, Homo sapiens
ugagaggagagagacuccagcug

SEQ ID NO: 202255 - RNA, 22 nt, Homo sapiens
aggcccuuccucuccacugccu

SEQ ID NO: 202256 - RNA, 20 nt, Homo sapiens
cacaauagcaguugaaacaa

SEQ ID NO: 202257 - RNA, 19 nt, Homo sapiens
accauucaggacacaggga

SEQ ID NO: 202258 - RNA, 18 nt, Homo sapiens
auggaggaaagugauauc

SEQ ID NO: 202259 - RNA, 15 nt, Homo sapiens
guaucaaaugugaca

SEQ ID NO: 202260 - RNA, 20 nt, Homo sapiens
gaagccacuauuacugggac

SEQ ID NO: 202261 - RNA, 20 nt, Homo sapiens
ccaacguggggcagcacaga

SEQ ID NO: 202262 - RNA, 17 nt, Homo sapiens
caacaugugcucaggga

SEQ ID NO: 202263 - RNA, 14 nt, Homo sapiens
ugucucagccuccc

SEQ ID NO: 202264 - RNA, 17 nt, Homo sapiens
uuauuacauggggucua

SEQ ID NO: 202265 - RNA, 20 nt, Homo sapiens
aaugcagggacaaaugccac

SEQ ID NO: 202266 - RNA, 22 nt, Homo sapiens
cauagaggugagggaagccuga

SEQ ID NO: 202267 - RNA, 14 nt, Homo sapiens
ugcaccaccaagcc

SEQ ID NO: 202268 - RNA, 15 nt, Homo sapiens
ccagagaguggcucc

SEQ ID NO: 202269 - RNA, 14 nt, Homo sapiens
ugcuggcauuugca

SEQ ID NO: 202270 - RNA, 18 nt, Homo sapiens
uccggaauccuguccuca

SEQ ID NO: 202271 - RNA, 18 nt, Homo sapiens
uaaaaccaucauaguaca

SEQ ID NO: 202272 - RNA, 15 nt, Homo sapiens
uauauuuuugugcac

SEQ ID NO: 202273 - RNA, 20 nt, Homo sapiens
ucuaauaaaaaacaccuucu

SEQ ID NO: 202274 - RNA, 14 nt, Homo sapiens
agcugggagcacag

SEQ ID NO: 202275 - RNA, 23 nt, Homo sapiens
uggcuucacagaugugugauuca

SEQ ID NO: 202276 - RNA, 16 nt, Homo sapiens
uuugguaugugacaug

SEQ ID NO: 202277 - RNA, 17 nt, Homo sapiens
cuuuguaugcacuuugu

SEQ ID NO: 202278 - RNA, 17 nt, Homo sapiens
cuggguuucucuguaua

SEQ ID NO: 202279 - RNA, 21 nt, Homo sapiens
gacacuauuuaucugugcaaa

SEQ ID NO: 202280 - RNA, 15 nt, Homo sapiens
aauccuuuacuguua

SEQ ID NO: 202281 - RNA, 15 nt, Homo sapiens
acagaaaacgguuaa

SEQ ID NO: 202282 - RNA, 14 nt, Homo sapiens
gccuaugugcaugc

SEQ ID NO: 202283 - RNA, 20 nt, Homo sapiens
aagaccugacaccuuucaua

SEQ ID NO: 202284 - RNA, 13 nt, Homo sapiens
aucaucuccaguu

SEQ ID NO: 202285 - RNA, 14 nt, Homo sapiens
cugaccuugcacaa

SEQ ID NO: 202286 - RNA, 18 nt, Homo sapiens
uguggcuggaagauccug

SEQ ID NO: 202287 - RNA, 22 nt, Homo sapiens
aaaacuguggguagagacuuug

SEQ ID NO: 202288 - RNA, 17 nt, Homo sapiens
uguguauuuaacugccu

SEQ ID NO: 202289 - RNA, 15 nt, Homo sapiens
uacuacacauucaau

SEQ ID NO: 202290 - RNA, 16 nt, Homo sapiens
aaaguaguccugugaa

SEQ ID NO: 202291 - RNA, 20 nt, Homo sapiens
ggugaaccuuaguaccuaaa

SEQ ID NO: 202292 - RNA, 12 nt, Homo sapiens
gaaagugauauc

SEQ ID NO: 202293 - RNA, 14 nt, Homo sapiens
aagucaaccugccu

SEQ ID NO: 202294 - RNA, 17 nt, Homo sapiens
caccacagccagcaccu

SEQ ID NO: 202295 - RNA, 15 nt, Homo sapiens
uuacaaaguguguau

SEQ ID NO: 202296 - RNA, 19 nt, Homo sapiens
cuaauacagacuaugucac

SEQ ID NO: 202297 - RNA, 15 nt, Homo sapiens
auccuuuacuguuag

SEQ ID NO: 202298 - RNA, 14 nt, Homo sapiens
ucugagcugugcag

SEQ ID NO: 202299 - RNA, 14 nt, Homo sapiens
auuuuuuugcaagu

SEQ ID NO: 202300 - RNA, 22 nt, Homo sapiens
uuguagagauggggucucacag

SEQ ID NO: 202301 - RNA, 22 nt, Homo sapiens
cugcauuuauagcauacgguau

SEQ ID NO: 202302 - RNA, 20 nt, Homo sapiens
gcacuguucccccugugcag

SEQ ID NO: 202303 - RNA, 17 nt, Homo sapiens
aaggcuagaucaugaag

SEQ ID NO: 202304 - RNA, 22 nt, Homo sapiens
aucauuucuauuucuccuccau

SEQ ID NO: 202305 - RNA, 20 nt, Homo sapiens
cuaugucacccaaugcauau

SEQ ID NO: 202306 - RNA, 16 nt, Homo sapiens
cagaaagcucaucuca

SEQ ID NO: 202307 - RNA, 23 nt, Homo sapiens
agaagcuaaauccuuuacuguua

SEQ ID NO: 202308 - RNA, 22 nt, Homo sapiens
aaauuguauuaucaacagcauu

SEQ ID NO: 202309 - RNA, 17 nt, Homo sapiens
caucauucucugucuca

SEQ ID NO: 202310 - RNA, 23 nt, Homo sapiens
accuaaaaggaaaucucacccca

SEQ ID NO: 202311 - RNA, 15 nt, Homo sapiens
caugugcucagggaa

SEQ ID NO: 202312 - RNA, 20 nt, Homo sapiens
cucacagagugcauugugag

SEQ ID NO: 202313 - RNA, 15 nt, Homo sapiens
caauauugacuuugu

SEQ ID NO: 202314 - RNA, 22 nt, Homo sapiens
gaaacaacaauuucuacuuuga

SEQ ID NO: 202315 - RNA, 20 nt, Homo sapiens
aaaugccacacggcucucac

SEQ ID NO: 202316 - RNA, 23 nt, Homo sapiens
aguuccucauuuuugaauacagg

SEQ ID NO: 202317 - RNA, 14 nt, Homo sapiens
gaguccacuuuguu

SEQ ID NO: 202318 - RNA, 21 nt, Homo sapiens
aucuccaguuuauagaccaga

SEQ ID NO: 202319 - RNA, 22 nt, Homo sapiens
uacauucugcaagcacaucugc

SEQ ID NO: 202320 - RNA, 19 nt, Homo sapiens
ucagacuccugugcaacuu

SEQ ID NO: 202321 - RNA, 17 nt, Homo sapiens
aaaagacaagacuucag

SEQ ID NO: 202322 - RNA, 20 nt, Homo sapiens
cauuagccuaugugcaugca

SEQ ID NO: 202323 - RNA, 20 nt, Homo sapiens
cuugagccaguaauuggucc

SEQ ID NO: 202324 - RNA, 15 nt, Homo sapiens
accagggguuucucg

SEQ ID NO: 202325 - RNA, 14 nt, Homo sapiens
ugaaguaagcaaag

SEQ ID NO: 202326 - RNA, 22 nt, Homo sapiens
gaaucuguuaccagaggacaaa

SEQ ID NO: 202327 - RNA, 23 nt, Homo sapiens
uucaagcagucgugccugugucc

SEQ ID NO: 202328 - RNA, 22 nt, Homo sapiens
uuggguucacagaagcacagca

SEQ ID NO: 202329 - RNA, 18 nt, Homo sapiens
aaugcugggacucagccu

SEQ ID NO: 202330 - RNA, 16 nt, Homo sapiens
cauuaauauuugcuga

SEQ ID NO: 202331 - RNA, 15 nt, Homo sapiens
caauguucaucccau

SEQ ID NO: 202332 - RNA, 18 nt, Homo sapiens
accugaaaacacugugca

SEQ ID NO: 202333 - RNA, 13 nt, Homo sapiens
cuguugacaucca

SEQ ID NO: 202334 - RNA, 14 nt, Homo sapiens
cuuauauucaucca

SEQ ID NO: 202335 - RNA, 22 nt, Homo sapiens
uagaagccacuauuacugggac

SEQ ID NO: 202336 - RNA, 20 nt, Homo sapiens
guggguacucaauguguacu

SEQ ID NO: 202337 - RNA, 13 nt, Homo sapiens
ucacaccuguaau

SEQ ID NO: 202338 - RNA, 18 nt, Homo sapiens
accagaggacaaagccuu

SEQ ID NO: 202339 - RNA, 18 nt, Homo sapiens
cuuuuucuagucuucaua

SEQ ID NO: 202340 - RNA, 17 nt, Homo sapiens
cuaagcagaccacugau

SEQ ID NO: 202341 - RNA, 11 nt, Homo sapiens
aaugcaacuuc

SEQ ID NO: 202342 - RNA, 17 nt, Homo sapiens
uugacaaccaugagacc

SEQ ID NO: 202343 - RNA, 17 nt, Homo sapiens
ggaugguggagggccac

SEQ ID NO: 202344 - RNA, 18 nt, Homo sapiens
agcacagcacccauggga

SEQ ID NO: 202345 - RNA, 16 nt, Homo sapiens
aguuuacaaucagcca

SEQ ID NO: 202346 - RNA, 20 nt, Homo sapiens
uaacuucaaggcccauaucu

SEQ ID NO: 202347 - RNA, 22 nt, Homo sapiens
caaaucuucuugauccacuucu

SEQ ID NO: 202348 - RNA, 12 nt, Homo sapiens
ucaucuugccac

SEQ ID NO: 202349 - RNA, 19 nt, Homo sapiens
cugagguuugccagcauuu

SEQ ID NO: 202350 - RNA, 16 nt, Homo sapiens
aaauguacauuaauua

SEQ ID NO: 202351 - RNA, 15 nt, Homo sapiens
auuuaucugugcaaa

SEQ ID NO: 202352 - RNA, 20 nt, Homo sapiens
acacuauuuaucugugcaaa

SEQ ID NO: 202353 - RNA, 14 nt, Homo sapiens
gaggaguuccuuga

SEQ ID NO: 202354 - RNA, 14 nt, Homo sapiens
uggaaaauaaauca

SEQ ID NO: 202355 - RNA, 14 nt, Homo sapiens
agaccacugauaaa

SEQ ID NO: 202356 - RNA, 18 nt, Homo sapiens
uauuuugcauaguaccaa

SEQ ID NO: 202357 - RNA, 16 nt, Homo sapiens
gucagaguugugcaca

SEQ ID NO: 202358 - RNA, 12 nt, Homo sapiens
cauucucugucu

SEQ ID NO: 202359 - RNA, 16 nt, Homo sapiens
ucgcuuuguugcccag

SEQ ID NO: 202360 - RNA, 14 nt, Homo sapiens
cauuauaugcacua

SEQ ID NO: 202361 - RNA, 16 nt, Homo sapiens
ugcccagugaccaguc

SEQ ID NO: 202362 - RNA, 21 nt, Homo sapiens
cucugagguuuccgaaaucag

SEQ ID NO: 202363 - RNA, 23 nt, Homo sapiens
cauaauuucuucacucaaucucu

SEQ ID NO: 202364 - RNA, 18 nt, Homo sapiens
gcaaaauacaugacauuu

SEQ ID NO: 202365 - RNA, 16 nt, Homo sapiens
ggagcuggcccucucc

SEQ ID NO: 202366 - RNA, 22 nt, Homo sapiens
acagagggcaggaacuugcaca

SEQ ID NO: 202367 - RNA, 21 nt, Homo sapiens
gcuuagacuaaggccauuauu

SEQ ID NO: 202368 - RNA, 15 nt, Homo sapiens
uaaguuugauuucau

SEQ ID NO: 202369 - RNA, 13 nt, Homo sapiens
caggcucuucucc

SEQ ID NO: 202370 - RNA, 15 nt, Homo sapiens
cccucacuguugaau

SEQ ID NO: 202371 - RNA, 17 nt, Homo sapiens
gugacauuuccaugcau

SEQ ID NO: 202372 - RNA, 17 nt, Homo sapiens
acugcucaucauuccuu

SEQ ID NO: 202373 - RNA, 16 nt, Homo sapiens
cauggagcaugggacu

SEQ ID NO: 202374 - RNA, 22 nt, Homo sapiens
ccuugauggagauauuuacaug

SEQ ID NO: 202375 - RNA, 22 nt, Homo sapiens
aauuuuuuuaaccaaaggugaa

SEQ ID NO: 202376 - RNA, 23 nt, Homo sapiens
gcacguaguagggucaggccacg

SEQ ID NO: 202377 - RNA, 14 nt, Homo sapiens
cguuugaaucacag

SEQ ID NO: 202378 - RNA, 17 nt, Homo sapiens
uuuggaauauuguccau

SEQ ID NO: 202379 - RNA, 14 nt, Homo sapiens
auguucaacuggag

SEQ ID NO: 202380 - RNA, 21 nt, Homo sapiens
agcagcgccccucccaagagg

SEQ ID NO: 202381 - RNA, 18 nt, Homo sapiens
uuaaacuuaccugggcau

SEQ ID NO: 202382 - RNA, 20 nt, Homo sapiens
guuccccacugacagccucc

SEQ ID NO: 202383 - RNA, 16 nt, Homo sapiens
agcaaaaagcaaaauc

SEQ ID NO: 202384 - RNA, 23 nt, Homo sapiens
ccaacguggggcagcacagagag

SEQ ID NO: 202385 - RNA, 22 nt, Homo sapiens
aguguugcccaggcuggucuca

SEQ ID NO: 202386 - RNA, 19 nt, Homo sapiens
cuuuaaagccugccucuuc

SEQ ID NO: 202387 - RNA, 18 nt, Homo sapiens
gcgucaugcuuguguuau

SEQ ID NO: 202388 - RNA, 18 nt, Homo sapiens
aagcauugagcaaagggg

SEQ ID NO: 202389 - RNA, 18 nt, Homo sapiens
uagaguguuaucagucau

SEQ ID NO: 202390 - RNA, 13 nt, Homo sapiens
aaggccucugugg

SEQ ID NO: 202391 - RNA, 19 nt, Homo sapiens
caggcagaucccacuugca

SEQ ID NO: 202392 - RNA, 14 nt, Homo sapiens
cucuucuccacugg

SEQ ID NO: 202393 - RNA, 23 nt, Homo sapiens
ugaauaugauuaguaaagaaaug

SEQ ID NO: 202394 - RNA, 19 nt, Homo sapiens
cuacaaggcuggcagugac

SEQ ID NO: 202395 - RNA, 14 nt, Homo sapiens
cagacuucccugaa

SEQ ID NO: 202396 - RNA, 15 nt, Homo sapiens
aauguuacauuauua

SEQ ID NO: 202397 - RNA, 16 nt, Homo sapiens
auggaggcacacagcu

SEQ ID NO: 202398 - RNA, 15 nt, Homo sapiens
gaaaaauguguaauu

SEQ ID NO: 202399 - RNA, 12 nt, Homo sapiens
ucccccacugau

SEQ ID NO: 202400 - RNA, 21 nt, Homo sapiens
auugguccgaucuuugacucu

SEQ ID NO: 202401 - RNA, 21 nt, Homo sapiens
caggguuacaaaucuucuuga

SEQ ID NO: 202402 - RNA, 14 nt, Homo sapiens
uaaucuuugcuuua

SEQ ID NO: 202403 - RNA, 20 nt, Homo sapiens
caguaccuccugccccaugc

SEQ ID NO: 202404 - RNA, 21 nt, Homo sapiens
ggaggcuccagagggcacucu

SEQ ID NO: 202405 - RNA, 21 nt, Homo sapiens
uaccuugguucccccacugau

SEQ ID NO: 202406 - RNA, 14 nt, Homo sapiens
caaaaucacacagc

SEQ ID NO: 202407 - RNA, 18 nt, Homo sapiens
auguugggaaacuuggcu

SEQ ID NO: 202408 - RNA, 16 nt, Homo sapiens
uuugaaucacaguaua

SEQ ID NO: 202409 - RNA, 20 nt, Homo sapiens
uuaagaauguucuuauguug

SEQ ID NO: 202410 - RNA, 17 nt, Homo sapiens
augucguuugaaucaca

SEQ ID NO: 202411 - RNA, 14 nt, Homo sapiens
guucccccugugca

SEQ ID NO: 202412 - RNA, 21 nt, Homo sapiens
uacugggguuuuucuaagaaa

SEQ ID NO: 202413 - RNA, 21 nt, Homo sapiens
ucccagcugaaauacugaggg

SEQ ID NO: 202414 - RNA, 12 nt, Homo sapiens
caacuuugacaa

SEQ ID NO: 202415 - RNA, 20 nt, Homo sapiens
uguacaacuuuuuaccuagu

SEQ ID NO: 202416 - RNA, 17 nt, Homo sapiens
ucugaagucacugcaca

SEQ ID NO: 202417 - RNA, 16 nt, Homo sapiens
acauccaagcuuccuu

SEQ ID NO: 202418 - RNA, 20 nt, Homo sapiens
cagagcuugaacacagucuc

SEQ ID NO: 202419 - RNA, 13 nt, Homo sapiens
uggagaagcuccc

SEQ ID NO: 202420 - RNA, 17 nt, Homo sapiens
auccugaccuugcacaa

SEQ ID NO: 202421 - RNA, 17 nt, Homo sapiens
auggccucauguggcug

SEQ ID NO: 202422 - RNA, 17 nt, Homo sapiens
ccaauccuggacaugaa

SEQ ID NO: 202423 - RNA, 14 nt, Homo sapiens
acagcugcagagac

SEQ ID NO: 202424 - RNA, 19 nt, Homo sapiens
uggcuagugguggguacuc

SEQ ID NO: 202425 - RNA, 16 nt, Homo sapiens
gugaucugaacagaaa

SEQ ID NO: 202426 - RNA, 13 nt, Homo sapiens
caggcuggucuca

SEQ ID NO: 202427 - RNA, 15 nt, Homo sapiens
cagaccauucaggac

SEQ ID NO: 202428 - RNA, 16 nt, Homo sapiens
cacuaacaaacucuga

SEQ ID NO: 202429 - RNA, 12 nt, Homo sapiens
accuaguacaag

SEQ ID NO: 202430 - RNA, 15 nt, Homo sapiens
accaacccucagagc

SEQ ID NO: 202431 - RNA, 17 nt, Homo sapiens
accgugggcucccugac

SEQ ID NO: 202432 - RNA, 21 nt, Homo sapiens
gccaggcagaucccacuugca

SEQ ID NO: 202433 - RNA, 16 nt, Homo sapiens
gccccaggcauugcca

SEQ ID NO: 202434 - RNA, 19 nt, Homo sapiens
ugaaauaauguacaucugg

SEQ ID NO: 202435 - RNA, 20 nt, Homo sapiens
uauacuucucuauuaucuca

SEQ ID NO: 202436 - RNA, 14 nt, Homo sapiens
uucacucaaucucu

SEQ ID NO: 202437 - RNA, 14 nt, Homo sapiens
ccuuuguacuuugu

SEQ ID NO: 202438 - RNA, 15 nt, Homo sapiens
acaauagaaaccugu

SEQ ID NO: 202439 - RNA, 20 nt, Homo sapiens
cuccaguuuauagaccagaa

SEQ ID NO: 202440 - RNA, 18 nt, Homo sapiens
uaaaauuagaugaacuca

SEQ ID NO: 202441 - RNA, 23 nt, Homo sapiens
uuauuuaccugaaauaaaauuca

SEQ ID NO: 202442 - RNA, 17 nt, Homo sapiens
auaaacguccuacugua

SEQ ID NO: 202443 - RNA, 15 nt, Homo sapiens
gccuuaaccaugagg

SEQ ID NO: 202444 - RNA, 17 nt, Homo sapiens
acauuaagaaaaucaua

SEQ ID NO: 202445 - RNA, 20 nt, Homo sapiens
auucuaaaugaauguuuaca

SEQ ID NO: 202446 - RNA, 15 nt, Homo sapiens
uacaugaauugcauu

SEQ ID NO: 202447 - RNA, 19 nt, Homo sapiens
aucagugaauaaaccauca

SEQ ID NO: 202448 - RNA, 20 nt, Homo sapiens
uguacaguagauuuuccaaa

SEQ ID NO: 202449 - RNA, 19 nt, Homo sapiens
uuaaagcugaaaacugcaa

SEQ ID NO: 202450 - RNA, 17 nt, Homo sapiens
cuaaucagcauucucac

SEQ ID NO: 202451 - RNA, 22 nt, Homo sapiens
uuucuacuuugaagucauacca

SEQ ID NO: 202452 - RNA, 16 nt, Homo sapiens
gggaccacagacucac

SEQ ID NO: 202453 - RNA, 14 nt, Homo sapiens
cccacugcucauuu

SEQ ID NO: 202454 - RNA, 22 nt, Homo sapiens
aucucugcuuuggaaaucacac

SEQ ID NO: 202455 - RNA, 19 nt, Homo sapiens
acaaucaucaucauucuca

SEQ ID NO: 202456 - RNA, 16 nt, Homo sapiens
cucugggccaagucaa

SEQ ID NO: 202457 - RNA, 20 nt, Homo sapiens
cugcggcacccuugcgcuuu

SEQ ID NO: 202458 - RNA, 21 nt, Homo sapiens
gcccuucccacaggacauuuc

SEQ ID NO: 202459 - RNA, 11 nt, Homo sapiens
uuccuugagaa

SEQ ID NO: 202460 - RNA, 21 nt, Homo sapiens
augugcucagggaauaaucca

SEQ ID NO: 202461 - RNA, 18 nt, Homo sapiens
cgcagauguccuugaugc

SEQ ID NO: 202462 - RNA, 19 nt, Homo sapiens
uucauaauuucuucacuca

SEQ ID NO: 202463 - RNA, 16 nt, Homo sapiens
cuaugauaugcuaaua

SEQ ID NO: 202464 - RNA, 23 nt, Homo sapiens
acugcugccucuugaaugcaggg

SEQ ID NO: 202465 - RNA, 22 nt, Homo sapiens
uuccuaacaggauuagacaguc

SEQ ID NO: 202466 - RNA, 17 nt, Homo sapiens
uuugauuaaagacucca

SEQ ID NO: 202467 - RNA, 19 nt, Homo sapiens
cagucagaguugugcacau

SEQ ID NO: 202468 - RNA, 18 nt, Homo sapiens
cagucagaguugugcaca

SEQ ID NO: 202469 - RNA, 23 nt, Homo sapiens
gcucccccucccccacugccaua

SEQ ID NO: 202470 - RNA, 20 nt, Homo sapiens
gcauuugugcccacucucca

SEQ ID NO: 202471 - RNA, 22 nt, Homo sapiens
ugguauaaacguccuacuguau

SEQ ID NO: 202472 - RNA, 17 nt, Homo sapiens
aguaagcaaagacuuuc

SEQ ID NO: 202473 - RNA, 20 nt, Homo sapiens
aaauuguaucaaaugugaca

SEQ ID NO: 202474 - RNA, 15 nt, Homo sapiens
agggaaccugugucc

SEQ ID NO: 202475 - RNA, 19 nt, Homo sapiens
caaggcccauaucugugaa

SEQ ID NO: 202476 - RNA, 14 nt, Homo sapiens
cuggcccagccaaa

SEQ ID NO: 202477 - RNA, 18 nt, Homo sapiens
ucccuuacccuccuccag

SEQ ID NO: 202478 - RNA, 13 nt, Homo sapiens
agucugcaaaaug

SEQ ID NO: 202479 - RNA, 13 nt, Homo sapiens
ggcuagaucauga

SEQ ID NO: 202480 - RNA, 16 nt, Homo sapiens
agguccuggugguauu

SEQ ID NO: 202481 - RNA, 17 nt, Homo sapiens
cucccagauaaugugaa

SEQ ID NO: 202482 - RNA, 21 nt, Homo sapiens
aaauacagucuuccauuugca

SEQ ID NO: 202483 - RNA, 17 nt, Homo sapiens
uggccuugaaaccaccu

SEQ ID NO: 202484 - RNA, 21 nt, Homo sapiens
cacagcugcagagacagagag

SEQ ID NO: 202485 - RNA, 18 nt, Homo sapiens
cauucugcaagcacaucu

SEQ ID NO: 202486 - RNA, 21 nt, Homo sapiens
caguuugauuguuguuuauaa

SEQ ID NO: 202487 - RNA, 17 nt, Homo sapiens
gaagagaaugugacagg

SEQ ID NO: 202488 - RNA, 17 nt, Homo sapiens
guaggggcccacuucac

SEQ ID NO: 202489 - RNA, 12 nt, Homo sapiens
aguguugcuugg

SEQ ID NO: 202490 - RNA, 23 nt, Homo sapiens
acagccucccacccccaucucuc

SEQ ID NO: 202491 - RNA, 18 nt, Homo sapiens
cuguauucccaguuacuu

SEQ ID NO: 202492 - RNA, 20 nt, Homo sapiens
augucuuuccuuuugcucuu

SEQ ID NO: 202493 - RNA, 12 nt, Homo sapiens
caaccucaguga

SEQ ID NO: 202494 - RNA, 20 nt, Homo sapiens
auuccuauauaguuuauuga

SEQ ID NO: 202495 - RNA, 18 nt, Homo sapiens
uguacaaauauaagaaua

SEQ ID NO: 202496 - RNA, 13 nt, Homo sapiens
accauguacauga

SEQ ID NO: 202497 - RNA, 20 nt, Homo sapiens
uauuacaguuuaucuauggc

SEQ ID NO: 202498 - RNA, 17 nt, Homo sapiens
uagaugcugacuguacu

SEQ ID NO: 202499 - RNA, 21 nt, Homo sapiens
ugugugaucugugggcacauu

SEQ ID NO: 202500 - RNA, 13 nt, Homo sapiens
uaagaugaucauc

SEQ ID NO: 202501 - RNA, 19 nt, Homo sapiens
gcucagggaauaauccaga

SEQ ID NO: 202502 - RNA, 20 nt, Homo sapiens
ggaucaucuauugcuggcaa

SEQ ID NO: 202503 - RNA, 22 nt, Homo sapiens
ugaagucaugcguuuaaucaca

SEQ ID NO: 202504 - RNA, 20 nt, Homo sapiens
gucuucagggggccaggugc

SEQ ID NO: 202505 - RNA, 18 nt, Homo sapiens
aucuuaguauuugcauau

SEQ ID NO: 202506 - RNA, 11 nt, Homo sapiens
acuucccugaa

SEQ ID NO: 202507 - RNA, 21 nt, Homo sapiens
cgggccuggagaacuagagaa

SEQ ID NO: 202508 - RNA, 19 nt, Homo sapiens
acuuuaaucccacuugccc

SEQ ID NO: 202509 - RNA, 16 nt, Homo sapiens
agcuuugcugggagag

SEQ ID NO: 202510 - RNA, 15 nt, Homo sapiens
agguuugccagcauu

SEQ ID NO: 202511 - RNA, 17 nt, Homo sapiens
guuugauuauucagugu

SEQ ID NO: 202512 - RNA, 14 nt, Homo sapiens
agagcuucccugac

SEQ ID NO: 202513 - RNA, 18 nt, Homo sapiens
aaaauacaugacauuuau

SEQ ID NO: 202514 - RNA, 13 nt, Homo sapiens
uugaaaagacauc

SEQ ID NO: 202515 - RNA, 16 nt, Homo sapiens
acccuaaaucuugacu

SEQ ID NO: 202516 - RNA, 15 nt, Homo sapiens
uacguuaccaggcag

SEQ ID NO: 202517 - RNA, 16 nt, Homo sapiens
augcagcaucuaagua

SEQ ID NO: 202518 - RNA, 22 nt, Homo sapiens
accugaaauaaaauucauuagu

SEQ ID NO: 202519 - RNA, 20 nt, Homo sapiens
ccucauuaccuugugcuaau

SEQ ID NO: 202520 - RNA, 11 nt, Homo sapiens
ccccacugaca

SEQ ID NO: 202521 - RNA, 18 nt, Homo sapiens
cagacuccugugcaacuu

SEQ ID NO: 202522 - RNA, 16 nt, Homo sapiens
ccuguaccugugcacg

SEQ ID NO: 202523 - RNA, 17 nt, Homo sapiens
agacucacauccugacc

SEQ ID NO: 202524 - RNA, 12 nt, Homo sapiens
guucaaagccag

SEQ ID NO: 202525 - RNA, 23 nt, Homo sapiens
cuaccgagucucuucuccacugg

SEQ ID NO: 202526 - RNA, 22 nt, Homo sapiens
ugaagaacaguaacugccauca

SEQ ID NO: 202527 - RNA, 23 nt, Homo sapiens
aaaugucuuuccuuuugcucuua

SEQ ID NO: 202528 - RNA, 13 nt, Homo sapiens
guucaccagguca

SEQ ID NO: 202529 - RNA, 15 nt, Homo sapiens
acacaugagaucuag

SEQ ID NO: 202530 - RNA, 20 nt, Homo sapiens
cagucagaguugugcacaug

SEQ ID NO: 202531 - RNA, 13 nt, Homo sapiens
cguuuaaucacau

SEQ ID NO: 202532 - RNA, 19 nt, Homo sapiens
ucaaguccuacaagcuaaa

SEQ ID NO: 202533 - RNA, 16 nt, Homo sapiens
augaaauguaaauacu

SEQ ID NO: 202534 - RNA, 21 nt, Homo sapiens
gcagagcuugaacacagucuc

SEQ ID NO: 202535 - RNA, 21 nt, Homo sapiens
ugcacuguucccccugugcag

SEQ ID NO: 202536 - RNA, 16 nt, Homo sapiens
auuauaugcacuagca

SEQ ID NO: 202537 - RNA, 21 nt, Homo sapiens
cucacagagugcauugugagg

SEQ ID NO: 202538 - RNA, 21 nt, Homo sapiens
gaguuugggaacugcaauaac

SEQ ID NO: 202539 - RNA, 20 nt, Homo sapiens
ggguucaccaggucagggag

SEQ ID NO: 202540 - RNA, 15 nt, Homo sapiens
uguaccugugcacgu

SEQ ID NO: 202541 - RNA, 20 nt, Homo sapiens
ucaccauuuggcaaugccau

SEQ ID NO: 202542 - RNA, 20 nt, Homo sapiens
gagccaccacguccagcugg

SEQ ID NO: 202543 - RNA, 16 nt, Homo sapiens
auuagaugaacucaac

SEQ ID NO: 202544 - RNA, 16 nt, Homo sapiens
aaaacaagcauucaca

SEQ ID NO: 202545 - RNA, 23 nt, Homo sapiens
guaauucuaaaugaauguuuaca

SEQ ID NO: 202546 - RNA, 23 nt, Homo sapiens
ucauguguguccacgacugucuc

SEQ ID NO: 202547 - RNA, 18 nt, Homo sapiens
caauccagcuauguuaua

SEQ ID NO: 202548 - RNA, 19 nt, Homo sapiens
ucaacaucuuuuacauucu

SEQ ID NO: 202549 - RNA, 20 nt, Homo sapiens
auaugauauauaaaugugau

SEQ ID NO: 202550 - RNA, 21 nt, Homo sapiens
auggagauauuuacaugaauu

SEQ ID NO: 202551 - RNA, 17 nt, Homo sapiens
uucccagcuacaccuuu

SEQ ID NO: 202552 - RNA, 18 nt, Homo sapiens
gacaaaugccacacggcu

SEQ ID NO: 202553 - RNA, 18 nt, Homo sapiens
uuuauauuuuuauagaca

SEQ ID NO: 202554 - RNA, 15 nt, Homo sapiens
aaaucuugacuacag

SEQ ID NO: 202555 - RNA, 16 nt, Homo sapiens
ccucuacaauuugcca

SEQ ID NO: 202556 - RNA, 15 nt, Homo sapiens
cagggacuugaaguu

SEQ ID NO: 202557 - RNA, 21 nt, Homo sapiens
guuaccugaaaacacugugca

SEQ ID NO: 202558 - RNA, 15 nt, Homo sapiens
cuggagucgggacua

SEQ ID NO: 202559 - RNA, 17 nt, Homo sapiens
gucuacguuaccaggca

SEQ ID NO: 202560 - RNA, 21 nt, Homo sapiens
ccuggcuggcauggaggguga

SEQ ID NO: 202561 - RNA, 16 nt, Homo sapiens
cucaagaugaaggcaa

SEQ ID NO: 202562 - RNA, 18 nt, Homo sapiens
agaccugacaccuuucau

SEQ ID NO: 202563 - RNA, 15 nt, Homo sapiens
cgcuuuguugcccag

SEQ ID NO: 202564 - RNA, 13 nt, Homo sapiens
auuagaugaacuc

SEQ ID NO: 202565 - RNA, 21 nt, Homo sapiens
ugcuauaacuauguugauaaa

SEQ ID NO: 202566 - RNA, 20 nt, Homo sapiens
aagagggugauugcuggggc

SEQ ID NO: 202567 - RNA, 15 nt, Homo sapiens
agaggagaaggaggg

SEQ ID NO: 202568 - RNA, 21 nt, Homo sapiens
cacccuggaggauuucaucuc

SEQ ID NO: 202569 - RNA, 20 nt, Homo sapiens
aauaauccagaaaaacugug

SEQ ID NO: 202570 - RNA, 13 nt, Homo sapiens
uacaugacauuua

SEQ ID NO: 202571 - RNA, 21 nt, Homo sapiens
uucaugaguuuuucccagcua

SEQ ID NO: 202572 - RNA, 19 nt, Homo sapiens
ucagggggccaggugcaca

SEQ ID NO: 202573 - RNA, 16 nt, Homo sapiens
uaaagcaggugcccag

SEQ ID NO: 202574 - RNA, 23 nt, Homo sapiens
cugcggguggggcuuggggcuca

SEQ ID NO: 202575 - RNA, 23 nt, Homo sapiens
ccucacagagugcauugugaggg

SEQ ID NO: 202576 - RNA, 19 nt, Homo sapiens
agaacaguaacugccauca

SEQ ID NO: 202577 - RNA, 22 nt, Homo sapiens
auauccaacaugugcucaggga

SEQ ID NO: 202578 - RNA, 18 nt, Homo sapiens
cccaggucccuuguccca

SEQ ID NO: 202579 - RNA, 13 nt, Homo sapiens
auuaauauuugcu

SEQ ID NO: 202580 - RNA, 21 nt, Homo sapiens
uggaacuuuuauuacuggggu

SEQ ID NO: 202581 - RNA, 13 nt, Homo sapiens
cugucucauauga

SEQ ID NO: 202582 - RNA, 15 nt, Homo sapiens
ccucuacaauuugcc

SEQ ID NO: 202583 - RNA, 14 nt, Homo sapiens
gacagaacuaagau

SEQ ID NO: 202584 - RNA, 12 nt, Homo sapiens
uaagaaaaucau

SEQ ID NO: 202585 - RNA, 22 nt, Homo sapiens
ccacugccuucgcuucuugccu

SEQ ID NO: 202586 - RNA, 21 nt, Homo sapiens
gcuccaucgcugucaucucag

SEQ ID NO: 202587 - RNA, 21 nt, Homo sapiens
ucaagccuagcccuucucuca

SEQ ID NO: 202588 - RNA, 17 nt, Homo sapiens
cagguaaggugagggaa

SEQ ID NO: 202589 - RNA, 18 nt, Homo sapiens
aauguuugucucauccca

SEQ ID NO: 202590 - RNA, 22 nt, Homo sapiens
ucaaugcuauaacuauguugau

SEQ ID NO: 202591 - RNA, 18 nt, Homo sapiens
acugcacagugcaucuca

SEQ ID NO: 202592 - RNA, 15 nt, Homo sapiens
ccacuguguauuuaa

SEQ ID NO: 202593 - RNA, 15 nt, Homo sapiens
accugggcaaagccu

SEQ ID NO: 202594 - RNA, 23 nt, Homo sapiens
uucagggggccaggugcacagac

SEQ ID NO: 202595 - RNA, 23 nt, Homo sapiens
acagagggcaggaacuugcacaa

SEQ ID NO: 202596 - RNA, 14 nt, Homo sapiens
aacuacucagggaa

SEQ ID NO: 202597 - RNA, 18 nt, Homo sapiens
guggaaccaacacuaaca

SEQ ID NO: 202598 - RNA, 16 nt, Homo sapiens
cagacuccugugcaac

SEQ ID NO: 202599 - RNA, 17 nt, Homo sapiens
cacagccuccccugcca

SEQ ID NO: 202600 - RNA, 17 nt, Homo sapiens
ccuucaugaucaucaca

SEQ ID NO: 202601 - RNA, 20 nt, Homo sapiens
gcccaggcuggaguggagug

SEQ ID NO: 202602 - RNA, 22 nt, Homo sapiens
cagagugagacccagcccucau

SEQ ID NO: 202603 - RNA, 14 nt, Homo sapiens
acaugaagaagcua

SEQ ID NO: 202604 - RNA, 16 nt, Homo sapiens
cagagaggacuguuga

SEQ ID NO: 202605 - RNA, 12 nt, Homo sapiens
auugacuuuguc

SEQ ID NO: 202606 - RNA, 15 nt, Homo sapiens
cucugcauucuagua

SEQ ID NO: 202607 - RNA, 17 nt, Homo sapiens
aguugcugaugaacucu

SEQ ID NO: 202608 - RNA, 19 nt, Homo sapiens
uugacaguucauauguacc

SEQ ID NO: 202609 - RNA, 23 nt, Homo sapiens
agguugucugaagucacugcaca

SEQ ID NO: 202610 - RNA, 13 nt, Homo sapiens
uucagggggccag

SEQ ID NO: 202611 - RNA, 21 nt, Homo sapiens
ccuuuggggugaacuaccuug

SEQ ID NO: 202612 - RNA, 16 nt, Homo sapiens
auuucuccuccauggg

SEQ ID NO: 202613 - RNA, 17 nt, Homo sapiens
gauacugucucuuucau

SEQ ID NO: 202614 - RNA, 20 nt, Homo sapiens
acugccuucgcuucuugccu

SEQ ID NO: 202615 - RNA, 15 nt, Homo sapiens
agaauggaaggugga

SEQ ID NO: 202616 - RNA, 17 nt, Homo sapiens
ugaguguugcucucuag

SEQ ID NO: 202617 - RNA, 19 nt, Homo sapiens
cucccugaaguaagcaaag

SEQ ID NO: 202618 - RNA, 13 nt, Homo sapiens
agaaggagggaga

SEQ ID NO: 202619 - RNA, 19 nt, Homo sapiens
acaaacucucccuucacuc

SEQ ID NO: 202620 - RNA, 16 nt, Homo sapiens
cuauaacuauguugau

SEQ ID NO: 202621 - RNA, 17 nt, Homo sapiens
ggaaaauuucacauuaa

SEQ ID NO: 202622 - RNA, 16 nt, Homo sapiens
uugccacuacccccuc

SEQ ID NO: 202623 - RNA, 22 nt, Homo sapiens
ucccuuucugugugaagaucac

SEQ ID NO: 202624 - RNA, 21 nt, Homo sapiens
aaacagccccucuggacacag

SEQ ID NO: 202625 - RNA, 16 nt, Homo sapiens
aauauagcuguacaaa

SEQ ID NO: 202626 - RNA, 21 nt, Homo sapiens
cugcauaccaaccugggcaau

SEQ ID NO: 202627 - RNA, 13 nt, Homo sapiens
aguagucauuuca

SEQ ID NO: 202628 - RNA, 20 nt, Homo sapiens
agucaugagcugagcaggga

SEQ ID NO: 202629 - RNA, 20 nt, Homo sapiens
caaagccuuuggcucuucua

SEQ ID NO: 202630 - RNA, 22 nt, Homo sapiens
augcuucugacuucauagauuu

SEQ ID NO: 202631 - RNA, 17 nt, Homo sapiens
augaaugggagugaggg

SEQ ID NO: 202632 - RNA, 16 nt, Homo sapiens
cuuuugguaugugaca

SEQ ID NO: 202633 - RNA, 18 nt, Homo sapiens
ccuaaugaaugcauaaaa

SEQ ID NO: 202634 - RNA, 15 nt, Homo sapiens
uuacuaucaugucaa

SEQ ID NO: 202635 - RNA, 13 nt, Homo sapiens
agucaaagacauu

SEQ ID NO: 202636 - RNA, 23 nt, Homo sapiens
uugcuauggggagaaaagacaug

SEQ ID NO: 202637 - RNA, 15 nt, Homo sapiens
cagagagggggccac

SEQ ID NO: 202638 - RNA, 23 nt, Homo sapiens
caccuuucauaaucuuugcuuua

SEQ ID NO: 202639 - RNA, 17 nt, Homo sapiens
gagucagcagaacuggg

SEQ ID NO: 202640 - RNA, 16 nt, Homo sapiens
guuuuuaaaacccagu

SEQ ID NO: 202641 - RNA, 11 nt, Homo sapiens
cauuugugccc

SEQ ID NO: 202642 - RNA, 20 nt, Homo sapiens
uugcagcuuauauucaucca

SEQ ID NO: 202643 - RNA, 18 nt, Homo sapiens
acaggacccugggaccac

SEQ ID NO: 202644 - RNA, 22 nt, Homo sapiens
cuugaaagaaaauaugcaucua

SEQ ID NO: 202645 - RNA, 23 nt, Homo sapiens
acuaccuugguucccccacugau

SEQ ID NO: 202646 - RNA, 18 nt, Homo sapiens
uccucuccacugccuucg

SEQ ID NO: 202647 - RNA, 22 nt, Homo sapiens
cucacuaggcccccacuugccu

SEQ ID NO: 202648 - RNA, 16 nt, Homo sapiens
ucugucucauaugauu

SEQ ID NO: 202649 - RNA, 21 nt, Homo sapiens
gauucuaugaggcaaccacag

SEQ ID NO: 202650 - RNA, 17 nt, Homo sapiens
cuuguaaaugugguaaa

SEQ ID NO: 202651 - RNA, 23 nt, Homo sapiens
gaugaccccuccccuaaugccug

SEQ ID NO: 202652 - RNA, 12 nt, Homo sapiens
gagagggggcca

SEQ ID NO: 202653 - RNA, 13 nt, Homo sapiens
cugucuccauggc

SEQ ID NO: 202654 - RNA, 22 nt, Homo sapiens
gucucuuguaauccgaaucucu

SEQ ID NO: 202655 - RNA, 12 nt, Homo sapiens
ccaggaccaguc

SEQ ID NO: 202656 - RNA, 14 nt, Homo sapiens
gggcagucauuauc

SEQ ID NO: 202657 - RNA, 13 nt, Homo sapiens
ccuugaaggguuc

SEQ ID NO: 202658 - RNA, 14 nt, Homo sapiens
ugaauacaggcaua

SEQ ID NO: 202659 - RNA, 20 nt, Homo sapiens
acugcucauuuggaucccag

SEQ ID NO: 202660 - RNA, 14 nt, Homo sapiens
augcucagggucaa

SEQ ID NO: 202661 - RNA, 16 nt, Homo sapiens
agccagcucugcauua

SEQ ID NO: 202662 - RNA, 18 nt, Homo sapiens
ugacauccaagcuuccuu

SEQ ID NO: 202663 - RNA, 20 nt, Homo sapiens
aagggccagcuggaggugaa

SEQ ID NO: 202664 - RNA, 16 nt, Homo sapiens
aacaaauguauuucaa

SEQ ID NO: 202665 - RNA, 23 nt, Homo sapiens
ugaaggguucaccaggucaggga

SEQ ID NO: 202666 - RNA, 18 nt, Homo sapiens
cccucuccccacugcuca

SEQ ID NO: 202667 - RNA, 21 nt, Homo sapiens
caagccuagcccuucucucau

SEQ ID NO: 202668 - RNA, 23 nt, Homo sapiens
gcacagagagggggccaccuccc

SEQ ID NO: 202669 - RNA, 18 nt, Homo sapiens
agcauaaguuucugggac

SEQ ID NO: 202670 - RNA, 22 nt, Homo sapiens
agaugggcaaauuaaggcauaa

SEQ ID NO: 202671 - RNA, 13 nt, Homo sapiens
auuucuucacuca

SEQ ID NO: 202672 - RNA, 20 nt, Homo sapiens
aggauccccucucuuccuac

SEQ ID NO: 202673 - RNA, 22 nt, Homo sapiens
caugauuucauuucaacuguuu

SEQ ID NO: 202674 - RNA, 17 nt, Homo sapiens
gauucugguuccagggu

SEQ ID NO: 202675 - RNA, 17 nt, Homo sapiens
gucucacaguguugccc

SEQ ID NO: 202676 - RNA, 21 nt, Homo sapiens
uaugccauggaggcacuaaca

SEQ ID NO: 202677 - RNA, 15 nt, Homo sapiens
ccacaaaaguacaau

SEQ ID NO: 202678 - RNA, 15 nt, Homo sapiens
acguggggcagcaca

SEQ ID NO: 202679 - RNA, 16 nt, Homo sapiens
gacaaauaauaagcaa

SEQ ID NO: 202680 - RNA, 23 nt, Homo sapiens
aguguugcccaggcuggucucaa

SEQ ID NO: 202681 - RNA, 14 nt, Homo sapiens
caucucuuguauau

SEQ ID NO: 202682 - RNA, 19 nt, Homo sapiens
auacugcucaucauuccuu

SEQ ID NO: 202683 - RNA, 17 nt, Homo sapiens
uuucuuuuguauguaaa

SEQ ID NO: 202684 - RNA, 16 nt, Homo sapiens
accaggccaccucccc

SEQ ID NO: 202685 - RNA, 13 nt, Homo sapiens
cuucuuguucccc

SEQ ID NO: 202686 - RNA, 21 nt, Homo sapiens
agaauauuuuaaguauugcau

SEQ ID NO: 202687 - RNA, 19 nt, Homo sapiens
cugccugcggaccagauga

SEQ ID NO: 202688 - RNA, 16 nt, Homo sapiens
auaugaacggugagca

SEQ ID NO: 202689 - RNA, 16 nt, Homo sapiens
ucaaauuggagcuuca

SEQ ID NO: 202690 - RNA, 16 nt, Homo sapiens
cccuuggagccaaugg

SEQ ID NO: 202691 - RNA, 23 nt, Homo sapiens
uccagcuggaagggucaacaucu

SEQ ID NO: 202692 - RNA, 15 nt, Homo sapiens
uccuuucacaaccuu

SEQ ID NO: 202693 - RNA, 14 nt, Homo sapiens
auugagcaaagggg

SEQ ID NO: 202694 - RNA, 16 nt, Homo sapiens
ggaaagaaaugcccau

SEQ ID NO: 202695 - RNA, 18 nt, Homo sapiens
uaauaaguuucacugacu

SEQ ID NO: 202696 - RNA, 15 nt, Homo sapiens
cuucacaugcaucaa

SEQ ID NO: 202697 - RNA, 17 nt, Homo sapiens
ucauaaucuuugcuuua

SEQ ID NO: 202698 - RNA, 20 nt, Homo sapiens
uguauagguuuuaaagaccu

SEQ ID NO: 202699 - RNA, 21 nt, Homo sapiens
agccacugcauaccaaccugg

SEQ ID NO: 202700 - RNA, 16 nt, Homo sapiens
agugauuggcucugug

SEQ ID NO: 202701 - RNA, 14 nt, Homo sapiens
caaaggauacugua

SEQ ID NO: 202702 - RNA, 18 nt, Homo sapiens
aaaauuauuugcauaaca

SEQ ID NO: 202703 - RNA, 15 nt, Homo sapiens
uuuuuccuaacagga

SEQ ID NO: 202704 - RNA, 15 nt, Homo sapiens
auuuucugcauuuaa

SEQ ID NO: 202705 - RNA, 14 nt, Homo sapiens
ugcacacuuugcca

SEQ ID NO: 202706 - RNA, 23 nt, Homo sapiens
cagagaugcaccaccaagccaag

SEQ ID NO: 202707 - RNA, 23 nt, Homo sapiens
ucccuuuuuauaucccauuuuua

SEQ ID NO: 202708 - RNA, 19 nt, Homo sapiens
uuuaagguuuuuacuguga

SEQ ID NO: 202709 - RNA, 17 nt, Homo sapiens
aucccauucugcgucau

SEQ ID NO: 202710 - RNA, 16 nt, Homo sapiens
cacauucaauaagcau

SEQ ID NO: 202711 - RNA, 17 nt, Homo sapiens
agugauugauagagugu

SEQ ID NO: 202712 - RNA, 15 nt, Homo sapiens
gaacuagagaaggac

SEQ ID NO: 202713 - RNA, 16 nt, Homo sapiens
aucuaugauaugcuaa

SEQ ID NO: 202714 - RNA, 19 nt, Homo sapiens
gggucagagaggagucaga

SEQ ID NO: 202715 - RNA, 18 nt, Homo sapiens
cuugggagaccuguaauc

SEQ ID NO: 202716 - RNA, 14 nt, Homo sapiens
cuuucauaaucuuu

SEQ ID NO: 202717 - RNA, 12 nt, Homo sapiens
cgcuucuugccu

SEQ ID NO: 202718 - RNA, 21 nt, Homo sapiens
aauguacaacuuuuuaccuag

SEQ ID NO: 202719 - RNA, 14 nt, Homo sapiens
ccaucagugcuccc

SEQ ID NO: 202720 - RNA, 18 nt, Homo sapiens
ucucacaguguugcccag

SEQ ID NO: 202721 - RNA, 23 nt, Homo sapiens
aauguuaaguugauggugaugaa

SEQ ID NO: 202722 - RNA, 22 nt, Homo sapiens
gagagcucgcuuugagugacug

SEQ ID NO: 202723 - RNA, 13 nt, Homo sapiens
gagacugggucuc

SEQ ID NO: 202724 - RNA, 14 nt, Homo sapiens
auguauaugcacuu

SEQ ID NO: 202725 - RNA, 24 nt, Homo sapiens
guccacgagcuguuuacuagggau

SEQ ID NO: 202726 - RNA, 18 nt, Homo sapiens
ugugggugggaccacaga

SEQ ID NO: 202727 - RNA, 17 nt, Homo sapiens
cucagcuggaucuccau

SEQ ID NO: 202728 - RNA, 18 nt, Homo sapiens
auaacuaguguugcuugg

SEQ ID NO: 202729 - RNA, 14 nt, Homo sapiens
ccauaauguuacau

SEQ ID NO: 202730 - RNA, 20 nt, Homo sapiens
aucuguuaccagaggacaaa

SEQ ID NO: 202731 - RNA, 23 nt, Homo sapiens
ucaccauuuggcaaugccaucau

SEQ ID NO: 202732 - RNA, 12 nt, Homo sapiens
aggcccucgcug

SEQ ID NO: 202733 - RNA, 19 nt, Homo sapiens
gucaaccugccugacauuu

SEQ ID NO: 202734 - RNA, 14 nt, Homo sapiens
ccugugaaugccac

SEQ ID NO: 202735 - RNA, 19 nt, Homo sapiens
cucacagagugcauuguga

SEQ ID NO: 202736 - RNA, 21 nt, Homo sapiens
acacugggcuucuagaaccag

SEQ ID NO: 202737 - RNA, 15 nt, Homo sapiens
uggcaaggugacauu

SEQ ID NO: 202738 - RNA, 17 nt, Homo sapiens
guucacucuacuuagca

SEQ ID NO: 202739 - RNA, 23 nt, Homo sapiens
acugcagggaaaauuauuugcau

SEQ ID NO: 202740 - RNA, 12 nt, Homo sapiens
aauuaugccaua

SEQ ID NO: 202741 - RNA, 20 nt, Homo sapiens
cagacgcacgugggucuuca

SEQ ID NO: 202742 - RNA, 13 nt, Homo sapiens
cauucuagguagg

SEQ ID NO: 202743 - RNA, 20 nt, Homo sapiens
uuguaucaaaugugacauua

SEQ ID NO: 202744 - RNA, 12 nt, Homo sapiens
uuuaaaucugag

SEQ ID NO: 202745 - RNA, 18 nt, Homo sapiens
cacgucuggcuucacaga

SEQ ID NO: 202746 - RNA, 20 nt, Homo sapiens
uaaggguuaguuuacaauca

SEQ ID NO: 202747 - RNA, 13 nt, Homo sapiens
uguugacauccaa

SEQ ID NO: 202748 - RNA, 23 nt, Homo sapiens
auauaugauauauaaaugugauu

SEQ ID NO: 202749 - RNA, 14 nt, Homo sapiens
ugggagugagggau

SEQ ID NO: 202750 - RNA, 13 nt, Homo sapiens
ggaguaugcaaaa

SEQ ID NO: 202751 - RNA, 19 nt, Homo sapiens
augcugugauugugccuac

SEQ ID NO: 202752 - RNA, 14 nt, Homo sapiens
gacugcugagucaa

SEQ ID NO: 202753 - RNA, 17 nt, Homo sapiens
guguaauuuuguucuag

SEQ ID NO: 202754 - RNA, 13 nt, Homo sapiens
auuuagcacauac

SEQ ID NO: 202755 - RNA, 23 nt, Homo sapiens
uaugaggaugcagagucagcaga

SEQ ID NO: 202756 - RNA, 23 nt, Homo sapiens
agucaaggauggaugcagaucca

SEQ ID NO: 202757 - RNA, 13 nt, Homo sapiens
agagcugguuggg

SEQ ID NO: 202758 - RNA, 22 nt, Homo sapiens
acaagacaggacccugggacca

SEQ ID NO: 202759 - RNA, 14 nt, Homo sapiens
ggccuuaaccauga

SEQ ID NO: 202760 - RNA, 15 nt, Homo sapiens
augcguuuaaucaca

SEQ ID NO: 202761 - RNA, 16 nt, Homo sapiens
uuaaguugauggugau

SEQ ID NO: 202762 - RNA, 22 nt, Homo sapiens
guaauuuuguucuaguuuucag

SEQ ID NO: 202763 - RNA, 19 nt, Homo sapiens
ccaugcugcccgcuucuca

SEQ ID NO: 202764 - RNA, 21 nt, Homo sapiens
aacuggaggaguuccuugauc

SEQ ID NO: 202765 - RNA, 17 nt, Homo sapiens
caggaggugcuaucgca

SEQ ID NO: 202766 - RNA, 14 nt, Homo sapiens
caugucagcaaaaa

SEQ ID NO: 202767 - RNA, 19 nt, Homo sapiens
ccuggggagucugggcaca

SEQ ID NO: 202768 - RNA, 15 nt, Homo sapiens
gaagggacauauuca

SEQ ID NO: 202769 - RNA, 13 nt, Homo sapiens
agcugagcaggga

SEQ ID NO: 202770 - RNA, 16 nt, Homo sapiens
gagggcagucgauaga

SEQ ID NO: 202771 - RNA, 20 nt, Homo sapiens
ucuaagagaacaaugugcua

SEQ ID NO: 202772 - RNA, 23 nt, Homo sapiens
aacaauuuuaggaggaccagagc

SEQ ID NO: 202773 - RNA, 16 nt, Homo sapiens
gaagagaaugugacag

SEQ ID NO: 202774 - RNA, 12 nt, Homo sapiens
gaacuugcacaa

SEQ ID NO: 202775 - RNA, 16 nt, Homo sapiens
aauaauguacaucugg

SEQ ID NO: 202776 - RNA, 17 nt, Homo sapiens
agaacaguaacugccau

SEQ ID NO: 202777 - RNA, 14 nt, Homo sapiens
agggagcuggaaaa

SEQ ID NO: 202778 - RNA, 17 nt, Homo sapiens
caauuuuaaaucugaga

SEQ ID NO: 202779 - RNA, 18 nt, Homo sapiens
aaaaacuaacacccaguc

SEQ ID NO: 202780 - RNA, 18 nt, Homo sapiens
acuauggcucuacuuuca

SEQ ID NO: 202781 - RNA, 20 nt, Homo sapiens
aacaaaaauuaaaauccuca

SEQ ID NO: 202782 - RNA, 19 nt, Homo sapiens
gguuaauaaguuucacuga

SEQ ID NO: 202783 - RNA, 13 nt, Homo sapiens
gaacuagacuccc

SEQ ID NO: 202784 - RNA, 23 nt, Homo sapiens
augaauguuuacacucuuuguaa

SEQ ID NO: 202785 - RNA, 18 nt, Homo sapiens
cuucuccauccacauggg

SEQ ID NO: 202786 - RNA, 14 nt, Homo sapiens
agaguugugcacau

SEQ ID NO: 202787 - RNA, 16 nt, Homo sapiens
auggcucuacuuucag

SEQ ID NO: 202788 - RNA, 19 nt, Homo sapiens
cgagccaaguuaagaaugu

SEQ ID NO: 202789 - RNA, 22 nt, Homo sapiens
ucuuguuucaauuccaccugca

SEQ ID NO: 202790 - RNA, 23 nt, Homo sapiens
ugcuaauauauguauaugcaaua

SEQ ID NO: 202791 - RNA, 19 nt, Homo sapiens
cuccagaaagcucaucuca

SEQ ID NO: 202792 - RNA, 17 nt, Homo sapiens
cagagcagaacuuucac

SEQ ID NO: 202793 - RNA, 14 nt, Homo sapiens
uuugagacuuagaa

SEQ ID NO: 202794 - RNA, 16 nt, Homo sapiens
gggucuuugaacccuu

SEQ ID NO: 202795 - RNA, 13 nt, Homo sapiens
auucacaguguga

SEQ ID NO: 202796 - RNA, 18 nt, Homo sapiens
cucuaguuuccagaggcu

SEQ ID NO: 202797 - RNA, 22 nt, Homo sapiens
uucucucugacccucuccccac

SEQ ID NO: 202798 - RNA, 14 nt, Homo sapiens
acagacucacaucc

SEQ ID NO: 202799 - RNA, 13 nt, Homo sapiens
gaagguugcaccu

SEQ ID NO: 202800 - RNA, 17 nt, Homo sapiens
uuccuacccuuccucac

SEQ ID NO: 202801 - RNA, 12 nt, Homo sapiens
cccugcauuuau

SEQ ID NO: 202802 - RNA, 20 nt, Homo sapiens
cauauccaacaugugcucag

SEQ ID NO: 202803 - RNA, 20 nt, Homo sapiens
auuucaugauuucauuucaa

SEQ ID NO: 202804 - RNA, 20 nt, Homo sapiens
uuuauagucgaacaauucau

SEQ ID NO: 202805 - RNA, 20 nt, Homo sapiens
ggcagacacagggacuugaa

SEQ ID NO: 202806 - RNA, 12 nt, Homo sapiens
aaauccuugaua

SEQ ID NO: 202807 - RNA, 22 nt, Homo sapiens
aagcugggagcacaggcacugc

SEQ ID NO: 202808 - RNA, 19 nt, Homo sapiens
uccucugugaccaaugucu

SEQ ID NO: 202809 - RNA, 13 nt, Homo sapiens
uugcaaggcauuu

SEQ ID NO: 202810 - RNA, 23 nt, Homo sapiens
ugccucuugaaugcagggacaaa

SEQ ID NO: 202811 - RNA, 16 nt, Homo sapiens
uauaacuauguugaua

SEQ ID NO: 202812 - RNA, 14 nt, Homo sapiens
ugggcagagcccaa

SEQ ID NO: 202813 - RNA, 18 nt, Homo sapiens
acaauagugauugauaga

SEQ ID NO: 202814 - RNA, 18 nt, Homo sapiens
accauucaggacacaggg

SEQ ID NO: 202815 - RNA, 11 nt, Homo sapiens
uaucugugaaa

SEQ ID NO: 202816 - RNA, 21 nt, Homo sapiens
ccugaaguaagcaaagacuuu

SEQ ID NO: 202817 - RNA, 15 nt, Homo sapiens
aggcaaccacaggca

SEQ ID NO: 202818 - RNA, 17 nt, Homo sapiens
cccuaaaucuugacuac

SEQ ID NO: 202819 - RNA, 18 nt, Homo sapiens
caaguguagguaucauuu

SEQ ID NO: 202820 - RNA, 21 nt, Homo sapiens
acaaccaugagaccacuguua

SEQ ID NO: 202821 - RNA, 23 nt, Homo sapiens
aaacuuggcucgaaucucugugc

SEQ ID NO: 202822 - RNA, 15 nt, Homo sapiens
cucugaaaccagugu

SEQ ID NO: 202823 - RNA, 13 nt, Homo sapiens
uuaucugugcaaa

SEQ ID NO: 202824 - RNA, 16 nt, Homo sapiens
cagguuccaaucagaa

SEQ ID NO: 202825 - RNA, 20 nt, Homo sapiens
uacaggcauagaguucagac

SEQ ID NO: 202826 - RNA, 21 nt, Homo sapiens
uuccuugauggagauauuuac

SEQ ID NO: 202827 - RNA, 13 nt, Homo sapiens
auuuuugaauaca

SEQ ID NO: 202828 - RNA, 21 nt, Homo sapiens
ugagugugaccaggcauccuc

SEQ ID NO: 202829 - RNA, 15 nt, Homo sapiens
gaugucucacauccu

SEQ ID NO: 202830 - RNA, 21 nt, Homo sapiens
caucagacuccugugcaacuu

SEQ ID NO: 202831 - RNA, 20 nt, Homo sapiens
uccacuuagaaauugcauuu

SEQ ID NO: 202832 - RNA, 23 nt, Homo sapiens
ccuacaaggcuggcagugacaga

SEQ ID NO: 202833 - RNA, 14 nt, Homo sapiens
ucaguguauuugua

SEQ ID NO: 202834 - RNA, 17 nt, Homo sapiens
ucugacucagggcuccu

SEQ ID NO: 202835 - RNA, 23 nt, Homo sapiens
aaccuguaaagcaggugcccagg

SEQ ID NO: 202836 - RNA, 22 nt, Homo sapiens
uauagucgaacaauucauauau

SEQ ID NO: 202837 - RNA, 16 nt, Homo sapiens
ucaagcagucgugccu

SEQ ID NO: 202838 - RNA, 15 nt, Homo sapiens
uugacucuccagaaa

SEQ ID NO: 202839 - RNA, 16 nt, Homo sapiens
gcugccucuaccugac

SEQ ID NO: 202840 - RNA, 17 nt, Homo sapiens
ccaaagcuuucauguaa

SEQ ID NO: 202841 - RNA, 17 nt, Homo sapiens
guccugccucagccucc

SEQ ID NO: 202842 - RNA, 15 nt, Homo sapiens
uuagaaauugcauuu

SEQ ID NO: 202843 - RNA, 17 nt, Homo sapiens
aucagggaggucauuuu

SEQ ID NO: 202844 - RNA, 23 nt, Homo sapiens
cauauauuugaaguggagccaua

SEQ ID NO: 202845 - RNA, 13 nt, Homo sapiens
cugagcugugcag

SEQ ID NO: 202846 - RNA, 20 nt, Homo sapiens
gggacagagcagaacuuuca

SEQ ID NO: 202847 - RNA, 19 nt, Homo sapiens
acccuuggagccaauggag

SEQ ID NO: 202848 - RNA, 16 nt, Homo sapiens
cccacaaaaguacaau

SEQ ID NO: 202849 - RNA, 19 nt, Homo sapiens
cauuguucagaugcuucuu

SEQ ID NO: 202850 - RNA, 13 nt, Homo sapiens
uauguaacaugua

SEQ ID NO: 202851 - RNA, 15 nt, Homo sapiens
aggcagcagugugag

SEQ ID NO: 202852 - RNA, 19 nt, Homo sapiens
cuuuagucugcaaaaugag

SEQ ID NO: 202853 - RNA, 23 nt, Homo sapiens
cagcuggguuggaaaacaguauu

SEQ ID NO: 202854 - RNA, 18 nt, Homo sapiens
cuugcugccaaaagccuu

SEQ ID NO: 202855 - RNA, 22 nt, Homo sapiens
uucaucagacuccugugcaacu

SEQ ID NO: 202856 - RNA, 19 nt, Homo sapiens
uucugcauuuaaccgucaa

SEQ ID NO: 202857 - RNA, 19 nt, Homo sapiens
auguacaucuggccuugaa

SEQ ID NO: 202858 - RNA, 16 nt, Homo sapiens
ucaugauuucauuuca

SEQ ID NO: 202859 - RNA, 20 nt, Homo sapiens
uggcuguagaaggagacaga

SEQ ID NO: 202860 - RNA, 20 nt, Homo sapiens
uucgagaccagccuggccaa

SEQ ID NO: 202861 - RNA, 18 nt, Homo sapiens
ucacagaugugugauuca

SEQ ID NO: 202862 - RNA, 14 nt, Homo sapiens
aaaacugucccuuu

SEQ ID NO: 202863 - RNA, 23 nt, Homo sapiens
aaggccucccugucuaaaauccc

SEQ ID NO: 202864 - RNA, 16 nt, Homo sapiens
ugaaaacacugugcac

SEQ ID NO: 202865 - RNA, 19 nt, Homo sapiens
uguuucuuuuguauguaaa

SEQ ID NO: 202866 - RNA, 13 nt, Homo sapiens
ugucuuucacuga

SEQ ID NO: 202867 - RNA, 15 nt, Homo sapiens
uuguucuaguuuuca

SEQ ID NO: 202868 - RNA, 17 nt, Homo sapiens
caaaucuggaagccaaa

SEQ ID NO: 202869 - RNA, 15 nt, Homo sapiens
cauuuucugcauuua

SEQ ID NO: 202870 - RNA, 17 nt, Homo sapiens
cuuugucccggggcucc

SEQ ID NO: 202871 - RNA, 16 nt, Homo sapiens
cuguauuaagccacuu

SEQ ID NO: 202872 - RNA, 18 nt, Homo sapiens
ccuggucccuuggagaca

SEQ ID NO: 202873 - RNA, 20 nt, Homo sapiens
uucauauauuuguaugaucc

SEQ ID NO: 202874 - RNA, 17 nt, Homo sapiens
cuuuugacaaaggcaag

SEQ ID NO: 202875 - RNA, 17 nt, Homo sapiens
uccccauuugcuuacuu

SEQ ID NO: 202876 - RNA, 18 nt, Homo sapiens
uuuagacccugcauuuau

SEQ ID NO: 202877 - RNA, 12 nt, Homo sapiens
gggugggaccac

SEQ ID NO: 202878 - RNA, 19 nt, Homo sapiens
agcacugagcaaagcauug

SEQ ID NO: 202879 - RNA, 18 nt, Homo sapiens
guaccugcccccaaucca

SEQ ID NO: 202880 - RNA, 15 nt, Homo sapiens
cugaagaacaguaac

SEQ ID NO: 202881 - RNA, 21 nt, Homo sapiens
uugccucugaagccuauguau

SEQ ID NO: 202882 - RNA, 18 nt, Homo sapiens
gaaccaggcaacuuggga

SEQ ID NO: 202883 - RNA, 22 nt, Homo sapiens
aggugcccaggaaccucagggc

SEQ ID NO: 202884 - RNA, 23 nt, Homo sapiens
cacugcuugaggaaaacaagcau

SEQ ID NO: 202885 - RNA, 16 nt, Homo sapiens
aguguuccccuuccac

SEQ ID NO: 202886 - RNA, 16 nt, Homo sapiens
uggcucacaccuguaa

SEQ ID NO: 202887 - RNA, 15 nt, Homo sapiens
uaaguaaugaugucg

SEQ ID NO: 202888 - RNA, 16 nt, Homo sapiens
cuuugagugacugggu

SEQ ID NO: 202889 - RNA, 15 nt, Homo sapiens
ccccauuccugggaa

SEQ ID NO: 202890 - RNA, 18 nt, Homo sapiens
cuggacacagccccaugu

SEQ ID NO: 202891 - RNA, 20 nt, Homo sapiens
cagaucccacuugcagccuc

SEQ ID NO: 202892 - RNA, 21 nt, Homo sapiens
aagccucagagaauugcugau

SEQ ID NO: 202893 - RNA, 20 nt, Homo sapiens
ugugaccaaugucuugaugc

SEQ ID NO: 202894 - RNA, 15 nt, Homo sapiens
augcuggcauuugca

SEQ ID NO: 202895 - RNA, 15 nt, Homo sapiens
cagaaccagagcuca

SEQ ID NO: 202896 - RNA, 15 nt, Homo sapiens
uaagagaacaaugug

SEQ ID NO: 202897 - RNA, 13 nt, Homo sapiens
aggcacagaugaa

SEQ ID NO: 202898 - RNA, 15 nt, Homo sapiens
ccugagguuugccag

SEQ ID NO: 202899 - RNA, 21 nt, Homo sapiens
agcaacacucuauauuuagau

SEQ ID NO: 202900 - RNA, 19 nt, Homo sapiens
auugugcacauacuugaga

SEQ ID NO: 202901 - RNA, 17 nt, Homo sapiens
cuccuccagaccauuca

SEQ ID NO: 202902 - RNA, 12 nt, Homo sapiens
aacccugucuga

SEQ ID NO: 202903 - RNA, 18 nt, Homo sapiens
gcauaugaggaugcagag

SEQ ID NO: 202904 - RNA, 21 nt, Homo sapiens
ugcugggagaggggguagcua

SEQ ID NO: 202905 - RNA, 18 nt, Homo sapiens
gagauaauucuagcuuug

SEQ ID NO: 202906 - RNA, 18 nt, Homo sapiens
ucccucacuguugaauuu

SEQ ID NO: 202907 - RNA, 20 nt, Homo sapiens
uuagauuguuaaaauaacua

SEQ ID NO: 202908 - RNA, 12 nt, Homo sapiens
auguugaugaaa

SEQ ID NO: 202909 - RNA, 13 nt, Homo sapiens
gaugaucaucucc

SEQ ID NO: 202910 - RNA, 14 nt, Homo sapiens
uaagugcaugacau

SEQ ID NO: 202911 - RNA, 14 nt, Homo sapiens
ugauuucauuucaa

SEQ ID NO: 202912 - RNA, 17 nt, Homo sapiens
auuuugcauaguaccaa

SEQ ID NO: 202913 - RNA, 14 nt, Homo sapiens
ccaggcagauccca

SEQ ID NO: 202914 - RNA, 20 nt, Homo sapiens
uucccuauuuugccaguggg

SEQ ID NO: 202915 - RNA, 18 nt, Homo sapiens
auccacuucucucaggau

SEQ ID NO: 202916 - RNA, 20 nt, Homo sapiens
agaugccuucuccagacaaa

SEQ ID NO: 202917 - RNA, 21 nt, Homo sapiens
agguugucugaagucacugca

SEQ ID NO: 202918 - RNA, 20 nt, Homo sapiens
auggcaaaggaagguggaug

SEQ ID NO: 202919 - RNA, 19 nt, Homo sapiens
ccuugguucccccacugau

SEQ ID NO: 202920 - RNA, 19 nt, Homo sapiens
gaaauugcauuuccugaca

SEQ ID NO: 202921 - RNA, 17 nt, Homo sapiens
aucagacuccugugcaa

SEQ ID NO: 202922 - RNA, 18 nt, Homo sapiens
ugaugaaauguaaauacu

SEQ ID NO: 202923 - RNA, 18 nt, Homo sapiens
agcuuagacuaaggccau

SEQ ID NO: 202924 - RNA, 18 nt, Homo sapiens
agaacccuuggagccaau

SEQ ID NO: 202925 - RNA, 14 nt, Homo sapiens
augugauugcagcu

SEQ ID NO: 202926 - RNA, 21 nt, Homo sapiens
ggaguguucagggccagcccu

SEQ ID NO: 202927 - RNA, 19 nt, Homo sapiens
ucuacagagcuucccugac

SEQ ID NO: 202928 - RNA, 20 nt, Homo sapiens
guaaaauauagcuguacaaa

SEQ ID NO: 202929 - RNA, 17 nt, Homo sapiens
gagauggaggaaaguga

SEQ ID NO: 202930 - RNA, 15 nt, Homo sapiens
cuguuaccagaggac

SEQ ID NO: 202931 - RNA, 19 nt, Homo sapiens
gcaccacuguguauuuaac

SEQ ID NO: 202932 - RNA, 21 nt, Homo sapiens
gagcacuggguugacuuucag

SEQ ID NO: 202933 - RNA, 23 nt, Homo sapiens
ccuuagauguucuaagucuuucc

SEQ ID NO: 202934 - RNA, 17 nt, Homo sapiens
gaaauaucaugcuccau

SEQ ID NO: 202935 - RNA, 20 nt, Homo sapiens
agaagcacccaggacuucca

SEQ ID NO: 202936 - RNA, 21 nt, Homo sapiens
gagcagugaaugauucagugu

SEQ ID NO: 202937 - RNA, 19 nt, Homo sapiens
cuuuugcauaagugcauga

SEQ ID NO: 202938 - RNA, 21 nt, Homo sapiens
cuuuugcauaagugcaugaca

SEQ ID NO: 202939 - RNA, 13 nt, Homo sapiens
cuugggcucccug

SEQ ID NO: 202940 - RNA, 22 nt, Homo sapiens
gacaaaccagaagcaacagaaa

SEQ ID NO: 202941 - RNA, 21 nt, Homo sapiens
auguacaugaagaagcuaaau

SEQ ID NO: 202942 - RNA, 15 nt, Homo sapiens
cgugaggaugggaag

SEQ ID NO: 202943 - RNA, 19 nt, Homo sapiens
agccccucuggacacagcc

SEQ ID NO: 202944 - RNA, 16 nt, Homo sapiens
cagaccauucaggaca

SEQ ID NO: 202945 - RNA, 19 nt, Homo sapiens
acaccguccuccacgccau

SEQ ID NO: 202946 - RNA, 20 nt, Homo sapiens
auuguaucaaaugugacauu

SEQ ID NO: 202947 - RNA, 21 nt, Homo sapiens
aaugaugucguuugaaucaca

SEQ ID NO: 202948 - RNA, 17 nt, Homo sapiens
accacugauaaaaccau

SEQ ID NO: 202949 - RNA, 16 nt, Homo sapiens
acaacuaugauuugga

SEQ ID NO: 202950 - RNA, 19 nt, Homo sapiens
gacagagcagaacuuucac

SEQ ID NO: 202951 - RNA, 11 nt, Homo sapiens
cuucuugccuc

SEQ ID NO: 202952 - RNA, 14 nt, Homo sapiens
cgagucucuucucc

SEQ ID NO: 202953 - RNA, 20 nt, Homo sapiens
cuuacauuugaaaucuauga

SEQ ID NO: 202954 - RNA, 14 nt, Homo sapiens
uccaacaugugcuc

SEQ ID NO: 202955 - RNA, 16 nt, Homo sapiens
ugcuucgcagaugucc

SEQ ID NO: 202956 - RNA, 20 nt, Homo sapiens
uuacaaucagccacauucua

SEQ ID NO: 202957 - RNA, 22 nt, Homo sapiens
agaguggaaccaacacuaacau

SEQ ID NO: 202958 - RNA, 18 nt, Homo sapiens
ccuaaaaggaaaucucac

SEQ ID NO: 202959 - RNA, 12 nt, Homo sapiens
gaaggagggaga

SEQ ID NO: 202960 - RNA, 21 nt, Homo sapiens
gagguauucaauauccuuugc

SEQ ID NO: 202961 - RNA, 16 nt, Homo sapiens
ggcaggaacuugcaca

SEQ ID NO: 202962 - RNA, 16 nt, Homo sapiens
auaaaauucauuaguu

SEQ ID NO: 202963 - RNA, 17 nt, Homo sapiens
ugcaccacuucaaguga

SEQ ID NO: 202964 - RNA, 18 nt, Homo sapiens
acuuucagguacuaaaua

SEQ ID NO: 202965 - RNA, 22 nt, Homo sapiens
uguucuaagucuuuccauugga

SEQ ID NO: 202966 - RNA, 17 nt, Homo sapiens
gauauguucaacuggag

SEQ ID NO: 202967 - RNA, 13 nt, Homo sapiens
agagaacuggagg

SEQ ID NO: 202968 - RNA, 21 nt, Homo sapiens
gagccuuaaaacccacaaaag

SEQ ID NO: 202969 - RNA, 15 nt, Homo sapiens
ucggcugaccaugcu

SEQ ID NO: 202970 - RNA, 19 nt, Homo sapiens
uccuaaugaaugcauaaaa

SEQ ID NO: 202971 - RNA, 13 nt, Homo sapiens
cagauaaugugaa

SEQ ID NO: 202972 - RNA, 18 nt, Homo sapiens
agcauuuagcacauacua

SEQ ID NO: 202973 - RNA, 16 nt, Homo sapiens
aggaugggaaggaggg

SEQ ID NO: 202974 - RNA, 14 nt, Homo sapiens
cauacacagccugg

SEQ ID NO: 202975 - RNA, 17 nt, Homo sapiens
cagcauucucacuccua

SEQ ID NO: 202976 - RNA, 13 nt, Homo sapiens
ucugaugcaagca

SEQ ID NO: 202977 - RNA, 13 nt, Homo sapiens
uuucaccauuuga

SEQ ID NO: 202978 - RNA, 20 nt, Homo sapiens
gacuauggcucuacuuucag

SEQ ID NO: 202979 - RNA, 20 nt, Homo sapiens
gaacuugcugcugagugcac

SEQ ID NO: 202980 - RNA, 16 nt, Homo sapiens
aacuauguaacaugua

SEQ ID NO: 202981 - RNA, 20 nt, Homo sapiens
uagguaggggcccacuucac

SEQ ID NO: 202982 - RNA, 20 nt, Homo sapiens
gacuucauuuuuccuaacag

SEQ ID NO: 202983 - RNA, 17 nt, Homo sapiens
aaucagaacuguuggca

SEQ ID NO: 202984 - RNA, 13 nt, Homo sapiens
ugcagagacagag

SEQ ID NO: 202985 - RNA, 13 nt, Homo sapiens
ugugugaagauca

SEQ ID NO: 202986 - RNA, 16 nt, Homo sapiens
ugaaauaucaugcucc

SEQ ID NO: 202987 - RNA, 16 nt, Homo sapiens
aacuuuuauuacuggg

SEQ ID NO: 202988 - RNA, 14 nt, Homo sapiens
gucuucaagcagau

SEQ ID NO: 202989 - RNA, 19 nt, Homo sapiens
gcaaaaagcaaaaucauuu

SEQ ID NO: 202990 - RNA, 19 nt, Homo sapiens
auauccuuugccucaagga

SEQ ID NO: 202991 - RNA, 17 nt, Homo sapiens
cuauggcucuacuuuca

SEQ ID NO: 202992 - RNA, 17 nt, Homo sapiens
cacauucgaguguuuca

SEQ ID NO: 202993 - RNA, 13 nt, Homo sapiens
cuucugcuucuca

SEQ ID NO: 202994 - RNA, 18 nt, Homo sapiens
uccagaccauucaggaca

SEQ ID NO: 202995 - RNA, 15 nt, Homo sapiens
cagaucccacuugca

SEQ ID NO: 202996 - RNA, 16 nt, Homo sapiens
cugggccaagucaaag

SEQ ID NO: 202997 - RNA, 16 nt, Homo sapiens
cuucuucaccauuugg

SEQ ID NO: 202998 - RNA, 17 nt, Homo sapiens
agcauuuagacccugca

SEQ ID NO: 202999 - RNA, 20 nt, Homo sapiens
aaagacauucugacaucuua

SEQ ID NO: 203000 - RNA, 20 nt, Homo sapiens
gucucauaugauugugcaca

SEQ ID NO: 203001 - RNA, 23 nt, Homo sapiens
uggggacagagcagaacuuucac

SEQ ID NO: 203002 - RNA, 15 nt, Homo sapiens
agauccugguuggug

SEQ ID NO: 203003 - RNA, 12 nt, Homo sapiens
ccauauuuucac

SEQ ID NO: 203004 - RNA, 20 nt, Homo sapiens
agaugcugacuguacuccuc

SEQ ID NO: 203005 - RNA, 20 nt, Homo sapiens
agaauauuuuaaguauugca

SEQ ID NO: 203006 - RNA, 14 nt, Homo sapiens
ugcuggcugccuua

SEQ ID NO: 203007 - RNA, 15 nt, Homo sapiens
caggaacuugcacaa

SEQ ID NO: 203008 - RNA, 22 nt, Homo sapiens
caaacucuuaguuacucauuca

SEQ ID NO: 203009 - RNA, 15 nt, Homo sapiens
acaauguucauccca

SEQ ID NO: 203010 - RNA, 20 nt, Homo sapiens
gggucucacaguguugccca

SEQ ID NO: 203011 - RNA, 23 nt, Homo sapiens
gagaaagagcacuuaagagaaua

SEQ ID NO: 203012 - RNA, 13 nt, Homo sapiens
caaggaagucaaa

SEQ ID NO: 203013 - RNA, 20 nt, Homo sapiens
ccaugucagcaaaaagcaaa

SEQ ID NO: 203014 - RNA, 19 nt, Homo sapiens
agguuucuggcagccagua

SEQ ID NO: 203015 - RNA, 17 nt, Homo sapiens
cagccuggccaacaugg

SEQ ID NO: 203016 - RNA, 16 nt, Homo sapiens
ugcuggcaaagacaga

SEQ ID NO: 203017 - RNA, 19 nt, Homo sapiens
uggggaguaggacauacca

SEQ ID NO: 203018 - RNA, 16 nt, Homo sapiens
aagggacauauucauu

SEQ ID NO: 203019 - RNA, 21 nt, Homo sapiens
gcauaaguuucugggaccuca

SEQ ID NO: 203020 - RNA, 14 nt, Homo sapiens
uaaguuucugggac

SEQ ID NO: 203021 - RNA, 18 nt, Homo sapiens
aaggguucaccaggucag

SEQ ID NO: 203022 - RNA, 14 nt, Homo sapiens
uggcagccaguacc

SEQ ID NO: 203023 - RNA, 14 nt, Homo sapiens
cugacaccuuucau

SEQ ID NO: 203024 - RNA, 23 nt, Homo sapiens
augcuggcauuugcaccuaccuc

SEQ ID NO: 203025 - RNA, 22 nt, Homo sapiens
uaaaaaaaacaaaaagaacaaa

SEQ ID NO: 203026 - RNA, 13 nt, Homo sapiens
aaagaagguuuca

SEQ ID NO: 203027 - RNA, 17 nt, Homo sapiens
gcuucuagaaccaggca

SEQ ID NO: 203028 - RNA, 20 nt, Homo sapiens
cugguaauuuaagauuccag

SEQ ID NO: 203029 - RNA, 14 nt, Homo sapiens
ucacccaaugcaua

SEQ ID NO: 203030 - RNA, 14 nt, Homo sapiens
uuuaucugugcaaa

SEQ ID NO: 203031 - RNA, 18 nt, Homo sapiens
caacaugugcucagggaa

SEQ ID NO: 203032 - RNA, 15 nt, Homo sapiens
aaggauggaugcaga

SEQ ID NO: 203033 - RNA, 23 nt, Homo sapiens
agccucaagucuuauuuccucaa

SEQ ID NO: 203034 - RNA, 13 nt, Homo sapiens
ugcuggcauuugc

SEQ ID NO: 203035 - RNA, 15 nt, Homo sapiens
guuuauagaccagaa

SEQ ID NO: 203036 - RNA, 16 nt, Homo sapiens
gccacacggcucucac

SEQ ID NO: 203037 - RNA, 21 nt, Homo sapiens
uaaaagaugcauuaucuauga

SEQ ID NO: 203038 - RNA, 17 nt, Homo sapiens
ugugauucacaguguga

SEQ ID NO: 203039 - RNA, 21 nt, Homo sapiens
cacuugugcaguguugacagu

SEQ ID NO: 203040 - RNA, 17 nt, Homo sapiens
ugcagccuuugccuccc

SEQ ID NO: 203041 - RNA, 14 nt, Homo sapiens
augauugugcacau

SEQ ID NO: 203042 - RNA, 21 nt, Homo sapiens
gcugaugaacucuuaaucaaa

SEQ ID NO: 203043 - RNA, 14 nt, Homo sapiens
uggccugcacuggu

SEQ ID NO: 203044 - RNA, 12 nt, Homo sapiens
ugucucauauga

SEQ ID NO: 203045 - RNA, 23 nt, Homo sapiens
uuucaaugaugggcgagcgugca

SEQ ID NO: 203046 - RNA, 17 nt, Homo sapiens
caucaucuccugccuuc

SEQ ID NO: 203047 - RNA, 13 nt, Homo sapiens
gguggagggccac

SEQ ID NO: 203048 - RNA, 12 nt, Homo sapiens
cuugcugugagc

SEQ ID NO: 203049 - RNA, 19 nt, Homo sapiens
cauuuccugacagaaggac

SEQ ID NO: 203050 - RNA, 22 nt, Homo sapiens
accauucugacucgguuucucc

SEQ ID NO: 203051 - RNA, 22 nt, Homo sapiens
uauguagcaaaauacaugacau

SEQ ID NO: 203052 - RNA, 16 nt, Homo sapiens
ccacuucucucaggau

SEQ ID NO: 203053 - RNA, 21 nt, Homo sapiens
ucacagagauaauucuagcuu

SEQ ID NO: 203054 - RNA, 17 nt, Homo sapiens
cugcacagugcaucuca

SEQ ID NO: 203055 - RNA, 22 nt, Homo sapiens
ccuaaaucaaguuggcuucuaa

SEQ ID NO: 203056 - RNA, 16 nt, Homo sapiens
ucuuguguuaccugaa

SEQ ID NO: 203057 - RNA, 20 nt, Homo sapiens
accugaaaacacugugcaca

SEQ ID NO: 203058 - RNA, 21 nt, Homo sapiens
gguuucuggcagccaguaccu

SEQ ID NO: 203059 - RNA, 15 nt, Homo sapiens
cacguucugcucauc

SEQ ID NO: 203060 - RNA, 16 nt, Homo sapiens
cuagauuuaugaauac

SEQ ID NO: 203061 - RNA, 13 nt, Homo sapiens
ugucagcaaaaag

SEQ ID NO: 203062 - RNA, 21 nt, Homo sapiens
acuugcacaaaaucacacagc

SEQ ID NO: 203063 - RNA, 20 nt, Homo sapiens
acagaccuaggauuucauga

SEQ ID NO: 203064 - RNA, 14 nt, Homo sapiens
ugcuuguuauuaga

SEQ ID NO: 203065 - RNA, 18 nt, Homo sapiens
aucagacuccugugcaac

SEQ ID NO: 203066 - RNA, 18 nt, Homo sapiens
caggggaguguucagggc

SEQ ID NO: 203067 - RNA, 15 nt, Homo sapiens
aggcuggcagugaca

SEQ ID NO: 203068 - RNA, 13 nt, Homo sapiens
gcuggcagugaca

SEQ ID NO: 203069 - RNA, 15 nt, Homo sapiens
uugaaugcagggaca

SEQ ID NO: 203070 - RNA, 23 nt, Homo sapiens
gagugucuuuccacggagccacu

SEQ ID NO: 203071 - RNA, 11 nt, Homo sapiens
cugaauaugaa

SEQ ID NO: 203072 - RNA, 14 nt, Homo sapiens
uuaauauaacugcc

SEQ ID NO: 203073 - RNA, 15 nt, Homo sapiens
agaaugugacaggca

SEQ ID NO: 203074 - RNA, 17 nt, Homo sapiens
gcacagcacccauggga

SEQ ID NO: 203075 - RNA, 15 nt, Homo sapiens
cuagauuuaugaaua

SEQ ID NO: 203076 - RNA, 19 nt, Homo sapiens
aaguauugcaucuguauaa

SEQ ID NO: 203077 - RNA, 18 nt, Homo sapiens
aaaacuuuaaucccacuu

SEQ ID NO: 203078 - RNA, 18 nt, Homo sapiens
caugaucaucacaaucau

SEQ ID NO: 203079 - RNA, 22 nt, Homo sapiens
agguauucguaaggaugggaag

SEQ ID NO: 203080 - RNA, 19 nt, Homo sapiens
gcaaaauacaugacauuua

SEQ ID NO: 203081 - RNA, 19 nt, Homo sapiens
gacucuccagaaagcucau

SEQ ID NO: 203082 - RNA, 22 nt, Homo sapiens
acauuugaaaucuaugaaauau

SEQ ID NO: 203083 - RNA, 18 nt, Homo sapiens
auauucauuucaaaggga

SEQ ID NO: 203084 - RNA, 15 nt, Homo sapiens
gacccugggaccaca

SEQ ID NO: 203085 - RNA, 21 nt, Homo sapiens
ggacuauggcucuacuuucag

SEQ ID NO: 203086 - RNA, 19 nt, Homo sapiens
cacugagcaaagcauugag

SEQ ID NO: 203087 - RNA, 20 nt, Homo sapiens
uuacuacaugugggagcuuu

SEQ ID NO: 203088 - RNA, 11 nt, Homo sapiens
accucagggcu

SEQ ID NO: 203089 - RNA, 22 nt, Homo sapiens
ccuuggcuuuuacugaagccuu

SEQ ID NO: 203090 - RNA, 17 nt, Homo sapiens
gcaguguucaaggccau

SEQ ID NO: 203091 - RNA, 13 nt, Homo sapiens
aaacuucaagggu

SEQ ID NO: 203092 - RNA, 17 nt, Homo sapiens
ucuaaguaaugaugucg

SEQ ID NO: 203093 - RNA, 16 nt, Homo sapiens
ucuuagucgagccaag

SEQ ID NO: 203094 - RNA, 21 nt, Homo sapiens
auccugguugguguugcagaa

SEQ ID NO: 203095 - RNA, 13 nt, Homo sapiens
uccucugacucag

SEQ ID NO: 203096 - RNA, 23 nt, Homo sapiens
acagcucgggcccucugugagau

SEQ ID NO: 203097 - RNA, 14 nt, Homo sapiens
ucaugaucaucaca

SEQ ID NO: 203098 - RNA, 19 nt, Homo sapiens
ucucuaguuuccagaggcu

SEQ ID NO: 203099 - RNA, 19 nt, Homo sapiens
gaauguuugucucauccca

SEQ ID NO: 203100 - RNA, 23 nt, Homo sapiens
cagugacagaacuaagaugauca

SEQ ID NO: 203101 - RNA, 23 nt, Homo sapiens
aucucauuggacccuuccauggu

SEQ ID NO: 203102 - RNA, 20 nt, Homo sapiens
ccacagaccuaggauuucau

SEQ ID NO: 203103 - RNA, 22 nt, Homo sapiens
cuauuuccuucuccuccugucu

SEQ ID NO: 203104 - RNA, 13 nt, Homo sapiens
acuccuaaaucaa

SEQ ID NO: 203105 - RNA, 14 nt, Homo sapiens
aaucagcauucuca

SEQ ID NO: 203106 - RNA, 18 nt, Homo sapiens
gcaggaaaugaaaauguc

SEQ ID NO: 203107 - RNA, 14 nt, Homo sapiens
cccuccacguucac

SEQ ID NO: 203108 - RNA, 12 nt, Homo sapiens
caugaauaugau

SEQ ID NO: 203109 - RNA, 19 nt, Homo sapiens
gcuuuuacugaagccuuuc

SEQ ID NO: 203110 - RNA, 17 nt, Homo sapiens
uauguugcccagugugu

SEQ ID NO: 203111 - RNA, 11 nt, Homo sapiens
uucaucucuug

SEQ ID NO: 203112 - RNA, 16 nt, Homo sapiens
caggacccugggacca

SEQ ID NO: 203113 - RNA, 18 nt, Homo sapiens
acacuaacauauaauguu

SEQ ID NO: 203114 - RNA, 15 nt, Homo sapiens
uuugaaaucuaugaa

SEQ ID NO: 203115 - RNA, 18 nt, Homo sapiens
acuuugggaggccaagga

SEQ ID NO: 203116 - RNA, 19 nt, Homo sapiens
cucauaugauugugcacau

SEQ ID NO: 203117 - RNA, 12 nt, Homo sapiens
aaaucuaugaaa

SEQ ID NO: 203118 - RNA, 21 nt, Homo sapiens
auaauguuacauuauuaucaa

SEQ ID NO: 203119 - RNA, 19 nt, Homo sapiens
ugcacauacuugagacugu

SEQ ID NO: 203120 - RNA, 22 nt, Homo sapiens
ucccuguacaguagauuuucca

SEQ ID NO: 203121 - RNA, 20 nt, Homo sapiens
aagaacaguaacugccauca

SEQ ID NO: 203122 - RNA, 12 nt, Homo sapiens
cauuuagcacau

SEQ ID NO: 203123 - RNA, 22 nt, Homo sapiens
uuuuucuuugagacugggucuc

SEQ ID NO: 203124 - RNA, 21 nt, Homo sapiens
gcagaaucuguuaccagagga

SEQ ID NO: 203125 - RNA, 14 nt, Homo sapiens
ucucacuugucuca

SEQ ID NO: 203126 - RNA, 20 nt, Homo sapiens
ucuccagaaagcucaucuca

SEQ ID NO: 203127 - RNA, 19 nt, Homo sapiens
ucuggacacagccccaugu

SEQ ID NO: 203128 - RNA, 21 nt, Homo sapiens
aacuguuggcaaggugacauu

SEQ ID NO: 203129 - RNA, 12 nt, Homo sapiens
gagccuggacaa

SEQ ID NO: 203130 - RNA, 17 nt, Homo sapiens
ucuuccauuugcaaggg

SEQ ID NO: 203131 - RNA, 18 nt, Homo sapiens
uggugacccagucagagu

SEQ ID NO: 203132 - RNA, 14 nt, Homo sapiens
uuggguucacagaa

SEQ ID NO: 203133 - RNA, 15 nt, Homo sapiens
uguauuuaacugccu

SEQ ID NO: 203134 - RNA, 23 nt, Homo sapiens
uaaugaugucguuugaaucacag

SEQ ID NO: 203135 - RNA, 18 nt, Homo sapiens
ugggucuucagggggcca

SEQ ID NO: 203136 - RNA, 18 nt, Homo sapiens
cauuugcuuacuuugcau

SEQ ID NO: 203137 - RNA, 18 nt, Homo sapiens
agccucacugcaagcacu

SEQ ID NO: 203138 - RNA, 21 nt, Homo sapiens
aauuauuauuuauauauguau

SEQ ID NO: 203139 - RNA, 17 nt, Homo sapiens
ugaggcaaccacaggca

SEQ ID NO: 203140 - RNA, 15 nt, Homo sapiens
cuccacgccauuucc

SEQ ID NO: 203141 - RNA, 23 nt, Homo sapiens
caaacuaccuuccaguuccucau

SEQ ID NO: 203142 - RNA, 16 nt, Homo sapiens
uucccacaggacauuu

SEQ ID NO: 203143 - RNA, 18 nt, Homo sapiens
cagggcauuuugguccaa

SEQ ID NO: 203144 - RNA, 21 nt, Homo sapiens
cucucagucucugagcaguga

SEQ ID NO: 203145 - RNA, 16 nt, Homo sapiens
aguugcugaugaacuc

SEQ ID NO: 203146 - RNA, 21 nt, Homo sapiens
gaguguuccccuuccacugag

SEQ ID NO: 203147 - RNA, 16 nt, Homo sapiens
aucuguauauacaaua

SEQ ID NO: 203148 - RNA, 20 nt, Homo sapiens
ucuuugaacccuugcuugca

SEQ ID NO: 203149 - RNA, 11 nt, Homo sapiens
uugacuuuguc

SEQ ID NO: 203150 - RNA, 14 nt, Homo sapiens
augcauaaaugcga

SEQ ID NO: 203151 - RNA, 18 nt, Homo sapiens
caaucucugauucuguca

SEQ ID NO: 203152 - RNA, 21 nt, Homo sapiens
gccuccucucucaaacugggg

SEQ ID NO: 203153 - RNA, 19 nt, Homo sapiens
gauggagauauuuacauga

SEQ ID NO: 203154 - RNA, 22 nt, Homo sapiens
aaaccaucauaguacagguaag

SEQ ID NO: 203155 - RNA, 21 nt, Homo sapiens
acagccucccacccccaucuc

SEQ ID NO: 203156 - RNA, 19 nt, Homo sapiens
gaacuggaggaguuccuug

SEQ ID NO: 203157 - RNA, 23 nt, Homo sapiens
uuagacagucaaggaguggcuua

SEQ ID NO: 203158 - RNA, 20 nt, Homo sapiens
gccuggcagccgugccuuca

SEQ ID NO: 203159 - RNA, 16 nt, Homo sapiens
auuucucucugacccu

SEQ ID NO: 203160 - RNA, 13 nt, Homo sapiens
auguaaauacugu

SEQ ID NO: 203161 - RNA, 22 nt, Homo sapiens
auauguugaugaaaaauagcaa

SEQ ID NO: 203162 - RNA, 14 nt, Homo sapiens
cacugcucauuugg

SEQ ID NO: 203163 - RNA, 16 nt, Homo sapiens
acccugugcagaaccu

SEQ ID NO: 203164 - RNA, 15 nt, Homo sapiens
cugggagcacaggca

SEQ ID NO: 203165 - RNA, 18 nt, Homo sapiens
aucaucuccugccuuccu

SEQ ID NO: 203166 - RNA, 18 nt, Homo sapiens
agaaccagagcucagaga

SEQ ID NO: 203167 - RNA, 20 nt, Homo sapiens
aauaccucaaccuaugguau

SEQ ID NO: 203168 - RNA, 16 nt, Homo sapiens
cauccaucaucaugug

SEQ ID NO: 203169 - RNA, 17 nt, Homo sapiens
cuuugagacugggucuc

SEQ ID NO: 203170 - RNA, 18 nt, Homo sapiens
caacaguuuuuuaugcua

SEQ ID NO: 203171 - RNA, 21 nt, Homo sapiens
aggugaggauugauuaccuag

SEQ ID NO: 203172 - RNA, 22 nt, Homo sapiens
ucuuguuuuuuuuuuccacuua

SEQ ID NO: 203173 - RNA, 23 nt, Homo sapiens
cuucacagaugugugauucacag

SEQ ID NO: 203174 - RNA, 16 nt, Homo sapiens
acuaauacagacuaug

SEQ ID NO: 203175 - RNA, 17 nt, Homo sapiens
ugacauuauaugcacua

SEQ ID NO: 203176 - RNA, 13 nt, Homo sapiens
cgcaacaguuuuu

SEQ ID NO: 203177 - RNA, 19 nt, Homo sapiens
gcuucccuaaucuaugguc

SEQ ID NO: 203178 - RNA, 12 nt, Homo sapiens
auauucauuuca

SEQ ID NO: 203179 - RNA, 23 nt, Homo sapiens
aucuguauauacaauaacauaau

SEQ ID NO: 203180 - RNA, 17 nt, Homo sapiens
agagaaugcccagugac

SEQ ID NO: 203181 - RNA, 17 nt, Homo sapiens
cauuuccaugcauaaau

SEQ ID NO: 203182 - RNA, 20 nt, Homo sapiens
cacauccucugucuauuuga

SEQ ID NO: 203183 - RNA, 15 nt, Homo sapiens
aggaaaaauguguaa

SEQ ID NO: 203184 - RNA, 14 nt, Homo sapiens
ugacauccaagcuu

SEQ ID NO: 203185 - RNA, 15 nt, Homo sapiens
ucuuacauuagcagu

SEQ ID NO: 203186 - RNA, 19 nt, Homo sapiens
gaaaacacugugcacaucu

SEQ ID NO: 203187 - RNA, 22 nt, Homo sapiens
aacaguuuuuuaugcuaaucag

SEQ ID NO: 203188 - RNA, 15 nt, Homo sapiens
gaacaauauugacuu

SEQ ID NO: 203189 - RNA, 19 nt, Homo sapiens
cgagaccagccuggccaac

SEQ ID NO: 203190 - RNA, 17 nt, Homo sapiens
ugagaaagagcacuuaa

SEQ ID NO: 203191 - RNA, 20 nt, Homo sapiens
cacugcacagugcaucucag

SEQ ID NO: 203192 - RNA, 18 nt, Homo sapiens
ggcauggccagguggcca

SEQ ID NO: 203193 - RNA, 11 nt, Homo sapiens
gcuccacugaa

SEQ ID NO: 203194 - RNA, 21 nt, Homo sapiens
uuaaacccuauugguaaagaa

SEQ ID NO: 203195 - RNA, 10 nt, Homo sapiens
gccucugugc

SEQ ID NO: 203196 - RNA, 15 nt, Homo sapiens
cacugagcaaagcau

SEQ ID NO: 203197 - RNA, 14 nt, Homo sapiens
ccucgcugccagcu

SEQ ID NO: 203198 - RNA, 20 nt, Homo sapiens
aagcaggaaaugaaaauguc

SEQ ID NO: 203199 - RNA, 23 nt, Homo sapiens
acauucugcaagcacaucugcau

SEQ ID NO: 203200 - RNA, 16 nt, Homo sapiens
ugggugggaccacaga

SEQ ID NO: 203201 - RNA, 19 nt, Homo sapiens
ucccagcuauuccuacucu

SEQ ID NO: 203202 - RNA, 20 nt, Homo sapiens
aaugugacauuauaugcacu

SEQ ID NO: 203203 - RNA, 17 nt, Homo sapiens
cauauguaccauguaca

SEQ ID NO: 203204 - RNA, 20 nt, Homo sapiens
gcaaaggggggaagggacau

SEQ ID NO: 203205 - RNA, 19 nt, Homo sapiens
agaccuguaaucauauaau

SEQ ID NO: 203206 - RNA, 13 nt, Homo sapiens
cccuccaauccca

SEQ ID NO: 203207 - RNA, 19 nt, Homo sapiens
auguuaggaaaauuucaca

SEQ ID NO: 203208 - RNA, 15 nt, Homo sapiens
aguguagguaucauu

SEQ ID NO: 203209 - RNA, 16 nt, Homo sapiens
ugggcccuuugagugc

SEQ ID NO: 203210 - RNA, 20 nt, Homo sapiens
acauucugcaagcacaucug

SEQ ID NO: 203211 - RNA, 22 nt, Homo sapiens
uuuggguucacagaagcacagc

SEQ ID NO: 203212 - RNA, 12 nt, Homo sapiens
auagaaagccaa

SEQ ID NO: 203213 - RNA, 15 nt, Homo sapiens
gcuucccugacucau

SEQ ID NO: 203214 - RNA, 16 nt, Homo sapiens
ugauagaguguuauca

SEQ ID NO: 203215 - RNA, 22 nt, Homo sapiens
cauaauuuguacauauguaaaa

SEQ ID NO: 203216 - RNA, 16 nt, Homo sapiens
ugggcaauauagcaag

SEQ ID NO: 203217 - RNA, 22 nt, Homo sapiens
ucuuaaguuguggagagugcaa

SEQ ID NO: 203218 - RNA, 15 nt, Homo sapiens
cuagguaggggccca

SEQ ID NO: 203219 - RNA, 21 nt, Homo sapiens
guucaucagacuccugugcaa

SEQ ID NO: 203220 - RNA, 19 nt, Homo sapiens
caaccacaggcagcauuua

SEQ ID NO: 203221 - RNA, 14 nt, Homo sapiens
acaguaacugccau

SEQ ID NO: 203222 - RNA, 23 nt, Homo sapiens
acuuggcucgaaucucugugccu

SEQ ID NO: 203223 - RNA, 16 nt, Homo sapiens
gucugggcacagucag

SEQ ID NO: 203224 - RNA, 13 nt, Homo sapiens
caucauuccuuga

SEQ ID NO: 203225 - RNA, 21 nt, Homo sapiens
acaggcccuuccucuccacug

SEQ ID NO: 203226 - RNA, 14 nt, Homo sapiens
cuuccucaccacuu

SEQ ID NO: 203227 - RNA, 13 nt, Homo sapiens
ugccugacauuug

SEQ ID NO: 203228 - RNA, 18 nt, Homo sapiens
ucccuuugaaaugaauau

SEQ ID NO: 203229 - RNA, 14 nt, Homo sapiens
gggcucgugcccug

SEQ ID NO: 203230 - RNA, 14 nt, Homo sapiens
cugucuuucacuga

SEQ ID NO: 203231 - RNA, 17 nt, Homo sapiens
aacuaagaugcugccug

SEQ ID NO: 203232 - RNA, 13 nt, Homo sapiens
gaagugugugauc

SEQ ID NO: 203233 - RNA, 22 nt, Homo sapiens
augaccccuccccuaaugccug

SEQ ID NO: 203234 - RNA, 18 nt, Homo sapiens
ucccggggcuccacugaa

SEQ ID NO: 203235 - RNA, 18 nt, Homo sapiens
acuguaugugggaauuua

SEQ ID NO: 203236 - RNA, 22 nt, Homo sapiens
uagccacugcauaccaaccugg

SEQ ID NO: 203237 - RNA, 20 nt, Homo sapiens
gccuggaguguaugacugca

SEQ ID NO: 203238 - RNA, 13 nt, Homo sapiens
aauuagaugaacu

SEQ ID NO: 203239 - RNA, 18 nt, Homo sapiens
uagagauuaccuccugag

SEQ ID NO: 203240 - RNA, 15 nt, Homo sapiens
agcaauaaaaugcua

SEQ ID NO: 203241 - RNA, 23 nt, Homo sapiens
uuaugccauagcaagauugcuua

SEQ ID NO: 203242 - RNA, 18 nt, Homo sapiens
gagcucagagaggcuaga

SEQ ID NO: 203243 - RNA, 15 nt, Homo sapiens
aagcagaccacugau

SEQ ID NO: 203244 - RNA, 16 nt, Homo sapiens
ucaaaguaaaacuugc

SEQ ID NO: 203245 - RNA, 20 nt, Homo sapiens
ggcagagaggacuguugaca

SEQ ID NO: 203246 - RNA, 16 nt, Homo sapiens
cgcaccacuguguauu

SEQ ID NO: 203247 - RNA, 18 nt, Homo sapiens
acccaugggaagggucca

SEQ ID NO: 203248 - RNA, 14 nt, Homo sapiens
ucuucaccauuugg

SEQ ID NO: 203249 - RNA, 20 nt, Homo sapiens
aaacaugguggguccauggg

SEQ ID NO: 203250 - RNA, 23 nt, Homo sapiens
acuuuuaaguugcugaugaacuc

SEQ ID NO: 203251 - RNA, 14 nt, Homo sapiens
uaucaacagcauuu

SEQ ID NO: 203252 - RNA, 18 nt, Homo sapiens
aaaaugccucaguguauu

SEQ ID NO: 203253 - RNA, 19 nt, Homo sapiens
uccugacagaaggacucag

SEQ ID NO: 203254 - RNA, 14 nt, Homo sapiens
augcagcaucuaag

SEQ ID NO: 203255 - RNA, 18 nt, Homo sapiens
gcagauccagagguuucu

SEQ ID NO: 203256 - RNA, 18 nt, Homo sapiens
aaagcaggggaguaugca

SEQ ID NO: 203257 - RNA, 12 nt, Homo sapiens
cagaauggagcu

SEQ ID NO: 203258 - RNA, 19 nt, Homo sapiens
auuuuugaauacaggcaua

SEQ ID NO: 203259 - RNA, 17 nt, Homo sapiens
gagguuugccagcauuu

SEQ ID NO: 203260 - RNA, 19 nt, Homo sapiens
cuuccuugaagaacugcag

SEQ ID NO: 203261 - RNA, 13 nt, Homo sapiens
uaaggugagggaa

SEQ ID NO: 203262 - RNA, 22 nt, Homo sapiens
ugaaaaugcuguauuagucaca

SEQ ID NO: 203263 - RNA, 17 nt, Homo sapiens
cugguuagguagaggga

SEQ ID NO: 203264 - RNA, 12 nt, Homo sapiens
aagugugugauc

SEQ ID NO: 203265 - RNA, 16 nt, Homo sapiens
aaugcuggcauuugca

SEQ ID NO: 203266 - RNA, 17 nt, Homo sapiens
uggccuccccugccacc

SEQ ID NO: 203267 - RNA, 23 nt, Homo sapiens
cccauaucugugaaaugcuggca

SEQ ID NO: 203268 - RNA, 15 nt, Homo sapiens
uugacaauaauuuca

SEQ ID NO: 203269 - RNA, 14 nt, Homo sapiens
ucucugagcaguga

SEQ ID NO: 203270 - RNA, 13 nt, Homo sapiens
ggagacugcugag

SEQ ID NO: 203271 - RNA, 13 nt, Homo sapiens
uacaauugugagc

SEQ ID NO: 203272 - RNA, 16 nt, Homo sapiens
aggacccugggaccac

SEQ ID NO: 203273 - RNA, 18 nt, Homo sapiens
ucugcucaucauucucug

SEQ ID NO: 203274 - RNA, 13 nt, Homo sapiens
cuuuuaaguugcu

SEQ ID NO: 203275 - RNA, 20 nt, Homo sapiens
ggugcuaucgcaccacugug

SEQ ID NO: 203276 - RNA, 16 nt, Homo sapiens
uuugcuggucacugcc

SEQ ID NO: 203277 - RNA, 21 nt, Homo sapiens
aacccaggaguucagggucau

SEQ ID NO: 203278 - RNA, 22 nt, Homo sapiens
cuuucuuacauuagcaguuugc

SEQ ID NO: 203279 - RNA, 12 nt, Homo sapiens
ggcagcauuuag

SEQ ID NO: 203280 - RNA, 15 nt, Homo sapiens
ccaucuaugucccuu

SEQ ID NO: 203281 - RNA, 17 nt, Homo sapiens
aaucauuuuaauuauua

SEQ ID NO: 203282 - RNA, 20 nt, Homo sapiens
caagccuagcccuucucuca

SEQ ID NO: 203283 - RNA, 20 nt, Homo sapiens
uggguuuugggucuuugaac

SEQ ID NO: 203284 - RNA, 20 nt, Homo sapiens
ucacuugugcaguguugaca

SEQ ID NO: 203285 - RNA, 21 nt, Homo sapiens
cuuucauccacuagugcaaau

SEQ ID NO: 203286 - RNA, 21 nt, Homo sapiens
gguuuuauaaggcugauguca

SEQ ID NO: 203287 - RNA, 12 nt, Homo sapiens
cagugcucccuc

SEQ ID NO: 203288 - RNA, 19 nt, Homo sapiens
ugcagcuuauauucaucca

SEQ ID NO: 203289 - RNA, 18 nt, Homo sapiens
cagucaaggaguggcuua

SEQ ID NO: 203290 - RNA, 22 nt, Homo sapiens
acuuuuaaguugcugaugaacu

SEQ ID NO: 203291 - RNA, 22 nt, Homo sapiens
uagagauggggucucacagugu

SEQ ID NO: 203292 - RNA, 22 nt, Homo sapiens
uuuuuaucuccccuucacaugc

SEQ ID NO: 203293 - RNA, 22 nt, Homo sapiens
cuuaguguuuggguauauucau

SEQ ID NO: 203294 - RNA, 13 nt, Homo sapiens
cccuccuucaucc

SEQ ID NO: 203295 - RNA, 19 nt, Homo sapiens
gaccacagagggcaggaac

SEQ ID NO: 203296 - RNA, 22 nt, Homo sapiens
ugcuggcauuugcaccuaccuc

SEQ ID NO: 203297 - RNA, 13 nt, Homo sapiens
cggugagcauugu

SEQ ID NO: 203298 - RNA, 13 nt, Homo sapiens
uaccaaucauuuu

SEQ ID NO: 203299 - RNA, 16 nt, Homo sapiens
augaaauaucaugcuc

SEQ ID NO: 203300 - RNA, 10 nt, Homo sapiens
cucuguccag

SEQ ID NO: 203301 - RNA, 14 nt, Homo sapiens
gccuuuuguguuuu

SEQ ID NO: 203302 - RNA, 18 nt, Homo sapiens
uccuacuguaugugggaa

SEQ ID NO: 203303 - RNA, 22 nt, Homo sapiens
cccacacccuggaggauuucau

SEQ ID NO: 203304 - RNA, 16 nt, Homo sapiens
ucugaugcaagcaaga

SEQ ID NO: 203305 - RNA, 13 nt, Homo sapiens
agcaaagggcuca

SEQ ID NO: 203306 - RNA, 13 nt, Homo sapiens
uuaucuauggcac

SEQ ID NO: 203307 - RNA, 21 nt, Homo sapiens
ugcuaaucagggaggucauuu

SEQ ID NO: 203308 - RNA, 15 nt, Homo sapiens
aguguugcucucuag

SEQ ID NO: 203309 - RNA, 12 nt, Homo sapiens
gaaaaucauauu

SEQ ID NO: 203310 - RNA, 19 nt, Homo sapiens
gccgugccuucagcucuac

SEQ ID NO: 203311 - RNA, 15 nt, Homo sapiens
uuugcauguuuugua

SEQ ID NO: 203312 - RNA, 22 nt, Homo sapiens
gcacaucugcauuuucacccca

SEQ ID NO: 203313 - RNA, 16 nt, Homo sapiens
cuggaagcauggagca

SEQ ID NO: 203314 - RNA, 15 nt, Homo sapiens
uuuucuagucuucau

SEQ ID NO: 203315 - RNA, 21 nt, Homo sapiens
uacaauaaaacuuugcugcca

SEQ ID NO: 203316 - RNA, 14 nt, Homo sapiens
augugcucagggaa

SEQ ID NO: 203317 - RNA, 23 nt, Homo sapiens
cugcaggagagaaugcccaguga

SEQ ID NO: 203318 - RNA, 12 nt, Homo sapiens
ccucugacucag

SEQ ID NO: 203319 - RNA, 19 nt, Homo sapiens
ugggucuucagggggccag

SEQ ID NO: 203320 - RNA, 16 nt, Homo sapiens
augauugugcacauac

SEQ ID NO: 203321 - RNA, 13 nt, Homo sapiens
cacugcaagcacu

SEQ ID NO: 203322 - RNA, 22 nt, Homo sapiens
gccguggggccgccgccucuuu

SEQ ID NO: 203323 - RNA, 21 nt, Homo sapiens
auauaaaugugauugcagcuu

SEQ ID NO: 203324 - RNA, 18 nt, Homo sapiens
caaagcacgaaauguuau

SEQ ID NO: 203325 - RNA, 12 nt, Homo sapiens
cacugcaagcac

SEQ ID NO: 203326 - RNA, 19 nt, Homo sapiens
cuccauguagaagccacua

SEQ ID NO: 203327 - RNA, 19 nt, Homo sapiens
auuagccuaugugcaugca

SEQ ID NO: 203328 - RNA, 16 nt, Homo sapiens
uucugaucugaugcaa

SEQ ID NO: 203329 - RNA, 21 nt, Homo sapiens
uucuguucugucucauaugau

SEQ ID NO: 203330 - RNA, 20 nt, Homo sapiens
ccauagcaagauugcuuaaa

SEQ ID NO: 203331 - RNA, 18 nt, Homo sapiens
auggggagaaaagacaug

SEQ ID NO: 203332 - RNA, 21 nt, Homo sapiens
agcuucuuaaaugagaaggaa

SEQ ID NO: 203333 - RNA, 14 nt, Homo sapiens
cuaucgcaccacug

SEQ ID NO: 203334 - RNA, 16 nt, Homo sapiens
aaucagccacauucua

SEQ ID NO: 203335 - RNA, 15 nt, Homo sapiens
cuaaaaaugcaacuu

SEQ ID NO: 203336 - RNA, 19 nt, Homo sapiens
agaugcauuaucuaugaua

SEQ ID NO: 203337 - RNA, 16 nt, Homo sapiens
agccugccucuuccag

SEQ ID NO: 203338 - RNA, 16 nt, Homo sapiens
uaacaggauuagacag

SEQ ID NO: 203339 - RNA, 16 nt, Homo sapiens
guaaucccagcacuuu

SEQ ID NO: 203340 - RNA, 13 nt, Homo sapiens
uggcccagccaaa

SEQ ID NO: 203341 - RNA, 18 nt, Homo sapiens
auuuuauucccuuucaca

SEQ ID NO: 203342 - RNA, 19 nt, Homo sapiens
uucuuaauauaacugccuu

SEQ ID NO: 203343 - RNA, 21 nt, Homo sapiens
ggcagauacugucucuuucau

SEQ ID NO: 203344 - RNA, 12 nt, Homo sapiens
gacucacauccu

SEQ ID NO: 203345 - RNA, 19 nt, Homo sapiens
gaagaacaguaacugccau

SEQ ID NO: 203346 - RNA, 18 nt, Homo sapiens
ucaagcccuuuacuugac

SEQ ID NO: 203347 - RNA, 16 nt, Homo sapiens
gugaaugauucagugu

SEQ ID NO: 203348 - RNA, 21 nt, Homo sapiens
uauaaaugugauugcagcuuu

SEQ ID NO: 203349 - RNA, 23 nt, Homo sapiens
cauuugaaaucuaugaaauauca

SEQ ID NO: 203350 - RNA, 17 nt, Homo sapiens
ggacaaggcuagaucau

SEQ ID NO: 203351 - RNA, 12 nt, Homo sapiens
cauguacaugaa

SEQ ID NO: 203352 - RNA, 22 nt, Homo sapiens
gaccagaaccagagcucagaga

SEQ ID NO: 203353 - RNA, 16 nt, Homo sapiens
guuucuggcagccagu

SEQ ID NO: 203354 - RNA, 19 nt, Homo sapiens
aucacauucgaguguuuca

SEQ ID NO: 203355 - RNA, 20 nt, Homo sapiens
uagucaagugcguccacgag

SEQ ID NO: 203356 - RNA, 17 nt, Homo sapiens
agucuuauuuccucaac

SEQ ID NO: 203357 - RNA, 22 nt, Homo sapiens
aaaguucugacuugacuuuagu

SEQ ID NO: 203358 - RNA, 20 nt, Homo sapiens
uauauacccguacaacgugu

SEQ ID NO: 203359 - RNA, 13 nt, Homo sapiens
caggcauugccaa

SEQ ID NO: 203360 - RNA, 16 nt, Homo sapiens
gagaguggcuccuccc

SEQ ID NO: 203361 - RNA, 15 nt, Homo sapiens
ucucuuccuacccuu

SEQ ID NO: 203362 - RNA, 19 nt, Homo sapiens
gccaccuccccaggccgug

SEQ ID NO: 203363 - RNA, 22 nt, Homo sapiens
augccucauuaccuugugcuaa

SEQ ID NO: 203364 - RNA, 18 nt, Homo sapiens
guuaaggguuaguuuaca

SEQ ID NO: 203365 - RNA, 20 nt, Homo sapiens
gagcuuuugguaugugacau

SEQ ID NO: 203366 - RNA, 19 nt, Homo sapiens
cccuaugugggugggacca

SEQ ID NO: 203367 - RNA, 14 nt, Homo sapiens
gccucuuucaucca

SEQ ID NO: 203368 - RNA, 14 nt, Homo sapiens
cuguaaccucuuca

SEQ ID NO: 203369 - RNA, 19 nt, Homo sapiens
cgacuuguuuuugcacaug

SEQ ID NO: 203370 - RNA, 11 nt, Homo sapiens
aguaacaugug

SEQ ID NO: 203371 - RNA, 19 nt, Homo sapiens
uaccucacagagugcauug

SEQ ID NO: 203372 - RNA, 21 nt, Homo sapiens
gggaccacagacucacauccu

SEQ ID NO: 203373 - RNA, 17 nt, Homo sapiens
gaauguagcagaucccc

SEQ ID NO: 203374 - RNA, 20 nt, Homo sapiens
agcucugaaaccaguguuag

SEQ ID NO: 203375 - RNA, 20 nt, Homo sapiens
gcagaaucuguuaccagagg

SEQ ID NO: 203376 - RNA, 17 nt, Homo sapiens
gacuauggcuaccaaaa

SEQ ID NO: 203377 - RNA, 22 nt, Homo sapiens
agaucacuucaggucaggaguu

SEQ ID NO: 203378 - RNA, 19 nt, Homo sapiens
aaucauauaauaaauguac

SEQ ID NO: 203379 - RNA, 13 nt, Homo sapiens
ucucauccaucau

SEQ ID NO: 203380 - RNA, 18 nt, Homo sapiens
guacaaggcaacauauag

SEQ ID NO: 203381 - RNA, 16 nt, Homo sapiens
uaauuaguaacaugug

SEQ ID NO: 203382 - RNA, 13 nt, Homo sapiens
agagugucuuucc

SEQ ID NO: 203383 - RNA, 13 nt, Homo sapiens
auuaugaagucau

SEQ ID NO: 203384 - RNA, 21 nt, Homo sapiens
auuuaaaaaacuaacacccag

SEQ ID NO: 203385 - RNA, 19 nt, Homo sapiens
uggggagaaaagacaugaa

SEQ ID NO: 203386 - RNA, 16 nt, Homo sapiens
ugauucugucaauguc

SEQ ID NO: 203387 - RNA, 15 nt, Homo sapiens
cggggcuccacugaa

SEQ ID NO: 203388 - RNA, 18 nt, Homo sapiens
ccuuugccucaaggacuu

SEQ ID NO: 203389 - RNA, 19 nt, Homo sapiens
caacaaacuucaaggguuu

SEQ ID NO: 203390 - RNA, 17 nt, Homo sapiens
agccauaugaaugucag

SEQ ID NO: 203391 - RNA, 13 nt, Homo sapiens
cauuaucuaugau

SEQ ID NO: 203392 - RNA, 13 nt, Homo sapiens
cuccaaacugaag

SEQ ID NO: 203393 - RNA, 17 nt, Homo sapiens
cagaaaaacugugggua

SEQ ID NO: 203394 - RNA, 22 nt, Homo sapiens
aagacucuacccauauuacaga

SEQ ID NO: 203395 - RNA, 13 nt, Homo sapiens
acuugggaacuag

SEQ ID NO: 203396 - RNA, 18 nt, Homo sapiens
uauggcacccaugcaccu

SEQ ID NO: 203397 - RNA, 14 nt, Homo sapiens
guuuagugaucuga

SEQ ID NO: 203398 - RNA, 20 nt, Homo sapiens
ucaaaggugauugugccagg

SEQ ID NO: 203399 - RNA, 20 nt, Homo sapiens
caaaggagggucaggaagga

SEQ ID NO: 203400 - RNA, 19 nt, Homo sapiens
cagcucgggcccucuguga

SEQ ID NO: 203401 - RNA, 20 nt, Homo sapiens
gcauacgguaugauauugca

SEQ ID NO: 203402 - RNA, 17 nt, Homo sapiens
uuggaaaauaaaucaau

SEQ ID NO: 203403 - RNA, 16 nt, Homo sapiens
uggcacccaugcaccu

SEQ ID NO: 203404 - RNA, 21 nt, Homo sapiens
gaugcugccugcccagugcac

SEQ ID NO: 203405 - RNA, 21 nt, Homo sapiens
uuuauuacaguuuaucuaugg

SEQ ID NO: 203406 - RNA, 19 nt, Homo sapiens
aacuuuuugcaaggcauuu

SEQ ID NO: 203407 - RNA, 19 nt, Homo sapiens
agugaauaaaccaucaucu

SEQ ID NO: 203408 - RNA, 17 nt, Homo sapiens
gagucgggacuaaccca

SEQ ID NO: 203409 - RNA, 20 nt, Homo sapiens
uuugggaacugcaauaaccu

SEQ ID NO: 203410 - RNA, 15 nt, Homo sapiens
cugggcaauauagca

SEQ ID NO: 203411 - RNA, 13 nt, Homo sapiens
cuggacucucagu

SEQ ID NO: 203412 - RNA, 18 nt, Homo sapiens
accugggcaauauagcaa

SEQ ID NO: 203413 - RNA, 21 nt, Homo sapiens
cuguguugccaagcuccaagc

SEQ ID NO: 203414 - RNA, 13 nt, Homo sapiens
acaucaagcacag

SEQ ID NO: 203415 - RNA, 18 nt, Homo sapiens
agaauuugagugcucuga

SEQ ID NO: 203416 - RNA, 14 nt, Homo sapiens
gaaagauggaacuu

SEQ ID NO: 203417 - RNA, 17 nt, Homo sapiens
cgagaggugggccaguc

SEQ ID NO: 203418 - RNA, 23 nt, Homo sapiens
uuaaaaaaaacaaaaagaacaaa

SEQ ID NO: 203419 - RNA, 13 nt, Homo sapiens
aauauccuuugcc

SEQ ID NO: 203420 - RNA, 12 nt, Homo sapiens
gaaccucagggc

SEQ ID NO: 203421 - RNA, 15 nt, Homo sapiens
gagcagaacuuucac

SEQ ID NO: 203422 - RNA, 21 nt, Homo sapiens
agcuacaccuuucuccuuugu

SEQ ID NO: 203423 - RNA, 17 nt, Homo sapiens
ccacaggcagcauuuag

SEQ ID NO: 203424 - RNA, 23 nt, Homo sapiens
ugccauggaggcacacagcugca

SEQ ID NO: 203425 - RNA, 14 nt, Homo sapiens
auguaaacugugca

SEQ ID NO: 203426 - RNA, 21 nt, Homo sapiens
ucuguggaucagagaugcacc

SEQ ID NO: 203427 - RNA, 20 nt, Homo sapiens
aaucccuagucuucaagcag

SEQ ID NO: 203428 - RNA, 15 nt, Homo sapiens
gcuucccuaaucuau

SEQ ID NO: 203429 - RNA, 13 nt, Homo sapiens
ggcuugcugccaa

SEQ ID NO: 203430 - RNA, 21 nt, Homo sapiens
agaggagagagacuccagcug

SEQ ID NO: 203431 - RNA, 14 nt, Homo sapiens
ccagaggacaaagc

SEQ ID NO: 203432 - RNA, 22 nt, Homo sapiens
augauccuaaugaaugcauaaa

SEQ ID NO: 203433 - RNA, 20 nt, Homo sapiens
cguccagcuggaagggucaa

SEQ ID NO: 203434 - RNA, 17 nt, Homo sapiens
ugacuauggcuaccaaa

SEQ ID NO: 203435 - RNA, 20 nt, Homo sapiens
ccucaguuuuaucauuuuca

SEQ ID NO: 203436 - RNA, 20 nt, Homo sapiens
uauuuuauucccuuucacaa

SEQ ID NO: 203437 - RNA, 12 nt, Homo sapiens
cagaagccucac

SEQ ID NO: 203438 - RNA, 17 nt, Homo sapiens
uauggcucuacuuucag

SEQ ID NO: 203439 - RNA, 21 nt, Homo sapiens
cacuagcaauaaaaugcuaau

SEQ ID NO: 203440 - RNA, 22 nt, Homo sapiens
ugcuaauccucuuuuucuaguc

SEQ ID NO: 203441 - RNA, 20 nt, Homo sapiens
cagacuucccugaauguauu

SEQ ID NO: 203442 - RNA, 14 nt, Homo sapiens
uuuacauucugcaa

SEQ ID NO: 203443 - RNA, 15 nt, Homo sapiens
uucccccgcaaugug

SEQ ID NO: 203444 - RNA, 22 nt, Homo sapiens
caggcccuggccuccccugcca

SEQ ID NO: 203445 - RNA, 23 nt, Homo sapiens
aggcccuuccucuccacugccuu

SEQ ID NO: 203446 - RNA, 17 nt, Homo sapiens
aaugcuauaacuauguu

SEQ ID NO: 203447 - RNA, 15 nt, Homo sapiens
ggauuuggguuggaa

SEQ ID NO: 203448 - RNA, 15 nt, Homo sapiens
cuugaaaucaagggc

SEQ ID NO: 203449 - RNA, 21 nt, Homo sapiens
ccaggccaccuccccagcauu

SEQ ID NO: 203450 - RNA, 20 nt, Homo sapiens
aaagccugccucuuccagga

SEQ ID NO: 203451 - RNA, 22 nt, Homo sapiens
ugaaucacaguauacgcuccau

SEQ ID NO: 203452 - RNA, 19 nt, Homo sapiens
uuacaguuuaucuauggca

SEQ ID NO: 203453 - RNA, 22 nt, Homo sapiens
agggaagcugucccucacuguu

SEQ ID NO: 203454 - RNA, 19 nt, Homo sapiens
uuugaacccuugcuugcaa

SEQ ID NO: 203455 - RNA, 21 nt, Homo sapiens
acccuaugugggugggaccac

SEQ ID NO: 203456 - RNA, 18 nt, Homo sapiens
ccuuucuucagacacuga

SEQ ID NO: 203457 - RNA, 15 nt, Homo sapiens
ugccaggccuggcaa

SEQ ID NO: 203458 - RNA, 13 nt, Homo sapiens
aucaacagcauuu

SEQ ID NO: 203459 - RNA, 18 nt, Homo sapiens
uguuucugaucugaugca

SEQ ID NO: 203460 - RNA, 17 nt, Homo sapiens
uuacauuugaaaucuau

SEQ ID NO: 203461 - RNA, 13 nt, Homo sapiens
uugauuaccuagu

SEQ ID NO: 203462 - RNA, 17 nt, Homo sapiens
agauaauucuagcuuug

SEQ ID NO: 203463 - RNA, 19 nt, Homo sapiens
auuguaucaaaugugacau

SEQ ID NO: 203464 - RNA, 21 nt, Homo sapiens
gccacagaccuaggauuucau

SEQ ID NO: 203465 - RNA, 18 nt, Homo sapiens
ccucuccccacugcucau

SEQ ID NO: 203466 - RNA, 15 nt, Homo sapiens
uugggcccuuugagu

SEQ ID NO: 203467 - RNA, 14 nt, Homo sapiens
gaauaauccagaaa

SEQ ID NO: 203468 - RNA, 16 nt, Homo sapiens
guucccuauuuugcca

SEQ ID NO: 203469 - RNA, 22 nt, Homo sapiens
uagaguccaacguggggcagca

SEQ ID NO: 203470 - RNA, 15 nt, Homo sapiens
aggucagggugagga

SEQ ID NO: 203471 - RNA, 17 nt, Homo sapiens
accucgcuggacucuca

SEQ ID NO: 203472 - RNA, 22 nt, Homo sapiens
caucuaaccucaucuucuucac

SEQ ID NO: 203473 - RNA, 14 nt, Homo sapiens
auaucgaucucuua

SEQ ID NO: 203474 - RNA, 17 nt, Homo sapiens
aaggaugggaaggaggg

SEQ ID NO: 203475 - RNA, 20 nt, Homo sapiens
uaacaaguagcacccuggau

SEQ ID NO: 203476 - RNA, 17 nt, Homo sapiens
aagcuuccuuggcuuuu

SEQ ID NO: 203477 - RNA, 23 nt, Homo sapiens
augcauauccaacaugugcucag

SEQ ID NO: 203478 - RNA, 12 nt, Homo sapiens
cuauuaucucaa

SEQ ID NO: 203479 - RNA, 13 nt, Homo sapiens
aggaccagagcua

SEQ ID NO: 203480 - RNA, 20 nt, Homo sapiens
agaugcauuaucuaugauau

SEQ ID NO: 203481 - RNA, 13 nt, Homo sapiens
auauucauuugga

SEQ ID NO: 203482 - RNA, 18 nt, Homo sapiens
cacugccauggaggcaca

SEQ ID NO: 203483 - RNA, 14 nt, Homo sapiens
auaaguuucacuga

SEQ ID NO: 203484 - RNA, 20 nt, Homo sapiens
ggagcuuuugguaugugaca

SEQ ID NO: 203485 - RNA, 17 nt, Homo sapiens
agcccucaggucagggu

SEQ ID NO: 203486 - RNA, 19 nt, Homo sapiens
cuggcagccgugccuucag

SEQ ID NO: 203487 - RNA, 13 nt, Homo sapiens
augagaacaugaa

SEQ ID NO: 203488 - RNA, 21 nt, Homo sapiens
aucgacuuguuuuugcacaug

SEQ ID NO: 203489 - RNA, 18 nt, Homo sapiens
uaguuacucauucaggga

SEQ ID NO: 203490 - RNA, 19 nt, Homo sapiens
cagugaccagucacugacc

SEQ ID NO: 203491 - RNA, 18 nt, Homo sapiens
ugaaaugcuggcauuugc

SEQ ID NO: 203492 - RNA, 22 nt, Homo sapiens
uggccuccccugccaccaggcc

SEQ ID NO: 203493 - RNA, 12 nt, Homo sapiens
uacaauugugag

SEQ ID NO: 203494 - RNA, 17 nt, Homo sapiens
auccuuugccucaagga

SEQ ID NO: 203495 - RNA, 15 nt, Homo sapiens
gaccuaggauuucau

SEQ ID NO: 203496 - RNA, 20 nt, Homo sapiens
uguaaauacuguuuuuaaca

SEQ ID NO: 203497 - RNA, 19 nt, Homo sapiens
acuucaagaucugaauuug

SEQ ID NO: 203498 - RNA, 22 nt, Homo sapiens
gguuggaaaacaguauuuucca

SEQ ID NO: 203499 - RNA, 15 nt, Homo sapiens
ugcauauucuuaugu

SEQ ID NO: 203500 - RNA, 23 nt, Homo sapiens
ggucaggaaggaugagcauuuag

SEQ ID NO: 203501 - RNA, 16 nt, Homo sapiens
ucccacaggcccuucc

SEQ ID NO: 203502 - RNA, 21 nt, Homo sapiens
auacugcucaucauuccuuga

SEQ ID NO: 203503 - RNA, 15 nt, Homo sapiens
aggaacauacuucag

SEQ ID NO: 203504 - RNA, 20 nt, Homo sapiens
ugaccuugcacaaacagccc

SEQ ID NO: 203505 - RNA, 20 nt, Homo sapiens
gugggcucccugacugggag

SEQ ID NO: 203506 - RNA, 22 nt, Homo sapiens
ucuccccacugcucauuuggau

SEQ ID NO: 203507 - RNA, 22 nt, Homo sapiens
cuaacaaguagcacccuggauu

SEQ ID NO: 203508 - RNA, 14 nt, Homo sapiens
agacagaagccuca

SEQ ID NO: 203509 - RNA, 15 nt, Homo sapiens
uauucuucauaacaa

SEQ ID NO: 203510 - RNA, 16 nt, Homo sapiens
aucuccccuucacaug

SEQ ID NO: 203511 - RNA, 20 nt, Homo sapiens
cuugagggugcuuguucccu

SEQ ID NO: 203512 - RNA, 21 nt, Homo sapiens
ggagacuagauuuaugaauac

SEQ ID NO: 203513 - RNA, 22 nt, Homo sapiens
gacaggacccugggaccacaga

SEQ ID NO: 203514 - RNA, 21 nt, Homo sapiens
uuucaggccacauggcuaaag

SEQ ID NO: 203515 - RNA, 22 nt, Homo sapiens
uagucacagagauaauucuagc

SEQ ID NO: 203516 - RNA, 22 nt, Homo sapiens
agaugugugauucacaguguga

SEQ ID NO: 203517 - RNA, 16 nt, Homo sapiens
ccugggggugccagga

SEQ ID NO: 203518 - RNA, 21 nt, Homo sapiens
agcuuugagcuuaagaauuuu

SEQ ID NO: 203519 - RNA, 22 nt, Homo sapiens
ugacagcugaccuuugucaucu

SEQ ID NO: 203520 - RNA, 22 nt, Homo sapiens
cccaucccacacccuggaggau

SEQ ID NO: 203521 - RNA, 20 nt, Homo sapiens
uguuaccugaaaacacugug

SEQ ID NO: 203522 - RNA, 22 nt, Homo sapiens
uucucagaaucuacccaaagga

SEQ ID NO: 203523 - RNA, 15 nt, Homo sapiens
ucuaagaaagaaauu

SEQ ID NO: 203524 - RNA, 13 nt, Homo sapiens
gcaccauucugac

SEQ ID NO: 203525 - RNA, 24 nt, Homo sapiens
acagacuaugucacccaaugcaua

SEQ ID NO: 203526 - RNA, 20 nt, Homo sapiens
gcugaaaacugcaacuugua

SEQ ID NO: 203527 - RNA, 18 nt, Homo sapiens
ggauacuguaacacuuua

SEQ ID NO: 203528 - RNA, 11 nt, Homo sapiens
uacaauuguga

SEQ ID NO: 203529 - RNA, 15 nt, Homo sapiens
aggcuggccagucca

SEQ ID NO: 203530 - RNA, 20 nt, Homo sapiens
uuguaagaguggaaccaaca

SEQ ID NO: 203531 - RNA, 16 nt, Homo sapiens
uccugccccaugcugc

SEQ ID NO: 203532 - RNA, 15 nt, Homo sapiens
ucuucuaaauggcaa

SEQ ID NO: 203533 - RNA, 22 nt, Homo sapiens
cugcuugaggaaaacaagcauu

SEQ ID NO: 203534 - RNA, 14 nt, Homo sapiens
uucuggaauguaau

SEQ ID NO: 203535 - RNA, 20 nt, Homo sapiens
gacacuauuuaucugugcaa

SEQ ID NO: 203536 - RNA, 23 nt, Homo sapiens
uaucucaaacuacuggcaauuug

SEQ ID NO: 203537 - RNA, 14 nt, Homo sapiens
augagagaacugga

SEQ ID NO: 203538 - RNA, 22 nt, Homo sapiens
ccugaaguaagcaaagacuuuc

SEQ ID NO: 203539 - RNA, 18 nt, Homo sapiens
gcacagagagggggccac

SEQ ID NO: 203540 - RNA, 19 nt, Homo sapiens
gaccaaugucuugaugcau

SEQ ID NO: 203541 - RNA, 18 nt, Homo sapiens
ugcccagugaccagucac

SEQ ID NO: 203542 - RNA, 13 nt, Homo sapiens
uucagcucuacag

SEQ ID NO: 203543 - RNA, 14 nt, Homo sapiens
guuugaguuacuau

SEQ ID NO: 203544 - RNA, 17 nt, Homo sapiens
uccugccgcaacaguuu

SEQ ID NO: 203545 - RNA, 12 nt, Homo sapiens
uagcacauacua

SEQ ID NO: 203546 - RNA, 18 nt, Homo sapiens
ccucugggccaagucaaa

SEQ ID NO: 203547 - RNA, 23 nt, Homo sapiens
aaggauacuguaacacuuuacaa

SEQ ID NO: 203548 - RNA, 14 nt, Homo sapiens
agaccauaauguua

SEQ ID NO: 203549 - RNA, 15 nt, Homo sapiens
agaccacuguuauca

SEQ ID NO: 203550 - RNA, 11 nt, Homo sapiens
gcaccuggcau

SEQ ID NO: 203551 - RNA, 15 nt, Homo sapiens
gccaggugcacagac

SEQ ID NO: 203552 - RNA, 15 nt, Homo sapiens
uugauuucauuaaua

SEQ ID NO: 203553 - RNA, 16 nt, Homo sapiens
ggaagcugucccucac

SEQ ID NO: 203554 - RNA, 14 nt, Homo sapiens
ucagaaauguacaa

SEQ ID NO: 203555 - RNA, 15 nt, Homo sapiens
aggaaaauuucacau

SEQ ID NO: 203556 - RNA, 17 nt, Homo sapiens
aggcucguugacuggcu

SEQ ID NO: 203557 - RNA, 22 nt, Homo sapiens
uuaccugaaauaaaauucauua

SEQ ID NO: 203558 - RNA, 15 nt, Homo sapiens
agguuuuuacuguga

SEQ ID NO: 203559 - RNA, 16 nt, Homo sapiens
aacaguaacugccauc

SEQ ID NO: 203560 - RNA, 16 nt, Homo sapiens
ucuucauaauuucuuc

SEQ ID NO: 203561 - RNA, 17 nt, Homo sapiens
cacauacuacacauuca

SEQ ID NO: 203562 - RNA, 14 nt, Homo sapiens
uaauuuaaugcaug

SEQ ID NO: 203563 - RNA, 16 nt, Homo sapiens
ucugaucugaugcaag

SEQ ID NO: 203564 - RNA, 20 nt, Homo sapiens
caggacccugggaccacaga

SEQ ID NO: 203565 - RNA, 22 nt, Homo sapiens
gggucccauagaggugagggaa

SEQ ID NO: 203566 - RNA, 13 nt, Homo sapiens
aucauuccuugag

SEQ ID NO: 203567 - RNA, 14 nt, Homo sapiens
uggaugcagaucca

SEQ ID NO: 203568 - RNA, 16 nt, Homo sapiens
cuaguagucauuucau

SEQ ID NO: 203569 - RNA, 15 nt, Homo sapiens
cuuuguaugcacuuu

SEQ ID NO: 203570 - RNA, 16 nt, Homo sapiens
auauugcuucuucucc

SEQ ID NO: 203571 - RNA, 15 nt, Homo sapiens
ugaguuuagugaucu

SEQ ID NO: 203572 - RNA, 21 nt, Homo sapiens
aaauacaauaaacuuacuaua

SEQ ID NO: 203573 - RNA, 17 nt, Homo sapiens
ccucaguuuuaucauuu

SEQ ID NO: 203574 - RNA, 14 nt, Homo sapiens
agggagcacugggu

SEQ ID NO: 203575 - RNA, 22 nt, Homo sapiens
gacuaugucacccaaugcauau

SEQ ID NO: 203576 - RNA, 12 nt, Homo sapiens
accuugugagag

SEQ ID NO: 203577 - RNA, 14 nt, Homo sapiens
ugccauagcaagau

SEQ ID NO: 203578 - RNA, 17 nt, Homo sapiens
aaacagccccucuggac

SEQ ID NO: 203579 - RNA, 16 nt, Homo sapiens
ugugagccaccacguc

SEQ ID NO: 203580 - RNA, 21 nt, Homo sapiens
gaaaugcccaucuaugucccu

SEQ ID NO: 203581 - RNA, 12 nt, Homo sapiens
gagcucagagag

SEQ ID NO: 203582 - RNA, 22 nt, Homo sapiens
gcccacuucaccguacuaacca

SEQ ID NO: 203583 - RNA, 21 nt, Homo sapiens
caugacucggggguggggaaa

SEQ ID NO: 203584 - RNA, 15 nt, Homo sapiens
cucacacaugagauc

SEQ ID NO: 203585 - RNA, 14 nt, Homo sapiens
aagcagucgugccu

SEQ ID NO: 203586 - RNA, 16 nt, Homo sapiens
uggaucaucuauugcu

SEQ ID NO: 203587 - RNA, 13 nt, Homo sapiens
gucucgcuuuguu

SEQ ID NO: 203588 - RNA, 18 nt, Homo sapiens
cuguaccugugcacguug

SEQ ID NO: 203589 - RNA, 14 nt, Homo sapiens
cauucugacaucuu

SEQ ID NO: 203590 - RNA, 15 nt, Homo sapiens
uuagucgagccaagu

SEQ ID NO: 203591 - RNA, 15 nt, Homo sapiens
gaagucaugcguuua

SEQ ID NO: 203592 - RNA, 23 nt, Homo sapiens
aacuugcacaaaaucacacagcc

SEQ ID NO: 203593 - RNA, 23 nt, Homo sapiens
caagaauagaugcugacuguacu

SEQ ID NO: 203594 - RNA, 18 nt, Homo sapiens
agggacuugaaguuguua

SEQ ID NO: 203595 - RNA, 21 nt, Homo sapiens
cugggucucgcuuuguugccc

SEQ ID NO: 203596 - RNA, 17 nt, Homo sapiens
ccaccccuaaagagaua

SEQ ID NO: 203597 - RNA, 23 nt, Homo sapiens
ucaugccaccauggccagccaac

SEQ ID NO: 203598 - RNA, 15 nt, Homo sapiens
cuggucucaaacucc

SEQ ID NO: 203599 - RNA, 20 nt, Homo sapiens
caggcagaucccacuugcag

SEQ ID NO: 203600 - RNA, 14 nt, Homo sapiens
aauaauguacaucu

SEQ ID NO: 203601 - RNA, 22 nt, Homo sapiens
cuacccuuccucaccacuuccc

SEQ ID NO: 203602 - RNA, 15 nt, Homo sapiens
ucuacccaaaggaua

SEQ ID NO: 203603 - RNA, 17 nt, Homo sapiens
acagaaaaaaucgucuc

SEQ ID NO: 203604 - RNA, 16 nt, Homo sapiens
aggccaggcagauccc

SEQ ID NO: 203605 - RNA, 11 nt, Homo sapiens
ugggcuucuag

SEQ ID NO: 203606 - RNA, 21 nt, Homo sapiens
ucuuuguaagaguggaaccaa

SEQ ID NO: 203607 - RNA, 16 nt, Homo sapiens
cuucaguauguuguca

SEQ ID NO: 203608 - RNA, 17 nt, Homo sapiens
cugcuuuggaaaucaca

SEQ ID NO: 203609 - RNA, 20 nt, Homo sapiens
cuugaguuuagugaucugaa

SEQ ID NO: 203610 - RNA, 15 nt, Homo sapiens
aucauguguguccac

SEQ ID NO: 203611 - RNA, 14 nt, Homo sapiens
cagggucauagcau

SEQ ID NO: 203612 - RNA, 17 nt, Homo sapiens
aaacuaccuuccaguuc

SEQ ID NO: 203613 - RNA, 14 nt, Homo sapiens
cagaaaaacugugg

SEQ ID NO: 203614 - RNA, 14 nt, Homo sapiens
cucaucauuccuug

SEQ ID NO: 203615 - RNA, 22 nt, Homo sapiens
uacucauucagggauagcacug

SEQ ID NO: 203616 - RNA, 18 nt, Homo sapiens
cucugacucagggcuccu

SEQ ID NO: 203617 - RNA, 20 nt, Homo sapiens
ugcauaaaauguuaaguuga

SEQ ID NO: 203618 - RNA, 20 nt, Homo sapiens
gcuucuugccucugugcugu

SEQ ID NO: 203619 - RNA, 22 nt, Homo sapiens
acagaacuaagaugaucaucuc

SEQ ID NO: 203620 - RNA, 17 nt, Homo sapiens
caacuugggaacuagac

SEQ ID NO: 203621 - RNA, 18 nt, Homo sapiens
aaucaaguuggcuucuaa

SEQ ID NO: 203622 - RNA, 22 nt, Homo sapiens
acucuccagaaagcucaucuca

SEQ ID NO: 203623 - RNA, 14 nt, Homo sapiens
uugguaugugacau

SEQ ID NO: 203624 - RNA, 13 nt, Homo sapiens
uauaaaugugauu

SEQ ID NO: 203625 - RNA, 22 nt, Homo sapiens
caaacagccccucuggacacag

SEQ ID NO: 203626 - RNA, 17 nt, Homo sapiens
gaauguuuacacucuuu

SEQ ID NO: 203627 - RNA, 14 nt, Homo sapiens
aacuugacccccuu

SEQ ID NO: 203628 - RNA, 12 nt, Homo sapiens
caggcacugaga

SEQ ID NO: 203629 - RNA, 22 nt, Homo sapiens
aacugcaggcccuggccucccc

SEQ ID NO: 203630 - RNA, 15 nt, Homo sapiens
aggaccuuuccacca

SEQ ID NO: 203631 - RNA, 15 nt, Homo sapiens
uugcuggcaaagaca

SEQ ID NO: 203632 - RNA, 12 nt, Homo sapiens
cggaaguuuuca

SEQ ID NO: 203633 - RNA, 17 nt, Homo sapiens
ugcuggagucgggacua

SEQ ID NO: 203634 - RNA, 11 nt, Homo sapiens
ccagagcucag

SEQ ID NO: 203635 - RNA, 20 nt, Homo sapiens
cagauacugucucuuucaug

SEQ ID NO: 203636 - RNA, 13 nt, Homo sapiens
uugcugugagcaa

SEQ ID NO: 203637 - RNA, 21 nt, Homo sapiens
ccauuuggcaaugccaucauc

SEQ ID NO: 203638 - RNA, 17 nt, Homo sapiens
guagaagccacuauuac

SEQ ID NO: 203639 - RNA, 21 nt, Homo sapiens
cacauccucugucuauuugag

SEQ ID NO: 203640 - RNA, 12 nt, Homo sapiens
ccaggugcacag

SEQ ID NO: 203641 - RNA, 16 nt, Homo sapiens
gaugcagagucagcag

SEQ ID NO: 203642 - RNA, 20 nt, Homo sapiens
agaccccucucccagcuauu

SEQ ID NO: 203643 - RNA, 14 nt, Homo sapiens
uagacuaaggccau

SEQ ID NO: 203644 - RNA, 17 nt, Homo sapiens
gcuaucgcaccacugug

SEQ ID NO: 203645 - RNA, 14 nt, Homo sapiens
agccuuugccuccc

SEQ ID NO: 203646 - RNA, 19 nt, Homo sapiens
uauaaaccuaaaaaagaua

SEQ ID NO: 203647 - RNA, 21 nt, Homo sapiens
uugcacaaaaucacacagcca

SEQ ID NO: 203648 - RNA, 21 nt, Homo sapiens
cuucauccucugagugugacc

SEQ ID NO: 203649 - RNA, 17 nt, Homo sapiens
gugaaccuuaguaccua

SEQ ID NO: 203650 - RNA, 14 nt, Homo sapiens
uagaggugagggaa

SEQ ID NO: 203651 - RNA, 13 nt, Homo sapiens
gcucaucauucuc

SEQ ID NO: 203652 - RNA, 15 nt, Homo sapiens
gaaccaggcaacuug

SEQ ID NO: 203653 - RNA, 21 nt, Homo sapiens
cagcuggaagggucaacaucu

SEQ ID NO: 203654 - RNA, 16 nt, Homo sapiens
uaaaaucccuccuuca

SEQ ID NO: 203655 - RNA, 16 nt, Homo sapiens
aauguuacauuauuau

SEQ ID NO: 203656 - RNA, 15 nt, Homo sapiens
ggaaaacaagcauuc

SEQ ID NO: 203657 - RNA, 20 nt, Homo sapiens
cagaccacugauaaaaccau

SEQ ID NO: 203658 - RNA, 17 nt, Homo sapiens
cuucacucaaucucuga

SEQ ID NO: 203659 - RNA, 16 nt, Homo sapiens
uauauucauccaugcc

SEQ ID NO: 203660 - RNA, 17 nt, Homo sapiens
acccuugaaaagacauc

SEQ ID NO: 203661 - RNA, 22 nt, Homo sapiens
cagaucacuucaggucaggagu

SEQ ID NO: 203662 - RNA, 23 nt, Homo sapiens
gacccagucagaguugugcacau

SEQ ID NO: 203663 - RNA, 16 nt, Homo sapiens
cuccacugccuucgau

SEQ ID NO: 203664 - RNA, 15 nt, Homo sapiens
gugaauaaaccauca

SEQ ID NO: 203665 - RNA, 20 nt, Homo sapiens
gcuccaucgcugucaucuca

SEQ ID NO: 203666 - RNA, 18 nt, Homo sapiens
aaucuucuugauccacuu

SEQ ID NO: 203667 - RNA, 15 nt, Homo sapiens
aagcccuuuacuuga

SEQ ID NO: 203668 - RNA, 22 nt, Homo sapiens
gguucacagaagcacagcaccc

SEQ ID NO: 203669 - RNA, 15 nt, Homo sapiens
uugccucugugcugu

SEQ ID NO: 203670 - RNA, 13 nt, Homo sapiens
guuacuugggagg

SEQ ID NO: 203671 - RNA, 14 nt, Homo sapiens
agcuacugacuaug

SEQ ID NO: 203672 - RNA, 18 nt, Homo sapiens
guacaguagauuuuccaa

SEQ ID NO: 203673 - RNA, 21 nt, Homo sapiens
uauugcugcuggggcucccca

SEQ ID NO: 203674 - RNA, 16 nt, Homo sapiens
gcccagcuaaagcaau

SEQ ID NO: 203675 - RNA, 17 nt, Homo sapiens
gaagccuauguaugcca

SEQ ID NO: 203676 - RNA, 16 nt, Homo sapiens
ugcuggucacugccau

SEQ ID NO: 203677 - RNA, 16 nt, Homo sapiens
aagcugggagcacagg

SEQ ID NO: 203678 - RNA, 23 nt, Homo sapiens
agccuauguaugccauggaggca

SEQ ID NO: 203679 - RNA, 16 nt, Homo sapiens
ccaguaauugguccga

SEQ ID NO: 203680 - RNA, 19 nt, Homo sapiens
cucauucagggauagcacu

SEQ ID NO: 203681 - RNA, 17 nt, Homo sapiens
aagaacaguaacugcca

SEQ ID NO: 203682 - RNA, 23 nt, Homo sapiens
ucaacuggagacacuauuuaucu

SEQ ID NO: 203683 - RNA, 19 nt, Homo sapiens
acuucaguauguugucaaa

SEQ ID NO: 203684 - RNA, 21 nt, Homo sapiens
gaagccucacugcaagcacug

SEQ ID NO: 203685 - RNA, 21 nt, Homo sapiens
auuugcaagggaaaagucucu

SEQ ID NO: 203686 - RNA, 21 nt, Homo sapiens
ucuuuucuggaauguaaucaa

SEQ ID NO: 203687 - RNA, 16 nt, Homo sapiens
cugcaagcacaucugc

SEQ ID NO: 203688 - RNA, 15 nt, Homo sapiens
ugggaacugcaauaa

SEQ ID NO: 203689 - RNA, 22 nt, Homo sapiens
ggcaaccacaggcagcauuuag

SEQ ID NO: 203690 - RNA, 22 nt, Homo sapiens
acggagccacuccucugacuca

SEQ ID NO: 203691 - RNA, 12 nt, Homo sapiens
gccguggcugcg

SEQ ID NO: 203692 - RNA, 15 nt, Homo sapiens
ggcaaagccuaguga

SEQ ID NO: 203693 - RNA, 16 nt, Homo sapiens
cccaauucacaucuaa

SEQ ID NO: 203694 - RNA, 12 nt, Homo sapiens
ugacagccuccc

SEQ ID NO: 203695 - RNA, 14 nt, Homo sapiens
auacgguaugauau

SEQ ID NO: 203696 - RNA, 16 nt, Homo sapiens
caagcuggacuauggc

SEQ ID NO: 203697 - RNA, 23 nt, Homo sapiens
ucaugaagaaccuugacggcauu

SEQ ID NO: 203698 - RNA, 17 nt, Homo sapiens
aaagggagcacuggguu

SEQ ID NO: 203699 - RNA, 20 nt, Homo sapiens
aauagcaaccuuuuuaucuc

SEQ ID NO: 203700 - RNA, 22 nt, Homo sapiens
gauacugcucaucauuccuuga

SEQ ID NO: 203701 - RNA, 13 nt, Homo sapiens
aaaugugaugaau

SEQ ID NO: 203702 - RNA, 13 nt, Homo sapiens
ggaacugcaauaa

SEQ ID NO: 203703 - RNA, 16 nt, Homo sapiens
ugcccaguguguuucu

SEQ ID NO: 203704 - RNA, 20 nt, Homo sapiens
gacuuguuuuaugcucaggg

SEQ ID NO: 203705 - RNA, 15 nt, Homo sapiens
uaaaucaaugcuaua

SEQ ID NO: 203706 - RNA, 16 nt, Homo sapiens
cagggcuccugcacuu

SEQ ID NO: 203707 - RNA, 20 nt, Homo sapiens
ggggucccauagaggugagg

SEQ ID NO: 203708 - RNA, 15 nt, Homo sapiens
caaaaggacucucag

SEQ ID NO: 203709 - RNA, 14 nt, Homo sapiens
ugacuugacuuuag

SEQ ID NO: 203710 - RNA, 17 nt, Homo sapiens
guuugaaucacaguaua

SEQ ID NO: 203711 - RNA, 16 nt, Homo sapiens
aucaacgaguacuuca

SEQ ID NO: 203712 - RNA, 21 nt, Homo sapiens
cagagauaauucuagcuuuga

SEQ ID NO: 203713 - RNA, 17 nt, Homo sapiens
ccauagaggugagggaa

SEQ ID NO: 203714 - RNA, 14 nt, Homo sapiens
aauaaagcuugcaa

SEQ ID NO: 203715 - RNA, 20 nt, Homo sapiens
aaucacacgucuggcuucac

SEQ ID NO: 203716 - RNA, 16 nt, Homo sapiens
auaaaauuaugccaua

SEQ ID NO: 203717 - RNA, 14 nt, Homo sapiens
ugucugacaaccuc

SEQ ID NO: 203718 - RNA, 14 nt, Homo sapiens
aucaaguccuacaa

SEQ ID NO: 203719 - RNA, 19 nt, Homo sapiens
ccuggucccuuggagacaa

SEQ ID NO: 203720 - RNA, 21 nt, Homo sapiens
gcaagcaagaaacacugggcu

SEQ ID NO: 203721 - RNA, 15 nt, Homo sapiens
gucuaaaaugccuca

SEQ ID NO: 203722 - RNA, 16 nt, Homo sapiens
gagggcagaucacuuc

SEQ ID NO: 203723 - RNA, 15 nt, Homo sapiens
caggccacauggcua

SEQ ID NO: 203724 - RNA, 22 nt, Homo sapiens
cugggauuacaauugugagcca

SEQ ID NO: 203725 - RNA, 12 nt, Homo sapiens
ugugcucaggga

SEQ ID NO: 203726 - RNA, 17 nt, Homo sapiens
agggauagcacugagca

SEQ ID NO: 203727 - RNA, 20 nt, Homo sapiens
acuguuagucauuugcugag

SEQ ID NO: 203728 - RNA, 13 nt, Homo sapiens
ggggcagcacaga

SEQ ID NO: 203729 - RNA, 17 nt, Homo sapiens
uaacugccuuguguaca

SEQ ID NO: 203730 - RNA, 21 nt, Homo sapiens
cauggcagaaggcaaacccau

SEQ ID NO: 203731 - RNA, 20 nt, Homo sapiens
auguugaugaaaaauagcaa

SEQ ID NO: 203732 - RNA, 15 nt, Homo sapiens
gaaugcagggacaaa

SEQ ID NO: 203733 - RNA, 17 nt, Homo sapiens
accuugacggcauugcu

SEQ ID NO: 203734 - RNA, 15 nt, Homo sapiens
uggggagaaaagaca

SEQ ID NO: 203735 - RNA, 18 nt, Homo sapiens
cuauggcucuacuuucag

SEQ ID NO: 203736 - RNA, 18 nt, Homo sapiens
agcuggaaaaaguguccu

SEQ ID NO: 203737 - RNA, 20 nt, Homo sapiens
cuauaacuauguugauaaaa

SEQ ID NO: 203738 - RNA, 21 nt, Homo sapiens
guccuucucucaccuccuaaa

SEQ ID NO: 203739 - RNA, 16 nt, Homo sapiens
augaacucuuaaucaa

SEQ ID NO: 203740 - RNA, 20 nt, Homo sapiens
ccgagucucuucuccacugg

SEQ ID NO: 203741 - RNA, 21 nt, Homo sapiens
uggcuucacagaugugugauu

SEQ ID NO: 203742 - RNA, 18 nt, Homo sapiens
ccuaagcagaccacugau

SEQ ID NO: 203743 - RNA, 11 nt, Homo sapiens
ucuggacacag

SEQ ID NO: 203744 - RNA, 15 nt, Homo sapiens
uguucccuauuuugc

SEQ ID NO: 203745 - RNA, 16 nt, Homo sapiens
uagaguucagacuuuu

SEQ ID NO: 203746 - RNA, 14 nt, Homo sapiens
ucucagccucugaa

SEQ ID NO: 203747 - RNA, 11 nt, Homo sapiens
ugagcauuuag

SEQ ID NO: 203748 - RNA, 19 nt, Homo sapiens
agagacuuugacucuccag

SEQ ID NO: 203749 - RNA, 19 nt, Homo sapiens
uccugccugcggaccagau

SEQ ID NO: 203750 - RNA, 18 nt, Homo sapiens
gccaauggagacugucuc

SEQ ID NO: 203751 - RNA, 21 nt, Homo sapiens
guugucugaagucacugcaca

SEQ ID NO: 203752 - RNA, 15 nt, Homo sapiens
acaccuguaauccca

SEQ ID NO: 203753 - RNA, 23 nt, Homo sapiens
aucucuuguauaugaugaucugg

SEQ ID NO: 203754 - RNA, 20 nt, Homo sapiens
cuaugugggugggaccacag

SEQ ID NO: 203755 - RNA, 12 nt, Homo sapiens
uuaucugugcaa

SEQ ID NO: 203756 - RNA, 13 nt, Homo sapiens
aauaauccagaaa

SEQ ID NO: 203757 - RNA, 17 nt, Homo sapiens
ugucuaaaaugccucag

SEQ ID NO: 203758 - RNA, 16 nt, Homo sapiens
gaugccuucuccagac

SEQ ID NO: 203759 - RNA, 13 nt, Homo sapiens
cuggagucgggac

SEQ ID NO: 203760 - RNA, 14 nt, Homo sapiens
aguuucacugacuu

SEQ ID NO: 203761 - RNA, 14 nt, Homo sapiens
cucugaaaccagug

SEQ ID NO: 203762 - RNA, 19 nt, Homo sapiens
aaugucuugaugcaugcac

SEQ ID NO: 203763 - RNA, 21 nt, Homo sapiens
cugucucauaugauugugcac

SEQ ID NO: 203764 - RNA, 16 nt, Homo sapiens
ggagacugucucaaga

SEQ ID NO: 203765 - RNA, 19 nt, Homo sapiens
gccucaagaugaaggcaaa

SEQ ID NO: 203766 - RNA, 13 nt, Homo sapiens
ucaaagacauucu

SEQ ID NO: 203767 - RNA, 11 nt, Homo sapiens
gucuguuggca

SEQ ID NO: 203768 - RNA, 21 nt, Homo sapiens
uugcagcuuauauucauccau

SEQ ID NO: 203769 - RNA, 20 nt, Homo sapiens
aauuuccggccaacaguuaa

SEQ ID NO: 203770 - RNA, 19 nt, Homo sapiens
uaccuaguagucauuucau

SEQ ID NO: 203771 - RNA, 20 nt, Homo sapiens
cuggaauguaaucaauguuu

SEQ ID NO: 203772 - RNA, 12 nt, Homo sapiens
cuuuuauuacau

SEQ ID NO: 203773 - RNA, 19 nt, Homo sapiens
agacaaaaucuuaaaugcc

SEQ ID NO: 203774 - RNA, 12 nt, Homo sapiens
cucaaucucuga

SEQ ID NO: 203775 - RNA, 12 nt, Homo sapiens
caauaugcauuu

SEQ ID NO: 203776 - RNA, 12 nt, Homo sapiens
aaaguguguauu

SEQ ID NO: 203777 - RNA, 20 nt, Homo sapiens
gcuccauguagaagccacua

SEQ ID NO: 203778 - RNA, 18 nt, Homo sapiens
ucaaaguaaaacuugcug

SEQ ID NO: 203779 - RNA, 18 nt, Homo sapiens
cauauccaacaugugcuc

SEQ ID NO: 203780 - RNA, 18 nt, Homo sapiens
uccuccagaauggagcug

SEQ ID NO: 203781 - RNA, 21 nt, Homo sapiens
cccaguguguuucugaucuga

SEQ ID NO: 203782 - RNA, 16 nt, Homo sapiens
ugucugacaaccucuu

SEQ ID NO: 203783 - RNA, 17 nt, Homo sapiens
cccggggcuccacugaa

SEQ ID NO: 203784 - RNA, 20 nt, Homo sapiens
aacagccccucuggacacag

SEQ ID NO: 203785 - RNA, 18 nt, Homo sapiens
caagcacugcaugggcaa

SEQ ID NO: 203786 - RNA, 11 nt, Homo sapiens
auugugcacau

SEQ ID NO: 203787 - RNA, 18 nt, Homo sapiens
ugggccaagucaaagaca

SEQ ID NO: 203788 - RNA, 13 nt, Homo sapiens
aguaaugaugucg

SEQ ID NO: 203789 - RNA, 17 nt, Homo sapiens
cagucuuccauuugcaa

SEQ ID NO: 203790 - RNA, 10 nt, Homo sapiens
agaugcauua

SEQ ID NO: 203791 - RNA, 15 nt, Homo sapiens
gcucaucauucucug

SEQ ID NO: 203792 - RNA, 18 nt, Homo sapiens
uucagcucacacaugaga

SEQ ID NO: 203793 - RNA, 23 nt, Homo sapiens
acaugaauugcauuuuacuuuaa

SEQ ID NO: 203794 - RNA, 14 nt, Homo sapiens
cagggaaugaaggu

SEQ ID NO: 203795 - RNA, 13 nt, Homo sapiens
ucaccacuucccu

SEQ ID NO: 203796 - RNA, 12 nt, Homo sapiens
agaaaagacaug

SEQ ID NO: 203797 - RNA, 15 nt, Homo sapiens
cuauuuuauucccuu

SEQ ID NO: 203798 - RNA, 22 nt, Homo sapiens
uuauguaugugaaaguuacaaa

SEQ ID NO: 203799 - RNA, 14 nt, Homo sapiens
ccccuggcuuuuca

SEQ ID NO: 203800 - RNA, 23 nt, Homo sapiens
caggaaccucagggcugugugua

SEQ ID NO: 203801 - RNA, 18 nt, Homo sapiens
ugagaacuacucagggaa

SEQ ID NO: 203802 - RNA, 19 nt, Homo sapiens
aucugaacagaaauaccaa

SEQ ID NO: 203803 - RNA, 18 nt, Homo sapiens
aauuguaucaaaugugac

SEQ ID NO: 203804 - RNA, 17 nt, Homo sapiens
ugagaccacuguuauca

SEQ ID NO: 203805 - RNA, 20 nt, Homo sapiens
aauacagucuuccauuugca

SEQ ID NO: 203806 - RNA, 15 nt, Homo sapiens
agacuaugucaccca

SEQ ID NO: 203807 - RNA, 16 nt, Homo sapiens
aucagaccauaauguu

SEQ ID NO: 203808 - RNA, 23 nt, Homo sapiens
cagggacuugaaguuguuacuaa

SEQ ID NO: 203809 - RNA, 17 nt, Homo sapiens
guccauuguccaauccu

SEQ ID NO: 203810 - RNA, 15 nt, Homo sapiens
acuaagaaauaugca

SEQ ID NO: 203811 - RNA, 21 nt, Homo sapiens
caggaguucagggucauagca

SEQ ID NO: 203812 - RNA, 12 nt, Homo sapiens
ucucauaugauu

SEQ ID NO: 203813 - RNA, 18 nt, Homo sapiens
agcaaagggagcacuggg

SEQ ID NO: 203814 - RNA, 23 nt, Homo sapiens
aguuugaguuacuaucaugucaa

SEQ ID NO: 203815 - RNA, 24 nt, Homo sapiens
uuauaaaagaugcauuaucuauga

SEQ ID NO: 203816 - RNA, 14 nt, Homo sapiens
cauccaagcuuccu

SEQ ID NO: 203817 - RNA, 21 nt, Homo sapiens
acagacgucccuccacguuca

SEQ ID NO: 203818 - RNA, 17 nt, Homo sapiens
gcucacacaugagaucu

SEQ ID NO: 203819 - RNA, 21 nt, Homo sapiens
gaccaugcucaucugcugguc

SEQ ID NO: 203820 - RNA, 12 nt, Homo sapiens
acaucaagcaca

SEQ ID NO: 203821 - RNA, 13 nt, Homo sapiens
uauucgugcagca

SEQ ID NO: 203822 - RNA, 17 nt, Homo sapiens
acuuagcaugucccuac

SEQ ID NO: 203823 - RNA, 22 nt, Homo sapiens
cugugcagguggggagacuggg

SEQ ID NO: 203824 - RNA, 14 nt, Homo sapiens
cacagggacuugaa

SEQ ID NO: 203825 - RNA, 18 nt, Homo sapiens
auugugaucagaccauaa

SEQ ID NO: 203826 - RNA, 17 nt, Homo sapiens
ucuguggcacucagaua

SEQ ID NO: 203827 - RNA, 19 nt, Homo sapiens
augucguuugaaucacagu

SEQ ID NO: 203828 - RNA, 17 nt, Homo sapiens
uuccuugaucuguauau

SEQ ID NO: 203829 - RNA, 13 nt, Homo sapiens
cacaaaaucacac

SEQ ID NO: 203830 - RNA, 23 nt, Homo sapiens
caaagcaggggaguaugcaaaag

SEQ ID NO: 203831 - RNA, 22 nt, Homo sapiens
uuugucccggggcuccacugaa

SEQ ID NO: 203832 - RNA, 15 nt, Homo sapiens
ugcaagcacaucugc

SEQ ID NO: 203833 - RNA, 20 nt, Homo sapiens
cuuggagacaaaaucuuaaa

SEQ ID NO: 203834 - RNA, 12 nt, Homo sapiens
uggaagggucaa

SEQ ID NO: 203835 - RNA, 19 nt, Homo sapiens
caugagaccacuguuauca

SEQ ID NO: 203836 - RNA, 23 nt, Homo sapiens
cauaguacagguaaggugaggga

SEQ ID NO: 203837 - RNA, 15 nt, Homo sapiens
aagauucauccauuu

SEQ ID NO: 203838 - RNA, 16 nt, Homo sapiens
aaacguccuacuguau

SEQ ID NO: 203839 - RNA, 21 nt, Homo sapiens
ugaacuuggaaagaaaugccc

SEQ ID NO: 203840 - RNA, 20 nt, Homo sapiens
gccugcggaccagaugaaug

SEQ ID NO: 203841 - RNA, 17 nt, Homo sapiens
aguuugcuuuguaugca

SEQ ID NO: 203842 - RNA, 22 nt, Homo sapiens
aggaggugcuaucgcaccacug

SEQ ID NO: 203843 - RNA, 21 nt, Homo sapiens
cucauuggacccuuccauggu

SEQ ID NO: 203844 - RNA, 17 nt, Homo sapiens
uuuacaauguucauccc

SEQ ID NO: 203845 - RNA, 13 nt, Homo sapiens
auaguacuggcau

SEQ ID NO: 203846 - RNA, 13 nt, Homo sapiens
aguuacucauuca

SEQ ID NO: 203847 - RNA, 16 nt, Homo sapiens
aaacuaacacccaguc

SEQ ID NO: 203848 - RNA, 16 nt, Homo sapiens
gaagucacugcacagu

SEQ ID NO: 203849 - RNA, 14 nt, Homo sapiens
cacagagugcauug

SEQ ID NO: 203850 - RNA, 18 nt, Homo sapiens
uauaacuauguugauaaa

SEQ ID NO: 203851 - RNA, 18 nt, Homo sapiens
aagaugagagaacuggag

SEQ ID NO: 203852 - RNA, 14 nt, Homo sapiens
ccuuacaguaggag

SEQ ID NO: 203853 - RNA, 16 nt, Homo sapiens
guaggcuuaguuugug

SEQ ID NO: 203854 - RNA, 16 nt, Homo sapiens
gcaaggaaacuaugua

SEQ ID NO: 203855 - RNA, 13 nt, Homo sapiens
auaucgaucucuu

SEQ ID NO: 203856 - RNA, 17 nt, Homo sapiens
uucaauugcaucuccca

SEQ ID NO: 203857 - RNA, 13 nt, Homo sapiens
gugauugugccag

SEQ ID NO: 203858 - RNA, 19 nt, Homo sapiens
uccgagaggugggccaguc

SEQ ID NO: 203859 - RNA, 23 nt, Homo sapiens
uuguucaucagacuccugugcaa

SEQ ID NO: 203860 - RNA, 19 nt, Homo sapiens
ucuugacuacagucaggaa

SEQ ID NO: 203861 - RNA, 21 nt, Homo sapiens
ucugcaagcacaucugcauuu

SEQ ID NO: 203862 - RNA, 17 nt, Homo sapiens
aguucauauguaccaug

SEQ ID NO: 203863 - RNA, 23 nt, Homo sapiens
caggaacuugcacaaaaucacac

SEQ ID NO: 203864 - RNA, 22 nt, Homo sapiens
uacugcucaucauuccuugaga

SEQ ID NO: 203865 - RNA, 17 nt, Homo sapiens
uuguauuaucaacagca

SEQ ID NO: 203866 - RNA, 13 nt, Homo sapiens
uagcauacgguau

SEQ ID NO: 203867 - RNA, 19 nt, Homo sapiens
gcugccucuaccugacacu

SEQ ID NO: 203868 - RNA, 20 nt, Homo sapiens
ccucacagagugcauuguga

SEQ ID NO: 203869 - RNA, 17 nt, Homo sapiens
gccugagguuugccagc

SEQ ID NO: 203870 - RNA, 18 nt, Homo sapiens
agaaucccuagucuucaa

SEQ ID NO: 203871 - RNA, 16 nt, Homo sapiens
cauguaaacugugcac

SEQ ID NO: 203872 - RNA, 12 nt, Homo sapiens
ucgaguguuuca

SEQ ID NO: 203873 - RNA, 13 nt, Homo sapiens
uuggcaaugccau

SEQ ID NO: 203874 - RNA, 17 nt, Homo sapiens
acacagccccauguaca

SEQ ID NO: 203875 - RNA, 13 nt, Homo sapiens
cuccugggcucag

SEQ ID NO: 203876 - RNA, 20 nt, Homo sapiens
auguugcccaguguguuucu

SEQ ID NO: 203877 - RNA, 21 nt, Homo sapiens
gaauaaaccaucaucuugcca

SEQ ID NO: 203878 - RNA, 16 nt, Homo sapiens
agcacagcuugaccug

SEQ ID NO: 203879 - RNA, 21 nt, Homo sapiens
caggagagaaugcccagugac

SEQ ID NO: 203880 - RNA, 13 nt, Homo sapiens
cauuugcaccuac

SEQ ID NO: 203881 - RNA, 12 nt, Homo sapiens
aauuuguacaua

SEQ ID NO: 203882 - RNA, 22 nt, Homo sapiens
auccuacaaggcuggcagugac

SEQ ID NO: 203883 - RNA, 15 nt, Homo sapiens
acagagcagaacuuu

SEQ ID NO: 203884 - RNA, 21 nt, Homo sapiens
auaaaauuaaagcugaaaacu

SEQ ID NO: 203885 - RNA, 14 nt, Homo sapiens
auauguaccaugua

SEQ ID NO: 203886 - RNA, 21 nt, Homo sapiens
guauguuugggagacugcuga

SEQ ID NO: 203887 - RNA, 16 nt, Homo sapiens
cuuccuacccuuccuc

SEQ ID NO: 203888 - RNA, 15 nt, Homo sapiens
aagacaucaagcaca

SEQ ID NO: 203889 - RNA, 17 nt, Homo sapiens
ggccuggcaagugggug

SEQ ID NO: 203890 - RNA, 19 nt, Homo sapiens
aagaccugacaccuuucau

SEQ ID NO: 203891 - RNA, 17 nt, Homo sapiens
caggauuagacagucaa

SEQ ID NO: 203892 - RNA, 17 nt, Homo sapiens
cucugaaaccaguguua

SEQ ID NO: 203893 - RNA, 15 nt, Homo sapiens
aguaacauguguuaa

SEQ ID NO: 203894 - RNA, 16 nt, Homo sapiens
cuaugaggcaaccaca

SEQ ID NO: 203895 - RNA, 18 nt, Homo sapiens
ucuucacucaaucucuga

SEQ ID NO: 203896 - RNA, 19 nt, Homo sapiens
aacuggaggaguuccuuga

SEQ ID NO: 203897 - RNA, 21 nt, Homo sapiens
cauggccagguggccacucca

SEQ ID NO: 203898 - RNA, 15 nt, Homo sapiens
uaugauugugcacau

SEQ ID NO: 203899 - RNA, 22 nt, Homo sapiens
auguucacuuuugacaaaggca

SEQ ID NO: 203900 - RNA, 22 nt, Homo sapiens
gcacccaggacuuccauuugcu

SEQ ID NO: 203901 - RNA, 19 nt, Homo sapiens
gguucaccaggucagggag

SEQ ID NO: 203902 - RNA, 17 nt, Homo sapiens
aaguagcacccuggauu

SEQ ID NO: 203903 - RNA, 15 nt, Homo sapiens
ucugucaaugucuug

SEQ ID NO: 203904 - RNA, 15 nt, Homo sapiens
aaaugagaacaugaa

SEQ ID NO: 203905 - RNA, 14 nt, Homo sapiens
aauuagaugaacuc

SEQ ID NO: 203906 - RNA, 17 nt, Homo sapiens
caaucagccacauucua

SEQ ID NO: 203907 - RNA, 15 nt, Homo sapiens
ccuuucuuacauuag

SEQ ID NO: 203908 - RNA, 15 nt, Homo sapiens
cccucuaagggaccu

SEQ ID NO: 203909 - RNA, 21 nt, Homo sapiens
auugugccuacgaauagccac

SEQ ID NO: 203910 - RNA, 21 nt, Homo sapiens
ccuacaaggcuggcagugaca

SEQ ID NO: 203911 - RNA, 23 nt, Homo sapiens
ucccugaaguaagcaaagacuuu

SEQ ID NO: 203912 - RNA, 15 nt, Homo sapiens
cuugagccaguaauu

SEQ ID NO: 203913 - RNA, 22 nt, Homo sapiens
acuaaaauuguaucaaauguga

SEQ ID NO: 203914 - RNA, 20 nt, Homo sapiens
aucccacuugccccuguuac

SEQ ID NO: 203915 - RNA, 19 nt, Homo sapiens
uuugcauaagugcaugaca

SEQ ID NO: 203916 - RNA, 14 nt, Homo sapiens
accucaaaggugau

SEQ ID NO: 203917 - RNA, 12 nt, Homo sapiens
caagugaagguu

SEQ ID NO: 203918 - RNA, 17 nt, Homo sapiens
accaugucagcaaaaag

SEQ ID NO: 203919 - RNA, 19 nt, Homo sapiens
agcacagcuugaccugagg

SEQ ID NO: 203920 - RNA, 14 nt, Homo sapiens
aagaugaucaucuc

SEQ ID NO: 203921 - RNA, 14 nt, Homo sapiens
uagcagacaguguu

SEQ ID NO: 203922 - RNA, 20 nt, Homo sapiens
agucaugcguuuaaucacau

SEQ ID NO: 203923 - RNA, 20 nt, Homo sapiens
gaaucucuuuuugcuuucga

SEQ ID NO: 203924 - RNA, 13 nt, Homo sapiens
uccugggcccucu

SEQ ID NO: 203925 - RNA, 13 nt, Homo sapiens
cuuuuucuuugag

SEQ ID NO: 203926 - RNA, 12 nt, Homo sapiens
uggacacagccc

SEQ ID NO: 203927 - RNA, 20 nt, Homo sapiens
uuguguuuuguuuuguauca

SEQ ID NO: 203928 - RNA, 13 nt, Homo sapiens
gaacuugcacaaa

SEQ ID NO: 203929 - RNA, 20 nt, Homo sapiens
gugagaacuacucagggaau

SEQ ID NO: 203930 - RNA, 19 nt, Homo sapiens
guuuguguguugucucuug

SEQ ID NO: 203931 - RNA, 16 nt, Homo sapiens
ucacaguguugcccag

SEQ ID NO: 203932 - RNA, 15 nt, Homo sapiens
ugaaaugcuggcauu

SEQ ID NO: 203933 - RNA, 18 nt, Homo sapiens
ccaacaugugcucaggga

SEQ ID NO: 203934 - RNA, 16 nt, Homo sapiens
uuacuaacuaaacucu

SEQ ID NO: 203935 - RNA, 13 nt, Homo sapiens
auaggcaaagggg

SEQ ID NO: 203936 - RNA, 21 nt, Homo sapiens
acucaaucucugauucuguca

SEQ ID NO: 203937 - RNA, 18 nt, Homo sapiens
aaggcuggcagugacaga

SEQ ID NO: 203938 - RNA, 14 nt, Homo sapiens
cucacaguguugcc

SEQ ID NO: 203939 - RNA, 20 nt, Homo sapiens
auucuuucccaauucacauc

SEQ ID NO: 203940 - RNA, 18 nt, Homo sapiens
aacggugagcauuguggc

SEQ ID NO: 203941 - RNA, 14 nt, Homo sapiens
caaacuucaagggu

SEQ ID NO: 203942 - RNA, 15 nt, Homo sapiens
auagcaagaucccau

SEQ ID NO: 203943 - RNA, 18 nt, Homo sapiens
uaugcucagggucaauuu

SEQ ID NO: 203944 - RNA, 14 nt, Homo sapiens
uacuggcaauuugu

SEQ ID NO: 203945 - RNA, 22 nt, Homo sapiens
auccucugagugugaccaggca

SEQ ID NO: 203946 - RNA, 16 nt, Homo sapiens
ccaggcuggucucaaa

SEQ ID NO: 203947 - RNA, 22 nt, Homo sapiens
gcacuggguugacuuucaggua

SEQ ID NO: 203948 - RNA, 23 nt, Homo sapiens
uccacuucuuguuccccacugac

SEQ ID NO: 203949 - RNA, 19 nt, Homo sapiens
auauauauuuuugugcaca

SEQ ID NO: 203950 - RNA, 19 nt, Homo sapiens
gucuauuugagacuuagaa

SEQ ID NO: 203951 - RNA, 22 nt, Homo sapiens
cuauguuuuuguucaaagccag

SEQ ID NO: 203952 - RNA, 17 nt, Homo sapiens
gauaguggggucagggc

SEQ ID NO: 203953 - RNA, 23 nt, Homo sapiens
ucagggauagcacugagcaaagc

SEQ ID NO: 203954 - RNA, 18 nt, Homo sapiens
aaucucaccccaucccac

SEQ ID NO: 203955 - RNA, 19 nt, Homo sapiens
acagagcuucccugacuca

SEQ ID NO: 203956 - RNA, 15 nt, Homo sapiens
aauauagcuguacaa

SEQ ID NO: 203957 - RNA, 21 nt, Homo sapiens
uaccugggcauucuuguuuca

SEQ ID NO: 203958 - RNA, 13 nt, Homo sapiens
agaaucaaaugca

SEQ ID NO: 203959 - RNA, 13 nt, Homo sapiens
cuacaauuugcca

SEQ ID NO: 203960 - RNA, 13 nt, Homo sapiens
uaggaaguaggaa

SEQ ID NO: 203961 - RNA, 13 nt, Homo sapiens
uacuugagacugu

SEQ ID NO: 203962 - RNA, 23 nt, Homo sapiens
uggcuuacuacaugugggagcuu

SEQ ID NO: 203963 - RNA, 14 nt, Homo sapiens
cuaugugcaugcag

SEQ ID NO: 203964 - RNA, 16 nt, Homo sapiens
cuucauuuuuccuaac

SEQ ID NO: 203965 - RNA, 12 nt, Homo sapiens
uuaaauaguaaa

SEQ ID NO: 203966 - RNA, 13 nt, Homo sapiens
gccucaaggacuu

SEQ ID NO: 203967 - RNA, 20 nt, Homo sapiens
aguguuccccuuccacugag

SEQ ID NO: 203968 - RNA, 18 nt, Homo sapiens
auggagccagcucugcau

SEQ ID NO: 203969 - RNA, 18 nt, Homo sapiens
aucauuuucugcauuuaa

SEQ ID NO: 203970 - RNA, 13 nt, Homo sapiens
uuuucaccccacc

SEQ ID NO: 203971 - RNA, 15 nt, Homo sapiens
ugacauuauaugcac

SEQ ID NO: 203972 - RNA, 23 nt, Homo sapiens
uaaaaauugugaucagaccauaa

SEQ ID NO: 203973 - RNA, 20 nt, Homo sapiens
aggggucccauagaggugag

SEQ ID NO: 203974 - RNA, 19 nt, Homo sapiens
gucucaagagggcacuggu

SEQ ID NO: 203975 - RNA, 18 nt, Homo sapiens
aauauuugcugacagcug

SEQ ID NO: 203976 - RNA, 19 nt, Homo sapiens
auuucuccuccaugggaga

SEQ ID NO: 203977 - RNA, 18 nt, Homo sapiens
uuugaaauuaaccucuca

SEQ ID NO: 203978 - RNA, 14 nt, Homo sapiens
aaccaacacuaaca

SEQ ID NO: 203979 - RNA, 14 nt, Homo sapiens
aacguggggcagca

SEQ ID NO: 203980 - RNA, 12 nt, Homo sapiens
ugggaccacaga

SEQ ID NO: 203981 - RNA, 13 nt, Homo sapiens
gacccugggacca

SEQ ID NO: 203982 - RNA, 13 nt, Homo sapiens
cucacaccuguaa

SEQ ID NO: 203983 - RNA, 16 nt, Homo sapiens
auguaaacugugcacc

SEQ ID NO: 203984 - RNA, 23 nt, Homo sapiens
cuugaaaagacaucaagcacaga

SEQ ID NO: 203985 - RNA, 21 nt, Homo sapiens
caaagcaggggaguaugcaaa

SEQ ID NO: 203986 - RNA, 22 nt, Homo sapiens
aagcucaucucagcuccugaaa

SEQ ID NO: 203987 - RNA, 15 nt, Homo sapiens
aaauauuuugucuaa

SEQ ID NO: 203988 - RNA, 12 nt, Homo sapiens
cuggagauccuc

SEQ ID NO: 203989 - RNA, 22 nt, Homo sapiens
aaagaugcauuaucuaugauau

SEQ ID NO: 203990 - RNA, 15 nt, Homo sapiens
ccuuugaaaugaaua

SEQ ID NO: 203991 - RNA, 15 nt, Homo sapiens
gaaucuguuaccaga

SEQ ID NO: 203992 - RNA, 17 nt, Homo sapiens
uacaauuuacaaagugu

SEQ ID NO: 203993 - RNA, 14 nt, Homo sapiens
uacuaucaugucaa

SEQ ID NO: 203994 - RNA, 15 nt, Homo sapiens
augugcccccagacg

SEQ ID NO: 203995 - RNA, 13 nt, Homo sapiens
acuucaaggguuu

SEQ ID NO: 203996 - RNA, 15 nt, Homo sapiens
guuagugauggagcu

SEQ ID NO: 203997 - RNA, 19 nt, Homo sapiens
auacuucucuauuaucuca

SEQ ID NO: 203998 - RNA, 14 nt, Homo sapiens
cuagggaucccuca

SEQ ID NO: 203999 - RNA, 14 nt, Homo sapiens
auguguaaggugaa

SEQ ID NO: 204000 - RNA, 21 nt, Homo sapiens
ccugaagaacaguaacugcca

SEQ ID NO: 204001 - RNA, 19 nt, Homo sapiens
uacaaucagccacauucua

SEQ ID NO: 204002 - RNA, 19 nt, Homo sapiens
ugaaaaugguccaggagaa

SEQ ID NO: 204003 - RNA, 22 nt, Homo sapiens
ugaauaaaccaucaucuugcca

SEQ ID NO: 204004 - RNA, 13 nt, Homo sapiens
accuaggauuuca

SEQ ID NO: 204005 - RNA, 17 nt, Homo sapiens
uuaaauacagucuucca

SEQ ID NO: 204006 - RNA, 10 nt, Homo sapiens
ccucagggcu

SEQ ID NO: 204007 - RNA, 19 nt, Homo sapiens
uuaaguugauggugaugaa

SEQ ID NO: 204008 - RNA, 17 nt, Homo sapiens
cgucuaagucaugagcu

SEQ ID NO: 204009 - RNA, 17 nt, Homo sapiens
gagcaugggacuguucu

SEQ ID NO: 204010 - RNA, 20 nt, Homo sapiens
aauggagggaauaauaccua

SEQ ID NO: 204011 - RNA, 15 nt, Homo sapiens
cauuugcaccuaccu

SEQ ID NO: 204012 - RNA, 21 nt, Homo sapiens
ccuaccucacagagugcauug

SEQ ID NO: 204013 - RNA, 15 nt, Homo sapiens
agggucccucugugu

SEQ ID NO: 204014 - RNA, 18 nt, Homo sapiens
ucacauuaauauuugcug

SEQ ID NO: 204015 - RNA, 14 nt, Homo sapiens
guugcccagugugu

SEQ ID NO: 204016 - RNA, 15 nt, Homo sapiens
cagggcuguguguac

SEQ ID NO: 204017 - RNA, 20 nt, Homo sapiens
uacagaaucaaaugcaauuu

SEQ ID NO: 204018 - RNA, 18 nt, Homo sapiens
gggccaggugcacagacg

SEQ ID NO: 204019 - RNA, 20 nt, Homo sapiens
gcacuuugggaggccaagga

SEQ ID NO: 204020 - RNA, 22 nt, Homo sapiens
gccccaugcugcccgcuucuca

SEQ ID NO: 204021 - RNA, 21 nt, Homo sapiens
ucacacagccaagccagucaa

SEQ ID NO: 204022 - RNA, 14 nt, Homo sapiens
auuucuucacucaa

SEQ ID NO: 204023 - RNA, 21 nt, Homo sapiens
acacagcugcagagacagaga

SEQ ID NO: 204024 - RNA, 15 nt, Homo sapiens
auauuuuugugcaca

SEQ ID NO: 204025 - RNA, 15 nt, Homo sapiens
ucaaaguaaaacuug

SEQ ID NO: 204026 - RNA, 23 nt, Homo sapiens
uaguacuugggagaccuguaauc

SEQ ID NO: 204027 - RNA, 17 nt, Homo sapiens
gcauuuucaagcaguua

SEQ ID NO: 204028 - RNA, 20 nt, Homo sapiens
acuaggcccccacuugccuc

SEQ ID NO: 204029 - RNA, 18 nt, Homo sapiens
gauggagccagcucugca

SEQ ID NO: 204030 - RNA, 17 nt, Homo sapiens
gucagcaaaaagcaaaa

SEQ ID NO: 204031 - RNA, 19 nt, Homo sapiens
aauugugaucagaccauaa

SEQ ID NO: 204032 - RNA, 16 nt, Homo sapiens
aacauacuucagcuca

SEQ ID NO: 204033 - RNA, 16 nt, Homo sapiens
cuguauaguacuggca

SEQ ID NO: 204034 - RNA, 18 nt, Homo sapiens
aggccugggccgcugcca

SEQ ID NO: 204035 - RNA, 21 nt, Homo sapiens
aggguucaccaggucagggag

SEQ ID NO: 204036 - RNA, 19 nt, Homo sapiens
gacgaggggugucuugggc

SEQ ID NO: 204037 - RNA, 14 nt, Homo sapiens
uaccuccugagaaa

SEQ ID NO: 204038 - RNA, 16 nt, Homo sapiens
aaggaugagcauuuag

SEQ ID NO: 204039 - RNA, 12 nt, Homo sapiens
gauuccagagag

SEQ ID NO: 204040 - RNA, 13 nt, Homo sapiens
guauaugcaauau

SEQ ID NO: 204041 - RNA, 19 nt, Homo sapiens
ugaguuacuaucaugucaa

SEQ ID NO: 204042 - RNA, 23 nt, Homo sapiens
agaagccucacugcaagcacugc

SEQ ID NO: 204043 - RNA, 22 nt, Homo sapiens
ccacacccuggaggauuucauc

SEQ ID NO: 204044 - RNA, 12 nt, Homo sapiens
ugucccuaguaa

SEQ ID NO: 204045 - RNA, 14 nt, Homo sapiens
gaaagaagugggga

SEQ ID NO: 204046 - RNA, 22 nt, Homo sapiens
caggacacagggaaaucagggu

SEQ ID NO: 204047 - RNA, 19 nt, Homo sapiens
aucccccagccucaagucu

SEQ ID NO: 204048 - RNA, 17 nt, Homo sapiens
gaauggagcuggcccuc

SEQ ID NO: 204049 - RNA, 20 nt, Homo sapiens
agcaggggaguaugcaaaag

SEQ ID NO: 204050 - RNA, 16 nt, Homo sapiens
uaguggggucagggcu

SEQ ID NO: 204051 - RNA, 18 nt, Homo sapiens
ccuaugugggugggacca

SEQ ID NO: 204052 - RNA, 21 nt, Homo sapiens
cuaauccucuuuuucuagucu

SEQ ID NO: 204053 - RNA, 15 nt, Homo sapiens
acggcucucaccagu

SEQ ID NO: 204054 - RNA, 22 nt, Homo sapiens
auauuuguaugauccuaaugaa

SEQ ID NO: 204055 - RNA, 18 nt, Homo sapiens
ucagauaccgacuggggc

SEQ ID NO: 204056 - RNA, 18 nt, Homo sapiens
gcccuuccucuccacugc

SEQ ID NO: 204057 - RNA, 16 nt, Homo sapiens
ucacagaugugugauu

SEQ ID NO: 204058 - RNA, 17 nt, Homo sapiens
uaaaccaucaucuugcc

SEQ ID NO: 204059 - RNA, 16 nt, Homo sapiens
gugaauaaaccaucau

SEQ ID NO: 204060 - RNA, 13 nt, Homo sapiens
cuauguugauaaa

SEQ ID NO: 204061 - RNA, 20 nt, Homo sapiens
cuaauaaaaaacaccuucua

SEQ ID NO: 204062 - RNA, 15 nt, Homo sapiens
aaagcaggugcccag

SEQ ID NO: 204063 - RNA, 21 nt, Homo sapiens
gagcauuguggcugucagcag

SEQ ID NO: 204064 - RNA, 21 nt, Homo sapiens
agcucagagaggcuagaugau

SEQ ID NO: 204065 - RNA, 13 nt, Homo sapiens
uugggucuuugaa

SEQ ID NO: 204066 - RNA, 13 nt, Homo sapiens
cacccaugcaccu

SEQ ID NO: 204067 - RNA, 14 nt, Homo sapiens
ccaaguuccacugc

SEQ ID NO: 204068 - RNA, 17 nt, Homo sapiens
agcauugagcaaagggg

SEQ ID NO: 204069 - RNA, 18 nt, Homo sapiens
aaggcccauaucugugaa

SEQ ID NO: 204070 - RNA, 14 nt, Homo sapiens
gaauaugaacggug

SEQ ID NO: 204071 - RNA, 22 nt, Homo sapiens
uaaccgucaauaggcaaagggg

SEQ ID NO: 204072 - RNA, 20 nt, Homo sapiens
ccaccaacagcccucagguc

SEQ ID NO: 204073 - RNA, 17 nt, Homo sapiens
agcacagcacccauggg

SEQ ID NO: 204074 - RNA, 23 nt, Homo sapiens
guuuuuuuuuuccacuuagaaau

SEQ ID NO: 204075 - RNA, 20 nt, Homo sapiens
agucacagagauaauucuag

SEQ ID NO: 204076 - RNA, 13 nt, Homo sapiens
cguccuacuguau

SEQ ID NO: 204077 - RNA, 12 nt, Homo sapiens
aguaugcaaaag

SEQ ID NO: 204078 - RNA, 17 nt, Homo sapiens
acacagcugcagagaca

SEQ ID NO: 204079 - RNA, 14 nt, Homo sapiens
uaacaacuaugauu

SEQ ID NO: 204080 - RNA, 20 nt, Homo sapiens
cccuccuccagaccauucag

SEQ ID NO: 204081 - RNA, 22 nt, Homo sapiens
acccuaugugggugggaccaca

SEQ ID NO: 204082 - RNA, 16 nt, Homo sapiens
ccuagcccuucucuca

SEQ ID NO: 204083 - RNA, 16 nt, Homo sapiens
agggucccucugugua

SEQ ID NO: 204084 - RNA, 18 nt, Homo sapiens
aagggcucacgcauucag

SEQ ID NO: 204085 - RNA, 15 nt, Homo sapiens
uagaguucagacuuu

SEQ ID NO: 204086 - RNA, 14 nt, Homo sapiens
cucagcuucuuaau

SEQ ID NO: 204087 - RNA, 13 nt, Homo sapiens
cagcuaaagcaau

SEQ ID NO: 204088 - RNA, 23 nt, Homo sapiens
cacagugugaaucuuggugucua

SEQ ID NO: 204089 - RNA, 11 nt, Homo sapiens
uacaucuggcc

SEQ ID NO: 204090 - RNA, 17 nt, Homo sapiens
aguugauggugaugaaa

SEQ ID NO: 204091 - RNA, 15 nt, Homo sapiens
aucuccauucucuca

SEQ ID NO: 204092 - RNA, 13 nt, Homo sapiens
uaggucaagaaga

SEQ ID NO: 204093 - RNA, 22 nt, Homo sapiens
cuccucuuucaaccucagugau

SEQ ID NO: 204094 - RNA, 15 nt, Homo sapiens
agguccagcucugga

SEQ ID NO: 204095 - RNA, 21 nt, Homo sapiens
agaacuaagaugaucaucucc

SEQ ID NO: 204096 - RNA, 12 nt, Homo sapiens
ugaaucacagua

SEQ ID NO: 204097 - RNA, 16 nt, Homo sapiens
auauagcaagauccca

SEQ ID NO: 204098 - RNA, 18 nt, Homo sapiens
agaaggagggagacauga

SEQ ID NO: 204099 - RNA, 13 nt, Homo sapiens
uaagauucaucca

SEQ ID NO: 204100 - RNA, 15 nt, Homo sapiens
gaaugccacugccuu

SEQ ID NO: 204101 - RNA, 23 nt, Homo sapiens
cuuuucacugcuggcugccuuag

SEQ ID NO: 204102 - RNA, 22 nt, Homo sapiens
ugcuccgucuaagucaugagcu

SEQ ID NO: 204103 - RNA, 19 nt, Homo sapiens
guauaaugguugacugggu

SEQ ID NO: 204104 - RNA, 20 nt, Homo sapiens
acagagagggggccaccucc

SEQ ID NO: 204105 - RNA, 13 nt, Homo sapiens
auucuaguacuug

SEQ ID NO: 204106 - RNA, 19 nt, Homo sapiens
aaugcagggacaaaugcca

SEQ ID NO: 204107 - RNA, 18 nt, Homo sapiens
cucacuugugcaguguug

SEQ ID NO: 204108 - RNA, 11 nt, Homo sapiens
auaguacuggc

SEQ ID NO: 204109 - RNA, 18 nt, Homo sapiens
ugacccucuccccacugc

SEQ ID NO: 204110 - RNA, 16 nt, Homo sapiens
gaacuuucaccuucau

SEQ ID NO: 204111 - RNA, 16 nt, Homo sapiens
ccauguacaugaagaa

SEQ ID NO: 204112 - RNA, 18 nt, Homo sapiens
cagaucccacuugcagcc

SEQ ID NO: 204113 - RNA, 18 nt, Homo sapiens
agacaggguuuggcugug

SEQ ID NO: 204114 - RNA, 22 nt, Homo sapiens
agcuggaagggucaacaucuuu

SEQ ID NO: 204115 - RNA, 18 nt, Homo sapiens
aaaauagagccugaggga

SEQ ID NO: 204116 - RNA, 15 nt, Homo sapiens
gaauagaugcugacu

SEQ ID NO: 204117 - RNA, 16 nt, Homo sapiens
cuugcuugcaauaggu

SEQ ID NO: 204118 - RNA, 18 nt, Homo sapiens
uacccuuccucaccacuu

SEQ ID NO: 204119 - RNA, 18 nt, Homo sapiens
ucagggcugagaggagaa

SEQ ID NO: 204120 - RNA, 15 nt, Homo sapiens
augaacucuuaauca

SEQ ID NO: 204121 - RNA, 18 nt, Homo sapiens
caggggaguaugcaaaag

SEQ ID NO: 204122 - RNA, 14 nt, Homo sapiens
guucccccacugau

SEQ ID NO: 204123 - RNA, 18 nt, Homo sapiens
accuaguagucauuucau

SEQ ID NO: 204124 - RNA, 18 nt, Homo sapiens
cucacauccucugucuau

SEQ ID NO: 204125 - RNA, 21 nt, Homo sapiens
ugggcagcuguuagaguccaa

SEQ ID NO: 204126 - RNA, 16 nt, Homo sapiens
cuagggccaagcccag

SEQ ID NO: 204127 - RNA, 15 nt, Homo sapiens
cuaaagaagguuuca

SEQ ID NO: 204128 - RNA, 16 nt, Homo sapiens
gcaggggccuggagau

SEQ ID NO: 204129 - RNA, 21 nt, Homo sapiens
ucugaugcaagcaagaaacac

SEQ ID NO: 204130 - RNA, 22 nt, Homo sapiens
aucaaaugugacauuauaugca

SEQ ID NO: 204131 - RNA, 16 nt, Homo sapiens
auuguuaaaauaacua

SEQ ID NO: 204132 - RNA, 12 nt, Homo sapiens
cacacuuugcca

SEQ ID NO: 204133 - RNA, 17 nt, Homo sapiens
aggaugggaaggaggga

SEQ ID NO: 204134 - RNA, 22 nt, Homo sapiens
cauuucuauuucuccuccaugg

SEQ ID NO: 204135 - RNA, 16 nt, Homo sapiens
ugcaaaaggacucuca

SEQ ID NO: 204136 - RNA, 21 nt, Homo sapiens
agacugcccagcuaaagcaau

SEQ ID NO: 204137 - RNA, 12 nt, Homo sapiens
agugcaccacuu

SEQ ID NO: 204138 - RNA, 22 nt, Homo sapiens
gaaggguucaccaggucaggga

SEQ ID NO: 204139 - RNA, 14 nt, Homo sapiens
cuauguaacaugua

SEQ ID NO: 204140 - RNA, 21 nt, Homo sapiens
ucagacuccugugcaacuuuc

SEQ ID NO: 204141 - RNA, 12 nt, Homo sapiens
aggcuagaugau

SEQ ID NO: 204142 - RNA, 18 nt, Homo sapiens
agcaggggaguaugcaaa

SEQ ID NO: 204143 - RNA, 13 nt, Homo sapiens
uucuccuccaugg

SEQ ID NO: 204144 - RNA, 15 nt, Homo sapiens
guuuuguauucucug

SEQ ID NO: 204145 - RNA, 18 nt, Homo sapiens
auccaauggguuuuuccc

SEQ ID NO: 204146 - RNA, 15 nt, Homo sapiens
uagaaggagacagag

SEQ ID NO: 204147 - RNA, 22 nt, Homo sapiens
aaaugcuguauuagucacagag

SEQ ID NO: 204148 - RNA, 19 nt, Homo sapiens
acagccccucuggacacag

SEQ ID NO: 204149 - RNA, 11 nt, Homo sapiens
cggcugaccau

SEQ ID NO: 204150 - RNA, 14 nt, Homo sapiens
ccaacaugugcuca

SEQ ID NO: 204151 - RNA, 17 nt, Homo sapiens
cuaauuagagcagauga

SEQ ID NO: 204152 - RNA, 22 nt, Homo sapiens
aaauuguaucaaaugugacauu

SEQ ID NO: 204153 - RNA, 15 nt, Homo sapiens
guaaauguuuagguu

SEQ ID NO: 204154 - RNA, 10 nt, Homo sapiens
acaugggagc

SEQ ID NO: 204155 - RNA, 12 nt, Homo sapiens
agaaauguacaa

SEQ ID NO: 204156 - RNA, 17 nt, Homo sapiens
ugaacggugagcauugu

SEQ ID NO: 204157 - RNA, 16 nt, Homo sapiens
aucagucauaacuaaa

SEQ ID NO: 204158 - RNA, 23 nt, Homo sapiens
cagacuaugucacccaaugcaua

SEQ ID NO: 204159 - RNA, 16 nt, Homo sapiens
caauccagcuauguua

SEQ ID NO: 204160 - RNA, 19 nt, Homo sapiens
gggcuucuagaaccaggca

SEQ ID NO: 204161 - RNA, 20 nt, Homo sapiens
cuucauaauuucuucacuca

SEQ ID NO: 204162 - RNA, 17 nt, Homo sapiens
acaguaacugccaucaa

SEQ ID NO: 204163 - RNA, 13 nt, Homo sapiens
acagagugcauug

SEQ ID NO: 204164 - RNA, 13 nt, Homo sapiens
guuuuuacuguga

SEQ ID NO: 204165 - RNA, 22 nt, Homo sapiens
ucaacagcauuuucaagcaguu

SEQ ID NO: 204166 - RNA, 22 nt, Homo sapiens
cugugaaaugcuggcauuugca

SEQ ID NO: 204167 - RNA, 17 nt, Homo sapiens
auuuccuuuuccuucaa

SEQ ID NO: 204168 - RNA, 17 nt, Homo sapiens
cagaggcuuaaucacac

SEQ ID NO: 204169 - RNA, 19 nt, Homo sapiens
cuaagaaauaugcacaaua

SEQ ID NO: 204170 - RNA, 17 nt, Homo sapiens
uuacuaucaugucaaac

SEQ ID NO: 204171 - RNA, 20 nt, Homo sapiens
ccaguguguuucugaucuga

SEQ ID NO: 204172 - RNA, 13 nt, Homo sapiens
accauaauguuac

SEQ ID NO: 204173 - RNA, 16 nt, Homo sapiens
aagucauaccaaugaa

SEQ ID NO: 204174 - RNA, 15 nt, Homo sapiens
caggaauauuuucca

SEQ ID NO: 204175 - RNA, 11 nt, Homo sapiens
cuuuacuugac

SEQ ID NO: 204176 - RNA, 15 nt, Homo sapiens
uggcacccaugcacc

SEQ ID NO: 204177 - RNA, 13 nt, Homo sapiens
uuauauucaucca

SEQ ID NO: 204178 - RNA, 16 nt, Homo sapiens
uccucuccacugccuu

SEQ ID NO: 204179 - RNA, 13 nt, Homo sapiens
gggucaacaucuu

SEQ ID NO: 204180 - RNA, 15 nt, Homo sapiens
aucagccacauucua

SEQ ID NO: 204181 - RNA, 19 nt, Homo sapiens
uuucagguuccaaucagaa

SEQ ID NO: 204182 - RNA, 17 nt, Homo sapiens
auaugaaugucaguagu

SEQ ID NO: 204183 - RNA, 21 nt, Homo sapiens
ucagcuggaucuccauucucu

SEQ ID NO: 204184 - RNA, 21 nt, Homo sapiens
caaacagccccucuggacaca

SEQ ID NO: 204185 - RNA, 23 nt, Homo sapiens
ccccagacgcacgugggucuuca

SEQ ID NO: 204186 - RNA, 17 nt, Homo sapiens
gaccauucaggacacag

SEQ ID NO: 204187 - RNA, 14 nt, Homo sapiens
acaugaaaacagaa

SEQ ID NO: 204188 - RNA, 20 nt, Homo sapiens
caugacauauuuuugcuuua

SEQ ID NO: 204189 - RNA, 20 nt, Homo sapiens
gucccggggcuccacugaac

SEQ ID NO: 204190 - RNA, 13 nt, Homo sapiens
gaaaucuaugaaa

SEQ ID NO: 204191 - RNA, 22 nt, Homo sapiens
aagcuuucauguaaacugugca

SEQ ID NO: 204192 - RNA, 20 nt, Homo sapiens
ggucucgcuuuguugcccag

SEQ ID NO: 204193 - RNA, 21 nt, Homo sapiens
cuggagucgggacuaacccag

SEQ ID NO: 204194 - RNA, 22 nt, Homo sapiens
auuaccuugugcuaauccucuu

SEQ ID NO: 204195 - RNA, 20 nt, Homo sapiens
gagagaaucccuagucuuca

SEQ ID NO: 204196 - RNA, 14 nt, Homo sapiens
aaagaaguggggac

SEQ ID NO: 204197 - RNA, 22 nt, Homo sapiens
aaaucacacagccaagccaguc

SEQ ID NO: 204198 - RNA, 13 nt, Homo sapiens
agucacugacccu

SEQ ID NO: 204199 - RNA, 17 nt, Homo sapiens
ucuugaugcaugcacug

SEQ ID NO: 204200 - RNA, 16 nt, Homo sapiens
gauccccucucuuccu

SEQ ID NO: 204201 - RNA, 19 nt, Homo sapiens
ucuccacuucuuguucccc

SEQ ID NO: 204202 - RNA, 13 nt, Homo sapiens
caucauaguacag

SEQ ID NO: 204203 - RNA, 14 nt, Homo sapiens
accauaauguuaca

SEQ ID NO: 204204 - RNA, 11 nt, Homo sapiens
augagcauuua

SEQ ID NO: 204205 - RNA, 13 nt, Homo sapiens
auauaacugccuu

SEQ ID NO: 204206 - RNA, 19 nt, Homo sapiens
cagaaucuguuaccagagg

SEQ ID NO: 204207 - RNA, 12 nt, Homo sapiens
cagggacuugaa

SEQ ID NO: 204208 - RNA, 13 nt, Homo sapiens
auuuuuguuuaua

SEQ ID NO: 204209 - RNA, 14 nt, Homo sapiens
ccuugaugcucaua

SEQ ID NO: 204210 - RNA, 19 nt, Homo sapiens
agaggggguagcuagccug

SEQ ID NO: 204211 - RNA, 21 nt, Homo sapiens
cuuaguuacucauucagggau

SEQ ID NO: 204212 - RNA, 14 nt, Homo sapiens
cacuucucucagga

SEQ ID NO: 204213 - RNA, 18 nt, Homo sapiens
cucugugggcuccaugua

SEQ ID NO: 204214 - RNA, 15 nt, Homo sapiens
uccccacugcucauu

SEQ ID NO: 204215 - RNA, 16 nt, Homo sapiens
auuuacaaagugugua

SEQ ID NO: 204216 - RNA, 19 nt, Homo sapiens
augcccuguaccugugcac

SEQ ID NO: 204217 - RNA, 13 nt, Homo sapiens
aauagccacugca

SEQ ID NO: 204218 - RNA, 22 nt, Homo sapiens
gcuacugacuauggcuaccaaa

SEQ ID NO: 204219 - RNA, 19 nt, Homo sapiens
cuagagaaggacccggagg

SEQ ID NO: 204220 - RNA, 15 nt, Homo sapiens
ugcagcuuauauuca

SEQ ID NO: 204221 - RNA, 14 nt, Homo sapiens
gccugccucuucca

SEQ ID NO: 204222 - RNA, 15 nt, Homo sapiens
aggccucuguggcac

SEQ ID NO: 204223 - RNA, 18 nt, Homo sapiens
acagaagccucacugcaa

SEQ ID NO: 204224 - RNA, 16 nt, Homo sapiens
uauauaacaacaaacu

SEQ ID NO: 204225 - RNA, 11 nt, Homo sapiens
ggaaaucacac

SEQ ID NO: 204226 - RNA, 16 nt, Homo sapiens
aauccuguccucagcu

SEQ ID NO: 204227 - RNA, 18 nt, Homo sapiens
ggcugcccacacacccca

SEQ ID NO: 204228 - RNA, 19 nt, Homo sapiens
gaucacuucaggucaggag

SEQ ID NO: 204229 - RNA, 23 nt, Homo sapiens
gccuguggcgccgucuccagggg

SEQ ID NO: 204230 - RNA, 13 nt, Homo sapiens
gccaaaagccuuu

SEQ ID NO: 204231 - RNA, 15 nt, Homo sapiens
acaggcagcauuuag

SEQ ID NO: 204232 - RNA, 15 nt, Homo sapiens
uuauaaaagaugcau

SEQ ID NO: 204233 - RNA, 22 nt, Homo sapiens
cagucuuccauuugcaagggaa

SEQ ID NO: 204234 - RNA, 19 nt, Homo sapiens
cauaauuuguacauaugua

SEQ ID NO: 204235 - RNA, 23 nt, Homo sapiens
agccaacuuuugcauguuuugua

SEQ ID NO: 204236 - RNA, 13 nt, Homo sapiens
ccgaaaucagaag

SEQ ID NO: 204237 - RNA, 16 nt, Homo sapiens
accuuggacauccucc

SEQ ID NO: 204238 - RNA, 22 nt, Homo sapiens
cuuggcuuacugcagccuuugc

SEQ ID NO: 204239 - RNA, 18 nt, Homo sapiens
uguaucauuaugaaguca

SEQ ID NO: 204240 - RNA, 12 nt, Homo sapiens
agcacuggguug

SEQ ID NO: 204241 - RNA, 15 nt, Homo sapiens
cuccugaagccacag

SEQ ID NO: 204242 - RNA, 15 nt, Homo sapiens
cauugugaggguuaa

SEQ ID NO: 204243 - RNA, 19 nt, Homo sapiens
caugagaucuaggugagga

SEQ ID NO: 204244 - RNA, 17 nt, Homo sapiens
cagacucacauccugac

SEQ ID NO: 204245 - RNA, 19 nt, Homo sapiens
gguggccgcugaguggcag

SEQ ID NO: 204246 - RNA, 17 nt, Homo sapiens
cacaugucaguaccuuc

SEQ ID NO: 204247 - RNA, 23 nt, Homo sapiens
gaaacaacaauuucuacuuugaa

SEQ ID NO: 204248 - RNA, 19 nt, Homo sapiens
cccacacccucccuuaccc

SEQ ID NO: 204249 - RNA, 20 nt, Homo sapiens
aaguugcugaugaacucuua

SEQ ID NO: 204250 - RNA, 14 nt, Homo sapiens
ggagagagacucca

SEQ ID NO: 204251 - RNA, 11 nt, Homo sapiens
cccuuucacaa

SEQ ID NO: 204252 - RNA, 13 nt, Homo sapiens
aauaagcugccuu

SEQ ID NO: 204253 - RNA, 16 nt, Homo sapiens
cuaagagaacaaugug

SEQ ID NO: 204254 - RNA, 20 nt, Homo sapiens
gaauuuucucuaacuucaag

SEQ ID NO: 204255 - RNA, 12 nt, Homo sapiens
augugugauuca

SEQ ID NO: 204256 - RNA, 18 nt, Homo sapiens
auguuagccacaguguau

SEQ ID NO: 204257 - RNA, 13 nt, Homo sapiens
uuaaaaucuguca

SEQ ID NO: 204258 - RNA, 15 nt, Homo sapiens
aggcgauccaccugu

SEQ ID NO: 204259 - RNA, 22 nt, Homo sapiens
ugccugcggaguugugcacgua

SEQ ID NO: 204260 - RNA, 15 nt, Homo sapiens
gcaccacuguguauu

SEQ ID NO: 204261 - RNA, 16 nt, Homo sapiens
cuuguuuuugcacaug

SEQ ID NO: 204262 - RNA, 19 nt, Homo sapiens
ccacuuagaaauugcauuu

SEQ ID NO: 204263 - RNA, 22 nt, Homo sapiens
gaacccuuggagccaauggaga

SEQ ID NO: 204264 - RNA, 15 nt, Homo sapiens
guagcuagccugaga

SEQ ID NO: 204265 - RNA, 14 nt, Homo sapiens
ucccuguaaccucu

SEQ ID NO: 204266 - RNA, 20 nt, Homo sapiens
caaccucgcuggacucucag

SEQ ID NO: 204267 - RNA, 17 nt, Homo sapiens
caagcugggagcacagg

SEQ ID NO: 204268 - RNA, 22 nt, Homo sapiens
uaucugugaaaugcuggcauuu

SEQ ID NO: 204269 - RNA, 17 nt, Homo sapiens
uacugucucuuucauga

SEQ ID NO: 204270 - RNA, 13 nt, Homo sapiens
gaggcacacagcu

SEQ ID NO: 204271 - RNA, 13 nt, Homo sapiens
cauaacaauuccu

SEQ ID NO: 204272 - RNA, 14 nt, Homo sapiens
aucauuccuugaga

SEQ ID NO: 204273 - RNA, 13 nt, Homo sapiens
gcagauccagagg

SEQ ID NO: 204274 - RNA, 21 nt, Homo sapiens
aggucuaggaacauacuucag

SEQ ID NO: 204275 - RNA, 12 nt, Homo sapiens
uugaacuuggaa

SEQ ID NO: 204276 - RNA, 22 nt, Homo sapiens
cugagcagugaaugauucagug

SEQ ID NO: 204277 - RNA, 19 nt, Homo sapiens
ucuauuucuccuccauggg

SEQ ID NO: 204278 - RNA, 13 nt, Homo sapiens
cucuauuaucuca

SEQ ID NO: 204279 - RNA, 20 nt, Homo sapiens
uucucucaccuccuaaagua

SEQ ID NO: 204280 - RNA, 22 nt, Homo sapiens
aagcuaaaauuagaugaacuca

SEQ ID NO: 204281 - RNA, 19 nt, Homo sapiens
agcgaggaggcuccagagg

SEQ ID NO: 204282 - RNA, 20 nt, Homo sapiens
ggccaaggagggcagaucac

SEQ ID NO: 204283 - RNA, 13 nt, Homo sapiens
ccaccugucucag

SEQ ID NO: 204284 - RNA, 19 nt, Homo sapiens
auauugcagcuuauauuca

SEQ ID NO: 204285 - RNA, 17 nt, Homo sapiens
accuaguagucauuuca

SEQ ID NO: 204286 - RNA, 19 nt, Homo sapiens
ugcccagugaccagucacu

SEQ ID NO: 204287 - RNA, 20 nt, Homo sapiens
gacccggaggggccuggcag

SEQ ID NO: 204288 - RNA, 20 nt, Homo sapiens
ucagggagaguuugggaacu

SEQ ID NO: 204289 - RNA, 15 nt, Homo sapiens
ugcuggcauuugcac

SEQ ID NO: 204290 - RNA, 19 nt, Homo sapiens
gacuuccauuugcuuuguc

SEQ ID NO: 204291 - RNA, 12 nt, Homo sapiens
agaauggagcug

SEQ ID NO: 204292 - RNA, 22 nt, Homo sapiens
ugaccaggcauccuccacaaua

SEQ ID NO: 204293 - RNA, 23 nt, Homo sapiens
cuguggugugucccccucugucc

SEQ ID NO: 204294 - RNA, 21 nt, Homo sapiens
accugugcacguuggaacuuu

SEQ ID NO: 204295 - RNA, 17 nt, Homo sapiens
uguugacauccaagcuu

SEQ ID NO: 204296 - RNA, 21 nt, Homo sapiens
auaugcacaauagcaguugaa

SEQ ID NO: 204297 - RNA, 19 nt, Homo sapiens
acacccagucuguucccca

SEQ ID NO: 204298 - RNA, 12 nt, Homo sapiens
gcaccuaccuca

SEQ ID NO: 204299 - RNA, 13 nt, Homo sapiens
cuuagcauguccc

SEQ ID NO: 204300 - RNA, 14 nt, Homo sapiens
aggguuacaaaucu

SEQ ID NO: 204301 - RNA, 21 nt, Homo sapiens
aggacuuccauuugcuuuguc

SEQ ID NO: 204302 - RNA, 13 nt, Homo sapiens
cugaugcaagcaa

SEQ ID NO: 204303 - RNA, 17 nt, Homo sapiens
ucuacaauuugccauug

SEQ ID NO: 204304 - RNA, 15 nt, Homo sapiens
auccacuucucucag

SEQ ID NO: 204305 - RNA, 24 nt, Homo sapiens
uggagguauucaauauccuuugcc

SEQ ID NO: 204306 - RNA, 14 nt, Homo sapiens
cccuguaugauucc

SEQ ID NO: 204307 - RNA, 23 nt, Homo sapiens
cauuugcuuacuuugcauuugug

SEQ ID NO: 204308 - RNA, 16 nt, Homo sapiens
cuggugacccagucag

SEQ ID NO: 204309 - RNA, 15 nt, Homo sapiens
cuccccuucacaugc

SEQ ID NO: 204310 - RNA, 16 nt, Homo sapiens
cuguaugauuccuuga

SEQ ID NO: 204311 - RNA, 22 nt, Homo sapiens
caucaagaugagagaacuggag

SEQ ID NO: 204312 - RNA, 23 nt, Homo sapiens
gggauaaguaaguuugauuucau

SEQ ID NO: 204313 - RNA, 16 nt, Homo sapiens
cuugcugcugagugca

SEQ ID NO: 204314 - RNA, 13 nt, Homo sapiens
gagauauuuacau

SEQ ID NO: 204315 - RNA, 20 nt, Homo sapiens
uaaagaaauauauaugauau

SEQ ID NO: 204316 - RNA, 14 nt, Homo sapiens
cuucuaaucaaagc

SEQ ID NO: 204317 - RNA, 21 nt, Homo sapiens
ccacaauagcagacaguguuu

SEQ ID NO: 204318 - RNA, 20 nt, Homo sapiens
uuaaucacaccguccuccac

SEQ ID NO: 204319 - RNA, 13 nt, Homo sapiens
ucaaauagcauaa

SEQ ID NO: 204320 - RNA, 15 nt, Homo sapiens
cuaugauaugcuaau

SEQ ID NO: 204321 - RNA, 20 nt, Homo sapiens
caacuugggaacuagacucc

SEQ ID NO: 204322 - RNA, 18 nt, Homo sapiens
gauuggcaggaguuggaa

SEQ ID NO: 204323 - RNA, 15 nt, Homo sapiens
gaaucucugugccuu

SEQ ID NO: 204324 - RNA, 22 nt, Homo sapiens
gaguguuccccuuccacugagg

SEQ ID NO: 204325 - RNA, 17 nt, Homo sapiens
uucuagguaggggccca

SEQ ID NO: 204326 - RNA, 22 nt, Homo sapiens
gucaacccaauaguuguugauu

SEQ ID NO: 204327 - RNA, 22 nt, Homo sapiens
agugauaucccccagccucaag

SEQ ID NO: 204328 - RNA, 19 nt, Homo sapiens
cugcugagugcaccacuuc

SEQ ID NO: 204329 - RNA, 23 nt, Homo sapiens
uauaaagauacagaacucuuuca

SEQ ID NO: 204330 - RNA, 22 nt, Homo sapiens
accaugagaccacuguuaucaa

SEQ ID NO: 204331 - RNA, 18 nt, Homo sapiens
gcccaucaauuauagaaa

SEQ ID NO: 204332 - RNA, 15 nt, Homo sapiens
aaauuguauuaucaa

SEQ ID NO: 204333 - RNA, 12 nt, Homo sapiens
aaugugauugca

SEQ ID NO: 204334 - RNA, 17 nt, Homo sapiens
ccagaaagcucaucuca

SEQ ID NO: 204335 - RNA, 22 nt, Homo sapiens
guuuccugccugcggaccagau

SEQ ID NO: 204336 - RNA, 12 nt, Homo sapiens
ugaaaaaugccu

SEQ ID NO: 204337 - RNA, 16 nt, Homo sapiens
cacugcugccucuuga

SEQ ID NO: 204338 - RNA, 15 nt, Homo sapiens
aaagagcacuuaaga

SEQ ID NO: 204339 - RNA, 12 nt, Homo sapiens
auccacauggga

SEQ ID NO: 204340 - RNA, 16 nt, Homo sapiens
acccugggaccacaga

SEQ ID NO: 204341 - RNA, 16 nt, Homo sapiens
aacaugugcucaggga

SEQ ID NO: 204342 - RNA, 16 nt, Homo sapiens
cccaaguuccacugcu

SEQ ID NO: 204343 - RNA, 22 nt, Homo sapiens
uauguucaacuggagacacuau

SEQ ID NO: 204344 - RNA, 19 nt, Homo sapiens
ccauagcaagauugcuuaa

SEQ ID NO: 204345 - RNA, 16 nt, Homo sapiens
uucacaucuaaccuca

SEQ ID NO: 204346 - RNA, 13 nt, Homo sapiens
cugccagggccag

SEQ ID NO: 204347 - RNA, 19 nt, Homo sapiens
ucucugagcagugaaugau

SEQ ID NO: 204348 - RNA, 19 nt, Homo sapiens
caaacagccccucuggaca

SEQ ID NO: 204349 - RNA, 14 nt, Homo sapiens
aggaaggaugagca

SEQ ID NO: 204350 - RNA, 14 nt, Homo sapiens
aagucaaagacauu

SEQ ID NO: 204351 - RNA, 14 nt, Homo sapiens
uauuugcauaacaa

SEQ ID NO: 204352 - RNA, 18 nt, Homo sapiens
agguugucugaagucacu

SEQ ID NO: 204353 - RNA, 21 nt, Homo sapiens
aguagacuucauuuuuccuaa

SEQ ID NO: 204354 - RNA, 16 nt, Homo sapiens
gccacuauuacuggga

SEQ ID NO: 204355 - RNA, 23 nt, Homo sapiens
uggaaccaacacuaacauauaau

SEQ ID NO: 204356 - RNA, 19 nt, Homo sapiens
cugggacugugcucagaga

SEQ ID NO: 204357 - RNA, 20 nt, Homo sapiens
caacuuuuuaccuaguacaa

SEQ ID NO: 204358 - RNA, 17 nt, Homo sapiens
cuuuuacugaagccuuu

SEQ ID NO: 204359 - RNA, 15 nt, Homo sapiens
accaucauaguacag

SEQ ID NO: 204360 - RNA, 16 nt, Homo sapiens
caggggaguaugcaaa

SEQ ID NO: 204361 - RNA, 18 nt, Homo sapiens
accccuccccuaaugccu

SEQ ID NO: 204362 - RNA, 16 nt, Homo sapiens
agcauuuagcacauac

SEQ ID NO: 204363 - RNA, 14 nt, Homo sapiens
cagaacucuuucaa

SEQ ID NO: 204364 - RNA, 20 nt, Homo sapiens
auaugaugaucuggauccac

SEQ ID NO: 204365 - RNA, 21 nt, Homo sapiens
cugccuucaccuccucuuuca

SEQ ID NO: 204366 - RNA, 18 nt, Homo sapiens
uaauuuuuuuaaccaaag

SEQ ID NO: 204367 - RNA, 14 nt, Homo sapiens
ggagaacuagagaa

SEQ ID NO: 204368 - RNA, 17 nt, Homo sapiens
aacuaagaaauaugcac

SEQ ID NO: 204369 - RNA, 19 nt, Homo sapiens
ugcaagcaagaaacacugg

SEQ ID NO: 204370 - RNA, 16 nt, Homo sapiens
acaauauugacuuugu

SEQ ID NO: 204371 - RNA, 14 nt, Homo sapiens
ucuuucccaauuca

SEQ ID NO: 204372 - RNA, 22 nt, Homo sapiens
ccuuagauguucuaagucuuuc

SEQ ID NO: 204373 - RNA, 15 nt, Homo sapiens
uaagcaaagacuuuc

SEQ ID NO: 204374 - RNA, 19 nt, Homo sapiens
gccuccucuacaauuugcc

SEQ ID NO: 204375 - RNA, 23 nt, Homo sapiens
uuuucaauguuagccacagugua

SEQ ID NO: 204376 - RNA, 16 nt, Homo sapiens
gaagcuuccuuggcuu

SEQ ID NO: 204377 - RNA, 14 nt, Homo sapiens
aaauuaugccauag

SEQ ID NO: 204378 - RNA, 16 nt, Homo sapiens
uuuguaucauuaugaa

SEQ ID NO: 204379 - RNA, 22 nt, Homo sapiens
uauuacaguuuaucuauggcac

SEQ ID NO: 204380 - RNA, 18 nt, Homo sapiens
guuaauaaguuucacuga

SEQ ID NO: 204381 - RNA, 22 nt, Homo sapiens
gcugccucuugaaugcagggac

SEQ ID NO: 204382 - RNA, 12 nt, Homo sapiens
uaaauacuguuu

SEQ ID NO: 204383 - RNA, 12 nt, Homo sapiens
ugucaaugucuu

SEQ ID NO: 204384 - RNA, 19 nt, Homo sapiens
guuauuuaugccucuguau

SEQ ID NO: 204385 - RNA, 21 nt, Homo sapiens
uuaaaucaacgaguacuucaa

SEQ ID NO: 204386 - RNA, 14 nt, Homo sapiens
uauaucgaucucuu

SEQ ID NO: 204387 - RNA, 16 nt, Homo sapiens
gcauaaguuucuggga

SEQ ID NO: 204388 - RNA, 20 nt, Homo sapiens
caagucuuuacagaaucaaa

SEQ ID NO: 204389 - RNA, 22 nt, Homo sapiens
aaugugaaaaugguccaggaga

SEQ ID NO: 204390 - RNA, 21 nt, Homo sapiens
acauggcuaaagaagguuuca

SEQ ID NO: 204391 - RNA, 17 nt, Homo sapiens
cccugucuaaaaauuca

SEQ ID NO: 204392 - RNA, 19 nt, Homo sapiens
uuuugcuggucacugccau

SEQ ID NO: 204393 - RNA, 19 nt, Homo sapiens
guuguggagagugcaacag

SEQ ID NO: 204394 - RNA, 23 nt, Homo sapiens
ugcugcugagugcaccacuucaa

SEQ ID NO: 204395 - RNA, 21 nt, Homo sapiens
ucugcauuaucugaggucaca

SEQ ID NO: 204396 - RNA, 22 nt, Homo sapiens
gccauuuuggguuuugggucuu

SEQ ID NO: 204397 - RNA, 18 nt, Homo sapiens
agacaugagcauggcuga

SEQ ID NO: 204398 - RNA, 17 nt, Homo sapiens
aucgcaguguucaaggc

SEQ ID NO: 204399 - RNA, 22 nt, Homo sapiens
acgccauuuccuuuuccuucaa

SEQ ID NO: 204400 - RNA, 16 nt, Homo sapiens
uaccaaaauuauuuca

SEQ ID NO: 204401 - RNA, 16 nt, Homo sapiens
ucccuccccugccauu

SEQ ID NO: 204402 - RNA, 12 nt, Homo sapiens
uuuuauauguca

SEQ ID NO: 204403 - RNA, 20 nt, Homo sapiens
aagcagucgugccugugucc

SEQ ID NO: 204404 - RNA, 22 nt, Homo sapiens
aguaaguuugauuucauuaaua

SEQ ID NO: 204405 - RNA, 18 nt, Homo sapiens
cauuauuucucucugacc

SEQ ID NO: 204406 - RNA, 18 nt, Homo sapiens
cugccagggccagucuug

SEQ ID NO: 204407 - RNA, 20 nt, Homo sapiens
ggagagcuggggaagcuucu

SEQ ID NO: 204408 - RNA, 19 nt, Homo sapiens
accaugagaccacuguuau

SEQ ID NO: 204409 - RNA, 14 nt, Homo sapiens
uuaccuaguacaag

SEQ ID NO: 204410 - RNA, 19 nt, Homo sapiens
uauguaccauguacaugaa

SEQ ID NO: 204411 - RNA, 19 nt, Homo sapiens
uaaaauauagcuguacaaa

SEQ ID NO: 204412 - RNA, 23 nt, Homo sapiens
augguggagggccacaugggagg

SEQ ID NO: 204413 - RNA, 17 nt, Homo sapiens
cuagaugauugauuacc

SEQ ID NO: 204414 - RNA, 21 nt, Homo sapiens
aucccaugauguagugccucu

SEQ ID NO: 204415 - RNA, 19 nt, Homo sapiens
cagaccauucaggacacag

SEQ ID NO: 204416 - RNA, 13 nt, Homo sapiens
aaucaaauagcau

SEQ ID NO: 204417 - RNA, 16 nt, Homo sapiens
aucgcugucaucucag

SEQ ID NO: 204418 - RNA, 18 nt, Homo sapiens
aaucaggaauauuuucca

SEQ ID NO: 204419 - RNA, 13 nt, Homo sapiens
cagaaggacucag

SEQ ID NO: 204420 - RNA, 13 nt, Homo sapiens
cgugggcucccug

SEQ ID NO: 204421 - RNA, 20 nt, Homo sapiens
ugcccaggcuggaguggagu

SEQ ID NO: 204422 - RNA, 23 nt, Homo sapiens
guauguuugggagacugcugagu

SEQ ID NO: 204423 - RNA, 23 nt, Homo sapiens
augucaaagcaggggaguaugca

SEQ ID NO: 204424 - RNA, 15 nt, Homo sapiens
auguugaugaaaaau

SEQ ID NO: 204425 - RNA, 14 nt, Homo sapiens
ccuucuguggcuca

SEQ ID NO: 204426 - RNA, 16 nt, Homo sapiens
uuacuaucaugucaaa

SEQ ID NO: 204427 - RNA, 15 nt, Homo sapiens
aaucagccacauucu

SEQ ID NO: 204428 - RNA, 14 nt, Homo sapiens
uaccugacacuccc

SEQ ID NO: 204429 - RNA, 18 nt, Homo sapiens
gaugucguuugaaucaca

SEQ ID NO: 204430 - RNA, 16 nt, Homo sapiens
caugcauaaaugcgau

SEQ ID NO: 204431 - RNA, 15 nt, Homo sapiens
acuugcacaaaauca

SEQ ID NO: 204432 - RNA, 11 nt, Homo sapiens
cuuuguugccc

SEQ ID NO: 204433 - RNA, 18 nt, Homo sapiens
aaucacacagccaagcca

SEQ ID NO: 204434 - RNA, 20 nt, Homo sapiens
aauccaugaaccaagaccau

SEQ ID NO: 204435 - RNA, 17 nt, Homo sapiens
ugcucuuaaguugugga

SEQ ID NO: 204436 - RNA, 21 nt, Homo sapiens
agucaaccugccugacauuug

SEQ ID NO: 204437 - RNA, 23 nt, Homo sapiens
aucucagcuccugaaaaaugccu

SEQ ID NO: 204438 - RNA, 17 nt, Homo sapiens
gacuucauuuuuccuaa

SEQ ID NO: 204439 - RNA, 20 nt, Homo sapiens
ugguccuuagccccaucugc

SEQ ID NO: 204440 - RNA, 17 nt, Homo sapiens
auuaccgcguuguaaaa

SEQ ID NO: 204441 - RNA, 10 nt, Homo sapiens
ggacuauuau

SEQ ID NO: 204442 - RNA, 15 nt, Homo sapiens
uuuuggagguauuca

SEQ ID NO: 204443 - RNA, 15 nt, Homo sapiens
uucuguguugccaag

SEQ ID NO: 204444 - RNA, 18 nt, Homo sapiens
cucauuaccuugugcuaa

SEQ ID NO: 204445 - RNA, 14 nt, Homo sapiens
guucagggucauag

SEQ ID NO: 204446 - RNA, 17 nt, Homo sapiens
cucucacuauaccagua

SEQ ID NO: 204447 - RNA, 20 nt, Homo sapiens
cagccaagccagucaaggau

SEQ ID NO: 204448 - RNA, 18 nt, Homo sapiens
uuuugcuggucacugcca

SEQ ID NO: 204449 - RNA, 17 nt, Homo sapiens
cucuuguauaugaugau

SEQ ID NO: 204450 - RNA, 16 nt, Homo sapiens
guggggcagcacagag

SEQ ID NO: 204451 - RNA, 13 nt, Homo sapiens
aaagcucaucuca

SEQ ID NO: 204452 - RNA, 16 nt, Homo sapiens
aauauaacugccuuaa

SEQ ID NO: 204453 - RNA, 18 nt, Homo sapiens
ugggaacuagacucccaa

SEQ ID NO: 204454 - RNA, 18 nt, Homo sapiens
uguaucaaaugugacauu

SEQ ID NO: 204455 - RNA, 13 nt, Homo sapiens
gggcagcacagag

SEQ ID NO: 204456 - RNA, 22 nt, Homo sapiens
aaaaucacacagccaagccagu

SEQ ID NO: 204457 - RNA, 13 nt, Homo sapiens
ugagggucagaga

SEQ ID NO: 204458 - RNA, 20 nt, Homo sapiens
cacauccugaccuugcacaa

SEQ ID NO: 204459 - RNA, 23 nt, Homo sapiens
cagagugagacccagcccucauc

SEQ ID NO: 204460 - RNA, 22 nt, Homo sapiens
ucauaugauugugcacauacuu

SEQ ID NO: 204461 - RNA, 15 nt, Homo sapiens
ucgggacuaacccag

SEQ ID NO: 204462 - RNA, 20 nt, Homo sapiens
uacgcuccaucgcugucauc

SEQ ID NO: 204463 - RNA, 17 nt, Homo sapiens
ucauuuucugcauuuaa

SEQ ID NO: 204464 - RNA, 17 nt, Homo sapiens
agucagaguugugcaca

SEQ ID NO: 204465 - RNA, 14 nt, Homo sapiens
agaacuugaccccc

SEQ ID NO: 204466 - RNA, 16 nt, Homo sapiens
gaaccaggcaacuugg

SEQ ID NO: 204467 - RNA, 22 nt, Homo sapiens
ccuucaugaucaucacaaucau

SEQ ID NO: 204468 - RNA, 17 nt, Homo sapiens
acuuguuuuugcacaug

SEQ ID NO: 204469 - RNA, 12 nt, Homo sapiens
aguugugcacau

SEQ ID NO: 204470 - RNA, 23 nt, Homo sapiens
aguguuccccuuccacugagggc

SEQ ID NO: 204471 - RNA, 20 nt, Homo sapiens
agagcgcaagcugggagcac

SEQ ID NO: 204472 - RNA, 20 nt, Homo sapiens
aaucacacagccaagccagu

SEQ ID NO: 204473 - RNA, 11 nt, Homo sapiens
ccuaguacaag

SEQ ID NO: 204474 - RNA, 20 nt, Homo sapiens
uugggggauggcuaaaacca

SEQ ID NO: 204475 - RNA, 15 nt, Homo sapiens
gaugcagauccagag

SEQ ID NO: 204476 - RNA, 18 nt, Homo sapiens
agggaaaauuauuugcau

SEQ ID NO: 204477 - RNA, 18 nt, Homo sapiens
cauaauguuacauuauua

SEQ ID NO: 204478 - RNA, 17 nt, Homo sapiens
agacaggacccugggac

SEQ ID NO: 204479 - RNA, 17 nt, Homo sapiens
agccucugaauaugaac

SEQ ID NO: 204480 - RNA, 18 nt, Homo sapiens
guauaaugguugacuggg

SEQ ID NO: 204481 - RNA, 16 nt, Homo sapiens
ucauaugauugugcac

SEQ ID NO: 204482 - RNA, 20 nt, Homo sapiens
uccccuggggagucugggca

SEQ ID NO: 204483 - RNA, 17 nt, Homo sapiens
uucuccuccugucuuua

SEQ ID NO: 204484 - RNA, 15 nt, Homo sapiens
ugucccaaguuccac

SEQ ID NO: 204485 - RNA, 16 nt, Homo sapiens
cuuguuuuaugcucag

SEQ ID NO: 204486 - RNA, 13 nt, Homo sapiens
ugggcuucuagaa

SEQ ID NO: 204487 - RNA, 17 nt, Homo sapiens
aggaucuuuugaaccca

SEQ ID NO: 204488 - RNA, 17 nt, Homo sapiens
gaaccagagcucagaga

SEQ ID NO: 204489 - RNA, 23 nt, Homo sapiens
uugacaaacucucccuucacucc

SEQ ID NO: 204490 - RNA, 14 nt, Homo sapiens
ccaaucauuuuaau

SEQ ID NO: 204491 - RNA, 21 nt, Homo sapiens
cacacgucuggcuucacagau

SEQ ID NO: 204492 - RNA, 14 nt, Homo sapiens
ugcacuuacuugcu

SEQ ID NO: 204493 - RNA, 14 nt, Homo sapiens
auccacaugggagc

SEQ ID NO: 204494 - RNA, 12 nt, Homo sapiens
aggacaaagccu

SEQ ID NO: 204495 - RNA, 14 nt, Homo sapiens
acaguguugcccag

SEQ ID NO: 204496 - RNA, 14 nt, Homo sapiens
caagggaugucuca

SEQ ID NO: 204497 - RNA, 15 nt, Homo sapiens
cuccuguucgccucc

SEQ ID NO: 204498 - RNA, 16 nt, Homo sapiens
cauuuagcacauacua

SEQ ID NO: 204499 - RNA, 18 nt, Homo sapiens
ucaauauccuuugccuca

SEQ ID NO: 204500 - RNA, 14 nt, Homo sapiens
uuugucucauccca

SEQ ID NO: 204501 - RNA, 21 nt, Homo sapiens
ccucuggucgcuccugcccac

SEQ ID NO: 204502 - RNA, 15 nt, Homo sapiens
ccucgcuggacucuc

SEQ ID NO: 204503 - RNA, 16 nt, Homo sapiens
uggggaagcuucuuaa

SEQ ID NO: 204504 - RNA, 22 nt, Homo sapiens
auuuaguuugauuauucagugu

SEQ ID NO: 204505 - RNA, 17 nt, Homo sapiens
caugguggguccauggg

SEQ ID NO: 204506 - RNA, 13 nt, Homo sapiens
ccucuuucaucca

SEQ ID NO: 204507 - RNA, 18 nt, Homo sapiens
cuuuacuguuagucauuu

SEQ ID NO: 204508 - RNA, 17 nt, Homo sapiens
gagccgggucugccucu

SEQ ID NO: 204509 - RNA, 18 nt, Homo sapiens
acagccccucuggacaca

SEQ ID NO: 204510 - RNA, 23 nt, Homo sapiens
ugguuccggaauccuguccucag

SEQ ID NO: 204511 - RNA, 22 nt, Homo sapiens
uccucauuuuugaauacaggca

SEQ ID NO: 204512 - RNA, 22 nt, Homo sapiens
ugcauaaaugcgauccacagaa

SEQ ID NO: 204513 - RNA, 15 nt, Homo sapiens
agguaaggugaggga

SEQ ID NO: 204514 - RNA, 12 nt, Homo sapiens
ucucugcucugc

SEQ ID NO: 204515 - RNA, 22 nt, Homo sapiens
gaagcucccugaaguaagcaaa

SEQ ID NO: 204516 - RNA, 16 nt, Homo sapiens
cuguaccugugcacgu

SEQ ID NO: 204517 - RNA, 15 nt, Homo sapiens
auaugauugugcaca

SEQ ID NO: 204518 - RNA, 20 nt, Homo sapiens
ucucaggaccaaagcuuuca

SEQ ID NO: 204519 - RNA, 16 nt, Homo sapiens
cguuucugguggucug

SEQ ID NO: 204520 - RNA, 13 nt, Homo sapiens
cuuuuacauucug

SEQ ID NO: 204521 - RNA, 12 nt, Homo sapiens
augauuaguaaa

SEQ ID NO: 204522 - RNA, 21 nt, Homo sapiens
aggagggucaggaaggaugag

SEQ ID NO: 204523 - RNA, 16 nt, Homo sapiens
ucucaaacuacuggca

SEQ ID NO: 204524 - RNA, 14 nt, Homo sapiens
ucagaguugugcac

SEQ ID NO: 204525 - RNA, 13 nt, Homo sapiens
cugggaccacaga

SEQ ID NO: 204526 - RNA, 13 nt, Homo sapiens
cccgcaaugugcc

SEQ ID NO: 204527 - RNA, 18 nt, Homo sapiens
guuggccugcacuggugu

SEQ ID NO: 204528 - RNA, 18 nt, Homo sapiens
guaagcaaagacuuuccu

SEQ ID NO: 204529 - RNA, 19 nt, Homo sapiens
guauccccccaucuugcuu

SEQ ID NO: 204530 - RNA, 21 nt, Homo sapiens
cuaugugcaugcagcaucuaa

SEQ ID NO: 204531 - RNA, 23 nt, Homo sapiens
auuucagguuuuguaaagaugcc

SEQ ID NO: 204532 - RNA, 16 nt, Homo sapiens
gacuuagaaaaauccu

SEQ ID NO: 204533 - RNA, 23 nt, Homo sapiens
uauaacuacuccggagacagggu

SEQ ID NO: 204534 - RNA, 19 nt, Homo sapiens
cagauacugucucuuucau

SEQ ID NO: 204535 - RNA, 12 nt, Homo sapiens
ugcuuguucccu

SEQ ID NO: 204536 - RNA, 17 nt, Homo sapiens
caaaggugauugugcca

SEQ ID NO: 204537 - RNA, 13 nt, Homo sapiens
cuguuaccagagg

SEQ ID NO: 204538 - RNA, 17 nt, Homo sapiens
aagguuuuuacugugag

SEQ ID NO: 204539 - RNA, 17 nt, Homo sapiens
caugcccuguaccugug

SEQ ID NO: 204540 - RNA, 13 nt, Homo sapiens
aauguauugaacu

SEQ ID NO: 204541 - RNA, 20 nt, Homo sapiens
uucaucagacuccugugcaa

SEQ ID NO: 204542 - RNA, 19 nt, Homo sapiens
gauacugcgacuuucugcc

SEQ ID NO: 204543 - RNA, 19 nt, Homo sapiens
uaugauugugcacauacuu

SEQ ID NO: 204544 - RNA, 12 nt, Homo sapiens
aauccaugaacc

SEQ ID NO: 204545 - RNA, 16 nt, Homo sapiens
caaaaucacacagcca

SEQ ID NO: 204546 - RNA, 12 nt, Homo sapiens
ccuggcuggcau

SEQ ID NO: 204547 - RNA, 18 nt, Homo sapiens
gaggccaggcagauccca

SEQ ID NO: 204548 - RNA, 18 nt, Homo sapiens
aaggauggagccagcucu

SEQ ID NO: 204549 - RNA, 23 nt, Homo sapiens
ugaauacacgagguaugaggucu

SEQ ID NO: 204550 - RNA, 20 nt, Homo sapiens
aaugcauauccaacaugugc

SEQ ID NO: 204551 - RNA, 14 nt, Homo sapiens
acauacuucagcuc

SEQ ID NO: 204552 - RNA, 14 nt, Homo sapiens
cuucuccacuggau

SEQ ID NO: 204553 - RNA, 16 nt, Homo sapiens
uguucccccugugcag

SEQ ID NO: 204554 - RNA, 20 nt, Homo sapiens
aacuggaggaguuccuugau

SEQ ID NO: 204555 - RNA, 13 nt, Homo sapiens
agaaacacugggc

SEQ ID NO: 204556 - RNA, 16 nt, Homo sapiens
ccuuugaaaugaauau

SEQ ID NO: 204557 - RNA, 20 nt, Homo sapiens
acaggacccugggaccacag

SEQ ID NO: 204558 - RNA, 19 nt, Homo sapiens
ccgcaaaagacaagucuuu

SEQ ID NO: 204559 - RNA, 18 nt, Homo sapiens
caucagacuccugugcaa

SEQ ID NO: 204560 - RNA, 20 nt, Homo sapiens
uuugcaagggaaaagucucu

SEQ ID NO: 204561 - RNA, 14 nt, Homo sapiens
auggugaugaaaug

SEQ ID NO: 204562 - RNA, 18 nt, Homo sapiens
uuucaaauuggagcuuca

SEQ ID NO: 204563 - RNA, 10 nt, Homo sapiens
acaugaauau

SEQ ID NO: 204564 - RNA, 14 nt, Homo sapiens
uuauaauauacuau

SEQ ID NO: 204565 - RNA, 15 nt, Homo sapiens
uccaacaugugcuca

SEQ ID NO: 204566 - RNA, 22 nt, Homo sapiens
augcacuguucccccugugcag

SEQ ID NO: 204567 - RNA, 18 nt, Homo sapiens
gaauguuugucucauccc

SEQ ID NO: 204568 - RNA, 17 nt, Homo sapiens
cuaacuucaaggcccau

SEQ ID NO: 204569 - RNA, 18 nt, Homo sapiens
ucaaaugugacauuauau

SEQ ID NO: 204570 - RNA, 15 nt, Homo sapiens
agcccuuuacuugac

SEQ ID NO: 204571 - RNA, 17 nt, Homo sapiens
cagucagaguugugcac

SEQ ID NO: 204572 - RNA, 20 nt, Homo sapiens
auauauauuuuugugcacau

SEQ ID NO: 204573 - RNA, 13 nt, Homo sapiens
cuuuagucugcaa

SEQ ID NO: 204574 - RNA, 14 nt, Homo sapiens
uacagaacucuuuc

SEQ ID NO: 204575 - RNA, 12 nt, Homo sapiens
agugauggagcu

SEQ ID NO: 204576 - RNA, 21 nt, Homo sapiens
ugcaucuguauaaguaagaaa

SEQ ID NO: 204577 - RNA, 13 nt, Homo sapiens
gagaacuacucag

SEQ ID NO: 204578 - RNA, 24 nt, Homo sapiens
ggucuaggaacauacuucagcuca

SEQ ID NO: 204579 - RNA, 18 nt, Homo sapiens
uuggcaggcuggccaguc

SEQ ID NO: 204580 - RNA, 19 nt, Homo sapiens
uaguaaagugauaauuucu

SEQ ID NO: 204581 - RNA, 20 nt, Homo sapiens
uguguacuuuuggguucaca

SEQ ID NO: 204582 - RNA, 23 nt, Homo sapiens
aaccucagugauuggcucugugg

SEQ ID NO: 204583 - RNA, 15 nt, Homo sapiens
caugaggaccaggug

SEQ ID NO: 204584 - RNA, 12 nt, Homo sapiens
cuacucagggaa

SEQ ID NO: 204585 - RNA, 23 nt, Homo sapiens
ggcagugacagaacuaagaugau

SEQ ID NO: 204586 - RNA, 18 nt, Homo sapiens
gcauagaguucagacuuu

SEQ ID NO: 204587 - RNA, 14 nt, Homo sapiens
uaauguacaucugg

SEQ ID NO: 204588 - RNA, 13 nt, Homo sapiens
cagaguugugcac

SEQ ID NO: 204589 - RNA, 21 nt, Homo sapiens
uaauaagcaaagggagcacug

SEQ ID NO: 204590 - RNA, 13 nt, Homo sapiens
gcuccacugaaca

SEQ ID NO: 204591 - RNA, 15 nt, Homo sapiens
ucucacuauaccagu

SEQ ID NO: 204592 - RNA, 18 nt, Homo sapiens
caauuauagaaagccaaa

SEQ ID NO: 204593 - RNA, 15 nt, Homo sapiens
gcucgagcaguccug

SEQ ID NO: 204594 - RNA, 21 nt, Homo sapiens
uuauacuucucuauuaucuca

SEQ ID NO: 204595 - RNA, 20 nt, Homo sapiens
aucuugcuucugcuucucau

SEQ ID NO: 204596 - RNA, 23 nt, Homo sapiens
uuuauaaagggagauaacaaucu

SEQ ID NO: 204597 - RNA, 18 nt, Homo sapiens
ugggcauucuuguuucaa

SEQ ID NO: 204598 - RNA, 18 nt, Homo sapiens
aggucuaggaacauacuu

SEQ ID NO: 204599 - RNA, 20 nt, Homo sapiens
caagcuuggcuguagaagga

SEQ ID NO: 204600 - RNA, 13 nt, Homo sapiens
aaaucauagcugg

SEQ ID NO: 204601 - RNA, 20 nt, Homo sapiens
uaaauauauauaaaccuaaa

SEQ ID NO: 204602 - RNA, 14 nt, Homo sapiens
uaaauguacauuaa

SEQ ID NO: 204603 - RNA, 15 nt, Homo sapiens
uuucucuguauagua

SEQ ID NO: 204604 - RNA, 16 nt, Homo sapiens
auucauuucaaaggga

SEQ ID NO: 204605 - RNA, 15 nt, Homo sapiens
acugacuuucucagc

SEQ ID NO: 204606 - RNA, 18 nt, Homo sapiens
cuugcaguuaaggguuag

SEQ ID NO: 204607 - RNA, 18 nt, Homo sapiens
acuucaguauguugucaa

SEQ ID NO: 204608 - RNA, 14 nt, Homo sapiens
caauguuagccaca

SEQ ID NO: 204609 - RNA, 13 nt, Homo sapiens
cuaugaaauauca

SEQ ID NO: 204610 - RNA, 16 nt, Homo sapiens
augauccuaaugaaug

SEQ ID NO: 204611 - RNA, 16 nt, Homo sapiens
cacagguucaugccac

SEQ ID NO: 204612 - RNA, 18 nt, Homo sapiens
ccagaggcuuaaucacac

SEQ ID NO: 204613 - RNA, 14 nt, Homo sapiens
acccugggaccaca

SEQ ID NO: 204614 - RNA, 23 nt, Homo sapiens
guuucuggcagccaguaccuccu

SEQ ID NO: 204615 - RNA, 11 nt, Homo sapiens
caaagacagaa

SEQ ID NO: 204616 - RNA, 21 nt, Homo sapiens
ugauauauaaaugugauugca

SEQ ID NO: 204617 - RNA, 17 nt, Homo sapiens
aauugugaucagaccau

SEQ ID NO: 204618 - RNA, 20 nt, Homo sapiens
uccuaacaaguagcacccug

SEQ ID NO: 204619 - RNA, 23 nt, Homo sapiens
ggugcuacacccuuuuccagcug

SEQ ID NO: 204620 - RNA, 22 nt, Homo sapiens
auccccuaagcagaccacugau

SEQ ID NO: 204621 - RNA, 18 nt, Homo sapiens
uguggggugggcacauug

SEQ ID NO: 204622 - RNA, 16 nt, Homo sapiens
aaguuucacugacuua

SEQ ID NO: 204623 - RNA, 17 nt, Homo sapiens
cuguaaucccagcacuu

SEQ ID NO: 204624 - RNA, 12 nt, Homo sapiens
ucucgcuuuguu

SEQ ID NO: 204625 - RNA, 21 nt, Homo sapiens
ccaacguggggcagcacagag

SEQ ID NO: 204626 - RNA, 12 nt, Homo sapiens
aauugcauuucc

SEQ ID NO: 204627 - RNA, 16 nt, Homo sapiens
ugcaugcagcaucuaa

SEQ ID NO: 204628 - RNA, 22 nt, Homo sapiens
ugcucagggaauaauccagaaa

SEQ ID NO: 204629 - RNA, 11 nt, Homo sapiens
augugaugaau

SEQ ID NO: 204630 - RNA, 22 nt, Homo sapiens
accucaguuuuaucauuuucaa

SEQ ID NO: 204631 - RNA, 14 nt, Homo sapiens
uauaguacuggcau

SEQ ID NO: 204632 - RNA, 21 nt, Homo sapiens
uauccaacaugugcucaggga

SEQ ID NO: 204633 - RNA, 14 nt, Homo sapiens
acuugcugccugaa

SEQ ID NO: 204634 - RNA, 14 nt, Homo sapiens
ggaagcgagcuuug

SEQ ID NO: 204635 - RNA, 18 nt, Homo sapiens
acugccauggaggcacac

SEQ ID NO: 204636 - RNA, 21 nt, Homo sapiens
uuagaaaaauccuacaaggcu

SEQ ID NO: 204637 - RNA, 21 nt, Homo sapiens
aacguggggcagcacagagag

SEQ ID NO: 204638 - RNA, 18 nt, Homo sapiens
aaacucuacuuaauccaa

SEQ ID NO: 204639 - RNA, 21 nt, Homo sapiens
aaucuguuaccagaggacaaa

SEQ ID NO: 204640 - RNA, 18 nt, Homo sapiens
gcacacagcugcagagac

SEQ ID NO: 204641 - RNA, 21 nt, Homo sapiens
gucaacaucuuuuacauucug

SEQ ID NO: 204642 - RNA, 19 nt, Homo sapiens
cuuuucaauguuagccaca

SEQ ID NO: 204643 - RNA, 14 nt, Homo sapiens
uuggcuuuuacuga

SEQ ID NO: 204644 - RNA, 18 nt, Homo sapiens
cagucaaggauggaugca

SEQ ID NO: 204645 - RNA, 13 nt, Homo sapiens
uguaaaugugcau

SEQ ID NO: 204646 - RNA, 11 nt, Homo sapiens
ggauagcacug

SEQ ID NO: 204647 - RNA, 12 nt, Homo sapiens
auuuauauaugu

SEQ ID NO: 204648 - RNA, 18 nt, Homo sapiens
gaauuugaguuggaucau

SEQ ID NO: 204649 - RNA, 20 nt, Homo sapiens
auguggcuggaagauccugc

SEQ ID NO: 204650 - RNA, 20 nt, Homo sapiens
ucaauuccaccugcaaucaa

SEQ ID NO: 204651 - RNA, 13 nt, Homo sapiens
uguaccauguaca

SEQ ID NO: 204652 - RNA, 16 nt, Homo sapiens
gugcacaucugugucu

SEQ ID NO: 204653 - RNA, 21 nt, Homo sapiens
ucacaaucaucaucauucuca

SEQ ID NO: 204654 - RNA, 16 nt, Homo sapiens
aucuucuucaccauuu

SEQ ID NO: 204655 - RNA, 20 nt, Homo sapiens
gagacuuugacucuccagaa

SEQ ID NO: 204656 - RNA, 23 nt, Homo sapiens
uguuaccugaaaacacugugcac

SEQ ID NO: 204657 - RNA, 18 nt, Homo sapiens
acaaggcuggcagugaca

SEQ ID NO: 204658 - RNA, 11 nt, Homo sapiens
uccacuuagaa

SEQ ID NO: 204659 - RNA, 21 nt, Homo sapiens
ugcauuugugcccacucucca

SEQ ID NO: 204660 - RNA, 14 nt, Homo sapiens
aaguuggcuucuaa

SEQ ID NO: 204661 - RNA, 17 nt, Homo sapiens
gugcaugcagcaucuaa

SEQ ID NO: 204662 - RNA, 17 nt, Homo sapiens
cuauugcuggcaaagac

SEQ ID NO: 204663 - RNA, 22 nt, Homo sapiens
aaauguuauuuuuuaauuauua

SEQ ID NO: 204664 - RNA, 19 nt, Homo sapiens
gccucccacccccaucucu

SEQ ID NO: 204665 - RNA, 18 nt, Homo sapiens
gguaauuaguaacaugug

SEQ ID NO: 204666 - RNA, 15 nt, Homo sapiens
uccggaauccugucc

SEQ ID NO: 204667 - RNA, 17 nt, Homo sapiens
cugaaauaaaauucauu

SEQ ID NO: 204668 - RNA, 17 nt, Homo sapiens
agguuuaggucaagaag

SEQ ID NO: 204669 - RNA, 21 nt, Homo sapiens
agaccauucaggacacaggga

SEQ ID NO: 204670 - RNA, 20 nt, Homo sapiens
ugcauauccaacaugugcuc

SEQ ID NO: 204671 - RNA, 14 nt, Homo sapiens
caggaacuugcaca

SEQ ID NO: 204672 - RNA, 15 nt, Homo sapiens
uuauucccuuucaca

SEQ ID NO: 204673 - RNA, 20 nt, Homo sapiens
ugacucuccagaaagcucau

SEQ ID NO: 204674 - RNA, 22 nt, Homo sapiens
cacugggcuucuagaaccaggc

SEQ ID NO: 204675 - RNA, 14 nt, Homo sapiens
acccauauuacaga

SEQ ID NO: 204676 - RNA, 22 nt, Homo sapiens
accccugcuccccugagcugaa

SEQ ID NO: 204677 - RNA, 14 nt, Homo sapiens
aacaugugcucagg

SEQ ID NO: 204678 - RNA, 16 nt, Homo sapiens
cugagcaaagcauuga

SEQ ID NO: 204679 - RNA, 19 nt, Homo sapiens
accccuccccuaaugccug

SEQ ID NO: 204680 - RNA, 17 nt, Homo sapiens
acacagccaagccaguc

SEQ ID NO: 204681 - RNA, 13 nt, Homo sapiens
cugguuagguaga

SEQ ID NO: 204682 - RNA, 17 nt, Homo sapiens
aguuuauugacaauaau

SEQ ID NO: 204683 - RNA, 22 nt, Homo sapiens
agaaucuguuaccagaggacaa

SEQ ID NO: 204684 - RNA, 22 nt, Homo sapiens
acagaugugugauucacagugu

SEQ ID NO: 204685 - RNA, 19 nt, Homo sapiens
gaccccagaggauugcugc

SEQ ID NO: 204686 - RNA, 19 nt, Homo sapiens
ugagaggagagagacucca

SEQ ID NO: 204687 - RNA, 18 nt, Homo sapiens
aaagccugccucuuccag

SEQ ID NO: 204688 - RNA, 17 nt, Homo sapiens
gcagucgugccuguguc

SEQ ID NO: 204689 - RNA, 17 nt, Homo sapiens
uuucugcaaacaccaac

SEQ ID NO: 204690 - RNA, 22 nt, Homo sapiens
cuacacauucaauaagcaucaa

SEQ ID NO: 204691 - RNA, 22 nt, Homo sapiens
acuucaaggguuuguugaacaa

SEQ ID NO: 204692 - RNA, 13 nt, Homo sapiens
caaaugugacauu

SEQ ID NO: 204693 - RNA, 23 nt, Homo sapiens
acccagucagaguugugcacaug

SEQ ID NO: 204694 - RNA, 12 nt, Homo sapiens
guacaucuggcc

SEQ ID NO: 204695 - RNA, 22 nt, Homo sapiens
aaguagacuucauuuuuccuaa

SEQ ID NO: 204696 - RNA, 17 nt, Homo sapiens
cuguuggcaaggugaca

SEQ ID NO: 204697 - RNA, 19 nt, Homo sapiens
cagagauaauucuagcuuu

SEQ ID NO: 204698 - RNA, 18 nt, Homo sapiens
aaagaaagccucagagaa

SEQ ID NO: 204699 - RNA, 15 nt, Homo sapiens
aguuuauugacaaua

SEQ ID NO: 204700 - RNA, 19 nt, Homo sapiens
aauuaaaauccucaaucca

SEQ ID NO: 204701 - RNA, 20 nt, Homo sapiens
agacuuugacucuccagaaa

SEQ ID NO: 204702 - RNA, 20 nt, Homo sapiens
guauuaaaaaaaacaaaaag

SEQ ID NO: 204703 - RNA, 22 nt, Homo sapiens
cugagcaaagcauugagcaaag

SEQ ID NO: 204704 - RNA, 18 nt, Homo sapiens
uauauaaaugugauugca

SEQ ID NO: 204705 - RNA, 18 nt, Homo sapiens
aacaucuuuuacauucug

SEQ ID NO: 204706 - RNA, 18 nt, Homo sapiens
ugauccuaaugaaugcau

SEQ ID NO: 204707 - RNA, 23 nt, Homo sapiens
aaguagacuucauuuuuccuaac

SEQ ID NO: 204708 - RNA, 20 nt, Homo sapiens
cagagcgcaagcugggagca

SEQ ID NO: 204709 - RNA, 13 nt, Homo sapiens
gacagccuggcac

SEQ ID NO: 204710 - RNA, 15 nt, Homo sapiens
cauuuccaugcauaa

SEQ ID NO: 204711 - RNA, 21 nt, Homo sapiens
uauuuauagucgaacaauuca

SEQ ID NO: 204712 - RNA, 13 nt, Homo sapiens
gucuucccuguau

SEQ ID NO: 204713 - RNA, 22 nt, Homo sapiens
aaucaaguuggcuucuaaucaa

SEQ ID NO: 204714 - RNA, 20 nt, Homo sapiens
gcuuucauguaaacugugca

SEQ ID NO: 204715 - RNA, 18 nt, Homo sapiens
acagccuggcacagggca

SEQ ID NO: 204716 - RNA, 12 nt, Homo sapiens
uuuucacuugua

SEQ ID NO: 204717 - RNA, 14 nt, Homo sapiens
uguuccccacugac

SEQ ID NO: 204718 - RNA, 14 nt, Homo sapiens
uauuuuugugcaca

SEQ ID NO: 204719 - RNA, 11 nt, Homo sapiens
gagcugugcag

SEQ ID NO: 204720 - RNA, 17 nt, Homo sapiens
aaggugaaccaugucag

SEQ ID NO: 204721 - RNA, 16 nt, Homo sapiens
agaaugcccagugacc

SEQ ID NO: 204722 - RNA, 22 nt, Homo sapiens
acugccauggaggcacacagcu

SEQ ID NO: 204723 - RNA, 12 nt, Homo sapiens
gcaacaguuuuu

SEQ ID NO: 204724 - RNA, 16 nt, Homo sapiens
aucagaacuguuggca

SEQ ID NO: 204725 - RNA, 15 nt, Homo sapiens
uaauauaacugccuu

SEQ ID NO: 204726 - RNA, 23 nt, Homo sapiens
uugcuggggcucgugcccugcau

SEQ ID NO: 204727 - RNA, 19 nt, Homo sapiens
ugcuccuugggcccuuuga

SEQ ID NO: 204728 - RNA, 14 nt, Homo sapiens
ggacaaagccuuug

SEQ ID NO: 204729 - RNA, 22 nt, Homo sapiens
cuugccccuguuaccuaauuag

SEQ ID NO: 204730 - RNA, 20 nt, Homo sapiens
caguguuaaaugugaugaau

SEQ ID NO: 204731 - RNA, 18 nt, Homo sapiens
aauaaaguucuguacuca

SEQ ID NO: 204732 - RNA, 18 nt, Homo sapiens
auuacauggggucuagaa

SEQ ID NO: 204733 - RNA, 22 nt, Homo sapiens
acaggcccuuccucuccacugc

SEQ ID NO: 204734 - RNA, 13 nt, Homo sapiens
uaauguuacauua

SEQ ID NO: 204735 - RNA, 13 nt, Homo sapiens
ugcuuacuuugca

SEQ ID NO: 204736 - RNA, 18 nt, Homo sapiens
uccuucaugaucaucaca

SEQ ID NO: 204737 - RNA, 16 nt, Homo sapiens
gugacauuuccaugca

SEQ ID NO: 204738 - RNA, 15 nt, Homo sapiens
aggauuagacaguca

SEQ ID NO: 204739 - RNA, 22 nt, Homo sapiens
aagcuaaauccuuuacuguuag

SEQ ID NO: 204740 - RNA, 18 nt, Homo sapiens
gcuucucugacuucugcc

SEQ ID NO: 204741 - RNA, 16 nt, Homo sapiens
agaccauaauguuaca

SEQ ID NO: 204742 - RNA, 21 nt, Homo sapiens
uggugagaacuacucagggaa

SEQ ID NO: 204743 - RNA, 20 nt, Homo sapiens
auccuacaaggcuggcagug

SEQ ID NO: 204744 - RNA, 13 nt, Homo sapiens
cucaccuccuaaa

SEQ ID NO: 204745 - RNA, 20 nt, Homo sapiens
aaaugcuguauuagucacag

SEQ ID NO: 204746 - RNA, 17 nt, Homo sapiens
uagucauuucauggguu

SEQ ID NO: 204747 - RNA, 15 nt, Homo sapiens
aucucaaacuacugg

SEQ ID NO: 204748 - RNA, 17 nt, Homo sapiens
augugaaaguuacaaau

SEQ ID NO: 204749 - RNA, 11 nt, Homo sapiens
acuagggccaa

SEQ ID NO: 204750 - RNA, 20 nt, Homo sapiens
uuaaguugauggugaugaaa

SEQ ID NO: 204751 - RNA, 16 nt, Homo sapiens
uaauaaguuucacuga

SEQ ID NO: 204752 - RNA, 14 nt, Homo sapiens
cuaguguugcuugg

SEQ ID NO: 204753 - RNA, 18 nt, Homo sapiens
uaccuaguacaaggcaac

SEQ ID NO: 204754 - RNA, 16 nt, Homo sapiens
cucaagggaugucuca

SEQ ID NO: 204755 - RNA, 13 nt, Homo sapiens
cauuuauagcaua

SEQ ID NO: 204756 - RNA, 17 nt, Homo sapiens
auuauaugcacuagcaa

SEQ ID NO: 204757 - RNA, 15 nt, Homo sapiens
guccgaucuuugacu

SEQ ID NO: 204758 - RNA, 14 nt, Homo sapiens
guuaguuccuucau

SEQ ID NO: 204759 - RNA, 17 nt, Homo sapiens
cgauuuuguaucugcag

SEQ ID NO: 204760 - RNA, 14 nt, Homo sapiens
agaaagcucaucuc

SEQ ID NO: 204761 - RNA, 16 nt, Homo sapiens
uauaguuuauugacaa

SEQ ID NO: 204762 - RNA, 19 nt, Homo sapiens
agguaggggcccacuucac

SEQ ID NO: 204763 - RNA, 15 nt, Homo sapiens
cauagaggugaggga

SEQ ID NO: 204764 - RNA, 23 nt, Homo sapiens
uucugacuugacuuuagucugca

SEQ ID NO: 204765 - RNA, 17 nt, Homo sapiens
ucuuuucgccguggcug

SEQ ID NO: 204766 - RNA, 22 nt, Homo sapiens
acccagucagaguugugcacau

SEQ ID NO: 204767 - RNA, 13 nt, Homo sapiens
uuuaucugugcaa

SEQ ID NO: 204768 - RNA, 13 nt, Homo sapiens
aaauuaaagcuga

SEQ ID NO: 204769 - RNA, 17 nt, Homo sapiens
aaugcuucugacuucau

SEQ ID NO: 204770 - RNA, 16 nt, Homo sapiens
ccugucuaaaaauuca

SEQ ID NO: 204771 - RNA, 21 nt, Homo sapiens
gaaaaugcuguauuagucaca

SEQ ID NO: 204772 - RNA, 16 nt, Homo sapiens
uccuuuucccuauuuc

SEQ ID NO: 204773 - RNA, 19 nt, Homo sapiens
aagccuagcccuucucuca

SEQ ID NO: 204774 - RNA, 13 nt, Homo sapiens
caaagacuuuccu

SEQ ID NO: 204775 - RNA, 22 nt, Homo sapiens
caaugcuauaacuauguugaua

SEQ ID NO: 204776 - RNA, 19 nt, Homo sapiens
uccuaaaguagacuucauu

SEQ ID NO: 204777 - RNA, 17 nt, Homo sapiens
ccuucgcuucuugccuc

SEQ ID NO: 204778 - RNA, 14 nt, Homo sapiens
gcccauaucuguga

SEQ ID NO: 204779 - RNA, 21 nt, Homo sapiens
ucugaaggagccccauuccug

SEQ ID NO: 204780 - RNA, 15 nt, Homo sapiens
gguuccggaauccug

SEQ ID NO: 204781 - RNA, 15 nt, Homo sapiens
ucagaguugugcaca

SEQ ID NO: 204782 - RNA, 21 nt, Homo sapiens
cagcucugcauuaucugaggu

SEQ ID NO: 204783 - RNA, 19 nt, Homo sapiens
uugagcuuaagaauuuuga

SEQ ID NO: 204784 - RNA, 23 nt, Homo sapiens
auguuaggaaaauuucacauuaa

SEQ ID NO: 204785 - RNA, 16 nt, Homo sapiens
auauuuugcauaguac

SEQ ID NO: 204786 - RNA, 19 nt, Homo sapiens
ccuucuccauccacauggg

SEQ ID NO: 204787 - RNA, 21 nt, Homo sapiens
uauauaaaugugauugcagcu

SEQ ID NO: 204788 - RNA, 14 nt, Homo sapiens
ccugggaccacaga

SEQ ID NO: 204789 - RNA, 13 nt, Homo sapiens
guagaacuuggau

SEQ ID NO: 204790 - RNA, 18 nt, Homo sapiens
gucaugcguuuaaucaca

SEQ ID NO: 204791 - RNA, 17 nt, Homo sapiens
ugccagugggaacuccu

SEQ ID NO: 204792 - RNA, 14 nt, Homo sapiens
gguuucucuguaua

SEQ ID NO: 204793 - RNA, 23 nt, Homo sapiens
ugaagucaugcguuuaaucacau

SEQ ID NO: 204794 - RNA, 18 nt, Homo sapiens
auuauuauucuucauaac

SEQ ID NO: 204795 - RNA, 18 nt, Homo sapiens
ugggcaauauagcaagau

SEQ ID NO: 204796 - RNA, 23 nt, Homo sapiens
guguauuuaaccuugaaggguuc

SEQ ID NO: 204797 - RNA, 16 nt, Homo sapiens
uauuuaucugugcaaa

SEQ ID NO: 204798 - RNA, 22 nt, Homo sapiens
guuaccugaaaacacugugcac

SEQ ID NO: 204799 - RNA, 21 nt, Homo sapiens
agggaagcugucccucacugu

SEQ ID NO: 204800 - RNA, 13 nt, Homo sapiens
cuaugugcaugca

SEQ ID NO: 204801 - RNA, 14 nt, Homo sapiens
uaucagucauaacu

SEQ ID NO: 204802 - RNA, 19 nt, Homo sapiens
auuaccuaguagucauuuc

SEQ ID NO: 204803 - RNA, 18 nt, Homo sapiens
agcauacgguaugauauu

SEQ ID NO: 204804 - RNA, 19 nt, Homo sapiens
gagacaugagcauggcuga

SEQ ID NO: 204805 - RNA, 13 nt, Homo sapiens
ugaaaucuaugaa

SEQ ID NO: 204806 - RNA, 13 nt, Homo sapiens
gacuccugugcaa

SEQ ID NO: 204807 - RNA, 19 nt, Homo sapiens
ucacauucgaguguuucag

SEQ ID NO: 204808 - RNA, 15 nt, Homo sapiens
uuguucagaugcuuc

SEQ ID NO: 204809 - RNA, 15 nt, Homo sapiens
cuaagcagaccacug

SEQ ID NO: 204810 - RNA, 18 nt, Homo sapiens
uggaguccgaugauucuc

SEQ ID NO: 204811 - RNA, 23 nt, Homo sapiens
aggaggugcuaucgcaccacugu

SEQ ID NO: 204812 - RNA, 15 nt, Homo sapiens
uauugcagcuuauau

SEQ ID NO: 204813 - RNA, 19 nt, Homo sapiens
uaauccucuuuuucuaguc

SEQ ID NO: 204814 - RNA, 16 nt, Homo sapiens
ccagcacuuugggagg

SEQ ID NO: 204815 - RNA, 18 nt, Homo sapiens
gugcaccacuucaaguga

SEQ ID NO: 204816 - RNA, 19 nt, Homo sapiens
ccuuguaauucuaaaugaa

SEQ ID NO: 204817 - RNA, 22 nt, Homo sapiens
cauuuaguuugauuauucagug

SEQ ID NO: 204818 - RNA, 22 nt, Homo sapiens
cacguaguagggucaggccacg

SEQ ID NO: 204819 - RNA, 12 nt, Homo sapiens
caucaagcacag

SEQ ID NO: 204820 - RNA, 19 nt, Homo sapiens
aacagccaaaaaggacuuu

SEQ ID NO: 204821 - RNA, 14 nt, Homo sapiens
acaggcagcauuua

SEQ ID NO: 204822 - RNA, 24 nt, Homo sapiens
uauauguuuugugggaacagaugu

SEQ ID NO: 204823 - RNA, 16 nt, Homo sapiens
gaggauuucaucucuu

SEQ ID NO: 204824 - RNA, 19 nt, Homo sapiens
ucucccuccccugccauuu

SEQ ID NO: 204825 - RNA, 18 nt, Homo sapiens
uuuauaaggcugauguca

SEQ ID NO: 204826 - RNA, 19 nt, Homo sapiens
cagcuggaagggucaacau

SEQ ID NO: 204827 - RNA, 15 nt, Homo sapiens
guaugacugcacaug

SEQ ID NO: 204828 - RNA, 23 nt, Homo sapiens
uuuacaauaaaacuuugcugcca

SEQ ID NO: 204829 - RNA, 22 nt, Homo sapiens
aucuuugcuuuauaaaagaaca

SEQ ID NO: 204830 - RNA, 17 nt, Homo sapiens
uuuuaacaacuaugauu

SEQ ID NO: 204831 - RNA, 15 nt, Homo sapiens
cagacuccugugcaa

SEQ ID NO: 204832 - RNA, 19 nt, Homo sapiens
ugcugcugagugcaccacu

SEQ ID NO: 204833 - RNA, 19 nt, Homo sapiens
gggauggcuaaaaccauca

SEQ ID NO: 204834 - RNA, 17 nt, Homo sapiens
ggcagcauuuagcacau

SEQ ID NO: 204835 - RNA, 14 nt, Homo sapiens
uaucugaggucaca

SEQ ID NO: 204836 - RNA, 20 nt, Homo sapiens
acaaaauaaccaauccugga

SEQ ID NO: 204837 - RNA, 18 nt, Homo sapiens
acuguugacauccaagcu

SEQ ID NO: 204838 - RNA, 10 nt, Homo sapiens
uuccacugag

SEQ ID NO: 204839 - RNA, 17 nt, Homo sapiens
auucucugucucaucca

SEQ ID NO: 204840 - RNA, 16 nt, Homo sapiens
aaccaucaucuugcca

SEQ ID NO: 204841 - RNA, 18 nt, Homo sapiens
auaugcuaauauauguau

SEQ ID NO: 204842 - RNA, 19 nt, Homo sapiens
aaucauuuuauaugucaaa

SEQ ID NO: 204843 - RNA, 21 nt, Homo sapiens
gcagauacugucucuuucaug

SEQ ID NO: 204844 - RNA, 23 nt, Homo sapiens
aucacaccguccuccacgccauu

SEQ ID NO: 204845 - RNA, 20 nt, Homo sapiens
agaugaauguagcagauccc

SEQ ID NO: 204846 - RNA, 22 nt, Homo sapiens
acaucuggccuugaaaccaccu

SEQ ID NO: 204847 - RNA, 21 nt, Homo sapiens
ggagacagagcugguugggaa

SEQ ID NO: 204848 - RNA, 19 nt, Homo sapiens
aacccucuaagggaccuca

SEQ ID NO: 204849 - RNA, 19 nt, Homo sapiens
agauguccuugaugcucau

SEQ ID NO: 204850 - RNA, 19 nt, Homo sapiens
aacccuauugguaaagaau

SEQ ID NO: 204851 - RNA, 14 nt, Homo sapiens
gcccaagaauagau

SEQ ID NO: 204852 - RNA, 20 nt, Homo sapiens
uaccugaaauaaaauucauu

SEQ ID NO: 204853 - RNA, 16 nt, Homo sapiens
caugaagauucuuucc

SEQ ID NO: 204854 - RNA, 14 nt, Homo sapiens
aggaaccucagggc

SEQ ID NO: 204855 - RNA, 19 nt, Homo sapiens
uugcacaaaaucacacagc

SEQ ID NO: 204856 - RNA, 14 nt, Homo sapiens
uauaaugguugacu

SEQ ID NO: 204857 - RNA, 14 nt, Homo sapiens
auaucaugcuccau

SEQ ID NO: 204858 - RNA, 21 nt, Homo sapiens
uacuuugaagucauaccaaug

SEQ ID NO: 204859 - RNA, 19 nt, Homo sapiens
ccuaacaggauuagacagu

SEQ ID NO: 204860 - RNA, 14 nt, Homo sapiens
caauaauuucaggu

SEQ ID NO: 204861 - RNA, 15 nt, Homo sapiens
gauugauuaccaagu

SEQ ID NO: 204862 - RNA, 11 nt, Homo sapiens
ggaagggucaa

SEQ ID NO: 204863 - RNA, 13 nt, Homo sapiens
uguuaaguugaug

SEQ ID NO: 204864 - RNA, 14 nt, Homo sapiens
ugugggugggacca

SEQ ID NO: 204865 - RNA, 18 nt, Homo sapiens
cucuccccacugcucauu

SEQ ID NO: 204866 - RNA, 18 nt, Homo sapiens
uuuuuguucaaagccagc

SEQ ID NO: 204867 - RNA, 16 nt, Homo sapiens
auuaucaacagcauuu

SEQ ID NO: 204868 - RNA, 18 nt, Homo sapiens
aagccuagcccuucucuc

SEQ ID NO: 204869 - RNA, 21 nt, Homo sapiens
uagaagccacuauuacuggga

SEQ ID NO: 204870 - RNA, 18 nt, Homo sapiens
agauacugucucuuucau

SEQ ID NO: 204871 - RNA, 18 nt, Homo sapiens
cuauugcuggcaaagaca

SEQ ID NO: 204872 - RNA, 13 nt, Homo sapiens
ugcacacuuugcc

SEQ ID NO: 204873 - RNA, 12 nt, Homo sapiens
cuucucauuucu

SEQ ID NO: 204874 - RNA, 16 nt, Homo sapiens
gcuuaguuuguguguu

SEQ ID NO: 204875 - RNA, 20 nt, Homo sapiens
auuuaugccucuguauuuaa

SEQ ID NO: 204876 - RNA, 23 nt, Homo sapiens
ccacauccuccacguucugcuca

SEQ ID NO: 204877 - RNA, 16 nt, Homo sapiens
cuuuagucugcaaaau

SEQ ID NO: 204878 - RNA, 16 nt, Homo sapiens
cauuugaaaucuauga

SEQ ID NO: 204879 - RNA, 14 nt, Homo sapiens
aaucaaaugcaauu

SEQ ID NO: 204880 - RNA, 18 nt, Homo sapiens
cucuuguauaugaugauc

SEQ ID NO: 204881 - RNA, 14 nt, Homo sapiens
uugcaaccucgcug

SEQ ID NO: 204882 - RNA, 13 nt, Homo sapiens
cacagcacccaug

SEQ ID NO: 204883 - RNA, 15 nt, Homo sapiens
cuucacucaaucucu

SEQ ID NO: 204884 - RNA, 21 nt, Homo sapiens
uagacccugcauuuauagcau

SEQ ID NO: 204885 - RNA, 17 nt, Homo sapiens
ugacacuuuucaugugu

SEQ ID NO: 204886 - RNA, 20 nt, Homo sapiens
aggugguauguuugggagac

SEQ ID NO: 204887 - RNA, 16 nt, Homo sapiens
gcaaagacuuuccucu

SEQ ID NO: 204888 - RNA, 17 nt, Homo sapiens
gaggugagggaagccug

SEQ ID NO: 204889 - RNA, 16 nt, Homo sapiens
agcaauaugcauuuaa

SEQ ID NO: 204890 - RNA, 16 nt, Homo sapiens
ugacccagucagaguu

SEQ ID NO: 204891 - RNA, 21 nt, Homo sapiens
caucaagaugagagaacugga

SEQ ID NO: 204892 - RNA, 21 nt, Homo sapiens
auuuuaaugaagaaaguggaa

SEQ ID NO: 204893 - RNA, 14 nt, Homo sapiens
cuacaauuugccau

SEQ ID NO: 204894 - RNA, 17 nt, Homo sapiens
aucauucucugucucau

SEQ ID NO: 204895 - RNA, 21 nt, Homo sapiens
agcuucuuaauauaacugccu

SEQ ID NO: 204896 - RNA, 15 nt, Homo sapiens
agccaagccagucaa

SEQ ID NO: 204897 - RNA, 13 nt, Homo sapiens
guaaaugugcauu

SEQ ID NO: 204898 - RNA, 22 nt, Homo sapiens
ccuaugugggugggaccacaga

SEQ ID NO: 204899 - RNA, 19 nt, Homo sapiens
uggaaaacaguauuuucca

SEQ ID NO: 204900 - RNA, 16 nt, Homo sapiens
ucccaucccagcugaa

SEQ ID NO: 204901 - RNA, 13 nt, Homo sapiens
acuucucucagga

SEQ ID NO: 204902 - RNA, 19 nt, Homo sapiens
ugcccuguaccugugcacg

SEQ ID NO: 204903 - RNA, 15 nt, Homo sapiens
gguccaucucagaga

SEQ ID NO: 204904 - RNA, 15 nt, Homo sapiens
caccaggucagggag

SEQ ID NO: 204905 - RNA, 12 nt, Homo sapiens
uuucaauugcau

SEQ ID NO: 204906 - RNA, 21 nt, Homo sapiens
uugaguuugucgcucaugugu

SEQ ID NO: 204907 - RNA, 18 nt, Homo sapiens
aguuacucauucagggau

SEQ ID NO: 204908 - RNA, 12 nt, Homo sapiens
ccucucugcucu

SEQ ID NO: 204909 - RNA, 22 nt, Homo sapiens
uuaaaacccacaaaaguacaau

SEQ ID NO: 204910 - RNA, 20 nt, Homo sapiens
uacaaucagccacauucuag

SEQ ID NO: 204911 - RNA, 12 nt, Homo sapiens
aaucacaguaua

SEQ ID NO: 204912 - RNA, 20 nt, Homo sapiens
cauuauaugcacuagcaaua

SEQ ID NO: 204913 - RNA, 22 nt, Homo sapiens
ucacucaaucucugauucuguc

SEQ ID NO: 204914 - RNA, 19 nt, Homo sapiens
acugcacagugcaucucag

SEQ ID NO: 204915 - RNA, 14 nt, Homo sapiens
agaugaucaucucc

SEQ ID NO: 204916 - RNA, 19 nt, Homo sapiens
accugaaaacacugugcac

SEQ ID NO: 204917 - RNA, 21 nt, Homo sapiens
agcaugcugugauugugccua

SEQ ID NO: 204918 - RNA, 22 nt, Homo sapiens
agcaguuugcuuuguaugcacu

SEQ ID NO: 204919 - RNA, 21 nt, Homo sapiens
caggcccuuccucuccacugc

SEQ ID NO: 204920 - RNA, 18 nt, Homo sapiens
gacggugcccaagccaga

SEQ ID NO: 204921 - RNA, 15 nt, Homo sapiens
ccuccgcccugccac

SEQ ID NO: 204922 - RNA, 16 nt, Homo sapiens
ggaguaggacauacca

SEQ ID NO: 204923 - RNA, 19 nt, Homo sapiens
aauaugcacaauagcaguu

SEQ ID NO: 204924 - RNA, 23 nt, Homo sapiens
cuggucucaaacuccugggcuca

SEQ ID NO: 204925 - RNA, 18 nt, Homo sapiens
gcugacuguacuccuccc

SEQ ID NO: 204926 - RNA, 15 nt, Homo sapiens
uggaagugugugauc

SEQ ID NO: 204927 - RNA, 16 nt, Homo sapiens
uuucaggccacauggc

SEQ ID NO: 204928 - RNA, 19 nt, Homo sapiens
cauauaauguuguuauuua

SEQ ID NO: 204929 - RNA, 17 nt, Homo sapiens
ucccuuuuuauauccca

SEQ ID NO: 204930 - RNA, 19 nt, Homo sapiens
cacugcauaccaaccuggg

SEQ ID NO: 204931 - RNA, 19 nt, Homo sapiens
cgagucucuucuccacugg

SEQ ID NO: 204932 - RNA, 15 nt, Homo sapiens
ccugagagggaaccc

SEQ ID NO: 204933 - RNA, 14 nt, Homo sapiens
uaagauucauccau

SEQ ID NO: 204934 - RNA, 21 nt, Homo sapiens
uguugcccaggcuggucucaa

SEQ ID NO: 204935 - RNA, 21 nt, Homo sapiens
ucaucccgagcaccuccacau

SEQ ID NO: 204936 - RNA, 20 nt, Homo sapiens
accaggguugaccccagagg

SEQ ID NO: 204937 - RNA, 23 nt, Homo sapiens
ggcacgaggccaggcagauccca

SEQ ID NO: 204938 - RNA, 16 nt, Homo sapiens
uauuguuucaauugca

SEQ ID NO: 204939 - RNA, 23 nt, Homo sapiens
ccaucagugcucccucacauguc

SEQ ID NO: 204940 - RNA, 14 nt, Homo sapiens
ucuucuccacugga

SEQ ID NO: 204941 - RNA, 14 nt, Homo sapiens
acugcuugaggaaa

SEQ ID NO: 204942 - RNA, 16 nt, Homo sapiens
agcauggagcauggga

SEQ ID NO: 204943 - RNA, 15 nt, Homo sapiens
ucgcugucaucucag

SEQ ID NO: 204944 - RNA, 19 nt, Homo sapiens
cuuuucuggaauguaauca

SEQ ID NO: 204945 - RNA, 22 nt, Homo sapiens
aaaugguccaggagaaggccaa

SEQ ID NO: 204946 - RNA, 21 nt, Homo sapiens
gacaugcgggcugggcagcug

SEQ ID NO: 204947 - RNA, 12 nt, Homo sapiens
cauuuccaugca

SEQ ID NO: 204948 - RNA, 15 nt, Homo sapiens
cuuccucuccacugc

SEQ ID NO: 204949 - RNA, 17 nt, Homo sapiens
aggcccccacuugccuc

SEQ ID NO: 204950 - RNA, 14 nt, Homo sapiens
cugagauaccagcg

SEQ ID NO: 204951 - RNA, 13 nt, Homo sapiens
aacaugugcucag

SEQ ID NO: 204952 - RNA, 16 nt, Homo sapiens
cuguuagucauuugcu

SEQ ID NO: 204953 - RNA, 22 nt, Homo sapiens
acuacacauucaauaagcauca

SEQ ID NO: 204954 - RNA, 23 nt, Homo sapiens
uuauaaagggagauaacaaucug

SEQ ID NO: 204955 - RNA, 24 nt, Homo sapiens
cucauucagggauagcacugagca

SEQ ID NO: 204956 - RNA, 10 nt, Homo sapiens
acugcaauaa

SEQ ID NO: 204957 - RNA, 13 nt, Homo sapiens
guuccccacugac

SEQ ID NO: 204958 - RNA, 14 nt, Homo sapiens
uuacuaucauguca

SEQ ID NO: 204959 - RNA, 16 nt, Homo sapiens
uauggcacccaugcac

SEQ ID NO: 204960 - RNA, 22 nt, Homo sapiens
cuacagagcuucccugacucau

SEQ ID NO: 204961 - RNA, 16 nt, Homo sapiens
cucacacaugagaucu

SEQ ID NO: 204962 - RNA, 16 nt, Homo sapiens
cuaaucagcauucuca

SEQ ID NO: 204963 - RNA, 14 nt, Homo sapiens
cacuugcagccucc

SEQ ID NO: 204964 - RNA, 18 nt, Homo sapiens
agccugccucuuccagga

SEQ ID NO: 204965 - RNA, 19 nt, Homo sapiens
cagaaggaaaaauguguaa

SEQ ID NO: 204966 - RNA, 15 nt, Homo sapiens
gauuucaugauuuca

SEQ ID NO: 204967 - RNA, 21 nt, Homo sapiens
ugccucauuaccuugugcuaa

SEQ ID NO: 204968 - RNA, 20 nt, Homo sapiens
guuggaagugagggucagag

SEQ ID NO: 204969 - RNA, 14 nt, Homo sapiens
aaaauauagcugua

SEQ ID NO: 204970 - RNA, 22 nt, Homo sapiens
ucuugguugaggaaacaaacau

SEQ ID NO: 204971 - RNA, 19 nt, Homo sapiens
uggcuaaaaccaucauagu

SEQ ID NO: 204972 - RNA, 18 nt, Homo sapiens
augauccuaaugaaugca

SEQ ID NO: 204973 - RNA, 15 nt, Homo sapiens
ugaggguuaaugaaa

SEQ ID NO: 204974 - RNA, 20 nt, Homo sapiens
acuaagaugaucaucuccag

SEQ ID NO: 204975 - RNA, 21 nt, Homo sapiens
caagggcuuuguuuugcacac

SEQ ID NO: 204976 - RNA, 21 nt, Homo sapiens
aggcgccccuucccccuccaa

SEQ ID NO: 204977 - RNA, 14 nt, Homo sapiens
cugccuuguguaca

SEQ ID NO: 204978 - RNA, 17 nt, Homo sapiens
uuucuggcagccaguac

SEQ ID NO: 204979 - RNA, 21 nt, Homo sapiens
acaauaaacgguacuugucau

SEQ ID NO: 204980 - RNA, 20 nt, Homo sapiens
agacugggucucgcuuuguu

SEQ ID NO: 204981 - RNA, 18 nt, Homo sapiens
ugcaauaggugugcguca

SEQ ID NO: 204982 - RNA, 22 nt, Homo sapiens
guagaaaauuuguuauuuugca

SEQ ID NO: 204983 - RNA, 22 nt, Homo sapiens
aucucugauucugucaaugucu

SEQ ID NO: 204984 - RNA, 14 nt, Homo sapiens
gguaugauauugca

SEQ ID NO: 204985 - RNA, 16 nt, Homo sapiens
cuugucucacuugugc

SEQ ID NO: 204986 - RNA, 18 nt, Homo sapiens
cuuucaugaguuuuuccc

SEQ ID NO: 204987 - RNA, 14 nt, Homo sapiens
uucuaugaggcaac

SEQ ID NO: 204988 - RNA, 20 nt, Homo sapiens
ugcaaaaguucugacuugac

SEQ ID NO: 204989 - RNA, 22 nt, Homo sapiens
augagaauuugagugcucugau

SEQ ID NO: 204990 - RNA, 23 nt, Homo sapiens
auaguacagguaaggugagggaa

SEQ ID NO: 204991 - RNA, 22 nt, Homo sapiens
aacacuuuacaauguucauccc

SEQ ID NO: 204992 - RNA, 22 nt, Homo sapiens
cgcuuuugcuggucacugccau

SEQ ID NO: 204993 - RNA, 15 nt, Homo sapiens
guauaguacuggcau

SEQ ID NO: 204994 - RNA, 21 nt, Homo sapiens
ugucaucucagcuggaucucc

SEQ ID NO: 204995 - RNA, 16 nt, Homo sapiens
agccuggccaacaugg

SEQ ID NO: 204996 - RNA, 15 nt, Homo sapiens
ugcuaucgcaccacu

SEQ ID NO: 204997 - RNA, 18 nt, Homo sapiens
acagagcagaacuuucac

SEQ ID NO: 204998 - RNA, 12 nt, Homo sapiens
gcuacaccuuuc

SEQ ID NO: 204999 - RNA, 17 nt, Homo sapiens
cacggcucucaccagug

SEQ ID NO: 205000 - RNA, 13 nt, Homo sapiens
uaagggaccucaa

SEQ ID NO: 205001 - RNA, 17 nt, Homo sapiens
ugucuaaaaucccuccu

SEQ ID NO: 205002 - RNA, 17 nt, Homo sapiens
auguagcagauccccag

SEQ ID NO: 205003 - RNA, 13 nt, Homo sapiens
acucagggcuccu

SEQ ID NO: 205004 - RNA, 16 nt, Homo sapiens
ccagagcuacugacua

SEQ ID NO: 205005 - RNA, 18 nt, Homo sapiens
cugggagcacaggcacug

SEQ ID NO: 205006 - RNA, 22 nt, Homo sapiens
guagagggaguugucaagucuc

SEQ ID NO: 205007 - RNA, 20 nt, Homo sapiens
gaaccaaaucuggaagccaa

SEQ ID NO: 205008 - RNA, 17 nt, Homo sapiens
cggagccuccucucuca

SEQ ID NO: 205009 - RNA, 14 nt, Homo sapiens
uaauauaacugccu

SEQ ID NO: 205010 - RNA, 20 nt, Homo sapiens
caaggagggcagaucacuuc

SEQ ID NO: 205011 - RNA, 20 nt, Homo sapiens
uaaaacccacaaaaguacaa

SEQ ID NO: 205012 - RNA, 17 nt, Homo sapiens
cauucuaguacuuggga

SEQ ID NO: 205013 - RNA, 15 nt, Homo sapiens
aggaugagcauuuag

SEQ ID NO: 205014 - RNA, 15 nt, Homo sapiens
agccaccaagaggga

SEQ ID NO: 205015 - RNA, 20 nt, Homo sapiens
ugaggcaaccacaggcagca

SEQ ID NO: 205016 - RNA, 22 nt, Homo sapiens
accucagggcuguguguacuaa

SEQ ID NO: 205017 - RNA, 18 nt, Homo sapiens
augcgggcugggcagcug

SEQ ID NO: 205018 - RNA, 17 nt, Homo sapiens
caugcguuuaaucacau

SEQ ID NO: 205019 - RNA, 21 nt, Homo sapiens
cugguugguguugcagaaggu

SEQ ID NO: 205020 - RNA, 15 nt, Homo sapiens
aucacuucaggucag

SEQ ID NO: 205021 - RNA, 23 nt, Homo sapiens
acuuagaaauugcauuuccugac

SEQ ID NO: 205022 - RNA, 19 nt, Homo sapiens
ccaaucccaccaacccuca

SEQ ID NO: 205023 - RNA, 22 nt, Homo sapiens
caacagcccucaggucagggug

SEQ ID NO: 205024 - RNA, 16 nt, Homo sapiens
gcaccaccaagccaag

SEQ ID NO: 205025 - RNA, 15 nt, Homo sapiens
ugacaauaauuucag

SEQ ID NO: 205026 - RNA, 15 nt, Homo sapiens
cucuacuuaauccaa

SEQ ID NO: 205027 - RNA, 13 nt, Homo sapiens
agacuucccugaa

SEQ ID NO: 205028 - RNA, 18 nt, Homo sapiens
gaaacacugggcuucuag

SEQ ID NO: 205029 - RNA, 19 nt, Homo sapiens
uuauuagagugucuuucca

SEQ ID NO: 205030 - RNA, 22 nt, Homo sapiens
aauccuguccucagcuucuuaa

SEQ ID NO: 205031 - RNA, 20 nt, Homo sapiens
ugauccuaaugaaugcauaa

SEQ ID NO: 205032 - RNA, 15 nt, Homo sapiens
aaauacagucuucca

SEQ ID NO: 205033 - RNA, 20 nt, Homo sapiens
cuggaguggaguggcgugau

SEQ ID NO: 205034 - RNA, 18 nt, Homo sapiens
aagcucaucucagcuccu

SEQ ID NO: 205035 - RNA, 16 nt, Homo sapiens
uaugugggugggacca

SEQ ID NO: 205036 - RNA, 16 nt, Homo sapiens
uguaucaaaugugaca

SEQ ID NO: 205037 - RNA, 18 nt, Homo sapiens
cuuccauuugcaagggaa

SEQ ID NO: 205038 - RNA, 15 nt, Homo sapiens
acacuaacauauaau

SEQ ID NO: 205039 - RNA, 19 nt, Homo sapiens
ugaaaugcuggcauuugca

SEQ ID NO: 205040 - RNA, 21 nt, Homo sapiens
uaccaguauaauugaguuuuc

SEQ ID NO: 205041 - RNA, 19 nt, Homo sapiens
uuggaagugugugaucugu

SEQ ID NO: 205042 - RNA, 18 nt, Homo sapiens
aucaggaauauuuuccaa

SEQ ID NO: 205043 - RNA, 15 nt, Homo sapiens
agggaauaauccaga

SEQ ID NO: 205044 - RNA, 18 nt, Homo sapiens
cuugauggagauauuuac

SEQ ID NO: 205045 - RNA, 20 nt, Homo sapiens
uagaccagaaccagagcuca

SEQ ID NO: 205046 - RNA, 20 nt, Homo sapiens
ugucccggggcuccacugaa

SEQ ID NO: 205047 - RNA, 23 nt, Homo sapiens
auuuuccuccaucgcaguguuca

SEQ ID NO: 205048 - RNA, 18 nt, Homo sapiens
ugcauaagugcaugacau

SEQ ID NO: 205049 - RNA, 21 nt, Homo sapiens
gugaagaucacguuccuuccc

SEQ ID NO: 205050 - RNA, 20 nt, Homo sapiens
ugaauaugaacggugagcau

SEQ ID NO: 205051 - RNA, 15 nt, Homo sapiens
ggaggaccagagcua

SEQ ID NO: 205052 - RNA, 21 nt, Homo sapiens
uguaaagcaggugcccaggaa

SEQ ID NO: 205053 - RNA, 16 nt, Homo sapiens
gaccacagacucacau

SEQ ID NO: 205054 - RNA, 20 nt, Homo sapiens
uugcauaguaccaaucauuu

SEQ ID NO: 205055 - RNA, 14 nt, Homo sapiens
uccuccaugggaga

SEQ ID NO: 205056 - RNA, 23 nt, Homo sapiens
cagaccauucaggacacagggaa

SEQ ID NO: 205057 - RNA, 15 nt, Homo sapiens
uuugauuauucagug

SEQ ID NO: 205058 - RNA, 16 nt, Homo sapiens
ugcuuuggaaaucaca

SEQ ID NO: 205059 - RNA, 21 nt, Homo sapiens
cuaugugggugggaccacaga

SEQ ID NO: 205060 - RNA, 11 nt, Homo sapiens
caggugcacag

SEQ ID NO: 205061 - RNA, 17 nt, Homo sapiens
ucagcuucuuaauauaa

SEQ ID NO: 205062 - RNA, 13 nt, Homo sapiens
cagccucaagucu

SEQ ID NO: 205063 - RNA, 14 nt, Homo sapiens
aacccuugcuugca

SEQ ID NO: 205064 - RNA, 17 nt, Homo sapiens
uaagucaaccugccuga

SEQ ID NO: 205065 - RNA, 12 nt, Homo sapiens
ggaccucaaagg

SEQ ID NO: 205066 - RNA, 22 nt, Homo sapiens
ucaagccuagcccuucucucau

SEQ ID NO: 205067 - RNA, 22 nt, Homo sapiens
ucaaacgugaaaaugcuguauu

SEQ ID NO: 205068 - RNA, 17 nt, Homo sapiens
aaacuauguaacaugua

SEQ ID NO: 205069 - RNA, 13 nt, Homo sapiens
auucaggacacag

SEQ ID NO: 205070 - RNA, 21 nt, Homo sapiens
ucucugcuuuggaaaucacac

SEQ ID NO: 205071 - RNA, 13 nt, Homo sapiens
agccauaugaaug

SEQ ID NO: 205072 - RNA, 15 nt, Homo sapiens
agccuccucucucaa

SEQ ID NO: 205073 - RNA, 14 nt, Homo sapiens
uguaccugugcacg

SEQ ID NO: 205074 - RNA, 23 nt, Homo sapiens
gauugccucugaagccuauguau

SEQ ID NO: 205075 - RNA, 13 nt, Homo sapiens
aauaaccaauccu

SEQ ID NO: 205076 - RNA, 19 nt, Homo sapiens
cuguauauacaauaacaua

SEQ ID NO: 205077 - RNA, 24 nt, Homo sapiens
ugaacuuggaaagaaaugcccauc

SEQ ID NO: 205078 - RNA, 10 nt, Homo sapiens
guuaccuaau

SEQ ID NO: 205079 - RNA, 19 nt, Homo sapiens
aggcauaagaaaacuaaga

SEQ ID NO: 205080 - RNA, 23 nt, Homo sapiens
uccaucgcaguguucaaggccau

SEQ ID NO: 205081 - RNA, 16 nt, Homo sapiens
caauggagacugucuc

SEQ ID NO: 205082 - RNA, 11 nt, Homo sapiens
uucuccacugg

SEQ ID NO: 205083 - RNA, 17 nt, Homo sapiens
auuuuuauagacaaaua

SEQ ID NO: 205084 - RNA, 18 nt, Homo sapiens
aguucauauguaccaugu

SEQ ID NO: 205085 - RNA, 22 nt, Homo sapiens
uaagucaaccugccugacauuu

SEQ ID NO: 205086 - RNA, 13 nt, Homo sapiens
ugggaacuccuaa

SEQ ID NO: 205087 - RNA, 19 nt, Homo sapiens
guaugauccuaaugaaugc

SEQ ID NO: 205088 - RNA, 23 nt, Homo sapiens
cuuguaaaugugguaaagaguua

SEQ ID NO: 205089 - RNA, 22 nt, Homo sapiens
caguauuuuccaaacuaccuuc

SEQ ID NO: 205090 - RNA, 18 nt, Homo sapiens
ucacagagugcauuguga

SEQ ID NO: 205091 - RNA, 17 nt, Homo sapiens
ucuguuccccauggcca

SEQ ID NO: 205092 - RNA, 15 nt, Homo sapiens
cuccccacugcucau

SEQ ID NO: 205093 - RNA, 15 nt, Homo sapiens
uucacuuuugacaaa

SEQ ID NO: 205094 - RNA, 11 nt, Homo sapiens
cuuccauuugc

SEQ ID NO: 205095 - RNA, 21 nt, Homo sapiens
uuuucuaagaaagaaauugua

SEQ ID NO: 205096 - RNA, 13 nt, Homo sapiens
gucccuuggagac

SEQ ID NO: 205097 - RNA, 16 nt, Homo sapiens
acuguaacacuuuaca

SEQ ID NO: 205098 - RNA, 14 nt, Homo sapiens
ugguaaaauacuuc

SEQ ID NO: 205099 - RNA, 17 nt, Homo sapiens
uucacagaugugugauu

SEQ ID NO: 205100 - RNA, 21 nt, Homo sapiens
ucucagcuggaucuccauucu

SEQ ID NO: 205101 - RNA, 20 nt, Homo sapiens
aagacuucaguauguuguca

SEQ ID NO: 205102 - RNA, 21 nt, Homo sapiens
aaaugcccaucuaugucccuu

SEQ ID NO: 205103 - RNA, 14 nt, Homo sapiens
acuccuaaaucaag

SEQ ID NO: 205104 - RNA, 18 nt, Homo sapiens
gccauuguuucuccuggg

SEQ ID NO: 205105 - RNA, 14 nt, Homo sapiens
cuguuauagagggu

SEQ ID NO: 205106 - RNA, 21 nt, Homo sapiens
gggaaggguccaucucagaga

SEQ ID NO: 205107 - RNA, 20 nt, Homo sapiens
uccugugaaugccacugccu

SEQ ID NO: 205108 - RNA, 17 nt, Homo sapiens
aguacuggcaugguacg

SEQ ID NO: 205109 - RNA, 22 nt, Homo sapiens
aucugugcaaauccuugauacu

SEQ ID NO: 205110 - RNA, 23 nt, Homo sapiens
cugaauagcagaagguugcaccu

SEQ ID NO: 205111 - RNA, 20 nt, Homo sapiens
cacuugccccuguuaccuaa

SEQ ID NO: 205112 - RNA, 14 nt, Homo sapiens
ugcuuaaaauagca

SEQ ID NO: 205113 - RNA, 15 nt, Homo sapiens
aaaacacugugcaca

SEQ ID NO: 205114 - RNA, 18 nt, Homo sapiens
aguuccuugaucuguaua

SEQ ID NO: 205115 - RNA, 21 nt, Homo sapiens
agacugggucucgcuuuguug

SEQ ID NO: 205116 - RNA, 14 nt, Homo sapiens
cuccugugcaacuu

SEQ ID NO: 205117 - RNA, 19 nt, Homo sapiens
agggcuccugcacuuacuu

SEQ ID NO: 205118 - RNA, 12 nt, Homo sapiens
augaugaucugg

SEQ ID NO: 205119 - RNA, 23 nt, Homo sapiens
uccacggagccacuccucugacu

SEQ ID NO: 205120 - RNA, 22 nt, Homo sapiens
agauguaagaaauguucuugca

SEQ ID NO: 205121 - RNA, 21 nt, Homo sapiens
gccugagguuugccagcauuu

SEQ ID NO: 205122 - RNA, 15 nt, Homo sapiens
cuuuggaaaucacac

SEQ ID NO: 205123 - RNA, 22 nt, Homo sapiens
uaaugaaauaauguacaucugg

SEQ ID NO: 205124 - RNA, 18 nt, Homo sapiens
ucacauucgaguguuuca

SEQ ID NO: 205125 - RNA, 15 nt, Homo sapiens
uaugccucuguauuu

SEQ ID NO: 205126 - RNA, 17 nt, Homo sapiens
aaggugagcaaagggcu

SEQ ID NO: 205127 - RNA, 21 nt, Homo sapiens
guaucaaaugugacauuauau

SEQ ID NO: 205128 - RNA, 13 nt, Homo sapiens
ucuagaacuugac

SEQ ID NO: 205129 - RNA, 23 nt, Homo sapiens
caaacagccccucuggacacagc

SEQ ID NO: 205130 - RNA, 18 nt, Homo sapiens
caugagaccacuguuauc

SEQ ID NO: 205131 - RNA, 20 nt, Homo sapiens
gggucucgcuuuguugccca

SEQ ID NO: 205132 - RNA, 18 nt, Homo sapiens
caggaguuggaagugugu

SEQ ID NO: 205133 - RNA, 14 nt, Homo sapiens
accaccaagccaag

SEQ ID NO: 205134 - RNA, 21 nt, Homo sapiens
gcaaaacucuacuuaauccaa

SEQ ID NO: 205135 - RNA, 20 nt, Homo sapiens
uuuguuuuguaucauuauga

SEQ ID NO: 205136 - RNA, 20 nt, Homo sapiens
gguauaaugguugacugggu

SEQ ID NO: 205137 - RNA, 15 nt, Homo sapiens
caaaugccacacggc

SEQ ID NO: 205138 - RNA, 15 nt, Homo sapiens
gcuggcccagccaaa

SEQ ID NO: 205139 - RNA, 17 nt, Homo sapiens
cucaucccgagcaccuc

SEQ ID NO: 205140 - RNA, 13 nt, Homo sapiens
uaaacugugcacc

SEQ ID NO: 205141 - RNA, 14 nt, Homo sapiens
auucucacuccuac

SEQ ID NO: 205142 - RNA, 19 nt, Homo sapiens
augaauugcauuuuacuuu

SEQ ID NO: 205143 - RNA, 21 nt, Homo sapiens
augcaagcaagaaacacuggg

SEQ ID NO: 205144 - RNA, 18 nt, Homo sapiens
ucucgcuuuguugcccag

SEQ ID NO: 205145 - RNA, 20 nt, Homo sapiens
cccuggggagucugggcaca

SEQ ID NO: 205146 - RNA, 21 nt, Homo sapiens
acugccaucaagaugagagaa

SEQ ID NO: 205147 - RNA, 14 nt, Homo sapiens
cccauaucugugaa

SEQ ID NO: 205148 - RNA, 21 nt, Homo sapiens
cuucaguauguugucaaagag

SEQ ID NO: 205149 - RNA, 19 nt, Homo sapiens
agcuuggcuguagaaggag

SEQ ID NO: 205150 - RNA, 16 nt, Homo sapiens
ugcaacaguagcauag

SEQ ID NO: 205151 - RNA, 19 nt, Homo sapiens
cucacaccuguaaucccag

SEQ ID NO: 205152 - RNA, 15 nt, Homo sapiens
uacauuaauuaccuu

SEQ ID NO: 205153 - RNA, 18 nt, Homo sapiens
gauccacuucucucagga

SEQ ID NO: 205154 - RNA, 20 nt, Homo sapiens
agcaguuaguuccuucauga

SEQ ID NO: 205155 - RNA, 17 nt, Homo sapiens
augagaaggaauuugag

SEQ ID NO: 205156 - RNA, 20 nt, Homo sapiens
ccagcacuuugggaggccaa

SEQ ID NO: 205157 - RNA, 19 nt, Homo sapiens
aguguuuggguauauucau

SEQ ID NO: 205158 - RNA, 14 nt, Homo sapiens
gaaugcagggacaa

SEQ ID NO: 205159 - RNA, 14 nt, Homo sapiens
caugaaaacagaaa

SEQ ID NO: 205160 - RNA, 17 nt, Homo sapiens
augggaaccccuucauc

SEQ ID NO: 205161 - RNA, 14 nt, Homo sapiens
ucuguuaccagagg

SEQ ID NO: 205162 - RNA, 12 nt, Homo sapiens
gccagguggcca

SEQ ID NO: 205163 - RNA, 19 nt, Homo sapiens
ucauaauuucuucacucaa

SEQ ID NO: 205164 - RNA, 19 nt, Homo sapiens
uuugaauacaggcauagag

SEQ ID NO: 205165 - RNA, 22 nt, Homo sapiens
aucucaaacuacuggcaauuug

SEQ ID NO: 205166 - RNA, 23 nt, Homo sapiens
cauauucuuauguaugugaaagu

SEQ ID NO: 205167 - RNA, 19 nt, Homo sapiens
cugucacguagaacuugga

SEQ ID NO: 205168 - RNA, 14 nt, Homo sapiens
ccccaauccaugaa

SEQ ID NO: 205169 - RNA, 18 nt, Homo sapiens
ccugacagaaggacucag

SEQ ID NO: 205170 - RNA, 14 nt, Homo sapiens
gccugcggaccaga

SEQ ID NO: 205171 - RNA, 17 nt, Homo sapiens
gauacugcgacuuucug

SEQ ID NO: 205172 - RNA, 18 nt, Homo sapiens
ugggagacugcugaguca

SEQ ID NO: 205173 - RNA, 22 nt, Homo sapiens
ucacuaggcccccacuugccuc

SEQ ID NO: 205174 - RNA, 23 nt, Homo sapiens
cuucagcucacacaugagaucua

SEQ ID NO: 205175 - RNA, 14 nt, Homo sapiens
ugaaucacaguaua

SEQ ID NO: 205176 - RNA, 16 nt, Homo sapiens
ggcagcauuuagcaca

SEQ ID NO: 205177 - RNA, 17 nt, Homo sapiens
cucugggccaagucaaa

SEQ ID NO: 205178 - RNA, 19 nt, Homo sapiens
aaugaugucguuugaauca

SEQ ID NO: 205179 - RNA, 20 nt, Homo sapiens
gacuggguuuugugauugcc

SEQ ID NO: 205180 - RNA, 12 nt, Homo sapiens
uugugauugccu

SEQ ID NO: 205181 - RNA, 13 nt, Homo sapiens
cacuggguugacu

SEQ ID NO: 205182 - RNA, 19 nt, Homo sapiens
ucacgaaguuuguucauca

SEQ ID NO: 205183 - RNA, 18 nt, Homo sapiens
uuuaucuauggcacccau

SEQ ID NO: 205184 - RNA, 14 nt, Homo sapiens
auguaaaugugcau

SEQ ID NO: 205185 - RNA, 20 nt, Homo sapiens
uaaaauguugaaaagucaaa

SEQ ID NO: 205186 - RNA, 20 nt, Homo sapiens
auauugcagcuuauauucau

SEQ ID NO: 205187 - RNA, 16 nt, Homo sapiens
accgagucucuucucc

SEQ ID NO: 205188 - RNA, 16 nt, Homo sapiens
aucucuuauuuuacaa

SEQ ID NO: 205189 - RNA, 16 nt, Homo sapiens
ucuggucgcuccugcc

SEQ ID NO: 205190 - RNA, 15 nt, Homo sapiens
cugagugcaccacuu

SEQ ID NO: 205191 - RNA, 19 nt, Homo sapiens
uggguuggaaaacaguauu

SEQ ID NO: 205192 - RNA, 23 nt, Homo sapiens
cccagcccagggcuccugcacuu

SEQ ID NO: 205193 - RNA, 14 nt, Homo sapiens
ucagcuggaucucc

SEQ ID NO: 205194 - RNA, 17 nt, Homo sapiens
aaaugaaaaugucuugu

SEQ ID NO: 205195 - RNA, 18 nt, Homo sapiens
ucacugcuggcugccuua

SEQ ID NO: 205196 - RNA, 18 nt, Homo sapiens
auuuagacccugcauuua

SEQ ID NO: 205197 - RNA, 14 nt, Homo sapiens
cuccugaagccaca

SEQ ID NO: 205198 - RNA, 14 nt, Homo sapiens
ugcuuaaucuugcu

SEQ ID NO: 205199 - RNA, 22 nt, Homo sapiens
cuaaaauuguaucaaaugugac

SEQ ID NO: 205200 - RNA, 12 nt, Homo sapiens
uuccacugcugc

SEQ ID NO: 205201 - RNA, 15 nt, Homo sapiens
acagggcauggccag

SEQ ID NO: 205202 - RNA, 20 nt, Homo sapiens
gauaaguaaguuugauuuca

SEQ ID NO: 205203 - RNA, 21 nt, Homo sapiens
cagugaaugauucaguguuaa

SEQ ID NO: 205204 - RNA, 21 nt, Homo sapiens
ucgguauccccccaucuugcu

SEQ ID NO: 205205 - RNA, 17 nt, Homo sapiens
agugcugggauuacaau

SEQ ID NO: 205206 - RNA, 23 nt, Homo sapiens
cacuccgagaggugggccagucu

SEQ ID NO: 205207 - RNA, 23 nt, Homo sapiens
agucacugcacagugcaucucag

SEQ ID NO: 205208 - RNA, 20 nt, Homo sapiens
uucaggacacagggaaauca

SEQ ID NO: 205209 - RNA, 15 nt, Homo sapiens
cagauccccagccuc

SEQ ID NO: 205210 - RNA, 21 nt, Homo sapiens
cuuuuaaacccuauugguaaa

SEQ ID NO: 205211 - RNA, 12 nt, Homo sapiens
cacagugugaau

SEQ ID NO: 205212 - RNA, 20 nt, Homo sapiens
agacuuagaaaaauccuaca

SEQ ID NO: 205213 - RNA, 22 nt, Homo sapiens
agcugggagcacaggcacugca

SEQ ID NO: 205214 - RNA, 17 nt, Homo sapiens
ucuaugaaauaucaugc

SEQ ID NO: 205215 - RNA, 13 nt, Homo sapiens
cugccccaugcug

SEQ ID NO: 205216 - RNA, 15 nt, Homo sapiens
ucguuugaaucacag

SEQ ID NO: 205217 - RNA, 18 nt, Homo sapiens
uaauccagaaaaacugug

SEQ ID NO: 205218 - RNA, 19 nt, Homo sapiens
aaugccacacggcucucac

SEQ ID NO: 205219 - RNA, 13 nt, Homo sapiens
acaaauugcuuga

SEQ ID NO: 205220 - RNA, 20 nt, Homo sapiens
cagaacuuaaggauggagcc

SEQ ID NO: 205221 - RNA, 23 nt, Homo sapiens
uuugccauauuuucaccauuuga

SEQ ID NO: 205222 - RNA, 13 nt, Homo sapiens
uguugaacaauag

SEQ ID NO: 205223 - RNA, 13 nt, Homo sapiens
auuugagugcucu

SEQ ID NO: 205224 - RNA, 16 nt, Homo sapiens
acccucuaagggaccu

SEQ ID NO: 205225 - RNA, 16 nt, Homo sapiens
cuuuuggagguauuca

SEQ ID NO: 205226 - RNA, 18 nt, Homo sapiens
caggcccuuccucuccac

SEQ ID NO: 205227 - RNA, 16 nt, Homo sapiens
agccucaagaugaagg

SEQ ID NO: 205228 - RNA, 13 nt, Homo sapiens
ggagcacuggguu

SEQ ID NO: 205229 - RNA, 14 nt, Homo sapiens
auuaccuugugcua

SEQ ID NO: 205230 - RNA, 17 nt, Homo sapiens
auaagaggugcuacuga

SEQ ID NO: 205231 - RNA, 18 nt, Homo sapiens
cuugaucuguauauacaa

SEQ ID NO: 205232 - RNA, 12 nt, Homo sapiens
acgagcagggau

SEQ ID NO: 205233 - RNA, 16 nt, Homo sapiens
uauauguauaugcaau

SEQ ID NO: 205234 - RNA, 17 nt, Homo sapiens
gagccaccccuaaagag

SEQ ID NO: 205235 - RNA, 19 nt, Homo sapiens
ucucaggaccaaagcuuuc

SEQ ID NO: 205236 - RNA, 18 nt, Homo sapiens
ucacucaaucucugauuc

SEQ ID NO: 205237 - RNA, 16 nt, Homo sapiens
agaccuaggauuucau

SEQ ID NO: 205238 - RNA, 21 nt, Homo sapiens
ugccagcauuuagacccugca

SEQ ID NO: 205239 - RNA, 12 nt, Homo sapiens
uauaugcaauau

SEQ ID NO: 205240 - RNA, 13 nt, Homo sapiens
ugggaccacagac

SEQ ID NO: 205241 - RNA, 16 nt, Homo sapiens
augagaccacuguuau

SEQ ID NO: 205242 - RNA, 23 nt, Homo sapiens
cuuguuccccacugacagccucc

SEQ ID NO: 205243 - RNA, 16 nt, Homo sapiens
cgugaaaaugcuguau

SEQ ID NO: 205244 - RNA, 14 nt, Homo sapiens
gucuuugaacccuu

SEQ ID NO: 205245 - RNA, 13 nt, Homo sapiens
cucaggucagggu

SEQ ID NO: 205246 - RNA, 23 nt, Homo sapiens
aguuuauagaccagaaccagagc

SEQ ID NO: 205247 - RNA, 22 nt, Homo sapiens
cacaggcagcauuuagcacaua

SEQ ID NO: 205248 - RNA, 14 nt, Homo sapiens
ucaaauagcauaag

SEQ ID NO: 205249 - RNA, 17 nt, Homo sapiens
guuaggaaaauuucaca

SEQ ID NO: 205250 - RNA, 18 nt, Homo sapiens
gaacaaaaaaaucugcag

SEQ ID NO: 205251 - RNA, 20 nt, Homo sapiens
augcaucaaguuauugacaa

SEQ ID NO: 205252 - RNA, 21 nt, Homo sapiens
augucguuugaaucacaguau

SEQ ID NO: 205253 - RNA, 22 nt, Homo sapiens
agagaacaaugugcuaugugaa

SEQ ID NO: 205254 - RNA, 22 nt, Homo sapiens
uggggagaaaagacaugaauau

SEQ ID NO: 205255 - RNA, 21 nt, Homo sapiens
aggaugagcauuuagggcaag

SEQ ID NO: 205256 - RNA, 23 nt, Homo sapiens
cuagguucuaaaaauugugauca

SEQ ID NO: 205257 - RNA, 19 nt, Homo sapiens
augugggugggaccacaga

SEQ ID NO: 205258 - RNA, 19 nt, Homo sapiens
uaugugggugggaccacag

SEQ ID NO: 205259 - RNA, 12 nt, Homo sapiens
accucaguuuua

SEQ ID NO: 205260 - RNA, 23 nt, Homo sapiens
ucaggcgauccaccugucucagc

SEQ ID NO: 205261 - RNA, 20 nt, Homo sapiens
gugcccccagacgcacgugg

SEQ ID NO: 205262 - RNA, 20 nt, Homo sapiens
ugaucagcgccgcaccagcc

SEQ ID NO: 205263 - RNA, 17 nt, Homo sapiens
uugagccuuaaaaccca

SEQ ID NO: 205264 - RNA, 13 nt, Homo sapiens
caaauguauuuca

SEQ ID NO: 205265 - RNA, 15 nt, Homo sapiens
uccccuuccacugag

SEQ ID NO: 205266 - RNA, 17 nt, Homo sapiens
acgugggcggcagagag

SEQ ID NO: 205267 - RNA, 19 nt, Homo sapiens
augugacauuauaugcacu

SEQ ID NO: 205268 - RNA, 15 nt, Homo sapiens
aacaguaacugccau

SEQ ID NO: 205269 - RNA, 14 nt, Homo sapiens
guaucaaaugugac

SEQ ID NO: 205270 - RNA, 17 nt, Homo sapiens
acaugagaucuagguga

SEQ ID NO: 205271 - RNA, 16 nt, Homo sapiens
acauucgaguguuuca

SEQ ID NO: 205272 - RNA, 22 nt, Homo sapiens
auguggccuaaaaaugcaacuu

SEQ ID NO: 205273 - RNA, 15 nt, Homo sapiens
ugucacccaaugcau

SEQ ID NO: 205274 - RNA, 18 nt, Homo sapiens
uaaaguaguccugugaau

SEQ ID NO: 205275 - RNA, 14 nt, Homo sapiens
gauguagugccucu

SEQ ID NO: 205276 - RNA, 16 nt, Homo sapiens
uugcuggcaaagacag

SEQ ID NO: 205277 - RNA, 20 nt, Homo sapiens
acuuucagguacuaaauacc

SEQ ID NO: 205278 - RNA, 14 nt, Homo sapiens
caggcuggccaguc

SEQ ID NO: 205279 - RNA, 15 nt, Homo sapiens
auuguuaaaauaacu

SEQ ID NO: 205280 - RNA, 19 nt, Homo sapiens
ugguucccccacugaucac

SEQ ID NO: 205281 - RNA, 21 nt, Homo sapiens
accgagucucuucuccacugg

SEQ ID NO: 205282 - RNA, 15 nt, Homo sapiens
uaccuaguagucauu

SEQ ID NO: 205283 - RNA, 13 nt, Homo sapiens
gaaacaacucuuu

SEQ ID NO: 205284 - RNA, 21 nt, Homo sapiens
cacuucuuguuccccacugac

SEQ ID NO: 205285 - RNA, 16 nt, Homo sapiens
auaauguuacauuauu

SEQ ID NO: 205286 - RNA, 19 nt, Homo sapiens
ugugucccccucuguccag

SEQ ID NO: 205287 - RNA, 15 nt, Homo sapiens
uuagugauggagcuu

SEQ ID NO: 205288 - RNA, 16 nt, Homo sapiens
uaggcagacacaggga

SEQ ID NO: 205289 - RNA, 15 nt, Homo sapiens
aagcaguuaguuccu

SEQ ID NO: 205290 - RNA, 18 nt, Homo sapiens
ucccacccccaucucucc

SEQ ID NO: 205291 - RNA, 21 nt, Homo sapiens
aguguugaugcuuucgucucc

SEQ ID NO: 205292 - RNA, 21 nt, Homo sapiens
agagguuucuggcagccagua

SEQ ID NO: 205293 - RNA, 19 nt, Homo sapiens
gccaagggaaccugugucc

SEQ ID NO: 205294 - RNA, 13 nt, Homo sapiens
auagagccugagg

SEQ ID NO: 205295 - RNA, 12 nt, Homo sapiens
uccccacugcuc

SEQ ID NO: 205296 - RNA, 23 nt, Homo sapiens
cauuaguuguuagugauggagcu

SEQ ID NO: 205297 - RNA, 14 nt, Homo sapiens
ucuaagucuuucca

SEQ ID NO: 205298 - RNA, 17 nt, Homo sapiens
uccuccacaauagcaga

SEQ ID NO: 205299 - RNA, 18 nt, Homo sapiens
cauaugauugugcacaua

SEQ ID NO: 205300 - RNA, 17 nt, Homo sapiens
uauuauucuucauaaca

SEQ ID NO: 205301 - RNA, 17 nt, Homo sapiens
auggcccugcaaaagga

SEQ ID NO: 205302 - RNA, 12 nt, Homo sapiens
ugauauugcagc

SEQ ID NO: 205303 - RNA, 18 nt, Homo sapiens
ccugugcaacuuucccaa

SEQ ID NO: 205304 - RNA, 21 nt, Homo sapiens
aaauucauuaguuguuaguga

SEQ ID NO: 205305 - RNA, 23 nt, Homo sapiens
guaugaggucuaggaacauacuu

SEQ ID NO: 205306 - RNA, 24 nt, Homo sapiens
gagggaacccucuaagggaccuca

SEQ ID NO: 205307 - RNA, 11 nt, Homo sapiens
ccacagacuca

SEQ ID NO: 205308 - RNA, 17 nt, Homo sapiens
cagcuuauauucaucca

SEQ ID NO: 205309 - RNA, 14 nt, Homo sapiens
ucugcucaucauuc

SEQ ID NO: 205310 - RNA, 21 nt, Homo sapiens
uggacuauggcucuacuuuca

SEQ ID NO: 205311 - RNA, 12 nt, Homo sapiens
aguuaaggguua

SEQ ID NO: 205312 - RNA, 21 nt, Homo sapiens
ccuccucuacaauuugccauu

SEQ ID NO: 205313 - RNA, 21 nt, Homo sapiens
cuucuuaauauaacugccuua

SEQ ID NO: 205314 - RNA, 13 nt, Homo sapiens
uucagaaagaagu

SEQ ID NO: 205315 - RNA, 23 nt, Homo sapiens
caaagcaaggaaacuauguaaca

SEQ ID NO: 205316 - RNA, 16 nt, Homo sapiens
gcauucagccaggaga

SEQ ID NO: 205317 - RNA, 23 nt, Homo sapiens
cuaacacccagucuguuccccau

SEQ ID NO: 205318 - RNA, 21 nt, Homo sapiens
aauguuauuuuuuaauuauua

SEQ ID NO: 205319 - RNA, 20 nt, Homo sapiens
gaagaacaguaacugccauc

SEQ ID NO: 205320 - RNA, 16 nt, Homo sapiens
agggccacaugggagg

SEQ ID NO: 205321 - RNA, 15 nt, Homo sapiens
uguggguaccuguau

SEQ ID NO: 205322 - RNA, 21 nt, Homo sapiens
caucucccagauaaugugaaa

SEQ ID NO: 205323 - RNA, 15 nt, Homo sapiens
ccuuuguacuuugug

SEQ ID NO: 205324 - RNA, 17 nt, Homo sapiens
gaguugucaagucucug

SEQ ID NO: 205325 - RNA, 14 nt, Homo sapiens
ugacaccuuucaua

SEQ ID NO: 205326 - RNA, 12 nt, Homo sapiens
gaauuugagugc

SEQ ID NO: 205327 - RNA, 23 nt, Homo sapiens
gaugucucacauccucugucuau

SEQ ID NO: 205328 - RNA, 18 nt, Homo sapiens
ucccagcuacaccuuucu

SEQ ID NO: 205329 - RNA, 21 nt, Homo sapiens
cacccuuccccuccuucuccc

SEQ ID NO: 205330 - RNA, 22 nt, Homo sapiens
cccauuugcuuacuuugcauuu

SEQ ID NO: 205331 - RNA, 16 nt, Homo sapiens
aauaaauguacauuaa

SEQ ID NO: 205332 - RNA, 12 nt, Homo sapiens
uucuguggcuca

SEQ ID NO: 205333 - RNA, 19 nt, Homo sapiens
gccacacggcucucaccag

SEQ ID NO: 205334 - RNA, 20 nt, Homo sapiens
aagaugcauuaucuaugaua

SEQ ID NO: 205335 - RNA, 22 nt, Homo sapiens
aaugucuuuccuuuugcucuua

SEQ ID NO: 205336 - RNA, 20 nt, Homo sapiens
guccuuagccccaucugcca

SEQ ID NO: 205337 - RNA, 22 nt, Homo sapiens
cccagagugcugggauuacaau

SEQ ID NO: 205338 - RNA, 14 nt, Homo sapiens
cucaaccuauggua

SEQ ID NO: 205339 - RNA, 14 nt, Homo sapiens
aaucccuccuucau

SEQ ID NO: 205340 - RNA, 17 nt, Homo sapiens
ccugcaaaaggacucuc

SEQ ID NO: 205341 - RNA, 13 nt, Homo sapiens
ccauggaggcaca

SEQ ID NO: 205342 - RNA, 17 nt, Homo sapiens
ugauccacuucucucag

SEQ ID NO: 205343 - RNA, 13 nt, Homo sapiens
caaccuaugguau

SEQ ID NO: 205344 - RNA, 19 nt, Homo sapiens
aguuugauuguuguuuaua

SEQ ID NO: 205345 - RNA, 22 nt, Homo sapiens
acugcagggaaaauuauuugca

SEQ ID NO: 205346 - RNA, 21 nt, Homo sapiens
cacuugccccuguuaccuaau

SEQ ID NO: 205347 - RNA, 15 nt, Homo sapiens
ugccuucaccuccuc

SEQ ID NO: 205348 - RNA, 20 nt, Homo sapiens
ucagcaaaaagcaaaaucau

SEQ ID NO: 205349 - RNA, 23 nt, Homo sapiens
uccuuuguuuuuuuuuccugucc

SEQ ID NO: 205350 - RNA, 14 nt, Homo sapiens
auuacaauugugag

SEQ ID NO: 205351 - RNA, 20 nt, Homo sapiens
acuugcacaaaaucacacag

SEQ ID NO: 205352 - RNA, 13 nt, Homo sapiens
ugaaaaaugccuc

SEQ ID NO: 205353 - RNA, 17 nt, Homo sapiens
uccagaccauucaggac

SEQ ID NO: 205354 - RNA, 18 nt, Homo sapiens
cauaauuucuucacucaa

SEQ ID NO: 205355 - RNA, 13 nt, Homo sapiens
augugugauucac

SEQ ID NO: 205356 - RNA, 15 nt, Homo sapiens
guauauucauuucaa

SEQ ID NO: 205357 - RNA, 13 nt, Homo sapiens
uaccuugugcuaa

SEQ ID NO: 205358 - RNA, 14 nt, Homo sapiens
uaccaaucauuuua

SEQ ID NO: 205359 - RNA, 22 nt, Homo sapiens
acaaaugccacacggcucucac

SEQ ID NO: 205360 - RNA, 12 nt, Homo sapiens
ucaaugcuauaa

SEQ ID NO: 205361 - RNA, 17 nt, Homo sapiens
aggagguuuaggucaag

SEQ ID NO: 205362 - RNA, 19 nt, Homo sapiens
ccugccuguggcgccgucu

SEQ ID NO: 205363 - RNA, 18 nt, Homo sapiens
uguuucuuuuguauguaa

SEQ ID NO: 205364 - RNA, 13 nt, Homo sapiens
ugugcucagggaa

SEQ ID NO: 205365 - RNA, 16 nt, Homo sapiens
cagugaccagucacug

SEQ ID NO: 205366 - RNA, 19 nt, Homo sapiens
cuaaaauuagaugaacuca

SEQ ID NO: 205367 - RNA, 20 nt, Homo sapiens
aaccaaaucuggaagccaaa

SEQ ID NO: 205368 - RNA, 19 nt, Homo sapiens
cuccuggaagcgagcuuug

SEQ ID NO: 205369 - RNA, 14 nt, Homo sapiens
ccacaaaaguacaa

SEQ ID NO: 205370 - RNA, 21 nt, Homo sapiens
cuguguauuuaacugccuugu

SEQ ID NO: 205371 - RNA, 14 nt, Homo sapiens
cugcaagcacugca

SEQ ID NO: 205372 - RNA, 22 nt, Homo sapiens
cgcugagcgaggagaugcuccu

SEQ ID NO: 205373 - RNA, 17 nt, Homo sapiens
acaaauugcuugaaaga

SEQ ID NO: 205374 - RNA, 17 nt, Homo sapiens
gugcuaucgcaccacug

SEQ ID NO: 205375 - RNA, 14 nt, Homo sapiens
cuuccacugagggc

SEQ ID NO: 205376 - RNA, 15 nt, Homo sapiens
acaucugcauuuuca

SEQ ID NO: 205377 - RNA, 20 nt, Homo sapiens
cacacccuggaggauuucau

SEQ ID NO: 205378 - RNA, 18 nt, Homo sapiens
ugugucccccucugucca

SEQ ID NO: 205379 - RNA, 19 nt, Homo sapiens
ucugugggcuccauguaga

SEQ ID NO: 205380 - RNA, 16 nt, Homo sapiens
cucucaccuccuaaag

SEQ ID NO: 205381 - RNA, 12 nt, Homo sapiens
ugagcugugcag

SEQ ID NO: 205382 - RNA, 21 nt, Homo sapiens
agggaacccucuaagggaccu

SEQ ID NO: 205383 - RNA, 20 nt, Homo sapiens
uaugucacccaaugcauauc

SEQ ID NO: 205384 - RNA, 15 nt, Homo sapiens
agacuccugugcaac

SEQ ID NO: 205385 - RNA, 22 nt, Homo sapiens
agucuucauaauuucuucacuc

SEQ ID NO: 205386 - RNA, 20 nt, Homo sapiens
uccaacaugugcucagggaa

SEQ ID NO: 205387 - RNA, 16 nt, Homo sapiens
cauacuacacauucaa

SEQ ID NO: 205388 - RNA, 18 nt, Homo sapiens
uuugccagugggaacucc

SEQ ID NO: 205389 - RNA, 22 nt, Homo sapiens
auagagggucuaagauucaucc

SEQ ID NO: 205390 - RNA, 14 nt, Homo sapiens
gccucuguggcacu

SEQ ID NO: 205391 - RNA, 23 nt, Homo sapiens
gcaaggaaacuauguaacaugua

SEQ ID NO: 205392 - RNA, 15 nt, Homo sapiens
gccaggcagauccca

SEQ ID NO: 205393 - RNA, 23 nt, Homo sapiens
auauguugaugaaaaauagcaac

SEQ ID NO: 205394 - RNA, 20 nt, Homo sapiens
gaauguauugaacuuggaaa

SEQ ID NO: 205395 - RNA, 21 nt, Homo sapiens
agacaccuuggacauccuccu

SEQ ID NO: 205396 - RNA, 17 nt, Homo sapiens
aucaagcccuuuacuug

SEQ ID NO: 205397 - RNA, 19 nt, Homo sapiens
uccacguucugcucaucau

SEQ ID NO: 205398 - RNA, 22 nt, Homo sapiens
caggcagcauuuagcacauacu

SEQ ID NO: 205399 - RNA, 17 nt, Homo sapiens
guuucugguggucuguu

SEQ ID NO: 205400 - RNA, 18 nt, Homo sapiens
gauacuguaacacuuuac

SEQ ID NO: 205401 - RNA, 14 nt, Homo sapiens
cucucaccuccuaa

SEQ ID NO: 205402 - RNA, 20 nt, Homo sapiens
gaaauacugaggggucucca

SEQ ID NO: 205403 - RNA, 18 nt, Homo sapiens
uaaaggcucgauuuugua

SEQ ID NO: 205404 - RNA, 22 nt, Homo sapiens
cuucuuaauauaacugccuuaa

SEQ ID NO: 205405 - RNA, 16 nt, Homo sapiens
gaaaacacugugcaca

SEQ ID NO: 205406 - RNA, 23 nt, Homo sapiens
acucuuaguuacucauucaggga

SEQ ID NO: 205407 - RNA, 21 nt, Homo sapiens
ucaggaaggaugagcauuuag

SEQ ID NO: 205408 - RNA, 13 nt, Homo sapiens
augcagggacaaa

SEQ ID NO: 205409 - RNA, 14 nt, Homo sapiens
cucccuuacccucc

SEQ ID NO: 205410 - RNA, 13 nt, Homo sapiens
cuugcugccugaa

SEQ ID NO: 205411 - RNA, 22 nt, Homo sapiens
aucuaugaaauaucaugcucca

SEQ ID NO: 205412 - RNA, 17 nt, Homo sapiens
aaugcuggcauuugcac

SEQ ID NO: 205413 - RNA, 15 nt, Homo sapiens
acugcaagcacugca

SEQ ID NO: 205414 - RNA, 21 nt, Homo sapiens
cucuggacacagccccaugua

SEQ ID NO: 205415 - RNA, 17 nt, Homo sapiens
acccacaaaaguacaau

SEQ ID NO: 205416 - RNA, 19 nt, Homo sapiens
aaaacccacaaaaguacaa

SEQ ID NO: 205417 - RNA, 15 nt, Homo sapiens
agccaaguuaagaau

SEQ ID NO: 205418 - RNA, 15 nt, Homo sapiens
acaaucuguauauaa

SEQ ID NO: 205419 - RNA, 21 nt, Homo sapiens
cuuuuuucacggaaguuuuca

SEQ ID NO: 205420 - RNA, 12 nt, Homo sapiens
caguguguuucu

SEQ ID NO: 205421 - RNA, 16 nt, Homo sapiens
augugugauucacagu

SEQ ID NO: 205422 - RNA, 15 nt, Homo sapiens
uguaaacugugcacc

SEQ ID NO: 205423 - RNA, 14 nt, Homo sapiens
aaauuguauuauca

SEQ ID NO: 205424 - RNA, 18 nt, Homo sapiens
uuucagguuccaaucaga

SEQ ID NO: 205425 - RNA, 19 nt, Homo sapiens
gcugcuuccuccuggaaau

SEQ ID NO: 205426 - RNA, 16 nt, Homo sapiens
uuccccuuccacugag

SEQ ID NO: 205427 - RNA, 18 nt, Homo sapiens
guaaagaguuaguuugag

SEQ ID NO: 205428 - RNA, 13 nt, Homo sapiens
cagguaaggugag

SEQ ID NO: 205429 - RNA, 13 nt, Homo sapiens
cacaucugcauuu

SEQ ID NO: 205430 - RNA, 22 nt, Homo sapiens
cucugggccaagucaaagacau

SEQ ID NO: 205431 - RNA, 16 nt, Homo sapiens
ugcggaguugugcacg

SEQ ID NO: 205432 - RNA, 22 nt, Homo sapiens
cauguacacggccucaagggau

SEQ ID NO: 205433 - RNA, 22 nt, Homo sapiens
cauggcuuaguuuucauacaca

SEQ ID NO: 205434 - RNA, 20 nt, Homo sapiens
cuuuugcuggucacugccau

SEQ ID NO: 205435 - RNA, 18 nt, Homo sapiens
cacaaaauaaccaauccu

SEQ ID NO: 205436 - RNA, 18 nt, Homo sapiens
ucucacuugugcaguguu

SEQ ID NO: 205437 - RNA, 18 nt, Homo sapiens
cuguucugucucauauga

SEQ ID NO: 205438 - RNA, 18 nt, Homo sapiens
cccuaagcagaccacuga

SEQ ID NO: 205439 - RNA, 22 nt, Homo sapiens
cugggcccucucugcucugcgu

SEQ ID NO: 205440 - RNA, 12 nt, Homo sapiens
cacuucucucag

SEQ ID NO: 205441 - RNA, 17 nt, Homo sapiens
aaagccugccucuucca

SEQ ID NO: 205442 - RNA, 23 nt, Homo sapiens
uuuaaauacagucuuccauuugc

SEQ ID NO: 205443 - RNA, 13 nt, Homo sapiens
ugggcagagccca

SEQ ID NO: 205444 - RNA, 14 nt, Homo sapiens
ugcccacucuccac

SEQ ID NO: 205445 - RNA, 23 nt, Homo sapiens
agcuggaagggucaacaucuuuu

SEQ ID NO: 205446 - RNA, 17 nt, Homo sapiens
ucuuuuaagcccaucaa

SEQ ID NO: 205447 - RNA, 17 nt, Homo sapiens
auaaauguacauuaauu

SEQ ID NO: 205448 - RNA, 14 nt, Homo sapiens
auugauuaccaagu

SEQ ID NO: 205449 - RNA, 13 nt, Homo sapiens
gccacggcagccu

SEQ ID NO: 205450 - RNA, 23 nt, Homo sapiens
ucugagcagugaaugauucagug

SEQ ID NO: 205451 - RNA, 13 nt, Homo sapiens
cagggccagucuu

SEQ ID NO: 205452 - RNA, 15 nt, Homo sapiens
agguggccacuccag

SEQ ID NO: 205453 - RNA, 24 nt, Homo sapiens
gagacaggguuuggcugugucuaa

SEQ ID NO: 205454 - RNA, 19 nt, Homo sapiens
cgcccccuccgcccugcca

SEQ ID NO: 205455 - RNA, 14 nt, Homo sapiens
ggagagugcaacag

SEQ ID NO: 205456 - RNA, 13 nt, Homo sapiens
ucugagcugugca

SEQ ID NO: 205457 - RNA, 19 nt, Homo sapiens
gaaaucuaugaaauaucau

SEQ ID NO: 205458 - RNA, 23 nt, Homo sapiens
ugaagaacugcaggcccuggccu

SEQ ID NO: 205459 - RNA, 17 nt, Homo sapiens
agaaagcucaucucagc

SEQ ID NO: 205460 - RNA, 13 nt, Homo sapiens
ugauauugcagcu

SEQ ID NO: 205461 - RNA, 20 nt, Homo sapiens
cuuucauccacuagugcaaa

SEQ ID NO: 205462 - RNA, 15 nt, Homo sapiens
cacugcaagcacugc

SEQ ID NO: 205463 - RNA, 13 nt, Homo sapiens
uauauucauuuca

SEQ ID NO: 205464 - RNA, 15 nt, Homo sapiens
ggagacuagauuuau

SEQ ID NO: 205465 - RNA, 22 nt, Homo sapiens
cauaccaaugaaaaaauguaua

SEQ ID NO: 205466 - RNA, 23 nt, Homo sapiens
ugcugagugcaccacuucaagug

SEQ ID NO: 205467 - RNA, 17 nt, Homo sapiens
gccaagccagucaagga

SEQ ID NO: 205468 - RNA, 12 nt, Homo sapiens
uuggaaaucaca

SEQ ID NO: 205469 - RNA, 20 nt, Homo sapiens
ggucucacaguguugcccag

SEQ ID NO: 205470 - RNA, 15 nt, Homo sapiens
gaccugacaccuuuc

SEQ ID NO: 205471 - RNA, 21 nt, Homo sapiens
cagucauaacuaaauaaagcu

SEQ ID NO: 205472 - RNA, 15 nt, Homo sapiens
uugugagccaccacg

SEQ ID NO: 205473 - RNA, 23 nt, Homo sapiens
ucucccuguuggucgguggguug

SEQ ID NO: 205474 - RNA, 14 nt, Homo sapiens
uucuuaggccacau

SEQ ID NO: 205475 - RNA, 22 nt, Homo sapiens
uuaagagaauauuuuaaguauu

SEQ ID NO: 205476 - RNA, 19 nt, Homo sapiens
ggcuggaguggaguggcgu

SEQ ID NO: 205477 - RNA, 22 nt, Homo sapiens
gcagagcuugaacacagucuca

SEQ ID NO: 205478 - RNA, 15 nt, Homo sapiens
cuuuguacuuugugc

SEQ ID NO: 205479 - RNA, 18 nt, Homo sapiens
cuuagaaauugcauuucc

SEQ ID NO: 205480 - RNA, 13 nt, Homo sapiens
guaggacauacca

SEQ ID NO: 205481 - RNA, 17 nt, Homo sapiens
auuauaauauacuauau

SEQ ID NO: 205482 - RNA, 15 nt, Homo sapiens
cagcuggaucuccau

SEQ ID NO: 205483 - RNA, 16 nt, Homo sapiens
uuucugaucugaugca

SEQ ID NO: 205484 - RNA, 23 nt, Homo sapiens
ucuuggggggguggccgcugagu

SEQ ID NO: 205485 - RNA, 22 nt, Homo sapiens
uaaagggagauaacaaucugua

SEQ ID NO: 205486 - RNA, 18 nt, Homo sapiens
augggaaggguccaucuc

SEQ ID NO: 205487 - RNA, 20 nt, Homo sapiens
cuauggcacccaugcaccuu

SEQ ID NO: 205488 - RNA, 15 nt, Homo sapiens
gggcuccauguagaa

SEQ ID NO: 205489 - RNA, 22 nt, Homo sapiens
cccagucagaguugugcacaug

SEQ ID NO: 205490 - RNA, 15 nt, Homo sapiens
uccauuugcuuuguc

SEQ ID NO: 205491 - RNA, 12 nt, Homo sapiens
ucauucagggau

SEQ ID NO: 205492 - RNA, 15 nt, Homo sapiens
uggcucuacuuucag

SEQ ID NO: 205493 - RNA, 20 nt, Homo sapiens
ugaugcaagcaagaaacacu

SEQ ID NO: 205494 - RNA, 16 nt, Homo sapiens
caaagacaaaggugag

SEQ ID NO: 205495 - RNA, 15 nt, Homo sapiens
aaucaaugcuauaac

SEQ ID NO: 205496 - RNA, 12 nt, Homo sapiens
agugauguaauc

SEQ ID NO: 205497 - RNA, 13 nt, Homo sapiens
uccaccugucuca

SEQ ID NO: 205498 - RNA, 23 nt, Homo sapiens
cuuuuaaguugcugaugaacucu

SEQ ID NO: 205499 - RNA, 16 nt, Homo sapiens
ucuccagaaagcucau

SEQ ID NO: 205500 - RNA, 15 nt, Homo sapiens
augugaaaguuacaa

SEQ ID NO: 205501 - RNA, 22 nt, Homo sapiens
aucagaccauaauguuacauua

SEQ ID NO: 205502 - RNA, 21 nt, Homo sapiens
aagaggaaggccucuguggca

SEQ ID NO: 205503 - RNA, 18 nt, Homo sapiens
agcacaggcacugcagga

SEQ ID NO: 205504 - RNA, 15 nt, Homo sapiens
aaauacuucuugaag

SEQ ID NO: 205505 - RNA, 16 nt, Homo sapiens
aaaaaucguccaggga

SEQ ID NO: 205506 - RNA, 22 nt, Homo sapiens
augcaucaaguuauugacaaac

SEQ ID NO: 205507 - RNA, 17 nt, Homo sapiens
cuguguguacuaauaca

SEQ ID NO: 205508 - RNA, 12 nt, Homo sapiens
acuauuacuggg

SEQ ID NO: 205509 - RNA, 22 nt, Homo sapiens
ugggaaggguccaucucagaga

SEQ ID NO: 205510 - RNA, 23 nt, Homo sapiens
ccaugggaaggguccaucucaga

SEQ ID NO: 205511 - RNA, 19 nt, Homo sapiens
gggucucgcuuuguugccc

SEQ ID NO: 205512 - RNA, 16 nt, Homo sapiens
ggugaaagauggaacu

SEQ ID NO: 205513 - RNA, 17 nt, Homo sapiens
augagaccacuguuauc

SEQ ID NO: 205514 - RNA, 23 nt, Homo sapiens
ggaagcgagcuuugcugggagag

SEQ ID NO: 205515 - RNA, 15 nt, Homo sapiens
cagggauagcacuga

SEQ ID NO: 205516 - RNA, 17 nt, Homo sapiens
gaucugaugcaagcaag

SEQ ID NO: 205517 - RNA, 14 nt, Homo sapiens
uguaaucauauaau

SEQ ID NO: 205518 - RNA, 17 nt, Homo sapiens
gucaauaggcaaagggg

SEQ ID NO: 205519 - RNA, 22 nt, Homo sapiens
ugacccagucagaguugugcac

SEQ ID NO: 205520 - RNA, 16 nt, Homo sapiens
gaacaguaacugccau

SEQ ID NO: 205521 - RNA, 23 nt, Homo sapiens
guuaggaaaauuucacauuaaua

SEQ ID NO: 205522 - RNA, 19 nt, Homo sapiens
accaaaucuggaagccaaa

SEQ ID NO: 205523 - RNA, 18 nt, Homo sapiens
ugccuucuccagacaaac

SEQ ID NO: 205524 - RNA, 17 nt, Homo sapiens
cucacuguugaauuuuc

SEQ ID NO: 205525 - RNA, 18 nt, Homo sapiens
cuauauuuagauuguuaa

SEQ ID NO: 205526 - RNA, 17 nt, Homo sapiens
auauccaacaugugcuc

SEQ ID NO: 205527 - RNA, 23 nt, Homo sapiens
gacaggcacagaugaaugggagu

SEQ ID NO: 205528 - RNA, 22 nt, Homo sapiens
uaaagcugccggcacagaacuu

SEQ ID NO: 205529 - RNA, 13 nt, Homo sapiens
cucugaucccucu

SEQ ID NO: 205530 - RNA, 15 nt, Homo sapiens
ccagugaccagucac

SEQ ID NO: 205531 - RNA, 13 nt, Homo sapiens
ugcaacuuguaaa

SEQ ID NO: 205532 - RNA, 22 nt, Homo sapiens
uauuuugcauaguaccaaucau

SEQ ID NO: 205533 - RNA, 12 nt, Homo sapiens
agccucaagucu

SEQ ID NO: 205534 - RNA, 16 nt, Homo sapiens
cgucaugcuuguguua

SEQ ID NO: 205535 - RNA, 19 nt, Homo sapiens
ucuaugaaauaucaugcuc

SEQ ID NO: 205536 - RNA, 23 nt, Homo sapiens
gugaauaaaccaucaucuugcca

SEQ ID NO: 205537 - RNA, 18 nt, Homo sapiens
ucugggccaagucaaaga

SEQ ID NO: 205538 - RNA, 14 nt, Homo sapiens
ccugggcaaagccu

SEQ ID NO: 205539 - RNA, 23 nt, Homo sapiens
aaugcccagugaccagucacuga

SEQ ID NO: 205540 - RNA, 13 nt, Homo sapiens
auuaucaacagca

SEQ ID NO: 205541 - RNA, 17 nt, Homo sapiens
agugccucuuucaucca

SEQ ID NO: 205542 - RNA, 14 nt, Homo sapiens
cuugacggcauugc

SEQ ID NO: 205543 - RNA, 20 nt, Homo sapiens
aagcuaaaauuagaugaacu

SEQ ID NO: 205544 - RNA, 17 nt, Homo sapiens
uuauaaaagaugcauua

SEQ ID NO: 205545 - RNA, 16 nt, Homo sapiens
cauuugcaccuaccuc

SEQ ID NO: 205546 - RNA, 14 nt, Homo sapiens
gauucacaguguga

SEQ ID NO: 205547 - RNA, 13 nt, Homo sapiens
ucuauuaucucaa

SEQ ID NO: 205548 - RNA, 18 nt, Homo sapiens
cgacuuucugccuggagu

SEQ ID NO: 205549 - RNA, 15 nt, Homo sapiens
gcccuggugcugcca

SEQ ID NO: 205550 - RNA, 21 nt, Homo sapiens
ucauaugauugugcacauacu

SEQ ID NO: 205551 - RNA, 18 nt, Homo sapiens
gauugcuuaaaauagcaa

SEQ ID NO: 205552 - RNA, 20 nt, Homo sapiens
agauaacaaucuguauauaa

SEQ ID NO: 205553 - RNA, 14 nt, Homo sapiens
caguaccuccugcc

SEQ ID NO: 205554 - RNA, 16 nt, Homo sapiens
uuuaaucccacuugcc

SEQ ID NO: 205555 - RNA, 19 nt, Homo sapiens
uguuuuuuuuuuccacuua

SEQ ID NO: 205556 - RNA, 18 nt, Homo sapiens
cuuacccuccuccagacc

SEQ ID NO: 205557 - RNA, 14 nt, Homo sapiens
augaacggugagca

SEQ ID NO: 205558 - RNA, 12 nt, Homo sapiens
agcaaagacuuu

SEQ ID NO: 205559 - RNA, 22 nt, Homo sapiens
agcuucuuaauauaacugccuu

SEQ ID NO: 205560 - RNA, 23 nt, Homo sapiens
ccuauguuuuuguucaaagccag

SEQ ID NO: 205561 - RNA, 18 nt, Homo sapiens
gcccauaucugugaaaug

SEQ ID NO: 205562 - RNA, 15 nt, Homo sapiens
ccuugaaaagacauc

SEQ ID NO: 205563 - RNA, 17 nt, Homo sapiens
ggacaugaagauucuuu

SEQ ID NO: 205564 - RNA, 21 nt, Homo sapiens
uucuugaguuuagugaucuga

SEQ ID NO: 205565 - RNA, 17 nt, Homo sapiens
aaucagcauucucacuc

SEQ ID NO: 205566 - RNA, 23 nt, Homo sapiens
ggcccuucccacaggacauuucu

SEQ ID NO: 205567 - RNA, 16 nt, Homo sapiens
uacaauguucauccca

SEQ ID NO: 205568 - RNA, 12 nt, Homo sapiens
gcacccuggauu

SEQ ID NO: 205569 - RNA, 16 nt, Homo sapiens
ucaaucucugauucug

SEQ ID NO: 205570 - RNA, 15 nt, Homo sapiens
gugucaccugugcuu

SEQ ID NO: 205571 - RNA, 15 nt, Homo sapiens
gugugaagaucacgu

SEQ ID NO: 205572 - RNA, 16 nt, Homo sapiens
agauuguuaaaauaac

SEQ ID NO: 205573 - RNA, 17 nt, Homo sapiens
augaucuggauccacca

SEQ ID NO: 205574 - RNA, 14 nt, Homo sapiens
uaaaaaugcaacuu

SEQ ID NO: 205575 - RNA, 18 nt, Homo sapiens
cagggucccucuguguau

SEQ ID NO: 205576 - RNA, 22 nt, Homo sapiens
cuaaucagcauucucacuccua

SEQ ID NO: 205577 - RNA, 18 nt, Homo sapiens
aagggaugucucacaucc

SEQ ID NO: 205578 - RNA, 13 nt, Homo sapiens
uaucgaucucuua

SEQ ID NO: 205579 - RNA, 16 nt, Homo sapiens
cagaaggcaaacccau

SEQ ID NO: 205580 - RNA, 20 nt, Homo sapiens
agcaaaauacaugacauuua

SEQ ID NO: 205581 - RNA, 20 nt, Homo sapiens
cuaagcucaaggcgugagga

SEQ ID NO: 205582 - RNA, 15 nt, Homo sapiens
ggaugcagagucagc

SEQ ID NO: 205583 - RNA, 20 nt, Homo sapiens
uccaacguggggcagcacag

SEQ ID NO: 205584 - RNA, 20 nt, Homo sapiens
cuggcuucacagauguguga

SEQ ID NO: 205585 - RNA, 13 nt, Homo sapiens
cuugaucuguaua

SEQ ID NO: 205586 - RNA, 14 nt, Homo sapiens
ccuguucacucuac

SEQ ID NO: 205587 - RNA, 11 nt, Homo sapiens
cuugccucuuc

SEQ ID NO: 205588 - RNA, 15 nt, Homo sapiens
caacucuuugagaaa

SEQ ID NO: 205589 - RNA, 17 nt, Homo sapiens
caagaagucaaaguaaa

SEQ ID NO: 205590 - RNA, 13 nt, Homo sapiens
aaacaaacaugac

SEQ ID NO: 205591 - RNA, 9 nt, Homo sapiens
cauucaguc

SEQ ID NO: 205592 - RNA, 17 nt, Homo sapiens
gcgaaaaaaucagugaa

SEQ ID NO: 205593 - RNA, 23 nt, Homo sapiens
augccauagcaagauugcuuaaa

SEQ ID NO: 205594 - RNA, 9 nt, Homo sapiens
ggcacauug

SEQ ID NO: 205595 - RNA, 21 nt, Homo sapiens
cucugggccaagucaaagaca

SEQ ID NO: 205596 - RNA, 14 nt, Homo sapiens
aaaucguccaggga

SEQ ID NO: 205597 - RNA, 17 nt, Homo sapiens
auauacaauaacauaau

SEQ ID NO: 205598 - RNA, 18 nt, Homo sapiens
agggaagcugucccucac

SEQ ID NO: 205599 - RNA, 22 nt, Homo sapiens
ccuggaguguaugacugcacau

SEQ ID NO: 205600 - RNA, 13 nt, Homo sapiens
aaaagcaaaauca

SEQ ID NO: 205601 - RNA, 19 nt, Homo sapiens
uccacuucuuguuccccac

SEQ ID NO: 205602 - RNA, 19 nt, Homo sapiens
gaaguaagcaaagacuuuc

SEQ ID NO: 205603 - RNA, 18 nt, Homo sapiens
uaaguaaguuugauuuca

SEQ ID NO: 205604 - RNA, 12 nt, Homo sapiens
ugacaaccucuu

SEQ ID NO: 205605 - RNA, 21 nt, Homo sapiens
aaaaucauuuuauaugucaaa

SEQ ID NO: 205606 - RNA, 19 nt, Homo sapiens
agcaagaucccaucucuuu

SEQ ID NO: 205607 - RNA, 17 nt, Homo sapiens
gcaaagggagcacuggg

SEQ ID NO: 205608 - RNA, 16 nt, Homo sapiens
cuauggcacccaugca

SEQ ID NO: 205609 - RNA, 21 nt, Homo sapiens
cucuuguauaugaugaucugg

SEQ ID NO: 205610 - RNA, 16 nt, Homo sapiens
gcugagugcaccacuu

SEQ ID NO: 205611 - RNA, 19 nt, Homo sapiens
gguagagacuuugacucuc

SEQ ID NO: 205612 - RNA, 13 nt, Homo sapiens
auuuccugacaga

SEQ ID NO: 205613 - RNA, 12 nt, Homo sapiens
cuaaaguagacu

SEQ ID NO: 205614 - RNA, 13 nt, Homo sapiens
acuucaagugacc

SEQ ID NO: 205615 - RNA, 23 nt, Homo sapiens
guuuuguagagauggggucucac

SEQ ID NO: 205616 - RNA, 15 nt, Homo sapiens
aaauauauaugauau

SEQ ID NO: 205617 - RNA, 19 nt, Homo sapiens
aauccuuuacuguuaguca

SEQ ID NO: 205618 - RNA, 18 nt, Homo sapiens
ccuggcaagugggugaaa

SEQ ID NO: 205619 - RNA, 22 nt, Homo sapiens
agaacuggaggaguuccuugau

SEQ ID NO: 205620 - RNA, 18 nt, Homo sapiens
aguuggaagugugugauc

SEQ ID NO: 205621 - RNA, 12 nt, Homo sapiens
agaaagccucag

SEQ ID NO: 205622 - RNA, 13 nt, Homo sapiens
gggcacugguggc

SEQ ID NO: 205623 - RNA, 20 nt, Homo sapiens
cugaauguauugaacuugga

SEQ ID NO: 205624 - RNA, 15 nt, Homo sapiens
gaacaguaacugcca

SEQ ID NO: 205625 - RNA, 19 nt, Homo sapiens
caguguguuucugaucuga

SEQ ID NO: 205626 - RNA, 12 nt, Homo sapiens
cuugcugccaaa

SEQ ID NO: 205627 - RNA, 16 nt, Homo sapiens
ugcauaagugcaugac

SEQ ID NO: 205628 - RNA, 17 nt, Homo sapiens
cauguaaacugugcacc

SEQ ID NO: 205629 - RNA, 21 nt, Homo sapiens
gagcuucccugacucauucug

SEQ ID NO: 205630 - RNA, 15 nt, Homo sapiens
uaaaaaugcaacuuc

SEQ ID NO: 205631 - RNA, 12 nt, Homo sapiens
uccaaucagaac

SEQ ID NO: 205632 - RNA, 17 nt, Homo sapiens
acaccuguaaucccagc

SEQ ID NO: 205633 - RNA, 18 nt, Homo sapiens
aggauccccucucuuccu

SEQ ID NO: 205634 - RNA, 20 nt, Homo sapiens
uuaauacagggcauuuuggu

SEQ ID NO: 205635 - RNA, 12 nt, Homo sapiens
cucuaacuucaa

SEQ ID NO: 205636 - RNA, 20 nt, Homo sapiens
ugccaccauggccagccaac

SEQ ID NO: 205637 - RNA, 19 nt, Homo sapiens
agauacugucucuuucaug

SEQ ID NO: 205638 - RNA, 23 nt, Homo sapiens
uuagauguucuaagucuuuccau

SEQ ID NO: 205639 - RNA, 21 nt, Homo sapiens
gauuaccuaguagucauuuca

SEQ ID NO: 205640 - RNA, 20 nt, Homo sapiens
uucucacuccuaccugguaa

SEQ ID NO: 205641 - RNA, 23 nt, Homo sapiens
ugcauuuaaauacagucuuccau

SEQ ID NO: 205642 - RNA, 22 nt, Homo sapiens
aagggccagcuggaggugaaga

SEQ ID NO: 205643 - RNA, 15 nt, Homo sapiens
ccccaggcauugcca

SEQ ID NO: 205644 - RNA, 15 nt, Homo sapiens
cccauaucugugaaa

SEQ ID NO: 205645 - RNA, 16 nt, Homo sapiens
auggcuaccaaaaaga

SEQ ID NO: 205646 - RNA, 10 nt, Homo sapiens
uuuucacugc

SEQ ID NO: 205647 - RNA, 15 nt, Homo sapiens
ucauucucauucuca

SEQ ID NO: 205648 - RNA, 21 nt, Homo sapiens
auuuccugacagaaggacuca

SEQ ID NO: 205649 - RNA, 15 nt, Homo sapiens
agacacuauuuaucu

SEQ ID NO: 205650 - RNA, 13 nt, Homo sapiens
agaccagaaccag

SEQ ID NO: 205651 - RNA, 15 nt, Homo sapiens
caaaaucacacagcc

SEQ ID NO: 205652 - RNA, 15 nt, Homo sapiens
cauuaaacuuaccug

SEQ ID NO: 205653 - RNA, 13 nt, Homo sapiens
cauauaauguugu

SEQ ID NO: 205654 - RNA, 21 nt, Homo sapiens
ucaaggcccauaucugugaaa

SEQ ID NO: 205655 - RNA, 22 nt, Homo sapiens
gcuucacugguugaguguugcu

SEQ ID NO: 205656 - RNA, 21 nt, Homo sapiens
cauccauuuauuuggcaucug

SEQ ID NO: 205657 - RNA, 22 nt, Homo sapiens
uugacuggguuucucuguauag

SEQ ID NO: 205658 - RNA, 18 nt, Homo sapiens
auaaugguugacuggguu

SEQ ID NO: 205659 - RNA, 15 nt, Homo sapiens
acuagggaucccuca

SEQ ID NO: 205660 - RNA, 19 nt, Homo sapiens
aacccaggaguucaggguc

SEQ ID NO: 205661 - RNA, 16 nt, Homo sapiens
ucagacuccugugcaa

SEQ ID NO: 205662 - RNA, 21 nt, Homo sapiens
gagacugucucaagagggcac

SEQ ID NO: 205663 - RNA, 14 nt, Homo sapiens
agccaacuuuugca

SEQ ID NO: 205664 - RNA, 15 nt, Homo sapiens
cacagugcaucucag

SEQ ID NO: 205665 - RNA, 23 nt, Homo sapiens
ccaucccagcugaaauacugagg

SEQ ID NO: 205666 - RNA, 14 nt, Homo sapiens
uagcaugcugugau

SEQ ID NO: 205667 - RNA, 17 nt, Homo sapiens
gaaaacaguauuuucca

SEQ ID NO: 205668 - RNA, 16 nt, Homo sapiens
gaagugugugaucugu

SEQ ID NO: 205669 - RNA, 17 nt, Homo sapiens
aaacaaauguauuucaa

SEQ ID NO: 205670 - RNA, 14 nt, Homo sapiens
guucagaugcuucu

SEQ ID NO: 205671 - RNA, 19 nt, Homo sapiens
cuucucucaccuccuaaag

SEQ ID NO: 205672 - RNA, 20 nt, Homo sapiens
ucgcaguguucaaggccauc

SEQ ID NO: 205673 - RNA, 15 nt, Homo sapiens
uaaaauuaugccaua

SEQ ID NO: 205674 - RNA, 20 nt, Homo sapiens
acauccugaccuugcacaaa

SEQ ID NO: 205675 - RNA, 13 nt, Homo sapiens
ccauaauguuaca

SEQ ID NO: 205676 - RNA, 23 nt, Homo sapiens
aaaggcucgauuuuguaucugca

SEQ ID NO: 205677 - RNA, 18 nt, Homo sapiens
uucagguacuaaauaccu

SEQ ID NO: 205678 - RNA, 15 nt, Homo sapiens
caaacucucccuuca

SEQ ID NO: 205679 - RNA, 14 nt, Homo sapiens
auacuacacauuca

SEQ ID NO: 205680 - RNA, 22 nt, Homo sapiens
ccugagguuugccagcauuuag

SEQ ID NO: 205681 - RNA, 21 nt, Homo sapiens
gggucucgcuuuguugcccag

SEQ ID NO: 205682 - RNA, 14 nt, Homo sapiens
uauuuaugccucug

SEQ ID NO: 205683 - RNA, 12 nt, Homo sapiens
aucaauguuucu

SEQ ID NO: 205684 - RNA, 16 nt, Homo sapiens
acaggcccuuccucuc

SEQ ID NO: 205685 - RNA, 23 nt, Homo sapiens
acccuugcgcuuuugcuggucac

SEQ ID NO: 205686 - RNA, 14 nt, Homo sapiens
aaaugagaacauga

SEQ ID NO: 205687 - RNA, 15 nt, Homo sapiens
ugugcagaaccuccu

SEQ ID NO: 205688 - RNA, 18 nt, Homo sapiens
cacacaccuguagcacuu

SEQ ID NO: 205689 - RNA, 24 nt, Homo sapiens
uaagaguggaaccaacacuaacau

SEQ ID NO: 205690 - RNA, 24 nt, Homo sapiens
cuuucaggccacauggcuaaagaa

SEQ ID NO: 205691 - RNA, 13 nt, Homo sapiens
ugcauuuauagca

SEQ ID NO: 205692 - RNA, 15 nt, Homo sapiens
aaugugauugcagcu

SEQ ID NO: 205693 - RNA, 14 nt, Homo sapiens
aaaguagacuucau

SEQ ID NO: 205694 - RNA, 18 nt, Homo sapiens
guuuauaaaagaugcauu

SEQ ID NO: 205695 - RNA, 14 nt, Homo sapiens
aagcugggagcaca

SEQ ID NO: 205696 - RNA, 22 nt, Homo sapiens
aauuauuugcauaacaauuccu

SEQ ID NO: 205697 - RNA, 15 nt, Homo sapiens
aaaucccuccuucau

SEQ ID NO: 205698 - RNA, 19 nt, Homo sapiens
acucuuaguuacucauuca

SEQ ID NO: 205699 - RNA, 20 nt, Homo sapiens
caaguuggcuucuaaucaaa

SEQ ID NO: 205700 - RNA, 15 nt, Homo sapiens
ucaguguuaaaugug

SEQ ID NO: 205701 - RNA, 15 nt, Homo sapiens
caagcacagaaggag

SEQ ID NO: 205702 - RNA, 15 nt, Homo sapiens
cauucgaguguuuca

SEQ ID NO: 205703 - RNA, 21 nt, Homo sapiens
ugagcuuaagaauuuugagca

SEQ ID NO: 205704 - RNA, 14 nt, Homo sapiens
cccugggaccacag

SEQ ID NO: 205705 - RNA, 16 nt, Homo sapiens
cauaauguuacauuau

SEQ ID NO: 205706 - RNA, 18 nt, Homo sapiens
agcccucaggucagggug

SEQ ID NO: 205707 - RNA, 16 nt, Homo sapiens
augaaagggcaaagac

SEQ ID NO: 205708 - RNA, 21 nt, Homo sapiens
uucccuauuuugccaguggga

SEQ ID NO: 205709 - RNA, 11 nt, Homo sapiens
ugugcacauuu

SEQ ID NO: 205710 - RNA, 20 nt, Homo sapiens
ccuuauuagagugucuuucc

SEQ ID NO: 205711 - RNA, 20 nt, Homo sapiens
ccagaccauucaggacacag

SEQ ID NO: 205712 - RNA, 18 nt, Homo sapiens
gcaauuuccggccaacag

SEQ ID NO: 205713 - RNA, 13 nt, Homo sapiens
agcuuaagaauuu

SEQ ID NO: 205714 - RNA, 17 nt, Homo sapiens
aguggcucacaccugua

SEQ ID NO: 205715 - RNA, 12 nt, Homo sapiens
ccauucaggaca

SEQ ID NO: 205716 - RNA, 13 nt, Homo sapiens
ugggaccacagag

SEQ ID NO: 205717 - RNA, 17 nt, Homo sapiens
ugagaacuacucaggga

SEQ ID NO: 205718 - RNA, 12 nt, Homo sapiens
auauaacugccu

SEQ ID NO: 205719 - RNA, 19 nt, Homo sapiens
auuucuucacucaaucucu

SEQ ID NO: 205720 - RNA, 19 nt, Homo sapiens
auaguacuggcaugguacg

SEQ ID NO: 205721 - RNA, 20 nt, Homo sapiens
cuucuugccucugugcugug

SEQ ID NO: 205722 - RNA, 15 nt, Homo sapiens
aaguucugacuugac

SEQ ID NO: 205723 - RNA, 14 nt, Homo sapiens
cuugaacacagucu

SEQ ID NO: 205724 - RNA, 19 nt, Homo sapiens
auauaaaguaguccuguga

SEQ ID NO: 205725 - RNA, 21 nt, Homo sapiens
cacugcucauuuggaucccag

SEQ ID NO: 205726 - RNA, 13 nt, Homo sapiens
auuucacauuaau

SEQ ID NO: 205727 - RNA, 19 nt, Homo sapiens
cagggaagcugucccucac

SEQ ID NO: 205728 - RNA, 16 nt, Homo sapiens
caaggguuuguugaac

SEQ ID NO: 205729 - RNA, 13 nt, Homo sapiens
acaucuuuuacau

SEQ ID NO: 205730 - RNA, 20 nt, Homo sapiens
gucagcaggaagcaacgaag

SEQ ID NO: 205731 - RNA, 17 nt, Homo sapiens
aaaacuugcugccugaa

SEQ ID NO: 205732 - RNA, 17 nt, Homo sapiens
gaccugaggcugugguc

SEQ ID NO: 205733 - RNA, 14 nt, Homo sapiens
ucuuauuuccucaa

SEQ ID NO: 205734 - RNA, 17 nt, Homo sapiens
aggacuguugacaucca

SEQ ID NO: 205735 - RNA, 20 nt, Homo sapiens
cugaagaacaguaacugcca

SEQ ID NO: 205736 - RNA, 14 nt, Homo sapiens
uuaucagucauaac

SEQ ID NO: 205737 - RNA, 14 nt, Homo sapiens
uccucaauccagcu

SEQ ID NO: 205738 - RNA, 18 nt, Homo sapiens
aaccacaggcagcauuua

SEQ ID NO: 205739 - RNA, 11 nt, Homo sapiens
aaaacacugug

SEQ ID NO: 205740 - RNA, 23 nt, Homo sapiens
gcaaucaaguccuacaagcuaaa

SEQ ID NO: 205741 - RNA, 17 nt, Homo sapiens
gacaguguuuucuggga

SEQ ID NO: 205742 - RNA, 18 nt, Homo sapiens
accccccuauugcugcug

SEQ ID NO: 205743 - RNA, 14 nt, Homo sapiens
gaccugacaccuuu

SEQ ID NO: 205744 - RNA, 15 nt, Homo sapiens
uuuaacaacuaugau

SEQ ID NO: 205745 - RNA, 13 nt, Homo sapiens
auuucucucugac

SEQ ID NO: 205746 - RNA, 22 nt, Homo sapiens
aaaagaugcauuaucuaugaua

SEQ ID NO: 205747 - RNA, 19 nt, Homo sapiens
uaaguugauggugaugaaa

SEQ ID NO: 205748 - RNA, 23 nt, Homo sapiens
ggcaacuugggaacuagacuccc

SEQ ID NO: 205749 - RNA, 21 nt, Homo sapiens
gcuuuaauuuuuuuaaccaaa

SEQ ID NO: 205750 - RNA, 11 nt, Homo sapiens
gcuucacuggu

SEQ ID NO: 205751 - RNA, 17 nt, Homo sapiens
ugcccaggcuggucuca

SEQ ID NO: 205752 - RNA, 18 nt, Homo sapiens
augcuauaacuauguuga

SEQ ID NO: 205753 - RNA, 18 nt, Homo sapiens
uucauuaauacagggcau

SEQ ID NO: 205754 - RNA, 15 nt, Homo sapiens
aauguucacuuuuga

SEQ ID NO: 205755 - RNA, 13 nt, Homo sapiens
cugcaagcacugc

SEQ ID NO: 205756 - RNA, 21 nt, Homo sapiens
cauguuaggaaaauuucacau

SEQ ID NO: 205757 - RNA, 16 nt, Homo sapiens
agggacgccugggggu

SEQ ID NO: 205758 - RNA, 17 nt, Homo sapiens
uacugggacugugcuca

SEQ ID NO: 205759 - RNA, 16 nt, Homo sapiens
gacucgguuucuccaa

SEQ ID NO: 205760 - RNA, 18 nt, Homo sapiens
uuuugcacacuuugccau

SEQ ID NO: 205761 - RNA, 15 nt, Homo sapiens
agaccauaauguuac

SEQ ID NO: 205762 - RNA, 17 nt, Homo sapiens
ucccacccccaucucuc

SEQ ID NO: 205763 - RNA, 20 nt, Homo sapiens
cucugcauuaucugagguca

SEQ ID NO: 205764 - RNA, 15 nt, Homo sapiens
caacagcauuuucaa

SEQ ID NO: 205765 - RNA, 17 nt, Homo sapiens
cuggaggaguuccuuga

SEQ ID NO: 205766 - RNA, 13 nt, Homo sapiens
uucccccacugau

SEQ ID NO: 205767 - RNA, 18 nt, Homo sapiens
aaacuauguaacauguag

SEQ ID NO: 205768 - RNA, 22 nt, Homo sapiens
aucucucccuccccugccauuu

SEQ ID NO: 205769 - RNA, 13 nt, Homo sapiens
uggguaccuguau

SEQ ID NO: 205770 - RNA, 19 nt, Homo sapiens
uacacgagguaugaggucu

SEQ ID NO: 205771 - RNA, 12 nt, Homo sapiens
aaacaacucuuu

SEQ ID NO: 205772 - RNA, 16 nt, Homo sapiens
ucuauggcacccaugc

SEQ ID NO: 205773 - RNA, 18 nt, Homo sapiens
aggcagaucccacuugca

SEQ ID NO: 205774 - RNA, 22 nt, Homo sapiens
cuucaaggcccauaucugugaa

SEQ ID NO: 205775 - RNA, 23 nt, Homo sapiens
auaagcaaagggagcacuggguu

SEQ ID NO: 205776 - RNA, 16 nt, Homo sapiens
aaauuuuuguuuauaa

SEQ ID NO: 205777 - RNA, 21 nt, Homo sapiens
guguuaucagucauaacuaaa

SEQ ID NO: 205778 - RNA, 20 nt, Homo sapiens
aaaaggacucucaggaccaa

SEQ ID NO: 205779 - RNA, 16 nt, Homo sapiens
gcucgcuuugagugac

SEQ ID NO: 205780 - RNA, 11 nt, Homo sapiens
gcugccucuug

SEQ ID NO: 205781 - RNA, 13 nt, Homo sapiens
uguuaaaauaacu

SEQ ID NO: 205782 - RNA, 18 nt, Homo sapiens
gagucucuucuccacugg

SEQ ID NO: 205783 - RNA, 13 nt, Homo sapiens
acugucuccaugg

SEQ ID NO: 205784 - RNA, 12 nt, Homo sapiens
ugggugggacca

SEQ ID NO: 205785 - RNA, 14 nt, Homo sapiens
uacaguuuaucuau

SEQ ID NO: 205786 - RNA, 20 nt, Homo sapiens
aucaccgugggcucccugac

SEQ ID NO: 205787 - RNA, 17 nt, Homo sapiens
cuccacccuuggacuuu

SEQ ID NO: 205788 - RNA, 23 nt, Homo sapiens
acagagcugguugggaagacaug

SEQ ID NO: 205789 - RNA, 23 nt, Homo sapiens
gcaaugugcccccagacgcacgu

SEQ ID NO: 205790 - RNA, 14 nt, Homo sapiens
uaaaucaaugcuau

SEQ ID NO: 205791 - RNA, 18 nt, Homo sapiens
auucucugagcugugcag

SEQ ID NO: 205792 - RNA, 14 nt, Homo sapiens
aggccguggcugcc

SEQ ID NO: 205793 - RNA, 20 nt, Homo sapiens
accccugcuccccugagcug

SEQ ID NO: 205794 - RNA, 22 nt, Homo sapiens
gcgauccaccugucucagccuc

SEQ ID NO: 205795 - RNA, 17 nt, Homo sapiens
gaccccccuauugcugc

SEQ ID NO: 205796 - RNA, 15 nt, Homo sapiens
cuaaaauuagaugaa

SEQ ID NO: 205797 - RNA, 22 nt, Homo sapiens
aagacuucaguauguugucaaa

SEQ ID NO: 205798 - RNA, 16 nt, Homo sapiens
uaaugguugacugggu

SEQ ID NO: 205799 - RNA, 16 nt, Homo sapiens
ucaucaugugugucca

SEQ ID NO: 205800 - RNA, 12 nt, Homo sapiens
cuuccauuugcu

SEQ ID NO: 205801 - RNA, 22 nt, Homo sapiens
ucuauugcuggcaaagacagaa

SEQ ID NO: 205802 - RNA, 21 nt, Homo sapiens
ugcauauccaacaugugcuca

SEQ ID NO: 205803 - RNA, 15 nt, Homo sapiens
ugauucacaguguga

SEQ ID NO: 205804 - RNA, 13 nt, Homo sapiens
agagaguggcucc

SEQ ID NO: 205805 - RNA, 19 nt, Homo sapiens
ggcucuucuaaucagagcg

SEQ ID NO: 205806 - RNA, 19 nt, Homo sapiens
aggcgauccaccugucuca

SEQ ID NO: 205807 - RNA, 16 nt, Homo sapiens
caaggcuggcagugac

SEQ ID NO: 205808 - RNA, 17 nt, Homo sapiens
acugagcaaagcauuga

SEQ ID NO: 205809 - RNA, 17 nt, Homo sapiens
gagucucuucuccacug

SEQ ID NO: 205810 - RNA, 13 nt, Homo sapiens
guaaacugugcac

SEQ ID NO: 205811 - RNA, 22 nt, Homo sapiens
caaagcuuucauguaaacugug

SEQ ID NO: 205812 - RNA, 19 nt, Homo sapiens
cugaaggagccccauuccu

SEQ ID NO: 205813 - RNA, 17 nt, Homo sapiens
aaguugcugaugaacuc

SEQ ID NO: 205814 - RNA, 17 nt, Homo sapiens
ggcagagaggacuguug

SEQ ID NO: 205815 - RNA, 14 nt, Homo sapiens
agcagaacuuucac

SEQ ID NO: 205816 - RNA, 18 nt, Homo sapiens
ugaggaugcagagucagc

SEQ ID NO: 205817 - RNA, 16 nt, Homo sapiens
ucacagagugcauugu

SEQ ID NO: 205818 - RNA, 15 nt, Homo sapiens
agugagggucagaga

SEQ ID NO: 205819 - RNA, 13 nt, Homo sapiens
uacagaugggcaa

SEQ ID NO: 205820 - RNA, 20 nt, Homo sapiens
gugcuaucgcaccacugugu

SEQ ID NO: 205821 - RNA, 18 nt, Homo sapiens
cugacagaaggacucagg

SEQ ID NO: 205822 - RNA, 18 nt, Homo sapiens
cuugacccccuugagggu

SEQ ID NO: 205823 - RNA, 23 nt, Homo sapiens
uuuacagaaucaaaugcaauuuu

SEQ ID NO: 205824 - RNA, 13 nt, Homo sapiens
uugggaagacaug

SEQ ID NO: 205825 - RNA, 22 nt, Homo sapiens
gcacauuagccuaugugcaugc

SEQ ID NO: 205826 - RNA, 23 nt, Homo sapiens
accuuacauuugaaaucuaugaa

SEQ ID NO: 205827 - RNA, 17 nt, Homo sapiens
cacauccugaccuugca

SEQ ID NO: 205828 - RNA, 14 nt, Homo sapiens
acaaucagcuccuu

SEQ ID NO: 205829 - RNA, 19 nt, Homo sapiens
ccgucaauaggcaaagggg

SEQ ID NO: 205830 - RNA, 21 nt, Homo sapiens
gaaccaaaucuggaagccaaa

SEQ ID NO: 205831 - RNA, 23 nt, Homo sapiens
cuauauaguuuauugacaauaau

SEQ ID NO: 205832 - RNA, 15 nt, Homo sapiens
aguuuauacuucucu

SEQ ID NO: 205833 - RNA, 21 nt, Homo sapiens
ugggucuucccuguaugauuc

SEQ ID NO: 205834 - RNA, 17 nt, Homo sapiens
cgucccuccacguucac

SEQ ID NO: 205835 - RNA, 16 nt, Homo sapiens
aaggagccccauuccu

SEQ ID NO: 205836 - RNA, 17 nt, Homo sapiens
cacagaagguccuggug

SEQ ID NO: 205837 - RNA, 15 nt, Homo sapiens
ucacagagugcauug

SEQ ID NO: 205838 - RNA, 12 nt, Homo sapiens
guauuagucaca

SEQ ID NO: 205839 - RNA, 13 nt, Homo sapiens
accuguauuccca

SEQ ID NO: 205840 - RNA, 16 nt, Homo sapiens
ggcccauaucugugaa

SEQ ID NO: 205841 - RNA, 15 nt, Homo sapiens
ugccucuguauuuaa

SEQ ID NO: 205842 - RNA, 18 nt, Homo sapiens
ggagaaacccuugaaaag

SEQ ID NO: 205843 - RNA, 14 nt, Homo sapiens
cacugcauaccaac

SEQ ID NO: 205844 - RNA, 17 nt, Homo sapiens
agaagguuuacucugug

SEQ ID NO: 205845 - RNA, 18 nt, Homo sapiens
uaaaauuaugccauagca

SEQ ID NO: 205846 - RNA, 13 nt, Homo sapiens
cagcuuauauuca

SEQ ID NO: 205847 - RNA, 19 nt, Homo sapiens
cccuggccuccccugccac

SEQ ID NO: 205848 - RNA, 13 nt, Homo sapiens
gcagaccacugau

SEQ ID NO: 205849 - RNA, 21 nt, Homo sapiens
cuugaaaagacaucaagcaca

SEQ ID NO: 205850 - RNA, 20 nt, Homo sapiens
uugggauugagucugugcca

SEQ ID NO: 205851 - RNA, 13 nt, Homo sapiens
ggagaacuagaga

SEQ ID NO: 205852 - RNA, 17 nt, Homo sapiens
uugcuggucacugccau

SEQ ID NO: 205853 - RNA, 14 nt, Homo sapiens
aauuucuacuuuga

SEQ ID NO: 205854 - RNA, 12 nt, Homo sapiens
ucaacuuugaca

SEQ ID NO: 205855 - RNA, 13 nt, Homo sapiens
cccgacagccugg

SEQ ID NO: 205856 - RNA, 21 nt, Homo sapiens
uuccuucaugaucaucacaau

SEQ ID NO: 205857 - RNA, 15 nt, Homo sapiens
guaucaggacccaga

SEQ ID NO: 205858 - RNA, 21 nt, Homo sapiens
acugcaagcacugcaugggca

SEQ ID NO: 205859 - RNA, 20 nt, Homo sapiens
ucaggaaggaugagcauuua

SEQ ID NO: 205860 - RNA, 13 nt, Homo sapiens
ucuucuccacugg

SEQ ID NO: 205861 - RNA, 14 nt, Homo sapiens
uguuucugaucuga

SEQ ID NO: 205862 - RNA, 13 nt, Homo sapiens
aguucagacuuuu

SEQ ID NO: 205863 - RNA, 18 nt, Homo sapiens
uggggagaaaagacauga

SEQ ID NO: 205864 - RNA, 15 nt, Human immunodeficiency virus 2 (HIV-2)
uuugugcaacuaaaa

SEQ ID NO: 205865 - RNA, 17 nt, Human immunodeficiency virus 2 (HIV-2)
ugcacuaacaaaugcua

SEQ ID NO: 205866 - RNA, 15 nt, Human immunodeficiency virus 2 (HIV-2)
uguaagcgaugcagu

SEQ ID NO: 205867 - RNA, 16 nt, Human immunodeficiency virus 2 (HIV-2)
uucucuccagcacuag

SEQ ID NO: 205868 - RNA, 12 nt, Human immunodeficiency virus 2 (HIV-2)
uccuagacauau

SEQ ID NO: 205869 - RNA, 14 nt, Human immunodeficiency virus 2 (HIV-2)
uccuguuacaccaa

SEQ ID NO: 205870 - RNA, 14 nt, Human immunodeficiency virus 2 (HIV-2)
uccuugcccagcug

SEQ ID NO: 205871 - RNA, 15 nt, Human immunodeficiency virus 2 (HIV-2)
ucauuuuccaggugu

SEQ ID NO: 205872 - RNA, 18 nt, Human immunodeficiency virus 2 (HIV-2)
ucagcagggagaguacau

SEQ ID NO: 205873 - RNA, 22 nt, Human immunodeficiency virus 2 (HIV-2)
ucagcagggagaguacaugaac

SEQ ID NO: 205874 - RNA, 22 nt, Human immunodeficiency virus 2 (HIV-2)
ucagggacuggcugagacuuaa

SEQ ID NO: 205875 - RNA, 17 nt, Human immunodeficiency virus 2 (HIV-2)
ucaggcagggagcagaa

SEQ ID NO: 205876 - RNA, 21 nt, Human immunodeficiency virus 2 (HIV-2)
ucaggcagggagcagaacucg

SEQ ID NO: 205877 - RNA, 17 nt, Human immunodeficiency virus 2 (HIV-2)
ugacugaagcaccaaca

SEQ ID NO: 205878 - RNA, 12 nt, Human immunodeficiency virus 2 (HIV-2)
ugcaccagacaa

SEQ ID NO: 205879 - RNA, 14 nt, Human immunodeficiency virus 2 (HIV-2)
ucuucgugcacuuc

SEQ ID NO: 205880 - RNA, 21 nt, Human immunodeficiency virus 2 (HIV-2)
ucuugcuuuacggcaggugaa

SEQ ID NO: 205881 - RNA, 18 nt, Human immunodeficiency virus 2 (HIV-2)
cuccuucgccuucugcac

SEQ ID NO: 205882 - RNA, 16 nt, Human immunodeficiency virus 2 (HIV-2)
cucgcaguuccaagaa

SEQ ID NO: 205883 - RNA, 15 nt, Human immunodeficiency virus 2 (HIV-2)
cuauccaagaacucc

SEQ ID NO: 205884 - RNA, 16 nt, Human immunodeficiency virus 2 (HIV-2)
cuagagccaugcacua

SEQ ID NO: 205885 - RNA, 23 nt, Human immunodeficiency virus 2 (HIV-2)
cuaaaagagaucugugaaaaaau

SEQ ID NO: 205886 - RNA, 13 nt, Human immunodeficiency virus 2 (HIV-2)
cugacagccuuag

SEQ ID NO: 205887 - RNA, 16 nt, Human immunodeficiency virus 2 (HIV-2)
cucuuggcuacuauau

SEQ ID NO: 205888 - RNA, 21 nt, Human immunodeficiency virus 2 (HIV-2)
cgagcccugagagguucucuc

SEQ ID NO: 205889 - RNA, 16 nt, Human immunodeficiency virus 2 (HIV-2)
cgaguggauccaagaa

SEQ ID NO: 205890 - RNA, 15 nt, Human immunodeficiency virus 2 (HIV-2)
cgguagaagucuuac

SEQ ID NO: 205891 - RNA, 19 nt, Human immunodeficiency virus 2 (HIV-2)
gagacacccuugaaggcgc

SEQ ID NO: 205892 - RNA, 14 nt, Human immunodeficiency virus 2 (HIV-2)
gacugaagcaccaa

SEQ ID NO: 205893 - RNA, 23 nt, Human immunodeficiency virus 2 (HIV-2)
gacacaggggcugaugacucaau

SEQ ID NO: 205894 - RNA, 17 nt, Human immunodeficiency virus 2 (HIV-2)
gagccaugcacuaacaa

SEQ ID NO: 205895 - RNA, 19 nt, Human immunodeficiency virus 2 (HIV-2)
gaggccuucgaguggcuag

SEQ ID NO: 205896 - RNA, 18 nt, Human immunodeficiency virus 2 (HIV-2)
gagccaauaaaaguaaca

SEQ ID NO: 205897 - RNA, 21 nt, Human immunodeficiency virus 2 (HIV-2)
gagagcucauuuuccaggugu

SEQ ID NO: 205898 - RNA, 16 nt, Human immunodeficiency virus 2 (HIV-2)
gagucuaacagcaauc

SEQ ID NO: 205899 - RNA, 17 nt, Human immunodeficiency virus 2 (HIV-2)
gagucuaacagcaauca

SEQ ID NO: 205900 - RNA, 14 nt, Human immunodeficiency virus 2 (HIV-2)
gauuggaagaccaa

SEQ ID NO: 205901 - RNA, 17 nt, Human immunodeficiency virus 2 (HIV-2)
gaugucagcaagcuaca

SEQ ID NO: 205902 - RNA, 21 nt, Human immunodeficiency virus 2 (HIV-2)
gaugaccuaauaggaguuccu

SEQ ID NO: 205903 - RNA, 20 nt, Human immunodeficiency virus 2 (HIV-2)
gaauccuagacauauaccua

SEQ ID NO: 205904 - RNA, 16 nt, Human immunodeficiency virus 2 (HIV-2)
gaagccuuaagacauu

SEQ ID NO: 205905 - RNA, 21 nt, Human immunodeficiency virus 2 (HIV-2)
gaagcaccaacagaguuuccc

SEQ ID NO: 205906 - RNA, 16 nt, Human immunodeficiency virus 2 (HIV-2)
gaaaauagaagcacua

SEQ ID NO: 205907 - RNA, 19 nt, Human immunodeficiency virus 2 (HIV-2)
uacagugcuugccagacaa

SEQ ID NO: 205908 - RNA, 13 nt, Human immunodeficiency virus 2 (HIV-2)
uaagcgaugcagu

SEQ ID NO: 205909 - RNA, 14 nt, Human immunodeficiency virus 2 (HIV-2)
uaagcgaugcaguu

SEQ ID NO: 205910 - RNA, 21 nt, Human immunodeficiency virus 2 (HIV-2)
uaaggcggcccaacugcaaua

SEQ ID NO: 205911 - RNA, 15 nt, Human immunodeficiency virus 2 (HIV-2)
uacaugaacagccca

SEQ ID NO: 205912 - RNA, 21 nt, Human immunodeficiency virus 2 (HIV-2)
uacaugaacagcccauggaga

SEQ ID NO: 205913 - RNA, 17 nt, Human immunodeficiency virus 2 (HIV-2)
uacuauccaagaacucc

SEQ ID NO: 205914 - RNA, 17 nt, Human immunodeficiency virus 2 (HIV-2)
uagacauauaccuagaa

SEQ ID NO: 205915 - RNA, 18 nt, Human immunodeficiency virus 2 (HIV-2)
uagacauauaccuagaaa

SEQ ID NO: 205916 - RNA, 17 nt, Human immunodeficiency virus 2 (HIV-2)
uagaaauaaaaguacua

SEQ ID NO: 205917 - RNA, 18 nt, Human immunodeficiency virus 2 (HIV-2)
uagaaauaaaaguacuaa

SEQ ID NO: 205918 - RNA, 10 nt, Human immunodeficiency virus 2 (HIV-2)
uagagccaug

SEQ ID NO: 205919 - RNA, 18 nt, Human immunodeficiency virus 2 (HIV-2)
uagagccuggguguuccc

SEQ ID NO: 205920 - RNA, 19 nt, Human immunodeficiency virus 2 (HIV-2)
uagagccuggguguucccu

SEQ ID NO: 205921 - RNA, 22 nt, Human immunodeficiency virus 2 (HIV-2)
guguguucccaucucuccuagu

SEQ ID NO: 205922 - RNA, 14 nt, Human immunodeficiency virus 2 (HIV-2)
guggauccaagaag

SEQ ID NO: 205923 - RNA, 24 nt, Human immunodeficiency virus 2 (HIV-2)
gucaaggcaggaaguagcuacuaa

SEQ ID NO: 205924 - RNA, 14 nt, Human immunodeficiency virus 2 (HIV-2)
uaaacaccaaagaa

SEQ ID NO: 205925 - RNA, 16 nt, Human immunodeficiency virus 2 (HIV-2)
uaaacaccaaagaaua

SEQ ID NO: 205926 - RNA, 14 nt, Human immunodeficiency virus 2 (HIV-2)
gccgacugaucucc

SEQ ID NO: 205927 - RNA, 18 nt, Human immunodeficiency virus 2 (HIV-2)
gccgggaaggauuggaag

SEQ ID NO: 205928 - RNA, 23 nt, Human immunodeficiency virus 2 (HIV-2)
gcucggaauaucauaugagcgaa

SEQ ID NO: 205929 - RNA, 15 nt, Human immunodeficiency virus 2 (HIV-2)
gcuauauuuacacau

SEQ ID NO: 205930 - RNA, 17 nt, Human immunodeficiency virus 2 (HIV-2)
ggauccaagaagcuuuc

SEQ ID NO: 205931 - RNA, 19 nt, Human immunodeficiency virus 2 (HIV-2)
ggcaugaugaacaagggau

SEQ ID NO: 205932 - RNA, 21 nt, Human immunodeficiency virus 2 (HIV-2)
ggauaauaccagauuggcaga

SEQ ID NO: 205933 - RNA, 16 nt, Human immunodeficiency virus 2 (HIV-2)
gcuuuacggcagguga

SEQ ID NO: 205934 - RNA, 14 nt, Human immunodeficiency virus 2 (HIV-2)
guaguacaacaaaa

SEQ ID NO: 205935 - RNA, 15 nt, Human immunodeficiency virus 2 (HIV-2)
guaagcgaugcaguu

SEQ ID NO: 205936 - RNA, 18 nt, Human immunodeficiency virus 2 (HIV-2)
guaagaagagccaucaga

SEQ ID NO: 205937 - RNA, 22 nt, Human immunodeficiency virus 2 (HIV-2)
ccaggucuagucuaaugacuga

SEQ ID NO: 205938 - RNA, 17 nt, Human immunodeficiency virus 2 (HIV-2)
ccagagucuaacagcaa

SEQ ID NO: 205939 - RNA, 18 nt, Human immunodeficiency virus 2 (HIV-2)
ccagagucuaacagcaau

SEQ ID NO: 205940 - RNA, 14 nt, Human immunodeficiency virus 2 (HIV-2)
cccagcaacagaaa

SEQ ID NO: 205941 - RNA, 13 nt, Human immunodeficiency virus 2 (HIV-2)
cccuagagccaug

SEQ ID NO: 205942 - RNA, 17 nt, Human immunodeficiency virus 2 (HIV-2)
cccuacaacgagcccuc

SEQ ID NO: 205943 - RNA, 23 nt, Human immunodeficiency virus 2 (HIV-2)
cagggagaguacaugaacagccc

SEQ ID NO: 205944 - RNA, 16 nt, Human immunodeficiency virus 2 (HIV-2)
cagggagcagaacucg

SEQ ID NO: 205945 - RNA, 15 nt, Human immunodeficiency virus 2 (HIV-2)
cagggaggcagugaa

SEQ ID NO: 205946 - RNA, 22 nt, Human immunodeficiency virus 2 (HIV-2)
cagccuuaggcaugucauuaaa

SEQ ID NO: 205947 - RNA, 21 nt, Human immunodeficiency virus 2 (HIV-2)
cagagucuaacagcaaucagg

SEQ ID NO: 205948 - RNA, 19 nt, Human immunodeficiency virus 2 (HIV-2)
caccaaagaauacaaaaau

SEQ ID NO: 205949 - RNA, 18 nt, Human immunodeficiency virus 2 (HIV-2)
caguuccaagaagaauca

SEQ ID NO: 205950 - RNA, 19 nt, Human immunodeficiency virus 2 (HIV-2)
caguagaacucucacaaga

SEQ ID NO: 205951 - RNA, 21 nt, Human immunodeficiency virus 2 (HIV-2)
caguaucagcagggagaguac

SEQ ID NO: 205952 - RNA, 18 nt, Human immunodeficiency virus 2 (HIV-2)
cauauaccuagaaaaaga

SEQ ID NO: 205953 - RNA, 21 nt, Human immunodeficiency virus 2 (HIV-2)
caucugccccgagagcucauu

SEQ ID NO: 205954 - RNA, 18 nt, Human immunodeficiency virus 2 (HIV-2)
caucugcagagacuuacu

SEQ ID NO: 205955 - RNA, 21 nt, Human immunodeficiency virus 2 (HIV-2)
caaaagagaaaauagaagcac

SEQ ID NO: 205956 - RNA, 17 nt, Human immunodeficiency virus 2 (HIV-2)
caauaguagcaggaaua

SEQ ID NO: 205957 - RNA, 16 nt, Human immunodeficiency virus 2 (HIV-2)
caagagagggugcacu

SEQ ID NO: 205958 - RNA, 14 nt, Human immunodeficiency virus 2 (HIV-2)
caacugcaauaugg

SEQ ID NO: 205959 - RNA, 14 nt, Human immunodeficiency virus 2 (HIV-2)
auugaagccaggga

SEQ ID NO: 205960 - RNA, 22 nt, Human immunodeficiency virus 2 (HIV-2)
augggaccccacggagggacuu

SEQ ID NO: 205961 - RNA, 20 nt, Human immunodeficiency virus 2 (HIV-2)
augcaguuuccauugccagc

SEQ ID NO: 205962 - RNA, 14 nt, Human immunodeficiency virus 2 (HIV-2)
augaugaugaccua

SEQ ID NO: 205963 - RNA, 20 nt, Human immunodeficiency virus 2 (HIV-2)
augaccuaauaggaguuccu

SEQ ID NO: 205964 - RNA, 13 nt, Human immunodeficiency virus 2 (HIV-2)
accuaauaggagu

SEQ ID NO: 205965 - RNA, 12 nt, Human immunodeficiency virus 2 (HIV-2)
acuauccaagaa

SEQ ID NO: 205966 - RNA, 12 nt, Human immunodeficiency virus 2 (HIV-2)
acuacgagagag

SEQ ID NO: 205967 - RNA, 18 nt, Human immunodeficiency virus 2 (HIV-2)
acuccaaggaaaacuaag

SEQ ID NO: 205968 - RNA, 12 nt, Human immunodeficiency virus 2 (HIV-2)
acuccaaaaaua

SEQ ID NO: 205969 - RNA, 13 nt, Human immunodeficiency virus 2 (HIV-2)
aaugaccuauaaa

SEQ ID NO: 205970 - RNA, 21 nt, Human immunodeficiency virus 2 (HIV-2)
acaauggccccuaacaaaaga

SEQ ID NO: 205971 - RNA, 19 nt, Human immunodeficiency virus 2 (HIV-2)
acacaggggcugaugacuc

SEQ ID NO: 205972 - RNA, 20 nt, Human immunodeficiency virus 2 (HIV-2)
acaccaagaguaccacggag

SEQ ID NO: 205973 - RNA, 18 nt, Human immunodeficiency virus 2 (HIV-2)
acaguaggaggagacaua

SEQ ID NO: 205974 - RNA, 17 nt, Human immunodeficiency virus 2 (HIV-2)
acagggaggcagugaac

SEQ ID NO: 205975 - RNA, 14 nt, Human immunodeficiency virus 2 (HIV-2)
agcaacagaaagac

SEQ ID NO: 205976 - RNA, 17 nt, Human immunodeficiency virus 2 (HIV-2)
agagacuuacuauccaa

SEQ ID NO: 205977 - RNA, 22 nt, Human immunodeficiency virus 2 (HIV-2)
agccugguaggaaucagcuguu

SEQ ID NO: 205978 - RNA, 14 nt, Human immunodeficiency virus 2 (HIV-2)
agcacuaaaagaga

SEQ ID NO: 205979 - RNA, 24 nt, Human immunodeficiency virus 2 (HIV-2)
aggaaacaguggagaagagaccau

SEQ ID NO: 205980 - RNA, 23 nt, Human immunodeficiency virus 2 (HIV-2)
auaucauaugagcgaaagggcag

SEQ ID NO: 205981 - RNA, 13 nt, Human immunodeficiency virus 2 (HIV-2)
auaaacaccaaag

SEQ ID NO: 205982 - RNA, 17 nt, Human immunodeficiency virus 2 (HIV-2)
auaaacaccaaagaaua

SEQ ID NO: 205983 - RNA, 14 nt, Human immunodeficiency virus 2 (HIV-2)
aguagaacucucac

SEQ ID NO: 205984 - RNA, 20 nt, Human immunodeficiency virus 2 (HIV-2)
agucuaacagcaaucaggga

SEQ ID NO: 205985 - RNA, 19 nt, Human immunodeficiency virus 2 (HIV-2)
agucuaaugacugaagcac

SEQ ID NO: 205986 - RNA, 22 nt, Human immunodeficiency virus 2 (HIV-2)
agucuaaugacugaagcaccaa

SEQ ID NO: 205987 - RNA, 23 nt, Human immunodeficiency virus 2 (HIV-2)
uuauaaacaccaaagaauacaaa

SEQ ID NO: 205988 - RNA, 15 nt, Human immunodeficiency virus 2 (HIV-2)
ugugacuguuuucua

SEQ ID NO: 205989 - RNA, 13 nt, Human immunodeficiency virus 2 (HIV-2)
ugucauuuuacua

SEQ ID NO: 205990 - RNA, 17 nt, Human immunodeficiency virus 2 (HIV-2)
uggcaauagauauguca

SEQ ID NO: 205991 - RNA, 13 nt, Human immunodeficiency virus 2 (HIV-2)
uggaugauguaga

SEQ ID NO: 205992 - RNA, 17 nt, Human immunodeficiency virus 2 (HIV-2)
uggcagaauuauacuca

SEQ ID NO: 205993 - RNA, 17 nt, Human immunodeficiency virus 2 (HIV-2)
ugccaagauagagccaa

SEQ ID NO: 205994 - RNA, 17 nt, Human immunodeficiency virus 2 (HIV-2)
ugcaguuuccauugcca

SEQ ID NO: 205995 - RNA, 23 nt, Human immunodeficiency virus 2 (HIV-2)
ugcaguuuccauugccagcugug

SEQ ID NO: 205996 - RNA, 18 nt, Human immunodeficiency virus 2 (HIV-2)
ugcaccagacaagugagu

SEQ ID NO: 205997 - RNA, 17 nt, Human immunodeficiency virus 2 (HIV-2)
ugccagcuguguuucuc

SEQ ID NO: 205998 - RNA, 21 nt, Human immunodeficiency virus 2 (HIV-2)
ugccagacaaugaugauuauc

SEQ ID NO: 205999 - RNA, 13 nt, Human immunodeficiency virus 2 (HIV-2)
ugcuugccagaca

SEQ ID NO: 206000 - RNA, 21 nt, Human immunodeficiency virus 2 (HIV-2)
aagucuuacuagacacagggg

SEQ ID NO: 206001 - RNA, 21 nt, Human immunodeficiency virus 2 (HIV-2)
aaguaagaagagccaucagag

SEQ ID NO: 206002 - RNA, 16 nt, Human immunodeficiency virus 2 (HIV-2)
aauaaaaguacuaaau

SEQ ID NO: 206003 - RNA, 18 nt, Human immunodeficiency virus 2 (HIV-2)
aagagccaccauaaugac

SEQ ID NO: 206004 - RNA, 18 nt, Human immunodeficiency virus 2 (HIV-2)
aagaguaagagccaccau

SEQ ID NO: 206005 - RNA, 20 nt, Human immunodeficiency virus 2 (HIV-2)
aagaguaccacggagagaaa

SEQ ID NO: 206006 - RNA, 14 nt, Human immunodeficiency virus 2 (HIV-2)
aagauagagccaau

SEQ ID NO: 206007 - RNA, 16 nt, Human immunodeficiency virus 2 (HIV-2)
aagauagagccaauaa

SEQ ID NO: 206008 - RNA, 13 nt, Human immunodeficiency virus 2 (HIV-2)
aagaccucuucaa

SEQ ID NO: 206009 - RNA, 23 nt, Human immunodeficiency virus 2 (HIV-2)
aacuccuugcccagcugcaccga

SEQ ID NO: 206010 - RNA, 19 nt, Human immunodeficiency virus 2 (HIV-2)
uugcuggggggaggacaug

SEQ ID NO: 206011 - RNA, 17 nt, Human immunodeficiency virus 2 (HIV-2)
uuucucgaaaaaggggc

SEQ ID NO: 206012 - RNA, 20 nt, Human immunodeficiency virus 2 (HIV-2)
uuguugucauuuuacuaaca

SEQ ID NO: 206013 - RNA, 13 nt, Human immunodeficiency virus 2 (HIV-2)
uuuacaguaggag

SEQ ID NO: 206014 - RNA, 18 nt, Human immunodeficiency virus 2 (HIV-2)
uaccuagaaaaagaggaa

SEQ ID NO: 206015 - RNA, 15 nt, Human immunodeficiency virus 2 (HIV-2)
uacgagagagacucu

SEQ ID NO: 206016 - RNA, 16 nt, Human immunodeficiency virus 2 (HIV-2)
uacagugcuugccaga

SEQ ID NO: 206017 - RNA, 20 nt, Human immunodeficiency virus 2 (HIV-2)
uacaguaggaggagacauag

SEQ ID NO: 206018 - RNA, 18 nt, Human immunodeficiency virus 2 (HIV-2)
uaauaccagauuggcaga

SEQ ID NO: 206019 - RNA, 16 nt, Human immunodeficiency virus 2 (HIV-2)
uaaguguguguuccca

SEQ ID NO: 206020 - RNA, 21 nt, Human immunodeficiency virus 2 (HIV-2)
uaaauaaaagaguaagagcca

SEQ ID NO: 206021 - RNA, 17 nt, Human immunodeficiency virus 2 (HIV-2)
uaaaagagaucugugaa

SEQ ID NO: 206022 - RNA, 17 nt, Human immunodeficiency virus 2 (HIV-2)
uaacagcaaucagggac

SEQ ID NO: 206023 - RNA, 17 nt, Human immunodeficiency virus 2 (HIV-2)
uaagaagagccaucaga

SEQ ID NO: 206024 - RNA, 22 nt, Human immunodeficiency virus 2 (HIV-2)
gucauuuuacuaacaagugcuu

SEQ ID NO: 206025 - RNA, 15 nt, Human immunodeficiency virus 2 (HIV-2)
gugccuaaugcaaaa

SEQ ID NO: 206026 - RNA, 17 nt, Human immunodeficiency virus 2 (HIV-2)
guggaagcuaguaucag

SEQ ID NO: 206027 - RNA, 16 nt, Human immunodeficiency virus 2 (HIV-2)
guuaaguguguguucc

SEQ ID NO: 206028 - RNA, 11 nt, Human immunodeficiency virus 2 (HIV-2)
guuccaagaag

SEQ ID NO: 206029 - RNA, 22 nt, Human immunodeficiency virus 2 (HIV-2)
ucaagagagggugcacuugcug

SEQ ID NO: 206030 - RNA, 19 nt, Human immunodeficiency virus 2 (HIV-2)
uauuguaagcgaugcaguu

SEQ ID NO: 206031 - RNA, 21 nt, Human immunodeficiency virus 2 (HIV-2)
uaucauaugagcgaaagggca

SEQ ID NO: 206032 - RNA, 19 nt, Human immunodeficiency virus 2 (HIV-2)
ucccagagucuaacagcaa

SEQ ID NO: 206033 - RNA, 19 nt, Human immunodeficiency virus 2 (HIV-2)
ucgccuucugcaccagaca

SEQ ID NO: 206034 - RNA, 20 nt, Human immunodeficiency virus 2 (HIV-2)
ucgccuucugcaccagacaa

SEQ ID NO: 206035 - RNA, 15 nt, Human immunodeficiency virus 2 (HIV-2)
cugcagagacuuacu

SEQ ID NO: 206036 - RNA, 20 nt, Human immunodeficiency virus 2 (HIV-2)
cuggacucucaccaguacuu

SEQ ID NO: 206037 - RNA, 16 nt, Human immunodeficiency virus 2 (HIV-2)
cuguaaccaagggagg

SEQ ID NO: 206038 - RNA, 20 nt, Human immunodeficiency virus 2 (HIV-2)
cucgaaaaaggggcucggaa

SEQ ID NO: 206039 - RNA, 16 nt, Human immunodeficiency virus 2 (HIV-2)
cguggaaaaaugcauc

SEQ ID NO: 206040 - RNA, 21 nt, Human immunodeficiency virus 2 (HIV-2)
ccuuauuuugugcaacuaaaa

SEQ ID NO: 206041 - RNA, 15 nt, Human immunodeficiency virus 2 (HIV-2)
cgccagagagcucau

SEQ ID NO: 206042 - RNA, 22 nt, Human immunodeficiency virus 2 (HIV-2)
aaacagggaggcagugaaccau

SEQ ID NO: 206043 - RNA, 13 nt, Human immunodeficiency virus 2 (HIV-2)
ccuagaaaaagag

SEQ ID NO: 206044 - RNA, 16 nt, Human immunodeficiency virus 2 (HIV-2)
ccuagaaaaagaggaa

SEQ ID NO: 206045 - RNA, 14 nt, Human immunodeficiency virus 2 (HIV-2)
ccuaacaaaagaga

SEQ ID NO: 206046 - RNA, 14 nt, Human immunodeficiency virus 2 (HIV-2)
ccccgagagcucau

SEQ ID NO: 206047 - RNA, 12 nt, Human immunodeficiency virus 2 (HIV-2)
ccccaagcucau

SEQ ID NO: 206048 - RNA, 16 nt, Human immunodeficiency virus 2 (HIV-2)
ccaggaaacaguggag

SEQ ID NO: 206049 - RNA, 16 nt, Human immunodeficiency virus 2 (HIV-2)
ccagagucuaacagca

SEQ ID NO: 206050 - RNA, 15 nt, Human immunodeficiency virus 2 (HIV-2)
ccaagauagagccaa

SEQ ID NO: 206051 - RNA, 17 nt, Human immunodeficiency virus 2 (HIV-2)
ccaagauagagccaaua

SEQ ID NO: 206052 - RNA, 21 nt, Human immunodeficiency virus 2 (HIV-2)
ccaauaaaaguaacauugaag

SEQ ID NO: 206053 - RNA, 14 nt, Human immunodeficiency virus 2 (HIV-2)
ccaagaagaaucag

SEQ ID NO: 206054 - RNA, 13 nt, Human immunodeficiency virus 2 (HIV-2)
cauuucaagagag

SEQ ID NO: 206055 - RNA, 23 nt, Human immunodeficiency virus 2 (HIV-2)
cauuucaagagagggugcacuug

SEQ ID NO: 206056 - RNA, 22 nt, Human immunodeficiency virus 2 (HIV-2)
cauggagaaacccagcaacaga

SEQ ID NO: 206057 - RNA, 23 nt, Human immunodeficiency virus 2 (HIV-2)
cagacaaugaugauuaucaggaa

SEQ ID NO: 206058 - RNA, 22 nt, Human immunodeficiency virus 2 (HIV-2)
caggugaaguaagaagagccau

SEQ ID NO: 206059 - RNA, 19 nt, Human immunodeficiency virus 2 (HIV-2)
cagggaggcagugaaccau

SEQ ID NO: 206060 - RNA, 13 nt, Human immunodeficiency virus 2 (HIV-2)
cauacagugcuug

SEQ ID NO: 206061 - RNA, 15 nt, Human immunodeficiency virus 2 (HIV-2)
caguuccugauccac

SEQ ID NO: 206062 - RNA, 22 nt, Human immunodeficiency virus 2 (HIV-2)
caguuccugauccaccuacuga

SEQ ID NO: 206063 - RNA, 17 nt, Human immunodeficiency virus 2 (HIV-2)
caguuuccauugccagc

SEQ ID NO: 206064 - RNA, 20 nt, Human immunodeficiency virus 2 (HIV-2)
gccagggaaagauggaccaa

SEQ ID NO: 206065 - RNA, 21 nt, Human immunodeficiency virus 2 (HIV-2)
gccaugcacuaacaaaugcua

SEQ ID NO: 206066 - RNA, 19 nt, Human immunodeficiency virus 2 (HIV-2)
gcccuaguaguaguacaac

SEQ ID NO: 206067 - RNA, 17 nt, Human immunodeficiency virus 2 (HIV-2)
gcaguuuccauugccag

SEQ ID NO: 206068 - RNA, 18 nt, Human immunodeficiency virus 2 (HIV-2)
gcaguuuccauugccagc

SEQ ID NO: 206069 - RNA, 19 nt, Human immunodeficiency virus 2 (HIV-2)
gcaguuuccauugccagcu

SEQ ID NO: 206070 - RNA, 17 nt, Human immunodeficiency virus 2 (HIV-2)
gcagugaaccaucugcc

SEQ ID NO: 206071 - RNA, 20 nt, Human immunodeficiency virus 2 (HIV-2)
gcagggagcagaacucgccc

SEQ ID NO: 206072 - RNA, 18 nt, Human immunodeficiency virus 2 (HIV-2)
gcaagcuacacaaaguau

SEQ ID NO: 206073 - RNA, 19 nt, Human immunodeficiency virus 2 (HIV-2)
gauccaagaagcuuuccaa

SEQ ID NO: 206074 - RNA, 17 nt, Human immunodeficiency virus 2 (HIV-2)
gcucuuggcuacuauau

SEQ ID NO: 206075 - RNA, 21 nt, Human immunodeficiency virus 2 (HIV-2)
gcuugcuuaaagaccucuuca

SEQ ID NO: 206076 - RNA, 22 nt, Human immunodeficiency virus 2 (HIV-2)
ggaaaacuaagacuccuucgcc

SEQ ID NO: 206077 - RNA, 18 nt, Human immunodeficiency virus 2 (HIV-2)
ggaauacucgcaguucca

SEQ ID NO: 206078 - RNA, 21 nt, Human immunodeficiency virus 2 (HIV-2)
ggaagcuaguaucaguagaac

SEQ ID NO: 206079 - RNA, 13 nt, Human immunodeficiency virus 2 (HIV-2)
ggaccauacagug

SEQ ID NO: 206080 - RNA, 20 nt, Human immunodeficiency virus 2 (HIV-2)
ggaccauacagugcuugcca

SEQ ID NO: 206081 - RNA, 22 nt, Human immunodeficiency virus 2 (HIV-2)
ggggaccauacagugcuugcca

SEQ ID NO: 206082 - RNA, 12 nt, Human immunodeficiency virus 2 (HIV-2)
gaccaaggaccu

SEQ ID NO: 206083 - RNA, 18 nt, Human immunodeficiency virus 2 (HIV-2)
gaccaaggcugaaacaau

SEQ ID NO: 206084 - RNA, 12 nt, Human immunodeficiency virus 2 (HIV-2)
gagacauagaau

SEQ ID NO: 206085 - RNA, 16 nt, Human immunodeficiency virus 2 (HIV-2)
aacaaaugcuauugua

SEQ ID NO: 206086 - RNA, 17 nt, Human immunodeficiency virus 2 (HIV-2)
gaaguaagaagagccau

SEQ ID NO: 206087 - RNA, 21 nt, Human immunodeficiency virus 2 (HIV-2)
gaaguaagaagagccaucaga

SEQ ID NO: 206088 - RNA, 15 nt, Human immunodeficiency virus 2 (HIV-2)
gaagcuuuccaagca

SEQ ID NO: 206089 - RNA, 23 nt, Human immunodeficiency virus 2 (HIV-2)
gaaaugaccuauaaauuggcaau

SEQ ID NO: 206090 - RNA, 15 nt, Human immunodeficiency virus 2 (HIV-2)
gaaaacuaagacucc

SEQ ID NO: 206091 - RNA, 14 nt, Human immunodeficiency virus 2 (HIV-2)
gaaacccagcaaca

SEQ ID NO: 206092 - RNA, 19 nt, Human immunodeficiency virus 2 (HIV-2)
aacuauccccaagcucaua

SEQ ID NO: 206093 - RNA, 22 nt, Human immunodeficiency virus 2 (HIV-2)
aacuauccccaagcucauaaag

SEQ ID NO: 206094 - RNA, 16 nt, Human immunodeficiency virus 2 (HIV-2)
aaauagaagcacuaaa

SEQ ID NO: 206095 - RNA, 17 nt, Human immunodeficiency virus 2 (HIV-2)
aaauagaagcacuaaaa

SEQ ID NO: 206096 - RNA, 22 nt, Human immunodeficiency virus 2 (HIV-2)
aaagaccucuucaauaaagcug

SEQ ID NO: 206097 - RNA, 17 nt, Human immunodeficiency virus 2 (HIV-2)
aaaagagaucugugaaa

SEQ ID NO: 206098 - RNA, 17 nt, Human immunodeficiency virus 2 (HIV-2)
aaaagaguaagagccac

SEQ ID NO: 206099 - RNA, 12 nt, Human immunodeficiency virus 2 (HIV-2)
aaaagagaaaau

SEQ ID NO: 206100 - RNA, 13 nt, Human immunodeficiency virus 2 (HIV-2)
aaugcaaaaagcu

SEQ ID NO: 206101 - RNA, 16 nt, Human immunodeficiency virus 2 (HIV-2)
aaugcaaaaagcuaua

SEQ ID NO: 206102 - RNA, 14 nt, Human immunodeficiency virus 2 (HIV-2)
aauagauaugucac

SEQ ID NO: 206103 - RNA, 20 nt, Human immunodeficiency virus 2 (HIV-2)
aauguacccgcuucuugcau

SEQ ID NO: 206104 - RNA, 15 nt, Human immunodeficiency virus 2 (HIV-2)
aauugcucuuggcua

SEQ ID NO: 206105 - RNA, 24 nt, Human immunodeficiency virus 2 (HIV-2)
aaggagaagaacuccuugcccagc

SEQ ID NO: 206106 - RNA, 20 nt, Human immunodeficiency virus 2 (HIV-2)
aaggauuggaagaccaagga

SEQ ID NO: 206107 - RNA, 18 nt, Human immunodeficiency virus 2 (HIV-2)
aagcucauaaagcacagg

SEQ ID NO: 206108 - RNA, 15 nt, Human immunodeficiency virus 2 (HIV-2)
aagaauacaaaaaug

SEQ ID NO: 206109 - RNA, 23 nt, Human immunodeficiency virus 2 (HIV-2)
accuagaaaaagaggaagggaua

SEQ ID NO: 206110 - RNA, 21 nt, Human immunodeficiency virus 2 (HIV-2)
acgagcccucuucgugcacuu

SEQ ID NO: 206111 - RNA, 16 nt, Human immunodeficiency virus 2 (HIV-2)
acauugaagccaggga

SEQ ID NO: 206112 - RNA, 17 nt, Human immunodeficiency virus 2 (HIV-2)
accauacagugcuugcc

SEQ ID NO: 206113 - RNA, 20 nt, Human immunodeficiency virus 2 (HIV-2)
accauacagugcuugccaga

SEQ ID NO: 206114 - RNA, 22 nt, Human immunodeficiency virus 2 (HIV-2)
accaucugccccgagagcucau

SEQ ID NO: 206115 - RNA, 17 nt, Human immunodeficiency virus 2 (HIV-2)
accccagagaaagggua

SEQ ID NO: 206116 - RNA, 21 nt, Human immunodeficiency virus 2 (HIV-2)
acccgcguggaaaaaugcauc

SEQ ID NO: 206117 - RNA, 14 nt, Human immunodeficiency virus 2 (HIV-2)
acaucugcagagac

SEQ ID NO: 206118 - RNA, 19 nt, Human immunodeficiency virus 2 (HIV-2)
acaugaacagcccauggag

SEQ ID NO: 206119 - RNA, 15 nt, Human immunodeficiency virus 2 (HIV-2)
acagaccccagagaa

SEQ ID NO: 206120 - RNA, 14 nt, Human immunodeficiency virus 2 (HIV-2)
acacuccaaaaaua

SEQ ID NO: 206121 - RNA, 14 nt, Human immunodeficiency virus 2 (HIV-2)
acucaauaguagca

SEQ ID NO: 206122 - RNA, 17 nt, Human immunodeficiency virus 2 (HIV-2)
acucgcaguuccaagaa

SEQ ID NO: 206123 - RNA, 13 nt, Human immunodeficiency virus 2 (HIV-2)
acugcaagggaug

SEQ ID NO: 206124 - RNA, 21 nt, Human immunodeficiency virus 2 (HIV-2)
agaaaggguaccgccaggaaa

SEQ ID NO: 206125 - RNA, 20 nt, Human immunodeficiency virus 2 (HIV-2)
agagcucauuuuccaggugu

SEQ ID NO: 206126 - RNA, 18 nt, Human immunodeficiency virus 2 (HIV-2)
agagccuggguguucccu

SEQ ID NO: 206127 - RNA, 17 nt, Human immunodeficiency virus 2 (HIV-2)
agacauauaccuagaaa

SEQ ID NO: 206128 - RNA, 22 nt, Human immunodeficiency virus 2 (HIV-2)
caaaaugacagaccccagagaa

SEQ ID NO: 206129 - RNA, 20 nt, Human immunodeficiency virus 2 (HIV-2)
caacaucuuuggcagaaaua

SEQ ID NO: 206130 - RNA, 17 nt, Human immunodeficiency virus 2 (HIV-2)
caagagagggugcacuu

SEQ ID NO: 206131 - RNA, 12 nt, Human immunodeficiency virus 2 (HIV-2)
caacugcaauau

SEQ ID NO: 206132 - RNA, 16 nt, Human immunodeficiency virus 2 (HIV-2)
cagaaagacagaaaga

SEQ ID NO: 206133 - RNA, 20 nt, Human immunodeficiency virus 2 (HIV-2)
caauggccccuaacaaaaga

SEQ ID NO: 206134 - RNA, 16 nt, Human immunodeficiency virus 2 (HIV-2)
caccagacaagugagu

SEQ ID NO: 206135 - RNA, 19 nt, Human immunodeficiency virus 2 (HIV-2)
augucagcaagcuacacaa

SEQ ID NO: 206136 - RNA, 20 nt, Human immunodeficiency virus 2 (HIV-2)
augucagcaagcuacacaaa

SEQ ID NO: 206137 - RNA, 21 nt, Human immunodeficiency virus 2 (HIV-2)
auucugaugaugaugaccuaa

SEQ ID NO: 206138 - RNA, 18 nt, Human immunodeficiency virus 2 (HIV-2)
agccuuaagacauuuuga

SEQ ID NO: 206139 - RNA, 20 nt, Human immunodeficiency virus 2 (HIV-2)
auagaauccuagacauauac

SEQ ID NO: 206140 - RNA, 18 nt, Human immunodeficiency virus 2 (HIV-2)
auagaagccuuaaacagg

SEQ ID NO: 206141 - RNA, 14 nt, Human immunodeficiency virus 2 (HIV-2)
auagauaugucaca

SEQ ID NO: 206142 - RNA, 18 nt, Human immunodeficiency virus 2 (HIV-2)
auacucaugggccaggag

SEQ ID NO: 206143 - RNA, 18 nt, Human immunodeficiency virus 2 (HIV-2)
auccaagaagcuuuccaa

SEQ ID NO: 206144 - RNA, 17 nt, Human immunodeficiency virus 2 (HIV-2)
auauuuacacauuucaa

SEQ ID NO: 206145 - RNA, 20 nt, Human immunodeficiency virus 2 (HIV-2)
aucagcagggagaguacaug

SEQ ID NO: 206146 - RNA, 22 nt, Human immunodeficiency virus 2 (HIV-2)
aucagcagggagaguacaugaa

SEQ ID NO: 206147 - RNA, 12 nt, Human immunodeficiency virus 2 (HIV-2)
aaaagaaaaagg

SEQ ID NO: 206148 - RNA, 22 nt, Human immunodeficiency virus 2 (HIV-2)
aaaaaggggcucggaauaucau

SEQ ID NO: 206149 - RNA, 16 nt, Human immunodeficiency virus 2 (HIV-2)
ugcaguuuccauugcc

SEQ ID NO: 206150 - RNA, 13 nt, Human immunodeficiency virus 2 (HIV-2)
ugcaacuaaaaau

SEQ ID NO: 206151 - RNA, 16 nt, Human immunodeficiency virus 2 (HIV-2)
ugccaagauagagcca

SEQ ID NO: 206152 - RNA, 16 nt, Human immunodeficiency virus 2 (HIV-2)
ugagggacagcaguau

SEQ ID NO: 206153 - RNA, 15 nt, Human immunodeficiency virus 2 (HIV-2)
ucugcagagacuuac

SEQ ID NO: 206154 - RNA, 18 nt, Human immunodeficiency virus 2 (HIV-2)
ucugccccgagagcucau

SEQ ID NO: 206155 - RNA, 19 nt, Human immunodeficiency virus 2 (HIV-2)
uccaagaagaaucaggcag

SEQ ID NO: 206156 - RNA, 12 nt, Human immunodeficiency virus 2 (HIV-2)
uguauaggcagc

SEQ ID NO: 206157 - RNA, 17 nt, Human immunodeficiency virus 2 (HIV-2)
uguugucauuuuacuaa

SEQ ID NO: 206158 - RNA, 14 nt, Human immunodeficiency virus 2 (HIV-2)
uuacacuccaaaaa

SEQ ID NO: 206159 - RNA, 15 nt, Human immunodeficiency virus 2 (HIV-2)
uuacacuccaaaaau

SEQ ID NO: 206160 - RNA, 20 nt, Human immunodeficiency virus 2 (HIV-2)
uuaguauauuguagccagua

SEQ ID NO: 206161 - RNA, 16 nt, Human immunodeficiency virus 2 (HIV-2)
uuauaaacaccaaaga

SEQ ID NO: 206162 - RNA, 18 nt, Human immunodeficiency virus 2 (HIV-2)
uugcuuuacggcagguga

SEQ ID NO: 206163 - RNA, 15 nt, Human immunodeficiency virus 2 (HIV-2)
guaccaucacuucaa

SEQ ID NO: 206164 - RNA, 23 nt, Human immunodeficiency virus 2 (HIV-2)
guaccacggagagaaaugaccua

SEQ ID NO: 206165 - RNA, 17 nt, Human immunodeficiency virus 2 (HIV-2)
guacaacaaaaugacag

SEQ ID NO: 206166 - RNA, 20 nt, Human immunodeficiency virus 2 (HIV-2)
gucuaaugacugaagcacca

SEQ ID NO: 206167 - RNA, 13 nt, Human immunodeficiency virus 2 (HIV-2)
gugcuugccagac

SEQ ID NO: 206168 - RNA, 17 nt, Human immunodeficiency virus 2 (HIV-2)
gugcaguuccugaucca

SEQ ID NO: 206169 - RNA, 16 nt, Human immunodeficiency virus 2 (HIV-2)
gugaguauggagccug

SEQ ID NO: 206170 - RNA, 13 nt, Human immunodeficiency virus 2 (HIV-2)
gugaaccaucugc

SEQ ID NO: 206171 - RNA, 22 nt, Human immunodeficiency virus 2 (HIV-2)
ggaauacucgcaguuccaagaa

SEQ ID NO: 206172 - RNA, 18 nt, Human immunodeficiency virus 2 (HIV-2)
ggagaagaacuccuugcc

SEQ ID NO: 206173 - RNA, 19 nt, Human immunodeficiency virus 2 (HIV-2)
ggagaagaacuccuugccc

SEQ ID NO: 206174 - RNA, 21 nt, Human immunodeficiency virus 2 (HIV-2)
ggaccauacagugcuugccag

SEQ ID NO: 206175 - RNA, 20 nt, Human immunodeficiency virus 2 (HIV-2)
ggcagacgaagaaggacucc

SEQ ID NO: 206176 - RNA, 18 nt, Human immunodeficiency virus 2 (HIV-2)
ucaagaauuggcuaaaca

SEQ ID NO: 206177 - RNA, 23 nt, Human immunodeficiency virus 2 (HIV-2)
uaucaguagaacucucacaagag

SEQ ID NO: 206178 - RNA, 15 nt, Human immunodeficiency virus 2 (HIV-2)
uauaaacaccaaaga

SEQ ID NO: 206179 - RNA, 13 nt, Human immunodeficiency virus 2 (HIV-2)
uacggcaggugaa

SEQ ID NO: 206180 - RNA, 15 nt, Human immunodeficiency virus 2 (HIV-2)
uaaguguguguuccc

SEQ ID NO: 206181 - RNA, 16 nt, Human immunodeficiency virus 2 (HIV-2)
uaaaaguaacauugaa

SEQ ID NO: 206182 - RNA, 12 nt, Human immunodeficiency virus 2 (HIV-2)
cuuacuauccaa

SEQ ID NO: 206183 - RNA, 18 nt, Human immunodeficiency virus 2 (HIV-2)
cuguuacaccaagaguac

SEQ ID NO: 206184 - RNA, 23 nt, Human immunodeficiency virus 2 (HIV-2)
cugcaccgaccccuagagccaug

SEQ ID NO: 206185 - RNA, 15 nt, Human immunodeficiency virus 2 (HIV-2)
cuaaauaaaagagua

SEQ ID NO: 206186 - RNA, 13 nt, Human immunodeficiency virus 2 (HIV-2)
cgguguucaucug

SEQ ID NO: 206187 - RNA, 16 nt, Human immunodeficiency virus 2 (HIV-2)
cgaagaaggacuccaa

SEQ ID NO: 206188 - RNA, 16 nt, Human immunodeficiency virus 2 (HIV-2)
cgaccccuagagccau

SEQ ID NO: 206189 - RNA, 19 nt, Human immunodeficiency virus 2 (HIV-2)
cgaccccuagagccaugca

SEQ ID NO: 206190 - RNA, 22 nt, Human immunodeficiency virus 2 (HIV-2)
cggagggacuuagggagugacu

SEQ ID NO: 206191 - RNA, 20 nt, Human immunodeficiency virus 2 (HIV-2)
cuauauccauaauagacaug

SEQ ID NO: 206192 - RNA, 17 nt, Human immunodeficiency virus 2 (HIV-2)
cuacuauauccauaaua

SEQ ID NO: 206193 - RNA, 21 nt, Human immunodeficiency virus 2 (HIV-2)
cuaauugcucuuggcuacuau

SEQ ID NO: 206194 - RNA, 19 nt, Human immunodeficiency virus 2 (HIV-2)
cuaaugcaaaaagcuauau

SEQ ID NO: 206195 - RNA, 21 nt, Human immunodeficiency virus 2 (HIV-2)
gacauggagacacccuugaag

SEQ ID NO: 206196 - RNA, 19 nt, Human immunodeficiency virus 2 (HIV-2)
gaccaaggcugaaacaaug

SEQ ID NO: 206197 - RNA, 20 nt, Human immunodeficiency virus 2 (HIV-2)
gacuacgagagagacucuug

SEQ ID NO: 206198 - RNA, 13 nt, Human immunodeficiency virus 2 (HIV-2)
gagaucugugaaa

SEQ ID NO: 206199 - RNA, 14 nt, Human immunodeficiency virus 2 (HIV-2)
gacagaaagauuug

SEQ ID NO: 206200 - RNA, 11 nt, Human immunodeficiency virus 2 (HIV-2)
gacagcaguau

SEQ ID NO: 206201 - RNA, 12 nt, Human immunodeficiency virus 2 (HIV-2)
gaauuauacuca

SEQ ID NO: 206202 - RNA, 22 nt, Human immunodeficiency virus 2 (HIV-2)
gaauagggggauuuauaaacac

SEQ ID NO: 206203 - RNA, 15 nt, Human immunodeficiency virus 2 (HIV-2)
gaagaacuccuugcc

SEQ ID NO: 206204 - RNA, 17 nt, Human immunodeficiency virus 2 (HIV-2)
gaagaacuccuugccca

SEQ ID NO: 206205 - RNA, 14 nt, Human immunodeficiency virus 2 (HIV-2)
gaagagccaucaga

SEQ ID NO: 206206 - RNA, 15 nt, Human immunodeficiency virus 2 (HIV-2)
gauauuugugccuaa

SEQ ID NO: 206207 - RNA, 17 nt, Human immunodeficiency virus 2 (HIV-2)
gaggggaauacucgcag

SEQ ID NO: 206208 - RNA, 13 nt, Human immunodeficiency virus 2 (HIV-2)
gagggugcacuug

SEQ ID NO: 206209 - RNA, 13 nt, Human immunodeficiency virus 2 (HIV-2)
gaguaagagccac

SEQ ID NO: 206210 - RNA, 19 nt, Human immunodeficiency virus 2 (HIV-2)
gaucucccagagucuaaca

SEQ ID NO: 206211 - RNA, 12 nt, Human immunodeficiency virus 2 (HIV-2)
gauggaccaagg

SEQ ID NO: 206212 - RNA, 17 nt, Human immunodeficiency virus 2 (HIV-2)
gcacagguaccaucacu

SEQ ID NO: 206213 - RNA, 16 nt, Human immunodeficiency virus 2 (HIV-2)
cccucuucgugcacuu

SEQ ID NO: 206214 - RNA, 15 nt, Human immunodeficiency virus 2 (HIV-2)
ccugcuggacucuca

SEQ ID NO: 206215 - RNA, 15 nt, Human immunodeficiency virus 2 (HIV-2)
ccucuucgugcacuu

SEQ ID NO: 206216 - RNA, 18 nt, Human immunodeficiency virus 2 (HIV-2)
cauucgcgaggacuacga

SEQ ID NO: 206217 - RNA, 14 nt, Human immunodeficiency virus 2 (HIV-2)
cagugcuugccaga

SEQ ID NO: 206218 - RNA, 19 nt, Human immunodeficiency virus 2 (HIV-2)
cagcaaucagggacuggcu

SEQ ID NO: 206219 - RNA, 20 nt, Human immunodeficiency virus 2 (HIV-2)
auuuaccaguugccaagaua

SEQ ID NO: 206220 - RNA, 17 nt, Human immunodeficiency virus 2 (HIV-2)
auuugugccuaaugcaa

SEQ ID NO: 206221 - RNA, 19 nt, Human immunodeficiency virus 2 (HIV-2)
auuggcaugaugaacaagg

SEQ ID NO: 206222 - RNA, 16 nt, Human immunodeficiency virus 2 (HIV-2)
cacaggggcugaugac

SEQ ID NO: 206223 - RNA, 22 nt, Human immunodeficiency virus 2 (HIV-2)
caauggccccuaacaaaagaga

SEQ ID NO: 206224 - RNA, 20 nt, Human immunodeficiency virus 2 (HIV-2)
caccauaaugacaggagaua

SEQ ID NO: 206225 - RNA, 23 nt, Human immunodeficiency virus 2 (HIV-2)
agcgaugcaguuuccauugccag

SEQ ID NO: 206226 - RNA, 21 nt, Human immunodeficiency virus 2 (HIV-2)
aggagaagaacuccuugccca

SEQ ID NO: 206227 - RNA, 19 nt, Human immunodeficiency virus 2 (HIV-2)
aggaccauagaagccuuaa

SEQ ID NO: 206228 - RNA, 14 nt, Human immunodeficiency virus 2 (HIV-2)
agggagaguacaug

SEQ ID NO: 206229 - RNA, 17 nt, Human immunodeficiency virus 2 (HIV-2)
agggagaguacaugaac

SEQ ID NO: 206230 - RNA, 14 nt, Human immunodeficiency virus 2 (HIV-2)
agggaggcagugaa

SEQ ID NO: 206231 - RNA, 15 nt, Human immunodeficiency virus 2 (HIV-2)
aguaagaagagccau

SEQ ID NO: 206232 - RNA, 14 nt, Human immunodeficiency virus 2 (HIV-2)
aguggauccaagaa

SEQ ID NO: 206233 - RNA, 15 nt, Human immunodeficiency virus 2 (HIV-2)
aguaucagcagggag

SEQ ID NO: 206234 - RNA, 22 nt, Human immunodeficiency virus 2 (HIV-2)
aucugcagagacuuacuaucca

SEQ ID NO: 206235 - RNA, 23 nt, Human immunodeficiency virus 2 (HIV-2)
aucugcagagacuuacuauccaa

SEQ ID NO: 206236 - RNA, 14 nt, Human immunodeficiency virus 2 (HIV-2)
auccccaagcucau

SEQ ID NO: 206237 - RNA, 17 nt, Human immunodeficiency virus 2 (HIV-2)
auccaagaagcuuucca

SEQ ID NO: 206238 - RNA, 21 nt, Human immunodeficiency virus 2 (HIV-2)
auagaauccuagacauauacc

SEQ ID NO: 206239 - RNA, 15 nt, Human immunodeficiency virus 2 (HIV-2)
auagaagcacuaaaa

SEQ ID NO: 206240 - RNA, 16 nt, Human immunodeficiency virus 2 (HIV-2)
auacucgcaguuccaa

SEQ ID NO: 206241 - RNA, 20 nt, Human immunodeficiency virus 2 (HIV-2)
auaggcagcaaaauauggau

SEQ ID NO: 206242 - RNA, 23 nt, Human immunodeficiency virus 2 (HIV-2)
acagaaagauuuguauaggcagc

SEQ ID NO: 206243 - RNA, 21 nt, Human immunodeficiency virus 2 (HIV-2)
agacacuugggggaccauaca

SEQ ID NO: 206244 - RNA, 22 nt, Human immunodeficiency virus 2 (HIV-2)
agaccauuggagaggccuucga

SEQ ID NO: 206245 - RNA, 18 nt, Human immunodeficiency virus 2 (HIV-2)
agaaacccagcaacagaa

SEQ ID NO: 206246 - RNA, 12 nt, Human immunodeficiency virus 2 (HIV-2)
agaaaugaccua

SEQ ID NO: 206247 - RNA, 21 nt, Human immunodeficiency virus 2 (HIV-2)
agaauuaggggacaauuacac

SEQ ID NO: 206248 - RNA, 18 nt, Human immunodeficiency virus 2 (HIV-2)
agaacuccuugcccagcu

SEQ ID NO: 206249 - RNA, 13 nt, Human immunodeficiency virus 2 (HIV-2)
agaagcuuuccaa

SEQ ID NO: 206250 - RNA, 20 nt, Human immunodeficiency virus 2 (HIV-2)
acucucacaagaggcagagg

SEQ ID NO: 206251 - RNA, 20 nt, Human immunodeficiency virus 2 (HIV-2)
acucgcccuccugugaggga

SEQ ID NO: 206252 - RNA, 14 nt, Human immunodeficiency virus 2 (HIV-2)
acuagacacagggg

SEQ ID NO: 206253 - RNA, 17 nt, Human immunodeficiency virus 2 (HIV-2)
acugaagcaccaacaga

SEQ ID NO: 206254 - RNA, 20 nt, Human immunodeficiency virus 2 (HIV-2)
acuugggggaccauacagug

SEQ ID NO: 206255 - RNA, 22 nt, Human immunodeficiency virus 2 (HIV-2)
uaggcaugucauuaaauuuacc

SEQ ID NO: 206256 - RNA, 23 nt, Human immunodeficiency virus 2 (HIV-2)
uaggaguuccuguuacaccaaga

SEQ ID NO: 206257 - RNA, 18 nt, Human immunodeficiency virus 2 (HIV-2)
uaggaggagacauagaau

SEQ ID NO: 206258 - RNA, 18 nt, Human immunodeficiency virus 2 (HIV-2)
uagucgccgccuggucau

SEQ ID NO: 206259 - RNA, 11 nt, Human immunodeficiency virus 2 (HIV-2)
uacuuggucaa

SEQ ID NO: 206260 - RNA, 17 nt, Human immunodeficiency virus 2 (HIV-2)
uacuuggucaaggcagg

SEQ ID NO: 206261 - RNA, 17 nt, Human immunodeficiency virus 2 (HIV-2)
uagagaggaccauagaa

SEQ ID NO: 206262 - RNA, 14 nt, Human immunodeficiency virus 2 (HIV-2)
uagagccaugcacu

SEQ ID NO: 206263 - RNA, 20 nt, Human immunodeficiency virus 2 (HIV-2)
uacccgcguggaaaaaugca

SEQ ID NO: 206264 - RNA, 14 nt, Human immunodeficiency virus 2 (HIV-2)
aacaagugcuugcu

SEQ ID NO: 206265 - RNA, 15 nt, Human immunodeficiency virus 2 (HIV-2)
aacaagugcuugcuu

SEQ ID NO: 206266 - RNA, 19 nt, Human immunodeficiency virus 2 (HIV-2)
aacaagugcuugcuuagua

SEQ ID NO: 206267 - RNA, 20 nt, Human immunodeficiency virus 2 (HIV-2)
uacuaacaagugcuugcuua

SEQ ID NO: 206268 - RNA, 17 nt, Human immunodeficiency virus 2 (HIV-2)
uacaccaagaguaccac

SEQ ID NO: 206269 - RNA, 22 nt, Human immunodeficiency virus 2 (HIV-2)
uacaccaagaguaccacggaga

SEQ ID NO: 206270 - RNA, 20 nt, Human immunodeficiency virus 2 (HIV-2)
uaaacaccaaagaauacaaa

SEQ ID NO: 206271 - RNA, 17 nt, Human immunodeficiency virus 2 (HIV-2)
uaaagcacagguaccau

SEQ ID NO: 206272 - RNA, 18 nt, Human immunodeficiency virus 2 (HIV-2)
uaaauuuaccaguugcca

SEQ ID NO: 206273 - RNA, 13 nt, Human immunodeficiency virus 2 (HIV-2)
guuuccauugcca

SEQ ID NO: 206274 - RNA, 18 nt, Human immunodeficiency virus 2 (HIV-2)
ucacaagaggcagaggaa

SEQ ID NO: 206275 - RNA, 12 nt, Human immunodeficiency virus 2 (HIV-2)
uccauugccagc

SEQ ID NO: 206276 - RNA, 14 nt, Human immunodeficiency virus 2 (HIV-2)
uccauugccagcug

SEQ ID NO: 206277 - RNA, 18 nt, Human immunodeficiency virus 2 (HIV-2)
ugacagaccccagagaaa

SEQ ID NO: 206278 - RNA, 21 nt, Human immunodeficiency virus 2 (HIV-2)
ugaccuauaaauuggcaauag

SEQ ID NO: 206279 - RNA, 17 nt, Human immunodeficiency virus 2 (HIV-2)
ucugaugaugaugaccu

SEQ ID NO: 206280 - RNA, 16 nt, Human immunodeficiency virus 2 (HIV-2)
ucucacaagaggcaga

SEQ ID NO: 206281 - RNA, 14 nt, Human immunodeficiency virus 2 (HIV-2)
ucugcaccagacaa

SEQ ID NO: 206282 - RNA, 17 nt, Human immunodeficiency virus 2 (HIV-2)
uuaccaguugccaagau

SEQ ID NO: 206283 - RNA, 17 nt, Human immunodeficiency virus 2 (HIV-2)
uuaaguguguguuccca

SEQ ID NO: 206284 - RNA, 20 nt, Human immunodeficiency virus 2 (HIV-2)
uguugucauuuuacuaacaa

SEQ ID NO: 206285 - RNA, 16 nt, Human immunodeficiency virus 2 (HIV-2)
ugcaucuauucccuua

SEQ ID NO: 206286 - RNA, 23 nt, Human immunodeficiency virus 2 (HIV-2)
ugcagagacuuacuauccaagaa

SEQ ID NO: 206287 - RNA, 18 nt, Human immunodeficiency virus 2 (HIV-2)
uggagaaacccagcaaca

SEQ ID NO: 206288 - RNA, 15 nt, Human immunodeficiency virus 2 (HIV-2)
uggaaaaaugcaucu

SEQ ID NO: 206289 - RNA, 15 nt, Human immunodeficiency virus 2 (HIV-2)
uggagaagagaccau

SEQ ID NO: 206290 - RNA, 12 nt, Human immunodeficiency virus 2 (HIV-2)
uggauccaagaa

SEQ ID NO: 206291 - RNA, 12 nt, Human immunodeficiency virus 2 (HIV-2)
aagaaacagcug

SEQ ID NO: 206292 - RNA, 15 nt, Human immunodeficiency virus 2 (HIV-2)
uuucccccagaagau

SEQ ID NO: 206293 - RNA, 22 nt, Human immunodeficiency virus 2 (HIV-2)
aaucaggcagggagcagaacuc

SEQ ID NO: 206294 - RNA, 16 nt, Human immunodeficiency virus 2 (HIV-2)
aagcuauauuuacaca

SEQ ID NO: 206295 - RNA, 17 nt, Human immunodeficiency virus 2 (HIV-2)
aagcuauauuuacacau

SEQ ID NO: 206296 - RNA, 12 nt, Human immunodeficiency virus 2 (HIV-2)
aagcuacacaaa

SEQ ID NO: 206297 - RNA, 16 nt, Human immunodeficiency virus 2 (HIV-2)
aagaacuccuugccca

SEQ ID NO: 206298 - RNA, 13 nt, Human immunodeficiency virus 2 (HIV-2)
aagcgaugcaguu

SEQ ID NO: 206299 - RNA, 17 nt, Human immunodeficiency virus 2 (HIV-2)
aauuacacuccaaaaau

SEQ ID NO: 206300 - RNA, 19 nt, Human immunodeficiency virus 2 (HIV-2)
aauggccccuaacaaaaga

SEQ ID NO: 206301 - RNA, 14 nt, Human immunodeficiency virus 2 (HIV-2)
aaauagaagcacua

SEQ ID NO: 206302 - RNA, 19 nt, Human immunodeficiency virus 2 (HIV-2)
gaccauacagugcuugcca

SEQ ID NO: 206303 - RNA, 22 nt, Human immunodeficiency virus 2 (HIV-2)
gacacaggggcugaugacucaa

SEQ ID NO: 206304 - RNA, 18 nt, Human immunodeficiency virus 2 (HIV-2)
gaauacucgcaguuccaa

SEQ ID NO: 206305 - RNA, 21 nt, Human immunodeficiency virus 2 (HIV-2)
gaauacucgcaguuccaagaa

SEQ ID NO: 206306 - RNA, 19 nt, Human immunodeficiency virus 2 (HIV-2)
gaauacaaaaauguagaaa

SEQ ID NO: 206307 - RNA, 20 nt, Human immunodeficiency virus 2 (HIV-2)
gaaucaggcagggagcagaa

SEQ ID NO: 206308 - RNA, 18 nt, Human immunodeficiency virus 2 (HIV-2)
gaagccuuaaacagggag

SEQ ID NO: 206309 - RNA, 14 nt, Human immunodeficiency virus 2 (HIV-2)
gaagccuuaagaca

SEQ ID NO: 206310 - RNA, 16 nt, Human immunodeficiency virus 2 (HIV-2)
gaacaagggaugucag

SEQ ID NO: 206311 - RNA, 19 nt, Human immunodeficiency virus 2 (HIV-2)
gagacuuacuauccaagaa

SEQ ID NO: 206312 - RNA, 19 nt, Human immunodeficiency virus 2 (HIV-2)
gagaggaccauagaagccu

SEQ ID NO: 206313 - RNA, 22 nt, Human immunodeficiency virus 2 (HIV-2)
gagggacuuagggagugacugg

SEQ ID NO: 206314 - RNA, 19 nt, Human immunodeficiency virus 2 (HIV-2)
aaauauucugacagccuua

SEQ ID NO: 206315 - RNA, 15 nt, Human immunodeficiency virus 2 (HIV-2)
aaauggaaaaagagg

SEQ ID NO: 206316 - RNA, 17 nt, Human immunodeficiency virus 2 (HIV-2)
gacuuacuauccaagaa

SEQ ID NO: 206317 - RNA, 18 nt, Human immunodeficiency virus 2 (HIV-2)
gacuuacuauccaagaac

SEQ ID NO: 206318 - RNA, 19 nt, Human immunodeficiency virus 2 (HIV-2)
gauuuauaaacaccaaaga

SEQ ID NO: 206319 - RNA, 17 nt, Human immunodeficiency virus 2 (HIV-2)
gauguuuuacaguagga

SEQ ID NO: 206320 - RNA, 15 nt, Human immunodeficiency virus 2 (HIV-2)
gaugaugaugaccua

SEQ ID NO: 206321 - RNA, 19 nt, Human immunodeficiency virus 2 (HIV-2)
guaagcgaugcaguuucca

SEQ ID NO: 206322 - RNA, 20 nt, Human immunodeficiency virus 2 (HIV-2)
gggaccauacagugcuugcc

SEQ ID NO: 206323 - RNA, 16 nt, Human immunodeficiency virus 2 (HIV-2)
ggucauucgguguuca

SEQ ID NO: 206324 - RNA, 17 nt, Human immunodeficiency virus 2 (HIV-2)
ggagaagaacuccuugc

SEQ ID NO: 206325 - RNA, 17 nt, Human immunodeficiency virus 2 (HIV-2)
gcucauuuuccaggugu

SEQ ID NO: 206326 - RNA, 17 nt, Human immunodeficiency virus 2 (HIV-2)
gcucaagaauuggcuaa

SEQ ID NO: 206327 - RNA, 13 nt, Human immunodeficiency virus 2 (HIV-2)
gcuacuauaucca

SEQ ID NO: 206328 - RNA, 14 nt, Human immunodeficiency virus 2 (HIV-2)
gcggcccaacugca

SEQ ID NO: 206329 - RNA, 15 nt, Human immunodeficiency virus 2 (HIV-2)
gccccuaacaaaaga

SEQ ID NO: 206330 - RNA, 20 nt, Human immunodeficiency virus 2 (HIV-2)
gccuaaugcaaaaagcuaua

SEQ ID NO: 206331 - RNA, 19 nt, Human immunodeficiency virus 2 (HIV-2)
cuagagccaugcacuaaca

SEQ ID NO: 206332 - RNA, 20 nt, Human immunodeficiency virus 2 (HIV-2)
cuagagccaugcacuaacaa

SEQ ID NO: 206333 - RNA, 14 nt, Human immunodeficiency virus 2 (HIV-2)
cuauaaauuggcaa

SEQ ID NO: 206334 - RNA, 18 nt, Human immunodeficiency virus 2 (HIV-2)
cuauccaagaacuccccg

SEQ ID NO: 206335 - RNA, 23 nt, Human immunodeficiency virus 2 (HIV-2)
cuaaauaaaagaguaagagccac

SEQ ID NO: 206336 - RNA, 20 nt, Human immunodeficiency virus 2 (HIV-2)
cgggcuauacaacaucugca

SEQ ID NO: 206337 - RNA, 23 nt, Human immunodeficiency virus 2 (HIV-2)
cugagagguucucuccagcacua

SEQ ID NO: 206338 - RNA, 23 nt, Human immunodeficiency virus 2 (HIV-2)
cugaagcaccaacagaguuuccc

SEQ ID NO: 206339 - RNA, 18 nt, Human immunodeficiency virus 2 (HIV-2)
cugauccaccuacugacu

SEQ ID NO: 206340 - RNA, 14 nt, Human immunodeficiency virus 2 (HIV-2)
cuuauuuugugcaa

SEQ ID NO: 206341 - RNA, 22 nt, Human immunodeficiency virus 2 (HIV-2)
ccauacagugcuugccagacaa

SEQ ID NO: 206342 - RNA, 21 nt, Human immunodeficiency virus 2 (HIV-2)
ccacggagagaaaugaccuau

SEQ ID NO: 206343 - RNA, 20 nt, Human immunodeficiency virus 2 (HIV-2)
caucagaggggaaaaguuau

SEQ ID NO: 206344 - RNA, 17 nt, Human immunodeficiency virus 2 (HIV-2)
caugaugaacaagggau

SEQ ID NO: 206345 - RNA, 21 nt, Human immunodeficiency virus 2 (HIV-2)
caugcacuaacaaaugcuauu

SEQ ID NO: 206346 - RNA, 21 nt, Human immunodeficiency virus 2 (HIV-2)
cauuuuacuaacaagugcuug

SEQ ID NO: 206347 - RNA, 23 nt, Human immunodeficiency virus 2 (HIV-2)
ccgaccccuagagccaugcacua

SEQ ID NO: 206348 - RNA, 19 nt, Human immunodeficiency virus 2 (HIV-2)
ccuauaaauuggcaauaga

SEQ ID NO: 206349 - RNA, 19 nt, Human immunodeficiency virus 2 (HIV-2)
ccuugaaggcgccagagag

SEQ ID NO: 206350 - RNA, 14 nt, Human immunodeficiency virus 2 (HIV-2)
cgaugcaguuucca

SEQ ID NO: 206351 - RNA, 18 nt, Human immunodeficiency virus 2 (HIV-2)
auaugggugcgaguggau

SEQ ID NO: 206352 - RNA, 13 nt, Human immunodeficiency virus 2 (HIV-2)
augcacuaacaaa

SEQ ID NO: 206353 - RNA, 23 nt, Human immunodeficiency virus 2 (HIV-2)
augacaggagauaccccaaucaa

SEQ ID NO: 206354 - RNA, 22 nt, Human immunodeficiency virus 2 (HIV-2)
aguaacauugaagccagggaaa

SEQ ID NO: 206355 - RNA, 12 nt, Human immunodeficiency virus 2 (HIV-2)
agugcuugccag

SEQ ID NO: 206356 - RNA, 16 nt, Human immunodeficiency virus 2 (HIV-2)
agugcuugccagacaa

SEQ ID NO: 206357 - RNA, 19 nt, Human immunodeficiency virus 2 (HIV-2)
aguuauuguccugcugcaa

SEQ ID NO: 206358 - RNA, 14 nt, Human immunodeficiency virus 2 (HIV-2)
auaaacaccaaaga

SEQ ID NO: 206359 - RNA, 16 nt, Human immunodeficiency virus 2 (HIV-2)
auaaauuggcaauaga

SEQ ID NO: 206360 - RNA, 16 nt, Human immunodeficiency virus 2 (HIV-2)
aggcggcccaacugca

SEQ ID NO: 206361 - RNA, 18 nt, Human immunodeficiency virus 2 (HIV-2)
aggcggcccaacugcaau

SEQ ID NO: 206362 - RNA, 16 nt, Human immunodeficiency virus 2 (HIV-2)
aggaguuccuguuaca

SEQ ID NO: 206363 - RNA, 13 nt, Human immunodeficiency virus 2 (HIV-2)
caaaugcuauugu

SEQ ID NO: 206364 - RNA, 19 nt, Human immunodeficiency virus 2 (HIV-2)
caaaguauagauauuugug

SEQ ID NO: 206365 - RNA, 12 nt, Human immunodeficiency virus 2 (HIV-2)
auggaccaaggc

SEQ ID NO: 206366 - RNA, 18 nt, Human immunodeficiency virus 2 (HIV-2)
auuuauaaacaccaaaga

SEQ ID NO: 206367 - RNA, 23 nt, Human immunodeficiency virus 2 (HIV-2)
cagagucuaacagcaaucaggga

SEQ ID NO: 206368 - RNA, 22 nt, Human immunodeficiency virus 2 (HIV-2)
cagagcgggauguaaccgcuca

SEQ ID NO: 206369 - RNA, 20 nt, Human immunodeficiency virus 2 (HIV-2)
cagcagggagaguacaugaa

SEQ ID NO: 206370 - RNA, 17 nt, Human immunodeficiency virus 2 (HIV-2)
caauuacacuccaaaaa

SEQ ID NO: 206371 - RNA, 18 nt, Human immunodeficiency virus 2 (HIV-2)
accaagaguaccacggag

SEQ ID NO: 206372 - RNA, 15 nt, Human immunodeficiency virus 2 (HIV-2)
acagugcuugccaga

SEQ ID NO: 206373 - RNA, 21 nt, Human immunodeficiency virus 2 (HIV-2)
acagcaaucagggacuggcug

SEQ ID NO: 206374 - RNA, 13 nt, Human immunodeficiency virus 2 (HIV-2)
acagcaguaucag

SEQ ID NO: 206375 - RNA, 12 nt, Human immunodeficiency virus 2 (HIV-2)
acggcaggugaa

SEQ ID NO: 206376 - RNA, 16 nt, Human immunodeficiency virus 2 (HIV-2)
accgccaggaaacagu

SEQ ID NO: 206377 - RNA, 18 nt, Human immunodeficiency virus 2 (HIV-2)
agcacagguaccaucacu

SEQ ID NO: 206378 - RNA, 22 nt, Human immunodeficiency virus 2 (HIV-2)
agagaaaggguaccgccaggaa

SEQ ID NO: 206379 - RNA, 21 nt, Human immunodeficiency virus 2 (HIV-2)
agacuuacuauccaagaacuc

SEQ ID NO: 206380 - RNA, 16 nt, Human immunodeficiency virus 2 (HIV-2)
agagguucucuccagc

SEQ ID NO: 206381 - RNA, 12 nt, Human immunodeficiency virus 2 (HIV-2)
agauagagccaa

SEQ ID NO: 206382 - RNA, 14 nt, Human immunodeficiency virus 2 (HIV-2)
agaggaccauagaa

SEQ ID NO: 206383 - RNA, 16 nt, Human immunodeficiency virus 2 (HIV-2)
agacaaugaugauuau

SEQ ID NO: 206384 - RNA, 15 nt, Human immunodeficiency virus 2 (HIV-2)
agaauuaggggacaa

SEQ ID NO: 206385 - RNA, 13 nt, Human immunodeficiency virus 2 (HIV-2)
agaagaaucaggc

SEQ ID NO: 206386 - RNA, 23 nt, Human immunodeficiency virus 2 (HIV-2)
acuccuucgccuucugcaccaga

SEQ ID NO: 206387 - RNA, 22 nt, Human immunodeficiency virus 2 (HIV-2)
acuccuugcccagcugcaccga

SEQ ID NO: 206388 - RNA, 10 nt, Human immunodeficiency virus 2 (HIV-2)
acaagggaug

SEQ ID NO: 206389 - RNA, 17 nt, Human immunodeficiency virus 2 (HIV-2)
acaacaucugcagagac

SEQ ID NO: 206390 - RNA, 19 nt, Human immunodeficiency virus 2 (HIV-2)
aauaaaggaagaagccuua

SEQ ID NO: 206391 - RNA, 15 nt, Human immunodeficiency virus 2 (HIV-2)
aaucagcuguuuguu

SEQ ID NO: 206392 - RNA, 20 nt, Human immunodeficiency virus 2 (HIV-2)
aauaaaagaguaagagccac

SEQ ID NO: 206393 - RNA, 17 nt, Human immunodeficiency virus 2 (HIV-2)
aaguaagaagagccauc

SEQ ID NO: 206394 - RNA, 19 nt, Human immunodeficiency virus 2 (HIV-2)
aagcacagguaccaucacu

SEQ ID NO: 206395 - RNA, 17 nt, Human immunodeficiency virus 2 (HIV-2)
aagggaugucagcaagc

SEQ ID NO: 206396 - RNA, 23 nt, Human immunodeficiency virus 2 (HIV-2)
aagggaugucagcaagcuacaca

SEQ ID NO: 206397 - RNA, 16 nt, Human immunodeficiency virus 2 (HIV-2)
aagagagggugcacuu

SEQ ID NO: 206398 - RNA, 17 nt, Human immunodeficiency virus 2 (HIV-2)
aacagggaggcagugaa

SEQ ID NO: 206399 - RNA, 22 nt, Human immunodeficiency virus 2 (HIV-2)
aacgagcccucuucgugcacuu

SEQ ID NO: 206400 - RNA, 12 nt, Human immunodeficiency virus 2 (HIV-2)
aaauaaaagagu

SEQ ID NO: 206401 - RNA, 15 nt, Human immunodeficiency virus 2 (HIV-2)
aaauaaaaguacuaa

SEQ ID NO: 206402 - RNA, 13 nt, Human immunodeficiency virus 2 (HIV-2)
aaaguacuaaaua

SEQ ID NO: 206403 - RNA, 22 nt, Human immunodeficiency virus 2 (HIV-2)
aacaauggccccuaacaaaaga

SEQ ID NO: 206404 - RNA, 14 nt, Human immunodeficiency virus 2 (HIV-2)
aaaaguacuaaaua

SEQ ID NO: 206405 - RNA, 23 nt, Human immunodeficiency virus 2 (HIV-2)
aaacaauggccccuaacaaaaga

SEQ ID NO: 206406 - RNA, 12 nt, Human immunodeficiency virus 2 (HIV-2)
aaacaccaaaga

SEQ ID NO: 206407 - RNA, 13 nt, Human immunodeficiency virus 2 (HIV-2)
aaacaccaaagaa

SEQ ID NO: 206408 - RNA, 19 nt, Human immunodeficiency virus 2 (HIV-2)
aaacagggaggcagugaac

SEQ ID NO: 206409 - RNA, 21 nt, Human immunodeficiency virus 2 (HIV-2)
aaacaguggagaagagaccau

SEQ ID NO: 206410 - RNA, 21 nt, Human immunodeficiency virus 2 (HIV-2)
aaaaagaggaagggauaauac

SEQ ID NO: 206411 - RNA, 18 nt, Human metapneumovirus
aaaaagugaauacuguau

SEQ ID NO: 206412 - RNA, 13 nt, Human metapneumovirus
aaaaauaccacaa

SEQ ID NO: 206413 - RNA, 17 nt, Human metapneumovirus
aaaaacaguuuacuuaa

SEQ ID NO: 206414 - RNA, 13 nt, Human metapneumovirus
aaaaaacacucgc

SEQ ID NO: 206415 - RNA, 12 nt, Human metapneumovirus
aaaaaaugacaa

SEQ ID NO: 206416 - RNA, 18 nt, Human metapneumovirus
aaacauguacucaccuca

SEQ ID NO: 206417 - RNA, 19 nt, Human metapneumovirus
aaacauguacucaccucaa

SEQ ID NO: 206418 - RNA, 18 nt, Human metapneumovirus
aaacauuggaauuaccua

SEQ ID NO: 206419 - RNA, 20 nt, Human metapneumovirus
aaaccaugcagacaccaaca

SEQ ID NO: 206420 - RNA, 23 nt, Human metapneumovirus
aaaccaggucauaaaagaucuca

SEQ ID NO: 206421 - RNA, 21 nt, Human metapneumovirus
aaacacaucagagugggauaa

SEQ ID NO: 206422 - RNA, 13 nt, Human metapneumovirus
aaacacaucugaa

SEQ ID NO: 206423 - RNA, 21 nt, Human metapneumovirus
aaaauuugggacaaaucauaa

SEQ ID NO: 206424 - RNA, 16 nt, Human metapneumovirus
aaaaguaaaaaacaau

SEQ ID NO: 206425 - RNA, 15 nt, Human metapneumovirus
aaaagugcacuaaga

SEQ ID NO: 206426 - RNA, 22 nt, Human metapneumovirus
aaaagugcacuaagagagcuca

SEQ ID NO: 206427 - RNA, 18 nt, Human metapneumovirus
aaaaguaaaaaacaauaa

SEQ ID NO: 206428 - RNA, 17 nt, Human metapneumovirus
aaaaguggaaaacaauc

SEQ ID NO: 206429 - RNA, 18 nt, Human metapneumovirus
aacaauggauccucucaa

SEQ ID NO: 206430 - RNA, 13 nt, Human metapneumovirus
aacaaucugcaaa

SEQ ID NO: 206431 - RNA, 14 nt, Human metapneumovirus
aacaacacccaaga

SEQ ID NO: 206432 - RNA, 21 nt, Human metapneumovirus
aacaagaauuaaaucaaucaa

SEQ ID NO: 206433 - RNA, 15 nt, Human metapneumovirus
aacaacugucauuaa

SEQ ID NO: 206434 - RNA, 19 nt, Human metapneumovirus
aaagguggggcaaccaaaa

SEQ ID NO: 206435 - RNA, 23 nt, Human metapneumovirus
aaaguuagaaacuaacaacuguc

SEQ ID NO: 206436 - RNA, 17 nt, Human metapneumovirus
aaagugggacaagucaa

SEQ ID NO: 206437 - RNA, 18 nt, Human metapneumovirus
aaagugaauacuguauca

SEQ ID NO: 206438 - RNA, 16 nt, Human metapneumovirus
aaagugcacuaagaga

SEQ ID NO: 206439 - RNA, 12 nt, Human metapneumovirus
aaauaacucuaa

SEQ ID NO: 206440 - RNA, 23 nt, Human metapneumovirus
aagagcuacuaacccuaucucau

SEQ ID NO: 206441 - RNA, 12 nt, Human metapneumovirus
aagagacaaaua

SEQ ID NO: 206442 - RNA, 15 nt, Human metapneumovirus
aacuggaauuugaca

SEQ ID NO: 206443 - RNA, 23 nt, Human metapneumovirus
aaguaaaaacaguuuacuuaaca

SEQ ID NO: 206444 - RNA, 18 nt, Human metapneumovirus
aagguggggcaaccaaaa

SEQ ID NO: 206445 - RNA, 23 nt, Human metapneumovirus
aagguggggcaaccaaaacugaa

SEQ ID NO: 206446 - RNA, 13 nt, Human metapneumovirus
aauaaacagugac

SEQ ID NO: 206447 - RNA, 19 nt, Human metapneumovirus
aaucaugauaucacacagu

SEQ ID NO: 206448 - RNA, 19 nt, Human metapneumovirus
aaucauuaagaaaaccagg

SEQ ID NO: 206449 - RNA, 18 nt, Human metapneumovirus
aaucaaguuagaacaaga

SEQ ID NO: 206450 - RNA, 21 nt, Human metapneumovirus
aaucaagaacgggacaaauaa

SEQ ID NO: 206451 - RNA, 18 nt, Human metapneumovirus
aauaaagcaagcaaucaa

SEQ ID NO: 206452 - RNA, 16 nt, Human metapneumovirus
aauaacaccucaacac

SEQ ID NO: 206453 - RNA, 19 nt, Human metapneumovirus
aauaucaggagcaggcaga

SEQ ID NO: 206454 - RNA, 17 nt, Human metapneumovirus
aauaugccagucaaaaa

SEQ ID NO: 206455 - RNA, 14 nt, Human metapneumovirus
acaacaccauauua

SEQ ID NO: 206456 - RNA, 23 nt, Human metapneumovirus
acaaguaaguuucuaugauacuu

SEQ ID NO: 206457 - RNA, 17 nt, Human metapneumovirus
acaagucaaaaugucau

SEQ ID NO: 206458 - RNA, 22 nt, Human metapneumovirus
acaaugauaacauuagauguca

SEQ ID NO: 206459 - RNA, 22 nt, Human metapneumovirus
aauuaaaaauaaaguaaauuaa

SEQ ID NO: 206460 - RNA, 15 nt, Human metapneumovirus
aaucuccccaaaaag

SEQ ID NO: 206461 - RNA, 20 nt, Human metapneumovirus
aaucuccccaaaaaggcaac

SEQ ID NO: 206462 - RNA, 18 nt, Human metapneumovirus
acuuaaaagaagcuuuau

SEQ ID NO: 206463 - RNA, 16 nt, Human metapneumovirus
acugauagagcugaug

SEQ ID NO: 206464 - RNA, 15 nt, Human metapneumovirus
acugaaggauaucuc

SEQ ID NO: 206465 - RNA, 16 nt, Human metapneumovirus
acugaaggauaucuca

SEQ ID NO: 206466 - RNA, 19 nt, Human metapneumovirus
agacaaaaaggacucauca

SEQ ID NO: 206467 - RNA, 17 nt, Human metapneumovirus
agauagauacuuauuaa

SEQ ID NO: 206468 - RNA, 13 nt, Human metapneumovirus
agauaggacacaa

SEQ ID NO: 206469 - RNA, 20 nt, Human metapneumovirus
agagagcucagaacaguuuc

SEQ ID NO: 206470 - RNA, 16 nt, Human metapneumovirus
accgucagaaccaaag

SEQ ID NO: 206471 - RNA, 16 nt, Human metapneumovirus
accuaaaaaaugacaa

SEQ ID NO: 206472 - RNA, 14 nt, Human metapneumovirus
acacaccaccagca

SEQ ID NO: 206473 - RNA, 14 nt, Human metapneumovirus
acagucuacauaau

SEQ ID NO: 206474 - RNA, 22 nt, Human metapneumovirus
accaggucauaaaagaucucaa

SEQ ID NO: 206475 - RNA, 19 nt, Human metapneumovirus
accaaaaauaccacaacca

SEQ ID NO: 206476 - RNA, 13 nt, Human metapneumovirus
accaacaauggag

SEQ ID NO: 206477 - RNA, 14 nt, Human metapneumovirus
accaacaauggaga

SEQ ID NO: 206478 - RNA, 15 nt, Human metapneumovirus
accaaagcauaacaa

SEQ ID NO: 206479 - RNA, 15 nt, Human metapneumovirus
caaugugguucaagg

SEQ ID NO: 206480 - RNA, 18 nt, Human metapneumovirus
caauuauauaaaagugga

SEQ ID NO: 206481 - RNA, 22 nt, Human metapneumovirus
caauuauguaauaguuaauuaa

SEQ ID NO: 206482 - RNA, 16 nt, Human metapneumovirus
cacaaccaccccaaga

SEQ ID NO: 206483 - RNA, 17 nt, Human metapneumovirus
cacaaccaccccaagaa

SEQ ID NO: 206484 - RNA, 19 nt, Human metapneumovirus
cacggucuuaaagagagcu

SEQ ID NO: 206485 - RNA, 13 nt, Human metapneumovirus
cagcccaaggugc

SEQ ID NO: 206486 - RNA, 21 nt, Human metapneumovirus
cagagaagauaggacacaaga

SEQ ID NO: 206487 - RNA, 16 nt, Human metapneumovirus
cagcaaaugcuuuaaa

SEQ ID NO: 206488 - RNA, 17 nt, Human metapneumovirus
auucgaaaccauaacua

SEQ ID NO: 206489 - RNA, 21 nt, Human metapneumovirus
auucaauuuaaaaaguaaaaa

SEQ ID NO: 206490 - RNA, 13 nt, Human metapneumovirus
caacaauggagaa

SEQ ID NO: 206491 - RNA, 15 nt, Human metapneumovirus
caacacccaagagac

SEQ ID NO: 206492 - RNA, 22 nt, Human metapneumovirus
caacacaccaccagcagugcug

SEQ ID NO: 206493 - RNA, 22 nt, Human metapneumovirus
caaaaaaauaauuaaagaccac

SEQ ID NO: 206494 - RNA, 16 nt, Human metapneumovirus
caaaaaggacucauca

SEQ ID NO: 206495 - RNA, 17 nt, Human metapneumovirus
agcuuuacuaacauuuc

SEQ ID NO: 206496 - RNA, 23 nt, Human metapneumovirus
agcagugcugcucgaucagcuaa

SEQ ID NO: 206497 - RNA, 16 nt, Human metapneumovirus
auaacauuagauguca

SEQ ID NO: 206498 - RNA, 20 nt, Human metapneumovirus
auaaccacucuguaugcugc

SEQ ID NO: 206499 - RNA, 16 nt, Human metapneumovirus
auaauaauaaguaaua

SEQ ID NO: 206500 - RNA, 17 nt, Human metapneumovirus
aguuuaaccacaauuac

SEQ ID NO: 206501 - RNA, 19 nt, Human metapneumovirus
agugcugcucgaucagcua

SEQ ID NO: 206502 - RNA, 16 nt, Human metapneumovirus
aguggaaaacaaucug

SEQ ID NO: 206503 - RNA, 16 nt, Human metapneumovirus
agugggacaagucaaa

SEQ ID NO: 206504 - RNA, 13 nt, Human metapneumovirus
augaagcagcaaa

SEQ ID NO: 206505 - RNA, 14 nt, Human metapneumovirus
augaagcagcaaaa

SEQ ID NO: 206506 - RNA, 23 nt, Human metapneumovirus
auauuagcucugcccaaaucucc

SEQ ID NO: 206507 - RNA, 13 nt, Human metapneumovirus
auauaccaaaaau

SEQ ID NO: 206508 - RNA, 14 nt, Human metapneumovirus
auauagcaaacugg

SEQ ID NO: 206509 - RNA, 17 nt, Human metapneumovirus
auauaugucaaggcuua

SEQ ID NO: 206510 - RNA, 13 nt, Human metapneumovirus
auaggacacaaga

SEQ ID NO: 206511 - RNA, 20 nt, Human metapneumovirus
auaggagaaaaagugaauac

SEQ ID NO: 206512 - RNA, 21 nt, Human metapneumovirus
aucgagcauguuagacucaaa

SEQ ID NO: 206513 - RNA, 21 nt, Human metapneumovirus
aucauuaagaaaaccagguca

SEQ ID NO: 206514 - RNA, 16 nt, Human metapneumovirus
ccuggaaaaaacacuc

SEQ ID NO: 206515 - RNA, 12 nt, Human metapneumovirus
cgaacaauagau

SEQ ID NO: 206516 - RNA, 22 nt, Human metapneumovirus
ccugaccaaaagugcacuaaga

SEQ ID NO: 206517 - RNA, 16 nt, Human metapneumovirus
cccaaggugcagcaau

SEQ ID NO: 206518 - RNA, 21 nt, Human metapneumovirus
caugcagacaccaacaaugga

SEQ ID NO: 206519 - RNA, 22 nt, Human metapneumovirus
caugcagacaccaacaauggag

SEQ ID NO: 206520 - RNA, 15 nt, Human metapneumovirus
caugggacaaguagu

SEQ ID NO: 206521 - RNA, 15 nt, Human metapneumovirus
caucaacuaacacca

SEQ ID NO: 206522 - RNA, 19 nt, Human metapneumovirus
caucaacuaacaccaaaaa

SEQ ID NO: 206523 - RNA, 15 nt, Human metapneumovirus
caucaucaaauacca

SEQ ID NO: 206524 - RNA, 21 nt, Human metapneumovirus
ccacucuguaugcugcaucac

SEQ ID NO: 206525 - RNA, 18 nt, Human metapneumovirus
ccagauagauacuuauua

SEQ ID NO: 206526 - RNA, 20 nt, Human metapneumovirus
ccaguuuucauuacuauaga

SEQ ID NO: 206527 - RNA, 15 nt, Human metapneumovirus
ccagucaaaaacuga

SEQ ID NO: 206528 - RNA, 23 nt, Human metapneumovirus
aaaauaccacaaccaccccaaga

SEQ ID NO: 206529 - RNA, 19 nt, Human metapneumovirus
ccaccaaugugguucaagg

SEQ ID NO: 206530 - RNA, 23 nt, Human metapneumovirus
aaaaugcaaaaaaacacaucuga

SEQ ID NO: 206531 - RNA, 15 nt, Human metapneumovirus
ccaaaagacaauuca

SEQ ID NO: 206532 - RNA, 11 nt, Human metapneumovirus
ccaaaacugaa

SEQ ID NO: 206533 - RNA, 13 nt, Human metapneumovirus
ccaaaacugaaau

SEQ ID NO: 206534 - RNA, 21 nt, Human metapneumovirus
cuuagaagagucauguagcac

SEQ ID NO: 206535 - RNA, 16 nt, Human metapneumovirus
cuggaaaaaacacucg

SEQ ID NO: 206536 - RNA, 22 nt, Human metapneumovirus
cugguaaagugcuuauuguacu

SEQ ID NO: 206537 - RNA, 16 nt, Human metapneumovirus
cugaaggauaucucag

SEQ ID NO: 206538 - RNA, 22 nt, Human metapneumovirus
cugaaggauaucucaguguucu

SEQ ID NO: 206539 - RNA, 19 nt, Human metapneumovirus
cugaccaaaagugcacuaa

SEQ ID NO: 206540 - RNA, 23 nt, Human metapneumovirus
cugaccaaaagugcacuaagaga

SEQ ID NO: 206541 - RNA, 14 nt, Human metapneumovirus
cuaacccuaucuca

SEQ ID NO: 206542 - RNA, 15 nt, Human metapneumovirus
cuaacccuaucucau

SEQ ID NO: 206543 - RNA, 19 nt, Human metapneumovirus
cuaaaucaugauaucacac

SEQ ID NO: 206544 - RNA, 13 nt, Human metapneumovirus
cuaacaccaaaaa

SEQ ID NO: 206545 - RNA, 14 nt, Human metapneumovirus
cucaucaucaaaua

SEQ ID NO: 206546 - RNA, 22 nt, Human metapneumovirus
cucagaacaguuucugcugauc

SEQ ID NO: 206547 - RNA, 21 nt, Human metapneumovirus
cuauaacugaaggauaucuca

SEQ ID NO: 206548 - RNA, 22 nt, Human metapneumovirus
cuauaacugaaggauaucucag

SEQ ID NO: 206549 - RNA, 15 nt, Human metapneumovirus
cuaguagacaccuau

SEQ ID NO: 206550 - RNA, 23 nt, Human metapneumovirus
cuacaagaaguugaaguuaggca

SEQ ID NO: 206551 - RNA, 20 nt, Human metapneumovirus
gccagucaaaaacugaauca

SEQ ID NO: 206552 - RNA, 17 nt, Human metapneumovirus
gcaaccaaaacugaaau

SEQ ID NO: 206553 - RNA, 22 nt, Human metapneumovirus
gcaaauaugaagugcggggcaa

SEQ ID NO: 206554 - RNA, 12 nt, Human metapneumovirus
ggcaaccaaaac

SEQ ID NO: 206555 - RNA, 14 nt, Human metapneumovirus
ggcaacaacaccau

SEQ ID NO: 206556 - RNA, 12 nt, Human metapneumovirus
ggcuuaucaaua

SEQ ID NO: 206557 - RNA, 14 nt, Human metapneumovirus
ggucuucaaaaaca

SEQ ID NO: 206558 - RNA, 18 nt, Human metapneumovirus
gguaaugaagcagcaaaa

SEQ ID NO: 206559 - RNA, 13 nt, Human metapneumovirus
guaaaaaacaaua

SEQ ID NO: 206560 - RNA, 16 nt, Human metapneumovirus
guaaaaaacaauaaca

SEQ ID NO: 206561 - RNA, 18 nt, Human metapneumovirus
gguugguacaccaauguu

SEQ ID NO: 206562 - RNA, 20 nt, Human metapneumovirus
gaucucaaucuauuauagga

SEQ ID NO: 206563 - RNA, 18 nt, Human metapneumovirus
gcaaaacaacacccaaga

SEQ ID NO: 206564 - RNA, 20 nt, Human metapneumovirus
gcaaaacaacacccaagaga

SEQ ID NO: 206565 - RNA, 23 nt, Human metapneumovirus
gcaaaacaacacccaagagacaa

SEQ ID NO: 206566 - RNA, 20 nt, Human metapneumovirus
gacucauaucuuaaaggagu

SEQ ID NO: 206567 - RNA, 14 nt, Human metapneumovirus
gacucaaaaaugca

SEQ ID NO: 206568 - RNA, 15 nt, Human metapneumovirus
gacucaaaaaugcag

SEQ ID NO: 206569 - RNA, 16 nt, Human metapneumovirus
gacucaaaaaugcagu

SEQ ID NO: 206570 - RNA, 19 nt, Human metapneumovirus
aaauaggugacaacuucau

SEQ ID NO: 206571 - RNA, 13 nt, Human metapneumovirus
gagacuaaugcaa

SEQ ID NO: 206572 - RNA, 15 nt, Human metapneumovirus
gacaccaacaaugga

SEQ ID NO: 206573 - RNA, 23 nt, Human metapneumovirus
gacaaugauaacauuagauguca

SEQ ID NO: 206574 - RNA, 19 nt, Human metapneumovirus
aaauaaagcaagcaaucaa

SEQ ID NO: 206575 - RNA, 16 nt, Human metapneumovirus
aaaggcaacaacacca

SEQ ID NO: 206576 - RNA, 21 nt, Human metapneumovirus
aaacugggcaaaacaacaccc

SEQ ID NO: 206577 - RNA, 14 nt, Human metapneumovirus
aauggagaagccaa

SEQ ID NO: 206578 - RNA, 18 nt, Human metapneumovirus
aaugucuuggaaaguggu

SEQ ID NO: 206579 - RNA, 18 nt, Human metapneumovirus
aaucauuaagaaaaccag

SEQ ID NO: 206580 - RNA, 17 nt, Human metapneumovirus
aauguuuuuacacugga

SEQ ID NO: 206581 - RNA, 21 nt, Human metapneumovirus
aauucacaaucuccccaaaaa

SEQ ID NO: 206582 - RNA, 23 nt, Human metapneumovirus
aagccuaacaauaugguucccuu

SEQ ID NO: 206583 - RNA, 13 nt, Human metapneumovirus
aaggauaucucag

SEQ ID NO: 206584 - RNA, 19 nt, Human metapneumovirus
aaguuaauauuagcuuuac

SEQ ID NO: 206585 - RNA, 17 nt, Human metapneumovirus
aaguuaguaaaaacaca

SEQ ID NO: 206586 - RNA, 21 nt, Human metapneumovirus
aaguuaguaaaaacacaucag

SEQ ID NO: 206587 - RNA, 13 nt, Human metapneumovirus
aagucaaugcgac

SEQ ID NO: 206588 - RNA, 23 nt, Human metapneumovirus
aaguaaucauuugauuaugcaau

SEQ ID NO: 206589 - RNA, 19 nt, Human metapneumovirus
aaggcauuccuuacacagc

SEQ ID NO: 206590 - RNA, 15 nt, Human metapneumovirus
aauaugccagucaaa

SEQ ID NO: 206591 - RNA, 22 nt, Human metapneumovirus
aauaaccacucuguaugcugca

SEQ ID NO: 206592 - RNA, 14 nt, Human metapneumovirus
aauaacuacauuga

SEQ ID NO: 206593 - RNA, 12 nt, Human metapneumovirus
aauaacaaugga

SEQ ID NO: 206594 - RNA, 20 nt, Human metapneumovirus
aauaauaucaggagcaggca

SEQ ID NO: 206595 - RNA, 14 nt, Human metapneumovirus
aauaaguaauaauu

SEQ ID NO: 206596 - RNA, 14 nt, Human metapneumovirus
aaguugccauagag

SEQ ID NO: 206597 - RNA, 18 nt, Human metapneumovirus
uuuuaaaaguuugauuca

SEQ ID NO: 206598 - RNA, 14 nt, Human metapneumovirus
aacuggcaagagag

SEQ ID NO: 206599 - RNA, 16 nt, Human metapneumovirus
aacuaacaccaaaaag

SEQ ID NO: 206600 - RNA, 14 nt, Human metapneumovirus
aacuauaaaaugca

SEQ ID NO: 206601 - RNA, 18 nt, Human metapneumovirus
aacauguacucaccucaa

SEQ ID NO: 206602 - RNA, 18 nt, Human metapneumovirus
aacaugggacaaguaguu

SEQ ID NO: 206603 - RNA, 20 nt, Human metapneumovirus
aacauuauucgaaaccauaa

SEQ ID NO: 206604 - RNA, 19 nt, Human metapneumovirus
aaccaaaacugaaauaaag

SEQ ID NO: 206605 - RNA, 12 nt, Human metapneumovirus
aaccaaccauac

SEQ ID NO: 206606 - RNA, 13 nt, Human metapneumovirus
aaccccugcagaa

SEQ ID NO: 206607 - RNA, 20 nt, Human metapneumovirus
aacccuaucucauagaucau

SEQ ID NO: 206608 - RNA, 22 nt, Human metapneumovirus
aaccauaccgucagaaccaaag

SEQ ID NO: 206609 - RNA, 21 nt, Human metapneumovirus
ugggacaaaucauaaugucuc

SEQ ID NO: 206610 - RNA, 18 nt, Human metapneumovirus
ugggacaaguaaaaaugg

SEQ ID NO: 206611 - RNA, 12 nt, Human metapneumovirus
uggguaaugaag

SEQ ID NO: 206612 - RNA, 22 nt, Human metapneumovirus
uguaugcugcaucacaaaaugg

SEQ ID NO: 206613 - RNA, 19 nt, Human metapneumovirus
ugcuuaaucaucaucacaa

SEQ ID NO: 206614 - RNA, 16 nt, Human metapneumovirus
uggagaagccaaaaga

SEQ ID NO: 206615 - RNA, 22 nt, Human metapneumovirus
ugcaucagcccaaggugcagca

SEQ ID NO: 206616 - RNA, 20 nt, Human metapneumovirus
ugcagaaaagaaacugaaac

SEQ ID NO: 206617 - RNA, 18 nt, Human metapneumovirus
ugucucuuaaaaagaccu

SEQ ID NO: 206618 - RNA, 16 nt, Human metapneumovirus
uuaaucaucaucacaa

SEQ ID NO: 206619 - RNA, 18 nt, Human metapneumovirus
uucucacaguaacaauca

SEQ ID NO: 206620 - RNA, 19 nt, Human metapneumovirus
uucacaaucuccccaaaaa

SEQ ID NO: 206621 - RNA, 20 nt, Human metapneumovirus
ucugcaauaaacagugacac

SEQ ID NO: 206622 - RNA, 17 nt, Human metapneumovirus
ucucacaguaacaauca

SEQ ID NO: 206623 - RNA, 15 nt, Human metapneumovirus
ucucaaucuauuaua

SEQ ID NO: 206624 - RNA, 14 nt, Human metapneumovirus
ucugaggacagguu

SEQ ID NO: 206625 - RNA, 22 nt, Human metapneumovirus
ugaauccacuguuaaugucuau

SEQ ID NO: 206626 - RNA, 17 nt, Human metapneumovirus
ugaauauagcaaacugg

SEQ ID NO: 206627 - RNA, 15 nt, Human metapneumovirus
ugaaucagaacauca

SEQ ID NO: 206628 - RNA, 17 nt, Human metapneumovirus
ugaauacuguaucagaa

SEQ ID NO: 206629 - RNA, 18 nt, Human metapneumovirus
ugaauacuguaucagaaa

SEQ ID NO: 206630 - RNA, 15 nt, Human metapneumovirus
ucccaaaaaauuuga

SEQ ID NO: 206631 - RNA, 21 nt, Human metapneumovirus
ucccaaaaaauuugaagucaa

SEQ ID NO: 206632 - RNA, 17 nt, Human metapneumovirus
uccaauacucaaaguga

SEQ ID NO: 206633 - RNA, 19 nt, Human metapneumovirus
uccaauacucaaagugaau

SEQ ID NO: 206634 - RNA, 21 nt, Human metapneumovirus
ucaguagaccugcaaaaccaa

SEQ ID NO: 206635 - RNA, 14 nt, Human metapneumovirus
ucaugauaucacac

SEQ ID NO: 206636 - RNA, 14 nt, Human metapneumovirus
ucaucaaauaccac

SEQ ID NO: 206637 - RNA, 13 nt, Human metapneumovirus
ucaugucucuuaa

SEQ ID NO: 206638 - RNA, 17 nt, Human metapneumovirus
ucauggguaaugaagca

SEQ ID NO: 206639 - RNA, 14 nt, Human metapneumovirus
ucaauaucuaucug

SEQ ID NO: 206640 - RNA, 18 nt, Human metapneumovirus
ucacagucugugaaguaa

SEQ ID NO: 206641 - RNA, 20 nt, Human metapneumovirus
ucaaggcauuccuuacacag

SEQ ID NO: 206642 - RNA, 14 nt, Human metapneumovirus
ucagagugggauaa

SEQ ID NO: 206643 - RNA, 23 nt, Human metapneumovirus
ucaaaaaaauaauuaaagaccac

SEQ ID NO: 206644 - RNA, 20 nt, Human metapneumovirus
uauaacugaaggauaucuca

SEQ ID NO: 206645 - RNA, 17 nt, Human metapneumovirus
uauugaugauaaccaaa

SEQ ID NO: 206646 - RNA, 15 nt, Human metapneumovirus
uauucgaaaccauaa

SEQ ID NO: 206647 - RNA, 18 nt, Human metapneumovirus
uauucgaaaccauaacua

SEQ ID NO: 206648 - RNA, 16 nt, Human metapneumovirus
uaaaucaugauaucac

SEQ ID NO: 206649 - RNA, 15 nt, Human metapneumovirus
uaaaaacacaucaga

SEQ ID NO: 206650 - RNA, 16 nt, Human metapneumovirus
gugggacaagucaaaa

SEQ ID NO: 206651 - RNA, 18 nt, Human metapneumovirus
guuacagucuacauaaua

SEQ ID NO: 206652 - RNA, 14 nt, Human metapneumovirus
uacaaaauaacucu

SEQ ID NO: 206653 - RNA, 17 nt, Human metapneumovirus
uaaugaagcagcaaaau

SEQ ID NO: 206654 - RNA, 21 nt, Human metapneumovirus
uaaccaaagcauaacaaaagc

SEQ ID NO: 206655 - RNA, 15 nt, Human metapneumovirus
uacuaacauuuacaa

SEQ ID NO: 206656 - RNA, 16 nt, Human metapneumovirus
uacuaacccuaucuca

SEQ ID NO: 206657 - RNA, 18 nt, Human metapneumovirus
uaccgucagaaccaaagu

SEQ ID NO: 206658 - RNA, 15 nt, Human metapneumovirus
aacaauaacauggga

SEQ ID NO: 206659 - RNA, 22 nt, Human metapneumovirus
aacaauggagaagccaaaagac

SEQ ID NO: 206660 - RNA, 14 nt, Human metapneumovirus
uagacaccuaucaa

SEQ ID NO: 206661 - RNA, 15 nt, Human metapneumovirus
uagacaccuaucaag

SEQ ID NO: 206662 - RNA, 14 nt, Human metapneumovirus
uacuucccaaaaaa

SEQ ID NO: 206663 - RNA, 13 nt, Human metapneumovirus
uacuucauaauaa

SEQ ID NO: 206664 - RNA, 23 nt, Human metapneumovirus
uagcaaacuggaauuugacaaac

SEQ ID NO: 206665 - RNA, 17 nt, Human metapneumovirus
uaguaaaaacacaucag

SEQ ID NO: 206666 - RNA, 18 nt, Human metapneumovirus
uagugagacuaaugcaau

SEQ ID NO: 206667 - RNA, 14 nt, Human metapneumovirus
uaggugacaacuuc

SEQ ID NO: 206668 - RNA, 21 nt, Human metapneumovirus
acuuauuaauaagaucaaauu

SEQ ID NO: 206669 - RNA, 17 nt, Human metapneumovirus
acugaaggauaucucag

SEQ ID NO: 206670 - RNA, 22 nt, Human metapneumovirus
acugaaggauaucucaguguuc

SEQ ID NO: 206671 - RNA, 22 nt, Human metapneumovirus
acuauaacugaaggauaucuca

SEQ ID NO: 206672 - RNA, 17 nt, Human metapneumovirus
acucacagucugugaag

SEQ ID NO: 206673 - RNA, 22 nt, Human metapneumovirus
acucugcaauaaacagugacac

SEQ ID NO: 206674 - RNA, 23 nt, Human metapneumovirus
agaagcuuuaucugaugggauag

SEQ ID NO: 206675 - RNA, 18 nt, Human metapneumovirus
agaagagucuaccgagaa

SEQ ID NO: 206676 - RNA, 17 nt, Human metapneumovirus
agaaauuauauauguca

SEQ ID NO: 206677 - RNA, 20 nt, Human metapneumovirus
agaacaguuucugcugauca

SEQ ID NO: 206678 - RNA, 16 nt, Human metapneumovirus
agaaacugaaaccauc

SEQ ID NO: 206679 - RNA, 14 nt, Human metapneumovirus
agaaaucaaugcac

SEQ ID NO: 206680 - RNA, 20 nt, Human metapneumovirus
agaccugaccaaaagugcac

SEQ ID NO: 206681 - RNA, 18 nt, Human metapneumovirus
agaccugcaaaaccaacc

SEQ ID NO: 206682 - RNA, 14 nt, Human metapneumovirus
agacaccaacaaug

SEQ ID NO: 206683 - RNA, 19 nt, Human metapneumovirus
agacaaauaacaauggauc

SEQ ID NO: 206684 - RNA, 13 nt, Human metapneumovirus
agacucaaaaaug

SEQ ID NO: 206685 - RNA, 19 nt, Human metapneumovirus
acagaauuagaccugacca

SEQ ID NO: 206686 - RNA, 22 nt, Human metapneumovirus
acaguuuacuuaacaaccauga

SEQ ID NO: 206687 - RNA, 14 nt, Human metapneumovirus
acaugggacaagua

SEQ ID NO: 206688 - RNA, 17 nt, Human metapneumovirus
acauguacucaccucaa

SEQ ID NO: 206689 - RNA, 13 nt, Human metapneumovirus
accacucuguaug

SEQ ID NO: 206690 - RNA, 21 nt, Human metapneumovirus
accuaaaaaaugacaacacug

SEQ ID NO: 206691 - RNA, 22 nt, Human metapneumovirus
accuaaaaaaugacaacacugc

SEQ ID NO: 206692 - RNA, 12 nt, Human metapneumovirus
acccuccaguga

SEQ ID NO: 206693 - RNA, 19 nt, Human metapneumovirus
accccaagaaaaaaacugg

SEQ ID NO: 206694 - RNA, 21 nt, Human metapneumovirus
accauaccgucagaaccaaag

SEQ ID NO: 206695 - RNA, 21 nt, Human metapneumovirus
accaucaacuaacaccaaaaa

SEQ ID NO: 206696 - RNA, 13 nt, Human metapneumovirus
acccaagagacaa

SEQ ID NO: 206697 - RNA, 23 nt, Human metapneumovirus
acccaagagacaaauaacaaugg

SEQ ID NO: 206698 - RNA, 22 nt, Human metapneumovirus
acccagcuuaauaaaaacagaa

SEQ ID NO: 206699 - RNA, 16 nt, Human metapneumovirus
auaggaauaacuacau

SEQ ID NO: 206700 - RNA, 20 nt, Human metapneumovirus
auauaaucaaacaacuacaa

SEQ ID NO: 206701 - RNA, 14 nt, Human metapneumovirus
auauaccaaaaaua

SEQ ID NO: 206702 - RNA, 22 nt, Human metapneumovirus
auauaugucaaggcuuacuuaa

SEQ ID NO: 206703 - RNA, 18 nt, Human metapneumovirus
aucaaauaccacaucagu

SEQ ID NO: 206704 - RNA, 19 nt, Human metapneumovirus
aucaaagucauggauccca

SEQ ID NO: 206705 - RNA, 18 nt, Human metapneumovirus
auauugaugauaaccaaa

SEQ ID NO: 206706 - RNA, 14 nt, Human metapneumovirus
auacuucauaauaa

SEQ ID NO: 206707 - RNA, 18 nt, Human metapneumovirus
auaaagguggggcaacca

SEQ ID NO: 206708 - RNA, 20 nt, Human metapneumovirus
auaaagguggggcaaccaaa

SEQ ID NO: 206709 - RNA, 21 nt, Human metapneumovirus
auaaagguggggcaaccaaaa

SEQ ID NO: 206710 - RNA, 19 nt, Human metapneumovirus
auaacaauggauccucuca

SEQ ID NO: 206711 - RNA, 20 nt, Human metapneumovirus
aucagaaacauuggaauuac

SEQ ID NO: 206712 - RNA, 12 nt, Human metapneumovirus
aucaugauauca

SEQ ID NO: 206713 - RNA, 23 nt, Human metapneumovirus
aucauuaagaaaaccaggucaua

SEQ ID NO: 206714 - RNA, 14 nt, Human metapneumovirus
aucuccccaaaaag

SEQ ID NO: 206715 - RNA, 16 nt, Human metapneumovirus
agugaugggaaaaccc

SEQ ID NO: 206716 - RNA, 20 nt, Human metapneumovirus
aguggaaaacaaucugcaaa

SEQ ID NO: 206717 - RNA, 16 nt, Human metapneumovirus
aguaaaaacacaucag

SEQ ID NO: 206718 - RNA, 15 nt, Human metapneumovirus
aggccaacacaccac

SEQ ID NO: 206719 - RNA, 13 nt, Human metapneumovirus
aggcaacaacacc

SEQ ID NO: 206720 - RNA, 14 nt, Human metapneumovirus
cacaucagucacaa

SEQ ID NO: 206721 - RNA, 13 nt, Human metapneumovirus
caaugcgacugua

SEQ ID NO: 206722 - RNA, 21 nt, Human metapneumovirus
caaugcgacuguagcacucga

SEQ ID NO: 206723 - RNA, 20 nt, Human metapneumovirus
cacaauuacuggaguuggcc

SEQ ID NO: 206724 - RNA, 21 nt, Human metapneumovirus
cacaccaccagcagugcugcu

SEQ ID NO: 206725 - RNA, 23 nt, Human metapneumovirus
caauaaccacucuguaugcugca

SEQ ID NO: 206726 - RNA, 15 nt, Human metapneumovirus
caauacucaaaguga

SEQ ID NO: 206727 - RNA, 14 nt, Human metapneumovirus
caacacccaagaga

SEQ ID NO: 206728 - RNA, 21 nt, Human metapneumovirus
caacacccaagagacaaauaa

SEQ ID NO: 206729 - RNA, 16 nt, Human metapneumovirus
caaggcuccgugcaaa

SEQ ID NO: 206730 - RNA, 16 nt, Human metapneumovirus
caccuuggccaagagc

SEQ ID NO: 206731 - RNA, 18 nt, Human metapneumovirus
caccuaucaaggcauucc

SEQ ID NO: 206732 - RNA, 23 nt, Human metapneumovirus
cacuauaacugaaggauaucuca

SEQ ID NO: 206733 - RNA, 20 nt, Human metapneumovirus
cagagaagauaggacacaag

SEQ ID NO: 206734 - RNA, 16 nt, Human metapneumovirus
cagaaaagaaacugaa

SEQ ID NO: 206735 - RNA, 15 nt, Human metapneumovirus
auuccuuacacagca

SEQ ID NO: 206736 - RNA, 19 nt, Human metapneumovirus
auuacuggaguuggccaga

SEQ ID NO: 206737 - RNA, 16 nt, Human metapneumovirus
augguccaguuuucau

SEQ ID NO: 206738 - RNA, 22 nt, Human metapneumovirus
caaaaacauguacucaccucaa

SEQ ID NO: 206739 - RNA, 13 nt, Human metapneumovirus
auuugaagucaau

SEQ ID NO: 206740 - RNA, 17 nt, Human metapneumovirus
auuugaagucaaugcga

SEQ ID NO: 206741 - RNA, 23 nt, Human metapneumovirus
caacaauggagaagccaaaagac

SEQ ID NO: 206742 - RNA, 13 nt, Human metapneumovirus
caaacucugcaau

SEQ ID NO: 206743 - RNA, 18 nt, Human metapneumovirus
caaacucacagucuguga

SEQ ID NO: 206744 - RNA, 12 nt, Human metapneumovirus
caaaaauaccac

SEQ ID NO: 206745 - RNA, 17 nt, Human metapneumovirus
caaaaacugaaucagac

SEQ ID NO: 206746 - RNA, 21 nt, Human metapneumovirus
caaaaaggacucaucaucaaa

SEQ ID NO: 206747 - RNA, 23 nt, Human metapneumovirus
caaaaugucauucccugaaggaa

SEQ ID NO: 206748 - RNA, 14 nt, Human metapneumovirus
cauaaaagaucuca

SEQ ID NO: 206749 - RNA, 20 nt, Human metapneumovirus
cauagaaauuauauauguca

SEQ ID NO: 206750 - RNA, 17 nt, Human metapneumovirus
caucaacuaacaccaaa

SEQ ID NO: 206751 - RNA, 15 nt, Human metapneumovirus
cauuaagaaaaccag

SEQ ID NO: 206752 - RNA, 14 nt, Human metapneumovirus
ccaaggugcagcaa

SEQ ID NO: 206753 - RNA, 16 nt, Human metapneumovirus
ccaagacuacucuaaa

SEQ ID NO: 206754 - RNA, 15 nt, Human metapneumovirus
ccaagagacaaauaa

SEQ ID NO: 206755 - RNA, 20 nt, Human metapneumovirus
ccugacaauaaccacucugu

SEQ ID NO: 206756 - RNA, 21 nt, Human metapneumovirus
ccuguuacagucuacauaaua

SEQ ID NO: 206757 - RNA, 21 nt, Human metapneumovirus
cgaacaauagauaugcucaaa

SEQ ID NO: 206758 - RNA, 15 nt, Human metapneumovirus
ccuuggccaagagcu

SEQ ID NO: 206759 - RNA, 23 nt, Human metapneumovirus
cccugcagaaaagaaacugaaac

SEQ ID NO: 206760 - RNA, 14 nt, Human metapneumovirus
ccccugcagaaaag

SEQ ID NO: 206761 - RNA, 14 nt, Human metapneumovirus
ccauauaccaaaaa

SEQ ID NO: 206762 - RNA, 18 nt, Human metapneumovirus
ccauagagaauccuguua

SEQ ID NO: 206763 - RNA, 17 nt, Human metapneumovirus
ccauaccgucagaacca

SEQ ID NO: 206764 - RNA, 20 nt, Human metapneumovirus
ccauaccgucagaaccaaag

SEQ ID NO: 206765 - RNA, 10 nt, Human metapneumovirus
gcaaccaaaa

SEQ ID NO: 206766 - RNA, 18 nt, Human metapneumovirus
gcaaaaaaacacaucuga

SEQ ID NO: 206767 - RNA, 14 nt, Human metapneumovirus
gcaaaaccaaccau

SEQ ID NO: 206768 - RNA, 14 nt, Human metapneumovirus
gaugauaaccaaag

SEQ ID NO: 206769 - RNA, 19 nt, Human metapneumovirus
gaugauaaccaaagcauaa

SEQ ID NO: 206770 - RNA, 13 nt, Human metapneumovirus
gcauaacaaaagc

SEQ ID NO: 206771 - RNA, 23 nt, Human metapneumovirus
gcagaaaagaaacugaaaccauc

SEQ ID NO: 206772 - RNA, 14 nt, Human metapneumovirus
gcauguuagacuca

SEQ ID NO: 206773 - RNA, 15 nt, Human metapneumovirus
gaauacuguaucaga

SEQ ID NO: 206774 - RNA, 17 nt, Human metapneumovirus
gaagagucuaccgagaa

SEQ ID NO: 206775 - RNA, 16 nt, Human metapneumovirus
gagaagccaaaagaca

SEQ ID NO: 206776 - RNA, 13 nt, Human metapneumovirus
gagaaaaagugaa

SEQ ID NO: 206777 - RNA, 22 nt, Human metapneumovirus
gaccuuaccuaaaaaaugacaa

SEQ ID NO: 206778 - RNA, 20 nt, Human metapneumovirus
cuacauaauauaaucaaaca

SEQ ID NO: 206779 - RNA, 13 nt, Human metapneumovirus
cuaguuauauaaa

SEQ ID NO: 206780 - RNA, 12 nt, Human metapneumovirus
cucaaagugaau

SEQ ID NO: 206781 - RNA, 22 nt, Human metapneumovirus
cucaucaucaaauaccacauca

SEQ ID NO: 206782 - RNA, 20 nt, Human metapneumovirus
cugcagaaaagaaacugaaa

SEQ ID NO: 206783 - RNA, 16 nt, Human metapneumovirus
cugggcaaaacaacac

SEQ ID NO: 206784 - RNA, 15 nt, Human metapneumovirus
cugaaggauaucuca

SEQ ID NO: 206785 - RNA, 12 nt, Human metapneumovirus
cuccccaaaaag

SEQ ID NO: 206786 - RNA, 13 nt, Human metapneumovirus
cuccccaaaaagg

SEQ ID NO: 206787 - RNA, 21 nt, Human metapneumovirus
cuuaaagagagcuacuuagaa

SEQ ID NO: 206788 - RNA, 13 nt, Human metapneumovirus
cuuaucaauaaua

SEQ ID NO: 206789 - RNA, 16 nt, Human metapneumovirus
cuuaacaaccaugaaa

SEQ ID NO: 206790 - RNA, 14 nt, Human metapneumovirus
cuucaaaaacaugu

SEQ ID NO: 206791 - RNA, 17 nt, Human metapneumovirus
cuucaaaaacauguacu

SEQ ID NO: 206792 - RNA, 21 nt, Human metapneumovirus
uaaaagugaugggucuucaaa

SEQ ID NO: 206793 - RNA, 20 nt, Human metapneumovirus
uaaaauaggugacaacuuca

SEQ ID NO: 206794 - RNA, 19 nt, Human metapneumovirus
uaaagcaagcaaucaaagu

SEQ ID NO: 206795 - RNA, 19 nt, Human metapneumovirus
uaaaaacagaauuagaccu

SEQ ID NO: 206796 - RNA, 13 nt, Human metapneumovirus
uaaaaacacauca

SEQ ID NO: 206797 - RNA, 18 nt, Human metapneumovirus
uaaaaagaccuuaccuaa

SEQ ID NO: 206798 - RNA, 15 nt, Human metapneumovirus
guggggcaaccaaaa

SEQ ID NO: 206799 - RNA, 19 nt, Human metapneumovirus
guggaaaacaaucugcaaa

SEQ ID NO: 206800 - RNA, 15 nt, Human metapneumovirus
uaagauaaaccaugc

SEQ ID NO: 206801 - RNA, 20 nt, Human metapneumovirus
uaaagguggggcaaccaaaa

SEQ ID NO: 206802 - RNA, 15 nt, Human metapneumovirus
uaauaaaaacagaau

SEQ ID NO: 206803 - RNA, 13 nt, Human metapneumovirus
uaauauaaucaaa

SEQ ID NO: 206804 - RNA, 15 nt, Human metapneumovirus
uacaaacucugcaau

SEQ ID NO: 206805 - RNA, 17 nt, Human metapneumovirus
uaccacaucagucacaa

SEQ ID NO: 206806 - RNA, 16 nt, Human metapneumovirus
uagguuccaccaaugu

SEQ ID NO: 206807 - RNA, 20 nt, Human metapneumovirus
uaucugaucauaaacuauaa

SEQ ID NO: 206808 - RNA, 22 nt, Human metapneumovirus
uauuaaaucaacuuuuaaggaa

SEQ ID NO: 206809 - RNA, 13 nt, Human metapneumovirus
uaugauacuucau

SEQ ID NO: 206810 - RNA, 22 nt, Human metapneumovirus
ucaaggcauuccuuacacagca

SEQ ID NO: 206811 - RNA, 14 nt, Human metapneumovirus
ucaaguugaucuaa

SEQ ID NO: 206812 - RNA, 13 nt, Human metapneumovirus
ucaauuauauaaa

SEQ ID NO: 206813 - RNA, 13 nt, Human metapneumovirus
ucaaucaagaacg

SEQ ID NO: 206814 - RNA, 17 nt, Human metapneumovirus
ucaaagcaagaguaaaa

SEQ ID NO: 206815 - RNA, 15 nt, Human metapneumovirus
ucaaauaccacauca

SEQ ID NO: 206816 - RNA, 16 nt, Human metapneumovirus
ucaaauaccacaucag

SEQ ID NO: 206817 - RNA, 18 nt, Human metapneumovirus
ucaaagugaaugcaucag

SEQ ID NO: 206818 - RNA, 15 nt, Human metapneumovirus
ucaacuggcaagaga

SEQ ID NO: 206819 - RNA, 17 nt, Human metapneumovirus
ucaacuaacaccaaaaa

SEQ ID NO: 206820 - RNA, 15 nt, Human metapneumovirus
ggagaaaaagugaau

SEQ ID NO: 206821 - RNA, 14 nt, Human metapneumovirus
ggaagugagugcaa

SEQ ID NO: 206822 - RNA, 14 nt, Human metapneumovirus
gcccauauaccaaa

SEQ ID NO: 206823 - RNA, 17 nt, Human metapneumovirus
gcccauauaccaaaaau

SEQ ID NO: 206824 - RNA, 13 nt, Human metapneumovirus
gugacaacuucau

SEQ ID NO: 206825 - RNA, 13 nt, Human metapneumovirus
gucuucaaaaaca

SEQ ID NO: 206826 - RNA, 19 nt, Human metapneumovirus
guccucauaggaauaacua

SEQ ID NO: 206827 - RNA, 17 nt, Human metapneumovirus
gucauguagcacuauaa

SEQ ID NO: 206828 - RNA, 21 nt, Human metapneumovirus
guccaauacucaaagugaaug

SEQ ID NO: 206829 - RNA, 18 nt, Human metapneumovirus
guagcacuauaacugaag

SEQ ID NO: 206830 - RNA, 21 nt, Human metapneumovirus
ggugaucauuuuuucauuguu

SEQ ID NO: 206831 - RNA, 18 nt, Human metapneumovirus
uuucucacaguaacaauc

SEQ ID NO: 206832 - RNA, 11 nt, Human metapneumovirus
uuaacaaccau

SEQ ID NO: 206833 - RNA, 13 nt, Human metapneumovirus
uguucaaguugau

SEQ ID NO: 206834 - RNA, 17 nt, Human metapneumovirus
ugggucuucaaaaacau

SEQ ID NO: 206835 - RNA, 14 nt, Human metapneumovirus
uggcuuaucaauaa

SEQ ID NO: 206836 - RNA, 19 nt, Human metapneumovirus
uggcuuaucaauaauauca

SEQ ID NO: 206837 - RNA, 16 nt, Human metapneumovirus
ucauguagcacuauaa

SEQ ID NO: 206838 - RNA, 20 nt, Human metapneumovirus
ucauggaucccauugaagaa

SEQ ID NO: 206839 - RNA, 15 nt, Human metapneumovirus
uccccaaaaaggcaa

SEQ ID NO: 206840 - RNA, 20 nt, Human metapneumovirus
uccccaaaaaggcaacaaca

SEQ ID NO: 206841 - RNA, 12 nt, Human metapneumovirus
ucugcugaucaa

SEQ ID NO: 206842 - RNA, 20 nt, Human metapneumovirus
ucugcaaauaugccagucaa

SEQ ID NO: 206843 - RNA, 18 nt, Human metapneumovirus
ucuaagauaaaccaugca

SEQ ID NO: 206844 - RNA, 19 nt, Human metapneumovirus
ucucacaguaacaaucacc

SEQ ID NO: 206845 - RNA, 16 nt, Human metapneumovirus
ugcaaaaaaacacauc

SEQ ID NO: 206846 - RNA, 18 nt, Human metapneumovirus
ugcaaaaaaacacaucug

SEQ ID NO: 206847 - RNA, 20 nt, Human metapneumovirus
aaaagaaacugaaaccauca

SEQ ID NO: 206848 - RNA, 21 nt, Human metapneumovirus
aaaagaaacugaaaccaucaa

SEQ ID NO: 206849 - RNA, 19 nt, Human metapneumovirus
aaaacugggcaaaacaaca

SEQ ID NO: 206850 - RNA, 17 nt, Human metapneumovirus
aaaacugaaucagacaa

SEQ ID NO: 206851 - RNA, 13 nt, Human metapneumovirus
aaaaccaggucau

SEQ ID NO: 206852 - RNA, 14 nt, Human metapneumovirus
aaaagaagcuuuau

SEQ ID NO: 206853 - RNA, 17 nt, Human metapneumovirus
aaaaaugacaacacugc

SEQ ID NO: 206854 - RNA, 21 nt, Human metapneumovirus
aaaacaaucugcaaauaugcc

SEQ ID NO: 206855 - RNA, 22 nt, Human metapneumovirus
aaaacacucgcccauauaccaa

SEQ ID NO: 206856 - RNA, 21 nt, Human metapneumovirus
aucaguagaccugcaaaacca

SEQ ID NO: 206857 - RNA, 22 nt, Human metapneumovirus
aucaaguuagaacaagaauuaa

SEQ ID NO: 206858 - RNA, 16 nt, Human metapneumovirus
aucaagaacgggacaa

SEQ ID NO: 206859 - RNA, 12 nt, Human metapneumovirus
aucaaagucaug

SEQ ID NO: 206860 - RNA, 15 nt, Human metapneumovirus
auaugccagucaaaa

SEQ ID NO: 206861 - RNA, 18 nt, Human metapneumovirus
auaugccagucaaaaacu

SEQ ID NO: 206862 - RNA, 15 nt, Human metapneumovirus
aucucaaucuauuau

SEQ ID NO: 206863 - RNA, 18 nt, Human metapneumovirus
aucucauagaucauaaag

SEQ ID NO: 206864 - RNA, 14 nt, Human metapneumovirus
aucucccuggaaaa

SEQ ID NO: 206865 - RNA, 17 nt, Human metapneumovirus
auagaucauaaagucac

SEQ ID NO: 206866 - RNA, 20 nt, Human metapneumovirus
auagagguugaugacaugau

SEQ ID NO: 206867 - RNA, 21 nt, Human metapneumovirus
auagagcugauggcuuaucaa

SEQ ID NO: 206868 - RNA, 12 nt, Human metapneumovirus
auaccaaaaaua

SEQ ID NO: 206869 - RNA, 19 nt, Human metapneumovirus
auaccgucagaaccaaagu

SEQ ID NO: 206870 - RNA, 16 nt, Human metapneumovirus
auaaaaacagaauuag

SEQ ID NO: 206871 - RNA, 19 nt, Human metapneumovirus
agcuacuuagaagagucau

SEQ ID NO: 206872 - RNA, 18 nt, Human metapneumovirus
agcuacuaacccuaucuc

SEQ ID NO: 206873 - RNA, 13 nt, Human metapneumovirus
agccaaaagacaa

SEQ ID NO: 206874 - RNA, 21 nt, Human metapneumovirus
agcugauggcuuaucaauaau

SEQ ID NO: 206875 - RNA, 20 nt, Human metapneumovirus
aggccaacacaccaccagca

SEQ ID NO: 206876 - RNA, 23 nt, Human metapneumovirus
aggcauuccuuacacagcagcug

SEQ ID NO: 206877 - RNA, 21 nt, Human metapneumovirus
agguauacaaacucugcaaua

SEQ ID NO: 206878 - RNA, 21 nt, Human metapneumovirus
auugcuuaaucaucaucacaa

SEQ ID NO: 206879 - RNA, 15 nt, Human metapneumovirus
auuagaugucauuaa

SEQ ID NO: 206880 - RNA, 22 nt, Human metapneumovirus
auuagcucugcccaaaucuccc

SEQ ID NO: 206881 - RNA, 16 nt, Human metapneumovirus
auuaggauccauccaa

SEQ ID NO: 206882 - RNA, 17 nt, Human metapneumovirus
caaaacaacacccaaga

SEQ ID NO: 206883 - RNA, 18 nt, Human metapneumovirus
augucaaggcuuacuuaa

SEQ ID NO: 206884 - RNA, 20 nt, Human metapneumovirus
augucuaucuuccugacuca

SEQ ID NO: 206885 - RNA, 16 nt, Human metapneumovirus
auguuagacucaaaaa

SEQ ID NO: 206886 - RNA, 16 nt, Human metapneumovirus
auuaaaauuaaaaaua

SEQ ID NO: 206887 - RNA, 21 nt, Human metapneumovirus
augggacaaguaaaaauggag

SEQ ID NO: 206888 - RNA, 15 nt, Human metapneumovirus
auguacucaccucaa

SEQ ID NO: 206889 - RNA, 18 nt, Human metapneumovirus
auguacucaccucaaaaa

SEQ ID NO: 206890 - RNA, 17 nt, Human metapneumovirus
cacaguaacaaucacca

SEQ ID NO: 206891 - RNA, 19 nt, Human metapneumovirus
caauggagaagccaaaaga

SEQ ID NO: 206892 - RNA, 21 nt, Human metapneumovirus
caaugauaacauuagauguca

SEQ ID NO: 206893 - RNA, 11 nt, Human metapneumovirus
caaucugcaaa

SEQ ID NO: 206894 - RNA, 15 nt, Human metapneumovirus
caaucuccccaaaaa

SEQ ID NO: 206895 - RNA, 20 nt, Human metapneumovirus
caaucuccccaaaaaggcaa

SEQ ID NO: 206896 - RNA, 13 nt, Human metapneumovirus
cagaacaguuucu

SEQ ID NO: 206897 - RNA, 22 nt, Human metapneumovirus
caccuuggccaagagcuacuaa

SEQ ID NO: 206898 - RNA, 17 nt, Human metapneumovirus
cacucuguaugcugcau

SEQ ID NO: 206899 - RNA, 16 nt, Human metapneumovirus
cacuaagagagcucag

SEQ ID NO: 206900 - RNA, 14 nt, Human metapneumovirus
caacuggcaagaga

SEQ ID NO: 206901 - RNA, 15 nt, Human metapneumovirus
caaccaagacuacuc

SEQ ID NO: 206902 - RNA, 15 nt, Human metapneumovirus
caaccaaaacugaaa

SEQ ID NO: 206903 - RNA, 15 nt, Human metapneumovirus
caaccaccccaagaa

SEQ ID NO: 206904 - RNA, 16 nt, Human metapneumovirus
caaaaguugccauaga

SEQ ID NO: 206905 - RNA, 18 nt, Human metapneumovirus
caaaaugucauucccuga

SEQ ID NO: 206906 - RNA, 23 nt, Human metapneumovirus
caauagaggaagugagugcaagu

SEQ ID NO: 206907 - RNA, 15 nt, Human metapneumovirus
caauaaccacucugu

SEQ ID NO: 206908 - RNA, 16 nt, Human metapneumovirus
caauaaccacucugua

SEQ ID NO: 206909 - RNA, 19 nt, Human metapneumovirus
caaggugcagcaaugucug

SEQ ID NO: 206910 - RNA, 13 nt, Human metapneumovirus
caagagcuacuaa

SEQ ID NO: 206911 - RNA, 14 nt, Human metapneumovirus
caaguaaaaaugga

SEQ ID NO: 206912 - RNA, 23 nt, Human metapneumovirus
agagugggauaaaugacaaugau

SEQ ID NO: 206913 - RNA, 21 nt, Human metapneumovirus
agauaaagguggggcaaccaa

SEQ ID NO: 206914 - RNA, 23 nt, Human metapneumovirus
agauaaagguggggcaaccaaaa

SEQ ID NO: 206915 - RNA, 16 nt, Human metapneumovirus
agaccugcaaaaccaa

SEQ ID NO: 206916 - RNA, 16 nt, Human metapneumovirus
agaaaagaaacugaaa

SEQ ID NO: 206917 - RNA, 16 nt, Human metapneumovirus
agaaaaccaggucaua

SEQ ID NO: 206918 - RNA, 13 nt, Human metapneumovirus
acucaaagugaau

SEQ ID NO: 206919 - RNA, 14 nt, Human metapneumovirus
acucaaagugaaug

SEQ ID NO: 206920 - RNA, 14 nt, Human metapneumovirus
acuaagagagcuca

SEQ ID NO: 206921 - RNA, 16 nt, Human metapneumovirus
acaagaauuaaaucaa

SEQ ID NO: 206922 - RNA, 22 nt, Human metapneumovirus
acaugugccgauggacccagcu

SEQ ID NO: 206923 - RNA, 15 nt, Human metapneumovirus
accauaacuauucaa

SEQ ID NO: 206924 - RNA, 22 nt, Human metapneumovirus
accaucaauuauauaaaagugg

SEQ ID NO: 206925 - RNA, 12 nt, Human metapneumovirus
accauaccguca

SEQ ID NO: 206926 - RNA, 22 nt, Human metapneumovirus
accauaccgucagaaccaaagu

SEQ ID NO: 206927 - RNA, 20 nt, Human metapneumovirus
acauugaguauugcccucaa

SEQ ID NO: 206928 - RNA, 21 nt, Human metapneumovirus
accuacuaucaguagaccugc

SEQ ID NO: 206929 - RNA, 15 nt, Human metapneumovirus
aagcuuuccagaaau

SEQ ID NO: 206930 - RNA, 20 nt, Human metapneumovirus
aaggacuuaaaagaagcuuu

SEQ ID NO: 206931 - RNA, 19 nt, Human metapneumovirus
aagucucauacuaacauuu

SEQ ID NO: 206932 - RNA, 17 nt, Human metapneumovirus
aauacucaaagugaaug

SEQ ID NO: 206933 - RNA, 14 nt, Human metapneumovirus
aaguggaaaacaau

SEQ ID NO: 206934 - RNA, 21 nt, Human metapneumovirus
aaguggaaaacaaucugcaaa

SEQ ID NO: 206935 - RNA, 19 nt, Human metapneumovirus
aagugcggggcaaaugcaa

SEQ ID NO: 206936 - RNA, 20 nt, Human metapneumovirus
aaguuucuaugauacuucau

SEQ ID NO: 206937 - RNA, 23 nt, Human metapneumovirus
aauugguucaugucucuuaaaaa

SEQ ID NO: 206938 - RNA, 21 nt, Human metapneumovirus
aaugucuaucuuccugacuca

SEQ ID NO: 206939 - RNA, 23 nt, Human metapneumovirus
aauuagaccugaccaaaagugca

SEQ ID NO: 206940 - RNA, 19 nt, Human metapneumovirus
aauuauauaaaaguggaaa

SEQ ID NO: 206941 - RNA, 13 nt, Human metapneumovirus
aauuaccuacuau

SEQ ID NO: 206942 - RNA, 19 nt, Human metapneumovirus
aauagaaaaggaccuguua

SEQ ID NO: 206943 - RNA, 15 nt, Human metapneumovirus
aaugccucuuugguc

SEQ ID NO: 206944 - RNA, 18 nt, Human metapneumovirus
aaugcuuuaaaaaugccu

SEQ ID NO: 206945 - RNA, 15 nt, Human metapneumovirus
aauggagaagccaaa

SEQ ID NO: 206946 - RNA, 16 nt, Human metapneumovirus
aaaagaccuuaccuaa

SEQ ID NO: 206947 - RNA, 21 nt, Human metapneumovirus
aaaagacaauucacaaucucc

SEQ ID NO: 206948 - RNA, 15 nt, Human metapneumovirus
aaaauaacucuaaga

SEQ ID NO: 206949 - RNA, 18 nt, Human metapneumovirus
aaaaugacaacacugcaa

SEQ ID NO: 206950 - RNA, 15 nt, Human metapneumovirus
aaacugaaaccauca

SEQ ID NO: 206951 - RNA, 23 nt, Human metapneumovirus
aaagaaacugaaaccaucaacua

SEQ ID NO: 206952 - RNA, 14 nt, Human metapneumovirus
aaauaccacaucag

SEQ ID NO: 206953 - RNA, 19 nt, Human metapneumovirus
aaauacaaaauaacucuaa

SEQ ID NO: 206954 - RNA, 13 nt, Human metapneumovirus
aaaggacucauca

SEQ ID NO: 206955 - RNA, 19 nt, Human metapneumovirus
aaaggaccuguuaccugca

SEQ ID NO: 206956 - RNA, 18 nt, Human metapneumovirus
aaaugcaaaaaaacacau

SEQ ID NO: 206957 - RNA, 15 nt, Human metapneumovirus
aaccuuacaugugcc

SEQ ID NO: 206958 - RNA, 22 nt, Human metapneumovirus
aacauuucucacaguaacaauc

SEQ ID NO: 206959 - RNA, 14 nt, Human metapneumovirus
aaccaccccaagaa

SEQ ID NO: 206960 - RNA, 17 nt, Human metapneumovirus
aaauuugggacaaauca

SEQ ID NO: 206961 - RNA, 13 nt, Human metapneumovirus
gaaacauuggaau

SEQ ID NO: 206962 - RNA, 15 nt, Human metapneumovirus
gaaaagaaacugaaa

SEQ ID NO: 206963 - RNA, 12 nt, Human metapneumovirus
gaaaauaaacag

SEQ ID NO: 206964 - RNA, 16 nt, Human metapneumovirus
gaaaaaaacugggcaa

SEQ ID NO: 206965 - RNA, 13 nt, Human metapneumovirus
cuuaacaaccaug

SEQ ID NO: 206966 - RNA, 15 nt, Human metapneumovirus
cuuaacaaccaugaa

SEQ ID NO: 206967 - RNA, 12 nt, Human metapneumovirus
cuuacaugugcc

SEQ ID NO: 206968 - RNA, 16 nt, Human metapneumovirus
cuuaaucaucaucaca

SEQ ID NO: 206969 - RNA, 18 nt, Human metapneumovirus
cuuuuaaggaacacugau

SEQ ID NO: 206970 - RNA, 15 nt, Human metapneumovirus
gaaaguggagaacau

SEQ ID NO: 206971 - RNA, 16 nt, Human metapneumovirus
gaaaguggugaucauu

SEQ ID NO: 206972 - RNA, 22 nt, Human metapneumovirus
aaaccaucaacuaacaccaaaa

SEQ ID NO: 206973 - RNA, 16 nt, Human metapneumovirus
aaaccaggucauaaaa

SEQ ID NO: 206974 - RNA, 19 nt, Human metapneumovirus
gaauuaccuacuaucagua

SEQ ID NO: 206975 - RNA, 15 nt, Human metapneumovirus
aaagaucucaaucua

SEQ ID NO: 206976 - RNA, 18 nt, Human metapneumovirus
gagacaaauaacaaugga

SEQ ID NO: 206977 - RNA, 16 nt, Human metapneumovirus
gagaagaaggugcuac

SEQ ID NO: 206978 - RNA, 18 nt, Human metapneumovirus
gagaacauucgaacaaua

SEQ ID NO: 206979 - RNA, 20 nt, Human metapneumovirus
gagcugauggcuuaucaaua

SEQ ID NO: 206980 - RNA, 11 nt, Human metapneumovirus
gagugggauaa

SEQ ID NO: 206981 - RNA, 22 nt, Human metapneumovirus
gauaaagguggggcaaccaaaa

SEQ ID NO: 206982 - RNA, 22 nt, Human metapneumovirus
aaauaacaauggauccucucaa

SEQ ID NO: 206983 - RNA, 16 nt, Human metapneumovirus
aaauaccacaaccacc

SEQ ID NO: 206984 - RNA, 19 nt, Human metapneumovirus
aaauaccacaucagucaca

SEQ ID NO: 206985 - RNA, 19 nt, Human metapneumovirus
aaaucaugauaucacacag

SEQ ID NO: 206986 - RNA, 16 nt, Human metapneumovirus
gacaaauaacaaugga

SEQ ID NO: 206987 - RNA, 17 nt, Human metapneumovirus
gacaaauaacaauggau

SEQ ID NO: 206988 - RNA, 13 nt, Human metapneumovirus
gaccuuaccuaaa

SEQ ID NO: 206989 - RNA, 24 nt, Human metapneumovirus
ggaauuugacaaacucacagucug

SEQ ID NO: 206990 - RNA, 23 nt, Human metapneumovirus
ggcagagaagauaggacacaaga

SEQ ID NO: 206991 - RNA, 16 nt, Human metapneumovirus
ggaauaacuacauuga

SEQ ID NO: 206992 - RNA, 17 nt, Human metapneumovirus
ggaauuaccuacuauca

SEQ ID NO: 206993 - RNA, 14 nt, Human metapneumovirus
gcuuaucaauaaua

SEQ ID NO: 206994 - RNA, 22 nt, Human metapneumovirus
gcaaggcuccgugcaaauauga

SEQ ID NO: 206995 - RNA, 15 nt, Human metapneumovirus
gcaaguuuaaccaca

SEQ ID NO: 206996 - RNA, 23 nt, Human metapneumovirus
gcaggcagagaagauaggacaca

SEQ ID NO: 206997 - RNA, 21 nt, Human metapneumovirus
gcacuaagagagcucagaaca

SEQ ID NO: 206998 - RNA, 16 nt, Human metapneumovirus
gccaacacaccaccag

SEQ ID NO: 206999 - RNA, 15 nt, Human metapneumovirus
gccaagagcuacuaa

SEQ ID NO: 207000 - RNA, 19 nt, Human metapneumovirus
caggucauaaaagaucuca

SEQ ID NO: 207001 - RNA, 19 nt, Human metapneumovirus
cagacaaaaaggacucauc

SEQ ID NO: 207002 - RNA, 13 nt, Human metapneumovirus
cauguuagacuca

SEQ ID NO: 207003 - RNA, 15 nt, Human metapneumovirus
cauggaucccauuga

SEQ ID NO: 207004 - RNA, 17 nt, Human metapneumovirus
cauagagaauccuguua

SEQ ID NO: 207005 - RNA, 15 nt, Human metapneumovirus
cauuagaugucauua

SEQ ID NO: 207006 - RNA, 23 nt, Human metapneumovirus
cauuagaugucauuaaaagugau

SEQ ID NO: 207007 - RNA, 19 nt, Human metapneumovirus
cauuuacaauuguuauuua

SEQ ID NO: 207008 - RNA, 22 nt, Human metapneumovirus
ccaagagacaaauaacaaugga

SEQ ID NO: 207009 - RNA, 19 nt, Human metapneumovirus
ccagcuuaauaaaaacaga

SEQ ID NO: 207010 - RNA, 20 nt, Human metapneumovirus
ccauagagaauccuguuauc

SEQ ID NO: 207011 - RNA, 23 nt, Human metapneumovirus
ccauaccgucagaaccaaaguua

SEQ ID NO: 207012 - RNA, 21 nt, Human metapneumovirus
cccaaaaaauuugaagucaau

SEQ ID NO: 207013 - RNA, 22 nt, Human metapneumovirus
cccaaaaaauuugaagucaaug

SEQ ID NO: 207014 - RNA, 15 nt, Human metapneumovirus
aaacaacacccaaga

SEQ ID NO: 207015 - RNA, 13 nt, Human metapneumovirus
aaaccaaccauac

SEQ ID NO: 207016 - RNA, 14 nt, Human metapneumovirus
aaacauguacucac

SEQ ID NO: 207017 - RNA, 16 nt, Human metapneumovirus
cuaaaaacccugacaa

SEQ ID NO: 207018 - RNA, 22 nt, Human metapneumovirus
cucgaucagcuaaaaacccuga

SEQ ID NO: 207019 - RNA, 15 nt, Human metapneumovirus
cuccccaaaaaggca

SEQ ID NO: 207020 - RNA, 17 nt, Human metapneumovirus
cuacuaacccuaucuca

SEQ ID NO: 207021 - RNA, 18 nt, Human metapneumovirus
cuacuaacccuaucucau

SEQ ID NO: 207022 - RNA, 12 nt, Human metapneumovirus
cugcaaaaccaa

SEQ ID NO: 207023 - RNA, 21 nt, Human metapneumovirus
cugcaaaaguugccauagaga

SEQ ID NO: 207024 - RNA, 17 nt, Human metapneumovirus
ucucauacuaacauuua

SEQ ID NO: 207025 - RNA, 17 nt, Human metapneumovirus
ucuaaaucaugauauca

SEQ ID NO: 207026 - RNA, 20 nt, Human metapneumovirus
ucuaaaucaugauaucacac

SEQ ID NO: 207027 - RNA, 17 nt, Human metapneumovirus
ucucccuggaaaaaaca

SEQ ID NO: 207028 - RNA, 13 nt, Human metapneumovirus
ucuccccaaaaag

SEQ ID NO: 207029 - RNA, 19 nt, Human metapneumovirus
ucccuggaaaaaacacucg

SEQ ID NO: 207030 - RNA, 18 nt, Human metapneumovirus
uccugacucauaucuuaa

SEQ ID NO: 207031 - RNA, 13 nt, Human metapneumovirus
uauggacucacaa

SEQ ID NO: 207032 - RNA, 12 nt, Human metapneumovirus
uauaccaaaaau

SEQ ID NO: 207033 - RNA, 13 nt, Human metapneumovirus
uauauaaaagugg

SEQ ID NO: 207034 - RNA, 16 nt, Human metapneumovirus
ucaaacaacuacaaga

SEQ ID NO: 207035 - RNA, 17 nt, Human metapneumovirus
ucaaacaacuacaagaa

SEQ ID NO: 207036 - RNA, 13 nt, Human metapneumovirus
ucaaugaauccac

SEQ ID NO: 207037 - RNA, 18 nt, Human metapneumovirus
ucaaugaauccacuguua

SEQ ID NO: 207038 - RNA, 19 nt, Human metapneumovirus
ucaggccaacacaccacca

SEQ ID NO: 207039 - RNA, 12 nt, Human metapneumovirus
ucagaacaguuu

SEQ ID NO: 207040 - RNA, 23 nt, Human metapneumovirus
ucagaacaguuucugcugaucaa

SEQ ID NO: 207041 - RNA, 16 nt, Human metapneumovirus
guucaaguugaucuaa

SEQ ID NO: 207042 - RNA, 19 nt, Human metapneumovirus
gugcaaguuuaaccacaau

SEQ ID NO: 207043 - RNA, 20 nt, Human metapneumovirus
guccaauacucaaagugaau

SEQ ID NO: 207044 - RNA, 15 nt, Human metapneumovirus
gucauguagcacuau

SEQ ID NO: 207045 - RNA, 22 nt, Human metapneumovirus
gucauaaaagaucucaaucuau

SEQ ID NO: 207046 - RNA, 13 nt, Human metapneumovirus
gucagaaccaaag

SEQ ID NO: 207047 - RNA, 19 nt, Human metapneumovirus
ggguaaugaagcagcaaaa

SEQ ID NO: 207048 - RNA, 15 nt, Human metapneumovirus
guagacaccuaucaa

SEQ ID NO: 207049 - RNA, 23 nt, Human metapneumovirus
guauacaaacucugcaauaaaca

SEQ ID NO: 207050 - RNA, 22 nt, Human metapneumovirus
uaagaaaaccaggucauaaaag

SEQ ID NO: 207051 - RNA, 15 nt, Human metapneumovirus
uaacaaucaccauca

SEQ ID NO: 207052 - RNA, 13 nt, Human metapneumovirus
uaacaccaaaaag

SEQ ID NO: 207053 - RNA, 20 nt, Human metapneumovirus
uaaaagugaugggucuucaa

SEQ ID NO: 207054 - RNA, 21 nt, Human metapneumovirus
uaaagguggggcaaccaaaac

SEQ ID NO: 207055 - RNA, 17 nt, Human metapneumovirus
uaaaaguuugauucaaa

SEQ ID NO: 207056 - RNA, 15 nt, Human metapneumovirus
uaauaagaucaaauu

SEQ ID NO: 207057 - RNA, 23 nt, Human metapneumovirus
uaauugcuuaaucaucaucacaa

SEQ ID NO: 207058 - RNA, 17 nt, Human metapneumovirus
uaccuaaaaaaugacaa

SEQ ID NO: 207059 - RNA, 17 nt, Human metapneumovirus
aacaacacccaagagac

SEQ ID NO: 207060 - RNA, 13 nt, Human metapneumovirus
uacucaaagugaa

SEQ ID NO: 207061 - RNA, 23 nt, Human metapneumovirus
uacucaaagugaaugcaucagcc

SEQ ID NO: 207062 - RNA, 22 nt, Human metapneumovirus
aacacucgcccauauaccaaaa

SEQ ID NO: 207063 - RNA, 17 nt, Human metapneumovirus
aacugaaggauaucuca

SEQ ID NO: 207064 - RNA, 19 nt, Human metapneumovirus
aacucuaagauaaaccaug

SEQ ID NO: 207065 - RNA, 13 nt, Human metapneumovirus
aagacuacucuaa

SEQ ID NO: 207066 - RNA, 23 nt, Human metapneumovirus
aagauaaaccaugcagacaccaa

SEQ ID NO: 207067 - RNA, 14 nt, Human metapneumovirus
aauaaacaauggga

SEQ ID NO: 207068 - RNA, 23 nt, Human metapneumovirus
aaucaaguuagaacaagaauuaa

SEQ ID NO: 207069 - RNA, 20 nt, Human metapneumovirus
aagucauggaucccauugaa

SEQ ID NO: 207070 - RNA, 20 nt, Human metapneumovirus
aagugaugggucuucaaaaa

SEQ ID NO: 207071 - RNA, 19 nt, Human metapneumovirus
aaggaccuguuaccugcaa

SEQ ID NO: 207072 - RNA, 20 nt, Human metapneumovirus
aagguauacaaacucugcaa

SEQ ID NO: 207073 - RNA, 19 nt, Human metapneumovirus
aagcaccuuggccaagagc

SEQ ID NO: 207074 - RNA, 15 nt, Human metapneumovirus
ugcccucaauaucua

SEQ ID NO: 207075 - RNA, 15 nt, Human metapneumovirus
ugcaucacaaaaugg

SEQ ID NO: 207076 - RNA, 15 nt, Human metapneumovirus
ugagacuaaugcaau

SEQ ID NO: 207077 - RNA, 19 nt, Human metapneumovirus
ugcaaauaugccagucaaa

SEQ ID NO: 207078 - RNA, 17 nt, Human metapneumovirus
ugcaaguuuaaccacaa

SEQ ID NO: 207079 - RNA, 15 nt, Human metapneumovirus
ugcaagccuaacaau

SEQ ID NO: 207080 - RNA, 20 nt, Human metapneumovirus
ugcaaaaaaacacaucugaa

SEQ ID NO: 207081 - RNA, 20 nt, Human metapneumovirus
ugaugauaaccaaagcauaa

SEQ ID NO: 207082 - RNA, 22 nt, Human metapneumovirus
ugaucauaaacuauaaaaugca

SEQ ID NO: 207083 - RNA, 19 nt, Human metapneumovirus
ugaucuaauagaaaaggac

SEQ ID NO: 207084 - RNA, 14 nt, Human metapneumovirus
uggggcaaccaaaa

SEQ ID NO: 207085 - RNA, 15 nt, Human metapneumovirus
uggggcaaccaaaac

SEQ ID NO: 207086 - RNA, 18 nt, Human metapneumovirus
ugguccaauacucaaagu

SEQ ID NO: 207087 - RNA, 23 nt, Human metapneumovirus
ugguucaugucucuuaaaaagac

SEQ ID NO: 207088 - RNA, 17 nt, Human metapneumovirus
uuagacucaaaaaugca

SEQ ID NO: 207089 - RNA, 20 nt, Human metapneumovirus
uucaaaaacauguacucacc

SEQ ID NO: 207090 - RNA, 13 nt, Human metapneumovirus
uuaaaaaguaaaa

SEQ ID NO: 207091 - RNA, 20 nt, Human metapneumovirus
uuaaaaagaccuuaccuaaa

SEQ ID NO: 207092 - RNA, 14 nt, Human metapneumovirus
uguucugaggacag

SEQ ID NO: 207093 - RNA, 21 nt, Human metapneumovirus
uguuagacucaaaaaugcagu

SEQ ID NO: 207094 - RNA, 20 nt, Human metapneumovirus
agucuacauaauauaaucaa

SEQ ID NO: 207095 - RNA, 23 nt, Human metapneumovirus
agucuacauaauauaaucaaaca

SEQ ID NO: 207096 - RNA, 17 nt, Human metapneumovirus
agucuaccgagaagaag

SEQ ID NO: 207097 - RNA, 13 nt, Human metapneumovirus
agucaaaaacuga

SEQ ID NO: 207098 - RNA, 21 nt, Human metapneumovirus
auaaaaguggaaaacaaucug

SEQ ID NO: 207099 - RNA, 22 nt, Human metapneumovirus
auaaacagaaaucaaugcacaa

SEQ ID NO: 207100 - RNA, 15 nt, Human metapneumovirus
auaaacagugacaca

SEQ ID NO: 207101 - RNA, 19 nt, Human metapneumovirus
auaaccaaagcauaacaaa

SEQ ID NO: 207102 - RNA, 16 nt, Human metapneumovirus
auaaagcaagcaauca

SEQ ID NO: 207103 - RNA, 13 nt, Human metapneumovirus
auaaaagaucuca

SEQ ID NO: 207104 - RNA, 16 nt, Human metapneumovirus
aguguucugaggacag

SEQ ID NO: 207105 - RNA, 21 nt, Human metapneumovirus
aguuagcauggacagauaaag

SEQ ID NO: 207106 - RNA, 15 nt, Human metapneumovirus
agugaaugcaucagc

SEQ ID NO: 207107 - RNA, 18 nt, Human metapneumovirus
agugaaugcaucagccca

SEQ ID NO: 207108 - RNA, 15 nt, Human metapneumovirus
auagugaagucucau

SEQ ID NO: 207109 - RNA, 14 nt, Human metapneumovirus
auaucuuaaaggag

SEQ ID NO: 207110 - RNA, 17 nt, Human metapneumovirus
aucaaggcauuccuuac

SEQ ID NO: 207111 - RNA, 20 nt, Human metapneumovirus
aucaaucaagaacgggacaa

SEQ ID NO: 207112 - RNA, 21 nt, Human metapneumovirus
auaauaucaggagcaggcaga

SEQ ID NO: 207113 - RNA, 22 nt, Human metapneumovirus
auaccacaaccaccccaagaaa

SEQ ID NO: 207114 - RNA, 17 nt, Human metapneumovirus
auacaaaauaacucuaa

SEQ ID NO: 207115 - RNA, 14 nt, Human metapneumovirus
auacaaacucugca

SEQ ID NO: 207116 - RNA, 16 nt, Human metapneumovirus
auacaaacucugcaau

SEQ ID NO: 207117 - RNA, 17 nt, Human metapneumovirus
aggaauaacuacauuga

SEQ ID NO: 207118 - RNA, 11 nt, Human metapneumovirus
agcagcuguuc

SEQ ID NO: 207119 - RNA, 22 nt, Human metapneumovirus
agcagugcugcucgaucagcua

SEQ ID NO: 207120 - RNA, 15 nt, Human metapneumovirus
agcauaacaaaagcu

SEQ ID NO: 207121 - RNA, 22 nt, Human metapneumovirus
agagcuacuaacccuaucucau

SEQ ID NO: 207122 - RNA, 12 nt, Human metapneumovirus
agagcuacuuag

SEQ ID NO: 207123 - RNA, 19 nt, Human metapneumovirus
agagacaaauaacaaugga

SEQ ID NO: 207124 - RNA, 19 nt, Human metapneumovirus
agauagauacuuauuaaua

SEQ ID NO: 207125 - RNA, 16 nt, Human metapneumovirus
agauaggacacaagau

SEQ ID NO: 207126 - RNA, 19 nt, Human metapneumovirus
agagugggauaaaugacaa

SEQ ID NO: 207127 - RNA, 22 nt, Human metapneumovirus
agauaugcucaaagcaagagua

SEQ ID NO: 207128 - RNA, 15 nt, Human metapneumovirus
agcaaucaaagucau

SEQ ID NO: 207129 - RNA, 14 nt, Human metapneumovirus
agcaagaguaaaaa

SEQ ID NO: 207130 - RNA, 15 nt, Human metapneumovirus
agcaagcaaucaaag

SEQ ID NO: 207131 - RNA, 14 nt, Human metapneumovirus
acaguaacaaucac

SEQ ID NO: 207132 - RNA, 17 nt, Human metapneumovirus
acaguaacaaucaccau

SEQ ID NO: 207133 - RNA, 14 nt, Human metapneumovirus
acaucagucacaac

SEQ ID NO: 207134 - RNA, 14 nt, Human metapneumovirus
acauucgaacaaua

SEQ ID NO: 207135 - RNA, 14 nt, Human metapneumovirus
acaccaacaaugga

SEQ ID NO: 207136 - RNA, 16 nt, Human metapneumovirus
acaccaacaauggaga

SEQ ID NO: 207137 - RNA, 22 nt, Human metapneumovirus
acaauuacuggaguuggccaga

SEQ ID NO: 207138 - RNA, 15 nt, Human metapneumovirus
acacucgcccauaua

SEQ ID NO: 207139 - RNA, 21 nt, Human metapneumovirus
acacucgcccauauaccaaaa

SEQ ID NO: 207140 - RNA, 21 nt, Human metapneumovirus
acaccuaucaaggcauuccuu

SEQ ID NO: 207141 - RNA, 22 nt, Human metapneumovirus
acacugauagagcugauggcuu

SEQ ID NO: 207142 - RNA, 18 nt, Human metapneumovirus
acaauggagaagccaaaa

SEQ ID NO: 207143 - RNA, 18 nt, Human metapneumovirus
aaugacaacacugcaaaa

SEQ ID NO: 207144 - RNA, 13 nt, Human metapneumovirus
aauuugggacaaa

SEQ ID NO: 207145 - RNA, 13 nt, Human metapneumovirus
acaaaagcugcag

SEQ ID NO: 207146 - RNA, 21 nt, Human metapneumovirus
acaaaaugguccaauacucaa

SEQ ID NO: 207147 - RNA, 21 nt, Human metapneumovirus
acuaucaguagaccugcaaaa

SEQ ID NO: 207148 - RNA, 15 nt, Human metapneumovirus
acuaacaacugucau

SEQ ID NO: 207149 - RNA, 13 nt, Human metapneumovirus
acuaacaccaaaa

SEQ ID NO: 207150 - RNA, 15 nt, Human metapneumovirus
acuaacauuucucac

SEQ ID NO: 207151 - RNA, 15 nt, Human metapneumovirus
acuaacccuaucuca

SEQ ID NO: 207152 - RNA, 20 nt, Human metapneumovirus
accucaacacggucuuaaag

SEQ ID NO: 207153 - RNA, 12 nt, Human metapneumovirus
accaaugugguu

SEQ ID NO: 207154 - RNA, 18 nt, Human metapneumovirus
accacaauuacuggaguu

SEQ ID NO: 207155 - RNA, 20 nt, Human metapneumovirus
accacaucagucacaaccaa

SEQ ID NO: 207156 - RNA, 14 nt, Human metapneumovirus
accuguuaccugca

SEQ ID NO: 207157 - RNA, 18 nt, Human metapneumovirus
accuuacaugugccgaug

SEQ ID NO: 207158 - RNA, 15 nt, Human metapneumovirus
augauaaccaaagca

SEQ ID NO: 207159 - RNA, 14 nt, Human metapneumovirus
augaauauagcaaa

SEQ ID NO: 207160 - RNA, 20 nt, Human metapneumovirus
augaauauagcaaacuggaa

SEQ ID NO: 207161 - RNA, 21 nt, Human metapneumovirus
augaagugcggggcaaaugca

SEQ ID NO: 207162 - RNA, 14 nt, Human metapneumovirus
augcugcaucacaa

SEQ ID NO: 207163 - RNA, 19 nt, Human metapneumovirus
auggacucacaaggacuua

SEQ ID NO: 207164 - RNA, 22 nt, Human metapneumovirus
auggagaagccaaaagacaauu

SEQ ID NO: 207165 - RNA, 14 nt, Human metapneumovirus
auucacaaucuccc

SEQ ID NO: 207166 - RNA, 18 nt, Human metapneumovirus
auuaauaagaucaaauua

SEQ ID NO: 207167 - RNA, 14 nt, Human metapneumovirus
caacuacaagaagu

SEQ ID NO: 207168 - RNA, 15 nt, Human metapneumovirus
caacuaacaccaaaa

SEQ ID NO: 207169 - RNA, 22 nt, Human metapneumovirus
caagagacaaauaacaauggau

SEQ ID NO: 207170 - RNA, 21 nt, Human metapneumovirus
caagagcuacuaacccuaucu

SEQ ID NO: 207171 - RNA, 15 nt, Human metapneumovirus
caaguuagaacaaga

SEQ ID NO: 207172 - RNA, 22 nt, Human metapneumovirus
caauucacaaucuccccaaaaa

SEQ ID NO: 207173 - RNA, 14 nt, Human metapneumovirus
cacaaggacuuaaa

SEQ ID NO: 207174 - RNA, 14 nt, Human metapneumovirus
cacaaaauggucca

SEQ ID NO: 207175 - RNA, 21 nt, Human metapneumovirus
cacagcagcuguucaaguuga

SEQ ID NO: 207176 - RNA, 18 nt, Human metapneumovirus
caaaaguugccauagaga

SEQ ID NO: 207177 - RNA, 19 nt, Human metapneumovirus
caaaaguugccauagagaa

SEQ ID NO: 207178 - RNA, 16 nt, Human metapneumovirus
caaccaccccaagaaa

SEQ ID NO: 207179 - RNA, 19 nt, Human metapneumovirus
cauaccgucagaaccaaag

SEQ ID NO: 207180 - RNA, 12 nt, Human metapneumovirus
cagucaaaaacu

SEQ ID NO: 207181 - RNA, 20 nt, Human metapneumovirus
caguagaccugcaaaaccaa

SEQ ID NO: 207182 - RNA, 22 nt, Human metapneumovirus
caguaacaaucaccaucaauua

SEQ ID NO: 207183 - RNA, 17 nt, Human metapneumovirus
cauaaugucucgcaagg

SEQ ID NO: 207184 - RNA, 18 nt, Human metapneumovirus
caguuuacuuaacaacca

SEQ ID NO: 207185 - RNA, 20 nt, Human metapneumovirus
caccaacaauggagaagcca

SEQ ID NO: 207186 - RNA, 13 nt, Human metapneumovirus
caccaaugugguu

SEQ ID NO: 207187 - RNA, 12 nt, Human metapneumovirus
cagaaccaaagu

SEQ ID NO: 207188 - RNA, 20 nt, Human metapneumovirus
cagaagcuuuccagaaauca

SEQ ID NO: 207189 - RNA, 17 nt, Human metapneumovirus
cagacaccaacaaugga

SEQ ID NO: 207190 - RNA, 18 nt, Human metapneumovirus
cagcuuaauaaaaacaga

SEQ ID NO: 207191 - RNA, 15 nt, Human metapneumovirus
caggccaacacacca

SEQ ID NO: 207192 - RNA, 14 nt, Human metapneumovirus
cccaaggugcagca

SEQ ID NO: 207193 - RNA, 17 nt, Human metapneumovirus
ccaaagcauaacaaaag

SEQ ID NO: 207194 - RNA, 23 nt, Human metapneumovirus
ccaacaauggagaagccaaaaga

SEQ ID NO: 207195 - RNA, 23 nt, Human metapneumovirus
cauggguaaugaagcagcaaaau

SEQ ID NO: 207196 - RNA, 18 nt, Human metapneumovirus
guauacaaacucugcaau

SEQ ID NO: 207197 - RNA, 19 nt, Human metapneumovirus
gcuuuaucugaugggauag

SEQ ID NO: 207198 - RNA, 19 nt, Human metapneumovirus
ggcauuccuuacacagcag

SEQ ID NO: 207199 - RNA, 19 nt, Human metapneumovirus
gcuacuuagaagagucaug

SEQ ID NO: 207200 - RNA, 14 nt, Human metapneumovirus
gcucgaucagcuaa

SEQ ID NO: 207201 - RNA, 17 nt, Human metapneumovirus
guuuacuuaacaaccau

SEQ ID NO: 207202 - RNA, 15 nt, Human metapneumovirus
guuaauaacaccuca

SEQ ID NO: 207203 - RNA, 18 nt, Human metapneumovirus
uagcaaacuggaauuuga

SEQ ID NO: 207204 - RNA, 19 nt, Human metapneumovirus
uagaaacuaacaacuguca

SEQ ID NO: 207205 - RNA, 20 nt, Human metapneumovirus
uagaagagucauguagcacu

SEQ ID NO: 207206 - RNA, 14 nt, Human metapneumovirus
uaggauccauccaa

SEQ ID NO: 207207 - RNA, 21 nt, Human metapneumovirus
uauauugaugauaaccaaagc

SEQ ID NO: 207208 - RNA, 22 nt, Human metapneumovirus
uauauaaaaguggaaaacaauc

SEQ ID NO: 207209 - RNA, 17 nt, Human metapneumovirus
uacuaacccuaucucau

SEQ ID NO: 207210 - RNA, 19 nt, Human metapneumovirus
uacuuauuaauaagaucaa

SEQ ID NO: 207211 - RNA, 22 nt, Human metapneumovirus
uaccuaaaaaaugacaacacug

SEQ ID NO: 207212 - RNA, 14 nt, Human metapneumovirus
uaccugcaagccua

SEQ ID NO: 207213 - RNA, 18 nt, Human metapneumovirus
uaccugcaagccuaacaa

SEQ ID NO: 207214 - RNA, 20 nt, Human metapneumovirus
uaacucuaagauaaaccaug

SEQ ID NO: 207215 - RNA, 22 nt, Human metapneumovirus
uaacucuaagauaaaccaugca

SEQ ID NO: 207216 - RNA, 18 nt, Human metapneumovirus
uaacugaaggauaucuca

SEQ ID NO: 207217 - RNA, 18 nt, Human metapneumovirus
gaaacuaacaacugucau

SEQ ID NO: 207218 - RNA, 16 nt, Human metapneumovirus
gaaauuauauauguca

SEQ ID NO: 207219 - RNA, 22 nt, Human metapneumovirus
gaagccaaaagacaauucacaa

SEQ ID NO: 207220 - RNA, 22 nt, Human metapneumovirus
gaaguaaaaacaguuuacuuaa

SEQ ID NO: 207221 - RNA, 19 nt, Human metapneumovirus
gacaaaaaggacucaucau

SEQ ID NO: 207222 - RNA, 14 nt, Human metapneumovirus
gaaaagaaacugaa

SEQ ID NO: 207223 - RNA, 12 nt, Human metapneumovirus
gaaaaagugaau

SEQ ID NO: 207224 - RNA, 13 nt, Human metapneumovirus
cuuugguccucau

SEQ ID NO: 207225 - RNA, 14 nt, Human metapneumovirus
gcaagcaaucaaag

SEQ ID NO: 207226 - RNA, 18 nt, Human metapneumovirus
gcaagcaaucaaagucau

SEQ ID NO: 207227 - RNA, 14 nt, Human metapneumovirus
gcaaaugcaauaga

SEQ ID NO: 207228 - RNA, 17 nt, Human metapneumovirus
gcaccuuggccaagagc

SEQ ID NO: 207229 - RNA, 20 nt, Human metapneumovirus
gagugcaaguuuaaccacaa

SEQ ID NO: 207230 - RNA, 16 nt, Human metapneumovirus
gauaaccaaagcauaa

SEQ ID NO: 207231 - RNA, 18 nt, Human metapneumovirus
gagcaggcagagaagaua

SEQ ID NO: 207232 - RNA, 16 nt, Human metapneumovirus
gacaccaacaauggag

SEQ ID NO: 207233 - RNA, 16 nt, Human metapneumovirus
gacaccuaucaaggca

SEQ ID NO: 207234 - RNA, 21 nt, Human metapneumovirus
gacuguagcacucgaugaaua

SEQ ID NO: 207235 - RNA, 14 nt, Human metapneumovirus
gagacuaaugcaau

SEQ ID NO: 207236 - RNA, 17 nt, Human metapneumovirus
cgacuguagcacucgau

SEQ ID NO: 207237 - RNA, 18 nt, Human metapneumovirus
cgcccauauaccaaaaau

SEQ ID NO: 207238 - RNA, 16 nt, Human metapneumovirus
cugacaauaaccacuc

SEQ ID NO: 207239 - RNA, 18 nt, Human metapneumovirus
cugaaucagaacaucaca

SEQ ID NO: 207240 - RNA, 21 nt, Human metapneumovirus
cucuaaaucaugauaucacac

SEQ ID NO: 207241 - RNA, 16 nt, Human metapneumovirus
cugcaauaaacaguga

SEQ ID NO: 207242 - RNA, 18 nt, Human metapneumovirus
cugcaaauaugccaguca

SEQ ID NO: 207243 - RNA, 20 nt, Human metapneumovirus
cuaaaaaaugacaacacugc

SEQ ID NO: 207244 - RNA, 16 nt, Human metapneumovirus
cuaagagagcucagaa

SEQ ID NO: 207245 - RNA, 19 nt, Human metapneumovirus
cucacagucugugaaguaa

SEQ ID NO: 207246 - RNA, 16 nt, Human metapneumovirus
cucaaugaauccacug

SEQ ID NO: 207247 - RNA, 21 nt, Human metapneumovirus
cucaaugaauccacuguuaau

SEQ ID NO: 207248 - RNA, 21 nt, Human metapneumovirus
ucuuggaaaguggugaucauu

SEQ ID NO: 207249 - RNA, 18 nt, Human metapneumovirus
ucuguuaguucaacaauu

SEQ ID NO: 207250 - RNA, 15 nt, Human metapneumovirus
ucuaugauacuucau

SEQ ID NO: 207251 - RNA, 20 nt, Human metapneumovirus
ugcaauugguucaugucucu

SEQ ID NO: 207252 - RNA, 15 nt, Human metapneumovirus
ugcaauaaacaguga

SEQ ID NO: 207253 - RNA, 18 nt, Human metapneumovirus
ugcaauaaacagugacac

SEQ ID NO: 207254 - RNA, 14 nt, Human metapneumovirus
ugaugggaaaaccc

SEQ ID NO: 207255 - RNA, 19 nt, Human metapneumovirus
ugaugauaaccaaagcaua

SEQ ID NO: 207256 - RNA, 15 nt, Human metapneumovirus
ugauaucacacagua

SEQ ID NO: 207257 - RNA, 15 nt, Human metapneumovirus
ugacaaacucacagu

SEQ ID NO: 207258 - RNA, 17 nt, Human metapneumovirus
ucagcuaaaaacccuga

SEQ ID NO: 207259 - RNA, 21 nt, Human metapneumovirus
ucagcuaaaaacccugacaau

SEQ ID NO: 207260 - RNA, 14 nt, Human metapneumovirus
ucagcccaaggugc

SEQ ID NO: 207261 - RNA, 12 nt, Human metapneumovirus
ucagaaccaaag

SEQ ID NO: 207262 - RNA, 15 nt, Human metapneumovirus
uaugcugcaucacaa

SEQ ID NO: 207263 - RNA, 18 nt, Human metapneumovirus
uaugcugcaucacaaaau

SEQ ID NO: 207264 - RNA, 16 nt, Human metapneumovirus
ucacaguaacaaucac

SEQ ID NO: 207265 - RNA, 22 nt, Human metapneumovirus
ucacaguaacaaucaccaucaa

SEQ ID NO: 207266 - RNA, 17 nt, Human metapneumovirus
ucacagucugugaagua

SEQ ID NO: 207267 - RNA, 23 nt, Human metapneumovirus
uccauccaagucuguuaguucaa

SEQ ID NO: 207268 - RNA, 23 nt, Human metapneumovirus
uccagaaaucauuaagaaaacca

SEQ ID NO: 207269 - RNA, 20 nt, Human metapneumovirus
uccuuuagugagacuaaugc

SEQ ID NO: 207270 - RNA, 22 nt, Human metapneumovirus
uccucauaggaauaacuacauu

SEQ ID NO: 207271 - RNA, 22 nt, Human metapneumovirus
ucccaaaaaauuugaagucaau

SEQ ID NO: 207272 - RNA, 19 nt, Human metapneumovirus
uuaccugcaagccuaacaa

SEQ ID NO: 207273 - RNA, 18 nt, Human metapneumovirus
uuauaggagaaaaaguga

SEQ ID NO: 207274 - RNA, 13 nt, Human metapneumovirus
uuagaccugacca

SEQ ID NO: 207275 - RNA, 17 nt, Human metapneumovirus
uggccaagagcuacuaa

SEQ ID NO: 207276 - RNA, 20 nt, Human metapneumovirus
ugggacaaguaaaaauggag

SEQ ID NO: 207277 - RNA, 14 nt, Human metapneumovirus
ugggacaaaucaua

SEQ ID NO: 207278 - RNA, 19 nt, Human metapneumovirus
ugcagacaccaacaaugga

SEQ ID NO: 207279 - RNA, 20 nt, Human metapneumovirus
ugcugcaucacaaaaugguc

SEQ ID NO: 207280 - RNA, 17 nt, Human metapneumovirus
uggaauuaccuacuauc

SEQ ID NO: 207281 - RNA, 23 nt, Human metapneumovirus
uggaauuaccuacuaucaguaga

SEQ ID NO: 207282 - RNA, 17 nt, Human metapneumovirus
uggagaagccaaaagac

SEQ ID NO: 207283 - RNA, 19 nt, Human metapneumovirus
uggagaagccaaaagacaa

SEQ ID NO: 207284 - RNA, 21 nt, Human metapneumovirus
acuauucaauuuaaaaaguaa

SEQ ID NO: 207285 - RNA, 16 nt, Human metapneumovirus
aguuuauuaaaaauaa

SEQ ID NO: 207286 - RNA, 16 nt, Human metapneumovirus
aguuaauuaaaaacua

SEQ ID NO: 207287 - RNA, 15 nt, Human metapneumovirus
auauuuugaaaacaa

SEQ ID NO: 207288 - RNA, 19 nt, Homo sapiens
cuguuuuaaaugaaccaaa

SEQ ID NO: 207289 - RNA, 21 nt, Homo sapiens
caaaauauauuuuguuuacaa

SEQ ID NO: 207290 - RNA, 16 nt, Homo sapiens
ugugaagcaaacucua

SEQ ID NO: 207291 - RNA, 13 nt, Homo sapiens
agaaaaauuuccc

SEQ ID NO: 207292 - RNA, 15 nt, Homo sapiens
ccaaaaauuacuuug

SEQ ID NO: 207293 - RNA, 14 nt, Homo sapiens
uaacguggcacugg

SEQ ID NO: 207294 - RNA, 16 nt, Homo sapiens
uaaaacacaucaucaa

SEQ ID NO: 207295 - RNA, 18 nt, Homo sapiens
aaccaaaucauacuuucu

SEQ ID NO: 207296 - RNA, 14 nt, Homo sapiens
auuuagcaaccuag

SEQ ID NO: 207297 - RNA, 12 nt, Homo sapiens
ucuggauuucau

SEQ ID NO: 207298 - RNA, 22 nt, Homo sapiens
cauacuuucucuucaaauuuag

SEQ ID NO: 207299 - RNA, 14 nt, Homo sapiens
cuuaaccuaccugg

SEQ ID NO: 207300 - RNA, 20 nt, Homo sapiens
auuuauucuuggugaagaug

SEQ ID NO: 207301 - RNA, 23 nt, Homo sapiens
augccuuucucucuuucucuuaa

SEQ ID NO: 207302 - RNA, 14 nt, Homo sapiens
ugcacuaacagagu

SEQ ID NO: 207303 - RNA, 16 nt, Homo sapiens
uauaaaacacaucauc

SEQ ID NO: 207304 - RNA, 20 nt, Homo sapiens
ggagggugguucaacaaaga

SEQ ID NO: 207305 - RNA, 20 nt, Homo sapiens
uucaaauuuagcaaccuaga

SEQ ID NO: 207306 - RNA, 15 nt, Homo sapiens
uucuuuucuuuacaa

SEQ ID NO: 207307 - RNA, 13 nt, Homo sapiens
cccaacccuggcu

SEQ ID NO: 207308 - RNA, 21 nt, Homo sapiens
uuuuaauaacuuaucuauaaa

SEQ ID NO: 207309 - RNA, 22 nt, Homo sapiens
cguuguuuugguuguacuuugg

SEQ ID NO: 207310 - RNA, 16 nt, Homo sapiens
ugucuuaaccuaccug

SEQ ID NO: 207311 - RNA, 15 nt, Homo sapiens
uuauuacucuauaca

SEQ ID NO: 207312 - RNA, 13 nt, Homo sapiens
cugcagcaaacac

SEQ ID NO: 207313 - RNA, 15 nt, Homo sapiens
uugcuauagagccua

SEQ ID NO: 207314 - RNA, 20 nt, Homo sapiens
cccuugaggaaaaaugucca

SEQ ID NO: 207315 - RNA, 14 nt, Homo sapiens
ccaagguauuuuua

SEQ ID NO: 207316 - RNA, 16 nt, Homo sapiens
augauagucaucauca

SEQ ID NO: 207317 - RNA, 18 nt, Homo sapiens
ugaugauagucaucauca

SEQ ID NO: 207318 - RNA, 17 nt, Homo sapiens
cuuucucaucuugauga

SEQ ID NO: 207319 - RNA, 17 nt, Homo sapiens
accaaaucauacuuucu

SEQ ID NO: 207320 - RNA, 15 nt, Homo sapiens
agaauuauaacugua

SEQ ID NO: 207321 - RNA, 13 nt, Homo sapiens
augauagucauca

SEQ ID NO: 207322 - RNA, 14 nt, Homo sapiens
guaaaauuauuuca

SEQ ID NO: 207323 - RNA, 20 nt, Homo sapiens
cauauuucuuuucuaucuca

SEQ ID NO: 207324 - RNA, 17 nt, Homo sapiens
ugcugcaaauacuguau

SEQ ID NO: 207325 - RNA, 14 nt, Homo sapiens
agaaauagaauuau

SEQ ID NO: 207326 - RNA, 16 nt, Homo sapiens
uuagucugucacucca

SEQ ID NO: 207327 - RNA, 16 nt, Homo sapiens
ugcagcaaacacucca

SEQ ID NO: 207328 - RNA, 21 nt, Homo sapiens
caaccuagaaacacacauuuc

SEQ ID NO: 207329 - RNA, 21 nt, Homo sapiens
caaauacuguauauucaggac

SEQ ID NO: 207330 - RNA, 17 nt, Homo sapiens
ccuuucacuaaaacaca

SEQ ID NO: 207331 - RNA, 12 nt, Homo sapiens
aacagacuugaa

SEQ ID NO: 207332 - RNA, 21 nt, Homo sapiens
cuccauuuggaaaauguucac

SEQ ID NO: 207333 - RNA, 16 nt, Homo sapiens
ccucuccaguuugcac

SEQ ID NO: 207334 - RNA, 19 nt, Homo sapiens
ccugauuccuuuaaaugaa

SEQ ID NO: 207335 - RNA, 15 nt, Homo sapiens
cagaaauuaaaugaa

SEQ ID NO: 207336 - RNA, 21 nt, Homo sapiens
gauucuauaaaacacaucauc

SEQ ID NO: 207337 - RNA, 21 nt, Homo sapiens
guccccacccuccacucagcu

SEQ ID NO: 207338 - RNA, 14 nt, Homo sapiens
uugcacagccaaau

SEQ ID NO: 207339 - RNA, 20 nt, Homo sapiens
aucaacgccucacugaaaca

SEQ ID NO: 207340 - RNA, 16 nt, Homo sapiens
gaccuguuuuaaauga

SEQ ID NO: 207341 - RNA, 18 nt, Homo sapiens
gcucuccggcugcaucua

SEQ ID NO: 207342 - RNA, 18 nt, Homo sapiens
ugaaccaaaccaaaucau

SEQ ID NO: 207343 - RNA, 17 nt, Homo sapiens
aagccauugagcucucc

SEQ ID NO: 207344 - RNA, 21 nt, Homo sapiens
acuccauuuggaaaauguuca

SEQ ID NO: 207345 - RNA, 20 nt, Homo sapiens
gaaagaauagaacacaguuu

SEQ ID NO: 207346 - RNA, 22 nt, Homo sapiens
ugcauaauguuucuggauuuca

SEQ ID NO: 207347 - RNA, 12 nt, Homo sapiens
caagacaccaaa

SEQ ID NO: 207348 - RNA, 13 nt, Homo sapiens
aacagacuugaau

SEQ ID NO: 207349 - RNA, 12 nt, Homo sapiens
cuucacaguacc

SEQ ID NO: 207350 - RNA, 17 nt, Homo sapiens
acugguagguugggaca

SEQ ID NO: 207351 - RNA, 20 nt, Homo sapiens
cagauguucugguaaacuga

SEQ ID NO: 207352 - RNA, 21 nt, Homo sapiens
cuaggccucuccaguuugcac

SEQ ID NO: 207353 - RNA, 18 nt, Homo sapiens
guacucuguccaguuccu

SEQ ID NO: 207354 - RNA, 14 nt, Homo sapiens
aagaugaaucacuu

SEQ ID NO: 207355 - RNA, 17 nt, Homo sapiens
cucaugaugcuacccga

SEQ ID NO: 207356 - RNA, 13 nt, Homo sapiens
ucuugaugaugau

SEQ ID NO: 207357 - RNA, 14 nt, Homo sapiens
auuucauacuguaa

SEQ ID NO: 207358 - RNA, 18 nt, Homo sapiens
agaaaauggguuuauuca

SEQ ID NO: 207359 - RNA, 14 nt, Homo sapiens
auaagcccacauau

SEQ ID NO: 207360 - RNA, 21 nt, Homo sapiens
agcucucaugaugcuacccga

SEQ ID NO: 207361 - RNA, 22 nt, Homo sapiens
ccugauuccuuuaaaugaauau

SEQ ID NO: 207362 - RNA, 19 nt, Homo sapiens
acugcugcaaauacuguau

SEQ ID NO: 207363 - RNA, 21 nt, Homo sapiens
ugcagcaaacacuccacccuc

SEQ ID NO: 207364 - RNA, 14 nt, Homo sapiens
caaaccaaaucaua

SEQ ID NO: 207365 - RNA, 12 nt, Homo sapiens
agucaucaucaa

SEQ ID NO: 207366 - RNA, 22 nt, Homo sapiens
aaugaauaugaaacacuacaaa

SEQ ID NO: 207367 - RNA, 19 nt, Homo sapiens
acuugaaugcuaguuauac

SEQ ID NO: 207368 - RNA, 23 nt, Homo sapiens
caaaauaagaugaaucacuuaau

SEQ ID NO: 207369 - RNA, 13 nt, Homo sapiens
cuuuuucuuugaa

SEQ ID NO: 207370 - RNA, 17 nt, Homo sapiens
acucaccugcacuaaca

SEQ ID NO: 207371 - RNA, 20 nt, Homo sapiens
gagugacuacacacaguacg

SEQ ID NO: 207372 - RNA, 20 nt, Homo sapiens
ucaagaaacagccagcaaga

SEQ ID NO: 207373 - RNA, 18 nt, Homo sapiens
ccugcagauguucuggua

SEQ ID NO: 207374 - RNA, 16 nt, Homo sapiens
aacaacagauucucuu

SEQ ID NO: 207375 - RNA, 17 nt, Homo sapiens
cgaaccuacaguuuuaa

SEQ ID NO: 207376 - RNA, 19 nt, Homo sapiens
accugaagcugucaccucu

SEQ ID NO: 207377 - RNA, 20 nt, Homo sapiens
cuccagauaguguagcugag

SEQ ID NO: 207378 - RNA, 20 nt, Homo sapiens
gaagaagccauugagcucuc

SEQ ID NO: 207379 - RNA, 16 nt, Homo sapiens
gaaaucuuaaaccuua

SEQ ID NO: 207380 - RNA, 14 nt, Homo sapiens
ucuuaaccuaccug

SEQ ID NO: 207381 - RNA, 15 nt, Homo sapiens
ugauagucaucauca

SEQ ID NO: 207382 - RNA, 20 nt, Homo sapiens
acauccuccagauaguguag

SEQ ID NO: 207383 - RNA, 13 nt, Homo sapiens
cacagcauuguau

SEQ ID NO: 207384 - RNA, 18 nt, Homo sapiens
uggucuguuugcauuuga

SEQ ID NO: 207385 - RNA, 15 nt, Homo sapiens
cccuccaccuuccau

SEQ ID NO: 207386 - RNA, 18 nt, Homo sapiens
gaaccaaaccaaaucaua

SEQ ID NO: 207387 - RNA, 23 nt, Homo sapiens
uagaaacacacauuucuuugaau

SEQ ID NO: 207388 - RNA, 12 nt, Homo sapiens
uauaacuguaaa

SEQ ID NO: 207389 - RNA, 13 nt, Homo sapiens
cugggcuguaacg

SEQ ID NO: 207390 - RNA, 16 nt, Homo sapiens
cuuagagcucucauga

SEQ ID NO: 207391 - RNA, 22 nt, Homo sapiens
gaccuaaauuauuuacugcaaa

SEQ ID NO: 207392 - RNA, 17 nt, Homo sapiens
cuauaaaacacaucauc

SEQ ID NO: 207393 - RNA, 17 nt, Homo sapiens
gucugucacuccauuua

SEQ ID NO: 207394 - RNA, 21 nt, Homo sapiens
auacuuuuucuuugaauuuag

SEQ ID NO: 207395 - RNA, 18 nt, Homo sapiens
gaaacacacauuucuuug

SEQ ID NO: 207396 - RNA, 22 nt, Homo sapiens
cuuccauuuucccccacuacug

SEQ ID NO: 207397 - RNA, 17 nt, Homo sapiens
cuuuuucuuugaauuua

SEQ ID NO: 207398 - RNA, 22 nt, Homo sapiens
uugaauuuaggugauaccuaaa

SEQ ID NO: 207399 - RNA, 15 nt, Homo sapiens
caguuugcaccuguc

SEQ ID NO: 207400 - RNA, 21 nt, Homo sapiens
ucuuugaauuuaggugauacc

SEQ ID NO: 207401 - RNA, 14 nt, Homo sapiens
aagaugaaucauuu

SEQ ID NO: 207402 - RNA, 22 nt, Homo sapiens
augcaauuagucugucacucca

SEQ ID NO: 207403 - RNA, 17 nt, Homo sapiens
gccucuccaguuugcac

SEQ ID NO: 207404 - RNA, 15 nt, Homo sapiens
auaagcccacauaua

SEQ ID NO: 207405 - RNA, 19 nt, Homo sapiens
aagaucaacgccucacuga

SEQ ID NO: 207406 - RNA, 22 nt, Homo sapiens
uucccuugaggaaaaaugucca

SEQ ID NO: 207407 - RNA, 14 nt, Homo sapiens
ugauugcuggcaac

SEQ ID NO: 207408 - RNA, 14 nt, Homo sapiens
cacauuucuuugaa

SEQ ID NO: 207409 - RNA, 14 nt, Homo sapiens
uaaauguacuuuuc

SEQ ID NO: 207410 - RNA, 18 nt, Homo sapiens
acagguuauaacaguguu

SEQ ID NO: 207411 - RNA, 21 nt, Homo sapiens
agccuggcugcccaucaugug

SEQ ID NO: 207412 - RNA, 15 nt, Homo sapiens
cuuugacaguguuuu

SEQ ID NO: 207413 - RNA, 17 nt, Homo sapiens
cuaaauuugaaauauaa

SEQ ID NO: 207414 - RNA, 17 nt, Homo sapiens
cuacugcagcaccucca

SEQ ID NO: 207415 - RNA, 20 nt, Homo sapiens
guacuaacuagcauuguaaa

SEQ ID NO: 207416 - RNA, 18 nt, Homo sapiens
uacccgagguuugcaaau

SEQ ID NO: 207417 - RNA, 14 nt, Homo sapiens
gaggcaucuggaaa

SEQ ID NO: 207418 - RNA, 12 nt, Homo sapiens
aaauguccaaaa

SEQ ID NO: 207419 - RNA, 11 nt, Homo sapiens
uauaacagugu

SEQ ID NO: 207420 - RNA, 18 nt, Homo sapiens
ggccucuccaguuugcac

SEQ ID NO: 207421 - RNA, 22 nt, Homo sapiens
cauacuuuuucuuugaauuuag

SEQ ID NO: 207422 - RNA, 18 nt, Homo sapiens
ugaugaucgucaucauca

SEQ ID NO: 207423 - RNA, 16 nt, Homo sapiens
aaaucauacuuucucu

SEQ ID NO: 207424 - RNA, 15 nt, Homo sapiens
cuaacuagcauugua

SEQ ID NO: 207425 - RNA, 17 nt, Homo sapiens
cuaacuagcauuguaaa

SEQ ID NO: 207426 - RNA, 21 nt, Homo sapiens
ggccaaagagucuccaguuua

SEQ ID NO: 207427 - RNA, 12 nt, Homo sapiens
aauuuuucuucc

SEQ ID NO: 207428 - RNA, 17 nt, Homo sapiens
aaugaaccaaaccaaau

SEQ ID NO: 207429 - RNA, 19 nt, Homo sapiens
cuacccgagguuugcaaau

SEQ ID NO: 207430 - RNA, 20 nt, Homo sapiens
augaugaucgucaucaucaa

SEQ ID NO: 207431 - RNA, 15 nt, Homo sapiens
uugaaagaaauggug

SEQ ID NO: 207432 - RNA, 23 nt, Homo sapiens
guuucuggauuucauacuguaac

SEQ ID NO: 207433 - RNA, 20 nt, Homo sapiens
agucacuggucuguuugcau

SEQ ID NO: 207434 - RNA, 13 nt, Homo sapiens
agaaaauguucac

SEQ ID NO: 207435 - RNA, 16 nt, Homo sapiens
gggcuuagagcucuca

SEQ ID NO: 207436 - RNA, 11 nt, Homo sapiens
uuucuuugaau

SEQ ID NO: 207437 - RNA, 17 nt, Homo sapiens
acaguuuuaacugugga

SEQ ID NO: 207438 - RNA, 12 nt, Homo sapiens
uggaaaauguuc

SEQ ID NO: 207439 - RNA, 16 nt, Homo sapiens
gaaauauaauucuguu

SEQ ID NO: 207440 - RNA, 19 nt, Homo sapiens
guuuccuagcugugugaau

SEQ ID NO: 207441 - RNA, 20 nt, Homo sapiens
uugaauuuagcaaccuagaa

SEQ ID NO: 207442 - RNA, 21 nt, Homo sapiens
ucuuaaacuaaaugugcaaua

SEQ ID NO: 207443 - RNA, 14 nt, Homo sapiens
agaugaaucauuua

SEQ ID NO: 207444 - RNA, 17 nt, Homo sapiens
cagcagaaauuaaauga

SEQ ID NO: 207445 - RNA, 19 nt, Homo sapiens
aauccuucuuauguuucua

SEQ ID NO: 207446 - RNA, 18 nt, Homo sapiens
ugaauuuagcaaccuaga

SEQ ID NO: 207447 - RNA, 16 nt, Homo sapiens
ccaaaaauuacuuugg

SEQ ID NO: 207448 - RNA, 23 nt, Homo sapiens
acuccacccuccaccuuccauuu

SEQ ID NO: 207449 - RNA, 18 nt, Homo sapiens
gcgcucauucuauuuuau

SEQ ID NO: 207450 - RNA, 23 nt, Homo sapiens
gcaucuggaaauuuuuacuuuaa

SEQ ID NO: 207451 - RNA, 21 nt, Homo sapiens
aacacacaggugcaacagacu

SEQ ID NO: 207452 - RNA, 23 nt, Homo sapiens
cccacauauaaauguacuuuucc

SEQ ID NO: 207453 - RNA, 16 nt, Homo sapiens
uccuucuuauguuucu

SEQ ID NO: 207454 - RNA, 15 nt, Homo sapiens
uugguuguacuuugg

SEQ ID NO: 207455 - RNA, 23 nt, Homo sapiens
uguuucuaaauuuugugauucua

SEQ ID NO: 207456 - RNA, 15 nt, Homo sapiens
acaaagaaacaaaga

SEQ ID NO: 207457 - RNA, 17 nt, Homo sapiens
acuaaaacacacaggug

SEQ ID NO: 207458 - RNA, 14 nt, Homo sapiens
cuuugacaguguuu

SEQ ID NO: 207459 - RNA, 23 nt, Homo sapiens
auaaauguacuuuuucuuccaga

SEQ ID NO: 207460 - RNA, 18 nt, Homo sapiens
ucuuugaauuuaggugau

SEQ ID NO: 207461 - RNA, 16 nt, Homo sapiens
ucuuccugauuccuuu

SEQ ID NO: 207462 - RNA, 21 nt, Homo sapiens
cuccauuuagaaaauguucac

SEQ ID NO: 207463 - RNA, 12 nt, Homo sapiens
gaaucacuuaau

SEQ ID NO: 207464 - RNA, 17 nt, Homo sapiens
ccuucuuauguuucuaa

SEQ ID NO: 207465 - RNA, 15 nt, Homo sapiens
uuucuguacaacuac

SEQ ID NO: 207466 - RNA, 22 nt, Homo sapiens
ucuuaauaagcccacauauaaa

SEQ ID NO: 207467 - RNA, 17 nt, Homo sapiens
ccacauauaaauguacu

SEQ ID NO: 207468 - RNA, 17 nt, Homo sapiens
caagacaccaaauugaa

SEQ ID NO: 207469 - RNA, 14 nt, Homo sapiens
ucaucaagaauuua

SEQ ID NO: 207470 - RNA, 16 nt, Homo sapiens
acuaacaggccaaaga

SEQ ID NO: 207471 - RNA, 14 nt, Homo sapiens
ccaaauugaacuca

SEQ ID NO: 207472 - RNA, 14 nt, Homo sapiens
aauuaccuguggau

SEQ ID NO: 207473 - RNA, 18 nt, Homo sapiens
ccugcagcaaacacucca

SEQ ID NO: 207474 - RNA, 12 nt, Homo sapiens
uaauaacuuauc

SEQ ID NO: 207475 - RNA, 23 nt, Homo sapiens
gugccucagucaauaaauuugca

SEQ ID NO: 207476 - RNA, 15 nt, Homo sapiens
cagaaaaauucuccu

SEQ ID NO: 207477 - RNA, 22 nt, Homo sapiens
cuccaguuuacccuucagguug

SEQ ID NO: 207478 - RNA, 14 nt, Homo sapiens
ugaccuaaauuauu

SEQ ID NO: 207479 - RNA, 16 nt, Homo sapiens
aaaguguucauuguuu

SEQ ID NO: 207480 - RNA, 20 nt, Homo sapiens
agaccuguguuacuaaaaaa

SEQ ID NO: 207481 - RNA, 15 nt, Homo sapiens
aaggagcugauacuu

SEQ ID NO: 207482 - RNA, 17 nt, Homo sapiens
uggcuguguuugcagcc

SEQ ID NO: 207483 - RNA, 17 nt, Homo sapiens
ugaugaucgucaucauc

SEQ ID NO: 207484 - RNA, 14 nt, Homo sapiens
uacuuugacagugu

SEQ ID NO: 207485 - RNA, 21 nt, Homo sapiens
aaacagguuauaacaguguuu

SEQ ID NO: 207486 - RNA, 15 nt, Homo sapiens
gcuguuguuccauug

SEQ ID NO: 207487 - RNA, 14 nt, Homo sapiens
aacagagacugaau

SEQ ID NO: 207488 - RNA, 22 nt, Homo sapiens
aaaugacaaccugaauuaucua

SEQ ID NO: 207489 - RNA, 18 nt, Homo sapiens
ugauacuuugacaguguu

SEQ ID NO: 207490 - RNA, 11 nt, Homo sapiens
aucacuuugac

SEQ ID NO: 207491 - RNA, 12 nt, Homo sapiens
ggaaaaaugucc

SEQ ID NO: 207492 - RNA, 19 nt, Homo sapiens
ugcuauagagccuaccugu

SEQ ID NO: 207493 - RNA, 20 nt, Homo sapiens
uacugaaucugcuaccaaaa

SEQ ID NO: 207494 - RNA, 16 nt, Homo sapiens
cagugcuguaaacuua

SEQ ID NO: 207495 - RNA, 17 nt, Homo sapiens
cuugaugaugaucguca

SEQ ID NO: 207496 - RNA, 13 nt, Homo sapiens
uuauugacuaaca

SEQ ID NO: 207497 - RNA, 16 nt, Homo sapiens
uacugcagcaccucca

SEQ ID NO: 207498 - RNA, 15 nt, Homo sapiens
uacuugcuucucuag

SEQ ID NO: 207499 - RNA, 23 nt, Homo sapiens
ugggcuguaacguggcacuggua

SEQ ID NO: 207500 - RNA, 16 nt, Homo sapiens
uacuuuuucuuugaau

SEQ ID NO: 207501 - RNA, 13 nt, Homo sapiens
agagcucucauga

SEQ ID NO: 207502 - RNA, 17 nt, Homo sapiens
cccaaaaauuacuuugg

SEQ ID NO: 207503 - RNA, 22 nt, Homo sapiens
acuguauauucaggacuugaaa

SEQ ID NO: 207504 - RNA, 22 nt, Homo sapiens
uccacucagcuguccugcagca

SEQ ID NO: 207505 - RNA, 20 nt, Homo sapiens
ccuugaggaaaaauguccaa

SEQ ID NO: 207506 - RNA, 16 nt, Homo sapiens
ugggcuuagagcucuc

SEQ ID NO: 207507 - RNA, 23 nt, Homo sapiens
ggcuaauuuaacaagaacuuuaa

SEQ ID NO: 207508 - RNA, 16 nt, Homo sapiens
cacauauaaauguacu

SEQ ID NO: 207509 - RNA, 14 nt, Homo sapiens
caauaaauuugcaa

SEQ ID NO: 207510 - RNA, 11 nt, Homo sapiens
gauacuuugac

SEQ ID NO: 207511 - RNA, 16 nt, Homo sapiens
cucuuucucuuaauaa

SEQ ID NO: 207512 - RNA, 13 nt, Homo sapiens
ucuauaaaacaca

SEQ ID NO: 207513 - RNA, 22 nt, Homo sapiens
ugcucacgucaaaugcauacaa

SEQ ID NO: 207514 - RNA, 21 nt, Homo sapiens
gcauaauguuucuggauuuca

SEQ ID NO: 207515 - RNA, 21 nt, Homo sapiens
cagugcuguaaacuuaacugu

SEQ ID NO: 207516 - RNA, 16 nt, Homo sapiens
acccgagguuugcaaa

SEQ ID NO: 207517 - RNA, 22 nt, Homo sapiens
acugcagugcuguaaacuuaac

SEQ ID NO: 207518 - RNA, 17 nt, Homo sapiens
gcuacccgagguuugca

SEQ ID NO: 207519 - RNA, 15 nt, Homo sapiens
cugcaaauacuguau

SEQ ID NO: 207520 - RNA, 17 nt, Homo sapiens
uuuguauaaaaguguga

SEQ ID NO: 207521 - RNA, 14 nt, Homo sapiens
caaaucauacuuuc

SEQ ID NO: 207522 - RNA, 23 nt, Homo sapiens
cuggcuuggggucaagaaacagc

SEQ ID NO: 207523 - RNA, 15 nt, Homo sapiens
uuugcaaauucauga

SEQ ID NO: 207524 - RNA, 15 nt, Homo sapiens
uucuauaaaacacau

SEQ ID NO: 207525 - RNA, 20 nt, Homo sapiens
cagccugcucuagugggaca

SEQ ID NO: 207526 - RNA, 18 nt, Homo sapiens
auuuaggugauaccuaaa

SEQ ID NO: 207527 - RNA, 18 nt, Homo sapiens
auaaaacacaucaucaau

SEQ ID NO: 207528 - RNA, 18 nt, Homo sapiens
aacagguuauaacagugu

SEQ ID NO: 207529 - RNA, 13 nt, Homo sapiens
gaaaaaauggaug

SEQ ID NO: 207530 - RNA, 14 nt, Homo sapiens
uugaauuuagguga

SEQ ID NO: 207531 - RNA, 21 nt, Homo sapiens
caaaucauacuuuuucuuuga

SEQ ID NO: 207532 - RNA, 21 nt, Homo sapiens
ucuaaauuuugugauucuaua

SEQ ID NO: 207533 - RNA, 22 nt, Homo sapiens
accucuccuucaugacagccuc

SEQ ID NO: 207534 - RNA, 20 nt, Homo sapiens
acgcuuguagaacucacucu

SEQ ID NO: 207535 - RNA, 16 nt, Homo sapiens
auacuuucucuucaaa

SEQ ID NO: 207536 - RNA, 20 nt, Homo sapiens
uuggggcuaauuuaacaaga

SEQ ID NO: 207537 - RNA, 17 nt, Homo sapiens
auaguguagcugaggag

SEQ ID NO: 207538 - RNA, 22 nt, Homo sapiens
aauuuagcaaccuagaaacaca

SEQ ID NO: 207539 - RNA, 17 nt, Homo sapiens
aguacgaaccuacaguu

SEQ ID NO: 207540 - RNA, 23 nt, Homo sapiens
cucagucaauaaauuugcaaauu

SEQ ID NO: 207541 - RNA, 18 nt, Homo sapiens
gucaagaaacagccagca

SEQ ID NO: 207542 - RNA, 18 nt, Homo sapiens
aaacaggugcuaauuugu

SEQ ID NO: 207543 - RNA, 20 nt, Homo sapiens
ucagucaauaaauuugcaaa

SEQ ID NO: 207544 - RNA, 21 nt, Homo sapiens
ugauucuauaaaacacaucau

SEQ ID NO: 207545 - RNA, 13 nt, Homo sapiens
agccgacucuggc

SEQ ID NO: 207546 - RNA, 14 nt, Homo sapiens
ucuauaaaacacau

SEQ ID NO: 207547 - RNA, 17 nt, Homo sapiens
augggcuuagagcucuc

SEQ ID NO: 207548 - RNA, 21 nt, Homo sapiens
caaacugcuuuuuccaacuca

SEQ ID NO: 207549 - RNA, 18 nt, Homo sapiens
auccuucuuauguuucua

SEQ ID NO: 207550 - RNA, 18 nt, Homo sapiens
acauggcuguguuugcag

SEQ ID NO: 207551 - RNA, 17 nt, Homo sapiens
ucaauaaacaacagcug

SEQ ID NO: 207552 - RNA, 17 nt, Homo sapiens
agguacgaugacagugu

SEQ ID NO: 207553 - RNA, 18 nt, Homo sapiens
ugggguaguuguguuuca

SEQ ID NO: 207554 - RNA, 20 nt, Homo sapiens
ucuggauuucauacuguaac

SEQ ID NO: 207555 - RNA, 16 nt, Homo sapiens
acucaccugcacuaac

SEQ ID NO: 207556 - RNA, 22 nt, Homo sapiens
cucacugcugcaaauacuguau

SEQ ID NO: 207557 - RNA, 21 nt, Homo sapiens
caugaugcuacccgagguuug

SEQ ID NO: 207558 - RNA, 20 nt, Homo sapiens
gaggaaugcuggacuggagg

SEQ ID NO: 207559 - RNA, 23 nt, Homo sapiens
auuuugugauucuauaaaacaca

SEQ ID NO: 207560 - RNA, 15 nt, Homo sapiens
uucaacagagacuga

SEQ ID NO: 207561 - RNA, 20 nt, Homo sapiens
guccugcagcaaacacucca

SEQ ID NO: 207562 - RNA, 12 nt, Homo sapiens
uauaacaguguu

SEQ ID NO: 207563 - RNA, 19 nt, Homo sapiens
cauuguuucguaacacagc

SEQ ID NO: 207564 - RNA, 20 nt, Homo sapiens
uuucauacuguaacauucag

SEQ ID NO: 207565 - RNA, 23 nt, Homo sapiens
ugucuucuaaauuugaaauauaa

SEQ ID NO: 207566 - RNA, 19 nt, Homo sapiens
aggccucuccaguuugcac

SEQ ID NO: 207567 - RNA, 14 nt, Homo sapiens
cgaugacaguguuc

SEQ ID NO: 207568 - RNA, 16 nt, Homo sapiens
gaauuuuucuuccuga

SEQ ID NO: 207569 - RNA, 18 nt, Homo sapiens
ugcuucucuagcucucua

SEQ ID NO: 207570 - RNA, 18 nt, Homo sapiens
ucuccaguuugcaccugu

SEQ ID NO: 207571 - RNA, 17 nt, Homo sapiens
aucacuuaauaccguau

SEQ ID NO: 207572 - RNA, 22 nt, Homo sapiens
uaaaacaaauaaauuagucucu

SEQ ID NO: 207573 - RNA, 21 nt, Homo sapiens
aaauuucuguaaaacagguua

SEQ ID NO: 207574 - RNA, 14 nt, Homo sapiens
acaaaccauuuugu

SEQ ID NO: 207575 - RNA, 15 nt, Homo sapiens
gguagguugggacac

SEQ ID NO: 207576 - RNA, 16 nt, Homo sapiens
accaaaucauacuuuu

SEQ ID NO: 207577 - RNA, 14 nt, Homo sapiens
cacaacccaaaagg

SEQ ID NO: 207578 - RNA, 17 nt, Homo sapiens
uccuguguguacucugu

SEQ ID NO: 207579 - RNA, 17 nt, Homo sapiens
gauauuuuuuacuuuag

SEQ ID NO: 207580 - RNA, 13 nt, Homo sapiens
acguggcacuggu

SEQ ID NO: 207581 - RNA, 17 nt, Homo sapiens
auaccugaagcugucac

SEQ ID NO: 207582 - RNA, 20 nt, Homo sapiens
accuagaaacacacauuucu

SEQ ID NO: 207583 - RNA, 16 nt, Homo sapiens
ugaucgucaucaucaa

SEQ ID NO: 207584 - RNA, 16 nt, Homo sapiens
aaaauguucaccuaga

SEQ ID NO: 207585 - RNA, 19 nt, Homo sapiens
cuaaauuuugugauucuau

SEQ ID NO: 207586 - RNA, 21 nt, Homo sapiens
gugcuaauuuguuuuggauau

SEQ ID NO: 207587 - RNA, 20 nt, Homo sapiens
caauuagucugucacuccau

SEQ ID NO: 207588 - RNA, 17 nt, Homo sapiens
ggcucauauuucuuuuc

SEQ ID NO: 207589 - RNA, 20 nt, Homo sapiens
cucuuaauaagcccacauau

SEQ ID NO: 207590 - RNA, 19 nt, Homo sapiens
caggugcaacagacuugaa

SEQ ID NO: 207591 - RNA, 17 nt, Homo sapiens
ugauacuuugacagugu

SEQ ID NO: 207592 - RNA, 12 nt, Homo sapiens
cuagcauuguaa

SEQ ID NO: 207593 - RNA, 22 nt, Homo sapiens
auucuauuuuauaaaacaaaua

SEQ ID NO: 207594 - RNA, 17 nt, Homo sapiens
auaccgugucuucuaaa

SEQ ID NO: 207595 - RNA, 18 nt, Homo sapiens
augucuuaaccuaccugg

SEQ ID NO: 207596 - RNA, 15 nt, Homo sapiens
ucccuuucacuaaaa

SEQ ID NO: 207597 - RNA, 17 nt, Homo sapiens
guuuuaacuguggauau

SEQ ID NO: 207598 - RNA, 21 nt, Homo sapiens
cacauauaaauguacuuuucc

SEQ ID NO: 207599 - RNA, 12 nt, Homo sapiens
aauagauaugaa

SEQ ID NO: 207600 - RNA, 19 nt, Homo sapiens
gaggccccuggagccagau

SEQ ID NO: 207601 - RNA, 18 nt, Homo sapiens
cauucaacagagacugaa

SEQ ID NO: 207602 - RNA, 20 nt, Homo sapiens
caaaccaaaucauacuuucu

SEQ ID NO: 207603 - RNA, 13 nt, Homo sapiens
uuauaacaguguu

SEQ ID NO: 207604 - RNA, 12 nt, Homo sapiens
ccgauaccaugc

SEQ ID NO: 207605 - RNA, 17 nt, Homo sapiens
cuacaguuuuaacugug

SEQ ID NO: 207606 - RNA, 15 nt, Homo sapiens
guagugccacuguug

SEQ ID NO: 207607 - RNA, 15 nt, Homo sapiens
aaauggguuuauuca

SEQ ID NO: 207608 - RNA, 20 nt, Homo sapiens
acacauuucuuugaauuuag

SEQ ID NO: 207609 - RNA, 23 nt, Homo sapiens
cuagaaacacacauuucuuugaa

SEQ ID NO: 207610 - RNA, 13 nt, Homo sapiens
cuuugacaguguu

SEQ ID NO: 207611 - RNA, 16 nt, Homo sapiens
aacucacucugggcug

SEQ ID NO: 207612 - RNA, 22 nt, Homo sapiens
ccguaucuucuaaauuugaaau

SEQ ID NO: 207613 - RNA, 18 nt, Homo sapiens
uagaauuauaacuguaaa

SEQ ID NO: 207614 - RNA, 23 nt, Homo sapiens
uugggagggugguucaacaaaga

SEQ ID NO: 207615 - RNA, 23 nt, Homo sapiens
cuguaaacuuaacuguucuuugc

SEQ ID NO: 207616 - RNA, 22 nt, Homo sapiens
auuuagaaaauguucaccuaga

SEQ ID NO: 207617 - RNA, 23 nt, Homo sapiens
gcaccgaugggcuuagagcucuc

SEQ ID NO: 207618 - RNA, 15 nt, Homo sapiens
cucacugaaacaugg

SEQ ID NO: 207619 - RNA, 21 nt, Homo sapiens
uauucccaaaaauuacuuugg

SEQ ID NO: 207620 - RNA, 20 nt, Homo sapiens
cuuugaccuaaauuauuuac

SEQ ID NO: 207621 - RNA, 18 nt, Homo sapiens
aauuaccaugcuucacaa

SEQ ID NO: 207622 - RNA, 14 nt, Homo sapiens
aaacacaucaucaa

SEQ ID NO: 207623 - RNA, 21 nt, Homo sapiens
aaccugaauuaucuauuucau

SEQ ID NO: 207624 - RNA, 13 nt, Homo sapiens
augaucgucauca

SEQ ID NO: 207625 - RNA, 13 nt, Homo sapiens
aaaugucaucuca

SEQ ID NO: 207626 - RNA, 18 nt, Homo sapiens
acaguacccaaacugcuu

SEQ ID NO: 207627 - RNA, 13 nt, Homo sapiens
gcuguguuugcag

SEQ ID NO: 207628 - RNA, 23 nt, Homo sapiens
cuaaauuauuuacugcaaaaaga

SEQ ID NO: 207629 - RNA, 23 nt, Homo sapiens
agcuguccugcagcaaacacucc

SEQ ID NO: 207630 - RNA, 20 nt, Homo sapiens
cuucaugucuuaaccuaccu

SEQ ID NO: 207631 - RNA, 20 nt, Homo sapiens
uaaaauagcaugccuuucuc

SEQ ID NO: 207632 - RNA, 19 nt, Homo sapiens
auucuauaaaacacaucau

SEQ ID NO: 207633 - RNA, 13 nt, Homo sapiens
gagguuugcaaau

SEQ ID NO: 207634 - RNA, 15 nt, Homo sapiens
aacucacucugggcu

SEQ ID NO: 207635 - RNA, 19 nt, Homo sapiens
acugaaucugcuaccaaaa

SEQ ID NO: 207636 - RNA, 20 nt, Homo sapiens
ucuuaauaagcccacauaua

SEQ ID NO: 207637 - RNA, 16 nt, Homo sapiens
aguaaccagaauccaa

SEQ ID NO: 207638 - RNA, 11 nt, Homo sapiens
aauuaccaugc

SEQ ID NO: 207639 - RNA, 20 nt, Homo sapiens
auugacuaacaggccaaaga

SEQ ID NO: 207640 - RNA, 20 nt, Homo sapiens
aaccaaaccaaaucauacuu

SEQ ID NO: 207641 - RNA, 14 nt, Homo sapiens
agcugauacuuuga

SEQ ID NO: 207642 - RNA, 21 nt, Homo sapiens
cuuuauaaauguaccagagag

SEQ ID NO: 207643 - RNA, 15 nt, Homo sapiens
gcccagagccuggcu

SEQ ID NO: 207644 - RNA, 16 nt, Homo sapiens
uuuacuuuaaaaagua

SEQ ID NO: 207645 - RNA, 19 nt, Homo sapiens
acccuccacucagcugucc

SEQ ID NO: 207646 - RNA, 15 nt, Homo sapiens
uguaaaauuauuuca

SEQ ID NO: 207647 - RNA, 13 nt, Homo sapiens
uaaaauuauuuca

SEQ ID NO: 207648 - RNA, 15 nt, Homo sapiens
uacgaugacaguguu

SEQ ID NO: 207649 - RNA, 22 nt, Homo sapiens
aaaccauuuuguuauugacuaa

SEQ ID NO: 207650 - RNA, 22 nt, Homo sapiens
cucuagguacgaugacaguguu

SEQ ID NO: 207651 - RNA, 20 nt, Homo sapiens
cuccaccccacaacccaaaa

SEQ ID NO: 207652 - RNA, 22 nt, Homo sapiens
uggagaaaauggguuuauucac

SEQ ID NO: 207653 - RNA, 13 nt, Homo sapiens
cuauaaaacacau

SEQ ID NO: 207654 - RNA, 14 nt, Homo sapiens
ccugcagauguucu

SEQ ID NO: 207655 - RNA, 16 nt, Homo sapiens
caucacguuagcuguc

SEQ ID NO: 207656 - RNA, 23 nt, Homo sapiens
cucuaggccucuccaguuugcac

SEQ ID NO: 207657 - RNA, 14 nt, Homo sapiens
aaaaugucaucuca

SEQ ID NO: 207658 - RNA, 11 nt, Homo sapiens
ccaguuugcac

SEQ ID NO: 207659 - RNA, 22 nt, Homo sapiens
auuuucccccacuacugcagca

SEQ ID NO: 207660 - RNA, 13 nt, Homo sapiens
agugcgguuuacu

SEQ ID NO: 207661 - RNA, 19 nt, Homo sapiens
acuuuaaaaaguaaccaga

SEQ ID NO: 207662 - RNA, 21 nt, Homo sapiens
uuugaauuuagcaaccuagaa

SEQ ID NO: 207663 - RNA, 20 nt, Homo sapiens
cuuaaaccuuaagauacuaa

SEQ ID NO: 207664 - RNA, 17 nt, Homo sapiens
cagccugcucuaguggg

SEQ ID NO: 207665 - RNA, 20 nt, Homo sapiens
auggauuuuucuuuaacugc

SEQ ID NO: 207666 - RNA, 17 nt, Homo sapiens
auuuaggugauaccuaa

SEQ ID NO: 207667 - RNA, 14 nt, Homo sapiens
uauaauucuguuuc

SEQ ID NO: 207668 - RNA, 19 nt, Homo sapiens
cuugcuucucuagcucucu

SEQ ID NO: 207669 - RNA, 14 nt, Homo sapiens
uucuuugaauuuag

SEQ ID NO: 207670 - RNA, 22 nt, Homo sapiens
gccuuucucucuuucucuuaau

SEQ ID NO: 207671 - RNA, 22 nt, Homo sapiens
cucauauuucuuuucuaucuca

SEQ ID NO: 207672 - RNA, 18 nt, Homo sapiens
ucaucaucaagaauuuaa

SEQ ID NO: 207673 - RNA, 14 nt, Homo sapiens
ggauuuuucuuuaa

SEQ ID NO: 207674 - RNA, 17 nt, Homo sapiens
augcauacaaguuucau

SEQ ID NO: 207675 - RNA, 20 nt, Homo sapiens
uuugaauuuagcaaccuaga

SEQ ID NO: 207676 - RNA, 13 nt, Homo sapiens
gcuucacaguacc

SEQ ID NO: 207677 - RNA, 16 nt, Homo sapiens
agaagccauugagcuc

SEQ ID NO: 207678 - RNA, 13 nt, Homo sapiens
cgaugacaguguu

SEQ ID NO: 207679 - RNA, 19 nt, Homo sapiens
auuuuguuauugacuaaca

SEQ ID NO: 207680 - RNA, 13 nt, Homo sapiens
gaaauauaauucu

SEQ ID NO: 207681 - RNA, 22 nt, Homo sapiens
aagaagagcgagagaucaaaga

SEQ ID NO: 207682 - RNA, 22 nt, Homo sapiens
aagaugaaucacuuaauaccgu

SEQ ID NO: 207683 - RNA, 11 nt, Homo sapiens
gacaccaaauu

SEQ ID NO: 207684 - RNA, 13 nt, Homo sapiens
cuuuucuuucuca

SEQ ID NO: 207685 - RNA, 23 nt, Homo sapiens
gucuucuaaauuugaaauauaau

SEQ ID NO: 207686 - RNA, 15 nt, Homo sapiens
uuggagaaaaugggu

SEQ ID NO: 207687 - RNA, 18 nt, Homo sapiens
cagcagaaauuaaaugaa

SEQ ID NO: 207688 - RNA, 16 nt, Homo sapiens
acuaaaaaaaagauga

SEQ ID NO: 207689 - RNA, 17 nt, Homo sapiens
gguuauaacaguguuua

SEQ ID NO: 207690 - RNA, 15 nt, Homo sapiens
uaauuguguggauuc

SEQ ID NO: 207691 - RNA, 16 nt, Homo sapiens
ucucuuucucuuaaua

SEQ ID NO: 207692 - RNA, 15 nt, Homo sapiens
cuaacaggccaaaga

SEQ ID NO: 207693 - RNA, 22 nt, Homo sapiens
ucauauuucuuuucuuucucau

SEQ ID NO: 207694 - RNA, 22 nt, Homo sapiens
cuguccugcagcaaacacucca

SEQ ID NO: 207695 - RNA, 13 nt, Homo sapiens
aaaauguccaaaa

SEQ ID NO: 207696 - RNA, 14 nt, Homo sapiens
aauuuuuacuuuaa

SEQ ID NO: 207697 - RNA, 19 nt, Homo sapiens
auauuucuuuucuuucuca

SEQ ID NO: 207698 - RNA, 14 nt, Homo sapiens
aauuuauucuuggu

SEQ ID NO: 207699 - RNA, 13 nt, Homo sapiens
uguguguacucug

SEQ ID NO: 207700 - RNA, 18 nt, Homo sapiens
cucagcuguccugcagca

SEQ ID NO: 207701 - RNA, 19 nt, Homo sapiens
uucccccacuacugcagca

SEQ ID NO: 207702 - RNA, 20 nt, Homo sapiens
uaaauccuucuuauguuucu

SEQ ID NO: 207703 - RNA, 19 nt, Homo sapiens
ugauacauuuuuguacuaa

SEQ ID NO: 207704 - RNA, 22 nt, Homo sapiens
uaaccuugaaaaaaaacagugg

SEQ ID NO: 207705 - RNA, 22 nt, Homo sapiens
guuuauuucaggcauuggauau

SEQ ID NO: 207706 - RNA, 20 nt, Homo sapiens
accaaauugaacucacugcu

SEQ ID NO: 207707 - RNA, 21 nt, Homo sapiens
uucaaauuuagcaaccuagaa

SEQ ID NO: 207708 - RNA, 16 nt, Homo sapiens
ccuaauguguuuagau

SEQ ID NO: 207709 - RNA, 23 nt, Homo sapiens
uaaacugauugcuggcaacaaca

SEQ ID NO: 207710 - RNA, 22 nt, Homo sapiens
aagaugaaucauuuaauaccgu

SEQ ID NO: 207711 - RNA, 24 nt, Homo sapiens
ugauucuauaaaacacaucaucaa

SEQ ID NO: 207712 - RNA, 14 nt, Homo sapiens
cuacacacaguacg

SEQ ID NO: 207713 - RNA, 15 nt, Homo sapiens
agaacucacucuggg

SEQ ID NO: 207714 - RNA, 21 nt, Homo sapiens
cagacuugaaugcuaguuaua

SEQ ID NO: 207715 - RNA, 17 nt, Homo sapiens
ugaugauagucaucauc

SEQ ID NO: 207716 - RNA, 16 nt, Homo sapiens
auauucaggacuugaa

SEQ ID NO: 207717 - RNA, 14 nt, Homo sapiens
cugcuaccaaaaca

SEQ ID NO: 207718 - RNA, 15 nt, Homo sapiens
uaagcccacauauaa

SEQ ID NO: 207719 - RNA, 16 nt, Homo sapiens
uccaguuugcaccugu

SEQ ID NO: 207720 - RNA, 14 nt, Homo sapiens
ucauauuucuuuuc

SEQ ID NO: 207721 - RNA, 14 nt, Homo sapiens
aacguggcacuggu

SEQ ID NO: 207722 - RNA, 12 nt, Homo sapiens
ugauacuuugac

SEQ ID NO: 207723 - RNA, 19 nt, Homo sapiens
aaacacacauuucuuugaa

SEQ ID NO: 207724 - RNA, 16 nt, Homo sapiens
aauaccguaucuucua

SEQ ID NO: 207725 - RNA, 22 nt, Homo sapiens
ccgugucuucuaaauuugaaau

SEQ ID NO: 207726 - RNA, 13 nt, Homo sapiens
uauaacaguguuu

SEQ ID NO: 207727 - RNA, 19 nt, Homo sapiens
ucucuucaaauuuagcaac

SEQ ID NO: 207728 - RNA, 17 nt, Homo sapiens
aaauauaauucuguuuc

SEQ ID NO: 207729 - RNA, 17 nt, Homo sapiens
uagaaacacacauuucu

SEQ ID NO: 207730 - RNA, 17 nt, Homo sapiens
accuguccccacccucc

SEQ ID NO: 207731 - RNA, 23 nt, Homo sapiens
uccaagauaagaugaaucauuua

SEQ ID NO: 207732 - RNA, 23 nt, Homo sapiens
cccauccauuaggccagcaacgc

SEQ ID NO: 207733 - RNA, 21 nt, Homo sapiens
uaucucaucuugaugaugaua

SEQ ID NO: 207734 - RNA, 12 nt, Homo sapiens
aaagcuucacag

SEQ ID NO: 207735 - RNA, 20 nt, Homo sapiens
uugaaauauaauucuguuuc

SEQ ID NO: 207736 - RNA, 15 nt, Homo sapiens
uaaaacacaucauca

SEQ ID NO: 207737 - RNA, 15 nt, Homo sapiens
aauaaauuugcaaau

SEQ ID NO: 207738 - RNA, 19 nt, Homo sapiens
gaugggcuuagagcucuca

SEQ ID NO: 207739 - RNA, 17 nt, Homo sapiens
auuagucugucacucca

SEQ ID NO: 207740 - RNA, 13 nt, Homo sapiens
augaaucacuuaa

SEQ ID NO: 207741 - RNA, 21 nt, Homo sapiens
accgaugggcuuagagcucuc

SEQ ID NO: 207742 - RNA, 12 nt, Homo sapiens
aaacacuccacc

SEQ ID NO: 207743 - RNA, 15 nt, Homo sapiens
auauuuuguuuacaa

SEQ ID NO: 207744 - RNA, 23 nt, Homo sapiens
aggagcugauacuuugacagugu

SEQ ID NO: 207745 - RNA, 22 nt, Homo sapiens
uggauuuaaaagccugcucaau

SEQ ID NO: 207746 - RNA, 15 nt, Homo sapiens
acuuacaucaugugu

SEQ ID NO: 207747 - RNA, 18 nt, Homo sapiens
uggauuuuucuuuaacug

SEQ ID NO: 207748 - RNA, 19 nt, Homo sapiens
auauuucuuuucuaucuca

SEQ ID NO: 207749 - RNA, 19 nt, Homo sapiens
uggcaacaacagauucucu

SEQ ID NO: 207750 - RNA, 21 nt, Homo sapiens
acuccauuuagaaaauguuca

SEQ ID NO: 207751 - RNA, 12 nt, Homo sapiens
agauguuuauuu

SEQ ID NO: 207752 - RNA, 20 nt, Homo sapiens
ccuguuuuaaaugaaccaaa

SEQ ID NO: 207753 - RNA, 19 nt, Homo sapiens
augaugauagucaucauca

SEQ ID NO: 207754 - RNA, 22 nt, Homo sapiens
uguuucuaaauuuugugauucu

SEQ ID NO: 207755 - RNA, 16 nt, Homo sapiens
auggcuguguuugcag

SEQ ID NO: 207756 - RNA, 20 nt, Homo sapiens
caaaucauacuuuuucuuug

SEQ ID NO: 207757 - RNA, 14 nt, Homo sapiens
uguacaacuaccuc

SEQ ID NO: 207758 - RNA, 17 nt, Homo sapiens
uuguaaaauuauuucau

SEQ ID NO: 207759 - RNA, 21 nt, Homo sapiens
gcucucaugaugcuacccgag

SEQ ID NO: 207760 - RNA, 19 nt, Homo sapiens
guuauacuuauuuguauau

SEQ ID NO: 207761 - RNA, 18 nt, Homo sapiens
gguguucugguaaacuga

SEQ ID NO: 207762 - RNA, 17 nt, Homo sapiens
uuccugauuccuuuaaa

SEQ ID NO: 207763 - RNA, 20 nt, Homo sapiens
aguguuccccgauaccaugc

SEQ ID NO: 207764 - RNA, 16 nt, Homo sapiens
cuguaaaacagguuau

SEQ ID NO: 207765 - RNA, 14 nt, Homo sapiens
gucuuaaccuaccu

SEQ ID NO: 207766 - RNA, 20 nt, Homo sapiens
caaaugcauacaaguuucau

SEQ ID NO: 207767 - RNA, 21 nt, Homo sapiens
acccuccacucagcuguccug

SEQ ID NO: 207768 - RNA, 13 nt, Homo sapiens
auuucauacugua

SEQ ID NO: 207769 - RNA, 21 nt, Homo sapiens
cuaucucaucuugaugaugau

SEQ ID NO: 207770 - RNA, 14 nt, Homo sapiens
gucaucacuuugac

SEQ ID NO: 207771 - RNA, 12 nt, Homo sapiens
cucuagcucucu

SEQ ID NO: 207772 - RNA, 13 nt, Homo sapiens
uucuuugaauuua

SEQ ID NO: 207773 - RNA, 14 nt, Homo sapiens
gcuguccugcagca

SEQ ID NO: 207774 - RNA, 19 nt, Homo sapiens
cuauuuuauaaaacaaaua

SEQ ID NO: 207775 - RNA, 18 nt, Homo sapiens
aaaucauacuuucucuuc

SEQ ID NO: 207776 - RNA, 20 nt, Homo sapiens
aggggccuuagggcacuggg

SEQ ID NO: 207777 - RNA, 15 nt, Homo sapiens
gcaacaacagauucu

SEQ ID NO: 207778 - RNA, 23 nt, Homo sapiens
aaauguacuuuuucuuccagaaa

SEQ ID NO: 207779 - RNA, 14 nt, Homo sapiens
accaugcuucacaa

SEQ ID NO: 207780 - RNA, 12 nt, Homo sapiens
uuccuagcugug

SEQ ID NO: 207781 - RNA, 14 nt, Homo sapiens
auuauaacuguaaa

SEQ ID NO: 207782 - RNA, 19 nt, Homo sapiens
caaaccaaaucauacuuuu

SEQ ID NO: 207783 - RNA, 17 nt, Homo sapiens
gaggucaucacuuugac

SEQ ID NO: 207784 - RNA, 23 nt, Homo sapiens
aaccuacaguuuuaacuguggau

SEQ ID NO: 207785 - RNA, 21 nt, Homo sapiens
accauuuuguuauugacuaac

SEQ ID NO: 207786 - RNA, 12 nt, Homo sapiens
uaauuaccaugc

SEQ ID NO: 207787 - RNA, 18 nt, Homo sapiens
gaucaacgccucacugaa

SEQ ID NO: 207788 - RNA, 18 nt, Homo sapiens
cagaaauuaaaugaauuu

SEQ ID NO: 207789 - RNA, 21 nt, Homo sapiens
cuauaaaacacaucaucaaua

SEQ ID NO: 207790 - RNA, 23 nt, Homo sapiens
uaaaaauggcaggggguggaauu

SEQ ID NO: 207791 - RNA, 14 nt, Homo sapiens
cucuagugggacag

SEQ ID NO: 207792 - RNA, 20 nt, Homo sapiens
agccugcucuagugggacag

SEQ ID NO: 207793 - RNA, 17 nt, Homo sapiens
cuagaaacacacauuuc

SEQ ID NO: 207794 - RNA, 18 nt, Homo sapiens
ucuauaaaacacaucauc

SEQ ID NO: 207795 - RNA, 16 nt, Homo sapiens
agcugucccacaucac

SEQ ID NO: 207796 - RNA, 21 nt, Homo sapiens
ucacugcugcaaauacuguau

SEQ ID NO: 207797 - RNA, 12 nt, Homo sapiens
uaaccuaccugg

SEQ ID NO: 207798 - RNA, 15 nt, Homo sapiens
acaacagauucucuu

SEQ ID NO: 207799 - RNA, 13 nt, Homo sapiens
aagacuacugaau

SEQ ID NO: 207800 - RNA, 21 nt, Homo sapiens
cuguaaagauguuuauuucag

SEQ ID NO: 207801 - RNA, 18 nt, Homo sapiens
caacgccucacugaaaca

SEQ ID NO: 207802 - RNA, 17 nt, Homo sapiens
uugcuggcaacaacaga

SEQ ID NO: 207803 - RNA, 17 nt, Homo sapiens
acucagcuguccugcag

SEQ ID NO: 207804 - RNA, 18 nt, Homo sapiens
gcaacagcaaacaggugc

SEQ ID NO: 207805 - RNA, 17 nt, Homo sapiens
aaaccaaaucauacuuu

SEQ ID NO: 207806 - RNA, 18 nt, Homo sapiens
cugauacuuugacagugu

SEQ ID NO: 207807 - RNA, 16 nt, Homo sapiens
cugaaucugcuaccaa

SEQ ID NO: 207808 - RNA, 18 nt, Homo sapiens
gucaauaaacaacagcug

SEQ ID NO: 207809 - RNA, 22 nt, Homo sapiens
uauaaaacacaucaucaauaaa

SEQ ID NO: 207810 - RNA, 17 nt, Homo sapiens
cagauucucuuggcuca

SEQ ID NO: 207811 - RNA, 22 nt, Homo sapiens
ucacugcugcaaauacuguaua

SEQ ID NO: 207812 - RNA, 22 nt, Homo sapiens
aaccuugaaaaaaaacagugga

SEQ ID NO: 207813 - RNA, 19 nt, Homo sapiens
uguauauucaggacuugaa

SEQ ID NO: 207814 - RNA, 21 nt, Homo sapiens
cucuuaauaagcccacauaua

SEQ ID NO: 207815 - RNA, 14 nt, Homo sapiens
ccaaaacaguuaau

SEQ ID NO: 207816 - RNA, 15 nt, Homo sapiens
aacguggcacuggua

SEQ ID NO: 207817 - RNA, 22 nt, Homo sapiens
ucauauuucuuuucuaucucau

SEQ ID NO: 207818 - RNA, 19 nt, Homo sapiens
cucaaucccugaggacuga

SEQ ID NO: 207819 - RNA, 12 nt, Homo sapiens
gacugauuucag

SEQ ID NO: 207820 - RNA, 22 nt, Homo sapiens
guagaacucacucugggcugua

SEQ ID NO: 207821 - RNA, 16 nt, Homo sapiens
acaaaauauauuuugu

SEQ ID NO: 207822 - RNA, 15 nt, Homo sapiens
ugucuuaaccuaccu

SEQ ID NO: 207823 - RNA, 22 nt, Homo sapiens
auagucaucaucaagaauuuaa

SEQ ID NO: 207824 - RNA, 22 nt, Homo sapiens
cucacucugggcuguaacgugg

SEQ ID NO: 207825 - RNA, 18 nt, Homo sapiens
aagcugucaccucuugau

SEQ ID NO: 207826 - RNA, 13 nt, Homo sapiens
ccuagaaacacac

SEQ ID NO: 207827 - RNA, 15 nt, Homo sapiens
ccuucuuauguuucu

SEQ ID NO: 207828 - RNA, 21 nt, Homo sapiens
uuaaaauagcaugccuuucuc

SEQ ID NO: 207829 - RNA, 14 nt, Homo sapiens
cuauaaaacacauc

SEQ ID NO: 207830 - RNA, 13 nt, Homo sapiens
aacacaucaucaa

SEQ ID NO: 207831 - RNA, 21 nt, Homo sapiens
cuaagcgcucauucuauuuua

SEQ ID NO: 207832 - RNA, 22 nt, Homo sapiens
guuuaaagucucaguuucuugc

SEQ ID NO: 207833 - RNA, 16 nt, Homo sapiens
acagacuugaaugcua

SEQ ID NO: 207834 - RNA, 23 nt, Homo sapiens
uguugcuauagagccuaccugua

SEQ ID NO: 207835 - RNA, 23 nt, Homo sapiens
uacaaaccauuuuguuauugacu

SEQ ID NO: 207836 - RNA, 14 nt, Homo sapiens
aacaagaacuuuaa

SEQ ID NO: 207837 - RNA, 20 nt, Homo sapiens
ucuaaauuuugugauucuau

SEQ ID NO: 207838 - RNA, 22 nt, Homo sapiens
cacuuaauaccguaucuucuaa

SEQ ID NO: 207839 - RNA, 20 nt, Homo sapiens
uugcaccuguccccacccuc

SEQ ID NO: 207840 - RNA, 21 nt, Homo sapiens
uuuagaccuguguuacuaaaa

SEQ ID NO: 207841 - RNA, 14 nt, Homo sapiens
ucuguuugugaccu

SEQ ID NO: 207842 - RNA, 17 nt, Homo sapiens
uuagaccuguguuacua

SEQ ID NO: 207843 - RNA, 14 nt, Homo sapiens
ggucaucacuuuga

SEQ ID NO: 207844 - RNA, 13 nt, Homo sapiens
cauugagcucucc

SEQ ID NO: 207845 - RNA, 18 nt, Homo sapiens
agagcucucaugaugcua

SEQ ID NO: 207846 - RNA, 23 nt, Homo sapiens
guccaaaauaagaugaaucacuu

SEQ ID NO: 207847 - RNA, 21 nt, Homo sapiens
guuucguaacacagcauugua

SEQ ID NO: 207848 - RNA, 15 nt, Homo sapiens
auagaacacaguuug

SEQ ID NO: 207849 - RNA, 17 nt, Homo sapiens
gccuuucucucuuucuc

SEQ ID NO: 207850 - RNA, 19 nt, Homo sapiens
ugacaaccugaauuaucua

SEQ ID NO: 207851 - RNA, 19 nt, Homo sapiens
gcucauauuucuuuucuau

SEQ ID NO: 207852 - RNA, 20 nt, Homo sapiens
ccaguuugcaccugucccca

SEQ ID NO: 207853 - RNA, 18 nt, Homo sapiens
ccauuuggaaaauguuca

SEQ ID NO: 207854 - RNA, 23 nt, Homo sapiens
auacuuucucuucaaauuuagca

SEQ ID NO: 207855 - RNA, 21 nt, Homo sapiens
auguacuuuuucuuccagaaa

SEQ ID NO: 207856 - RNA, 19 nt, Homo sapiens
cugauacuuugacaguguu

SEQ ID NO: 207857 - RNA, 15 nt, Homo sapiens
uuuagcuucccuuaa

SEQ ID NO: 207858 - RNA, 18 nt, Homo sapiens
cuugaaaaaaaacagugg

SEQ ID NO: 207859 - RNA, 14 nt, Homo sapiens
aaugcuggacugga

SEQ ID NO: 207860 - RNA, 16 nt, Homo sapiens
ugaaacauggcugugu

SEQ ID NO: 207861 - RNA, 15 nt, Homo sapiens
cacauauaaauguac

SEQ ID NO: 207862 - RNA, 12 nt, Homo sapiens
uuuauucuuggu

SEQ ID NO: 207863 - RNA, 17 nt, Homo sapiens
cuggauuucauacugua

SEQ ID NO: 207864 - RNA, 19 nt, Homo sapiens
aaauagcaugccuuucucu

SEQ ID NO: 207865 - RNA, 17 nt, Homo sapiens
uauaguauaagcagugu

SEQ ID NO: 207866 - RNA, 10 nt, Homo sapiens
ucacaaagug

SEQ ID NO: 207867 - RNA, 14 nt, Homo sapiens
acagcaaacaggug

SEQ ID NO: 207868 - RNA, 16 nt, Homo sapiens
acuugcuucucuagcu

SEQ ID NO: 207869 - RNA, 21 nt, Homo sapiens
uuucuuugaauuuaggugaua

SEQ ID NO: 207870 - RNA, 15 nt, Homo sapiens
uguccaagauaagau

SEQ ID NO: 207871 - RNA, 19 nt, Homo sapiens
ucauacuuuuucuuugaau

SEQ ID NO: 207872 - RNA, 20 nt, Homo sapiens
uggauucuuuaaacgcucua

SEQ ID NO: 207873 - RNA, 21 nt, Homo sapiens
ugugauucuauaaaacacauc

SEQ ID NO: 207874 - RNA, 11 nt, Homo sapiens
ccuucaugucu

SEQ ID NO: 207875 - RNA, 15 nt, Homo sapiens
guacgaugacagugu

SEQ ID NO: 207876 - RNA, 22 nt, Homo sapiens
uaaaacagguuauaacaguguu

SEQ ID NO: 207877 - RNA, 17 nt, Homo sapiens
agaaauuaccuguggau

SEQ ID NO: 207878 - RNA, 12 nt, Homo sapiens
aauccuucaugu

SEQ ID NO: 207879 - RNA, 17 nt, Homo sapiens
uggauuucauacuguaa

SEQ ID NO: 207880 - RNA, 14 nt, Homo sapiens
uaaaacacaucauc

SEQ ID NO: 207881 - RNA, 16 nt, Homo sapiens
auuucuuugaauuuag

SEQ ID NO: 207882 - RNA, 15 nt, Homo sapiens
cgagguuugcaaauc

SEQ ID NO: 207883 - RNA, 17 nt, Homo sapiens
auaccguaucuucuaaa

SEQ ID NO: 207884 - RNA, 22 nt, Homo sapiens
guaaacuuaacuguucuuugcc

SEQ ID NO: 207885 - RNA, 12 nt, Homo sapiens
ucauacuguaac

SEQ ID NO: 207886 - RNA, 13 nt, Homo sapiens
aaccuacaguuuu

SEQ ID NO: 207887 - RNA, 15 nt, Homo sapiens
uuuaaaugaaccaaa

SEQ ID NO: 207888 - RNA, 23 nt, Homo sapiens
ccaaaucauacuuuuucuuugaa

SEQ ID NO: 207889 - RNA, 19 nt, Homo sapiens
auuauaaaugacaaccuga

SEQ ID NO: 207890 - RNA, 20 nt, Homo sapiens
ucuuuucuaucucaucuuga

SEQ ID NO: 207891 - RNA, 20 nt, Homo sapiens
gguuucuguacaacuaccuc

SEQ ID NO: 207892 - RNA, 22 nt, Homo sapiens
ucaucaagaauuuaaugauuaa

SEQ ID NO: 207893 - RNA, 15 nt, Homo sapiens
uccugauuccuuuaa

SEQ ID NO: 207894 - RNA, 23 nt, Homo sapiens
cuagcauuguaaaauuauuucau

SEQ ID NO: 207895 - RNA, 19 nt, Homo sapiens
aagaauuuuugaagugacu

SEQ ID NO: 207896 - RNA, 19 nt, Homo sapiens
cuacacucaccugcacuaa

SEQ ID NO: 207897 - RNA, 14 nt, Homo sapiens
cuguacaacuaccu

SEQ ID NO: 207898 - RNA, 16 nt, Homo sapiens
auaauucuguuucuga

SEQ ID NO: 207899 - RNA, 18 nt, Homo sapiens
aaauagcaugccuuucuc

SEQ ID NO: 207900 - RNA, 15 nt, Homo sapiens
agagucuccaguuua

SEQ ID NO: 207901 - RNA, 13 nt, Homo sapiens
cuuagagcucuca

SEQ ID NO: 207902 - RNA, 23 nt, Homo sapiens
acucauagcgggggccuaaaaaa

SEQ ID NO: 207903 - RNA, 18 nt, Homo sapiens
ccaguauaagacuacuga

SEQ ID NO: 207904 - RNA, 16 nt, Homo sapiens
cauuucuuugaauuua

SEQ ID NO: 207905 - RNA, 16 nt, Homo sapiens
caccugcagauguucu

SEQ ID NO: 207906 - RNA, 14 nt, Homo sapiens
agggcacugggcug

SEQ ID NO: 207907 - RNA, 22 nt, Homo sapiens
acacauuucuuugaauuuaggu

SEQ ID NO: 207908 - RNA, 17 nt, Homo sapiens
caaacacuccacccucc

SEQ ID NO: 207909 - RNA, 21 nt, Homo sapiens
uagaaacacacauuucuuuga

SEQ ID NO: 207910 - RNA, 19 nt, Homo sapiens
auugcuggcaacaacagau

SEQ ID NO: 207911 - RNA, 24 nt, Homo sapiens
ugauuagaaauuaccuguggauau

SEQ ID NO: 207912 - RNA, 14 nt, Homo sapiens
gcaacagacuugaa

SEQ ID NO: 207913 - RNA, 19 nt, Homo sapiens
auacuguaacauucaggaa

SEQ ID NO: 207914 - RNA, 13 nt, Homo sapiens
augaaucauuuaa

SEQ ID NO: 207915 - RNA, 16 nt, Homo sapiens
uuuauaaaaguguuca

SEQ ID NO: 207916 - RNA, 22 nt, Homo sapiens
uucauucucccuuucacuaaaa

SEQ ID NO: 207917 - RNA, 14 nt, Homo sapiens
ugcaaauacuguau

SEQ ID NO: 207918 - RNA, 18 nt, Homo sapiens
agaccuguguuacuaaaa

SEQ ID NO: 207919 - RNA, 13 nt, Homo sapiens
aauagaacacagu

SEQ ID NO: 207920 - RNA, 18 nt, Homo sapiens
ccauuuagaaaauguuca

SEQ ID NO: 207921 - RNA, 19 nt, Homo sapiens
uagaaaauguucaccuaga

SEQ ID NO: 207922 - RNA, 14 nt, Homo sapiens
gaaacacacauuuc

SEQ ID NO: 207923 - RNA, 23 nt, Homo sapiens
caaacugcuuuuuccaacucaga

SEQ ID NO: 207924 - RNA, 21 nt, Homo sapiens
acgccucacugaaacauggcu

SEQ ID NO: 207925 - RNA, 23 nt, Homo sapiens
acucacugcugcaaauacuguau

SEQ ID NO: 207926 - RNA, 15 nt, Homo sapiens
ggucaagaaacagcc

SEQ ID NO: 207927 - RNA, 21 nt, Homo sapiens
ccuuaagaauuuuugaaguga

SEQ ID NO: 207928 - RNA, 20 nt, Homo sapiens
augccuuucucucuuucucu

SEQ ID NO: 207929 - RNA, 21 nt, Homo sapiens
acuugaaagaaauggugaaug

SEQ ID NO: 207930 - RNA, 17 nt, Homo sapiens
auaaaacacaucaucaa

SEQ ID NO: 207931 - RNA, 14 nt, Homo sapiens
cuaccaaaacaguu

SEQ ID NO: 207932 - RNA, 16 nt, Homo sapiens
ggauuucauacuguaa

SEQ ID NO: 207933 - RNA, 22 nt, Homo sapiens
acugaauagauaugaaagcuga

SEQ ID NO: 207934 - RNA, 16 nt, Homo sapiens
gauacuuugacagugu

SEQ ID NO: 207935 - RNA, 17 nt, Homo sapiens
cacucugggcuguaacg

SEQ ID NO: 207936 - RNA, 19 nt, Homo sapiens
agucaauaaauuugcaaau

SEQ ID NO: 207937 - RNA, 22 nt, Homo sapiens
aggccucuccaguuugcaccug

SEQ ID NO: 207938 - RNA, 21 nt, Homo sapiens
aaaucauacuuuuucuuugaa

SEQ ID NO: 207939 - RNA, 18 nt, Homo sapiens
gauguucugguaaacuga

SEQ ID NO: 207940 - RNA, 17 nt, Homo sapiens
ucaauaaauuugcaaau

SEQ ID NO: 207941 - RNA, 13 nt, Homo sapiens
uuuugugauucua

SEQ ID NO: 207942 - RNA, 13 nt, Homo sapiens
gucuguuugcauu

SEQ ID NO: 207943 - RNA, 23 nt, Homo sapiens
uuccauugaagccgacucuggcc

SEQ ID NO: 207944 - RNA, 16 nt, Homo sapiens
uugaauuuaggugaua

SEQ ID NO: 207945 - RNA, 16 nt, Homo sapiens
gagcugauacuuugac

SEQ ID NO: 207946 - RNA, 20 nt, Homo sapiens
acaggugcaacagacuugaa

SEQ ID NO: 207947 - RNA, 15 nt, Homo sapiens
uacauucaacagaga

SEQ ID NO: 207948 - RNA, 19 nt, Homo sapiens
uguaaagauguuuauuuca

SEQ ID NO: 207949 - RNA, 14 nt, Homo sapiens
aaaauucuccuuga

SEQ ID NO: 207950 - RNA, 15 nt, Homo sapiens
acccuccacucagcu

SEQ ID NO: 207951 - RNA, 16 nt, Homo sapiens
cagcuguccugcagca

SEQ ID NO: 207952 - RNA, 23 nt, Homo sapiens
auaaauguaccagagagaguugu

SEQ ID NO: 207953 - RNA, 12 nt, Homo sapiens
aauuuaacaaga

SEQ ID NO: 207954 - RNA, 20 nt, Homo sapiens
uaaauuuuuuauaaaagugu

SEQ ID NO: 207955 - RNA, 12 nt, Homo sapiens
acacacaguacg

SEQ ID NO: 207956 - RNA, 23 nt, Homo sapiens
uguuuauuucaggcauuggauau

SEQ ID NO: 207957 - RNA, 17 nt, Homo sapiens
aguauauugauaaccuu

SEQ ID NO: 207958 - RNA, 13 nt, Homo sapiens
gcaaauacuguau

SEQ ID NO: 207959 - RNA, 18 nt, Homo sapiens
caaacucuaaaauuauaa

SEQ ID NO: 207960 - RNA, 20 nt, Homo sapiens
acaagaacuuuaaauugugu

SEQ ID NO: 207961 - RNA, 11 nt, Homo sapiens
ccgacucuggc

SEQ ID NO: 207962 - RNA, 23 nt, Homo sapiens
ugaugcuacccgagguuugcaaa

SEQ ID NO: 207963 - RNA, 21 nt, Homo sapiens
caaaauaagaugaaucacuua

SEQ ID NO: 207964 - RNA, 14 nt, Homo sapiens
gaauuuuugaagug

SEQ ID NO: 207965 - RNA, 22 nt, Homo sapiens
caccucuugauuaucuaaacua

SEQ ID NO: 207966 - RNA, 21 nt, Homo sapiens
ucaauaaaauagugacauaaa

SEQ ID NO: 207967 - RNA, 16 nt, Homo sapiens
gguacgaugacagugu

SEQ ID NO: 207968 - RNA, 22 nt, Homo sapiens
cuaaauuuugugauucuauaaa

SEQ ID NO: 207969 - RNA, 11 nt, Homo sapiens
uuuacuuuaaa

SEQ ID NO: 207970 - RNA, 13 nt, Homo sapiens
gaugaaucacuua

SEQ ID NO: 207971 - RNA, 19 nt, Homo sapiens
ugaaugccuaugguggauc

SEQ ID NO: 207972 - RNA, 18 nt, Homo sapiens
cuggauuucauacuguaa

SEQ ID NO: 207973 - RNA, 21 nt, Homo sapiens
cucacugcugcaaauacugua

SEQ ID NO: 207974 - RNA, 16 nt, Homo sapiens
aauaagaugaaucacu

SEQ ID NO: 207975 - RNA, 20 nt, Homo sapiens
gcuacccgagguuugcaaau

SEQ ID NO: 207976 - RNA, 16 nt, Homo sapiens
ucaugaugcuacccga

SEQ ID NO: 207977 - RNA, 19 nt, Homo sapiens
aagauaagaugaaucauuu

SEQ ID NO: 207978 - RNA, 21 nt, Homo sapiens
agcauuguaaaauuauuucau

SEQ ID NO: 207979 - RNA, 18 nt, Homo sapiens
cauccuccagauagugua

SEQ ID NO: 207980 - RNA, 15 nt, Homo sapiens
cucagcuguccugca

SEQ ID NO: 207981 - RNA, 19 nt, Homo sapiens
ucaaauuuagcaaccuaga

SEQ ID NO: 207982 - RNA, 16 nt, Homo sapiens
acugcagcaccuccag

SEQ ID NO: 207983 - RNA, 21 nt, Homo sapiens
auccuucaugucuuaaccuac

SEQ ID NO: 207984 - RNA, 14 nt, Homo sapiens
uuaaaugaaccaaa

SEQ ID NO: 207985 - RNA, 22 nt, Homo sapiens
ccacauauaaauguacuuuucc

SEQ ID NO: 207986 - RNA, 23 nt, Homo sapiens
uuacucuauacauucaacagaga

SEQ ID NO: 207987 - RNA, 21 nt, Homo sapiens
aaacugugacugcagugcugu

SEQ ID NO: 207988 - RNA, 20 nt, Homo sapiens
ccagggaagaagaucaacgc

SEQ ID NO: 207989 - RNA, 22 nt, Homo sapiens
cucagucaauaaauuugcaaau

SEQ ID NO: 207990 - RNA, 17 nt, Homo sapiens
cauggcuguguuugcag

SEQ ID NO: 207991 - RNA, 18 nt, Homo sapiens
agauucucuuggcucaua

SEQ ID NO: 207992 - RNA, 24 nt, Homo sapiens
acuguucuuugccagaacacaaga

SEQ ID NO: 207993 - RNA, 18 nt, Homo sapiens
cacaauguuaaguuauau

SEQ ID NO: 207994 - RNA, 19 nt, Homo sapiens
gcaccuacacucaccugca

SEQ ID NO: 207995 - RNA, 22 nt, Homo sapiens
aagacaccaaauugaacucacu

SEQ ID NO: 207996 - RNA, 22 nt, Homo sapiens
ucaauaaacaacagcugaagca

SEQ ID NO: 207997 - RNA, 21 nt, Homo sapiens
gagcugauacuuugacagugu

SEQ ID NO: 207998 - RNA, 23 nt, Homo sapiens
ccaagauaagaugaaucauuuaa

SEQ ID NO: 207999 - RNA, 16 nt, Homo sapiens
aagccauugagcucuc

SEQ ID NO: 208000 - RNA, 15 nt, Homo sapiens
auuucauacuguaac

SEQ ID NO: 208001 - RNA, 14 nt, Homo sapiens
agaugauaccugaa

SEQ ID NO: 208002 - RNA, 17 nt, Homo sapiens
acccgagguuugcaaau

SEQ ID NO: 208003 - RNA, 17 nt, Homo sapiens
cagguuauaacaguguu

SEQ ID NO: 208004 - RNA, 14 nt, Homo sapiens
ucaaauuuagcaac

SEQ ID NO: 208005 - RNA, 23 nt, Homo sapiens
cucacugcugcaaauacuguaua

SEQ ID NO: 208006 - RNA, 16 nt, Homo sapiens
uucuguacaacuaccu

SEQ ID NO: 208007 - RNA, 18 nt, Homo sapiens
uuaaaccuuaagauacua

SEQ ID NO: 208008 - RNA, 14 nt, Homo sapiens
auaagacuacugaa

SEQ ID NO: 208009 - RNA, 13 nt, Homo sapiens
cacucagcugucc

SEQ ID NO: 208010 - RNA, 19 nt, Homo sapiens
cucagcuguccugcagcaa

SEQ ID NO: 208011 - RNA, 22 nt, Homo sapiens
caauuagucugucacuccauuu

SEQ ID NO: 208012 - RNA, 18 nt, Homo sapiens
uggauauuuuuuacuuua

SEQ ID NO: 208013 - RNA, 18 nt, Homo sapiens
uguuuuaaaugaaccaaa

SEQ ID NO: 208014 - RNA, 18 nt, Homo sapiens
uuaauaagcccacauaua

SEQ ID NO: 208015 - RNA, 18 nt, Homo sapiens
ccaaauugaacucacugc

SEQ ID NO: 208016 - RNA, 14 nt, Homo sapiens
ugcagcaccuccag

SEQ ID NO: 208017 - RNA, 13 nt, Homo sapiens
ucuuugaauuuag

SEQ ID NO: 208018 - RNA, 14 nt, Homo sapiens
aaauuaccugugga

SEQ ID NO: 208019 - RNA, 17 nt, Homo sapiens
ugaugaugauagucauc

SEQ ID NO: 208020 - RNA, 16 nt, Homo sapiens
uucuguaaaacagguu

SEQ ID NO: 208021 - RNA, 18 nt, Homo sapiens
uuucucuucaaauuuagc

SEQ ID NO: 208022 - RNA, 17 nt, Homo sapiens
gacugcagugcuguaaa

SEQ ID NO: 208023 - RNA, 21 nt, Homo sapiens
ccaaaucauacuuuuucuuug

SEQ ID NO: 208024 - RNA, 18 nt, Homo sapiens
auaaaaguguucauuguu

SEQ ID NO: 208025 - RNA, 17 nt, Homo sapiens
uccuagcugugugaaua

SEQ ID NO: 208026 - RNA, 17 nt, Homo sapiens
caauaaauuugcaaauu

SEQ ID NO: 208027 - RNA, 21 nt, Homo sapiens
caaaucauacuuucucuucaa

SEQ ID NO: 208028 - RNA, 14 nt, Homo sapiens
acgaugacaguguu

SEQ ID NO: 208029 - RNA, 19 nt, Homo sapiens
agccugcucuagugggaca

SEQ ID NO: 208030 - RNA, 12 nt, Homo sapiens
cauugagcucuc

SEQ ID NO: 208031 - RNA, 21 nt, Homo sapiens
ugguuucuguacaacuaccuc

SEQ ID NO: 208032 - RNA, 18 nt, Homo sapiens
uauaaaacacaucaucaa

SEQ ID NO: 208033 - RNA, 23 nt, Homo sapiens
gcuguguuugcagccugcucuag

SEQ ID NO: 208034 - RNA, 22 nt, Homo sapiens
ucaucaauaaaauagugacaua

SEQ ID NO: 208035 - RNA, 21 nt, Homo sapiens
gucuuaaacuaaaugugcaau

SEQ ID NO: 208036 - RNA, 22 nt, Homo sapiens
uggaagaagccauugagcucuc

SEQ ID NO: 208037 - RNA, 19 nt, Homo sapiens
cauugaagccgacucuggc

SEQ ID NO: 208038 - RNA, 22 nt, Homo sapiens
accgaugggcuuagagcucuca

SEQ ID NO: 208039 - RNA, 14 nt, Homo sapiens
uuucuaaauuuugu

SEQ ID NO: 208040 - RNA, 14 nt, Homo sapiens
acaguuuuaacugu

SEQ ID NO: 208041 - RNA, 21 nt, Homo sapiens
cuagaaacacacauuucuuug

SEQ ID NO: 208042 - RNA, 11 nt, Homo sapiens
auugagcucuc

SEQ ID NO: 208043 - RNA, 16 nt, Homo sapiens
ucucuaggccucucca

SEQ ID NO: 208044 - RNA, 16 nt, Homo sapiens
ucuguacaacuaccuc

SEQ ID NO: 208045 - RNA, 21 nt, Homo sapiens
cuuaauaagcccacauauaaa

SEQ ID NO: 208046 - RNA, 22 nt, Homo sapiens
cuugaggaaaaauguccaaaau

SEQ ID NO: 208047 - RNA, 18 nt, Homo sapiens
guuccccgauaccaugcu

SEQ ID NO: 208048 - RNA, 17 nt, Homo sapiens
uuccagaaaaauuuccc

SEQ ID NO: 208049 - RNA, 16 nt, Homo sapiens
agccauugagcucucc

SEQ ID NO: 208050 - RNA, 23 nt, Homo sapiens
uccugauuccuuuaaaugaauau

SEQ ID NO: 208051 - RNA, 21 nt, Homo sapiens
ucaauaaaauaaugacauaaa

SEQ ID NO: 208052 - RNA, 15 nt, Homo sapiens
uaucucaucuugaug

SEQ ID NO: 208053 - RNA, 15 nt, Homo sapiens
gucuuaaccuaccug

SEQ ID NO: 208054 - RNA, 23 nt, Homo sapiens
gcaaccuagaaacacacauuucu

SEQ ID NO: 208055 - RNA, 22 nt, Homo sapiens
cuguaugucaauaaacaacagc

SEQ ID NO: 208056 - RNA, 13 nt, Homo sapiens
cauuucuuugaau

SEQ ID NO: 208057 - RNA, 21 nt, Homo sapiens
caucaauaaaauagugacaua

SEQ ID NO: 208058 - RNA, 24 nt, Homo sapiens
ugugauucuauaaaacacaucauc

SEQ ID NO: 208059 - RNA, 14 nt, Homo sapiens
uugcuucucuagcu

SEQ ID NO: 208060 - RNA, 22 nt, Homo sapiens
uuccauugaagccgacucuggc

SEQ ID NO: 208061 - RNA, 22 nt, Homo sapiens
caaucccugaggacugauuuca

SEQ ID NO: 208062 - RNA, 22 nt, Homo sapiens
uguuuuaaaugaaccaaaccaa

SEQ ID NO: 208063 - RNA, 16 nt, Homo sapiens
gacagcuuccuuuccu

SEQ ID NO: 208064 - RNA, 20 nt, Homo sapiens
uugaaaaaaaacaguggauc

SEQ ID NO: 208065 - RNA, 15 nt, Homo sapiens
gaaauuuuuacuuua

SEQ ID NO: 208066 - RNA, 22 nt, Homo sapiens
cauuuagaaaauguucaccuag

SEQ ID NO: 208067 - RNA, 13 nt, Homo sapiens
guuuaaagucuca

SEQ ID NO: 208068 - RNA, 23 nt, Homo sapiens
auacuuuuucuuugaauuuagca

SEQ ID NO: 208069 - RNA, 11 nt, Homo sapiens
ugugauucuau

SEQ ID NO: 208070 - RNA, 21 nt, Homo sapiens
cauaauguuucuggauuucau

SEQ ID NO: 208071 - RNA, 21 nt, Homo sapiens
ugaaacauggcuguguuugca

SEQ ID NO: 208072 - RNA, 15 nt, Homo sapiens
gaauuaucuauuuca

SEQ ID NO: 208073 - RNA, 11 nt, Homo sapiens
gugucuucuaa

SEQ ID NO: 208074 - RNA, 23 nt, Homo sapiens
cugauugcuggcaacaacagauu

SEQ ID NO: 208075 - RNA, 20 nt, Homo sapiens
uccuguguguacucugucca

SEQ ID NO: 208076 - RNA, 16 nt, Homo sapiens
auaagaugaaucacuu

SEQ ID NO: 208077 - RNA, 17 nt, Homo sapiens
augucuuaaccuaccug

SEQ ID NO: 208078 - RNA, 17 nt, Homo sapiens
uauagagccuaccugua

SEQ ID NO: 208079 - RNA, 16 nt, Homo sapiens
gccuuagggcacuggg

SEQ ID NO: 208080 - RNA, 20 nt, Homo sapiens
guaaacuuaacuguucuuug

SEQ ID NO: 208081 - RNA, 18 nt, Homo sapiens
cugaauuaucuauuucau

SEQ ID NO: 208082 - RNA, 18 nt, Homo sapiens
cgccucacugaaacaugg

SEQ ID NO: 208083 - RNA, 23 nt, Homo sapiens
uuucagagugacuacacacagua

SEQ ID NO: 208084 - RNA, 20 nt, Homo sapiens
aaaucauacuuucucuucaa

SEQ ID NO: 208085 - RNA, 19 nt, Homo sapiens
uccugcagcaaacacucca

SEQ ID NO: 208086 - RNA, 21 nt, Homo sapiens
gucuucuaaauuugaaauaua

SEQ ID NO: 208087 - RNA, 18 nt, Homo sapiens
uccuagcugugugaauac

SEQ ID NO: 208088 - RNA, 20 nt, Homo sapiens
cauuuucccccacuacugca

SEQ ID NO: 208089 - RNA, 22 nt, Homo sapiens
aguuguuuuaauaacuuaucua

SEQ ID NO: 208090 - RNA, 22 nt, Homo sapiens
guauucccaaaaauuacuuugg

SEQ ID NO: 208091 - RNA, 17 nt, Homo sapiens
ggauauuuuuuacuuua

SEQ ID NO: 208092 - RNA, 23 nt, Homo sapiens
auaaauguacuuuuccuuccaga

SEQ ID NO: 208093 - RNA, 14 nt, Homo sapiens
ccacuacugcagca

SEQ ID NO: 208094 - RNA, 17 nt, Homo sapiens
caucaagaauuuaauga

SEQ ID NO: 208095 - RNA, 22 nt, Homo sapiens
cuuggagaaaauggguuuauuc

SEQ ID NO: 208096 - RNA, 16 nt, Homo sapiens
cuccuguuuugcacag

SEQ ID NO: 208097 - RNA, 23 nt, Homo sapiens
uggaagaagccauugagcucucc

SEQ ID NO: 208098 - RNA, 17 nt, Homo sapiens
auuuuauaaaacaaaua

SEQ ID NO: 208099 - RNA, 18 nt, Homo sapiens
cagaacacaagacaccaa

SEQ ID NO: 208100 - RNA, 16 nt, Homo sapiens
aucaucaagaauuuaa

SEQ ID NO: 208101 - RNA, 17 nt, Homo sapiens
aauucuuagucacaaaa

SEQ ID NO: 208102 - RNA, 18 nt, Homo sapiens
ccaggccuguugcuauag

SEQ ID NO: 208103 - RNA, 15 nt, Homo sapiens
gaagaugauaccuga

SEQ ID NO: 208104 - RNA, 19 nt, Homo sapiens
caauuagucugucacucca

SEQ ID NO: 208105 - RNA, 17 nt, Homo sapiens
uucaccuagagguguuc

SEQ ID NO: 208106 - RNA, 17 nt, Homo sapiens
acuguucuuugccagaa

SEQ ID NO: 208107 - RNA, 18 nt, Homo sapiens
ucaucuugaugaugauag

SEQ ID NO: 208108 - RNA, 16 nt, Homo sapiens
gaauuauaacuguaaa

SEQ ID NO: 208109 - RNA, 15 nt, Homo sapiens
acaagacaccaaauu

SEQ ID NO: 208110 - RNA, 18 nt, Homo sapiens
uaauaagcccacauauaa

SEQ ID NO: 208111 - RNA, 16 nt, Homo sapiens
auaagcccacauauaa

SEQ ID NO: 208112 - RNA, 14 nt, Homo sapiens
auucaggacuugaa

SEQ ID NO: 208113 - RNA, 23 nt, Homo sapiens
accaaaucauacuuuuucuuuga

SEQ ID NO: 208114 - RNA, 15 nt, Homo sapiens
uagaacacaguuugu

SEQ ID NO: 208115 - RNA, 22 nt, Homo sapiens
auucuauaaaacacaucaucaa

SEQ ID NO: 208116 - RNA, 13 nt, Homo sapiens
ucaucacuuugac

SEQ ID NO: 208117 - RNA, 19 nt, Homo sapiens
aaucauacuuucucuucaa

SEQ ID NO: 208118 - RNA, 21 nt, Homo sapiens
ugcaccuguccccacccucca

SEQ ID NO: 208119 - RNA, 23 nt, Homo sapiens
uauaaacuauaaccucuccuuca

SEQ ID NO: 208120 - RNA, 12 nt, Homo sapiens
agcucucuaggc

SEQ ID NO: 208121 - RNA, 20 nt, Homo sapiens
auucaacagagacugaauag

SEQ ID NO: 208122 - RNA, 14 nt, Homo sapiens
ccagaaaaauuucc

SEQ ID NO: 208123 - RNA, 13 nt, Homo sapiens
uaaauuugcaaau

SEQ ID NO: 208124 - RNA, 16 nt, Homo sapiens
uucucuucaaauuuag

SEQ ID NO: 208125 - RNA, 17 nt, Homo sapiens
augauagucaucaucaa

SEQ ID NO: 208126 - RNA, 16 nt, Homo sapiens
acauuuuuguacuaac

SEQ ID NO: 208127 - RNA, 19 nt, Homo sapiens
aauauaauucuguuucuga

SEQ ID NO: 208128 - RNA, 13 nt, Homo sapiens
ucuuggugaagau

SEQ ID NO: 208129 - RNA, 18 nt, Homo sapiens
uuaaaugaaccaaaccaa

SEQ ID NO: 208130 - RNA, 16 nt, Homo sapiens
aaagcuucacaguacc

SEQ ID NO: 208131 - RNA, 23 nt, Homo sapiens
ugaagaugauaccugaagcuguc

SEQ ID NO: 208132 - RNA, 21 nt, Homo sapiens
cuggcaacaacagauucucuu

SEQ ID NO: 208133 - RNA, 12 nt, Homo sapiens
cgucaucaucaa

SEQ ID NO: 208134 - RNA, 20 nt, Homo sapiens
gcuguaacguggcacuggua

SEQ ID NO: 208135 - RNA, 19 nt, Homo sapiens
ccugaauuaucuauuucau

SEQ ID NO: 208136 - RNA, 15 nt, Homo sapiens
ucuguacaacuaccu

SEQ ID NO: 208137 - RNA, 15 nt, Homo sapiens
auaaaauaaugacau

SEQ ID NO: 208138 - RNA, 16 nt, Homo sapiens
auaaauguaccagaga

SEQ ID NO: 208139 - RNA, 21 nt, Homo sapiens
cugcucuagugggacagccca

SEQ ID NO: 208140 - RNA, 15 nt, Homo sapiens
aaaaaugucaucuca

SEQ ID NO: 208141 - RNA, 17 nt, Homo sapiens
agaaacaaagauguuau

SEQ ID NO: 208142 - RNA, 18 nt, Homo sapiens
auacuguauauucaggac

SEQ ID NO: 208143 - RNA, 19 nt, Homo sapiens
aaaauagcaugccuuucuc

SEQ ID NO: 208144 - RNA, 16 nt, Homo sapiens
agauaagaugaaucau

SEQ ID NO: 208145 - RNA, 21 nt, Homo sapiens
auucuauaaaacacaucauca

SEQ ID NO: 208146 - RNA, 22 nt, Homo sapiens
agugacugggcaggcagcagaa

SEQ ID NO: 208147 - RNA, 23 nt, Homo sapiens
ucagagugacuacacacaguacg

SEQ ID NO: 208148 - RNA, 22 nt, Homo sapiens
gcccuuacuugcuucucuagcu

SEQ ID NO: 208149 - RNA, 15 nt, Homo sapiens
acucccaacccuggc

SEQ ID NO: 208150 - RNA, 14 nt, Homo sapiens
auucuccuugagga

SEQ ID NO: 208151 - RNA, 18 nt, Homo sapiens
ugccuuucucucuuucuc

SEQ ID NO: 208152 - RNA, 19 nt, Homo sapiens
uaaacugauugcuggcaac

SEQ ID NO: 208153 - RNA, 12 nt, Homo sapiens
aacauucaggaa

SEQ ID NO: 208154 - RNA, 18 nt, Homo sapiens
gucaauaaauuugcaaau

SEQ ID NO: 208155 - RNA, 18 nt, Homo sapiens
auucuauaaaacacauca

SEQ ID NO: 208156 - RNA, 12 nt, Homo sapiens
cuagaaacacac

SEQ ID NO: 208157 - RNA, 12 nt, Homo sapiens
ccacuacugcag

SEQ ID NO: 208158 - RNA, 17 nt, Homo sapiens
auuuagaaaauguucac

SEQ ID NO: 208159 - RNA, 19 nt, Homo sapiens
uuaauaccguaucuucuaa

SEQ ID NO: 208160 - RNA, 13 nt, Homo sapiens
caacagacuugaa

SEQ ID NO: 208161 - RNA, 20 nt, Homo sapiens
agccaaauuuaaaacuguug

SEQ ID NO: 208162 - RNA, 20 nt, Homo sapiens
uucuggauuucauacuguaa

SEQ ID NO: 208163 - RNA, 16 nt, Homo sapiens
cuguuuccuagcugug

SEQ ID NO: 208164 - RNA, 17 nt, Homo sapiens
uauaaauguacuuuucc

SEQ ID NO: 208165 - RNA, 12 nt, Homo sapiens
agacaccaaauu

SEQ ID NO: 208166 - RNA, 16 nt, Homo sapiens
uuccuuuaaaugaaua

SEQ ID NO: 208167 - RNA, 21 nt, Homo sapiens
uaaaacagguuauaacagugu

SEQ ID NO: 208168 - RNA, 22 nt, Homo sapiens
gauuuuuuuuaauuaccaugcu

SEQ ID NO: 208169 - RNA, 19 nt, Homo sapiens
gaagaagaucaacgccuca

SEQ ID NO: 208170 - RNA, 22 nt, Homo sapiens
accuaaauccuucuuauguuuc

SEQ ID NO: 208171 - RNA, 22 nt, Homo sapiens
augcuacccgagguuugcaaau

SEQ ID NO: 208172 - RNA, 21 nt, Homo sapiens
cuaaggagcugauacuuugac

SEQ ID NO: 208173 - RNA, 21 nt, Homo sapiens
cuucaaauuuagcaaccuaga

SEQ ID NO: 208174 - RNA, 14 nt, Homo sapiens
agauguuuauuuca

SEQ ID NO: 208175 - RNA, 16 nt, Homo sapiens
augaucgucaucauca

SEQ ID NO: 208176 - RNA, 18 nt, Homo sapiens
cuacugcagcaccuccag

SEQ ID NO: 208177 - RNA, 21 nt, Homo sapiens
cucuagguacgaugacagugu

SEQ ID NO: 208178 - RNA, 18 nt, Homo sapiens
ugcucaaucccugaggac

SEQ ID NO: 208179 - RNA, 14 nt, Homo sapiens
aaucauacuuucuc

SEQ ID NO: 208180 - RNA, 19 nt, Homo sapiens
uaagaauuuuugaagugac

SEQ ID NO: 208181 - RNA, 19 nt, Homo sapiens
uucaacaaagaaacaaaga

SEQ ID NO: 208182 - RNA, 21 nt, Homo sapiens
ugaauuuaggugauaccuaaa

SEQ ID NO: 208183 - RNA, 19 nt, Homo sapiens
ugcaaauacuguauauuca

SEQ ID NO: 208184 - RNA, 13 nt, Homo sapiens
aagaauuuaauga

SEQ ID NO: 208185 - RNA, 16 nt, Homo sapiens
aauuuagcaaccuaga

SEQ ID NO: 208186 - RNA, 18 nt, Homo sapiens
guuucuguacaacuaccu

SEQ ID NO: 208187 - RNA, 21 nt, Homo sapiens
ucuggaaauuuuuacuuuaaa

SEQ ID NO: 208188 - RNA, 15 nt, Homo sapiens
ucaucaagaauuuaa

SEQ ID NO: 208189 - RNA, 14 nt, Homo sapiens
cauacaaguuucau

SEQ ID NO: 208190 - RNA, 19 nt, Homo sapiens
ccaaacugauccaguauaa

SEQ ID NO: 208191 - RNA, 18 nt, Homo sapiens
cuuccugauuccuuuaaa

SEQ ID NO: 208192 - RNA, 18 nt, Homo sapiens
ccugaggacugauuucag

SEQ ID NO: 208193 - RNA, 16 nt, Homo sapiens
accugcagauguucug

SEQ ID NO: 208194 - RNA, 23 nt, Homo sapiens
cugggcuguaacguggcacuggu

SEQ ID NO: 208195 - RNA, 17 nt, Homo sapiens
auucucccuuucacuaa

SEQ ID NO: 208196 - RNA, 18 nt, Homo sapiens
aggagcugauacuuugac

SEQ ID NO: 208197 - RNA, 21 nt, Homo sapiens
agagguguucugguaaacuga

SEQ ID NO: 208198 - RNA, 13 nt, Homo sapiens
uagucaucaucaa

SEQ ID NO: 208199 - RNA, 17 nt, Homo sapiens
guccccacccuccacuc

SEQ ID NO: 208200 - RNA, 19 nt, Homo sapiens
gccucacugaaacauggcu

SEQ ID NO: 208201 - RNA, 23 nt, Homo sapiens
ggcucauauuucuuuucuuucuc

SEQ ID NO: 208202 - RNA, 20 nt, Homo sapiens
ccacauauaaauguacuuuu

SEQ ID NO: 208203 - RNA, 21 nt, Homo sapiens
uaugccauugggguaguugug

SEQ ID NO: 208204 - RNA, 14 nt, Homo sapiens
agcuucacaguacc

SEQ ID NO: 208205 - RNA, 20 nt, Homo sapiens
cauacuuuuucuuugaauuu

SEQ ID NO: 208206 - RNA, 14 nt, Homo sapiens
aguuuuaacugugg

SEQ ID NO: 208207 - RNA, 23 nt, Homo sapiens
aauguacuuuuucuuccagaaaa

SEQ ID NO: 208208 - RNA, 12 nt, Homo sapiens
uaaaacacauca

SEQ ID NO: 208209 - RNA, 22 nt, Homo sapiens
cagcaaacaggugcuaauuugu

SEQ ID NO: 208210 - RNA, 20 nt, Homo sapiens
acugauccaguauaagacua

SEQ ID NO: 208211 - RNA, 16 nt, Homo sapiens
cagagacugaauagau

SEQ ID NO: 208212 - RNA, 16 nt, Homo sapiens
uaaaaaugucaucuca

SEQ ID NO: 208213 - RNA, 16 nt, Homo sapiens
ugaaaaaaaacagugg

SEQ ID NO: 208214 - RNA, 21 nt, Homo sapiens
auuugauacauuuuuguacua

SEQ ID NO: 208215 - RNA, 18 nt, Homo sapiens
uccaucacguuagcuguc

SEQ ID NO: 208216 - RNA, 13 nt, Homo sapiens
acuuugaccuaaa

SEQ ID NO: 208217 - RNA, 11 nt, Homo sapiens
auaacaguguu

SEQ ID NO: 208218 - RNA, 17 nt, Homo sapiens
cuucacaguacccaaac

SEQ ID NO: 208219 - RNA, 21 nt, Homo sapiens
ccaaccccagugccucaguca

SEQ ID NO: 208220 - RNA, 19 nt, Homo sapiens
uuaaaugaauuuuucuucc

SEQ ID NO: 208221 - RNA, 18 nt, Homo sapiens
acaguuuuaacuguggau

SEQ ID NO: 208222 - RNA, 18 nt, Homo sapiens
cucaucuugaugaugaua

SEQ ID NO: 208223 - RNA, 18 nt, Homo sapiens
aaauuuaaaacuguugga

SEQ ID NO: 208224 - RNA, 15 nt, Homo sapiens
cauacuuucucuuca

SEQ ID NO: 208225 - RNA, 22 nt, Homo sapiens
ucuuaaacuaaaugugcaauag

SEQ ID NO: 208226 - RNA, 19 nt, Homo sapiens
acaagacaccaaauugaac

SEQ ID NO: 208227 - RNA, 23 nt, Homo sapiens
aauguacuuuuccuuccagaaaa

SEQ ID NO: 208228 - RNA, 20 nt, Homo sapiens
ccaaaauaagaugaaucacu

SEQ ID NO: 208229 - RNA, 15 nt, Homo sapiens
acagcccagagccug

SEQ ID NO: 208230 - RNA, 23 nt, Homo sapiens
caaagauguuaugguguuuagau

SEQ ID NO: 208231 - RNA, 12 nt, Homo sapiens
aaaaaacagugg

SEQ ID NO: 208232 - RNA, 12 nt, Homo sapiens
uuagagcucuca

SEQ ID NO: 208233 - RNA, 22 nt, Homo sapiens
aacugugacugcagugcuguaa

SEQ ID NO: 208234 - RNA, 18 nt, Homo sapiens
caaauuuagcaaccuaga

SEQ ID NO: 208235 - RNA, 21 nt, Homo sapiens
gaagaucaacgccucacugaa

SEQ ID NO: 208236 - RNA, 17 nt, Homo sapiens
aaugauuaaaauagcau

SEQ ID NO: 208237 - RNA, 15 nt, Homo sapiens
aauaaugacauaaaa

SEQ ID NO: 208238 - RNA, 17 nt, Homo sapiens
ugcuaccaaaacaguua

SEQ ID NO: 208239 - RNA, 16 nt, Homo sapiens
uguaacguggcacugg

SEQ ID NO: 208240 - RNA, 14 nt, Homo sapiens
cuagaaacacacau

SEQ ID NO: 208241 - RNA, 16 nt, Homo sapiens
caaccuagaaacacac

SEQ ID NO: 208242 - RNA, 21 nt, Homo sapiens
ugcuggcaacaacagauucuc

SEQ ID NO: 208243 - RNA, 15 nt, Homo sapiens
uccaaaauaagauga

SEQ ID NO: 208244 - RNA, 21 nt, Homo sapiens
ucagucaauaaauuugcaaau

SEQ ID NO: 208245 - RNA, 15 nt, Homo sapiens
cauuucuuugaauuu

SEQ ID NO: 208246 - RNA, 22 nt, Homo sapiens
gcccacauauaaauguacuuuu

SEQ ID NO: 208247 - RNA, 14 nt, Homo sapiens
uaauaacuuaucua

SEQ ID NO: 208248 - RNA, 14 nt, Homo sapiens
cugcaaauacugua

SEQ ID NO: 208249 - RNA, 15 nt, Homo sapiens
aaaaauguccaagau

SEQ ID NO: 208250 - RNA, 23 nt, Homo sapiens
cuggaagaagccauugagcucuc

SEQ ID NO: 208251 - RNA, 16 nt, Homo sapiens
uagaaacacacauuuc

SEQ ID NO: 208252 - RNA, 21 nt, Homo sapiens
auaagacuacugaaucugcua

SEQ ID NO: 208253 - RNA, 17 nt, Homo sapiens
uaaagauguuuauuuca

SEQ ID NO: 208254 - RNA, 23 nt, Homo sapiens
acguuguuuugguuguacuuugg

SEQ ID NO: 208255 - RNA, 21 nt, Homo sapiens
aagcccacauauaaauguacu

SEQ ID NO: 208256 - RNA, 12 nt, Homo sapiens
uuagggcacugg

SEQ ID NO: 208257 - RNA, 20 nt, Homo sapiens
accuaccuggaagaagccau

SEQ ID NO: 208258 - RNA, 16 nt, Homo sapiens
guuguuaaaaauguca

SEQ ID NO: 208259 - RNA, 20 nt, Homo sapiens
aauaaaauagugacauaaaa

SEQ ID NO: 208260 - RNA, 23 nt, Homo sapiens
acacucaccugcacuaacagagu

SEQ ID NO: 208261 - RNA, 16 nt, Homo sapiens
uaaacuauaaccucuc

SEQ ID NO: 208262 - RNA, 14 nt, Homo sapiens
aauaaauuugcaaa

SEQ ID NO: 208263 - RNA, 14 nt, Homo sapiens
acuuugacaguguu

SEQ ID NO: 208264 - RNA, 21 nt, Homo sapiens
uucuauuuuauaaaacaaaua

SEQ ID NO: 208265 - RNA, 15 nt, Homo sapiens
aaaucauacuuucuc

SEQ ID NO: 208266 - RNA, 15 nt, Homo sapiens
ugaggacugauuuca

SEQ ID NO: 208267 - RNA, 12 nt, Homo sapiens
caucacuuugac

SEQ ID NO: 208268 - RNA, 12 nt, Homo sapiens
uucauacuguaa

SEQ ID NO: 208269 - RNA, 18 nt, Homo sapiens
uucaccugcagauguucu

SEQ ID NO: 208270 - RNA, 13 nt, Homo sapiens
caacagauucucu

SEQ ID NO: 208271 - RNA, 15 nt, Homo sapiens
acucaccugcacuaa

SEQ ID NO: 208272 - RNA, 17 nt, Homo sapiens
uaagaugaaucauuuaa

SEQ ID NO: 208273 - RNA, 13 nt, Homo sapiens
uuauaacuguaaa

SEQ ID NO: 208274 - RNA, 21 nt, Homo sapiens
aggggccuuagggcacugggc

SEQ ID NO: 208275 - RNA, 13 nt, Homo sapiens
cacauuucuuuga

SEQ ID NO: 208276 - RNA, 20 nt, Homo sapiens
acacuacaaauuuauucuug

SEQ ID NO: 208277 - RNA, 17 nt, Homo sapiens
uauaaauguaccagaga

SEQ ID NO: 208278 - RNA, 12 nt, Homo sapiens
uccaccuuccau

SEQ ID NO: 208279 - RNA, 23 nt, Homo sapiens
gauucuauaaaacacaucaucaa

SEQ ID NO: 208280 - RNA, 17 nt, Homo sapiens
cugguagguugggacac

SEQ ID NO: 208281 - RNA, 23 nt, Homo sapiens
ugaccuaaauuauuuacugcaaa

SEQ ID NO: 208282 - RNA, 11 nt, Homo sapiens
uuagagcucuc

SEQ ID NO: 208283 - RNA, 18 nt, Homo sapiens
uucuuucucaucuugaug

SEQ ID NO: 208284 - RNA, 15 nt, Homo sapiens
ugcaacagacuugaa

SEQ ID NO: 208285 - RNA, 19 nt, Homo sapiens
ccucccaaccccagugccu

SEQ ID NO: 208286 - RNA, 23 nt, Homo sapiens
acucugggcuguaacguggcacu

SEQ ID NO: 208287 - RNA, 14 nt, Homo sapiens
gagguuugcaaauc

SEQ ID NO: 208288 - RNA, 16 nt, Homo sapiens
aaagaugaaaaguaua

SEQ ID NO: 208289 - RNA, 16 nt, Homo sapiens
ccuguccccacccucc

SEQ ID NO: 208290 - RNA, 20 nt, Homo sapiens
ucacugcugcaaauacugua

SEQ ID NO: 208291 - RNA, 13 nt, Homo sapiens
ucuuaaccuaccu

SEQ ID NO: 208292 - RNA, 16 nt, Homo sapiens
ugcaaauccuucaugu

SEQ ID NO: 208293 - RNA, 12 nt, Homo sapiens
gcccacauauaa

SEQ ID NO: 208294 - RNA, 20 nt, Homo sapiens
uaaauuuugugauucuauaa

SEQ ID NO: 208295 - RNA, 18 nt, Homo sapiens
gaugggcuuagagcucuc

SEQ ID NO: 208296 - RNA, 17 nt, Homo sapiens
uucagagugacuacaca

SEQ ID NO: 208297 - RNA, 19 nt, Homo sapiens
aacuuaacuguucuuugcc

SEQ ID NO: 208298 - RNA, 17 nt, Homo sapiens
uucuuagucacaaaaua

SEQ ID NO: 208299 - RNA, 16 nt, Homo sapiens
uaaauuauuuacugca

SEQ ID NO: 208300 - RNA, 14 nt, Homo sapiens
acacagcauuguau

SEQ ID NO: 208301 - RNA, 18 nt, Homo sapiens
augggcuuagagcucuca

SEQ ID NO: 208302 - RNA, 19 nt, Homo sapiens
uugaauuuagcaaccuaga

SEQ ID NO: 208303 - RNA, 20 nt, Homo sapiens
ucacuaaaacacacaggugc

SEQ ID NO: 208304 - RNA, 16 nt, Homo sapiens
cuuacaucauguguug

SEQ ID NO: 208305 - RNA, 23 nt, Human papillomavirus type 16
ugcaacuaacguuagaaacaaua

SEQ ID NO: 208306 - RNA, 21 nt, Human papillomavirus type 16
ugcaguuugauggagacauau

SEQ ID NO: 208307 - RNA, 17 nt, Human papillomavirus type 16
ugccaacacuggcugua

SEQ ID NO: 208308 - RNA, 21 nt, Human papillomavirus type 16
ugccaacacuggcuguaucaa

SEQ ID NO: 208309 - RNA, 22 nt, Human papillomavirus type 16
ugcauuauacaaacuggacaca

SEQ ID NO: 208310 - RNA, 19 nt, Human papillomavirus type 16
ugcgccuagaaugugcuau

SEQ ID NO: 208311 - RNA, 15 nt, Human papillomavirus type 16
ugaaguguauuuaac

SEQ ID NO: 208312 - RNA, 21 nt, Human papillomavirus type 16
ugaauauguugcacgcacaaa

SEQ ID NO: 208313 - RNA, 19 nt, Human papillomavirus type 16
ugaaaaguggacauuacaa

SEQ ID NO: 208314 - RNA, 17 nt, Human papillomavirus type 16
uguauauaaacuauauu

SEQ ID NO: 208315 - RNA, 17 nt, Human papillomavirus type 16
uguauaaaaaaacaugg

SEQ ID NO: 208316 - RNA, 18 nt, Human papillomavirus type 16
uguauaaaaaaacaugga

SEQ ID NO: 208317 - RNA, 22 nt, Human papillomavirus type 16
uuagaaacaauauauaacucac

SEQ ID NO: 208318 - RNA, 23 nt, Human papillomavirus type 16
uuuccuauuaaaaaaccuaacaa

SEQ ID NO: 208319 - RNA, 13 nt, Human papillomavirus type 16
uuucauauauaau

SEQ ID NO: 208320 - RNA, 21 nt, Human papillomavirus type 16
uuuauuaaauaaauuggauga

SEQ ID NO: 208321 - RNA, 14 nt, Human papillomavirus type 16
uuuauauaccauua

SEQ ID NO: 208322 - RNA, 15 nt, Human papillomavirus type 16
uuuacugcacaggaa

SEQ ID NO: 208323 - RNA, 15 nt, Human papillomavirus type 16
uuguuuauauaccau

SEQ ID NO: 208324 - RNA, 15 nt, Human papillomavirus type 16
uuguuguauaccaua

SEQ ID NO: 208325 - RNA, 16 nt, Human papillomavirus type 16
uuuaauacauacacau

SEQ ID NO: 208326 - RNA, 14 nt, Human papillomavirus type 16
uuuaaacuuguacg

SEQ ID NO: 208327 - RNA, 19 nt, Human papillomavirus type 16
uuuaacugcaccaacagga

SEQ ID NO: 208328 - RNA, 18 nt, Human papillomavirus type 16
uugcacgcacaaacauau

SEQ ID NO: 208329 - RNA, 16 nt, Human papillomavirus type 16
uugcaagugugacucu

SEQ ID NO: 208330 - RNA, 20 nt, Human papillomavirus type 16
uugaaguguauuuaacugca

SEQ ID NO: 208331 - RNA, 19 nt, Human papillomavirus type 16
gguauuuagaauacauuua

SEQ ID NO: 208332 - RNA, 19 nt, Human papillomavirus type 16
gugauauuaguggaugugu

SEQ ID NO: 208333 - RNA, 21 nt, Human papillomavirus type 16
gugcaguuugauggagacaua

SEQ ID NO: 208334 - RNA, 16 nt, Human papillomavirus type 16
gcugauccugcaggua

SEQ ID NO: 208335 - RNA, 12 nt, Human papillomavirus type 16
uaugugcuugua

SEQ ID NO: 208336 - RNA, 19 nt, Human papillomavirus type 16
uaugucagcaacuaugguu

SEQ ID NO: 208337 - RNA, 14 nt, Human papillomavirus type 16
uaucaggauuacaa

SEQ ID NO: 208338 - RNA, 18 nt, Human papillomavirus type 16
uaucaggauuacaauaca

SEQ ID NO: 208339 - RNA, 20 nt, Human papillomavirus type 16
uauaauuguuguauaccaua

SEQ ID NO: 208340 - RNA, 23 nt, Human papillomavirus type 16
uaucaaagaauaaagcauuacaa

SEQ ID NO: 208341 - RNA, 16 nt, Human papillomavirus type 16
uaguaaugaaaagugg

SEQ ID NO: 208342 - RNA, 22 nt, Human papillomavirus type 16
uaguguuguuuguuguguauau

SEQ ID NO: 208343 - RNA, 16 nt, Human papillomavirus type 16
uauaauaaacacgugu

SEQ ID NO: 208344 - RNA, 19 nt, Human papillomavirus type 16
uacaagacguuagccuuga

SEQ ID NO: 208345 - RNA, 20 nt, Human papillomavirus type 16
uacaccuacauugcaugaau

SEQ ID NO: 208346 - RNA, 18 nt, Human papillomavirus type 16
uacagaccuacgugacca

SEQ ID NO: 208347 - RNA, 22 nt, Human papillomavirus type 16
uaccauuauuuuuaauacauac

SEQ ID NO: 208348 - RNA, 18 nt, Human papillomavirus type 16
uacaaacuggacacauau

SEQ ID NO: 208349 - RNA, 19 nt, Human papillomavirus type 16
uacaaacuggacacauaua

SEQ ID NO: 208350 - RNA, 20 nt, Human papillomavirus type 16
uaauaauauugguauuacua

SEQ ID NO: 208351 - RNA, 11 nt, Human papillomavirus type 16
uaaacuauauu

SEQ ID NO: 208352 - RNA, 16 nt, Human papillomavirus type 16
cugugucuacauacac

SEQ ID NO: 208353 - RNA, 17 nt, Human papillomavirus type 16
cugugucuacauacaca

SEQ ID NO: 208354 - RNA, 16 nt, Human papillomavirus type 16
cuguguagguguugag

SEQ ID NO: 208355 - RNA, 17 nt, Human papillomavirus type 16
cugcauccacaacauua

SEQ ID NO: 208356 - RNA, 12 nt, Human papillomavirus type 16
cuacauacacau

SEQ ID NO: 208357 - RNA, 14 nt, Human papillomavirus type 16
cuacauacacauca

SEQ ID NO: 208358 - RNA, 23 nt, Human papillomavirus type 16
cuaacguuagaaacaauauauaa

SEQ ID NO: 208359 - RNA, 13 nt, Human papillomavirus type 16
gacguuagccuug

SEQ ID NO: 208360 - RNA, 13 nt, Human papillomavirus type 16
gaauaaagcauua

SEQ ID NO: 208361 - RNA, 22 nt, Human papillomavirus type 16
gccagagaaaugggauuuaaac

SEQ ID NO: 208362 - RNA, 14 nt, Human papillomavirus type 16
gauuaaaagcuaua

SEQ ID NO: 208363 - RNA, 16 nt, Human papillomavirus type 16
gauuaaaagcuauaug

SEQ ID NO: 208364 - RNA, 22 nt, Human papillomavirus type 16
gcaaccagagacaacugaucuc

SEQ ID NO: 208365 - RNA, 14 nt, Human papillomavirus type 16
gcacaggaagcaaa

SEQ ID NO: 208366 - RNA, 13 nt, Human papillomavirus type 16
ccuauuaauacgu

SEQ ID NO: 208367 - RNA, 14 nt, Human papillomavirus type 16
ccuguguagguguu

SEQ ID NO: 208368 - RNA, 19 nt, Human papillomavirus type 16
ccagagacaacugaucucu

SEQ ID NO: 208369 - RNA, 15 nt, Human papillomavirus type 16
cauuauacaaacugg

SEQ ID NO: 208370 - RNA, 20 nt, Human papillomavirus type 16
cauuauuuuuaauacauaca

SEQ ID NO: 208371 - RNA, 22 nt, Human papillomavirus type 16
cauuauuuuuaauacauacaca

SEQ ID NO: 208372 - RNA, 20 nt, Human papillomavirus type 16
caugaauauauguuagauuu

SEQ ID NO: 208373 - RNA, 23 nt, Human papillomavirus type 16
cauaaauaaacuuauuguuucaa

SEQ ID NO: 208374 - RNA, 15 nt, Human papillomavirus type 16
cagcaacuaugguuu

SEQ ID NO: 208375 - RNA, 17 nt, Human papillomavirus type 16
cagcaacuaugguuuaa

SEQ ID NO: 208376 - RNA, 15 nt, Human papillomavirus type 16
caguggaagugcagu

SEQ ID NO: 208377 - RNA, 18 nt, Human papillomavirus type 16
auuuauuacaaggccaga

SEQ ID NO: 208378 - RNA, 16 nt, Human papillomavirus type 16
auuugcuacauccugu

SEQ ID NO: 208379 - RNA, 21 nt, Human papillomavirus type 16
auuuaaacauauuaaccacca

SEQ ID NO: 208380 - RNA, 15 nt, Human papillomavirus type 16
auuuaacugcaccaa

SEQ ID NO: 208381 - RNA, 18 nt, Human papillomavirus type 16
auuuaacugcaccaacag

SEQ ID NO: 208382 - RNA, 14 nt, Human papillomavirus type 16
auuguuacauauaa

SEQ ID NO: 208383 - RNA, 21 nt, Human papillomavirus type 16
augugcuuguaugugcuugua

SEQ ID NO: 208384 - RNA, 16 nt, Human papillomavirus type 16
auuacuggcgugcuuu

SEQ ID NO: 208385 - RNA, 15 nt, Human papillomavirus type 16
auucgguugcaugcu

SEQ ID NO: 208386 - RNA, 12 nt, Human papillomavirus type 16
cagaaacagaga

SEQ ID NO: 208387 - RNA, 13 nt, Human papillomavirus type 16
caccuacauugca

SEQ ID NO: 208388 - RNA, 17 nt, Human papillomavirus type 16
caagcaauugaacugca

SEQ ID NO: 208389 - RNA, 18 nt, Human papillomavirus type 16
cacaucauuaauaauauu

SEQ ID NO: 208390 - RNA, 20 nt, Human papillomavirus type 16
agaggguacgggauguaaug

SEQ ID NO: 208391 - RNA, 15 nt, Human papillomavirus type 16
aguggaagugcaguu

SEQ ID NO: 208392 - RNA, 13 nt, Human papillomavirus type 16
aguggacauuaca

SEQ ID NO: 208393 - RNA, 18 nt, Human papillomavirus type 16
aguggaaaaaaaaacagg

SEQ ID NO: 208394 - RNA, 17 nt, Human papillomavirus type 16
aguguauuuaacugcac

SEQ ID NO: 208395 - RNA, 20 nt, Human papillomavirus type 16
aguuugauggagacauaugc

SEQ ID NO: 208396 - RNA, 20 nt, Human papillomavirus type 16
aucaugcaggaacauccaga

SEQ ID NO: 208397 - RNA, 22 nt, Human papillomavirus type 16
auauuguaaccuuuuguugcaa

SEQ ID NO: 208398 - RNA, 13 nt, Human papillomavirus type 16
auauauacuauau

SEQ ID NO: 208399 - RNA, 21 nt, Human papillomavirus type 16
accauuauuuuuaauacauac

SEQ ID NO: 208400 - RNA, 16 nt, Human papillomavirus type 16
acgcuucgguugugcg

SEQ ID NO: 208401 - RNA, 14 nt, Human papillomavirus type 16
accagagacaacug

SEQ ID NO: 208402 - RNA, 18 nt, Human papillomavirus type 16
accaacaggauguauaaa

SEQ ID NO: 208403 - RNA, 22 nt, Human papillomavirus type 16
acauuacaagacguuagccuug

SEQ ID NO: 208404 - RNA, 16 nt, Human papillomavirus type 16
acagagcccauuacaa

SEQ ID NO: 208405 - RNA, 22 nt, Human papillomavirus type 16
agaccuacgugaccauauagac

SEQ ID NO: 208406 - RNA, 17 nt, Human papillomavirus type 16
agacauucguacuuugg

SEQ ID NO: 208407 - RNA, 13 nt, Human papillomavirus type 16
agaaacagagaca

SEQ ID NO: 208408 - RNA, 16 nt, Human papillomavirus type 16
acugcacaggaagcaa

SEQ ID NO: 208409 - RNA, 13 nt, Human papillomavirus type 16
acuuagugauauu

SEQ ID NO: 208410 - RNA, 18 nt, Human papillomavirus type 16
acuuguacguuuccugcu

SEQ ID NO: 208411 - RNA, 16 nt, Human papillomavirus type 16
uagccuugaaguguau

SEQ ID NO: 208412 - RNA, 18 nt, Human papillomavirus type 16
uagccuugaaguguauuu

SEQ ID NO: 208413 - RNA, 18 nt, Human papillomavirus type 16
uaguccacuuagugauau

SEQ ID NO: 208414 - RNA, 14 nt, Human papillomavirus type 16
uagaaaaacaaagu

SEQ ID NO: 208415 - RNA, 23 nt, Human papillomavirus type 16
uaccauuauuuuuaauacauaca

SEQ ID NO: 208416 - RNA, 16 nt, Human papillomavirus type 16
uaaugaaaaguggaca

SEQ ID NO: 208417 - RNA, 21 nt, Human papillomavirus type 16
gugucuacauacacaucauua

SEQ ID NO: 208418 - RNA, 13 nt, Human papillomavirus type 16
guacaaagcacac

SEQ ID NO: 208419 - RNA, 18 nt, Human papillomavirus type 16
uaaauuggaugacacaga

SEQ ID NO: 208420 - RNA, 18 nt, Human papillomavirus type 16
guuuauauaccauuauuu

SEQ ID NO: 208421 - RNA, 22 nt, Human papillomavirus type 16
guuuguuguguauauguuugua

SEQ ID NO: 208422 - RNA, 20 nt, Human papillomavirus type 16
guuugauggagacauaugca

SEQ ID NO: 208423 - RNA, 23 nt, Human papillomavirus type 16
guuugauggagacauaugcaaua

SEQ ID NO: 208424 - RNA, 19 nt, Human papillomavirus type 16
uauaauaaacacgugugua

SEQ ID NO: 208425 - RNA, 15 nt, Human papillomavirus type 16
uccagacuacuugca

SEQ ID NO: 208426 - RNA, 16 nt, Human papillomavirus type 16
ugaccauauagacuau

SEQ ID NO: 208427 - RNA, 13 nt, Human papillomavirus type 16
ugacagugauaca

SEQ ID NO: 208428 - RNA, 17 nt, Human papillomavirus type 16
ugacagugauacaggug

SEQ ID NO: 208429 - RNA, 14 nt, Human papillomavirus type 16
ugacagcucagagg

SEQ ID NO: 208430 - RNA, 13 nt, Human papillomavirus type 16
ugaaagcgaagac

SEQ ID NO: 208431 - RNA, 22 nt, Human papillomavirus type 16
ucugugucuacauacacaucau

SEQ ID NO: 208432 - RNA, 15 nt, Human papillomavirus type 16
ucuacauacacauca

SEQ ID NO: 208433 - RNA, 14 nt, Human papillomavirus type 16
ucuaugucagcaac

SEQ ID NO: 208434 - RNA, 13 nt, Human papillomavirus type 16
uucucagaaacca

SEQ ID NO: 208435 - RNA, 19 nt, Human papillomavirus type 16
uuagugauauuaguggaug

SEQ ID NO: 208436 - RNA, 20 nt, Human papillomavirus type 16
uuaucaugcaggaacaucca

SEQ ID NO: 208437 - RNA, 16 nt, Human papillomavirus type 16
uuaugcagcaaaugca

SEQ ID NO: 208438 - RNA, 13 nt, Human papillomavirus type 16
ugucuacauacac

SEQ ID NO: 208439 - RNA, 13 nt, Human papillomavirus type 16
uuaauacauacac

SEQ ID NO: 208440 - RNA, 14 nt, Human papillomavirus type 16
ugcaggaacaucca

SEQ ID NO: 208441 - RNA, 15 nt, Human papillomavirus type 16
ugcuauaucagauga

SEQ ID NO: 208442 - RNA, 14 nt, Human papillomavirus type 16
uguauuuaacugca

SEQ ID NO: 208443 - RNA, 17 nt, Human papillomavirus type 16
ugggauuuaaacauauu

SEQ ID NO: 208444 - RNA, 13 nt, Human papillomavirus type 16
ugguuuuccugac

SEQ ID NO: 208445 - RNA, 13 nt, Human papillomavirus type 16
uggagacauaugc

SEQ ID NO: 208446 - RNA, 18 nt, Human papillomavirus type 16
uuuuggcacaaaaugugu

SEQ ID NO: 208447 - RNA, 20 nt, Human papillomavirus type 16
uuuuaaauaguucuauguca

SEQ ID NO: 208448 - RNA, 14 nt, Human papillomavirus type 16
uuugcaaccagaga

SEQ ID NO: 208449 - RNA, 17 nt, Human papillomavirus type 16
uuguuuauauaccauua

SEQ ID NO: 208450 - RNA, 14 nt, Human papillomavirus type 16
aauacaaugcauua

SEQ ID NO: 208451 - RNA, 18 nt, Human papillomavirus type 16
aauacaaugcauuauaca

SEQ ID NO: 208452 - RNA, 13 nt, Human papillomavirus type 16
aauauauaacuca

SEQ ID NO: 208453 - RNA, 13 nt, Human papillomavirus type 16
aagugugacucua

SEQ ID NO: 208454 - RNA, 16 nt, Human papillomavirus type 16
aauugaacugcaacua

SEQ ID NO: 208455 - RNA, 13 nt, Human papillomavirus type 16
aauuguuacauau

SEQ ID NO: 208456 - RNA, 18 nt, Human papillomavirus type 16
aaugugcuauuuauuaca

SEQ ID NO: 208457 - RNA, 19 nt, Human papillomavirus type 16
aaugggauuuaaacauauu

SEQ ID NO: 208458 - RNA, 20 nt, Human papillomavirus type 16
aaugggauuuaaacauauua

SEQ ID NO: 208459 - RNA, 17 nt, Human papillomavirus type 16
aaagcuauauguauaga

SEQ ID NO: 208460 - RNA, 19 nt, Human papillomavirus type 16
gaacgaaaaugacagugau

SEQ ID NO: 208461 - RNA, 19 nt, Human papillomavirus type 16
gaagcaucaguaacugugg

SEQ ID NO: 208462 - RNA, 14 nt, Human papillomavirus type 16
gaauaaagcauuac

SEQ ID NO: 208463 - RNA, 14 nt, Human papillomavirus type 16
aaaugcuuguguaa

SEQ ID NO: 208464 - RNA, 21 nt, Human papillomavirus type 16
aaaugggauuuaaacauauua

SEQ ID NO: 208465 - RNA, 22 nt, Human papillomavirus type 16
gauccugcagguaccaaugggg

SEQ ID NO: 208466 - RNA, 16 nt, Human papillomavirus type 16
gauguaauggaugguu

SEQ ID NO: 208467 - RNA, 16 nt, Human papillomavirus type 16
gauggagacauaugca

SEQ ID NO: 208468 - RNA, 18 nt, Human papillomavirus type 16
gauggagacauaugcaau

SEQ ID NO: 208469 - RNA, 15 nt, Human papillomavirus type 16
gaugcaguacagguu

SEQ ID NO: 208470 - RNA, 15 nt, Human papillomavirus type 16
guaauuguuacauau

SEQ ID NO: 208471 - RNA, 17 nt, Human papillomavirus type 16
guaacuauugugucaug

SEQ ID NO: 208472 - RNA, 20 nt, Human papillomavirus type 16
gguaguccacuuagugauau

SEQ ID NO: 208473 - RNA, 23 nt, Human papillomavirus type 16
gcaacuaacguuagaaacaauau

SEQ ID NO: 208474 - RNA, 18 nt, Human papillomavirus type 16
gcauggagauacaccuac

SEQ ID NO: 208475 - RNA, 15 nt, Human papillomavirus type 16
gcauuacaagcaauu

SEQ ID NO: 208476 - RNA, 16 nt, Human papillomavirus type 16
gcauuacaagcaauug

SEQ ID NO: 208477 - RNA, 18 nt, Human papillomavirus type 16
cuaauuguguugugguua

SEQ ID NO: 208478 - RNA, 22 nt, Human papillomavirus type 16
cucagaggaggaggaugaaaua

SEQ ID NO: 208479 - RNA, 14 nt, Human papillomavirus type 16
cuauuuauuacaag

SEQ ID NO: 208480 - RNA, 14 nt, Human papillomavirus type 16
cuggacacauauau

SEQ ID NO: 208481 - RNA, 15 nt, Human papillomavirus type 16
cugcauccacaacau

SEQ ID NO: 208482 - RNA, 22 nt, Human papillomavirus type 16
cuugauacugcauccacaacau

SEQ ID NO: 208483 - RNA, 15 nt, Human papillomavirus type 16
caucaguaacugugg

SEQ ID NO: 208484 - RNA, 17 nt, Human papillomavirus type 16
caucaguaacuguggua

SEQ ID NO: 208485 - RNA, 21 nt, Human papillomavirus type 16
cauuauuuuuaauacauacac

SEQ ID NO: 208486 - RNA, 15 nt, Human papillomavirus type 16
cgaaaguauuuggua

SEQ ID NO: 208487 - RNA, 22 nt, Human papillomavirus type 16
cgagaacgaaaaugacagugau

SEQ ID NO: 208488 - RNA, 23 nt, Human papillomavirus type 16
auauuauauuuguuuauauacca

SEQ ID NO: 208489 - RNA, 15 nt, Human papillomavirus type 16
auauauaacucacaa

SEQ ID NO: 208490 - RNA, 14 nt, Human papillomavirus type 16
auauauacuauauu

SEQ ID NO: 208491 - RNA, 15 nt, Human papillomavirus type 16
auauuaaccaccaag

SEQ ID NO: 208492 - RNA, 18 nt, Human papillomavirus type 16
auauguuuguaugugcuu

SEQ ID NO: 208493 - RNA, 18 nt, Human papillomavirus type 16
augauuauuuaacacagg

SEQ ID NO: 208494 - RNA, 18 nt, Human papillomavirus type 16
augcaggaacauccagac

SEQ ID NO: 208495 - RNA, 14 nt, Human papillomavirus type 16
aguggacauuacaa

SEQ ID NO: 208496 - RNA, 15 nt, Human papillomavirus type 16
aguggacauuacaag

SEQ ID NO: 208497 - RNA, 12 nt, Human papillomavirus type 16
aguuguaugugu

SEQ ID NO: 208498 - RNA, 17 nt, Human papillomavirus type 16
auaaacacguguguaug

SEQ ID NO: 208499 - RNA, 19 nt, Human papillomavirus type 16
auaaauuggaugacacaga

SEQ ID NO: 208500 - RNA, 12 nt, Human papillomavirus type 16
auaaacuauauu

SEQ ID NO: 208501 - RNA, 16 nt, Human papillomavirus type 16
agcaucaguaacugug

SEQ ID NO: 208502 - RNA, 10 nt, Human papillomavirus type 16
agcauuacaa

SEQ ID NO: 208503 - RNA, 16 nt, Human papillomavirus type 16
agcauuacaagcaauu

SEQ ID NO: 208504 - RNA, 17 nt, Human papillomavirus type 16
agcauuacaagcaauug

SEQ ID NO: 208505 - RNA, 20 nt, Human papillomavirus type 16
caaacauauauuaucaugca

SEQ ID NO: 208506 - RNA, 19 nt, Human papillomavirus type 16
caaagaauaaagcauuaca

SEQ ID NO: 208507 - RNA, 20 nt, Human papillomavirus type 16
caaagaauaaagcauuacaa

SEQ ID NO: 208508 - RNA, 15 nt, Human papillomavirus type 16
caaacuggacacaua

SEQ ID NO: 208509 - RNA, 18 nt, Human papillomavirus type 16
caaaguagagcugcaaaa

SEQ ID NO: 208510 - RNA, 20 nt, Human papillomavirus type 16
caacuaacguuagaaacaau

SEQ ID NO: 208511 - RNA, 20 nt, Human papillomavirus type 16
caacauagagaugcaguaca

SEQ ID NO: 208512 - RNA, 22 nt, Human papillomavirus type 16
auucauuguauauaaacuauau

SEQ ID NO: 208513 - RNA, 15 nt, Human papillomavirus type 16
auggagacauaugca

SEQ ID NO: 208514 - RNA, 15 nt, Human papillomavirus type 16
auuauuuaacacagg

SEQ ID NO: 208515 - RNA, 14 nt, Human papillomavirus type 16
cagcaaaugcaggu

SEQ ID NO: 208516 - RNA, 20 nt, Human papillomavirus type 16
cagaggaggaggaugaaaua

SEQ ID NO: 208517 - RNA, 13 nt, Human papillomavirus type 16
cagagacagcaca

SEQ ID NO: 208518 - RNA, 15 nt, Human papillomavirus type 16
cacugucuacuugcc

SEQ ID NO: 208519 - RNA, 14 nt, Human papillomavirus type 16
cagcuggacaagca

SEQ ID NO: 208520 - RNA, 19 nt, Human papillomavirus type 16
acaugcgccuagaaugugc

SEQ ID NO: 208521 - RNA, 22 nt, Human papillomavirus type 16
acaugcgccuagaaugugcuau

SEQ ID NO: 208522 - RNA, 17 nt, Human papillomavirus type 16
accaaguggugccaaca

SEQ ID NO: 208523 - RNA, 16 nt, Human papillomavirus type 16
acagugauacagguga

SEQ ID NO: 208524 - RNA, 19 nt, Human papillomavirus type 16
acauaugcaauacaaugca

SEQ ID NO: 208525 - RNA, 20 nt, Human papillomavirus type 16
acgcuuuuuaauuacauaau

SEQ ID NO: 208526 - RNA, 12 nt, Human papillomavirus type 16
agacuacuugca

SEQ ID NO: 208527 - RNA, 14 nt, Human papillomavirus type 16
agcaacuaugguuu

SEQ ID NO: 208528 - RNA, 13 nt, Human papillomavirus type 16
agcaaaugcaggu

SEQ ID NO: 208529 - RNA, 18 nt, Human papillomavirus type 16
agaacgaaaaugacagug

SEQ ID NO: 208530 - RNA, 21 nt, Human papillomavirus type 16
aaugaaaaguggacauuacaa

SEQ ID NO: 208531 - RNA, 19 nt, Human papillomavirus type 16
aaugugcuauuuauuacaa

SEQ ID NO: 208532 - RNA, 13 nt, Human papillomavirus type 16
aauugaacugcaa

SEQ ID NO: 208533 - RNA, 21 nt, Human papillomavirus type 16
aaguaucaggauuacaauaca

SEQ ID NO: 208534 - RNA, 16 nt, Human papillomavirus type 16
aagcaauugaacugca

SEQ ID NO: 208535 - RNA, 17 nt, Human papillomavirus type 16
aagcaauugaacugcaa

SEQ ID NO: 208536 - RNA, 17 nt, Human papillomavirus type 16
aagcaaaacaacauaga

SEQ ID NO: 208537 - RNA, 15 nt, Human papillomavirus type 16
aacuggacacauaua

SEQ ID NO: 208538 - RNA, 16 nt, Human papillomavirus type 16
aacuggacacauauau

SEQ ID NO: 208539 - RNA, 23 nt, Human papillomavirus type 16
aagaccuguuaaugggcacacua

SEQ ID NO: 208540 - RNA, 20 nt, Human papillomavirus type 16
aacaggggaugcuauaucag

SEQ ID NO: 208541 - RNA, 21 nt, Human papillomavirus type 16
aacauauauuaucaugcagga

SEQ ID NO: 208542 - RNA, 21 nt, Human papillomavirus type 16
aacacaggcagaaacagagac

SEQ ID NO: 208543 - RNA, 16 nt, Human papillomavirus type 16
aacaccuacuaauugu

SEQ ID NO: 208544 - RNA, 15 nt, Human papillomavirus type 16
aaaagcuauauguau

SEQ ID NO: 208545 - RNA, 14 nt, Human papillomavirus type 16
aaaacaacauagag

SEQ ID NO: 208546 - RNA, 15 nt, Human papillomavirus type 16
aaaacaacauagaga

SEQ ID NO: 208547 - RNA, 18 nt, Human papillomavirus type 16
aaacaauauauaacucac

SEQ ID NO: 208548 - RNA, 16 nt, Human papillomavirus type 16
aaacauggauauacag

SEQ ID NO: 208549 - RNA, 22 nt, Human papillomavirus type 16
uuuugucugugucuacauacac

SEQ ID NO: 208550 - RNA, 20 nt, Human papillomavirus type 16
uuuguugcaagugugacucu

SEQ ID NO: 208551 - RNA, 18 nt, Human papillomavirus type 16
uuuuaaauaguucuaugu

SEQ ID NO: 208552 - RNA, 16 nt, Human papillomavirus type 16
uuguaagcacggauga

SEQ ID NO: 208553 - RNA, 21 nt, Human papillomavirus type 16
uggagauacaccuacauugca

SEQ ID NO: 208554 - RNA, 13 nt, Human papillomavirus type 16
uggaaacacaugc

SEQ ID NO: 208555 - RNA, 22 nt, Human papillomavirus type 16
ugcuuuugucugugucuacaua

SEQ ID NO: 208556 - RNA, 20 nt, Human papillomavirus type 16
ugcuuuugugugucugccua

SEQ ID NO: 208557 - RNA, 15 nt, Human papillomavirus type 16
ugggauuuaaacaua

SEQ ID NO: 208558 - RNA, 15 nt, Human papillomavirus type 16
ugugcguacaaagca

SEQ ID NO: 208559 - RNA, 22 nt, Human papillomavirus type 16
uuauguagaggcuguaguggaa

SEQ ID NO: 208560 - RNA, 13 nt, Human papillomavirus type 16
uuauuguauauau

SEQ ID NO: 208561 - RNA, 16 nt, Human papillomavirus type 16
uuauuugaaagcgaag

SEQ ID NO: 208562 - RNA, 17 nt, Human papillomavirus type 16
ugugucuacauacacau

SEQ ID NO: 208563 - RNA, 19 nt, Human papillomavirus type 16
uucguacuuuggaagaccu

SEQ ID NO: 208564 - RNA, 16 nt, Human papillomavirus type 16
uucuaaaacgaaagua

SEQ ID NO: 208565 - RNA, 21 nt, Human papillomavirus type 16
uugauacugcauccacaacau

SEQ ID NO: 208566 - RNA, 19 nt, Human papillomavirus type 16
uccagcuggacaagcagaa

SEQ ID NO: 208567 - RNA, 19 nt, Human papillomavirus type 16
ugauggagacauaugcaau

SEQ ID NO: 208568 - RNA, 14 nt, Human papillomavirus type 16
cuggcuguaucaaa

SEQ ID NO: 208569 - RNA, 17 nt, Human papillomavirus type 16
ccuacauugcaugaaua

SEQ ID NO: 208570 - RNA, 19 nt, Human papillomavirus type 16
gcaauacaaugcauuauac

SEQ ID NO: 208571 - RNA, 15 nt, Human papillomavirus type 16
gauuuaaacauauua

SEQ ID NO: 208572 - RNA, 19 nt, Human papillomavirus type 16
gauggagacauaugcaaua

SEQ ID NO: 208573 - RNA, 13 nt, Human papillomavirus type 16
cuguaguggaaaa

SEQ ID NO: 208574 - RNA, 14 nt, Human papillomavirus type 16
gacaacugaucucu

SEQ ID NO: 208575 - RNA, 20 nt, Human papillomavirus type 16
gaaaugggauuuaaacauau

SEQ ID NO: 208576 - RNA, 17 nt, Human papillomavirus type 16
gaaaaguggacauuaca

SEQ ID NO: 208577 - RNA, 17 nt, Human papillomavirus type 16
uaauuguuguauaccau

SEQ ID NO: 208578 - RNA, 22 nt, Human papillomavirus type 16
uacaggguauuuagaauacauu

SEQ ID NO: 208579 - RNA, 19 nt, Human papillomavirus type 16
uacacaucauuaauaauau

SEQ ID NO: 208580 - RNA, 17 nt, Human papillomavirus type 16
uacaaugcauuauacaa

SEQ ID NO: 208581 - RNA, 19 nt, Human papillomavirus type 16
uauauaaacuauauuugcu

SEQ ID NO: 208582 - RNA, 21 nt, Human papillomavirus type 16
uauauauuauauuuguuuaua

SEQ ID NO: 208583 - RNA, 17 nt, Human papillomavirus type 16
uauauguuuguaugugc

SEQ ID NO: 208584 - RNA, 18 nt, Human papillomavirus type 16
uauauguuuguaugugcu

SEQ ID NO: 208585 - RNA, 19 nt, Human papillomavirus type 16
uagacuauuggaaacacau

SEQ ID NO: 208586 - RNA, 15 nt, Human papillomavirus type 16
guuuguuguguauau

SEQ ID NO: 208587 - RNA, 17 nt, Human papillomavirus type 16
uaaauaguucuauguca

SEQ ID NO: 208588 - RNA, 19 nt, Human papillomavirus type 16
uaaacacguguguaugugu

SEQ ID NO: 208589 - RNA, 12 nt, Human papillomavirus type 16
uaaaugcuugug

SEQ ID NO: 208590 - RNA, 16 nt, Human papillomavirus type 16
uaaaugcuuguguaac

SEQ ID NO: 208591 - RNA, 19 nt, Human papillomavirus type 16
gcuuguguaacuauugugu

SEQ ID NO: 208592 - RNA, 15 nt, Human papillomavirus type 16
gcuggacaagcagaa

SEQ ID NO: 208593 - RNA, 16 nt, Human papillomavirus type 16
gcuauauguauagaaa

SEQ ID NO: 208594 - RNA, 16 nt, Human papillomavirus type 16
gcuauaucagaugacg

SEQ ID NO: 208595 - RNA, 21 nt, Human papillomavirus type 16
ggcauuaguggccauccuuua

SEQ ID NO: 208596 - RNA, 13 nt, Human papillomavirus type 16
ggcacacuaggaa

SEQ ID NO: 208597 - RNA, 16 nt, Human papillomavirus type 16
guauagaaaaacaaag

SEQ ID NO: 208598 - RNA, 22 nt, Human papillomavirus type 16
guauaaaaaaacauggauauac

SEQ ID NO: 208599 - RNA, 14 nt, Human papillomavirus type 16
gguccagcuggaca

SEQ ID NO: 208600 - RNA, 12 nt, Human papillomavirus type 16
ccauuaggugug

SEQ ID NO: 208601 - RNA, 22 nt, Human papillomavirus type 16
caggauguauaaaaaaacaugg

SEQ ID NO: 208602 - RNA, 21 nt, Human papillomavirus type 16
caggaagcaaaacaacauaga

SEQ ID NO: 208603 - RNA, 17 nt, Human papillomavirus type 16
caguuugauggagacau

SEQ ID NO: 208604 - RNA, 20 nt, Human papillomavirus type 16
caguuugauggagacauaug

SEQ ID NO: 208605 - RNA, 23 nt, Human papillomavirus type 16
caguuugauggagacauaugcaa

SEQ ID NO: 208606 - RNA, 17 nt, Human papillomavirus type 16
caggugaagauuuggua

SEQ ID NO: 208607 - RNA, 14 nt, Human papillomavirus type 16
cauauuaaccacca

SEQ ID NO: 208608 - RNA, 17 nt, Human papillomavirus type 16
cauccagacuacuugca

SEQ ID NO: 208609 - RNA, 21 nt, Human papillomavirus type 16
caacauagagaugcaguacag

SEQ ID NO: 208610 - RNA, 17 nt, Human papillomavirus type 16
caaacuggacacauaua

SEQ ID NO: 208611 - RNA, 22 nt, Human papillomavirus type 16
caauauaguaaugaaaagugga

SEQ ID NO: 208612 - RNA, 21 nt, Human papillomavirus type 16
auuauuugaaagcgaagacag

SEQ ID NO: 208613 - RNA, 16 nt, Human papillomavirus type 16
auugaacugcaacuaa

SEQ ID NO: 208614 - RNA, 14 nt, Human papillomavirus type 16
auggagacauaugc

SEQ ID NO: 208615 - RNA, 19 nt, Human papillomavirus type 16
auggaugguuuuauguaga

SEQ ID NO: 208616 - RNA, 16 nt, Human papillomavirus type 16
auguugcacgcacaaa

SEQ ID NO: 208617 - RNA, 20 nt, Human papillomavirus type 16
auggggaagaggguacggga

SEQ ID NO: 208618 - RNA, 13 nt, Human papillomavirus type 16
augcaguacaggu

SEQ ID NO: 208619 - RNA, 19 nt, Human papillomavirus type 16
augaaaaguggacauuaca

SEQ ID NO: 208620 - RNA, 20 nt, Human papillomavirus type 16
augaaaaguggacauuacaa

SEQ ID NO: 208621 - RNA, 17 nt, Human papillomavirus type 16
augacagugauacaggu

SEQ ID NO: 208622 - RNA, 21 nt, Human papillomavirus type 16
accaaguggugccaacacugg

SEQ ID NO: 208623 - RNA, 20 nt, Human papillomavirus type 16
accggacagagcccauuaca

SEQ ID NO: 208624 - RNA, 14 nt, Human papillomavirus type 16
acuaauuguguugu

SEQ ID NO: 208625 - RNA, 18 nt, Human papillomavirus type 16
acugcauccacaacauua

SEQ ID NO: 208626 - RNA, 14 nt, Human papillomavirus type 16
acugucuacuugcc

SEQ ID NO: 208627 - RNA, 12 nt, Human papillomavirus type 16
acaaaauguguu

SEQ ID NO: 208628 - RNA, 11 nt, Human papillomavirus type 16
acaaagcacac

SEQ ID NO: 208629 - RNA, 12 nt, Human papillomavirus type 16
aaugacagugau

SEQ ID NO: 208630 - RNA, 22 nt, Human papillomavirus type 16
acaauauaguaaugaaaagugg

SEQ ID NO: 208631 - RNA, 21 nt, Human papillomavirus type 16
acaagcaauugaacugcaacu

SEQ ID NO: 208632 - RNA, 19 nt, Human papillomavirus type 16
acaacauagagaugcagua

SEQ ID NO: 208633 - RNA, 22 nt, Human papillomavirus type 16
acacuggcuguaucaaagaaua

SEQ ID NO: 208634 - RNA, 18 nt, Human papillomavirus type 16
acacaugcgccuagaaug

SEQ ID NO: 208635 - RNA, 19 nt, Human papillomavirus type 16
acacaggcagaaacagaga

SEQ ID NO: 208636 - RNA, 16 nt, Human papillomavirus type 16
acauaugcaauacaau

SEQ ID NO: 208637 - RNA, 17 nt, Human papillomavirus type 16
acauaugcaauacaaug

SEQ ID NO: 208638 - RNA, 20 nt, Human papillomavirus type 16
acauauauuaucaugcagga

SEQ ID NO: 208639 - RNA, 13 nt, Human papillomavirus type 16
acauauuaaccac

SEQ ID NO: 208640 - RNA, 14 nt, Human papillomavirus type 16
acauagagaugcag

SEQ ID NO: 208641 - RNA, 22 nt, Human papillomavirus type 16
agaugguccagcuggacaagca

SEQ ID NO: 208642 - RNA, 11 nt, Human papillomavirus type 16
agcauuacaag

SEQ ID NO: 208643 - RNA, 12 nt, Human papillomavirus type 16
auaauccagaua

SEQ ID NO: 208644 - RNA, 16 nt, Human papillomavirus type 16
auaauccagauacaca

SEQ ID NO: 208645 - RNA, 20 nt, Human papillomavirus type 16
auaauaaacacguguguaug

SEQ ID NO: 208646 - RNA, 13 nt, Human papillomavirus type 16
auaacucacaaua

SEQ ID NO: 208647 - RNA, 19 nt, Human papillomavirus type 16
auauguuuguaugugcuug

SEQ ID NO: 208648 - RNA, 18 nt, Human papillomavirus type 16
auauguugcacgcacaaa

SEQ ID NO: 208649 - RNA, 23 nt, Human papillomavirus type 16
auauaacucacaauauaguaaug

SEQ ID NO: 208650 - RNA, 14 nt, Human papillomavirus type 16
auaaagcauuacaa

SEQ ID NO: 208651 - RNA, 14 nt, Human papillomavirus type 16
aguccuagauuaaa

SEQ ID NO: 208652 - RNA, 21 nt, Human papillomavirus type 16
agguguugagguaggucgugg

SEQ ID NO: 208653 - RNA, 16 nt, Human papillomavirus type 16
aaaacauggauauaca

SEQ ID NO: 208654 - RNA, 17 nt, Human papillomavirus type 16
aaauuggaugacacaga

SEQ ID NO: 208655 - RNA, 18 nt, Human papillomavirus type 16
aacacuggcuguaucaaa

SEQ ID NO: 208656 - RNA, 15 nt, Human papillomavirus type 16
aaccaccaaguggug

SEQ ID NO: 208657 - RNA, 16 nt, Human papillomavirus type 16
aaccuaacaauaacaa

SEQ ID NO: 208658 - RNA, 16 nt, Human papillomavirus type 16
aaaugacagugauaca

SEQ ID NO: 208659 - RNA, 16 nt, Human papillomavirus type 16
aaacuggacacauaua

SEQ ID NO: 208660 - RNA, 17 nt, Human papillomavirus type 16
aaaaugacagugauaca

SEQ ID NO: 208661 - RNA, 22 nt, Human papillomavirus type 16
aaugcauuauacaaacuggaca

SEQ ID NO: 208662 - RNA, 23 nt, Human papillomavirus type 16
aauuaguguuguuuguuguguau

SEQ ID NO: 208663 - RNA, 18 nt, Human papillomavirus type 16
aauguauauguacauaau

SEQ ID NO: 208664 - RNA, 12 nt, Human papillomavirus type 16
aauacaaugcau

SEQ ID NO: 208665 - RNA, 13 nt, Human papillomavirus type 16
aagaauaaagcau

SEQ ID NO: 208666 - RNA, 23 nt, Human papillomavirus type 16
aacuuguacguuuccugcuugcc

SEQ ID NO: 208667 - RNA, 15 nt, Human papillomavirus type 16
accauauagacuauu

SEQ ID NO: 208668 - RNA, 17 nt, Human papillomavirus type 16
acaggggaugcuauauc

SEQ ID NO: 208669 - RNA, 14 nt, Human papillomavirus type 16
acacguguguaugu

SEQ ID NO: 208670 - RNA, 16 nt, Human papillomavirus type 16
acuauuggaaacacau

SEQ ID NO: 208671 - RNA, 17 nt, Human papillomavirus type 16
agaauaaagcauuacaa

SEQ ID NO: 208672 - RNA, 13 nt, Human papillomavirus type 16
caauacaaugcau

SEQ ID NO: 208673 - RNA, 21 nt, Human papillomavirus type 16
caaugcauuauacaaacugga

SEQ ID NO: 208674 - RNA, 14 nt, Human papillomavirus type 16
cacacguagacauu

SEQ ID NO: 208675 - RNA, 23 nt, Human papillomavirus type 16
cacaggaagcaaaacaacauaga

SEQ ID NO: 208676 - RNA, 15 nt, Human papillomavirus type 16
auguaauuguuacau

SEQ ID NO: 208677 - RNA, 19 nt, Human papillomavirus type 16
auguaauuguuacauauaa

SEQ ID NO: 208678 - RNA, 16 nt, Human papillomavirus type 16
auggggaagaggguac

SEQ ID NO: 208679 - RNA, 20 nt, Human papillomavirus type 16
auggcugauccugcagguac

SEQ ID NO: 208680 - RNA, 15 nt, Human papillomavirus type 16
auguuagauuugcaa

SEQ ID NO: 208681 - RNA, 14 nt, Human papillomavirus type 16
caaaacaacauaga

SEQ ID NO: 208682 - RNA, 17 nt, Human papillomavirus type 16
caaaacaacauagagau

SEQ ID NO: 208683 - RNA, 17 nt, Human papillomavirus type 16
auuuuuaauacauacac

SEQ ID NO: 208684 - RNA, 15 nt, Human papillomavirus type 16
auuguuguauaccau

SEQ ID NO: 208685 - RNA, 13 nt, Human papillomavirus type 16
auuuaacugcacc

SEQ ID NO: 208686 - RNA, 22 nt, Human papillomavirus type 16
auuacauaauguauauguacau

SEQ ID NO: 208687 - RNA, 15 nt, Human papillomavirus type 16
auuggaugacacaga

SEQ ID NO: 208688 - RNA, 17 nt, Human papillomavirus type 16
agauacaccuacauugc

SEQ ID NO: 208689 - RNA, 19 nt, Human papillomavirus type 16
agauacaccuacauugcau

SEQ ID NO: 208690 - RNA, 14 nt, Human papillomavirus type 16
agcggcugguuugg

SEQ ID NO: 208691 - RNA, 12 nt, Human papillomavirus type 16
auacauacacau

SEQ ID NO: 208692 - RNA, 20 nt, Human papillomavirus type 16
auacacaugcacgcuuuuua

SEQ ID NO: 208693 - RNA, 17 nt, Human papillomavirus type 16
auacaguggaagugcag

SEQ ID NO: 208694 - RNA, 18 nt, Human papillomavirus type 16
auagacuauuggaaacac

SEQ ID NO: 208695 - RNA, 22 nt, Human papillomavirus type 16
auagacuauuggaaacacaugc

SEQ ID NO: 208696 - RNA, 17 nt, Human papillomavirus type 16
aucucuacuguuaugag

SEQ ID NO: 208697 - RNA, 19 nt, Human papillomavirus type 16
auauuuguuuauauaccau

SEQ ID NO: 208698 - RNA, 19 nt, Human papillomavirus type 16
uguuuguuguguauauguu

SEQ ID NO: 208699 - RNA, 21 nt, Human papillomavirus type 16
uuaacacaggcagaaacagag

SEQ ID NO: 208700 - RNA, 19 nt, Human papillomavirus type 16
uuauuuuuaauacauacac

SEQ ID NO: 208701 - RNA, 14 nt, Human papillomavirus type 16
uuauacaaacugga

SEQ ID NO: 208702 - RNA, 15 nt, Human papillomavirus type 16
uggugccaacacugg

SEQ ID NO: 208703 - RNA, 18 nt, Human papillomavirus type 16
uguguaacuauuguguca

SEQ ID NO: 208704 - RNA, 24 nt, Human papillomavirus type 16
uguguaacuauugugucaugcaac

SEQ ID NO: 208705 - RNA, 13 nt, Human papillomavirus type 16
ugaucucuacugu

SEQ ID NO: 208706 - RNA, 13 nt, Human papillomavirus type 16
ugauacaggugaa

SEQ ID NO: 208707 - RNA, 24 nt, Human papillomavirus type 16
ugcaguuugauggagacauaugca

SEQ ID NO: 208708 - RNA, 17 nt, Human papillomavirus type 16
ugcacaggaagcaaaac

SEQ ID NO: 208709 - RNA, 17 nt, Human papillomavirus type 16
ugcaccaacaggaugua

SEQ ID NO: 208710 - RNA, 21 nt, Human papillomavirus type 16
ugcaccaacaggauguauaaa

SEQ ID NO: 208711 - RNA, 12 nt, Human papillomavirus type 16
ugccccaucugu

SEQ ID NO: 208712 - RNA, 16 nt, Human papillomavirus type 16
ugccccaucuguucuc

SEQ ID NO: 208713 - RNA, 14 nt, Human papillomavirus type 16
ugcuuguaugugcu

SEQ ID NO: 208714 - RNA, 18 nt, Human papillomavirus type 16
ugcguacaaagcacacac

SEQ ID NO: 208715 - RNA, 23 nt, Human papillomavirus type 16
aauauuaguuccuaaaguaucag

SEQ ID NO: 208716 - RNA, 15 nt, Human papillomavirus type 16
aauaaagcauuacaa

SEQ ID NO: 208717 - RNA, 15 nt, Human papillomavirus type 16
aaguggacauuacaa

SEQ ID NO: 208718 - RNA, 16 nt, Human papillomavirus type 16
aauaaauuggaugaca

SEQ ID NO: 208719 - RNA, 15 nt, Human papillomavirus type 16
aacuauugugucaug

SEQ ID NO: 208720 - RNA, 16 nt, Human papillomavirus type 16
aacacuggcuguauca

SEQ ID NO: 208721 - RNA, 17 nt, Human papillomavirus type 16
aacacguguguaugugu

SEQ ID NO: 208722 - RNA, 18 nt, Human papillomavirus type 16
aacacguguguauguguu

SEQ ID NO: 208723 - RNA, 16 nt, Human papillomavirus type 16
uugcuuugugugcuuu

SEQ ID NO: 208724 - RNA, 14 nt, Human papillomavirus type 16
uuuaauuacauaau

SEQ ID NO: 208725 - RNA, 14 nt, Human papillomavirus type 16
uuguuguauaccau

SEQ ID NO: 208726 - RNA, 15 nt, Human papillomavirus type 16
uugugugucugccua

SEQ ID NO: 208727 - RNA, 18 nt, Human papillomavirus type 16
uuuaccugaccccaauaa

SEQ ID NO: 208728 - RNA, 21 nt, Human papillomavirus type 16
uuguaaauauuaaguuguaug

SEQ ID NO: 208729 - RNA, 17 nt, Human papillomavirus type 16
uuguaugugcuuguaug

SEQ ID NO: 208730 - RNA, 17 nt, Human papillomavirus type 16
uuuuauauauacuauau

SEQ ID NO: 208731 - RNA, 18 nt, Human papillomavirus type 16
uuuuauauauacuauauu

SEQ ID NO: 208732 - RNA, 14 nt, Human papillomavirus type 16
uuugucugugucua

SEQ ID NO: 208733 - RNA, 12 nt, Human papillomavirus type 16
uaauacauacac

SEQ ID NO: 208734 - RNA, 14 nt, Human papillomavirus type 16
uaauacauacacau

SEQ ID NO: 208735 - RNA, 23 nt, Human papillomavirus type 16
uacauauaauuguuguauaccau

SEQ ID NO: 208736 - RNA, 20 nt, Human papillomavirus type 16
uacaaggccagagaaauggg

SEQ ID NO: 208737 - RNA, 13 nt, Human papillomavirus type 16
uacaagcaauuga

SEQ ID NO: 208738 - RNA, 19 nt, Human papillomavirus type 16
uacaagcaauugaacugca

SEQ ID NO: 208739 - RNA, 21 nt, Human papillomavirus type 16
uaaauauuaaguuguaugugu

SEQ ID NO: 208740 - RNA, 17 nt, Human papillomavirus type 16
uaacguuagaaacaaua

SEQ ID NO: 208741 - RNA, 18 nt, Human papillomavirus type 16
uaacuauugugucaugca

SEQ ID NO: 208742 - RNA, 14 nt, Human papillomavirus type 16
uaagcacggaugaa

SEQ ID NO: 208743 - RNA, 17 nt, Human papillomavirus type 16
guauaaaaaaacaugga

SEQ ID NO: 208744 - RNA, 16 nt, Human papillomavirus type 16
guccacuuagugauau

SEQ ID NO: 208745 - RNA, 18 nt, Human papillomavirus type 16
guaugugcuuguaaauau

SEQ ID NO: 208746 - RNA, 23 nt, Human papillomavirus type 16
guauauguuuguaugugcuugua

SEQ ID NO: 208747 - RNA, 12 nt, Human papillomavirus type 16
gugauacaggug

SEQ ID NO: 208748 - RNA, 17 nt, Human papillomavirus type 16
gucugugucuacauaca

SEQ ID NO: 208749 - RNA, 12 nt, Human papillomavirus type 16
guggacauuaca

SEQ ID NO: 208750 - RNA, 22 nt, Human papillomavirus type 16
guggugccaacacuggcuguau

SEQ ID NO: 208751 - RNA, 18 nt, Human papillomavirus type 16
ucaaagaauaaagcauua

SEQ ID NO: 208752 - RNA, 23 nt, Human papillomavirus type 16
uauuauauuuguuuauauaccau

SEQ ID NO: 208753 - RNA, 15 nt, Human papillomavirus type 16
uauguuagauuugca

SEQ ID NO: 208754 - RNA, 13 nt, Human papillomavirus type 16
uauauacuauauu

SEQ ID NO: 208755 - RNA, 17 nt, Human papillomavirus type 16
uauagaaaaacaaagua

SEQ ID NO: 208756 - RNA, 21 nt, Human papillomavirus type 16
uauauuugugaagaagcauca

SEQ ID NO: 208757 - RNA, 22 nt, Human papillomavirus type 16
uauauguuuguaugugcuugua

SEQ ID NO: 208758 - RNA, 13 nt, Human papillomavirus type 16
uagaaugugcuau

SEQ ID NO: 208759 - RNA, 22 nt, Human papillomavirus type 16
uagaaugugcuauuuauuacaa

SEQ ID NO: 208760 - RNA, 13 nt, Human papillomavirus type 16
uauacaaacugga

SEQ ID NO: 208761 - RNA, 22 nt, Human papillomavirus type 16
uaucaugcaggaacauccagac

SEQ ID NO: 208762 - RNA, 19 nt, Human papillomavirus type 16
cugcaacuaacguuagaaa

SEQ ID NO: 208763 - RNA, 22 nt, Human papillomavirus type 16
cugcaccaacaggauguauaaa

SEQ ID NO: 208764 - RNA, 13 nt, Human papillomavirus type 16
cugucuacuugcc

SEQ ID NO: 208765 - RNA, 17 nt, Human papillomavirus type 16
cuacgugaccauauaga

SEQ ID NO: 208766 - RNA, 15 nt, Human papillomavirus type 16
cuacauacacaucau

SEQ ID NO: 208767 - RNA, 16 nt, Human papillomavirus type 16
aaacauauauuaucau

SEQ ID NO: 208768 - RNA, 18 nt, Human papillomavirus type 16
ccuguuaaugggcacacu

SEQ ID NO: 208769 - RNA, 14 nt, Human papillomavirus type 16
aaacaauauauaac

SEQ ID NO: 208770 - RNA, 14 nt, Human papillomavirus type 16
ccugcagguaccaa

SEQ ID NO: 208771 - RNA, 18 nt, Human papillomavirus type 16
ccauuauuuuuaauacau

SEQ ID NO: 208772 - RNA, 15 nt, Human papillomavirus type 16
ccagcuggacaagca

SEQ ID NO: 208773 - RNA, 16 nt, Human papillomavirus type 16
ccagcuggacaagcag

SEQ ID NO: 208774 - RNA, 12 nt, Human papillomavirus type 16
cauuaggugugg

SEQ ID NO: 208775 - RNA, 13 nt, Human papillomavirus type 16
cauuacaagcaau

SEQ ID NO: 208776 - RNA, 21 nt, Human papillomavirus type 16
cauagagaugcaguacagguu

SEQ ID NO: 208777 - RNA, 13 nt, Human papillomavirus type 16
cauaugcaauaca

SEQ ID NO: 208778 - RNA, 18 nt, Human papillomavirus type 16
cauggauauacaguggaa

SEQ ID NO: 208779 - RNA, 20 nt, Human papillomavirus type 16
cagaccuacgugaccauaua

SEQ ID NO: 208780 - RNA, 12 nt, Human papillomavirus type 16
cagagaaauggg

SEQ ID NO: 208781 - RNA, 22 nt, Human papillomavirus type 16
cauaauguaauuguuacauaua

SEQ ID NO: 208782 - RNA, 15 nt, Human papillomavirus type 16
gcaucaguaacugug

SEQ ID NO: 208783 - RNA, 16 nt, Human papillomavirus type 16
gcagaaacagagacag

SEQ ID NO: 208784 - RNA, 20 nt, Human papillomavirus type 16
gcaauacaaugcauuauaca

SEQ ID NO: 208785 - RNA, 16 nt, Human papillomavirus type 16
gcaagugugacucuac

SEQ ID NO: 208786 - RNA, 14 nt, Human papillomavirus type 16
gcacaaaauguguu

SEQ ID NO: 208787 - RNA, 21 nt, Human papillomavirus type 16
gcuuguaaauauuaaguugua

SEQ ID NO: 208788 - RNA, 13 nt, Human papillomavirus type 16
gcuuugcuuugug

SEQ ID NO: 208789 - RNA, 16 nt, Human papillomavirus type 16
ggcagaaacagagaca

SEQ ID NO: 208790 - RNA, 15 nt, Human papillomavirus type 16
gaccuguuaaugggc

SEQ ID NO: 208791 - RNA, 20 nt, Human papillomavirus type 16
gacauaugcaauacaaugca

SEQ ID NO: 208792 - RNA, 16 nt, Human papillomavirus type 16
gacagugauacaggug

SEQ ID NO: 208793 - RNA, 23 nt, Human papillomavirus type 16
gagaacgaaaaugacagugauac

SEQ ID NO: 208794 - RNA, 17 nt, Human papillomavirus type 16
gagaugcaguacagguu

SEQ ID NO: 208795 - RNA, 13 nt, Human papillomavirus type 16
aaagaauaaagca

SEQ ID NO: 208796 - RNA, 16 nt, Human papillomavirus type 16
aaagaauaaagcauua

SEQ ID NO: 208797 - RNA, 23 nt, Human papillomavirus type 16
cuuuugucugugucuacauacac

SEQ ID NO: 208798 - RNA, 23 nt, Human parainfluenza virus 1 strain Washington/1964
gaaaaacaagauacacaacaaac

SEQ ID NO: 208799 - RNA, 16 nt, Human parainfluenza virus 1 strain Washington/1964
gaaaaacguagggaca

SEQ ID NO: 208800 - RNA, 16 nt, Human parainfluenza virus 1 strain Washington/1964
gaaaacaaauaguuca

SEQ ID NO: 208801 - RNA, 14 nt, Human parainfluenza virus 1 strain Washington/1964
gaaagaaaaggaca

SEQ ID NO: 208802 - RNA, 13 nt, Human parainfluenza virus 1 strain Washington/1964
aaagacaauccag

SEQ ID NO: 208803 - RNA, 16 nt, Human parainfluenza virus 1 strain Washington/1964
aaagcaagauugcuca

SEQ ID NO: 208804 - RNA, 20 nt, Human parainfluenza virus 1 strain Washington/1964
aaagcaagauugcucaacuu

SEQ ID NO: 208805 - RNA, 15 nt, Human parainfluenza virus 1 strain Washington/1964
aaagcaaucccucac

SEQ ID NO: 208806 - RNA, 21 nt, Human parainfluenza virus 1 strain Washington/1964
gaaucuacaauuucaaccagc

SEQ ID NO: 208807 - RNA, 14 nt, Human parainfluenza virus 1 strain Washington/1964
gaaaugacaauucc

SEQ ID NO: 208808 - RNA, 16 nt, Human parainfluenza virus 1 strain Washington/1964
gaagaggaaaccagca

SEQ ID NO: 208809 - RNA, 15 nt, Human parainfluenza virus 1 strain Washington/1964
gaagacaaacaucau

SEQ ID NO: 208810 - RNA, 17 nt, Human parainfluenza virus 1 strain Washington/1964
gaagaccacaacaccaa

SEQ ID NO: 208811 - RNA, 20 nt, Human parainfluenza virus 1 strain Washington/1964
gaagaccacaacaccaaaac

SEQ ID NO: 208812 - RNA, 13 nt, Human parainfluenza virus 1 strain Washington/1964
gaagaaaauggga

SEQ ID NO: 208813 - RNA, 16 nt, Human parainfluenza virus 1 strain Washington/1964
gagauccuccaaaaca

SEQ ID NO: 208814 - RNA, 15 nt, Human parainfluenza virus 1 strain Washington/1964
gagccaacucaaaaa

SEQ ID NO: 208815 - RNA, 12 nt, Human parainfluenza virus 1 strain Washington/1964
aacaacaaugca

SEQ ID NO: 208816 - RNA, 19 nt, Human parainfluenza virus 1 strain Washington/1964
aacaacaaugcauacagua

SEQ ID NO: 208817 - RNA, 15 nt, Human parainfluenza virus 1 strain Washington/1964
aacaaagacagagca

SEQ ID NO: 208818 - RNA, 15 nt, Human parainfluenza virus 1 strain Washington/1964
aacaaauaguucaua

SEQ ID NO: 208819 - RNA, 16 nt, Human parainfluenza virus 1 strain Washington/1964
gaggaaaccagcaaca

SEQ ID NO: 208820 - RNA, 21 nt, Human parainfluenza virus 1 strain Washington/1964
gacaguagaaccucucccucu

SEQ ID NO: 208821 - RNA, 13 nt, Human parainfluenza virus 1 strain Washington/1964
gacaaacaucaug

SEQ ID NO: 208822 - RNA, 14 nt, Human parainfluenza virus 1 strain Washington/1964
gacaaaaaagcaau

SEQ ID NO: 208823 - RNA, 22 nt, Human parainfluenza virus 1 strain Washington/1964
gacaaaaacggaggcaagaaca

SEQ ID NO: 208824 - RNA, 14 nt, Human parainfluenza virus 1 strain Washington/1964
gacaaaaaugcaaa

SEQ ID NO: 208825 - RNA, 16 nt, Human parainfluenza virus 1 strain Washington/1964
aacaaaaacaagaaca

SEQ ID NO: 208826 - RNA, 21 nt, Human parainfluenza virus 1 strain Washington/1964
ggauucuuugaaacaccuaag

SEQ ID NO: 208827 - RNA, 15 nt, Human parainfluenza virus 1 strain Washington/1964
ggcagcauaucugau

SEQ ID NO: 208828 - RNA, 23 nt, Human parainfluenza virus 1 strain Washington/1964
ggacaagaucacaaacaagaaca

SEQ ID NO: 208829 - RNA, 15 nt, Human parainfluenza virus 1 strain Washington/1964
ggaaggacacacauc

SEQ ID NO: 208830 - RNA, 17 nt, Human parainfluenza virus 1 strain Washington/1964
ggaagaaaaacaaaagu

SEQ ID NO: 208831 - RNA, 12 nt, Human parainfluenza virus 1 strain Washington/1964
gcuagauaucaa

SEQ ID NO: 208832 - RNA, 16 nt, Human parainfluenza virus 1 strain Washington/1964
gcaccacgaaaacaag

SEQ ID NO: 208833 - RNA, 22 nt, Human parainfluenza virus 1 strain Washington/1964
gcaaucucaacgucgacccaag

SEQ ID NO: 208834 - RNA, 17 nt, Human parainfluenza virus 1 strain Washington/1964
gcaaucccucacaucag

SEQ ID NO: 208835 - RNA, 14 nt, Human parainfluenza virus 1 strain Washington/1964
gcaggaaggacaca

SEQ ID NO: 208836 - RNA, 23 nt, Human parainfluenza virus 1 strain Washington/1964
gcauaucugaucucacagaauca

SEQ ID NO: 208837 - RNA, 16 nt, Human parainfluenza virus 1 strain Washington/1964
gcauacauacaacaau

SEQ ID NO: 208838 - RNA, 13 nt, Human parainfluenza virus 1 strain Washington/1964
gccagaucaaaag

SEQ ID NO: 208839 - RNA, 18 nt, Human parainfluenza virus 1 strain Washington/1964
cauacauacaacaaucaa

SEQ ID NO: 208840 - RNA, 18 nt, Human parainfluenza virus 1 strain Washington/1964
caguauaauaaauaucac

SEQ ID NO: 208841 - RNA, 22 nt, Human parainfluenza virus 1 strain Washington/1964
caguagaaccucucccucucaa

SEQ ID NO: 208842 - RNA, 19 nt, Human parainfluenza virus 1 strain Washington/1964
ccagagccaacucaaaaag

SEQ ID NO: 208843 - RNA, 19 nt, Human parainfluenza virus 1 strain Washington/1964
ccaucaagcguaaccaaac

SEQ ID NO: 208844 - RNA, 19 nt, Human parainfluenza virus 1 strain Washington/1964
cccagauucucacacgaag

SEQ ID NO: 208845 - RNA, 13 nt, Human parainfluenza virus 1 strain Washington/1964
cccgaaaugacaa

SEQ ID NO: 208846 - RNA, 10 nt, Human parainfluenza virus 1 strain Washington/1964
cccucaaaac

SEQ ID NO: 208847 - RNA, 17 nt, Human parainfluenza virus 1 strain Washington/1964
ccugccuauuugucaaa

SEQ ID NO: 208848 - RNA, 16 nt, Human parainfluenza virus 1 strain Washington/1964
ccuccaaaacauggag

SEQ ID NO: 208849 - RNA, 17 nt, Human parainfluenza virus 1 strain Washington/1964
cucucaaaacagguccu

SEQ ID NO: 208850 - RNA, 18 nt, Human parainfluenza virus 1 strain Washington/1964
uaucuugaugugcuacua

SEQ ID NO: 208851 - RNA, 19 nt, Human parainfluenza virus 1 strain Washington/1964
uagaaccucucccucucaa

SEQ ID NO: 208852 - RNA, 17 nt, Human parainfluenza virus 1 strain Washington/1964
uauaucaauuaugugaa

SEQ ID NO: 208853 - RNA, 13 nt, Human parainfluenza virus 1 strain Washington/1964
ucagaauuccuca

SEQ ID NO: 208854 - RNA, 17 nt, Human parainfluenza virus 1 strain Washington/1964
ucacaaacaagaacaaa

SEQ ID NO: 208855 - RNA, 24 nt, Human parainfluenza virus 1 strain Washington/1964
ucaccaaucagguguacaacaagu

SEQ ID NO: 208856 - RNA, 19 nt, Human parainfluenza virus 1 strain Washington/1964
uccugacaaaaaagcaauc

SEQ ID NO: 208857 - RNA, 12 nt, Human parainfluenza virus 1 strain Washington/1964
uccuccaugaac

SEQ ID NO: 208858 - RNA, 19 nt, Human parainfluenza virus 1 strain Washington/1964
ucgauacaaucaguucaaa

SEQ ID NO: 208859 - RNA, 14 nt, Human parainfluenza virus 1 strain Washington/1964
ucgaagaccacaac

SEQ ID NO: 208860 - RNA, 15 nt, Human parainfluenza virus 1 strain Washington/1964
ucccucucaaaacag

SEQ ID NO: 208861 - RNA, 14 nt, Human parainfluenza virus 1 strain Washington/1964
ucaucgacaaccca

SEQ ID NO: 208862 - RNA, 21 nt, Human parainfluenza virus 1 strain Washington/1964
ucaugacaguauccuccauga

SEQ ID NO: 208863 - RNA, 23 nt, Human parainfluenza virus 1 strain Washington/1964
ucuggcuacugauugcaacaaca

SEQ ID NO: 208864 - RNA, 16 nt, Human parainfluenza virus 1 strain Washington/1964
guuaaagacaauccag

SEQ ID NO: 208865 - RNA, 16 nt, Human parainfluenza virus 1 strain Washington/1964
gugccaaaauaaucaa

SEQ ID NO: 208866 - RNA, 19 nt, Human parainfluenza virus 1 strain Washington/1964
guaucaucgacaacccaaa

SEQ ID NO: 208867 - RNA, 16 nt, Human parainfluenza virus 1 strain Washington/1964
gucaacucagaauucc

SEQ ID NO: 208868 - RNA, 22 nt, Human parainfluenza virus 1 strain Washington/1964
guagcauacauacaacaaucaa

SEQ ID NO: 208869 - RNA, 15 nt, Human parainfluenza virus 1 strain Washington/1964
uaacaagauaagaaa

SEQ ID NO: 208870 - RNA, 13 nt, Human parainfluenza virus 1 strain Washington/1964
uaaagacaaucca

SEQ ID NO: 208871 - RNA, 22 nt, Human parainfluenza virus 1 strain Washington/1964
uacaaucaguucaaauaagaaa

SEQ ID NO: 208872 - RNA, 15 nt, Human parainfluenza virus 1 strain Washington/1964
uacauacaacaauca

SEQ ID NO: 208873 - RNA, 16 nt, Human parainfluenza virus 1 strain Washington/1964
uaauacaccagcagga

SEQ ID NO: 208874 - RNA, 14 nt, Human parainfluenza virus 1 strain Washington/1964
aacaagaacaaaag

SEQ ID NO: 208875 - RNA, 22 nt, Human parainfluenza virus 1 strain Washington/1964
uacugauugcaacaacaaugca

SEQ ID NO: 208876 - RNA, 22 nt, Human parainfluenza virus 1 strain Washington/1964
uuguaaaaagcaagauugcuca

SEQ ID NO: 208877 - RNA, 17 nt, Human parainfluenza virus 1 strain Washington/1964
uuggagaagacagaagc

SEQ ID NO: 208878 - RNA, 16 nt, Human parainfluenza virus 1 strain Washington/1964
aacaccaaaaccagcc

SEQ ID NO: 208879 - RNA, 18 nt, Human parainfluenza virus 1 strain Washington/1964
uugcaacaacaaugcaua

SEQ ID NO: 208880 - RNA, 16 nt, Human parainfluenza virus 1 strain Washington/1964
aacucagaauuccuca

SEQ ID NO: 208881 - RNA, 16 nt, Human parainfluenza virus 1 strain Washington/1964
aagagucucaaaaagc

SEQ ID NO: 208882 - RNA, 15 nt, Human parainfluenza virus 1 strain Washington/1964
aagcaagauugcuca

SEQ ID NO: 208883 - RNA, 14 nt, Human parainfluenza virus 1 strain Washington/1964
aacuucaccaauca

SEQ ID NO: 208884 - RNA, 23 nt, Human parainfluenza virus 1 strain Washington/1964
aacuuaggguuaaagacaaucca

SEQ ID NO: 208885 - RNA, 22 nt, Human parainfluenza virus 1 strain Washington/1964
aagacagagcaaucucaacguc

SEQ ID NO: 208886 - RNA, 18 nt, Human parainfluenza virus 1 strain Washington/1964
aagcucccucaaaacaau

SEQ ID NO: 208887 - RNA, 16 nt, Human parainfluenza virus 1 strain Washington/1964
aaguccucuaccaaca

SEQ ID NO: 208888 - RNA, 18 nt, Human parainfluenza virus 1 strain Washington/1964
uggacaauagaagccaga

SEQ ID NO: 208889 - RNA, 22 nt, Human parainfluenza virus 1 strain Washington/1964
uggacaauagaagccagaucaa

SEQ ID NO: 208890 - RNA, 18 nt, Human parainfluenza virus 1 strain Washington/1964
ugaucucacagaaucaac

SEQ ID NO: 208891 - RNA, 23 nt, Human parainfluenza virus 1 strain Washington/1964
ugauugcaacaacaaugcauaca

SEQ ID NO: 208892 - RNA, 18 nt, Human parainfluenza virus 1 strain Washington/1964
ugcaacaacaaugcauac

SEQ ID NO: 208893 - RNA, 19 nt, Human parainfluenza virus 1 strain Washington/1964
ugcaaagccgacgauaaca

SEQ ID NO: 208894 - RNA, 13 nt, Human parainfluenza virus 1 strain Washington/1964
uuauacaaacgau

SEQ ID NO: 208895 - RNA, 13 nt, Human parainfluenza virus 1 strain Washington/1964
auccuaugcauug

SEQ ID NO: 208896 - RNA, 12 nt, Human parainfluenza virus 1 strain Washington/1964
auagaagccaga

SEQ ID NO: 208897 - RNA, 18 nt, Human parainfluenza virus 1 strain Washington/1964
auagacauuuauaugaca

SEQ ID NO: 208898 - RNA, 16 nt, Human parainfluenza virus 1 strain Washington/1964
auacauacaacaauca

SEQ ID NO: 208899 - RNA, 22 nt, Human parainfluenza virus 1 strain Washington/1964
auacaccagcaggaaggacaca

SEQ ID NO: 208900 - RNA, 15 nt, Human parainfluenza virus 1 strain Washington/1964
auaccucagcaucca

SEQ ID NO: 208901 - RNA, 15 nt, Human parainfluenza virus 1 strain Washington/1964
auaaaacaagacacu

SEQ ID NO: 208902 - RNA, 21 nt, Human parainfluenza virus 1 strain Washington/1964
auaagaaaaacguagggacaa

SEQ ID NO: 208903 - RNA, 17 nt, Human parainfluenza virus 1 strain Washington/1964
agcucaaccagacacca

SEQ ID NO: 208904 - RNA, 15 nt, Human parainfluenza virus 1 strain Washington/1964
agcucccucaaaaca

SEQ ID NO: 208905 - RNA, 21 nt, Human parainfluenza virus 1 strain Washington/1964
agccgacgauaacaacaaaga

SEQ ID NO: 208906 - RNA, 21 nt, Human parainfluenza virus 1 strain Washington/1964
agguccugacaaaaaagcaau

SEQ ID NO: 208907 - RNA, 22 nt, Human parainfluenza virus 1 strain Washington/1964
aguacauuguagcauacauaca

SEQ ID NO: 208908 - RNA, 16 nt, Human parainfluenza virus 1 strain Washington/1964
agucagguaucuugau

SEQ ID NO: 208909 - RNA, 17 nt, Human parainfluenza virus 1 strain Washington/1964
aguccaccaacucccga

SEQ ID NO: 208910 - RNA, 13 nt, Human parainfluenza virus 1 strain Washington/1964
aggagaggcacca

SEQ ID NO: 208911 - RNA, 17 nt, Human parainfluenza virus 1 strain Washington/1964
aggagaggcaccacgaa

SEQ ID NO: 208912 - RNA, 17 nt, Human parainfluenza virus 1 strain Washington/1964
auugcaacaacaaugca

SEQ ID NO: 208913 - RNA, 16 nt, Human parainfluenza virus 1 strain Washington/1964
auuauaaaacaagaca

SEQ ID NO: 208914 - RNA, 20 nt, Human parainfluenza virus 1 strain Washington/1964
caaaagaaaacaagccauca

SEQ ID NO: 208915 - RNA, 16 nt, Human parainfluenza virus 1 strain Washington/1964
caaaacucuccuuccc

SEQ ID NO: 208916 - RNA, 15 nt, Human parainfluenza virus 1 strain Washington/1964
cacagaucagcucaa

SEQ ID NO: 208917 - RNA, 12 nt, Human parainfluenza virus 1 strain Washington/1964
caccuaagcaag

SEQ ID NO: 208918 - RNA, 16 nt, Human parainfluenza virus 1 strain Washington/1964
cacagaaucaaccagu

SEQ ID NO: 208919 - RNA, 23 nt, Human parainfluenza virus 1 strain Washington/1964
cacagaaucaaccaguuauucaa

SEQ ID NO: 208920 - RNA, 22 nt, Human parainfluenza virus 1 strain Washington/1964
caaugcaaacaacaacacaaaa

SEQ ID NO: 208921 - RNA, 15 nt, Human parainfluenza virus 1 strain Washington/1964
caaugcauacaguau

SEQ ID NO: 208922 - RNA, 23 nt, Human parainfluenza virus 1 strain Washington/1964
cacgaaaacaagaaucacucuca

SEQ ID NO: 208923 - RNA, 20 nt, Human parainfluenza virus 1 strain Washington/1964
cagaaauuggagaagacaga

SEQ ID NO: 208924 - RNA, 15 nt, Human parainfluenza virus 1 strain Washington/1964
caauagaagccagau

SEQ ID NO: 208925 - RNA, 18 nt, Human parainfluenza virus 1 strain Washington/1964
caauagaagccagaucaa

SEQ ID NO: 208926 - RNA, 15 nt, Human parainfluenza virus 1 strain Washington/1964
caaucaaaaucaaua

SEQ ID NO: 208927 - RNA, 15 nt, Human parainfluenza virus 1 strain Washington/1964
caaucccucacauca

SEQ ID NO: 208928 - RNA, 17 nt, Human parainfluenza virus 1 strain Washington/1964
caagagucucaaaaagc

SEQ ID NO: 208929 - RNA, 14 nt, Human parainfluenza virus 1 strain Washington/1964
caagauugcucaac

SEQ ID NO: 208930 - RNA, 14 nt, Human parainfluenza virus 1 strain Washington/1964
caaacaagaacaaa

SEQ ID NO: 208931 - RNA, 14 nt, Human parainfluenza virus 1 strain Washington/1964
caacaaguaagaaa

SEQ ID NO: 208932 - RNA, 20 nt, Human parainfluenza virus 1 strain Washington/1964
caacaaguaagaaaaacuua

SEQ ID NO: 208933 - RNA, 12 nt, Human parainfluenza virus 1 strain Washington/1964
caacaaagacag

SEQ ID NO: 208934 - RNA, 14 nt, Human parainfluenza virus 1 strain Washington/1964
caacaaagacagag

SEQ ID NO: 208935 - RNA, 20 nt, Human parainfluenza virus 1 strain Washington/1964
caacccgaaaugacaauucc

SEQ ID NO: 208936 - RNA, 19 nt, Human parainfluenza virus 1 strain Washington/1964
agaagccagaucaaaagua

SEQ ID NO: 208937 - RNA, 19 nt, Human parainfluenza virus 1 strain Washington/1964
agaaaaaaggccagagaca

SEQ ID NO: 208938 - RNA, 15 nt, Human parainfluenza virus 1 strain Washington/1964
agaaaaacaaaagua

SEQ ID NO: 208939 - RNA, 13 nt, Human parainfluenza virus 1 strain Washington/1964
acuucaccaauca

SEQ ID NO: 208940 - RNA, 13 nt, Human parainfluenza virus 1 strain Washington/1964
agagcaaucucaa

SEQ ID NO: 208941 - RNA, 18 nt, Human parainfluenza virus 1 strain Washington/1964
agacaucuuauauccaga

SEQ ID NO: 208942 - RNA, 14 nt, Human parainfluenza virus 1 strain Washington/1964
agaaucacucucag

SEQ ID NO: 208943 - RNA, 20 nt, Human parainfluenza virus 1 strain Washington/1964
agaaucacucucagauguca

SEQ ID NO: 208944 - RNA, 17 nt, Human parainfluenza virus 1 strain Washington/1964
agacagagcaaucucaa

SEQ ID NO: 208945 - RNA, 16 nt, Human parainfluenza virus 1 strain Washington/1964
acugauugcaacaaca

SEQ ID NO: 208946 - RNA, 22 nt, Human parainfluenza virus 1 strain Washington/1964
acacgaaaccaaccuucacagu

SEQ ID NO: 208947 - RNA, 20 nt, Human parainfluenza virus 1 strain Washington/1964
acacuuguaugaagacaaac

SEQ ID NO: 208948 - RNA, 15 nt, Human parainfluenza virus 1 strain Washington/1964
acagaaucaaccagu

SEQ ID NO: 208949 - RNA, 10 nt, Human parainfluenza virus 1 strain Washington/1964
acaagacacu

SEQ ID NO: 208950 - RNA, 15 nt, Human parainfluenza virus 1 strain Washington/1964
acaagaaucacucuc

SEQ ID NO: 208951 - RNA, 16 nt, Human parainfluenza virus 1 strain Washington/1964
acaagaaucacucuca

SEQ ID NO: 208952 - RNA, 23 nt, Human parainfluenza virus 1 strain Washington/1964
acaagaaucacucucagauguca

SEQ ID NO: 208953 - RNA, 23 nt, Human parainfluenza virus 1 strain Washington/1964
acaagaucacaaacaagaacaaa

SEQ ID NO: 208954 - RNA, 13 nt, Human parainfluenza virus 1 strain Washington/1964
acaacaaucaaau

SEQ ID NO: 208955 - RNA, 19 nt, Human parainfluenza virus 1 strain Washington/1964
acaacaaugcauacaguau

SEQ ID NO: 208956 - RNA, 14 nt, Human parainfluenza virus 1 strain Washington/1964
acagagcaaucuca

SEQ ID NO: 208957 - RNA, 15 nt, Human parainfluenza virus 1 strain Washington/1964
acagagcaaucucaa

SEQ ID NO: 208958 - RNA, 13 nt, Human parainfluenza virus 1 strain Washington/1964
acagaucagcuca

SEQ ID NO: 208959 - RNA, 14 nt, Human parainfluenza virus 1 strain Washington/1964
acagaucagcucaa

SEQ ID NO: 208960 - RNA, 19 nt, Human parainfluenza virus 1 strain Washington/1964
acagaucagcucaaccaga

SEQ ID NO: 208961 - RNA, 17 nt, Human parainfluenza virus 1 strain Washington/1964
acauuaauacaccagca

SEQ ID NO: 208962 - RNA, 22 nt, Human parainfluenza virus 1 strain Washington/1964
acaucuuauauccagaauguca

SEQ ID NO: 208963 - RNA, 15 nt, Human parainfluenza virus 1 strain Washington/1964
acauacaacaaucaa

SEQ ID NO: 208964 - RNA, 15 nt, Human parainfluenza virus 1 strain Washington/1964
acccgaaaugacaau

SEQ ID NO: 208965 - RNA, 21 nt, Human parainfluenza virus 1 strain Washington/1964
aacuucacguuuugcuagaua

SEQ ID NO: 208966 - RNA, 19 nt, Human parainfluenza virus 1 strain Washington/1964
aacuuagggugaaugacaa

SEQ ID NO: 208967 - RNA, 17 nt, Human parainfluenza virus 1 strain Washington/1964
aacuuaggguuaaagac

SEQ ID NO: 208968 - RNA, 22 nt, Human parainfluenza virus 1 strain Washington/1964
aacuuaggguuaaagacaaucc

SEQ ID NO: 208969 - RNA, 21 nt, Human parainfluenza virus 1 strain Washington/1964
aaggcaacagcauccgauuau

SEQ ID NO: 208970 - RNA, 15 nt, Human parainfluenza virus 1 strain Washington/1964
aaggccagagacaaa

SEQ ID NO: 208971 - RNA, 16 nt, Human parainfluenza virus 1 strain Washington/1964
aauuauaaaacaagac

SEQ ID NO: 208972 - RNA, 16 nt, Human parainfluenza virus 1 strain Washington/1964
aauuggagaagacaga

SEQ ID NO: 208973 - RNA, 12 nt, Human parainfluenza virus 1 strain Washington/1964
acaaaaacagaa

SEQ ID NO: 208974 - RNA, 22 nt, Human parainfluenza virus 1 strain Washington/1964
acaaaaaugcaaaaaucagaga

SEQ ID NO: 208975 - RNA, 16 nt, Human parainfluenza virus 1 strain Washington/1964
acaaagacagagcaau

SEQ ID NO: 208976 - RNA, 15 nt, Human parainfluenza virus 1 strain Washington/1964
aauagaagccagauc

SEQ ID NO: 208977 - RNA, 23 nt, Human parainfluenza virus 1 strain Washington/1964
aaaaucagaucaaguacauugua

SEQ ID NO: 208978 - RNA, 16 nt, Human parainfluenza virus 1 strain Washington/1964
aaaagcaaucccucac

SEQ ID NO: 208979 - RNA, 18 nt, Human parainfluenza virus 1 strain Washington/1964
aaacuuagggucaaagaa

SEQ ID NO: 208980 - RNA, 20 nt, Human parainfluenza virus 1 strain Washington/1964
aaacuuaggguuaaagacaa

SEQ ID NO: 208981 - RNA, 22 nt, Human parainfluenza virus 1 strain Washington/1964
aaagaacaaccacaaccacaga

SEQ ID NO: 208982 - RNA, 12 nt, Human parainfluenza virus 1 strain Washington/1964
aaagacaaucca

SEQ ID NO: 208983 - RNA, 19 nt, Human parainfluenza virus 1 strain Washington/1964
aaagacagagcaaucucaa

SEQ ID NO: 208984 - RNA, 13 nt, Human parainfluenza virus 1 strain Washington/1964
aaagcucccucaa

SEQ ID NO: 208985 - RNA, 20 nt, Human parainfluenza virus 1 strain Washington/1964
aacccaaaagaaaacaagcc

SEQ ID NO: 208986 - RNA, 15 nt, Human parainfluenza virus 1 strain Washington/1964
aaccagacaccacca

SEQ ID NO: 208987 - RNA, 19 nt, Human parainfluenza virus 1 strain Washington/1964
aaccucucccucucaaaac

SEQ ID NO: 208988 - RNA, 16 nt, Human parainfluenza virus 1 strain Washington/1964
aacaucaugacaguau

SEQ ID NO: 208989 - RNA, 18 nt, Human parainfluenza virus 1 strain Washington/1964
aacaggagucaacucaga

SEQ ID NO: 208990 - RNA, 15 nt, Human parainfluenza virus 1 strain Washington/1964
aacaacaacacaaag

SEQ ID NO: 208991 - RNA, 21 nt, Human parainfluenza virus 1 strain Washington/1964
aacagcauccgauuauacaaa

SEQ ID NO: 208992 - RNA, 17 nt, Human parainfluenza virus 1 strain Washington/1964
aacaaaaguauacacaa

SEQ ID NO: 208993 - RNA, 23 nt, Human parainfluenza virus 1 strain Washington/1964
aaaacagguccugacaaaaaagc

SEQ ID NO: 208994 - RNA, 12 nt, Human parainfluenza virus 1 strain Washington/1964
aaaacaacaaca

SEQ ID NO: 208995 - RNA, 18 nt, Human parainfluenza virus 1 strain Washington/1964
aaaacaacaacacaaaga

SEQ ID NO: 208996 - RNA, 19 nt, Human parainfluenza virus 1 strain Washington/1964
aaaacguagggacaaaguc

SEQ ID NO: 208997 - RNA, 22 nt, Human parainfluenza virus 1 strain Washington/1964
aaaaacuuagggugaaugacaa

SEQ ID NO: 208998 - RNA, 12 nt, Human parainfluenza virus 1 strain Washington/1964
aguccaccaacu

SEQ ID NO: 208999 - RNA, 21 nt, Human parainfluenza virus 1 strain Washington/1964
aguagaaccucucccucucaa

SEQ ID NO: 209000 - RNA, 21 nt, Human parainfluenza virus 1 strain Washington/1964
auauccagagccaacucaaaa

SEQ ID NO: 209001 - RNA, 16 nt, Human parainfluenza virus 1 strain Washington/1964
aucaagcguaaccaaa

SEQ ID NO: 209002 - RNA, 23 nt, Human parainfluenza virus 1 strain Washington/1964
aucaauauccagagccaacucaa

SEQ ID NO: 209003 - RNA, 16 nt, Human parainfluenza virus 1 strain Washington/1964
auaauaaacaccaaga

SEQ ID NO: 209004 - RNA, 16 nt, Human parainfluenza virus 1 strain Washington/1964
agcauacacgaaacca

SEQ ID NO: 209005 - RNA, 20 nt, Human parainfluenza virus 1 strain Washington/1964
agcauacauacaacaaucaa

SEQ ID NO: 209006 - RNA, 12 nt, Human parainfluenza virus 1 strain Washington/1964
agauugcucaac

SEQ ID NO: 209007 - RNA, 16 nt, Human parainfluenza virus 1 strain Washington/1964
agcaaucccucacauc

SEQ ID NO: 209008 - RNA, 22 nt, Human parainfluenza virus 1 strain Washington/1964
agcaaucccucacaucagaaua

SEQ ID NO: 209009 - RNA, 14 nt, Human parainfluenza virus 1 strain Washington/1964
agauagagacaaaa

SEQ ID NO: 209010 - RNA, 22 nt, Human parainfluenza virus 1 strain Washington/1964
agaaaaacuuagggucaaagaa

SEQ ID NO: 209011 - RNA, 21 nt, Human parainfluenza virus 1 strain Washington/1964
agaaaaaaggccagagacaaa

SEQ ID NO: 209012 - RNA, 22 nt, Human parainfluenza virus 1 strain Washington/1964
agaaaaaaggccagagacaaaa

SEQ ID NO: 209013 - RNA, 13 nt, Human parainfluenza virus 1 strain Washington/1964
agagccaacucaa

SEQ ID NO: 209014 - RNA, 19 nt, Human parainfluenza virus 1 strain Washington/1964
acaguauuguccuucauua

SEQ ID NO: 209015 - RNA, 23 nt, Human parainfluenza virus 1 strain Washington/1964
acaguauuguccuucauuaucau

SEQ ID NO: 209016 - RNA, 16 nt, Human parainfluenza virus 1 strain Washington/1964
acaguauccuccauga

SEQ ID NO: 209017 - RNA, 18 nt, Human parainfluenza virus 1 strain Washington/1964
acagcauccgauuauaca

SEQ ID NO: 209018 - RNA, 19 nt, Human parainfluenza virus 1 strain Washington/1964
acauuguagcauacauaca

SEQ ID NO: 209019 - RNA, 20 nt, Human parainfluenza virus 1 strain Washington/1964
acauuguagcauacauacaa

SEQ ID NO: 209020 - RNA, 18 nt, Human parainfluenza virus 1 strain Washington/1964
acacauuaauacaccagc

SEQ ID NO: 209021 - RNA, 16 nt, Human parainfluenza virus 1 strain Washington/1964
acaccaccagcauaca

SEQ ID NO: 209022 - RNA, 19 nt, Human parainfluenza virus 1 strain Washington/1964
acaauucacagaucagcuc

SEQ ID NO: 209023 - RNA, 21 nt, Human parainfluenza virus 1 strain Washington/1964
acaauuucaaccagcaaucaa

SEQ ID NO: 209024 - RNA, 15 nt, Human parainfluenza virus 1 strain Washington/1964
acacaaaaaccaaaa

SEQ ID NO: 209025 - RNA, 15 nt, Human parainfluenza virus 1 strain Washington/1964
acacaaaaaguccac

SEQ ID NO: 209026 - RNA, 12 nt, Human parainfluenza virus 1 strain Washington/1964
acagaucagcuc

SEQ ID NO: 209027 - RNA, 15 nt, Human parainfluenza virus 1 strain Washington/1964
acacuuguaugaaga

SEQ ID NO: 209028 - RNA, 14 nt, Human parainfluenza virus 1 strain Washington/1964
acacgaaaccaacc

SEQ ID NO: 209029 - RNA, 18 nt, Human parainfluenza virus 1 strain Washington/1964
acaacccgaaaugacaau

SEQ ID NO: 209030 - RNA, 22 nt, Human parainfluenza virus 1 strain Washington/1964
acaacccgaaaugacaauucca

SEQ ID NO: 209031 - RNA, 18 nt, Human parainfluenza virus 1 strain Washington/1964
acaagaaucacucucaga

SEQ ID NO: 209032 - RNA, 13 nt, Human parainfluenza virus 1 strain Washington/1964
acaaucaaaucua

SEQ ID NO: 209033 - RNA, 18 nt, Human parainfluenza virus 1 strain Washington/1964
acaauccagucaaccuau

SEQ ID NO: 209034 - RNA, 16 nt, Human parainfluenza virus 1 strain Washington/1964
aaugacaauucacaga

SEQ ID NO: 209035 - RNA, 14 nt, Human parainfluenza virus 1 strain Washington/1964
acaaaaaagcaauc

SEQ ID NO: 209036 - RNA, 12 nt, Human parainfluenza virus 1 strain Washington/1964
acaaaaacaaga

SEQ ID NO: 209037 - RNA, 18 nt, Human parainfluenza virus 1 strain Washington/1964
acaacaccaaaaccagcc

SEQ ID NO: 209038 - RNA, 12 nt, Human parainfluenza virus 1 strain Washington/1964
acaacaaugcau

SEQ ID NO: 209039 - RNA, 15 nt, Human parainfluenza virus 1 strain Washington/1964
acaacaaugcauaca

SEQ ID NO: 209040 - RNA, 16 nt, Human parainfluenza virus 1 strain Washington/1964
acaacaaugcauacag

SEQ ID NO: 209041 - RNA, 20 nt, Human parainfluenza virus 1 strain Washington/1964
acuccaaagaacaaccacaa

SEQ ID NO: 209042 - RNA, 14 nt, Human parainfluenza virus 1 strain Washington/1964
acgguaaacacaca

SEQ ID NO: 209043 - RNA, 21 nt, Human parainfluenza virus 1 strain Washington/1964
accuaauuauaaaacaagaca

SEQ ID NO: 209044 - RNA, 20 nt, Human parainfluenza virus 1 strain Washington/1964
accuauaaggcaacagcauc

SEQ ID NO: 209045 - RNA, 20 nt, Human parainfluenza virus 1 strain Washington/1964
acgauaacaacaaagacaga

SEQ ID NO: 209046 - RNA, 19 nt, Human parainfluenza virus 1 strain Washington/1964
augaagaggaaaccagcaa

SEQ ID NO: 209047 - RNA, 13 nt, Human parainfluenza virus 1 strain Washington/1964
augcauacaguau

SEQ ID NO: 209048 - RNA, 18 nt, Human parainfluenza virus 1 strain Washington/1964
augcauugaccuaauuau

SEQ ID NO: 209049 - RNA, 20 nt, Human parainfluenza virus 1 strain Washington/1964
augccugccuauuugucaaa

SEQ ID NO: 209050 - RNA, 16 nt, Human parainfluenza virus 1 strain Washington/1964
auucacagaucagcuc

SEQ ID NO: 209051 - RNA, 20 nt, Human parainfluenza virus 1 strain Washington/1964
auucacagaucagcucaacc

SEQ ID NO: 209052 - RNA, 21 nt, Human parainfluenza virus 1 strain Washington/1964
auucacagaucagcucaacca

SEQ ID NO: 209053 - RNA, 20 nt, Human parainfluenza virus 1 strain Washington/1964
caauauccagagccaacuca

SEQ ID NO: 209054 - RNA, 19 nt, Human parainfluenza virus 1 strain Washington/1964
caaucagguguacaacaag

SEQ ID NO: 209055 - RNA, 12 nt, Human parainfluenza virus 1 strain Washington/1964
caauucacagau

SEQ ID NO: 209056 - RNA, 19 nt, Human parainfluenza virus 1 strain Washington/1964
caauucacagaucagcuca

SEQ ID NO: 209057 - RNA, 15 nt, Human parainfluenza virus 1 strain Washington/1964
caauuucaaccagca

SEQ ID NO: 209058 - RNA, 14 nt, Human parainfluenza virus 1 strain Washington/1964
cacagaucagcuca

SEQ ID NO: 209059 - RNA, 14 nt, Human parainfluenza virus 1 strain Washington/1964
cacaaacaagaaca

SEQ ID NO: 209060 - RNA, 17 nt, Human parainfluenza virus 1 strain Washington/1964
cacaaacaagaacaaaa

SEQ ID NO: 209061 - RNA, 15 nt, Human parainfluenza virus 1 strain Washington/1964
caagaaucacucuca

SEQ ID NO: 209062 - RNA, 16 nt, Human parainfluenza virus 1 strain Washington/1964
caagaaucacucucag

SEQ ID NO: 209063 - RNA, 15 nt, Human parainfluenza virus 1 strain Washington/1964
caacgucgacccaag

SEQ ID NO: 209064 - RNA, 15 nt, Human parainfluenza virus 1 strain Washington/1964
caaaaucaauaucca

SEQ ID NO: 209065 - RNA, 18 nt, Human parainfluenza virus 1 strain Washington/1964
caaaagaaaacaagccau

SEQ ID NO: 209066 - RNA, 21 nt, Human parainfluenza virus 1 strain Washington/1964
caaaagaaaacaagccaucau

SEQ ID NO: 209067 - RNA, 20 nt, Human parainfluenza virus 1 strain Washington/1964
caaagaacaaccacaaccac

SEQ ID NO: 209068 - RNA, 11 nt, Human parainfluenza virus 1 strain Washington/1964
caaagacagag

SEQ ID NO: 209069 - RNA, 22 nt, Human parainfluenza virus 1 strain Washington/1964
caacccaaaagaaaacaagcca

SEQ ID NO: 209070 - RNA, 14 nt, Human parainfluenza virus 1 strain Washington/1964
caaauaagaaaaac

SEQ ID NO: 209071 - RNA, 13 nt, Human parainfluenza virus 1 strain Washington/1964
auugcaacaacaa

SEQ ID NO: 209072 - RNA, 16 nt, Human parainfluenza virus 1 strain Washington/1964
auugcaacaacaaugc

SEQ ID NO: 209073 - RNA, 12 nt, Human parainfluenza virus 1 strain Washington/1964
caaaaaagcaau

SEQ ID NO: 209074 - RNA, 14 nt, Human parainfluenza virus 1 strain Washington/1964
cauaucugaucuca

SEQ ID NO: 209075 - RNA, 18 nt, Human parainfluenza virus 1 strain Washington/1964
cauaucugaucucacaga

SEQ ID NO: 209076 - RNA, 14 nt, Human parainfluenza virus 1 strain Washington/1964
caucaugacaguau

SEQ ID NO: 209077 - RNA, 19 nt, Human parainfluenza virus 1 strain Washington/1964
cagguuccccagauucuca

SEQ ID NO: 209078 - RNA, 14 nt, Human parainfluenza virus 1 strain Washington/1964
cauacaacaaucaa

SEQ ID NO: 209079 - RNA, 21 nt, Human parainfluenza virus 1 strain Washington/1964
cauacacgaaaccaaccuuca

SEQ ID NO: 209080 - RNA, 19 nt, Human parainfluenza virus 1 strain Washington/1964
cagaauuccucagacaucu

SEQ ID NO: 209081 - RNA, 16 nt, Human parainfluenza virus 1 strain Washington/1964
cagaauagucaaggua

SEQ ID NO: 209082 - RNA, 15 nt, Human parainfluenza virus 1 strain Washington/1964
cccaagaucauagau

SEQ ID NO: 209083 - RNA, 13 nt, Human parainfluenza virus 1 strain Washington/1964
ccggcagaucaaa

SEQ ID NO: 209084 - RNA, 20 nt, Human parainfluenza virus 1 strain Washington/1964
ccaaccucgaagaccacaac

SEQ ID NO: 209085 - RNA, 23 nt, Human parainfluenza virus 1 strain Washington/1964
ccaaucagguguacaacaaguaa

SEQ ID NO: 209086 - RNA, 23 nt, Human parainfluenza virus 1 strain Washington/1964
ccaaagaacaaccacaaccacag

SEQ ID NO: 209087 - RNA, 23 nt, Human parainfluenza virus 1 strain Washington/1964
ccacagaaauuggagaagacaga

SEQ ID NO: 209088 - RNA, 19 nt, Human parainfluenza virus 1 strain Washington/1964
ccaugaacgaaagugccaa

SEQ ID NO: 209089 - RNA, 16 nt, Human parainfluenza virus 1 strain Washington/1964
ggguuaaagacaaucc

SEQ ID NO: 209090 - RNA, 15 nt, Human parainfluenza virus 1 strain Washington/1964
guauacacaaaaacc

SEQ ID NO: 209091 - RNA, 15 nt, Human parainfluenza virus 1 strain Washington/1964
ggccagagacaaaaa

SEQ ID NO: 209092 - RNA, 13 nt, Human parainfluenza virus 1 strain Washington/1964
gccuauuugucaa

SEQ ID NO: 209093 - RNA, 18 nt, Human parainfluenza virus 1 strain Washington/1964
gccgacgauaacaacaaa

SEQ ID NO: 209094 - RNA, 18 nt, Human parainfluenza virus 1 strain Washington/1964
gccccggcagaucaaaau

SEQ ID NO: 209095 - RNA, 22 nt, Human parainfluenza virus 1 strain Washington/1964
uaaacaccaagauagagacaaa

SEQ ID NO: 209096 - RNA, 18 nt, Human parainfluenza virus 1 strain Washington/1964
uaucaucgacaacccaaa

SEQ ID NO: 209097 - RNA, 14 nt, Human parainfluenza virus 1 strain Washington/1964
uaaggcaacagcau

SEQ ID NO: 209098 - RNA, 15 nt, Human parainfluenza virus 1 strain Washington/1964
uaaggcaacagcauc

SEQ ID NO: 209099 - RNA, 18 nt, Human parainfluenza virus 1 strain Washington/1964
uaagcaaggaccucuauc

SEQ ID NO: 209100 - RNA, 16 nt, Human parainfluenza virus 1 strain Washington/1964
uacauacaacaaucaa

SEQ ID NO: 209101 - RNA, 17 nt, Human parainfluenza virus 1 strain Washington/1964
gaacaaaagcaaaaaca

SEQ ID NO: 209102 - RNA, 21 nt, Human parainfluenza virus 1 strain Washington/1964
gaacgaaagugccaaaauaau

SEQ ID NO: 209103 - RNA, 18 nt, Human parainfluenza virus 1 strain Washington/1964
gaaugacaauucacagau

SEQ ID NO: 209104 - RNA, 21 nt, Human parainfluenza virus 1 strain Washington/1964
gacaaaaaagcaaucccucac

SEQ ID NO: 209105 - RNA, 22 nt, Human parainfluenza virus 1 strain Washington/1964
gaaucuacaauuucaaccagca

SEQ ID NO: 209106 - RNA, 12 nt, Human parainfluenza virus 1 strain Washington/1964
gaaucaaccagu

SEQ ID NO: 209107 - RNA, 14 nt, Human parainfluenza virus 1 strain Washington/1964
gaaucaaccaguua

SEQ ID NO: 209108 - RNA, 21 nt, Human parainfluenza virus 1 strain Washington/1964
gaagccgaaggagaggcacca

SEQ ID NO: 209109 - RNA, 18 nt, Human parainfluenza virus 1 strain Washington/1964
gaaaaagggaaaacaaau

SEQ ID NO: 209110 - RNA, 19 nt, Human parainfluenza virus 1 strain Washington/1964
gauaccucagcauccaaaa

SEQ ID NO: 209111 - RNA, 13 nt, Human parainfluenza virus 1 strain Washington/1964
gauacacaacaaa

SEQ ID NO: 209112 - RNA, 17 nt, Human parainfluenza virus 1 strain Washington/1964
gaucagcucaaccagac

SEQ ID NO: 209113 - RNA, 15 nt, Human parainfluenza virus 1 strain Washington/1964
gauugcaacaacaau

SEQ ID NO: 209114 - RNA, 14 nt, Human parainfluenza virus 1 strain Washington/1964
gcaagauugcucaa

SEQ ID NO: 209115 - RNA, 15 nt, Human parainfluenza virus 1 strain Washington/1964
gcaagauugcucaac

SEQ ID NO: 209116 - RNA, 12 nt, Human parainfluenza virus 1 strain Washington/1964
gcaaucccucac

SEQ ID NO: 209117 - RNA, 12 nt, Human parainfluenza virus 1 strain Washington/1964
gagacaaaaacg

SEQ ID NO: 209118 - RNA, 21 nt, Human parainfluenza virus 1 strain Washington/1964
gagacaaaaaugcaaaaauca

SEQ ID NO: 209119 - RNA, 14 nt, Human parainfluenza virus 1 strain Washington/1964
gacaccaccagcau

SEQ ID NO: 209120 - RNA, 22 nt, Human parainfluenza virus 1 strain Washington/1964
gacaauucacagaucagcucaa

SEQ ID NO: 209121 - RNA, 17 nt, Human parainfluenza virus 1 strain Washington/1964
gaggcaccacgaaaaca

SEQ ID NO: 209122 - RNA, 20 nt, Human parainfluenza virus 1 strain Washington/1964
gaggcaccacgaaaacaaga

SEQ ID NO: 209123 - RNA, 16 nt, Human parainfluenza virus 1 strain Washington/1964
gauaacaacaaagaca

SEQ ID NO: 209124 - RNA, 18 nt, Human parainfluenza virus 1 strain Washington/1964
ccuacaagcccacagaaa

SEQ ID NO: 209125 - RNA, 18 nt, Human parainfluenza virus 1 strain Washington/1964
cuccaaagaacaaccaca

SEQ ID NO: 209126 - RNA, 16 nt, Human parainfluenza virus 1 strain Washington/1964
ugaugugcuacuauug

SEQ ID NO: 209127 - RNA, 17 nt, Human parainfluenza virus 1 strain Washington/1964
ugaagaggaaaccagca

SEQ ID NO: 209128 - RNA, 20 nt, Human parainfluenza virus 1 strain Washington/1964
ucuaucuggcagcauaucug

SEQ ID NO: 209129 - RNA, 19 nt, Human parainfluenza virus 1 strain Washington/1964
ucuccuucccgaauggauc

SEQ ID NO: 209130 - RNA, 17 nt, Human parainfluenza virus 1 strain Washington/1964
ucuacaauuucaaccag

SEQ ID NO: 209131 - RNA, 20 nt, Human parainfluenza virus 1 strain Washington/1964
uccagagccaacucaaaaag

SEQ ID NO: 209132 - RNA, 13 nt, Human parainfluenza virus 1 strain Washington/1964
uccuccaaaacau

SEQ ID NO: 209133 - RNA, 22 nt, Human parainfluenza virus 1 strain Washington/1964
uccuccaugaacgaaagugcca

SEQ ID NO: 209134 - RNA, 22 nt, Human parainfluenza virus 1 strain Washington/1964
ucaccaaauacaaaaucagaaa

SEQ ID NO: 209135 - RNA, 16 nt, Human parainfluenza virus 1 strain Washington/1964
ucacagaaucaaccag

SEQ ID NO: 209136 - RNA, 23 nt, Human parainfluenza virus 1 strain Washington/1964
ucacagaucagcucaaccagaca

SEQ ID NO: 209137 - RNA, 19 nt, Human parainfluenza virus 1 strain Washington/1964
uauccuacaagcccacaga

SEQ ID NO: 209138 - RNA, 18 nt, Human parainfluenza virus 1 strain Washington/1964
ucacucucagaugucauc

SEQ ID NO: 209139 - RNA, 15 nt, Human parainfluenza virus 1 strain Washington/1964
ucagaacuccacaaa

SEQ ID NO: 209140 - RNA, 13 nt, Human parainfluenza virus 1 strain Washington/1964
ucagaauagucaa

SEQ ID NO: 209141 - RNA, 20 nt, Human parainfluenza virus 1 strain Washington/1964
ucagguaucuugaugugcua

SEQ ID NO: 209142 - RNA, 15 nt, Human parainfluenza virus 1 strain Washington/1964
ucagguguacaacaa

SEQ ID NO: 209143 - RNA, 12 nt, Human parainfluenza virus 1 strain Washington/1964
uuggagaagaca

SEQ ID NO: 209144 - RNA, 15 nt, Human parainfluenza virus 1 strain Washington/1964
uuggagaagacagaa

SEQ ID NO: 209145 - RNA, 21 nt, Human parainfluenza virus 1 strain Washington/1964
uucacaguggauaccucagca

SEQ ID NO: 209146 - RNA, 17 nt, Human parainfluenza virus 1 strain Washington/1964
uuauauccagaauguca

SEQ ID NO: 209147 - RNA, 15 nt, Human parainfluenza virus 1 strain Washington/1964
uguaaugaaaucaca

SEQ ID NO: 209148 - RNA, 22 nt, Human parainfluenza virus 1 strain Washington/1964
uggucuacaacccgaaaugaca

SEQ ID NO: 209149 - RNA, 16 nt, Human parainfluenza virus 1 strain Washington/1964
uggacaauagaagcca

SEQ ID NO: 209150 - RNA, 17 nt, Human parainfluenza virus 1 strain Washington/1964
uggaucaggaugccuuc

SEQ ID NO: 209151 - RNA, 20 nt, Human parainfluenza virus 1 strain Washington/1964
uuguagcauacauacaacaa

SEQ ID NO: 209152 - RNA, 16 nt, Human parainfluenza virus 1 strain Washington/1964
uuguaugaagacaaac

SEQ ID NO: 209153 - RNA, 16 nt, Human parainfluenza virus 1 strain Washington/1964
aaacaggagucaacuc

SEQ ID NO: 209154 - RNA, 17 nt, Human parainfluenza virus 1 strain Washington/1964
aaacaggagucaacuca

SEQ ID NO: 209155 - RNA, 10 nt, Human parainfluenza virus 1 strain Washington/1964
aaacaaaagu

SEQ ID NO: 209156 - RNA, 21 nt, Human parainfluenza virus 1 strain Washington/1964
aaacaagccaucaugcaaagc

SEQ ID NO: 209157 - RNA, 14 nt, Human parainfluenza virus 1 strain Washington/1964
aaaacaagaacaaa

SEQ ID NO: 209158 - RNA, 22 nt, Human parainfluenza virus 1 strain Washington/1964
aaaaguauacacaaaaaccaaa

SEQ ID NO: 209159 - RNA, 14 nt, Human parainfluenza virus 1 strain Washington/1964
aaaagcucccucaa

SEQ ID NO: 209160 - RNA, 13 nt, Human parainfluenza virus 1 strain Washington/1964
aaaaacaagaaca

SEQ ID NO: 209161 - RNA, 13 nt, Human parainfluenza virus 1 strain Washington/1964
aacaccuaagcaa

SEQ ID NO: 209162 - RNA, 21 nt, Human parainfluenza virus 1 strain Washington/1964
aacacaaaaaguccaccaacu

SEQ ID NO: 209163 - RNA, 18 nt, Human parainfluenza virus 1 strain Washington/1964
aacaagccaucaugcaaa

SEQ ID NO: 209164 - RNA, 16 nt, Human parainfluenza virus 1 strain Washington/1964
aacaagacacuuguau

SEQ ID NO: 209165 - RNA, 14 nt, Human parainfluenza virus 1 strain Washington/1964
aacaacaaugcaua

SEQ ID NO: 209166 - RNA, 20 nt, Human parainfluenza virus 1 strain Washington/1964
aacaacaaugcauacaguau

SEQ ID NO: 209167 - RNA, 22 nt, Human parainfluenza virus 1 strain Washington/1964
aaaguauacacaaaaaccaaaa

SEQ ID NO: 209168 - RNA, 17 nt, Human parainfluenza virus 1 strain Washington/1964
aaacggaggcaagaaca

SEQ ID NO: 209169 - RNA, 19 nt, Human parainfluenza virus 1 strain Washington/1964
aaacggaggcaagaacaaa

SEQ ID NO: 209170 - RNA, 20 nt, Human parainfluenza virus 1 strain Washington/1964
aacccgaaaugacaauucca

SEQ ID NO: 209171 - RNA, 20 nt, Human parainfluenza virus 1 strain Washington/1964
aacucaaaaagcucccucaa

SEQ ID NO: 209172 - RNA, 13 nt, Human parainfluenza virus 1 strain Washington/1964
aagauagagacaa

SEQ ID NO: 209173 - RNA, 14 nt, Human parainfluenza virus 1 strain Washington/1964
aagauagagacaaa

SEQ ID NO: 209174 - RNA, 21 nt, Human parainfluenza virus 1 strain Washington/1964
aagaaaucccuuuaacugacu

SEQ ID NO: 209175 - RNA, 14 nt, Human parainfluenza virus 1 strain Washington/1964
aagaacaaccacaa

SEQ ID NO: 209176 - RNA, 17 nt, Human parainfluenza virus 1 strain Washington/1964
aagacagagcaaucuca

SEQ ID NO: 209177 - RNA, 18 nt, Human parainfluenza virus 1 strain Washington/1964
aagacagagcaaucucaa

SEQ ID NO: 209178 - RNA, 17 nt, Human parainfluenza virus 1 strain Washington/1964
aagacaauccagucaac

SEQ ID NO: 209179 - RNA, 16 nt, Human parainfluenza virus 1 strain Washington/1964
aagaaaacaagccauc

SEQ ID NO: 209180 - RNA, 17 nt, Human parainfluenza virus 1 strain Washington/1964
aagauugcucaacuuca

SEQ ID NO: 209181 - RNA, 19 nt, Human parainfluenza virus 1 strain Washington/1964
aagaucacaaacaagaaca

SEQ ID NO: 209182 - RNA, 22 nt, Human parainfluenza virus 1 strain Washington/1964
aagcaaucccucacaucagaau

SEQ ID NO: 209183 - RNA, 23 nt, Human parainfluenza virus 1 strain Washington/1964
aauauccagagccaacucaaaaa

SEQ ID NO: 209184 - RNA, 16 nt, Human parainfluenza virus 1 strain Washington/1964
aaucaacccuaugauu

SEQ ID NO: 209185 - RNA, 21 nt, Human parainfluenza virus 1 strain Washington/1964
aaucagguguacaacaaguaa

SEQ ID NO: 209186 - RNA, 12 nt, Human parainfluenza virus 1 strain Washington/1964
acaauucacaga

SEQ ID NO: 209187 - RNA, 15 nt, Human parainfluenza virus 1 strain Washington/1964
acaauucacagauca

SEQ ID NO: 209188 - RNA, 14 nt, Human parainfluenza virus 1 strain Washington/1964
acaaucaaaucuau

SEQ ID NO: 209189 - RNA, 16 nt, Human parainfluenza virus 1 strain Washington/1964
acaaucaaaucuaucc

SEQ ID NO: 209190 - RNA, 18 nt, Human parainfluenza virus 1 strain Washington/1964
acaauagaagccagauca

SEQ ID NO: 209191 - RNA, 15 nt, Human parainfluenza virus 1 strain Washington/1964
acaaacaucaugaca

SEQ ID NO: 209192 - RNA, 19 nt, Human parainfluenza virus 1 strain Washington/1964
acaaacaucaugacaguau

SEQ ID NO: 209193 - RNA, 14 nt, Human parainfluenza virus 1 strain Washington/1964
acaagcccacagaa

SEQ ID NO: 209194 - RNA, 19 nt, Human parainfluenza virus 1 strain Washington/1964
agaaaaugggacaguagaa

SEQ ID NO: 209195 - RNA, 19 nt, Human parainfluenza virus 1 strain Washington/1964
acuuguaugaagacaaaca

SEQ ID NO: 209196 - RNA, 18 nt, Human parainfluenza virus 1 strain Washington/1964
agauucucacacgaagaa

SEQ ID NO: 209197 - RNA, 15 nt, Human parainfluenza virus 1 strain Washington/1964
agcaagauugcucaa

SEQ ID NO: 209198 - RNA, 19 nt, Human parainfluenza virus 1 strain Washington/1964
agcaaggaccucuaucugg

SEQ ID NO: 209199 - RNA, 20 nt, Human parainfluenza virus 1 strain Washington/1964
agagacaaaaacggaggcaa

SEQ ID NO: 209200 - RNA, 21 nt, Human parainfluenza virus 1 strain Washington/1964
agagacaaaaaugcaaaaauc

SEQ ID NO: 209201 - RNA, 18 nt, Human parainfluenza virus 1 strain Washington/1964
agaucacaaacaagaaca

SEQ ID NO: 209202 - RNA, 14 nt, Human parainfluenza virus 1 strain Washington/1964
agaggaaaccagca

SEQ ID NO: 209203 - RNA, 21 nt, Human parainfluenza virus 1 strain Washington/1964
agaggcaccacgaaaacaaga

SEQ ID NO: 209204 - RNA, 16 nt, Human parainfluenza virus 1 strain Washington/1964
acgauaacaacaaaga

SEQ ID NO: 209205 - RNA, 17 nt, Human parainfluenza virus 1 strain Washington/1964
accucucccucucaaaa

SEQ ID NO: 209206 - RNA, 19 nt, Human parainfluenza virus 1 strain Washington/1964
accucucccucucaaaaca

SEQ ID NO: 209207 - RNA, 17 nt, Human parainfluenza virus 1 strain Washington/1964
acaguauccuccaugaa

SEQ ID NO: 209208 - RNA, 14 nt, Human parainfluenza virus 1 strain Washington/1964
acacacacauuaau

SEQ ID NO: 209209 - RNA, 15 nt, Human parainfluenza virus 1 strain Washington/1964
accaaccuucacagu

SEQ ID NO: 209210 - RNA, 19 nt, Human parainfluenza virus 1 strain Washington/1964
accagcaaucaaaaucaau

SEQ ID NO: 209211 - RNA, 20 nt, Human parainfluenza virus 1 strain Washington/1964
accagcaaucaaaaucaaua

SEQ ID NO: 209212 - RNA, 14 nt, Human parainfluenza virus 1 strain Washington/1964
acauuguagcauac

SEQ ID NO: 209213 - RNA, 16 nt, Human parainfluenza virus 1 strain Washington/1964
acauuguagcauacau

SEQ ID NO: 209214 - RNA, 17 nt, Human parainfluenza virus 1 strain Washington/1964
cagcauacacgaaacca

SEQ ID NO: 209215 - RNA, 18 nt, Human parainfluenza virus 1 strain Washington/1964
cagcauacacgaaaccaa

SEQ ID NO: 209216 - RNA, 13 nt, Human parainfluenza virus 1 strain Washington/1964
cagcauccaaaac

SEQ ID NO: 209217 - RNA, 13 nt, Human parainfluenza virus 1 strain Washington/1964
cagagagaaaaac

SEQ ID NO: 209218 - RNA, 19 nt, Human parainfluenza virus 1 strain Washington/1964
cagagccaacucaaaaagc

SEQ ID NO: 209219 - RNA, 13 nt, Human parainfluenza virus 1 strain Washington/1964
cagagcaaucuca

SEQ ID NO: 209220 - RNA, 14 nt, Human parainfluenza virus 1 strain Washington/1964
cagagcaaucucaa

SEQ ID NO: 209221 - RNA, 14 nt, Human parainfluenza virus 1 strain Washington/1964
caccaaaaccagcc

SEQ ID NO: 209222 - RNA, 14 nt, Human parainfluenza virus 1 strain Washington/1964
cacaaaaaccaaaa

SEQ ID NO: 209223 - RNA, 14 nt, Human parainfluenza virus 1 strain Washington/1964
cacaaaaaguccac

SEQ ID NO: 209224 - RNA, 15 nt, Human parainfluenza virus 1 strain Washington/1964
caauuggcauagcca

SEQ ID NO: 209225 - RNA, 15 nt, Human parainfluenza virus 1 strain Washington/1964
auuucaaccagcaau

SEQ ID NO: 209226 - RNA, 16 nt, Human parainfluenza virus 1 strain Washington/1964
auuucaaccagcaauc

SEQ ID NO: 209227 - RNA, 13 nt, Human parainfluenza virus 1 strain Washington/1964
auuuauaugacaa

SEQ ID NO: 209228 - RNA, 16 nt, Human parainfluenza virus 1 strain Washington/1964
caacgucgacccaaga

SEQ ID NO: 209229 - RNA, 15 nt, Human parainfluenza virus 1 strain Washington/1964
caaccuauaaggcaa

SEQ ID NO: 209230 - RNA, 13 nt, Human parainfluenza virus 1 strain Washington/1964
caagaacaaaagc

SEQ ID NO: 209231 - RNA, 19 nt, Human parainfluenza virus 1 strain Washington/1964
caaaucuauccacaacuuc

SEQ ID NO: 209232 - RNA, 17 nt, Human parainfluenza virus 1 strain Washington/1964
caaagaacaaccacaac

SEQ ID NO: 209233 - RNA, 14 nt, Human parainfluenza virus 1 strain Washington/1964
caaaggaacaaaag

SEQ ID NO: 209234 - RNA, 16 nt, Human parainfluenza virus 1 strain Washington/1964
caaaaagcucccucaa

SEQ ID NO: 209235 - RNA, 20 nt, Human parainfluenza virus 1 strain Washington/1964
caaaaacggaggcaagaaca

SEQ ID NO: 209236 - RNA, 23 nt, Human parainfluenza virus 1 strain Washington/1964
caaaaacggaggcaagaacaaaa

SEQ ID NO: 209237 - RNA, 17 nt, Human parainfluenza virus 1 strain Washington/1964
caaaaacaagaacaaaa

SEQ ID NO: 209238 - RNA, 19 nt, Human parainfluenza virus 1 strain Washington/1964
caaaaaagggaagaaaaac

SEQ ID NO: 209239 - RNA, 13 nt, Human parainfluenza virus 1 strain Washington/1964
agcauacacgaaa

SEQ ID NO: 209240 - RNA, 17 nt, Human parainfluenza virus 1 strain Washington/1964
aggguuaaagacaaucc

SEQ ID NO: 209241 - RNA, 17 nt, Human parainfluenza virus 1 strain Washington/1964
auaacaacaaagacaga

SEQ ID NO: 209242 - RNA, 17 nt, Human parainfluenza virus 1 strain Washington/1964
aguucagaacuccacaa

SEQ ID NO: 209243 - RNA, 21 nt, Human parainfluenza virus 1 strain Washington/1964
aguucagaacuccacaaauca

SEQ ID NO: 209244 - RNA, 21 nt, Human parainfluenza virus 1 strain Washington/1964
aguggauaccucagcauccaa

SEQ ID NO: 209245 - RNA, 20 nt, Human parainfluenza virus 1 strain Washington/1964
aguauacacaaaaaccaaaa

SEQ ID NO: 209246 - RNA, 15 nt, Human parainfluenza virus 1 strain Washington/1964
augcauacaguauug

SEQ ID NO: 209247 - RNA, 19 nt, Human parainfluenza virus 1 strain Washington/1964
augccugccuauuugucaa

SEQ ID NO: 209248 - RNA, 23 nt, Human parainfluenza virus 1 strain Washington/1964
augacaguauccuccaugaacga

SEQ ID NO: 209249 - RNA, 17 nt, Human parainfluenza virus 1 strain Washington/1964
augacaauucacagauc

SEQ ID NO: 209250 - RNA, 14 nt, Human parainfluenza virus 1 strain Washington/1964
aucaugacaguauc

SEQ ID NO: 209251 - RNA, 20 nt, Human parainfluenza virus 1 strain Washington/1964
aucaugacaguauccuccau

SEQ ID NO: 209252 - RNA, 14 nt, Human parainfluenza virus 1 strain Washington/1964
aucacucucagaug

SEQ ID NO: 209253 - RNA, 22 nt, Human parainfluenza virus 1 strain Washington/1964
cgaaaacaagaaucacucucag

SEQ ID NO: 209254 - RNA, 13 nt, Human parainfluenza virus 1 strain Washington/1964
ccuauaaggcaac

SEQ ID NO: 209255 - RNA, 20 nt, Human parainfluenza virus 1 strain Washington/1964
cauuaucaugauccuaugca

SEQ ID NO: 209256 - RNA, 16 nt, Human parainfluenza virus 1 strain Washington/1964
caugaauagacauuua

SEQ ID NO: 209257 - RNA, 19 nt, Human parainfluenza virus 1 strain Washington/1964
ccaaaagaaaacaagccau

SEQ ID NO: 209258 - RNA, 22 nt, Human parainfluenza virus 1 strain Washington/1964
ccacagaaauuggagaagacag

SEQ ID NO: 209259 - RNA, 13 nt, Human parainfluenza virus 1 strain Washington/1964
ccaaccuucacag

SEQ ID NO: 209260 - RNA, 18 nt, Human parainfluenza virus 1 strain Washington/1964
ccaccagcauacacgaaa

SEQ ID NO: 209261 - RNA, 14 nt, Human parainfluenza virus 1 strain Washington/1964
ccagcaaucaaaau

SEQ ID NO: 209262 - RNA, 16 nt, Human parainfluenza virus 1 strain Washington/1964
ccacgguaaacacaca

SEQ ID NO: 209263 - RNA, 15 nt, Human parainfluenza virus 1 strain Washington/1964
cuuagggucaaagaa

SEQ ID NO: 209264 - RNA, 20 nt, Human parainfluenza virus 1 strain Washington/1964
cuucacaguggauaccucag

SEQ ID NO: 209265 - RNA, 20 nt, Human parainfluenza virus 1 strain Washington/1964
cuucccgaauggaucaggau

SEQ ID NO: 209266 - RNA, 14 nt, Human parainfluenza virus 1 strain Washington/1964
cuucauuaucauga

SEQ ID NO: 209267 - RNA, 15 nt, Human parainfluenza virus 1 strain Washington/1964
cuucauuaucaugau

SEQ ID NO: 209268 - RNA, 15 nt, Human parainfluenza virus 1 strain Washington/1964
cugaucucacagaau

SEQ ID NO: 209269 - RNA, 23 nt, Human parainfluenza virus 1 strain Washington/1964
cugacaaaaaagcaaucccucac

SEQ ID NO: 209270 - RNA, 18 nt, Human parainfluenza virus 1 strain Washington/1964
cugaaacauacagguucc

SEQ ID NO: 209271 - RNA, 21 nt, Human parainfluenza virus 1 strain Washington/1964
cugaaaaagggaaaacaaaua

SEQ ID NO: 209272 - RNA, 12 nt, Human parainfluenza virus 1 strain Washington/1964
cucagacaucuu

SEQ ID NO: 209273 - RNA, 20 nt, Human parainfluenza virus 1 strain Washington/1964
cuccaaagaacaaccacaac

SEQ ID NO: 209274 - RNA, 21 nt, Human parainfluenza virus 1 strain Washington/1964
cuccaaccucgaagaccacaa

SEQ ID NO: 209275 - RNA, 17 nt, Human parainfluenza virus 1 strain Washington/1964
cuacaagcccacagaaa

SEQ ID NO: 209276 - RNA, 19 nt, Human parainfluenza virus 1 strain Washington/1964
cuacugauugcaacaacaa

SEQ ID NO: 209277 - RNA, 23 nt, Human parainfluenza virus 1 strain Washington/1964
gccacuccaaagaacaaccacaa

SEQ ID NO: 209278 - RNA, 15 nt, Human parainfluenza virus 1 strain Washington/1964
gcaacaacaaugcau

SEQ ID NO: 209279 - RNA, 19 nt, Human parainfluenza virus 1 strain Washington/1964
gguuccccagauucucaca

SEQ ID NO: 209280 - RNA, 20 nt, Human parainfluenza virus 1 strain Washington/1964
ggauaccucagcauccaaaa

SEQ ID NO: 209281 - RNA, 18 nt, Human parainfluenza virus 1 strain Washington/1964
ggagucagguaucuugau

SEQ ID NO: 209282 - RNA, 13 nt, Human parainfluenza virus 1 strain Washington/1964
gauccuccaaaac

SEQ ID NO: 209283 - RNA, 14 nt, Human parainfluenza virus 1 strain Washington/1964
gauccuccaaaaca

SEQ ID NO: 209284 - RNA, 17 nt, Human parainfluenza virus 1 strain Washington/1964
gauaccucagcauccaa

SEQ ID NO: 209285 - RNA, 21 nt, Human parainfluenza virus 1 strain Washington/1964
gcaaaaacaaaaacaagaaca

SEQ ID NO: 209286 - RNA, 18 nt, Human parainfluenza virus 1 strain Washington/1964
gaggcaagaacaaaaauu

SEQ ID NO: 209287 - RNA, 19 nt, Human parainfluenza virus 1 strain Washington/1964
gaaucaaccaguuauucaa

SEQ ID NO: 209288 - RNA, 13 nt, Human parainfluenza virus 1 strain Washington/1964
gaacuccacaaau

SEQ ID NO: 209289 - RNA, 20 nt, Human parainfluenza virus 1 strain Washington/1964
gaacuccacaaaucaacaag

SEQ ID NO: 209290 - RNA, 21 nt, Human parainfluenza virus 1 strain Washington/1964
gaagccagaucaaaaguaaga

SEQ ID NO: 209291 - RNA, 15 nt, Human parainfluenza virus 1 strain Washington/1964
gaacaaaaaagggaa

SEQ ID NO: 209292 - RNA, 19 nt, Human parainfluenza virus 1 strain Washington/1964
cuuguaugaagacaaacau

SEQ ID NO: 209293 - RNA, 14 nt, Human parainfluenza virus 1 strain Washington/1964
aaaggaacaaaaga

SEQ ID NO: 209294 - RNA, 19 nt, Human parainfluenza virus 1 strain Washington/1964
aaaggccagagacaaaaac

SEQ ID NO: 209295 - RNA, 16 nt, Human parainfluenza virus 1 strain Washington/1964
aaagggaaaacaaaua

SEQ ID NO: 209296 - RNA, 19 nt, Human parainfluenza virus 1 strain Washington/1964
aaagccgacgauaacaaca

SEQ ID NO: 209297 - RNA, 23 nt, Human parainfluenza virus 1 strain Washington/1964
aaagccgacgauaacaacaaaga

SEQ ID NO: 209298 - RNA, 13 nt, Human parainfluenza virus 1 strain Washington/1964
gacaagaucacaa

SEQ ID NO: 209299 - RNA, 22 nt, Human parainfluenza virus 1 strain Washington/1964
gaccuaauuauaaaacaagaca

SEQ ID NO: 209300 - RNA, 14 nt, Human parainfluenza virus 1 strain Washington/1964
gaccucuaucuggc

SEQ ID NO: 209301 - RNA, 15 nt, Human parainfluenza virus 1 strain Washington/1964
gacaauagaagccag

SEQ ID NO: 209302 - RNA, 19 nt, Human parainfluenza virus 1 strain Washington/1964
gacaauagaagccagauca

SEQ ID NO: 209303 - RNA, 19 nt, Human parainfluenza virus 1 strain Washington/1964
gacacuuguaugaagacaa

SEQ ID NO: 209304 - RNA, 16 nt, Human parainfluenza virus 1 strain Washington/1964
aaugcauacaguauug

SEQ ID NO: 209305 - RNA, 16 nt, Human parainfluenza virus 1 strain Washington/1964
aauuggcauagccaag

SEQ ID NO: 209306 - RNA, 14 nt, Human parainfluenza virus 1 strain Washington/1964
aagaaucacucuca

SEQ ID NO: 209307 - RNA, 22 nt, Human parainfluenza virus 1 strain Washington/1964
aauauccagagccaacucaaaa

SEQ ID NO: 209308 - RNA, 15 nt, Human parainfluenza virus 1 strain Washington/1964
aaucagguguacaac

SEQ ID NO: 209309 - RNA, 19 nt, Human parainfluenza virus 1 strain Washington/1964
aaucagguguacaacaagu

SEQ ID NO: 209310 - RNA, 21 nt, Human parainfluenza virus 1 strain Washington/1964
aaccaguuauucaaucugugg

SEQ ID NO: 209311 - RNA, 19 nt, Human parainfluenza virus 1 strain Washington/1964
aaccuauaaggcaacagca

SEQ ID NO: 209312 - RNA, 21 nt, Human parainfluenza virus 1 strain Washington/1964
aaccuauaaggcaacagcauc

SEQ ID NO: 209313 - RNA, 21 nt, Human parainfluenza virus 1 strain Washington/1964
aacgaagagucagcagccacu

SEQ ID NO: 209314 - RNA, 24 nt, Human parainfluenza virus 1 strain Washington/1964
aagaaaaacuuagggugaaugaca

SEQ ID NO: 209315 - RNA, 19 nt, Human parainfluenza virus 1 strain Washington/1964
uguaugaagacaaacauca

SEQ ID NO: 209316 - RNA, 22 nt, Human parainfluenza virus 1 strain Washington/1964
uguaugaagacaaacaucauga

SEQ ID NO: 209317 - RNA, 19 nt, Human parainfluenza virus 1 strain Washington/1964
uguagcauacauacaacaa

SEQ ID NO: 209318 - RNA, 18 nt, Human parainfluenza virus 1 strain Washington/1964
ugcuagauaucaaucaac

SEQ ID NO: 209319 - RNA, 13 nt, Human parainfluenza virus 1 strain Washington/1964
uggagaagacaga

SEQ ID NO: 209320 - RNA, 18 nt, Human parainfluenza virus 1 strain Washington/1964
uggagaagacagaagcug

SEQ ID NO: 209321 - RNA, 21 nt, Human parainfluenza virus 1 strain Washington/1964
uuaucaugauccuaugcauug

SEQ ID NO: 209322 - RNA, 23 nt, Human parainfluenza virus 1 strain Washington/1964
uucaccaaucagguguacaacaa

SEQ ID NO: 209323 - RNA, 19 nt, Human parainfluenza virus 1 strain Washington/1964
uccuacaagcccacagaaa

SEQ ID NO: 209324 - RNA, 14 nt, Human parainfluenza virus 1 strain Washington/1964
ucucagaugucauc

SEQ ID NO: 209325 - RNA, 20 nt, Human parainfluenza virus 1 strain Washington/1964
ugaagacaaacaucaugaca

SEQ ID NO: 209326 - RNA, 21 nt, Human parainfluenza virus 1 strain Washington/1964
ugaagacaaacaucaugacag

SEQ ID NO: 209327 - RNA, 14 nt, Human parainfluenza virus 1 strain Washington/1964
ugaaaauagcucca

SEQ ID NO: 209328 - RNA, 20 nt, Human parainfluenza virus 1 strain Washington/1964
ugaaaauagcuccaaccucg

SEQ ID NO: 209329 - RNA, 18 nt, Human parainfluenza virus 1 strain Washington/1964
ugacaauucacagaucag

SEQ ID NO: 209330 - RNA, 19 nt, Human parainfluenza virus 1 strain Washington/1964
ugacaauucacagaucagc

SEQ ID NO: 209331 - RNA, 19 nt, Human parainfluenza virus 1 strain Washington/1964
ugaccuaauuauaaaacaa

SEQ ID NO: 209332 - RNA, 13 nt, Human parainfluenza virus 1 strain Washington/1964
ugaauagacauuu

SEQ ID NO: 209333 - RNA, 16 nt, Human parainfluenza virus 1 strain Washington/1964
uccagagccaacucaa

SEQ ID NO: 209334 - RNA, 17 nt, Human parainfluenza virus 1 strain Washington/1964
uccagagccaacucaaa

SEQ ID NO: 209335 - RNA, 15 nt, Human parainfluenza virus 1 strain Washington/1964
uccaugaacgaaagu

SEQ ID NO: 209336 - RNA, 14 nt, Human parainfluenza virus 1 strain Washington/1964
ucauuaccaaccca

SEQ ID NO: 209337 - RNA, 17 nt, Human parainfluenza virus 1 strain Washington/1964
uccaaagaacaaccaca

SEQ ID NO: 209338 - RNA, 17 nt, Human parainfluenza virus 1 strain Washington/1964
ucaaaaagcucccucaa

SEQ ID NO: 209339 - RNA, 17 nt, Human parainfluenza virus 1 strain Washington/1964
ucaaaacaauuaagaaa

SEQ ID NO: 209340 - RNA, 19 nt, Human parainfluenza virus 1 strain Washington/1964
ucagcagccacuccaaaga

SEQ ID NO: 209341 - RNA, 21 nt, Human parainfluenza virus 1 strain Washington/1964
ucacguuuugcuagauaucaa

SEQ ID NO: 209342 - RNA, 15 nt, Human parainfluenza virus 1 strain Washington/1964
ucaaccagcaaucaa

SEQ ID NO: 209343 - RNA, 21 nt, Human parainfluenza virus 1 strain Washington/1964
ucaaccuauaaggcaacagca

SEQ ID NO: 209344 - RNA, 21 nt, Human parainfluenza virus 1 strain Washington/1964
ucacagaucagcucaaccaga

SEQ ID NO: 209345 - RNA, 19 nt, Human parainfluenza virus 1 strain Washington/1964
uaaaacaagacacuuguau

SEQ ID NO: 209346 - RNA, 21 nt, Human parainfluenza virus 1 strain Washington/1964
uaaacaccaagauagagacaa

SEQ ID NO: 209347 - RNA, 15 nt, Human parainfluenza virus 1 strain Washington/1964
uaaugaaaucacaac

SEQ ID NO: 209348 - RNA, 16 nt, Human parainfluenza virus 1 strain Washington/1964
uaaugaaaucacaaca

SEQ ID NO: 209349 - RNA, 16 nt, Human parainfluenza virus 1 strain Washington/1964
uacaacaaguaagaaa

SEQ ID NO: 209350 - RNA, 21 nt, Human parainfluenza virus 1 strain Washington/1964
acuuggacaauagaagccaga

SEQ ID NO: 209351 - RNA, 14 nt, Human parainfluenza virus 1 strain Washington/1964
agaaaacaagccau

SEQ ID NO: 209352 - RNA, 21 nt, Human parainfluenza virus 1 strain Washington/1964
agaaaacaagccaucaugcaa

SEQ ID NO: 209353 - RNA, 16 nt, Human parainfluenza virus 1 strain Washington/1964
acuuagggucaaagaa

SEQ ID NO: 209354 - RNA, 24 nt, Human parainfluenza virus 1 strain Washington/1964
acuuaggguuaaagacaauccagu

SEQ ID NO: 209355 - RNA, 22 nt, Human parainfluenza virus 1 strain Washington/1964
acugauugcaacaacaaugcau

SEQ ID NO: 209356 - RNA, 22 nt, Human parainfluenza virus 1 strain Washington/1964
agaaccucucccucucaaaaca

SEQ ID NO: 209357 - RNA, 18 nt, Human parainfluenza virus 1 strain Washington/1964
agaaauuggagaagacag

SEQ ID NO: 209358 - RNA, 15 nt, Human parainfluenza virus 1 strain Washington/1964
agaacaaaagcaaaa

SEQ ID NO: 209359 - RNA, 22 nt, Human parainfluenza virus 1 strain Washington/1964
agaaucaaccaguuauucaauc

SEQ ID NO: 209360 - RNA, 17 nt, Human parainfluenza virus 1 strain Washington/1964
agaccacaacaccaaaa

SEQ ID NO: 209361 - RNA, 20 nt, Human parainfluenza virus 1 strain Washington/1964
agaccacaacaccaaaacca

SEQ ID NO: 209362 - RNA, 22 nt, Human parainfluenza virus 1 strain Washington/1964
agacaaacaucaugacaguauc

SEQ ID NO: 209363 - RNA, 18 nt, Human parainfluenza virus 1 strain Washington/1964
acagaauuuaaauucaua

SEQ ID NO: 209364 - RNA, 18 nt, Human parainfluenza virus 1 strain Washington/1964
acacgaaaccaaccuuca

SEQ ID NO: 209365 - RNA, 13 nt, Human parainfluenza virus 1 strain Washington/1964
aauuucaaccagc

SEQ ID NO: 209366 - RNA, 16 nt, Human parainfluenza virus 1 strain Washington/1964
accaacccaaguccag

SEQ ID NO: 209367 - RNA, 14 nt, Human parainfluenza virus 1 strain Washington/1964
acauuaauacacca

SEQ ID NO: 209368 - RNA, 22 nt, Human parainfluenza virus 1 strain Washington/1964
aucaaaucuauccacaacuuca

SEQ ID NO: 209369 - RNA, 14 nt, Human parainfluenza virus 1 strain Washington/1964
auaacaacaaagac

SEQ ID NO: 209370 - RNA, 15 nt, Human parainfluenza virus 1 strain Washington/1964
auacauacaacaauc

SEQ ID NO: 209371 - RNA, 18 nt, Human parainfluenza virus 1 strain Washington/1964
auacaccagcaggaagga

SEQ ID NO: 209372 - RNA, 18 nt, Human parainfluenza virus 1 strain Washington/1964
auacacaacaaacaaugc

SEQ ID NO: 209373 - RNA, 13 nt, Human parainfluenza virus 1 strain Washington/1964
auagaagccagau

SEQ ID NO: 209374 - RNA, 14 nt, Human parainfluenza virus 1 strain Washington/1964
auagaagccagauc

SEQ ID NO: 209375 - RNA, 17 nt, Human parainfluenza virus 1 strain Washington/1964
aucaugauccuaugcau

SEQ ID NO: 209376 - RNA, 15 nt, Human parainfluenza virus 1 strain Washington/1964
aucagaauagucaag

SEQ ID NO: 209377 - RNA, 17 nt, Human parainfluenza virus 1 strain Washington/1964
aucagagagaacacaga

SEQ ID NO: 209378 - RNA, 15 nt, Human parainfluenza virus 1 strain Washington/1964
auccgauuauacaaa

SEQ ID NO: 209379 - RNA, 15 nt, Human parainfluenza virus 1 strain Washington/1964
aguuauucaaucugu

SEQ ID NO: 209380 - RNA, 19 nt, Human parainfluenza virus 1 strain Washington/1964
aguuauucaaucuguggau

SEQ ID NO: 209381 - RNA, 14 nt, Human parainfluenza virus 1 strain Washington/1964
aguggauaccucag

SEQ ID NO: 209382 - RNA, 15 nt, Human parainfluenza virus 1 strain Washington/1964
aguauuguccuucau

SEQ ID NO: 209383 - RNA, 17 nt, Human parainfluenza virus 1 strain Washington/1964
aguauaauaaauaucac

SEQ ID NO: 209384 - RNA, 17 nt, Human parainfluenza virus 1 strain Washington/1964
agggauccugaagccga

SEQ ID NO: 209385 - RNA, 13 nt, Human parainfluenza virus 1 strain Washington/1964
agcucccucaaaa

SEQ ID NO: 209386 - RNA, 14 nt, Human parainfluenza virus 1 strain Washington/1964
agcucaaccagaca

SEQ ID NO: 209387 - RNA, 22 nt, Human parainfluenza virus 1 strain Washington/1964
aggagauccuccaaaacaugga

SEQ ID NO: 209388 - RNA, 15 nt, Human parainfluenza virus 1 strain Washington/1964
cacaguggauaccuc

SEQ ID NO: 209389 - RNA, 12 nt, Human parainfluenza virus 1 strain Washington/1964
cacacacauuaa

SEQ ID NO: 209390 - RNA, 18 nt, Human parainfluenza virus 1 strain Washington/1964
caaugcauacaguauugu

SEQ ID NO: 209391 - RNA, 21 nt, Human parainfluenza virus 1 strain Washington/1964
caagguaggagauccuccaaa

SEQ ID NO: 209392 - RNA, 15 nt, Human parainfluenza virus 1 strain Washington/1964
caagccaucaugcaa

SEQ ID NO: 209393 - RNA, 14 nt, Human parainfluenza virus 1 strain Washington/1964
caauagaagccaga

SEQ ID NO: 209394 - RNA, 14 nt, Human parainfluenza virus 1 strain Washington/1964
caaucccucacauc

SEQ ID NO: 209395 - RNA, 18 nt, Human parainfluenza virus 1 strain Washington/1964
cacgaaaccaaccuucac

SEQ ID NO: 209396 - RNA, 23 nt, Human parainfluenza virus 1 strain Washington/1964
cacuuguaugaagacaaacauca

SEQ ID NO: 209397 - RNA, 16 nt, Human parainfluenza virus 1 strain Washington/1964
cagagagaacacagag

SEQ ID NO: 209398 - RNA, 18 nt, Human parainfluenza virus 1 strain Washington/1964
cacuccaaagaacaacca

SEQ ID NO: 209399 - RNA, 15 nt, Human parainfluenza virus 1 strain Washington/1964
auuuaaacaaaaaca

SEQ ID NO: 209400 - RNA, 14 nt, Human parainfluenza virus 1 strain Washington/1964
caaaaacaagaaca

SEQ ID NO: 209401 - RNA, 23 nt, Human parainfluenza virus 1 strain Washington/1964
caaaaagcucccucaaaacaauu

SEQ ID NO: 209402 - RNA, 19 nt, Human parainfluenza virus 1 strain Washington/1964
caaaacaauuaagaaaaac

SEQ ID NO: 209403 - RNA, 14 nt, Human parainfluenza virus 1 strain Washington/1964
caaacaucaugaca

SEQ ID NO: 209404 - RNA, 22 nt, Human parainfluenza virus 1 strain Washington/1964
caaacaucaugacaguauccuc

SEQ ID NO: 209405 - RNA, 22 nt, Human parainfluenza virus 1 strain Washington/1964
caaacaagaucagagagaacac

SEQ ID NO: 209406 - RNA, 21 nt, Human parainfluenza virus 1 strain Washington/1964
caaaugaagaggaaaccagca

SEQ ID NO: 209407 - RNA, 13 nt, Human parainfluenza virus 1 strain Washington/1964
caacaaagacaga

SEQ ID NO: 209408 - RNA, 14 nt, Human parainfluenza virus 1 strain Washington/1964
caguggauaccuca

SEQ ID NO: 209409 - RNA, 22 nt, Human parainfluenza virus 1 strain Washington/1964
caguggauaccucagcauccaa

SEQ ID NO: 209410 - RNA, 12 nt, Human parainfluenza virus 1 strain Washington/1964
cagccacuccaa

SEQ ID NO: 209411 - RNA, 14 nt, Human parainfluenza virus 1 strain Washington/1964
caugacaguauccu

SEQ ID NO: 209412 - RNA, 15 nt, Human parainfluenza virus 1 strain Washington/1964
caucaaggaagacaa

SEQ ID NO: 209413 - RNA, 20 nt, Human parainfluenza virus 1 strain Washington/1964
cauuaccaacccaaguccag

SEQ ID NO: 209414 - RNA, 14 nt, Human parainfluenza virus 1 strain Washington/1964
ccaaaauaaucaaa

SEQ ID NO: 209415 - RNA, 22 nt, Human parainfluenza virus 1 strain Washington/1964
ccaacucaaaaagcucccucaa

SEQ ID NO: 209416 - RNA, 18 nt, Human parainfluenza virus 1 strain Washington/1964
ccagagccaacucaaaaa

SEQ ID NO: 209417 - RNA, 14 nt, Human parainfluenza virus 1 strain Washington/1964
ccagacaccaccag

SEQ ID NO: 209418 - RNA, 23 nt, Human parainfluenza virus 1 strain Washington/1964
ccacuccaaagaacaaccacaac

SEQ ID NO: 209419 - RNA, 14 nt, Human parainfluenza virus 1 strain Washington/1964
ccacgaaaacaaga

SEQ ID NO: 209420 - RNA, 21 nt, Human parainfluenza virus 1 strain Washington/1964
ccacgaaaacaagaaucacuc

SEQ ID NO: 209421 - RNA, 23 nt, Human parainfluenza virus 1 strain Washington/1964
cgaaaacaagaaucacucucaga

SEQ ID NO: 209422 - RNA, 16 nt, Human parainfluenza virus 1 strain Washington/1964
ccucgaagaccacaac

SEQ ID NO: 209423 - RNA, 19 nt, Human parainfluenza virus 1 strain Washington/1964
ccucaaaacaauuaagaaa

SEQ ID NO: 209424 - RNA, 12 nt, Human parainfluenza virus 1 strain Washington/1964
cccucucaaaac

SEQ ID NO: 209425 - RNA, 12 nt, Human parainfluenza virus 1 strain Washington/1964
gcaacagcaucc

SEQ ID NO: 209426 - RNA, 14 nt, Human parainfluenza virus 1 strain Washington/1964
gauccuaugcauug

SEQ ID NO: 209427 - RNA, 13 nt, Human parainfluenza virus 1 strain Washington/1964
gccaaaauaauca

SEQ ID NO: 209428 - RNA, 13 nt, Human parainfluenza virus 1 strain Washington/1964
gcaggaaggacac

SEQ ID NO: 209429 - RNA, 12 nt, Human parainfluenza virus 1 strain Washington/1964
gcauccaaaacu

SEQ ID NO: 209430 - RNA, 14 nt, Human parainfluenza virus 1 strain Washington/1964
gaagaggaaaccag

SEQ ID NO: 209431 - RNA, 23 nt, Human parainfluenza virus 1 strain Washington/1964
gaagacaaacaucaugacaguau

SEQ ID NO: 209432 - RNA, 16 nt, Human parainfluenza virus 1 strain Washington/1964
gacagagcaaucucaa

SEQ ID NO: 209433 - RNA, 17 nt, Human parainfluenza virus 1 strain Washington/1964
gagaaaggaaauggcug

SEQ ID NO: 209434 - RNA, 16 nt, Human parainfluenza virus 1 strain Washington/1964
gagaaaaacaacaaca

SEQ ID NO: 209435 - RNA, 18 nt, Human parainfluenza virus 1 strain Washington/1964
cgacgauaacaacaaaga

SEQ ID NO: 209436 - RNA, 19 nt, Human parainfluenza virus 1 strain Washington/1964
cgacgauaacaacaaagac

SEQ ID NO: 209437 - RNA, 19 nt, Human parainfluenza virus 1 strain Washington/1964
cuacaacccgaaaugacaa

SEQ ID NO: 209438 - RNA, 18 nt, Human parainfluenza virus 1 strain Washington/1964
cuacugauugcaacaaca

SEQ ID NO: 209439 - RNA, 18 nt, Human parainfluenza virus 1 strain Washington/1964
cucucccucucaaaacag

SEQ ID NO: 209440 - RNA, 16 nt, Human parainfluenza virus 1 strain Washington/1964
cuuagggucaaagaaa

SEQ ID NO: 209441 - RNA, 13 nt, Human parainfluenza virus 1 strain Washington/1964
cuuauccuacaag

SEQ ID NO: 209442 - RNA, 17 nt, Human parainfluenza virus 1 strain Washington/1964
cuuauccuacaagccca

SEQ ID NO: 209443 - RNA, 21 nt, Human parainfluenza virus 1 strain Washington/1964
cuucacaguggauaccucagc

SEQ ID NO: 209444 - RNA, 23 nt, Human parainfluenza virus 1 strain Washington/1964
cuucacaguggauaccucagcau

SEQ ID NO: 209445 - RNA, 14 nt, Human parainfluenza virus 1 strain Washington/1964
cuucaccaaucagg

SEQ ID NO: 209446 - RNA, 17 nt, Human parainfluenza virus 1 strain Washington/1964
uaaagacaauccaguca

SEQ ID NO: 209447 - RNA, 19 nt, Human parainfluenza virus 1 strain Washington/1964
uaaaaagcaagauugcuca

SEQ ID NO: 209448 - RNA, 18 nt, Human parainfluenza virus 1 strain Washington/1964
uaaaaacauaguaagaaa

SEQ ID NO: 209449 - RNA, 17 nt, Human parainfluenza virus 1 strain Washington/1964
uacaacccgaaaugaca

SEQ ID NO: 209450 - RNA, 15 nt, Human parainfluenza virus 1 strain Washington/1964
uacaacaaucaaauc

SEQ ID NO: 209451 - RNA, 17 nt, Human parainfluenza virus 1 strain Washington/1964
uaauuauaaaacaagac

SEQ ID NO: 209452 - RNA, 20 nt, Human parainfluenza virus 1 strain Washington/1964
uacacgaaaccaaccuucac

SEQ ID NO: 209453 - RNA, 21 nt, Human parainfluenza virus 1 strain Washington/1964
uaccaacaucaaggaagacaa

SEQ ID NO: 209454 - RNA, 23 nt, Human parainfluenza virus 1 strain Washington/1964
uacauuguagcauacauacaaca

SEQ ID NO: 209455 - RNA, 15 nt, Human parainfluenza virus 1 strain Washington/1964
uauaaggcaacagca

SEQ ID NO: 209456 - RNA, 14 nt, Human parainfluenza virus 1 strain Washington/1964
uagcauacauacaa

SEQ ID NO: 209457 - RNA, 19 nt, Human parainfluenza virus 1 strain Washington/1964
uagcauacauacaacaauc

SEQ ID NO: 209458 - RNA, 17 nt, Human parainfluenza virus 1 strain Washington/1964
uacugauugcaacaaca

SEQ ID NO: 209459 - RNA, 18 nt, Human parainfluenza virus 1 strain Washington/1964
uaugaagacaaacaucau

SEQ ID NO: 209460 - RNA, 18 nt, Human parainfluenza virus 1 strain Washington/1964
ucaacucagaauuccuca

SEQ ID NO: 209461 - RNA, 20 nt, Human parainfluenza virus 1 strain Washington/1964
ucaacccuaugauuuaaaag

SEQ ID NO: 209462 - RNA, 23 nt, Human parainfluenza virus 1 strain Washington/1964
ucaaccagcaaucaaaaucaaua

SEQ ID NO: 209463 - RNA, 16 nt, Human parainfluenza virus 1 strain Washington/1964
ucaaccuauaaggcaa

SEQ ID NO: 209464 - RNA, 18 nt, Human parainfluenza virus 1 strain Washington/1964
uauuguccuucauuauca

SEQ ID NO: 209465 - RNA, 21 nt, Human parainfluenza virus 1 strain Washington/1964
gcucaaccagacaccaccagc

SEQ ID NO: 209466 - RNA, 22 nt, Human parainfluenza virus 1 strain Washington/1964
ggacaguagaaccucucccucu

SEQ ID NO: 209467 - RNA, 20 nt, Human parainfluenza virus 1 strain Washington/1964
ggacaauagaagccagauca

SEQ ID NO: 209468 - RNA, 20 nt, Human parainfluenza virus 1 strain Washington/1964
ggagaggcaccacgaaaaca

SEQ ID NO: 209469 - RNA, 21 nt, Human parainfluenza virus 1 strain Washington/1964
ggcagcauaucugaucucaca

SEQ ID NO: 209470 - RNA, 21 nt, Human parainfluenza virus 1 strain Washington/1964
gguaucaucgacaacccaaaa

SEQ ID NO: 209471 - RNA, 23 nt, Human parainfluenza virus 1 strain Washington/1964
ggugaaugacaauucacagauca

SEQ ID NO: 209472 - RNA, 17 nt, Human parainfluenza virus 1 strain Washington/1964
guaaacacacacauuaa

SEQ ID NO: 209473 - RNA, 20 nt, Human parainfluenza virus 1 strain Washington/1964
ggcuacugauugcaacaaca

SEQ ID NO: 209474 - RNA, 15 nt, Human parainfluenza virus 1 strain Washington/1964
guagcauacauacaa

SEQ ID NO: 209475 - RNA, 20 nt, Human parainfluenza virus 1 strain Washington/1964
uucgauacaaucaguucaaa

SEQ ID NO: 209476 - RNA, 17 nt, Human parainfluenza virus 1 strain Washington/1964
uuggacaauagaagcca

SEQ ID NO: 209477 - RNA, 21 nt, Human parainfluenza virus 1 strain Washington/1964
uuggacaauagaagccagauc

SEQ ID NO: 209478 - RNA, 20 nt, Human parainfluenza virus 1 strain Washington/1964
uuaggguuaaagacaaucca

SEQ ID NO: 209479 - RNA, 13 nt, Human parainfluenza virus 1 strain Washington/1964
uuaaagacaaucc

SEQ ID NO: 209480 - RNA, 14 nt, Human parainfluenza virus 1 strain Washington/1964
uuaaagacaaucca

SEQ ID NO: 209481 - RNA, 15 nt, Human parainfluenza virus 1 strain Washington/1964
uguagcauacauaca

SEQ ID NO: 209482 - RNA, 16 nt, Human parainfluenza virus 1 strain Washington/1964
uguagcauacauacaa

SEQ ID NO: 209483 - RNA, 22 nt, Human parainfluenza virus 1 strain Washington/1964
uguagcauacauacaacaauca

SEQ ID NO: 209484 - RNA, 16 nt, Human parainfluenza virus 1 strain Washington/1964
ugaaacaccuaagcaa

SEQ ID NO: 209485 - RNA, 15 nt, Human parainfluenza virus 1 strain Washington/1964
ugaaugacaauucac

SEQ ID NO: 209486 - RNA, 19 nt, Human parainfluenza virus 1 strain Washington/1964
ugauugcaacaacaaugca

SEQ ID NO: 209487 - RNA, 15 nt, Human parainfluenza virus 1 strain Washington/1964
ugccuauuugucaaa

SEQ ID NO: 209488 - RNA, 15 nt, Human parainfluenza virus 1 strain Washington/1964
ugcaacaacaaugca

SEQ ID NO: 209489 - RNA, 16 nt, Human parainfluenza virus 1 strain Washington/1964
ugcaaacaacaacaca

SEQ ID NO: 209490 - RNA, 15 nt, Human parainfluenza virus 1 strain Washington/1964
ucucaaaaagcucag

SEQ ID NO: 209491 - RNA, 15 nt, Human parainfluenza virus 1 strain Washington/1964
ucgaagaccacaaca

SEQ ID NO: 209492 - RNA, 14 nt, Human parainfluenza virus 1 strain Washington/1964
uccgauuguaaaaa

SEQ ID NO: 209493 - RNA, 20 nt, Human parainfluenza virus 1 strain Washington/1964
ucacaaacaagaacaaaagc

SEQ ID NO: 209494 - RNA, 15 nt, Human parainfluenza virus 1 strain Washington/1964
gcaaucaaaaucaau

SEQ ID NO: 209495 - RNA, 13 nt, Human parainfluenza virus 1 strain Washington/1964
gcuagauaucaau

SEQ ID NO: 209496 - RNA, 14 nt, Human parainfluenza virus 1 strain Washington/1964
accaguuauucaau

SEQ ID NO: 209497 - RNA, 19 nt, Human parainfluenza virus 1 strain Washington/1964
gacccaacacuauaucaau

SEQ ID NO: 209498 - RNA, 18 nt, Human parainfluenza virus 2
aaccaacauacaccacug

SEQ ID NO: 209499 - RNA, 23 nt, Human parainfluenza virus 2
aaccuccacaccagaaucauaca

SEQ ID NO: 209500 - RNA, 16 nt, Human parainfluenza virus 2
aaccagauauacacau

SEQ ID NO: 209501 - RNA, 17 nt, Human parainfluenza virus 2
aacuagacucacaucau

SEQ ID NO: 209502 - RNA, 21 nt, Human parainfluenza virus 2
aacuaaacguuccacaauaaa

SEQ ID NO: 209503 - RNA, 15 nt, Human parainfluenza virus 2
aaauucuugcaacuu

SEQ ID NO: 209504 - RNA, 22 nt, Human parainfluenza virus 2
aaaagacccaaacaacaccuca

SEQ ID NO: 209505 - RNA, 17 nt, Human parainfluenza virus 2
aaaaugaaaugacuagu

SEQ ID NO: 209506 - RNA, 22 nt, Human parainfluenza virus 2
aaaaugaaaugacuagucucaa

SEQ ID NO: 209507 - RNA, 17 nt, Human parainfluenza virus 2
aauagaaccacaaucaa

SEQ ID NO: 209508 - RNA, 18 nt, Human parainfluenza virus 2
aauauaggggucauucaa

SEQ ID NO: 209509 - RNA, 21 nt, Human parainfluenza virus 2
aaugaggugcagucacacaag

SEQ ID NO: 209510 - RNA, 14 nt, Human parainfluenza virus 2
aauugucaacacca

SEQ ID NO: 209511 - RNA, 16 nt, Human parainfluenza virus 2
aauugucaacaccaag

SEQ ID NO: 209512 - RNA, 19 nt, Human parainfluenza virus 2
aauuuuagucaacugauua

SEQ ID NO: 209513 - RNA, 16 nt, Human parainfluenza virus 2
aaugucauacaaccag

SEQ ID NO: 209514 - RNA, 16 nt, Human parainfluenza virus 2
aaggcgaguguugcaa

SEQ ID NO: 209515 - RNA, 21 nt, Human parainfluenza virus 2
aaggcagcaucccaccaggug

SEQ ID NO: 209516 - RNA, 20 nt, Human parainfluenza virus 2
aagucauacuacuagucacu

SEQ ID NO: 209517 - RNA, 17 nt, Human parainfluenza virus 2
aacuugacaccaaagau

SEQ ID NO: 209518 - RNA, 13 nt, Human parainfluenza virus 2
aacuuugaugcag

SEQ ID NO: 209519 - RNA, 18 nt, Human parainfluenza virus 2
acccauucuuauauaaga

SEQ ID NO: 209520 - RNA, 17 nt, Human parainfluenza virus 2
accaugcucaaccaaaa

SEQ ID NO: 209521 - RNA, 13 nt, Human parainfluenza virus 2
accuaaaauaagc

SEQ ID NO: 209522 - RNA, 14 nt, Human parainfluenza virus 2
acagaucccaaaau

SEQ ID NO: 209523 - RNA, 19 nt, Human parainfluenza virus 2
acagaucccaaaaucauag

SEQ ID NO: 209524 - RNA, 17 nt, Human parainfluenza virus 2
acaaaucaaacuagacu

SEQ ID NO: 209525 - RNA, 24 nt, Human parainfluenza virus 2
acaaaucaaacuagacucacauca

SEQ ID NO: 209526 - RNA, 13 nt, Human parainfluenza virus 2
acaccacugagca

SEQ ID NO: 209527 - RNA, 14 nt, Human parainfluenza virus 2
acaagagacacuca

SEQ ID NO: 209528 - RNA, 14 nt, Human parainfluenza virus 2
acugauuaccaaga

SEQ ID NO: 209529 - RNA, 16 nt, Human parainfluenza virus 2
acuaaacguuccacaa

SEQ ID NO: 209530 - RNA, 17 nt, Human parainfluenza virus 2
acguucaggccaaaaua

SEQ ID NO: 209531 - RNA, 13 nt, Human parainfluenza virus 2
acuauacugaugg

SEQ ID NO: 209532 - RNA, 19 nt, Human parainfluenza virus 2
acuagugcagcggagacaa

SEQ ID NO: 209533 - RNA, 19 nt, Human parainfluenza virus 2
acuagucacuauacaauaa

SEQ ID NO: 209534 - RNA, 23 nt, Human parainfluenza virus 2
acuagucucaaggcgaguguugc

SEQ ID NO: 209535 - RNA, 21 nt, Human parainfluenza virus 2
agacacucaacaugcauccaa

SEQ ID NO: 209536 - RNA, 23 nt, Human parainfluenza virus 2
agacacucaacaugcauccaauc

SEQ ID NO: 209537 - RNA, 13 nt, Human parainfluenza virus 2
agaaucauacaau

SEQ ID NO: 209538 - RNA, 14 nt, Human parainfluenza virus 2
agaaucauacaauc

SEQ ID NO: 209539 - RNA, 17 nt, Human parainfluenza virus 2
agacccauagaugcuca

SEQ ID NO: 209540 - RNA, 13 nt, Human parainfluenza virus 2
agaaaaacauauu

SEQ ID NO: 209541 - RNA, 19 nt, Human parainfluenza virus 2
agaauagaaccacaaucaa

SEQ ID NO: 209542 - RNA, 18 nt, Human parainfluenza virus 2
caaccagauauacacauc

SEQ ID NO: 209543 - RNA, 15 nt, Human parainfluenza virus 2
caaccaaaagaccca

SEQ ID NO: 209544 - RNA, 15 nt, Human parainfluenza virus 2
caacuucugcaacua

SEQ ID NO: 209545 - RNA, 19 nt, Human parainfluenza virus 2
caaacacaaacucauauac

SEQ ID NO: 209546 - RNA, 20 nt, Human parainfluenza virus 2
caaaauauucagccaugcau

SEQ ID NO: 209547 - RNA, 17 nt, Human parainfluenza virus 2
caauccuucaacaccga

SEQ ID NO: 209548 - RNA, 16 nt, Human parainfluenza virus 2
cagaaucauacaauca

SEQ ID NO: 209549 - RNA, 14 nt, Human parainfluenza virus 2
caccucacaucaau

SEQ ID NO: 209550 - RNA, 23 nt, Human parainfluenza virus 2
caaugaauaugaauauaucucuu

SEQ ID NO: 209551 - RNA, 21 nt, Human parainfluenza virus 2
caauggaacaugcaacaucac

SEQ ID NO: 209552 - RNA, 16 nt, Human parainfluenza virus 2
caccagaaucauacaa

SEQ ID NO: 209553 - RNA, 13 nt, Human parainfluenza virus 2
caaaagaccucaa

SEQ ID NO: 209554 - RNA, 16 nt, Human parainfluenza virus 2
auuuaagaaaaaaccu

SEQ ID NO: 209555 - RNA, 19 nt, Human parainfluenza virus 2
auuuaaagaaaaaaucaua

SEQ ID NO: 209556 - RNA, 22 nt, Human parainfluenza virus 2
auugcuggagaucaacuacuua

SEQ ID NO: 209557 - RNA, 12 nt, Human parainfluenza virus 2
auugcuaccuaa

SEQ ID NO: 209558 - RNA, 14 nt, Human parainfluenza virus 2
auugcuaccuaauc

SEQ ID NO: 209559 - RNA, 18 nt, Human parainfluenza virus 2
auuaauccaugcuggacu

SEQ ID NO: 209560 - RNA, 20 nt, Human parainfluenza virus 2
auuaagccuccagauaccaa

SEQ ID NO: 209561 - RNA, 12 nt, Human parainfluenza virus 2
auggaugaacua

SEQ ID NO: 209562 - RNA, 22 nt, Human parainfluenza virus 2
auguaacaauacuauuaagauu

SEQ ID NO: 209563 - RNA, 13 nt, Human parainfluenza virus 2
agcugccacucac

SEQ ID NO: 209564 - RNA, 21 nt, Human parainfluenza virus 2
aggccaaaauauucagccaug

SEQ ID NO: 209565 - RNA, 18 nt, Human parainfluenza virus 2
agucacuauacaauaauc

SEQ ID NO: 209566 - RNA, 14 nt, Human parainfluenza virus 2
agccgaaccaugcu

SEQ ID NO: 209567 - RNA, 17 nt, Human parainfluenza virus 2
agccugaauccaagaaa

SEQ ID NO: 209568 - RNA, 23 nt, Human parainfluenza virus 2
agauaaccuccacaccagaauca

SEQ ID NO: 209569 - RNA, 15 nt, Human parainfluenza virus 2
agauccagacuccau

SEQ ID NO: 209570 - RNA, 23 nt, Human parainfluenza virus 2
agauccagacuccauccauccaa

SEQ ID NO: 209571 - RNA, 18 nt, Human parainfluenza virus 2
agcggagacaaaauccaa

SEQ ID NO: 209572 - RNA, 22 nt, Human parainfluenza virus 2
agucucaaggcgaguguugcaa

SEQ ID NO: 209573 - RNA, 18 nt, Human parainfluenza virus 2
auagaugcucagucuucu

SEQ ID NO: 209574 - RNA, 19 nt, Human parainfluenza virus 2
auacuacuagucacuauac

SEQ ID NO: 209575 - RNA, 15 nt, Human parainfluenza virus 2
auacuccuuccugaa

SEQ ID NO: 209576 - RNA, 21 nt, Human parainfluenza virus 2
aucauagguccgaacugauca

SEQ ID NO: 209577 - RNA, 22 nt, Human parainfluenza virus 2
aucauagguccgaacugaucaa

SEQ ID NO: 209578 - RNA, 18 nt, Human parainfluenza virus 2
auccacucaacauauaau

SEQ ID NO: 209579 - RNA, 17 nt, Human parainfluenza virus 2
auccagacuccauccau

SEQ ID NO: 209580 - RNA, 14 nt, Human parainfluenza virus 2
auccagacaaauca

SEQ ID NO: 209581 - RNA, 16 nt, Human parainfluenza virus 2
aucucuuagaaaaccu

SEQ ID NO: 209582 - RNA, 18 nt, Human parainfluenza virus 2
aucaaagauaagaucacu

SEQ ID NO: 209583 - RNA, 15 nt, Human parainfluenza virus 2
aucaagauccagacu

SEQ ID NO: 209584 - RNA, 22 nt, Human parainfluenza virus 2
aucaagauccagacuccaucca

SEQ ID NO: 209585 - RNA, 14 nt, Human parainfluenza virus 2
aucaagucauacua

SEQ ID NO: 209586 - RNA, 17 nt, Human parainfluenza virus 2
aucaagucauacuacua

SEQ ID NO: 209587 - RNA, 18 nt, Human parainfluenza virus 2
aucaacaauuuuagucaa

SEQ ID NO: 209588 - RNA, 21 nt, Human parainfluenza virus 2
aucagauaaccuccacaccag

SEQ ID NO: 209589 - RNA, 16 nt, Human parainfluenza virus 2
uuaagaaaaacauauu

SEQ ID NO: 209590 - RNA, 15 nt, Human parainfluenza virus 2
ugucauacaaccaga

SEQ ID NO: 209591 - RNA, 15 nt, Human parainfluenza virus 2
uguaauucaaucuua

SEQ ID NO: 209592 - RNA, 17 nt, Human parainfluenza virus 2
ugauuucaauggaugaa

SEQ ID NO: 209593 - RNA, 20 nt, Human parainfluenza virus 2
ugauagcguaguacaauuua

SEQ ID NO: 209594 - RNA, 15 nt, Human parainfluenza virus 2
ugauaguaugcaucu

SEQ ID NO: 209595 - RNA, 16 nt, Human parainfluenza virus 2
ugauauugauuucaau

SEQ ID NO: 209596 - RNA, 15 nt, Human parainfluenza virus 2
ugaugcagcuugcaa

SEQ ID NO: 209597 - RNA, 22 nt, Human parainfluenza virus 2
ugaucuugacauuucugaaaua

SEQ ID NO: 209598 - RNA, 15 nt, Human parainfluenza virus 2
ugagauacuccuucc

SEQ ID NO: 209599 - RNA, 17 nt, Human parainfluenza virus 2
ugccacucacacacuca

SEQ ID NO: 209600 - RNA, 20 nt, Human parainfluenza virus 2
ugccauugcuggagaucaac

SEQ ID NO: 209601 - RNA, 17 nt, Human parainfluenza virus 2
aaguccacuugaacuca

SEQ ID NO: 209602 - RNA, 14 nt, Human parainfluenza virus 2
aauauucagccaug

SEQ ID NO: 209603 - RNA, 21 nt, Human parainfluenza virus 2
aaucaacguucaggccaaaau

SEQ ID NO: 209604 - RNA, 18 nt, Human parainfluenza virus 2
aaucacaaaagaccucaa

SEQ ID NO: 209605 - RNA, 15 nt, Human parainfluenza virus 2
aacuugacaccaaag

SEQ ID NO: 209606 - RNA, 16 nt, Human parainfluenza virus 2
aacuucugcaacuaua

SEQ ID NO: 209607 - RNA, 15 nt, Human parainfluenza virus 2
aagacccaaacaaca

SEQ ID NO: 209608 - RNA, 21 nt, Human parainfluenza virus 2
aagauuaugauauaggccaga

SEQ ID NO: 209609 - RNA, 21 nt, Human parainfluenza virus 2
aagaucacucauguacuauac

SEQ ID NO: 209610 - RNA, 13 nt, Human parainfluenza virus 2
aagaguuuacaca

SEQ ID NO: 209611 - RNA, 17 nt, Human parainfluenza virus 2
aacucauauacuacuua

SEQ ID NO: 209612 - RNA, 20 nt, Human parainfluenza virus 2
aacucauauacuacuuauua

SEQ ID NO: 209613 - RNA, 17 nt, Human parainfluenza virus 2
aacaugcauccaaucaa

SEQ ID NO: 209614 - RNA, 19 nt, Human parainfluenza virus 2
uugcaacuucugcaacuau

SEQ ID NO: 209615 - RNA, 20 nt, Human parainfluenza virus 2
aacaccaagaaacaaccaca

SEQ ID NO: 209616 - RNA, 21 nt, Human parainfluenza virus 2
aacaccaagaaacaaccacag

SEQ ID NO: 209617 - RNA, 23 nt, Human parainfluenza virus 2
aacacaguauaauuuaaucacaa

SEQ ID NO: 209618 - RNA, 18 nt, Human parainfluenza virus 2
uugacauuucugaaauaa

SEQ ID NO: 209619 - RNA, 14 nt, Human parainfluenza virus 2
aacaauuuuaguca

SEQ ID NO: 209620 - RNA, 17 nt, Human parainfluenza virus 2
uugaugcagcuugcaaa

SEQ ID NO: 209621 - RNA, 23 nt, Human parainfluenza virus 2
uacugaugguggugcuagcuuua

SEQ ID NO: 209622 - RNA, 17 nt, Human parainfluenza virus 2
uacaauaaucaacaauu

SEQ ID NO: 209623 - RNA, 21 nt, Human parainfluenza virus 2
uacaaccagauauacacaucc

SEQ ID NO: 209624 - RNA, 22 nt, Human parainfluenza virus 2
uacaaccagauauacacaucca

SEQ ID NO: 209625 - RNA, 14 nt, Human parainfluenza virus 2
uaacuagugcagcg

SEQ ID NO: 209626 - RNA, 21 nt, Human parainfluenza virus 2
uaaccuuuauauaauguaaca

SEQ ID NO: 209627 - RNA, 18 nt, Human parainfluenza virus 2
uaagcccccuucacaaua

SEQ ID NO: 209628 - RNA, 18 nt, Human parainfluenza virus 2
ggguucaguucaaauauc

SEQ ID NO: 209629 - RNA, 16 nt, Human parainfluenza virus 2
gucauacuacuaguca

SEQ ID NO: 209630 - RNA, 19 nt, Human parainfluenza virus 2
gucacagcuguucuaacua

SEQ ID NO: 209631 - RNA, 15 nt, Human parainfluenza virus 2
ucuagguccgaaagc

SEQ ID NO: 209632 - RNA, 19 nt, Human parainfluenza virus 2
uccacaauugacccuuaag

SEQ ID NO: 209633 - RNA, 16 nt, Human parainfluenza virus 2
ucccccaagcaaugga

SEQ ID NO: 209634 - RNA, 24 nt, Human parainfluenza virus 2
ucccuuacuccguuuccaauacaa

SEQ ID NO: 209635 - RNA, 12 nt, Human parainfluenza virus 2
uccauccaaaaa

SEQ ID NO: 209636 - RNA, 19 nt, Human parainfluenza virus 2
ucaccugcauccaaugaua

SEQ ID NO: 209637 - RNA, 17 nt, Human parainfluenza virus 2
ucaggccaaaauauuca

SEQ ID NO: 209638 - RNA, 12 nt, Human parainfluenza virus 2
ucauccagacaa

SEQ ID NO: 209639 - RNA, 19 nt, Human parainfluenza virus 2
uauuuaagaaaaacauauu

SEQ ID NO: 209640 - RNA, 20 nt, Human parainfluenza virus 2
uauuuaagaaaaacauauug

SEQ ID NO: 209641 - RNA, 19 nt, Human parainfluenza virus 2
ucaaagauaagaucacuca

SEQ ID NO: 209642 - RNA, 18 nt, Human parainfluenza virus 2
ucaacugauuaccaagau

SEQ ID NO: 209643 - RNA, 19 nt, Human parainfluenza virus 2
ucaacguucaggccaaaau

SEQ ID NO: 209644 - RNA, 22 nt, Human parainfluenza virus 2
uauacugaugguggugcuagcu

SEQ ID NO: 209645 - RNA, 21 nt, Human parainfluenza virus 2
uauaggggucauucaaucaaa

SEQ ID NO: 209646 - RNA, 16 nt, Human parainfluenza virus 2
uagaaccacaaucaag

SEQ ID NO: 209647 - RNA, 13 nt, Human parainfluenza virus 2
uauacacauccac

SEQ ID NO: 209648 - RNA, 14 nt, Human parainfluenza virus 2
uaucuuaugcaaua

SEQ ID NO: 209649 - RNA, 14 nt, Human parainfluenza virus 2
cucuaucuuaugca

SEQ ID NO: 209650 - RNA, 16 nt, Human parainfluenza virus 2
cucuaucuuaugcaau

SEQ ID NO: 209651 - RNA, 21 nt, Human parainfluenza virus 2
cucucaaugucauacaaccag

SEQ ID NO: 209652 - RNA, 23 nt, Human parainfluenza virus 2
cucaaggcgaguguugcaacuau

SEQ ID NO: 209653 - RNA, 15 nt, Human parainfluenza virus 2
cuccauccauccaaa

SEQ ID NO: 209654 - RNA, 13 nt, Human parainfluenza virus 2
cuccagauucaau

SEQ ID NO: 209655 - RNA, 15 nt, Human parainfluenza virus 2
cuguuguaauucaau

SEQ ID NO: 209656 - RNA, 18 nt, Human parainfluenza virus 2
cuaacuuugaugcagcuu

SEQ ID NO: 209657 - RNA, 17 nt, Human parainfluenza virus 2
cuaaacguuccacaaua

SEQ ID NO: 209658 - RNA, 12 nt, Human parainfluenza virus 2
ccuccacaccag

SEQ ID NO: 209659 - RNA, 23 nt, Human parainfluenza virus 2
aaaauuuaaaggacacaauagag

SEQ ID NO: 209660 - RNA, 21 nt, Human parainfluenza virus 2
ccuaaucuucccccaagcaau

SEQ ID NO: 209661 - RNA, 22 nt, Human parainfluenza virus 2
ccuaaucuucccccaagcaaug

SEQ ID NO: 209662 - RNA, 15 nt, Human parainfluenza virus 2
ccauaugaagcaauc

SEQ ID NO: 209663 - RNA, 15 nt, Human parainfluenza virus 2
cagacuccauccauc

SEQ ID NO: 209664 - RNA, 22 nt, Human parainfluenza virus 2
cagacuccauccauccaaaaac

SEQ ID NO: 209665 - RNA, 14 nt, Human parainfluenza virus 2
cagacagaucccaa

SEQ ID NO: 209666 - RNA, 16 nt, Human parainfluenza virus 2
cauuaccagcagaucc

SEQ ID NO: 209667 - RNA, 20 nt, Human parainfluenza virus 2
ccaagcaauggaacaugcaa

SEQ ID NO: 209668 - RNA, 13 nt, Human parainfluenza virus 2
gccaaaauauuca

SEQ ID NO: 209669 - RNA, 15 nt, Human parainfluenza virus 2
gcccacaauugucaa

SEQ ID NO: 209670 - RNA, 16 nt, Human parainfluenza virus 2
gcccacaauugucaac

SEQ ID NO: 209671 - RNA, 18 nt, Human parainfluenza virus 2
gaucacacgaaagccuga

SEQ ID NO: 209672 - RNA, 20 nt, Human parainfluenza virus 2
ggcauaaaacuaacuuugau

SEQ ID NO: 209673 - RNA, 19 nt, Human parainfluenza virus 2
ggcucucuaucuuaugcaa

SEQ ID NO: 209674 - RNA, 22 nt, Human parainfluenza virus 2
ggcucucuaucuuaugcaauag

SEQ ID NO: 209675 - RNA, 12 nt, Human parainfluenza virus 2
aaauucuugcaa

SEQ ID NO: 209676 - RNA, 23 nt, Human parainfluenza virus 2
aaauccaaaccaguugcugcugg

SEQ ID NO: 209677 - RNA, 19 nt, Human parainfluenza virus 2
aaauaagcccccuucacaa

SEQ ID NO: 209678 - RNA, 20 nt, Human parainfluenza virus 2
gauauacacauccacaucac

SEQ ID NO: 209679 - RNA, 15 nt, Human parainfluenza virus 2
gauagcguaguacaa

SEQ ID NO: 209680 - RNA, 19 nt, Human parainfluenza virus 2
gagaauagaaccacaauca

SEQ ID NO: 209681 - RNA, 20 nt, Human parainfluenza virus 2
gaagacuccagauucaauaa

SEQ ID NO: 209682 - RNA, 18 nt, Human parainfluenza virus 2
gaaauaagcccccuucac

SEQ ID NO: 209683 - RNA, 17 nt, Human parainfluenza virus 2
gaauuaauccaugcugg

SEQ ID NO: 209684 - RNA, 14 nt, Human parainfluenza virus 2
aaagacccaaacaa

SEQ ID NO: 209685 - RNA, 20 nt, Human parainfluenza virus 2
cuuaauauaggggucauuca

SEQ ID NO: 209686 - RNA, 15 nt, Human parainfluenza virus 2
uuguaauucaaucuu

SEQ ID NO: 209687 - RNA, 21 nt, Human parainfluenza virus 2
ugcuggagaucaacuacuuaa

SEQ ID NO: 209688 - RNA, 14 nt, Human parainfluenza virus 2
ugcucaaccaaaag

SEQ ID NO: 209689 - RNA, 12 nt, Human parainfluenza virus 2
uguaauucaauc

SEQ ID NO: 209690 - RNA, 13 nt, Human parainfluenza virus 2
uguccacaauuga

SEQ ID NO: 209691 - RNA, 20 nt, Human parainfluenza virus 2
uucaaucaaagauaagauca

SEQ ID NO: 209692 - RNA, 11 nt, Human parainfluenza virus 2
uucugagauac

SEQ ID NO: 209693 - RNA, 12 nt, Human parainfluenza virus 2
uucccauaugaa

SEQ ID NO: 209694 - RNA, 13 nt, Human parainfluenza virus 2
uugcaaaugacug

SEQ ID NO: 209695 - RNA, 21 nt, Human parainfluenza virus 2
uugccucucagacagauccca

SEQ ID NO: 209696 - RNA, 14 nt, Human parainfluenza virus 2
ucaguucaaauauc

SEQ ID NO: 209697 - RNA, 13 nt, Human parainfluenza virus 2
ucagccaugcauc

SEQ ID NO: 209698 - RNA, 14 nt, Human parainfluenza virus 2
ucagccaugcauca

SEQ ID NO: 209699 - RNA, 15 nt, Human parainfluenza virus 2
ucagccaugcaucac

SEQ ID NO: 209700 - RNA, 12 nt, Human parainfluenza virus 2
ucagaugccauu

SEQ ID NO: 209701 - RNA, 16 nt, Human parainfluenza virus 2
ucaccugcauccaaug

SEQ ID NO: 209702 - RNA, 15 nt, Human parainfluenza virus 2
ucauacaaccagaua

SEQ ID NO: 209703 - RNA, 21 nt, Human parainfluenza virus 2
ucauacaaccagauauacaca

SEQ ID NO: 209704 - RNA, 23 nt, Human parainfluenza virus 2
ucauacuacuagucacuauacaa

SEQ ID NO: 209705 - RNA, 15 nt, Human parainfluenza virus 2
ucuaucuuaugcaau

SEQ ID NO: 209706 - RNA, 19 nt, Human parainfluenza virus 2
ucuuauauaagaacacagu

SEQ ID NO: 209707 - RNA, 12 nt, Human parainfluenza virus 2
ucuucugagaua

SEQ ID NO: 209708 - RNA, 22 nt, Human parainfluenza virus 2
ucuucgccuucagacuguagaa

SEQ ID NO: 209709 - RNA, 17 nt, Human parainfluenza virus 2
ugaagacuccagauuca

SEQ ID NO: 209710 - RNA, 16 nt, Human parainfluenza virus 2
ugaacucaccaauagu

SEQ ID NO: 209711 - RNA, 13 nt, Human parainfluenza virus 2
ugaagcaauccuu

SEQ ID NO: 209712 - RNA, 14 nt, Human parainfluenza virus 2
ugaagcaauccuuc

SEQ ID NO: 209713 - RNA, 14 nt, Human parainfluenza virus 2
cuccagauucaaua

SEQ ID NO: 209714 - RNA, 22 nt, Human parainfluenza virus 2
cuguagaagggaaaguagauaa

SEQ ID NO: 209715 - RNA, 22 nt, Human parainfluenza virus 2
cuguagaggagaucagaaagag

SEQ ID NO: 209716 - RNA, 20 nt, Human parainfluenza virus 2
cugcuguuuuucccauauga

SEQ ID NO: 209717 - RNA, 17 nt, Human parainfluenza virus 2
cucucaucaacaaaaag

SEQ ID NO: 209718 - RNA, 16 nt, Human parainfluenza virus 2
cucucagacagauccc

SEQ ID NO: 209719 - RNA, 13 nt, Human parainfluenza virus 2
cgcaugaucuuga

SEQ ID NO: 209720 - RNA, 12 nt, Human parainfluenza virus 2
gauaacaacaau

SEQ ID NO: 209721 - RNA, 19 nt, Human parainfluenza virus 2
gauaaccuccacaccagaa

SEQ ID NO: 209722 - RNA, 17 nt, Human parainfluenza virus 2
gaguuuacacaauguuc

SEQ ID NO: 209723 - RNA, 12 nt, Human parainfluenza virus 2
gacugggaacag

SEQ ID NO: 209724 - RNA, 15 nt, Human parainfluenza virus 2
gcaauggaacaugca

SEQ ID NO: 209725 - RNA, 12 nt, Human parainfluenza virus 2
gcaaaggcagca

SEQ ID NO: 209726 - RNA, 19 nt, Human parainfluenza virus 2
gaucagauaaccuccacac

SEQ ID NO: 209727 - RNA, 16 nt, Human parainfluenza virus 2
gauacagcugccacuc

SEQ ID NO: 209728 - RNA, 16 nt, Human parainfluenza virus 2
gaagcaauccuucaac

SEQ ID NO: 209729 - RNA, 23 nt, Human parainfluenza virus 2
gaagcaauccuucaacaccgacu

SEQ ID NO: 209730 - RNA, 20 nt, Human parainfluenza virus 2
gaaugaagacuccagauuca

SEQ ID NO: 209731 - RNA, 14 nt, Human parainfluenza virus 2
uacuauacugaugg

SEQ ID NO: 209732 - RNA, 18 nt, Human parainfluenza virus 2
uaagcacgaacccuuaag

SEQ ID NO: 209733 - RNA, 14 nt, Human parainfluenza virus 2
uaacuuugaugcag

SEQ ID NO: 209734 - RNA, 20 nt, Human parainfluenza virus 2
uaauucaaucuuacuaaagu

SEQ ID NO: 209735 - RNA, 23 nt, Human parainfluenza virus 2
uacaauuuaagaaaaaaccuaaa

SEQ ID NO: 209736 - RNA, 16 nt, Human parainfluenza virus 2
uacacauccacaucac

SEQ ID NO: 209737 - RNA, 19 nt, Human parainfluenza virus 2
uacacauccacaucacuca

SEQ ID NO: 209738 - RNA, 16 nt, Human parainfluenza virus 2
uacagcugccacucac

SEQ ID NO: 209739 - RNA, 17 nt, Human parainfluenza virus 2
uacagcugccacucaca

SEQ ID NO: 209740 - RNA, 24 nt, Human parainfluenza virus 2
uaucauagguccgaacugaucaau

SEQ ID NO: 209741 - RNA, 15 nt, Human parainfluenza virus 2
uaggcaaaggcagca

SEQ ID NO: 209742 - RNA, 19 nt, Human parainfluenza virus 2
uaguccaaaccccaaacac

SEQ ID NO: 209743 - RNA, 15 nt, Human parainfluenza virus 2
uagucacuauacaau

SEQ ID NO: 209744 - RNA, 18 nt, Human parainfluenza virus 2
uagacccauagaugcuca

SEQ ID NO: 209745 - RNA, 11 nt, Human parainfluenza virus 2
uagaaaaccug

SEQ ID NO: 209746 - RNA, 22 nt, Human parainfluenza virus 2
uagcuagaccuacacucucauc

SEQ ID NO: 209747 - RNA, 18 nt, Human parainfluenza virus 2
uagauaaaauucuugcaa

SEQ ID NO: 209748 - RNA, 17 nt, Human parainfluenza virus 2
uaaaaaugaaaugacua

SEQ ID NO: 209749 - RNA, 16 nt, Human parainfluenza virus 2
uaacgucucgugacac

SEQ ID NO: 209750 - RNA, 20 nt, Human parainfluenza virus 2
guuguaaaauugcuaccuaa

SEQ ID NO: 209751 - RNA, 19 nt, Human parainfluenza virus 2
gcuguuuuucccauaugaa

SEQ ID NO: 209752 - RNA, 18 nt, Human parainfluenza virus 2
gcuccagcaucugagaau

SEQ ID NO: 209753 - RNA, 20 nt, Human parainfluenza virus 2
ggcuucacagccgaacaggu

SEQ ID NO: 209754 - RNA, 19 nt, Human parainfluenza virus 2
ggaaccaacauacaccacu

SEQ ID NO: 209755 - RNA, 15 nt, Human parainfluenza virus 2
gguccgaacugauca

SEQ ID NO: 209756 - RNA, 15 nt, Human parainfluenza virus 2
gguucagaugccauu

SEQ ID NO: 209757 - RNA, 21 nt, Human parainfluenza virus 2
ccacagccgaaccaugcucaa

SEQ ID NO: 209758 - RNA, 20 nt, Human parainfluenza virus 2
ccagauauacacauccacau

SEQ ID NO: 209759 - RNA, 12 nt, Human parainfluenza virus 2
ccacaucacuca

SEQ ID NO: 209760 - RNA, 19 nt, Human parainfluenza virus 2
ccgaggaaccaacauacac

SEQ ID NO: 209761 - RNA, 16 nt, Human parainfluenza virus 2
ccaugcuggacuggga

SEQ ID NO: 209762 - RNA, 14 nt, Human parainfluenza virus 2
ccaugcucaaccaa

SEQ ID NO: 209763 - RNA, 22 nt, Human parainfluenza virus 2
cagauaaccuccacaccagaau

SEQ ID NO: 209764 - RNA, 15 nt, Human parainfluenza virus 2
cagauauacacaucc

SEQ ID NO: 209765 - RNA, 20 nt, Human parainfluenza virus 2
cagcuguucuaacuagugca

SEQ ID NO: 209766 - RNA, 21 nt, Human parainfluenza virus 2
cagcggagacaaaauccaaac

SEQ ID NO: 209767 - RNA, 20 nt, Human parainfluenza virus 2
caucuuuguuauguacacug

SEQ ID NO: 209768 - RNA, 22 nt, Human parainfluenza virus 2
caucuuuguuauguacacugga

SEQ ID NO: 209769 - RNA, 19 nt, Human parainfluenza virus 2
caaccagauauacacaucc

SEQ ID NO: 209770 - RNA, 22 nt, Human parainfluenza virus 2
caaccaaaagacccaaacaaca

SEQ ID NO: 209771 - RNA, 21 nt, Human parainfluenza virus 2
caacuucacccagucaauccc

SEQ ID NO: 209772 - RNA, 18 nt, Human parainfluenza virus 2
caacuugacaccaaagau

SEQ ID NO: 209773 - RNA, 19 nt, Human parainfluenza virus 2
caagucauacuacuaguca

SEQ ID NO: 209774 - RNA, 13 nt, Human parainfluenza virus 2
cacaaucaaguca

SEQ ID NO: 209775 - RNA, 21 nt, Human parainfluenza virus 2
cacaaucaagucauacuacua

SEQ ID NO: 209776 - RNA, 17 nt, Human parainfluenza virus 2
cacaagagacacucaac

SEQ ID NO: 209777 - RNA, 14 nt, Human parainfluenza virus 2
cacagccgaaccau

SEQ ID NO: 209778 - RNA, 20 nt, Human parainfluenza virus 2
caauuuuagucaacugauua

SEQ ID NO: 209779 - RNA, 22 nt, Human parainfluenza virus 2
caauugacccuuaagaaccaac

SEQ ID NO: 209780 - RNA, 16 nt, Human parainfluenza virus 2
caauagucaaacacaa

SEQ ID NO: 209781 - RNA, 21 nt, Human parainfluenza virus 2
caauagucaaacacaaacuca

SEQ ID NO: 209782 - RNA, 21 nt, Human parainfluenza virus 2
auugaaugaagacuccagauu

SEQ ID NO: 209783 - RNA, 19 nt, Human parainfluenza virus 2
auugacccuuaagaaccaa

SEQ ID NO: 209784 - RNA, 17 nt, Human parainfluenza virus 2
auuaagauuaugauaua

SEQ ID NO: 209785 - RNA, 18 nt, Human parainfluenza virus 2
augucauacaaccagaua

SEQ ID NO: 209786 - RNA, 17 nt, Human parainfluenza virus 2
augcucaaccaaaagac

SEQ ID NO: 209787 - RNA, 19 nt, Human parainfluenza virus 2
augcaucuuuguuauguac

SEQ ID NO: 209788 - RNA, 23 nt, Human parainfluenza virus 2
augcaucaccugcauccaaugau

SEQ ID NO: 209789 - RNA, 19 nt, Human parainfluenza virus 2
augaaaugacuagucucaa

SEQ ID NO: 209790 - RNA, 21 nt, Human parainfluenza virus 2
aucuucgccuucagacuguag

SEQ ID NO: 209791 - RNA, 18 nt, Human parainfluenza virus 2
aucuucccccaagcaaug

SEQ ID NO: 209792 - RNA, 20 nt, Human parainfluenza virus 2
aucuugacauuucugaaaua

SEQ ID NO: 209793 - RNA, 23 nt, Human parainfluenza virus 2
aucacacgaaagccugaauccaa

SEQ ID NO: 209794 - RNA, 15 nt, Human parainfluenza virus 2
augaauuaauccaug

SEQ ID NO: 209795 - RNA, 21 nt, Human parainfluenza virus 2
accucaaaaacugacacagcu

SEQ ID NO: 209796 - RNA, 17 nt, Human parainfluenza virus 2
accucacaucaauagaa

SEQ ID NO: 209797 - RNA, 17 nt, Human parainfluenza virus 2
accuaaucuucccccaa

SEQ ID NO: 209798 - RNA, 19 nt, Human parainfluenza virus 2
accacagccgaaccaugcu

SEQ ID NO: 209799 - RNA, 16 nt, Human parainfluenza virus 2
acguucaggccaaaau

SEQ ID NO: 209800 - RNA, 21 nt, Human parainfluenza virus 2
acguucaggccaaaauauuca

SEQ ID NO: 209801 - RNA, 16 nt, Human parainfluenza virus 2
acuaacuuugaugcag

SEQ ID NO: 209802 - RNA, 19 nt, Human parainfluenza virus 2
acuccauccauccaaaaac

SEQ ID NO: 209803 - RNA, 17 nt, Human parainfluenza virus 2
acuccagauucaauaau

SEQ ID NO: 209804 - RNA, 18 nt, Human parainfluenza virus 2
acuccagauucaauaaua

SEQ ID NO: 209805 - RNA, 18 nt, Human parainfluenza virus 2
acuccguuuccaauacaa

SEQ ID NO: 209806 - RNA, 22 nt, Human parainfluenza virus 2
acuugaacucaccaauagucaa

SEQ ID NO: 209807 - RNA, 15 nt, Human parainfluenza virus 2
acuugacaccaaaga

SEQ ID NO: 209808 - RNA, 23 nt, Human parainfluenza virus 2
acaacaauuaaaaucauggaucc

SEQ ID NO: 209809 - RNA, 16 nt, Human parainfluenza virus 2
aaugacuagucucaag

SEQ ID NO: 209810 - RNA, 15 nt, Human parainfluenza virus 2
acaaucaagucauac

SEQ ID NO: 209811 - RNA, 19 nt, Human parainfluenza virus 2
acaacuugacaccaaagau

SEQ ID NO: 209812 - RNA, 19 nt, Human parainfluenza virus 2
acaaccagauauacacauc

SEQ ID NO: 209813 - RNA, 22 nt, Human parainfluenza virus 2
acaaccagauauacacauccac

SEQ ID NO: 209814 - RNA, 15 nt, Human parainfluenza virus 2
acacucauccagaca

SEQ ID NO: 209815 - RNA, 13 nt, Human parainfluenza virus 2
acaccucacauca

SEQ ID NO: 209816 - RNA, 21 nt, Human parainfluenza virus 2
acaccgacuuagguucaauuu

SEQ ID NO: 209817 - RNA, 16 nt, Human parainfluenza virus 2
acaauugucaacacca

SEQ ID NO: 209818 - RNA, 19 nt, Human parainfluenza virus 2
acaauugucaacaccaaga

SEQ ID NO: 209819 - RNA, 18 nt, Human parainfluenza virus 2
acaauucucucauaauuu

SEQ ID NO: 209820 - RNA, 17 nt, Human parainfluenza virus 2
acacaagagacacucaa

SEQ ID NO: 209821 - RNA, 20 nt, Human parainfluenza virus 2
acacaauagagaaaaucuag

SEQ ID NO: 209822 - RNA, 15 nt, Human parainfluenza virus 2
acaccagaaucauac

SEQ ID NO: 209823 - RNA, 19 nt, Human parainfluenza virus 2
acaccagaaucauacaauc

SEQ ID NO: 209824 - RNA, 21 nt, Human parainfluenza virus 2
acaccagaaucauacaaucau

SEQ ID NO: 209825 - RNA, 21 nt, Human parainfluenza virus 2
acacaguauaauuuaaucaca

SEQ ID NO: 209826 - RNA, 14 nt, Human parainfluenza virus 2
acacauccacauca

SEQ ID NO: 209827 - RNA, 15 nt, Human parainfluenza virus 2
acacacucauccaga

SEQ ID NO: 209828 - RNA, 19 nt, Human parainfluenza virus 2
acacacucauccagacaaa

SEQ ID NO: 209829 - RNA, 19 nt, Human parainfluenza virus 2
acaucacucagagauacag

SEQ ID NO: 209830 - RNA, 13 nt, Human parainfluenza virus 2
acauccacaucac

SEQ ID NO: 209831 - RNA, 20 nt, Human parainfluenza virus 2
acauccacaucacucagaga

SEQ ID NO: 209832 - RNA, 12 nt, Human parainfluenza virus 2
agagacacucaa

SEQ ID NO: 209833 - RNA, 21 nt, Human parainfluenza virus 2
agagauacagcugccacucac

SEQ ID NO: 209834 - RNA, 15 nt, Human parainfluenza virus 2
agaucaacuacuuaa

SEQ ID NO: 209835 - RNA, 22 nt, Human parainfluenza virus 2
agauccaacuucacccagucaa

SEQ ID NO: 209836 - RNA, 23 nt, Human parainfluenza virus 2
agcaaguugaugaauuaauccau

SEQ ID NO: 209837 - RNA, 13 nt, Human parainfluenza virus 2
agauuucuuccua

SEQ ID NO: 209838 - RNA, 21 nt, Human parainfluenza virus 2
agauucugcuguuuuucccau

SEQ ID NO: 209839 - RNA, 16 nt, Human parainfluenza virus 2
agccuccagauaccaa

SEQ ID NO: 209840 - RNA, 14 nt, Human parainfluenza virus 2
agcggagacaaaau

SEQ ID NO: 209841 - RNA, 17 nt, Human parainfluenza virus 2
auaagaacucaugauag

SEQ ID NO: 209842 - RNA, 20 nt, Human parainfluenza virus 2
auaagaucacucauguacua

SEQ ID NO: 209843 - RNA, 13 nt, Human parainfluenza virus 2
aucaaucuaacaa

SEQ ID NO: 209844 - RNA, 18 nt, Human parainfluenza virus 2
aucaagucauacuacuag

SEQ ID NO: 209845 - RNA, 22 nt, Human parainfluenza virus 2
aucaagucauacuacuagucac

SEQ ID NO: 209846 - RNA, 19 nt, Human parainfluenza virus 2
auaucgaccucuaacccaa

SEQ ID NO: 209847 - RNA, 14 nt, Human parainfluenza virus 2
agucauacuacuag

SEQ ID NO: 209848 - RNA, 15 nt, Human parainfluenza virus 2
agucacacaagagac

SEQ ID NO: 209849 - RNA, 21 nt, Human parainfluenza virus 2
agucacacaagagacacucaa

SEQ ID NO: 209850 - RNA, 20 nt, Human parainfluenza virus 2
agucacuauacaauaaucaa

SEQ ID NO: 209851 - RNA, 14 nt, Human parainfluenza virus 2
aguccaaaccccaa

SEQ ID NO: 209852 - RNA, 18 nt, Human parainfluenza virus 2
aguccaaaccccaaacac

SEQ ID NO: 209853 - RNA, 18 nt, Human parainfluenza virus 2
aggcgaguguugcaacua

SEQ ID NO: 209854 - RNA, 17 nt, Human parainfluenza virus 2
agguucaauuuucucau

SEQ ID NO: 209855 - RNA, 19 nt, Human parainfluenza virus 2
aguuuacacaauguuccag

SEQ ID NO: 209856 - RNA, 23 nt, Human parainfluenza virus 2
agucuauauauguccacaauuga

SEQ ID NO: 209857 - RNA, 15 nt, Human parainfluenza virus 2
aguguugcaacuaug

SEQ ID NO: 209858 - RNA, 11 nt, Human parainfluenza virus 2
aaaaacauauu

SEQ ID NO: 209859 - RNA, 13 nt, Human parainfluenza virus 2
aaaauuaacauua

SEQ ID NO: 209860 - RNA, 14 nt, Human parainfluenza virus 2
aaacaauucucuca

SEQ ID NO: 209861 - RNA, 13 nt, Human parainfluenza virus 2
aaacacagcagca

SEQ ID NO: 209862 - RNA, 18 nt, Human parainfluenza virus 2
auauucagccaugcauca

SEQ ID NO: 209863 - RNA, 22 nt, Human parainfluenza virus 2
auauucagccaugcaucaccug

SEQ ID NO: 209864 - RNA, 23 nt, Human parainfluenza virus 2
auauucagccaugcaucaccugc

SEQ ID NO: 209865 - RNA, 13 nt, Human parainfluenza virus 2
aucauuaccagca

SEQ ID NO: 209866 - RNA, 14 nt, Human parainfluenza virus 2
auccauccaaaaac

SEQ ID NO: 209867 - RNA, 13 nt, Human parainfluenza virus 2
auaucgaccucua

SEQ ID NO: 209868 - RNA, 16 nt, Human parainfluenza virus 2
auauaggggucauuca

SEQ ID NO: 209869 - RNA, 17 nt, Human parainfluenza virus 2
auauaggggucauucaa

SEQ ID NO: 209870 - RNA, 13 nt, Human parainfluenza virus 2
auaguaugcaucu

SEQ ID NO: 209871 - RNA, 21 nt, Human parainfluenza virus 2
auagucaaacacaaacucaua

SEQ ID NO: 209872 - RNA, 14 nt, Human parainfluenza virus 2
augcucaaccaaaa

SEQ ID NO: 209873 - RNA, 16 nt, Human parainfluenza virus 2
augcucaaccaaaaga

SEQ ID NO: 209874 - RNA, 18 nt, Human parainfluenza virus 2
augcaucaccugcaucca

SEQ ID NO: 209875 - RNA, 23 nt, Human parainfluenza virus 2
augccauugcuggagaucaacua

SEQ ID NO: 209876 - RNA, 15 nt, Human parainfluenza virus 2
augauaguaugcauc

SEQ ID NO: 209877 - RNA, 13 nt, Human parainfluenza virus 2
augcagcuugcaa

SEQ ID NO: 209878 - RNA, 20 nt, Human parainfluenza virus 2
augcagcuugcaaaugacug

SEQ ID NO: 209879 - RNA, 14 nt, Human parainfluenza virus 2
augcaacaucacca

SEQ ID NO: 209880 - RNA, 15 nt, Human parainfluenza virus 2
auaaaauucuugcaa

SEQ ID NO: 209881 - RNA, 23 nt, Human parainfluenza virus 2
aggugucacagcuguucuaacua

SEQ ID NO: 209882 - RNA, 22 nt, Human parainfluenza virus 2
agcuugauccacucaacauaua

SEQ ID NO: 209883 - RNA, 22 nt, Human parainfluenza virus 2
caaagauaagaucacucaugua

SEQ ID NO: 209884 - RNA, 18 nt, Human parainfluenza virus 2
caaacuagacucacauca

SEQ ID NO: 209885 - RNA, 21 nt, Human parainfluenza virus 2
caaacuagacucacaucauuc

SEQ ID NO: 209886 - RNA, 14 nt, Human parainfluenza virus 2
caaaccccaaacac

SEQ ID NO: 209887 - RNA, 11 nt, Human parainfluenza virus 2
caaaugacugc

SEQ ID NO: 209888 - RNA, 16 nt, Human parainfluenza virus 2
caaauaucgaccucua

SEQ ID NO: 209889 - RNA, 12 nt, Human parainfluenza virus 2
caacaccaagaa

SEQ ID NO: 209890 - RNA, 21 nt, Human parainfluenza virus 2
caacaccucacaucaauagaa

SEQ ID NO: 209891 - RNA, 22 nt, Human parainfluenza virus 2
caacaaugauuauaagaacuca

SEQ ID NO: 209892 - RNA, 16 nt, Human parainfluenza virus 2
caagaaagauuuaaca

SEQ ID NO: 209893 - RNA, 15 nt, Human parainfluenza virus 2
caacauacaccacug

SEQ ID NO: 209894 - RNA, 19 nt, Human parainfluenza virus 2
auuuacuguuguaauucaa

SEQ ID NO: 209895 - RNA, 21 nt, Human parainfluenza virus 2
auuuacuguuguaauucaauc

SEQ ID NO: 209896 - RNA, 18 nt, Human parainfluenza virus 2
auugucaacaccaagaaa

SEQ ID NO: 209897 - RNA, 19 nt, Human parainfluenza virus 2
auugucaacaccaagaaac

SEQ ID NO: 209898 - RNA, 15 nt, Human parainfluenza virus 2
augcuggacugggaa

SEQ ID NO: 209899 - RNA, 20 nt, Human parainfluenza virus 2
auucagccaugcaucaccug

SEQ ID NO: 209900 - RNA, 14 nt, Human parainfluenza virus 2
auucaaucaaagau

SEQ ID NO: 209901 - RNA, 19 nt, Human parainfluenza virus 2
caaugucauacaaccagau

SEQ ID NO: 209902 - RNA, 17 nt, Human parainfluenza virus 2
caauuaaaaucauggau

SEQ ID NO: 209903 - RNA, 12 nt, Human parainfluenza virus 2
cacacacucauc

SEQ ID NO: 209904 - RNA, 16 nt, Human parainfluenza virus 2
caccaagaaacaacca

SEQ ID NO: 209905 - RNA, 19 nt, Human parainfluenza virus 2
caccaagaaacaaccacag

SEQ ID NO: 209906 - RNA, 13 nt, Human parainfluenza virus 2
cacuauacaauaa

SEQ ID NO: 209907 - RNA, 19 nt, Human parainfluenza virus 2
cacucauguacuauacuga

SEQ ID NO: 209908 - RNA, 22 nt, Human parainfluenza virus 2
cacuugaacucaccaauaguca

SEQ ID NO: 209909 - RNA, 20 nt, Human parainfluenza virus 2
cagauaaccuccacaccaga

SEQ ID NO: 209910 - RNA, 16 nt, Human parainfluenza virus 2
cagcaaucuaucucuu

SEQ ID NO: 209911 - RNA, 23 nt, Human parainfluenza virus 2
cagcuguucuaacuagugcagcg

SEQ ID NO: 209912 - RNA, 16 nt, Human parainfluenza virus 2
acaugcaacaucacca

SEQ ID NO: 209913 - RNA, 19 nt, Human parainfluenza virus 2
accagauauacacauccac

SEQ ID NO: 209914 - RNA, 17 nt, Human parainfluenza virus 2
accaggugucacagcug

SEQ ID NO: 209915 - RNA, 12 nt, Human parainfluenza virus 2
accaacauacac

SEQ ID NO: 209916 - RNA, 16 nt, Human parainfluenza virus 2
accaacauacaccacu

SEQ ID NO: 209917 - RNA, 18 nt, Human parainfluenza virus 2
accaacuuccaacgauua

SEQ ID NO: 209918 - RNA, 15 nt, Human parainfluenza virus 2
accaagaaacaacca

SEQ ID NO: 209919 - RNA, 21 nt, Human parainfluenza virus 2
accaauagucaaacacaaacu

SEQ ID NO: 209920 - RNA, 13 nt, Human parainfluenza virus 2
acacacucaucca

SEQ ID NO: 209921 - RNA, 21 nt, Human parainfluenza virus 2
acacacucauccagacaaauc

SEQ ID NO: 209922 - RNA, 16 nt, Human parainfluenza virus 2
acagccgaaccaugcu

SEQ ID NO: 209923 - RNA, 18 nt, Human parainfluenza virus 2
acacauccacaucacuca

SEQ ID NO: 209924 - RNA, 20 nt, Human parainfluenza virus 2
acacauccacaucacucaga

SEQ ID NO: 209925 - RNA, 14 nt, Human parainfluenza virus 2
acagcugccacuca

SEQ ID NO: 209926 - RNA, 14 nt, Human parainfluenza virus 2
acauccacaucacu

SEQ ID NO: 209927 - RNA, 21 nt, Human parainfluenza virus 2
acaucacucagagauacagcu

SEQ ID NO: 209928 - RNA, 14 nt, Human parainfluenza virus 2
accuccacaccaga

SEQ ID NO: 209929 - RNA, 13 nt, Human parainfluenza virus 2
acgaaagccugaa

SEQ ID NO: 209930 - RNA, 14 nt, Human parainfluenza virus 2
agaucaacuacuua

SEQ ID NO: 209931 - RNA, 13 nt, Human parainfluenza virus 2
agauauacacauc

SEQ ID NO: 209932 - RNA, 19 nt, Human parainfluenza virus 2
agauauacacauccacauc

SEQ ID NO: 209933 - RNA, 23 nt, Human parainfluenza virus 2
agacucacaucauucggaaacaa

SEQ ID NO: 209934 - RNA, 21 nt, Human parainfluenza virus 2
acugagcaaguugaugaauua

SEQ ID NO: 209935 - RNA, 21 nt, Human parainfluenza virus 2
acugaucaaucuaacaaaaaa

SEQ ID NO: 209936 - RNA, 17 nt, Human parainfluenza virus 2
acuguuguaauucaauc

SEQ ID NO: 209937 - RNA, 23 nt, Human parainfluenza virus 2
acuuaauauaggggucauucaau

SEQ ID NO: 209938 - RNA, 13 nt, Human parainfluenza virus 2
acuugacaccaaa

SEQ ID NO: 209939 - RNA, 15 nt, Human parainfluenza virus 2
acucauguacuauac

SEQ ID NO: 209940 - RNA, 15 nt, Human parainfluenza virus 2
acuccagauucaaua

SEQ ID NO: 209941 - RNA, 17 nt, Human parainfluenza virus 2
acucauccagacaaauc

SEQ ID NO: 209942 - RNA, 16 nt, Human parainfluenza virus 2
acaaccagauauacac

SEQ ID NO: 209943 - RNA, 18 nt, Human parainfluenza virus 2
acaaccagauauacacau

SEQ ID NO: 209944 - RNA, 11 nt, Human parainfluenza virus 2
acaaaauccaa

SEQ ID NO: 209945 - RNA, 22 nt, Human parainfluenza virus 2
acaacaccucacaucaauagaa

SEQ ID NO: 209946 - RNA, 22 nt, Human parainfluenza virus 2
acaauguuccaguaguaauugc

SEQ ID NO: 209947 - RNA, 22 nt, Human parainfluenza virus 2
aaucuucccccaagcaauggaa

SEQ ID NO: 209948 - RNA, 21 nt, Human parainfluenza virus 2
aaucuuaaaaaugaaaugacu

SEQ ID NO: 209949 - RNA, 12 nt, Human parainfluenza virus 2
aauuaacauuaa

SEQ ID NO: 209950 - RNA, 16 nt, Human parainfluenza virus 2
aauucaaucuuacuaa

SEQ ID NO: 209951 - RNA, 22 nt, Human parainfluenza virus 2
aaucaagucauacuacuaguca

SEQ ID NO: 209952 - RNA, 21 nt, Human parainfluenza virus 2
aaucaacaauuuuagucaacu

SEQ ID NO: 209953 - RNA, 21 nt, Human parainfluenza virus 2
aauaaccuuuauauaauguaa

SEQ ID NO: 209954 - RNA, 12 nt, Human parainfluenza virus 2
aauaauaauuga

SEQ ID NO: 209955 - RNA, 21 nt, Human parainfluenza virus 2
aaguagauaaaauucuugcaa

SEQ ID NO: 209956 - RNA, 14 nt, Human parainfluenza virus 2
aagaaaaaaucaua

SEQ ID NO: 209957 - RNA, 14 nt, Human parainfluenza virus 2
aagaaaaacauauu

SEQ ID NO: 209958 - RNA, 15 nt, Human parainfluenza virus 2
aagaaaaacauauug

SEQ ID NO: 209959 - RNA, 14 nt, Human parainfluenza virus 2
aacugaucaaucua

SEQ ID NO: 209960 - RNA, 15 nt, Human parainfluenza virus 2
aagaguuuacacaau

SEQ ID NO: 209961 - RNA, 20 nt, Human parainfluenza virus 2
aagaccucaaaaacugacac

SEQ ID NO: 209962 - RNA, 13 nt, Human parainfluenza virus 2
aagagacacucaa

SEQ ID NO: 209963 - RNA, 21 nt, Human parainfluenza virus 2
aagacuccagauucaauaaua

SEQ ID NO: 209964 - RNA, 17 nt, Human parainfluenza virus 2
aacauauugauuuuccc

SEQ ID NO: 209965 - RNA, 14 nt, Human parainfluenza virus 2
aaacuaacuuugau

SEQ ID NO: 209966 - RNA, 16 nt, Human parainfluenza virus 2
aaacuagacucacauc

SEQ ID NO: 209967 - RNA, 19 nt, Human parainfluenza virus 2
aaauauucagccaugcauc

SEQ ID NO: 209968 - RNA, 21 nt, Human parainfluenza virus 2
aaauaaccuuuauauaaugua

SEQ ID NO: 209969 - RNA, 13 nt, Human parainfluenza virus 2
aacaauacuauua

SEQ ID NO: 209970 - RNA, 17 nt, Human parainfluenza virus 2
uaauguaacaauacuau

SEQ ID NO: 209971 - RNA, 20 nt, Human parainfluenza virus 2
uaaucuucccccaagcaaug

SEQ ID NO: 209972 - RNA, 16 nt, Human parainfluenza virus 2
uaaccuccacaccaga

SEQ ID NO: 209973 - RNA, 15 nt, Human parainfluenza virus 2
uaccagcagauccaa

SEQ ID NO: 209974 - RNA, 16 nt, Human parainfluenza virus 2
uacuagucacuauaca

SEQ ID NO: 209975 - RNA, 16 nt, Human parainfluenza virus 2
uagaccuacacucuca

SEQ ID NO: 209976 - RNA, 15 nt, Human parainfluenza virus 2
uagacucacaucauu

SEQ ID NO: 209977 - RNA, 19 nt, Human parainfluenza virus 2
uagauaaaauucuugcaac

SEQ ID NO: 209978 - RNA, 12 nt, Human parainfluenza virus 2
uaguaugcaucu

SEQ ID NO: 209979 - RNA, 20 nt, Human parainfluenza virus 2
uagucaaacacaaacucaua

SEQ ID NO: 209980 - RNA, 21 nt, Human parainfluenza virus 2
uagucaacugauuaccaagau

SEQ ID NO: 209981 - RNA, 14 nt, Human parainfluenza virus 2
uagcguaguacaau

SEQ ID NO: 209982 - RNA, 14 nt, Human parainfluenza virus 2
uaaaauugcuaccu

SEQ ID NO: 209983 - RNA, 20 nt, Human parainfluenza virus 2
uaaaaaugaaaugacuaguc

SEQ ID NO: 209984 - RNA, 15 nt, Human parainfluenza virus 2
uaaagggacuugauc

SEQ ID NO: 209985 - RNA, 15 nt, Human parainfluenza virus 2
uaaaggacacaauag

SEQ ID NO: 209986 - RNA, 18 nt, Human parainfluenza virus 2
guuauagauucugcuguu

SEQ ID NO: 209987 - RNA, 22 nt, Human parainfluenza virus 2
guacaauuuaagaaaaaaccua

SEQ ID NO: 209988 - RNA, 15 nt, Human parainfluenza virus 2
ucacacgaaagccug

SEQ ID NO: 209989 - RNA, 20 nt, Human parainfluenza virus 2
ucaaucaaagauaagaucac

SEQ ID NO: 209990 - RNA, 19 nt, Human parainfluenza virus 2
ucacucagagauacagcug

SEQ ID NO: 209991 - RNA, 12 nt, Human parainfluenza virus 2
ucagccaugcau

SEQ ID NO: 209992 - RNA, 22 nt, Human parainfluenza virus 2
ucagauaaccuccacaccagaa

SEQ ID NO: 209993 - RNA, 12 nt, Human parainfluenza virus 2
ucaacaugcauc

SEQ ID NO: 209994 - RNA, 12 nt, Human parainfluenza virus 2
ucaaccaaaaga

SEQ ID NO: 209995 - RNA, 19 nt, Human parainfluenza virus 2
ucaacaaaaaggaucacac

SEQ ID NO: 209996 - RNA, 17 nt, Human parainfluenza virus 2
ucaaaaacugacacagc

SEQ ID NO: 209997 - RNA, 16 nt, Human parainfluenza virus 2
uauaauuuaaucacaa

SEQ ID NO: 209998 - RNA, 15 nt, Human parainfluenza virus 2
uauaagaacucauga

SEQ ID NO: 209999 - RNA, 15 nt, Human parainfluenza virus 2
uccaaaccccaaaca

SEQ ID NO: 210000 - RNA, 21 nt, Human parainfluenza virus 2
ucauuuacuguuguaauucaa

SEQ ID NO: 210001 - RNA, 22 nt, Human parainfluenza virus 2
ucauuuacuguuguaauucaau

SEQ ID NO: 210002 - RNA, 21 nt, Human parainfluenza virus 2
ucauggccgaggaaccaacau

SEQ ID NO: 210003 - RNA, 15 nt, Human parainfluenza virus 2
uccacucaacauaua

SEQ ID NO: 210004 - RNA, 16 nt, Human parainfluenza virus 2
ugaauaugaauauauc

SEQ ID NO: 210005 - RNA, 14 nt, Human parainfluenza virus 2
ugaauuaauccaug

SEQ ID NO: 210006 - RNA, 21 nt, Human parainfluenza virus 2
ugacaccggguucaguucaaa

SEQ ID NO: 210007 - RNA, 21 nt, Human parainfluenza virus 2
ucuugcaacuucugcaacuau

SEQ ID NO: 210008 - RNA, 14 nt, Human parainfluenza virus 2
ugaacucaccaaua

SEQ ID NO: 210009 - RNA, 21 nt, Human parainfluenza virus 2
ucucagacagaucccaaaauc

SEQ ID NO: 210010 - RNA, 18 nt, Human parainfluenza virus 2
ucucuuagaaaaccugau

SEQ ID NO: 210011 - RNA, 17 nt, Human parainfluenza virus 2
ucucaaugucauacaac

SEQ ID NO: 210012 - RNA, 20 nt, Human parainfluenza virus 2
ucucaaggcgaguguugcaa

SEQ ID NO: 210013 - RNA, 16 nt, Human parainfluenza virus 2
uccguuuccaauacaa

SEQ ID NO: 210014 - RNA, 19 nt, Human parainfluenza virus 2
uucccgcaugaucuugaca

SEQ ID NO: 210015 - RNA, 22 nt, Human parainfluenza virus 2
uucugagauacuccuuccugaa

SEQ ID NO: 210016 - RNA, 21 nt, Human parainfluenza virus 2
uuccuaucuagacccauagau

SEQ ID NO: 210017 - RNA, 17 nt, Human parainfluenza virus 2
uuaagauuaugauauag

SEQ ID NO: 210018 - RNA, 12 nt, Human parainfluenza virus 2
uggaacaugcaa

SEQ ID NO: 210019 - RNA, 15 nt, Human parainfluenza virus 2
ugccuauaauaucau

SEQ ID NO: 210020 - RNA, 22 nt, Human parainfluenza virus 2
ugcaucaccugcauccaaugau

SEQ ID NO: 210021 - RNA, 17 nt, Human parainfluenza virus 2
ugcauccaaucaagauc

SEQ ID NO: 210022 - RNA, 18 nt, Human parainfluenza virus 2
ugcauccaaucaagaucc

SEQ ID NO: 210023 - RNA, 19 nt, Human parainfluenza virus 2
ugcauccaaucaagaucca

SEQ ID NO: 210024 - RNA, 20 nt, Human parainfluenza virus 2
aacuaaacguuccacaauaa

SEQ ID NO: 210025 - RNA, 12 nt, Human parainfluenza virus 2
aacuauaaucaa

SEQ ID NO: 210026 - RNA, 12 nt, Human parainfluenza virus 2
aaccacaaucaa

SEQ ID NO: 210027 - RNA, 22 nt, Human parainfluenza virus 2
aaccacagccgaaccaugcuca

SEQ ID NO: 210028 - RNA, 13 nt, Human parainfluenza virus 2
aacauauugauuu

SEQ ID NO: 210029 - RNA, 19 nt, Human parainfluenza virus 2
aaccaaaagacccaaacaa

SEQ ID NO: 210030 - RNA, 20 nt, Human parainfluenza virus 2
aauaucgaccucuaacccaa

SEQ ID NO: 210031 - RNA, 22 nt, Human parainfluenza virus 2
aauauaggggucauucaaucaa

SEQ ID NO: 210032 - RNA, 21 nt, Human parainfluenza virus 2
aagccuccagauaccaaugaa

SEQ ID NO: 210033 - RNA, 19 nt, Human parainfluenza virus 2
aauuuaaagaaaaaaucau

SEQ ID NO: 210034 - RNA, 21 nt, Human parainfluenza virus 2
aauucuugcaacuucugcaac

SEQ ID NO: 210035 - RNA, 19 nt, Human parainfluenza virus 2
aaucuucccccaagcaaug

SEQ ID NO: 210036 - RNA, 19 nt, Human parainfluenza virus 2
aaucuuacuaaaguuauuc

SEQ ID NO: 210037 - RNA, 15 nt, Human parainfluenza virus 2
aauccaaaccaguug

SEQ ID NO: 210038 - RNA, 19 nt, Human parainfluenza virus 2
gaccucaaaaacugacaca

SEQ ID NO: 210039 - RNA, 18 nt, Human parainfluenza virus 2
gaccucuaacccaauuua

SEQ ID NO: 210040 - RNA, 11 nt, Human parainfluenza virus 2
gacccaaacaa

SEQ ID NO: 210041 - RNA, 18 nt, Human parainfluenza virus 2
aaacugacacagcuugau

SEQ ID NO: 210042 - RNA, 18 nt, Human parainfluenza virus 2
aaacuagacucacaucau

SEQ ID NO: 210043 - RNA, 14 nt, Human parainfluenza virus 2
gaaccaugcucaac

SEQ ID NO: 210044 - RNA, 14 nt, Human parainfluenza virus 2
gaaccaacauacac

SEQ ID NO: 210045 - RNA, 15 nt, Human parainfluenza virus 2
gaaucauacaaucau

SEQ ID NO: 210046 - RNA, 17 nt, Human parainfluenza virus 2
aaaucaaacuagacuca

SEQ ID NO: 210047 - RNA, 15 nt, Human parainfluenza virus 2
aaauauucagccaug

SEQ ID NO: 210048 - RNA, 20 nt, Human parainfluenza virus 2
aaauauucagccaugcauca

SEQ ID NO: 210049 - RNA, 12 nt, Human parainfluenza virus 2
gacucacaucau

SEQ ID NO: 210050 - RNA, 17 nt, Human parainfluenza virus 2
gacuccauccauccaaa

SEQ ID NO: 210051 - RNA, 13 nt, Human parainfluenza virus 2
gauuuaacaggca

SEQ ID NO: 210052 - RNA, 14 nt, Human parainfluenza virus 2
gcuucacagccgaa

SEQ ID NO: 210053 - RNA, 18 nt, Human parainfluenza virus 2
ggccggacggguuagaaa

SEQ ID NO: 210054 - RNA, 17 nt, Human parainfluenza virus 2
gguccgaacugaucaau

SEQ ID NO: 210055 - RNA, 19 nt, Human parainfluenza virus 2
gcaacuauaaucaaucuua

SEQ ID NO: 210056 - RNA, 21 nt, Human parainfluenza virus 2
gccgaaccaugcucaaccaaa

SEQ ID NO: 210057 - RNA, 20 nt, Human parainfluenza virus 2
gccgaggaaccaacauacac

SEQ ID NO: 210058 - RNA, 20 nt, Human parainfluenza virus 2
gcucaaccaaaagacccaaa

SEQ ID NO: 210059 - RNA, 21 nt, Human parainfluenza virus 2
gcucagucuucuuuaggcaaa

SEQ ID NO: 210060 - RNA, 15 nt, Human parainfluenza virus 2
cuacuagucacuaua

SEQ ID NO: 210061 - RNA, 21 nt, Human parainfluenza virus 2
cuccacaccagaaucauacaa

SEQ ID NO: 210062 - RNA, 16 nt, Human parainfluenza virus 2
cucaugauaguuuuau

SEQ ID NO: 210063 - RNA, 15 nt, Human parainfluenza virus 2
cucagacagauccca

SEQ ID NO: 210064 - RNA, 14 nt, Human parainfluenza virus 2
cucaaccaaaagac

SEQ ID NO: 210065 - RNA, 20 nt, Human parainfluenza virus 2
cugaaguccacuugaacuca

SEQ ID NO: 210066 - RNA, 14 nt, Human parainfluenza virus 2
cugagcaaguugau

SEQ ID NO: 210067 - RNA, 22 nt, Human parainfluenza virus 2
cugagaauagaaccacaaucaa

SEQ ID NO: 210068 - RNA, 14 nt, Human parainfluenza virus 2
cugcauccaaugau

SEQ ID NO: 210069 - RNA, 17 nt, Human parainfluenza virus 2
cugccacucacacacuc

SEQ ID NO: 210070 - RNA, 23 nt, Human parainfluenza virus 2
cugccacucacacacucauccag

SEQ ID NO: 210071 - RNA, 19 nt, Human parainfluenza virus 2
cuucccccaagcaauggaa

SEQ ID NO: 210072 - RNA, 21 nt, Human parainfluenza virus 2
cuucagacuguagaagggaaa

SEQ ID NO: 210073 - RNA, 20 nt, Human parainfluenza virus 2
cuugccucucagacagaucc

SEQ ID NO: 210074 - RNA, 15 nt, Human parainfluenza virus 2
ccacucacacacuca

SEQ ID NO: 210075 - RNA, 15 nt, Human parainfluenza virus 2
ccagauauacacauc

SEQ ID NO: 210076 - RNA, 18 nt, Human parainfluenza virus 2
ccagauauacacauccac

SEQ ID NO: 210077 - RNA, 17 nt, Human parainfluenza virus 2
ccagauaccaaugaaua

SEQ ID NO: 210078 - RNA, 12 nt, Human parainfluenza virus 2
ccagcagaucca

SEQ ID NO: 210079 - RNA, 15 nt, Human parainfluenza virus 2
ccaugcucaaccaaa

SEQ ID NO: 210080 - RNA, 18 nt, Human parainfluenza virus 2
aaaaugaaaugacuaguc

SEQ ID NO: 210081 - RNA, 17 nt, Human parainfluenza virus 2
aaaaucauaguccaaac

SEQ ID NO: 210082 - RNA, 23 nt, Human parainfluenza virus 2
ccacaccagaaucauacaaucau

SEQ ID NO: 210083 - RNA, 17 nt, Human parainfluenza virus 2
ccaaaagacccaaacaa

SEQ ID NO: 210084 - RNA, 22 nt, Human parainfluenza virus 2
ccaaacaacaccucacaucaau

SEQ ID NO: 210085 - RNA, 16 nt, Human parainfluenza virus 2
cauccagacaaaucaa

SEQ ID NO: 210086 - RNA, 13 nt, Human parainfluenza virus 2
cauccacaucacu

SEQ ID NO: 210087 - RNA, 16 nt, Human parainfluenza virus 2
cauccaaaaacacgcc

SEQ ID NO: 210088 - RNA, 16 nt, Human parainfluenza virus 2
cauccaaugauaguau

SEQ ID NO: 210089 - RNA, 15 nt, Human parainfluenza virus 2
caucacucagagaua

SEQ ID NO: 210090 - RNA, 14 nt, Human parainfluenza virus 2
cauguacuauacug

SEQ ID NO: 210091 - RNA, 14 nt, Human parainfluenza virus 2
caugcaacaucacc

SEQ ID NO: 210092 - RNA, 20 nt, Human parainfluenza virus 2
caugcaacaucaccagucua

SEQ ID NO: 210093 - RNA, 23 nt, Human parainfluenza virus 2
cauugcuggagaucaacuacuua

SEQ ID NO: 210094 - RNA, 12 nt, Human parainfluenza virus 2
cauucaaucaaa

SEQ ID NO: 210095 - RNA, 14 nt, Human parainfluenza virus 2
cauucaaucaaaga

SEQ ID NO: 210096 - RNA, 21 nt, Human parainfluenza virus 2
cgaggaaccaacauacaccac

SEQ ID NO: 210097 - RNA, 15 nt, Human parainfluenza virus 2
ucaucauuuacuguu

SEQ ID NO: 210098 - RNA, 18 nt, Human parainfluenza virus 2
ucauggaucccaguacac

SEQ ID NO: 210099 - RNA, 18 nt, Human parainfluenza virus 2
ucauuaccagcagaucca

SEQ ID NO: 210100 - RNA, 17 nt, Human parainfluenza virus 2
uccaagaaagauuuaac

SEQ ID NO: 210101 - RNA, 20 nt, Human parainfluenza virus 2
uccacaccagaaucauacaa

SEQ ID NO: 210102 - RNA, 16 nt, Human parainfluenza virus 2
uccacaauaaaucaac

SEQ ID NO: 210103 - RNA, 16 nt, Human parainfluenza virus 2
uccaaucaagauccag

SEQ ID NO: 210104 - RNA, 14 nt, Human parainfluenza virus 2
ucccccaagcaaug

SEQ ID NO: 210105 - RNA, 18 nt, Human parainfluenza virus 2
uccugaaguccacuugaa

SEQ ID NO: 210106 - RNA, 20 nt, Human parainfluenza virus 2
ucuaacaaaaaaacuaaacg

SEQ ID NO: 210107 - RNA, 15 nt, Human parainfluenza virus 2
ugcaacuauaaucaa

SEQ ID NO: 210108 - RNA, 19 nt, Human parainfluenza virus 2
ugcagcggagacaaaaucc

SEQ ID NO: 210109 - RNA, 18 nt, Human parainfluenza virus 2
ugcaucaccugcauccaa

SEQ ID NO: 210110 - RNA, 18 nt, Human parainfluenza virus 2
ugccacucacacacucau

SEQ ID NO: 210111 - RNA, 21 nt, Human parainfluenza virus 2
ugccacucacacacucaucca

SEQ ID NO: 210112 - RNA, 18 nt, Human parainfluenza virus 2
ugauuaccaagauguuau

SEQ ID NO: 210113 - RNA, 18 nt, Human parainfluenza virus 2
ugaaauaagcccccuuca

SEQ ID NO: 210114 - RNA, 14 nt, Human parainfluenza virus 2
uguuccaguaguaa

SEQ ID NO: 210115 - RNA, 16 nt, Human parainfluenza virus 2
uguugcaacuauggaa

SEQ ID NO: 210116 - RNA, 20 nt, Human parainfluenza virus 2
uucaggccaaaauauucagc

SEQ ID NO: 210117 - RNA, 18 nt, Human parainfluenza virus 2
gucacuauacaauaauca

SEQ ID NO: 210118 - RNA, 15 nt, Human parainfluenza virus 2
gucauacaaccagau

SEQ ID NO: 210119 - RNA, 23 nt, Human parainfluenza virus 2
gcucaaccaaaagacccaaacaa

SEQ ID NO: 210120 - RNA, 17 nt, Human parainfluenza virus 2
uauugauuucaauggau

SEQ ID NO: 210121 - RNA, 17 nt, Human parainfluenza virus 2
uauucagccaugcauca

SEQ ID NO: 210122 - RNA, 14 nt, Human parainfluenza virus 2
ucaaacuagacuca

SEQ ID NO: 210123 - RNA, 18 nt, Human parainfluenza virus 2
ucaaacacaaacucauau

SEQ ID NO: 210124 - RNA, 15 nt, Human parainfluenza virus 2
ucaaccaaaagaccc

SEQ ID NO: 210125 - RNA, 13 nt, Human parainfluenza virus 2
ucaacaccaagaa

SEQ ID NO: 210126 - RNA, 15 nt, Human parainfluenza virus 2
ucaauggaugaacua

SEQ ID NO: 210127 - RNA, 22 nt, Human parainfluenza virus 2
ucaaugucauacaaccagauau

SEQ ID NO: 210128 - RNA, 21 nt, Human parainfluenza virus 2
ucaaggcgaguguugcaacua

SEQ ID NO: 210129 - RNA, 17 nt, Human parainfluenza virus 2
uaugaagcaauccuuca

SEQ ID NO: 210130 - RNA, 14 nt, Human parainfluenza virus 2
uauaaucaaucuua

SEQ ID NO: 210131 - RNA, 19 nt, Human parainfluenza virus 2
uacaacuugacaccaaaga

SEQ ID NO: 210132 - RNA, 20 nt, Human parainfluenza virus 2
uacaaccagauauacacauc

SEQ ID NO: 210133 - RNA, 20 nt, Human parainfluenza virus 2
uaauaauggaagauuacagc

SEQ ID NO: 210134 - RNA, 18 nt, Human parainfluenza virus 2
uaauauaggggucauuca

SEQ ID NO: 210135 - RNA, 19 nt, Human parainfluenza virus 2
uaauauaggggucauucaa

SEQ ID NO: 210136 - RNA, 19 nt, Human parainfluenza virus 2
uaauaucauuaccagcaga

SEQ ID NO: 210137 - RNA, 22 nt, Human parainfluenza virus 2
uaauccaugcuggacugggaac

SEQ ID NO: 210138 - RNA, 17 nt, Human parainfluenza virus 2
uaaacguuccacaauaa

SEQ ID NO: 210139 - RNA, 20 nt, Human parainfluenza virus 2
uaaaaucauggaucccagua

SEQ ID NO: 210140 - RNA, 16 nt, Human parainfluenza virus 2
uaaaauugcuaccuaa

SEQ ID NO: 210141 - RNA, 14 nt, Human parainfluenza virus 2
uaacaggcauaaaa

SEQ ID NO: 210142 - RNA, 17 nt, Human parainfluenza virus 2
uaagaacacaguauaau

SEQ ID NO: 210143 - RNA, 14 nt, Human parainfluenza virus 2
cuucccccaagcaa

SEQ ID NO: 210144 - RNA, 12 nt, Human parainfluenza virus 2
cuucugcaacua

SEQ ID NO: 210145 - RNA, 13 nt, Human parainfluenza virus 2
cuucuuuaggcaa

SEQ ID NO: 210146 - RNA, 23 nt, Human parainfluenza virus 2
cucucuaucuuaugcaauaguua

SEQ ID NO: 210147 - RNA, 16 nt, Human parainfluenza virus 2
cugaucaaucuaacaa

SEQ ID NO: 210148 - RNA, 20 nt, Human parainfluenza virus 2
cuggacugggaacaguagau

SEQ ID NO: 210149 - RNA, 14 nt, Human parainfluenza virus 2
cuagucacuauaca

SEQ ID NO: 210150 - RNA, 21 nt, Human parainfluenza virus 2
cuagucacuauacaauaauca

SEQ ID NO: 210151 - RNA, 23 nt, Human parainfluenza virus 2
cuaccuaaucuucccccaagcaa

SEQ ID NO: 210152 - RNA, 17 nt, Human parainfluenza virus 2
cucauccagacaaauca

SEQ ID NO: 210153 - RNA, 20 nt, Human parainfluenza virus 2
cucauccagacaaaucaaac

SEQ ID NO: 210154 - RNA, 16 nt, Human parainfluenza virus 2
cucauauacuacuuau

SEQ ID NO: 210155 - RNA, 19 nt, Human parainfluenza virus 2
cucagacagaucccaaaau

SEQ ID NO: 210156 - RNA, 12 nt, Human parainfluenza virus 2
cucaaccaaaag

SEQ ID NO: 210157 - RNA, 13 nt, Human parainfluenza virus 2
cucaaccaaaaga

SEQ ID NO: 210158 - RNA, 22 nt, Human parainfluenza virus 2
cuaacuagugcagcggagacaa

SEQ ID NO: 210159 - RNA, 19 nt, Human parainfluenza virus 2
cuaaacguuccacaauaaa

SEQ ID NO: 210160 - RNA, 16 nt, Human parainfluenza virus 2
gacuccagauucaaua

SEQ ID NO: 210161 - RNA, 18 nt, Human parainfluenza virus 2
gacuccauccauccaaaa

SEQ ID NO: 210162 - RNA, 19 nt, Human parainfluenza virus 2
gaaccaugcucaaccaaaa

SEQ ID NO: 210163 - RNA, 13 nt, Human parainfluenza virus 2
gaaccaacauaca

SEQ ID NO: 210164 - RNA, 22 nt, Human parainfluenza virus 2
gaacaugcaacaucaccagucu

SEQ ID NO: 210165 - RNA, 13 nt, Human parainfluenza virus 2
gcaucccaccagg

SEQ ID NO: 210166 - RNA, 14 nt, Human parainfluenza virus 2
gcaucccaccaggu

SEQ ID NO: 210167 - RNA, 12 nt, Human parainfluenza virus 2
gcagcaucccac

SEQ ID NO: 210168 - RNA, 17 nt, Human parainfluenza virus 2
gccacucacacacucau

SEQ ID NO: 210169 - RNA, 21 nt, Human parainfluenza virus 2
gccacucacacacucauccag

SEQ ID NO: 210170 - RNA, 19 nt, Human parainfluenza virus 2
gauauugauuucaauggau

SEQ ID NO: 210171 - RNA, 20 nt, Human parainfluenza virus 2
cccuguagaggagaucagaa

SEQ ID NO: 210172 - RNA, 12 nt, Human parainfluenza virus 2
ccauaugaagca

SEQ ID NO: 210173 - RNA, 14 nt, Human parainfluenza virus 2
ccauccauccaaaa

SEQ ID NO: 210174 - RNA, 14 nt, Human parainfluenza virus 2
ccuccacaccagaa

SEQ ID NO: 210175 - RNA, 18 nt, Human parainfluenza virus 2
ccugauuauuaugugaua

SEQ ID NO: 210176 - RNA, 23 nt, Human parainfluenza virus 2
cgaacaggugauauugauuucaa

SEQ ID NO: 210177 - RNA, 21 nt, Human parainfluenza virus 2
ccuuuauauaauguaacaaua

SEQ ID NO: 210178 - RNA, 14 nt, Human parainfluenza virus 2
ccuuccugaagucc

SEQ ID NO: 210179 - RNA, 16 nt, Human parainfluenza virus 2
ccagaaucauacaauc

SEQ ID NO: 210180 - RNA, 15 nt, Human parainfluenza virus 2
ccagacuccauccau

SEQ ID NO: 210181 - RNA, 19 nt, Human parainfluenza virus 2
ccagacuccauccauccaa

SEQ ID NO: 210182 - RNA, 21 nt, Human parainfluenza virus 2
ccaaaauauucagccaugcau

SEQ ID NO: 210183 - RNA, 22 nt, Human parainfluenza virus 2
cauuaagccuccagauaccaau

SEQ ID NO: 210184 - RNA, 15 nt, Human parainfluenza virus 2
caucaccagucuaga

SEQ ID NO: 210185 - RNA, 21 nt, Human parainfluenza virus 2
cauaguccaaaccccaaacac

SEQ ID NO: 210186 - RNA, 16 nt, Human parainfluenza virus 2
cagcaucccaccaggu

SEQ ID NO: 210187 - RNA, 16 nt, Human parainfluenza virus 2
cauagaugcucagucu

SEQ ID NO: 210188 - RNA, 18 nt, Human parainfluenza virus 2
caacaaaaaggaucacac

SEQ ID NO: 210189 - RNA, 15 nt, Human parainfluenza virus 2
caaacuagacucaca

SEQ ID NO: 210190 - RNA, 17 nt, Human parainfluenza virus 2
caaacuagacucacauc

SEQ ID NO: 210191 - RNA, 14 nt, Human parainfluenza virus 2
caaacacaaacuca

SEQ ID NO: 210192 - RNA, 20 nt, Human parainfluenza virus 2
auuuaaguauaauaguuuaa

SEQ ID NO: 210193 - RNA, 19 nt, Human parainfluenza virus 2
auuuaaucacaaaagaccu

SEQ ID NO: 210194 - RNA, 19 nt, Human parainfluenza virus 2
augugauagcguaguacaa

SEQ ID NO: 210195 - RNA, 18 nt, Human parainfluenza virus 2
auguaacaauacuauuaa

SEQ ID NO: 210196 - RNA, 19 nt, Human parainfluenza virus 2
cacucucaucaacaaaaag

SEQ ID NO: 210197 - RNA, 17 nt, Human parainfluenza virus 2
cacucacacacucaucc

SEQ ID NO: 210198 - RNA, 12 nt, Human parainfluenza virus 2
cacucaacaugc

SEQ ID NO: 210199 - RNA, 14 nt, Human parainfluenza virus 2
cacucaacaugcau

SEQ ID NO: 210200 - RNA, 23 nt, Human parainfluenza virus 2
cacuugaacucaccaauagucaa

SEQ ID NO: 210201 - RNA, 18 nt, Human parainfluenza virus 2
cagagauacagcugccac

SEQ ID NO: 210202 - RNA, 19 nt, Human parainfluenza virus 2
caaugauuauaagaacuca

SEQ ID NO: 210203 - RNA, 22 nt, Human parainfluenza virus 2
caaugauuauaagaacucauga

SEQ ID NO: 210204 - RNA, 15 nt, Human parainfluenza virus 2
caagauccagacucc

SEQ ID NO: 210205 - RNA, 15 nt, Human parainfluenza virus 2
caacaccaagaaaca

SEQ ID NO: 210206 - RNA, 18 nt, Human parainfluenza virus 2
caauggaugaacuagcua

SEQ ID NO: 210207 - RNA, 13 nt, Human parainfluenza virus 2
caauguuccagua

SEQ ID NO: 210208 - RNA, 20 nt, Human parainfluenza virus 2
cacaauugucaacaccaaga

SEQ ID NO: 210209 - RNA, 16 nt, Human parainfluenza virus 2
cacauccacaucacuc

SEQ ID NO: 210210 - RNA, 20 nt, Human parainfluenza virus 2
caccagaaucauacaaucau

SEQ ID NO: 210211 - RNA, 17 nt, Human parainfluenza virus 2
caccaggugucacagcu

SEQ ID NO: 210212 - RNA, 14 nt, Human parainfluenza virus 2
aggcagcaucccac

SEQ ID NO: 210213 - RNA, 17 nt, Human parainfluenza virus 2
agccgaaccaugcucaa

SEQ ID NO: 210214 - RNA, 15 nt, Human parainfluenza virus 2
aguagauuucuuccu

SEQ ID NO: 210215 - RNA, 21 nt, Human parainfluenza virus 2
aguggaggcuucacagccgaa

SEQ ID NO: 210216 - RNA, 21 nt, Human parainfluenza virus 2
aucccaccaggugucacagcu

SEQ ID NO: 210217 - RNA, 16 nt, Human parainfluenza virus 2
auccacaucacucaga

SEQ ID NO: 210218 - RNA, 15 nt, Human parainfluenza virus 2
auccauccaaaaaca

SEQ ID NO: 210219 - RNA, 23 nt, Human parainfluenza virus 2
aucauaguccaaaccccaaacac

SEQ ID NO: 210220 - RNA, 19 nt, Human parainfluenza virus 2
aucauucggaaacaauucu

SEQ ID NO: 210221 - RNA, 16 nt, Human parainfluenza virus 2
auagaaccacaaucaa

SEQ ID NO: 210222 - RNA, 13 nt, Human parainfluenza virus 2
auacuacuaguca

SEQ ID NO: 210223 - RNA, 16 nt, Human parainfluenza virus 2
auacaccacugagcaa

SEQ ID NO: 210224 - RNA, 17 nt, Human parainfluenza virus 2
auacagcugccacucac

SEQ ID NO: 210225 - RNA, 19 nt, Human parainfluenza virus 2
auacagcugccacucacac

SEQ ID NO: 210226 - RNA, 21 nt, Human parainfluenza virus 2
aucaaacuagacucacaucau

SEQ ID NO: 210227 - RNA, 17 nt, Human parainfluenza virus 2
aucaccugcauccaaug

SEQ ID NO: 210228 - RNA, 16 nt, Human parainfluenza virus 2
aucacucagagauaca

SEQ ID NO: 210229 - RNA, 18 nt, Human parainfluenza virus 2
aucacucauguacuauac

SEQ ID NO: 210230 - RNA, 20 nt, Human parainfluenza virus 2
auauacacauccacaucacu

SEQ ID NO: 210231 - RNA, 18 nt, Human parainfluenza virus 2
acaugcaacaucaccagu

SEQ ID NO: 210232 - RNA, 18 nt, Human parainfluenza virus 2
accaaaagacccaaacaa

SEQ ID NO: 210233 - RNA, 16 nt, Human parainfluenza virus 2
accagaaucauacaau

SEQ ID NO: 210234 - RNA, 18 nt, Human parainfluenza virus 2
accagaaucauacaauca

SEQ ID NO: 210235 - RNA, 14 nt, Human parainfluenza virus 2
acacucaacaugca

SEQ ID NO: 210236 - RNA, 15 nt, Human parainfluenza virus 2
acacucaacaugcau

SEQ ID NO: 210237 - RNA, 19 nt, Human parainfluenza virus 2
acagccgaaccaugcucaa

SEQ ID NO: 210238 - RNA, 22 nt, Human parainfluenza virus 2
acagcugccacucacacacuca

SEQ ID NO: 210239 - RNA, 15 nt, Human parainfluenza virus 2
accuccacaccagaa

SEQ ID NO: 210240 - RNA, 20 nt, Human parainfluenza virus 2
accuccacaccagaaucaua

SEQ ID NO: 210241 - RNA, 16 nt, Human parainfluenza virus 2
acgaaagccugaaucc

SEQ ID NO: 210242 - RNA, 12 nt, Human parainfluenza virus 2
acccaaacaaca

SEQ ID NO: 210243 - RNA, 15 nt, Human parainfluenza virus 2
acccuuaagaaccaa

SEQ ID NO: 210244 - RNA, 21 nt, Human parainfluenza virus 2
agacaaaucaaacuagacuca

SEQ ID NO: 210245 - RNA, 16 nt, Human parainfluenza virus 2
agaccuacacucucau

SEQ ID NO: 210246 - RNA, 17 nt, Human parainfluenza virus 2
agacccaaacaacaccu

SEQ ID NO: 210247 - RNA, 17 nt, Human parainfluenza virus 2
agacuccauccauccaa

SEQ ID NO: 210248 - RNA, 19 nt, Human parainfluenza virus 2
agacuccauccauccaaaa

SEQ ID NO: 210249 - RNA, 20 nt, Human parainfluenza virus 2
agaauagaaccacaaucaag

SEQ ID NO: 210250 - RNA, 21 nt, Human parainfluenza virus 2
acugauuaccaagauguuauc

SEQ ID NO: 210251 - RNA, 18 nt, Human parainfluenza virus 2
acugaugguggugcuagc

SEQ ID NO: 210252 - RNA, 19 nt, Human parainfluenza virus 2
acucacacacucauccaga

SEQ ID NO: 210253 - RNA, 17 nt, Human parainfluenza virus 2
acucagagauacagcug

SEQ ID NO: 210254 - RNA, 16 nt, Human parainfluenza virus 2
acucauauacuacuua

SEQ ID NO: 210255 - RNA, 18 nt, Human parainfluenza virus 2
acucauccagacaaauca

SEQ ID NO: 210256 - RNA, 21 nt, Human parainfluenza virus 2
acuagugcagcggagacaaaa

SEQ ID NO: 210257 - RNA, 21 nt, Human parainfluenza virus 2
acuagggcacuucccgcauga

SEQ ID NO: 210258 - RNA, 15 nt, Human parainfluenza virus 3
acucaaucaauagag

SEQ ID NO: 210259 - RNA, 15 nt, Human parainfluenza virus 3
acucuacucauacaa

SEQ ID NO: 210260 - RNA, 13 nt, Human parainfluenza virus 3
acuucaacacugc

SEQ ID NO: 210261 - RNA, 17 nt, Human parainfluenza virus 3
agaaaauggaugaauca

SEQ ID NO: 210262 - RNA, 19 nt, Human parainfluenza virus 3
agaaaauggaugaaucaca

SEQ ID NO: 210263 - RNA, 17 nt, Human parainfluenza virus 3
agaagaugacaaaagaa

SEQ ID NO: 210264 - RNA, 15 nt, Human parainfluenza virus 3
agaacaacugucauu

SEQ ID NO: 210265 - RNA, 22 nt, Human parainfluenza virus 3
agaacaacugucauugaucacg

SEQ ID NO: 210266 - RNA, 22 nt, Human parainfluenza virus 3
agaacccaauagacaaauccaa

SEQ ID NO: 210267 - RNA, 16 nt, Human parainfluenza virus 3
agaaacaacaguagau

SEQ ID NO: 210268 - RNA, 13 nt, Human parainfluenza virus 3
agaaagaccaaaa

SEQ ID NO: 210269 - RNA, 20 nt, Human parainfluenza virus 3
agaaagaccaaaaugaaucc

SEQ ID NO: 210270 - RNA, 17 nt, Human parainfluenza virus 3
agaaagaagggacaaaa

SEQ ID NO: 210271 - RNA, 22 nt, Human parainfluenza virus 3
agacguccauggcuacucauaa

SEQ ID NO: 210272 - RNA, 14 nt, Human parainfluenza virus 3
agacaaauccaaau

SEQ ID NO: 210273 - RNA, 19 nt, Human parainfluenza virus 3
agacaaauccaaauucgag

SEQ ID NO: 210274 - RNA, 12 nt, Human parainfluenza virus 3
agacagaaucau

SEQ ID NO: 210275 - RNA, 18 nt, Human parainfluenza virus 3
accauugauaacaacaca

SEQ ID NO: 210276 - RNA, 20 nt, Human parainfluenza virus 3
accauugauaacaacacaga

SEQ ID NO: 210277 - RNA, 17 nt, Human parainfluenza virus 3
accaucuaucaaccaaa

SEQ ID NO: 210278 - RNA, 18 nt, Human parainfluenza virus 3
accaucuaucaaccaaaa

SEQ ID NO: 210279 - RNA, 17 nt, Human parainfluenza virus 3
acagaaacaagugagaa

SEQ ID NO: 210280 - RNA, 14 nt, Human parainfluenza virus 3
accaacaacuauua

SEQ ID NO: 210281 - RNA, 12 nt, Human parainfluenza virus 3
auauacaaauaa

SEQ ID NO: 210282 - RNA, 15 nt, Human parainfluenza virus 3
auaggagaaaucaaa

SEQ ID NO: 210283 - RNA, 16 nt, Human parainfluenza virus 3
auagcacaauuacaca

SEQ ID NO: 210284 - RNA, 19 nt, Human parainfluenza virus 3
auauauauuauggacaaua

SEQ ID NO: 210285 - RNA, 22 nt, Human parainfluenza virus 3
aucaagcagaaugaaacaauag

SEQ ID NO: 210286 - RNA, 19 nt, Human parainfluenza virus 3
aucaacauuuugauccaaa

SEQ ID NO: 210287 - RNA, 18 nt, Human parainfluenza virus 3
auacuggaagcauaccaa

SEQ ID NO: 210288 - RNA, 15 nt, Human parainfluenza virus 3
auagaaaaucaaaga

SEQ ID NO: 210289 - RNA, 16 nt, Human parainfluenza virus 3
auagaaaaucaaagag

SEQ ID NO: 210290 - RNA, 17 nt, Human parainfluenza virus 3
auagauaucaaucaaua

SEQ ID NO: 210291 - RNA, 19 nt, Human parainfluenza virus 3
auagauaucaaucaauaua

SEQ ID NO: 210292 - RNA, 11 nt, Human parainfluenza virus 3
auagauaucac

SEQ ID NO: 210293 - RNA, 21 nt, Human parainfluenza virus 3
aucauagugcuaauuaauucc

SEQ ID NO: 210294 - RNA, 13 nt, Human parainfluenza virus 3
auccgaacaaacu

SEQ ID NO: 210295 - RNA, 13 nt, Human parainfluenza virus 3
aucuaacaauggc

SEQ ID NO: 210296 - RNA, 15 nt, Human parainfluenza virus 3
aucuaucaaccaaaa

SEQ ID NO: 210297 - RNA, 17 nt, Human parainfluenza virus 3
aucuaucaaccaaaaau

SEQ ID NO: 210298 - RNA, 15 nt, Human parainfluenza virus 3
aucucaaaaacaaca

SEQ ID NO: 210299 - RNA, 20 nt, Human parainfluenza virus 3
aucucaaaaacaacaaccau

SEQ ID NO: 210300 - RNA, 13 nt, Human parainfluenza virus 3
aucggaaauccac

SEQ ID NO: 210301 - RNA, 22 nt, Human parainfluenza virus 3
aguggaucaacugacaaaaaua

SEQ ID NO: 210302 - RNA, 16 nt, Human parainfluenza virus 3
aguauccaugaucaaa

SEQ ID NO: 210303 - RNA, 21 nt, Human parainfluenza virus 3
agugucaccuuaacucuccua

SEQ ID NO: 210304 - RNA, 15 nt, Human parainfluenza virus 3
auaaaaaucccaaaa

SEQ ID NO: 210305 - RNA, 20 nt, Human parainfluenza virus 3
agggcagaagaaaaucucaa

SEQ ID NO: 210306 - RNA, 19 nt, Human parainfluenza virus 3
agggaugaagauaucacaa

SEQ ID NO: 210307 - RNA, 17 nt, Human parainfluenza virus 3
agaguauccaugaucaa

SEQ ID NO: 210308 - RNA, 18 nt, Human parainfluenza virus 3
cacaucaaaacuagauuu

SEQ ID NO: 210309 - RNA, 21 nt, Human parainfluenza virus 3
caauguagauacugcaucaaa

SEQ ID NO: 210310 - RNA, 23 nt, Human parainfluenza virus 3
caauguagauacugcaucaaaga

SEQ ID NO: 210311 - RNA, 22 nt, Human parainfluenza virus 3
caauacuaguuaucacuagaca

SEQ ID NO: 210312 - RNA, 20 nt, Human parainfluenza virus 3
auuacagaaaagauccaaau

SEQ ID NO: 210313 - RNA, 14 nt, Human parainfluenza virus 3
auuacacacuauua

SEQ ID NO: 210314 - RNA, 17 nt, Human parainfluenza virus 3
caaacagacaagaaaca

SEQ ID NO: 210315 - RNA, 18 nt, Human parainfluenza virus 3
caaaaaucaaaccaacag

SEQ ID NO: 210316 - RNA, 22 nt, Human parainfluenza virus 3
caaaaugaauccaaugagagag

SEQ ID NO: 210317 - RNA, 14 nt, Human parainfluenza virus 3
caaaaugaguauaa

SEQ ID NO: 210318 - RNA, 23 nt, Human parainfluenza virus 3
caaauggcaucggauaauaccaa

SEQ ID NO: 210319 - RNA, 13 nt, Human parainfluenza virus 3
caucaauagugaa

SEQ ID NO: 210320 - RNA, 18 nt, Human parainfluenza virus 3
caucuaucaaccaaaaau

SEQ ID NO: 210321 - RNA, 19 nt, Human parainfluenza virus 3
cauucuuugaaaaugguca

SEQ ID NO: 210322 - RNA, 20 nt, Human parainfluenza virus 3
ccaagaagaugacaaaagaa

SEQ ID NO: 210323 - RNA, 13 nt, Human parainfluenza virus 3
ccaaaaaucaaac

SEQ ID NO: 210324 - RNA, 21 nt, Human parainfluenza virus 3
ccagaaucaucauucuuugaa

SEQ ID NO: 210325 - RNA, 18 nt, Human parainfluenza virus 3
ccacucaaagucaaugaa

SEQ ID NO: 210326 - RNA, 12 nt, Human parainfluenza virus 3
ccaccaucuauc

SEQ ID NO: 210327 - RNA, 21 nt, Human parainfluenza virus 3
cgaaauggaacgaaucaaaga

SEQ ID NO: 210328 - RNA, 22 nt, Human parainfluenza virus 3
cgaaauggaacgaaucaaagac

SEQ ID NO: 210329 - RNA, 22 nt, Human parainfluenza virus 3
gauaguggaucaacugacaaaa

SEQ ID NO: 210330 - RNA, 13 nt, Human parainfluenza virus 3
gaugcuaaaaacu

SEQ ID NO: 210331 - RNA, 18 nt, Human parainfluenza virus 3
gaucuaaagaaaauggau

SEQ ID NO: 210332 - RNA, 22 nt, Human parainfluenza virus 3
gcaaaauaggagaaaucaaaac

SEQ ID NO: 210333 - RNA, 21 nt, Human parainfluenza virus 3
gccaccaucuaucaaccaaaa

SEQ ID NO: 210334 - RNA, 22 nt, Human parainfluenza virus 3
gaaaugcuaaaccucaaagcag

SEQ ID NO: 210335 - RNA, 22 nt, Human parainfluenza virus 3
gacacugaaucuaacaauggca

SEQ ID NO: 210336 - RNA, 19 nt, Human parainfluenza virus 3
gacagucugggucaucaca

SEQ ID NO: 210337 - RNA, 21 nt, Human parainfluenza virus 3
gaagaccuaucggaaaacgac

SEQ ID NO: 210338 - RNA, 21 nt, Human parainfluenza virus 3
gaagaaauacuaaugaaaaau

SEQ ID NO: 210339 - RNA, 14 nt, Human parainfluenza virus 3
gaagaaaaucucaa

SEQ ID NO: 210340 - RNA, 14 nt, Human parainfluenza virus 3
gagaaaucaaaaca

SEQ ID NO: 210341 - RNA, 22 nt, Human parainfluenza virus 3
gagcaaagcgugcucggaaaau

SEQ ID NO: 210342 - RNA, 22 nt, Human parainfluenza virus 3
gacuacagauccacaucaaaag

SEQ ID NO: 210343 - RNA, 17 nt, Human parainfluenza virus 3
cggaaauccaccaaaac

SEQ ID NO: 210344 - RNA, 14 nt, Human parainfluenza virus 3
cggauaauaccaau

SEQ ID NO: 210345 - RNA, 19 nt, Human parainfluenza virus 3
cuaucaaccaaaaaucaaa

SEQ ID NO: 210346 - RNA, 20 nt, Human parainfluenza virus 3
cucaauacuaguuaucacua

SEQ ID NO: 210347 - RNA, 16 nt, Human parainfluenza virus 3
cuacaagaaauaaaua

SEQ ID NO: 210348 - RNA, 13 nt, Human parainfluenza virus 3
cugcaucaaagau

SEQ ID NO: 210349 - RNA, 20 nt, Human parainfluenza virus 3
cuggaagcauaccaaucacg

SEQ ID NO: 210350 - RNA, 13 nt, Human parainfluenza virus 3
cuucgaaauggaa

SEQ ID NO: 210351 - RNA, 13 nt, Human parainfluenza virus 3
uaaaauagcacaa

SEQ ID NO: 210352 - RNA, 14 nt, Human parainfluenza virus 3
uaaaaacuaucaaa

SEQ ID NO: 210353 - RNA, 21 nt, Human parainfluenza virus 3
uaauaucuccucggcccucaa

SEQ ID NO: 210354 - RNA, 16 nt, Human parainfluenza virus 3
uaauauauauauacca

SEQ ID NO: 210355 - RNA, 17 nt, Human parainfluenza virus 3
uaaugaguuuauggaga

SEQ ID NO: 210356 - RNA, 22 nt, Human parainfluenza virus 3
uaaugaguuuauggagauuaca

SEQ ID NO: 210357 - RNA, 23 nt, Human parainfluenza virus 3
uacaccaagaagaugacaaaaga

SEQ ID NO: 210358 - RNA, 14 nt, Human parainfluenza virus 3
uacacauucccaga

SEQ ID NO: 210359 - RNA, 14 nt, Human parainfluenza virus 3
uacagaacaccaaa

SEQ ID NO: 210360 - RNA, 20 nt, Human parainfluenza virus 3
uaccaacaucagacuacaga

SEQ ID NO: 210361 - RNA, 11 nt, Human parainfluenza virus 3
uaucacaaaac

SEQ ID NO: 210362 - RNA, 18 nt, Human parainfluenza virus 3
uaucaaucaauauacaaa

SEQ ID NO: 210363 - RNA, 23 nt, Human parainfluenza virus 3
uaucggaaaacgacacaaucaac

SEQ ID NO: 210364 - RNA, 12 nt, Human parainfluenza virus 3
uacucauacaau

SEQ ID NO: 210365 - RNA, 22 nt, Human parainfluenza virus 3
ucaauggacaacgacacaaaau

SEQ ID NO: 210366 - RNA, 20 nt, Human parainfluenza virus 3
ucaaucaauagagaguugau

SEQ ID NO: 210367 - RNA, 20 nt, Human parainfluenza virus 3
ucaauagugaaaagguccau

SEQ ID NO: 210368 - RNA, 11 nt, Human parainfluenza virus 3
ucaacaccaac

SEQ ID NO: 210369 - RNA, 17 nt, Human parainfluenza virus 3
ucaacauuuugauccaa

SEQ ID NO: 210370 - RNA, 12 nt, Human parainfluenza virus 3
ucaaccaaaaau

SEQ ID NO: 210371 - RNA, 17 nt, Human parainfluenza virus 3
ucaacuaauaucuccuc

SEQ ID NO: 210372 - RNA, 17 nt, Human parainfluenza virus 3
ucaacuuauacaaaaga

SEQ ID NO: 210373 - RNA, 19 nt, Human parainfluenza virus 3
ucaaaaacaacaaccauca

SEQ ID NO: 210374 - RNA, 17 nt, Human parainfluenza virus 3
ggacaaaaaaagcaaaa

SEQ ID NO: 210375 - RNA, 22 nt, Human parainfluenza virus 3
gucauagggguuucaauggaca

SEQ ID NO: 210376 - RNA, 19 nt, Human parainfluenza virus 3
gugcucggaaaauggacac

SEQ ID NO: 210377 - RNA, 22 nt, Human parainfluenza virus 3
guaucugacauacucuauccug

SEQ ID NO: 210378 - RNA, 21 nt, Human parainfluenza virus 3
uucaucauagugcuaauuaau

SEQ ID NO: 210379 - RNA, 23 nt, Human parainfluenza virus 3
uucgaaauggaacgaaucaaaga

SEQ ID NO: 210380 - RNA, 15 nt, Human parainfluenza virus 3
uugaauucauacuua

SEQ ID NO: 210381 - RNA, 14 nt, Human parainfluenza virus 3
uugcuugcaacuca

SEQ ID NO: 210382 - RNA, 17 nt, Human parainfluenza virus 3
uugcuugcaacucaauc

SEQ ID NO: 210383 - RNA, 21 nt, Human parainfluenza virus 3
uuaaaauuaugacugagagag

SEQ ID NO: 210384 - RNA, 24 nt, Human parainfluenza virus 3
uggauucuugggaagaggaaucaa

SEQ ID NO: 210385 - RNA, 19 nt, Human parainfluenza virus 3
ugcuaaaaacuaucaaauc

SEQ ID NO: 210386 - RNA, 17 nt, Human parainfluenza virus 3
ugauagaaaaucaaaga

SEQ ID NO: 210387 - RNA, 15 nt, Human parainfluenza virus 3
ugcaacucaaucaau

SEQ ID NO: 210388 - RNA, 16 nt, Human parainfluenza virus 3
ugcaacucaaucaaua

SEQ ID NO: 210389 - RNA, 20 nt, Human parainfluenza virus 3
ucucaccauugauaacaaca

SEQ ID NO: 210390 - RNA, 21 nt, Human parainfluenza virus 3
ucugccaaauagauaucacaa

SEQ ID NO: 210391 - RNA, 21 nt, Human parainfluenza virus 3
ucugcaauauacacauuccca

SEQ ID NO: 210392 - RNA, 21 nt, Human parainfluenza virus 3
ucuccucggcccucaauauca

SEQ ID NO: 210393 - RNA, 17 nt, Human parainfluenza virus 3
ucaucauggaaucucac

SEQ ID NO: 210394 - RNA, 18 nt, Human parainfluenza virus 3
cgaagcaaauaagggaua

SEQ ID NO: 210395 - RNA, 12 nt, Human parainfluenza virus 3
cgaaucaaagac

SEQ ID NO: 210396 - RNA, 18 nt, Human parainfluenza virus 3
cauugauaacaacacaga

SEQ ID NO: 210397 - RNA, 22 nt, Human parainfluenza virus 3
caugaucaaaacaaaauugaaa

SEQ ID NO: 210398 - RNA, 18 nt, Human parainfluenza virus 3
cauggcuacucauaacaa

SEQ ID NO: 210399 - RNA, 22 nt, Human parainfluenza virus 3
ccaaaaugaguauaacuaacuc

SEQ ID NO: 210400 - RNA, 12 nt, Human parainfluenza virus 3
aaaaucuaucaa

SEQ ID NO: 210401 - RNA, 14 nt, Human parainfluenza virus 3
aaaaucaagcagaa

SEQ ID NO: 210402 - RNA, 15 nt, Human parainfluenza virus 3
aaaaucaaaccaaca

SEQ ID NO: 210403 - RNA, 19 nt, Human parainfluenza virus 3
aaaauagcacaauuacaca

SEQ ID NO: 210404 - RNA, 18 nt, Human parainfluenza virus 3
aaaauaguaggacaaaga

SEQ ID NO: 210405 - RNA, 16 nt, Human parainfluenza virus 3
ccaccaaaacauggau

SEQ ID NO: 210406 - RNA, 21 nt, Human parainfluenza virus 3
aaaaucggaaauccaccaaaa

SEQ ID NO: 210407 - RNA, 18 nt, Human parainfluenza virus 3
aaaaucucaaaaacaaca

SEQ ID NO: 210408 - RNA, 15 nt, Human parainfluenza virus 3
aaaauggacacugaa

SEQ ID NO: 210409 - RNA, 15 nt, Human parainfluenza virus 3
ccaucuaucaaccaa

SEQ ID NO: 210410 - RNA, 20 nt, Human parainfluenza virus 3
cuugggaagaggaaucaaga

SEQ ID NO: 210411 - RNA, 14 nt, Human parainfluenza virus 3
cuuauacaaaagaa

SEQ ID NO: 210412 - RNA, 14 nt, Human parainfluenza virus 3
cuuauccaaaauga

SEQ ID NO: 210413 - RNA, 15 nt, Human parainfluenza virus 3
cuuaggacaaaagag

SEQ ID NO: 210414 - RNA, 14 nt, Human parainfluenza virus 3
cuuaggauuaaaga

SEQ ID NO: 210415 - RNA, 17 nt, Human parainfluenza virus 3
cuuaggauuaaagaaua

SEQ ID NO: 210416 - RNA, 23 nt, Human parainfluenza virus 3
cugacaaccagauaccaacauca

SEQ ID NO: 210417 - RNA, 19 nt, Human parainfluenza virus 3
cugacauacucuauccuga

SEQ ID NO: 210418 - RNA, 19 nt, Human parainfluenza virus 3
cucacuaauaagauaauau

SEQ ID NO: 210419 - RNA, 15 nt, Human parainfluenza virus 3
cucaaaaacaacaac

SEQ ID NO: 210420 - RNA, 21 nt, Human parainfluenza virus 3
cucaaagucaaugaacagaga

SEQ ID NO: 210421 - RNA, 13 nt, Human parainfluenza virus 3
cuaucaaccaaaa

SEQ ID NO: 210422 - RNA, 17 nt, Human parainfluenza virus 3
cuaucaaccaaaaauca

SEQ ID NO: 210423 - RNA, 19 nt, Human parainfluenza virus 3
cuaauuaauuccaucaaua

SEQ ID NO: 210424 - RNA, 23 nt, Human parainfluenza virus 3
cuagacagaaaauaaaacucaau

SEQ ID NO: 210425 - RNA, 17 nt, Human parainfluenza virus 3
cuagauuuauaucaaga

SEQ ID NO: 210426 - RNA, 23 nt, Human parainfluenza virus 3
cggauaauaccaaugaucuaaua

SEQ ID NO: 210427 - RNA, 17 nt, Human parainfluenza virus 3
gcucggaaaauggacac

SEQ ID NO: 210428 - RNA, 11 nt, Human parainfluenza virus 3
gcaacucagug

SEQ ID NO: 210429 - RNA, 20 nt, Human parainfluenza virus 3
gccaccaucuaucaaccaaa

SEQ ID NO: 210430 - RNA, 21 nt, Human parainfluenza virus 3
guaaaugaucucgacagugac

SEQ ID NO: 210431 - RNA, 18 nt, Human parainfluenza virus 3
guaaaguuacgcaaucca

SEQ ID NO: 210432 - RNA, 20 nt, Human parainfluenza virus 3
ggcaaacagaaauacagaca

SEQ ID NO: 210433 - RNA, 20 nt, Human parainfluenza virus 3
ggaucaacuuauacaaaaga

SEQ ID NO: 210434 - RNA, 22 nt, Human parainfluenza virus 3
ggagauuacagaaaagauccaa

SEQ ID NO: 210435 - RNA, 23 nt, Human parainfluenza virus 3
gcaaaauaggagaaaucaaaaca

SEQ ID NO: 210436 - RNA, 15 nt, Human parainfluenza virus 3
gauacugacaaccag

SEQ ID NO: 210437 - RNA, 17 nt, Human parainfluenza virus 3
gauacugacaaccagau

SEQ ID NO: 210438 - RNA, 23 nt, Human parainfluenza virus 3
gauggaauacuggaagcauacca

SEQ ID NO: 210439 - RNA, 14 nt, Human parainfluenza virus 3
gaugaagauaucac

SEQ ID NO: 210440 - RNA, 12 nt, Human parainfluenza virus 3
gaugacaaaaga

SEQ ID NO: 210441 - RNA, 15 nt, Human parainfluenza virus 3
gaugacgacucaaua

SEQ ID NO: 210442 - RNA, 15 nt, Human parainfluenza virus 3
aaauggacacugaau

SEQ ID NO: 210443 - RNA, 12 nt, Human parainfluenza virus 3
gagagaguaucc

SEQ ID NO: 210444 - RNA, 22 nt, Human parainfluenza virus 3
aaacgaguuguauguguagcaa

SEQ ID NO: 210445 - RNA, 19 nt, Human parainfluenza virus 3
gaaucaacauuuugaucca

SEQ ID NO: 210446 - RNA, 22 nt, Human parainfluenza virus 3
gaaucaacauuuugauccaaau

SEQ ID NO: 210447 - RNA, 14 nt, Human parainfluenza virus 3
gaagcauaccaauc

SEQ ID NO: 210448 - RNA, 13 nt, Human parainfluenza virus 3
gaaccauuaccac

SEQ ID NO: 210449 - RNA, 21 nt, Human parainfluenza virus 3
aaacuuaggauuaaagaauaa

SEQ ID NO: 210450 - RNA, 21 nt, Human parainfluenza virus 3
aaaguacagaacaccaaaaca

SEQ ID NO: 210451 - RNA, 13 nt, Human parainfluenza virus 3
aaaguuacgcaau

SEQ ID NO: 210452 - RNA, 18 nt, Human parainfluenza virus 3
aaaguuacgcaauccaac

SEQ ID NO: 210453 - RNA, 20 nt, Human parainfluenza virus 3
aaagggaugaagauaucaca

SEQ ID NO: 210454 - RNA, 14 nt, Human parainfluenza virus 3
gacaauggacaaaa

SEQ ID NO: 210455 - RNA, 16 nt, Human parainfluenza virus 3
aaucuaucaacacaca

SEQ ID NO: 210456 - RNA, 17 nt, Human parainfluenza virus 3
aaucucaaaaacaacaa

SEQ ID NO: 210457 - RNA, 22 nt, Human parainfluenza virus 3
aauguagauacugcaucaaaga

SEQ ID NO: 210458 - RNA, 19 nt, Human parainfluenza virus 3
aagaauaaauuaauccuua

SEQ ID NO: 210459 - RNA, 16 nt, Human parainfluenza virus 3
aaguuacgcaauccaa

SEQ ID NO: 210460 - RNA, 17 nt, Human parainfluenza virus 3
aauaucauugaauucau

SEQ ID NO: 210461 - RNA, 17 nt, Human parainfluenza virus 3
aaucaucaggaacacaa

SEQ ID NO: 210462 - RNA, 21 nt, Human parainfluenza virus 3
aaucaucaggaacacaauccu

SEQ ID NO: 210463 - RNA, 23 nt, Human parainfluenza virus 3
aaucagacaauggacaaaaggaa

SEQ ID NO: 210464 - RNA, 11 nt, Human parainfluenza virus 3
aaccaaaaauc

SEQ ID NO: 210465 - RNA, 14 nt, Human parainfluenza virus 3
aaccaucaacaccg

SEQ ID NO: 210466 - RNA, 17 nt, Human parainfluenza virus 3
aagaaacaacaguagau

SEQ ID NO: 210467 - RNA, 14 nt, Human parainfluenza virus 3
aagaaagaccaaaa

SEQ ID NO: 210468 - RNA, 17 nt, Human parainfluenza virus 3
uggaucaacugacaaaa

SEQ ID NO: 210469 - RNA, 16 nt, Human parainfluenza virus 3
uuaagccgaagcaaau

SEQ ID NO: 210470 - RNA, 20 nt, Human parainfluenza virus 3
uuaagccgaagcaaauaagg

SEQ ID NO: 210471 - RNA, 23 nt, Human parainfluenza virus 3
uucugccaaauagauaucacaaa

SEQ ID NO: 210472 - RNA, 18 nt, Human parainfluenza virus 3
uccuaucguuaaagguaa

SEQ ID NO: 210473 - RNA, 19 nt, Human parainfluenza virus 3
ucucaaaaacaacaaccau

SEQ ID NO: 210474 - RNA, 22 nt, Human parainfluenza virus 3
ucugccaaauagauaucacaaa

SEQ ID NO: 210475 - RNA, 20 nt, Human parainfluenza virus 3
ugaagaagaaauacuaauga

SEQ ID NO: 210476 - RNA, 21 nt, Human parainfluenza virus 3
ugaaagaagaaaagaucaaga

SEQ ID NO: 210477 - RNA, 16 nt, Human parainfluenza virus 3
ugaauccaaugagaga

SEQ ID NO: 210478 - RNA, 19 nt, Human parainfluenza virus 3
uccaugaucaaaacaaaau

SEQ ID NO: 210479 - RNA, 11 nt, Human parainfluenza virus 3
ucccaaaagag

SEQ ID NO: 210480 - RNA, 14 nt, Human parainfluenza virus 3
ucaucagauauuaa

SEQ ID NO: 210481 - RNA, 20 nt, Human parainfluenza virus 3
ucauauagaaccauuaccac

SEQ ID NO: 210482 - RNA, 15 nt, Human parainfluenza virus 3
ucauagugcuaauua

SEQ ID NO: 210483 - RNA, 16 nt, Human parainfluenza virus 3
ucauaacaacaagcuc

SEQ ID NO: 210484 - RNA, 11 nt, Human parainfluenza virus 3
ucacuaauaag

SEQ ID NO: 210485 - RNA, 17 nt, Human parainfluenza virus 3
ucaauagugaaaagguc

SEQ ID NO: 210486 - RNA, 15 nt, Human parainfluenza virus 3
ucaauacaccaagaa

SEQ ID NO: 210487 - RNA, 14 nt, Human parainfluenza virus 3
guuuaagaaaucaa

SEQ ID NO: 210488 - RNA, 17 nt, Human parainfluenza virus 3
guuuaagaaaucaaaag

SEQ ID NO: 210489 - RNA, 18 nt, Human parainfluenza virus 3
guuugcuugcaacucaau

SEQ ID NO: 210490 - RNA, 14 nt, Human parainfluenza virus 3
uaaaaaucccaaaa

SEQ ID NO: 210491 - RNA, 18 nt, Human parainfluenza virus 3
uaggagaaaucaaaacaa

SEQ ID NO: 210492 - RNA, 22 nt, Human parainfluenza virus 3
uagugaaaagguccauaauuca

SEQ ID NO: 210493 - RNA, 22 nt, Human parainfluenza virus 3
uaguggaucaacugacaaaaau

SEQ ID NO: 210494 - RNA, 18 nt, Human parainfluenza virus 3
uagauacugcaucaaaga

SEQ ID NO: 210495 - RNA, 15 nt, Human parainfluenza virus 3
uagauaucaaucaau

SEQ ID NO: 210496 - RNA, 16 nt, Human parainfluenza virus 3
uagauaucaaucaaua

SEQ ID NO: 210497 - RNA, 14 nt, Human parainfluenza virus 3
uagacaaauccaaa

SEQ ID NO: 210498 - RNA, 19 nt, Human parainfluenza virus 3
aacaauagauaucaaucaa

SEQ ID NO: 210499 - RNA, 23 nt, Human parainfluenza virus 3
uaccccacauuagaguugccaaa

SEQ ID NO: 210500 - RNA, 17 nt, Human parainfluenza virus 3
uacagaaaagauccaaa

SEQ ID NO: 210501 - RNA, 13 nt, Human parainfluenza virus 3
uacagaacaccaa

SEQ ID NO: 210502 - RNA, 17 nt, Human parainfluenza virus 3
uacagacagaaucauca

SEQ ID NO: 210503 - RNA, 18 nt, Human parainfluenza virus 3
uaauccugguguuauuau

SEQ ID NO: 210504 - RNA, 23 nt, Human parainfluenza virus 3
uaauccugguguuauuaucaaua

SEQ ID NO: 210505 - RNA, 21 nt, Human parainfluenza virus 3
uaaucagcaaucagacaaugg

SEQ ID NO: 210506 - RNA, 21 nt, Human parainfluenza virus 3
uaaugaguuuauggagauuac

SEQ ID NO: 210507 - RNA, 14 nt, Human parainfluenza virus 3
uaaugagcuggaga

SEQ ID NO: 210508 - RNA, 14 nt, Human parainfluenza virus 3
aacacagauacaaa

SEQ ID NO: 210509 - RNA, 12 nt, Human parainfluenza virus 3
aacaacaaccau

SEQ ID NO: 210510 - RNA, 23 nt, Human parainfluenza virus 3
aaauguacuaaacaauguagaua

SEQ ID NO: 210511 - RNA, 15 nt, Human parainfluenza virus 3
aaaucccaaaagaga

SEQ ID NO: 210512 - RNA, 21 nt, Human parainfluenza virus 3
aaaucucaaaaacaacaacca

SEQ ID NO: 210513 - RNA, 16 nt, Human parainfluenza virus 3
aaagguccauaauuca

SEQ ID NO: 210514 - RNA, 20 nt, Human parainfluenza virus 3
aacaguagaucaaaaucuau

SEQ ID NO: 210515 - RNA, 23 nt, Human parainfluenza virus 3
aacaguagaucaaaaucuaucaa

SEQ ID NO: 210516 - RNA, 17 nt, Human parainfluenza virus 3
aacacugcuaauuauua

SEQ ID NO: 210517 - RNA, 23 nt, Human parainfluenza virus 3
aacucagugccaccaucuaucaa

SEQ ID NO: 210518 - RNA, 20 nt, Human parainfluenza virus 3
aacucccccaacaacaaccu

SEQ ID NO: 210519 - RNA, 21 nt, Human parainfluenza virus 3
aacgacacaaucaacacaaga

SEQ ID NO: 210520 - RNA, 18 nt, Human parainfluenza virus 3
aagagacuggcaacacag

SEQ ID NO: 210521 - RNA, 16 nt, Human parainfluenza virus 3
aagaggucaacaccaa

SEQ ID NO: 210522 - RNA, 18 nt, Human parainfluenza virus 3
aagauacugacaaccaga

SEQ ID NO: 210523 - RNA, 15 nt, Human parainfluenza virus 3
aagauaucacaaaac

SEQ ID NO: 210524 - RNA, 13 nt, Human parainfluenza virus 3
aagaaaaucucaa

SEQ ID NO: 210525 - RNA, 14 nt, Human parainfluenza virus 3
aauauuaacugaga

SEQ ID NO: 210526 - RNA, 15 nt, Human parainfluenza virus 3
aauauuaacugagaa

SEQ ID NO: 210527 - RNA, 21 nt, Human parainfluenza virus 3
aauauuaacugagaaagugaa

SEQ ID NO: 210528 - RNA, 12 nt, Human parainfluenza virus 3
aaucaacuaaua

SEQ ID NO: 210529 - RNA, 17 nt, Human parainfluenza virus 3
aaucaagcagaaugaaa

SEQ ID NO: 210530 - RNA, 22 nt, Human parainfluenza virus 3
aaucaauagagaguugauggaa

SEQ ID NO: 210531 - RNA, 14 nt, Human parainfluenza virus 3
aaucagacaaugga

SEQ ID NO: 210532 - RNA, 16 nt, Human parainfluenza virus 3
aaucagacaauggaca

SEQ ID NO: 210533 - RNA, 16 nt, Human parainfluenza virus 3
aaucagcaaucagaca

SEQ ID NO: 210534 - RNA, 17 nt, Human parainfluenza virus 3
aauccaacucuacucau

SEQ ID NO: 210535 - RNA, 13 nt, Human parainfluenza virus 3
aauccaccaaaac

SEQ ID NO: 210536 - RNA, 16 nt, Human parainfluenza virus 3
aaugaauccaaugaga

SEQ ID NO: 210537 - RNA, 17 nt, Human parainfluenza virus 3
acaauuacacacuauua

SEQ ID NO: 210538 - RNA, 14 nt, Human parainfluenza virus 3
acaauagauaucaa

SEQ ID NO: 210539 - RNA, 17 nt, Human parainfluenza virus 3
acaaccagauaccaaca

SEQ ID NO: 210540 - RNA, 15 nt, Human parainfluenza virus 3
acucauacaauugag

SEQ ID NO: 210541 - RNA, 18 nt, Human parainfluenza virus 3
acguccauggcuacucau

SEQ ID NO: 210542 - RNA, 24 nt, Human parainfluenza virus 3
agaaaauggaugaaucacauagaa

SEQ ID NO: 210543 - RNA, 20 nt, Human parainfluenza virus 3
agaaaauaaaacucaauaaa

SEQ ID NO: 210544 - RNA, 14 nt, Human parainfluenza virus 3
agaacaccaaaaca

SEQ ID NO: 210545 - RNA, 12 nt, Human parainfluenza virus 3
agaaagaccaaa

SEQ ID NO: 210546 - RNA, 20 nt, Human parainfluenza virus 3
agacguccauggcuacucau

SEQ ID NO: 210547 - RNA, 16 nt, Human parainfluenza virus 3
agaucaaaaucuauca

SEQ ID NO: 210548 - RNA, 17 nt, Human parainfluenza virus 3
agaucaaaaucuaucaa

SEQ ID NO: 210549 - RNA, 12 nt, Human parainfluenza virus 3
agauaucaauca

SEQ ID NO: 210550 - RNA, 18 nt, Human parainfluenza virus 3
agauggaauacuggaagc

SEQ ID NO: 210551 - RNA, 15 nt, Human parainfluenza virus 3
agcaaauguacuaaa

SEQ ID NO: 210552 - RNA, 15 nt, Human parainfluenza virus 3
acaucaaaagggcag

SEQ ID NO: 210553 - RNA, 12 nt, Human parainfluenza virus 3
acaccaaaacaa

SEQ ID NO: 210554 - RNA, 14 nt, Human parainfluenza virus 3
acacagauacaaaa

SEQ ID NO: 210555 - RNA, 11 nt, Human parainfluenza virus 3
acacaaucaac

SEQ ID NO: 210556 - RNA, 20 nt, Human parainfluenza virus 3
acacacaaaaucaagcagaa

SEQ ID NO: 210557 - RNA, 14 nt, Human parainfluenza virus 3
acacacacaaaauc

SEQ ID NO: 210558 - RNA, 14 nt, Human parainfluenza virus 3
accaaaaugaaucc

SEQ ID NO: 210559 - RNA, 18 nt, Human parainfluenza virus 3
cagcaaucagacaaugga

SEQ ID NO: 210560 - RNA, 14 nt, Human parainfluenza virus 3
cagaaaagauccaa

SEQ ID NO: 210561 - RNA, 12 nt, Human parainfluenza virus 3
cacucaaaguca

SEQ ID NO: 210562 - RNA, 19 nt, Human parainfluenza virus 3
cacaauuacacacuauuau

SEQ ID NO: 210563 - RNA, 13 nt, Human parainfluenza virus 3
cacaagaacccag

SEQ ID NO: 210564 - RNA, 16 nt, Human parainfluenza virus 3
auggacaacgacacaa

SEQ ID NO: 210565 - RNA, 12 nt, Human parainfluenza virus 3
auggaaucucac

SEQ ID NO: 210566 - RNA, 16 nt, Human parainfluenza virus 3
auuaugagucuaccuc

SEQ ID NO: 210567 - RNA, 18 nt, Human parainfluenza virus 3
caaauaagggauaaucaa

SEQ ID NO: 210568 - RNA, 14 nt, Human parainfluenza virus 3
caaagauagacuuc

SEQ ID NO: 210569 - RNA, 20 nt, Human parainfluenza virus 3
caaagggaugaagauaucac

SEQ ID NO: 210570 - RNA, 21 nt, Human parainfluenza virus 3
caaagggaugaagauaucaca

SEQ ID NO: 210571 - RNA, 22 nt, Human parainfluenza virus 3
caaagcgugcucggaaaaugga

SEQ ID NO: 210572 - RNA, 23 nt, Human parainfluenza virus 3
caaagcgugcucggaaaauggac

SEQ ID NO: 210573 - RNA, 18 nt, Human parainfluenza virus 3
caaaaacuuaggacaaaa

SEQ ID NO: 210574 - RNA, 23 nt, Human parainfluenza virus 3
caaaaaguaagaaaaacauguaa

SEQ ID NO: 210575 - RNA, 22 nt, Human parainfluenza virus 3
aggaguaaaguuacgcaaucca

SEQ ID NO: 210576 - RNA, 14 nt, Human parainfluenza virus 3
aguuacgcaaucca

SEQ ID NO: 210577 - RNA, 15 nt, Human parainfluenza virus 3
aguuacgcaauccaa

SEQ ID NO: 210578 - RNA, 17 nt, Human parainfluenza virus 3
augaagauaucacaaaa

SEQ ID NO: 210579 - RNA, 19 nt, Human parainfluenza virus 3
augaaacaauagauaucaa

SEQ ID NO: 210580 - RNA, 18 nt, Human parainfluenza virus 3
aucggaaaacgacacaau

SEQ ID NO: 210581 - RNA, 14 nt, Human parainfluenza virus 3
auaggagaaaucaa

SEQ ID NO: 210582 - RNA, 15 nt, Human parainfluenza virus 3
auagugcuaauuaau

SEQ ID NO: 210583 - RNA, 23 nt, Human parainfluenza virus 3
auaguggaucaacugacaaaaau

SEQ ID NO: 210584 - RNA, 13 nt, Human parainfluenza virus 3
auaucaagacaaa

SEQ ID NO: 210585 - RNA, 15 nt, Human parainfluenza virus 3
aucauggaaucucac

SEQ ID NO: 210586 - RNA, 13 nt, Human parainfluenza virus 3
aaaauuaauauua

SEQ ID NO: 210587 - RNA, 16 nt, Human parainfluenza virus 3
aaaauuaugacugaga

SEQ ID NO: 210588 - RNA, 18 nt, Human parainfluenza virus 3
aaaaguacagaacaccaa

SEQ ID NO: 210589 - RNA, 19 nt, Human parainfluenza virus 3
aaaaaucaaaccaacagaa

SEQ ID NO: 210590 - RNA, 18 nt, Human parainfluenza virus 3
aaaacgacacaaucaaca

SEQ ID NO: 210591 - RNA, 19 nt, Human parainfluenza virus 3
auagugcuaauuaauucca

SEQ ID NO: 210592 - RNA, 22 nt, Human parainfluenza virus 3
auaacuaacucugcaauauaca

SEQ ID NO: 210593 - RNA, 20 nt, Human parainfluenza virus 3
aggaguaaaguuacgcaauc

SEQ ID NO: 210594 - RNA, 22 nt, Human parainfluenza virus 3
agauugauagaaaaucaaagag

SEQ ID NO: 210595 - RNA, 13 nt, Human parainfluenza virus 3
agagaggaggaaa

SEQ ID NO: 210596 - RNA, 23 nt, Human parainfluenza virus 3
acagaucgaaccgaacagacaaa

SEQ ID NO: 210597 - RNA, 18 nt, Human parainfluenza virus 3
acaccgaacaaacagaca

SEQ ID NO: 210598 - RNA, 18 nt, Human parainfluenza virus 3
acacugcuaauuauuaca

SEQ ID NO: 210599 - RNA, 19 nt, Human parainfluenza virus 3
acaacaguagaucaaaauc

SEQ ID NO: 210600 - RNA, 14 nt, Human parainfluenza virus 3
acaacgaucuauua

SEQ ID NO: 210601 - RNA, 18 nt, Human parainfluenza virus 3
acaacucccccaacaaca

SEQ ID NO: 210602 - RNA, 16 nt, Human parainfluenza virus 3
acaagcucacuaauaa

SEQ ID NO: 210603 - RNA, 14 nt, Human parainfluenza virus 3
aaugagcuggagac

SEQ ID NO: 210604 - RNA, 14 nt, Human parainfluenza virus 3
acaaacacaacucc

SEQ ID NO: 210605 - RNA, 22 nt, Human parainfluenza virus 3
acucaaagucaaugaacagaga

SEQ ID NO: 210606 - RNA, 13 nt, Human parainfluenza virus 3
accaaugaucuaa

SEQ ID NO: 210607 - RNA, 13 nt, Human parainfluenza virus 3
auguacuaaacaa

SEQ ID NO: 210608 - RNA, 18 nt, Human parainfluenza virus 3
auggaaagcgaugcuaaa

SEQ ID NO: 210609 - RNA, 18 nt, Human parainfluenza virus 3
auggcacuguaucugaca

SEQ ID NO: 210610 - RNA, 16 nt, Human parainfluenza virus 3
caauaucauugaauuc

SEQ ID NO: 210611 - RNA, 16 nt, Human parainfluenza virus 3
cacaaucaacacaaga

SEQ ID NO: 210612 - RNA, 12 nt, Human parainfluenza virus 3
caacucaaucaa

SEQ ID NO: 210613 - RNA, 13 nt, Human parainfluenza virus 3
caacucaaucaau

SEQ ID NO: 210614 - RNA, 14 nt, Human parainfluenza virus 3
caacucaaucaaua

SEQ ID NO: 210615 - RNA, 17 nt, Human parainfluenza virus 3
caacucuacucauacaa

SEQ ID NO: 210616 - RNA, 16 nt, Human parainfluenza virus 3
caacauuuugauccaa

SEQ ID NO: 210617 - RNA, 23 nt, Human parainfluenza virus 3
caacauuuugauccaaauuaaua

SEQ ID NO: 210618 - RNA, 16 nt, Human parainfluenza virus 3
caaccaucaacaccga

SEQ ID NO: 210619 - RNA, 14 nt, Human parainfluenza virus 3
caaauagauaucac

SEQ ID NO: 210620 - RNA, 16 nt, Human parainfluenza virus 3
caaauagauaucacaa

SEQ ID NO: 210621 - RNA, 14 nt, Human parainfluenza virus 3
caacaguagaucaa

SEQ ID NO: 210622 - RNA, 17 nt, Human parainfluenza virus 3
caacaguagaucaaaau

SEQ ID NO: 210623 - RNA, 19 nt, Human parainfluenza virus 3
caaaauaggagaaaucaaa

SEQ ID NO: 210624 - RNA, 13 nt, Human parainfluenza virus 3
caaaaucuaucaa

SEQ ID NO: 210625 - RNA, 19 nt, Human parainfluenza virus 3
caaaaucuaucaacacaca

SEQ ID NO: 210626 - RNA, 13 nt, Human parainfluenza virus 3
auuuugauccaaa

SEQ ID NO: 210627 - RNA, 19 nt, Human parainfluenza virus 3
auugauagaaaaucaaaga

SEQ ID NO: 210628 - RNA, 16 nt, Human parainfluenza virus 3
caucauggaaucucac

SEQ ID NO: 210629 - RNA, 13 nt, Human parainfluenza virus 3
caucauagugcua

SEQ ID NO: 210630 - RNA, 16 nt, Human parainfluenza virus 3
cagucccaaagggaug

SEQ ID NO: 210631 - RNA, 21 nt, Human parainfluenza virus 3
caguagaucaaaaucuaucaa

SEQ ID NO: 210632 - RNA, 16 nt, Human parainfluenza virus 3
caguaccccacauuag

SEQ ID NO: 210633 - RNA, 23 nt, Human parainfluenza virus 3
cagaaugaaacaauagauaucaa

SEQ ID NO: 210634 - RNA, 16 nt, Human parainfluenza virus 3
cagaagaaaaucucaa

SEQ ID NO: 210635 - RNA, 19 nt, Human parainfluenza virus 3
ccauugauaacaacacaga

SEQ ID NO: 210636 - RNA, 13 nt, Human parainfluenza virus 3
cccagcaacucag

SEQ ID NO: 210637 - RNA, 22 nt, Human parainfluenza virus 3
ccacauuagaguugccaaaauc

SEQ ID NO: 210638 - RNA, 12 nt, Human parainfluenza virus 3
ccagcaacucag

SEQ ID NO: 210639 - RNA, 20 nt, Human parainfluenza virus 3
ccaaugaucuaauacaguca

SEQ ID NO: 210640 - RNA, 18 nt, Human parainfluenza virus 3
ccaucuaucaaccaaaaa

SEQ ID NO: 210641 - RNA, 17 nt, Human parainfluenza virus 3
ccaauagacaaauccaa

SEQ ID NO: 210642 - RNA, 21 nt, Human parainfluenza virus 3
cauuuaucagauauccagaaa

SEQ ID NO: 210643 - RNA, 15 nt, Human parainfluenza virus 3
ggauaaucaaaaacu

SEQ ID NO: 210644 - RNA, 18 nt, Human parainfluenza virus 3
gggacaaaaaaagcaaaa

SEQ ID NO: 210645 - RNA, 12 nt, Human parainfluenza virus 3
gccgaagcaaau

SEQ ID NO: 210646 - RNA, 13 nt, Human parainfluenza virus 3
uaaaagacaacga

SEQ ID NO: 210647 - RNA, 21 nt, Human parainfluenza virus 3
guuacugcugcaacaccagau

SEQ ID NO: 210648 - RNA, 16 nt, Human parainfluenza virus 3
guccauggcuacucau

SEQ ID NO: 210649 - RNA, 20 nt, Human parainfluenza virus 3
gugucaccuuaacucuccua

SEQ ID NO: 210650 - RNA, 22 nt, Human parainfluenza virus 3
uagaguuugcuugcaacucaau

SEQ ID NO: 210651 - RNA, 15 nt, Human parainfluenza virus 3
uagauaucacaaaac

SEQ ID NO: 210652 - RNA, 19 nt, Human parainfluenza virus 3
uagaucaaaaucuaucaac

SEQ ID NO: 210653 - RNA, 14 nt, Human parainfluenza virus 3
uagaaaaucaaaga

SEQ ID NO: 210654 - RNA, 15 nt, Human parainfluenza virus 3
uaguaggacaaagaa

SEQ ID NO: 210655 - RNA, 18 nt, Human parainfluenza virus 3
uagugaaaagguccauaa

SEQ ID NO: 210656 - RNA, 16 nt, Human parainfluenza virus 3
uauccaugaucaaaac

SEQ ID NO: 210657 - RNA, 22 nt, Human parainfluenza virus 3
uauagaaccauuaccacucaaa

SEQ ID NO: 210658 - RNA, 18 nt, Human parainfluenza virus 3
uacaauaaagauauaucu

SEQ ID NO: 210659 - RNA, 17 nt, Human parainfluenza virus 3
uacuggaagcauaccaa

SEQ ID NO: 210660 - RNA, 18 nt, Human parainfluenza virus 3
uacuggaagcauaccaau

SEQ ID NO: 210661 - RNA, 18 nt, Human parainfluenza virus 3
gaaucuaacaauggcacu

SEQ ID NO: 210662 - RNA, 20 nt, Human parainfluenza virus 3
gaaucaagagauaaaucaac

SEQ ID NO: 210663 - RNA, 21 nt, Human parainfluenza virus 3
gacaaaagaggucaacaccaa

SEQ ID NO: 210664 - RNA, 16 nt, Human parainfluenza virus 3
gacaaaaaaagcaaaa

SEQ ID NO: 210665 - RNA, 20 nt, Human parainfluenza virus 3
gaagggacaaaaaaagcaaa

SEQ ID NO: 210666 - RNA, 13 nt, Human parainfluenza virus 3
gaaagaccaaaau

SEQ ID NO: 210667 - RNA, 22 nt, Human parainfluenza virus 3
gaaagauaguggaucaacugac

SEQ ID NO: 210668 - RNA, 18 nt, Human parainfluenza virus 3
gaaagcgaugcuaaaaac

SEQ ID NO: 210669 - RNA, 13 nt, Human parainfluenza virus 3
gaaaaucaaagag

SEQ ID NO: 210670 - RNA, 16 nt, Human parainfluenza virus 3
gaaaauggaugaauca

SEQ ID NO: 210671 - RNA, 18 nt, Human parainfluenza virus 3
gaaaauggucauauagaa

SEQ ID NO: 210672 - RNA, 14 nt, Human parainfluenza virus 3
gaaaacgacacaau

SEQ ID NO: 210673 - RNA, 15 nt, Human parainfluenza virus 3
cuuucugccaaauag

SEQ ID NO: 210674 - RNA, 12 nt, Human parainfluenza virus 3
cuugcaacucaa

SEQ ID NO: 210675 - RNA, 20 nt, Human parainfluenza virus 3
cuugcaacucaaucaauaga

SEQ ID NO: 210676 - RNA, 12 nt, Human parainfluenza virus 3
gauaaucaaaaa

SEQ ID NO: 210677 - RNA, 14 nt, Human parainfluenza virus 3
gauaccaacaucag

SEQ ID NO: 210678 - RNA, 13 nt, Human parainfluenza virus 3
gaucaacugacaa

SEQ ID NO: 210679 - RNA, 16 nt, Human parainfluenza virus 3
gcaaucagacaaugga

SEQ ID NO: 210680 - RNA, 15 nt, Human parainfluenza virus 3
gacuggcaacacagc

SEQ ID NO: 210681 - RNA, 19 nt, Human parainfluenza virus 3
gagcccaaggauagacaaa

SEQ ID NO: 210682 - RNA, 18 nt, Human parainfluenza virus 3
gagauaaaucaacuaaua

SEQ ID NO: 210683 - RNA, 22 nt, Human parainfluenza virus 3
gagagaguauccaugaucaaaa

SEQ ID NO: 210684 - RNA, 16 nt, Human parainfluenza virus 3
cguuaaagguaaaaua

SEQ ID NO: 210685 - RNA, 15 nt, Human parainfluenza virus 3
cugaaucuaacaaug

SEQ ID NO: 210686 - RNA, 14 nt, Human parainfluenza virus 3
cugacauacucuau

SEQ ID NO: 210687 - RNA, 16 nt, Human parainfluenza virus 3
cucaauaucauugaau

SEQ ID NO: 210688 - RNA, 20 nt, Human parainfluenza virus 3
cucaauaucauugaauucau

SEQ ID NO: 210689 - RNA, 16 nt, Human parainfluenza virus 3
cuaacucugcaauaua

SEQ ID NO: 210690 - RNA, 22 nt, Human parainfluenza virus 3
cuaucggaaaacgacacaauca

SEQ ID NO: 210691 - RNA, 16 nt, Human parainfluenza virus 3
cuauuauaccagaaua

SEQ ID NO: 210692 - RNA, 14 nt, Human parainfluenza virus 3
ugaagauaucacaa

SEQ ID NO: 210693 - RNA, 15 nt, Human parainfluenza virus 3
ugaagauaucacaaa

SEQ ID NO: 210694 - RNA, 15 nt, Human parainfluenza virus 3
ugauccaaauuaaua

SEQ ID NO: 210695 - RNA, 21 nt, Human parainfluenza virus 3
ucgcaggaacaagaaagaagg

SEQ ID NO: 210696 - RNA, 23 nt, Human parainfluenza virus 3
ucauacuuagcaccgacccccaa

SEQ ID NO: 210697 - RNA, 22 nt, Human parainfluenza virus 3
uccaaaaugaguauaacuaacu

SEQ ID NO: 210698 - RNA, 23 nt, Human parainfluenza virus 3
uccaucaauagugaaaaggucca

SEQ ID NO: 210699 - RNA, 15 nt, Human parainfluenza virus 3
uccauggcuacucau

SEQ ID NO: 210700 - RNA, 11 nt, Human parainfluenza virus 3
uccaugaucaa

SEQ ID NO: 210701 - RNA, 14 nt, Human parainfluenza virus 3
uccugguguuauua

SEQ ID NO: 210702 - RNA, 21 nt, Human parainfluenza virus 3
ucagacuacagauccacauca

SEQ ID NO: 210703 - RNA, 18 nt, Human parainfluenza virus 3
ucaggaacacaauccuca

SEQ ID NO: 210704 - RNA, 16 nt, Human parainfluenza virus 3
uugcaacucaaucaau

SEQ ID NO: 210705 - RNA, 16 nt, Human parainfluenza virus 3
uucaauacaccaagaa

SEQ ID NO: 210706 - RNA, 15 nt, Human parainfluenza virus 3
uuaucaauaguuuuc

SEQ ID NO: 210707 - RNA, 13 nt, Human parainfluenza virus 3
uuauacaaaagaa

SEQ ID NO: 210708 - RNA, 22 nt, Human parainfluenza virus 3
uuauggcaucuuucugccaaau

SEQ ID NO: 210709 - RNA, 17 nt, Human parainfluenza virus 3
uuaagaaaucaaaagau

SEQ ID NO: 210710 - RNA, 16 nt, Human parainfluenza virus 3
uuaccacucaaaguca

SEQ ID NO: 210711 - RNA, 16 nt, Human parainfluenza virus 3
ugcucggaaaauggac

SEQ ID NO: 210712 - RNA, 14 nt, Human parainfluenza virus 3
ugcuugcaacucaa

SEQ ID NO: 210713 - RNA, 11 nt, Human parainfluenza virus 3
uggaaucucac

SEQ ID NO: 210714 - RNA, 15 nt, Human parainfluenza virus 3
uuugcuugcaacuca

SEQ ID NO: 210715 - RNA, 17 nt, Human parainfluenza virus 3
uuuucaucauagugcua

SEQ ID NO: 210716 - RNA, 17 nt, Human parainfluenza virus 3
uuuugauccaaauuaau

SEQ ID NO: 210717 - RNA, 15 nt, Human parainfluenza virus 3
gaaaauggacacuga

SEQ ID NO: 210718 - RNA, 14 nt, Human parainfluenza virus 3
gaaaagcaguaccc

SEQ ID NO: 210719 - RNA, 17 nt, Human parainfluenza virus 3
aaagauacugacaacca

SEQ ID NO: 210720 - RNA, 16 nt, Human parainfluenza virus 3
gaaauccaccaaaaca

SEQ ID NO: 210721 - RNA, 18 nt, Human parainfluenza virus 3
gauaucaaucaauauaca

SEQ ID NO: 210722 - RNA, 15 nt, Human parainfluenza virus 3
gauaacaacacagau

SEQ ID NO: 210723 - RNA, 17 nt, Human parainfluenza virus 3
gauaacaacacagaucg

SEQ ID NO: 210724 - RNA, 15 nt, Human parainfluenza virus 3
gaccaaaaugaaucc

SEQ ID NO: 210725 - RNA, 22 nt, Human parainfluenza virus 3
aaaucuuaaaauuaugacugag

SEQ ID NO: 210726 - RNA, 16 nt, Human parainfluenza virus 3
gggaugaagauaucac

SEQ ID NO: 210727 - RNA, 17 nt, Human parainfluenza virus 3
ggaacgaaucaaagaca

SEQ ID NO: 210728 - RNA, 19 nt, Human parainfluenza virus 3
gcaauccaacucuacucau

SEQ ID NO: 210729 - RNA, 19 nt, Human parainfluenza virus 3
gcaaucagacaauggacaa

SEQ ID NO: 210730 - RNA, 16 nt, Human parainfluenza virus 3
gcaccgacccccaaga

SEQ ID NO: 210731 - RNA, 21 nt, Human parainfluenza virus 3
gcccaaggauagacaaaaagu

SEQ ID NO: 210732 - RNA, 16 nt, Human parainfluenza virus 3
gccaaauagauaucac

SEQ ID NO: 210733 - RNA, 15 nt, Human parainfluenza virus 3
ccaaauagauaucac

SEQ ID NO: 210734 - RNA, 16 nt, Human parainfluenza virus 3
ccaaauagauaucaca

SEQ ID NO: 210735 - RNA, 20 nt, Human parainfluenza virus 3
ccaaagggaugaagauauca

SEQ ID NO: 210736 - RNA, 20 nt, Human parainfluenza virus 3
cauuaagccgaagcaaauaa

SEQ ID NO: 210737 - RNA, 14 nt, Human parainfluenza virus 3
cauagugcuaauua

SEQ ID NO: 210738 - RNA, 15 nt, Human parainfluenza virus 3
cagacagaaucauca

SEQ ID NO: 210739 - RNA, 13 nt, Human parainfluenza virus 3
caguagaucaaaa

SEQ ID NO: 210740 - RNA, 13 nt, Human parainfluenza virus 3
cauaauucauugc

SEQ ID NO: 210741 - RNA, 17 nt, Human parainfluenza virus 3
cagucugggucaucaca

SEQ ID NO: 210742 - RNA, 19 nt, Human parainfluenza virus 3
cagugccaccaucuaucaa

SEQ ID NO: 210743 - RNA, 17 nt, Human parainfluenza virus 3
ccauuaccacucaaagu

SEQ ID NO: 210744 - RNA, 16 nt, Human parainfluenza virus 3
aaacaauagauaucaa

SEQ ID NO: 210745 - RNA, 18 nt, Human parainfluenza virus 3
cuacagauccacaucaaa

SEQ ID NO: 210746 - RNA, 21 nt, Human parainfluenza virus 3
cuacagauccacaucaaaagg

SEQ ID NO: 210747 - RNA, 20 nt, Human parainfluenza virus 3
cggaaaacgacacaaucaac

SEQ ID NO: 210748 - RNA, 16 nt, Human parainfluenza virus 3
cggaaauccaccaaaa

SEQ ID NO: 210749 - RNA, 22 nt, Human parainfluenza virus 3
cggaaauccaccaaaacaugga

SEQ ID NO: 210750 - RNA, 18 nt, Human parainfluenza virus 3
ccuuauccaaaaugagua

SEQ ID NO: 210751 - RNA, 14 nt, Human parainfluenza virus 3
cugcugcaacacca

SEQ ID NO: 210752 - RNA, 19 nt, Human parainfluenza virus 3
cucugcaauauacacauuc

SEQ ID NO: 210753 - RNA, 20 nt, Human parainfluenza virus 3
uaucagauauccagaaaugu

SEQ ID NO: 210754 - RNA, 13 nt, Human parainfluenza virus 3
uaucacuagacag

SEQ ID NO: 210755 - RNA, 15 nt, Human parainfluenza virus 3
uaucaauaguuuuca

SEQ ID NO: 210756 - RNA, 14 nt, Human parainfluenza virus 3
uacugcaucaaaga

SEQ ID NO: 210757 - RNA, 16 nt, Human parainfluenza virus 3
uaucaacacacacaaa

SEQ ID NO: 210758 - RNA, 14 nt, Human parainfluenza virus 3
uaucaaccaaaaau

SEQ ID NO: 210759 - RNA, 15 nt, Human parainfluenza virus 3
ucaacugacaaaaau

SEQ ID NO: 210760 - RNA, 21 nt, Human parainfluenza virus 3
uauuggucaacagucccaaag

SEQ ID NO: 210761 - RNA, 15 nt, Human parainfluenza virus 3
ucagacuacagaucc

SEQ ID NO: 210762 - RNA, 21 nt, Human parainfluenza virus 3
ucaccauugauaacaacacag

SEQ ID NO: 210763 - RNA, 19 nt, Human parainfluenza virus 3
ucgagauggaauacuggaa

SEQ ID NO: 210764 - RNA, 18 nt, Human parainfluenza virus 3
gucaucacacgaauguac

SEQ ID NO: 210765 - RNA, 21 nt, Human parainfluenza virus 3
uaagaaaaacuuaggauuaaa

SEQ ID NO: 210766 - RNA, 17 nt, Human parainfluenza virus 3
uaacacagauacaaaau

SEQ ID NO: 210767 - RNA, 15 nt, Human parainfluenza virus 3
uacagauccacauca

SEQ ID NO: 210768 - RNA, 13 nt, Human parainfluenza virus 3
uacugacaaccag

SEQ ID NO: 210769 - RNA, 12 nt, Human parainfluenza virus 3
uacucauaacaa

SEQ ID NO: 210770 - RNA, 22 nt, Human parainfluenza virus 3
uuucaauggacaacgacacaaa

SEQ ID NO: 210771 - RNA, 14 nt, Human parainfluenza virus 3
aacgaaucaaagac

SEQ ID NO: 210772 - RNA, 14 nt, Human parainfluenza virus 3
aacgacacaaucaa

SEQ ID NO: 210773 - RNA, 11 nt, Human parainfluenza virus 3
aacucaaucaa

SEQ ID NO: 210774 - RNA, 12 nt, Human parainfluenza virus 3
aacucuacucau

SEQ ID NO: 210775 - RNA, 14 nt, Human parainfluenza virus 3
aacucuacucauac

SEQ ID NO: 210776 - RNA, 15 nt, Human parainfluenza virus 3
aagauaguggaucaa

SEQ ID NO: 210777 - RNA, 22 nt, Human parainfluenza virus 3
aagauugauagaaaaucaaaga

SEQ ID NO: 210778 - RNA, 22 nt, Human parainfluenza virus 3
aagcaaauaagggauaaucaaa

SEQ ID NO: 210779 - RNA, 14 nt, Human parainfluenza virus 3
aagagauaaaucaa

SEQ ID NO: 210780 - RNA, 15 nt, Human parainfluenza virus 3
aacuuauacaaaaga

SEQ ID NO: 210781 - RNA, 20 nt, Human parainfluenza virus 3
aacuuauacaaaagaaucaa

SEQ ID NO: 210782 - RNA, 21 nt, Human parainfluenza virus 3
aaucaagagauaaaucaacua

SEQ ID NO: 210783 - RNA, 16 nt, Human parainfluenza virus 3
aaucaaaccaacagaa

SEQ ID NO: 210784 - RNA, 14 nt, Human parainfluenza virus 3
aauagagaguugau

SEQ ID NO: 210785 - RNA, 16 nt, Human parainfluenza virus 3
aauaguaggacaaaga

SEQ ID NO: 210786 - RNA, 16 nt, Human parainfluenza virus 3
aauagauaucaaucaa

SEQ ID NO: 210787 - RNA, 17 nt, Human parainfluenza virus 3
ugccaccaucuaucaac

SEQ ID NO: 210788 - RNA, 15 nt, Human parainfluenza virus 3
ugcuugcaacucaau

SEQ ID NO: 210789 - RNA, 21 nt, Human parainfluenza virus 3
ugcuaauuaauuccaucaaua

SEQ ID NO: 210790 - RNA, 11 nt, Human parainfluenza virus 3
ugagaaaguga

SEQ ID NO: 210791 - RNA, 19 nt, Human parainfluenza virus 3
ugauggaaagcgaugcuaa

SEQ ID NO: 210792 - RNA, 13 nt, Human parainfluenza virus 3
ugucauugaucac

SEQ ID NO: 210793 - RNA, 22 nt, Human parainfluenza virus 3
uggucauauagaaccauuacca

SEQ ID NO: 210794 - RNA, 19 nt, Human parainfluenza virus 3
uuagaagauuaaaauuaau

SEQ ID NO: 210795 - RNA, 19 nt, Human parainfluenza virus 3
uuacagaaaagauccaaau

SEQ ID NO: 210796 - RNA, 22 nt, Human parainfluenza virus 3
aucagcaaucagacaauggaca

SEQ ID NO: 210797 - RNA, 18 nt, Human parainfluenza virus 3
aucaacacaagaacccag

SEQ ID NO: 210798 - RNA, 17 nt, Human parainfluenza virus 3
aucaaccaaaaaucaaa

SEQ ID NO: 210799 - RNA, 24 nt, Human parainfluenza virus 3
aucaaccaaaaaucaaaccaacag

SEQ ID NO: 210800 - RNA, 22 nt, Human parainfluenza virus 3
aucaauagugaaaagguccaua

SEQ ID NO: 210801 - RNA, 15 nt, Human parainfluenza virus 3
aucaaagacaaauac

SEQ ID NO: 210802 - RNA, 15 nt, Human parainfluenza virus 3
aucaaaaucuaucaa

SEQ ID NO: 210803 - RNA, 22 nt, Human parainfluenza virus 3
aucaaaagauacugacaaccag

SEQ ID NO: 210804 - RNA, 20 nt, Human parainfluenza virus 3
auauggaugacgacucaaua

SEQ ID NO: 210805 - RNA, 21 nt, Human parainfluenza virus 3
auauggaugacgacucaauac

SEQ ID NO: 210806 - RNA, 15 nt, Human parainfluenza virus 3
auacugacaaccaga

SEQ ID NO: 210807 - RNA, 21 nt, Human parainfluenza virus 3
auagaaaaucaaagagaacaa

SEQ ID NO: 210808 - RNA, 21 nt, Human parainfluenza virus 3
auagauaucaaucaauauaca

SEQ ID NO: 210809 - RNA, 15 nt, Human parainfluenza virus 3
auagauaucacaaaa

SEQ ID NO: 210810 - RNA, 12 nt, Human parainfluenza virus 3
auagacaaaucc

SEQ ID NO: 210811 - RNA, 12 nt, Human parainfluenza virus 3
auaccaacauca

SEQ ID NO: 210812 - RNA, 14 nt, Human parainfluenza virus 3
auaaaacucaauaa

SEQ ID NO: 210813 - RNA, 15 nt, Human parainfluenza virus 3
auaaaacucaauaaa

SEQ ID NO: 210814 - RNA, 23 nt, Human parainfluenza virus 3
auaacuaacucugcaauauacac

SEQ ID NO: 210815 - RNA, 13 nt, Human parainfluenza virus 3
agggauaaucaaa

SEQ ID NO: 210816 - RNA, 13 nt, Human parainfluenza virus 3
auuaaccuaucua

SEQ ID NO: 210817 - RNA, 19 nt, Human parainfluenza virus 3
auuacacacuauuaugagu

SEQ ID NO: 210818 - RNA, 14 nt, Human parainfluenza virus 3
auugauaacaacac

SEQ ID NO: 210819 - RNA, 23 nt, Human parainfluenza virus 3
auuagauaaaagacaacgaucua

SEQ ID NO: 210820 - RNA, 21 nt, Human parainfluenza virus 3
caaaagaggucaacaccaaca

SEQ ID NO: 210821 - RNA, 20 nt, Human parainfluenza virus 3
caaaacaacaaaaccaaaaa

SEQ ID NO: 210822 - RNA, 20 nt, Human parainfluenza virus 3
caauggacaacgacacaaaa

SEQ ID NO: 210823 - RNA, 18 nt, Human parainfluenza virus 3
cacgucauuaauuucaaa

SEQ ID NO: 210824 - RNA, 18 nt, Human parainfluenza virus 3
cagaaugaaacaauagau

SEQ ID NO: 210825 - RNA, 12 nt, Human parainfluenza virus 3
cagaacaccaaa

SEQ ID NO: 210826 - RNA, 13 nt, Human parainfluenza virus 3
cagaacaccaaaa

SEQ ID NO: 210827 - RNA, 16 nt, Human parainfluenza virus 3
caaucagacaauggac

SEQ ID NO: 210828 - RNA, 23 nt, Human parainfluenza virus 3
caaucacggaaaggaugcuggua

SEQ ID NO: 210829 - RNA, 16 nt, Human parainfluenza virus 3
caaucaauauacaaau

SEQ ID NO: 210830 - RNA, 19 nt, Human parainfluenza virus 3
caauaucauugaauucaua

SEQ ID NO: 210831 - RNA, 12 nt, Human parainfluenza virus 3
caauauacacau

SEQ ID NO: 210832 - RNA, 18 nt, Human parainfluenza virus 3
caauagacaaauccaaau

SEQ ID NO: 210833 - RNA, 19 nt, Human parainfluenza virus 3
caauagagaguugauggaa

SEQ ID NO: 210834 - RNA, 17 nt, Human parainfluenza virus 3
caaaaucggaaauccac

SEQ ID NO: 210835 - RNA, 14 nt, Human parainfluenza virus 3
caacaacaaccucc

SEQ ID NO: 210836 - RNA, 13 nt, Human parainfluenza virus 3
caacaaccaucaa

SEQ ID NO: 210837 - RNA, 22 nt, Human parainfluenza virus 3
caacaaaaccaaaaaaucugau

SEQ ID NO: 210838 - RNA, 22 nt, Human parainfluenza virus 3
caacauuuugauccaaauuaau

SEQ ID NO: 210839 - RNA, 18 nt, Human parainfluenza virus 3
agaagauuaaaauuaaua

SEQ ID NO: 210840 - RNA, 15 nt, Human parainfluenza virus 3
agaaaagauccaaau

SEQ ID NO: 210841 - RNA, 17 nt, Human parainfluenza virus 3
agaaugaaacaauagau

SEQ ID NO: 210842 - RNA, 22 nt, Human parainfluenza virus 3
agacagaaaauaaaacucaaua

SEQ ID NO: 210843 - RNA, 19 nt, Human parainfluenza virus 3
agagaguauccaugaucaa

SEQ ID NO: 210844 - RNA, 16 nt, Human parainfluenza virus 3
acuaguuaucacuaga

SEQ ID NO: 210845 - RNA, 18 nt, Human parainfluenza virus 3
acuaacucugcaauauac

SEQ ID NO: 210846 - RNA, 14 nt, Human parainfluenza virus 3
acugcaucaaagau

SEQ ID NO: 210847 - RNA, 15 nt, Human parainfluenza virus 3
acugcugcaacacca

SEQ ID NO: 210848 - RNA, 17 nt, Human parainfluenza virus 3
acugcugcaacaccaga

SEQ ID NO: 210849 - RNA, 19 nt, Human parainfluenza virus 3
acuggaagcauaccaauca

SEQ ID NO: 210850 - RNA, 16 nt, Human parainfluenza virus 3
acugucauugaucacg

SEQ ID NO: 210851 - RNA, 16 nt, Human parainfluenza virus 3
acucaaucaauagaga

SEQ ID NO: 210852 - RNA, 12 nt, Human parainfluenza virus 3
acaaauccaaau

SEQ ID NO: 210853 - RNA, 14 nt, Human parainfluenza virus 3
acaacaaaaccaaa

SEQ ID NO: 210854 - RNA, 17 nt, Human parainfluenza virus 3
acaagaaacaacaguag

SEQ ID NO: 210855 - RNA, 15 nt, Human parainfluenza virus 3
acagaaaagauccaa

SEQ ID NO: 210856 - RNA, 22 nt, Human parainfluenza virus 3
acagaucgaaccgaacagacaa

SEQ ID NO: 210857 - RNA, 14 nt, Human parainfluenza virus 3
accaucaacaccga

SEQ ID NO: 210858 - RNA, 15 nt, Human parainfluenza virus 3
aagaagaugacaaaa

SEQ ID NO: 210859 - RNA, 19 nt, Human parainfluenza virus 3
aagaaucaauccgaacaaa

SEQ ID NO: 210860 - RNA, 12 nt, Human parainfluenza virus 3
aagcauaccaau

SEQ ID NO: 210861 - RNA, 15 nt, Human parainfluenza virus 3
aagcucacuaauaag

SEQ ID NO: 210862 - RNA, 22 nt, Human parainfluenza virus 3
aagcgugcucggaaaauggaca

SEQ ID NO: 210863 - RNA, 11 nt, Human parainfluenza virus 3
aauacagacag

SEQ ID NO: 210864 - RNA, 19 nt, Human parainfluenza virus 3
aauacuggaagcauaccaa

SEQ ID NO: 210865 - RNA, 14 nt, Human parainfluenza virus 3
aauaguaggacaaa

SEQ ID NO: 210866 - RNA, 14 nt, Human parainfluenza virus 3
aaaauggacacuga

SEQ ID NO: 210867 - RNA, 22 nt, Human parainfluenza virus 3
aaaauggacacugaaucuaaca

SEQ ID NO: 210868 - RNA, 23 nt, Human parainfluenza virus 3
aaauugaaagaagaaaagaucaa

SEQ ID NO: 210869 - RNA, 19 nt, Human parainfluenza virus 3
aaauggaacgaaucaaaga

SEQ ID NO: 210870 - RNA, 15 nt, Human parainfluenza virus 3
aaaucugaucuauua

SEQ ID NO: 210871 - RNA, 23 nt, Human parainfluenza virus 3
aaagcgugcucggaaaauggaca

SEQ ID NO: 210872 - RNA, 15 nt, Human parainfluenza virus 3
aaauaaugaguuuau

SEQ ID NO: 210873 - RNA, 14 nt, Human parainfluenza virus 3
aaauagauaucaca

SEQ ID NO: 210874 - RNA, 14 nt, Human parainfluenza virus 3
aacuaucaaaucau

SEQ ID NO: 210875 - RNA, 20 nt, Human parainfluenza virus 3
aacuaucaaaucauggauuc

SEQ ID NO: 210876 - RNA, 15 nt, Human parainfluenza virus 3
aacuuaggacaaaag

SEQ ID NO: 210877 - RNA, 18 nt, Human parainfluenza virus 3
aacuuaggacaaaagagg

SEQ ID NO: 210878 - RNA, 21 nt, Human parainfluenza virus 3
aacuuaggauuaaagaauccu

SEQ ID NO: 210879 - RNA, 16 nt, Human parainfluenza virus 3
aacaucagacuacaga

SEQ ID NO: 210880 - RNA, 11 nt, Human parainfluenza virus 3
aacauguaaua

SEQ ID NO: 210881 - RNA, 12 nt, Human parainfluenza virus 3
aaaaacuaucaa

SEQ ID NO: 210882 - RNA, 16 nt, Human parainfluenza virus 3
aaaacgacacaaucaa

SEQ ID NO: 210883 - RNA, 20 nt, Human parainfluenza virus 3
aaaaccaaaaaaucugaucu

SEQ ID NO: 210884 - RNA, 16 nt, Human parainfluenza virus 3
aaaacuuaggacaaaa

SEQ ID NO: 210885 - RNA, 19 nt, Human parainfluenza virus 3
aaaacaacaaccaucaaca

SEQ ID NO: 210886 - RNA, 20 nt, Human parainfluenza virus 3
aaaaauaguaggacaaagaa

SEQ ID NO: 210887 - RNA, 12 nt, Human parechovirus 2
acuauucauuag

SEQ ID NO: 210888 - RNA, 12 nt, Human parechovirus 2
acuaauuugauu

SEQ ID NO: 210889 - RNA, 13 nt, Human parechovirus 2
auuagaacacuaa

SEQ ID NO: 210890 - RNA, 16 nt, Human parechovirus 2
aauauuggacauaaca

SEQ ID NO: 210891 - RNA, 18 nt, Human parechovirus 2
uucuuuugcuauggacua

SEQ ID NO: 210892 - RNA, 18 nt, Human parechovirus 2
uauucauuaggauacuaa

SEQ ID NO: 210893 - RNA, 13 nt, Human parechovirus 2
uagaacacuaauu

SEQ ID NO: 210894 - RNA, 11 nt, Human parechovirus 2
gcuauggacua

SEQ ID NO: 210895 - RNA, 21 nt, Human parechovirus 2
cuuuugcuauggacuauucau

SEQ ID NO: 210896 - RNA, 18 nt, Human parechovirus 2
uuuugcuauggacuauuc

SEQ ID NO: 210897 - RNA, 16 nt, Human parechovirus 2
cuuuugcuauggacua

SEQ ID NO: 210898 - RNA, 17 nt, Human parechovirus 2
gaauauuggacauaaca

SEQ ID NO: 210899 - RNA, 16 nt, Human parechovirus 2
gcuauggacuauucau

SEQ ID NO: 210900 - RNA, 17 nt, Human parechovirus 2
gguuuucuuuugcuaug

SEQ ID NO: 210901 - RNA, 12 nt, Human parechovirus 2
auggacuauuca

SEQ ID NO: 210902 - RNA, 13 nt, Human parechovirus 2
auggacuauucau

SEQ ID NO: 210903 - RNA, 15 nt, Human parechovirus 2
acuaauuuggaauau

SEQ ID NO: 210904 - RNA, 21 nt, Human parechovirus 2
aauuuggaauauuggacauaa

SEQ ID NO: 210905 - RNA, 13 nt, Human parechovirus 2
aauuugauuagaa

SEQ ID NO: 210906 - RNA, 12 nt, Human parechovirus 2
aggauacuaauu

SEQ ID NO: 210907 - RNA, 16 nt, Human parechovirus 2
uucuuuugcuauggac

SEQ ID NO: 210908 - RNA, 22 nt, Human parechovirus 2
uucauuaggauacuaauuugau

SEQ ID NO: 210909 - RNA, 23 nt, Human parechovirus 2
uuucuuuugcuauggacuauuca

SEQ ID NO: 210910 - RNA, 14 nt, Human parechovirus 2
uauuggacauaaca

SEQ ID NO: 210911 - RNA, 15 nt, Human parechovirus 2
uauuggacauaacaa

SEQ ID NO: 210912 - RNA, 23 nt, Human parechovirus 2
cuaauuugauuagaacacuaauu

SEQ ID NO: 210913 - RNA, 15 nt, Human parechovirus 2
auuagaacacuaauu

SEQ ID NO: 210914 - RNA, 13 nt, Human parechovirus 2
auuaggauacuaa

SEQ ID NO: 210915 - RNA, 14 nt, Human parechovirus 2
auuaggauacuaau

SEQ ID NO: 210916 - RNA, 16 nt, Human parechovirus 2
auauuggacauaacaa

SEQ ID NO: 210917 - RNA, 20 nt, Homo sapiens
caugcugaacaucacagcuu

SEQ ID NO: 210918 - RNA, 16 nt, Homo sapiens
auaccaugugccacac

SEQ ID NO: 210919 - RNA, 16 nt, Homo sapiens
ccaccugacacaccag

SEQ ID NO: 210920 - RNA, 13 nt, Homo sapiens
cuuagaccucagc

SEQ ID NO: 210921 - RNA, 19 nt, Homo sapiens
gucacagaggaucugcuug

SEQ ID NO: 210922 - RNA, 17 nt, Homo sapiens
uauagucacuaguugua

SEQ ID NO: 210923 - RNA, 17 nt, Homo sapiens
ucaguccaaagggcaug

SEQ ID NO: 210924 - RNA, 16 nt, Homo sapiens
accaucccagcacugc

SEQ ID NO: 210925 - RNA, 15 nt, Homo sapiens
auuuuuccaacuacu

SEQ ID NO: 210926 - RNA, 16 nt, Homo sapiens
uccucacuguauccag

SEQ ID NO: 210927 - RNA, 16 nt, Homo sapiens
cuucuuacaaugcauu

SEQ ID NO: 210928 - RNA, 23 nt, Homo sapiens
aggaugugucuuggggugggcac

SEQ ID NO: 210929 - RNA, 16 nt, Homo sapiens
acccgaguaacuuucu

SEQ ID NO: 210930 - RNA, 15 nt, Homo sapiens
ccuagccgaccucag

SEQ ID NO: 210931 - RNA, 12 nt, Homo sapiens
cacucagucucu

SEQ ID NO: 210932 - RNA, 21 nt, Homo sapiens
uucacaccaccccccaugcca

SEQ ID NO: 210933 - RNA, 20 nt, Homo sapiens
cacuggacugacgacuugag

SEQ ID NO: 210934 - RNA, 14 nt, Homo sapiens
uaaaguaugugcau

SEQ ID NO: 210935 - RNA, 14 nt, Homo sapiens
uagcuuagaccuca

SEQ ID NO: 210936 - RNA, 23 nt, Homo sapiens
uaauuuuuuugugggaaauccac

SEQ ID NO: 210937 - RNA, 14 nt, Homo sapiens
acacaccuugacaa

SEQ ID NO: 210938 - RNA, 22 nt, Homo sapiens
aguuaccuuauaguuacugugu

SEQ ID NO: 210939 - RNA, 17 nt, Homo sapiens
cucuccccuucucugua

SEQ ID NO: 210940 - RNA, 23 nt, Homo sapiens
agucaucuugcuaccaguauuua

SEQ ID NO: 210941 - RNA, 16 nt, Homo sapiens
uauuaauacauucacc

SEQ ID NO: 210942 - RNA, 22 nt, Homo sapiens
uacuauucaaucuuuacacaau

SEQ ID NO: 210943 - RNA, 16 nt, Homo sapiens
ugauaaaagauggcca

SEQ ID NO: 210944 - RNA, 23 nt, Homo sapiens
uggucaggcucuccaggugguca

SEQ ID NO: 210945 - RNA, 11 nt, Homo sapiens
aggcuguaacu

SEQ ID NO: 210946 - RNA, 12 nt, Homo sapiens
cugcuaccucac

SEQ ID NO: 210947 - RNA, 17 nt, Homo sapiens
ucuccucucucuguaau

SEQ ID NO: 210948 - RNA, 19 nt, Homo sapiens
cucagaugcacaugagcug

SEQ ID NO: 210949 - RNA, 17 nt, Homo sapiens
gggauuggggaagacug

SEQ ID NO: 210950 - RNA, 18 nt, Homo sapiens
aaucgcuccaccuugcag

SEQ ID NO: 210951 - RNA, 23 nt, Homo sapiens
guaacuuucugcugaugaacaaa

SEQ ID NO: 210952 - RNA, 23 nt, Homo sapiens
ucccucccagaggagccaccagu

SEQ ID NO: 210953 - RNA, 12 nt, Homo sapiens
ccucucucugua

SEQ ID NO: 210954 - RNA, 14 nt, Homo sapiens
agccccaauucgau

SEQ ID NO: 210955 - RNA, 16 nt, Homo sapiens
gagcaguaccggccaa

SEQ ID NO: 210956 - RNA, 17 nt, Homo sapiens
cagcagccagcucucag

SEQ ID NO: 210957 - RNA, 15 nt, Homo sapiens
uaaagcuuugugcag

SEQ ID NO: 210958 - RNA, 18 nt, Homo sapiens
gaggcagacagcagcuca

SEQ ID NO: 210959 - RNA, 18 nt, Homo sapiens
ucagccuagccgaccuca

SEQ ID NO: 210960 - RNA, 15 nt, Homo sapiens
auaaaguaugugcau

SEQ ID NO: 210961 - RNA, 11 nt, Homo sapiens
acaaugcauuc

SEQ ID NO: 210962 - RNA, 18 nt, Homo sapiens
agcacauaccaugugcca

SEQ ID NO: 210963 - RNA, 16 nt, Homo sapiens
aggguaccuugaacac

SEQ ID NO: 210964 - RNA, 19 nt, Homo sapiens
cauauuuuauuauagucac

SEQ ID NO: 210965 - RNA, 20 nt, Homo sapiens
cuuuacuccguaacagauuu

SEQ ID NO: 210966 - RNA, 19 nt, Homo sapiens
ugaccagccuugacacucc

SEQ ID NO: 210967 - RNA, 20 nt, Homo sapiens
aaggguucagagacucaggg

SEQ ID NO: 210968 - RNA, 18 nt, Homo sapiens
cagaaaagcccaaguuca

SEQ ID NO: 210969 - RNA, 16 nt, Homo sapiens
auaauuuaccuaagau

SEQ ID NO: 210970 - RNA, 15 nt, Homo sapiens
uagcuuagaccucag

SEQ ID NO: 210971 - RNA, 22 nt, Homo sapiens
caugagauggaggccuccuuau

SEQ ID NO: 210972 - RNA, 20 nt, Homo sapiens
ucucaguaccccauggagcu

SEQ ID NO: 210973 - RNA, 22 nt, Homo sapiens
auuuccucauuuuuauaauguc

SEQ ID NO: 210974 - RNA, 15 nt, Homo sapiens
cuuauccuccaugaa

SEQ ID NO: 210975 - RNA, 19 nt, Homo sapiens
uauuuggaaauaaagucag

SEQ ID NO: 210976 - RNA, 22 nt, Homo sapiens
ccccuuuuauuaauacauucac

SEQ ID NO: 210977 - RNA, 23 nt, Homo sapiens
ucugccucugcagcccacugccu

SEQ ID NO: 210978 - RNA, 18 nt, Homo sapiens
uguacuauucaaucuuua

SEQ ID NO: 210979 - RNA, 15 nt, Homo sapiens
aauaaguacugugua

SEQ ID NO: 210980 - RNA, 12 nt, Homo sapiens
cacagagugccu

SEQ ID NO: 210981 - RNA, 22 nt, Homo sapiens
gaauucugcuaccucacugggg

SEQ ID NO: 210982 - RNA, 15 nt, Homo sapiens
auccgaggcaggguc

SEQ ID NO: 210983 - RNA, 16 nt, Homo sapiens
ucucucuucucuccag

SEQ ID NO: 210984 - RNA, 17 nt, Homo sapiens
aguaccggccaagcaua

SEQ ID NO: 210985 - RNA, 20 nt, Homo sapiens
gccccccuugccagacaugu

SEQ ID NO: 210986 - RNA, 22 nt, Homo sapiens
cucuuccccauaaucacugacc

SEQ ID NO: 210987 - RNA, 15 nt, Homo sapiens
agcacgguggugccc

SEQ ID NO: 210988 - RNA, 16 nt, Homo sapiens
ucagagggcccagugg

SEQ ID NO: 210989 - RNA, 18 nt, Homo sapiens
auggcauaaccugucuca

SEQ ID NO: 210990 - RNA, 13 nt, Homo sapiens
uggaaucuuguaa

SEQ ID NO: 210991 - RNA, 15 nt, Homo sapiens
uugacaaaaucuuuu

SEQ ID NO: 210992 - RNA, 18 nt, Homo sapiens
acaguuuauuauguacua

SEQ ID NO: 210993 - RNA, 12 nt, Homo sapiens
aggacacagugg

SEQ ID NO: 210994 - RNA, 18 nt, Homo sapiens
ucuaacagcccuccucug

SEQ ID NO: 210995 - RNA, 14 nt, Homo sapiens
gaccucagccugug

SEQ ID NO: 210996 - RNA, 20 nt, Homo sapiens
gagauucucuggcacucuga

SEQ ID NO: 210997 - RNA, 16 nt, Homo sapiens
auccacacugagcuga

SEQ ID NO: 210998 - RNA, 14 nt, Homo sapiens
cacuuggucuguga

SEQ ID NO: 210999 - RNA, 23 nt, Homo sapiens
gaugaacaaaucugcaccccacu

SEQ ID NO: 211000 - RNA, 13 nt, Homo sapiens
agccgaccucagc

SEQ ID NO: 211001 - RNA, 17 nt, Homo sapiens
ccuauaucuucaucugu

SEQ ID NO: 211002 - RNA, 21 nt, Homo sapiens
guauuuggaaauaaagucaga

SEQ ID NO: 211003 - RNA, 13 nt, Homo sapiens
ugcccagugccau

SEQ ID NO: 211004 - RNA, 15 nt, Homo sapiens
agcauuacagugggu

SEQ ID NO: 211005 - RNA, 23 nt, Homo sapiens
acuuggucugugagaugcuagaa

SEQ ID NO: 211006 - RNA, 20 nt, Homo sapiens
gggauuuucagcccucagaa

SEQ ID NO: 211007 - RNA, 11 nt, Homo sapiens
caccaguucuc

SEQ ID NO: 211008 - RNA, 22 nt, Homo sapiens
ucagaccucggugggcauucac

SEQ ID NO: 211009 - RNA, 13 nt, Homo sapiens
cuugaacacuggg

SEQ ID NO: 211010 - RNA, 17 nt, Homo sapiens
ccaggcagccacuccua

SEQ ID NO: 211011 - RNA, 19 nt, Homo sapiens
ggcucuaauucacagugcu

SEQ ID NO: 211012 - RNA, 22 nt, Homo sapiens
gcaacugaggcagacagcagcu

SEQ ID NO: 211013 - RNA, 21 nt, Homo sapiens
ucaaucuuuacacaaugucac

SEQ ID NO: 211014 - RNA, 17 nt, Homo sapiens
cugcuaccucacugggg

SEQ ID NO: 211015 - RNA, 19 nt, Homo sapiens
cggagcccugucuccucuc

SEQ ID NO: 211016 - RNA, 18 nt, Homo sapiens
ucagaagucaucuugcua

SEQ ID NO: 211017 - RNA, 22 nt, Homo sapiens
uccuccaugaauaucaguuauu

SEQ ID NO: 211018 - RNA, 15 nt, Homo sapiens
uaaauauaucuaccc

SEQ ID NO: 211019 - RNA, 18 nt, Homo sapiens
ccuuagcuuagaccucag

SEQ ID NO: 211020 - RNA, 13 nt, Homo sapiens
caacuacuaauag

SEQ ID NO: 211021 - RNA, 17 nt, Homo sapiens
cuuagcuuagaccucag

SEQ ID NO: 211022 - RNA, 20 nt, Homo sapiens
aauucacagugcucuuuucu

SEQ ID NO: 211023 - RNA, 20 nt, Homo sapiens
uguuguuuuaggaauacaua

SEQ ID NO: 211024 - RNA, 14 nt, Homo sapiens
ugcagacaugaccc

SEQ ID NO: 211025 - RNA, 16 nt, Homo sapiens
auguuaguuaccuuau

SEQ ID NO: 211026 - RNA, 22 nt, Homo sapiens
guguggagcuaaggacacagug

SEQ ID NO: 211027 - RNA, 15 nt, Homo sapiens
gcaacugaggcagac

SEQ ID NO: 211028 - RNA, 11 nt, Homo sapiens
guaccaguuaa

SEQ ID NO: 211029 - RNA, 21 nt, Homo sapiens
agacccucaugcugccaauau

SEQ ID NO: 211030 - RNA, 15 nt, Homo sapiens
caguuccuucacuua

SEQ ID NO: 211031 - RNA, 19 nt, Homo sapiens
auuuagaagccaacuauga

SEQ ID NO: 211032 - RNA, 15 nt, Homo sapiens
agccuauaucuucau

SEQ ID NO: 211033 - RNA, 15 nt, Homo sapiens
cugcugaugaacaaa

SEQ ID NO: 211034 - RNA, 15 nt, Homo sapiens
agcucaggcacacuu

SEQ ID NO: 211035 - RNA, 14 nt, Homo sapiens
cacugagcugaggg

SEQ ID NO: 211036 - RNA, 11 nt, Homo sapiens
agccacuucau

SEQ ID NO: 211037 - RNA, 14 nt, Homo sapiens
cucagaugcacaug

SEQ ID NO: 211038 - RNA, 16 nt, Homo sapiens
gagagcaaauggcaaa

SEQ ID NO: 211039 - RNA, 17 nt, Homo sapiens
gaauaaaggcaguuuuc

SEQ ID NO: 211040 - RNA, 21 nt, Homo sapiens
augccaacucagcccccugac

SEQ ID NO: 211041 - RNA, 19 nt, Homo sapiens
cccucuccucucuuccucc

SEQ ID NO: 211042 - RNA, 19 nt, Homo sapiens
auaaucauuaaaauuaaca

SEQ ID NO: 211043 - RNA, 15 nt, Homo sapiens
uaugaaaaugucauu

SEQ ID NO: 211044 - RNA, 20 nt, Homo sapiens
cagggcuuuacuccguaaca

SEQ ID NO: 211045 - RNA, 20 nt, Homo sapiens
cucuuccccauaaucacuga

SEQ ID NO: 211046 - RNA, 17 nt, Homo sapiens
cagaaucgcuccaccuu

SEQ ID NO: 211047 - RNA, 17 nt, Homo sapiens
auugacuaucaaacuga

SEQ ID NO: 211048 - RNA, 14 nt, Homo sapiens
gaugagcaguaccg

SEQ ID NO: 211049 - RNA, 18 nt, Homo sapiens
cgagcacauaccaugugc

SEQ ID NO: 211050 - RNA, 20 nt, Homo sapiens
uagaaggguaccuugaacac

SEQ ID NO: 211051 - RNA, 19 nt, Homo sapiens
ugccucugcagcccacugc

SEQ ID NO: 211052 - RNA, 20 nt, Homo sapiens
aagcaucauuauuugcagag

SEQ ID NO: 211053 - RNA, 21 nt, Homo sapiens
aggcuccacuuggucugugag

SEQ ID NO: 211054 - RNA, 14 nt, Homo sapiens
gcacccuuagccac

SEQ ID NO: 211055 - RNA, 21 nt, Homo sapiens
uuaaucuuaguguaugauuac

SEQ ID NO: 211056 - RNA, 23 nt, Homo sapiens
augcagcuguggcagaguuacag

SEQ ID NO: 211057 - RNA, 18 nt, Homo sapiens
aguaugaaaaugucauug

SEQ ID NO: 211058 - RNA, 17 nt, Homo sapiens
cuggggugggcaguuuu

SEQ ID NO: 211059 - RNA, 16 nt, Homo sapiens
cugcccuagagcacac

SEQ ID NO: 211060 - RNA, 14 nt, Homo sapiens
cuugcaaaccaucc

SEQ ID NO: 211061 - RNA, 17 nt, Homo sapiens
ugcuaccucacuggggu

SEQ ID NO: 211062 - RNA, 15 nt, Homo sapiens
aaccucauuaucagu

SEQ ID NO: 211063 - RNA, 23 nt, Homo sapiens
ugcauucugagguaaccucauua

SEQ ID NO: 211064 - RNA, 22 nt, Homo sapiens
cuauugaccgagcacauaccau

SEQ ID NO: 211065 - RNA, 21 nt, Homo sapiens
agaccucggugggcauucaca

SEQ ID NO: 211066 - RNA, 17 nt, Homo sapiens
ucuccccuucucuguau

SEQ ID NO: 211067 - RNA, 18 nt, Homo sapiens
uauuaauacauucaccca

SEQ ID NO: 211068 - RNA, 23 nt, Homo sapiens
cuuuugugaauuaggcuguaacu

SEQ ID NO: 211069 - RNA, 13 nt, Homo sapiens
aaggauccuccaa

SEQ ID NO: 211070 - RNA, 21 nt, Homo sapiens
gccggccaaggccucuaggga

SEQ ID NO: 211071 - RNA, 20 nt, Homo sapiens
agaggagccaccaguucuca

SEQ ID NO: 211072 - RNA, 22 nt, Homo sapiens
auuuaucuauaauuuaccuaag

SEQ ID NO: 211073 - RNA, 14 nt, Homo sapiens
acgcacacugucug

SEQ ID NO: 211074 - RNA, 13 nt, Homo sapiens
aauuauuaccauc

SEQ ID NO: 211075 - RNA, 16 nt, Homo sapiens
acaccuugacaaaauc

SEQ ID NO: 211076 - RNA, 11 nt, Homo sapiens
gguagccacug

SEQ ID NO: 211077 - RNA, 22 nt, Homo sapiens
ugaggcagacagcagcucaggc

SEQ ID NO: 211078 - RNA, 16 nt, Homo sapiens
aguuugguuucuagca

SEQ ID NO: 211079 - RNA, 23 nt, Homo sapiens
uacaguuuauuauguacuauuca

SEQ ID NO: 211080 - RNA, 21 nt, Homo sapiens
cuuagacccucaugcugccaa

SEQ ID NO: 211081 - RNA, 13 nt, Homo sapiens
gccugaggcaauu

SEQ ID NO: 211082 - RNA, 18 nt, Homo sapiens
cucuuccccauaaucacu

SEQ ID NO: 211083 - RNA, 17 nt, Homo sapiens
uccugucggagcccugu

SEQ ID NO: 211084 - RNA, 21 nt, Homo sapiens
auuccccugaugggcccugac

SEQ ID NO: 211085 - RNA, 13 nt, Homo sapiens
cugaccagccuug

SEQ ID NO: 211086 - RNA, 19 nt, Homo sapiens
gaaauaaaguuggugacag

SEQ ID NO: 211087 - RNA, 16 nt, Homo sapiens
cacuuacagauggcag

SEQ ID NO: 211088 - RNA, 23 nt, Homo sapiens
aucauuaaaauuaacaugugcca

SEQ ID NO: 211089 - RNA, 14 nt, Homo sapiens
gaguuacaguucug

SEQ ID NO: 211090 - RNA, 17 nt, Homo sapiens
ucugcaccccacuucag

SEQ ID NO: 211091 - RNA, 12 nt, Homo sapiens
cuccucugcacu

SEQ ID NO: 211092 - RNA, 14 nt, Homo sapiens
uggccagaagucaa

SEQ ID NO: 211093 - RNA, 19 nt, Homo sapiens
gugucuuggggugggcaca

SEQ ID NO: 211094 - RNA, 21 nt, Homo sapiens
acuuaagcaucuggcucuaau

SEQ ID NO: 211095 - RNA, 20 nt, Homo sapiens
uccuuguauuuaaauauuaa

SEQ ID NO: 211096 - RNA, 17 nt, Homo sapiens
uuagcuuagaccucagc

SEQ ID NO: 211097 - RNA, 16 nt, Homo sapiens
uagcuuagaccucagc

SEQ ID NO: 211098 - RNA, 16 nt, Homo sapiens
uucugagguaaccuca

SEQ ID NO: 211099 - RNA, 17 nt, Homo sapiens
uuuuguuggcauagcuc

SEQ ID NO: 211100 - RNA, 16 nt, Homo sapiens
uucaugcucccagcca

SEQ ID NO: 211101 - RNA, 18 nt, Homo sapiens
aggagccaccaguucuca

SEQ ID NO: 211102 - RNA, 19 nt, Homo sapiens
aaacuuuuuuucuguacca

SEQ ID NO: 211103 - RNA, 18 nt, Homo sapiens
uauccuccaugaauauca

SEQ ID NO: 211104 - RNA, 14 nt, Homo sapiens
cucagcccccugac

SEQ ID NO: 211105 - RNA, 18 nt, Homo sapiens
gcucuccccuucucugua

SEQ ID NO: 211106 - RNA, 12 nt, Homo sapiens
uaucuaccccag

SEQ ID NO: 211107 - RNA, 20 nt, Homo sapiens
ggccagaagucaaggcuuag

SEQ ID NO: 211108 - RNA, 21 nt, Homo sapiens
gacucagggccccagcacuaa

SEQ ID NO: 211109 - RNA, 20 nt, Homo sapiens
ucagagggcccaguggugcc

SEQ ID NO: 211110 - RNA, 21 nt, Homo sapiens
gacuguguggagcuaaggaca

SEQ ID NO: 211111 - RNA, 14 nt, Homo sapiens
ucuauaauuuaccu

SEQ ID NO: 211112 - RNA, 21 nt, Homo sapiens
agguggucagagggcccagug

SEQ ID NO: 211113 - RNA, 16 nt, Homo sapiens
cugcuaccucacuggg

SEQ ID NO: 211114 - RNA, 22 nt, Homo sapiens
aagacuguggcugcuagcacuu

SEQ ID NO: 211115 - RNA, 22 nt, Homo sapiens
cuaauuuguuuucccuucuuac

SEQ ID NO: 211116 - RNA, 15 nt, Homo sapiens
uaucuucaucuguga

SEQ ID NO: 211117 - RNA, 21 nt, Homo sapiens
guacuauucaaucuuuacaca

SEQ ID NO: 211118 - RNA, 14 nt, Homo sapiens
acacagagugccug

SEQ ID NO: 211119 - RNA, 22 nt, Homo sapiens
ugcaagguacucuggugaguca

SEQ ID NO: 211120 - RNA, 18 nt, Homo sapiens
cugccaauauccuaauaa

SEQ ID NO: 211121 - RNA, 23 nt, Homo sapiens
cccccacugcagacaugacccga

SEQ ID NO: 211122 - RNA, 17 nt, Homo sapiens
uagccgaccucagccuu

SEQ ID NO: 211123 - RNA, 22 nt, Homo sapiens
acuggauccaaacccaucuucc

SEQ ID NO: 211124 - RNA, 15 nt, Homo sapiens
ugacagagagaggca

SEQ ID NO: 211125 - RNA, 19 nt, Homo sapiens
cauggguggcacucagucu

SEQ ID NO: 211126 - RNA, 23 nt, Homo sapiens
caguauuuagaagccaacuauga

SEQ ID NO: 211127 - RNA, 21 nt, Homo sapiens
cuguggcugcuagcacuugga

SEQ ID NO: 211128 - RNA, 15 nt, Homo sapiens
accuugaacacuggg

SEQ ID NO: 211129 - RNA, 13 nt, Homo sapiens
cagcccccugacc

SEQ ID NO: 211130 - RNA, 16 nt, Homo sapiens
ggagcaugagugccgu

SEQ ID NO: 211131 - RNA, 22 nt, Homo sapiens
ucuuaguguaugauuacuggcc

SEQ ID NO: 211132 - RNA, 14 nt, Homo sapiens
uuugacacugcucu

SEQ ID NO: 211133 - RNA, 19 nt, Homo sapiens
agaaacaguugguaacuuu

SEQ ID NO: 211134 - RNA, 14 nt, Homo sapiens
gccuauaucuucau

SEQ ID NO: 211135 - RNA, 14 nt, Homo sapiens
aggcacccuuagcc

SEQ ID NO: 211136 - RNA, 18 nt, Homo sapiens
agagggcccaguggugcc

SEQ ID NO: 211137 - RNA, 14 nt, Homo sapiens
accaccccccaugc

SEQ ID NO: 211138 - RNA, 18 nt, Homo sapiens
cuagcaaaauuacuacca

SEQ ID NO: 211139 - RNA, 15 nt, Homo sapiens
aaaaacguauugcau

SEQ ID NO: 211140 - RNA, 15 nt, Homo sapiens
aauacauucacccag

SEQ ID NO: 211141 - RNA, 17 nt, Homo sapiens
ccucggugggcauucac

SEQ ID NO: 211142 - RNA, 19 nt, Homo sapiens
agggauuuucagcccucag

SEQ ID NO: 211143 - RNA, 20 nt, Homo sapiens
ggaggcacccuuagccacuu

SEQ ID NO: 211144 - RNA, 19 nt, Homo sapiens
auguaucucaguaccccau

SEQ ID NO: 211145 - RNA, 16 nt, Homo sapiens
guaaagcuuugugcag

SEQ ID NO: 211146 - RNA, 17 nt, Homo sapiens
caguaugaaaaugucau

SEQ ID NO: 211147 - RNA, 15 nt, Homo sapiens
aagcauaaugacaga

SEQ ID NO: 211148 - RNA, 16 nt, Homo sapiens
cauuuuugaaaccaaa

SEQ ID NO: 211149 - RNA, 12 nt, Homo sapiens
accucauuauca

SEQ ID NO: 211150 - RNA, 22 nt, Homo sapiens
aaaucagaagucaucuugcuac

SEQ ID NO: 211151 - RNA, 17 nt, Homo sapiens
aggcagauuucagggaa

SEQ ID NO: 211152 - RNA, 17 nt, Homo sapiens
ccccauaaucacugacc

SEQ ID NO: 211153 - RNA, 21 nt, Homo sapiens
gacagagccccacccucagau

SEQ ID NO: 211154 - RNA, 21 nt, Homo sapiens
aaccagagccugaguguugcc

SEQ ID NO: 211155 - RNA, 19 nt, Homo sapiens
agcccuccucugcacuccc

SEQ ID NO: 211156 - RNA, 19 nt, Homo sapiens
aaauguuguuuuaggaaua

SEQ ID NO: 211157 - RNA, 21 nt, Homo sapiens
acugacauguacgauucacuc

SEQ ID NO: 211158 - RNA, 22 nt, Homo sapiens
aaaauaaauauaucuaccccag

SEQ ID NO: 211159 - RNA, 23 nt, Homo sapiens
aaaucuuuuaauacaguuuauua

SEQ ID NO: 211160 - RNA, 23 nt, Homo sapiens
uaaaaaaaaaacguauugcauuu

SEQ ID NO: 211161 - RNA, 15 nt, Homo sapiens
aggcagccacuccua

SEQ ID NO: 211162 - RNA, 17 nt, Homo sapiens
uggcauaaccugucuca

SEQ ID NO: 211163 - RNA, 23 nt, Homo sapiens
uugcauuuaauuuauugaggcuu

SEQ ID NO: 211164 - RNA, 14 nt, Homo sapiens
ugcugaacaucaca

SEQ ID NO: 211165 - RNA, 20 nt, Homo sapiens
guuaauuuuuccaacuacua

SEQ ID NO: 211166 - RNA, 20 nt, Homo sapiens
acuguggcugcuagcacuug

SEQ ID NO: 211167 - RNA, 17 nt, Homo sapiens
uguggcugcuagcacuu

SEQ ID NO: 211168 - RNA, 22 nt, Homo sapiens
aaaugucauuguucuugugaac

SEQ ID NO: 211169 - RNA, 16 nt, Homo sapiens
cagauggcagcaguga

SEQ ID NO: 211170 - RNA, 23 nt, Homo sapiens
aacccaaagugugacucauuaaa

SEQ ID NO: 211171 - RNA, 22 nt, Homo sapiens
ccaacccgucuggcccaccagg

SEQ ID NO: 211172 - RNA, 12 nt, Homo sapiens
agaaacugacac

SEQ ID NO: 211173 - RNA, 21 nt, Homo sapiens
aguuccuucacuuacagaugg

SEQ ID NO: 211174 - RNA, 22 nt, Homo sapiens
aggcuccacuuggucugugaga

SEQ ID NO: 211175 - RNA, 20 nt, Homo sapiens
uuuuauaaugucccuucaca

SEQ ID NO: 211176 - RNA, 13 nt, Homo sapiens
uaucaguccaaag

SEQ ID NO: 211177 - RNA, 17 nt, Homo sapiens
auucucuggcacucuga

SEQ ID NO: 211178 - RNA, 18 nt, Homo sapiens
ccccuugccagacaugug

SEQ ID NO: 211179 - RNA, 17 nt, Homo sapiens
gcaaagaugaucaguau

SEQ ID NO: 211180 - RNA, 21 nt, Homo sapiens
gcucaguagucagacuggaua

SEQ ID NO: 211181 - RNA, 13 nt, Homo sapiens
aacaaaucugcac

SEQ ID NO: 211182 - RNA, 20 nt, Homo sapiens
gacuguggcugcuagcacuu

SEQ ID NO: 211183 - RNA, 11 nt, Homo sapiens
gggcccugacu

SEQ ID NO: 211184 - RNA, 14 nt, Homo sapiens
ggugggacagggac

SEQ ID NO: 211185 - RNA, 14 nt, Homo sapiens
uuuuccaacuacua

SEQ ID NO: 211186 - RNA, 20 nt, Homo sapiens
cuccagcuagcaaaauuacu

SEQ ID NO: 211187 - RNA, 17 nt, Homo sapiens
ggcauagcucuggggug

SEQ ID NO: 211188 - RNA, 19 nt, Homo sapiens
acugccugcccagugccau

SEQ ID NO: 211189 - RNA, 19 nt, Homo sapiens
uucugcuaccucacugggg

SEQ ID NO: 211190 - RNA, 16 nt, Homo sapiens
cuucaucugugaaaug

SEQ ID NO: 211191 - RNA, 21 nt, Homo sapiens
gaauuaggcuguaacuacuuu

SEQ ID NO: 211192 - RNA, 17 nt, Homo sapiens
cagcccccugaccugga

SEQ ID NO: 211193 - RNA, 14 nt, Homo sapiens
auaguccgucucug

SEQ ID NO: 211194 - RNA, 20 nt, Homo sapiens
uuucuccucacuguauccag

SEQ ID NO: 211195 - RNA, 23 nt, Homo sapiens
guggugccccagcacgguggugc

SEQ ID NO: 211196 - RNA, 12 nt, Homo sapiens
aaaaaaacguau

SEQ ID NO: 211197 - RNA, 13 nt, Homo sapiens
auuguuuacccaa

SEQ ID NO: 211198 - RNA, 16 nt, Homo sapiens
ccugccuccugguccc

SEQ ID NO: 211199 - RNA, 17 nt, Homo sapiens
auuuccuaauacuguca

SEQ ID NO: 211200 - RNA, 21 nt, Homo sapiens
acaaaucugcaccccacuuca

SEQ ID NO: 211201 - RNA, 15 nt, Homo sapiens
acugcaccccaggca

SEQ ID NO: 211202 - RNA, 22 nt, Homo sapiens
accaggguccuuuugacacugc

SEQ ID NO: 211203 - RNA, 18 nt, Homo sapiens
cagggcucagccuggugg

SEQ ID NO: 211204 - RNA, 14 nt, Homo sapiens
uuggaagauggcau

SEQ ID NO: 211205 - RNA, 16 nt, Homo sapiens
ccauuuuugaaaccaa

SEQ ID NO: 211206 - RNA, 21 nt, Homo sapiens
gagcucgguggacccagggau

SEQ ID NO: 211207 - RNA, 12 nt, Homo sapiens
augcauucugag

SEQ ID NO: 211208 - RNA, 16 nt, Homo sapiens
gaugggcccugacucu

SEQ ID NO: 211209 - RNA, 21 nt, Homo sapiens
cagugggugccccccuugcca

SEQ ID NO: 211210 - RNA, 15 nt, Homo sapiens
acuuggucugugaga

SEQ ID NO: 211211 - RNA, 18 nt, Homo sapiens
acucagucucucuucucu

SEQ ID NO: 211212 - RNA, 16 nt, Homo sapiens
accuugaacacugggg

SEQ ID NO: 211213 - RNA, 15 nt, Homo sapiens
ucuuaguguaugauu

SEQ ID NO: 211214 - RNA, 20 nt, Homo sapiens
aacagauuuuguuggcauag

SEQ ID NO: 211215 - RNA, 15 nt, Homo sapiens
acucauuucuagcag

SEQ ID NO: 211216 - RNA, 21 nt, Homo sapiens
gccuccucuguccagggcccu

SEQ ID NO: 211217 - RNA, 22 nt, Homo sapiens
gaugcugucuucguacugggaa

SEQ ID NO: 211218 - RNA, 19 nt, Homo sapiens
accagagccguuacuacac

SEQ ID NO: 211219 - RNA, 18 nt, Homo sapiens
cagcucuccccuucucug

SEQ ID NO: 211220 - RNA, 17 nt, Homo sapiens
acgugcacgcacacugu

SEQ ID NO: 211221 - RNA, 21 nt, Homo sapiens
gauuacaaaucagaagucauc

SEQ ID NO: 211222 - RNA, 22 nt, Homo sapiens
aauuccuuagcuuagaccucag

SEQ ID NO: 211223 - RNA, 13 nt, Homo sapiens
agagcuggaggca

SEQ ID NO: 211224 - RNA, 17 nt, Homo sapiens
cccagacuagauguagu

SEQ ID NO: 211225 - RNA, 20 nt, Homo sapiens
ugcccagggcucagccuggu

SEQ ID NO: 211226 - RNA, 13 nt, Homo sapiens
acacagagugccu

SEQ ID NO: 211227 - RNA, 20 nt, Homo sapiens
aauggcaaagacuggaucca

SEQ ID NO: 211228 - RNA, 20 nt, Homo sapiens
gugccacacaccuugacaaa

SEQ ID NO: 211229 - RNA, 18 nt, Homo sapiens
ucugcuaccucacugggg

SEQ ID NO: 211230 - RNA, 12 nt, Homo sapiens
accuugacaaaa

SEQ ID NO: 211231 - RNA, 21 nt, Homo sapiens
uauguacuauucaaucuuuac

SEQ ID NO: 211232 - RNA, 15 nt, Homo sapiens
uuauaguuacugugu

SEQ ID NO: 211233 - RNA, 15 nt, Homo sapiens
uugaaaaugggcuca

SEQ ID NO: 211234 - RNA, 23 nt, Homo sapiens
cguaacagauuuuguuggcauag

SEQ ID NO: 211235 - RNA, 20 nt, Homo sapiens
cagcagccagcucucagcca

SEQ ID NO: 211236 - RNA, 19 nt, Homo sapiens
uacauaaaguaugugcaua

SEQ ID NO: 211237 - RNA, 19 nt, Homo sapiens
auugaccgagcacauacca

SEQ ID NO: 211238 - RNA, 15 nt, Homo sapiens
uugacacugcucuaa

SEQ ID NO: 211239 - RNA, 20 nt, Homo sapiens
acagccgcuccugucugcca

SEQ ID NO: 211240 - RNA, 17 nt, Homo sapiens
auguacgauucacuccu

SEQ ID NO: 211241 - RNA, 23 nt, Homo sapiens
agguccuggcaaagaugaucagu

SEQ ID NO: 211242 - RNA, 19 nt, Homo sapiens
cccuucuuacaaugcauuc

SEQ ID NO: 211243 - RNA, 17 nt, Homo sapiens
uaaagguccuggcaaag

SEQ ID NO: 211244 - RNA, 23 nt, Homo sapiens
augggacagggaggacgcucucu

SEQ ID NO: 211245 - RNA, 14 nt, Homo sapiens
acuaugauuauuaa

SEQ ID NO: 211246 - RNA, 17 nt, Homo sapiens
ggcacaguacccgguga

SEQ ID NO: 211247 - RNA, 16 nt, Homo sapiens
agcucaggcacacuuc

SEQ ID NO: 211248 - RNA, 23 nt, Homo sapiens
aguuacaguucugugguuucaug

SEQ ID NO: 211249 - RNA, 20 nt, Homo sapiens
caggaagcugugagagcagu

SEQ ID NO: 211250 - RNA, 16 nt, Homo sapiens
ugagccuauaucuuca

SEQ ID NO: 211251 - RNA, 18 nt, Homo sapiens
gauccaaacccaucuucc

SEQ ID NO: 211252 - RNA, 16 nt, Homo sapiens
agccaccaguucucau

SEQ ID NO: 211253 - RNA, 9 nt, Homo sapiens
cuaccccag

SEQ ID NO: 211254 - RNA, 14 nt, Homo sapiens
ugccagacaugugg

SEQ ID NO: 211255 - RNA, 23 nt, Homo sapiens
uaaacuuuuuuucuguaccaguu

SEQ ID NO: 211256 - RNA, 22 nt, Homo sapiens
aaauguuuugaguguuauuuca

SEQ ID NO: 211257 - RNA, 16 nt, Homo sapiens
aauauaucuaccccag

SEQ ID NO: 211258 - RNA, 18 nt, Homo sapiens
auagaauaaaggcaguuu

SEQ ID NO: 211259 - RNA, 18 nt, Homo sapiens
uaaaauuaacaugugcca

SEQ ID NO: 211260 - RNA, 18 nt, Homo sapiens
cauccccaggauccacuu

SEQ ID NO: 211261 - RNA, 14 nt, Homo sapiens
caaagaaaguguau

SEQ ID NO: 211262 - RNA, 21 nt, Homo sapiens
acaggcaacugaggcagacag

SEQ ID NO: 211263 - RNA, 22 nt, Homo sapiens
gggcacaguacccggugacucu

SEQ ID NO: 211264 - RNA, 18 nt, Homo sapiens
aaucugcaccccacuuca

SEQ ID NO: 211265 - RNA, 14 nt, Homo sapiens
aggaauugguuuca

SEQ ID NO: 211266 - RNA, 22 nt, Homo sapiens
ucaaagaaaguguauugguuua

SEQ ID NO: 211267 - RNA, 13 nt, Homo sapiens
gaugcugucuucg

SEQ ID NO: 211268 - RNA, 20 nt, Homo sapiens
caaucuuuacacaaugucac

SEQ ID NO: 211269 - RNA, 14 nt, Homo sapiens
gccauauuaccccu

SEQ ID NO: 211270 - RNA, 14 nt, Homo sapiens
cuggaggcacccuu

SEQ ID NO: 211271 - RNA, 18 nt, Homo sapiens
acaaaggcuauugaccga

SEQ ID NO: 211272 - RNA, 22 nt, Homo sapiens
ggcacucugaggucucuguggc

SEQ ID NO: 211273 - RNA, 18 nt, Homo sapiens
gaugcacaugagcuggcg

SEQ ID NO: 211274 - RNA, 13 nt, Homo sapiens
auaaucacugacc

SEQ ID NO: 211275 - RNA, 19 nt, Homo sapiens
uggcagaguuacaguucug

SEQ ID NO: 211276 - RNA, 17 nt, Homo sapiens
ucucuccagcugacuaa

SEQ ID NO: 211277 - RNA, 14 nt, Homo sapiens
aauacauucaccca

SEQ ID NO: 211278 - RNA, 19 nt, Homo sapiens
gguuucauguuaguuaccu

SEQ ID NO: 211279 - RNA, 19 nt, Homo sapiens
agaggagccaccaguucuc

SEQ ID NO: 211280 - RNA, 15 nt, Homo sapiens
ugacacugcucuaac

SEQ ID NO: 211281 - RNA, 18 nt, Homo sapiens
ugugaacccaaaguguga

SEQ ID NO: 211282 - RNA, 15 nt, Homo sapiens
agcacuaaagcagug

SEQ ID NO: 211283 - RNA, 14 nt, Homo sapiens
gaguuuggccagaa

SEQ ID NO: 211284 - RNA, 20 nt, Homo sapiens
cagccaccccaccccugagc

SEQ ID NO: 211285 - RNA, 13 nt, Homo sapiens
agcacacuguagc

SEQ ID NO: 211286 - RNA, 21 nt, Homo sapiens
ucauuaaaauuaacaugugcc

SEQ ID NO: 211287 - RNA, 14 nt, Homo sapiens
gaaggaugcugucu

SEQ ID NO: 211288 - RNA, 15 nt, Homo sapiens
uaaaguaugugcaua

SEQ ID NO: 211289 - RNA, 23 nt, Homo sapiens
gagacucagggccccagcacuaa

SEQ ID NO: 211290 - RNA, 16 nt, Homo sapiens
ccaucccagcacugca

SEQ ID NO: 211291 - RNA, 19 nt, Homo sapiens
cuccacuuggucugugaga

SEQ ID NO: 211292 - RNA, 17 nt, Homo sapiens
guacagaauucugcuac

SEQ ID NO: 211293 - RNA, 22 nt, Homo sapiens
cuuuucuccucacuguauccag

SEQ ID NO: 211294 - RNA, 18 nt, Homo sapiens
guucccggguagccacug

SEQ ID NO: 211295 - RNA, 24 nt, Homo sapiens
gacacaugcugaacaucacagcuu

SEQ ID NO: 211296 - RNA, 19 nt, Homo sapiens
ugacccgaguaacuuucug

SEQ ID NO: 211297 - RNA, 24 nt, Homo sapiens
ccagcacugcaccccaggcagcca

SEQ ID NO: 211298 - RNA, 14 nt, Homo sapiens
auuugcagagacag

SEQ ID NO: 211299 - RNA, 14 nt, Homo sapiens
agcaugagugccgu

SEQ ID NO: 211300 - RNA, 21 nt, Homo sapiens
cagaggagccaccaguucuca

SEQ ID NO: 211301 - RNA, 19 nt, Homo sapiens
cccuuucaacagaauucac

SEQ ID NO: 211302 - RNA, 23 nt, Homo sapiens
acccaguguuuuaggagcaugag

SEQ ID NO: 211303 - RNA, 20 nt, Homo sapiens
uccuuagcuuagaccucagc

SEQ ID NO: 211304 - RNA, 14 nt, Homo sapiens
guccuuuugacacu

SEQ ID NO: 211305 - RNA, 16 nt, Homo sapiens
aguuuauuauguacua

SEQ ID NO: 211306 - RNA, 19 nt, Homo sapiens
caggcucuccaggugguca

SEQ ID NO: 211307 - RNA, 15 nt, Homo sapiens
aaugucacgggacca

SEQ ID NO: 211308 - RNA, 15 nt, Homo sapiens
ugcccagggcucagc

SEQ ID NO: 211309 - RNA, 15 nt, Homo sapiens
ggcccugagcucggu

SEQ ID NO: 211310 - RNA, 21 nt, Homo sapiens
aaacuaccagcccuacaccau

SEQ ID NO: 211311 - RNA, 13 nt, Homo sapiens
gcuuagaccucag

SEQ ID NO: 211312 - RNA, 17 nt, Homo sapiens
cugagcucgguggaccc

SEQ ID NO: 211313 - RNA, 14 nt, Homo sapiens
gcccacugccugcc

SEQ ID NO: 211314 - RNA, 16 nt, Homo sapiens
aaagcuuugugcagau

SEQ ID NO: 211315 - RNA, 14 nt, Homo sapiens
uucauuuaucuaua

SEQ ID NO: 211316 - RNA, 18 nt, Homo sapiens
ggaagcugugagagcagu

SEQ ID NO: 211317 - RNA, 13 nt, Homo sapiens
augaaaaugucau

SEQ ID NO: 211318 - RNA, 21 nt, Homo sapiens
cugacuauugaaguugcagau

SEQ ID NO: 211319 - RNA, 17 nt, Homo sapiens
uccccauaaucacugac

SEQ ID NO: 211320 - RNA, 14 nt, Homo sapiens
agggacccacuuca

SEQ ID NO: 211321 - RNA, 16 nt, Homo sapiens
ugcuaccucacugggg

SEQ ID NO: 211322 - RNA, 18 nt, Homo sapiens
uugugaauuaggcuguaa

SEQ ID NO: 211323 - RNA, 12 nt, Homo sapiens
caaucuuuacac

SEQ ID NO: 211324 - RNA, 20 nt, Homo sapiens
aaguucaugcagcuguggca

SEQ ID NO: 211325 - RNA, 15 nt, Homo sapiens
cuguggcagaguuac

SEQ ID NO: 211326 - RNA, 15 nt, Homo sapiens
aagucaucuugcuac

SEQ ID NO: 211327 - RNA, 15 nt, Homo sapiens
ugcacucccaccuga

SEQ ID NO: 211328 - RNA, 21 nt, Homo sapiens
cagauuucagggaagcccuga

SEQ ID NO: 211329 - RNA, 11 nt, Homo sapiens
aacccaaagug

SEQ ID NO: 211330 - RNA, 17 nt, Homo sapiens
cuagaaacugacacaug

SEQ ID NO: 211331 - RNA, 14 nt, Homo sapiens
ggaagauggcauaa

SEQ ID NO: 211332 - RNA, 21 nt, Homo sapiens
aguucucauggguggcacuca

SEQ ID NO: 211333 - RNA, 19 nt, Homo sapiens
aggaauuucuuaacuucuu

SEQ ID NO: 211334 - RNA, 19 nt, Homo sapiens
cuuuaaaacuuauccucca

SEQ ID NO: 211335 - RNA, 21 nt, Homo sapiens
aagcccaaguucaugcagcug

SEQ ID NO: 211336 - RNA, 16 nt, Homo sapiens
caugaauaucaguuau

SEQ ID NO: 211337 - RNA, 21 nt, Homo sapiens
aguguuauuucagagagcaaa

SEQ ID NO: 211338 - RNA, 17 nt, Homo sapiens
ucauuaucaguccaaag

SEQ ID NO: 211339 - RNA, 14 nt, Homo sapiens
gcacacugucugcc

SEQ ID NO: 211340 - RNA, 23 nt, Homo sapiens
ucagaccucggugggcauucaca

SEQ ID NO: 211341 - RNA, 18 nt, Homo sapiens
ggccuucggccuccaucc

SEQ ID NO: 211342 - RNA, 15 nt, Homo sapiens
ggaggacgcucucug

SEQ ID NO: 211343 - RNA, 15 nt, Homo sapiens
uacauucacccagau

SEQ ID NO: 211344 - RNA, 12 nt, Homo sapiens
aaucacugacca

SEQ ID NO: 211345 - RNA, 20 nt, Homo sapiens
aaggcuuagacccucaugcu

SEQ ID NO: 211346 - RNA, 19 nt, Homo sapiens
uauuaucugucagcugcaa

SEQ ID NO: 211347 - RNA, 16 nt, Homo sapiens
uuccuagaaacugaca

SEQ ID NO: 211348 - RNA, 23 nt, Homo sapiens
ucauuccccugaugggcccugac

SEQ ID NO: 211349 - RNA, 15 nt, Homo sapiens
agggauuuucagccc

SEQ ID NO: 211350 - RNA, 21 nt, Homo sapiens
cagcacgguggugcccaagcc

SEQ ID NO: 211351 - RNA, 16 nt, Homo sapiens
uuuugaaaaugggcuc

SEQ ID NO: 211352 - RNA, 10 nt, Homo sapiens
ucuaccccag

SEQ ID NO: 211353 - RNA, 13 nt, Homo sapiens
gccccauguaucu

SEQ ID NO: 211354 - RNA, 17 nt, Homo sapiens
uauaaggacacugaagc

SEQ ID NO: 211355 - RNA, 12 nt, Homo sapiens
aucccagcacug

SEQ ID NO: 211356 - RNA, 12 nt, Homo sapiens
cuguaccaguua

SEQ ID NO: 211357 - RNA, 18 nt, Homo sapiens
agccagcagccagcucuc

SEQ ID NO: 211358 - RNA, 15 nt, Homo sapiens
ucaucuugcuaccag

SEQ ID NO: 211359 - RNA, 12 nt, Homo sapiens
caccuugacaaa

SEQ ID NO: 211360 - RNA, 18 nt, Homo sapiens
acaugcugaacaucacag

SEQ ID NO: 211361 - RNA, 15 nt, Homo sapiens
gcuccugucugccag

SEQ ID NO: 211362 - RNA, 21 nt, Homo sapiens
gauccugucuggccuucaguu

SEQ ID NO: 211363 - RNA, 13 nt, Homo sapiens
uguacgauucacu

SEQ ID NO: 211364 - RNA, 22 nt, Homo sapiens
cuccagcuagcaaaauuacuac

SEQ ID NO: 211365 - RNA, 17 nt, Homo sapiens
aucuuuacacaauguca

SEQ ID NO: 211366 - RNA, 13 nt, Homo sapiens
caguucugugguu

SEQ ID NO: 211367 - RNA, 13 nt, Homo sapiens
cauuaucagucca

SEQ ID NO: 211368 - RNA, 15 nt, Homo sapiens
aucccagcacugcac

SEQ ID NO: 211369 - RNA, 18 nt, Homo sapiens
aacuucuugcuucuuucu

SEQ ID NO: 211370 - RNA, 20 nt, Homo sapiens
cugguccaguuccuucacuu

SEQ ID NO: 211371 - RNA, 15 nt, Homo sapiens
acaucacagcuuauu

SEQ ID NO: 211372 - RNA, 15 nt, Homo sapiens
gcacaguacccggug

SEQ ID NO: 211373 - RNA, 13 nt, Homo sapiens
gagccaaggguuc

SEQ ID NO: 211374 - RNA, 21 nt, Homo sapiens
uucagccuagccgaccucagc

SEQ ID NO: 211375 - RNA, 20 nt, Homo sapiens
aaugacagagagaggcagau

SEQ ID NO: 211376 - RNA, 19 nt, Homo sapiens
caccuugacaaaaucuuuu

SEQ ID NO: 211377 - RNA, 17 nt, Homo sapiens
ggucagagggcccagug

SEQ ID NO: 211378 - RNA, 17 nt, Homo sapiens
cugccuauuaucuguca

SEQ ID NO: 211379 - RNA, 16 nt, Homo sapiens
ugugaacccaaagugu

SEQ ID NO: 211380 - RNA, 15 nt, Homo sapiens
aaucuuuacacaaug

SEQ ID NO: 211381 - RNA, 23 nt, Homo sapiens
auuuagaagccaacuaugauuau

SEQ ID NO: 211382 - RNA, 21 nt, Homo sapiens
gcuccacuuggucugugagau

SEQ ID NO: 211383 - RNA, 18 nt, Homo sapiens
ucuggcucuaauucacag

SEQ ID NO: 211384 - RNA, 18 nt, Homo sapiens
gcuccacuuggucuguga

SEQ ID NO: 211385 - RNA, 15 nt, Homo sapiens
gucuggcccaccagg

SEQ ID NO: 211386 - RNA, 21 nt, Homo sapiens
auuacuggccuuuuucauuua

SEQ ID NO: 211387 - RNA, 17 nt, Homo sapiens
gagggcccaguggugcc

SEQ ID NO: 211388 - RNA, 21 nt, Homo sapiens
ucuuccccauaaucacugacc

SEQ ID NO: 211389 - RNA, 23 nt, Homo sapiens
ucacaauuauuaccaucucucca

SEQ ID NO: 211390 - RNA, 12 nt, Homo sapiens
ugggcauucaca

SEQ ID NO: 211391 - RNA, 23 nt, Homo sapiens
uuuucggccccauguaucucagu

SEQ ID NO: 211392 - RNA, 18 nt, Homo sapiens
aguucaugcucccagcca

SEQ ID NO: 211393 - RNA, 22 nt, Homo sapiens
ccuggugggccuccucugucca

SEQ ID NO: 211394 - RNA, 17 nt, Homo sapiens
cuuuuuuucuguaccag

SEQ ID NO: 211395 - RNA, 12 nt, Homo sapiens
uucggccuccau

SEQ ID NO: 211396 - RNA, 18 nt, Homo sapiens
gagccuauaucuucaucu

SEQ ID NO: 211397 - RNA, 21 nt, Homo sapiens
aacucccuuucaacagaauuc

SEQ ID NO: 211398 - RNA, 21 nt, Homo sapiens
aacccaucuuccuggaccuga

SEQ ID NO: 211399 - RNA, 18 nt, Homo sapiens
aauuauuaccaucucucc

SEQ ID NO: 211400 - RNA, 19 nt, Homo sapiens
agagcacacuguagcauua

SEQ ID NO: 211401 - RNA, 11 nt, Homo sapiens
cagcacugcac

SEQ ID NO: 211402 - RNA, 14 nt, Homo sapiens
gcuguaacuacuuu

SEQ ID NO: 211403 - RNA, 14 nt, Homo sapiens
uagagcacacugua

SEQ ID NO: 211404 - RNA, 15 nt, Homo sapiens
uucagcccucagaau

SEQ ID NO: 211405 - RNA, 13 nt, Homo sapiens
ugaacacuggggg

SEQ ID NO: 211406 - RNA, 19 nt, Homo sapiens
cuuugugcagauucuuuac

SEQ ID NO: 211407 - RNA, 15 nt, Homo sapiens
guagucagacuggau

SEQ ID NO: 211408 - RNA, 16 nt, Homo sapiens
caucuugcuaccagua

SEQ ID NO: 211409 - RNA, 22 nt, Homo sapiens
auagcucuggggugggcaguuu

SEQ ID NO: 211410 - RNA, 21 nt, Homo sapiens
cagcacuaaagcaguggacac

SEQ ID NO: 211411 - RNA, 21 nt, Homo sapiens
acuuacagauggcagcaguga

SEQ ID NO: 211412 - RNA, 22 nt, Homo sapiens
agccuauaucuucaucugugaa

SEQ ID NO: 211413 - RNA, 17 nt, Homo sapiens
aguguaugauuacuggc

SEQ ID NO: 211414 - RNA, 16 nt, Homo sapiens
ccugugacugacaugu

SEQ ID NO: 211415 - RNA, 10 nt, Homo sapiens
aguaccccau

SEQ ID NO: 211416 - RNA, 21 nt, Homo sapiens
uggaaauaaagucagauggaa

SEQ ID NO: 211417 - RNA, 13 nt, Homo sapiens
ccaccaguucuca

SEQ ID NO: 211418 - RNA, 19 nt, Homo sapiens
gagcacauaccaugugcca

SEQ ID NO: 211419 - RNA, 19 nt, Homo sapiens
cacaauuauuaccaucucu

SEQ ID NO: 211420 - RNA, 15 nt, Homo sapiens
guuugguuucuagca

SEQ ID NO: 211421 - RNA, 24 nt, Homo sapiens
ccugugacugacauguacgauuca

SEQ ID NO: 211422 - RNA, 23 nt, Homo sapiens
gaaagcaucauuauuugcagaga

SEQ ID NO: 211423 - RNA, 22 nt, Homo sapiens
ggucuuaggaugugucuugggg

SEQ ID NO: 211424 - RNA, 22 nt, Homo sapiens
aauguuguuuuaggaauacaua

SEQ ID NO: 211425 - RNA, 17 nt, Homo sapiens
cugaggcagacagcagc

SEQ ID NO: 211426 - RNA, 16 nt, Homo sapiens
uguguaauuagugcca

SEQ ID NO: 211427 - RNA, 15 nt, Homo sapiens
gugagucaccacuuc

SEQ ID NO: 211428 - RNA, 18 nt, Homo sapiens
gcuguggcagaguuacag

SEQ ID NO: 211429 - RNA, 15 nt, Homo sapiens
agauggcagcaguga

SEQ ID NO: 211430 - RNA, 14 nt, Homo sapiens
ucaaagaaagugua

SEQ ID NO: 211431 - RNA, 13 nt, Homo sapiens
uugaaaaugggcu

SEQ ID NO: 211432 - RNA, 14 nt, Homo sapiens
auucacagugcucu

SEQ ID NO: 211433 - RNA, 22 nt, Homo sapiens
gaggcuccacuuggucugugag

SEQ ID NO: 211434 - RNA, 19 nt, Homo sapiens
gaacaaguuguuucauuga

SEQ ID NO: 211435 - RNA, 16 nt, Homo sapiens
cacauaccaugugcca

SEQ ID NO: 211436 - RNA, 23 nt, Homo sapiens
accaugugccacacaccuugaca

SEQ ID NO: 211437 - RNA, 12 nt, Homo sapiens
uaauacauucac

SEQ ID NO: 211438 - RNA, 17 nt, Homo sapiens
aggcagccacuccuagc

SEQ ID NO: 211439 - RNA, 22 nt, Homo sapiens
gagcccugucuccucucucugu

SEQ ID NO: 211440 - RNA, 19 nt, Homo sapiens
cagaggagccaccaguucu

SEQ ID NO: 211441 - RNA, 21 nt, Homo sapiens
acuauucaaucuuuacacaau

SEQ ID NO: 211442 - RNA, 17 nt, Homo sapiens
aaauguuuugaguguua

SEQ ID NO: 211443 - RNA, 18 nt, Homo sapiens
agcaguaccggccaagca

SEQ ID NO: 211444 - RNA, 15 nt, Homo sapiens
uuuauuaaucuuagu

SEQ ID NO: 211445 - RNA, 13 nt, Homo sapiens
ggccauauuaccc

SEQ ID NO: 211446 - RNA, 19 nt, Homo sapiens
guuuauuauguacuauuca

SEQ ID NO: 211447 - RNA, 19 nt, Homo sapiens
gacucagggccccagcacu

SEQ ID NO: 211448 - RNA, 12 nt, Homo sapiens
ucauuucuagca

SEQ ID NO: 211449 - RNA, 15 nt, Homo sapiens
ucagggaagcccuga

SEQ ID NO: 211450 - RNA, 18 nt, Homo sapiens
ggguggcacucagucucu

SEQ ID NO: 211451 - RNA, 15 nt, Homo sapiens
gaaacugacacaugc

SEQ ID NO: 211452 - RNA, 14 nt, Homo sapiens
cgauccccugucac

SEQ ID NO: 211453 - RNA, 19 nt, Homo sapiens
uacaaugcauucugaggua

SEQ ID NO: 211454 - RNA, 21 nt, Homo sapiens
gucagagggcccaguggugcc

SEQ ID NO: 211455 - RNA, 23 nt, Homo sapiens
gucuucagccuagccgaccucag

SEQ ID NO: 211456 - RNA, 14 nt, Homo sapiens
ucacacagagugcc

SEQ ID NO: 211457 - RNA, 20 nt, Homo sapiens
ugcauauuuuauuauaguca

SEQ ID NO: 211458 - RNA, 23 nt, Homo sapiens
gccuucaguuuccauccccagga

SEQ ID NO: 211459 - RNA, 19 nt, Homo sapiens
aucugcaccccacuucaga

SEQ ID NO: 211460 - RNA, 15 nt, Homo sapiens
aauuaggcuguaacu

SEQ ID NO: 211461 - RNA, 14 nt, Homo sapiens
aaagguccuggcaa

SEQ ID NO: 211462 - RNA, 15 nt, Homo sapiens
ugugggaaauccaca

SEQ ID NO: 211463 - RNA, 22 nt, Homo sapiens
guaauaaacucauuucuagcag

SEQ ID NO: 211464 - RNA, 12 nt, Homo sapiens
caacccugugac

SEQ ID NO: 211465 - RNA, 15 nt, Homo sapiens
cuaaggacacagugg

SEQ ID NO: 211466 - RNA, 18 nt, Homo sapiens
auaaaggcaguuuucuaa

SEQ ID NO: 211467 - RNA, 24 nt, Homo sapiens
uaucuucaucugugaaauggggau

SEQ ID NO: 211468 - RNA, 14 nt, Homo sapiens
ccccaucuggucca

SEQ ID NO: 211469 - RNA, 13 nt, Homo sapiens
cucagaugcacau

SEQ ID NO: 211470 - RNA, 21 nt, Homo sapiens
auucugagguaaccucauuau

SEQ ID NO: 211471 - RNA, 14 nt, Homo sapiens
aaagcuuugugcag

SEQ ID NO: 211472 - RNA, 11 nt, Homo sapiens
aguuccuucac

SEQ ID NO: 211473 - RNA, 17 nt, Homo sapiens
aaggacacaguggagau

SEQ ID NO: 211474 - RNA, 15 nt, Homo sapiens
cuuuacuccguaaca

SEQ ID NO: 211475 - RNA, 15 nt, Homo sapiens
ugacuguguggagcu

SEQ ID NO: 211476 - RNA, 23 nt, Homo sapiens
gagccuauaucuucaucugugaa

SEQ ID NO: 211477 - RNA, 22 nt, Homo sapiens
ugaggcuuuaaaacuuauccuc

SEQ ID NO: 211478 - RNA, 17 nt, Homo sapiens
gucacacagagugccug

SEQ ID NO: 211479 - RNA, 22 nt, Homo sapiens
gccuauuaucugucagcugcaa

SEQ ID NO: 211480 - RNA, 15 nt, Homo sapiens
uuuccaacuacuaau

SEQ ID NO: 211481 - RNA, 21 nt, Homo sapiens
ggcucuaauucacagugcucu

SEQ ID NO: 211482 - RNA, 17 nt, Homo sapiens
cuuagaggagugaaaug

SEQ ID NO: 211483 - RNA, 14 nt, Homo sapiens
acuucacacacagg

SEQ ID NO: 211484 - RNA, 14 nt, Homo sapiens
uucagcccucagaa

SEQ ID NO: 211485 - RNA, 20 nt, Homo sapiens
uacauaaaguaugugcauau

SEQ ID NO: 211486 - RNA, 21 nt, Homo sapiens
cucuguauuccuagaaacuga

SEQ ID NO: 211487 - RNA, 13 nt, Homo sapiens
agagcacacugua

SEQ ID NO: 211488 - RNA, 17 nt, Homo sapiens
gaauacauaaaguaugu

SEQ ID NO: 211489 - RNA, 22 nt, Homo sapiens
gucucuguggcaggccugguca

SEQ ID NO: 211490 - RNA, 16 nt, Homo sapiens
gccuagccgaccucag

SEQ ID NO: 211491 - RNA, 14 nt, Homo sapiens
caucccagcacugc

SEQ ID NO: 211492 - RNA, 23 nt, Homo sapiens
agcaguuugguuucuagcaugaa

SEQ ID NO: 211493 - RNA, 13 nt, Homo sapiens
ccuccauccugag

SEQ ID NO: 211494 - RNA, 21 nt, Homo sapiens
gccuauaucuucaucugugaa

SEQ ID NO: 211495 - RNA, 15 nt, Homo sapiens
cuugugaacccaaag

SEQ ID NO: 211496 - RNA, 24 nt, Homo sapiens
aauacauaaaguaugugcauauuu

SEQ ID NO: 211497 - RNA, 16 nt, Homo sapiens
agagcuggaggcaccc

SEQ ID NO: 211498 - RNA, 17 nt, Homo sapiens
cccaaagugugacucau

SEQ ID NO: 211499 - RNA, 16 nt, Homo sapiens
ccuucuuacaaugcau

SEQ ID NO: 211500 - RNA, 20 nt, Homo sapiens
gaacacugggggaggggaca

SEQ ID NO: 211501 - RNA, 16 nt, Homo sapiens
cuccacuuggucugug

SEQ ID NO: 211502 - RNA, 23 nt, Homo sapiens
cucauggguggcacucagucucu

SEQ ID NO: 211503 - RNA, 16 nt, Homo sapiens
ccagcacgguggugcc

SEQ ID NO: 211504 - RNA, 18 nt, Homo sapiens
gaagagccccccacugca

SEQ ID NO: 211505 - RNA, 20 nt, Homo sapiens
ucccagaggagccaccaguu

SEQ ID NO: 211506 - RNA, 21 nt, Homo sapiens
accagcccuacaccauuccuu

SEQ ID NO: 211507 - RNA, 16 nt, Homo sapiens
cuccuuugagucuuug

SEQ ID NO: 211508 - RNA, 21 nt, Homo sapiens
auuuaggccaugggacaggga

SEQ ID NO: 211509 - RNA, 14 nt, Homo sapiens
gugugacucauuaa

SEQ ID NO: 211510 - RNA, 21 nt, Homo sapiens
ugcucaguagucagacuggau

SEQ ID NO: 211511 - RNA, 19 nt, Homo sapiens
gcuuuaaaacuuauccucc

SEQ ID NO: 211512 - RNA, 19 nt, Homo sapiens
uccacuuggucugugagau

SEQ ID NO: 211513 - RNA, 19 nt, Homo sapiens
aaagucacacagagugccu

SEQ ID NO: 211514 - RNA, 12 nt, Homo sapiens
uauuuauuuucc

SEQ ID NO: 211515 - RNA, 18 nt, Homo sapiens
auuaggcuguaacuacuu

SEQ ID NO: 211516 - RNA, 18 nt, Homo sapiens
guaccuugaacacugggg

SEQ ID NO: 211517 - RNA, 14 nt, Homo sapiens
gugaauuaggcugu

SEQ ID NO: 211518 - RNA, 16 nt, Homo sapiens
auugaaggaugcuguc

SEQ ID NO: 211519 - RNA, 22 nt, Homo sapiens
agacuguggcugcuagcacuug

SEQ ID NO: 211520 - RNA, 16 nt, Homo sapiens
aacucauuucuagcag

SEQ ID NO: 211521 - RNA, 15 nt, Homo sapiens
gaccagccuugacac

SEQ ID NO: 211522 - RNA, 13 nt, Homo sapiens
gccaccaguucuc

SEQ ID NO: 211523 - RNA, 12 nt, Homo sapiens
cuugccagacau

SEQ ID NO: 211524 - RNA, 13 nt, Homo sapiens
auaaggacacuga

SEQ ID NO: 211525 - RNA, 16 nt, Homo sapiens
agagccccacccucag

SEQ ID NO: 211526 - RNA, 17 nt, Homo sapiens
caguuugguuucuagca

SEQ ID NO: 211527 - RNA, 17 nt, Homo sapiens
acauguacgauucacuc

SEQ ID NO: 211528 - RNA, 21 nt, Homo sapiens
cacacuguagcauuacagugg

SEQ ID NO: 211529 - RNA, 13 nt, Homo sapiens
caucuuccuggac

SEQ ID NO: 211530 - RNA, 19 nt, Homo sapiens
ugugaauuaggcuguaacu

SEQ ID NO: 211531 - RNA, 20 nt, Homo sapiens
cccuuucaacagaauucacu

SEQ ID NO: 211532 - RNA, 22 nt, Homo sapiens
cuucagccuagccgaccucagc

SEQ ID NO: 211533 - RNA, 11 nt, Homo sapiens
aagugcuguuu

SEQ ID NO: 211534 - RNA, 11 nt, Homo sapiens
caaagugugac

SEQ ID NO: 211535 - RNA, 19 nt, Homo sapiens
auuaaucuuaguguaugau

SEQ ID NO: 211536 - RNA, 19 nt, Homo sapiens
uggcaaagaugaucaguau

SEQ ID NO: 211537 - RNA, 14 nt, Homo sapiens
caagcauaaugaca

SEQ ID NO: 211538 - RNA, 16 nt, Homo sapiens
ucggugggcauucaca

SEQ ID NO: 211539 - RNA, 15 nt, Homo sapiens
cucucuucucuccag

SEQ ID NO: 211540 - RNA, 19 nt, Homo sapiens
ggcuuuaaaacuuauccuc

SEQ ID NO: 211541 - RNA, 23 nt, Homo sapiens
ugggguagaaggauccuccaaag

SEQ ID NO: 211542 - RNA, 22 nt, Homo sapiens
gccugaggcaauuagacacuuu

SEQ ID NO: 211543 - RNA, 21 nt, Homo sapiens
uauagaaggguaccuugaaca

SEQ ID NO: 211544 - RNA, 23 nt, Homo sapiens
uuugaaaaugggcucaaccagaa

SEQ ID NO: 211545 - RNA, 19 nt, Homo sapiens
gaccaguauuguuuaccca

SEQ ID NO: 211546 - RNA, 21 nt, Homo sapiens
cauuguucuugugaacccaaa

SEQ ID NO: 211547 - RNA, 16 nt, Homo sapiens
gucuccucucucugua

SEQ ID NO: 211548 - RNA, 13 nt, Homo sapiens
cacuucauucccc

SEQ ID NO: 211549 - RNA, 20 nt, Homo sapiens
accaguauuguuuacccaau

SEQ ID NO: 211550 - RNA, 13 nt, Homo sapiens
aguaugugcauau

SEQ ID NO: 211551 - RNA, 17 nt, Homo sapiens
cgcuaauucaaggaauu

SEQ ID NO: 211552 - RNA, 19 nt, Homo sapiens
accauuuuugaaaccaaac

SEQ ID NO: 211553 - RNA, 14 nt, Homo sapiens
uauaacuaacaugu

SEQ ID NO: 211554 - RNA, 20 nt, Homo sapiens
cauguaucucaguaccccau

SEQ ID NO: 211555 - RNA, 18 nt, Homo sapiens
auuauuaccaucucucca

SEQ ID NO: 211556 - RNA, 12 nt, Homo sapiens
ucuucagccuag

SEQ ID NO: 211557 - RNA, 15 nt, Homo sapiens
cagggacccacuuca

SEQ ID NO: 211558 - RNA, 18 nt, Homo sapiens
accaguuaauuuuuccaa

SEQ ID NO: 211559 - RNA, 18 nt, Homo sapiens
ccaugugccacacaccuu

SEQ ID NO: 211560 - RNA, 23 nt, Homo sapiens
aaacauuuaaauuauacaaucau

SEQ ID NO: 211561 - RNA, 14 nt, Homo sapiens
aagcacagcccuua

SEQ ID NO: 211562 - RNA, 14 nt, Homo sapiens
ucugucagcugcaa

SEQ ID NO: 211563 - RNA, 22 nt, Homo sapiens
cuuuucggccccauguaucuca

SEQ ID NO: 211564 - RNA, 13 nt, Homo sapiens
gccccaauucgau

SEQ ID NO: 211565 - RNA, 19 nt, Homo sapiens
agaaaagcccaaguucaug

SEQ ID NO: 211566 - RNA, 15 nt, Homo sapiens
acagaauucacuugu

SEQ ID NO: 211567 - RNA, 15 nt, Homo sapiens
auacauucacccaga

SEQ ID NO: 211568 - RNA, 18 nt, Homo sapiens
ugugccacacaccuugac

SEQ ID NO: 211569 - RNA, 12 nt, Homo sapiens
uuaucaguccaa

SEQ ID NO: 211570 - RNA, 13 nt, Homo sapiens
acagaauucacuu

SEQ ID NO: 211571 - RNA, 14 nt, Homo sapiens
accaugugccacac

SEQ ID NO: 211572 - RNA, 13 nt, Homo sapiens
cuuccccuugccc

SEQ ID NO: 211573 - RNA, 14 nt, Homo sapiens
agcacgguggugcc

SEQ ID NO: 211574 - RNA, 14 nt, Homo sapiens
caguggacaccagg

SEQ ID NO: 211575 - RNA, 22 nt, Homo sapiens
cuuagacccucaugcugccaau

SEQ ID NO: 211576 - RNA, 13 nt, Homo sapiens
cagcugacuaaac

SEQ ID NO: 211577 - RNA, 16 nt, Homo sapiens
guggcacucagucucu

SEQ ID NO: 211578 - RNA, 20 nt, Homo sapiens
ggauccacuuggucugugag

SEQ ID NO: 211579 - RNA, 20 nt, Homo sapiens
cauuguucuugugaacccaa

SEQ ID NO: 211580 - RNA, 22 nt, Homo sapiens
uuaccccuuuucggccccaugu

SEQ ID NO: 211581 - RNA, 16 nt, Homo sapiens
uaucucaguaccccau

SEQ ID NO: 211582 - RNA, 16 nt, Homo sapiens
agaaacugacacaugc

SEQ ID NO: 211583 - RNA, 19 nt, Homo sapiens
auugaggcuuuaaaacuua

SEQ ID NO: 211584 - RNA, 17 nt, Homo sapiens
uggauccaaacccaucu

SEQ ID NO: 211585 - RNA, 23 nt, Homo sapiens
gccccagcacuaaagcaguggac

SEQ ID NO: 211586 - RNA, 22 nt, Homo sapiens
caggagaggggcagaacagccg

SEQ ID NO: 211587 - RNA, 13 nt, Homo sapiens
uucuguaccaguu

SEQ ID NO: 211588 - RNA, 15 nt, Homo sapiens
uagaaggauccucca

SEQ ID NO: 211589 - RNA, 15 nt, Homo sapiens
cuuuaaaacuuaucc

SEQ ID NO: 211590 - RNA, 21 nt, Homo sapiens
acucuuccccauaaucacuga

SEQ ID NO: 211591 - RNA, 20 nt, Homo sapiens
uuaauuuauugaggcuuuaa

SEQ ID NO: 211592 - RNA, 12 nt, Homo sapiens
aaccugucucac

SEQ ID NO: 211593 - RNA, 21 nt, Homo sapiens
uguuguuuuaggaauacauaa

SEQ ID NO: 211594 - RNA, 23 nt, Homo sapiens
aaggguaccuugaacacuggggg

SEQ ID NO: 211595 - RNA, 19 nt, Homo sapiens
aauuuaccuaagauuacaa

SEQ ID NO: 211596 - RNA, 14 nt, Homo sapiens
agcauuacaguggg

SEQ ID NO: 211597 - RNA, 18 nt, Homo sapiens
uggucagagggcccagug

SEQ ID NO: 211598 - RNA, 18 nt, Homo sapiens
ucugauaaaagauggcca

SEQ ID NO: 211599 - RNA, 20 nt, Homo sapiens
cagcuguggcagaguuacag

SEQ ID NO: 211600 - RNA, 15 nt, Homo sapiens
gccccaauucgaucc

SEQ ID NO: 211601 - RNA, 20 nt, Homo sapiens
uuacccccugggagccccaa

SEQ ID NO: 211602 - RNA, 16 nt, Homo sapiens
aagagccccccacugc

SEQ ID NO: 211603 - RNA, 15 nt, Homo sapiens
cauaaugacagagag

SEQ ID NO: 211604 - RNA, 13 nt, Homo sapiens
ccucucucuguaa

SEQ ID NO: 211605 - RNA, 19 nt, Homo sapiens
ggcccugacucuuccccau

SEQ ID NO: 211606 - RNA, 13 nt, Homo sapiens
uggucugugagau

SEQ ID NO: 211607 - RNA, 15 nt, Homo sapiens
auaaucacugaccag

SEQ ID NO: 211608 - RNA, 13 nt, Homo sapiens
agauggaggccuc

SEQ ID NO: 211609 - RNA, 18 nt, Homo sapiens
cagcuagcaaaauuacua

SEQ ID NO: 211610 - RNA, 18 nt, Homo sapiens
ggccuucaguuuccaucc

SEQ ID NO: 211611 - RNA, 14 nt, Homo sapiens
caguuuccaucccc

SEQ ID NO: 211612 - RNA, 23 nt, Homo sapiens
cuaguuguaauuuuuuuguggga

SEQ ID NO: 211613 - RNA, 13 nt, Homo sapiens
caauuauuaccau

SEQ ID NO: 211614 - RNA, 12 nt, Homo sapiens
aucuuuacacaa

SEQ ID NO: 211615 - RNA, 14 nt, Homo sapiens
acugacacaugcug

SEQ ID NO: 211616 - RNA, 14 nt, Homo sapiens
ugacacaugcugaa

SEQ ID NO: 211617 - RNA, 21 nt, Homo sapiens
aaaauacuuguugcugucaca

SEQ ID NO: 211618 - RNA, 12 nt, Homo sapiens
ugacucuugggg

SEQ ID NO: 211619 - RNA, 20 nt, Homo sapiens
guucucauggguggcacuca

SEQ ID NO: 211620 - RNA, 15 nt, Homo sapiens
auaguuacuguguaa

SEQ ID NO: 211621 - RNA, 22 nt, Homo sapiens
cuaacagcccuccucugcacuc

SEQ ID NO: 211622 - RNA, 20 nt, Homo sapiens
cagacuggauaguccgucuc

SEQ ID NO: 211623 - RNA, 20 nt, Homo sapiens
uuucacgccugaggcaauua

SEQ ID NO: 211624 - RNA, 12 nt, Homo sapiens
acagagugccug

SEQ ID NO: 211625 - RNA, 16 nt, Homo sapiens
caguagucagacugga

SEQ ID NO: 211626 - RNA, 17 nt, Homo sapiens
ccugacucuuccccaua

SEQ ID NO: 211627 - RNA, 13 nt, Homo sapiens
uuaaagaaagugu

SEQ ID NO: 211628 - RNA, 22 nt, Homo sapiens
uauuuagaagccaacuaugauu

SEQ ID NO: 211629 - RNA, 12 nt, Homo sapiens
acacaguggaga

SEQ ID NO: 211630 - RNA, 23 nt, Homo sapiens
agaauucugcuaccucacugggg

SEQ ID NO: 211631 - RNA, 18 nt, Homo sapiens
gcagcucaggcacacuuc

SEQ ID NO: 211632 - RNA, 20 nt, Homo sapiens
ccuuuuauuaauacauucac

SEQ ID NO: 211633 - RNA, 20 nt, Homo sapiens
gacacaugcugaacaucaca

SEQ ID NO: 211634 - RNA, 19 nt, Homo sapiens
gaaacaguugguaacuuuu

SEQ ID NO: 211635 - RNA, 12 nt, Homo sapiens
uggaagauggca

SEQ ID NO: 211636 - RNA, 17 nt, Homo sapiens
gcuauugaccgagcaca

SEQ ID NO: 211637 - RNA, 18 nt, Homo sapiens
gugagaugcuagaacucc

SEQ ID NO: 211638 - RNA, 17 nt, Homo sapiens
uacaguucugugguuuc

SEQ ID NO: 211639 - RNA, 15 nt, Homo sapiens
acagaggaucugcuu

SEQ ID NO: 211640 - RNA, 19 nt, Homo sapiens
gguaauaaguacuguguac

SEQ ID NO: 211641 - RNA, 22 nt, Homo sapiens
auccugucuggccuucaguuuc

SEQ ID NO: 211642 - RNA, 18 nt, Homo sapiens
ugguuucuagcaugaaga

SEQ ID NO: 211643 - RNA, 18 nt, Homo sapiens
cuauucaaucuuuacaca

SEQ ID NO: 211644 - RNA, 21 nt, Homo sapiens
auccuaauaaaaaggugacca

SEQ ID NO: 211645 - RNA, 14 nt, Homo sapiens
cuguggcagaguua

SEQ ID NO: 211646 - RNA, 17 nt, Homo sapiens
aaacguauugcauuuaa

SEQ ID NO: 211647 - RNA, 12 nt, Homo sapiens
agccuggugggc

SEQ ID NO: 211648 - RNA, 13 nt, Homo sapiens
aucaguccaaagg

SEQ ID NO: 211649 - RNA, 11 nt, Homo sapiens
agcacacugua

SEQ ID NO: 211650 - RNA, 14 nt, Homo sapiens
uccuaauacuguca

SEQ ID NO: 211651 - RNA, 15 nt, Homo sapiens
cauaaucacugacca

SEQ ID NO: 211652 - RNA, 12 nt, Homo sapiens
cccuucucugua

SEQ ID NO: 211653 - RNA, 20 nt, Homo sapiens
agcucuggggugggcaguuu

SEQ ID NO: 211654 - RNA, 12 nt, Homo sapiens
agccgaccucag

SEQ ID NO: 211655 - RNA, 16 nt, Homo sapiens
caaaucugcaccccac

SEQ ID NO: 211656 - RNA, 14 nt, Homo sapiens
cuugaacacugggg

SEQ ID NO: 211657 - RNA, 13 nt, Homo sapiens
gugacucuugggg

SEQ ID NO: 211658 - RNA, 21 nt, Homo sapiens
aggauccacuuggucugugag

SEQ ID NO: 211659 - RNA, 16 nt, Homo sapiens
agccuagccgaccuca

SEQ ID NO: 211660 - RNA, 19 nt, Homo sapiens
auauuuuauuauagucacu

SEQ ID NO: 211661 - RNA, 17 nt, Homo sapiens
gcagaguuacaguucug

SEQ ID NO: 211662 - RNA, 22 nt, Homo sapiens
agggaagagccccccacugcag

SEQ ID NO: 211663 - RNA, 16 nt, Homo sapiens
cacaccuugacaaaau

SEQ ID NO: 211664 - RNA, 14 nt, Homo sapiens
ucaacagaauucac

SEQ ID NO: 211665 - RNA, 16 nt, Homo sapiens
ugccccccuugccaga

SEQ ID NO: 211666 - RNA, 13 nt, Homo sapiens
uaauacauucacc

SEQ ID NO: 211667 - RNA, 23 nt, Homo sapiens
cuugcaaaccaucccagcacugc

SEQ ID NO: 211668 - RNA, 17 nt, Homo sapiens
cauaaaguaugugcaua

SEQ ID NO: 211669 - RNA, 19 nt, Homo sapiens
cucagaaucgcuccaccuu

SEQ ID NO: 211670 - RNA, 17 nt, Homo sapiens
uaccaucucuccagcua

SEQ ID NO: 211671 - RNA, 17 nt, Homo sapiens
ucuggcacucugagguc

SEQ ID NO: 211672 - RNA, 14 nt, Homo sapiens
ucuugcuaccagua

SEQ ID NO: 211673 - RNA, 14 nt, Homo sapiens
uagccgaccucagc

SEQ ID NO: 211674 - RNA, 20 nt, Homo sapiens
agugggugccccccuugcca

SEQ ID NO: 211675 - RNA, 20 nt, Homo sapiens
uccugaggcuccacuugguc

SEQ ID NO: 211676 - RNA, 22 nt, Homo sapiens
cuguguacagaauucugcuacc

SEQ ID NO: 211677 - RNA, 16 nt, Homo sapiens
auucgauccccuguca

SEQ ID NO: 211678 - RNA, 15 nt, Homo sapiens
auauaucuaccccag

SEQ ID NO: 211679 - RNA, 23 nt, Homo sapiens
aauuccuuagcuuagaccucagc

SEQ ID NO: 211680 - RNA, 21 nt, Homo sapiens
ugagcuggcgggauugaagga

SEQ ID NO: 211681 - RNA, 13 nt, Homo sapiens
auaucuaccccag

SEQ ID NO: 211682 - RNA, 16 nt, Homo sapiens
cauaaaguaugugcau

SEQ ID NO: 211683 - RNA, 22 nt, Homo sapiens
acucuuccccauaaucacugac

SEQ ID NO: 211684 - RNA, 23 nt, Homo sapiens
uguggagcuaaggacacagugga

SEQ ID NO: 211685 - RNA, 12 nt, Homo sapiens
aguuacugugua

SEQ ID NO: 211686 - RNA, 15 nt, Homo sapiens
uucuccucacuguau

SEQ ID NO: 211687 - RNA, 20 nt, Homo sapiens
cuguaaagcuuugugcagau

SEQ ID NO: 211688 - RNA, 22 nt, Homo sapiens
cagggcucagccuggugggccu

SEQ ID NO: 211689 - RNA, 17 nt, Homo sapiens
cugaccagccuugacac

SEQ ID NO: 211690 - RNA, 21 nt, Homo sapiens
ccagaggagccaccaguucuc

SEQ ID NO: 211691 - RNA, 19 nt, Homo sapiens
acuucuugcuucuuucuag

SEQ ID NO: 211692 - RNA, 17 nt, Homo sapiens
gcacgguggugcccaag

SEQ ID NO: 211693 - RNA, 23 nt, Homo sapiens
ucuccucucucuguaauaaacuc

SEQ ID NO: 211694 - RNA, 15 nt, Homo sapiens
agcucgguggaccca

SEQ ID NO: 211695 - RNA, 15 nt, Homo sapiens
uacauaaaguaugug

SEQ ID NO: 211696 - RNA, 19 nt, Homo sapiens
guuaauuuugaagugcugu

SEQ ID NO: 211697 - RNA, 22 nt, Homo sapiens
uuccuuagcuuagaccucagcc

SEQ ID NO: 211698 - RNA, 14 nt, Homo sapiens
caauauccuaauaa

SEQ ID NO: 211699 - RNA, 19 nt, Homo sapiens
ucagcugcaagguacucug

SEQ ID NO: 211700 - RNA, 13 nt, Homo sapiens
gucagacuggaua

SEQ ID NO: 211701 - RNA, 16 nt, Homo sapiens
agcaaaauuacuacca

SEQ ID NO: 211702 - RNA, 20 nt, Homo sapiens
aaacuuauccuccaugaaua

SEQ ID NO: 211703 - RNA, 12 nt, Homo sapiens
cacgguggugcc

SEQ ID NO: 211704 - RNA, 23 nt, Homo sapiens
aacaaaucugcaccccacuucag

SEQ ID NO: 211705 - RNA, 13 nt, Homo sapiens
caaaccaucccag

SEQ ID NO: 211706 - RNA, 16 nt, Homo sapiens
guaacuuucugcugau

SEQ ID NO: 211707 - RNA, 22 nt, Homo sapiens
agaaggguaccuugaacacugg

SEQ ID NO: 211708 - RNA, 11 nt, Homo sapiens
acauugaacaa

SEQ ID NO: 211709 - RNA, 16 nt, Homo sapiens
acugccugcccagugc

SEQ ID NO: 211710 - RNA, 23 nt, Homo sapiens
gucucaccuggacuuaagcaucu

SEQ ID NO: 211711 - RNA, 20 nt, Homo sapiens
accaucccagcacugcaccc

SEQ ID NO: 211712 - RNA, 18 nt, Homo sapiens
acugaccagccuugacac

SEQ ID NO: 211713 - RNA, 21 nt, Homo sapiens
caugcagcuguggcagaguua

SEQ ID NO: 211714 - RNA, 16 nt, Homo sapiens
cuagcacuuggagcca

SEQ ID NO: 211715 - RNA, 20 nt, Homo sapiens
acacaugcugaacaucacag

SEQ ID NO: 211716 - RNA, 15 nt, Homo sapiens
agaguuacaguucug

SEQ ID NO: 211717 - RNA, 16 nt, Homo sapiens
gugaauuaggcuguaa

SEQ ID NO: 211718 - RNA, 23 nt, Homo sapiens
acaccauuccuucugcccugcuu

SEQ ID NO: 211719 - RNA, 17 nt, Homo sapiens
ugugaauuaggcuguaa

SEQ ID NO: 211720 - RNA, 12 nt, Homo sapiens
accacauggcuu

SEQ ID NO: 211721 - RNA, 19 nt, Homo sapiens
aucuuuacacaaugucacg

SEQ ID NO: 211722 - RNA, 18 nt, Homo sapiens
gacccagggaugacaugu

SEQ ID NO: 211723 - RNA, 14 nt, Homo sapiens
gaacaaaucugcac

SEQ ID NO: 211724 - RNA, 22 nt, Homo sapiens
caguguuuuaggagcaugagug

SEQ ID NO: 211725 - RNA, 18 nt, Homo sapiens
gacuagauguaguauuuu

SEQ ID NO: 211726 - RNA, 23 nt, Homo sapiens
uuccccuuuuauuaauacauuca

SEQ ID NO: 211727 - RNA, 16 nt, Homo sapiens
aaagggauuuucagcc

SEQ ID NO: 211728 - RNA, 15 nt, Homo sapiens
uauguacuauucaau

SEQ ID NO: 211729 - RNA, 17 nt, Homo sapiens
uaaagcuuugugcagau

SEQ ID NO: 211730 - RNA, 13 nt, Homo sapiens
ugugagaugcuag

SEQ ID NO: 211731 - RNA, 13 nt, Homo sapiens
cuuauuuccucau

SEQ ID NO: 211732 - RNA, 14 nt, Homo sapiens
uauaucuaccccag

SEQ ID NO: 211733 - RNA, 22 nt, Homo sapiens
uccccuugcccagggcucagcc

SEQ ID NO: 211734 - RNA, 19 nt, Homo sapiens
acuggauccaaacccaucu

SEQ ID NO: 211735 - RNA, 19 nt, Homo sapiens
ucuuacaaugcauucugag

SEQ ID NO: 211736 - RNA, 11 nt, Homo sapiens
caucucuccag

SEQ ID NO: 211737 - RNA, 22 nt, Homo sapiens
gcaucauuauuugcagagacag

SEQ ID NO: 211738 - RNA, 21 nt, Homo sapiens
caaguucaugcagcuguggca

SEQ ID NO: 211739 - RNA, 14 nt, Homo sapiens
caggcaacugaggc

SEQ ID NO: 211740 - RNA, 13 nt, Homo sapiens
cauaccaugugcc

SEQ ID NO: 211741 - RNA, 21 nt, Homo sapiens
agacucagggccccagcacua

SEQ ID NO: 211742 - RNA, 18 nt, Homo sapiens
aggcagccggccaaggcc

SEQ ID NO: 211743 - RNA, 23 nt, Homo sapiens
cuucaguuuccauccccaggauc

SEQ ID NO: 211744 - RNA, 15 nt, Homo sapiens
aaagacuggauccaa

SEQ ID NO: 211745 - RNA, 15 nt, Homo sapiens
auuuugaagugcugu

SEQ ID NO: 211746 - RNA, 23 nt, Homo sapiens
gaacagccgcuccugucugccag

SEQ ID NO: 211747 - RNA, 16 nt, Homo sapiens
acccuuagccacuuca

SEQ ID NO: 211748 - RNA, 14 nt, Homo sapiens
agcccaaguucaug

SEQ ID NO: 211749 - RNA, 16 nt, Homo sapiens
cgguggacccagggau

SEQ ID NO: 211750 - RNA, 19 nt, Homo sapiens
aggagccaccaguucucau

SEQ ID NO: 211751 - RNA, 18 nt, Homo sapiens
ggucagagggcccagugg

SEQ ID NO: 211752 - RNA, 18 nt, Homo sapiens
ggaauuucuuaacuucuu

SEQ ID NO: 211753 - RNA, 18 nt, Homo sapiens
cuuucaacagaauucacu

SEQ ID NO: 211754 - RNA, 18 nt, Homo sapiens
ugaggcaauuagacacuu

SEQ ID NO: 211755 - RNA, 17 nt, Homo sapiens
gcccuagagcacacugu

SEQ ID NO: 211756 - RNA, 21 nt, Homo sapiens
gugccaucaggaugagcagua

SEQ ID NO: 211757 - RNA, 19 nt, Homo sapiens
cuucucuccagcugacuaa

SEQ ID NO: 211758 - RNA, 12 nt, Homo sapiens
aagauggcauaa

SEQ ID NO: 211759 - RNA, 22 nt, Homo sapiens
agaaggauccuccaaagucaca

SEQ ID NO: 211760 - RNA, 19 nt, Homo sapiens
uucauguuaguuaccuuau

SEQ ID NO: 211761 - RNA, 22 nt, Homo sapiens
guaacagauuuuguuggcauag

SEQ ID NO: 211762 - RNA, 15 nt, Homo sapiens
uggcauaaccugucu

SEQ ID NO: 211763 - RNA, 13 nt, Homo sapiens
auccuccaaaguc

SEQ ID NO: 211764 - RNA, 23 nt, Homo sapiens
ccagagccguuacuacacacaaa

SEQ ID NO: 211765 - RNA, 16 nt, Homo sapiens
cccaccccugagcuga

SEQ ID NO: 211766 - RNA, 20 nt, Homo sapiens
guacccggugacucuugggg

SEQ ID NO: 211767 - RNA, 23 nt, Homo sapiens
uagcaggaagcugugagagcagu

SEQ ID NO: 211768 - RNA, 19 nt, Homo sapiens
uuucccuucuuacaaugca

SEQ ID NO: 211769 - RNA, 18 nt, Homo sapiens
aaggauccuccaaaguca

SEQ ID NO: 211770 - RNA, 14 nt, Homo sapiens
agccaccaguucuc

SEQ ID NO: 211771 - RNA, 18 nt, Homo sapiens
gauauuuauuuauuuucc

SEQ ID NO: 211772 - RNA, 18 nt, Homo sapiens
cucuaauucacagugcuc

SEQ ID NO: 211773 - RNA, 22 nt, Homo sapiens
auuggauuuccuaauacuguca

SEQ ID NO: 211774 - RNA, 20 nt, Homo sapiens
uaccccagacuagauguagu

SEQ ID NO: 211775 - RNA, 18 nt, Homo sapiens
ggauaguccgucucugcu

SEQ ID NO: 211776 - RNA, 14 nt, Homo sapiens
ucaguaccccaugg

SEQ ID NO: 211777 - RNA, 20 nt, Homo sapiens
augcugucuucguacuggga

SEQ ID NO: 211778 - RNA, 16 nt, Homo sapiens
agggccccagcacuaa

SEQ ID NO: 211779 - RNA, 17 nt, Homo sapiens
gcaccccaggcagccac

SEQ ID NO: 211780 - RNA, 14 nt, Homo sapiens
aacugaagccagaa

SEQ ID NO: 211781 - RNA, 13 nt, Homo sapiens
auaccaugugcca

SEQ ID NO: 211782 - RNA, 23 nt, Homo sapiens
uccccugucacgugugggcaaug

SEQ ID NO: 211783 - RNA, 17 nt, Homo sapiens
agaauaaaggcaguuuu

SEQ ID NO: 211784 - RNA, 13 nt, Homo sapiens
uggugauuuagca

SEQ ID NO: 211785 - RNA, 15 nt, Homo sapiens
ggcauucacaccacc

SEQ ID NO: 211786 - RNA, 14 nt, Homo sapiens
ccagcuagcaaaau

SEQ ID NO: 211787 - RNA, 12 nt, Homo sapiens
cuguaacuacuu

SEQ ID NO: 211788 - RNA, 14 nt, Homo sapiens
ccucaugcugccaa

SEQ ID NO: 211789 - RNA, 14 nt, Homo sapiens
ucuuccccauaauc

SEQ ID NO: 211790 - RNA, 15 nt, Homo sapiens
ucaacagaauucacu

SEQ ID NO: 211791 - RNA, 15 nt, Homo sapiens
cuguaccaguuaauu

SEQ ID NO: 211792 - RNA, 16 nt, Homo sapiens
auaaugucccuucaca

SEQ ID NO: 211793 - RNA, 16 nt, Homo sapiens
agcaucuggcucuaau

SEQ ID NO: 211794 - RNA, 16 nt, Homo sapiens
cgugugggcaauguuc

SEQ ID NO: 211795 - RNA, 21 nt, Homo sapiens
agcacgguggugcccaagcca

SEQ ID NO: 211796 - RNA, 14 nt, Homo sapiens
acugaggcagacag

SEQ ID NO: 211797 - RNA, 20 nt, Homo sapiens
uucugauaaaagauggccau

SEQ ID NO: 211798 - RNA, 16 nt, Homo sapiens
ccucagaugcacauga

SEQ ID NO: 211799 - RNA, 15 nt, Homo sapiens
cauaaccugucucac

SEQ ID NO: 211800 - RNA, 20 nt, Homo sapiens
caucucuccagcuagcaaaa

SEQ ID NO: 211801 - RNA, 17 nt, Homo sapiens
agccuagccgaccucag

SEQ ID NO: 211802 - RNA, 21 nt, Homo sapiens
acuauugaaguugcagauuca

SEQ ID NO: 211803 - RNA, 19 nt, Homo sapiens
gucacacagagugccugcc

SEQ ID NO: 211804 - RNA, 13 nt, Homo sapiens
uccugucugccag

SEQ ID NO: 211805 - RNA, 16 nt, Homo sapiens
cugaacaucacagcuu

SEQ ID NO: 211806 - RNA, 17 nt, Homo sapiens
uuucaacagaauucacu

SEQ ID NO: 211807 - RNA, 17 nt, Homo sapiens
cuugcuaccaguauuua

SEQ ID NO: 211808 - RNA, 15 nt, Homo sapiens
caugagugccgugug

SEQ ID NO: 211809 - RNA, 14 nt, Homo sapiens
ccuggucaggcucu

SEQ ID NO: 211810 - RNA, 22 nt, Homo sapiens
ccugucugccagccagcagcca

SEQ ID NO: 211811 - RNA, 16 nt, Homo sapiens
uguuggcauagcucug

SEQ ID NO: 211812 - RNA, 11 nt, Homo sapiens
auucacaccac

SEQ ID NO: 211813 - RNA, 15 nt, Homo sapiens
uauaucuaccccaga

SEQ ID NO: 211814 - RNA, 15 nt, Homo sapiens
aacagaauucacuug

SEQ ID NO: 211815 - RNA, 19 nt, Homo sapiens
aguucaugcagcuguggca

SEQ ID NO: 211816 - RNA, 20 nt, Homo sapiens
agacucagggccccagcacu

SEQ ID NO: 211817 - RNA, 17 nt, Homo sapiens
ugacauguacgauucac

SEQ ID NO: 211818 - RNA, 12 nt, Homo sapiens
cugugacugaca

SEQ ID NO: 211819 - RNA, 21 nt, Homo sapiens
cagcagcucaggcacacuucu

SEQ ID NO: 211820 - RNA, 17 nt, Homo sapiens
uccuagaaacugacaca

SEQ ID NO: 211821 - RNA, 14 nt, Homo sapiens
aaggccucuaggga

SEQ ID NO: 211822 - RNA, 14 nt, Homo sapiens
ucauugacuaucaa

SEQ ID NO: 211823 - RNA, 17 nt, Homo sapiens
uaccuugaacacugggg

SEQ ID NO: 211824 - RNA, 19 nt, Homo sapiens
cugacacaccaggcgcuaa

SEQ ID NO: 211825 - RNA, 20 nt, Homo sapiens
aucugguccaguuccuucac

SEQ ID NO: 211826 - RNA, 20 nt, Homo sapiens
ccugagcucgguggacccag

SEQ ID NO: 211827 - RNA, 22 nt, Homo sapiens
cagaccucggugggcauucaca

SEQ ID NO: 211828 - RNA, 13 nt, Homo sapiens
agcuuagaccuca

SEQ ID NO: 211829 - RNA, 16 nt, Homo sapiens
gcugcaagguacucug

SEQ ID NO: 211830 - RNA, 19 nt, Homo sapiens
ggguccuuuugacacugcu

SEQ ID NO: 211831 - RNA, 19 nt, Homo sapiens
aucuugcuaccaguauuua

SEQ ID NO: 211832 - RNA, 16 nt, Homo sapiens
aguauuuagaagccaa

SEQ ID NO: 211833 - RNA, 14 nt, Homo sapiens
uggagcugggcuaa

SEQ ID NO: 211834 - RNA, 21 nt, Homo sapiens
aaucgcuccaccuugcagcuc

SEQ ID NO: 211835 - RNA, 18 nt, Homo sapiens
uaggccaugggacaggga

SEQ ID NO: 211836 - RNA, 21 nt, Homo sapiens
acuguaaagcuuugugcagau

SEQ ID NO: 211837 - RNA, 18 nt, Homo sapiens
agucacuaguuguaauuu

SEQ ID NO: 211838 - RNA, 22 nt, Homo sapiens
auccugaggcuccacuuggucu

SEQ ID NO: 211839 - RNA, 13 nt, Homo sapiens
gcauaaccugucu

SEQ ID NO: 211840 - RNA, 14 nt, Homo sapiens
gggugggcacagua

SEQ ID NO: 211841 - RNA, 20 nt, Homo sapiens
caugagcuggcgggauugaa

SEQ ID NO: 211842 - RNA, 22 nt, Homo sapiens
ccccaugccaccggcuccacuu

SEQ ID NO: 211843 - RNA, 17 nt, Homo sapiens
ucaacagaauucacuug

SEQ ID NO: 211844 - RNA, 15 nt, Homo sapiens
ccaugggacagggag

SEQ ID NO: 211845 - RNA, 23 nt, Homo sapiens
gaaggguaccuugaacacugggg

SEQ ID NO: 211846 - RNA, 21 nt, Homo sapiens
cuucagccuagccgaccucag

SEQ ID NO: 211847 - RNA, 23 nt, Homo sapiens
aaagauggccauauuaccccuuu

SEQ ID NO: 211848 - RNA, 18 nt, Homo sapiens
aagccaacccugugacug

SEQ ID NO: 211849 - RNA, 17 nt, Homo sapiens
aggagcaugagugccgu

SEQ ID NO: 211850 - RNA, 20 nt, Homo sapiens
uuacaaugcauucugaggua

SEQ ID NO: 211851 - RNA, 20 nt, Homo sapiens
gcucuaauucacagugcucu

SEQ ID NO: 211852 - RNA, 11 nt, Homo sapiens
cagggacccac

SEQ ID NO: 211853 - RNA, 12 nt, Homo sapiens
ggccaagcauaa

SEQ ID NO: 211854 - RNA, 15 nt, Homo sapiens
gaccucggugggcau

SEQ ID NO: 211855 - RNA, 20 nt, Homo sapiens
gacgugcacgcacacugucu

SEQ ID NO: 211856 - RNA, 14 nt, Homo sapiens
acaguucugugguu

SEQ ID NO: 211857 - RNA, 17 nt, Homo sapiens
aucaguccaaagggcau

SEQ ID NO: 211858 - RNA, 18 nt, Homo sapiens
cauguacgauucacuccu

SEQ ID NO: 211859 - RNA, 16 nt, Homo sapiens
cggccuccauccugag

SEQ ID NO: 211860 - RNA, 17 nt, Homo sapiens
uuugaaaccaaaccaga

SEQ ID NO: 211861 - RNA, 19 nt, Homo sapiens
gagaggcagauuucaggga

SEQ ID NO: 211862 - RNA, 21 nt, Homo sapiens
aauacaguuuauuauguacua

SEQ ID NO: 211863 - RNA, 18 nt, Homo sapiens
ccagggaugacauguccc

SEQ ID NO: 211864 - RNA, 15 nt, Homo sapiens
ugcuagaacucccuu

SEQ ID NO: 211865 - RNA, 16 nt, Homo sapiens
ugcauauuuuauuaua

SEQ ID NO: 211866 - RNA, 17 nt, Homo sapiens
ugcauuuaauuuauuga

SEQ ID NO: 211867 - RNA, 15 nt, Homo sapiens
gcagcccacugccug

SEQ ID NO: 211868 - RNA, 12 nt, Homo sapiens
cagaugcacaug

SEQ ID NO: 211869 - RNA, 21 nt, Homo sapiens
gcaaaccaucccagcacugca

SEQ ID NO: 211870 - RNA, 14 nt, Homo sapiens
cuuccuggaccuga

SEQ ID NO: 211871 - RNA, 14 nt, Homo sapiens
cagggaagcccuga

SEQ ID NO: 211872 - RNA, 21 nt, Homo sapiens
ugucauccucaaagaaagugu

SEQ ID NO: 211873 - RNA, 21 nt, Homo sapiens
ucugauaaaagauggccauau

SEQ ID NO: 211874 - RNA, 18 nt, Homo sapiens
uaaauauaucuaccccag

SEQ ID NO: 211875 - RNA, 17 nt, Homo sapiens
ucucuguauuccuagaa

SEQ ID NO: 211876 - RNA, 16 nt, Homo sapiens
aaucuuuacacaaugu

SEQ ID NO: 211877 - RNA, 10 nt, Homo sapiens
cauugaacaa

SEQ ID NO: 211878 - RNA, 20 nt, Homo sapiens
ugcaccccaggcagccacuc

SEQ ID NO: 211879 - RNA, 22 nt, Homo sapiens
gcauucacaccaccccccaugc

SEQ ID NO: 211880 - RNA, 12 nt, Homo sapiens
cccaguggugcc

SEQ ID NO: 211881 - RNA, 20 nt, Homo sapiens
uucugcccugcuuuugcuag

SEQ ID NO: 211882 - RNA, 18 nt, Homo sapiens
accgagcacauaccaugu

SEQ ID NO: 211883 - RNA, 14 nt, Homo sapiens
auuaacaugugcca

SEQ ID NO: 211884 - RNA, 14 nt, Homo sapiens
gaugugucuugggg

SEQ ID NO: 211885 - RNA, 13 nt, Homo sapiens
uugagucuuugga

SEQ ID NO: 211886 - RNA, 23 nt, Homo sapiens
aaacuuuuuuucuguaccaguua

SEQ ID NO: 211887 - RNA, 14 nt, Homo sapiens
cauguuaguuaccu

SEQ ID NO: 211888 - RNA, 17 nt, Homo sapiens
acccuuagccacuucau

SEQ ID NO: 211889 - RNA, 14 nt, Homo sapiens
auaaggacacugaa

SEQ ID NO: 211890 - RNA, 13 nt, Homo sapiens
acaugugguggga

SEQ ID NO: 211891 - RNA, 19 nt, Homo sapiens
uauuaauacauucacccag

SEQ ID NO: 211892 - RNA, 19 nt, Homo sapiens
caaagaugaucaguaugaa

SEQ ID NO: 211893 - RNA, 22 nt, Homo sapiens
ugucuuggggugggcacaguac

SEQ ID NO: 211894 - RNA, 22 nt, Homo sapiens
ccuucaguuuccauccccagga

SEQ ID NO: 211895 - RNA, 12 nt, Homo sapiens
ugaacacugggg

SEQ ID NO: 211896 - RNA, 17 nt, Homo sapiens
ggcacccuuagccacuu

SEQ ID NO: 211897 - RNA, 13 nt, Homo sapiens
uugcuaccaguau

SEQ ID NO: 211898 - RNA, 18 nt, Homo sapiens
accuuauaguuacugugu

SEQ ID NO: 211899 - RNA, 17 nt, Homo sapiens
cuaauucacagugcucu

SEQ ID NO: 211900 - RNA, 11 nt, Homo sapiens
ccuucacuuac

SEQ ID NO: 211901 - RNA, 18 nt, Homo sapiens
uugguuuaaagaaagugu

SEQ ID NO: 211902 - RNA, 19 nt, Homo sapiens
aucuauaauuuaccuaaga

SEQ ID NO: 211903 - RNA, 15 nt, Homo sapiens
ugaauaucaguuauu

SEQ ID NO: 211904 - RNA, 17 nt, Homo sapiens
uguacgauucacuccuu

SEQ ID NO: 211905 - RNA, 18 nt, Homo sapiens
cuuuggaagauggcauaa

SEQ ID NO: 211906 - RNA, 20 nt, Homo sapiens
ccuugcaaaccaucccagca

SEQ ID NO: 211907 - RNA, 13 nt, Homo sapiens
gcacgguggugcc

SEQ ID NO: 211908 - RNA, 21 nt, Homo sapiens
uaugauuauuaacgaugucca

SEQ ID NO: 211909 - RNA, 15 nt, Homo sapiens
cuguggcugcuagca

SEQ ID NO: 211910 - RNA, 20 nt, Homo sapiens
uuagacccucaugcugccaa

SEQ ID NO: 211911 - RNA, 17 nt, Homo sapiens
cuauugaccgagcacau

SEQ ID NO: 211912 - RNA, 16 nt, Homo sapiens
accggcuccacuuucc

SEQ ID NO: 211913 - RNA, 14 nt, Homo sapiens
auuccuagaaacug

SEQ ID NO: 211914 - RNA, 22 nt, Homo sapiens
cucccagaggagccaccaguuc

SEQ ID NO: 211915 - RNA, 14 nt, Homo sapiens
ugaggcuccacuug

SEQ ID NO: 211916 - RNA, 15 nt, Homo sapiens
ccuagagcacacugu

SEQ ID NO: 211917 - RNA, 14 nt, Homo sapiens
uaauaaguacugug

SEQ ID NO: 211918 - RNA, 22 nt, Homo sapiens
auguacuauucaaucuuuacac

SEQ ID NO: 211919 - RNA, 14 nt, Homo sapiens
gggcucagccuggu

SEQ ID NO: 211920 - RNA, 18 nt, Homo sapiens
cuguagcauuacaguggg

SEQ ID NO: 211921 - RNA, 20 nt, Homo sapiens
aaaucugcaccccacuucag

SEQ ID NO: 211922 - RNA, 17 nt, Homo sapiens
aaccagagccugagugu

SEQ ID NO: 211923 - RNA, 18 nt, Homo sapiens
agagccccacccucagau

SEQ ID NO: 211924 - RNA, 21 nt, Homo sapiens
aagggauuuucagcccucaga

SEQ ID NO: 211925 - RNA, 18 nt, Homo sapiens
caaauggcaaagacugga

SEQ ID NO: 211926 - RNA, 21 nt, Homo sapiens
cuauaauuuaccuaagauuac

SEQ ID NO: 211927 - RNA, 17 nt, Homo sapiens
ucauuguucuugugaac

SEQ ID NO: 211928 - RNA, 14 nt, Homo sapiens
augccaacucagcc

SEQ ID NO: 211929 - RNA, 20 nt, Homo sapiens
cuccucacuguauccagguu

SEQ ID NO: 211930 - RNA, 14 nt, Homo sapiens
auggaggccuccuu

SEQ ID NO: 211931 - RNA, 17 nt, Homo sapiens
cugucuucguacuggga

SEQ ID NO: 211932 - RNA, 14 nt, Homo sapiens
cugcccagugccau

SEQ ID NO: 211933 - RNA, 14 nt, Homo sapiens
caucuugcuaccag

SEQ ID NO: 211934 - RNA, 20 nt, Homo sapiens
auaguccgucucugcuuauc

SEQ ID NO: 211935 - RNA, 17 nt, Homo sapiens
ugccccccuugccagac

SEQ ID NO: 211936 - RNA, 14 nt, Homo sapiens
cacaguacccggug

SEQ ID NO: 211937 - RNA, 21 nt, Homo sapiens
guccuuuugacacugcucuaa

SEQ ID NO: 211938 - RNA, 23 nt, Homo sapiens
cacucugaggucucuguggcagg

SEQ ID NO: 211939 - RNA, 11 nt, Homo sapiens
ucacacacagg

SEQ ID NO: 211940 - RNA, 22 nt, Homo sapiens
aauacauaaaguaugugcauau

SEQ ID NO: 211941 - RNA, 14 nt, Homo sapiens
aaguaugugcauau

SEQ ID NO: 211942 - RNA, 21 nt, Homo sapiens
aguggugccccagcacggugg

SEQ ID NO: 211943 - RNA, 17 nt, Homo sapiens
guaaagcuuugugcaga

SEQ ID NO: 211944 - RNA, 18 nt, Homo sapiens
acuauugaaguugcagau

SEQ ID NO: 211945 - RNA, 14 nt, Homo sapiens
gcuaccaguauuua

SEQ ID NO: 211946 - RNA, 17 nt, Homo sapiens
uuucauuuaucuauaau

SEQ ID NO: 211947 - RNA, 14 nt, Homo sapiens
cuucucuccagcug

SEQ ID NO: 211948 - RNA, 13 nt, Homo sapiens
gcugcuagcacuu

SEQ ID NO: 211949 - RNA, 18 nt, Homo sapiens
aacagcccuccucugcac

SEQ ID NO: 211950 - RNA, 17 nt, Homo sapiens
ugaggucucuguggcag

SEQ ID NO: 211951 - RNA, 16 nt, Homo sapiens
agaagccaacuaugau

SEQ ID NO: 211952 - RNA, 22 nt, Homo sapiens
aggagaggggcagaacagccgc

SEQ ID NO: 211953 - RNA, 20 nt, Homo sapiens
gaagagccccccacugcaga

SEQ ID NO: 211954 - RNA, 21 nt, Homo sapiens
ccuggcaaagaugaucaguau

SEQ ID NO: 211955 - RNA, 17 nt, Homo sapiens
cuggucaggcucuccag

SEQ ID NO: 211956 - RNA, 19 nt, Homo sapiens
uaccagagccguuacuaca

SEQ ID NO: 211957 - RNA, 15 nt, Homo sapiens
aucuugcuaccagua

SEQ ID NO: 211958 - RNA, 23 nt, Homo sapiens
guauuccuagaaacugacacaug

SEQ ID NO: 211959 - RNA, 11 nt, Homo sapiens
gagcacacugu

SEQ ID NO: 211960 - RNA, 21 nt, Homo sapiens
cguucccggguagccacugga

SEQ ID NO: 211961 - RNA, 12 nt, Homo sapiens
aacaugugccag

SEQ ID NO: 211962 - RNA, 21 nt, Homo sapiens
cuucaguuuccauccccagga

SEQ ID NO: 211963 - RNA, 22 nt, Homo sapiens
ucuguauuccuagaaacugaca

SEQ ID NO: 211964 - RNA, 18 nt, Homo sapiens
cugcacucccaccugaca

SEQ ID NO: 211965 - RNA, 19 nt, Homo sapiens
augucauuguucuugugaa

SEQ ID NO: 211966 - RNA, 14 nt, Homo sapiens
caguuccuucacuu

SEQ ID NO: 211967 - RNA, 19 nt, Homo sapiens
cuuucaacagaauucacuu

SEQ ID NO: 211968 - RNA, 21 nt, Homo sapiens
ugacucuuccccauaaucacu

SEQ ID NO: 211969 - RNA, 19 nt, Homo sapiens
cuggcacucugaggucucu

SEQ ID NO: 211970 - RNA, 22 nt, Homo sapiens
auccgaggcagggucaggagag

SEQ ID NO: 211971 - RNA, 14 nt, Homo sapiens
cucacuguauccag

SEQ ID NO: 211972 - RNA, 19 nt, Homo sapiens
gcccacugccugcccagug

SEQ ID NO: 211973 - RNA, 22 nt, Homo sapiens
uguaauaaacucauuucuagca

SEQ ID NO: 211974 - RNA, 12 nt, Homo sapiens
cuccuagccuug

SEQ ID NO: 211975 - RNA, 21 nt, Homo sapiens
ucaccuggacuuaagcaucug

SEQ ID NO: 211976 - RNA, 13 nt, Homo sapiens
aguguaugauuac

SEQ ID NO: 211977 - RNA, 17 nt, Homo sapiens
cagacauguggugggac

SEQ ID NO: 211978 - RNA, 16 nt, Homo sapiens
gagccccccacugcag

SEQ ID NO: 211979 - RNA, 22 nt, Homo sapiens
cccuuuuauuaauacauucacc

SEQ ID NO: 211980 - RNA, 21 nt, Homo sapiens
aagauggcauaaccugucuca

SEQ ID NO: 211981 - RNA, 17 nt, Homo sapiens
guaucucaguaccccau

SEQ ID NO: 211982 - RNA, 18 nt, Homo sapiens
aucugcaccccacuucag

SEQ ID NO: 211983 - RNA, 12 nt, Homo sapiens
uccuucacuuac

SEQ ID NO: 211984 - RNA, 15 nt, Homo sapiens
uuuucugauaaaaga

SEQ ID NO: 211985 - RNA, 16 nt, Homo sapiens
gacccagggaugacau

SEQ ID NO: 211986 - RNA, 18 nt, Homo sapiens
ugccacuuaauguauguu

SEQ ID NO: 211987 - RNA, 17 nt, Homo sapiens
gcacaguacccggugac

SEQ ID NO: 211988 - RNA, 18 nt, Homo sapiens
cccagacuagauguagua

SEQ ID NO: 211989 - RNA, 15 nt, Homo sapiens
acauaccaugugcca

SEQ ID NO: 211990 - RNA, 15 nt, Homo sapiens
gugcacgcacacugu

SEQ ID NO: 211991 - RNA, 18 nt, Homo sapiens
uagcaggaagcugugaga

SEQ ID NO: 211992 - RNA, 18 nt, Homo sapiens
cuauugaccgagcacaua

SEQ ID NO: 211993 - RNA, 16 nt, Homo sapiens
ucacacagagugccug

SEQ ID NO: 211994 - RNA, 20 nt, Homo sapiens
acacacaaaggcuauugacc

SEQ ID NO: 211995 - RNA, 14 nt, Homo sapiens
aaaacguauugcau

SEQ ID NO: 211996 - RNA, 22 nt, Homo sapiens
aggaugugucuuggggugggca

SEQ ID NO: 211997 - RNA, 14 nt, Homo sapiens
uggggaagacugug

SEQ ID NO: 211998 - RNA, 18 nt, Homo sapiens
uuagaagccaacuaugau

SEQ ID NO: 211999 - RNA, 13 nt, Homo sapiens
cgauucacuccuu

SEQ ID NO: 212000 - RNA, 18 nt, Homo sapiens
gucugugagaugcuagaa

SEQ ID NO: 212001 - RNA, 15 nt, Homo sapiens
ucauuauuugcagag

SEQ ID NO: 212002 - RNA, 21 nt, Homo sapiens
cuuuucuccucacuguaucca

SEQ ID NO: 212003 - RNA, 22 nt, Homo sapiens
aaggguaccuugaacacugggg

SEQ ID NO: 212004 - RNA, 21 nt, Homo sapiens
uccaaagggcauggguuuuau

SEQ ID NO: 212005 - RNA, 21 nt, Homo sapiens
acuguguaauuagugccacuu

SEQ ID NO: 212006 - RNA, 21 nt, Homo sapiens
uucccggguagccacuggacu

SEQ ID NO: 212007 - RNA, 12 nt, Homo sapiens
aagaaaguguau

SEQ ID NO: 212008 - RNA, 22 nt, Homo sapiens
guacagaauucugcuaccucac

SEQ ID NO: 212009 - RNA, 19 nt, Homo sapiens
gauucacuccuuugagucu

SEQ ID NO: 212010 - RNA, 19 nt, Homo sapiens
uucugugguuucauguuag

SEQ ID NO: 212011 - RNA, 15 nt, Homo sapiens
gagccaccaguucuc

SEQ ID NO: 212012 - RNA, 17 nt, Homo sapiens
uuugugggaaauccaca

SEQ ID NO: 212013 - RNA, 23 nt, Homo sapiens
auagcucuggggugggcaguuuu

SEQ ID NO: 212014 - RNA, 19 nt, Homo sapiens
ggugggccuccucugucca

SEQ ID NO: 212015 - RNA, 14 nt, Homo sapiens
accuugacaaaauc

SEQ ID NO: 212016 - RNA, 17 nt, Homo sapiens
uagaaagagaaacaguu

SEQ ID NO: 212017 - RNA, 20 nt, Homo sapiens
ccuaauacugucauccucaa

SEQ ID NO: 212018 - RNA, 15 nt, Homo sapiens
ugcaccccacuucag

SEQ ID NO: 212019 - RNA, 19 nt, Homo sapiens
ugguaauaaguacugugua

SEQ ID NO: 212020 - RNA, 17 nt, Homo sapiens
ggaggcagccggccaag

SEQ ID NO: 212021 - RNA, 19 nt, Homo sapiens
auggcaaagacuggaucca

SEQ ID NO: 212022 - RNA, 16 nt, Homo sapiens
gagccguuacuacaca

SEQ ID NO: 212023 - RNA, 17 nt, Homo sapiens
gagccccccacugcaga

SEQ ID NO: 212024 - RNA, 14 nt, Homo sapiens
cuagccgaccucag

SEQ ID NO: 212025 - RNA, 22 nt, Homo sapiens
gcugucacaauuauuaccaucu

SEQ ID NO: 212026 - RNA, 15 nt, Homo sapiens
uggaagauggcauaa

SEQ ID NO: 212027 - RNA, 19 nt, Homo sapiens
ugugccacacaccuugaca

SEQ ID NO: 212028 - RNA, 13 nt, Homo sapiens
auaguuacugugu

SEQ ID NO: 212029 - RNA, 14 nt, Homo sapiens
cccuucucuguauu

SEQ ID NO: 212030 - RNA, 18 nt, Homo sapiens
caccugacacaccaggcg

SEQ ID NO: 212031 - RNA, 18 nt, Homo sapiens
agccuagccgaccucagc

SEQ ID NO: 212032 - RNA, 17 nt, Homo sapiens
gccaacccugugacuga

SEQ ID NO: 212033 - RNA, 16 nt, Homo sapiens
cacagaggaucugcuu

SEQ ID NO: 212034 - RNA, 18 nt, Homo sapiens
agaauucacuuguggcua

SEQ ID NO: 212035 - RNA, 14 nt, Homo sapiens
cccaggcagccacu

SEQ ID NO: 212036 - RNA, 23 nt, Homo sapiens
agcacugcaccccaggcagccac

SEQ ID NO: 212037 - RNA, 18 nt, Homo sapiens
gccacuggacugacgacu

SEQ ID NO: 212038 - RNA, 17 nt, Homo sapiens
cucuggcacucugaggu

SEQ ID NO: 212039 - RNA, 21 nt, Homo sapiens
cucuuccccauaaucacugac

SEQ ID NO: 212040 - RNA, 18 nt, Homo sapiens
gaaauaaaguuggugaca

SEQ ID NO: 212041 - RNA, 15 nt, Homo sapiens
auuucuuaacuucuu

SEQ ID NO: 212042 - RNA, 23 nt, Homo sapiens
ggucugugagaugcuagaacucc

SEQ ID NO: 212043 - RNA, 23 nt, Homo sapiens
ucaggagaggggcagaacagccg

SEQ ID NO: 212044 - RNA, 20 nt, Homo sapiens
acaauuauuaccaucucucc

SEQ ID NO: 212045 - RNA, 17 nt, Homo sapiens
ccauuuuugaaaccaaa

SEQ ID NO: 212046 - RNA, 18 nt, Homo sapiens
auuucagggaagcccuga

SEQ ID NO: 212047 - RNA, 14 nt, Homo sapiens
gaggucucuguggc

SEQ ID NO: 212048 - RNA, 21 nt, Homo sapiens
uuucugauaaaagauggccau

SEQ ID NO: 212049 - RNA, 19 nt, Homo sapiens
aauucauuuuuuaaauucc

SEQ ID NO: 212050 - RNA, 22 nt, Homo sapiens
auacauucacccagauaaucau

SEQ ID NO: 212051 - RNA, 23 nt, Homo sapiens
aguuaccuuauaguuacugugua

SEQ ID NO: 212052 - RNA, 14 nt, Homo sapiens
cauaaccugucuca

SEQ ID NO: 212053 - RNA, 18 nt, Homo sapiens
uuauuucagagagcaaau

SEQ ID NO: 212054 - RNA, 23 nt, Homo sapiens
cauuccccugaugggcccugacu

SEQ ID NO: 212055 - RNA, 21 nt, Homo sapiens
cuguguacagaauucugcuac

SEQ ID NO: 212056 - RNA, 15 nt, Homo sapiens
uuccuaauacuguca

SEQ ID NO: 212057 - RNA, 19 nt, Homo sapiens
gucuccucucucuguaaua

SEQ ID NO: 212058 - RNA, 13 nt, Homo sapiens
aaaggcaguuuuc

SEQ ID NO: 212059 - RNA, 15 nt, Homo sapiens
guaccccauggagcu

SEQ ID NO: 212060 - RNA, 14 nt, Homo sapiens
ggcacucagucucu

SEQ ID NO: 212061 - RNA, 14 nt, Homo sapiens
acgauucacuccuu

SEQ ID NO: 212062 - RNA, 14 nt, Homo sapiens
aaaaacguauugca

SEQ ID NO: 212063 - RNA, 19 nt, Homo sapiens
aauaaguacuguguacaga

SEQ ID NO: 212064 - RNA, 22 nt, Homo sapiens
agagcaguuugguuucuagcau

SEQ ID NO: 212065 - RNA, 23 nt, Homo sapiens
guggagauucucuggcacucuga

SEQ ID NO: 212066 - RNA, 22 nt, Homo sapiens
gugggugccccccuugccagac

SEQ ID NO: 212067 - RNA, 20 nt, Homo sapiens
ugcauucugagguaaccuca

SEQ ID NO: 212068 - RNA, 18 nt, Homo sapiens
cauccugaggcuccacuu

SEQ ID NO: 212069 - RNA, 15 nt, Homo sapiens
gucuuggggugggca

SEQ ID NO: 212070 - RNA, 12 nt, Homo sapiens
ugagguaaccuc

SEQ ID NO: 212071 - RNA, 12 nt, Homo sapiens
ugccagacaugu

SEQ ID NO: 212072 - RNA, 12 nt, Homo sapiens
accucacugggg

SEQ ID NO: 212073 - RNA, 22 nt, Homo sapiens
auauuuauuuauuuucccugag

SEQ ID NO: 212074 - RNA, 21 nt, Homo sapiens
gagcaguuugguuucuagcau

SEQ ID NO: 212075 - RNA, 21 nt, Homo sapiens
uguggcugcuagcacuuggag

SEQ ID NO: 212076 - RNA, 17 nt, Homo sapiens
agaggagccaccaguuc

SEQ ID NO: 212077 - RNA, 15 nt, Homo sapiens
caucugguccaguuc

SEQ ID NO: 212078 - RNA, 14 nt, Homo sapiens
ugcacgcacacugu

SEQ ID NO: 212079 - RNA, 13 nt, Homo sapiens
ugggcauucacac

SEQ ID NO: 212080 - RNA, 16 nt, Homo sapiens
cacugccugcccagug

SEQ ID NO: 212081 - RNA, 15 nt, Homo sapiens
ugaccagccuugaca

SEQ ID NO: 212082 - RNA, 17 nt, Homo sapiens
agcacuaaagcagugga

SEQ ID NO: 212083 - RNA, 23 nt, Homo sapiens
cugguccaguuccuucacuuaca

SEQ ID NO: 212084 - RNA, 20 nt, Homo sapiens
aauacauaaaguaugugcau

SEQ ID NO: 212085 - RNA, 20 nt, Homo sapiens
ucagccuagccgaccucagc

SEQ ID NO: 212086 - RNA, 13 nt, Homo sapiens
accagccuugaca

SEQ ID NO: 212087 - RNA, 20 nt, Homo sapiens
caguuauuuuuaaacuguaa

SEQ ID NO: 212088 - RNA, 23 nt, Homo sapiens
aaauuccuuagcuuagaccucag

SEQ ID NO: 212089 - RNA, 15 nt, Homo sapiens
cacccuuagccacuu

SEQ ID NO: 212090 - RNA, 15 nt, Homo sapiens
acugccugcccagug

SEQ ID NO: 212091 - RNA, 17 nt, Homo sapiens
accagagccguuacuac

SEQ ID NO: 212092 - RNA, 21 nt, Homo sapiens
ggcaauguucccccucuccuc

SEQ ID NO: 212093 - RNA, 22 nt, Homo sapiens
agcccugacuguguggagcuaa

SEQ ID NO: 212094 - RNA, 16 nt, Homo sapiens
aguaugaaaaugucau

SEQ ID NO: 212095 - RNA, 19 nt, Homo sapiens
augucacgggaccaguauu

SEQ ID NO: 212096 - RNA, 12 nt, Homo sapiens
cuguauuccuag

SEQ ID NO: 212097 - RNA, 15 nt, Homo sapiens
agugugacucauuaa

SEQ ID NO: 212098 - RNA, 17 nt, Homo sapiens
cacacugagcugagggg

SEQ ID NO: 212099 - RNA, 16 nt, Homo sapiens
gaggagccaccaguuc

SEQ ID NO: 212100 - RNA, 19 nt, Homo sapiens
agccagcagccagcucuca

SEQ ID NO: 212101 - RNA, 13 nt, Homo sapiens
uuguucuugugaa

SEQ ID NO: 212102 - RNA, 18 nt, Homo sapiens
ugaucaguaugaaaaugu

SEQ ID NO: 212103 - RNA, 18 nt, Homo sapiens
gucugccagccagcagcc

SEQ ID NO: 212104 - RNA, 19 nt, Homo sapiens
ggagcccugucuccucucu

SEQ ID NO: 212105 - RNA, 14 nt, Homo sapiens
uaccucacuggggu

SEQ ID NO: 212106 - RNA, 20 nt, Homo sapiens
auuccuuagcuuagaccuca

SEQ ID NO: 212107 - RNA, 16 nt, Homo sapiens
ccaguuccuucacuua

SEQ ID NO: 212108 - RNA, 21 nt, Homo sapiens
acagugcucuuuucuccucac

SEQ ID NO: 212109 - RNA, 22 nt, Homo sapiens
uaaaaaaaaaacguauugcauu

SEQ ID NO: 212110 - RNA, 13 nt, Homo sapiens
gccaacccuguga

SEQ ID NO: 212111 - RNA, 16 nt, Homo sapiens
cuggugagucaccacu

SEQ ID NO: 212112 - RNA, 22 nt, Homo sapiens
gggaaagggauuuucagcccuc

SEQ ID NO: 212113 - RNA, 15 nt, Homo sapiens
ggcacccuuagccac

SEQ ID NO: 212114 - RNA, 19 nt, Homo sapiens
cuccaaagucacacagagu

SEQ ID NO: 212115 - RNA, 17 nt, Homo sapiens
cagggacccacuucaca

SEQ ID NO: 212116 - RNA, 15 nt, Homo sapiens
uggcacucagucucu

SEQ ID NO: 212117 - RNA, 20 nt, Homo sapiens
uccccugaugggcccugacu

SEQ ID NO: 212118 - RNA, 22 nt, Homo sapiens
auccuccaaagucacacagagu

SEQ ID NO: 212119 - RNA, 19 nt, Homo sapiens
ccacuuggucugugagaug

SEQ ID NO: 212120 - RNA, 14 nt, Homo sapiens
augaucaguaugaa

SEQ ID NO: 212121 - RNA, 22 nt, Homo sapiens
ggguaggcgggaaggaggguua

SEQ ID NO: 212122 - RNA, 21 nt, Homo sapiens
ucccagaggagccaccaguuc

SEQ ID NO: 212123 - RNA, 23 nt, Homo sapiens
acuaauagaauaaaggcaguuuu

SEQ ID NO: 212124 - RNA, 14 nt, Homo sapiens
gggaagcccugacu

SEQ ID NO: 212125 - RNA, 22 nt, Homo sapiens
cugggggaggggacauugaaca

SEQ ID NO: 212126 - RNA, 16 nt, Homo sapiens
aucauuaaaauuaaca

SEQ ID NO: 212127 - RNA, 21 nt, Homo sapiens
uuccccuugcccagggcucag

SEQ ID NO: 212128 - RNA, 19 nt, Homo sapiens
acagggaggacgcucucug

SEQ ID NO: 212129 - RNA, 12 nt, Homo sapiens
gaacacuggggg

SEQ ID NO: 212130 - RNA, 22 nt, Homo sapiens
agcaggaagcugugagagcagu

SEQ ID NO: 212131 - RNA, 16 nt, Homo sapiens
gucuucguacugggaa

SEQ ID NO: 212132 - RNA, 15 nt, Homo sapiens
aauuacuaccagagc

SEQ ID NO: 212133 - RNA, 16 nt, Homo sapiens
aauggcaaagacugga

SEQ ID NO: 212134 - RNA, 13 nt, Homo sapiens
cagaccucggugg

SEQ ID NO: 212135 - RNA, 23 nt, Homo sapiens
cuuuucggccccauguaucucag

SEQ ID NO: 212136 - RNA, 22 nt, Homo sapiens
ucauuguucuugugaacccaaa

SEQ ID NO: 212137 - RNA, 12 nt, Homo sapiens
gaagacuguggc

SEQ ID NO: 212138 - RNA, 15 nt, Homo sapiens
agccagcagccagcu

SEQ ID NO: 212139 - RNA, 17 nt, Homo sapiens
gccaagcauaaugacag

SEQ ID NO: 212140 - RNA, 14 nt, Homo sapiens
auuuuugaaaccaa

SEQ ID NO: 212141 - RNA, 20 nt, Homo sapiens
cucuccagguggucagaggg

SEQ ID NO: 212142 - RNA, 15 nt, Homo sapiens
uggcugcuagcacuu

SEQ ID NO: 212143 - RNA, 18 nt, Homo sapiens
ucugccagccagcagcca

SEQ ID NO: 212144 - RNA, 19 nt, Homo sapiens
aggccuccuuauuccccau

SEQ ID NO: 212145 - RNA, 15 nt, Homo sapiens
accgagcacauacca

SEQ ID NO: 212146 - RNA, 19 nt, Homo sapiens
ccuccaugaauaucaguua

SEQ ID NO: 212147 - RNA, 16 nt, Homo sapiens
ucuuaacuucuugcuu

SEQ ID NO: 212148 - RNA, 13 nt, Homo sapiens
caggaagcuguga

SEQ ID NO: 212149 - RNA, 14 nt, Homo sapiens
uauaaggacacuga

SEQ ID NO: 212150 - RNA, 16 nt, Homo sapiens
gcuaccucacuggggu

SEQ ID NO: 212151 - RNA, 15 nt, Homo sapiens
ucacacagagugccu

SEQ ID NO: 212152 - RNA, 22 nt, Homo sapiens
uccccuuuuauuaauacauuca

SEQ ID NO: 212153 - RNA, 16 nt, Homo sapiens
ugcagcccacugccug

SEQ ID NO: 212154 - RNA, 23 nt, Homo sapiens
auucugagguaaccucauuauca

SEQ ID NO: 212155 - RNA, 19 nt, Homo sapiens
aucucuccagcuagcaaaa

SEQ ID NO: 212156 - RNA, 20 nt, Homo sapiens
cugacauguacgauucacuc

SEQ ID NO: 212157 - RNA, 19 nt, Homo sapiens
cuuauccguuagccguggu

SEQ ID NO: 212158 - RNA, 15 nt, Homo sapiens
ccuugccagacaugu

SEQ ID NO: 212159 - RNA, 11 nt, Homo sapiens
cucaugcugcc

SEQ ID NO: 212160 - RNA, 21 nt, Homo sapiens
agugccacuuaauguauguua

SEQ ID NO: 212161 - RNA, 12 nt, Homo sapiens
aauacauucacc

SEQ ID NO: 212162 - RNA, 21 nt, Homo sapiens
agagccugaguguugccuaau

SEQ ID NO: 212163 - RNA, 19 nt, Homo sapiens
ccacugccugcccagugcc

SEQ ID NO: 212164 - RNA, 16 nt, Homo sapiens
agagccguuacuacac

SEQ ID NO: 212165 - RNA, 20 nt, Homo sapiens
agccguuacuacacacaaag

SEQ ID NO: 212166 - RNA, 15 nt, Homo sapiens
uaaaggcaguuuucu

SEQ ID NO: 212167 - RNA, 15 nt, Homo sapiens
ccagggaugacaugu

SEQ ID NO: 212168 - RNA, 17 nt, Homo sapiens
ucacgggaccaguauug

SEQ ID NO: 212169 - RNA, 21 nt, Homo sapiens
cacugccugcccagugccauc

SEQ ID NO: 212170 - RNA, 20 nt, Homo sapiens
uccuagaaacugacacaugc

SEQ ID NO: 212171 - RNA, 23 nt, Homo sapiens
ccccauguaucucaguaccccau

SEQ ID NO: 212172 - RNA, 14 nt, Homo sapiens
cucucuucucucca

SEQ ID NO: 212173 - RNA, 19 nt, Homo sapiens
uccccugaugggcccugac

SEQ ID NO: 212174 - RNA, 19 nt, Homo sapiens
acucagggccccagcacua

SEQ ID NO: 212175 - RNA, 16 nt, Homo sapiens
uauuaccaucucucca

SEQ ID NO: 212176 - RNA, 18 nt, Homo sapiens
uagcaaaauuacuaccag

SEQ ID NO: 212177 - RNA, 11 nt, Homo sapiens
acgguggugcc

SEQ ID NO: 212178 - RNA, 22 nt, Homo sapiens
acuaauagaauaaaggcaguuu

SEQ ID NO: 212179 - RNA, 13 nt, Homo sapiens
gcccagugccauc

SEQ ID NO: 212180 - RNA, 16 nt, Homo sapiens
ucuguauuccuagaaa

SEQ ID NO: 212181 - RNA, 17 nt, Homo sapiens
ccccugagcugaauaaa

SEQ ID NO: 212182 - RNA, 16 nt, Homo sapiens
ucuuccucccuggaau

SEQ ID NO: 212183 - RNA, 20 nt, Homo sapiens
aaaaaacguauugcauuuaa

SEQ ID NO: 212184 - RNA, 15 nt, Homo sapiens
auuggauuuccuaau

SEQ ID NO: 212185 - RNA, 13 nt, Homo sapiens
uccuaauacuguc

SEQ ID NO: 212186 - RNA, 11 nt, Homo sapiens
uuacaguucug

SEQ ID NO: 212187 - RNA, 16 nt, Homo sapiens
ccaagccaacccugug

SEQ ID NO: 212188 - RNA, 23 nt, Homo sapiens
aaggcuuagacccucaugcugcc

SEQ ID NO: 212189 - RNA, 22 nt, Homo sapiens
caacccgucuggcccaccaggg

SEQ ID NO: 212190 - RNA, 20 nt, Homo sapiens
acugaggcagacagcagcuc

SEQ ID NO: 212191 - RNA, 22 nt, Homo sapiens
guuuccauccccaggauccacu

SEQ ID NO: 212192 - RNA, 16 nt, Homo sapiens
cuuuuuuucuguacca

SEQ ID NO: 212193 - RNA, 22 nt, Homo sapiens
acuguggcugcuagcacuugga

SEQ ID NO: 212194 - RNA, 19 nt, Homo sapiens
auaaauauaucuaccccag

SEQ ID NO: 212195 - RNA, 17 nt, Homo sapiens
auaaaguuggugacaga

SEQ ID NO: 212196 - RNA, 17 nt, Homo sapiens
uacuauucaaucuuuac

SEQ ID NO: 212197 - RNA, 14 nt, Homo sapiens
cacugcagacauga

SEQ ID NO: 212198 - RNA, 22 nt, Homo sapiens
cuuggucugugagaugcuagaa

SEQ ID NO: 212199 - RNA, 14 nt, Homo sapiens
uacgauucacuccu

SEQ ID NO: 212200 - RNA, 18 nt, Homo sapiens
ucuuccccauaaucacug

SEQ ID NO: 212201 - RNA, 12 nt, Homo sapiens
ucaguaccccau

SEQ ID NO: 212202 - RNA, 17 nt, Homo sapiens
ccccaucugguccaguu

SEQ ID NO: 212203 - RNA, 13 nt, Homo sapiens
uucauuccccuga

SEQ ID NO: 212204 - RNA, 21 nt, Homo sapiens
gaguuaauauauagaagggua

SEQ ID NO: 212205 - RNA, 18 nt, Homo sapiens
acagcagcucaggcacac

SEQ ID NO: 212206 - RNA, 16 nt, Homo sapiens
cuuuggcaugagaugg

SEQ ID NO: 212207 - RNA, 13 nt, Homo sapiens
caacuaugauuau

SEQ ID NO: 212208 - RNA, 16 nt, Homo sapiens
uaaaguaugugcauau

SEQ ID NO: 212209 - RNA, 19 nt, Homo sapiens
aggaauacauaaaguaugu

SEQ ID NO: 212210 - RNA, 15 nt, Homo sapiens
gaggcagccggccaa

SEQ ID NO: 212211 - RNA, 19 nt, Homo sapiens
acagagccccacccucaga

SEQ ID NO: 212212 - RNA, 16 nt, Homo sapiens
ggccuucaguuuccau

SEQ ID NO: 212213 - RNA, 20 nt, Homo sapiens
agauuucagggaagcccuga

SEQ ID NO: 212214 - RNA, 14 nt, Homo sapiens
gaacucccuuucaa

SEQ ID NO: 212215 - RNA, 18 nt, Homo sapiens
uccccauaaucacugacc

SEQ ID NO: 212216 - RNA, 14 nt, Homo sapiens
ucuuccucccugga

SEQ ID NO: 212217 - RNA, 23 nt, Homo sapiens
auucauuuuucuuucugauguca

SEQ ID NO: 212218 - RNA, 16 nt, Homo sapiens
cucuccagcugacuaa

SEQ ID NO: 212219 - RNA, 12 nt, Homo sapiens
uguucuugugaa

SEQ ID NO: 212220 - RNA, 18 nt, Homo sapiens
aguuacaguucugugguu

SEQ ID NO: 212221 - RNA, 19 nt, Homo sapiens
cugaaguucaugcucccag

SEQ ID NO: 212222 - RNA, 18 nt, Homo sapiens
cugucacgugugggcaau

SEQ ID NO: 212223 - RNA, 14 nt, Homo sapiens
cuggaccugaaguu

SEQ ID NO: 212224 - RNA, 14 nt, Homo sapiens
cucaaagaaagugu

SEQ ID NO: 212225 - RNA, 21 nt, Homo sapiens
ucgauccccugucacgugugg

SEQ ID NO: 212226 - RNA, 23 nt, Homo sapiens
aaaaugucauuguucuugugaac

SEQ ID NO: 212227 - RNA, 20 nt, Homo sapiens
auucugcuaccucacugggg

SEQ ID NO: 212228 - RNA, 17 nt, Homo sapiens
auaaugucccuucacaa

SEQ ID NO: 212229 - RNA, 13 nt, Homo sapiens
uuguuuacccaau

SEQ ID NO: 212230 - RNA, 16 nt, Homo sapiens
augcugaacaucacag

SEQ ID NO: 212231 - RNA, 20 nt, Homo sapiens
caauuauuaccaucucucca

SEQ ID NO: 212232 - RNA, 19 nt, Homo sapiens
aaagcaguggacaccagga

SEQ ID NO: 212233 - RNA, 21 nt, Homo sapiens
aggguaccuugaacacugggg

SEQ ID NO: 212234 - RNA, 15 nt, Homo sapiens
agagcacacuguagc

SEQ ID NO: 212235 - RNA, 22 nt, Homo sapiens
agcucuggggugggcaguuuuu

SEQ ID NO: 212236 - RNA, 22 nt, Homo sapiens
uaguuguaauuuuuuuguggga

SEQ ID NO: 212237 - RNA, 14 nt, Homo sapiens
uuaauacauucacc

SEQ ID NO: 212238 - RNA, 19 nt, Homo sapiens
aacccaaagugugacucau

SEQ ID NO: 212239 - RNA, 15 nt, Homo sapiens
aagcaucuggcucua

SEQ ID NO: 212240 - RNA, 14 nt, Homo sapiens
gggaagacuguggc

SEQ ID NO: 212241 - RNA, 20 nt, Homo sapiens
cuuuugacacugcucuaaca

SEQ ID NO: 212242 - RNA, 18 nt, Homo sapiens
uaggagcaugagugccgu

SEQ ID NO: 212243 - RNA, 14 nt, Homo sapiens
ugcaaaccauccca

SEQ ID NO: 212244 - RNA, 17 nt, Homo sapiens
cgugcacgcacacuguc

SEQ ID NO: 212245 - RNA, 17 nt, Homo sapiens
gaugaacaaaucugcac

SEQ ID NO: 212246 - RNA, 17 nt, Homo sapiens
auuaauacauucaccca

SEQ ID NO: 212247 - RNA, 23 nt, Homo sapiens
cacucccaccugacacaccaggc

SEQ ID NO: 212248 - RNA, 15 nt, Homo sapiens
guaacuuucugcuga

SEQ ID NO: 212249 - RNA, 21 nt, Homo sapiens
cagggcucagccuggugggcc

SEQ ID NO: 212250 - RNA, 15 nt, Homo sapiens
gcaccccacuucaga

SEQ ID NO: 212251 - RNA, 16 nt, Homo sapiens
caggcucuccaggugg

SEQ ID NO: 212252 - RNA, 20 nt, Homo sapiens
agauggcauaaccugucuca

SEQ ID NO: 212253 - RNA, 11 nt, Homo sapiens
aaaggugacca

SEQ ID NO: 212254 - RNA, 19 nt, Homo sapiens
ucucauggguggcacucag

SEQ ID NO: 212255 - RNA, 14 nt, Homo sapiens
uuguugcugucaca

SEQ ID NO: 212256 - RNA, 16 nt, Homo sapiens
ucaacagaauucacuu

SEQ ID NO: 212257 - RNA, 22 nt, Homo sapiens
acaguuuauuauguacuauuca

SEQ ID NO: 212258 - RNA, 16 nt, Homo sapiens
acccucagaugcacau

SEQ ID NO: 212259 - RNA, 17 nt, Homo sapiens
acugucauccucaaaga

SEQ ID NO: 212260 - RNA, 13 nt, Homo sapiens
cccaggauccacu

SEQ ID NO: 212261 - RNA, 19 nt, Homo sapiens
uccuuagcuuagaccucag

SEQ ID NO: 212262 - RNA, 15 nt, Homo sapiens
aguuuauuauguacu

SEQ ID NO: 212263 - RNA, 18 nt, Homo sapiens
aagagccccccacugcag

SEQ ID NO: 212264 - RNA, 16 nt, Homo sapiens
aaauuaacaugugcca

SEQ ID NO: 212265 - RNA, 18 nt, Homo sapiens
cuagagcacacuguagca

SEQ ID NO: 212266 - RNA, 16 nt, Homo sapiens
cauguacgauucacuc

SEQ ID NO: 212267 - RNA, 18 nt, Homo sapiens
agccacuggacugacgac

SEQ ID NO: 212268 - RNA, 16 nt, Homo sapiens
auucaaucuuuacaca

SEQ ID NO: 212269 - RNA, 19 nt, Homo sapiens
ccccacugcagacaugacc

SEQ ID NO: 212270 - RNA, 20 nt, Homo sapiens
cccaugccaccggcuccacu

SEQ ID NO: 212271 - RNA, 21 nt, Homo sapiens
uuccuagaaacugacacaugc

SEQ ID NO: 212272 - RNA, 20 nt, Homo sapiens
cacugccugcccagugccau

SEQ ID NO: 212273 - RNA, 12 nt, Homo sapiens
caauuauuacca

SEQ ID NO: 212274 - RNA, 19 nt, Homo sapiens
uagcuuagaccucagccug

SEQ ID NO: 212275 - RNA, 14 nt, Homo sapiens
accccugagcugaa

SEQ ID NO: 212276 - RNA, 15 nt, Homo sapiens
aggcucuccaggugg

SEQ ID NO: 212277 - RNA, 19 nt, Homo sapiens
ugucugccagccagcagcc

SEQ ID NO: 212278 - RNA, 20 nt, Homo sapiens
gggguagaaggauccuccaa

SEQ ID NO: 212279 - RNA, 22 nt, Homo sapiens
cugggcuaaguaaauaggaauu

SEQ ID NO: 212280 - RNA, 18 nt, Homo sapiens
acagcccuuaugcgguua

SEQ ID NO: 212281 - RNA, 21 nt, Homo sapiens
cagcuagcaaaauuacuacca

SEQ ID NO: 212282 - RNA, 14 nt, Homo sapiens
aaucuuuacacaau

SEQ ID NO: 212283 - RNA, 13 nt, Homo sapiens
cccuucucuguau

SEQ ID NO: 212284 - RNA, 13 nt, Homo sapiens
gagugccugccuc

SEQ ID NO: 212285 - RNA, 12 nt, Homo sapiens
agauggccauau

SEQ ID NO: 212286 - RNA, 16 nt, Homo sapiens
cucaguagucagacug

SEQ ID NO: 212287 - RNA, 17 nt, Homo sapiens
agcuaaggacacagugg

SEQ ID NO: 212288 - RNA, 23 nt, Homo sapiens
aggcaacugaggcagacagcagc

SEQ ID NO: 212289 - RNA, 15 nt, Homo sapiens
cauguaucucaguac

SEQ ID NO: 212290 - RNA, 12 nt, Homo sapiens
agaacagccgcu

SEQ ID NO: 212291 - RNA, 10 nt, Homo sapiens
ggcaguuuuu

SEQ ID NO: 212292 - RNA, 22 nt, Homo sapiens
gcccucagaaucgcuccaccuu

SEQ ID NO: 212293 - RNA, 20 nt, Homo sapiens
gcccacugccugcccagugc

SEQ ID NO: 212294 - RNA, 19 nt, Homo sapiens
aacccaucuuccuggaccu

SEQ ID NO: 212295 - RNA, 20 nt, Homo sapiens
ugacucuuccccauaaucac

SEQ ID NO: 212296 - RNA, 14 nt, Homo sapiens
uggaaauaaaguca

SEQ ID NO: 212297 - RNA, 13 nt, Homo sapiens
uuuauuauauaua

SEQ ID NO: 212298 - RNA, 18 nt, Homo sapiens
aggcagccacuccuagcc

SEQ ID NO: 212299 - RNA, 17 nt, Homo sapiens
ugucacaauuauuacca

SEQ ID NO: 212300 - RNA, 16 nt, Homo sapiens
gcacuuuaaacauuua

SEQ ID NO: 212301 - RNA, 24 nt, Homo sapiens
ggcuuuaaaacuuauccuccauga

SEQ ID NO: 212302 - RNA, 13 nt, Homo sapiens
ugcagcccacugc

SEQ ID NO: 212303 - RNA, 18 nt, Homo sapiens
ugcugaacaucacagcuu

SEQ ID NO: 212304 - RNA, 17 nt, Homo sapiens
acgcacacugucugccc

SEQ ID NO: 212305 - RNA, 15 nt, Homo sapiens
ccccauaaucacuga

SEQ ID NO: 212306 - RNA, 18 nt, Homo sapiens
uccuuagcuuagaccuca

SEQ ID NO: 212307 - RNA, 15 nt, Homo sapiens
aucuucaucugugaa

SEQ ID NO: 212308 - RNA, 12 nt, Homo sapiens
gucagacuggau

SEQ ID NO: 212309 - RNA, 16 nt, Homo sapiens
uugcaaaccaucccag

SEQ ID NO: 212310 - RNA, 23 nt, Homo sapiens
gaggcuccacuuggucugugaga

SEQ ID NO: 212311 - RNA, 19 nt, Homo sapiens
agacuagauguaguauuuu

SEQ ID NO: 212312 - RNA, 17 nt, Homo sapiens
auacuuguugcugucac

SEQ ID NO: 212313 - RNA, 19 nt, Homo sapiens
gauuuagcaggaagcugug

SEQ ID NO: 212314 - RNA, 14 nt, Homo sapiens
ccaauuuuuuauaa

SEQ ID NO: 212315 - RNA, 21 nt, Homo sapiens
gucuuaggaugugucuugggg

SEQ ID NO: 212316 - RNA, 22 nt, Homo sapiens
cccagaggagccaccaguucuc

SEQ ID NO: 212317 - RNA, 13 nt, Homo sapiens
cucaguaccccau

SEQ ID NO: 212318 - RNA, 22 nt, Homo sapiens
ucuuguaaagguccuggcaaag

SEQ ID NO: 212319 - RNA, 17 nt, Homo sapiens
gccaucaggaugagcag

SEQ ID NO: 212320 - RNA, 16 nt, Homo sapiens
uaaagcuuugugcaga

SEQ ID NO: 212321 - RNA, 14 nt, Homo sapiens
gcccccugaccugg

SEQ ID NO: 212322 - RNA, 16 nt, Homo sapiens
uaauacauucacccag

SEQ ID NO: 212323 - RNA, 23 nt, Homo sapiens
acauguggugggacagggaccca

SEQ ID NO: 212324 - RNA, 15 nt, Homo sapiens
aucucaguaccccau

SEQ ID NO: 212325 - RNA, 18 nt, Homo sapiens
acuaucaaacugaagcca

SEQ ID NO: 212326 - RNA, 18 nt, Homo sapiens
auuggggaagacuguggc

SEQ ID NO: 212327 - RNA, 22 nt, Homo sapiens
cuaauagaauaaaggcaguuuu

SEQ ID NO: 212328 - RNA, 13 nt, Homo sapiens
cugucagcugcaa

SEQ ID NO: 212329 - RNA, 20 nt, Homo sapiens
agaccucggugggcauucac

SEQ ID NO: 212330 - RNA, 20 nt, Homo sapiens
ucacaccaccccccaugcca

SEQ ID NO: 212331 - RNA, 14 nt, Homo sapiens
cuucacuuacagau

SEQ ID NO: 212332 - RNA, 18 nt, Homo sapiens
aaucacugaccagccuug

SEQ ID NO: 212333 - RNA, 23 nt, Homo sapiens
uccuggcaaagaugaucaguaug

SEQ ID NO: 212334 - RNA, 20 nt, Homo sapiens
aguauuuagaagccaacuau

SEQ ID NO: 212335 - RNA, 18 nt, Homo sapiens
auucuuuacccccuggga

SEQ ID NO: 212336 - RNA, 19 nt, Homo sapiens
cauguggugggacagggac

SEQ ID NO: 212337 - RNA, 18 nt, Homo sapiens
cuagaaagagaaacaguu

SEQ ID NO: 212338 - RNA, 19 nt, Homo sapiens
uugaccgagcacauaccau

SEQ ID NO: 212339 - RNA, 20 nt, Homo sapiens
cagggcccugagcucggugg

SEQ ID NO: 212340 - RNA, 16 nt, Homo sapiens
ugagucuuuggaugcc

SEQ ID NO: 212341 - RNA, 22 nt, Homo sapiens
auuuuuuugugggaaauccaca

SEQ ID NO: 212342 - RNA, 15 nt, Homo sapiens
ccccaggauccacuu

SEQ ID NO: 212343 - RNA, 21 nt, Homo sapiens
cauuccccugaugggcccuga

SEQ ID NO: 212344 - RNA, 13 nt, Homo sapiens
augggacagggag

SEQ ID NO: 212345 - RNA, 18 nt, Homo sapiens
accauuuuugaaaccaaa

SEQ ID NO: 212346 - RNA, 20 nt, Homo sapiens
cagggaagcccugacugugu

SEQ ID NO: 212347 - RNA, 17 nt, Homo sapiens
cagaccucggugggcau

SEQ ID NO: 212348 - RNA, 14 nt, Homo sapiens
ccaugggacaggga

SEQ ID NO: 212349 - RNA, 16 nt, Homo sapiens
caaugcauucugaggu

SEQ ID NO: 212350 - RNA, 17 nt, Homo sapiens
uuauuauguacuauuca

SEQ ID NO: 212351 - RNA, 15 nt, Homo sapiens
gaauacauaaaguau

SEQ ID NO: 212352 - RNA, 18 nt, Homo sapiens
uaguuaccuuauaguuac

SEQ ID NO: 212353 - RNA, 20 nt, Homo sapiens
uucagccuagccgaccucag

SEQ ID NO: 212354 - RNA, 13 nt, Homo sapiens
ccuagaaacugac

SEQ ID NO: 212355 - RNA, 12 nt, Homo sapiens
uggucugugaga

SEQ ID NO: 212356 - RNA, 13 nt, Homo sapiens
aagucaucuugcu

SEQ ID NO: 212357 - RNA, 18 nt, Homo sapiens
gcccuccucugcacuccc

SEQ ID NO: 212358 - RNA, 17 nt, Homo sapiens
cccaaguucaugcagcu

SEQ ID NO: 212359 - RNA, 16 nt, Homo sapiens
accccaggcagccacu

SEQ ID NO: 212360 - RNA, 19 nt, Homo sapiens
acccucagaugcacaugag

SEQ ID NO: 212361 - RNA, 21 nt, Homo sapiens
gugaauuaggcuguaacuacu

SEQ ID NO: 212362 - RNA, 14 nt, Homo sapiens
acuuggucugugag

SEQ ID NO: 212363 - RNA, 14 nt, Homo sapiens
agaaaguguauuug

SEQ ID NO: 212364 - RNA, 19 nt, Homo sapiens
aggaagcugugagagcagu

SEQ ID NO: 212365 - RNA, 17 nt, Human respiratory syncytial virus
uuguaagaaaacuugau

SEQ ID NO: 212366 - RNA, 13 nt, Human respiratory syncytial virus
uggauaaccacca

SEQ ID NO: 212367 - RNA, 22 nt, Human respiratory syncytial virus
uggagcugcugauccacagguu

SEQ ID NO: 212368 - RNA, 16 nt, Human respiratory syncytial virus
ugcuuggccauaacga

SEQ ID NO: 212369 - RNA, 16 nt, Human respiratory syncytial virus
ugcuauuaaugcauug

SEQ ID NO: 212370 - RNA, 21 nt, Human respiratory syncytial virus
uguccaaacacaagaaucaac

SEQ ID NO: 212371 - RNA, 14 nt, Human respiratory syncytial virus
ugucacuacaguca

SEQ ID NO: 212372 - RNA, 12 nt, Human respiratory syncytial virus
uguaccagcaga

SEQ ID NO: 212373 - RNA, 20 nt, Human respiratory syncytial virus
uguaccagcagacuugcuca

SEQ ID NO: 212374 - RNA, 14 nt, Human respiratory syncytial virus
uguaccucaccuca

SEQ ID NO: 212375 - RNA, 19 nt, Human respiratory syncytial virus
uuaaucacugaagaugcaa

SEQ ID NO: 212376 - RNA, 20 nt, Human respiratory syncytial virus
uuaauauaaaaacucaucaa

SEQ ID NO: 212377 - RNA, 21 nt, Human respiratory syncytial virus
uuaugaugugcaaaaacaccu

SEQ ID NO: 212378 - RNA, 21 nt, Human respiratory syncytial virus
uuauuuaaaagguguuaucuc

SEQ ID NO: 212379 - RNA, 19 nt, Human respiratory syncytial virus
uuagaagaaccaacuuauu

SEQ ID NO: 212380 - RNA, 16 nt, Human respiratory syncytial virus
uuagaguucaaucaau

SEQ ID NO: 212381 - RNA, 18 nt, Human respiratory syncytial virus
uucaacguaguacaggag

SEQ ID NO: 212382 - RNA, 17 nt, Human respiratory syncytial virus
uucaacaacagucugcu

SEQ ID NO: 212383 - RNA, 14 nt, Human respiratory syncytial virus
uucaaucaaucuca

SEQ ID NO: 212384 - RNA, 20 nt, Human respiratory syncytial virus
uugcaagcaucaacauacua

SEQ ID NO: 212385 - RNA, 22 nt, Human respiratory syncytial virus
uucuggcaaugauaaucucaac

SEQ ID NO: 212386 - RNA, 19 nt, Human respiratory syncytial virus
ucauaaugcuuggccauaa

SEQ ID NO: 212387 - RNA, 16 nt, Human respiratory syncytial virus
ucauaacaauagaauu

SEQ ID NO: 212388 - RNA, 12 nt, Human respiratory syncytial virus
ucagcaaucaac

SEQ ID NO: 212389 - RNA, 17 nt, Human respiratory syncytial virus
ucaccuaaucaaucaaa

SEQ ID NO: 212390 - RNA, 16 nt, Human respiratory syncytial virus
ucaccccaagugacaa

SEQ ID NO: 212391 - RNA, 19 nt, Human respiratory syncytial virus
ucaccaaagaaaucaucac

SEQ ID NO: 212392 - RNA, 15 nt, Human respiratory syncytial virus
ucacuacagucauaa

SEQ ID NO: 212393 - RNA, 17 nt, Human respiratory syncytial virus
uauccucaaacuacaca

SEQ ID NO: 212394 - RNA, 19 nt, Human respiratory syncytial virus
ucacaguacaggcugaauc

SEQ ID NO: 212395 - RNA, 23 nt, Human respiratory syncytial virus
ucacagagucauggugucgcaaa

SEQ ID NO: 212396 - RNA, 21 nt, Human respiratory syncytial virus
uccuguauauauaaacaaaca

SEQ ID NO: 212397 - RNA, 17 nt, Human respiratory syncytial virus
ucgcaaaaccacgccaa

SEQ ID NO: 212398 - RNA, 11 nt, Human respiratory syncytial virus
uccaucacaau

SEQ ID NO: 212399 - RNA, 18 nt, Human respiratory syncytial virus
uccacuacuagagcauau

SEQ ID NO: 212400 - RNA, 16 nt, Human respiratory syncytial virus
uccaaaaucacuacca

SEQ ID NO: 212401 - RNA, 17 nt, Human respiratory syncytial virus
ucauuucuucacaucau

SEQ ID NO: 212402 - RNA, 17 nt, Human respiratory syncytial virus
ucgcaucauccaaagau

SEQ ID NO: 212403 - RNA, 12 nt, Human respiratory syncytial virus
ucuagauaucau

SEQ ID NO: 212404 - RNA, 22 nt, Human respiratory syncytial virus
ucucucauaauugcagccauaa

SEQ ID NO: 212405 - RNA, 17 nt, Human respiratory syncytial virus
ucuguuaacucaauaga

SEQ ID NO: 212406 - RNA, 15 nt, Human respiratory syncytial virus
ugauccaucagcaac

SEQ ID NO: 212407 - RNA, 12 nt, Human respiratory syncytial virus
ugaucaacucac

SEQ ID NO: 212408 - RNA, 18 nt, Human respiratory syncytial virus
ugaucaacucacucagca

SEQ ID NO: 212409 - RNA, 23 nt, Human respiratory syncytial virus
ugcaagcaucaacauacuaguga

SEQ ID NO: 212410 - RNA, 11 nt, Human respiratory syncytial virus
ugcaauggaac

SEQ ID NO: 212411 - RNA, 22 nt, Human respiratory syncytial virus
ugaugauccugcaucacuaaca

SEQ ID NO: 212412 - RNA, 13 nt, Human respiratory syncytial virus
ugauccugcauca

SEQ ID NO: 212413 - RNA, 20 nt, Human respiratory syncytial virus
ugaaauucauuggacaccua

SEQ ID NO: 212414 - RNA, 13 nt, Human respiratory syncytial virus
ugaacaagcuuca

SEQ ID NO: 212415 - RNA, 18 nt, Human respiratory syncytial virus
ugaacaucuacacuacac

SEQ ID NO: 212416 - RNA, 17 nt, Human respiratory syncytial virus
ugacaacacuacuaugc

SEQ ID NO: 212417 - RNA, 14 nt, Human respiratory syncytial virus
ugacacuaaaguaa

SEQ ID NO: 212418 - RNA, 21 nt, Human respiratory syncytial virus
aaugacaacacuacuaugcaa

SEQ ID NO: 212419 - RNA, 14 nt, Human respiratory syncytial virus
acaaacaaauccaa

SEQ ID NO: 212420 - RNA, 15 nt, Human respiratory syncytial virus
acaaacaaauccaau

SEQ ID NO: 212421 - RNA, 22 nt, Human respiratory syncytial virus
acaaacaaauccaaucuucuca

SEQ ID NO: 212422 - RNA, 18 nt, Human respiratory syncytial virus
acaaaagcauagacacuu

SEQ ID NO: 212423 - RNA, 12 nt, Human respiratory syncytial virus
acaaacacuuca

SEQ ID NO: 212424 - RNA, 16 nt, Human respiratory syncytial virus
acaaauagcacuauca

SEQ ID NO: 212425 - RNA, 18 nt, Human respiratory syncytial virus
acaaauccaaucuucuca

SEQ ID NO: 212426 - RNA, 19 nt, Human respiratory syncytial virus
acaaauccaaucuucucac

SEQ ID NO: 212427 - RNA, 22 nt, Human respiratory syncytial virus
acaacauuggggcaaaugcaac

SEQ ID NO: 212428 - RNA, 20 nt, Human respiratory syncytial virus
acaacagucugcugaucacc

SEQ ID NO: 212429 - RNA, 17 nt, Human respiratory syncytial virus
acaacacuacuaugcaa

SEQ ID NO: 212430 - RNA, 22 nt, Human respiratory syncytial virus
acaacaucaauaaaacagacau

SEQ ID NO: 212431 - RNA, 16 nt, Human respiratory syncytial virus
acaaucaaacacuaaa

SEQ ID NO: 212432 - RNA, 17 nt, Human respiratory syncytial virus
acaaugauacaugugca

SEQ ID NO: 212433 - RNA, 16 nt, Human respiratory syncytial virus
acaauagaauuaagua

SEQ ID NO: 212434 - RNA, 20 nt, Human respiratory syncytial virus
acaaguuuggucaaauuuag

SEQ ID NO: 212435 - RNA, 22 nt, Human respiratory syncytial virus
acagagucauggugucgcaaaa

SEQ ID NO: 212436 - RNA, 14 nt, Human respiratory syncytial virus
acacuucaacauca

SEQ ID NO: 212437 - RNA, 13 nt, Human respiratory syncytial virus
acaccuaaacaaa

SEQ ID NO: 212438 - RNA, 16 nt, Human respiratory syncytial virus
acacacuucaucacac

SEQ ID NO: 212439 - RNA, 17 nt, Human respiratory syncytial virus
acacacuauauccaaac

SEQ ID NO: 212440 - RNA, 12 nt, Human respiratory syncytial virus
acacaucauuca

SEQ ID NO: 212441 - RNA, 15 nt, Human respiratory syncytial virus
acaauuuaaccauaa

SEQ ID NO: 212442 - RNA, 23 nt, Human respiratory syncytial virus
acagauuaaauuuaaaaucuaua

SEQ ID NO: 212443 - RNA, 22 nt, Human respiratory syncytial virus
acaguaccccagaaaccaaagc

SEQ ID NO: 212444 - RNA, 15 nt, Human respiratory syncytial virus
acauacacagcagcu

SEQ ID NO: 212445 - RNA, 12 nt, Human respiratory syncytial virus
acaucaauccau

SEQ ID NO: 212446 - RNA, 15 nt, Human respiratory syncytial virus
acauauauccucaaa

SEQ ID NO: 212447 - RNA, 17 nt, Human respiratory syncytial virus
acaucucucaccaaaga

SEQ ID NO: 212448 - RNA, 13 nt, Human respiratory syncytial virus
acuaauacauaug

SEQ ID NO: 212449 - RNA, 15 nt, Human respiratory syncytial virus
acuaauacauaugau

SEQ ID NO: 212450 - RNA, 22 nt, Human respiratory syncytial virus
acuaacuauaacacagucauua

SEQ ID NO: 212451 - RNA, 14 nt, Human respiratory syncytial virus
acuaaaucaacaca

SEQ ID NO: 212452 - RNA, 18 nt, Human respiratory syncytial virus
acuaaaucaacacaucau

SEQ ID NO: 212453 - RNA, 18 nt, Human respiratory syncytial virus
acuaucaugguagcauag

SEQ ID NO: 212454 - RNA, 20 nt, Human respiratory syncytial virus
acuaugugguaugcuauuaa

SEQ ID NO: 212455 - RNA, 22 nt, Human respiratory syncytial virus
acuacuaugcaaagauuaauga

SEQ ID NO: 212456 - RNA, 15 nt, Human respiratory syncytial virus
acucaaaauccaaaa

SEQ ID NO: 212457 - RNA, 21 nt, Human respiratory syncytial virus
acuauuaugauugcaauacua

SEQ ID NO: 212458 - RNA, 20 nt, Human respiratory syncytial virus
acugccagaccgaacaaaca

SEQ ID NO: 212459 - RNA, 13 nt, Human respiratory syncytial virus
accaaucaaucaa

SEQ ID NO: 212460 - RNA, 22 nt, Human respiratory syncytial virus
accaacuuauuuccagucauua

SEQ ID NO: 212461 - RNA, 19 nt, Human respiratory syncytial virus
accucaaguaucacaauca

SEQ ID NO: 212462 - RNA, 19 nt, Human respiratory syncytial virus
accucaagucagaacauaa

SEQ ID NO: 212463 - RNA, 20 nt, Human respiratory syncytial virus
accucaagucagaacauaac

SEQ ID NO: 212464 - RNA, 15 nt, Human respiratory syncytial virus
accuagagugcgaau

SEQ ID NO: 212465 - RNA, 19 nt, Human respiratory syncytial virus
acgauucuauaucauccaa

SEQ ID NO: 212466 - RNA, 16 nt, Human respiratory syncytial virus
accugggauacucuca

SEQ ID NO: 212467 - RNA, 19 nt, Human respiratory syncytial virus
agauauagaaguaaccaaa

SEQ ID NO: 212468 - RNA, 22 nt, Human respiratory syncytial virus
agauauagaaguaaccaaagag

SEQ ID NO: 212469 - RNA, 20 nt, Human respiratory syncytial virus
agauaaguauaagaaugcag

SEQ ID NO: 212470 - RNA, 15 nt, Human respiratory syncytial virus
agauuaaugaucacg

SEQ ID NO: 212471 - RNA, 15 nt, Human respiratory syncytial virus
agaugcuaacacauc

SEQ ID NO: 212472 - RNA, 15 nt, Human respiratory syncytial virus
aggaguuuuaccaau

SEQ ID NO: 212473 - RNA, 13 nt, Human respiratory syncytial virus
aggcaaaacuuca

SEQ ID NO: 212474 - RNA, 22 nt, Human respiratory syncytial virus
auaacgauucuauaucauccaa

SEQ ID NO: 212475 - RNA, 14 nt, Human respiratory syncytial virus
auaagaaugcagug

SEQ ID NO: 212476 - RNA, 17 nt, Human respiratory syncytial virus
auaaucacuauuaugau

SEQ ID NO: 212477 - RNA, 19 nt, Human respiratory syncytial virus
auacaagaaauacacugaa

SEQ ID NO: 212478 - RNA, 16 nt, Human respiratory syncytial virus
auaccagugucauaac

SEQ ID NO: 212479 - RNA, 14 nt, Human respiratory syncytial virus
auaauuacuuugaa

SEQ ID NO: 212480 - RNA, 17 nt, Human respiratory syncytial virus
auagguauguuauaugc

SEQ ID NO: 212481 - RNA, 23 nt, Human respiratory syncytial virus
auagguauguuauaugcuauguc

SEQ ID NO: 212482 - RNA, 15 nt, Human respiratory syncytial virus
auauccaaacaucau

SEQ ID NO: 212483 - RNA, 17 nt, Human respiratory syncytial virus
auaucauccaaccauaa

SEQ ID NO: 212484 - RNA, 23 nt, Human respiratory syncytial virus
auauaaaagaaaccaaaugcaau

SEQ ID NO: 212485 - RNA, 13 nt, Human respiratory syncytial virus
aucaaucucaaca

SEQ ID NO: 212486 - RNA, 22 nt, Human respiratory syncytial virus
aucacaaucaaacacuaaauca

SEQ ID NO: 212487 - RNA, 16 nt, Human respiratory syncytial virus
aucacacaaaccaauc

SEQ ID NO: 212488 - RNA, 21 nt, Human respiratory syncytial virus
aucacacaaaccaaucccacu

SEQ ID NO: 212489 - RNA, 17 nt, Human respiratory syncytial virus
aguuaauauaaaaacuc

SEQ ID NO: 212490 - RNA, 19 nt, Human respiratory syncytial virus
aguuaauauaaaaacucau

SEQ ID NO: 212491 - RNA, 15 nt, Human respiratory syncytial virus
agugaagcagaucuc

SEQ ID NO: 212492 - RNA, 21 nt, Human respiratory syncytial virus
auaaaagaaaccaaaugcaau

SEQ ID NO: 212493 - RNA, 18 nt, Human respiratory syncytial virus
auaaacucaccuaaucaa

SEQ ID NO: 212494 - RNA, 14 nt, Human respiratory syncytial virus
auaaagauacuuaa

SEQ ID NO: 212495 - RNA, 21 nt, Human respiratory syncytial virus
aguacaggcugaaucauuucu

SEQ ID NO: 212496 - RNA, 18 nt, Human respiratory syncytial virus
agucauaauuacuuugaa

SEQ ID NO: 212497 - RNA, 21 nt, Human respiratory syncytial virus
augcuuuagggaguuaccuuu

SEQ ID NO: 212498 - RNA, 17 nt, Human respiratory syncytial virus
auggauucaauaauaac

SEQ ID NO: 212499 - RNA, 12 nt, Human respiratory syncytial virus
auguagugcagu

SEQ ID NO: 212500 - RNA, 12 nt, Human respiratory syncytial virus
auguuccaguca

SEQ ID NO: 212501 - RNA, 16 nt, Human respiratory syncytial virus
auuaaaaaauaugcaa

SEQ ID NO: 212502 - RNA, 21 nt, Human respiratory syncytial virus
auugaaucaacugccagaccg

SEQ ID NO: 212503 - RNA, 14 nt, Human respiratory syncytial virus
auucacaggauuaa

SEQ ID NO: 212504 - RNA, 14 nt, Human respiratory syncytial virus
augauccugcauca

SEQ ID NO: 212505 - RNA, 18 nt, Human respiratory syncytial virus
augaucuuaacucuaauc

SEQ ID NO: 212506 - RNA, 15 nt, Human respiratory syncytial virus
aucacaguacaggcu

SEQ ID NO: 212507 - RNA, 13 nt, Human respiratory syncytial virus
aucuuccuaacuc

SEQ ID NO: 212508 - RNA, 17 nt, Human respiratory syncytial virus
augcagugacagaauua

SEQ ID NO: 212509 - RNA, 17 nt, Human respiratory syncytial virus
augcaauggaacugaca

SEQ ID NO: 212510 - RNA, 18 nt, Human respiratory syncytial virus
augauugcaauacuaaau

SEQ ID NO: 212511 - RNA, 22 nt, Human respiratory syncytial virus
augcaaaacacaccagcugcca

SEQ ID NO: 212512 - RNA, 20 nt, Human respiratory syncytial virus
augcaaagauuaaugaucac

SEQ ID NO: 212513 - RNA, 18 nt, Human respiratory syncytial virus
augcuauguccagguuag

SEQ ID NO: 212514 - RNA, 21 nt, Human respiratory syncytial virus
augcuacccacacaacuaagc

SEQ ID NO: 212515 - RNA, 22 nt, Human respiratory syncytial virus
augcugugucaaauuauaaucc

SEQ ID NO: 212516 - RNA, 18 nt, Human respiratory syncytial virus
auuuccagucauuacuua

SEQ ID NO: 212517 - RNA, 21 nt, Human respiratory syncytial virus
auuucuccaacaucuuaacau

SEQ ID NO: 212518 - RNA, 14 nt, Human respiratory syncytial virus
auuucuucacauca

SEQ ID NO: 212519 - RNA, 15 nt, Human respiratory syncytial virus
caaaaucacuaccag

SEQ ID NO: 212520 - RNA, 15 nt, Human respiratory syncytial virus
caaaauccaaaauca

SEQ ID NO: 212521 - RNA, 18 nt, Human respiratory syncytial virus
caaaauccaaaaucacua

SEQ ID NO: 212522 - RNA, 15 nt, Human respiratory syncytial virus
caaaacuucauguua

SEQ ID NO: 212523 - RNA, 17 nt, Human respiratory syncytial virus
caaagauuaaugaucac

SEQ ID NO: 212524 - RNA, 13 nt, Human respiratory syncytial virus
caaauaacaaagc

SEQ ID NO: 212525 - RNA, 12 nt, Human respiratory syncytial virus
caaauaaacuca

SEQ ID NO: 212526 - RNA, 15 nt, Human respiratory syncytial virus
caaaguccacuacua

SEQ ID NO: 212527 - RNA, 17 nt, Human respiratory syncytial virus
caaccauguccaaacac

SEQ ID NO: 212528 - RNA, 12 nt, Human respiratory syncytial virus
caaccaaaccaa

SEQ ID NO: 212529 - RNA, 13 nt, Human respiratory syncytial virus
caaccaaucaauc

SEQ ID NO: 212530 - RNA, 24 nt, Human respiratory syncytial virus
caacagucugcugaucaccaaucc

SEQ ID NO: 212531 - RNA, 16 nt, Human respiratory syncytial virus
caacaucacaguacag

SEQ ID NO: 212532 - RNA, 18 nt, Human respiratory syncytial virus
caacuaacuuacuuaaaa

SEQ ID NO: 212533 - RNA, 20 nt, Human respiratory syncytial virus
caacuaucaugguagcauag

SEQ ID NO: 212534 - RNA, 14 nt, Human respiratory syncytial virus
caacuacccaagaa

SEQ ID NO: 212535 - RNA, 22 nt, Human respiratory syncytial virus
caaccugacgaaauuaacaaua

SEQ ID NO: 212536 - RNA, 22 nt, Human respiratory syncytial virus
caagugaaagcaugauugcuac

SEQ ID NO: 212537 - RNA, 20 nt, Human respiratory syncytial virus
caagaaucaacgcacugcca

SEQ ID NO: 212538 - RNA, 15 nt, Human respiratory syncytial virus
cacaacuaagcuaga

SEQ ID NO: 212539 - RNA, 17 nt, Human respiratory syncytial virus
caaucaacaacaucaau

SEQ ID NO: 212540 - RNA, 22 nt, Human respiratory syncytial virus
caaucauaaaaacauauuacaa

SEQ ID NO: 212541 - RNA, 22 nt, Human respiratory syncytial virus
caaguucgcaucauccaaagau

SEQ ID NO: 212542 - RNA, 22 nt, Human respiratory syncytial virus
caauaaaacagacaucaaucca

SEQ ID NO: 212543 - RNA, 15 nt, Human respiratory syncytial virus
caauccaacaaguga

SEQ ID NO: 212544 - RNA, 15 nt, Human respiratory syncytial virus
caauuucuccaacau

SEQ ID NO: 212545 - RNA, 17 nt, Human respiratory syncytial virus
caugcuacccacacaac

SEQ ID NO: 212546 - RNA, 20 nt, Human respiratory syncytial virus
caugcuacccacacaacuaa

SEQ ID NO: 212547 - RNA, 21 nt, Human respiratory syncytial virus
ccaaucgacauguagugcagu

SEQ ID NO: 212548 - RNA, 21 nt, Human respiratory syncytial virus
ccaaucccacucaaaauccaa

SEQ ID NO: 212549 - RNA, 18 nt, Human respiratory syncytial virus
ccaaaucaacccauaaca

SEQ ID NO: 212550 - RNA, 14 nt, Human respiratory syncytial virus
ccaacaucuuaaca

SEQ ID NO: 212551 - RNA, 12 nt, Human respiratory syncytial virus
ccaaccaaucaa

SEQ ID NO: 212552 - RNA, 19 nt, Human respiratory syncytial virus
ccaaauacaagaaauacac

SEQ ID NO: 212553 - RNA, 13 nt, Human respiratory syncytial virus
cauuucuucacau

SEQ ID NO: 212554 - RNA, 15 nt, Human respiratory syncytial virus
cauuucuucacauca

SEQ ID NO: 212555 - RNA, 16 nt, Human respiratory syncytial virus
cauuucuucacaucau

SEQ ID NO: 212556 - RNA, 19 nt, Human respiratory syncytial virus
cauuucuucacaucaugcu

SEQ ID NO: 212557 - RNA, 16 nt, Human respiratory syncytial virus
ccauaacaaacacuuc

SEQ ID NO: 212558 - RNA, 19 nt, Human respiratory syncytial virus
ccauaaaacuaucuuaaua

SEQ ID NO: 212559 - RNA, 13 nt, Human respiratory syncytial virus
ccaauucaauaca

SEQ ID NO: 212560 - RNA, 18 nt, Human respiratory syncytial virus
ccaauucaauacauauac

SEQ ID NO: 212561 - RNA, 23 nt, Human respiratory syncytial virus
ccacauauauccucaaacuacac

SEQ ID NO: 212562 - RNA, 18 nt, Human respiratory syncytial virus
ccacagguuaagugcaau

SEQ ID NO: 212563 - RNA, 15 nt, Human respiratory syncytial virus
ccacauacacagcag

SEQ ID NO: 212564 - RNA, 18 nt, Human respiratory syncytial virus
ccauuuggauaaccacca

SEQ ID NO: 212565 - RNA, 15 nt, Human respiratory syncytial virus
cagcuacuuaugcaa

SEQ ID NO: 212566 - RNA, 19 nt, Human respiratory syncytial virus
caguaccccagaaaccaaa

SEQ ID NO: 212567 - RNA, 20 nt, Human respiratory syncytial virus
caguaccccagaaaccaaag

SEQ ID NO: 212568 - RNA, 18 nt, Human respiratory syncytial virus
cagucauuaauaucuaga

SEQ ID NO: 212569 - RNA, 18 nt, Human respiratory syncytial virus
cagguugguauaccagug

SEQ ID NO: 212570 - RNA, 22 nt, Human respiratory syncytial virus
cagguugguauaccagugucau

SEQ ID NO: 212571 - RNA, 15 nt, Human respiratory syncytial virus
cagguccacauauau

SEQ ID NO: 212572 - RNA, 22 nt, Human respiratory syncytial virus
cauaaaaacauauuacaauuua

SEQ ID NO: 212573 - RNA, 14 nt, Human respiratory syncytial virus
caucauccaaagau

SEQ ID NO: 212574 - RNA, 16 nt, Human respiratory syncytial virus
caucaucucugccaau

SEQ ID NO: 212575 - RNA, 21 nt, Human respiratory syncytial virus
caucaucucugccaaucacaa

SEQ ID NO: 212576 - RNA, 21 nt, Human respiratory syncytial virus
caucaugaacaucuacacuac

SEQ ID NO: 212577 - RNA, 21 nt, Human respiratory syncytial virus
cauauuacaauuuaaccauaa

SEQ ID NO: 212578 - RNA, 20 nt, Human respiratory syncytial virus
cauaugaucuuaacucuaau

SEQ ID NO: 212579 - RNA, 13 nt, Human respiratory syncytial virus
cauauacuugaua

SEQ ID NO: 212580 - RNA, 21 nt, Human respiratory syncytial virus
caucuggcaccaacaucauca

SEQ ID NO: 212581 - RNA, 14 nt, Human respiratory syncytial virus
cauccaucacaaua

SEQ ID NO: 212582 - RNA, 16 nt, Human respiratory syncytial virus
guauaagaaugcagug

SEQ ID NO: 212583 - RNA, 17 nt, Human respiratory syncytial virus
guauaagaaugcaguga

SEQ ID NO: 212584 - RNA, 14 nt, Human respiratory syncytial virus
gguuaagugcaauc

SEQ ID NO: 212585 - RNA, 20 nt, Human respiratory syncytial virus
ggaucaaaaacaacauuggg

SEQ ID NO: 212586 - RNA, 22 nt, Human respiratory syncytial virus
gcuauuaaugcauuguaccuca

SEQ ID NO: 212587 - RNA, 22 nt, Human respiratory syncytial virus
gcuccacauacacagcagcugu

SEQ ID NO: 212588 - RNA, 23 nt, Human respiratory syncytial virus
gcucuaccaucaugcugugucaa

SEQ ID NO: 212589 - RNA, 18 nt, Human respiratory syncytial virus
uacuagugaagcagaucu

SEQ ID NO: 212590 - RNA, 14 nt, Human respiratory syncytial virus
uacauccaucacaa

SEQ ID NO: 212591 - RNA, 15 nt, Human respiratory syncytial virus
uacauuaaauaagga

SEQ ID NO: 212592 - RNA, 23 nt, Human respiratory syncytial virus
uacaugugcauuuacaacacaac

SEQ ID NO: 212593 - RNA, 15 nt, Human respiratory syncytial virus
uacaauuuaaccaua

SEQ ID NO: 212594 - RNA, 16 nt, Human respiratory syncytial virus
uacaauuuaaccauaa

SEQ ID NO: 212595 - RNA, 18 nt, Human respiratory syncytial virus
uacagcuacuuaugcaaa

SEQ ID NO: 212596 - RNA, 19 nt, Human respiratory syncytial virus
uacaggcugaaucauuucu

SEQ ID NO: 212597 - RNA, 17 nt, Human respiratory syncytial virus
uacacacuauauccaaa

SEQ ID NO: 212598 - RNA, 23 nt, Human respiratory syncytial virus
uacacacuucaucacacaaacca

SEQ ID NO: 212599 - RNA, 17 nt, Human respiratory syncytial virus
uacacagcagcuguuca

SEQ ID NO: 212600 - RNA, 14 nt, Human respiratory syncytial virus
uaauuguaauaucc

SEQ ID NO: 212601 - RNA, 22 nt, Human respiratory syncytial virus
uaagcuagauccuuaacucaua

SEQ ID NO: 212602 - RNA, 16 nt, Human respiratory syncytial virus
uaucauccaaccauaa

SEQ ID NO: 212603 - RNA, 17 nt, Human respiratory syncytial virus
uagaaguaaccaaagag

SEQ ID NO: 212604 - RNA, 12 nt, Human respiratory syncytial virus
uagaauucacaa

SEQ ID NO: 212605 - RNA, 23 nt, Human respiratory syncytial virus
uagcagaaaaccgugaccuauca

SEQ ID NO: 212606 - RNA, 24 nt, Human respiratory syncytial virus
uagcagaaaaccgugaccuaucaa

SEQ ID NO: 212607 - RNA, 18 nt, Human respiratory syncytial virus
gugucauaacaauagaau

SEQ ID NO: 212608 - RNA, 17 nt, Human respiratory syncytial virus
guuaaaugauacauuaa

SEQ ID NO: 212609 - RNA, 16 nt, Human respiratory syncytial virus
guuacauaaaaaccuc

SEQ ID NO: 212610 - RNA, 22 nt, Human respiratory syncytial virus
guuacauaaaaaccucaaguau

SEQ ID NO: 212611 - RNA, 22 nt, Human respiratory syncytial virus
guuccagucaucuguaccagca

SEQ ID NO: 212612 - RNA, 16 nt, Human respiratory syncytial virus
guucaaucaaucucaa

SEQ ID NO: 212613 - RNA, 19 nt, Human respiratory syncytial virus
uaaaagaacuugcaagcau

SEQ ID NO: 212614 - RNA, 19 nt, Human respiratory syncytial virus
uaaacaaacuaugugguau

SEQ ID NO: 212615 - RNA, 14 nt, Human respiratory syncytial virus
uaaaucaacacauc

SEQ ID NO: 212616 - RNA, 21 nt, Human respiratory syncytial virus
uaaaucaacacaucauucaca

SEQ ID NO: 212617 - RNA, 21 nt, Human respiratory syncytial virus
uaacuauaacacagucauuaa

SEQ ID NO: 212618 - RNA, 13 nt, Human respiratory syncytial virus
uaacacagucauu

SEQ ID NO: 212619 - RNA, 16 nt, Human respiratory syncytial virus
uaacacagucauuaau

SEQ ID NO: 212620 - RNA, 14 nt, Human respiratory syncytial virus
uaaauuugagauua

SEQ ID NO: 212621 - RNA, 18 nt, Human respiratory syncytial virus
uaaauuggggcaaauaca

SEQ ID NO: 212622 - RNA, 22 nt, Human respiratory syncytial virus
uaacaaacacuucaacaucaca

SEQ ID NO: 212623 - RNA, 15 nt, Human respiratory syncytial virus
gaaucauuucuucac

SEQ ID NO: 212624 - RNA, 18 nt, Human respiratory syncytial virus
gaaucauuucuucacauc

SEQ ID NO: 212625 - RNA, 21 nt, Human respiratory syncytial virus
gaagaugcaaauaacaaagcu

SEQ ID NO: 212626 - RNA, 17 nt, Human respiratory syncytial virus
gaagaugcaaaucauaa

SEQ ID NO: 212627 - RNA, 22 nt, Human respiratory syncytial virus
gaagaugcaaaucauaaauuca

SEQ ID NO: 212628 - RNA, 13 nt, Human respiratory syncytial virus
gaaaccaaaugca

SEQ ID NO: 212629 - RNA, 17 nt, Human respiratory syncytial virus
gaaaccaaaugcaaugg

SEQ ID NO: 212630 - RNA, 21 nt, Human respiratory syncytial virus
gaaaccaaaugcaauggaacu

SEQ ID NO: 212631 - RNA, 22 nt, Human respiratory syncytial virus
gaaagcaugauugcuacauuca

SEQ ID NO: 212632 - RNA, 14 nt, Human respiratory syncytial virus
gaaauuaaaccugg

SEQ ID NO: 212633 - RNA, 20 nt, Human respiratory syncytial virus
gaaauuagaagaaccaacuu

SEQ ID NO: 212634 - RNA, 22 nt, Human respiratory syncytial virus
gaaaagaccugggauacucuca

SEQ ID NO: 212635 - RNA, 17 nt, Human respiratory syncytial virus
gaaaaagaugaugaucc

SEQ ID NO: 212636 - RNA, 19 nt, Human respiratory syncytial virus
gagauaauauugacacucc

SEQ ID NO: 212637 - RNA, 21 nt, Human respiratory syncytial virus
gaggcaaaacuucauguuaaa

SEQ ID NO: 212638 - RNA, 22 nt, Human respiratory syncytial virus
gagacauuaguuuuugacacuu

SEQ ID NO: 212639 - RNA, 22 nt, Human respiratory syncytial virus
gcacaaaguagggaguaccaaa

SEQ ID NO: 212640 - RNA, 19 nt, Human respiratory syncytial virus
gcaaucuuccuaacucuug

SEQ ID NO: 212641 - RNA, 18 nt, Human respiratory syncytial virus
gcaaucaacaacaucaau

SEQ ID NO: 212642 - RNA, 16 nt, Human respiratory syncytial virus
gcaaguucgcaucauc

SEQ ID NO: 212643 - RNA, 21 nt, Human respiratory syncytial virus
gcaaguucgcaucauccaaag

SEQ ID NO: 212644 - RNA, 23 nt, Human respiratory syncytial virus
gcaaguucgcaucauccaaagau

SEQ ID NO: 212645 - RNA, 16 nt, Human respiratory syncytial virus
gcaaauacacuauuca

SEQ ID NO: 212646 - RNA, 22 nt, Human respiratory syncytial virus
gcaaauaaacucaccuaaucaa

SEQ ID NO: 212647 - RNA, 18 nt, Human respiratory syncytial virus
gaucaacucacucagcaa

SEQ ID NO: 212648 - RNA, 21 nt, Human respiratory syncytial virus
gauccacagguuaagugcaau

SEQ ID NO: 212649 - RNA, 15 nt, Human respiratory syncytial virus
gauacaugugcauuu

SEQ ID NO: 212650 - RNA, 18 nt, Human respiratory syncytial virus
gauacucucaaucaucua

SEQ ID NO: 212651 - RNA, 20 nt, Human respiratory syncytial virus
gauaaucucaaccucucuca

SEQ ID NO: 212652 - RNA, 12 nt, Human respiratory syncytial virus
cuagauccuuaa

SEQ ID NO: 212653 - RNA, 16 nt, Human respiratory syncytial virus
cuaacucuugcuauua

SEQ ID NO: 212654 - RNA, 15 nt, Human respiratory syncytial virus
cuaacuuacuuaaaa

SEQ ID NO: 212655 - RNA, 12 nt, Human respiratory syncytial virus
cuaauacauaug

SEQ ID NO: 212656 - RNA, 14 nt, Human respiratory syncytial virus
cuaauacauaugau

SEQ ID NO: 212657 - RNA, 17 nt, Human respiratory syncytial virus
cuaaguuguacaaagaa

SEQ ID NO: 212658 - RNA, 18 nt, Human respiratory syncytial virus
cuaagcuagauccuuaac

SEQ ID NO: 212659 - RNA, 14 nt, Human respiratory syncytial virus
cucaccccaaguga

SEQ ID NO: 212660 - RNA, 14 nt, Human respiratory syncytial virus
cuccucaugccuua

SEQ ID NO: 212661 - RNA, 21 nt, Human respiratory syncytial virus
cugaaugacagguccacauau

SEQ ID NO: 212662 - RNA, 23 nt, Human respiratory syncytial virus
cugaaugacagguccacauauau

SEQ ID NO: 212663 - RNA, 17 nt, Human respiratory syncytial virus
cugaaucauuucuucac

SEQ ID NO: 212664 - RNA, 21 nt, Human respiratory syncytial virus
cugauccaucagcaaccugac

SEQ ID NO: 212665 - RNA, 14 nt, Human respiratory syncytial virus
cucucaaucaucua

SEQ ID NO: 212666 - RNA, 14 nt, Human respiratory syncytial virus
cugccagaccgaac

SEQ ID NO: 212667 - RNA, 21 nt, Human respiratory syncytial virus
cgucagcggaaccaccaacca

SEQ ID NO: 212668 - RNA, 14 nt, Human respiratory syncytial virus
cggcccuuaucuca

SEQ ID NO: 212669 - RNA, 20 nt, Human respiratory syncytial virus
cgccaauucaauacauauac

SEQ ID NO: 212670 - RNA, 16 nt, Human respiratory syncytial virus
cgagacauuaguuuuu

SEQ ID NO: 212671 - RNA, 20 nt, Human respiratory syncytial virus
gaaaacuugaugaaagacaa

SEQ ID NO: 212672 - RNA, 12 nt, Human respiratory syncytial virus
gaaaccaaagcc

SEQ ID NO: 212673 - RNA, 15 nt, Human respiratory syncytial virus
gaaaccaaaugcaau

SEQ ID NO: 212674 - RNA, 13 nt, Human respiratory syncytial virus
gaaacauacguga

SEQ ID NO: 212675 - RNA, 20 nt, Human respiratory syncytial virus
gaaauccuuguaaauuugag

SEQ ID NO: 212676 - RNA, 15 nt, Human respiratory syncytial virus
aaagauacuuaaaga

SEQ ID NO: 212677 - RNA, 13 nt, Human respiratory syncytial virus
aaagaccugggau

SEQ ID NO: 212678 - RNA, 13 nt, Human respiratory syncytial virus
aaagacaagcuac

SEQ ID NO: 212679 - RNA, 23 nt, Human respiratory syncytial virus
aaaccgugaccuaucaagcaaga

SEQ ID NO: 212680 - RNA, 16 nt, Human respiratory syncytial virus
gaauuagauaaguaua

SEQ ID NO: 212681 - RNA, 13 nt, Human respiratory syncytial virus
gaaguaaccaaag

SEQ ID NO: 212682 - RNA, 14 nt, Human respiratory syncytial virus
gaaguaaccaaaga

SEQ ID NO: 212683 - RNA, 21 nt, Human respiratory syncytial virus
aaauuggggcaaauacaaaga

SEQ ID NO: 212684 - RNA, 15 nt, Human respiratory syncytial virus
aacaaacaaauccaa

SEQ ID NO: 212685 - RNA, 20 nt, Human respiratory syncytial virus
aacaaacacuucaacaucac

SEQ ID NO: 212686 - RNA, 21 nt, Human respiratory syncytial virus
aaauaaggaucagcugcuguc

SEQ ID NO: 212687 - RNA, 19 nt, Human respiratory syncytial virus
aaauaacaaagcuaccaaa

SEQ ID NO: 212688 - RNA, 17 nt, Human respiratory syncytial virus
aaauccaaucuucucac

SEQ ID NO: 212689 - RNA, 19 nt, Human respiratory syncytial virus
aaaucaacacaucauucac

SEQ ID NO: 212690 - RNA, 20 nt, Human respiratory syncytial virus
aaaucaacacaucauucaca

SEQ ID NO: 212691 - RNA, 15 nt, Human respiratory syncytial virus
aaauacacuauucaa

SEQ ID NO: 212692 - RNA, 18 nt, Human respiratory syncytial virus
gacaacacuacuaugcaa

SEQ ID NO: 212693 - RNA, 22 nt, Human respiratory syncytial virus
gacaguaccccagaaaccaaag

SEQ ID NO: 212694 - RNA, 23 nt, Human respiratory syncytial virus
gacaguaccccagaaaccaaagc

SEQ ID NO: 212695 - RNA, 22 nt, Human respiratory syncytial virus
gacaucaauccauugaaucaac

SEQ ID NO: 212696 - RNA, 16 nt, Human respiratory syncytial virus
gacauguagugcaguu

SEQ ID NO: 212697 - RNA, 17 nt, Human respiratory syncytial virus
gacauguagugcaguua

SEQ ID NO: 212698 - RNA, 17 nt, Human respiratory syncytial virus
gauauauauacaauaua

SEQ ID NO: 212699 - RNA, 22 nt, Human respiratory syncytial virus
gagucauggugucgcaaaacca

SEQ ID NO: 212700 - RNA, 16 nt, Human respiratory syncytial virus
aacaaagcuaccaaau

SEQ ID NO: 212701 - RNA, 16 nt, Human respiratory syncytial virus
gcuagaccuagagugc

SEQ ID NO: 212702 - RNA, 12 nt, Human respiratory syncytial virus
gcucuuagcaaa

SEQ ID NO: 212703 - RNA, 19 nt, Human respiratory syncytial virus
gcugucauccagcaaauac

SEQ ID NO: 212704 - RNA, 20 nt, Human respiratory syncytial virus
ggaaccaccaaccaaucaau

SEQ ID NO: 212705 - RNA, 21 nt, Human respiratory syncytial virus
ggaacugacacuaaaguaaaa

SEQ ID NO: 212706 - RNA, 14 nt, Human respiratory syncytial virus
ggaagacacuauaa

SEQ ID NO: 212707 - RNA, 16 nt, Human respiratory syncytial virus
ggaagggaagacacua

SEQ ID NO: 212708 - RNA, 13 nt, Human respiratory syncytial virus
ggcuccacauaca

SEQ ID NO: 212709 - RNA, 15 nt, Human respiratory syncytial virus
gccaauucaauacau

SEQ ID NO: 212710 - RNA, 18 nt, Human respiratory syncytial virus
gccaauucaauacauaua

SEQ ID NO: 212711 - RNA, 19 nt, Human respiratory syncytial virus
gccaauucaauacauauac

SEQ ID NO: 212712 - RNA, 15 nt, Human respiratory syncytial virus
gcaucacuaacaaua

SEQ ID NO: 212713 - RNA, 16 nt, Human respiratory syncytial virus
gcaucaacauacuagu

SEQ ID NO: 212714 - RNA, 22 nt, Human respiratory syncytial virus
gcaaguucgcaucauccaaaga

SEQ ID NO: 212715 - RNA, 15 nt, Human respiratory syncytial virus
gcaaugauaaucuca

SEQ ID NO: 212716 - RNA, 20 nt, Human respiratory syncytial virus
gcaauggaacugacacuaaa

SEQ ID NO: 212717 - RNA, 17 nt, Human respiratory syncytial virus
gcaagcaucaacauacu

SEQ ID NO: 212718 - RNA, 13 nt, Human respiratory syncytial virus
gaucauguuucaa

SEQ ID NO: 212719 - RNA, 18 nt, Human respiratory syncytial virus
gcagaaaaccgugaccua

SEQ ID NO: 212720 - RNA, 16 nt, Human respiratory syncytial virus
cuccacauacacagca

SEQ ID NO: 212721 - RNA, 14 nt, Human respiratory syncytial virus
cucaaucaucuaau

SEQ ID NO: 212722 - RNA, 13 nt, Human respiratory syncytial virus
cuauuaaugcauu

SEQ ID NO: 212723 - RNA, 19 nt, Human respiratory syncytial virus
cuuaaaaaacuaacuauaa

SEQ ID NO: 212724 - RNA, 18 nt, Human respiratory syncytial virus
cuggcaccaacaucauca

SEQ ID NO: 212725 - RNA, 22 nt, Human respiratory syncytial virus
ccuuaacucauaguuacauaaa

SEQ ID NO: 212726 - RNA, 11 nt, Human respiratory syncytial virus
cgcacugccag

SEQ ID NO: 212727 - RNA, 15 nt, Human respiratory syncytial virus
cgcaucauccaaaga

SEQ ID NO: 212728 - RNA, 21 nt, Human respiratory syncytial virus
cggaaccaccaaccaaucaau

SEQ ID NO: 212729 - RNA, 11 nt, Human respiratory syncytial virus
cuacccaagaa

SEQ ID NO: 212730 - RNA, 16 nt, Human respiratory syncytial virus
cuaaguuguacaaaga

SEQ ID NO: 212731 - RNA, 20 nt, Human respiratory syncytial virus
aaacaaauccaaucuucuca

SEQ ID NO: 212732 - RNA, 15 nt, Human respiratory syncytial virus
aaacaagauacucaa

SEQ ID NO: 212733 - RNA, 14 nt, Human respiratory syncytial virus
aaaauuaacauaau

SEQ ID NO: 212734 - RNA, 12 nt, Human respiratory syncytial virus
ccucaugccuua

SEQ ID NO: 212735 - RNA, 15 nt, Human respiratory syncytial virus
ccugcaucacuaaca

SEQ ID NO: 212736 - RNA, 15 nt, Human respiratory syncytial virus
ccuaaucaaucaaac

SEQ ID NO: 212737 - RNA, 21 nt, Human respiratory syncytial virus
ccuaaucaaucaaacuaugag

SEQ ID NO: 212738 - RNA, 18 nt, Human respiratory syncytial virus
ccuaacucuugcuauuaa

SEQ ID NO: 212739 - RNA, 11 nt, Human respiratory syncytial virus
cccuuaucuca

SEQ ID NO: 212740 - RNA, 12 nt, Human respiratory syncytial virus
cccuuaucucaa

SEQ ID NO: 212741 - RNA, 14 nt, Human respiratory syncytial virus
cccagaaaccaaag

SEQ ID NO: 212742 - RNA, 18 nt, Human respiratory syncytial virus
cccagaaaccaaagccaa

SEQ ID NO: 212743 - RNA, 16 nt, Human respiratory syncytial virus
ccccagaaaccaaagc

SEQ ID NO: 212744 - RNA, 22 nt, Human respiratory syncytial virus
cagugaucaacucacucagcaa

SEQ ID NO: 212745 - RNA, 17 nt, Human respiratory syncytial virus
cagucauuacuuaugac

SEQ ID NO: 212746 - RNA, 15 nt, Human respiratory syncytial virus
cagucaucuguacca

SEQ ID NO: 212747 - RNA, 22 nt, Human respiratory syncytial virus
cauaaugcuuggccauaacgau

SEQ ID NO: 212748 - RNA, 19 nt, Human respiratory syncytial virus
cauaauauucaucaucucu

SEQ ID NO: 212749 - RNA, 23 nt, Human respiratory syncytial virus
cauaauauucaucaucucugcca

SEQ ID NO: 212750 - RNA, 19 nt, Human respiratory syncytial virus
cauaaaggugaacugaaau

SEQ ID NO: 212751 - RNA, 17 nt, Human respiratory syncytial virus
cauaaaagaacuugcaa

SEQ ID NO: 212752 - RNA, 13 nt, Human respiratory syncytial virus
cauaaaaaccuca

SEQ ID NO: 212753 - RNA, 21 nt, Human respiratory syncytial virus
cauaaaaaccucaaguaucac

SEQ ID NO: 212754 - RNA, 18 nt, Human respiratory syncytial virus
caguaccccagaaaccaa

SEQ ID NO: 212755 - RNA, 15 nt, Human respiratory syncytial virus
cagaccgaacaaaca

SEQ ID NO: 212756 - RNA, 19 nt, Human respiratory syncytial virus
caucucugccaaucacaaa

SEQ ID NO: 212757 - RNA, 22 nt, Human respiratory syncytial virus
caucuaauuguaauauccucuu

SEQ ID NO: 212758 - RNA, 15 nt, Human respiratory syncytial virus
caucuacacuacaca

SEQ ID NO: 212759 - RNA, 17 nt, Human respiratory syncytial virus
caucuacacuacacacu

SEQ ID NO: 212760 - RNA, 14 nt, Human respiratory syncytial virus
cauguccaaacaca

SEQ ID NO: 212761 - RNA, 18 nt, Human respiratory syncytial virus
cauuacuuaugacauaua

SEQ ID NO: 212762 - RNA, 21 nt, Human respiratory syncytial virus
cauuaguuagaguucaaucaa

SEQ ID NO: 212763 - RNA, 16 nt, Human respiratory syncytial virus
ccaaagaaaucaucac

SEQ ID NO: 212764 - RNA, 22 nt, Human respiratory syncytial virus
ccaaagaaaucaucacacacaa

SEQ ID NO: 212765 - RNA, 17 nt, Human respiratory syncytial virus
ccaaucccacucaaaau

SEQ ID NO: 212766 - RNA, 22 nt, Human respiratory syncytial virus
ccaaucccacucaaaauccaaa

SEQ ID NO: 212767 - RNA, 22 nt, Human respiratory syncytial virus
ccaaucgacauguagugcaguu

SEQ ID NO: 212768 - RNA, 17 nt, Human respiratory syncytial virus
ccaauucaauacauaua

SEQ ID NO: 212769 - RNA, 16 nt, Human respiratory syncytial virus
uagaaguaaccaaaga

SEQ ID NO: 212770 - RNA, 15 nt, Human respiratory syncytial virus
uagaauuaaguaaua

SEQ ID NO: 212771 - RNA, 15 nt, Human respiratory syncytial virus
uauaccgccaauuca

SEQ ID NO: 212772 - RNA, 23 nt, Human respiratory syncytial virus
uauagcacaaauagcacuaucag

SEQ ID NO: 212773 - RNA, 19 nt, Human respiratory syncytial virus
uauagaaguaaccaaagag

SEQ ID NO: 212774 - RNA, 17 nt, Human respiratory syncytial virus
uauagaaguaaccaaag

SEQ ID NO: 212775 - RNA, 18 nt, Human respiratory syncytial virus
uauagaaguaaccaaaga

SEQ ID NO: 212776 - RNA, 21 nt, Human respiratory syncytial virus
uauauauaaacaaacaaaucc

SEQ ID NO: 212777 - RNA, 15 nt, Human respiratory syncytial virus
uaucacaaucaaaca

SEQ ID NO: 212778 - RNA, 18 nt, Human respiratory syncytial virus
uaucauccaaccauaaaa

SEQ ID NO: 212779 - RNA, 23 nt, Human respiratory syncytial virus
uauccuuguaguauaucauccau

SEQ ID NO: 212780 - RNA, 13 nt, Human respiratory syncytial virus
uaugacauauaaa

SEQ ID NO: 212781 - RNA, 16 nt, Human respiratory syncytial virus
uaugggaucaaaaaca

SEQ ID NO: 212782 - RNA, 12 nt, Human respiratory syncytial virus
ucaaaauccaaa

SEQ ID NO: 212783 - RNA, 21 nt, Human respiratory syncytial virus
ucaaagaagaucucaccccaa

SEQ ID NO: 212784 - RNA, 21 nt, Human respiratory syncytial virus
ucaaacuacacacuauaucca

SEQ ID NO: 212785 - RNA, 20 nt, Human respiratory syncytial virus
ucaaacuaugagcacuacaa

SEQ ID NO: 212786 - RNA, 13 nt, Human respiratory syncytial virus
ucaccucaaguca

SEQ ID NO: 212787 - RNA, 16 nt, Human respiratory syncytial virus
ucaccucaagucagaa

SEQ ID NO: 212788 - RNA, 22 nt, Human respiratory syncytial virus
ucaccucaagucagaacauaac

SEQ ID NO: 212789 - RNA, 15 nt, Human respiratory syncytial virus
ucaauggacaaaagc

SEQ ID NO: 212790 - RNA, 17 nt, Human respiratory syncytial virus
ucgacauguagugcagu

SEQ ID NO: 212791 - RNA, 15 nt, Human respiratory syncytial virus
ucccaaaucaaccca

SEQ ID NO: 212792 - RNA, 21 nt, Human respiratory syncytial virus
ucccaaaucaacccauaacaa

SEQ ID NO: 212793 - RNA, 21 nt, Human respiratory syncytial virus
uccaaucuucucacagaguca

SEQ ID NO: 212794 - RNA, 19 nt, Human respiratory syncytial virus
uccacauacacagcagcug

SEQ ID NO: 212795 - RNA, 22 nt, Human respiratory syncytial virus
ucuauagcacaaauagcacuau

SEQ ID NO: 212796 - RNA, 19 nt, Human respiratory syncytial virus
ucuaaguuguacaaagaaa

SEQ ID NO: 212797 - RNA, 16 nt, Human respiratory syncytial virus
ucgcaucauccaaaga

SEQ ID NO: 212798 - RNA, 15 nt, Human respiratory syncytial virus
ucuuagcaaagucaa

SEQ ID NO: 212799 - RNA, 13 nt, Human respiratory syncytial virus
ucucucaccaaag

SEQ ID NO: 212800 - RNA, 14 nt, Human respiratory syncytial virus
ucucugccaaucac

SEQ ID NO: 212801 - RNA, 22 nt, Human respiratory syncytial virus
uacucaagucaauggacaaaag

SEQ ID NO: 212802 - RNA, 23 nt, Human respiratory syncytial virus
uacucaagucaauggacaaaagc

SEQ ID NO: 212803 - RNA, 14 nt, Human respiratory syncytial virus
uacgugaacaagcu

SEQ ID NO: 212804 - RNA, 12 nt, Human respiratory syncytial virus
uacugauuccaa

SEQ ID NO: 212805 - RNA, 17 nt, Human respiratory syncytial virus
uacaugugcauuuacaa

SEQ ID NO: 212806 - RNA, 23 nt, Human respiratory syncytial virus
uacauccaucacaauagaauuca

SEQ ID NO: 212807 - RNA, 16 nt, Human respiratory syncytial virus
uacaauguucuagaaa

SEQ ID NO: 212808 - RNA, 18 nt, Human respiratory syncytial virus
uacagucauaauuacuuu

SEQ ID NO: 212809 - RNA, 14 nt, Human respiratory syncytial virus
uacauauacuauaa

SEQ ID NO: 212810 - RNA, 21 nt, Human respiratory syncytial virus
uacauaugaucuuaacucuaa

SEQ ID NO: 212811 - RNA, 16 nt, Human respiratory syncytial virus
uacagcuacuuaugca

SEQ ID NO: 212812 - RNA, 15 nt, Human respiratory syncytial virus
uacaggagauaauau

SEQ ID NO: 212813 - RNA, 14 nt, Human respiratory syncytial virus
uacaggcugaauca

SEQ ID NO: 212814 - RNA, 12 nt, Human respiratory syncytial virus
uaauuacuuuga

SEQ ID NO: 212815 - RNA, 13 nt, Human respiratory syncytial virus
uaauuacuuugaa

SEQ ID NO: 212816 - RNA, 17 nt, Human respiratory syncytial virus
uaacacagucauuaaua

SEQ ID NO: 212817 - RNA, 15 nt, Human respiratory syncytial virus
uaaaucaacacauca

SEQ ID NO: 212818 - RNA, 17 nt, Human respiratory syncytial virus
uaacgauucuauaucau

SEQ ID NO: 212819 - RNA, 18 nt, Human respiratory syncytial virus
uaacggcccuuaucucaa

SEQ ID NO: 212820 - RNA, 14 nt, Human respiratory syncytial virus
uaagaaggagcuaa

SEQ ID NO: 212821 - RNA, 21 nt, Human respiratory syncytial virus
uaagcuagauccuuaacucau

SEQ ID NO: 212822 - RNA, 23 nt, Human respiratory syncytial virus
uaaagggcaaguucgcaucaucc

SEQ ID NO: 212823 - RNA, 16 nt, Human respiratory syncytial virus
uaaaguaaaacuuaua

SEQ ID NO: 212824 - RNA, 16 nt, Human respiratory syncytial virus
uaaauaaaaccaaaau

SEQ ID NO: 212825 - RNA, 21 nt, Human respiratory syncytial virus
uaaacucaccuaaucaaucaa

SEQ ID NO: 212826 - RNA, 17 nt, Human respiratory syncytial virus
uaaaagguguuaucucu

SEQ ID NO: 212827 - RNA, 20 nt, Human respiratory syncytial virus
uaaaagaaaccaaaugcaau

SEQ ID NO: 212828 - RNA, 16 nt, Human respiratory syncytial virus
gucaucuguaccagca

SEQ ID NO: 212829 - RNA, 18 nt, Human respiratory syncytial virus
gucaucuguaccagcaga

SEQ ID NO: 212830 - RNA, 15 nt, Human respiratory syncytial virus
guaugggaucaaaaa

SEQ ID NO: 212831 - RNA, 13 nt, Human respiratory syncytial virus
guagaagauguca

SEQ ID NO: 212832 - RNA, 19 nt, Human respiratory syncytial virus
guauaccagugucauaaca

SEQ ID NO: 212833 - RNA, 21 nt, Human respiratory syncytial virus
gugaucaacucacucagcaau

SEQ ID NO: 212834 - RNA, 17 nt, Human respiratory syncytial virus
guuaaacaagauacuca

SEQ ID NO: 212835 - RNA, 22 nt, Human respiratory syncytial virus
guuaaacaagauacucaaguca

SEQ ID NO: 212836 - RNA, 14 nt, Human respiratory syncytial virus
aacacaagaaucaa

SEQ ID NO: 212837 - RNA, 19 nt, Human respiratory syncytial virus
uugaauggccuccucaugc

SEQ ID NO: 212838 - RNA, 15 nt, Human respiratory syncytial virus
aacacagucauuaau

SEQ ID NO: 212839 - RNA, 13 nt, Human respiratory syncytial virus
aacacaucauuca

SEQ ID NO: 212840 - RNA, 19 nt, Human respiratory syncytial virus
aacacaucauucacaaaau

SEQ ID NO: 212841 - RNA, 14 nt, Human respiratory syncytial virus
aacacuacuaugca

SEQ ID NO: 212842 - RNA, 20 nt, Human respiratory syncytial virus
aacauaaugaugaauuauua

SEQ ID NO: 212843 - RNA, 23 nt, Human respiratory syncytial virus
aacauaaauuggggcaaauacaa

SEQ ID NO: 212844 - RNA, 18 nt, Human respiratory syncytial virus
aacagguugguauaccag

SEQ ID NO: 212845 - RNA, 20 nt, Human respiratory syncytial virus
aacagguugguauaccagug

SEQ ID NO: 212846 - RNA, 18 nt, Human respiratory syncytial virus
uuucaacaacagucugcu

SEQ ID NO: 212847 - RNA, 13 nt, Human respiratory syncytial virus
aaucaaacuauga

SEQ ID NO: 212848 - RNA, 15 nt, Human respiratory syncytial virus
aaucaaacuaugagc

SEQ ID NO: 212849 - RNA, 17 nt, Human respiratory syncytial virus
aaucaacacaucauuca

SEQ ID NO: 212850 - RNA, 12 nt, Human respiratory syncytial virus
aaucaacccaua

SEQ ID NO: 212851 - RNA, 18 nt, Human respiratory syncytial virus
aaucaaacacuaaaucaa

SEQ ID NO: 212852 - RNA, 17 nt, Human respiratory syncytial virus
aaucaacgcacugccag

SEQ ID NO: 212853 - RNA, 20 nt, Human respiratory syncytial virus
aaucaaucaaccaacugauc

SEQ ID NO: 212854 - RNA, 19 nt, Human respiratory syncytial virus
aaucuucucacagagucau

SEQ ID NO: 212855 - RNA, 19 nt, Human respiratory syncytial virus
aauauaaaaacucaucaaa

SEQ ID NO: 212856 - RNA, 23 nt, Human respiratory syncytial virus
aauauaaaagaaaccaaaugcaa

SEQ ID NO: 212857 - RNA, 19 nt, Human respiratory syncytial virus
aauaaacucaccuaaucaa

SEQ ID NO: 212858 - RNA, 15 nt, Human respiratory syncytial virus
aagguguuaucucuu

SEQ ID NO: 212859 - RNA, 18 nt, Human respiratory syncytial virus
aagccaacuacccaagaa

SEQ ID NO: 212860 - RNA, 13 nt, Human respiratory syncytial virus
aagcagaucucua

SEQ ID NO: 212861 - RNA, 14 nt, Human respiratory syncytial virus
aagcaucaacauac

SEQ ID NO: 212862 - RNA, 17 nt, Human respiratory syncytial virus
aagcauagacacuuugu

SEQ ID NO: 212863 - RNA, 15 nt, Human respiratory syncytial virus
aacuugcaagcauca

SEQ ID NO: 212864 - RNA, 13 nt, Human respiratory syncytial virus
aagacacuauaaa

SEQ ID NO: 212865 - RNA, 20 nt, Human respiratory syncytial virus
aagaccugggauacucucaa

SEQ ID NO: 212866 - RNA, 17 nt, Human respiratory syncytial virus
aacugacacuaaaguaa

SEQ ID NO: 212867 - RNA, 18 nt, Human respiratory syncytial virus
aacucacucagcaaucaa

SEQ ID NO: 212868 - RNA, 14 nt, Human respiratory syncytial virus
aacaucucucacca

SEQ ID NO: 212869 - RNA, 23 nt, Human respiratory syncytial virus
aacaucaucaauccaacaaguga

SEQ ID NO: 212870 - RNA, 14 nt, Human respiratory syncytial virus
aacauacgugaaca

SEQ ID NO: 212871 - RNA, 14 nt, Human respiratory syncytial virus
aacauacuagugaa

SEQ ID NO: 212872 - RNA, 22 nt, Human respiratory syncytial virus
uuacuuugaauggccuccucau

SEQ ID NO: 212873 - RNA, 18 nt, Human respiratory syncytial virus
uuauaaucacuauuauga

SEQ ID NO: 212874 - RNA, 18 nt, Human respiratory syncytial virus
uuauaccgccaauucaau

SEQ ID NO: 212875 - RNA, 17 nt, Human respiratory syncytial virus
uuauuuuagugcuuuaa

SEQ ID NO: 212876 - RNA, 18 nt, Human respiratory syncytial virus
uuaaaagguguuaucucu

SEQ ID NO: 212877 - RNA, 19 nt, Human respiratory syncytial virus
uuaacaauauaguaacaaa

SEQ ID NO: 212878 - RNA, 16 nt, Human respiratory syncytial virus
uguuccagucaucugu

SEQ ID NO: 212879 - RNA, 12 nt, Human respiratory syncytial virus
ugguaugcuauu

SEQ ID NO: 212880 - RNA, 11 nt, Human respiratory syncytial virus
uguccaaacac

SEQ ID NO: 212881 - RNA, 22 nt, Human respiratory syncytial virus
uguccgucagcggaaccaccaa

SEQ ID NO: 212882 - RNA, 13 nt, Human respiratory syncytial virus
ugugguaugcuau

SEQ ID NO: 212883 - RNA, 22 nt, Human respiratory syncytial virus
ugaucaacucacucagcaauca

SEQ ID NO: 212884 - RNA, 19 nt, Human respiratory syncytial virus
ugaucaccaaucccaaauc

SEQ ID NO: 212885 - RNA, 20 nt, Human respiratory syncytial virus
ugaucauguuucaacaacag

SEQ ID NO: 212886 - RNA, 13 nt, Human respiratory syncytial virus
ugauccaucagca

SEQ ID NO: 212887 - RNA, 16 nt, Human respiratory syncytial virus
ugcaaaaacaccuaaa

SEQ ID NO: 212888 - RNA, 16 nt, Human respiratory syncytial virus
ugcaagcaucaacaua

SEQ ID NO: 212889 - RNA, 19 nt, Human respiratory syncytial virus
ugcaagcaucaacauacua

SEQ ID NO: 212890 - RNA, 14 nt, Human respiratory syncytial virus
ugauaaacaaugaa

SEQ ID NO: 212891 - RNA, 14 nt, Human respiratory syncytial virus
ugaggcaaaacuuc

SEQ ID NO: 212892 - RNA, 18 nt, Human respiratory syncytial virus
ugccagaccgaacaaaca

SEQ ID NO: 212893 - RNA, 22 nt, Human respiratory syncytial virus
auuacagcuacuuaugcaaaac

SEQ ID NO: 212894 - RNA, 13 nt, Human respiratory syncytial virus
auuaguuagaguu

SEQ ID NO: 212895 - RNA, 15 nt, Human respiratory syncytial virus
auuaucaacacugaa

SEQ ID NO: 212896 - RNA, 16 nt, Human respiratory syncytial virus
auucuauaucauccaa

SEQ ID NO: 212897 - RNA, 17 nt, Human respiratory syncytial virus
auucuauaucauccaac

SEQ ID NO: 212898 - RNA, 18 nt, Human respiratory syncytial virus
auugcuacaacuaacuua

SEQ ID NO: 212899 - RNA, 22 nt, Human respiratory syncytial virus
auugcuacauucaaucauaaaa

SEQ ID NO: 212900 - RNA, 20 nt, Human respiratory syncytial virus
auuuaaaagguguuaucucu

SEQ ID NO: 212901 - RNA, 18 nt, Human respiratory syncytial virus
auuacaauuuaaccauaa

SEQ ID NO: 212902 - RNA, 19 nt, Human respiratory syncytial virus
auuacaauuuaaccauaac

SEQ ID NO: 212903 - RNA, 22 nt, Human respiratory syncytial virus
auuacaauuuaaccauaaccau

SEQ ID NO: 212904 - RNA, 14 nt, Human respiratory syncytial virus
auuaaugcauugua

SEQ ID NO: 212905 - RNA, 22 nt, Human respiratory syncytial virus
auuaaugaucacggacaugaga

SEQ ID NO: 212906 - RNA, 18 nt, Human respiratory syncytial virus
auuaaaaaauaugcaaac

SEQ ID NO: 212907 - RNA, 18 nt, Human respiratory syncytial virus
auguuuagucuaacucaa

SEQ ID NO: 212908 - RNA, 13 nt, Human respiratory syncytial virus
auguuauaugcua

SEQ ID NO: 212909 - RNA, 13 nt, Human respiratory syncytial virus
augugguaugcua

SEQ ID NO: 212910 - RNA, 12 nt, Human respiratory syncytial virus
auguguaucuaa

SEQ ID NO: 212911 - RNA, 15 nt, Human respiratory syncytial virus
augucacuacaguca

SEQ ID NO: 212912 - RNA, 15 nt, Human respiratory syncytial virus
aucuguuaacucaau

SEQ ID NO: 212913 - RNA, 17 nt, Human respiratory syncytial virus
auggcucuuagcaaagu

SEQ ID NO: 212914 - RNA, 22 nt, Human respiratory syncytial virus
augggaaauacauccaucacaa

SEQ ID NO: 212915 - RNA, 19 nt, Human respiratory syncytial virus
caaccauguccaaacacaa

SEQ ID NO: 212916 - RNA, 12 nt, Human respiratory syncytial virus
caaccaaucaau

SEQ ID NO: 212917 - RNA, 15 nt, Human respiratory syncytial virus
caaccaaucaaucaa

SEQ ID NO: 212918 - RNA, 22 nt, Human respiratory syncytial virus
caacugccagaccgaacaaaca

SEQ ID NO: 212919 - RNA, 18 nt, Human respiratory syncytial virus
caacugauccaucagcaa

SEQ ID NO: 212920 - RNA, 19 nt, Human respiratory syncytial virus
caacucacucagcaaucaa

SEQ ID NO: 212921 - RNA, 20 nt, Human respiratory syncytial virus
caacucacucagcaaucaac

SEQ ID NO: 212922 - RNA, 21 nt, Human respiratory syncytial virus
caaacaaauccaaucuucuca

SEQ ID NO: 212923 - RNA, 14 nt, Human respiratory syncytial virus
caaacaacaaugcu

SEQ ID NO: 212924 - RNA, 15 nt, Human respiratory syncytial virus
caauagaauucacaa

SEQ ID NO: 212925 - RNA, 12 nt, Human respiratory syncytial virus
caaucaaccaac

SEQ ID NO: 212926 - RNA, 19 nt, Human respiratory syncytial virus
caaucaaacacuaaaucaa

SEQ ID NO: 212927 - RNA, 21 nt, Human respiratory syncytial virus
caaucccacucaaaauccaaa

SEQ ID NO: 212928 - RNA, 16 nt, Human respiratory syncytial virus
caagauacucaaguca

SEQ ID NO: 212929 - RNA, 17 nt, Human respiratory syncytial virus
caagauacucaagucaa

SEQ ID NO: 212930 - RNA, 16 nt, Human respiratory syncytial virus
caagucaauggacaaa

SEQ ID NO: 212931 - RNA, 14 nt, Human respiratory syncytial virus
caauaaaacagaca

SEQ ID NO: 212932 - RNA, 23 nt, Human respiratory syncytial virus
caauaaaacagacaucaauccau

SEQ ID NO: 212933 - RNA, 19 nt, Human respiratory syncytial virus
caaguuaaaugauacauua

SEQ ID NO: 212934 - RNA, 15 nt, Human respiratory syncytial virus
caccucaagucagaa

SEQ ID NO: 212935 - RNA, 19 nt, Human respiratory syncytial virus
cacuaaaucaacacaucau

SEQ ID NO: 212936 - RNA, 23 nt, Human respiratory syncytial virus
cacuaauacauaugaucuuaacu

SEQ ID NO: 212937 - RNA, 17 nt, Human respiratory syncytial virus
caaugauacaugugcau

SEQ ID NO: 212938 - RNA, 14 nt, Human respiratory syncytial virus
caaugauaaucuca

SEQ ID NO: 212939 - RNA, 19 nt, Human respiratory syncytial virus
cacagucauuaauaucuag

SEQ ID NO: 212940 - RNA, 22 nt, Human respiratory syncytial virus
cacauauauccucaaacuacac

SEQ ID NO: 212941 - RNA, 17 nt, Human respiratory syncytial virus
agucauaauuacuuuga

SEQ ID NO: 212942 - RNA, 16 nt, Human respiratory syncytial virus
agucauuacuuaugac

SEQ ID NO: 212943 - RNA, 19 nt, Human respiratory syncytial virus
aguaccccagaaaccaaag

SEQ ID NO: 212944 - RNA, 20 nt, Human respiratory syncytial virus
aguaccccagaaaccaaagc

SEQ ID NO: 212945 - RNA, 14 nt, Human respiratory syncytial virus
aggucauugcuuga

SEQ ID NO: 212946 - RNA, 17 nt, Human respiratory syncytial virus
agcuauuccucaaacaa

SEQ ID NO: 212947 - RNA, 18 nt, Human respiratory syncytial virus
agcuagauccuuaacuca

SEQ ID NO: 212948 - RNA, 20 nt, Human respiratory syncytial virus
agcuagauccuuaacucaua

SEQ ID NO: 212949 - RNA, 14 nt, Human respiratory syncytial virus
agauacucaaguca

SEQ ID NO: 212950 - RNA, 14 nt, Human respiratory syncytial virus
agccaauaacauaa

SEQ ID NO: 212951 - RNA, 18 nt, Human respiratory syncytial virus
agccaacuacccaagaaa

SEQ ID NO: 212952 - RNA, 22 nt, Human respiratory syncytial virus
agccauaauauucaucaucucu

SEQ ID NO: 212953 - RNA, 13 nt, Human respiratory syncytial virus
auaagaaugcagu

SEQ ID NO: 212954 - RNA, 14 nt, Human respiratory syncytial virus
auaauuuagcuuac

SEQ ID NO: 212955 - RNA, 23 nt, Human respiratory syncytial virus
auaauaacaucucucaccaaaga

SEQ ID NO: 212956 - RNA, 19 nt, Human respiratory syncytial virus
agucugcugaucaccaauc

SEQ ID NO: 212957 - RNA, 18 nt, Human respiratory syncytial virus
auaccagugucauaacaa

SEQ ID NO: 212958 - RNA, 14 nt, Human respiratory syncytial virus
auacauauacuaua

SEQ ID NO: 212959 - RNA, 16 nt, Human respiratory syncytial virus
auacauuaaauaagga

SEQ ID NO: 212960 - RNA, 19 nt, Human respiratory syncytial virus
auacauuaaauaaggauca

SEQ ID NO: 212961 - RNA, 23 nt, Human respiratory syncytial virus
auacauuaaauaaggaucagcug

SEQ ID NO: 212962 - RNA, 22 nt, Human respiratory syncytial virus
auacacugaauauaauacaaaa

SEQ ID NO: 212963 - RNA, 22 nt, Human respiratory syncytial virus
auacuugauaaacaaugaaugu

SEQ ID NO: 212964 - RNA, 21 nt, Human respiratory syncytial virus
auagaauucacaagcaaauuu

SEQ ID NO: 212965 - RNA, 16 nt, Human respiratory syncytial virus
auacucucaaucaucu

SEQ ID NO: 212966 - RNA, 17 nt, Human respiratory syncytial virus
auacucucaaucaucua

SEQ ID NO: 212967 - RNA, 18 nt, Human respiratory syncytial virus
auacuagugaagcagauc

SEQ ID NO: 212968 - RNA, 14 nt, Human respiratory syncytial virus
auaucuagauauca

SEQ ID NO: 212969 - RNA, 21 nt, Human respiratory syncytial virus
auagcacaaauagcacuauca

SEQ ID NO: 212970 - RNA, 15 nt, Human respiratory syncytial virus
aucaauaaaacagac

SEQ ID NO: 212971 - RNA, 23 nt, Human respiratory syncytial virus
aucaaccaacugauccaucagca

SEQ ID NO: 212972 - RNA, 15 nt, Human respiratory syncytial virus
aucaacucacucagc

SEQ ID NO: 212973 - RNA, 18 nt, Human respiratory syncytial virus
aucaacucacucagcaau

SEQ ID NO: 212974 - RNA, 21 nt, Human respiratory syncytial virus
aucaacucacucagcaaucaa

SEQ ID NO: 212975 - RNA, 15 nt, Human respiratory syncytial virus
aucaacaacaucaau

SEQ ID NO: 212976 - RNA, 13 nt, Human respiratory syncytial virus
auccaaaaucacu

SEQ ID NO: 212977 - RNA, 17 nt, Human respiratory syncytial virus
aucucugccaaucacaa

SEQ ID NO: 212978 - RNA, 18 nt, Human respiratory syncytial virus
aucucugccaaucacaaa

SEQ ID NO: 212979 - RNA, 14 nt, Human respiratory syncytial virus
aucucaaccucucu

SEQ ID NO: 212980 - RNA, 16 nt, Human respiratory syncytial virus
aucucaaccucucuca

SEQ ID NO: 212981 - RNA, 23 nt, Human respiratory syncytial virus
auccaaccauaaaacuaucuuaa

SEQ ID NO: 212982 - RNA, 13 nt, Human respiratory syncytial virus
auccaaucuucuc

SEQ ID NO: 212983 - RNA, 20 nt, Human respiratory syncytial virus
auccaaucuucucacagagu

SEQ ID NO: 212984 - RNA, 19 nt, Human respiratory syncytial virus
auccacagguuaagugcaa

SEQ ID NO: 212985 - RNA, 20 nt, Human respiratory syncytial virus
auccacagguuaagugcaau

SEQ ID NO: 212986 - RNA, 21 nt, Human respiratory syncytial virus
auccacagguuaagugcaauc

SEQ ID NO: 212987 - RNA, 16 nt, Human respiratory syncytial virus
auccucaaacuacaca

SEQ ID NO: 212988 - RNA, 18 nt, Human respiratory syncytial virus
auccucaaacuacacacu

SEQ ID NO: 212989 - RNA, 23 nt, Human respiratory syncytial virus
auccucaaacuacacacuauauc

SEQ ID NO: 212990 - RNA, 14 nt, Human respiratory syncytial virus
aucuacacuacaca

SEQ ID NO: 212991 - RNA, 16 nt, Human respiratory syncytial virus
auccugcaucacuaac

SEQ ID NO: 212992 - RNA, 20 nt, Human respiratory syncytial virus
auccucuuguuuauacagau

SEQ ID NO: 212993 - RNA, 15 nt, Human respiratory syncytial virus
acuauauccaaacau

SEQ ID NO: 212994 - RNA, 14 nt, Human respiratory syncytial virus
acuagugaggcaaa

SEQ ID NO: 212995 - RNA, 15 nt, Human respiratory syncytial virus
acuauaacacaguca

SEQ ID NO: 212996 - RNA, 20 nt, Human respiratory syncytial virus
acuauaacacagucauuaau

SEQ ID NO: 212997 - RNA, 15 nt, Human respiratory syncytial virus
acuagagcauaugaa

SEQ ID NO: 212998 - RNA, 19 nt, Human respiratory syncytial virus
acuauucaacguaguacag

SEQ ID NO: 212999 - RNA, 19 nt, Human respiratory syncytial virus
acuaugagcacuacaaaug

SEQ ID NO: 213000 - RNA, 16 nt, Human respiratory syncytial virus
acucaaaauccaaaau

SEQ ID NO: 213001 - RNA, 12 nt, Human respiratory syncytial virus
acucagcaauca

SEQ ID NO: 213002 - RNA, 21 nt, Human respiratory syncytial virus
acucagcaaucaacaacauca

SEQ ID NO: 213003 - RNA, 11 nt, Human respiratory syncytial virus
agaaugcagug

SEQ ID NO: 213004 - RNA, 15 nt, Human respiratory syncytial virus
agaaugcagugacag

SEQ ID NO: 213005 - RNA, 16 nt, Human respiratory syncytial virus
agaaucaauaaagggc

SEQ ID NO: 213006 - RNA, 23 nt, Human respiratory syncytial virus
agaaaagaccugggauacucuca

SEQ ID NO: 213007 - RNA, 20 nt, Human respiratory syncytial virus
agaaaaccgugaccuaucaa

SEQ ID NO: 213008 - RNA, 23 nt, Human respiratory syncytial virus
acuuaugcaaaacacaccagcug

SEQ ID NO: 213009 - RNA, 15 nt, Human respiratory syncytial virus
acuuauuuccaguca

SEQ ID NO: 213010 - RNA, 20 nt, Human respiratory syncytial virus
acuuauuuccagucauuacu

SEQ ID NO: 213011 - RNA, 14 nt, Human respiratory syncytial virus
agaaguaaccaaag

SEQ ID NO: 213012 - RNA, 19 nt, Human respiratory syncytial virus
agaaaucaucacacacaaa

SEQ ID NO: 213013 - RNA, 17 nt, Human respiratory syncytial virus
accagugucauaacaau

SEQ ID NO: 213014 - RNA, 16 nt, Human respiratory syncytial virus
accacgccaacuauca

SEQ ID NO: 213015 - RNA, 14 nt, Human respiratory syncytial virus
acccauaacaaaca

SEQ ID NO: 213016 - RNA, 13 nt, Human respiratory syncytial virus
accuaaacaaacu

SEQ ID NO: 213017 - RNA, 21 nt, Human respiratory syncytial virus
accuaaucaaucaaacuauga

SEQ ID NO: 213018 - RNA, 15 nt, Human respiratory syncytial virus
accucaaguaucaca

SEQ ID NO: 213019 - RNA, 20 nt, Human respiratory syncytial virus
accucaaguaucacaaucaa

SEQ ID NO: 213020 - RNA, 20 nt, Human respiratory syncytial virus
acaguaccccagaaaccaaa

SEQ ID NO: 213021 - RNA, 16 nt, Human respiratory syncytial virus
acagguuaagugcaau

SEQ ID NO: 213022 - RNA, 15 nt, Human respiratory syncytial virus
acaucuggcaccaac

SEQ ID NO: 213023 - RNA, 17 nt, Human respiratory syncytial virus
acauuaaauaaggauca

SEQ ID NO: 213024 - RNA, 22 nt, Human respiratory syncytial virus
acauuaguuagaguucaaucaa

SEQ ID NO: 213025 - RNA, 17 nt, Human respiratory syncytial virus
acacuucaucacacaaa

SEQ ID NO: 213026 - RNA, 17 nt, Human respiratory syncytial virus
acacuacacacuucauc

SEQ ID NO: 213027 - RNA, 21 nt, Human respiratory syncytial virus
acaagaaucaacgcacugcca

SEQ ID NO: 213028 - RNA, 18 nt, Human respiratory syncytial virus
aacaucaugaacaucuac

SEQ ID NO: 213029 - RNA, 21 nt, Human respiratory syncytial virus
aacagcuggggcaaauauguc

SEQ ID NO: 213030 - RNA, 13 nt, Human respiratory syncytial virus
aaccaaagccaac

SEQ ID NO: 213031 - RNA, 20 nt, Human respiratory syncytial virus
aaccaaaccaagcuauuccu

SEQ ID NO: 213032 - RNA, 14 nt, Human respiratory syncytial virus
aaccaccaaccaau

SEQ ID NO: 213033 - RNA, 20 nt, Human respiratory syncytial virus
aaauugcuacaacuaacuua

SEQ ID NO: 213034 - RNA, 16 nt, Human respiratory syncytial virus
aaauuuagaugcuaac

SEQ ID NO: 213035 - RNA, 16 nt, Human respiratory syncytial virus
aacagacaucaaucca

SEQ ID NO: 213036 - RNA, 17 nt, Human respiratory syncytial virus
aacagacaucaauccau

SEQ ID NO: 213037 - RNA, 21 nt, Human respiratory syncytial virus
aacagacaucaauccauugaa

SEQ ID NO: 213038 - RNA, 14 nt, Human respiratory syncytial virus
aacuacacacuaua

SEQ ID NO: 213039 - RNA, 16 nt, Human respiratory syncytial virus
aacuacacacuauauc

SEQ ID NO: 213040 - RNA, 16 nt, Human respiratory syncytial virus
aacggcccuuaucuca

SEQ ID NO: 213041 - RNA, 13 nt, Human respiratory syncytial virus
aaccauaaccauu

SEQ ID NO: 213042 - RNA, 23 nt, Human respiratory syncytial virus
aaccauuuauaccgccaauucaa

SEQ ID NO: 213043 - RNA, 12 nt, Human respiratory syncytial virus
aaccauggagcu

SEQ ID NO: 213044 - RNA, 21 nt, Human respiratory syncytial virus
aaccugacgaaauuaacaaua

SEQ ID NO: 213045 - RNA, 15 nt, Human respiratory syncytial virus
aaauagcacuaucag

SEQ ID NO: 213046 - RNA, 17 nt, Human respiratory syncytial virus
aaagccaacuacccaag

SEQ ID NO: 213047 - RNA, 14 nt, Human respiratory syncytial virus
aaaugauacauuaa

SEQ ID NO: 213048 - RNA, 20 nt, Human respiratory syncytial virus
aaauuagaagaaccaacuua

SEQ ID NO: 213049 - RNA, 17 nt, Human respiratory syncytial virus
aaaugcaauggaacuga

SEQ ID NO: 213050 - RNA, 17 nt, Human respiratory syncytial virus
aaauucauauacuugau

SEQ ID NO: 213051 - RNA, 16 nt, Human respiratory syncytial virus
aaauucacaggauuaa

SEQ ID NO: 213052 - RNA, 22 nt, Human respiratory syncytial virus
aaaaugauuacaccaacuuaau

SEQ ID NO: 213053 - RNA, 22 nt, Human respiratory syncytial virus
aaaagaccugggauacucucaa

SEQ ID NO: 213054 - RNA, 12 nt, Human respiratory syncytial virus
aaagaaaccaaa

SEQ ID NO: 213055 - RNA, 19 nt, Human respiratory syncytial virus
aaacuuuucaauaauuuag

SEQ ID NO: 213056 - RNA, 18 nt, Human respiratory syncytial virus
aaagauacuuaaagaugc

SEQ ID NO: 213057 - RNA, 15 nt, Human respiratory syncytial virus
aauagaauuaaguaa

SEQ ID NO: 213058 - RNA, 15 nt, Human respiratory syncytial virus
aauagaaacauuuga

SEQ ID NO: 213059 - RNA, 23 nt, Human respiratory syncytial virus
aauagauauagaaguaaccaaag

SEQ ID NO: 213060 - RNA, 18 nt, Human respiratory syncytial virus
aauauaaaaacucaucaa

SEQ ID NO: 213061 - RNA, 20 nt, Human respiratory syncytial virus
aaucuagcuacucauaugaa

SEQ ID NO: 213062 - RNA, 14 nt, Human respiratory syncytial virus
aaucuauagcacaa

SEQ ID NO: 213063 - RNA, 18 nt, Human respiratory syncytial virus
aauccuuguaaauuugag

SEQ ID NO: 213064 - RNA, 14 nt, Human respiratory syncytial virus
aaugcaaccauguc

SEQ ID NO: 213065 - RNA, 23 nt, Human respiratory syncytial virus
aaugcaaccauguccaaacacaa

SEQ ID NO: 213066 - RNA, 23 nt, Human respiratory syncytial virus
aauguccgucagcggaaccacca

SEQ ID NO: 213067 - RNA, 18 nt, Human respiratory syncytial virus
aauuauaaucacuauuau

SEQ ID NO: 213068 - RNA, 15 nt, Human respiratory syncytial virus
aauuaugaugugcaa

SEQ ID NO: 213069 - RNA, 17 nt, Human respiratory syncytial virus
acaaaaaaagaacaaga

SEQ ID NO: 213070 - RNA, 14 nt, Human respiratory syncytial virus
aauacacuauucaa

SEQ ID NO: 213071 - RNA, 23 nt, Human respiratory syncytial virus
aauacauauacuauaaaucuuaa

SEQ ID NO: 213072 - RNA, 21 nt, Human respiratory syncytial virus
aaguucgcaucauccaaagau

SEQ ID NO: 213073 - RNA, 14 nt, Human respiratory syncytial virus
aaguuaaaugauac

SEQ ID NO: 213074 - RNA, 21 nt, Human respiratory syncytial virus
aagcauguccucgucugaaca

SEQ ID NO: 213075 - RNA, 18 nt, Human respiratory syncytial virus
aagccgacaguaccccag

SEQ ID NO: 213076 - RNA, 23 nt, Human respiratory syncytial virus
aagaaugcagugacagaauuaca

SEQ ID NO: 213077 - RNA, 16 nt, Human respiratory syncytial virus
aagaauuagauaagua

SEQ ID NO: 213078 - RNA, 13 nt, Human respiratory syncytial virus
aacuugcaagcau

SEQ ID NO: 213079 - RNA, 13 nt, Human respiratory syncytial virus
aaaaaauaugcaa

SEQ ID NO: 213080 - RNA, 13 nt, Human respiratory syncytial virus
aaaagaaaccaaa

SEQ ID NO: 213081 - RNA, 21 nt, Human respiratory syncytial virus
aaaaccgugaccuaucaagca

SEQ ID NO: 213082 - RNA, 21 nt, Human respiratory syncytial virus
aaaagaacuugcaagcaucaa

SEQ ID NO: 213083 - RNA, 23 nt, Human respiratory syncytial virus
aaaagaacuugcaagcaucaaca

SEQ ID NO: 213084 - RNA, 21 nt, Human respiratory syncytial virus
aaaagaccugggauacucuca

SEQ ID NO: 213085 - RNA, 18 nt, Human respiratory syncytial virus
aaaaagaugaugauccug

SEQ ID NO: 213086 - RNA, 22 nt, Human respiratory syncytial virus
uuugagauuagaggucauugcu

SEQ ID NO: 213087 - RNA, 14 nt, Human respiratory syncytial virus
uucaucaucucugc

SEQ ID NO: 213088 - RNA, 14 nt, Human respiratory syncytial virus
uucauauacuugau

SEQ ID NO: 213089 - RNA, 17 nt, Human respiratory syncytial virus
uucgcaucauccaaaga

SEQ ID NO: 213090 - RNA, 19 nt, Human respiratory syncytial virus
uuccuaacucuugcuauua

SEQ ID NO: 213091 - RNA, 14 nt, Human respiratory syncytial virus
uuccucaaacaaca

SEQ ID NO: 213092 - RNA, 19 nt, Human respiratory syncytial virus
uuuaaaagguguuaucucu

SEQ ID NO: 213093 - RNA, 12 nt, Human respiratory syncytial virus
uuuaaaaucuau

SEQ ID NO: 213094 - RNA, 21 nt, Human respiratory syncytial virus
uuuacuaauuauaaucacuau

SEQ ID NO: 213095 - RNA, 21 nt, Human respiratory syncytial virus
uuuaguuaauauaaaaacuca

SEQ ID NO: 213096 - RNA, 17 nt, Human respiratory syncytial virus
ugcuacaacuaacuuac

SEQ ID NO: 213097 - RNA, 21 nt, Human respiratory syncytial virus
ugcuacaacuaacuuacuuaa

SEQ ID NO: 213098 - RNA, 21 nt, Human respiratory syncytial virus
ugcuagaccuagagugcgaau

SEQ ID NO: 213099 - RNA, 14 nt, Human respiratory syncytial virus
ugucaaauuauaau

SEQ ID NO: 213100 - RNA, 16 nt, Human respiratory syncytial virus
uuaaacaagauacuca

SEQ ID NO: 213101 - RNA, 10 nt, Human respiratory syncytial virus
uuaaccauaa

SEQ ID NO: 213102 - RNA, 18 nt, Human respiratory syncytial virus
uuaacggcccuuaucuca

SEQ ID NO: 213103 - RNA, 16 nt, Human respiratory syncytial virus
uuacacuaauacauau

SEQ ID NO: 213104 - RNA, 12 nt, Human respiratory syncytial virus
uuacaccaacuu

SEQ ID NO: 213105 - RNA, 17 nt, Human respiratory syncytial virus
uuacaauuuaaccauaa

SEQ ID NO: 213106 - RNA, 14 nt, Human respiratory syncytial virus
uuagucuaacucaa

SEQ ID NO: 213107 - RNA, 15 nt, Human respiratory syncytial virus
uuagucuaacucaau

SEQ ID NO: 213108 - RNA, 21 nt, Human respiratory syncytial virus
uuagugcuuuaagaacagguu

SEQ ID NO: 213109 - RNA, 14 nt, Human respiratory syncytial virus
uuaguuagaguuca

SEQ ID NO: 213110 - RNA, 16 nt, Human respiratory syncytial virus
ucaucaucucugccaa

SEQ ID NO: 213111 - RNA, 16 nt, Human respiratory syncytial virus
ucaucuguaccagcag

SEQ ID NO: 213112 - RNA, 16 nt, Human respiratory syncytial virus
ucaucuaauuguaaua

SEQ ID NO: 213113 - RNA, 18 nt, Human respiratory syncytial virus
ucaucucugccaaucaca

SEQ ID NO: 213114 - RNA, 23 nt, Human respiratory syncytial virus
uccacauauauccucaaacuaca

SEQ ID NO: 213115 - RNA, 19 nt, Human respiratory syncytial virus
uccacagguuaagugcaau

SEQ ID NO: 213116 - RNA, 18 nt, Human respiratory syncytial virus
ucauuaauaucuagauau

SEQ ID NO: 213117 - RNA, 22 nt, Human respiratory syncytial virus
ucauucacaaaauuaacagcug

SEQ ID NO: 213118 - RNA, 18 nt, Human respiratory syncytial virus
ucauguuaaacaagauac

SEQ ID NO: 213119 - RNA, 19 nt, Human respiratory syncytial virus
ucccaauuaugaugugcaa

SEQ ID NO: 213120 - RNA, 15 nt, Human respiratory syncytial virus
ucugccaaucacaaa

SEQ ID NO: 213121 - RNA, 21 nt, Human respiratory syncytial virus
ucucaccaaagaaaucaucac

SEQ ID NO: 213122 - RNA, 14 nt, Human respiratory syncytial virus
ugcaaauaacaaag

SEQ ID NO: 213123 - RNA, 19 nt, Human respiratory syncytial virus
ugccagaccgaacaaacaa

SEQ ID NO: 213124 - RNA, 23 nt, Human respiratory syncytial virus
ugccuauguuccagucaucugua

SEQ ID NO: 213125 - RNA, 13 nt, Human respiratory syncytial virus
ugauaaucucaac

SEQ ID NO: 213126 - RNA, 19 nt, Human respiratory syncytial virus
ugauacauuaaauaaggau

SEQ ID NO: 213127 - RNA, 14 nt, Human respiratory syncytial virus
ugaaucaacugcca

SEQ ID NO: 213128 - RNA, 14 nt, Human respiratory syncytial virus
ugaaucauuucuuc

SEQ ID NO: 213129 - RNA, 22 nt, Human respiratory syncytial virus
ugaaucauuucuucacaucaug

SEQ ID NO: 213130 - RNA, 23 nt, Human respiratory syncytial virus
ugaaucauuucuucacaucaugc

SEQ ID NO: 213131 - RNA, 13 nt, Human respiratory syncytial virus
aucaaacuaugag

SEQ ID NO: 213132 - RNA, 13 nt, Human respiratory syncytial virus
aucaacacaucau

SEQ ID NO: 213133 - RNA, 17 nt, Human respiratory syncytial virus
aucaacacaucauucac

SEQ ID NO: 213134 - RNA, 17 nt, Human respiratory syncytial virus
aucaacucacucagcaa

SEQ ID NO: 213135 - RNA, 22 nt, Human respiratory syncytial virus
aucaacucacucagcaaucaac

SEQ ID NO: 213136 - RNA, 13 nt, Human respiratory syncytial virus
aucaacugccaga

SEQ ID NO: 213137 - RNA, 14 nt, Human respiratory syncytial virus
aucacuaacaauau

SEQ ID NO: 213138 - RNA, 14 nt, Human respiratory syncytial virus
auauauaaacaaac

SEQ ID NO: 213139 - RNA, 13 nt, Human respiratory syncytial virus
auauucaucaucu

SEQ ID NO: 213140 - RNA, 20 nt, Human respiratory syncytial virus
auauucaucaucucugccaa

SEQ ID NO: 213141 - RNA, 22 nt, Human respiratory syncytial virus
auagcacuaucaguucuggcaa

SEQ ID NO: 213142 - RNA, 18 nt, Human respiratory syncytial virus
auagaaguaaccaaagag

SEQ ID NO: 213143 - RNA, 15 nt, Human respiratory syncytial virus
auacauauacuauaa

SEQ ID NO: 213144 - RNA, 14 nt, Human respiratory syncytial virus
auacacugaauaua

SEQ ID NO: 213145 - RNA, 18 nt, Human respiratory syncytial virus
auacacugaauauaauac

SEQ ID NO: 213146 - RNA, 13 nt, Human respiratory syncytial virus
auacacagcagcu

SEQ ID NO: 213147 - RNA, 18 nt, Human respiratory syncytial virus
auaaauucacaggauuaa

SEQ ID NO: 213148 - RNA, 16 nt, Human respiratory syncytial virus
auaacaaacacuucaa

SEQ ID NO: 213149 - RNA, 20 nt, Human respiratory syncytial virus
aucgacauguagugcaguua

SEQ ID NO: 213150 - RNA, 18 nt, Human respiratory syncytial virus
auccugcaucacuaacaa

SEQ ID NO: 213151 - RNA, 20 nt, Human respiratory syncytial virus
auccugcaucacuaacaaua

SEQ ID NO: 213152 - RNA, 13 nt, Human respiratory syncytial virus
aucucaacaacca

SEQ ID NO: 213153 - RNA, 13 nt, Human respiratory syncytial virus
aucuauagcacaa

SEQ ID NO: 213154 - RNA, 12 nt, Human respiratory syncytial virus
aucuacacuaca

SEQ ID NO: 213155 - RNA, 15 nt, Human respiratory syncytial virus
aucuacacuacacac

SEQ ID NO: 213156 - RNA, 16 nt, Human respiratory syncytial virus
aucuacacuacacacu

SEQ ID NO: 213157 - RNA, 18 nt, Human respiratory syncytial virus
aucccaaaucaacccaua

SEQ ID NO: 213158 - RNA, 13 nt, Human respiratory syncytial virus
auccaucagcaac

SEQ ID NO: 213159 - RNA, 16 nt, Human respiratory syncytial virus
auccaucacaauagaa

SEQ ID NO: 213160 - RNA, 21 nt, Human respiratory syncytial virus
auccaucacaauagaauucac

SEQ ID NO: 213161 - RNA, 22 nt, Human respiratory syncytial virus
auccaaucuucucacagaguca

SEQ ID NO: 213162 - RNA, 12 nt, Human respiratory syncytial virus
auccaaccauaa

SEQ ID NO: 213163 - RNA, 17 nt, Human respiratory syncytial virus
auccaaaaucacuacca

SEQ ID NO: 213164 - RNA, 18 nt, Human respiratory syncytial virus
aucauguuucaacaacag

SEQ ID NO: 213165 - RNA, 20 nt, Human respiratory syncytial virus
agccgacaguaccccagaaa

SEQ ID NO: 213166 - RNA, 15 nt, Human respiratory syncytial virus
agcuacucauaugaa

SEQ ID NO: 213167 - RNA, 23 nt, Human respiratory syncytial virus
aggcuccacauacacagcagcug

SEQ ID NO: 213168 - RNA, 21 nt, Human respiratory syncytial virus
agggcaaguucgcaucaucca

SEQ ID NO: 213169 - RNA, 23 nt, Human respiratory syncytial virus
agggaaauggggcaaauaaacuc

SEQ ID NO: 213170 - RNA, 13 nt, Human respiratory syncytial virus
aguaucacaauca

SEQ ID NO: 213171 - RNA, 21 nt, Human respiratory syncytial virus
aguaacaaaaaaagaacaaga

SEQ ID NO: 213172 - RNA, 12 nt, Human respiratory syncytial virus
aguaaagccaau

SEQ ID NO: 213173 - RNA, 12 nt, Human respiratory syncytial virus
auaaaaacucau

SEQ ID NO: 213174 - RNA, 13 nt, Human respiratory syncytial virus
auaaaaaccucaa

SEQ ID NO: 213175 - RNA, 23 nt, Human respiratory syncytial virus
agugucauaaugcuuggccauaa

SEQ ID NO: 213176 - RNA, 17 nt, Human respiratory syncytial virus
aguucaaucaaucucaa

SEQ ID NO: 213177 - RNA, 21 nt, Human respiratory syncytial virus
agugaucaacucacucagcaa

SEQ ID NO: 213178 - RNA, 13 nt, Human respiratory syncytial virus
accaaaugcaaug

SEQ ID NO: 213179 - RNA, 15 nt, Human respiratory syncytial virus
accaaaugcaaugga

SEQ ID NO: 213180 - RNA, 16 nt, Human respiratory syncytial virus
accaaccaaucaauca

SEQ ID NO: 213181 - RNA, 15 nt, Human respiratory syncytial virus
accagccacuaucug

SEQ ID NO: 213182 - RNA, 13 nt, Human respiratory syncytial virus
acaucuuagcaga

SEQ ID NO: 213183 - RNA, 14 nt, Human respiratory syncytial virus
acaucuuagcagaa

SEQ ID NO: 213184 - RNA, 22 nt, Human respiratory syncytial virus
acaugugcauuuacaacacaac

SEQ ID NO: 213185 - RNA, 13 nt, Human respiratory syncytial virus
acauguagugcag

SEQ ID NO: 213186 - RNA, 21 nt, Human respiratory syncytial virus
acauguagugcaguuagcaga

SEQ ID NO: 213187 - RNA, 17 nt, Human respiratory syncytial virus
acacuacuaugcaaaga

SEQ ID NO: 213188 - RNA, 18 nt, Human respiratory syncytial virus
aauuuagcuuacugauuc

SEQ ID NO: 213189 - RNA, 18 nt, Human respiratory syncytial virus
aauuucuccaacaucuua

SEQ ID NO: 213190 - RNA, 18 nt, Human respiratory syncytial virus
acaggagauaauauugac

SEQ ID NO: 213191 - RNA, 21 nt, Human respiratory syncytial virus
acagucugcugaucaccaauc

SEQ ID NO: 213192 - RNA, 19 nt, Human respiratory syncytial virus
accaucaugcugugucaaa

SEQ ID NO: 213193 - RNA, 14 nt, Human respiratory syncytial virus
accagugucauaac

SEQ ID NO: 213194 - RNA, 16 nt, Human respiratory syncytial virus
accccagaaaccaaag

SEQ ID NO: 213195 - RNA, 19 nt, Human respiratory syncytial virus
acccauaacaaacacuuca

SEQ ID NO: 213196 - RNA, 17 nt, Human respiratory syncytial virus
agacacuauaaagauac

SEQ ID NO: 213197 - RNA, 12 nt, Human respiratory syncytial virus
agaaacaauaga

SEQ ID NO: 213198 - RNA, 22 nt, Human respiratory syncytial virus
agaaaucaucacacacaaauuc

SEQ ID NO: 213199 - RNA, 22 nt, Human respiratory syncytial virus
agaagaugucacuacagucaua

SEQ ID NO: 213200 - RNA, 15 nt, Human respiratory syncytial virus
agaaguaaccaaaga

SEQ ID NO: 213201 - RNA, 19 nt, Human respiratory syncytial virus
agaaguaaccaaagagagc

SEQ ID NO: 213202 - RNA, 19 nt, Human respiratory syncytial virus
agaacuugcaagcaucaac

SEQ ID NO: 213203 - RNA, 19 nt, Human respiratory syncytial virus
agaaucaauaaagggcaag

SEQ ID NO: 213204 - RNA, 21 nt, Human respiratory syncytial virus
acuugcaagcaucaacauacu

SEQ ID NO: 213205 - RNA, 14 nt, Human respiratory syncytial virus
acuugcucauaaaa

SEQ ID NO: 213206 - RNA, 23 nt, Human respiratory syncytial virus
acuuauuagaugccacucaacaa

SEQ ID NO: 213207 - RNA, 17 nt, Human respiratory syncytial virus
acucaagucaauggaca

SEQ ID NO: 213208 - RNA, 14 nt, Human respiratory syncytial virus
acucacucagcaau

SEQ ID NO: 213209 - RNA, 21 nt, Human respiratory syncytial virus
acucacucagcaaucaacaac

SEQ ID NO: 213210 - RNA, 22 nt, Human respiratory syncytial virus
acucacucagcaaucaacaaca

SEQ ID NO: 213211 - RNA, 17 nt, Human respiratory syncytial virus
acucauaguuacauaaa

SEQ ID NO: 213212 - RNA, 13 nt, Human respiratory syncytial virus
acuauauccaaac

SEQ ID NO: 213213 - RNA, 16 nt, Human respiratory syncytial virus
auuagaugccacucaa

SEQ ID NO: 213214 - RNA, 16 nt, Human respiratory syncytial virus
auuauaaucacuauua

SEQ ID NO: 213215 - RNA, 23 nt, Human respiratory syncytial virus
auugcuacaacuaacuuacuuaa

SEQ ID NO: 213216 - RNA, 14 nt, Human respiratory syncytial virus
auuacaccaacuua

SEQ ID NO: 213217 - RNA, 15 nt, Human respiratory syncytial virus
auuacaccaacuuaa

SEQ ID NO: 213218 - RNA, 16 nt, Human respiratory syncytial virus
auuacaccaacuuaau

SEQ ID NO: 213219 - RNA, 21 nt, Human respiratory syncytial virus
auuacaauuuaaccauaacca

SEQ ID NO: 213220 - RNA, 13 nt, Human respiratory syncytial virus
auguuaaacaaga

SEQ ID NO: 213221 - RNA, 16 nt, Human respiratory syncytial virus
augugcaaaaacaccu

SEQ ID NO: 213222 - RNA, 22 nt, Human respiratory syncytial virus
auguaaugcuuuagggaguuac

SEQ ID NO: 213223 - RNA, 19 nt, Human respiratory syncytial virus
auggugucgcaaaaccacg

SEQ ID NO: 213224 - RNA, 20 nt, Human respiratory syncytial virus
aucuuaaaaaacuaacuaua

SEQ ID NO: 213225 - RNA, 14 nt, Human respiratory syncytial virus
aucuguaccagcag

SEQ ID NO: 213226 - RNA, 22 nt, Human respiratory syncytial virus
caaauguccgucagcggaacca

SEQ ID NO: 213227 - RNA, 19 nt, Human respiratory syncytial virus
caaacuaugagcacuacaa

SEQ ID NO: 213228 - RNA, 21 nt, Human respiratory syncytial virus
caaauccaaucuucucacaga

SEQ ID NO: 213229 - RNA, 22 nt, Human respiratory syncytial virus
caaacuacacacuauauccaaa

SEQ ID NO: 213230 - RNA, 15 nt, Human respiratory syncytial virus
caaauagcacuauca

SEQ ID NO: 213231 - RNA, 16 nt, Human respiratory syncytial virus
caaauagcacuaucag

SEQ ID NO: 213232 - RNA, 15 nt, Human respiratory syncytial virus
caaaucaacccauaa

SEQ ID NO: 213233 - RNA, 14 nt, Human respiratory syncytial virus
caaauauggaaaca

SEQ ID NO: 213234 - RNA, 14 nt, Human respiratory syncytial virus
caaaaaugauuaca

SEQ ID NO: 213235 - RNA, 10 nt, Human respiratory syncytial virus
caaacacuuc

SEQ ID NO: 213236 - RNA, 12 nt, Human respiratory syncytial virus
auuuaaccauaa

SEQ ID NO: 213237 - RNA, 23 nt, Human respiratory syncytial virus
auuuaaccauaaccauuuggaua

SEQ ID NO: 213238 - RNA, 16 nt, Human respiratory syncytial virus
auuuaaaagguguuau

SEQ ID NO: 213239 - RNA, 18 nt, Human respiratory syncytial virus
auuuacaacacaacgaga

SEQ ID NO: 213240 - RNA, 14 nt, Human respiratory syncytial virus
auuuagaugcuaac

SEQ ID NO: 213241 - RNA, 12 nt, Human respiratory syncytial virus
caauacauauac

SEQ ID NO: 213242 - RNA, 19 nt, Human respiratory syncytial virus
caauacauauacuauaaau

SEQ ID NO: 213243 - RNA, 21 nt, Human respiratory syncytial virus
caaugauaaucucaaccucuc

SEQ ID NO: 213244 - RNA, 15 nt, Human respiratory syncytial virus
caaucuuccuaacuc

SEQ ID NO: 213245 - RNA, 15 nt, Human respiratory syncytial virus
caaucuucucacaga

SEQ ID NO: 213246 - RNA, 19 nt, Human respiratory syncytial virus
caaucgacauguagugcag

SEQ ID NO: 213247 - RNA, 16 nt, Human respiratory syncytial virus
caaucucaacaaccau

SEQ ID NO: 213248 - RNA, 14 nt, Human respiratory syncytial virus
caaucccacucaaa

SEQ ID NO: 213249 - RNA, 15 nt, Human respiratory syncytial virus
caaucccacucaaaa

SEQ ID NO: 213250 - RNA, 21 nt, Human respiratory syncytial virus
caagcuauuccucaaacaaca

SEQ ID NO: 213251 - RNA, 16 nt, Human respiratory syncytial virus
cacagguuaagugcaa

SEQ ID NO: 213252 - RNA, 17 nt, Human respiratory syncytial virus
cacagguuaagugcaau

SEQ ID NO: 213253 - RNA, 17 nt, Human respiratory syncytial virus
cacaucauucacaaaau

SEQ ID NO: 213254 - RNA, 13 nt, Human respiratory syncytial virus
cagaaaccaaagc

SEQ ID NO: 213255 - RNA, 14 nt, Human respiratory syncytial virus
cacuucaacaucac

SEQ ID NO: 213256 - RNA, 22 nt, Human respiratory syncytial virus
cacucaaaauccaaaaucacua

SEQ ID NO: 213257 - RNA, 12 nt, Human respiratory syncytial virus
cacucaacaauu

SEQ ID NO: 213258 - RNA, 14 nt, Human respiratory syncytial virus
cacucagcaaucaa

SEQ ID NO: 213259 - RNA, 18 nt, Human respiratory syncytial virus
cacuauuaugauugcaau

SEQ ID NO: 213260 - RNA, 22 nt, Human respiratory syncytial virus
cacucccaauuaugaugugcaa

SEQ ID NO: 213261 - RNA, 12 nt, Human respiratory syncytial virus
caccucaaguca

SEQ ID NO: 213262 - RNA, 14 nt, Human respiratory syncytial virus
caccucaagucaga

SEQ ID NO: 213263 - RNA, 16 nt, Human respiratory syncytial virus
caccuaaaaacuuauu

SEQ ID NO: 213264 - RNA, 21 nt, Human respiratory syncytial virus
caccuaaaaacuuauuagaug

SEQ ID NO: 213265 - RNA, 13 nt, Human respiratory syncytial virus
cacuacuaugcaa

SEQ ID NO: 213266 - RNA, 16 nt, Human respiratory syncytial virus
cacuacacacuucauc

SEQ ID NO: 213267 - RNA, 23 nt, Human respiratory syncytial virus
cacuacacacuucaucacacaaa

SEQ ID NO: 213268 - RNA, 15 nt, Human respiratory syncytial virus
cacuaauacauauga

SEQ ID NO: 213269 - RNA, 22 nt, Human respiratory syncytial virus
ccuuuuuaacggcccuuaucuc

SEQ ID NO: 213270 - RNA, 17 nt, Human respiratory syncytial virus
ccuuguaguauaucauc

SEQ ID NO: 213271 - RNA, 17 nt, Human respiratory syncytial virus
ccucaaacuacacacua

SEQ ID NO: 213272 - RNA, 17 nt, Human respiratory syncytial virus
ccauaacaaacacuuca

SEQ ID NO: 213273 - RNA, 18 nt, Human respiratory syncytial virus
ccauaacaaacacuucaa

SEQ ID NO: 213274 - RNA, 13 nt, Human respiratory syncytial virus
ccaauaacauaaa

SEQ ID NO: 213275 - RNA, 17 nt, Human respiratory syncytial virus
ccacucaaaauccaaaa

SEQ ID NO: 213276 - RNA, 13 nt, Human respiratory syncytial virus
ccagaaaccaaag

SEQ ID NO: 213277 - RNA, 17 nt, Human respiratory syncytial virus
ccagaccgaacaaacaa

SEQ ID NO: 213278 - RNA, 22 nt, Human respiratory syncytial virus
ccaaaaucacuaccagccacua

SEQ ID NO: 213279 - RNA, 18 nt, Human respiratory syncytial virus
ccaaacacaagaaucaac

SEQ ID NO: 213280 - RNA, 20 nt, Human respiratory syncytial virus
cauuaauaucuagauaucau

SEQ ID NO: 213281 - RNA, 14 nt, Human respiratory syncytial virus
cauuaaauaaggau

SEQ ID NO: 213282 - RNA, 19 nt, Human respiratory syncytial virus
cauuauauuauaguuauua

SEQ ID NO: 213283 - RNA, 18 nt, Human respiratory syncytial virus
cauuaguuagaguucaau

SEQ ID NO: 213284 - RNA, 18 nt, Human respiratory syncytial virus
cauuaguuuuugacacuu

SEQ ID NO: 213285 - RNA, 13 nt, Human respiratory syncytial virus
caucucucaccaa

SEQ ID NO: 213286 - RNA, 16 nt, Human respiratory syncytial virus
caucucugccaaucac

SEQ ID NO: 213287 - RNA, 18 nt, Human respiratory syncytial virus
caucucugccaaucacaa

SEQ ID NO: 213288 - RNA, 15 nt, Human respiratory syncytial virus
caucacacaaaccaa

SEQ ID NO: 213289 - RNA, 14 nt, Human respiratory syncytial virus
caucaacauacuag

SEQ ID NO: 213290 - RNA, 19 nt, Human respiratory syncytial virus
caugauugcuacauucaau

SEQ ID NO: 213291 - RNA, 13 nt, Human respiratory syncytial virus
cauguagugcagu

SEQ ID NO: 213292 - RNA, 13 nt, Human respiratory syncytial virus
cauagacacuuug

SEQ ID NO: 213293 - RNA, 18 nt, Human respiratory syncytial virus
cauaauauucaucaucuc

SEQ ID NO: 213294 - RNA, 13 nt, Human respiratory syncytial virus
cauaacaaacacu

SEQ ID NO: 213295 - RNA, 19 nt, Human respiratory syncytial virus
cauaaauuggggcaaauac

SEQ ID NO: 213296 - RNA, 19 nt, Human respiratory syncytial virus
cauaacgauucuauaucau

SEQ ID NO: 213297 - RNA, 21 nt, Human respiratory syncytial virus
cagcaaucaacaacaucaaua

SEQ ID NO: 213298 - RNA, 12 nt, Human respiratory syncytial virus
cuacacacuaua

SEQ ID NO: 213299 - RNA, 14 nt, Human respiratory syncytial virus
cuacacacuauauc

SEQ ID NO: 213300 - RNA, 16 nt, Human respiratory syncytial virus
cuacacacuucaucac

SEQ ID NO: 213301 - RNA, 19 nt, Human respiratory syncytial virus
cuaauuauaaucacuauua

SEQ ID NO: 213302 - RNA, 13 nt, Human respiratory syncytial virus
cuacacuacacac

SEQ ID NO: 213303 - RNA, 17 nt, Human respiratory syncytial virus
cuaccagccacuaucug

SEQ ID NO: 213304 - RNA, 18 nt, Human respiratory syncytial virus
cuacuagagcauaugaau

SEQ ID NO: 213305 - RNA, 17 nt, Human respiratory syncytial virus
cuaguaagcuucaaaga

SEQ ID NO: 213306 - RNA, 18 nt, Human respiratory syncytial virus
cuaguaagcuucaaagaa

SEQ ID NO: 213307 - RNA, 19 nt, Human respiratory syncytial virus
cuagaaaaagaugaugauc

SEQ ID NO: 213308 - RNA, 24 nt, Human respiratory syncytial virus
cucacucagcaaucaacaacauca

SEQ ID NO: 213309 - RNA, 21 nt, Human respiratory syncytial virus
cucagcaaucaacaacaucaa

SEQ ID NO: 213310 - RNA, 15 nt, Human respiratory syncytial virus
cucaaccucucucau

SEQ ID NO: 213311 - RNA, 16 nt, Human respiratory syncytial virus
cuauuuuacacuaaua

SEQ ID NO: 213312 - RNA, 14 nt, Human respiratory syncytial virus
cucaaacuacacac

SEQ ID NO: 213313 - RNA, 15 nt, Human respiratory syncytial virus
cucaaacuacacacu

SEQ ID NO: 213314 - RNA, 19 nt, Human respiratory syncytial virus
cucaaacuacacacuauau

SEQ ID NO: 213315 - RNA, 12 nt, Human respiratory syncytial virus
cuagugaagcag

SEQ ID NO: 213316 - RNA, 16 nt, Human respiratory syncytial virus
cuauaaagauacuuaa

SEQ ID NO: 213317 - RNA, 17 nt, Human respiratory syncytial virus
cuauaaagauacuuaaa

SEQ ID NO: 213318 - RNA, 23 nt, Human respiratory syncytial virus
cuauaaagauacuuaaagaugcu

SEQ ID NO: 213319 - RNA, 19 nt, Human respiratory syncytial virus
cuauaucauccaaccauaa

SEQ ID NO: 213320 - RNA, 12 nt, Human respiratory syncytial virus
cuauauccaaac

SEQ ID NO: 213321 - RNA, 21 nt, Human respiratory syncytial virus
cuauauccaaacaucaugaac

SEQ ID NO: 213322 - RNA, 16 nt, Human respiratory syncytial virus
cgacauguagugcagu

SEQ ID NO: 213323 - RNA, 22 nt, Human respiratory syncytial virus
cgacaguaccccagaaaccaaa

SEQ ID NO: 213324 - RNA, 19 nt, Human respiratory syncytial virus
cuaaaguaaaacuuauaaa

SEQ ID NO: 213325 - RNA, 20 nt, Human respiratory syncytial virus
cuaaaucaacacaucauuca

SEQ ID NO: 213326 - RNA, 18 nt, Human respiratory syncytial virus
cuucaucacacaaaccaa

SEQ ID NO: 213327 - RNA, 13 nt, Human respiratory syncytial virus
cuucaacaucaca

SEQ ID NO: 213328 - RNA, 19 nt, Human respiratory syncytial virus
cuucaacaucacaguacag

SEQ ID NO: 213329 - RNA, 14 nt, Human respiratory syncytial virus
cuuaugacauauaa

SEQ ID NO: 213330 - RNA, 17 nt, Human respiratory syncytial virus
cuucaaagaagaucuca

SEQ ID NO: 213331 - RNA, 22 nt, Human respiratory syncytial virus
cuuagcagaaaaccgugaccua

SEQ ID NO: 213332 - RNA, 15 nt, Human respiratory syncytial virus
cuuaaagaugcugga

SEQ ID NO: 213333 - RNA, 23 nt, Human respiratory syncytial virus
cugauccacagguuaagugcaau

SEQ ID NO: 213334 - RNA, 18 nt, Human respiratory syncytial virus
cucaugccuuacuaguga

SEQ ID NO: 213335 - RNA, 15 nt, Human respiratory syncytial virus
gacauguagugcagu

SEQ ID NO: 213336 - RNA, 13 nt, Human respiratory syncytial virus
gacaucaauccau

SEQ ID NO: 213337 - RNA, 16 nt, Human respiratory syncytial virus
gagauuagaggucauu

SEQ ID NO: 213338 - RNA, 23 nt, Human respiratory syncytial virus
gaacuugcaagcaucaacauacu

SEQ ID NO: 213339 - RNA, 13 nt, Human respiratory syncytial virus
gaauuaaguaaua

SEQ ID NO: 213340 - RNA, 20 nt, Human respiratory syncytial virus
gaauuacagcuacuuaugca

SEQ ID NO: 213341 - RNA, 20 nt, Human respiratory syncytial virus
gaacagguugguauaccagu

SEQ ID NO: 213342 - RNA, 15 nt, Human respiratory syncytial virus
gaaccaccaaccaau

SEQ ID NO: 213343 - RNA, 16 nt, Human respiratory syncytial virus
gaaccaccaaccaauc

SEQ ID NO: 213344 - RNA, 20 nt, Human respiratory syncytial virus
gccagaccgaacaaacaaau

SEQ ID NO: 213345 - RNA, 17 nt, Human respiratory syncytial virus
gccaacuacccaagaaa

SEQ ID NO: 213346 - RNA, 17 nt, Human respiratory syncytial virus
gcaucacuaacaauaug

SEQ ID NO: 213347 - RNA, 23 nt, Human respiratory syncytial virus
gcauaauaucuguuaacucaaua

SEQ ID NO: 213348 - RNA, 21 nt, Human respiratory syncytial virus
gcaaaaccacgccaacuauca

SEQ ID NO: 213349 - RNA, 22 nt, Human respiratory syncytial virus
gcaaaaccacgccaacuaucau

SEQ ID NO: 213350 - RNA, 22 nt, Human respiratory syncytial virus
gcagaaaaccgugaccuaucaa

SEQ ID NO: 213351 - RNA, 19 nt, Human respiratory syncytial virus
gcacuaucaguucuggcaa

SEQ ID NO: 213352 - RNA, 22 nt, Human respiratory syncytial virus
gauccuuaacucauaguuacau

SEQ ID NO: 213353 - RNA, 15 nt, Human respiratory syncytial virus
gauccugcaucacua

SEQ ID NO: 213354 - RNA, 18 nt, Human respiratory syncytial virus
gauccugcaucacuaaca

SEQ ID NO: 213355 - RNA, 14 nt, Human respiratory syncytial virus
gauuacaccaacuu

SEQ ID NO: 213356 - RNA, 20 nt, Human respiratory syncytial virus
uauuaugauugcaauacuaa

SEQ ID NO: 213357 - RNA, 15 nt, Human respiratory syncytial virus
ucaaacuaugagcac

SEQ ID NO: 213358 - RNA, 24 nt, Human respiratory syncytial virus
ucaaaauccaaaaucacuaccagc

SEQ ID NO: 213359 - RNA, 20 nt, Human respiratory syncytial virus
uauuuccagucauuacuuau

SEQ ID NO: 213360 - RNA, 23 nt, Human respiratory syncytial virus
uauuugaugaaauucauuggaca

SEQ ID NO: 213361 - RNA, 13 nt, Human respiratory syncytial virus
uauuuuacacuaa

SEQ ID NO: 213362 - RNA, 20 nt, Human respiratory syncytial virus
ucaacaacagucugcugauc

SEQ ID NO: 213363 - RNA, 13 nt, Human respiratory syncytial virus
ucaacacaucauu

SEQ ID NO: 213364 - RNA, 23 nt, Human respiratory syncytial virus
ucaaagggaaauggggcaaauaa

SEQ ID NO: 213365 - RNA, 15 nt, Human respiratory syncytial virus
ucaaucaaccaacug

SEQ ID NO: 213366 - RNA, 21 nt, Human respiratory syncytial virus
ucaaucaaccaacugauccau

SEQ ID NO: 213367 - RNA, 17 nt, Human respiratory syncytial virus
ucaauccaacaagugaa

SEQ ID NO: 213368 - RNA, 17 nt, Human respiratory syncytial virus
ucaauccauugaaucaa

SEQ ID NO: 213369 - RNA, 21 nt, Human respiratory syncytial virus
ucaauuaugagaugaagcuac

SEQ ID NO: 213370 - RNA, 17 nt, Human respiratory syncytial virus
ucaaguaucacaaucaa

SEQ ID NO: 213371 - RNA, 15 nt, Human respiratory syncytial virus
ucaauaaaacagaca

SEQ ID NO: 213372 - RNA, 14 nt, Human respiratory syncytial virus
uagcauaauaucug

SEQ ID NO: 213373 - RNA, 14 nt, Human respiratory syncytial virus
uauaagaaugcagu

SEQ ID NO: 213374 - RNA, 15 nt, Human respiratory syncytial virus
uaguuagaguucaau

SEQ ID NO: 213375 - RNA, 23 nt, Human respiratory syncytial virus
uaguaagcuucaaagaagaucuc

SEQ ID NO: 213376 - RNA, 17 nt, Human respiratory syncytial virus
uaucacaaucaaacacu

SEQ ID NO: 213377 - RNA, 14 nt, Human respiratory syncytial virus
uaucaacacugaau

SEQ ID NO: 213378 - RNA, 15 nt, Human respiratory syncytial virus
uaugagcacuacaaa

SEQ ID NO: 213379 - RNA, 16 nt, Human respiratory syncytial virus
uauguuccagucaucu

SEQ ID NO: 213380 - RNA, 15 nt, Human respiratory syncytial virus
uauguuauaugcuau

SEQ ID NO: 213381 - RNA, 19 nt, Human respiratory syncytial virus
uaccagugucauaacaaua

SEQ ID NO: 213382 - RNA, 22 nt, Human respiratory syncytial virus
uacacuauucaacguaguacag

SEQ ID NO: 213383 - RNA, 17 nt, Human respiratory syncytial virus
uacacuaauacauauga

SEQ ID NO: 213384 - RNA, 20 nt, Human respiratory syncytial virus
uacacuaauacauaugaucu

SEQ ID NO: 213385 - RNA, 22 nt, Human respiratory syncytial virus
uaaugcauuguaccucaccuca

SEQ ID NO: 213386 - RNA, 23 nt, Human respiratory syncytial virus
uacaaagauggcucuuagcaaag

SEQ ID NO: 213387 - RNA, 20 nt, Human respiratory syncytial virus
uaauaucuguuaacucaaua

SEQ ID NO: 213388 - RNA, 18 nt, Human respiratory syncytial virus
uaauaucuagauaucaua

SEQ ID NO: 213389 - RNA, 14 nt, Human respiratory syncytial virus
uaauccuguauaua

SEQ ID NO: 213390 - RNA, 18 nt, Human respiratory syncytial virus
uaaucaaucaaacuauga

SEQ ID NO: 213391 - RNA, 18 nt, Human respiratory syncytial virus
uaauacaaaauauggcac

SEQ ID NO: 213392 - RNA, 15 nt, Human respiratory syncytial virus
uaaaaacucaucaaa

SEQ ID NO: 213393 - RNA, 19 nt, Human respiratory syncytial virus
uaaaaaacuaacuauaaca

SEQ ID NO: 213394 - RNA, 15 nt, Human respiratory syncytial virus
gugcuuuaagaacag

SEQ ID NO: 213395 - RNA, 23 nt, Human respiratory syncytial virus
uaaaaugggaaauacauccauca

SEQ ID NO: 213396 - RNA, 18 nt, Human respiratory syncytial virus
uaaagccaauaacauaaa

SEQ ID NO: 213397 - RNA, 18 nt, Human respiratory syncytial virus
uaagaagaaagauagcau

SEQ ID NO: 213398 - RNA, 18 nt, Human respiratory syncytial virus
uaacgauucuauaucauc

SEQ ID NO: 213399 - RNA, 20 nt, Human respiratory syncytial virus
uaacgauucuauaucaucca

SEQ ID NO: 213400 - RNA, 13 nt, Human respiratory syncytial virus
uaaguaauauaaa

SEQ ID NO: 213401 - RNA, 19 nt, Human respiratory syncytial virus
uaacagcuggggcaaauau

SEQ ID NO: 213402 - RNA, 14 nt, Human respiratory syncytial virus
gucagaacauaacu

SEQ ID NO: 213403 - RNA, 22 nt, Human respiratory syncytial virus
gucagcggaaccaccaaccaau

SEQ ID NO: 213404 - RNA, 14 nt, Human respiratory syncytial virus
guaccagcagacuu

SEQ ID NO: 213405 - RNA, 13 nt, Human respiratory syncytial virus
guaaauagacauu

SEQ ID NO: 213406 - RNA, 16 nt, Human respiratory syncytial virus
guaaauaaaaccaaaa

SEQ ID NO: 213407 - RNA, 15 nt, Human respiratory syncytial virus
guaaagccaauaaca

SEQ ID NO: 213408 - RNA, 14 nt, Human respiratory syncytial virus
gugccuauguucca

SEQ ID NO: 213409 - RNA, 18 nt, Human respiratory syncytial virus
gugccuauguuccaguca

SEQ ID NO: 213410 - RNA, 19 nt, Human respiratory syncytial virus
gugaucaacucacucagca

SEQ ID NO: 213411 - RNA, 20 nt, Human respiratory syncytial virus
gugaucaacucacucagcaa

SEQ ID NO: 213412 - RNA, 15 nt, Human respiratory syncytial virus
gugaggcaaaacuuc

SEQ ID NO: 213413 - RNA, 18 nt, Human respiratory syncytial virus
gugaccuaucaagcaaga

SEQ ID NO: 213414 - RNA, 22 nt, Human respiratory syncytial virus
gucaucuguaccagcagacuug

SEQ ID NO: 213415 - RNA, 23 nt, Human respiratory syncytial virus
gucauaauuacuuugaauggccu

SEQ ID NO: 213416 - RNA, 14 nt, Human respiratory syncytial virus
ggaaauacauccau

SEQ ID NO: 213417 - RNA, 20 nt, Human respiratory syncytial virus
ggcccuauuuuacacuaaua

SEQ ID NO: 213418 - RNA, 23 nt, Human respiratory syncytial virus
gcugaaucauuucuucacaucau

SEQ ID NO: 213419 - RNA, 15 nt, Human respiratory syncytial virus
gcggaaccaccaacc

SEQ ID NO: 213420 - RNA, 18 nt, Human respiratory syncytial virus
uuuaaaaauuaacauaau

SEQ ID NO: 213421 - RNA, 19 nt, Human respiratory syncytial virus
uuuaaaaucuauagcacaa

SEQ ID NO: 213422 - RNA, 19 nt, Human respiratory syncytial virus
uuuaacggcccuuaucuca

SEQ ID NO: 213423 - RNA, 11 nt, Human respiratory syncytial virus
uuuaaccauaa

SEQ ID NO: 213424 - RNA, 15 nt, Human respiratory syncytial virus
uuuagucuaacucaa

SEQ ID NO: 213425 - RNA, 19 nt, Human respiratory syncytial virus
uuuauaccgccaauucaau

SEQ ID NO: 213426 - RNA, 20 nt, Human respiratory syncytial virus
uuuuacacuaauacauauga

SEQ ID NO: 213427 - RNA, 13 nt, Human respiratory syncytial virus
aagaaaacuugau

SEQ ID NO: 213428 - RNA, 14 nt, Human respiratory syncytial virus
aagaaaacuugaug

SEQ ID NO: 213429 - RNA, 16 nt, Human respiratory syncytial virus
aagaaaacuugaugaa

SEQ ID NO: 213430 - RNA, 14 nt, Human respiratory syncytial virus
aacuaacaaugaua

SEQ ID NO: 213431 - RNA, 12 nt, Human respiratory syncytial virus
aacuaacuauaa

SEQ ID NO: 213432 - RNA, 19 nt, Human respiratory syncytial virus
aacuacacacuauauccaa

SEQ ID NO: 213433 - RNA, 22 nt, Human respiratory syncytial virus
aaccugacgaaauuaacaauau

SEQ ID NO: 213434 - RNA, 16 nt, Human respiratory syncytial virus
aaccgugaccuaucaa

SEQ ID NO: 213435 - RNA, 19 nt, Human respiratory syncytial virus
aaccauaaaacuaucuuaa

SEQ ID NO: 213436 - RNA, 13 nt, Human respiratory syncytial virus
aaccauguccaaa

SEQ ID NO: 213437 - RNA, 18 nt, Human respiratory syncytial virus
aaccauguccaaacacaa

SEQ ID NO: 213438 - RNA, 17 nt, Human respiratory syncytial virus
aaccaccugaucauguu

SEQ ID NO: 213439 - RNA, 17 nt, Human respiratory syncytial virus
aaccacgccaacuauca

SEQ ID NO: 213440 - RNA, 17 nt, Human respiratory syncytial virus
aaccaccaaccaaucaa

SEQ ID NO: 213441 - RNA, 16 nt, Human respiratory syncytial virus
aaccaacccaaccaaa

SEQ ID NO: 213442 - RNA, 18 nt, Human respiratory syncytial virus
aacaucaauaaaacagac

SEQ ID NO: 213443 - RNA, 16 nt, Human respiratory syncytial virus
aaucauaaaaacauau

SEQ ID NO: 213444 - RNA, 17 nt, Human respiratory syncytial virus
aaucauaaaaacauauu

SEQ ID NO: 213445 - RNA, 13 nt, Human respiratory syncytial virus
aauacggggcaaa

SEQ ID NO: 213446 - RNA, 11 nt, Human respiratory syncytial virus
aauacacuauu

SEQ ID NO: 213447 - RNA, 21 nt, Human respiratory syncytial virus
aauacacugaauauaauacaa

SEQ ID NO: 213448 - RNA, 17 nt, Human respiratory syncytial virus
aauacauaugaucuuaa

SEQ ID NO: 213449 - RNA, 11 nt, Human respiratory syncytial virus
aauacauccau

SEQ ID NO: 213450 - RNA, 21 nt, Human respiratory syncytial virus
aagggaagacacuauaaagau

SEQ ID NO: 213451 - RNA, 15 nt, Human respiratory syncytial virus
aagaaugcagugaca

SEQ ID NO: 213452 - RNA, 22 nt, Human respiratory syncytial virus
aagaagaucucaccccaaguga

SEQ ID NO: 213453 - RNA, 18 nt, Human respiratory syncytial virus
aaggaucagcugcuguca

SEQ ID NO: 213454 - RNA, 15 nt, Human respiratory syncytial virus
aagcuacugcacaaa

SEQ ID NO: 213455 - RNA, 14 nt, Human respiratory syncytial virus
aaucucaaccucuc

SEQ ID NO: 213456 - RNA, 17 nt, Human respiratory syncytial virus
aaucucaaccucucuca

SEQ ID NO: 213457 - RNA, 14 nt, Human respiratory syncytial virus
aaucucuuuacuaa

SEQ ID NO: 213458 - RNA, 21 nt, Human respiratory syncytial virus
aaugauacauuaaauaaggau

SEQ ID NO: 213459 - RNA, 13 nt, Human respiratory syncytial virus
aaugauaaucuca

SEQ ID NO: 213460 - RNA, 19 nt, Human respiratory syncytial virus
aaugaucacggacaugaga

SEQ ID NO: 213461 - RNA, 19 nt, Human respiratory syncytial virus
aaugcaaccauguccaaac

SEQ ID NO: 213462 - RNA, 15 nt, Human respiratory syncytial virus
aauucaauacauaua

SEQ ID NO: 213463 - RNA, 17 nt, Human respiratory syncytial virus
aauucauauacuugaua

SEQ ID NO: 213464 - RNA, 21 nt, Human respiratory syncytial virus
aauucauuggacaccuaaaaa

SEQ ID NO: 213465 - RNA, 14 nt, Human respiratory syncytial virus
aauuuaaaaucuau

SEQ ID NO: 213466 - RNA, 20 nt, Human respiratory syncytial virus
aauuacagcuacuuaugcaa

SEQ ID NO: 213467 - RNA, 21 nt, Human respiratory syncytial virus
aauuacagcuacuuaugcaaa

SEQ ID NO: 213468 - RNA, 18 nt, Human respiratory syncytial virus
uucgcaucauccaaagau

SEQ ID NO: 213469 - RNA, 19 nt, Human respiratory syncytial virus
uucuaaguuguacaaagaa

SEQ ID NO: 213470 - RNA, 13 nt, Human respiratory syncytial virus
uuccagucauuac

SEQ ID NO: 213471 - RNA, 13 nt, Human respiratory syncytial virus
uucacaucaugcu

SEQ ID NO: 213472 - RNA, 23 nt, Human respiratory syncytial virus
uucacaucaugcuacccacacaa

SEQ ID NO: 213473 - RNA, 16 nt, Human respiratory syncytial virus
uucacaaaauuaacag

SEQ ID NO: 213474 - RNA, 11 nt, Human respiratory syncytial virus
uucaguacaau

SEQ ID NO: 213475 - RNA, 14 nt, Human respiratory syncytial virus
uuaaaugauacauu

SEQ ID NO: 213476 - RNA, 17 nt, Human respiratory syncytial virus
uuaauauaaaaacucau

SEQ ID NO: 213477 - RNA, 16 nt, Human respiratory syncytial virus
uguuucaacaacaguc

SEQ ID NO: 213478 - RNA, 14 nt, Human respiratory syncytial virus
ugggauacucucaa

SEQ ID NO: 213479 - RNA, 23 nt, Human respiratory syncytial virus
uguaaauuugagauuagagguca

SEQ ID NO: 213480 - RNA, 21 nt, Human respiratory syncytial virus
uguauuguaagaaaacuugau

SEQ ID NO: 213481 - RNA, 15 nt, Human respiratory syncytial virus
ugcaucacuaacaau

SEQ ID NO: 213482 - RNA, 14 nt, Human respiratory syncytial virus
ugccuauguuccag

SEQ ID NO: 213483 - RNA, 15 nt, Human respiratory syncytial virus
ugcuacccacacaac

SEQ ID NO: 213484 - RNA, 15 nt, Human respiratory syncytial virus
uacacagcagcuguu

SEQ ID NO: 213485 - RNA, 20 nt, Human respiratory syncytial virus
uaauauccucuuguuuauac

SEQ ID NO: 213486 - RNA, 16 nt, Human respiratory syncytial virus
uaauauucaucaucuc

SEQ ID NO: 213487 - RNA, 17 nt, Human respiratory syncytial virus
uaaucucuuuacuaauu

SEQ ID NO: 213488 - RNA, 15 nt, Human respiratory syncytial virus
uaauauaaaaacuca

SEQ ID NO: 213489 - RNA, 15 nt, Human respiratory syncytial virus
uacacuaauacauau

SEQ ID NO: 213490 - RNA, 19 nt, Human respiratory syncytial virus
uacacugaauauaauacaa

SEQ ID NO: 213491 - RNA, 23 nt, Human respiratory syncytial virus
uaccaaucgacauguagugcagu

SEQ ID NO: 213492 - RNA, 23 nt, Human respiratory syncytial virus
uaccaaauuccuagaaucaauaa

SEQ ID NO: 213493 - RNA, 18 nt, Human respiratory syncytial virus
uaccccagaaaccaaagc

SEQ ID NO: 213494 - RNA, 15 nt, Human respiratory syncytial virus
uaccgccaauucaau

SEQ ID NO: 213495 - RNA, 21 nt, Human respiratory syncytial virus
uaccgccaauucaauacauau

SEQ ID NO: 213496 - RNA, 18 nt, Human respiratory syncytial virus
uaccaucaugcuguguca

SEQ ID NO: 213497 - RNA, 20 nt, Human respiratory syncytial virus
uaccaucaugcugugucaaa

SEQ ID NO: 213498 - RNA, 18 nt, Human respiratory syncytial virus
uacuagugaggcaaaacu

SEQ ID NO: 213499 - RNA, 19 nt, Human respiratory syncytial virus
aacaagauacucaagucaa

SEQ ID NO: 213500 - RNA, 16 nt, Human respiratory syncytial virus
uacuagagcauaugaa

SEQ ID NO: 213501 - RNA, 15 nt, Human respiratory syncytial virus
uacuuaugacauaua

SEQ ID NO: 213502 - RNA, 22 nt, Human respiratory syncytial virus
uagcacaaauagcacuaucagu

SEQ ID NO: 213503 - RNA, 13 nt, Human respiratory syncytial virus
uaguuaagaagga

SEQ ID NO: 213504 - RNA, 20 nt, Human respiratory syncytial virus
uaguuagaguucaaucaauc

SEQ ID NO: 213505 - RNA, 19 nt, Human respiratory syncytial virus
uaguaugggaucaaaaaca

SEQ ID NO: 213506 - RNA, 22 nt, Human respiratory syncytial virus
uaguaugggaucaaaaacaaca

SEQ ID NO: 213507 - RNA, 14 nt, Human respiratory syncytial virus
uaguauaucaucca

SEQ ID NO: 213508 - RNA, 16 nt, Human respiratory syncytial virus
uaguauaucauccaua

SEQ ID NO: 213509 - RNA, 17 nt, Human respiratory syncytial virus
uaguauaucauccauau

SEQ ID NO: 213510 - RNA, 23 nt, Human respiratory syncytial virus
uaguaacaaaaaaagaacaagau

SEQ ID NO: 213511 - RNA, 17 nt, Human respiratory syncytial virus
uaguaagcuucaaagaa

SEQ ID NO: 213512 - RNA, 20 nt, Human respiratory syncytial virus
uagguauguuauaugcuaug

SEQ ID NO: 213513 - RNA, 16 nt, Human respiratory syncytial virus
uagggaguaccaaaua

SEQ ID NO: 213514 - RNA, 22 nt, Human respiratory syncytial virus
uagggaguaccaaauacaagaa

SEQ ID NO: 213515 - RNA, 20 nt, Human respiratory syncytial virus
uaaaacagacaucaauccau

SEQ ID NO: 213516 - RNA, 20 nt, Human respiratory syncytial virus
uaaaaacauauuacaauuua

SEQ ID NO: 213517 - RNA, 15 nt, Human respiratory syncytial virus
uaaacaaacaaaucc

SEQ ID NO: 213518 - RNA, 19 nt, Human respiratory syncytial virus
uaaacaagauacucaaguc

SEQ ID NO: 213519 - RNA, 20 nt, Human respiratory syncytial virus
uaacaaacacuucaacauca

SEQ ID NO: 213520 - RNA, 16 nt, Human respiratory syncytial virus
uaacaucucucaccaa

SEQ ID NO: 213521 - RNA, 13 nt, Human respiratory syncytial virus
guacaauguucua

SEQ ID NO: 213522 - RNA, 18 nt, Human respiratory syncytial virus
guaccccagaaaccaaag

SEQ ID NO: 213523 - RNA, 19 nt, Human respiratory syncytial virus
guaccccagaaaccaaagc

SEQ ID NO: 213524 - RNA, 17 nt, Human respiratory syncytial virus
gugaccuaucaagcaag

SEQ ID NO: 213525 - RNA, 19 nt, Human respiratory syncytial virus
gugaccuaucaagcaagaa

SEQ ID NO: 213526 - RNA, 22 nt, Human respiratory syncytial virus
gugaagccgacaguaccccaga

SEQ ID NO: 213527 - RNA, 16 nt, Human respiratory syncytial virus
ucaaguaucacaauca

SEQ ID NO: 213528 - RNA, 16 nt, Human respiratory syncytial virus
ucaagucagaacauaa

SEQ ID NO: 213529 - RNA, 19 nt, Human respiratory syncytial virus
ucacaggauuaauagguau

SEQ ID NO: 213530 - RNA, 21 nt, Human respiratory syncytial virus
ucacaucaugcuacccacaca

SEQ ID NO: 213531 - RNA, 14 nt, Human respiratory syncytial virus
ucacuauuaugauu

SEQ ID NO: 213532 - RNA, 15 nt, Human respiratory syncytial virus
ucacugaagaugcaa

SEQ ID NO: 213533 - RNA, 23 nt, Human respiratory syncytial virus
uauaagaaugcagugacagaauu

SEQ ID NO: 213534 - RNA, 17 nt, Human respiratory syncytial virus
uauuuuacacuaauaca

SEQ ID NO: 213535 - RNA, 13 nt, Human respiratory syncytial virus
ucaacaacagucu

SEQ ID NO: 213536 - RNA, 13 nt, Human respiratory syncytial virus
ucaacaaccauuu

SEQ ID NO: 213537 - RNA, 17 nt, Human respiratory syncytial virus
ucaacacaucauucaca

SEQ ID NO: 213538 - RNA, 19 nt, Human respiratory syncytial virus
ucauaaaggugaacugaaa

SEQ ID NO: 213539 - RNA, 17 nt, Human respiratory syncytial virus
ucauaaauucacaggau

SEQ ID NO: 213540 - RNA, 23 nt, Human respiratory syncytial virus
ucaguucuggcaaugauaaucuc

SEQ ID NO: 213541 - RNA, 19 nt, Human respiratory syncytial virus
ucaucaauccaacaaguga

SEQ ID NO: 213542 - RNA, 22 nt, Human respiratory syncytial virus
ucaugcuacccacacaacuaag

SEQ ID NO: 213543 - RNA, 22 nt, Human respiratory syncytial virus
ucauguuaaacaagauacucaa

SEQ ID NO: 213544 - RNA, 13 nt, Human respiratory syncytial virus
ucauuucuucaca

SEQ ID NO: 213545 - RNA, 14 nt, Human respiratory syncytial virus
uccaaagauccuaa

SEQ ID NO: 213546 - RNA, 18 nt, Human respiratory syncytial virus
uccaacaagugaagccga

SEQ ID NO: 213547 - RNA, 16 nt, Human respiratory syncytial virus
ugaagaugcaaaucau

SEQ ID NO: 213548 - RNA, 15 nt, Human respiratory syncytial virus
ugacacuaaaguaaa

SEQ ID NO: 213549 - RNA, 15 nt, Human respiratory syncytial virus
ugaccuaucaagcaa

SEQ ID NO: 213550 - RNA, 13 nt, Human respiratory syncytial virus
ucucaccaaagaa

SEQ ID NO: 213551 - RNA, 13 nt, Human respiratory syncytial virus
ucucaccccaagu

SEQ ID NO: 213552 - RNA, 23 nt, Human respiratory syncytial virus
ucucuuuuucagaauguaaugcu

SEQ ID NO: 213553 - RNA, 16 nt, Human respiratory syncytial virus
gaccgaacaaacaaau

SEQ ID NO: 213554 - RNA, 13 nt, Human respiratory syncytial virus
aaaggaccuucac

SEQ ID NO: 213555 - RNA, 20 nt, Human respiratory syncytial virus
aaagucaaguuaaaugauac

SEQ ID NO: 213556 - RNA, 20 nt, Human respiratory syncytial virus
aaaguagggaguaccaaaua

SEQ ID NO: 213557 - RNA, 16 nt, Human respiratory syncytial virus
aaagguguuaucucuu

SEQ ID NO: 213558 - RNA, 18 nt, Human respiratory syncytial virus
aaagccaacuacccaaga

SEQ ID NO: 213559 - RNA, 16 nt, Human respiratory syncytial virus
aaacuacaucuuagca

SEQ ID NO: 213560 - RNA, 15 nt, Human respiratory syncytial virus
aaacuaacuauaaca

SEQ ID NO: 213561 - RNA, 16 nt, Human respiratory syncytial virus
aaacuaacaaugauac

SEQ ID NO: 213562 - RNA, 16 nt, Human respiratory syncytial virus
aaacuacacacuauau

SEQ ID NO: 213563 - RNA, 23 nt, Human respiratory syncytial virus
gaaccaacuuauuuccagucauu

SEQ ID NO: 213564 - RNA, 19 nt, Human respiratory syncytial virus
gaagaugucacuacaguca

SEQ ID NO: 213565 - RNA, 21 nt, Human respiratory syncytial virus
gaaucauuucuucacaucaug

SEQ ID NO: 213566 - RNA, 18 nt, Human respiratory syncytial virus
aaaccuggggcaaauaac

SEQ ID NO: 213567 - RNA, 16 nt, Human respiratory syncytial virus
aaauauggaaacauac

SEQ ID NO: 213568 - RNA, 15 nt, Human respiratory syncytial virus
aaaugauacauuaaa

SEQ ID NO: 213569 - RNA, 20 nt, Human respiratory syncytial virus
gacucuagaaaagaccuggg

SEQ ID NO: 213570 - RNA, 18 nt, Human respiratory syncytial virus
gaugccacucaacaauuu

SEQ ID NO: 213571 - RNA, 20 nt, Human respiratory syncytial virus
gauaaguauaagaaugcagu

SEQ ID NO: 213572 - RNA, 17 nt, Human respiratory syncytial virus
gcaaaaacaccuaaaca

SEQ ID NO: 213573 - RNA, 18 nt, Human respiratory syncytial virus
gauuaaauuuaaaaucua

SEQ ID NO: 213574 - RNA, 13 nt, Human respiratory syncytial virus
gauuaaugaucac

SEQ ID NO: 213575 - RNA, 23 nt, Human respiratory syncytial virus
gauucuauaucauccaaccauaa

SEQ ID NO: 213576 - RNA, 12 nt, Human respiratory syncytial virus
ggaucaaaaaca

SEQ ID NO: 213577 - RNA, 12 nt, Human respiratory syncytial virus
ggauacucucaa

SEQ ID NO: 213578 - RNA, 15 nt, Human respiratory syncytial virus
ggcaaauaaacucac

SEQ ID NO: 213579 - RNA, 18 nt, Human respiratory syncytial virus
guaaauaaaaccaaaaua

SEQ ID NO: 213580 - RNA, 16 nt, Human respiratory syncytial virus
gcaaaucauaaauuca

SEQ ID NO: 213581 - RNA, 18 nt, Human respiratory syncytial virus
gcugcugauccacagguu

SEQ ID NO: 213582 - RNA, 17 nt, Human respiratory syncytial virus
gcucauaaaagaacuug

SEQ ID NO: 213583 - RNA, 16 nt, Human respiratory syncytial virus
gcuacauuuacauucu

SEQ ID NO: 213584 - RNA, 19 nt, Human respiratory syncytial virus
gcuaauccguuuuaguaau

SEQ ID NO: 213585 - RNA, 22 nt, Human respiratory syncytial virus
cgcaaaaccacgccaacuauca

SEQ ID NO: 213586 - RNA, 13 nt, Human respiratory syncytial virus
cuaaaucaacaca

SEQ ID NO: 213587 - RNA, 16 nt, Human respiratory syncytial virus
cuaaaucaacacauca

SEQ ID NO: 213588 - RNA, 16 nt, Human respiratory syncytial virus
cuagauccuuaacuca

SEQ ID NO: 213589 - RNA, 16 nt, Human respiratory syncytial virus
cuaauuauaaucacua

SEQ ID NO: 213590 - RNA, 20 nt, Human respiratory syncytial virus
cuaauuauaaucacuauuau

SEQ ID NO: 213591 - RNA, 17 nt, Human respiratory syncytial virus
cuacaaaugacaacacu

SEQ ID NO: 213592 - RNA, 17 nt, Human respiratory syncytial virus
cuacuagagcauaugaa

SEQ ID NO: 213593 - RNA, 14 nt, Human respiratory syncytial virus
cuauaaaucuuaaa

SEQ ID NO: 213594 - RNA, 14 nt, Human respiratory syncytial virus
cuauagcacaaaua

SEQ ID NO: 213595 - RNA, 17 nt, Human respiratory syncytial virus
cuauaucauccaaccau

SEQ ID NO: 213596 - RNA, 14 nt, Human respiratory syncytial virus
cuauauccaaacau

SEQ ID NO: 213597 - RNA, 19 nt, Human respiratory syncytial virus
cuauauccaaacaucauga

SEQ ID NO: 213598 - RNA, 18 nt, Human respiratory syncytial virus
cuaucaugguagcauaga

SEQ ID NO: 213599 - RNA, 17 nt, Human respiratory syncytial virus
cuaucaguucuggcaau

SEQ ID NO: 213600 - RNA, 14 nt, Human respiratory syncytial virus
cuauuuuacacuaa

SEQ ID NO: 213601 - RNA, 23 nt, Human respiratory syncytial virus
cuauuuuacacuaauacauauga

SEQ ID NO: 213602 - RNA, 13 nt, Human respiratory syncytial virus
cucaccuaaucaa

SEQ ID NO: 213603 - RNA, 18 nt, Human respiratory syncytial virus
cugacgaaauuaacaaua

SEQ ID NO: 213604 - RNA, 19 nt, Human respiratory syncytial virus
cugaaucauuucuucacau

SEQ ID NO: 213605 - RNA, 22 nt, Human respiratory syncytial virus
cugaaugacagguccacauaua

SEQ ID NO: 213606 - RNA, 22 nt, Human respiratory syncytial virus
cugaaauuagaagaaccaacuu

SEQ ID NO: 213607 - RNA, 23 nt, Human respiratory syncytial virus
cugaaauuagaagaaccaacuua

SEQ ID NO: 213608 - RNA, 21 nt, Human respiratory syncytial virus
cugaacaaauugcuacaacua

SEQ ID NO: 213609 - RNA, 17 nt, Human respiratory syncytial virus
cugaagaugcaaaucau

SEQ ID NO: 213610 - RNA, 19 nt, Human respiratory syncytial virus
cucuuguuuauacagauua

SEQ ID NO: 213611 - RNA, 15 nt, Human respiratory syncytial virus
cugcaucacuaacaa

SEQ ID NO: 213612 - RNA, 20 nt, Human respiratory syncytial virus
cuuauuagaugccacucaac

SEQ ID NO: 213613 - RNA, 18 nt, Human respiratory syncytial virus
cuuaugcaaaacacacca

SEQ ID NO: 213614 - RNA, 16 nt, Human respiratory syncytial virus
cuuguaguauaucauc

SEQ ID NO: 213615 - RNA, 21 nt, Human respiratory syncytial virus
cuugcaagcaucaacauacua

SEQ ID NO: 213616 - RNA, 16 nt, Human respiratory syncytial virus
ccauaaaacuaucuua

SEQ ID NO: 213617 - RNA, 19 nt, Human respiratory syncytial virus
ccacuaucugcuagaccua

SEQ ID NO: 213618 - RNA, 20 nt, Human respiratory syncytial virus
aaaaugauuacaccaacuua

SEQ ID NO: 213619 - RNA, 12 nt, Human respiratory syncytial virus
ccaccaaccaau

SEQ ID NO: 213620 - RNA, 11 nt, Human respiratory syncytial virus
aaaauccaaaa

SEQ ID NO: 213621 - RNA, 13 nt, Human respiratory syncytial virus
ccaaaugcaaugg

SEQ ID NO: 213622 - RNA, 15 nt, Human respiratory syncytial virus
ccaacuacccaagaa

SEQ ID NO: 213623 - RNA, 20 nt, Human respiratory syncytial virus
ccacagguuaagugcaaucu

SEQ ID NO: 213624 - RNA, 16 nt, Human respiratory syncytial virus
ccacauacacagcagc

SEQ ID NO: 213625 - RNA, 21 nt, Human respiratory syncytial virus
ccacauauauccucaaacuac

SEQ ID NO: 213626 - RNA, 21 nt, Human respiratory syncytial virus
cauuggacaccuaaaaacuua

SEQ ID NO: 213627 - RNA, 16 nt, Human respiratory syncytial virus
cauuguaccucaccuc

SEQ ID NO: 213628 - RNA, 12 nt, Human respiratory syncytial virus
caucaacauacu

SEQ ID NO: 213629 - RNA, 14 nt, Human respiratory syncytial virus
caucacuaacaaua

SEQ ID NO: 213630 - RNA, 12 nt, Human respiratory syncytial virus
caucacaauaga

SEQ ID NO: 213631 - RNA, 18 nt, Human respiratory syncytial virus
caucacacacaaauucau

SEQ ID NO: 213632 - RNA, 14 nt, Human respiratory syncytial virus
cauauugauuucaa

SEQ ID NO: 213633 - RNA, 15 nt, Human respiratory syncytial virus
caucaucucugccaa

SEQ ID NO: 213634 - RNA, 18 nt, Human respiratory syncytial virus
cauccaucacaauagaau

SEQ ID NO: 213635 - RNA, 13 nt, Human respiratory syncytial virus
caucuuagcagaa

SEQ ID NO: 213636 - RNA, 21 nt, Human respiratory syncytial virus
cgaauagguaaauaaaaccaa

SEQ ID NO: 213637 - RNA, 23 nt, Human respiratory syncytial virus
cgaaauuaacaauauaguaacaa

SEQ ID NO: 213638 - RNA, 21 nt, Human respiratory syncytial virus
ccuauuuuacacuaauacaua

SEQ ID NO: 213639 - RNA, 15 nt, Human respiratory syncytial virus
ccgucagcggaacca

SEQ ID NO: 213640 - RNA, 13 nt, Human respiratory syncytial virus
ccucaaguaucac

SEQ ID NO: 213641 - RNA, 13 nt, Human respiratory syncytial virus
cccacucaaaauc

SEQ ID NO: 213642 - RNA, 18 nt, Human respiratory syncytial virus
ccgacaguaccccagaaa

SEQ ID NO: 213643 - RNA, 21 nt, Human respiratory syncytial virus
agguugguauaccagugucau

SEQ ID NO: 213644 - RNA, 14 nt, Human respiratory syncytial virus
agguuaagugcaau

SEQ ID NO: 213645 - RNA, 22 nt, Human respiratory syncytial virus
agcauguccucgucugaacaaa

SEQ ID NO: 213646 - RNA, 19 nt, Human respiratory syncytial virus
agcagcuguucaguacaau

SEQ ID NO: 213647 - RNA, 14 nt, Human respiratory syncytial virus
aguauaucauccau

SEQ ID NO: 213648 - RNA, 24 nt, Human respiratory syncytial virus
aguaucacaaucaaacacuaaauc

SEQ ID NO: 213649 - RNA, 13 nt, Human respiratory syncytial virus
aguaugggaucaa

SEQ ID NO: 213650 - RNA, 13 nt, Human respiratory syncytial virus
aguaaccaaagag

SEQ ID NO: 213651 - RNA, 12 nt, Human respiratory syncytial virus
auaaacaaugaa

SEQ ID NO: 213652 - RNA, 12 nt, Human respiratory syncytial virus
auaacaauagaa

SEQ ID NO: 213653 - RNA, 16 nt, Human respiratory syncytial virus
auaacaauagaauuaa

SEQ ID NO: 213654 - RNA, 17 nt, Human respiratory syncytial virus
auaacaucucucaccaa

SEQ ID NO: 213655 - RNA, 19 nt, Human respiratory syncytial virus
auaaaagucuaaaacuaac

SEQ ID NO: 213656 - RNA, 15 nt, Human respiratory syncytial virus
aucaugcugugucaa

SEQ ID NO: 213657 - RNA, 22 nt, Human respiratory syncytial virus
aucaucuaauuguaauauccuc

SEQ ID NO: 213658 - RNA, 12 nt, Human respiratory syncytial virus
aucauccaaaga

SEQ ID NO: 213659 - RNA, 13 nt, Human respiratory syncytial virus
aucauccaaagau

SEQ ID NO: 213660 - RNA, 15 nt, Human respiratory syncytial virus
aucauccaaccauaa

SEQ ID NO: 213661 - RNA, 16 nt, Human respiratory syncytial virus
aucauccaaccauaaa

SEQ ID NO: 213662 - RNA, 14 nt, Human respiratory syncytial virus
aucaugaacaucua

SEQ ID NO: 213663 - RNA, 19 nt, Human respiratory syncytial virus
aucacaauagaauucacaa

SEQ ID NO: 213664 - RNA, 22 nt, Human respiratory syncytial virus
aucacaauagaauucacaagca

SEQ ID NO: 213665 - RNA, 15 nt, Human respiratory syncytial virus
auauucaucaucucu

SEQ ID NO: 213666 - RNA, 21 nt, Human respiratory syncytial virus
aucacaguacaggcugaauca

SEQ ID NO: 213667 - RNA, 20 nt, Human respiratory syncytial virus
auccaucacaauagaauuca

SEQ ID NO: 213668 - RNA, 17 nt, Human respiratory syncytial virus
auccauugaaucaacug

SEQ ID NO: 213669 - RNA, 16 nt, Human respiratory syncytial virus
auccuuguaaauuuga

SEQ ID NO: 213670 - RNA, 12 nt, Human respiratory syncytial virus
auauauuugaug

SEQ ID NO: 213671 - RNA, 21 nt, Human respiratory syncytial virus
auauauccucaaacuacacac

SEQ ID NO: 213672 - RNA, 22 nt, Human respiratory syncytial virus
auauauaaacaaacaaauccaa

SEQ ID NO: 213673 - RNA, 21 nt, Human respiratory syncytial virus
auaguuacauaaaaaccucaa

SEQ ID NO: 213674 - RNA, 24 nt, Human respiratory syncytial virus
auauaaaagaaaccaaaugcaaug

SEQ ID NO: 213675 - RNA, 13 nt, Human respiratory syncytial virus
auaaucacuauua

SEQ ID NO: 213676 - RNA, 19 nt, Human respiratory syncytial virus
auaaucucaaccucucuca

SEQ ID NO: 213677 - RNA, 12 nt, Human respiratory syncytial virus
auaauccuguau

SEQ ID NO: 213678 - RNA, 17 nt, Human respiratory syncytial virus
auaauauucaucaucuc

SEQ ID NO: 213679 - RNA, 20 nt, Human respiratory syncytial virus
auaaugcuuggccauaacga

SEQ ID NO: 213680 - RNA, 19 nt, Human respiratory syncytial virus
augacaacacuacuaugca

SEQ ID NO: 213681 - RNA, 18 nt, Human respiratory syncytial virus
augaauguauuguaagaa

SEQ ID NO: 213682 - RNA, 16 nt, Human respiratory syncytial virus
augcaaaacacaccag

SEQ ID NO: 213683 - RNA, 21 nt, Human respiratory syncytial virus
augauccugcaucacuaacaa

SEQ ID NO: 213684 - RNA, 16 nt, Human respiratory syncytial virus
augcuauuaaucacug

SEQ ID NO: 213685 - RNA, 15 nt, Human respiratory syncytial virus
caaacacuucaacau

SEQ ID NO: 213686 - RNA, 19 nt, Human respiratory syncytial virus
caaacacuucaacaucaca

SEQ ID NO: 213687 - RNA, 12 nt, Human respiratory syncytial virus
auuuuacacuaa

SEQ ID NO: 213688 - RNA, 22 nt, Human respiratory syncytial virus
caaagcuaccaaauuccuagaa

SEQ ID NO: 213689 - RNA, 15 nt, Human respiratory syncytial virus
caaagaaaucaucac

SEQ ID NO: 213690 - RNA, 16 nt, Human respiratory syncytial virus
caaagaaacaauagaa

SEQ ID NO: 213691 - RNA, 20 nt, Human respiratory syncytial virus
caaacuaugagcacuacaaa

SEQ ID NO: 213692 - RNA, 23 nt, Human respiratory syncytial virus
caaacuaugagcacuacaaauga

SEQ ID NO: 213693 - RNA, 16 nt, Human respiratory syncytial virus
caaauccaaucuucuc

SEQ ID NO: 213694 - RNA, 13 nt, Human respiratory syncytial virus
caaauaaacucac

SEQ ID NO: 213695 - RNA, 22 nt, Human respiratory syncytial virus
caacaauuucuccaacaucuua

SEQ ID NO: 213696 - RNA, 16 nt, Human respiratory syncytial virus
caacacaucauucaca

SEQ ID NO: 213697 - RNA, 16 nt, Human respiratory syncytial virus
caacacuacuaugcaa

SEQ ID NO: 213698 - RNA, 19 nt, Human respiratory syncytial virus
caacacuacuaugcaaaga

SEQ ID NO: 213699 - RNA, 15 nt, Human respiratory syncytial virus
caagaacgaaauuaa

SEQ ID NO: 213700 - RNA, 14 nt, Human respiratory syncytial virus
auggagaagaugca

SEQ ID NO: 213701 - RNA, 15 nt, Human respiratory syncytial virus
auggagaaguuugca

SEQ ID NO: 213702 - RNA, 16 nt, Human respiratory syncytial virus
auggaaacucugcuaa

SEQ ID NO: 213703 - RNA, 19 nt, Human respiratory syncytial virus
auucaauaauaacaucucu

SEQ ID NO: 213704 - RNA, 15 nt, Human respiratory syncytial virus
auucaauacauauac

SEQ ID NO: 213705 - RNA, 15 nt, Human respiratory syncytial virus
auuccucaaacaaca

SEQ ID NO: 213706 - RNA, 21 nt, Human respiratory syncytial virus
auuccaacaaaaaaaaccaac

SEQ ID NO: 213707 - RNA, 19 nt, Human respiratory syncytial virus
auuguaagaaaacuugaug

SEQ ID NO: 213708 - RNA, 15 nt, Human respiratory syncytial virus
auuguaccucaccuc

SEQ ID NO: 213709 - RNA, 17 nt, Human respiratory syncytial virus
auuguaccucaccucaa

SEQ ID NO: 213710 - RNA, 17 nt, Human respiratory syncytial virus
cacaaauagcacuauca

SEQ ID NO: 213711 - RNA, 18 nt, Human respiratory syncytial virus
cacacacaaauucauaua

SEQ ID NO: 213712 - RNA, 14 nt, Human respiratory syncytial virus
caauucaauacaua

SEQ ID NO: 213713 - RNA, 16 nt, Human respiratory syncytial virus
cacucagcaaucaaca

SEQ ID NO: 213714 - RNA, 16 nt, Human respiratory syncytial virus
cacucaaaauccaaaa

SEQ ID NO: 213715 - RNA, 18 nt, Human respiratory syncytial virus
cacuauaaagauacuuaa

SEQ ID NO: 213716 - RNA, 13 nt, Human respiratory syncytial virus
cacuauauccaaa

SEQ ID NO: 213717 - RNA, 20 nt, Human respiratory syncytial virus
cacuacuagagcauaugaau

SEQ ID NO: 213718 - RNA, 15 nt, Human respiratory syncytial virus
caccuaaacaaacua

SEQ ID NO: 213719 - RNA, 13 nt, Human respiratory syncytial virus
cacuucaacauca

SEQ ID NO: 213720 - RNA, 13 nt, Human respiratory syncytial virus
cagcaaucaacaa

SEQ ID NO: 213721 - RNA, 23 nt, Human respiratory syncytial virus
cagcaaccugacgaaauuaacaa

SEQ ID NO: 213722 - RNA, 22 nt, Human respiratory syncytial virus
cagauuaaauuuaaaaucuaua

SEQ ID NO: 213723 - RNA, 20 nt, Human respiratory syncytial virus
cagagguuauuuuagugcuu

SEQ ID NO: 213724 - RNA, 19 nt, Human respiratory syncytial virus
cagcagcuguucaguacaa

SEQ ID NO: 213725 - RNA, 23 nt, Human respiratory syncytial virus
cagccauaauauucaucaucucu

SEQ ID NO: 213726 - RNA, 15 nt, Human respiratory syncytial virus
cagcuguucaguaca

SEQ ID NO: 213727 - RNA, 16 nt, Human respiratory syncytial virus
accaaaugcaauggaa

SEQ ID NO: 213728 - RNA, 22 nt, Human respiratory syncytial virus
accaaaugcaauggaacugaca

SEQ ID NO: 213729 - RNA, 19 nt, Human respiratory syncytial virus
acaucauucacaaaauuaa

SEQ ID NO: 213730 - RNA, 13 nt, Human respiratory syncytial virus
accaacaucauca

SEQ ID NO: 213731 - RNA, 22 nt, Human respiratory syncytial virus
accaaucgacauguagugcagu

SEQ ID NO: 213732 - RNA, 16 nt, Human respiratory syncytial virus
acccaaccaaaccaag

SEQ ID NO: 213733 - RNA, 21 nt, Human respiratory syncytial virus
accauuuauaccgccaauuca

SEQ ID NO: 213734 - RNA, 19 nt, Human respiratory syncytial virus
accagcagacuugcucaua

SEQ ID NO: 213735 - RNA, 19 nt, Human respiratory syncytial virus
acacacuauauccaaacau

SEQ ID NO: 213736 - RNA, 18 nt, Human respiratory syncytial virus
acaucaauaaaacagaca

SEQ ID NO: 213737 - RNA, 20 nt, Human respiratory syncytial virus
acaucaauaaaacagacauc

SEQ ID NO: 213738 - RNA, 19 nt, Human respiratory syncytial virus
acagucauaauuacuuuga

SEQ ID NO: 213739 - RNA, 13 nt, Human respiratory syncytial virus
accucaagucaga

SEQ ID NO: 213740 - RNA, 23 nt, Human respiratory syncytial virus
acgauucuauaucauccaaccau

SEQ ID NO: 213741 - RNA, 16 nt, Human respiratory syncytial virus
acggcccuuaucucaa

SEQ ID NO: 213742 - RNA, 19 nt, Human respiratory syncytial virus
agcaaucaacaacaucaau

SEQ ID NO: 213743 - RNA, 20 nt, Human respiratory syncytial virus
agcacaaauagcacuaucag

SEQ ID NO: 213744 - RNA, 23 nt, Human respiratory syncytial virus
agauaucauaaaggugaacugaa

SEQ ID NO: 213745 - RNA, 13 nt, Human respiratory syncytial virus
agacuugcucaua

SEQ ID NO: 213746 - RNA, 16 nt, Human respiratory syncytial virus
agacuugcucauaaaa

SEQ ID NO: 213747 - RNA, 23 nt, Human respiratory syncytial virus
agaauuacagcuacuuaugcaaa

SEQ ID NO: 213748 - RNA, 16 nt, Human respiratory syncytial virus
agaauucacaagcaaa

SEQ ID NO: 213749 - RNA, 17 nt, Human respiratory syncytial virus
agaaaccaaaugcaaug

SEQ ID NO: 213750 - RNA, 20 nt, Human respiratory syncytial virus
acuugcaagcaucaacauac

SEQ ID NO: 213751 - RNA, 17 nt, Human respiratory syncytial virus
acuugauaaacaaugaa

SEQ ID NO: 213752 - RNA, 19 nt, Human respiratory syncytial virus
acugaagaugcaaaucaua

SEQ ID NO: 213753 - RNA, 18 nt, Human respiratory syncytial virus
acaacagucugcugauca

SEQ ID NO: 213754 - RNA, 22 nt, Human respiratory syncytial virus
acaacagucugcugaucaccaa

SEQ ID NO: 213755 - RNA, 16 nt, Human respiratory syncytial virus
acaacacuacuaugca

SEQ ID NO: 213756 - RNA, 22 nt, Human respiratory syncytial virus
acaaacuaugugguaugcuauu

SEQ ID NO: 213757 - RNA, 18 nt, Human respiratory syncytial virus
acaaacaaauguccguca

SEQ ID NO: 213758 - RNA, 17 nt, Human respiratory syncytial virus
acaaacacuucaacauc

SEQ ID NO: 213759 - RNA, 16 nt, Human respiratory syncytial virus
acaauuucuccaacau

SEQ ID NO: 213760 - RNA, 19 nt, Human respiratory syncytial virus
aaucccacucaaaauccaa

SEQ ID NO: 213761 - RNA, 13 nt, Human respiratory syncytial virus
aauuaacaauaua

SEQ ID NO: 213762 - RNA, 22 nt, Human respiratory syncytial virus
acaaaagcauagacacuuuguc

SEQ ID NO: 213763 - RNA, 13 nt, Human respiratory syncytial virus
aauuuaaccauaa

SEQ ID NO: 213764 - RNA, 15 nt, Human respiratory syncytial virus
aauccaaucuucuca

SEQ ID NO: 213765 - RNA, 18 nt, Human respiratory syncytial virus
aauccaaaaucacuacca

SEQ ID NO: 213766 - RNA, 21 nt, Human respiratory syncytial virus
aauccaacaagugaagccgac

SEQ ID NO: 213767 - RNA, 13 nt, Human respiratory syncytial virus
aaucccaaaucaa

SEQ ID NO: 213768 - RNA, 21 nt, Human respiratory syncytial virus
aaucauaaauucacaggauua

SEQ ID NO: 213769 - RNA, 14 nt, Human respiratory syncytial virus
aaucauuucuucac

SEQ ID NO: 213770 - RNA, 19 nt, Human respiratory syncytial virus
aaucauuucuucacaucau

SEQ ID NO: 213771 - RNA, 21 nt, Human respiratory syncytial virus
aaucauuucuucacaucaugc

SEQ ID NO: 213772 - RNA, 21 nt, Human respiratory syncytial virus
aaucaaccaacugauccauca

SEQ ID NO: 213773 - RNA, 23 nt, Human respiratory syncytial virus
aaucaaccaacugauccaucagc

SEQ ID NO: 213774 - RNA, 22 nt, Human respiratory syncytial virus
aauaucuguuaacucaauagau

SEQ ID NO: 213775 - RNA, 17 nt, Human respiratory syncytial virus
aauaucuagauaucaua

SEQ ID NO: 213776 - RNA, 16 nt, Human respiratory syncytial virus
aauaagucaacaugga

SEQ ID NO: 213777 - RNA, 15 nt, Human respiratory syncytial virus
aauaaccauggagcu

SEQ ID NO: 213778 - RNA, 14 nt, Human respiratory syncytial virus
aaguaaccaaagag

SEQ ID NO: 213779 - RNA, 13 nt, Human respiratory syncytial virus
aaguaaagccaau

SEQ ID NO: 213780 - RNA, 21 nt, Human respiratory syncytial virus
aagucaauggacaaaagcaua

SEQ ID NO: 213781 - RNA, 13 nt, Human respiratory syncytial virus
aauaaaacagaca

SEQ ID NO: 213782 - RNA, 14 nt, Human respiratory syncytial virus
aaguaucacaauca

SEQ ID NO: 213783 - RNA, 15 nt, Human respiratory syncytial virus
aaguaucacaaucaa

SEQ ID NO: 213784 - RNA, 23 nt, Human respiratory syncytial virus
aauaaacucaccuaaucaaucaa

SEQ ID NO: 213785 - RNA, 16 nt, Human respiratory syncytial virus
aauaaaaguaaagcca

SEQ ID NO: 213786 - RNA, 19 nt, Human respiratory syncytial virus
aagaugucacuacagucau

SEQ ID NO: 213787 - RNA, 21 nt, Human respiratory syncytial virus
aagcaaauuuuggcccuauuu

SEQ ID NO: 213788 - RNA, 13 nt, Human respiratory syncytial virus
aagcaagaacgaa

SEQ ID NO: 213789 - RNA, 16 nt, Human respiratory syncytial virus
aagaaauacacugaau

SEQ ID NO: 213790 - RNA, 17 nt, Human respiratory syncytial virus
aagaaaccaaaugcaau

SEQ ID NO: 213791 - RNA, 18 nt, Human respiratory syncytial virus
aacugaggaguuuuacca

SEQ ID NO: 213792 - RNA, 22 nt, Human respiratory syncytial virus
aacugccagaccgaacaaacaa

SEQ ID NO: 213793 - RNA, 11 nt, Human respiratory syncytial virus
aagacacuaua

SEQ ID NO: 213794 - RNA, 19 nt, Human respiratory syncytial virus
aagaccugggauacucuca

SEQ ID NO: 213795 - RNA, 17 nt, Human respiratory syncytial virus
aacgauucuauaucauc

SEQ ID NO: 213796 - RNA, 15 nt, Human respiratory syncytial virus
aacucuugcuauuaa

SEQ ID NO: 213797 - RNA, 20 nt, Human respiratory syncytial virus
aacucuugcuauuaaugcau

SEQ ID NO: 213798 - RNA, 22 nt, Human respiratory syncytial virus
aacauacgugaacaagcuucac

SEQ ID NO: 213799 - RNA, 21 nt, Human respiratory syncytial virus
aacauacuagugaagcagauc

SEQ ID NO: 213800 - RNA, 23 nt, Human respiratory syncytial virus
aacauauuacaauuuaaccauaa

SEQ ID NO: 213801 - RNA, 15 nt, Human respiratory syncytial virus
aaagguguuaucucu

SEQ ID NO: 213802 - RNA, 20 nt, Human respiratory syncytial virus
aaacucaccuaaucaaucaa

SEQ ID NO: 213803 - RNA, 22 nt, Human respiratory syncytial virus
aaacuaugugguaugcuauuaa

SEQ ID NO: 213804 - RNA, 22 nt, Human respiratory syncytial virus
aaaccucaaguaucacaaucaa

SEQ ID NO: 213805 - RNA, 12 nt, Human respiratory syncytial virus
aaauaaacucac

SEQ ID NO: 213806 - RNA, 17 nt, Human respiratory syncytial virus
aaaucauaaauucacag

SEQ ID NO: 213807 - RNA, 15 nt, Human respiratory syncytial virus
aaaucaacacaucau

SEQ ID NO: 213808 - RNA, 16 nt, Human respiratory syncytial virus
aaauccaaucuucuca

SEQ ID NO: 213809 - RNA, 14 nt, Human respiratory syncytial virus
aacaagauacucaa

SEQ ID NO: 213810 - RNA, 13 nt, Human respiratory syncytial virus
aacacaccagcug

SEQ ID NO: 213811 - RNA, 13 nt, Human respiratory syncytial virus
aacaccuaaacaa

SEQ ID NO: 213812 - RNA, 17 nt, Human respiratory syncytial virus
aacaauuucuccaacau

SEQ ID NO: 213813 - RNA, 18 nt, Human respiratory syncytial virus
aaaacuuauaaaacaaga

SEQ ID NO: 213814 - RNA, 12 nt, Human respiratory syncytial virus
aaaacucaucaa

SEQ ID NO: 213815 - RNA, 22 nt, Human respiratory syncytial virus
aaaaguaaagccaauaacauaa

SEQ ID NO: 213816 - RNA, 14 nt, Human respiratory syncytial virus
aaacaccuaaacaa

SEQ ID NO: 213817 - RNA, 16 nt, Human respiratory syncytial virus
aaacaccuaaacaaac

SEQ ID NO: 213818 - RNA, 12 nt, Human respiratory syncytial virus
aaacacuaaauc

SEQ ID NO: 213819 - RNA, 23 nt, Human respiratory syncytial virus
aaacacuaaaucaacacaucauu

SEQ ID NO: 213820 - RNA, 12 nt, Human respiratory syncytial virus
aaaccaaaauau

SEQ ID NO: 213821 - RNA, 19 nt, Human respiratory syncytial virus
aaaccacgccaacuaucau

SEQ ID NO: 213822 - RNA, 17 nt, Human respiratory syncytial virus
aaaccgugaccuaucaa

SEQ ID NO: 213823 - RNA, 22 nt, Human respiratory syncytial virus
aaaaaccaacccaaccaaacca

SEQ ID NO: 213824 - RNA, 14 nt, Human respiratory syncytial virus
aaaaaccucaagua

SEQ ID NO: 213825 - RNA, 13 nt, Human respiratory syncytial virus
agaaaaagaugau

SEQ ID NO: 213826 - RNA, 16 nt, Human respiratory syncytial virus
aaaaagaacaagaugg

SEQ ID NO: 213827 - RNA, 13 nt, Human rhinovirus 89
agcuaguuuauua

SEQ ID NO: 213828 - RNA, 19 nt, Human rhinovirus 89
agcuaguuuauuaguuuua

SEQ ID NO: 213829 - RNA, 19 nt, Human rhinovirus 89
uaaauauagcuaguuuauu

SEQ ID NO: 213830 - RNA, 20 nt, Human rhinovirus 89
uaaaacuguuaaauauagcu

SEQ ID NO: 213831 - RNA, 21 nt, Human rhinovirus 89
uaaaacuguuaaauauagcua

SEQ ID NO: 213832 - RNA, 16 nt, Human rhinovirus 89
uauagcuaguuuauua

SEQ ID NO: 213833 - RNA, 23 nt, Human rhinovirus 89
auauaaaacuguuaaauauagcu

SEQ ID NO: 213834 - RNA, 18 nt, Human rhinovirus 89
acuguuaaauauagcuag

SEQ ID NO: 213835 - RNA, 14 nt, Human rhinovirus 89
uguuaaauauagcu

SEQ ID NO: 213836 - RNA, 22 nt, Human rhinovirus 89
auagcuaguuuauuaguuuuau

SEQ ID NO: 213837 - RNA, 22 nt, Human rhinovirus 89
auaaaacuguuaaauauagcua

SEQ ID NO: 213838 - RNA, 17 nt, Human rhinovirus 89
aaauauagcuaguuuau

SEQ ID NO: 213839 - RNA, 21 nt, Human rhinovirus 89
uauaaaacuguuaaauauagc

SEQ ID NO: 213840 - RNA, 20 nt, Human rhinovirus 89
uagcuaguuuauuaguuuua

SEQ ID NO: 213841 - RNA, 21 nt, Human rhinovirus 89
uagcuaguuuauuaguuuuau

SEQ ID NO: 213842 - RNA, 13 nt, Human rhinovirus 89
uuaaauauagcua

SEQ ID NO: 213843 - RNA, 16 nt, Human rhinovirus 89
aauauagcuaguuuau

SEQ ID NO: 213844 - RNA, 18 nt, Human rhinovirus 89
cuaguuuauuaguuuuau

SEQ ID NO: 213845 - RNA, 14 nt, Human rhinovirus 89
agcuaguuuauuag

SEQ ID NO: 213846 - RNA, 14 nt, Human rhinovirus B
auauagacacuuaa

SEQ ID NO: 213847 - RNA, 17 nt, Human rhinovirus B
acuuaauuugaguagaa

SEQ ID NO: 213848 - RNA, 21 nt, Human rhinovirus B
agacacuuaauuugaguagaa

SEQ ID NO: 213849 - RNA, 15 nt, Human rhinovirus B
ugaguagaaguagga

SEQ ID NO: 213850 - RNA, 20 nt, Human rhinovirus B
uuaacaauauagacacuuaa

SEQ ID NO: 213851 - RNA, 15 nt, Human rhinovirus B
aauauagacacuuaa

SEQ ID NO: 213852 - RNA, 14 nt, Human rhinovirus B
aaguaggaguuuau

SEQ ID NO: 213853 - RNA, 18 nt, Human rhinovirus B
uuugaguagaaguaggag

SEQ ID NO: 213854 - RNA, 19 nt, Human rhinovirus B
uuugaguagaaguaggagu

SEQ ID NO: 213855 - RNA, 17 nt, Human rhinovirus B
aacaauauagacacuua

SEQ ID NO: 213856 - RNA, 19 nt, Human rhinovirus B
aacaauauagacacuuaau

SEQ ID NO: 213857 - RNA, 20 nt, Human rhinovirus B
gacacuuaauuugaguagaa

SEQ ID NO: 213858 - RNA, 16 nt, Human rhinovirus B
acaauauagacacuua

SEQ ID NO: 213859 - RNA, 17 nt, Human rhinovirus B
acaauauagacacuuaa

SEQ ID NO: 213860 - RNA, 14 nt, Human rhinovirus B
caauauagacacuu

SEQ ID NO: 213861 - RNA, 16 nt, Human rhinovirus B
caauauagacacuuaa

SEQ ID NO: 213862 - RNA, 13 nt, Human rhinovirus B
uauagacacuuaa

SEQ ID NO: 213863 - RNA, 14 nt, Human rhinovirus B
uauagacacuuaau

SEQ ID NO: 213864 - RNA, 18 nt, Human rhinovirus B
uauagacacuuaauuuga

SEQ ID NO: 213865 - RNA, 12 nt, Human rhinovirus B
uagacacuuaau

SEQ ID NO: 213866 - RNA, 19 nt, Human rhinovirus B
uaacaauauagacacuuaa

SEQ ID NO: 213867 - RNA, 19 nt, Human rhinovirus B
guuaacaauauagacacuu

SEQ ID NO: 213868 - RNA, 15 nt, Human rhinovirus B
gaaguaggaguuuau

SEQ ID NO: 213869 - RNA, 22 nt, Human rhinovirus B
guuaacaauauagacacuuaau

SEQ ID NO: 213870 - RNA, 17 nt, Human rhinovirus B
guagaaguaggaguuua

SEQ ID NO: 213871 - RNA, 15 nt, Human rhinovirus B
uagaaguaggaguuu

SEQ ID NO: 213872 - RNA, 20 nt, Human rhinovirus B
uuaauuugaguagaaguagg

SEQ ID NO: 213873 - RNA, 21 nt, Human rhinovirus B
aauauagacacuuaauuugag

SEQ ID NO: 213874 - RNA, 16 nt, Human rhinovirus B
agaaguaggaguuuau

SEQ ID NO: 213875 - RNA, 16 nt, Human rhinovirus B
agacacuuaauuugag

SEQ ID NO: 213876 - RNA, 22 nt, Human rhinovirus B
agacacuuaauuugaguagaag

SEQ ID NO: 213877 - RNA, 15 nt, Human T-lymphotropic virus 1
agacccuuguuccuu

SEQ ID NO: 213878 - RNA, 19 nt, Human T-lymphotropic virus 1
agacgccuuuuuccaaauc

SEQ ID NO: 213879 - RNA, 19 nt, Human T-lymphotropic virus 1
agaauaaggcucugacguc

SEQ ID NO: 213880 - RNA, 12 nt, Human T-lymphotropic virus 1
acucucacaguu

SEQ ID NO: 213881 - RNA, 14 nt, Human T-lymphotropic virus 1
acuacacuagccca

SEQ ID NO: 213882 - RNA, 21 nt, Human T-lymphotropic virus 1
acauuacagcaaguccuuccu

SEQ ID NO: 213883 - RNA, 13 nt, Human T-lymphotropic virus 1
acaucuugccuag

SEQ ID NO: 213884 - RNA, 16 nt, Human T-lymphotropic virus 1
acaugacaguccuucc

SEQ ID NO: 213885 - RNA, 21 nt, Human T-lymphotropic virus 1
accuagggugccaaucaugga

SEQ ID NO: 213886 - RNA, 18 nt, Human T-lymphotropic virus 1
accucaaaaaacuuuuca

SEQ ID NO: 213887 - RNA, 18 nt, Human T-lymphotropic virus 1
aauccugcccagccaguu

SEQ ID NO: 213888 - RNA, 19 nt, Human T-lymphotropic virus 1
aaucuaguaaguuacucca

SEQ ID NO: 213889 - RNA, 16 nt, Human T-lymphotropic virus 1
aaugcacuauucuuca

SEQ ID NO: 213890 - RNA, 21 nt, Human T-lymphotropic virus 1
aauggcuucccuaaucuccca

SEQ ID NO: 213891 - RNA, 19 nt, Human T-lymphotropic virus 1
aauacuccccucaaaaaca

SEQ ID NO: 213892 - RNA, 21 nt, Human T-lymphotropic virus 1
aaagacuaucgaagcucuacu

SEQ ID NO: 213893 - RNA, 22 nt, Human T-lymphotropic virus 1
aaaugcagcuggcccauauccu

SEQ ID NO: 213894 - RNA, 15 nt, Human T-lymphotropic virus 1
aaagcccagauugac

SEQ ID NO: 213895 - RNA, 22 nt, Human T-lymphotropic virus 1
aaagcccagauugacacccaga

SEQ ID NO: 213896 - RNA, 19 nt, Human T-lymphotropic virus 1
aaagcguggggacaguuca

SEQ ID NO: 213897 - RNA, 16 nt, Human T-lymphotropic virus 1
aacuacacuagcccac

SEQ ID NO: 213898 - RNA, 13 nt, Human T-lymphotropic virus 1
aacaucuugccua

SEQ ID NO: 213899 - RNA, 16 nt, Human T-lymphotropic virus 1
aacaucuugccuaguu

SEQ ID NO: 213900 - RNA, 18 nt, Human T-lymphotropic virus 1
agcucaccucccuuccug

SEQ ID NO: 213901 - RNA, 22 nt, Human T-lymphotropic virus 1
agcucagcaccagcucaggcua

SEQ ID NO: 213902 - RNA, 23 nt, Human T-lymphotropic virus 1
agcuaccaugccaccuauucccu

SEQ ID NO: 213903 - RNA, 18 nt, Human T-lymphotropic virus 1
agccaguuuguucaugga

SEQ ID NO: 213904 - RNA, 18 nt, Human T-lymphotropic virus 1
agcccuacuuugcuuuca

SEQ ID NO: 213905 - RNA, 14 nt, Human T-lymphotropic virus 1
agccccucccaugc

SEQ ID NO: 213906 - RNA, 14 nt, Human T-lymphotropic virus 1
agccugccaacuac

SEQ ID NO: 213907 - RNA, 17 nt, Human T-lymphotropic virus 1
agccguccucaggcguu

SEQ ID NO: 213908 - RNA, 19 nt, Human T-lymphotropic virus 1
agaucucucaucaucuucc

SEQ ID NO: 213909 - RNA, 17 nt, Human T-lymphotropic virus 1
aggucgugaugccuuac

SEQ ID NO: 213910 - RNA, 13 nt, Human T-lymphotropic virus 1
aguacuaccccaa

SEQ ID NO: 213911 - RNA, 14 nt, Human T-lymphotropic virus 1
aggccgccauccac

SEQ ID NO: 213912 - RNA, 22 nt, Human T-lymphotropic virus 1
aggacagcucagcaccagcuca

SEQ ID NO: 213913 - RNA, 17 nt, Human T-lymphotropic virus 1
auccugcccagccaguu

SEQ ID NO: 213914 - RNA, 19 nt, Human T-lymphotropic virus 1
auacaggagccgucuccag

SEQ ID NO: 213915 - RNA, 19 nt, Human T-lymphotropic virus 1
auacaggagcagacaugac

SEQ ID NO: 213916 - RNA, 13 nt, Human T-lymphotropic virus 1
caauccugcccag

SEQ ID NO: 213917 - RNA, 23 nt, Human T-lymphotropic virus 1
caauaauuaaccucucccaucaa

SEQ ID NO: 213918 - RNA, 20 nt, Human T-lymphotropic virus 1
auggcuucccuaaucuccca

SEQ ID NO: 213919 - RNA, 21 nt, Human T-lymphotropic virus 1
uguuccuuaaaaugcccauac

SEQ ID NO: 213920 - RNA, 18 nt, Human T-lymphotropic virus 1
uuaaaaugcccauaccua

SEQ ID NO: 213921 - RNA, 16 nt, Human T-lymphotropic virus 1
uggggacaguucagga

SEQ ID NO: 213922 - RNA, 20 nt, Human T-lymphotropic virus 1
ugagaaggucagggcccaga

SEQ ID NO: 213923 - RNA, 12 nt, Human T-lymphotropic virus 1
ugauaccaaaaa

SEQ ID NO: 213924 - RNA, 18 nt, Human T-lymphotropic virus 1
aacaucuauucugccagu

SEQ ID NO: 213925 - RNA, 22 nt, Human T-lymphotropic virus 1
aagcccagauugacacccagac

SEQ ID NO: 213926 - RNA, 14 nt, Human T-lymphotropic virus 1
aagccguccucagg

SEQ ID NO: 213927 - RNA, 13 nt, Human T-lymphotropic virus 1
aagcucaccuccc

SEQ ID NO: 213928 - RNA, 20 nt, Human T-lymphotropic virus 1
aaguccuuccuaaccaagac

SEQ ID NO: 213929 - RNA, 20 nt, Human T-lymphotropic virus 1
aaguaauacuccccucaaaa

SEQ ID NO: 213930 - RNA, 13 nt, Human T-lymphotropic virus 1
uugcgcucacggc

SEQ ID NO: 213931 - RNA, 17 nt, Human T-lymphotropic virus 1
uauaucuauucccucau

SEQ ID NO: 213932 - RNA, 18 nt, Human T-lymphotropic virus 1
ucaagccguccucaggcg

SEQ ID NO: 213933 - RNA, 16 nt, Human T-lymphotropic virus 1
ucagacccuuguuccu

SEQ ID NO: 213934 - RNA, 19 nt, Human T-lymphotropic virus 1
ucagacccuuguuccuuaa

SEQ ID NO: 213935 - RNA, 16 nt, Human T-lymphotropic virus 1
ucuaguauagccauca

SEQ ID NO: 213936 - RNA, 20 nt, Human T-lymphotropic virus 1
uccagccugccaacuacacu

SEQ ID NO: 213937 - RNA, 20 nt, Human T-lymphotropic virus 1
uccagcuaccaugccaccua

SEQ ID NO: 213938 - RNA, 21 nt, Human T-lymphotropic virus 1
ucaucuucccccgggcccccu

SEQ ID NO: 213939 - RNA, 15 nt, Human T-lymphotropic virus 1
uccuccucuuucucc

SEQ ID NO: 213940 - RNA, 13 nt, Human T-lymphotropic virus 1
uccugcuuucucc

SEQ ID NO: 213941 - RNA, 19 nt, Human T-lymphotropic virus 1
uccuuaaaaugcccauacc

SEQ ID NO: 213942 - RNA, 23 nt, Human T-lymphotropic virus 1
gggggcuuagagccucucaguga

SEQ ID NO: 213943 - RNA, 21 nt, Human T-lymphotropic virus 1
uaaaagcguggggacaguuca

SEQ ID NO: 213944 - RNA, 22 nt, Human T-lymphotropic virus 1
uaaaagcguggggacaguucag

SEQ ID NO: 213945 - RNA, 18 nt, Human T-lymphotropic virus 1
uaagcucaccucccuucc

SEQ ID NO: 213946 - RNA, 18 nt, Human T-lymphotropic virus 1
uaacuacggccccggcac

SEQ ID NO: 213947 - RNA, 13 nt, Human T-lymphotropic virus 1
uaaguuacuccag

SEQ ID NO: 213948 - RNA, 19 nt, Human T-lymphotropic virus 1
uacagccacccugcccuaa

SEQ ID NO: 213949 - RNA, 15 nt, Human T-lymphotropic virus 1
uaccuaaacaguucc

SEQ ID NO: 213950 - RNA, 18 nt, Human T-lymphotropic virus 1
uacuccagcuaccaugcc

SEQ ID NO: 213951 - RNA, 21 nt, Human T-lymphotropic virus 1
ccaagaucacuuuaagcucac

SEQ ID NO: 213952 - RNA, 16 nt, Human T-lymphotropic virus 1
ccaacuccugcauuuu

SEQ ID NO: 213953 - RNA, 20 nt, Human T-lymphotropic virus 1
cauggacccucgaccugcug

SEQ ID NO: 213954 - RNA, 17 nt, Human T-lymphotropic virus 1
caguucugcccccucau

SEQ ID NO: 213955 - RNA, 20 nt, Human T-lymphotropic virus 1
cccccggaggacagcucagc

SEQ ID NO: 213956 - RNA, 13 nt, Human T-lymphotropic virus 1
ccccuaaagacaa

SEQ ID NO: 213957 - RNA, 22 nt, Human T-lymphotropic virus 1
ccccucccaugcggaccugcaa

SEQ ID NO: 213958 - RNA, 20 nt, Human T-lymphotropic virus 1
ccccuauacaggagccgucu

SEQ ID NO: 213959 - RNA, 16 nt, Human T-lymphotropic virus 1
ccagcuaccaugccac

SEQ ID NO: 213960 - RNA, 13 nt, Human T-lymphotropic virus 1
ccuaaacaguucc

SEQ ID NO: 213961 - RNA, 12 nt, Human T-lymphotropic virus 1
ccuaaucuccca

SEQ ID NO: 213962 - RNA, 11 nt, Human T-lymphotropic virus 1
ccuacagccac

SEQ ID NO: 213963 - RNA, 14 nt, Human T-lymphotropic virus 1
ccugccaacuacac

SEQ ID NO: 213964 - RNA, 14 nt, Human T-lymphotropic virus 1
ccuccccugccaau

SEQ ID NO: 213965 - RNA, 15 nt, Human T-lymphotropic virus 1
cuacacuagcccacu

SEQ ID NO: 213966 - RNA, 11 nt, Human T-lymphotropic virus 1
aaacauuuccg

SEQ ID NO: 213967 - RNA, 22 nt, Human T-lymphotropic virus 1
aaacauuuccgugaaacagaag

SEQ ID NO: 213968 - RNA, 17 nt, Human T-lymphotropic virus 1
cugucuaguauagccau

SEQ ID NO: 213969 - RNA, 18 nt, Human T-lymphotropic virus 1
cuguucgaaaugcagcug

SEQ ID NO: 213970 - RNA, 18 nt, Human T-lymphotropic virus 1
cugcucuuccugcuuucu

SEQ ID NO: 213971 - RNA, 17 nt, Human T-lymphotropic virus 1
cugcccuaaucuaguaa

SEQ ID NO: 213972 - RNA, 23 nt, Human T-lymphotropic virus 1
cucauaccacucuaaacccugca

SEQ ID NO: 213973 - RNA, 17 nt, Human T-lymphotropic virus 1
cucccauggguugccug

SEQ ID NO: 213974 - RNA, 23 nt, Human T-lymphotropic virus 1
gccaaucauggaccugccccuau

SEQ ID NO: 213975 - RNA, 20 nt, Human T-lymphotropic virus 1
gggcagggggccaaacccaa

SEQ ID NO: 213976 - RNA, 22 nt, Human T-lymphotropic virus 1
ggcagggggccaaacccaagau

SEQ ID NO: 213977 - RNA, 15 nt, Human T-lymphotropic virus 1
gcuuucacuguccca

SEQ ID NO: 213978 - RNA, 16 nt, Human T-lymphotropic virus 1
gcgccgugccuucucc

SEQ ID NO: 213979 - RNA, 13 nt, Human T-lymphotropic virus 1
gaggacagcucag

SEQ ID NO: 213980 - RNA, 23 nt, Human T-lymphotropic virus 1
gaggacagcucagcaccagcuca

SEQ ID NO: 213981 - RNA, 15 nt, Human T-lymphotropic virus 1
gaccagccacccaaa

SEQ ID NO: 213982 - RNA, 21 nt, Human T-lymphotropic virus 1
aaagacaaaucauaagcucag

SEQ ID NO: 213983 - RNA, 20 nt, Human T-lymphotropic virus 1
cuuuuccuccucuuucuccc

SEQ ID NO: 213984 - RNA, 15 nt, Human T-lymphotropic virus 1
cuuucucccgcucuu

SEQ ID NO: 213985 - RNA, 15 nt, Human T-lymphotropic virus 1
gacaaccccucaccu

SEQ ID NO: 213986 - RNA, 21 nt, Human T-lymphotropic virus 1
cuugccuaguugauaccaaaa

SEQ ID NO: 213987 - RNA, 17 nt, Human T-lymphotropic virus 1
cugugcuaauacgccuc

SEQ ID NO: 213988 - RNA, 14 nt, Human T-lymphotropic virus 1
cuuucacuguccca

SEQ ID NO: 213989 - RNA, 12 nt, Human T-lymphotropic virus 1
gauaccaaaaac

SEQ ID NO: 213990 - RNA, 20 nt, Human T-lymphotropic virus 1
gcaaguccuuccuaaccaag

SEQ ID NO: 213991 - RNA, 23 nt, Human T-lymphotropic virus 1
gcaagccuucccccaaugcacua

SEQ ID NO: 213992 - RNA, 14 nt, Human T-lymphotropic virus 1
gaggccgccaucca

SEQ ID NO: 213993 - RNA, 21 nt, Human T-lymphotropic virus 1
cggcccguaauuaaagcccag

SEQ ID NO: 213994 - RNA, 21 nt, Human T-lymphotropic virus 1
cugcccagccaguuuguucau

SEQ ID NO: 213995 - RNA, 23 nt, Human T-lymphotropic virus 1
cucggugauuacagccccagcug

SEQ ID NO: 213996 - RNA, 19 nt, Human T-lymphotropic virus 1
cuccagccccuacuggaaa

SEQ ID NO: 213997 - RNA, 17 nt, Human T-lymphotropic virus 1
cuccaccucgccuucca

SEQ ID NO: 213998 - RNA, 21 nt, Human T-lymphotropic virus 1
cucauuggaucaaaaagccaa

SEQ ID NO: 213999 - RNA, 16 nt, Human T-lymphotropic virus 1
uagagccucucaguga

SEQ ID NO: 214000 - RNA, 23 nt, Human T-lymphotropic virus 1
uaagcucagaccuccgggaagcc

SEQ ID NO: 214001 - RNA, 18 nt, Human T-lymphotropic virus 1
uacagccacccugcccua

SEQ ID NO: 214002 - RNA, 18 nt, Human T-lymphotropic virus 1
uacauggaugacauucuc

SEQ ID NO: 214003 - RNA, 20 nt, Human T-lymphotropic virus 1
gccuauuguuuuaacaucuu

SEQ ID NO: 214004 - RNA, 15 nt, Human T-lymphotropic virus 1
gccuccccugccaau

SEQ ID NO: 214005 - RNA, 23 nt, Human T-lymphotropic virus 1
gccucucagugaaaaacauuucc

SEQ ID NO: 214006 - RNA, 18 nt, Human T-lymphotropic virus 1
gccuuacaacaaugccaa

SEQ ID NO: 214007 - RNA, 14 nt, Human T-lymphotropic virus 1
gcuuuuccuccucu

SEQ ID NO: 214008 - RNA, 15 nt, Human T-lymphotropic virus 1
gggccaaacccaaga

SEQ ID NO: 214009 - RNA, 23 nt, Human T-lymphotropic virus 1
gggcgaagucagcggccuucucc

SEQ ID NO: 214010 - RNA, 15 nt, Human T-lymphotropic virus 1
ggggacaguucagga

SEQ ID NO: 214011 - RNA, 20 nt, Human T-lymphotropic virus 1
guaauacuccccucaaaaac

SEQ ID NO: 214012 - RNA, 22 nt, Human T-lymphotropic virus 1
caaccuccuccguucagccucc

SEQ ID NO: 214013 - RNA, 21 nt, Human T-lymphotropic virus 1
caaagacuaucgaagcucuac

SEQ ID NO: 214014 - RNA, 20 nt, Human T-lymphotropic virus 1
augccuuacaacaaugccaa

SEQ ID NO: 214015 - RNA, 17 nt, Human T-lymphotropic virus 1
augccaccuauucccua

SEQ ID NO: 214016 - RNA, 14 nt, Human T-lymphotropic virus 1
augcagcuggccca

SEQ ID NO: 214017 - RNA, 15 nt, Human T-lymphotropic virus 1
auuauugcaaccaca

SEQ ID NO: 214018 - RNA, 14 nt, Human T-lymphotropic virus 1
caucuugccuaguu

SEQ ID NO: 214019 - RNA, 15 nt, Human T-lymphotropic virus 1
cauaccacucuaaac

SEQ ID NO: 214020 - RNA, 14 nt, Human T-lymphotropic virus 1
cagggcccagaaua

SEQ ID NO: 214021 - RNA, 14 nt, Human T-lymphotropic virus 1
cagccccuacugga

SEQ ID NO: 214022 - RNA, 15 nt, Human T-lymphotropic virus 1
cccaacuccugcauu

SEQ ID NO: 214023 - RNA, 12 nt, Human T-lymphotropic virus 1
ccccuaccuaaa

SEQ ID NO: 214024 - RNA, 17 nt, Human T-lymphotropic virus 1
ccagccacccaaagacu

SEQ ID NO: 214025 - RNA, 18 nt, Human T-lymphotropic virus 1
ccaacaucuauucugcca

SEQ ID NO: 214026 - RNA, 17 nt, Human T-lymphotropic virus 1
ccaauaauuaaccucuc

SEQ ID NO: 214027 - RNA, 15 nt, Human T-lymphotropic virus 1
cauggaugacauucu

SEQ ID NO: 214028 - RNA, 17 nt, Human T-lymphotropic virus 1
acaauggcuucccuaau

SEQ ID NO: 214029 - RNA, 14 nt, Human T-lymphotropic virus 1
acaacaaugccaag

SEQ ID NO: 214030 - RNA, 13 nt, Human T-lymphotropic virus 1
acagcaaguccuu

SEQ ID NO: 214031 - RNA, 20 nt, Human T-lymphotropic virus 1
acagccacccugcccuaauc

SEQ ID NO: 214032 - RNA, 18 nt, Human T-lymphotropic virus 1
acuccaccucgccuucca

SEQ ID NO: 214033 - RNA, 15 nt, Human T-lymphotropic virus 1
acggcgcuccugcuc

SEQ ID NO: 214034 - RNA, 13 nt, Human T-lymphotropic virus 1
accacaucgccuc

SEQ ID NO: 214035 - RNA, 13 nt, Human T-lymphotropic virus 1
acccccaacuccu

SEQ ID NO: 214036 - RNA, 16 nt, Human T-lymphotropic virus 1
auauccugcagcccau

SEQ ID NO: 214037 - RNA, 21 nt, Human T-lymphotropic virus 1
auaauuaaccucucccaucaa

SEQ ID NO: 214038 - RNA, 12 nt, Human T-lymphotropic virus 1
aguacuacccca

SEQ ID NO: 214039 - RNA, 21 nt, Human T-lymphotropic virus 1
aggagggggcucgcaucucuc

SEQ ID NO: 214040 - RNA, 13 nt, Human T-lymphotropic virus 1
aggacagcucagc

SEQ ID NO: 214041 - RNA, 19 nt, Human T-lymphotropic virus 1
agccgucuccagccccuac

SEQ ID NO: 214042 - RNA, 17 nt, Human T-lymphotropic virus 1
agcagaucaggcccuac

SEQ ID NO: 214043 - RNA, 17 nt, Human T-lymphotropic virus 1
agcagacaugacagucc

SEQ ID NO: 214044 - RNA, 18 nt, Human T-lymphotropic virus 1
agcaaccuccuccguuca

SEQ ID NO: 214045 - RNA, 21 nt, Human T-lymphotropic virus 1
agcaaguccuuccuaaccaag

SEQ ID NO: 214046 - RNA, 22 nt, Human T-lymphotropic virus 1
agcaaucugcuuuuccuccucu

SEQ ID NO: 214047 - RNA, 15 nt, Human T-lymphotropic virus 1
agagccucucaguga

SEQ ID NO: 214048 - RNA, 14 nt, Human T-lymphotropic virus 1
uuauugcaaccaca

SEQ ID NO: 214049 - RNA, 23 nt, Human T-lymphotropic virus 1
uugccuaguugauaccaaaaaca

SEQ ID NO: 214050 - RNA, 16 nt, Human T-lymphotropic virus 1
uggagaguacuacccc

SEQ ID NO: 214051 - RNA, 19 nt, Human T-lymphotropic virus 1
uggagucuccucauaccac

SEQ ID NO: 214052 - RNA, 14 nt, Human T-lymphotropic virus 1
ugcuuucuccgggc

SEQ ID NO: 214053 - RNA, 22 nt, Human T-lymphotropic virus 1
ucuugccuaguugauaccaaaa

SEQ ID NO: 214054 - RNA, 22 nt, Human T-lymphotropic virus 1
uccuucuccugcagcaaccucc

SEQ ID NO: 214055 - RNA, 17 nt, Human T-lymphotropic virus 1
uccucauaccacucuaa

SEQ ID NO: 214056 - RNA, 18 nt, Human T-lymphotropic virus 1
uccucauaccacucuaaa

SEQ ID NO: 214057 - RNA, 18 nt, Human T-lymphotropic virus 1
ucagcaccagcucaggcu

SEQ ID NO: 214058 - RNA, 12 nt, Human T-lymphotropic virus 1
ucauaagcucag

SEQ ID NO: 214059 - RNA, 23 nt, Human T-lymphotropic virus 1
ucaggcccuacagccacccugcc

SEQ ID NO: 214060 - RNA, 17 nt, Human T-lymphotropic virus 1
ucagcggccuucuccuc

SEQ ID NO: 214061 - RNA, 23 nt, Human T-lymphotropic virus 1
uuuucgcuuccucuucuccucag

SEQ ID NO: 214062 - RNA, 23 nt, Human T-lymphotropic virus 1
uuuuucuuuccuagcacuaugcu

SEQ ID NO: 214063 - RNA, 19 nt, Human T-lymphotropic virus 1
gaccuccgggaagccaccg

SEQ ID NO: 214064 - RNA, 22 nt, Human T-lymphotropic virus 1
aaagcguggggacaguucagga

SEQ ID NO: 214065 - RNA, 22 nt, Human T-lymphotropic virus 1
gacuuguccagccugccaacua

SEQ ID NO: 214066 - RNA, 15 nt, Human T-lymphotropic virus 1
gauugacacccagac

SEQ ID NO: 214067 - RNA, 13 nt, Human T-lymphotropic virus 1
gauaccaaaaaca

SEQ ID NO: 214068 - RNA, 18 nt, Human T-lymphotropic virus 1
gcuauuauucagccucuu

SEQ ID NO: 214069 - RNA, 21 nt, Human T-lymphotropic virus 1
gcggaccugcaacuacucuca

SEQ ID NO: 214070 - RNA, 20 nt, Human T-lymphotropic virus 1
gccuuaccugaggccgccau

SEQ ID NO: 214071 - RNA, 22 nt, Human T-lymphotropic virus 1
gcaaccacaucgccuccagccu

SEQ ID NO: 214072 - RNA, 16 nt, Human T-lymphotropic virus 1
gccaccuauucccuau

SEQ ID NO: 214073 - RNA, 17 nt, Human T-lymphotropic virus 1
gccccuugucuccacuu

SEQ ID NO: 214074 - RNA, 20 nt, Human T-lymphotropic virus 1
gcccagauugacacccagac

SEQ ID NO: 214075 - RNA, 14 nt, Human T-lymphotropic virus 1
gcuggcccuuucag

SEQ ID NO: 214076 - RNA, 13 nt, Human T-lymphotropic virus 1
ggacuccaccucg

SEQ ID NO: 214077 - RNA, 18 nt, Human T-lymphotropic virus 1
gcuuccucuucuccucag

SEQ ID NO: 214078 - RNA, 12 nt, Human T-lymphotropic virus 1
cccacagcagug

SEQ ID NO: 214079 - RNA, 22 nt, Human T-lymphotropic virus 1
ccuucccccaaugcacuauucu

SEQ ID NO: 214080 - RNA, 17 nt, Human T-lymphotropic virus 1
ccuucuccucuuccuuc

SEQ ID NO: 214081 - RNA, 15 nt, Human T-lymphotropic virus 1
ccuuccuaaccaaga

SEQ ID NO: 214082 - RNA, 21 nt, Human T-lymphotropic virus 1
ccaacaucuauucugccaguu

SEQ ID NO: 214083 - RNA, 23 nt, Human T-lymphotropic virus 1
ccaugcggaccugcaacuacucu

SEQ ID NO: 214084 - RNA, 17 nt, Human T-lymphotropic virus 1
cuucccccaaugcacua

SEQ ID NO: 214085 - RNA, 16 nt, Human T-lymphotropic virus 1
cugucccacagcagug

SEQ ID NO: 214086 - RNA, 15 nt, Human T-lymphotropic virus 1
cugcuguacucucac

SEQ ID NO: 214087 - RNA, 13 nt, Human T-lymphotropic virus 1
cugccccuauaca

SEQ ID NO: 214088 - RNA, 18 nt, Human T-lymphotropic virus 1
cuccucauaccacucuaa

SEQ ID NO: 214089 - RNA, 20 nt, Human T-lymphotropic virus 1
cucacggcgcuccugcucuu

SEQ ID NO: 214090 - RNA, 19 nt, Human T-lymphotropic virus 1
cucagaggccacaauggcu

SEQ ID NO: 214091 - RNA, 22 nt, Human T-lymphotropic virus 1
cuaugcuguuucgccuucucag

SEQ ID NO: 214092 - RNA, 23 nt, Human T-lymphotropic virus 1
cuaugcuguuucgccuucucagc

SEQ ID NO: 214093 - RNA, 15 nt, Human T-lymphotropic virus 1
cuaguugauaccaaa

SEQ ID NO: 214094 - RNA, 16 nt, Human T-lymphotropic virus 1
cuaguauagccaucaa

SEQ ID NO: 214095 - RNA, 17 nt, Human T-lymphotropic virus 1
cguaauuaaagcccaga

SEQ ID NO: 214096 - RNA, 18 nt, Human T-lymphotropic virus 1
cggcucaauaaaauaaca

SEQ ID NO: 214097 - RNA, 20 nt, Human T-lymphotropic virus 1
uacuagauacaggagcagac

SEQ ID NO: 214098 - RNA, 16 nt, Human T-lymphotropic virus 1
uaggcccugacguguc

SEQ ID NO: 214099 - RNA, 15 nt, Human T-lymphotropic virus 1
uaguauagccaucaa

SEQ ID NO: 214100 - RNA, 21 nt, Human T-lymphotropic virus 1
gucuccagccccuacuggaaa

SEQ ID NO: 214101 - RNA, 21 nt, Human T-lymphotropic virus 1
uaaagacgccuuuuuccaaau

SEQ ID NO: 214102 - RNA, 17 nt, Human T-lymphotropic virus 1
ucagccccuugucucca

SEQ ID NO: 214103 - RNA, 22 nt, Human T-lymphotropic virus 1
ucucagaggccacaauggcuuc

SEQ ID NO: 214104 - RNA, 13 nt, Human T-lymphotropic virus 1
ugacaguccuucc

SEQ ID NO: 214105 - RNA, 23 nt, Human T-lymphotropic virus 1
ugacaaugaccaugagccccaaa

SEQ ID NO: 214106 - RNA, 14 nt, Human T-lymphotropic virus 1
ucuuuccuagcacu

SEQ ID NO: 214107 - RNA, 16 nt, Human T-lymphotropic virus 1
aaccacaucgccucca

SEQ ID NO: 214108 - RNA, 22 nt, Human T-lymphotropic virus 1
aaccuccuccguucagccucca

SEQ ID NO: 214109 - RNA, 15 nt, Human T-lymphotropic virus 1
aaguuacuccagcua

SEQ ID NO: 214110 - RNA, 17 nt, Human T-lymphotropic virus 1
aagucagcggccuucuc

SEQ ID NO: 214111 - RNA, 19 nt, Human T-lymphotropic virus 1
aauaauuaaccucucccau

SEQ ID NO: 214112 - RNA, 15 nt, Human T-lymphotropic virus 1
aaugcccauaccuag

SEQ ID NO: 214113 - RNA, 20 nt, Human T-lymphotropic virus 1
aaugccaaggcguccuguac

SEQ ID NO: 214114 - RNA, 22 nt, Human T-lymphotropic virus 1
aaucuaguaaguuacuccagcu

SEQ ID NO: 214115 - RNA, 18 nt, Human T-lymphotropic virus 1
aauggcggaggcuauuau

SEQ ID NO: 214116 - RNA, 15 nt, Human T-lymphotropic virus 1
uuccgugaaacagaa

SEQ ID NO: 214117 - RNA, 17 nt, Human T-lymphotropic virus 1
uuccuuuucaaauacuc

SEQ ID NO: 214118 - RNA, 15 nt, Human T-lymphotropic virus 1
ugcagcaaccuccuc

SEQ ID NO: 214119 - RNA, 23 nt, Human T-lymphotropic virus 1
auaaaagcguggggacaguucag

SEQ ID NO: 214120 - RNA, 14 nt, Human T-lymphotropic virus 1
aguauagccaucaa

SEQ ID NO: 214121 - RNA, 13 nt, Human T-lymphotropic virus 1
aggcuauuauuca

SEQ ID NO: 214122 - RNA, 19 nt, Human T-lymphotropic virus 1
aucauggaccugccccuau

SEQ ID NO: 214123 - RNA, 20 nt, Human T-lymphotropic virus 1
augccaccuauucccuauau

SEQ ID NO: 214124 - RNA, 13 nt, Human T-lymphotropic virus 1
cagccacccaaag

SEQ ID NO: 214125 - RNA, 21 nt, Human T-lymphotropic virus 1
cagaucaggcccuacagccac

SEQ ID NO: 214126 - RNA, 17 nt, Human T-lymphotropic virus 1
cacuuuaagcucaccuc

SEQ ID NO: 214127 - RNA, 13 nt, Human T-lymphotropic virus 1
cacuuacaaacua

SEQ ID NO: 214128 - RNA, 16 nt, Human T-lymphotropic virus 1
caagccccucccaugc

SEQ ID NO: 214129 - RNA, 23 nt, Human T-lymphotropic virus 1
cacacaauuauugcaaccacauc

SEQ ID NO: 214130 - RNA, 21 nt, Human T-lymphotropic virus 1
cacauuacagcaaguccuucc

SEQ ID NO: 214131 - RNA, 18 nt, Human T-lymphotropic virus 1
auucccuauaucuauucc

SEQ ID NO: 214132 - RNA, 20 nt, Human T-lymphotropic virus 1
augcuguuucgccuucucag

SEQ ID NO: 214133 - RNA, 16 nt, Human T-lymphotropic virus 1
caagacccaacaucua

SEQ ID NO: 214134 - RNA, 13 nt, Human T-lymphotropic virus 1
caacaaugccaag

SEQ ID NO: 214135 - RNA, 17 nt, Human T-lymphotropic virus 1
caaaucauaagcucaga

SEQ ID NO: 214136 - RNA, 20 nt, Human T-lymphotropic virus 1
aagaucacuuuaagcucacc

SEQ ID NO: 214137 - RNA, 21 nt, Human T-lymphotropic virus 1
aaggguuuaaaaauaguccca

SEQ ID NO: 214138 - RNA, 16 nt, Human T-lymphotropic virus 1
aauaaaauaacaggag

SEQ ID NO: 214139 - RNA, 13 nt, Human T-lymphotropic virus 1
aaguaauacuccc

SEQ ID NO: 214140 - RNA, 23 nt, Human T-lymphotropic virus 1
acuuuaagcucaccucccuuccu

SEQ ID NO: 214141 - RNA, 18 nt, Human T-lymphotropic virus 1
agaucaggcccuacagcc

SEQ ID NO: 214142 - RNA, 14 nt, Human T-lymphotropic virus 1
agcaccagcucagg

SEQ ID NO: 214143 - RNA, 15 nt, Human T-lymphotropic virus 1
agauugacacccaga

SEQ ID NO: 214144 - RNA, 19 nt, Human T-lymphotropic virus 1
acaguuggagucuccucau

SEQ ID NO: 214145 - RNA, 14 nt, Human T-lymphotropic virus 1
acagccacccugcc

SEQ ID NO: 214146 - RNA, 17 nt, Human T-lymphotropic virus 1
acagccacccugcccua

SEQ ID NO: 214147 - RNA, 23 nt, Human T-lymphotropic virus 1
acauggaugacauucuccuggca

SEQ ID NO: 214148 - RNA, 14 nt, Human T-lymphotropic virus 1
accaaaaacaacug

SEQ ID NO: 214149 - RNA, 13 nt, Human T-lymphotropic virus 1
aaaaacauuuccg

SEQ ID NO: 214150 - RNA, 18 nt, Human T-lymphotropic virus 1
aaacccugcaauccugcc

SEQ ID NO: 214151 - RNA, 21 nt, Human T-lymphotropic virus 1
uuacaaacuauagaccuuaaa

SEQ ID NO: 214152 - RNA, 23 nt, Human T-lymphotropic virus 1
uuaaccucucccaucaaauccuc

SEQ ID NO: 214153 - RNA, 17 nt, Human T-lymphotropic virus 1
uggcuucccuaaucucc

SEQ ID NO: 214154 - RNA, 22 nt, Human T-lymphotropic virus 1
uuuccaaaucccccuaccuaaa

SEQ ID NO: 214155 - RNA, 19 nt, Human T-lymphotropic virus 1
uucuccugcagcaaccucc

SEQ ID NO: 214156 - RNA, 17 nt, Human T-lymphotropic virus 1
ugacauucuccuggcaa

SEQ ID NO: 214157 - RNA, 18 nt, Human T-lymphotropic virus 1
ugccuaguugauaccaaa

SEQ ID NO: 214158 - RNA, 16 nt, Human T-lymphotropic virus 1
ugcccuaaucuaguaa

SEQ ID NO: 214159 - RNA, 19 nt, Human T-lymphotropic virus 1
ugccaacuacacuagccca

SEQ ID NO: 214160 - RNA, 19 nt, Human T-lymphotropic virus 1
ugcagcuggcccauauccu

SEQ ID NO: 214161 - RNA, 19 nt, Human T-lymphotropic virus 1
ugcaaccacaucgccucca

SEQ ID NO: 214162 - RNA, 22 nt, Human T-lymphotropic virus 1
uccugcgccgugccuucuccuc

SEQ ID NO: 214163 - RNA, 14 nt, Human T-lymphotropic virus 1
ucgaaaugcagcug

SEQ ID NO: 214164 - RNA, 21 nt, Human T-lymphotropic virus 1
ucccccaaugcacuauucuuc

SEQ ID NO: 214165 - RNA, 18 nt, Human T-lymphotropic virus 1
ucccccgggcccccugac

SEQ ID NO: 214166 - RNA, 23 nt, Human T-lymphotropic virus 1
uccuaaccaagacccaacaucua

SEQ ID NO: 214167 - RNA, 13 nt, Human T-lymphotropic virus 1
uccaaggacucca

SEQ ID NO: 214168 - RNA, 20 nt, Human T-lymphotropic virus 1
ucauuggaucaaaaagccaa

SEQ ID NO: 214169 - RNA, 20 nt, Human T-lymphotropic virus 1
acuuacaaacuauagaccuu

SEQ ID NO: 214170 - RNA, 11 nt, Human T-lymphotropic virus 1
accgggaacca

SEQ ID NO: 214171 - RNA, 21 nt, Human T-lymphotropic virus 1
accgggaaccacccauuuccu

SEQ ID NO: 214172 - RNA, 12 nt, Human T-lymphotropic virus 1
acccaacaucua

SEQ ID NO: 214173 - RNA, 20 nt, Human T-lymphotropic virus 1
accucgccuuccaacugucu

SEQ ID NO: 214174 - RNA, 19 nt, Human T-lymphotropic virus 1
acaggagccgucuccagcc

SEQ ID NO: 214175 - RNA, 19 nt, Human T-lymphotropic virus 1
acauggaugacauucuccu

SEQ ID NO: 214176 - RNA, 14 nt, Human T-lymphotropic virus 1
acaugacaguccuu

SEQ ID NO: 214177 - RNA, 20 nt, Human T-lymphotropic virus 1
aucaacccccaacuccugca

SEQ ID NO: 214178 - RNA, 22 nt, Human T-lymphotropic virus 1
aucaaauccuccuucuccugca

SEQ ID NO: 214179 - RNA, 14 nt, Human T-lymphotropic virus 1
auacaggagccguc

SEQ ID NO: 214180 - RNA, 22 nt, Human T-lymphotropic virus 1
auagaucucucaucaucuuccc

SEQ ID NO: 214181 - RNA, 18 nt, Human T-lymphotropic virus 1
auacuccccucaaaaaca

SEQ ID NO: 214182 - RNA, 18 nt, Human T-lymphotropic virus 1
aucauaagcucagaccuc

SEQ ID NO: 214183 - RNA, 18 nt, Human T-lymphotropic virus 1
agcuaccaugccaccuau

SEQ ID NO: 214184 - RNA, 22 nt, Human T-lymphotropic virus 1
agccccagcugcuguacucuca

SEQ ID NO: 214185 - RNA, 17 nt, Human T-lymphotropic virus 1
agcccagauugacaccc

SEQ ID NO: 214186 - RNA, 22 nt, Human T-lymphotropic virus 1
aggacuccaccucgccuuccaa

SEQ ID NO: 214187 - RNA, 15 nt, Human T-lymphotropic virus 1
aguugauaccaaaaa

SEQ ID NO: 214188 - RNA, 14 nt, Human T-lymphotropic virus 1
aguuccagcccuac

SEQ ID NO: 214189 - RNA, 18 nt, Human T-lymphotropic virus 1
agggggccaaacccaaga

SEQ ID NO: 214190 - RNA, 23 nt, Human T-lymphotropic virus 1
cagcaaguccuuccuaaccaaga

SEQ ID NO: 214191 - RNA, 13 nt, Human T-lymphotropic virus 1
cagcaaccuccuc

SEQ ID NO: 214192 - RNA, 12 nt, Human T-lymphotropic virus 1
cauaagcucaga

SEQ ID NO: 214193 - RNA, 15 nt, Human T-lymphotropic virus 1
caugacaguccuucc

SEQ ID NO: 214194 - RNA, 17 nt, Human T-lymphotropic virus 1
caucaacccccaacucc

SEQ ID NO: 214195 - RNA, 21 nt, Human T-lymphotropic virus 1
caucaacccccaacuccugca

SEQ ID NO: 214196 - RNA, 13 nt, Human T-lymphotropic virus 1
ccaaacccaagau

SEQ ID NO: 214197 - RNA, 15 nt, Human T-lymphotropic virus 1
ccaacuccugcauuu

SEQ ID NO: 214198 - RNA, 18 nt, Human T-lymphotropic virus 1
ccagcugcuguacucuca

SEQ ID NO: 214199 - RNA, 21 nt, Human T-lymphotropic virus 1
ccagaccagccacccaaagac

SEQ ID NO: 214200 - RNA, 22 nt, Human T-lymphotropic virus 1
ccaccgggaaccacccauuucc

SEQ ID NO: 214201 - RNA, 23 nt, Human T-lymphotropic virus 1
cccaugcggaccugcaacuacuc

SEQ ID NO: 214202 - RNA, 12 nt, Human T-lymphotropic virus 1
ccccaaauaucc

SEQ ID NO: 214203 - RNA, 23 nt, Human T-lymphotropic virus 1
cccucauuggaucaaaaagccaa

SEQ ID NO: 214204 - RNA, 23 nt, Human T-lymphotropic virus 1
ccuauuguuuuaacaucuugccu

SEQ ID NO: 214205 - RNA, 20 nt, Human T-lymphotropic virus 1
ccgggcccccugacuugucc

SEQ ID NO: 214206 - RNA, 22 nt, Human T-lymphotropic virus 1
cccuuguuccuuaaaaugccca

SEQ ID NO: 214207 - RNA, 20 nt, Human T-lymphotropic virus 1
cccuguucgaaaugcagcug

SEQ ID NO: 214208 - RNA, 15 nt, Human T-lymphotropic virus 1
ccugcccagccaguu

SEQ ID NO: 214209 - RNA, 21 nt, Human T-lymphotropic virus 1
ccuuguuccuuaaaaugccca

SEQ ID NO: 214210 - RNA, 22 nt, Human T-lymphotropic virus 1
ccuucucagccccuugucucca

SEQ ID NO: 214211 - RNA, 14 nt, Human T-lymphotropic virus 1
caccucgccuucca

SEQ ID NO: 214212 - RNA, 19 nt, Human T-lymphotropic virus 1
cacaucgccuccagccucc

SEQ ID NO: 214213 - RNA, 23 nt, Human T-lymphotropic virus 1
cacccagaccagccacccaaaga

SEQ ID NO: 214214 - RNA, 13 nt, Human T-lymphotropic virus 1
caaauccuccuuc

SEQ ID NO: 214215 - RNA, 14 nt, Human T-lymphotropic virus 1
auucggcaagccuu

SEQ ID NO: 214216 - RNA, 18 nt, Human T-lymphotropic virus 1
cuauuguuuuaacaucuu

SEQ ID NO: 214217 - RNA, 20 nt, Human T-lymphotropic virus 1
cucagcaccagcucaggcua

SEQ ID NO: 214218 - RNA, 16 nt, Human T-lymphotropic virus 1
cucauaccacucuaaa

SEQ ID NO: 214219 - RNA, 19 nt, Human T-lymphotropic virus 1
cucagugaaaaacauuucc

SEQ ID NO: 214220 - RNA, 17 nt, Human T-lymphotropic virus 1
cuacuuugcuuucacug

SEQ ID NO: 214221 - RNA, 16 nt, Human T-lymphotropic virus 1
cuaccaugccaccuau

SEQ ID NO: 214222 - RNA, 20 nt, Human T-lymphotropic virus 1
cuacagccacccugcccuaa

SEQ ID NO: 214223 - RNA, 22 nt, Human T-lymphotropic virus 1
cuaaucuaguaaguuacuccag

SEQ ID NO: 214224 - RNA, 14 nt, Human T-lymphotropic virus 1
cuaaucucccaugg

SEQ ID NO: 214225 - RNA, 22 nt, Human T-lymphotropic virus 1
cucccaugcggaccugcaacua

SEQ ID NO: 214226 - RNA, 22 nt, Human T-lymphotropic virus 1
cugucccacagcaguguaacua

SEQ ID NO: 214227 - RNA, 15 nt, Human T-lymphotropic virus 1
cuucaguacauggau

SEQ ID NO: 214228 - RNA, 14 nt, Human T-lymphotropic virus 1
cuuccuaaccaaga

SEQ ID NO: 214229 - RNA, 15 nt, Human T-lymphotropic virus 1
cuuccuaaccaagac

SEQ ID NO: 214230 - RNA, 22 nt, Human T-lymphotropic virus 1
cuuccuaaccaagacccaacau

SEQ ID NO: 214231 - RNA, 12 nt, Human T-lymphotropic virus 1
cuuccuuuucaa

SEQ ID NO: 214232 - RNA, 17 nt, Human T-lymphotropic virus 1
gccaacuacacuagccc

SEQ ID NO: 214233 - RNA, 13 nt, Human T-lymphotropic virus 1
gccaaacccaaga

SEQ ID NO: 214234 - RNA, 15 nt, Human T-lymphotropic virus 1
gccacccugcccuaa

SEQ ID NO: 214235 - RNA, 19 nt, Human T-lymphotropic virus 1
gccaccgggaaccacccau

SEQ ID NO: 214236 - RNA, 22 nt, Human T-lymphotropic virus 1
gaaccacccauuuccuccccau

SEQ ID NO: 214237 - RNA, 16 nt, Human T-lymphotropic virus 1
gaccagccacccaaag

SEQ ID NO: 214238 - RNA, 14 nt, Human T-lymphotropic virus 1
gaccaugagcccca

SEQ ID NO: 214239 - RNA, 20 nt, Human T-lymphotropic virus 1
gccccagcugcuguacucuc

SEQ ID NO: 214240 - RNA, 23 nt, Human T-lymphotropic virus 1
gcccagccaguuuguucauggac

SEQ ID NO: 214241 - RNA, 15 nt, Human T-lymphotropic virus 1
gcucuuccugcuuuc

SEQ ID NO: 214242 - RNA, 24 nt, Human T-lymphotropic virus 1
gcuauuauucagccucuuauucag

SEQ ID NO: 214243 - RNA, 17 nt, Human T-lymphotropic virus 1
gcuuccucuucuccuca

SEQ ID NO: 214244 - RNA, 22 nt, Human T-lymphotropic virus 1
gcuuccugcgccgugccuucuc

SEQ ID NO: 214245 - RNA, 20 nt, Human T-lymphotropic virus 1
ggcagggggccaaacccaag

SEQ ID NO: 214246 - RNA, 16 nt, Human T-lymphotropic virus 1
ggugccaaucauggac

SEQ ID NO: 214247 - RNA, 18 nt, Human T-lymphotropic virus 1
ggggcuuagagccucuca

SEQ ID NO: 214248 - RNA, 16 nt, Human T-lymphotropic virus 1
uaaccucucccaucaa

SEQ ID NO: 214249 - RNA, 13 nt, Human T-lymphotropic virus 1
uaaagacaaauca

SEQ ID NO: 214250 - RNA, 20 nt, Human T-lymphotropic virus 1
uaaaagcguggggacaguuc

SEQ ID NO: 214251 - RNA, 16 nt, Human T-lymphotropic virus 1
uacaaacuauagaccu

SEQ ID NO: 214252 - RNA, 19 nt, Human T-lymphotropic virus 1
uaccacucuaaacccugca

SEQ ID NO: 214253 - RNA, 22 nt, Human T-lymphotropic virus 1
uauugcaaccacaucgccucca

SEQ ID NO: 214254 - RNA, 12 nt, Human T-lymphotropic virus 2
ucaaacuccucc

SEQ ID NO: 214255 - RNA, 17 nt, Human T-lymphotropic virus 2
uauacaaaauguuccua

SEQ ID NO: 214256 - RNA, 16 nt, Human T-lymphotropic virus 2
uagcgcugaaaaacaa

SEQ ID NO: 214257 - RNA, 16 nt, Human T-lymphotropic virus 2
uaccagcuuuccccac

SEQ ID NO: 214258 - RNA, 22 nt, Human T-lymphotropic virus 2
uaccccaaagcagggcagccau

SEQ ID NO: 214259 - RNA, 15 nt, Human T-lymphotropic virus 2
uacaaaauguuccua

SEQ ID NO: 214260 - RNA, 16 nt, Human T-lymphotropic virus 2
uaacccccgcucacau

SEQ ID NO: 214261 - RNA, 15 nt, Human T-lymphotropic virus 2
gucacggagacucac

SEQ ID NO: 214262 - RNA, 15 nt, Human T-lymphotropic virus 2
gcuucuauaccuccc

SEQ ID NO: 214263 - RNA, 16 nt, Human T-lymphotropic virus 2
gaccuacccaccacaa

SEQ ID NO: 214264 - RNA, 24 nt, Human T-lymphotropic virus 2
gaggacgaccuacccaccacaaug

SEQ ID NO: 214265 - RNA, 13 nt, Human T-lymphotropic virus 2
gccagugggcaaa

SEQ ID NO: 214266 - RNA, 16 nt, Human T-lymphotropic virus 2
gauuacccccugccca

SEQ ID NO: 214267 - RNA, 15 nt, Human T-lymphotropic virus 2
gcaacagcaaccaau

SEQ ID NO: 214268 - RNA, 13 nt, Human T-lymphotropic virus 2
cuuccucaccaag

SEQ ID NO: 214269 - RNA, 23 nt, Human T-lymphotropic virus 2
cuucaaugacggcucaccaauga

SEQ ID NO: 214270 - RNA, 16 nt, Human T-lymphotropic virus 2
cuuauaccccauguca

SEQ ID NO: 214271 - RNA, 16 nt, Human T-lymphotropic virus 2
cuccccccuaggaaca

SEQ ID NO: 214272 - RNA, 17 nt, Human T-lymphotropic virus 2
cucccgcugcuccuccg

SEQ ID NO: 214273 - RNA, 16 nt, Human T-lymphotropic virus 2
cugaauaauugccuca

SEQ ID NO: 214274 - RNA, 18 nt, Human T-lymphotropic virus 2
cugaacugcuccucccaa

SEQ ID NO: 214275 - RNA, 20 nt, Human T-lymphotropic virus 2
cugaaaaacaaggcucugac

SEQ ID NO: 214276 - RNA, 16 nt, Human T-lymphotropic virus 2
cugcggcagcaacagc

SEQ ID NO: 214277 - RNA, 23 nt, Human T-lymphotropic virus 2
cuauaccucccagacgaccccag

SEQ ID NO: 214278 - RNA, 17 nt, Human T-lymphotropic virus 2
cgacacccugauccuag

SEQ ID NO: 214279 - RNA, 15 nt, Human T-lymphotropic virus 2
auucugccaccccag

SEQ ID NO: 214280 - RNA, 21 nt, Human T-lymphotropic virus 2
auuagaagaacuucuauacaa

SEQ ID NO: 214281 - RNA, 20 nt, Human T-lymphotropic virus 2
cacccaugacauggccacuu

SEQ ID NO: 214282 - RNA, 14 nt, Human T-lymphotropic virus 2
cacauauucuugcc

SEQ ID NO: 214283 - RNA, 14 nt, Human T-lymphotropic virus 2
cacagggacaguca

SEQ ID NO: 214284 - RNA, 23 nt, Human T-lymphotropic virus 2
caacacccaguucaaacuccucc

SEQ ID NO: 214285 - RNA, 17 nt, Human T-lymphotropic virus 2
caaugacggcucaccaa

SEQ ID NO: 214286 - RNA, 15 nt, Human T-lymphotropic virus 2
cacuuauaccccaug

SEQ ID NO: 214287 - RNA, 18 nt, Human T-lymphotropic virus 2
cacuuauaccccauguca

SEQ ID NO: 214288 - RNA, 16 nt, Human T-lymphotropic virus 2
ccuucaggaaauccac

SEQ ID NO: 214289 - RNA, 17 nt, Human T-lymphotropic virus 2
ccugccucuuagacacc

SEQ ID NO: 214290 - RNA, 16 nt, Human T-lymphotropic virus 2
ccugauccuaggcgcc

SEQ ID NO: 214291 - RNA, 16 nt, Human T-lymphotropic virus 2
ccucacgcuccugcag

SEQ ID NO: 214292 - RNA, 19 nt, Human T-lymphotropic virus 2
ccuccaaaccccccuacac

SEQ ID NO: 214293 - RNA, 22 nt, Human T-lymphotropic virus 2
cccuuuuuuuaggaacugaaac

SEQ ID NO: 214294 - RNA, 17 nt, Human T-lymphotropic virus 2
ccgcugcuccuccgcca

SEQ ID NO: 214295 - RNA, 14 nt, Human T-lymphotropic virus 2
ccuagucaaaauaa

SEQ ID NO: 214296 - RNA, 13 nt, Human T-lymphotropic virus 2
cccgcucacauuc

SEQ ID NO: 214297 - RNA, 21 nt, Human T-lymphotropic virus 2
ccagaaaaaaauagaccucac

SEQ ID NO: 214298 - RNA, 23 nt, Human T-lymphotropic virus 2
ccagcuuuccccacccaugacau

SEQ ID NO: 214299 - RNA, 21 nt, Human T-lymphotropic virus 2
ccaggaguccuauacacucca

SEQ ID NO: 214300 - RNA, 13 nt, Human T-lymphotropic virus 2
cauugacccaucc

SEQ ID NO: 214301 - RNA, 15 nt, Human T-lymphotropic virus 2
caucucgauacuccc

SEQ ID NO: 214302 - RNA, 16 nt, Human T-lymphotropic virus 2
aggucagaccgucuca

SEQ ID NO: 214303 - RNA, 12 nt, Human T-lymphotropic virus 2
agcucuccagaa

SEQ ID NO: 214304 - RNA, 12 nt, Human T-lymphotropic virus 2
auccacaguccu

SEQ ID NO: 214305 - RNA, 20 nt, Human T-lymphotropic virus 2
auccacaguccucuauacca

SEQ ID NO: 214306 - RNA, 15 nt, Human T-lymphotropic virus 2
auccauccucuccaa

SEQ ID NO: 214307 - RNA, 12 nt, Human T-lymphotropic virus 2
accaacacccag

SEQ ID NO: 214308 - RNA, 17 nt, Human T-lymphotropic virus 2
acaguccucuauaccag

SEQ ID NO: 214309 - RNA, 23 nt, Human T-lymphotropic virus 2
accuucaaugacggcucaccaau

SEQ ID NO: 214310 - RNA, 22 nt, Human T-lymphotropic virus 2
acccaguucaaacuccuccaaa

SEQ ID NO: 214311 - RNA, 20 nt, Human T-lymphotropic virus 2
acccugaagcaagucacaaa

SEQ ID NO: 214312 - RNA, 13 nt, Human T-lymphotropic virus 2
acuuauaccccau

SEQ ID NO: 214313 - RNA, 17 nt, Human T-lymphotropic virus 2
agaagaacuucuauaca

SEQ ID NO: 214314 - RNA, 14 nt, Human T-lymphotropic virus 2
agaacuucuauaca

SEQ ID NO: 214315 - RNA, 16 nt, Human T-lymphotropic virus 2
ucacaaaacccaucaa

SEQ ID NO: 214316 - RNA, 17 nt, Human T-lymphotropic virus 2
ucacaaaacccaucaaa

SEQ ID NO: 214317 - RNA, 14 nt, Human T-lymphotropic virus 2
ucacacaaacaauc

SEQ ID NO: 214318 - RNA, 21 nt, Human T-lymphotropic virus 2
uccucuauaccagaugagucg

SEQ ID NO: 214319 - RNA, 16 nt, Human T-lymphotropic virus 2
uccguuaugggacaaa

SEQ ID NO: 214320 - RNA, 15 nt, Human T-lymphotropic virus 2
ucccgaucaagacau

SEQ ID NO: 214321 - RNA, 20 nt, Human T-lymphotropic virus 2
uccccuagcgcugaaaaaca

SEQ ID NO: 214322 - RNA, 17 nt, Human T-lymphotropic virus 2
ucccgcaggcgcuccuu

SEQ ID NO: 214323 - RNA, 22 nt, Human T-lymphotropic virus 2
ucccaagguaagucuccucuca

SEQ ID NO: 214324 - RNA, 20 nt, Human T-lymphotropic virus 2
ugccucaaauaguuccucua

SEQ ID NO: 214325 - RNA, 13 nt, Human T-lymphotropic virus 2
uucuauaccuccc

SEQ ID NO: 214326 - RNA, 14 nt, Human T-lymphotropic virus 2
uucgaaaccaaagc

SEQ ID NO: 214327 - RNA, 17 nt, Human T-lymphotropic virus 2
uuaggagccuuccucac

SEQ ID NO: 214328 - RNA, 19 nt, Human T-lymphotropic virus 2
aaaaggucagaccgucuca

SEQ ID NO: 214329 - RNA, 21 nt, Human T-lymphotropic virus 2
aaaaggucagaccgucucaca

SEQ ID NO: 214330 - RNA, 20 nt, Human T-lymphotropic virus 2
aaaagcgcaaggacaguuca

SEQ ID NO: 214331 - RNA, 13 nt, Human T-lymphotropic virus 2
accaacacccagu

SEQ ID NO: 214332 - RNA, 20 nt, Human T-lymphotropic virus 2
accagcuuuccccacccaug

SEQ ID NO: 214333 - RNA, 17 nt, Human T-lymphotropic virus 2
accgucucacacaaaca

SEQ ID NO: 214334 - RNA, 19 nt, Human T-lymphotropic virus 2
agcaagucacaaaacccau

SEQ ID NO: 214335 - RNA, 11 nt, Human T-lymphotropic virus 2
agacacccaca

SEQ ID NO: 214336 - RNA, 15 nt, Human T-lymphotropic virus 2
acuucuccccuauca

SEQ ID NO: 214337 - RNA, 20 nt, Human T-lymphotropic virus 2
acaauuaggagccuuccuca

SEQ ID NO: 214338 - RNA, 12 nt, Human T-lymphotropic virus 2
acaauguuccaa

SEQ ID NO: 214339 - RNA, 14 nt, Human T-lymphotropic virus 2
acaaggcucugacg

SEQ ID NO: 214340 - RNA, 13 nt, Human T-lymphotropic virus 2
acaaacaccucag

SEQ ID NO: 214341 - RNA, 21 nt, Human T-lymphotropic virus 2
acaaacaccucagccuaccca

SEQ ID NO: 214342 - RNA, 14 nt, Human T-lymphotropic virus 2
aacaaggcucugac

SEQ ID NO: 214343 - RNA, 15 nt, Human T-lymphotropic virus 2
aaccccccuacacau

SEQ ID NO: 214344 - RNA, 22 nt, Human T-lymphotropic virus 2
auucugccaccccagacaauua

SEQ ID NO: 214345 - RNA, 20 nt, Human T-lymphotropic virus 2
auuuccggcccuuaccccaa

SEQ ID NO: 214346 - RNA, 19 nt, Human T-lymphotropic virus 2
caagguaagucuccucuca

SEQ ID NO: 214347 - RNA, 23 nt, Human T-lymphotropic virus 2
caauuaggagccuuccucaccaa

SEQ ID NO: 214348 - RNA, 14 nt, Human T-lymphotropic virus 2
caggaaauccacau

SEQ ID NO: 214349 - RNA, 17 nt, Human T-lymphotropic virus 2
augccuuucuucccucu

SEQ ID NO: 214350 - RNA, 22 nt, Human T-lymphotropic virus 2
augauuuccggcccuuacccca

SEQ ID NO: 214351 - RNA, 18 nt, Human T-lymphotropic virus 2
augacggcucaccaauga

SEQ ID NO: 214352 - RNA, 16 nt, Human T-lymphotropic virus 2
auauucugccacccca

SEQ ID NO: 214353 - RNA, 21 nt, Human T-lymphotropic virus 2
auauucugccaccccagacaa

SEQ ID NO: 214354 - RNA, 18 nt, Human T-lymphotropic virus 2
agguggcucgcucccuca

SEQ ID NO: 214355 - RNA, 12 nt, Human T-lymphotropic virus 2
agcuuuccccac

SEQ ID NO: 214356 - RNA, 16 nt, Human T-lymphotropic virus 2
aguucaaacuccucca

SEQ ID NO: 214357 - RNA, 18 nt, Human T-lymphotropic virus 2
uggccacuuauaccccau

SEQ ID NO: 214358 - RNA, 20 nt, Human T-lymphotropic virus 2
uuaggagccuuccucaccaa

SEQ ID NO: 214359 - RNA, 13 nt, Human T-lymphotropic virus 2
aauguuccuacac

SEQ ID NO: 214360 - RNA, 16 nt, Human T-lymphotropic virus 2
aaguuuuaagaucucc

SEQ ID NO: 214361 - RNA, 18 nt, Human T-lymphotropic virus 2
aagcgcaaggacaguuca

SEQ ID NO: 214362 - RNA, 20 nt, Human T-lymphotropic virus 2
aagcgcaaggacaguucagg

SEQ ID NO: 214363 - RNA, 23 nt, Human T-lymphotropic virus 2
aacccaggaguccuauacacucc

SEQ ID NO: 214364 - RNA, 13 nt, Human T-lymphotropic virus 2
aacagcaaccaau

SEQ ID NO: 214365 - RNA, 14 nt, Human T-lymphotropic virus 2
aaccaacacccagu

SEQ ID NO: 214366 - RNA, 21 nt, Human T-lymphotropic virus 2
ugacccauccacaguccucua

SEQ ID NO: 214367 - RNA, 23 nt, Human T-lymphotropic virus 2
ugacauggccacuuauaccccau

SEQ ID NO: 214368 - RNA, 17 nt, Human T-lymphotropic virus 2
ucugaauaauugccuca

SEQ ID NO: 214369 - RNA, 17 nt, Human T-lymphotropic virus 2
ucugcagcaaauccccu

SEQ ID NO: 214370 - RNA, 16 nt, Human T-lymphotropic virus 2
uccgugggaccgucuc

SEQ ID NO: 214371 - RNA, 14 nt, Human T-lymphotropic virus 2
ucacuccaucuuaa

SEQ ID NO: 214372 - RNA, 17 nt, Human T-lymphotropic virus 2
ucacauuccucccauag

SEQ ID NO: 214373 - RNA, 14 nt, Human T-lymphotropic virus 2
uauucugccacccc

SEQ ID NO: 214374 - RNA, 15 nt, Human T-lymphotropic virus 2
uauucugccacccca

SEQ ID NO: 214375 - RNA, 18 nt, Human T-lymphotropic virus 2
uccaucuuaacaacccca

SEQ ID NO: 214376 - RNA, 17 nt, Human T-lymphotropic virus 2
uccccuagcgcugaaaa

SEQ ID NO: 214377 - RNA, 17 nt, Human T-lymphotropic virus 2
uccggcccuuaccccaa

SEQ ID NO: 214378 - RNA, 12 nt, Human T-lymphotropic virus 2
ucccgcuccuca

SEQ ID NO: 214379 - RNA, 23 nt, Human T-lymphotropic virus 2
ucauauucugccaccccagacaa

SEQ ID NO: 214380 - RNA, 13 nt, Human T-lymphotropic virus 2
uaaaggcucugac

SEQ ID NO: 214381 - RNA, 18 nt, Human T-lymphotropic virus 2
uaaaggcucugacgucuc

SEQ ID NO: 214382 - RNA, 12 nt, Human T-lymphotropic virus 2
guuauaccccag

SEQ ID NO: 214383 - RNA, 20 nt, Human T-lymphotropic virus 2
gucucacacaaacaauccca

SEQ ID NO: 214384 - RNA, 18 nt, Human T-lymphotropic virus 2
uaggaacaggaacagcuc

SEQ ID NO: 214385 - RNA, 12 nt, Human T-lymphotropic virus 2
uagacacccaca

SEQ ID NO: 214386 - RNA, 15 nt, Human T-lymphotropic virus 2
aacaaugccaggggc

SEQ ID NO: 214387 - RNA, 18 nt, Human T-lymphotropic virus 2
aacaaggcucugacgauu

SEQ ID NO: 214388 - RNA, 17 nt, Human T-lymphotropic virus 2
uaccauugacccaucca

SEQ ID NO: 214389 - RNA, 11 nt, Human T-lymphotropic virus 2
uacccaccaca

SEQ ID NO: 214390 - RNA, 19 nt, Human T-lymphotropic virus 2
uaacccccgcucacauucc

SEQ ID NO: 214391 - RNA, 20 nt, Human T-lymphotropic virus 2
uaacccccgcucacauuccu

SEQ ID NO: 214392 - RNA, 14 nt, Human T-lymphotropic virus 2
uaauauggaccuuc

SEQ ID NO: 214393 - RNA, 21 nt, Human T-lymphotropic virus 2
cuaacccccgcucacauuccu

SEQ ID NO: 214394 - RNA, 23 nt, Human T-lymphotropic virus 2
cuaacccccgcucacauuccucc

SEQ ID NO: 214395 - RNA, 17 nt, Human T-lymphotropic virus 2
cuaauauggaccuucaa

SEQ ID NO: 214396 - RNA, 22 nt, Human T-lymphotropic virus 2
cguuaugggacaaacaccucag

SEQ ID NO: 214397 - RNA, 22 nt, Human T-lymphotropic virus 2
cuaggcgccagugggcaaacca

SEQ ID NO: 214398 - RNA, 16 nt, Human T-lymphotropic virus 2
cucacgcuccugcaga

SEQ ID NO: 214399 - RNA, 15 nt, Human T-lymphotropic virus 2
cucccgcuccucacg

SEQ ID NO: 214400 - RNA, 19 nt, Human T-lymphotropic virus 2
cucccuauuaaucuucgaa

SEQ ID NO: 214401 - RNA, 23 nt, Human T-lymphotropic virus 2
cuucccucucccggcgcuuuuga

SEQ ID NO: 214402 - RNA, 15 nt, Human T-lymphotropic virus 2
cuucuccccuaucac

SEQ ID NO: 214403 - RNA, 12 nt, Human T-lymphotropic virus 2
ccaacagucucc

SEQ ID NO: 214404 - RNA, 14 nt, Human T-lymphotropic virus 2
cauccacaguccuc

SEQ ID NO: 214405 - RNA, 14 nt, Human T-lymphotropic virus 2
caucaaaacccagg

SEQ ID NO: 214406 - RNA, 21 nt, Human T-lymphotropic virus 2
cauauucugccaccccagaca

SEQ ID NO: 214407 - RNA, 21 nt, Human T-lymphotropic virus 2
caggacuucuccccuaucacu

SEQ ID NO: 214408 - RNA, 21 nt, Human T-lymphotropic virus 2
cauugacccauccacaguccu

SEQ ID NO: 214409 - RNA, 16 nt, Human T-lymphotropic virus 2
cgauacucccacucau

SEQ ID NO: 214410 - RNA, 19 nt, Human T-lymphotropic virus 2
cccaaguaaaggcucugac

SEQ ID NO: 214411 - RNA, 21 nt, Human T-lymphotropic virus 2
ccucuggucacggagacucac

SEQ ID NO: 214412 - RNA, 21 nt, Human T-lymphotropic virus 2
ggaucuccguuaugggacaaa

SEQ ID NO: 214413 - RNA, 17 nt, Human T-lymphotropic virus 2
ggauccauccucuccaa

SEQ ID NO: 214414 - RNA, 13 nt, Human T-lymphotropic virus 2
guaaaggcucuga

SEQ ID NO: 214415 - RNA, 20 nt, Human T-lymphotropic virus 2
guaaaggcucugacgucucc

SEQ ID NO: 214416 - RNA, 16 nt, Human T-lymphotropic virus 2
guaagucuccucucag

SEQ ID NO: 214417 - RNA, 16 nt, Human T-lymphotropic virus 2
ggucagaccgucucac

SEQ ID NO: 214418 - RNA, 16 nt, Human T-lymphotropic virus 2
ggucacggagacucac

SEQ ID NO: 214419 - RNA, 12 nt, Human T-lymphotropic virus 2
gggaccgucucc

SEQ ID NO: 214420 - RNA, 19 nt, Human T-lymphotropic virus 2
gccacccagggcgagucau

SEQ ID NO: 214421 - RNA, 16 nt, Human T-lymphotropic virus 2
gcaacagcaaccaauu

SEQ ID NO: 214422 - RNA, 14 nt, Human T-lymphotropic virus 2
gcucccgcuccuca

SEQ ID NO: 214423 - RNA, 22 nt, Human T-lymphotropic virus 2
gauuagaagaacuucuauacaa

SEQ ID NO: 214424 - RNA, 16 nt, Human T-lymphotropic virus 2
gaggacgaccuaccca

SEQ ID NO: 214425 - RNA, 17 nt, Human T-lymphotropic virus 2
gaggacgaccuacccac

SEQ ID NO: 214426 - RNA, 18 nt, Human T-lymphotropic virus 2
aaaggucagaccgucuca

SEQ ID NO: 214427 - RNA, 19 nt, Human T-lymphotropic virus 2
aaagcgcaaggacaguuca

SEQ ID NO: 214428 - RNA, 22 nt, Human T-lymphotropic virus 2
aaagcgcaaggacaguucagga

SEQ ID NO: 214429 - RNA, 17 nt, Human T-lymphotropic virus 2
gaccucacccuuaccca

SEQ ID NO: 214430 - RNA, 21 nt, Human T-lymphotropic virus 2
gaccgucucacacaaacaauc

SEQ ID NO: 214431 - RNA, 20 nt, Human T-lymphotropic virus 2
gacccauccacaguccucua

SEQ ID NO: 214432 - RNA, 20 nt, Human T-lymphotropic virus 2
uccuccaaaccccccuacac

SEQ ID NO: 214433 - RNA, 14 nt, Human T-lymphotropic virus 2
uccgacgagagucu

SEQ ID NO: 214434 - RNA, 22 nt, Human T-lymphotropic virus 2
ucccucaccgacccucugguca

SEQ ID NO: 214435 - RNA, 16 nt, Human T-lymphotropic virus 2
ucgauacucccacuca

SEQ ID NO: 214436 - RNA, 18 nt, Human T-lymphotropic virus 2
ucgauacucccacucauc

SEQ ID NO: 214437 - RNA, 18 nt, Human T-lymphotropic virus 2
uccaaaccccccuacaca

SEQ ID NO: 214438 - RNA, 23 nt, Human T-lymphotropic virus 2
uccaaaccccccuacacauauuc

SEQ ID NO: 214439 - RNA, 22 nt, Human T-lymphotropic virus 2
uccagaaaaaaauagaccucac

SEQ ID NO: 214440 - RNA, 14 nt, Human T-lymphotropic virus 2
ucuuagacacccac

SEQ ID NO: 214441 - RNA, 14 nt, Human T-lymphotropic virus 2
ucucgauacuccca

SEQ ID NO: 214442 - RNA, 19 nt, Human T-lymphotropic virus 2
ucuauaccucccagacgac

SEQ ID NO: 214443 - RNA, 17 nt, Human T-lymphotropic virus 2
ugcagcaaauccccuag

SEQ ID NO: 214444 - RNA, 17 nt, Human T-lymphotropic virus 2
uugccuagucaaaauaa

SEQ ID NO: 214445 - RNA, 19 nt, Human T-lymphotropic virus 2
uucaaugacggcucaccaa

SEQ ID NO: 214446 - RNA, 21 nt, Human T-lymphotropic virus 2
uuauaccccagacacucgugc

SEQ ID NO: 214447 - RNA, 15 nt, Human T-lymphotropic virus 2
aggaguccuauacac

SEQ ID NO: 214448 - RNA, 16 nt, Human T-lymphotropic virus 2
aggaacagcucuccag

SEQ ID NO: 214449 - RNA, 13 nt, Human T-lymphotropic virus 2
agucaucgaccca

SEQ ID NO: 214450 - RNA, 16 nt, Human T-lymphotropic virus 2
aguccuauacacucca

SEQ ID NO: 214451 - RNA, 18 nt, Human T-lymphotropic virus 2
auaccuauaccagcuuuc

SEQ ID NO: 214452 - RNA, 19 nt, Human T-lymphotropic virus 2
acccccgcucacauuccuc

SEQ ID NO: 214453 - RNA, 22 nt, Human T-lymphotropic virus 2
accuacccaccacaauguucca

SEQ ID NO: 214454 - RNA, 20 nt, Human T-lymphotropic virus 2
accuuacgguuauaccccag

SEQ ID NO: 214455 - RNA, 18 nt, Human T-lymphotropic virus 2
accugcuagcuucugcag

SEQ ID NO: 214456 - RNA, 22 nt, Human T-lymphotropic virus 2
accugcuagcuucugcagcaaa

SEQ ID NO: 214457 - RNA, 23 nt, Human T-lymphotropic virus 2
acugcugaugccuuucuucccuc

SEQ ID NO: 214458 - RNA, 23 nt, Human T-lymphotropic virus 2
acacauauucuugcccuuccgaa

SEQ ID NO: 214459 - RNA, 16 nt, Human T-lymphotropic virus 2
acacccacaacaaaug

SEQ ID NO: 214460 - RNA, 13 nt, Human T-lymphotropic virus 2
acaaaauguuccu

SEQ ID NO: 214461 - RNA, 22 nt, Human T-lymphotropic virus 2
aaugacggcucaccaaugauuu

SEQ ID NO: 214462 - RNA, 20 nt, Human T-lymphotropic virus 2
ccauaaaauuugccuaguca

SEQ ID NO: 214463 - RNA, 21 nt, Human T-lymphotropic virus 2
ccauaaaauuugccuagucaa

SEQ ID NO: 214464 - RNA, 13 nt, Human T-lymphotropic virus 2
ccacaauguucca

SEQ ID NO: 214465 - RNA, 14 nt, Human T-lymphotropic virus 2
cccccuacacauau

SEQ ID NO: 214466 - RNA, 23 nt, Human T-lymphotropic virus 2
ccccagacaauuaggagccuucc

SEQ ID NO: 214467 - RNA, 21 nt, Human T-lymphotropic virus 2
cccagacaauuaggagccuuc

SEQ ID NO: 214468 - RNA, 22 nt, Human T-lymphotropic virus 2
cccaaagcagggcagccaucuu

SEQ ID NO: 214469 - RNA, 18 nt, Human T-lymphotropic virus 2
ccauugacccauccacag

SEQ ID NO: 214470 - RNA, 20 nt, Human T-lymphotropic virus 2
ccauugacccauccacaguc

SEQ ID NO: 214471 - RNA, 22 nt, Human T-lymphotropic virus 2
ccauugacccauccacaguccu

SEQ ID NO: 214472 - RNA, 16 nt, Human T-lymphotropic virus 2
ccgugggaccgucucc

SEQ ID NO: 214473 - RNA, 13 nt, Human T-lymphotropic virus 2
cagggacagucau

SEQ ID NO: 214474 - RNA, 17 nt, Human T-lymphotropic virus 2
caggaacagcucuccag

SEQ ID NO: 214475 - RNA, 21 nt, Human T-lymphotropic virus 2
cagcuuuccccacccaugaca

SEQ ID NO: 214476 - RNA, 18 nt, Human T-lymphotropic virus 2
caucccgaucaagacauc

SEQ ID NO: 214477 - RNA, 15 nt, Human T-lymphotropic virus 2
caguucaaacuccuc

SEQ ID NO: 214478 - RNA, 17 nt, Human T-lymphotropic virus 2
caguucaaacuccucca

SEQ ID NO: 214479 - RNA, 16 nt, Human T-lymphotropic virus 2
auugacccauccacag

SEQ ID NO: 214480 - RNA, 13 nt, Human T-lymphotropic virus 2
auguuccuacaca

SEQ ID NO: 214481 - RNA, 23 nt, Human T-lymphotropic virus 2
augauuuccggcccuuaccccaa

SEQ ID NO: 214482 - RNA, 22 nt, Human T-lymphotropic virus 2
auugccucaaauaguuccucua

SEQ ID NO: 214483 - RNA, 21 nt, Human T-lymphotropic virus 2
caagacaucucgauacuccca

SEQ ID NO: 214484 - RNA, 17 nt, Human T-lymphotropic virus 2
ggucagaccgucucaca

SEQ ID NO: 214485 - RNA, 18 nt, Human T-lymphotropic virus 2
gggauccauccucuccaa

SEQ ID NO: 214486 - RNA, 15 nt, Human T-lymphotropic virus 2
ggaacagcucuccag

SEQ ID NO: 214487 - RNA, 19 nt, Human T-lymphotropic virus 2
gcuuuccccacccaugaca

SEQ ID NO: 214488 - RNA, 14 nt, Human T-lymphotropic virus 2
gccuuccucaccaa

SEQ ID NO: 214489 - RNA, 19 nt, Human T-lymphotropic virus 2
gccucaaauaguuccucua

SEQ ID NO: 214490 - RNA, 21 nt, Human T-lymphotropic virus 2
gcgccagugggcaaaccaaca

SEQ ID NO: 214491 - RNA, 22 nt, Human T-lymphotropic virus 2
gcgccagugggcaaaccaacac

SEQ ID NO: 214492 - RNA, 14 nt, Human T-lymphotropic virus 2
uauaccccagacac

SEQ ID NO: 214493 - RNA, 15 nt, Human T-lymphotropic virus 2
uauaccccaugucau

SEQ ID NO: 214494 - RNA, 16 nt, Human T-lymphotropic virus 2
uaggagccuuccucac

SEQ ID NO: 214495 - RNA, 13 nt, Human T-lymphotropic virus 2
guuauaccccaga

SEQ ID NO: 214496 - RNA, 13 nt, Human T-lymphotropic virus 2
uaacaaccccagg

SEQ ID NO: 214497 - RNA, 20 nt, Human T-lymphotropic virus 2
cuccguuaugggacaaacac

SEQ ID NO: 214498 - RNA, 23 nt, Human T-lymphotropic virus 2
cuccguuaugggacaaacaccuc

SEQ ID NO: 214499 - RNA, 15 nt, Human T-lymphotropic virus 2
cuagcuucugcagca

SEQ ID NO: 214500 - RNA, 23 nt, Human T-lymphotropic virus 2
cucuaaaacgauuagaagaacuu

SEQ ID NO: 214501 - RNA, 17 nt, Human T-lymphotropic virus 2
cgcucacauuccuccca

SEQ ID NO: 214502 - RNA, 15 nt, Human T-lymphotropic virus 2
ccuaccauugaccca

SEQ ID NO: 214503 - RNA, 16 nt, Human T-lymphotropic virus 2
ccuaacucgauucuga

SEQ ID NO: 214504 - RNA, 13 nt, Human T-lymphotropic virus 2
cgccaacagucuc

SEQ ID NO: 214505 - RNA, 14 nt, Human T-lymphotropic virus 2
gagucaucgaccca

SEQ ID NO: 214506 - RNA, 16 nt, Human T-lymphotropic virus 2
gacacccacaacaaau

SEQ ID NO: 214507 - RNA, 15 nt, Human T-lymphotropic virus 2
cuuuuuuuaggaacu

SEQ ID NO: 214508 - RNA, 18 nt, Human T-lymphotropic virus 2
cuuuccccacccaugaca

SEQ ID NO: 214509 - RNA, 11 nt, Human T-lymphotropic virus 2
gaaaccaaagc

SEQ ID NO: 214510 - RNA, 20 nt, Human T-lymphotropic virus 2
aaacccaggaguccuauaca

SEQ ID NO: 214511 - RNA, 16 nt, Human T-lymphotropic virus 2
gaacugcuccucccaa

SEQ ID NO: 214512 - RNA, 23 nt, Human T-lymphotropic virus 2
gacauggccacuuauaccccaug

SEQ ID NO: 214513 - RNA, 16 nt, Human T-lymphotropic virus 2
gacaucucgauacucc

SEQ ID NO: 214514 - RNA, 12 nt, Human T-lymphotropic virus 2
gacgaccccagc

SEQ ID NO: 214515 - RNA, 23 nt, Human T-lymphotropic virus 2
gaccuucaaugacggcucaccaa

SEQ ID NO: 214516 - RNA, 16 nt, Human T-lymphotropic virus 2
gacgcccuacaacaau

SEQ ID NO: 214517 - RNA, 17 nt, Human T-lymphotropic virus 2
aaauucgaaaccaaagc

SEQ ID NO: 214518 - RNA, 13 nt, Human T-lymphotropic virus 2
gacggcucaccaa

SEQ ID NO: 214519 - RNA, 18 nt, Human T-lymphotropic virus 2
gcucuccagaaaaaaaua

SEQ ID NO: 214520 - RNA, 14 nt, Human T-lymphotropic virus 2
ggaacagcucucca

SEQ ID NO: 214521 - RNA, 20 nt, Human T-lymphotropic virus 2
ggaaauccacauaacccuga

SEQ ID NO: 214522 - RNA, 17 nt, Human T-lymphotropic virus 2
ggccacuuauaccccau

SEQ ID NO: 214523 - RNA, 11 nt, Human T-lymphotropic virus 2
ggaccgucucc

SEQ ID NO: 214524 - RNA, 19 nt, Human T-lymphotropic virus 2
ggcucccuguauccagacu

SEQ ID NO: 214525 - RNA, 16 nt, Human T-lymphotropic virus 2
gccacuuauaccccau

SEQ ID NO: 214526 - RNA, 15 nt, Human T-lymphotropic virus 2
gcccuacaacaaugc

SEQ ID NO: 214527 - RNA, 13 nt, Human T-lymphotropic virus 2
gcccuuaccccaa

SEQ ID NO: 214528 - RNA, 18 nt, Human T-lymphotropic virus 2
gccucggcaccuccugaa

SEQ ID NO: 214529 - RNA, 13 nt, Human T-lymphotropic virus 2
gcagggcagccau

SEQ ID NO: 214530 - RNA, 20 nt, Human T-lymphotropic virus 2
cuccaucuuaacaaccccag

SEQ ID NO: 214531 - RNA, 21 nt, Human T-lymphotropic virus 2
cugcuccuccgccaacagucu

SEQ ID NO: 214532 - RNA, 16 nt, Human T-lymphotropic virus 2
cgcugcuccuccgcca

SEQ ID NO: 214533 - RNA, 15 nt, Human T-lymphotropic virus 2
cgugggaccgucucc

SEQ ID NO: 214534 - RNA, 15 nt, Human T-lymphotropic virus 2
ccuccgccaacaguc

SEQ ID NO: 214535 - RNA, 21 nt, Human T-lymphotropic virus 2
ccuacacacagggacagucau

SEQ ID NO: 214536 - RNA, 22 nt, Human T-lymphotropic virus 2
cccuucaggaaauccacauaac

SEQ ID NO: 214537 - RNA, 22 nt, Human T-lymphotropic virus 2
ccccaucccgaucaagacaucu

SEQ ID NO: 214538 - RNA, 21 nt, Human T-lymphotropic virus 2
ccccaaagcagggcagccauc

SEQ ID NO: 214539 - RNA, 12 nt, Human T-lymphotropic virus 2
cagaccgucuca

SEQ ID NO: 214540 - RNA, 16 nt, Human T-lymphotropic virus 2
caucucgauacuccca

SEQ ID NO: 214541 - RNA, 21 nt, Human T-lymphotropic virus 2
caucucgauacucccacucau

SEQ ID NO: 214542 - RNA, 16 nt, Human T-lymphotropic virus 2
uacgguuauaccccag

SEQ ID NO: 214543 - RNA, 20 nt, Human T-lymphotropic virus 2
uacgguuauaccccagacac

SEQ ID NO: 214544 - RNA, 20 nt, Human T-lymphotropic virus 2
uaccucccagacgaccccag

SEQ ID NO: 214545 - RNA, 21 nt, Human T-lymphotropic virus 2
uaccucccagacgaccccagc

SEQ ID NO: 214546 - RNA, 19 nt, Human T-lymphotropic virus 2
uaaaagcgcaaggacaguu

SEQ ID NO: 214547 - RNA, 21 nt, Human T-lymphotropic virus 2
gucauauucugccaccccaga

SEQ ID NO: 214548 - RNA, 14 nt, Human T-lymphotropic virus 2
guuccuacacacag

SEQ ID NO: 214549 - RNA, 21 nt, Human T-lymphotropic virus 2
uccugccucuuagacacccac

SEQ ID NO: 214550 - RNA, 16 nt, Human T-lymphotropic virus 2
ucccuguauccagacu

SEQ ID NO: 214551 - RNA, 23 nt, Human T-lymphotropic virus 2
ucaccaaugauuuccggcccuua

SEQ ID NO: 214552 - RNA, 15 nt, Human T-lymphotropic virus 2
uaugggacaaacacc

SEQ ID NO: 214553 - RNA, 19 nt, Human T-lymphotropic virus 2
uaugggacaaacaccucag

SEQ ID NO: 214554 - RNA, 19 nt, Human T-lymphotropic virus 2
uaucacuccaucuuaacaa

SEQ ID NO: 214555 - RNA, 11 nt, Human T-lymphotropic virus 2
aacaccucagc

SEQ ID NO: 214556 - RNA, 20 nt, Human T-lymphotropic virus 2
aacaccucagccuacccaag

SEQ ID NO: 214557 - RNA, 15 nt, Human T-lymphotropic virus 2
uucaggaaauccaca

SEQ ID NO: 214558 - RNA, 16 nt, Human T-lymphotropic virus 2
uucaggaaauccacau

SEQ ID NO: 214559 - RNA, 15 nt, Human T-lymphotropic virus 2
aagucuccucucagg

SEQ ID NO: 214560 - RNA, 17 nt, Human T-lymphotropic virus 2
aaggucagaccgucuca

SEQ ID NO: 214561 - RNA, 18 nt, Human T-lymphotropic virus 2
aagguaagucuccucuca

SEQ ID NO: 214562 - RNA, 23 nt, Human T-lymphotropic virus 2
aaucccaaguaaaggcucugacg

SEQ ID NO: 214563 - RNA, 21 nt, Human T-lymphotropic virus 2
aagacaucucgauacucccac

SEQ ID NO: 214564 - RNA, 20 nt, Human T-lymphotropic virus 2
aacuucuauacaaaauguuc

SEQ ID NO: 214565 - RNA, 22 nt, Human T-lymphotropic virus 2
ugauuuccggcccuuaccccaa

SEQ ID NO: 214566 - RNA, 18 nt, Human T-lymphotropic virus 2
ugaaaaacaaggcucuga

SEQ ID NO: 214567 - RNA, 15 nt, Human T-lymphotropic virus 2
uuauaccccagacac

SEQ ID NO: 214568 - RNA, 15 nt, Human T-lymphotropic virus 2
aucuuaacaacccca

SEQ ID NO: 214569 - RNA, 19 nt, Human T-lymphotropic virus 2
auggccacuuauaccccau

SEQ ID NO: 214570 - RNA, 14 nt, Human T-lymphotropic virus 2
auguuccuacacac

SEQ ID NO: 214571 - RNA, 12 nt, Human T-lymphotropic virus 2
caaaacccauca

SEQ ID NO: 214572 - RNA, 21 nt, Human T-lymphotropic virus 2
auugccucaaauaguuccucu

SEQ ID NO: 214573 - RNA, 24 nt, Human T-lymphotropic virus 2
auuggaagggacgcccuacaacaa

SEQ ID NO: 214574 - RNA, 13 nt, Human T-lymphotropic virus 2
caaucccaaguaa

SEQ ID NO: 214575 - RNA, 13 nt, Human T-lymphotropic virus 2
caaaauguuccua

SEQ ID NO: 214576 - RNA, 17 nt, Human T-lymphotropic virus 2
cacagggacagucauag

SEQ ID NO: 214577 - RNA, 13 nt, Human T-lymphotropic virus 2
cacccacaacaaa

SEQ ID NO: 214578 - RNA, 20 nt, Human T-lymphotropic virus 2
caaugacggcucaccaauga

SEQ ID NO: 214579 - RNA, 17 nt, Human T-lymphotropic virus 2
auaccagcuuuccccac

SEQ ID NO: 214580 - RNA, 19 nt, Human T-lymphotropic virus 2
auccuaggcgccagugggc

SEQ ID NO: 214581 - RNA, 15 nt, Human T-lymphotropic virus 2
auccacaguccucua

SEQ ID NO: 214582 - RNA, 22 nt, Human T-lymphotropic virus 2
aucucccgcugcuccuccgcca

SEQ ID NO: 214583 - RNA, 18 nt, Human T-lymphotropic virus 2
aggagccuuccucaccaa

SEQ ID NO: 214584 - RNA, 23 nt, Human T-lymphotropic virus 2
agccuacccaagcgcuacuugac

SEQ ID NO: 214585 - RNA, 14 nt, Human T-lymphotropic virus 2
aacagcaaccaauu

SEQ ID NO: 214586 - RNA, 18 nt, Human T-lymphotropic virus 2
aaagaugccgagucuaua

SEQ ID NO: 214587 - RNA, 16 nt, Human T-lymphotropic virus 2
aagucuccucucaggu

SEQ ID NO: 214588 - RNA, 23 nt, Human T-lymphotropic virus 2
aaugauuuccggcccuuacccca

SEQ ID NO: 214589 - RNA, 19 nt, Human T-lymphotropic virus 2
aaugacggcucaccaauga

SEQ ID NO: 214590 - RNA, 15 nt, Human T-lymphotropic virus 2
accuacccaccacaa

SEQ ID NO: 214591 - RNA, 19 nt, Human T-lymphotropic virus 2
accuuacgguuauacccca

SEQ ID NO: 214592 - RNA, 14 nt, Human T-lymphotropic virus 2
accccagacacucg

SEQ ID NO: 214593 - RNA, 21 nt, Human T-lymphotropic virus 2
accccaaagcagggcagccau

SEQ ID NO: 214594 - RNA, 23 nt, Human T-lymphotropic virus 2
acccaggaguccuauacacucca

SEQ ID NO: 214595 - RNA, 14 nt, Human T-lymphotropic virus 2
accacaauguucca

SEQ ID NO: 214596 - RNA, 22 nt, Human T-lymphotropic virus 2
acacccaguucaaacuccucca

SEQ ID NO: 214597 - RNA, 23 nt, Human T-lymphotropic virus 2
acucgauucugaauaauugccuc

SEQ ID NO: 214598 - RNA, 17 nt, Human T-lymphotropic virus 2
acuuauaccccauguca

SEQ ID NO: 214599 - RNA, 23 nt, Human T-lymphotropic virus 2
agacaucucgauacucccacuca

SEQ ID NO: 214600 - RNA, 12 nt, Homo sapiens
ucaaauguucuc

SEQ ID NO: 214601 - RNA, 17 nt, Homo sapiens
caggaaauccuugcacc

SEQ ID NO: 214602 - RNA, 19 nt, Homo sapiens
aauuuacuuuaaacuacau

SEQ ID NO: 214603 - RNA, 14 nt, Homo sapiens
acugacacaugcug

SEQ ID NO: 214604 - RNA, 16 nt, Homo sapiens
uucaauaacuggaaca

SEQ ID NO: 214605 - RNA, 23 nt, Homo sapiens
acccaguguuuuaggagcaugag

SEQ ID NO: 214606 - RNA, 15 nt, Homo sapiens
ggguuaggaagaaaa

SEQ ID NO: 214607 - RNA, 15 nt, Homo sapiens
auccaauugcugcuu

SEQ ID NO: 214608 - RNA, 17 nt, Homo sapiens
gaugaagcacacaggaa

SEQ ID NO: 214609 - RNA, 18 nt, Homo sapiens
cuggaguuauugaagcag

SEQ ID NO: 214610 - RNA, 16 nt, Homo sapiens
ucaguauuucaacuga

SEQ ID NO: 214611 - RNA, 15 nt, Homo sapiens
acaucacagcuuauu

SEQ ID NO: 214612 - RNA, 23 nt, Homo sapiens
cauuuguuuugccaauuugcaca

SEQ ID NO: 214613 - RNA, 20 nt, Homo sapiens
ugugaaggcaggggaaugua

SEQ ID NO: 214614 - RNA, 16 nt, Homo sapiens
caucuguuacacaaag

SEQ ID NO: 214615 - RNA, 22 nt, Homo sapiens
ugucauuucaaacagucucccu

SEQ ID NO: 214616 - RNA, 17 nt, Homo sapiens
aaaaauaaagcacuuau

SEQ ID NO: 214617 - RNA, 14 nt, Homo sapiens
guucccugugucau

SEQ ID NO: 214618 - RNA, 16 nt, Homo sapiens
aagauucuauguuaau

SEQ ID NO: 214619 - RNA, 20 nt, Homo sapiens
gcaacaugccagccacugug

SEQ ID NO: 214620 - RNA, 21 nt, Homo sapiens
ugcucaguagucagacuggau

SEQ ID NO: 214621 - RNA, 17 nt, Homo sapiens
uauaaccuuguuccaaa

SEQ ID NO: 214622 - RNA, 18 nt, Homo sapiens
uaggagcaugagugccgu

SEQ ID NO: 214623 - RNA, 19 nt, Homo sapiens
cagauugaauuugccuaau

SEQ ID NO: 214624 - RNA, 16 nt, Homo sapiens
ucaacugaaguucuau

SEQ ID NO: 214625 - RNA, 14 nt, Homo sapiens
aggauuauugucaa

SEQ ID NO: 214626 - RNA, 22 nt, Homo sapiens
gcugcaguuuuuuuccuucaag

SEQ ID NO: 214627 - RNA, 17 nt, Homo sapiens
ucucuguauuccuagaa

SEQ ID NO: 214628 - RNA, 15 nt, Homo sapiens
uuagaugaaugucag

SEQ ID NO: 214629 - RNA, 18 nt, Homo sapiens
ugcugauuuaaacacauu

SEQ ID NO: 214630 - RNA, 15 nt, Homo sapiens
gagaagauucuugua

SEQ ID NO: 214631 - RNA, 16 nt, Homo sapiens
uuauugauguuuucau

SEQ ID NO: 214632 - RNA, 22 nt, Homo sapiens
ugaccuugcugauggugacauu

SEQ ID NO: 214633 - RNA, 22 nt, Homo sapiens
aagauacagugucugacuauaa

SEQ ID NO: 214634 - RNA, 23 nt, Homo sapiens
uucccaauagcaaggcugugcau

SEQ ID NO: 214635 - RNA, 14 nt, Homo sapiens
uccaauugcugcuu

SEQ ID NO: 214636 - RNA, 16 nt, Homo sapiens
acaaagcagauccuca

SEQ ID NO: 214637 - RNA, 13 nt, Homo sapiens
uggugauuuagca

SEQ ID NO: 214638 - RNA, 16 nt, Homo sapiens
uuauccuagucauucu

SEQ ID NO: 214639 - RNA, 22 nt, Homo sapiens
aacagcaacacaaagcuuuugc

SEQ ID NO: 214640 - RNA, 14 nt, Homo sapiens
uucagcccucagaa

SEQ ID NO: 214641 - RNA, 15 nt, Homo sapiens
auagaugacauugac

SEQ ID NO: 214642 - RNA, 13 nt, Homo sapiens
gaugacuauucag

SEQ ID NO: 214643 - RNA, 19 nt, Homo sapiens
uaaaugacucuucccucaa

SEQ ID NO: 214644 - RNA, 13 nt, Homo sapiens
gaauuugccuaau

SEQ ID NO: 214645 - RNA, 14 nt, Homo sapiens
cccuucucuguauu

SEQ ID NO: 214646 - RNA, 15 nt, Homo sapiens
auucucagcagagug

SEQ ID NO: 214647 - RNA, 21 nt, Homo sapiens
uauucucagcagagugcuuua

SEQ ID NO: 214648 - RNA, 14 nt, Homo sapiens
acuuccaugacaua

SEQ ID NO: 214649 - RNA, 14 nt, Homo sapiens
uauagauguugcua

SEQ ID NO: 214650 - RNA, 13 nt, Homo sapiens
uacagagaagauu

SEQ ID NO: 214651 - RNA, 12 nt, Homo sapiens
gucaacauuucu

SEQ ID NO: 214652 - RNA, 20 nt, Homo sapiens
ucugacuauaaccuuguucc

SEQ ID NO: 214653 - RNA, 17 nt, Homo sapiens
cugauggugacauugca

SEQ ID NO: 214654 - RNA, 15 nt, Homo sapiens
uaaagauacaguguc

SEQ ID NO: 214655 - RNA, 17 nt, Homo sapiens
uuuaagcagcgccagug

SEQ ID NO: 214656 - RNA, 15 nt, Homo sapiens
agggauuuucagccc

SEQ ID NO: 214657 - RNA, 21 nt, Homo sapiens
cuuuaagcagcgccagugaca

SEQ ID NO: 214658 - RNA, 17 nt, Homo sapiens
ugggauaucacuuccau

SEQ ID NO: 214659 - RNA, 21 nt, Homo sapiens
cuuuauuucucucaucuguua

SEQ ID NO: 214660 - RNA, 15 nt, Homo sapiens
cuauccaaucuguga

SEQ ID NO: 214661 - RNA, 17 nt, Homo sapiens
caaugagaucauuguga

SEQ ID NO: 214662 - RNA, 13 nt, Homo sapiens
uccuagucauucu

SEQ ID NO: 214663 - RNA, 12 nt, Homo sapiens
ucauuucuagca

SEQ ID NO: 214664 - RNA, 13 nt, Homo sapiens
aaacuacauugac

SEQ ID NO: 214665 - RNA, 13 nt, Homo sapiens
auuucacagugug

SEQ ID NO: 214666 - RNA, 17 nt, Homo sapiens
aauauccaauugcugcu

SEQ ID NO: 214667 - RNA, 15 nt, Homo sapiens
cccuuggacauuuua

SEQ ID NO: 214668 - RNA, 21 nt, Homo sapiens
ugguaguuuuacaguguuucu

SEQ ID NO: 214669 - RNA, 21 nt, Homo sapiens
aucuguauguguucuauucag

SEQ ID NO: 214670 - RNA, 16 nt, Homo sapiens
auugaaggaugcuguc

SEQ ID NO: 214671 - RNA, 21 nt, Homo sapiens
cugaccuugcugauggugaca

SEQ ID NO: 214672 - RNA, 20 nt, Homo sapiens
uggaugcugugaagagucua

SEQ ID NO: 214673 - RNA, 20 nt, Homo sapiens
agcagaguggcagucuucag

SEQ ID NO: 214674 - RNA, 13 nt, Homo sapiens
acuaucacugguu

SEQ ID NO: 214675 - RNA, 21 nt, Homo sapiens
cugcacacuguccuauuauau

SEQ ID NO: 214676 - RNA, 22 nt, Homo sapiens
cauguccuaaugcuugcugcug

SEQ ID NO: 214677 - RNA, 21 nt, Homo sapiens
guucaaucuggauucauauuu

SEQ ID NO: 214678 - RNA, 16 nt, Homo sapiens
aguuugguuucuagca

SEQ ID NO: 214679 - RNA, 16 nt, Homo sapiens
uugauugggcacauca

SEQ ID NO: 214680 - RNA, 23 nt, Homo sapiens
uuggccaugggucccauucuugg

SEQ ID NO: 214681 - RNA, 11 nt, Homo sapiens
auucuuggccc

SEQ ID NO: 214682 - RNA, 16 nt, Homo sapiens
cugcagggacagagca

SEQ ID NO: 214683 - RNA, 21 nt, Homo sapiens
uugagaaauuuuuuuuuccag

SEQ ID NO: 214684 - RNA, 13 nt, Homo sapiens
uugcugaugguga

SEQ ID NO: 214685 - RNA, 14 nt, Homo sapiens
agcagcgccaguga

SEQ ID NO: 214686 - RNA, 18 nt, Homo sapiens
acaugccagccacuguga

SEQ ID NO: 214687 - RNA, 13 nt, Homo sapiens
uguccuaaugcuu

SEQ ID NO: 214688 - RNA, 16 nt, Homo sapiens
augcugaacaucacag

SEQ ID NO: 214689 - RNA, 22 nt, Homo sapiens
agauccucaauaaacauuucau

SEQ ID NO: 214690 - RNA, 18 nt, Homo sapiens
guucacuggacacuucac

SEQ ID NO: 214691 - RNA, 20 nt, Homo sapiens
gaauguuuucaaauguucuc

SEQ ID NO: 214692 - RNA, 23 nt, Homo sapiens
aaauauuuugacuuguugagggu

SEQ ID NO: 214693 - RNA, 16 nt, Homo sapiens
acuuccaugacauaag

SEQ ID NO: 214694 - RNA, 20 nt, Homo sapiens
gggauuuucagcccucagaa

SEQ ID NO: 214695 - RNA, 16 nt, Homo sapiens
uuagguugugaaugca

SEQ ID NO: 214696 - RNA, 16 nt, Homo sapiens
gucuccucucucugua

SEQ ID NO: 214697 - RNA, 15 nt, Homo sapiens
cugugaugacauucc

SEQ ID NO: 214698 - RNA, 13 nt, Homo sapiens
aauuccuaacuau

SEQ ID NO: 214699 - RNA, 17 nt, Homo sapiens
cgugcacgcacacuguc

SEQ ID NO: 214700 - RNA, 10 nt, Homo sapiens
uacuuuuugg

SEQ ID NO: 214701 - RNA, 17 nt, Homo sapiens
cuaacagcaacacaaag

SEQ ID NO: 214702 - RNA, 14 nt, Homo sapiens
ugcacgcacacugu

SEQ ID NO: 214703 - RNA, 16 nt, Homo sapiens
acccucagaugcacau

SEQ ID NO: 214704 - RNA, 15 nt, Homo sapiens
acaaagcuuuugcau

SEQ ID NO: 214705 - RNA, 18 nt, Homo sapiens
ucccugugucauuucaaa

SEQ ID NO: 214706 - RNA, 16 nt, Homo sapiens
uauugcauacuauuaa

SEQ ID NO: 214707 - RNA, 11 nt, Homo sapiens
uuuacaguguu

SEQ ID NO: 214708 - RNA, 21 nt, Homo sapiens
cuuaauuauugauguuuucau

SEQ ID NO: 214709 - RNA, 11 nt, Homo sapiens
ugguacucugc

SEQ ID NO: 214710 - RNA, 15 nt, Homo sapiens
aacuaaaauguucua

SEQ ID NO: 214711 - RNA, 22 nt, Homo sapiens
cuuaauaaacuguggugcuuuu

SEQ ID NO: 214712 - RNA, 22 nt, Homo sapiens
augggugcuuaguaaguacuua

SEQ ID NO: 214713 - RNA, 17 nt, Homo sapiens
ccaauagcaaggcugug

SEQ ID NO: 214714 - RNA, 20 nt, Homo sapiens
gugagacuguaaguuacaug

SEQ ID NO: 214715 - RNA, 16 nt, Homo sapiens
uuauauagcaguaaaa

SEQ ID NO: 214716 - RNA, 13 nt, Homo sapiens
ccaauugaaguaa

SEQ ID NO: 214717 - RNA, 21 nt, Homo sapiens
guggggguaaggugcaucugu

SEQ ID NO: 214718 - RNA, 17 nt, Homo sapiens
uccuaaugcuugcugcu

SEQ ID NO: 214719 - RNA, 20 nt, Homo sapiens
cccuuggccaugggucccau

SEQ ID NO: 214720 - RNA, 17 nt, Homo sapiens
gcacacaggaaccuaau

SEQ ID NO: 214721 - RNA, 16 nt, Homo sapiens
ugggucccauucuugg

SEQ ID NO: 214722 - RNA, 12 nt, Homo sapiens
gcaaagaugaag

SEQ ID NO: 214723 - RNA, 15 nt, Homo sapiens
aacaguaacauagcu

SEQ ID NO: 214724 - RNA, 19 nt, Homo sapiens
augccagccacugugauag

SEQ ID NO: 214725 - RNA, 20 nt, Homo sapiens
uugacagauugaauuugccu

SEQ ID NO: 214726 - RNA, 21 nt, Homo sapiens
aauuuguggaaaauaacucac

SEQ ID NO: 214727 - RNA, 17 nt, Homo sapiens
cuucccuaaucuuccac

SEQ ID NO: 214728 - RNA, 19 nt, Homo sapiens
guccuaaugcuugcugcug

SEQ ID NO: 214729 - RNA, 16 nt, Homo sapiens
uugagugucaagcuga

SEQ ID NO: 214730 - RNA, 16 nt, Homo sapiens
uucaacugaaguucua

SEQ ID NO: 214731 - RNA, 20 nt, Homo sapiens
uguccuaaugcuugcugcug

SEQ ID NO: 214732 - RNA, 16 nt, Homo sapiens
aaauggccaaugagau

SEQ ID NO: 214733 - RNA, 16 nt, Homo sapiens
gcagcgccagugacag

SEQ ID NO: 214734 - RNA, 14 nt, Homo sapiens
augaaugcccagug

SEQ ID NO: 214735 - RNA, 19 nt, Homo sapiens
agugcaaacuucagaguuc

SEQ ID NO: 214736 - RNA, 17 nt, Homo sapiens
ugaggugacuauucuga

SEQ ID NO: 214737 - RNA, 14 nt, Homo sapiens
gagucuacagagaa

SEQ ID NO: 214738 - RNA, 18 nt, Homo sapiens
acaugcugaacaucacag

SEQ ID NO: 214739 - RNA, 17 nt, Homo sapiens
ccagucauuauguuaau

SEQ ID NO: 214740 - RNA, 14 nt, Homo sapiens
gaaggaugcugucu

SEQ ID NO: 214741 - RNA, 20 nt, Homo sapiens
aggguauguuuuauauagca

SEQ ID NO: 214742 - RNA, 16 nt, Homo sapiens
ccaaauguucacuggu

SEQ ID NO: 214743 - RNA, 23 nt, Homo sapiens
gaaaaaauuuacuuuaaacuaca

SEQ ID NO: 214744 - RNA, 18 nt, Homo sapiens
ccuuccuaugcuguucac

SEQ ID NO: 214745 - RNA, 21 nt, Homo sapiens
gcaacaugccagccacuguga

SEQ ID NO: 214746 - RNA, 14 nt, Homo sapiens
ugcaccuggaugua

SEQ ID NO: 214747 - RNA, 18 nt, Homo sapiens
uccccucuccuccacauu

SEQ ID NO: 214748 - RNA, 15 nt, Homo sapiens
uucagcccucagaau

SEQ ID NO: 214749 - RNA, 21 nt, Homo sapiens
aauguucuccagucauuaugu

SEQ ID NO: 214750 - RNA, 18 nt, Homo sapiens
uuaccaauugaaguaaaa

SEQ ID NO: 214751 - RNA, 16 nt, Homo sapiens
cauuucucauguugaa

SEQ ID NO: 214752 - RNA, 24 nt, Homo sapiens
gacacaugcugaacaucacagcuu

SEQ ID NO: 214753 - RNA, 20 nt, Homo sapiens
uuuuauccuagucauucuuc

SEQ ID NO: 214754 - RNA, 14 nt, Homo sapiens
uggccugucuuugg

SEQ ID NO: 214755 - RNA, 16 nt, Homo sapiens
aacucauuucuagcag

SEQ ID NO: 214756 - RNA, 20 nt, Homo sapiens
guaacucuguaauuccuaac

SEQ ID NO: 214757 - RNA, 22 nt, Homo sapiens
uucuuuaagcagcgccagugac

SEQ ID NO: 214758 - RNA, 19 nt, Homo sapiens
acagagccccacccucaga

SEQ ID NO: 214759 - RNA, 14 nt, Homo sapiens
uggugacauugcac

SEQ ID NO: 214760 - RNA, 22 nt, Homo sapiens
cuugcugauggugacauugcac

SEQ ID NO: 214761 - RNA, 23 nt, Homo sapiens
aaacugaacuucagagcaugaaa

SEQ ID NO: 214762 - RNA, 19 nt, Homo sapiens
cuuauccguuagccguggu

SEQ ID NO: 214763 - RNA, 17 nt, Homo sapiens
auauccaauugcugcuu

SEQ ID NO: 214764 - RNA, 13 nt, Homo sapiens
cuauuauauucau

SEQ ID NO: 214765 - RNA, 22 nt, Homo sapiens
uucuggaugaaugcccagugag

SEQ ID NO: 214766 - RNA, 20 nt, Homo sapiens
aacaugccagccacugugau

SEQ ID NO: 214767 - RNA, 14 nt, Homo sapiens
uacauacuuuuugg

SEQ ID NO: 214768 - RNA, 17 nt, Homo sapiens
aaucugugaugacauuc

SEQ ID NO: 214769 - RNA, 14 nt, Homo sapiens
ugacacaugcugaa

SEQ ID NO: 214770 - RNA, 13 nt, Homo sapiens
cauucuuggccca

SEQ ID NO: 214771 - RNA, 19 nt, Homo sapiens
caacaugccagccacugug

SEQ ID NO: 214772 - RNA, 18 nt, Homo sapiens
cagcgccagugacaguca

SEQ ID NO: 214773 - RNA, 23 nt, Homo sapiens
aacuucagagcaugaaaaucaca

SEQ ID NO: 214774 - RNA, 19 nt, Homo sapiens
cacugguuuguucccugug

SEQ ID NO: 214775 - RNA, 17 nt, Homo sapiens
ccaauuugcacauuaaa

SEQ ID NO: 214776 - RNA, 19 nt, Homo sapiens
uaguucaaucuggauucau

SEQ ID NO: 214777 - RNA, 21 nt, Homo sapiens
guaauuaugguuaguagaggu

SEQ ID NO: 214778 - RNA, 19 nt, Homo sapiens
uucauucuuuuugaaaugu

SEQ ID NO: 214779 - RNA, 15 nt, Homo sapiens
caugagugccgugug

SEQ ID NO: 214780 - RNA, 20 nt, Homo sapiens
aaaaugguguuuuaucuucu

SEQ ID NO: 214781 - RNA, 17 nt, Homo sapiens
auaaugucccuucacaa

SEQ ID NO: 214782 - RNA, 21 nt, Homo sapiens
agcaugaaaaucacacugucu

SEQ ID NO: 214783 - RNA, 20 nt, Homo sapiens
cccugugucauuucaaacag

SEQ ID NO: 214784 - RNA, 13 nt, Homo sapiens
gaccaggaccucc

SEQ ID NO: 214785 - RNA, 22 nt, Homo sapiens
aauuaaggguaugauuaacucu

SEQ ID NO: 214786 - RNA, 11 nt, Homo sapiens
cucaugcugcc

SEQ ID NO: 214787 - RNA, 22 nt, Homo sapiens
aguaaguacuuaauaaacugug

SEQ ID NO: 214788 - RNA, 21 nt, Homo sapiens
uucaagaaugcaguacuaaca

SEQ ID NO: 214789 - RNA, 22 nt, Homo sapiens
gagcccugucuccucucucugu

SEQ ID NO: 214790 - RNA, 14 nt, Homo sapiens
cuuaauaaacugug

SEQ ID NO: 214791 - RNA, 16 nt, Homo sapiens
agagccccacccucag

SEQ ID NO: 214792 - RNA, 21 nt, Homo sapiens
aggaccucccucccccuggca

SEQ ID NO: 214793 - RNA, 21 nt, Homo sapiens
gaagcuuacaugccuaccaau

SEQ ID NO: 214794 - RNA, 23 nt, Homo sapiens
ggauuaaagugcccagcacaaag

SEQ ID NO: 214795 - RNA, 16 nt, Homo sapiens
ccucagaugcacauga

SEQ ID NO: 214796 - RNA, 13 nt, Homo sapiens
cagucucccuucc

SEQ ID NO: 214797 - RNA, 17 nt, Homo sapiens
aggagcaugagugccgu

SEQ ID NO: 214798 - RNA, 16 nt, Homo sapiens
acagcaacacaaagcu

SEQ ID NO: 214799 - RNA, 17 nt, Homo sapiens
uucccugugucauuuca

SEQ ID NO: 214800 - RNA, 16 nt, Homo sapiens
uauccuagucauucuu

SEQ ID NO: 214801 - RNA, 16 nt, Homo sapiens
ggcagacuuucuucuc

SEQ ID NO: 214802 - RNA, 16 nt, Homo sapiens
uucaaucuggauucau

SEQ ID NO: 214803 - RNA, 13 nt, Homo sapiens
ugucaguauuuca

SEQ ID NO: 214804 - RNA, 14 nt, Homo sapiens
gaaugauauaaggu

SEQ ID NO: 214805 - RNA, 18 nt, Homo sapiens
cagaauauugugccccau

SEQ ID NO: 214806 - RNA, 16 nt, Homo sapiens
aauuauugauguuuuc

SEQ ID NO: 214807 - RNA, 14 nt, Homo sapiens
agcagagugcuuua

SEQ ID NO: 214808 - RNA, 14 nt, Homo sapiens
aaucugugaugaca

SEQ ID NO: 214809 - RNA, 19 nt, Homo sapiens
agggauuuucagcccucag

SEQ ID NO: 214810 - RNA, 22 nt, Homo sapiens
uagaaaaggccuucuucccaau

SEQ ID NO: 214811 - RNA, 13 nt, Homo sapiens
caauugaaguaaa

SEQ ID NO: 214812 - RNA, 15 nt, Homo sapiens
agucucccuuccuau

SEQ ID NO: 214813 - RNA, 18 nt, Homo sapiens
ggauaguccgucucugcu

SEQ ID NO: 214814 - RNA, 19 nt, Homo sapiens
aacaugccagccacuguga

SEQ ID NO: 214815 - RNA, 20 nt, Homo sapiens
gauacagugucugacuauaa

SEQ ID NO: 214816 - RNA, 18 nt, Homo sapiens
uuaaacucugagugcaaa

SEQ ID NO: 214817 - RNA, 20 nt, Homo sapiens
ucuacagagaagauucuugu

SEQ ID NO: 214818 - RNA, 20 nt, Homo sapiens
aggcauacugccuuguuuaa

SEQ ID NO: 214819 - RNA, 17 nt, Homo sapiens
gaaaaggccuucuuccc

SEQ ID NO: 214820 - RNA, 23 nt, Homo sapiens
aaugauuucacagugugugguca

SEQ ID NO: 214821 - RNA, 16 nt, Homo sapiens
cuaugcuguucacugg

SEQ ID NO: 214822 - RNA, 14 nt, Homo sapiens
cacagaagaugaag

SEQ ID NO: 214823 - RNA, 11 nt, Homo sapiens
aaucacacugu

SEQ ID NO: 214824 - RNA, 20 nt, Homo sapiens
aagcuuacaugccuaccaau

SEQ ID NO: 214825 - RNA, 21 nt, Homo sapiens
uugugaaaaaauuuacuuuaa

SEQ ID NO: 214826 - RNA, 17 nt, Homo sapiens
guauagauguugcuaac

SEQ ID NO: 214827 - RNA, 22 nt, Homo sapiens
gggaaagggauuuucagcccuc

SEQ ID NO: 214828 - RNA, 14 nt, Homo sapiens
agugagacuguguu

SEQ ID NO: 214829 - RNA, 15 nt, Homo sapiens
gaauguaugugcaca

SEQ ID NO: 214830 - RNA, 22 nt, Homo sapiens
ugaggguauguuuuauauagca

SEQ ID NO: 214831 - RNA, 13 nt, Homo sapiens
acugggaugaggu

SEQ ID NO: 214832 - RNA, 16 nt, Homo sapiens
aauuugccuaauauga

SEQ ID NO: 214833 - RNA, 19 nt, Homo sapiens
auucuuuuugaaaugucaa

SEQ ID NO: 214834 - RNA, 15 nt, Homo sapiens
auuugugagacugua

SEQ ID NO: 214835 - RNA, 23 nt, Homo sapiens
guauuccuagaaacugacacaug

SEQ ID NO: 214836 - RNA, 21 nt, Homo sapiens
aagggauuuucagcccucaga

SEQ ID NO: 214837 - RNA, 19 nt, Homo sapiens
auaaacauuucauuuccca

SEQ ID NO: 214838 - RNA, 16 nt, Homo sapiens
caguagucagacugga

SEQ ID NO: 214839 - RNA, 15 nt, Homo sapiens
ucacagaagaugaag

SEQ ID NO: 214840 - RNA, 15 nt, Homo sapiens
aaaacuacauugaca

SEQ ID NO: 214841 - RNA, 14 nt, Homo sapiens
agcaugagugccgu

SEQ ID NO: 214842 - RNA, 21 nt, Homo sapiens
guuuuacaguguuucuggcuu

SEQ ID NO: 214843 - RNA, 20 nt, Homo sapiens
gacacaugcugaacaucaca

SEQ ID NO: 214844 - RNA, 20 nt, Homo sapiens
uuuuaaacucugagugcaaa

SEQ ID NO: 214845 - RNA, 15 nt, Homo sapiens
agggacagagcauug

SEQ ID NO: 214846 - RNA, 13 nt, Homo sapiens
gccuuggcugcag

SEQ ID NO: 214847 - RNA, 23 nt, Homo sapiens
cacaaagcuuuugcauauugcau

SEQ ID NO: 214848 - RNA, 21 nt, Homo sapiens
cagagaagauucuuguauuua

SEQ ID NO: 214849 - RNA, 23 nt, Homo sapiens
ucaguuguuauuuauugaaauga

SEQ ID NO: 214850 - RNA, 20 nt, Homo sapiens
uuaaauagaugacauugacu

SEQ ID NO: 214851 - RNA, 13 nt, Homo sapiens
gaugcugucuucg

SEQ ID NO: 214852 - RNA, 14 nt, Homo sapiens
agucuucuauuuau

SEQ ID NO: 214853 - RNA, 12 nt, Homo sapiens
cugcacacuguc

SEQ ID NO: 214854 - RNA, 18 nt, Homo sapiens
aaucgcuccaccuugcag

SEQ ID NO: 214855 - RNA, 22 nt, Homo sapiens
uaucugcagggacagagcauug

SEQ ID NO: 214856 - RNA, 14 nt, Homo sapiens
uuaaauagaugaca

SEQ ID NO: 214857 - RNA, 16 nt, Homo sapiens
agacaacauaacucaa

SEQ ID NO: 214858 - RNA, 14 nt, Homo sapiens
gcacacugucugcc

SEQ ID NO: 214859 - RNA, 21 nt, Homo sapiens
gcucaguagucagacuggaua

SEQ ID NO: 214860 - RNA, 15 nt, Homo sapiens
uccaauugcugcuug

SEQ ID NO: 214861 - RNA, 23 nt, Homo sapiens
ugcaacaugccagccacugugau

SEQ ID NO: 214862 - RNA, 17 nt, Homo sapiens
uaaacauuucauuuccc

SEQ ID NO: 214863 - RNA, 15 nt, Homo sapiens
uacuauccaaucugu

SEQ ID NO: 214864 - RNA, 14 nt, Homo sapiens
auuccuagaaacug

SEQ ID NO: 214865 - RNA, 18 nt, Homo sapiens
guauuugaaacacugguu

SEQ ID NO: 214866 - RNA, 13 nt, Homo sapiens
uccaaucugugau

SEQ ID NO: 214867 - RNA, 19 nt, Homo sapiens
uucucuauuucuggaugaa

SEQ ID NO: 214868 - RNA, 18 nt, Homo sapiens
gauguaaaacugaacuuc

SEQ ID NO: 214869 - RNA, 19 nt, Homo sapiens
cucagaaucgcuccaccuu

SEQ ID NO: 214870 - RNA, 17 nt, Homo sapiens
gccuaauaugaugacug

SEQ ID NO: 214871 - RNA, 13 nt, Homo sapiens
aaacuguggugcu

SEQ ID NO: 214872 - RNA, 18 nt, Homo sapiens
agaaugcaguacuaacau

SEQ ID NO: 214873 - RNA, 21 nt, Homo sapiens
uuuaaauagaugacauugacu

SEQ ID NO: 214874 - RNA, 13 nt, Homo sapiens
cacuggacacuuc

SEQ ID NO: 214875 - RNA, 13 nt, Homo sapiens
agaugaaugucag

SEQ ID NO: 214876 - RNA, 21 nt, Homo sapiens
uauuuaaauagaugacauuga

SEQ ID NO: 214877 - RNA, 16 nt, Homo sapiens
acaugcuguacauacu

SEQ ID NO: 214878 - RNA, 13 nt, Homo sapiens
cuguuacacaaag

SEQ ID NO: 214879 - RNA, 17 nt, Homo sapiens
gccucuggaugcuguga

SEQ ID NO: 214880 - RNA, 17 nt, Homo sapiens
cugaacuuuguggucga

SEQ ID NO: 214881 - RNA, 22 nt, Homo sapiens
agcaggaagcugugagagcagu

SEQ ID NO: 214882 - RNA, 15 nt, Homo sapiens
ccagugagacugugu

SEQ ID NO: 214883 - RNA, 18 nt, Homo sapiens
uauggggccaaaauagca

SEQ ID NO: 214884 - RNA, 23 nt, Homo sapiens
uaaaacugaacuucagagcauga

SEQ ID NO: 214885 - RNA, 18 nt, Homo sapiens
cugccaauauccuaauaa

SEQ ID NO: 214886 - RNA, 18 nt, Homo sapiens
ucuucucuauuucuggau

SEQ ID NO: 214887 - RNA, 16 nt, Homo sapiens
uuccuagaaacugaca

SEQ ID NO: 214888 - RNA, 22 nt, Homo sapiens
gaugcugucuucguacugggaa

SEQ ID NO: 214889 - RNA, 23 nt, Homo sapiens
ugcugcugauuuaaacacauuaa

SEQ ID NO: 214890 - RNA, 17 nt, Homo sapiens
ugauaucugcagggaca

SEQ ID NO: 214891 - RNA, 20 nt, Homo sapiens
uuaccccucacaauccuugc

SEQ ID NO: 214892 - RNA, 15 nt, Homo sapiens
gaagauucuauguua

SEQ ID NO: 214893 - RNA, 14 nt, Homo sapiens
ccagccacugugau

SEQ ID NO: 214894 - RNA, 17 nt, Homo sapiens
gcggauccaagcaaaug

SEQ ID NO: 214895 - RNA, 13 nt, Homo sapiens
cuggacacuucac

SEQ ID NO: 214896 - RNA, 16 nt, Homo sapiens
aaauagaugacauuga

SEQ ID NO: 214897 - RNA, 14 nt, Homo sapiens
aucuguuacacaaa

SEQ ID NO: 214898 - RNA, 19 nt, Homo sapiens
agucagggaaggugccucu

SEQ ID NO: 214899 - RNA, 14 nt, Homo sapiens
aagcaaauggccaa

SEQ ID NO: 214900 - RNA, 16 nt, Homo sapiens
ccuaaugcuugcugcu

SEQ ID NO: 214901 - RNA, 23 nt, Homo sapiens
uugcugcugauuuaaacacauua

SEQ ID NO: 214902 - RNA, 19 nt, Homo sapiens
ggagcccugucuccucucu

SEQ ID NO: 214903 - RNA, 16 nt, Homo sapiens
uuauuuauuuauucau

SEQ ID NO: 214904 - RNA, 17 nt, Homo sapiens
ucaaucuggauucauau

SEQ ID NO: 214905 - RNA, 18 nt, Homo sapiens
agagccccacccucagau

SEQ ID NO: 214906 - RNA, 22 nt, Homo sapiens
augcuguucacuggacacuuca

SEQ ID NO: 214907 - RNA, 24 nt, Homo sapiens
ccuuccuaugcuguucacuggaca

SEQ ID NO: 214908 - RNA, 20 nt, Homo sapiens
cacuggacugacgacuugag

SEQ ID NO: 214909 - RNA, 17 nt, Homo sapiens
cagugacagucagggaa

SEQ ID NO: 214910 - RNA, 18 nt, Homo sapiens
gaaaaggccuucuuccca

SEQ ID NO: 214911 - RNA, 15 nt, Homo sapiens
gcagcgccagugaca

SEQ ID NO: 214912 - RNA, 19 nt, Homo sapiens
uaagacccucucaaacuaa

SEQ ID NO: 214913 - RNA, 18 nt, Homo sapiens
uuugaagguagaauguuu

SEQ ID NO: 214914 - RNA, 15 nt, Homo sapiens
cuauuauauucauuc

SEQ ID NO: 214915 - RNA, 16 nt, Homo sapiens
caguaacauagcugug

SEQ ID NO: 214916 - RNA, 13 nt, Homo sapiens
augcuugcugcug

SEQ ID NO: 214917 - RNA, 19 nt, Homo sapiens
cuuuaagcagcgccaguga

SEQ ID NO: 214918 - RNA, 18 nt, Homo sapiens
uuaagcagcgccagugac

SEQ ID NO: 214919 - RNA, 19 nt, Homo sapiens
augacauucccugcuaaua

SEQ ID NO: 214920 - RNA, 20 nt, Homo sapiens
aaucugugaugacauucccu

SEQ ID NO: 214921 - RNA, 15 nt, Homo sapiens
acucauuucuagcag

SEQ ID NO: 214922 - RNA, 12 nt, Homo sapiens
uugaaaugucaa

SEQ ID NO: 214923 - RNA, 23 nt, Homo sapiens
caucaaucuaaagauacaguguc

SEQ ID NO: 214924 - RNA, 17 nt, Homo sapiens
auaagugcuauugcaga

SEQ ID NO: 214925 - RNA, 22 nt, Homo sapiens
ucuguauuccuagaaacugaca

SEQ ID NO: 214926 - RNA, 19 nt, Homo sapiens
uacaacucuauuuaauuaa

SEQ ID NO: 214927 - RNA, 17 nt, Homo sapiens
cugucuucguacuggga

SEQ ID NO: 214928 - RNA, 19 nt, Homo sapiens
uauccaaucugugaugaca

SEQ ID NO: 214929 - RNA, 13 nt, Homo sapiens
cugugucauuuca

SEQ ID NO: 214930 - RNA, 13 nt, Homo sapiens
gaucauugugaag

SEQ ID NO: 214931 - RNA, 21 nt, Homo sapiens
cuauuuauuuauuuauucauu

SEQ ID NO: 214932 - RNA, 17 nt, Homo sapiens
ggcaguggaugggugcu

SEQ ID NO: 214933 - RNA, 13 nt, Homo sapiens
ucacuuccaugac

SEQ ID NO: 214934 - RNA, 19 nt, Homo sapiens
acccucagaugcacaugag

SEQ ID NO: 214935 - RNA, 16 nt, Homo sapiens
ugccagccacugugau

SEQ ID NO: 214936 - RNA, 15 nt, Homo sapiens
auccuagucauucuu

SEQ ID NO: 214937 - RNA, 21 nt, Homo sapiens
auuuauugaaaugauuucaca

SEQ ID NO: 214938 - RNA, 13 nt, Homo sapiens
ugaacaguaacau

SEQ ID NO: 214939 - RNA, 17 nt, Homo sapiens
acgugcacgcacacugu

SEQ ID NO: 214940 - RNA, 15 nt, Homo sapiens
guuugguuucuagca

SEQ ID NO: 214941 - RNA, 12 nt, Homo sapiens
agcaacacaaag

SEQ ID NO: 214942 - RNA, 14 nt, Homo sapiens
caauauccuaauaa

SEQ ID NO: 214943 - RNA, 12 nt, Homo sapiens
aaacacauuaaa

SEQ ID NO: 214944 - RNA, 13 nt, Homo sapiens
caggaagcuguga

SEQ ID NO: 214945 - RNA, 16 nt, Homo sapiens
uuauugaagcagagug

SEQ ID NO: 214946 - RNA, 15 nt, Homo sapiens
aauguaugugcacau

SEQ ID NO: 214947 - RNA, 12 nt, Homo sapiens
cagaugcacaug

SEQ ID NO: 214948 - RNA, 15 nt, Homo sapiens
agugcuauugcagag

SEQ ID NO: 214949 - RNA, 24 nt, Homo sapiens
agucuggcagacuuucuucucuau

SEQ ID NO: 214950 - RNA, 18 nt, Homo sapiens
ggaaggugccucuggaug

SEQ ID NO: 214951 - RNA, 22 nt, Homo sapiens
cuuccaugacauaagugcuauu

SEQ ID NO: 214952 - RNA, 12 nt, Homo sapiens
ugaguggaguua

SEQ ID NO: 214953 - RNA, 12 nt, Homo sapiens
gaagucauucuu

SEQ ID NO: 214954 - RNA, 20 nt, Homo sapiens
ggccagaagucaaggcuuag

SEQ ID NO: 214955 - RNA, 20 nt, Homo sapiens
guggauuaaagugcccagca

SEQ ID NO: 214956 - RNA, 19 nt, Homo sapiens
uuaauauccaauugcugcu

SEQ ID NO: 214957 - RNA, 21 nt, Homo sapiens
ugagcuggcgggauugaagga

SEQ ID NO: 214958 - RNA, 19 nt, Homo sapiens
uauccuagucauucuuccc

SEQ ID NO: 214959 - RNA, 12 nt, Homo sapiens
cugugaugacau

SEQ ID NO: 214960 - RNA, 22 nt, Homo sapiens
gaccuugcugauggugacauug

SEQ ID NO: 214961 - RNA, 13 nt, Homo sapiens
gaugacauucccu

SEQ ID NO: 214962 - RNA, 22 nt, Homo sapiens
cuggauguacuauccaaucugu

SEQ ID NO: 214963 - RNA, 15 nt, Homo sapiens
gaguuauugaagcag

SEQ ID NO: 214964 - RNA, 12 nt, Homo sapiens
uccaaucuguga

SEQ ID NO: 214965 - RNA, 16 nt, Homo sapiens
ggagcaugagugccgu

SEQ ID NO: 214966 - RNA, 22 nt, Homo sapiens
gugaugacauucccugcuaaua

SEQ ID NO: 214967 - RNA, 17 nt, Homo sapiens
gugggauaucacuucca

SEQ ID NO: 214968 - RNA, 14 nt, Homo sapiens
ugugagacuguaag

SEQ ID NO: 214969 - RNA, 12 nt, Homo sapiens
gaaggugccucu

SEQ ID NO: 214970 - RNA, 20 nt, Homo sapiens
caugagcuggcgggauugaa

SEQ ID NO: 214971 - RNA, 20 nt, Homo sapiens
acuguccuauuauauucauu

SEQ ID NO: 214972 - RNA, 15 nt, Homo sapiens
aaugauuucacagug

SEQ ID NO: 214973 - RNA, 19 nt, Homo sapiens
aguaaacgauaaaaugugg

SEQ ID NO: 214974 - RNA, 22 nt, Homo sapiens
aaacacauuaaagguacuuugc

SEQ ID NO: 214975 - RNA, 19 nt, Homo sapiens
ugauggugacauugcaccu

SEQ ID NO: 214976 - RNA, 12 nt, Homo sapiens
agugacagucag

SEQ ID NO: 214977 - RNA, 17 nt, Homo sapiens
uauccuagucauucuuc

SEQ ID NO: 214978 - RNA, 13 nt, Homo sapiens
aaugcccagugag

SEQ ID NO: 214979 - RNA, 16 nt, Homo sapiens
agaaacugacacaugc

SEQ ID NO: 214980 - RNA, 13 nt, Homo sapiens
uggccaaugagau

SEQ ID NO: 214981 - RNA, 15 nt, Homo sapiens
auccaaucugugaug

SEQ ID NO: 214982 - RNA, 13 nt, Homo sapiens
ugagacuguguug

SEQ ID NO: 214983 - RNA, 14 nt, Homo sapiens
uggccagaagucaa

SEQ ID NO: 214984 - RNA, 16 nt, Homo sapiens
acaauccuugccacag

SEQ ID NO: 214985 - RNA, 14 nt, Homo sapiens
auauugugccccau

SEQ ID NO: 214986 - RNA, 14 nt, Homo sapiens
acuaaaauguucua

SEQ ID NO: 214987 - RNA, 17 nt, Homo sapiens
cuggacuaaaacuacau

SEQ ID NO: 214988 - RNA, 19 nt, Homo sapiens
cggagcccugucuccucuc

SEQ ID NO: 214989 - RNA, 18 nt, Homo sapiens
gauggugacauugcaccu

SEQ ID NO: 214990 - RNA, 17 nt, Homo sapiens
aauguucuccagucauu

SEQ ID NO: 214991 - RNA, 20 nt, Homo sapiens
acacaugcugaacaucacag

SEQ ID NO: 214992 - RNA, 16 nt, Homo sapiens
uucacuggacacuuca

SEQ ID NO: 214993 - RNA, 21 nt, Homo sapiens
guaaaacugaacuucagagca

SEQ ID NO: 214994 - RNA, 17 nt, Homo sapiens
ccccucacaauccuugc

SEQ ID NO: 214995 - RNA, 21 nt, Homo sapiens
cuuagacccucaugcugccaa

SEQ ID NO: 214996 - RNA, 21 nt, Homo sapiens
uggugacauugcaccuggaug

SEQ ID NO: 214997 - RNA, 14 nt, Homo sapiens
auguaaaacugaac

SEQ ID NO: 214998 - RNA, 15 nt, Homo sapiens
gcugauggugacauu

SEQ ID NO: 214999 - RNA, 17 nt, Homo sapiens
uggcaucuuacaucuga

SEQ ID NO: 215000 - RNA, 22 nt, Homo sapiens
uuucuggaugaaugcccaguga

SEQ ID NO: 215001 - RNA, 21 nt, Homo sapiens
uuccuagaaacugacacaugc

SEQ ID NO: 215002 - RNA, 22 nt, Homo sapiens
uuaagacuuugguuauuuuacu

SEQ ID NO: 215003 - RNA, 17 nt, Homo sapiens
auccuagucauucuucc

SEQ ID NO: 215004 - RNA, 17 nt, Homo sapiens
caguuugguuucuagca

SEQ ID NO: 215005 - RNA, 15 nt, Homo sapiens
cccugugucauuuca

SEQ ID NO: 215006 - RNA, 18 nt, Homo sapiens
acuucacgcccuuggcca

SEQ ID NO: 215007 - RNA, 23 nt, Homo sapiens
aacuaacaggcuuagugauguaa

SEQ ID NO: 215008 - RNA, 17 nt, Homo sapiens
gaagauucuauguuaau

SEQ ID NO: 215009 - RNA, 21 nt, Homo sapiens
gacagagccccacccucagau

SEQ ID NO: 215010 - RNA, 22 nt, Homo sapiens
aaacgauaaaauguggauuaaa

SEQ ID NO: 215011 - RNA, 13 nt, Homo sapiens
cuuauuuccucau

SEQ ID NO: 215012 - RNA, 23 nt, Homo sapiens
ucuccucucucuguaauaaacuc

SEQ ID NO: 215013 - RNA, 13 nt, Homo sapiens
aacuaaaauguuc

SEQ ID NO: 215014 - RNA, 19 nt, Homo sapiens
ccaaugagaucauugugaa

SEQ ID NO: 215015 - RNA, 22 nt, Homo sapiens
gucaaccccaaguuaguucaau

SEQ ID NO: 215016 - RNA, 17 nt, Homo sapiens
cacuuuauuucucucau

SEQ ID NO: 215017 - RNA, 18 nt, Homo sapiens
gaaugcaaagaugaaggu

SEQ ID NO: 215018 - RNA, 23 nt, Homo sapiens
uguuuugccaauuugcacauuaa

SEQ ID NO: 215019 - RNA, 17 nt, Homo sapiens
ucuccccuucucuguau

SEQ ID NO: 215020 - RNA, 24 nt, Homo sapiens
aaauagcauguccuaaugcuugcu

SEQ ID NO: 215021 - RNA, 20 nt, Homo sapiens
auucugagaugacuauucag

SEQ ID NO: 215022 - RNA, 14 nt, Homo sapiens
ucauuauguuaaua

SEQ ID NO: 215023 - RNA, 14 nt, Homo sapiens
aauguaugugcaca

SEQ ID NO: 215024 - RNA, 16 nt, Homo sapiens
auuccuaacuaucacu

SEQ ID NO: 215025 - RNA, 13 nt, Homo sapiens
gucagacuggaua

SEQ ID NO: 215026 - RNA, 17 nt, Homo sapiens
aacagcaacacaaagcu

SEQ ID NO: 215027 - RNA, 18 nt, Homo sapiens
gaugcacaugagcuggcg

SEQ ID NO: 215028 - RNA, 22 nt, Homo sapiens
auuucugaggagccugcaacau

SEQ ID NO: 215029 - RNA, 20 nt, Homo sapiens
acuguuuagaugaaugucag

SEQ ID NO: 215030 - RNA, 16 nt, Homo sapiens
aacucuaccugcacac

SEQ ID NO: 215031 - RNA, 23 nt, Homo sapiens
gucucccuuccuaugcuguucac

SEQ ID NO: 215032 - RNA, 22 nt, Homo sapiens
ccuugcugauggugacauugca

SEQ ID NO: 215033 - RNA, 19 nt, Homo sapiens
cugaggagccugcaacaug

SEQ ID NO: 215034 - RNA, 16 nt, Homo sapiens
cuucccuaaucuucca

SEQ ID NO: 215035 - RNA, 20 nt, Homo sapiens
caugcugaacaucacagcuu

SEQ ID NO: 215036 - RNA, 18 nt, Homo sapiens
uagagguacacuugugaa

SEQ ID NO: 215037 - RNA, 16 nt, Homo sapiens
gcaccuggauguacua

SEQ ID NO: 215038 - RNA, 18 nt, Homo sapiens
ugacauugcaccuggaug

SEQ ID NO: 215039 - RNA, 13 nt, Homo sapiens
agaauguuuucaa

SEQ ID NO: 215040 - RNA, 15 nt, Homo sapiens
aaaguaaacgauaaa

SEQ ID NO: 215041 - RNA, 20 nt, Homo sapiens
auuauugucaaagaagucau

SEQ ID NO: 215042 - RNA, 13 nt, Homo sapiens
ggcagacuuucuu

SEQ ID NO: 215043 - RNA, 22 nt, Homo sapiens
cugaggagccugcaacaugcca

SEQ ID NO: 215044 - RNA, 13 nt, Homo sapiens
ugccucuggaugc

SEQ ID NO: 215045 - RNA, 22 nt, Homo sapiens
uuccuaugcuguucacuggaca

SEQ ID NO: 215046 - RNA, 20 nt, Homo sapiens
cagcuagaaaaggccuucuu

SEQ ID NO: 215047 - RNA, 12 nt, Homo sapiens
cccuucucugua

SEQ ID NO: 215048 - RNA, 15 nt, Homo sapiens
caaguuaguucaauc

SEQ ID NO: 215049 - RNA, 16 nt, Homo sapiens
auugcaccuggaugua

SEQ ID NO: 215050 - RNA, 13 nt, Homo sapiens
agucuucuauuua

SEQ ID NO: 215051 - RNA, 12 nt, Homo sapiens
uuggcccaggau

SEQ ID NO: 215052 - RNA, 17 nt, Homo sapiens
ucugugaugacauuccc

SEQ ID NO: 215053 - RNA, 20 nt, Homo sapiens
aauguggauuaaagugccca

SEQ ID NO: 215054 - RNA, 17 nt, Homo sapiens
ccuaacuaucacugguu

SEQ ID NO: 215055 - RNA, 14 nt, Homo sapiens
gcuuagaacaaagg

SEQ ID NO: 215056 - RNA, 21 nt, Homo sapiens
ggccacccaggaacuccugac

SEQ ID NO: 215057 - RNA, 13 nt, Homo sapiens
aauguucacuggu

SEQ ID NO: 215058 - RNA, 17 nt, Homo sapiens
aaugauuucacagugug

SEQ ID NO: 215059 - RNA, 14 nt, Homo sapiens
acaguaacauagcu

SEQ ID NO: 215060 - RNA, 15 nt, Homo sapiens
ucuggaugcugugaa

SEQ ID NO: 215061 - RNA, 21 nt, Homo sapiens
gauaucacuuccaugacauaa

SEQ ID NO: 215062 - RNA, 12 nt, Homo sapiens
agaaacugacac

SEQ ID NO: 215063 - RNA, 19 nt, Homo sapiens
gucuccucucucuguaaua

SEQ ID NO: 215064 - RNA, 22 nt, Homo sapiens
guaauuccuaacuaucacuggu

SEQ ID NO: 215065 - RNA, 18 nt, Homo sapiens
guucccggguagccacug

SEQ ID NO: 215066 - RNA, 21 nt, Homo sapiens
gaacuuuguggucgacaucaa

SEQ ID NO: 215067 - RNA, 11 nt, Homo sapiens
aacuccugacu

SEQ ID NO: 215068 - RNA, 21 nt, Homo sapiens
cucuguauuccuagaaacuga

SEQ ID NO: 215069 - RNA, 13 nt, Homo sapiens
aaaacuacauuga

SEQ ID NO: 215070 - RNA, 19 nt, Homo sapiens
ccuggcacugguuuguucc

SEQ ID NO: 215071 - RNA, 18 nt, Homo sapiens
ggaagcugugagagcagu

SEQ ID NO: 215072 - RNA, 20 nt, Homo sapiens
uccuagaaacugacacaugc

SEQ ID NO: 215073 - RNA, 15 nt, Homo sapiens
ugggauaucacuucc

SEQ ID NO: 215074 - RNA, 22 nt, Homo sapiens
guaauaaacucauuucuagcag

SEQ ID NO: 215075 - RNA, 21 nt, Homo sapiens
auagcagcccucaauugugaa

SEQ ID NO: 215076 - RNA, 13 nt, Homo sapiens
uucauuacuaaaa

SEQ ID NO: 215077 - RNA, 13 nt, Homo sapiens
auguucacuggua

SEQ ID NO: 215078 - RNA, 17 nt, Homo sapiens
caagcugaccuugcuga

SEQ ID NO: 215079 - RNA, 21 nt, Homo sapiens
gcuuaauuauugauguuuuca

SEQ ID NO: 215080 - RNA, 19 nt, Homo sapiens
caacugaaguucuauuuau

SEQ ID NO: 215081 - RNA, 17 nt, Homo sapiens
cuagaaacugacacaug

SEQ ID NO: 215082 - RNA, 23 nt, Homo sapiens
aauaucccuuggacauuuuaugu

SEQ ID NO: 215083 - RNA, 19 nt, Homo sapiens
augguaguuuuacaguguu

SEQ ID NO: 215084 - RNA, 20 nt, Homo sapiens
agcacaaagcagauccucaa

SEQ ID NO: 215085 - RNA, 12 nt, Homo sapiens
uuagguugugaa

SEQ ID NO: 215086 - RNA, 17 nt, Homo sapiens
cagaauauugugcccca

SEQ ID NO: 215087 - RNA, 11 nt, Homo sapiens
ggaaagcaaau

SEQ ID NO: 215088 - RNA, 13 nt, Homo sapiens
auguacuauccaa

SEQ ID NO: 215089 - RNA, 12 nt, Homo sapiens
guuugcagagua

SEQ ID NO: 215090 - RNA, 15 nt, Homo sapiens
uugguaacucuguaa

SEQ ID NO: 215091 - RNA, 16 nt, Homo sapiens
gucuucguacugggaa

SEQ ID NO: 215092 - RNA, 23 nt, Homo sapiens
uucuuuaagcagcgccagugaca

SEQ ID NO: 215093 - RNA, 21 nt, Homo sapiens
guucuccagucauuauguuaa

SEQ ID NO: 215094 - RNA, 16 nt, Homo sapiens
uuccaguaaugagcuu

SEQ ID NO: 215095 - RNA, 23 nt, Homo sapiens
uuucuggaugaaugcccagugag

SEQ ID NO: 215096 - RNA, 12 nt, Homo sapiens
ugcuuggaugua

SEQ ID NO: 215097 - RNA, 17 nt, Homo sapiens
ggaauguaugugcacau

SEQ ID NO: 215098 - RNA, 14 nt, Homo sapiens
guauagauguugcu

SEQ ID NO: 215099 - RNA, 23 nt, Homo sapiens
uaguaaguacuuaauaaacugug

SEQ ID NO: 215100 - RNA, 13 nt, Homo sapiens
cuugccacagugu

SEQ ID NO: 215101 - RNA, 14 nt, Homo sapiens
uaccugcacacugu

SEQ ID NO: 215102 - RNA, 13 nt, Homo sapiens
cucagaugcacau

SEQ ID NO: 215103 - RNA, 14 nt, Homo sapiens
auuuauuuauucau

SEQ ID NO: 215104 - RNA, 21 nt, Homo sapiens
uuuaccccucacaauccuugc

SEQ ID NO: 215105 - RNA, 17 nt, Homo sapiens
ugauuuaaacacauuaa

SEQ ID NO: 215106 - RNA, 18 nt, Homo sapiens
uugcugcuuguacacuca

SEQ ID NO: 215107 - RNA, 18 nt, Homo sapiens
caauccuugccacagugu

SEQ ID NO: 215108 - RNA, 16 nt, Homo sapiens
uauccaaucugugaug

SEQ ID NO: 215109 - RNA, 15 nt, Homo sapiens
ugauuucacagugug

SEQ ID NO: 215110 - RNA, 21 nt, Homo sapiens
uucccggguagccacuggacu

SEQ ID NO: 215111 - RNA, 22 nt, Homo sapiens
gauaucugcagggacagagcau

SEQ ID NO: 215112 - RNA, 14 nt, Homo sapiens
gaacuucagagcau

SEQ ID NO: 215113 - RNA, 19 nt, Homo sapiens
caggauuauugucaaagaa

SEQ ID NO: 215114 - RNA, 17 nt, Homo sapiens
guaaggugcaucuguuu

SEQ ID NO: 215115 - RNA, 17 nt, Homo sapiens
ccuaaugcuugcugcug

SEQ ID NO: 215116 - RNA, 13 nt, Homo sapiens
uuaaaaaacagag

SEQ ID NO: 215117 - RNA, 18 nt, Homo sapiens
cuuuguggucgacaucaa

SEQ ID NO: 215118 - RNA, 18 nt, Homo sapiens
gcagagugcuuuaccaau

SEQ ID NO: 215119 - RNA, 15 nt, Homo sapiens
aaaaucacacugucu

SEQ ID NO: 215120 - RNA, 21 nt, Homo sapiens
uuggguuaggaagaaaauaau

SEQ ID NO: 215121 - RNA, 15 nt, Homo sapiens
uaaacauuucauuuc

SEQ ID NO: 215122 - RNA, 23 nt, Homo sapiens
cuuggcccaggauuauugucaaa

SEQ ID NO: 215123 - RNA, 22 nt, Homo sapiens
agagcaugaaaaucacacuguc

SEQ ID NO: 215124 - RNA, 16 nt, Homo sapiens
auguacuauccaaucu

SEQ ID NO: 215125 - RNA, 15 nt, Homo sapiens
gaaacugacacaugc

SEQ ID NO: 215126 - RNA, 13 nt, Homo sapiens
uucuggacuaaaa

SEQ ID NO: 215127 - RNA, 12 nt, Homo sapiens
ugccacagugug

SEQ ID NO: 215128 - RNA, 13 nt, Homo sapiens
gcugauggugaca

SEQ ID NO: 215129 - RNA, 21 nt, Homo sapiens
aauugcugcuuguacacucau

SEQ ID NO: 215130 - RNA, 20 nt, Homo sapiens
gccacccaggaacuccugac

SEQ ID NO: 215131 - RNA, 17 nt, Homo sapiens
auuuauugaaaugauuu

SEQ ID NO: 215132 - RNA, 20 nt, Homo sapiens
ccaauagcaaggcugugcau

SEQ ID NO: 215133 - RNA, 13 nt, Homo sapiens
auuucaacugaag

SEQ ID NO: 215134 - RNA, 20 nt, Homo sapiens
aaggcuuagacccucaugcu

SEQ ID NO: 215135 - RNA, 19 nt, Homo sapiens
gauuuagcaggaagcugug

SEQ ID NO: 215136 - RNA, 22 nt, Homo sapiens
gaguggaguuacugaacaguaa

SEQ ID NO: 215137 - RNA, 23 nt, Homo sapiens
uggauugugccuaauguguuuga

SEQ ID NO: 215138 - RNA, 12 nt, Homo sapiens
cagaguggcagu

SEQ ID NO: 215139 - RNA, 13 nt, Homo sapiens
agcauguccuaau

SEQ ID NO: 215140 - RNA, 19 nt, Homo sapiens
cucagaugcacaugagcug

SEQ ID NO: 215141 - RNA, 18 nt, Homo sapiens
ugcugaacaucacagcuu

SEQ ID NO: 215142 - RNA, 19 nt, Homo sapiens
gagaagauucuuguauuua

SEQ ID NO: 215143 - RNA, 15 nt, Homo sapiens
agcagcgccagugac

SEQ ID NO: 215144 - RNA, 19 nt, Homo sapiens
caaucuaaagauacagugu

SEQ ID NO: 215145 - RNA, 19 nt, Homo sapiens
gcugauggugacauugcac

SEQ ID NO: 215146 - RNA, 16 nt, Homo sapiens
cucaguagucagacug

SEQ ID NO: 215147 - RNA, 13 nt, Homo sapiens
gacuaaaacuaca

SEQ ID NO: 215148 - RNA, 23 nt, Homo sapiens
auguacuauccaaucugugauga

SEQ ID NO: 215149 - RNA, 19 nt, Homo sapiens
aggaagcugugagagcagu

SEQ ID NO: 215150 - RNA, 20 nt, Homo sapiens
ucuccagucauuauguuaau

SEQ ID NO: 215151 - RNA, 17 nt, Homo sapiens
uaagcagcgccagugac

SEQ ID NO: 215152 - RNA, 21 nt, Homo sapiens
augacuauucaguggcuaacu

SEQ ID NO: 215153 - RNA, 16 nt, Homo sapiens
agagugcuuuaccaau

SEQ ID NO: 215154 - RNA, 17 nt, Homo sapiens
aauccuugccacagugu

SEQ ID NO: 215155 - RNA, 14 nt, Homo sapiens
uuauauucauucuu

SEQ ID NO: 215156 - RNA, 15 nt, Homo sapiens
cauuucaaacagucu

SEQ ID NO: 215157 - RNA, 14 nt, Homo sapiens
auaaccuuguucca

SEQ ID NO: 215158 - RNA, 15 nt, Homo sapiens
ucuguuuuguguacu

SEQ ID NO: 215159 - RNA, 19 nt, Homo sapiens
guuacaugaaggcagcaga

SEQ ID NO: 215160 - RNA, 15 nt, Homo sapiens
ugagaucauugugaa

SEQ ID NO: 215161 - RNA, 12 nt, Homo sapiens
cuuagaacaaag

SEQ ID NO: 215162 - RNA, 17 nt, Homo sapiens
ccccaaguuaguucaau

SEQ ID NO: 215163 - RNA, 21 nt, Homo sapiens
uggccaaugagaucauuguga

SEQ ID NO: 215164 - RNA, 18 nt, Homo sapiens
ucaaauguucuccaguca

SEQ ID NO: 215165 - RNA, 18 nt, Homo sapiens
gugagacuguaaguuaca

SEQ ID NO: 215166 - RNA, 16 nt, Homo sapiens
cacaauccuugccaca

SEQ ID NO: 215167 - RNA, 21 nt, Homo sapiens
agucauucuucccuaaucuuc

SEQ ID NO: 215168 - RNA, 21 nt, Homo sapiens
guauuucaacugaaguucuau

SEQ ID NO: 215169 - RNA, 16 nt, Homo sapiens
gaggagccugcaacau

SEQ ID NO: 215170 - RNA, 18 nt, Homo sapiens
agccacuggacugacgac

SEQ ID NO: 215171 - RNA, 12 nt, Homo sapiens
gaugacauuccc

SEQ ID NO: 215172 - RNA, 13 nt, Homo sapiens
auagauguugcua

SEQ ID NO: 215173 - RNA, 16 nt, Homo sapiens
ccuaacuaucacuggu

SEQ ID NO: 215174 - RNA, 15 nt, Homo sapiens
cauuauauagcagua

SEQ ID NO: 215175 - RNA, 16 nt, Homo sapiens
uauccaauugcugcuu

SEQ ID NO: 215176 - RNA, 22 nt, Homo sapiens
cauagagaauauaaaaauaaag

SEQ ID NO: 215177 - RNA, 19 nt, Homo sapiens
gcauacugccuuguuuaau

SEQ ID NO: 215178 - RNA, 13 nt, Homo sapiens
cccuucucuguau

SEQ ID NO: 215179 - RNA, 18 nt, Homo sapiens
uccucaauaaacauuuca

SEQ ID NO: 215180 - RNA, 22 nt, Homo sapiens
uccuuuuuuuuuuauccuaguc

SEQ ID NO: 215181 - RNA, 13 nt, Homo sapiens
cagcaacacaaag

SEQ ID NO: 215182 - RNA, 13 nt, Homo sapiens
ugaugacauuccc

SEQ ID NO: 215183 - RNA, 20 nt, Homo sapiens
agaaaaggccuucuucccaa

SEQ ID NO: 215184 - RNA, 14 nt, Homo sapiens
uucucagcagagug

SEQ ID NO: 215185 - RNA, 15 nt, Homo sapiens
gaagucuucuauuua

SEQ ID NO: 215186 - RNA, 17 nt, Homo sapiens
gcaaauggccaaugaga

SEQ ID NO: 215187 - RNA, 20 nt, Homo sapiens
cagacuggauaguccgucuc

SEQ ID NO: 215188 - RNA, 23 nt, Homo sapiens
gugagacuguguuguacagcuag

SEQ ID NO: 215189 - RNA, 19 nt, Homo sapiens
ugaagguagaauguuuuca

SEQ ID NO: 215190 - RNA, 20 nt, Homo sapiens
aaugguaguuuuacaguguu

SEQ ID NO: 215191 - RNA, 22 nt, Homo sapiens
cuuagacccucaugcugccaau

SEQ ID NO: 215192 - RNA, 17 nt, Homo sapiens
uccuaugcuguucacug

SEQ ID NO: 215193 - RNA, 14 nt, Homo sapiens
gugaagagucuaca

SEQ ID NO: 215194 - RNA, 15 nt, Homo sapiens
aaugucaguauuuca

SEQ ID NO: 215195 - RNA, 14 nt, Homo sapiens
cuaaaauguucuaa

SEQ ID NO: 215196 - RNA, 13 nt, Homo sapiens
acaucauuucaag

SEQ ID NO: 215197 - RNA, 15 nt, Homo sapiens
augacauaagugcua

SEQ ID NO: 215198 - RNA, 17 nt, Homo sapiens
ucucuauuucuggauga

SEQ ID NO: 215199 - RNA, 22 nt, Homo sapiens
gcccucagaaucgcuccaccuu

SEQ ID NO: 215200 - RNA, 13 nt, Homo sapiens
ggccacccaggaa

SEQ ID NO: 215201 - RNA, 20 nt, Homo sapiens
uggaugaaugcccagugaga

SEQ ID NO: 215202 - RNA, 18 nt, Homo sapiens
gucagggaaggugccucu

SEQ ID NO: 215203 - RNA, 22 nt, Homo sapiens
cuauuuauuuauuuauucauua

SEQ ID NO: 215204 - RNA, 16 nt, Homo sapiens
ugacauaagugcuauu

SEQ ID NO: 215205 - RNA, 20 nt, Homo sapiens
cauucuuuuugaaaugucaa

SEQ ID NO: 215206 - RNA, 14 nt, Homo sapiens
acucauucauuacu

SEQ ID NO: 215207 - RNA, 21 nt, Homo sapiens
uuuaaucuuuuaugauugccu

SEQ ID NO: 215208 - RNA, 18 nt, Homo sapiens
uucuuuuugaaaugucaa

SEQ ID NO: 215209 - RNA, 18 nt, Homo sapiens
ugguuucuagcaugaaga

SEQ ID NO: 215210 - RNA, 15 nt, Homo sapiens
uuuagaugaauguca

SEQ ID NO: 215211 - RNA, 21 nt, Homo sapiens
agaauguuuucaaauguucuc

SEQ ID NO: 215212 - RNA, 10 nt, Homo sapiens
uuuguucccu

SEQ ID NO: 215213 - RNA, 18 nt, Homo sapiens
caacaugccagccacugu

SEQ ID NO: 215214 - RNA, 22 nt, Homo sapiens
cagagccguggccacccaggaa

SEQ ID NO: 215215 - RNA, 22 nt, Homo sapiens
acuuauggggccaaaauagcau

SEQ ID NO: 215216 - RNA, 19 nt, Homo sapiens
agaaaaggccuucuuccca

SEQ ID NO: 215217 - RNA, 21 nt, Homo sapiens
caauaaacauuucauuuccca

SEQ ID NO: 215218 - RNA, 21 nt, Homo sapiens
cauacuauuaaacaugcugua

SEQ ID NO: 215219 - RNA, 14 nt, Homo sapiens
uggaugcugugaag

SEQ ID NO: 215220 - RNA, 17 nt, Homo sapiens
ugaaauaaggaaugaua

SEQ ID NO: 215221 - RNA, 13 nt, Homo sapiens
ccucucucuguaa

SEQ ID NO: 215222 - RNA, 16 nt, Homo sapiens
gcaaauggccaaugag

SEQ ID NO: 215223 - RNA, 20 nt, Homo sapiens
gacgugcacgcacacugucu

SEQ ID NO: 215224 - RNA, 22 nt, Homo sapiens
auuuccucauuuuuauaauguc

SEQ ID NO: 215225 - RNA, 15 nt, Homo sapiens
cugauuuaaacacau

SEQ ID NO: 215226 - RNA, 19 nt, Homo sapiens
cuguuuagaugaaugucag

SEQ ID NO: 215227 - RNA, 17 nt, Homo sapiens
cuucacgcccuuggcca

SEQ ID NO: 215228 - RNA, 17 nt, Homo sapiens
cagaaucgcuccaccuu

SEQ ID NO: 215229 - RNA, 19 nt, Homo sapiens
uaauauccaauugcugcuu

SEQ ID NO: 215230 - RNA, 15 nt, Homo sapiens
auugugccccaugcu

SEQ ID NO: 215231 - RNA, 23 nt, Homo sapiens
aguacuuaauaaacuguggugcu

SEQ ID NO: 215232 - RNA, 21 nt, Homo sapiens
auuaauauccaauugcugcuu

SEQ ID NO: 215233 - RNA, 22 nt, Homo sapiens
uauugaaaugauuucacagugu

SEQ ID NO: 215234 - RNA, 19 nt, Homo sapiens
cucccucccccuggcacug

SEQ ID NO: 215235 - RNA, 20 nt, Homo sapiens
ucaaagaagucauucuuuaa

SEQ ID NO: 215236 - RNA, 18 nt, Homo sapiens
ccuaaucuuccacuugag

SEQ ID NO: 215237 - RNA, 23 nt, Homo sapiens
uauccaaucugugaugacauucc

SEQ ID NO: 215238 - RNA, 16 nt, Homo sapiens
ucuguauuccuagaaa

SEQ ID NO: 215239 - RNA, 13 nt, Homo sapiens
caauuugcacauu

SEQ ID NO: 215240 - RNA, 20 nt, Homo sapiens
uguacuauccaaucugugau

SEQ ID NO: 215241 - RNA, 15 nt, Homo sapiens
aguaacauagcugug

SEQ ID NO: 215242 - RNA, 17 nt, Homo sapiens
cugagaugacuauucag

SEQ ID NO: 215243 - RNA, 14 nt, Homo sapiens
uuugcauauugcau

SEQ ID NO: 215244 - RNA, 19 nt, Homo sapiens
auguggcaggcuggaguua

SEQ ID NO: 215245 - RNA, 23 nt, Homo sapiens
uuggccugucuuuggauuguuaa

SEQ ID NO: 215246 - RNA, 12 nt, Homo sapiens
gucagacuggau

SEQ ID NO: 215247 - RNA, 19 nt, Homo sapiens
ugcccagugagacuguguu

SEQ ID NO: 215248 - RNA, 13 nt, Homo sapiens
agagggaugcuug

SEQ ID NO: 215249 - RNA, 17 nt, Homo sapiens
auaucacuuccaugaca

SEQ ID NO: 215250 - RNA, 20 nt, Homo sapiens
ucuguuacacaaagaaccac

SEQ ID NO: 215251 - RNA, 14 nt, Homo sapiens
acgcacacugucug

SEQ ID NO: 215252 - RNA, 19 nt, Homo sapiens
ggauaucacuuccaugaca

SEQ ID NO: 215253 - RNA, 14 nt, Homo sapiens
aaugcuugcugcug

SEQ ID NO: 215254 - RNA, 13 nt, Homo sapiens
aaaauguggcagg

SEQ ID NO: 215255 - RNA, 17 nt, Homo sapiens
acgcacacugucugccc

SEQ ID NO: 215256 - RNA, 13 nt, Homo sapiens
ccuagaaacugac

SEQ ID NO: 215257 - RNA, 20 nt, Homo sapiens
ucuaaagauacagugucuga

SEQ ID NO: 215258 - RNA, 20 nt, Homo sapiens
uuuugaagauucuauguuaa

SEQ ID NO: 215259 - RNA, 13 nt, Homo sapiens
acuuccaugacau

SEQ ID NO: 215260 - RNA, 16 nt, Homo sapiens
ucccugugucauuuca

SEQ ID NO: 215261 - RNA, 14 nt, Homo sapiens
ggagccugcaacau

SEQ ID NO: 215262 - RNA, 17 nt, Homo sapiens
uuggauguaaaacugaa

SEQ ID NO: 215263 - RNA, 23 nt, Homo sapiens
guaauuccuaacuaucacugguu

SEQ ID NO: 215264 - RNA, 18 nt, Homo sapiens
ggcacaucauuucaagaa

SEQ ID NO: 215265 - RNA, 15 nt, Homo sapiens
uuggaaaggaaugca

SEQ ID NO: 215266 - RNA, 15 nt, Homo sapiens
cuuuaagaacuaaaa

SEQ ID NO: 215267 - RNA, 19 nt, Homo sapiens
uaagaacuaaaauguucua

SEQ ID NO: 215268 - RNA, 21 nt, Homo sapiens
ugcccagugagacuguguugu

SEQ ID NO: 215269 - RNA, 14 nt, Homo sapiens
gaguuuggccagaa

SEQ ID NO: 215270 - RNA, 16 nt, Homo sapiens
uaaagugcccagcaca

SEQ ID NO: 215271 - RNA, 21 nt, Homo sapiens
gagcaguuugguuucuagcau

SEQ ID NO: 215272 - RNA, 19 nt, Homo sapiens
auauaaaaauaaagcacuu

SEQ ID NO: 215273 - RNA, 18 nt, Homo sapiens
gucaaagaagucauucuu

SEQ ID NO: 215274 - RNA, 20 nt, Homo sapiens
acucugagugcaaacuucag

SEQ ID NO: 215275 - RNA, 15 nt, Homo sapiens
uucuuguaaggcaua

SEQ ID NO: 215276 - RNA, 23 nt, Homo sapiens
agcaguuugguuucuagcaugaa

SEQ ID NO: 215277 - RNA, 23 nt, Homo sapiens
ucacugguuugguucuggacuaa

SEQ ID NO: 215278 - RNA, 18 nt, Homo sapiens
gccacuggacugacgacu

SEQ ID NO: 215279 - RNA, 20 nt, Homo sapiens
aaccuaggcaaagaguauau

SEQ ID NO: 215280 - RNA, 13 nt, Homo sapiens
guacuuuuaagac

SEQ ID NO: 215281 - RNA, 22 nt, Homo sapiens
agagcaguuugguuucuagcau

SEQ ID NO: 215282 - RNA, 16 nt, Homo sapiens
aaggccuucuucccaa

SEQ ID NO: 215283 - RNA, 12 nt, Homo sapiens
cuguauuccuag

SEQ ID NO: 215284 - RNA, 19 nt, Homo sapiens
caccuggauguacuaucca

SEQ ID NO: 215285 - RNA, 23 nt, Homo sapiens
uagcaggaagcugugagagcagu

SEQ ID NO: 215286 - RNA, 23 nt, Homo sapiens
aaggcuuagacccucaugcugcc

SEQ ID NO: 215287 - RNA, 16 nt, Homo sapiens
auuugaaacacugguu

SEQ ID NO: 215288 - RNA, 17 nt, Homo sapiens
guuuagaugaaugucag

SEQ ID NO: 215289 - RNA, 22 nt, Homo sapiens
cauuaaaugacucuucccucaa

SEQ ID NO: 215290 - RNA, 20 nt, Homo sapiens
gagacuguaaguuacaugaa

SEQ ID NO: 215291 - RNA, 17 nt, Homo sapiens
uccugucggagcccugu

SEQ ID NO: 215292 - RNA, 16 nt, Homo sapiens
auugaaaugauuucac

SEQ ID NO: 215293 - RNA, 12 nt, Homo sapiens
uaugugcacauc

SEQ ID NO: 215294 - RNA, 19 nt, Homo sapiens
cuuguaaggcauacugccu

SEQ ID NO: 215295 - RNA, 22 nt, Homo sapiens
ggaugggugcuuaguaaguacu

SEQ ID NO: 215296 - RNA, 20 nt, Homo sapiens
auaguccgucucugcuuauc

SEQ ID NO: 215297 - RNA, 23 nt, Homo sapiens
gugcuuuaccaauugaaguaaaa

SEQ ID NO: 215298 - RNA, 15 nt, Homo sapiens
cuuuuaaacucugag

SEQ ID NO: 215299 - RNA, 12 nt, Homo sapiens
gguaugauuaac

SEQ ID NO: 215300 - RNA, 18 nt, Homo sapiens
ggauaucacuuccaugac

SEQ ID NO: 215301 - RNA, 16 nt, Homo sapiens
uucaguuugcagagua

SEQ ID NO: 215302 - RNA, 22 nt, Homo sapiens
acuauccaaucugugaugacau

SEQ ID NO: 215303 - RNA, 16 nt, Homo sapiens
cucaauaaacauuuca

SEQ ID NO: 215304 - RNA, 16 nt, Homo sapiens
auaucacuuccaugac

SEQ ID NO: 215305 - RNA, 13 nt, Homo sapiens
ggaacuccugacu

SEQ ID NO: 215306 - RNA, 22 nt, Homo sapiens
gcuagaaaaggccuucuuccca

SEQ ID NO: 215307 - RNA, 16 nt, Homo sapiens
guccuauuauauucau

SEQ ID NO: 215308 - RNA, 23 nt, Homo sapiens
ugugagacuguaaguuacaugaa

SEQ ID NO: 215309 - RNA, 16 nt, Homo sapiens
cuagucauucuucccu

SEQ ID NO: 215310 - RNA, 20 nt, Homo sapiens
augcugucuucguacuggga

SEQ ID NO: 215311 - RNA, 20 nt, Homo sapiens
ccaaugagaucauugugaag

SEQ ID NO: 215312 - RNA, 21 nt, Homo sapiens
aaguucuauuuauuugugaga

SEQ ID NO: 215313 - RNA, 21 nt, Homo sapiens
gcaaacuucagaguucuugcc

SEQ ID NO: 215314 - RNA, 14 nt, Homo sapiens
gcuuacaugccuac

SEQ ID NO: 215315 - RNA, 18 nt, Homo sapiens
aaaugauuucacagugug

SEQ ID NO: 215316 - RNA, 23 nt, Homo sapiens
guaacuguuuagaugaaugucag

SEQ ID NO: 215317 - RNA, 20 nt, Homo sapiens
acagucucccuuccuaugcu

SEQ ID NO: 215318 - RNA, 14 nt, Homo sapiens
ugaugacauucccu

SEQ ID NO: 215319 - RNA, 16 nt, Homo sapiens
ucacacugucuucuga

SEQ ID NO: 215320 - RNA, 14 nt, Homo sapiens
auaguccgucucug

SEQ ID NO: 215321 - RNA, 18 nt, Homo sapiens
acuuuguggucgacauca

SEQ ID NO: 215322 - RNA, 17 nt, Homo sapiens
uggccaugggucccauu

SEQ ID NO: 215323 - RNA, 17 nt, Homo sapiens
uuccacuugagugucaa

SEQ ID NO: 215324 - RNA, 17 nt, Homo sapiens
uuaaagguacuuugcag

SEQ ID NO: 215325 - RNA, 13 nt, Homo sapiens
gauucuauguuaa

SEQ ID NO: 215326 - RNA, 19 nt, Homo sapiens
caaucugugaugacauucc

SEQ ID NO: 215327 - RNA, 14 nt, Homo sapiens
auccaauugcugcu

SEQ ID NO: 215328 - RNA, 14 nt, Homo sapiens
auuauauucauucu

SEQ ID NO: 215329 - RNA, 16 nt, Homo sapiens
cacaaagaaccaccag

SEQ ID NO: 215330 - RNA, 13 nt, Homo sapiens
gauaucacuucca

SEQ ID NO: 215331 - RNA, 16 nt, Homo sapiens
auaaacauuucauuuc

SEQ ID NO: 215332 - RNA, 19 nt, Homo sapiens
uuacuuuuuggaaaagaau

SEQ ID NO: 215333 - RNA, 18 nt, Homo sapiens
uuauccuagucauucuuc

SEQ ID NO: 215334 - RNA, 20 nt, Homo sapiens
uuagacccucaugcugccaa

SEQ ID NO: 215335 - RNA, 15 nt, Homo sapiens
gagugucaagcugac

SEQ ID NO: 215336 - RNA, 19 nt, Homo sapiens
uggcacugguuuguucccu

SEQ ID NO: 215337 - RNA, 20 nt, Homo sapiens
uaauuaaugucaguauuuca

SEQ ID NO: 215338 - RNA, 16 nt, Homo sapiens
uaaacauuucauuucc

SEQ ID NO: 215339 - RNA, 20 nt, Homo sapiens
uuuuauaaugucccuucaca

SEQ ID NO: 215340 - RNA, 14 nt, Homo sapiens
gcaaagaugaaggu

SEQ ID NO: 215341 - RNA, 15 nt, Homo sapiens
uuaauauuucugagg

SEQ ID NO: 215342 - RNA, 16 nt, Homo sapiens
gaaaaucacacugucu

SEQ ID NO: 215343 - RNA, 19 nt, Homo sapiens
uguguggucaacauuucuc

SEQ ID NO: 215344 - RNA, 14 nt, Homo sapiens
ugcugaacaucaca

SEQ ID NO: 215345 - RNA, 19 nt, Homo sapiens
caauccuugccacagugug

SEQ ID NO: 215346 - RNA, 17 nt, Homo sapiens
cuguccuauuauauuca

SEQ ID NO: 215347 - RNA, 22 nt, Homo sapiens
cugaacuuuguggucgacauca

SEQ ID NO: 215348 - RNA, 20 nt, Homo sapiens
ugaccuugcugauggugaca

SEQ ID NO: 215349 - RNA, 19 nt, Homo sapiens
aguuuuuuuccuucaagaa

SEQ ID NO: 215350 - RNA, 21 nt, Homo sapiens
cguucccggguagccacugga

SEQ ID NO: 215351 - RNA, 21 nt, Homo sapiens
aggaggugggauaucacuucc

SEQ ID NO: 215352 - RNA, 18 nt, Homo sapiens
uagcaggaagcugugaga

SEQ ID NO: 215353 - RNA, 18 nt, Homo sapiens
ugccaauuugcacauuaa

SEQ ID NO: 215354 - RNA, 15 nt, Homo sapiens
gaauauugugcccca

SEQ ID NO: 215355 - RNA, 18 nt, Homo sapiens
ugaaggcagcagaauauu

SEQ ID NO: 215356 - RNA, 12 nt, Homo sapiens
ucccauucuugg

SEQ ID NO: 215357 - RNA, 16 nt, Homo sapiens
ucuggaugcugugaag

SEQ ID NO: 215358 - RNA, 14 nt, Homo sapiens
ccagugagacugug

SEQ ID NO: 215359 - RNA, 23 nt, Homo sapiens
auucauucuuuuugaaaugucaa

SEQ ID NO: 215360 - RNA, 16 nt, Homo sapiens
cugaacaucacagcuu

SEQ ID NO: 215361 - RNA, 21 nt, Homo sapiens
cucaagucuggcagacuuucu

SEQ ID NO: 215362 - RNA, 22 nt, Homo sapiens
uugacagauugaauuugccuaa

SEQ ID NO: 215363 - RNA, 17 nt, Homo sapiens
cucuaccugcacacugu

SEQ ID NO: 215364 - RNA, 19 nt, Homo sapiens
gauaucugcagggacagag

SEQ ID NO: 215365 - RNA, 12 nt, Homo sapiens
aauagaugacau

SEQ ID NO: 215366 - RNA, 23 nt, Homo sapiens
gcaagacauuauauagcaguaaa

SEQ ID NO: 215367 - RNA, 14 nt, Homo sapiens
cugauggugacauu

SEQ ID NO: 215368 - RNA, 23 nt, Homo sapiens
ucucccuuccuaugcuguucacu

SEQ ID NO: 215369 - RNA, 13 nt, Homo sapiens
ucccuuggacauu

SEQ ID NO: 215370 - RNA, 14 nt, Homo sapiens
cuauuauauucauu

SEQ ID NO: 215371 - RNA, 15 nt, Homo sapiens
ugacauaagugcuau

SEQ ID NO: 215372 - RNA, 14 nt, Homo sapiens
uagaugaaugucag

SEQ ID NO: 215373 - RNA, 23 nt, Homo sapiens
guacuauccaaucugugaugaca

SEQ ID NO: 215374 - RNA, 19 nt, Homo sapiens
guauuuauuacaacucuau

SEQ ID NO: 215375 - RNA, 13 nt, Homo sapiens
cucaaacuaacag

SEQ ID NO: 215376 - RNA, 16 nt, Homo sapiens
cacacuguccuauuau

SEQ ID NO: 215377 - RNA, 18 nt, Homo sapiens
aguagagguacacuugug

SEQ ID NO: 215378 - RNA, 15 nt, Homo sapiens
acacugucuucugau

SEQ ID NO: 215379 - RNA, 12 nt, Homo sapiens
ccuaaucuucca

SEQ ID NO: 215380 - RNA, 20 nt, Homo sapiens
aguacuuaauaaacuguggu

SEQ ID NO: 215381 - RNA, 18 nt, Homo sapiens
gauaucugcagggacaga

SEQ ID NO: 215382 - RNA, 17 nt, Homo sapiens
uccuagaaacugacaca

SEQ ID NO: 215383 - RNA, 17 nt, Homo sapiens
guauguguucuauucag

SEQ ID NO: 215384 - RNA, 12 nt, Homo sapiens
uucaguuugcag

SEQ ID NO: 215385 - RNA, 15 nt, Homo sapiens
aaucacacugucuuc

SEQ ID NO: 215386 - RNA, 19 nt, Homo sapiens
uugucaaagaagucauucu

SEQ ID NO: 215387 - RNA, 13 nt, Homo sapiens
aaauguggauuaa

SEQ ID NO: 215388 - RNA, 15 nt, Homo sapiens
uucuuggcccaggau

SEQ ID NO: 215389 - RNA, 14 nt, Homo sapiens
augcaaagaugaag

SEQ ID NO: 215390 - RNA, 21 nt, Homo sapiens
ucauucuuuuugaaaugucaa

SEQ ID NO: 215391 - RNA, 15 nt, Homo sapiens
agacuuucuucucua

SEQ ID NO: 215392 - RNA, 18 nt, Homo sapiens
uacagagaagauucuugu

SEQ ID NO: 215393 - RNA, 16 nt, Homo sapiens
uaacauuuauuugagu

SEQ ID NO: 215394 - RNA, 19 nt, Homo sapiens
auuaaaaggaagcuuacau

SEQ ID NO: 215395 - RNA, 20 nt, Homo sapiens
ccaggauuauugucaaagaa

SEQ ID NO: 215396 - RNA, 14 nt, Homo sapiens
cucagaugcacaug

SEQ ID NO: 215397 - RNA, 14 nt, Homo sapiens
gugaugacauuccc

SEQ ID NO: 215398 - RNA, 16 nt, Homo sapiens
acugaacuucagagca

SEQ ID NO: 215399 - RNA, 15 nt, Homo sapiens
acaguguuucuggcu

SEQ ID NO: 215400 - RNA, 20 nt, Homo sapiens
uagcaaggcugugcaucuag

SEQ ID NO: 215401 - RNA, 23 nt, Homo sapiens
guuuguucccugugucauuucaa

SEQ ID NO: 215402 - RNA, 20 nt, Homo sapiens
acaucaaucuaaagauacag

SEQ ID NO: 215403 - RNA, 11 nt, Homo sapiens
caaauguucuc

SEQ ID NO: 215404 - RNA, 21 nt, Homo sapiens
cacaauccuugccacagugug

SEQ ID NO: 215405 - RNA, 13 nt, Homo sapiens
uugaagauucuau

SEQ ID NO: 215406 - RNA, 15 nt, Homo sapiens
uuaaauauuuugacu

SEQ ID NO: 215407 - RNA, 17 nt, Homo sapiens
caauugcugcuuguaca

SEQ ID NO: 215408 - RNA, 14 nt, Homo sapiens
gucauuauguuaau

SEQ ID NO: 215409 - RNA, 15 nt, Homo sapiens
uucaaauguucucca

SEQ ID NO: 215410 - RNA, 20 nt, Homo sapiens
gguggggguaaggugcaucu

SEQ ID NO: 215411 - RNA, 14 nt, Homo sapiens
uuuugaaaugucaa

SEQ ID NO: 215412 - RNA, 16 nt, Homo sapiens
aaugagaucauuguga

SEQ ID NO: 215413 - RNA, 19 nt, Homo sapiens
uccacuugagugucaagcu

SEQ ID NO: 215414 - RNA, 13 nt, Homo sapiens
gaauaaagagggu

SEQ ID NO: 215415 - RNA, 22 nt, Homo sapiens
auuuacuuuaaacuacauuagg

SEQ ID NO: 215416 - RNA, 14 nt, Homo sapiens
agucauucuucccu

SEQ ID NO: 215417 - RNA, 18 nt, Homo sapiens
agaauauaaaaauaaagc

SEQ ID NO: 215418 - RNA, 20 nt, Homo sapiens
cuguaauuccuaacuaucac

SEQ ID NO: 215419 - RNA, 19 nt, Homo sapiens
cuucucuauuucuggauga

SEQ ID NO: 215420 - RNA, 17 nt, Homo sapiens
uauagcaagacauuaua

SEQ ID NO: 215421 - RNA, 15 nt, Homo sapiens
uaugugcacaucugu

SEQ ID NO: 215422 - RNA, 23 nt, Homo sapiens
cuuccaugacauaagugcuauug

SEQ ID NO: 215423 - RNA, 18 nt, Homo sapiens
cagcucuccccuucucug

SEQ ID NO: 215424 - RNA, 16 nt, Homo sapiens
cuauucaguggcuaac

SEQ ID NO: 215425 - RNA, 22 nt, Homo sapiens
auugauugggcacaucauuuca

SEQ ID NO: 215426 - RNA, 16 nt, Homo sapiens
auaaugucccuucaca

SEQ ID NO: 215427 - RNA, 13 nt, Homo sapiens
auguugcuaacag

SEQ ID NO: 215428 - RNA, 22 nt, Homo sapiens
uuuuuauauucucagcagagug

SEQ ID NO: 215429 - RNA, 14 nt, Homo sapiens
gcgccagugacagu

SEQ ID NO: 215430 - RNA, 14 nt, Homo sapiens
aauauugugcccca

SEQ ID NO: 215431 - RNA, 17 nt, Homo sapiens
agcagauccucaauaaa

SEQ ID NO: 215432 - RNA, 16 nt, Homo sapiens
uacuuaauaaacugug

SEQ ID NO: 215433 - RNA, 15 nt, Homo sapiens
uaaugcuugcugcug

SEQ ID NO: 215434 - RNA, 13 nt, Homo sapiens
gaugcugugaaga

SEQ ID NO: 215435 - RNA, 13 nt, Homo sapiens
auuugcacauuaa

SEQ ID NO: 215436 - RNA, 19 nt, Homo sapiens
gaccuugcugauggugaca

SEQ ID NO: 215437 - RNA, 22 nt, Homo sapiens
cuggaguuauugaagcagagug

SEQ ID NO: 215438 - RNA, 22 nt, Homo sapiens
uguaauaaacucauuucuagca

SEQ ID NO: 215439 - RNA, 18 nt, Homo sapiens
acuucagagcaugaaaau

SEQ ID NO: 215440 - RNA, 17 nt, Homo sapiens
aucugugaugacauucc

SEQ ID NO: 215441 - RNA, 23 nt, Homo sapiens
aguaaguacuuaauaaacugugg

SEQ ID NO: 215442 - RNA, 17 nt, Homo sapiens
ccuggauguacuaucca

SEQ ID NO: 215443 - RNA, 22 nt, Homo sapiens
ccuuggccaugggucccauucu

SEQ ID NO: 215444 - RNA, 19 nt, Homo sapiens
uauccaauugcugcuugua

SEQ ID NO: 215445 - RNA, 14 nt, Homo sapiens
acauugacagauug

SEQ ID NO: 215446 - RNA, 15 nt, Homo sapiens
uauagauguugcuaa

SEQ ID NO: 215447 - RNA, 14 nt, Homo sapiens
ccucaugcugccaa

SEQ ID NO: 215448 - RNA, 20 nt, Homo sapiens
cuuaagaaauuuguggaaaa

SEQ ID NO: 215449 - RNA, 15 nt, Homo sapiens
ccacaguguggggca

SEQ ID NO: 215450 - RNA, 15 nt, Homo sapiens
guagucagacuggau

SEQ ID NO: 215451 - RNA, 19 nt, Homo sapiens
uccacauuuguuuugccaa

SEQ ID NO: 215452 - RNA, 16 nt, Homo sapiens
ggugacauugcaccug

SEQ ID NO: 215453 - RNA, 14 nt, Homo sapiens
gcaggcuggaguua

SEQ ID NO: 215454 - RNA, 17 nt, Homo sapiens
ucuccucucucuguaau

SEQ ID NO: 215455 - RNA, 15 nt, Homo sapiens
accuggcaucuuaca

SEQ ID NO: 215456 - RNA, 18 nt, Homo sapiens
uaacucuaccugcacacu

SEQ ID NO: 215457 - RNA, 21 nt, Homo sapiens
cauucuucccuaaucuuccac

SEQ ID NO: 215458 - RNA, 21 nt, Homo sapiens
uaaugguaguuuuacaguguu

SEQ ID NO: 215459 - RNA, 23 nt, Homo sapiens
ugggauaucacuuccaugacaua

SEQ ID NO: 215460 - RNA, 20 nt, Homo sapiens
caaucuaaagauacaguguc

SEQ ID NO: 215461 - RNA, 18 nt, Homo sapiens
gcucuccccuucucugua

SEQ ID NO: 215462 - RNA, 20 nt, Homo sapiens
uuggcccaggauuauuguca

SEQ ID NO: 215463 - RNA, 14 nt, Homo sapiens
ugaccuugcugaug

SEQ ID NO: 215464 - RNA, 22 nt, Homo sapiens
caguguuuuaggagcaugagug

SEQ ID NO: 215465 - RNA, 22 nt, Homo sapiens
guaaguuacaugaaggcagcag

SEQ ID NO: 215466 - RNA, 16 nt, Homo sapiens
caaugagaucauugug

SEQ ID NO: 215467 - RNA, 18 nt, Homo sapiens
aaaagacaacauaacuca

SEQ ID NO: 215468 - RNA, 17 nt, Homo sapiens
cuucaguuugcagagua

SEQ ID NO: 215469 - RNA, 18 nt, Homo sapiens
gacauuuuaugucuuucu

SEQ ID NO: 215470 - RNA, 15 nt, Homo sapiens
gugcacgcacacugu

SEQ ID NO: 215471 - RNA, 17 nt, Homo sapiens
uuaauauggaucuguau

SEQ ID NO: 215472 - RNA, 11 nt, Homo sapiens
ggcugcaguuu

SEQ ID NO: 215473 - RNA, 17 nt, Homo sapiens
cucuccccuucucugua

SEQ ID NO: 215474 - RNA, 14 nt, Homo sapiens
uuaaacaugcugua

SEQ ID NO: 215475 - RNA, 13 nt, Homo sapiens
aaucuggauucau

SEQ ID NO: 215476 - RNA, 11 nt, Homo sapiens
ucuauguuaau

SEQ ID NO: 215477 - RNA, 12 nt, Homo sapiens
ccucucucugua

SEQ ID NO: 215478 - RNA, 15 nt, Homo sapiens
agacauuauauagca

SEQ ID NO: 215479 - RNA, 21 nt, Homo sapiens
agacccucaugcugccaauau

SEQ ID NO: 215480 - RNA, 15 nt, Homo sapiens
uuaccccucacaauc

SEQ ID NO: 215481 - RNA, 12 nt, Homo sapiens
auacagugucug

SEQ ID NO: 215482 - RNA, 16 nt, Homo sapiens
aaagggauuuucagcc

SEQ ID NO: 215483 - RNA, 22 nt, Homo sapiens
uggacacuucacgcccuuggcc

SEQ ID NO: 215484 - RNA, 15 nt, Homo sapiens
aucuguuacacaaag

SEQ ID NO: 215485 - RNA, 21 nt, Homo sapiens
cuugcugauggugacauugca

SEQ ID NO: 215486 - RNA, 18 nt, Homo sapiens
uuuauuauuaacaaaaca

SEQ ID NO: 215487 - RNA, 16 nt, Homo sapiens
aggcaggggaauguau

SEQ ID NO: 215488 - RNA, 22 nt, Homo sapiens
ucaguuuaucuguucauaugga

SEQ ID NO: 215489 - RNA, 15 nt, Homo sapiens
aaacauuucauuucc

SEQ ID NO: 215490 - RNA, 17 nt, Homo sapiens
uggaaaggaaugcaaag

SEQ ID NO: 215491 - RNA, 17 nt, Homo sapiens
uucaguuugcagaguag

SEQ ID NO: 215492 - RNA, 21 nt, Homo sapiens
cuauuuauuugugagacugua

SEQ ID NO: 215493 - RNA, 22 nt, Homo sapiens
aauaauuagguauuuucuccaa

SEQ ID NO: 215494 - RNA, 21 nt, Homo sapiens
gccagcucaccccaucauccc

SEQ ID NO: 215495 - RNA, 20 nt, Homo sapiens
caggaagcugugagagcagu

SEQ ID NO: 215496 - RNA, 23 nt, Homo sapiens
cugcaacaugccagccacuguga

SEQ ID NO: 215497 - RNA, 14 nt, Homo sapiens
gauuaaagugccca

SEQ ID NO: 215498 - RNA, 22 nt, Homo sapiens
uuggguuuauuuggaaaggaau

SEQ ID NO: 215499 - RNA, 14 nt, Homo sapiens
augcuuggauguaa

SEQ ID NO: 215500 - RNA, 22 nt, Homo sapiens
caguuuaucuguucauauggau

SEQ ID NO: 215501 - RNA, 13 nt, Homo sapiens
caacucuauuuaa

SEQ ID NO: 215502 - RNA, 16 nt, Homo sapiens
caaauguucacuggua

SEQ ID NO: 215503 - RNA, 14 nt, Homo sapiens
gaaaugauuucaca

SEQ ID NO: 215504 - RNA, 15 nt, Homo sapiens
uccaaucugugauga

SEQ ID NO: 215505 - RNA, 18 nt, Homo sapiens
uccuaaugcuugcugcug

SEQ ID NO: 215506 - RNA, 22 nt, Homo sapiens
ugggugcuuaguaaguacuuaa

SEQ ID NO: 215507 - RNA, 15 nt, Homo sapiens
ugcaccuggauguac

SEQ ID NO: 215508 - RNA, 21 nt, Homo sapiens
aaucgcuccaccuugcagcuc

SEQ ID NO: 215509 - RNA, 21 nt, Homo sapiens
auccuaauaaaaaggugacca

SEQ ID NO: 215510 - RNA, 18 nt, Homo sapiens
cugugcaucuagccucaa

SEQ ID NO: 215511 - RNA, 23 nt, Homo sapiens
augcuguucacuggacacuucac

SEQ ID NO: 215512 - RNA, 11 nt, Homo sapiens
aaaggugacca

SEQ ID NO: 215513 - RNA, 16 nt, Homo sapiens
augauuucacagugug

SEQ ID NO: 215514 - RNA, 13 nt, Homo sapiens
ugacauugacuau

SEQ ID NO: 215515 - RNA, 23 nt, Homo sapiens
gcuggaguuauugaagcagagug

SEQ ID NO: 215516 - RNA, 14 nt, Homo sapiens
uuuauccuagucau

SEQ ID NO: 215517 - RNA, 18 nt, Homo sapiens
cucacagaagaugaagca

SEQ ID NO: 215518 - RNA, 15 nt, Homo sapiens
uauccaaucugugau

SEQ ID NO: 215519 - RNA, 13 nt, Homo sapiens
acacucgccagcu

SEQ ID NO: 215520 - RNA, 23 nt, Homo sapiens
uuucuuguaaggcauacugccuu

SEQ ID NO: 215521 - RNA, 11 nt, Homo sapiens
gguagccacug

SEQ ID NO: 215522 - RNA, 14 nt, Homo sapiens
gaaugcccagugag

SEQ ID NO: 215523 - RNA, 17 nt, Homo sapiens
gcccaggauuauuguca

SEQ ID NO: 215524 - RNA, 17 nt, Homo sapiens
uccuagucauucuuccc

SEQ ID NO: 215525 - RNA, 14 nt, Homo sapiens
caagcaaauggcca

SEQ ID NO: 215526 - RNA, 17 nt, Influenza A virus
uucaugaaaaaaugccu

SEQ ID NO: 215527 - RNA, 14 nt, Influenza A virus
uucagaaauaugag

SEQ ID NO: 215528 - RNA, 17 nt, Influenza A virus
uuuagcuuguccuucau

SEQ ID NO: 215529 - RNA, 14 nt, Influenza A virus
uuguccuucaugaa

SEQ ID NO: 215530 - RNA, 21 nt, Influenza A virus
ugaaaaaaugccuuguuccua

SEQ ID NO: 215531 - RNA, 16 nt, Influenza A virus
ugaaaaaaugccuugu

SEQ ID NO: 215532 - RNA, 17 nt, Influenza A virus
ugauugaagaagugaga

SEQ ID NO: 215533 - RNA, 16 nt, Influenza A virus
ucaugaaaaaaugccu

SEQ ID NO: 215534 - RNA, 22 nt, Influenza A virus
ucgaauaguuuaaaaacgaccu

SEQ ID NO: 215535 - RNA, 15 nt, Influenza A virus
agaagugagacacaa

SEQ ID NO: 215536 - RNA, 21 nt, Influenza A virus
agaauuucagaaauaugagga

SEQ ID NO: 215537 - RNA, 22 nt, Influenza A virus
agaauuucagaaauaugaggaa

SEQ ID NO: 215538 - RNA, 13 nt, Influenza A virus
acuguccaaaaaa

SEQ ID NO: 215539 - RNA, 23 nt, Influenza A virus
acuguccaaaaaaguaccuuguu

SEQ ID NO: 215540 - RNA, 11 nt, Influenza A virus
acuguccaaaa

SEQ ID NO: 215541 - RNA, 22 nt, Influenza A virus
acagagaauaguuuugagcaaa

SEQ ID NO: 215542 - RNA, 13 nt, Influenza A virus
auccauacugucc

SEQ ID NO: 215543 - RNA, 15 nt, Influenza A virus
auacuguccaaaaaa

SEQ ID NO: 215544 - RNA, 17 nt, Influenza A virus
agugcuacuauuugcua

SEQ ID NO: 215545 - RNA, 12 nt, Influenza A virus
ccuucaugaaaa

SEQ ID NO: 215546 - RNA, 18 nt, Influenza A virus
auuuagcuuguccuucau

SEQ ID NO: 215547 - RNA, 20 nt, Influenza A virus
auuugcuauccauacugucc

SEQ ID NO: 215548 - RNA, 22 nt, Influenza A virus
cgucuuuuuuucaaaugcauuu

SEQ ID NO: 215549 - RNA, 17 nt, Influenza A virus
cuauuugcuauccauac

SEQ ID NO: 215550 - RNA, 19 nt, Influenza A virus
cuacuauuugcuauccaua

SEQ ID NO: 215551 - RNA, 18 nt, Influenza A virus
cuacuauuugcuauccau

SEQ ID NO: 215552 - RNA, 13 nt, Influenza A virus
cuacuauuugcua

SEQ ID NO: 215553 - RNA, 20 nt, Influenza A virus
cuguccaaaaaaguaccuug

SEQ ID NO: 215554 - RNA, 21 nt, Influenza A virus
cuucaugaaaaaaugccuugu

SEQ ID NO: 215555 - RNA, 21 nt, Influenza A virus
gcagugcuacuauuugcuauc

SEQ ID NO: 215556 - RNA, 13 nt, Influenza A virus
gaggaaaaacacc

SEQ ID NO: 215557 - RNA, 22 nt, Influenza A virus
gaggaaaaacacccuuguuucu

SEQ ID NO: 215558 - RNA, 18 nt, Influenza A virus
gaaauaugaggaaaaaca

SEQ ID NO: 215559 - RNA, 20 nt, Influenza A virus
gaauuucagaaauaugagga

SEQ ID NO: 215560 - RNA, 23 nt, Influenza A virus
gcuugaaguggagcaagagauaa

SEQ ID NO: 215561 - RNA, 16 nt, Influenza A virus
guccaaaaaaguaccu

SEQ ID NO: 215562 - RNA, 12 nt, Influenza A virus
uacuauuugcua

SEQ ID NO: 215563 - RNA, 17 nt, Influenza A virus
uaugaggaaaaacaccc

SEQ ID NO: 215564 - RNA, 14 nt, Influenza A virus
gacacaaacugaag

SEQ ID NO: 215565 - RNA, 18 nt, Influenza A virus
gaauaguuuaaaaacgac

SEQ ID NO: 215566 - RNA, 22 nt, Influenza A virus
gaauaguuuaaaaacgaccuug

SEQ ID NO: 215567 - RNA, 15 nt, Influenza A virus
cuuguccuucaugaa

SEQ ID NO: 215568 - RNA, 16 nt, Influenza A virus
cuuguccuucaugaaa

SEQ ID NO: 215569 - RNA, 19 nt, Influenza A virus
ccuucaugaaaaaaugccu

SEQ ID NO: 215570 - RNA, 16 nt, Influenza A virus
caugaaaaaaugccuu

SEQ ID NO: 215571 - RNA, 17 nt, Influenza A virus
caugaaaaaaugccuug

SEQ ID NO: 215572 - RNA, 15 nt, Influenza A virus
aaaaugccuuguucc

SEQ ID NO: 215573 - RNA, 18 nt, Influenza A virus
cuguccaaaaaaguaccu

SEQ ID NO: 215574 - RNA, 14 nt, Influenza A virus
cuauccauacuguc

SEQ ID NO: 215575 - RNA, 17 nt, Influenza A virus
cuacuauuugcuaucca

SEQ ID NO: 215576 - RNA, 20 nt, Influenza A virus
cuacuauuugcuauccauac

SEQ ID NO: 215577 - RNA, 14 nt, Influenza A virus
guccuucaugaaaa

SEQ ID NO: 215578 - RNA, 15 nt, Influenza A virus
uccaaaaaaguaccu

SEQ ID NO: 215579 - RNA, 11 nt, Influenza A virus
ucuugcacuug

SEQ ID NO: 215580 - RNA, 12 nt, Influenza A virus
uuuugagcaaau

SEQ ID NO: 215581 - RNA, 13 nt, Influenza A virus
uuugcuauccaua

SEQ ID NO: 215582 - RNA, 15 nt, Influenza A virus
uuguccuucaugaaa

SEQ ID NO: 215583 - RNA, 18 nt, Influenza A virus
uucaugaaaaaaugccuu

SEQ ID NO: 215584 - RNA, 15 nt, Influenza A virus
ugcuauccauacugu

SEQ ID NO: 215585 - RNA, 23 nt, Influenza A virus
ugcuauccauacuguccaaaaaa

SEQ ID NO: 215586 - RNA, 20 nt, Influenza A virus
aguuuaaaaacgaccuuguu

SEQ ID NO: 215587 - RNA, 17 nt, Influenza A virus
aguuuaaaaacgaccuu

SEQ ID NO: 215588 - RNA, 17 nt, Influenza A virus
agcuuguccuucaugaa

SEQ ID NO: 215589 - RNA, 18 nt, Influenza A virus
auccauacuguccaaaaa

SEQ ID NO: 215590 - RNA, 16 nt, Influenza A virus
augaggaaaaacaccc

SEQ ID NO: 215591 - RNA, 13 nt, Influenza A virus
augaaaaaaugcc

SEQ ID NO: 215592 - RNA, 14 nt, Influenza A virus
caaaaaaguaccuu

SEQ ID NO: 215593 - RNA, 19 nt, Influenza A virus
aauuuagcuuguccuucau

SEQ ID NO: 215594 - RNA, 21 nt, Influenza A virus
aauaugaggaaaaacacccuu

SEQ ID NO: 215595 - RNA, 12 nt, Influenza A virus
aauaugaggaaa

SEQ ID NO: 215596 - RNA, 18 nt, Influenza A virus
aauaugaggaaaaacacc

SEQ ID NO: 215597 - RNA, 18 nt, Influenza A virus
agaauuucagaaauauga

SEQ ID NO: 215598 - RNA, 11 nt, Influenza A virus
aaaaaugccuu

SEQ ID NO: 215599 - RNA, 11 nt, Influenza A virus
aaaaaaugccu

SEQ ID NO: 215600 - RNA, 12 nt, Influenza A virus
aaaaaaugccuu

SEQ ID NO: 215601 - RNA, 12 nt, Influenza A virus
aaaaacacccuu

SEQ ID NO: 215602 - RNA, 20 nt, Influenza A virus
uggcagugcuacuauuugcu

SEQ ID NO: 215603 - RNA, 18 nt, Influenza A virus
ucuguucaaaaaacuccu

SEQ ID NO: 215604 - RNA, 19 nt, Influenza A virus
ucuguucaaaaaacuccuu

SEQ ID NO: 215605 - RNA, 18 nt, Influenza A virus
uccaaaaaaguaccuugu

SEQ ID NO: 215606 - RNA, 16 nt, Influenza A virus
ucauugggaucuugca

SEQ ID NO: 215607 - RNA, 12 nt, Influenza A virus
uccuucaugaaa

SEQ ID NO: 215608 - RNA, 14 nt, Influenza A virus
cuuguccuucauga

SEQ ID NO: 215609 - RNA, 19 nt, Influenza A virus
uagcuuguccuucaugaaa

SEQ ID NO: 215610 - RNA, 22 nt, Influenza A virus
gcuacuauuugcuauccauacu

SEQ ID NO: 215611 - RNA, 22 nt, Influenza A virus
gccuuacaucuauugcuugaag

SEQ ID NO: 215612 - RNA, 15 nt, Influenza A virus
caaaaaacuccuugu

SEQ ID NO: 215613 - RNA, 18 nt, Influenza A virus
caugaaaaaaugccuugu

SEQ ID NO: 215614 - RNA, 21 nt, Influenza A virus
caugaaaaaaugccuuguucc

SEQ ID NO: 215615 - RNA, 23 nt, Influenza A virus
caugaaaaaaugccuuguuccua

SEQ ID NO: 215616 - RNA, 23 nt, Influenza A virus
acacaaacugaagguaacagaga

SEQ ID NO: 215617 - RNA, 16 nt, Influenza A virus
auaugaggaaaaacac

SEQ ID NO: 215618 - RNA, 14 nt, Influenza A virus
agcuuguccuucau

SEQ ID NO: 215619 - RNA, 16 nt, Influenza A virus
agcuuguccuucauga

SEQ ID NO: 215620 - RNA, 14 nt, Influenza A virus
agaagugagacaca

SEQ ID NO: 215621 - RNA, 15 nt, Influenza A virus
agaaauaugaggaaa

SEQ ID NO: 215622 - RNA, 16 nt, Influenza A virus
acuauuugcuauccau

SEQ ID NO: 215623 - RNA, 15 nt, Influenza A virus
aaugccuuguuccua

SEQ ID NO: 215624 - RNA, 20 nt, Influenza A virus
aaggagugccaaagucuaug

SEQ ID NO: 215625 - RNA, 21 nt, Influenza A virus
aaggaacagcagagugcugug

SEQ ID NO: 215626 - RNA, 21 nt, Influenza A virus
aaauaugaggaaaaacacccu

SEQ ID NO: 215627 - RNA, 23 nt, Influenza A virus
auacuguccaaaaaaguaccuug

SEQ ID NO: 215628 - RNA, 12 nt, Influenza A virus
cagaaauaugag

SEQ ID NO: 215629 - RNA, 13 nt, Influenza A virus
auuugcuauccau

SEQ ID NO: 215630 - RNA, 12 nt, Influenza A virus
aaaaaguaccuu

SEQ ID NO: 215631 - RNA, 18 nt, Influenza A virus
aaaaaugccuuguuccua

SEQ ID NO: 215632 - RNA, 22 nt, Influenza A virus
uguggcagugcuacuauuugcu

SEQ ID NO: 215633 - RNA, 15 nt, Influenza A virus
uguccuucaugaaaa

SEQ ID NO: 215634 - RNA, 13 nt, Influenza A virus
ugcuugaagugga

SEQ ID NO: 215635 - RNA, 20 nt, Influenza A virus
uugcuugaaguggagcaaga

SEQ ID NO: 215636 - RNA, 20 nt, Influenza A virus
uuucagaaauaugaggaaaa

SEQ ID NO: 215637 - RNA, 16 nt, Influenza A virus
uaugaggaaaaacacc

SEQ ID NO: 215638 - RNA, 20 nt, Influenza A virus
uacuguccaaaaaaguaccu

SEQ ID NO: 215639 - RNA, 14 nt, Influenza A virus
uacuguccaaaaaa

SEQ ID NO: 215640 - RNA, 22 nt, Influenza A virus
uagaauuucagaaauaugagga

SEQ ID NO: 215641 - RNA, 17 nt, Influenza A virus
uccauacuguccaaaaa

SEQ ID NO: 215642 - RNA, 15 nt, Influenza A virus
uccauacuguccaaa

SEQ ID NO: 215643 - RNA, 23 nt, Influenza A virus
ucgaauaguuuaaaaacgaccuu

SEQ ID NO: 215644 - RNA, 22 nt, Influenza A virus
guggcagugcuacuauuugcua

SEQ ID NO: 215645 - RNA, 19 nt, Influenza A virus
uacuauuugcuauccauac

SEQ ID NO: 215646 - RNA, 23 nt, Influenza A virus
cagugcuacuauuugcuauccau

SEQ ID NO: 215647 - RNA, 17 nt, Influenza A virus
ccauacuguccaaaaaa

SEQ ID NO: 215648 - RNA, 16 nt, Influenza A virus
gcuuguccuucaugaa

SEQ ID NO: 215649 - RNA, 23 nt, Influenza A virus
gaauuucagaaauaugaggaaaa

SEQ ID NO: 215650 - RNA, 21 nt, Influenza A virus
gaaaaaaugccuuguuccuac

SEQ ID NO: 215651 - RNA, 22 nt, Homo sapiens
uggacacuucacgcccuuggcc

SEQ ID NO: 215652 - RNA, 20 nt, Homo sapiens
ucuaaagauacagugucuga

SEQ ID NO: 215653 - RNA, 17 nt, Homo sapiens
cucuccccuucucugua

SEQ ID NO: 215654 - RNA, 14 nt, Homo sapiens
gcuuacaugccuac

SEQ ID NO: 215655 - RNA, 23 nt, Homo sapiens
cuuccaugacauaagugcuauug

SEQ ID NO: 215656 - RNA, 18 nt, Homo sapiens
guucacuggacacuucac

SEQ ID NO: 215657 - RNA, 12 nt, Homo sapiens
cccuucucugua

SEQ ID NO: 215658 - RNA, 16 nt, Homo sapiens
augauuucacagugug

SEQ ID NO: 215659 - RNA, 15 nt, Homo sapiens
uaaugcuugcugcug

SEQ ID NO: 215660 - RNA, 19 nt, Homo sapiens
auuaaaaggaagcuuacau

SEQ ID NO: 215661 - RNA, 22 nt, Homo sapiens
ugaggguauguuuuauauagca

SEQ ID NO: 215662 - RNA, 17 nt, Homo sapiens
ucuccucucucuguaau

SEQ ID NO: 215663 - RNA, 22 nt, Homo sapiens
auuuacuuuaaacuacauuagg

SEQ ID NO: 215664 - RNA, 22 nt, Homo sapiens
uuccuaugcuguucacuggaca

SEQ ID NO: 215665 - RNA, 14 nt, Homo sapiens
gauuaaagugccca

SEQ ID NO: 215666 - RNA, 21 nt, Homo sapiens
uuuaaucuuuuaugauugccu

SEQ ID NO: 215667 - RNA, 17 nt, Homo sapiens
ucugugaugacauuccc

SEQ ID NO: 215668 - RNA, 17 nt, Homo sapiens
gaaaaggccuucuuccc

SEQ ID NO: 215669 - RNA, 18 nt, Homo sapiens
gaaaaggccuucuuccca

SEQ ID NO: 215670 - RNA, 23 nt, Homo sapiens
guauuccuagaaacugacacaug

SEQ ID NO: 215671 - RNA, 20 nt, Homo sapiens
uuaaauagaugacauugacu

SEQ ID NO: 215672 - RNA, 15 nt, Homo sapiens
aaugucaguauuuca

SEQ ID NO: 215673 - RNA, 16 nt, Homo sapiens
auuccuaacuaucacu

SEQ ID NO: 215674 - RNA, 15 nt, Homo sapiens
agucucccuuccuau

SEQ ID NO: 215675 - RNA, 13 nt, Homo sapiens
cccuucucuguau

SEQ ID NO: 215676 - RNA, 15 nt, Homo sapiens
aaacauuucauuucc

SEQ ID NO: 215677 - RNA, 16 nt, Homo sapiens
ggugacauugcaccug

SEQ ID NO: 215678 - RNA, 16 nt, Homo sapiens
aaugagaucauuguga

SEQ ID NO: 215679 - RNA, 13 nt, Homo sapiens
agucuucuauuua

SEQ ID NO: 215680 - RNA, 12 nt, Homo sapiens
gucagacuggau

SEQ ID NO: 215681 - RNA, 13 nt, Homo sapiens
cuuauuuccucau

SEQ ID NO: 215682 - RNA, 12 nt, Homo sapiens
uuggcccaggau

SEQ ID NO: 215683 - RNA, 14 nt, Homo sapiens
ugcugaacaucaca

SEQ ID NO: 215684 - RNA, 20 nt, Homo sapiens
caggaagcugugagagcagu

SEQ ID NO: 215685 - RNA, 23 nt, Homo sapiens
ucaguuguuauuuauugaaauga

SEQ ID NO: 215686 - RNA, 13 nt, Homo sapiens
ugaugacauuccc

SEQ ID NO: 215687 - RNA, 20 nt, Homo sapiens
aaggcuuagacccucaugcu

SEQ ID NO: 215688 - RNA, 18 nt, Homo sapiens
uuugaagguagaauguuu

SEQ ID NO: 215689 - RNA, 14 nt, Homo sapiens
gcuuagaacaaagg

SEQ ID NO: 215690 - RNA, 21 nt, Homo sapiens
gcaaacuucagaguucuugcc

SEQ ID NO: 215691 - RNA, 20 nt, Homo sapiens
auucugagaugacuauucag

SEQ ID NO: 215692 - RNA, 21 nt, Homo sapiens
gccagcucaccccaucauccc

SEQ ID NO: 215693 - RNA, 14 nt, Homo sapiens
augcuuggauguaa

SEQ ID NO: 215694 - RNA, 18 nt, Homo sapiens
ugacauugcaccuggaug

SEQ ID NO: 215695 - RNA, 16 nt, Homo sapiens
ugccagccacugugau

SEQ ID NO: 215696 - RNA, 16 nt, Homo sapiens
uuauugaagcagagug

SEQ ID NO: 215697 - RNA, 13 nt, Homo sapiens
gaugacauucccu

SEQ ID NO: 215698 - RNA, 23 nt, Homo sapiens
ucuccucucucuguaauaaacuc

SEQ ID NO: 215699 - RNA, 18 nt, Homo sapiens
aaaugauuucacagugug

SEQ ID NO: 215700 - RNA, 14 nt, Homo sapiens
agucauucuucccu

SEQ ID NO: 215701 - RNA, 17 nt, Homo sapiens
aggagcaugagugccgu

SEQ ID NO: 215702 - RNA, 12 nt, Homo sapiens
cugugaugacau

SEQ ID NO: 215703 - RNA, 13 nt, Homo sapiens
cuguuacacaaag

SEQ ID NO: 215704 - RNA, 21 nt, Homo sapiens
ucauucuuuuugaaaugucaa

SEQ ID NO: 215705 - RNA, 14 nt, Homo sapiens
uuuauccuagucau

SEQ ID NO: 215706 - RNA, 16 nt, Homo sapiens
aaauagaugacauuga

SEQ ID NO: 215707 - RNA, 15 nt, Homo sapiens
auccaaucugugaug

SEQ ID NO: 215708 - RNA, 22 nt, Homo sapiens
aaacacauuaaagguacuuugc

SEQ ID NO: 215709 - RNA, 17 nt, Homo sapiens
gcccaggauuauuguca

SEQ ID NO: 215710 - RNA, 23 nt, Homo sapiens
ugggauaucacuuccaugacaua

SEQ ID NO: 215711 - RNA, 14 nt, Homo sapiens
cucagaugcacaug

SEQ ID NO: 215712 - RNA, 18 nt, Homo sapiens
uuuauuauuaacaaaaca

SEQ ID NO: 215713 - RNA, 17 nt, Homo sapiens
uccuaugcuguucacug

SEQ ID NO: 215714 - RNA, 15 nt, Homo sapiens
gaauauugugcccca

SEQ ID NO: 215715 - RNA, 12 nt, Homo sapiens
ccucucucugua

SEQ ID NO: 215716 - RNA, 13 nt, Homo sapiens
aaugcccagugag

SEQ ID NO: 215717 - RNA, 18 nt, Homo sapiens
caacaugccagccacugu

SEQ ID NO: 215718 - RNA, 20 nt, Homo sapiens
acagucucccuuccuaugcu

SEQ ID NO: 215719 - RNA, 22 nt, Homo sapiens
gcccucagaaucgcuccaccuu

SEQ ID NO: 215720 - RNA, 13 nt, Homo sapiens
ucacuuccaugac

SEQ ID NO: 215721 - RNA, 17 nt, Homo sapiens
ccccucacaauccuugc

SEQ ID NO: 215722 - RNA, 13 nt, Homo sapiens
ggaacuccugacu

SEQ ID NO: 215723 - RNA, 16 nt, Homo sapiens
caguagucagacugga

SEQ ID NO: 215724 - RNA, 17 nt, Homo sapiens
cuucaguuugcagagua

SEQ ID NO: 215725 - RNA, 20 nt, Homo sapiens
caugcugaacaucacagcuu

SEQ ID NO: 215726 - RNA, 11 nt, Homo sapiens
ucuauguuaau

SEQ ID NO: 215727 - RNA, 12 nt, Homo sapiens
cugcacacuguc

SEQ ID NO: 215728 - RNA, 13 nt, Homo sapiens
cacuggacacuuc

SEQ ID NO: 215729 - RNA, 12 nt, Homo sapiens
gaagucauucuu

SEQ ID NO: 215730 - RNA, 14 nt, Homo sapiens
gugaugacauuccc

SEQ ID NO: 215731 - RNA, 20 nt, Homo sapiens
acacaugcugaacaucacag

SEQ ID NO: 215732 - RNA, 21 nt, Homo sapiens
cucaagucuggcagacuuucu

SEQ ID NO: 215733 - RNA, 14 nt, Homo sapiens
auauugugccccau

SEQ ID NO: 215734 - RNA, 18 nt, Homo sapiens
acuuuguggucgacauca

SEQ ID NO: 215735 - RNA, 13 nt, Homo sapiens
gauaucacuucca

SEQ ID NO: 215736 - RNA, 14 nt, Homo sapiens
uggugacauugcac

SEQ ID NO: 215737 - RNA, 15 nt, Homo sapiens
aauguaugugcacau

SEQ ID NO: 215738 - RNA, 12 nt, Homo sapiens
cuuagaacaaag

SEQ ID NO: 215739 - RNA, 20 nt, Homo sapiens
uaauuaaugucaguauuuca

SEQ ID NO: 215740 - RNA, 21 nt, Homo sapiens
ugguaguuuuacaguguuucu

SEQ ID NO: 215741 - RNA, 21 nt, Homo sapiens
cuauuuauuugugagacugua

SEQ ID NO: 215742 - RNA, 20 nt, Homo sapiens
agcacaaagcagauccucaa

SEQ ID NO: 215743 - RNA, 14 nt, Homo sapiens
agcagcgccaguga

SEQ ID NO: 215744 - RNA, 18 nt, Homo sapiens
uacagagaagauucuugu

SEQ ID NO: 215745 - RNA, 17 nt, Homo sapiens
cugaacuuuguggucga

SEQ ID NO: 215746 - RNA, 15 nt, Homo sapiens
cauuucaaacagucu

SEQ ID NO: 215747 - RNA, 19 nt, Homo sapiens
uguguggucaacauuucuc

SEQ ID NO: 215748 - RNA, 21 nt, Homo sapiens
uucaagaaugcaguacuaaca

SEQ ID NO: 215749 - RNA, 19 nt, Homo sapiens
agggauuuucagcccucag

SEQ ID NO: 215750 - RNA, 14 nt, Homo sapiens
agcagagugcuuua

SEQ ID NO: 215751 - RNA, 15 nt, Homo sapiens
accuggcaucuuaca

SEQ ID NO: 215752 - RNA, 20 nt, Homo sapiens
gacgugcacgcacacugucu

SEQ ID NO: 215753 - RNA, 14 nt, Homo sapiens
guucccugugucau

SEQ ID NO: 215754 - RNA, 19 nt, Homo sapiens
uccacuugagugucaagcu

SEQ ID NO: 215755 - RNA, 20 nt, Homo sapiens
caugagcuggcgggauugaa

SEQ ID NO: 215756 - RNA, 20 nt, Homo sapiens
cagacuggauaguccgucuc

SEQ ID NO: 215757 - RNA, 15 nt, Homo sapiens
ccacaguguggggca

SEQ ID NO: 215758 - RNA, 11 nt, Homo sapiens
aaucacacugu

SEQ ID NO: 215759 - RNA, 17 nt, Homo sapiens
auaucacuuccaugaca

SEQ ID NO: 215760 - RNA, 15 nt, Homo sapiens
uuuagaugaauguca

SEQ ID NO: 215761 - RNA, 22 nt, Homo sapiens
uucuggaugaaugcccagugag

SEQ ID NO: 215762 - RNA, 13 nt, Homo sapiens
uguccuaaugcuu

SEQ ID NO: 215763 - RNA, 16 nt, Homo sapiens
ccuaacuaucacuggu

SEQ ID NO: 215764 - RNA, 22 nt, Homo sapiens
aaacgauaaaauguggauuaaa

SEQ ID NO: 215765 - RNA, 21 nt, Homo sapiens
uauucucagcagagugcuuua

SEQ ID NO: 215766 - RNA, 22 nt, Homo sapiens
cuauuuauuuauuuauucauua

SEQ ID NO: 215767 - RNA, 13 nt, Homo sapiens
auuugcacauuaa

SEQ ID NO: 215768 - RNA, 12 nt, Homo sapiens
agugacagucag

SEQ ID NO: 215769 - RNA, 19 nt, Homo sapiens
cucagaaucgcuccaccuu

SEQ ID NO: 215770 - RNA, 20 nt, Homo sapiens
cauucuuuuugaaaugucaa

SEQ ID NO: 215771 - RNA, 17 nt, Homo sapiens
aauccuugccacagugu

SEQ ID NO: 215772 - RNA, 18 nt, Homo sapiens
cugccaauauccuaauaa

SEQ ID NO: 215773 - RNA, 14 nt, Homo sapiens
auccaauugcugcu

SEQ ID NO: 215774 - RNA, 15 nt, Homo sapiens
gagugucaagcugac

SEQ ID NO: 215775 - RNA, 23 nt, Homo sapiens
aguacuuaauaaacuguggugcu

SEQ ID NO: 215776 - RNA, 20 nt, Homo sapiens
uuuuauaaugucccuucaca

SEQ ID NO: 215777 - RNA, 19 nt, Homo sapiens
cucagaugcacaugagcug

SEQ ID NO: 215778 - RNA, 17 nt, Homo sapiens
gccuaauaugaugacug

SEQ ID NO: 215779 - RNA, 19 nt, Homo sapiens
augacauucccugcuaaua

SEQ ID NO: 215780 - RNA, 13 nt, Homo sapiens
gcugauggugaca

SEQ ID NO: 215781 - RNA, 20 nt, Homo sapiens
gccacccaggaacuccugac

SEQ ID NO: 215782 - RNA, 17 nt, Homo sapiens
uggaaaggaaugcaaag

SEQ ID NO: 215783 - RNA, 15 nt, Homo sapiens
uccaaucugugauga

SEQ ID NO: 215784 - RNA, 13 nt, Homo sapiens
gucagacuggaua

SEQ ID NO: 215785 - RNA, 13 nt, Homo sapiens
ugacauugacuau

SEQ ID NO: 215786 - RNA, 23 nt, Homo sapiens
gucucccuuccuaugcuguucac

SEQ ID NO: 215787 - RNA, 14 nt, Homo sapiens
auaaccuuguucca

SEQ ID NO: 215788 - RNA, 13 nt, Homo sapiens
aauguucacuggu

SEQ ID NO: 215789 - RNA, 18 nt, Homo sapiens
ugaaggcagcagaauauu

SEQ ID NO: 215790 - RNA, 19 nt, Homo sapiens
cacugguuuguucccugug

SEQ ID NO: 215791 - RNA, 12 nt, Homo sapiens
agaaacugacac

SEQ ID NO: 215792 - RNA, 14 nt, Homo sapiens
aauauugugcccca

SEQ ID NO: 215793 - RNA, 18 nt, Homo sapiens
ugcugaacaucacagcuu

SEQ ID NO: 215794 - RNA, 21 nt, Homo sapiens
aggaggugggauaucacuucc

SEQ ID NO: 215795 - RNA, 12 nt, Homo sapiens
gguaugauuaac

SEQ ID NO: 215796 - RNA, 17 nt, Homo sapiens
ugaaauaaggaaugaua

SEQ ID NO: 215797 - RNA, 21 nt, Homo sapiens
uugugaaaaaauuuacuuuaa

SEQ ID NO: 215798 - RNA, 17 nt, Homo sapiens
aacagcaacacaaagcu

SEQ ID NO: 215799 - RNA, 15 nt, Homo sapiens
augacauaagugcua

SEQ ID NO: 215800 - RNA, 22 nt, Homo sapiens
cauagagaauauaaaaauaaag

SEQ ID NO: 215801 - RNA, 17 nt, Homo sapiens
ucaaucuggauucauau

SEQ ID NO: 215802 - RNA, 23 nt, Homo sapiens
cugcaacaugccagccacuguga

SEQ ID NO: 215803 - RNA, 23 nt, Homo sapiens
gugagacuguguuguacagcuag

SEQ ID NO: 215804 - RNA, 13 nt, Homo sapiens
aaacuguggugcu

SEQ ID NO: 215805 - RNA, 14 nt, Homo sapiens
ugaugacauucccu

SEQ ID NO: 215806 - RNA, 14 nt, Homo sapiens
auaguccgucucug

SEQ ID NO: 215807 - RNA, 16 nt, Homo sapiens
cucaguagucagacug

SEQ ID NO: 215808 - RNA, 19 nt, Homo sapiens
ggauaucacuuccaugaca

SEQ ID NO: 215809 - RNA, 15 nt, Homo sapiens
gaagauucuauguua

SEQ ID NO: 215810 - RNA, 20 nt, Homo sapiens
cuguaauuccuaacuaucac

SEQ ID NO: 215811 - RNA, 19 nt, Homo sapiens
uuacuuuuuggaaaagaau

SEQ ID NO: 215812 - RNA, 15 nt, Homo sapiens
aacaguaacauagcu

SEQ ID NO: 215813 - RNA, 16 nt, Homo sapiens
uucaacugaaguucua

SEQ ID NO: 215814 - RNA, 13 nt, Homo sapiens
ggccacccaggaa

SEQ ID NO: 215815 - RNA, 16 nt, Homo sapiens
gaaaaucacacugucu

SEQ ID NO: 215816 - RNA, 18 nt, Homo sapiens
gauguaaaacugaacuuc

SEQ ID NO: 215817 - RNA, 12 nt, Homo sapiens
cagaguggcagu

SEQ ID NO: 215818 - RNA, 21 nt, Homo sapiens
cagagaagauucuuguauuua

SEQ ID NO: 215819 - RNA, 19 nt, Homo sapiens
uucucuauuucuggaugaa

SEQ ID NO: 215820 - RNA, 17 nt, Homo sapiens
ccccaaguuaguucaau

SEQ ID NO: 215821 - RNA, 19 nt, Homo sapiens
cugaggagccugcaacaug

SEQ ID NO: 215822 - RNA, 14 nt, Homo sapiens
auuccuagaaacug

SEQ ID NO: 215823 - RNA, 13 nt, Homo sapiens
acuuccaugacau

SEQ ID NO: 215824 - RNA, 23 nt, Homo sapiens
acccaguguuuuaggagcaugag

SEQ ID NO: 215825 - RNA, 12 nt, Homo sapiens
gaaggugccucu

SEQ ID NO: 215826 - RNA, 12 nt, Homo sapiens
aauagaugacau

SEQ ID NO: 215827 - RNA, 12 nt, Homo sapiens
uucaguuugcag

SEQ ID NO: 215828 - RNA, 12 nt, Homo sapiens
aaacacauuaaa

SEQ ID NO: 215829 - RNA, 23 nt, Homo sapiens
uagcaggaagcugugagagcagu

SEQ ID NO: 215830 - RNA, 15 nt, Homo sapiens
uucuuguaaggcaua

SEQ ID NO: 215831 - RNA, 18 nt, Homo sapiens
gauaucugcagggacaga

SEQ ID NO: 215832 - RNA, 21 nt, Homo sapiens
aauguucuccagucauuaugu

SEQ ID NO: 215833 - RNA, 18 nt, Homo sapiens
acaugcugaacaucacag

SEQ ID NO: 215834 - RNA, 14 nt, Homo sapiens
gucauuauguuaau

SEQ ID NO: 215835 - RNA, 14 nt, Homo sapiens
acgcacacugucug

SEQ ID NO: 215836 - RNA, 17 nt, Homo sapiens
cugagaugacuauucag

SEQ ID NO: 215837 - RNA, 23 nt, Homo sapiens
uauccaaucugugaugacauucc

SEQ ID NO: 215838 - RNA, 15 nt, Homo sapiens
uuagaugaaugucag

SEQ ID NO: 215839 - RNA, 15 nt, Homo sapiens
uauccaaucugugau

SEQ ID NO: 215840 - RNA, 17 nt, Homo sapiens
aauguucuccagucauu

SEQ ID NO: 215841 - RNA, 18 nt, Homo sapiens
uagagguacacuugugaa

SEQ ID NO: 215842 - RNA, 17 nt, Homo sapiens
ggcaguggaugggugcu

SEQ ID NO: 215843 - RNA, 11 nt, Homo sapiens
auucuuggccc

SEQ ID NO: 215844 - RNA, 18 nt, Homo sapiens
cagcucuccccuucucug

SEQ ID NO: 215845 - RNA, 14 nt, Homo sapiens
acauugacagauug

SEQ ID NO: 215846 - RNA, 16 nt, Homo sapiens
uauccaaucugugaug

SEQ ID NO: 215847 - RNA, 15 nt, Homo sapiens
auuugugagacugua

SEQ ID NO: 215848 - RNA, 21 nt, Homo sapiens
gcaacaugccagccacuguga

SEQ ID NO: 215849 - RNA, 20 nt, Homo sapiens
ggccagaagucaaggcuuag

SEQ ID NO: 215850 - RNA, 22 nt, Homo sapiens
cuggauguacuauccaaucugu

SEQ ID NO: 215851 - RNA, 14 nt, Homo sapiens
caagcaaauggcca

SEQ ID NO: 215852 - RNA, 13 nt, Homo sapiens
cugugucauuuca

SEQ ID NO: 215853 - RNA, 15 nt, Homo sapiens
cuauuauauucauuc

SEQ ID NO: 215854 - RNA, 22 nt, Homo sapiens
guaaguuacaugaaggcagcag

SEQ ID NO: 215855 - RNA, 16 nt, Homo sapiens
cuauucaguggcuaac

SEQ ID NO: 215856 - RNA, 11 nt, Homo sapiens
cucaugcugcc

SEQ ID NO: 215857 - RNA, 15 nt, Homo sapiens
cuuuaagaacuaaaa

SEQ ID NO: 215858 - RNA, 13 nt, Homo sapiens
augcuugcugcug

SEQ ID NO: 215859 - RNA, 17 nt, Homo sapiens
guaaggugcaucuguuu

SEQ ID NO: 215860 - RNA, 17 nt, Homo sapiens
auccuagucauucuucc

SEQ ID NO: 215861 - RNA, 19 nt, Homo sapiens
uacaacucuauuuaauuaa

SEQ ID NO: 215862 - RNA, 21 nt, Homo sapiens
aagggauuuucagcccucaga

SEQ ID NO: 215863 - RNA, 18 nt, Homo sapiens
aaaagacaacauaacuca

SEQ ID NO: 215864 - RNA, 14 nt, Homo sapiens
acuuccaugacaua

SEQ ID NO: 215865 - RNA, 14 nt, Homo sapiens
ugaccuugcugaug

SEQ ID NO: 215866 - RNA, 13 nt, Homo sapiens
ugaacaguaacau

SEQ ID NO: 215867 - RNA, 17 nt, Homo sapiens
cacuuuauuucucucau

SEQ ID NO: 215868 - RNA, 16 nt, Homo sapiens
aacucauuucuagcag

SEQ ID NO: 215869 - RNA, 22 nt, Homo sapiens
cuugcugauggugacauugcac

SEQ ID NO: 215870 - RNA, 18 nt, Homo sapiens
ccuaaucuuccacuugag

SEQ ID NO: 215871 - RNA, 23 nt, Homo sapiens
gugcuuuaccaauugaaguaaaa

SEQ ID NO: 215872 - RNA, 16 nt, Homo sapiens
uuauuuauuuauucau

SEQ ID NO: 215873 - RNA, 16 nt, Homo sapiens
gcaaauggccaaugag

SEQ ID NO: 215874 - RNA, 16 nt, Homo sapiens
cuaugcuguucacugg

SEQ ID NO: 215875 - RNA, 16 nt, Homo sapiens
guccuauuauauucau

SEQ ID NO: 215876 - RNA, 17 nt, Homo sapiens
uauagcaagacauuaua

SEQ ID NO: 215877 - RNA, 18 nt, Homo sapiens
uuaaacucugagugcaaa

SEQ ID NO: 215878 - RNA, 22 nt, Homo sapiens
cuggaguuauugaagcagagug

SEQ ID NO: 215879 - RNA, 23 nt, Homo sapiens
uguuuugccaauuugcacauuaa

SEQ ID NO: 215880 - RNA, 17 nt, Homo sapiens
guauagauguugcuaac

SEQ ID NO: 215881 - RNA, 16 nt, Homo sapiens
auaaugucccuucaca

SEQ ID NO: 215882 - RNA, 16 nt, Homo sapiens
cugcagggacagagca

SEQ ID NO: 215883 - RNA, 15 nt, Homo sapiens
uuggaaaggaaugca

SEQ ID NO: 215884 - RNA, 16 nt, Homo sapiens
auugaaaugauuucac

SEQ ID NO: 215885 - RNA, 22 nt, Homo sapiens
uaucugcagggacagagcauug

SEQ ID NO: 215886 - RNA, 15 nt, Homo sapiens
uacuauccaaucugu

SEQ ID NO: 215887 - RNA, 21 nt, Homo sapiens
ugcccagugagacuguguugu

SEQ ID NO: 215888 - RNA, 14 nt, Homo sapiens
uauagauguugcua

SEQ ID NO: 215889 - RNA, 14 nt, Homo sapiens
acucauucauuacu

SEQ ID NO: 215890 - RNA, 19 nt, Homo sapiens
ugaagguagaauguuuuca

SEQ ID NO: 215891 - RNA, 16 nt, Homo sapiens
cauuucucauguugaa

SEQ ID NO: 215892 - RNA, 16 nt, Homo sapiens
ucccugugucauuuca

SEQ ID NO: 215893 - RNA, 14 nt, Homo sapiens
uucucagcagagug

SEQ ID NO: 215894 - RNA, 17 nt, Homo sapiens
cuucccuaaucuuccac

SEQ ID NO: 215895 - RNA, 20 nt, Homo sapiens
guaacucuguaauuccuaac

SEQ ID NO: 215896 - RNA, 13 nt, Homo sapiens
cuggacacuucac

SEQ ID NO: 215897 - RNA, 17 nt, Homo sapiens
aaaaauaaagcacuuau

SEQ ID NO: 215898 - RNA, 21 nt, Homo sapiens
uauuuaaauagaugacauuga

SEQ ID NO: 215899 - RNA, 22 nt, Homo sapiens
agcaggaagcugugagagcagu

SEQ ID NO: 215900 - RNA, 14 nt, Homo sapiens
uuauauucauucuu

SEQ ID NO: 215901 - RNA, 16 nt, Homo sapiens
acaugcuguacauacu

SEQ ID NO: 215902 - RNA, 20 nt, Homo sapiens
uguccuaaugcuugcugcug

SEQ ID NO: 215903 - RNA, 13 nt, Homo sapiens
cauucuuggccca

SEQ ID NO: 215904 - RNA, 21 nt, Homo sapiens
cucuguauuccuagaaacuga

SEQ ID NO: 215905 - RNA, 22 nt, Homo sapiens
gauaucugcagggacagagcau

SEQ ID NO: 215906 - RNA, 16 nt, Homo sapiens
ggcagacuuucuucuc

SEQ ID NO: 215907 - RNA, 22 nt, Homo sapiens
guaauuccuaacuaucacuggu

SEQ ID NO: 215908 - RNA, 22 nt, Homo sapiens
acuuauggggccaaaauagcau

SEQ ID NO: 215909 - RNA, 13 nt, Homo sapiens
cagucucccuucc

SEQ ID NO: 215910 - RNA, 23 nt, Homo sapiens
gaaaaaauuuacuuuaaacuaca

SEQ ID NO: 215911 - RNA, 19 nt, Homo sapiens
auauaaaaauaaagcacuu

SEQ ID NO: 215912 - RNA, 19 nt, Homo sapiens
uaaaugacucuucccucaa

SEQ ID NO: 215913 - RNA, 17 nt, Homo sapiens
ugggauaucacuuccau

SEQ ID NO: 215914 - RNA, 15 nt, Homo sapiens
agggauuuucagccc

SEQ ID NO: 215915 - RNA, 13 nt, Homo sapiens
acuaucacugguu

SEQ ID NO: 215916 - RNA, 16 nt, Homo sapiens
acaauccuugccacag

SEQ ID NO: 215917 - RNA, 13 nt, Homo sapiens
aaacuacauugac

SEQ ID NO: 215918 - RNA, 20 nt, Homo sapiens
uuuuauccuagucauucuuc

SEQ ID NO: 215919 - RNA, 17 nt, Homo sapiens
gccucuggaugcuguga

SEQ ID NO: 215920 - RNA, 13 nt, Homo sapiens
cuugccacagugu

SEQ ID NO: 215921 - RNA, 20 nt, Homo sapiens
gguggggguaaggugcaucu

SEQ ID NO: 215922 - RNA, 17 nt, Homo sapiens
cgugcacgcacacuguc

SEQ ID NO: 215923 - RNA, 18 nt, Homo sapiens
guucccggguagccacug

SEQ ID NO: 215924 - RNA, 23 nt, Homo sapiens
aauaucccuuggacauuuuaugu

SEQ ID NO: 215925 - RNA, 21 nt, Homo sapiens
guggggguaaggugcaucugu

SEQ ID NO: 215926 - RNA, 15 nt, Homo sapiens
uaaagauacaguguc

SEQ ID NO: 215927 - RNA, 13 nt, Homo sapiens
ccaauugaaguaa

SEQ ID NO: 215928 - RNA, 21 nt, Homo sapiens
guucaaucuggauucauauuu

SEQ ID NO: 215929 - RNA, 13 nt, Homo sapiens
agaugaaugucag

SEQ ID NO: 215930 - RNA, 16 nt, Homo sapiens
cacaaagaaccaccag

SEQ ID NO: 215931 - RNA, 16 nt, Homo sapiens
gucuucguacugggaa

SEQ ID NO: 215932 - RNA, 13 nt, Homo sapiens
gaucauugugaag

SEQ ID NO: 215933 - RNA, 17 nt, Homo sapiens
gcacacaggaaccuaau

SEQ ID NO: 215934 - RNA, 23 nt, Homo sapiens
ucucccuuccuaugcuguucacu

SEQ ID NO: 215935 - RNA, 21 nt, Homo sapiens
cugaccuugcugauggugaca

SEQ ID NO: 215936 - RNA, 19 nt, Homo sapiens
uucauucuuuuugaaaugu

SEQ ID NO: 215937 - RNA, 13 nt, Homo sapiens
agagggaugcuug

SEQ ID NO: 215938 - RNA, 19 nt, Homo sapiens
cuguuuagaugaaugucag

SEQ ID NO: 215939 - RNA, 22 nt, Homo sapiens
gcuagaaaaggccuucuuccca

SEQ ID NO: 215940 - RNA, 15 nt, Homo sapiens
cugauuuaaacacau

SEQ ID NO: 215941 - RNA, 22 nt, Homo sapiens
gggaaagggauuuucagcccuc

SEQ ID NO: 215942 - RNA, 20 nt, Homo sapiens
uccuagaaacugacacaugc

SEQ ID NO: 215943 - RNA, 13 nt, Homo sapiens
agcauguccuaau

SEQ ID NO: 215944 - RNA, 14 nt, Homo sapiens
gaaugauauaaggu

SEQ ID NO: 215945 - RNA, 22 nt, Homo sapiens
agagcaugaaaaucacacuguc

SEQ ID NO: 215946 - RNA, 14 nt, Homo sapiens
cacagaagaugaag

SEQ ID NO: 215947 - RNA, 17 nt, Homo sapiens
uuuaagcagcgccagug

SEQ ID NO: 215948 - RNA, 15 nt, Homo sapiens
caugagugccgugug

SEQ ID NO: 215949 - RNA, 16 nt, Homo sapiens
uuagguugugaaugca

SEQ ID NO: 215950 - RNA, 16 nt, Homo sapiens
auguacuauccaaucu

SEQ ID NO: 215951 - RNA, 23 nt, Homo sapiens
uaaaacugaacuucagagcauga

SEQ ID NO: 215952 - RNA, 19 nt, Homo sapiens
aguuuuuuuccuucaagaa

SEQ ID NO: 215953 - RNA, 18 nt, Homo sapiens
guauuugaaacacugguu

SEQ ID NO: 215954 - RNA, 17 nt, Homo sapiens
uggccaugggucccauu

SEQ ID NO: 215955 - RNA, 16 nt, Homo sapiens
agacaacauaacucaa

SEQ ID NO: 215956 - RNA, 19 nt, Homo sapiens
caauccuugccacagugug

SEQ ID NO: 215957 - RNA, 20 nt, Homo sapiens
ucuccagucauuauguuaau

SEQ ID NO: 215958 - RNA, 17 nt, Homo sapiens
uuaaagguacuuugcag

SEQ ID NO: 215959 - RNA, 19 nt, Homo sapiens
guccuaaugcuugcugcug

SEQ ID NO: 215960 - RNA, 14 nt, Homo sapiens
uccaauugcugcuu

SEQ ID NO: 215961 - RNA, 18 nt, Homo sapiens
gucagggaaggugccucu

SEQ ID NO: 215962 - RNA, 17 nt, Homo sapiens
gaugaagcacacaggaa

SEQ ID NO: 215963 - RNA, 16 nt, Homo sapiens
uuccuagaaacugaca

SEQ ID NO: 215964 - RNA, 17 nt, Homo sapiens
cugucuucguacuggga

SEQ ID NO: 215965 - RNA, 20 nt, Homo sapiens
ugaccuugcugauggugaca

SEQ ID NO: 215966 - RNA, 15 nt, Homo sapiens
ccagugagacugugu

SEQ ID NO: 215967 - RNA, 12 nt, Homo sapiens
gcaaagaugaag

SEQ ID NO: 215968 - RNA, 13 nt, Homo sapiens
uucauuacuaaaa

SEQ ID NO: 215969 - RNA, 19 nt, Homo sapiens
caaucugugaugacauucc

SEQ ID NO: 215970 - RNA, 19 nt, Homo sapiens
caaucuaaagauacagugu

SEQ ID NO: 215971 - RNA, 16 nt, Homo sapiens
ccuaaugcuugcugcu

SEQ ID NO: 215972 - RNA, 19 nt, Homo sapiens
gauuuagcaggaagcugug

SEQ ID NO: 215973 - RNA, 11 nt, Homo sapiens
ggaaagcaaau

SEQ ID NO: 215974 - RNA, 15 nt, Homo sapiens
aaaacuacauugaca

SEQ ID NO: 215975 - RNA, 16 nt, Homo sapiens
caguaacauagcugug

SEQ ID NO: 215976 - RNA, 14 nt, Homo sapiens
aaugcuugcugcug

SEQ ID NO: 215977 - RNA, 20 nt, Homo sapiens
ugugaaggcaggggaaugua

SEQ ID NO: 215978 - RNA, 15 nt, Homo sapiens
uuaaauauuuugacu

SEQ ID NO: 215979 - RNA, 19 nt, Homo sapiens
auguggcaggcuggaguua

SEQ ID NO: 215980 - RNA, 22 nt, Homo sapiens
aacagcaacacaaagcuuuugc

SEQ ID NO: 215981 - RNA, 15 nt, Homo sapiens
agcagcgccagugac

SEQ ID NO: 215982 - RNA, 16 nt, Homo sapiens
uaaacauuucauuucc

SEQ ID NO: 215983 - RNA, 12 nt, Homo sapiens
ugccacagugug

SEQ ID NO: 215984 - RNA, 21 nt, Homo sapiens
guuuuacaguguuucuggcuu

SEQ ID NO: 215985 - RNA, 21 nt, Homo sapiens
cuuagacccucaugcugccaa

SEQ ID NO: 215986 - RNA, 19 nt, Homo sapiens
cuuguaaggcauacugccu

SEQ ID NO: 215987 - RNA, 23 nt, Homo sapiens
cacaaagcuuuugcauauugcau

SEQ ID NO: 215988 - RNA, 13 nt, Homo sapiens
caauuugcacauu

SEQ ID NO: 215989 - RNA, 21 nt, Homo sapiens
cauucuucccuaaucuuccac

SEQ ID NO: 215990 - RNA, 18 nt, Homo sapiens
gauggugacauugcaccu

SEQ ID NO: 215991 - RNA, 23 nt, Homo sapiens
aacuucagagcaugaaaaucaca

SEQ ID NO: 215992 - RNA, 14 nt, Homo sapiens
agucuucuauuuau

SEQ ID NO: 215993 - RNA, 23 nt, Homo sapiens
uaguaaguacuuaauaaacugug

SEQ ID NO: 215994 - RNA, 22 nt, Homo sapiens
ccuuggccaugggucccauucu

SEQ ID NO: 215995 - RNA, 23 nt, Homo sapiens
guuuguucccugugucauuucaa

SEQ ID NO: 215996 - RNA, 21 nt, Homo sapiens
agcaugaaaaucacacugucu

SEQ ID NO: 215997 - RNA, 21 nt, Homo sapiens
caauaaacauuucauuuccca

SEQ ID NO: 215998 - RNA, 12 nt, Homo sapiens
cagaugcacaug

SEQ ID NO: 215999 - RNA, 22 nt, Homo sapiens
agauccucaauaaacauuucau

SEQ ID NO: 216000 - RNA, 13 nt, Homo sapiens
caggaagcuguga

SEQ ID NO: 216001 - RNA, 16 nt, Homo sapiens
auuugaaacacugguu

SEQ ID NO: 216002 - RNA, 15 nt, Homo sapiens
auccuagucauucuu

SEQ ID NO: 216003 - RNA, 15 nt, Homo sapiens
uccaauugcugcuug

SEQ ID NO: 216004 - RNA, 22 nt, Homo sapiens
aauuaaggguaugauuaacucu

SEQ ID NO: 216005 - RNA, 18 nt, Homo sapiens
uaacucuaccugcacacu

SEQ ID NO: 216006 - RNA, 17 nt, Homo sapiens
aucugugaugacauucc

SEQ ID NO: 216007 - RNA, 15 nt, Homo sapiens
agugcuauugcagag

SEQ ID NO: 216008 - RNA, 18 nt, Homo sapiens
ggcacaucauuucaagaa

SEQ ID NO: 216009 - RNA, 14 nt, Homo sapiens
auuuauuuauucau

SEQ ID NO: 216010 - RNA, 17 nt, Homo sapiens
acgcacacugucugccc

SEQ ID NO: 216011 - RNA, 14 nt, Homo sapiens
uggaugcugugaag

SEQ ID NO: 216012 - RNA, 17 nt, Homo sapiens
ugaggugacuauucuga

SEQ ID NO: 216013 - RNA, 17 nt, Homo sapiens
guauguguucuauucag

SEQ ID NO: 216014 - RNA, 23 nt, Homo sapiens
aacuaacaggcuuagugauguaa

SEQ ID NO: 216015 - RNA, 19 nt, Homo sapiens
agugcaaacuucagaguuc

SEQ ID NO: 216016 - RNA, 20 nt, Homo sapiens
ccaggauuauugucaaagaa

SEQ ID NO: 216017 - RNA, 18 nt, Homo sapiens
ccuuccuaugcuguucac

SEQ ID NO: 216018 - RNA, 13 nt, Homo sapiens
caacucuauuuaa

SEQ ID NO: 216019 - RNA, 15 nt, Homo sapiens
guagucagacuggau

SEQ ID NO: 216020 - RNA, 15 nt, Homo sapiens
uauagauguugcuaa

SEQ ID NO: 216021 - RNA, 19 nt, Homo sapiens
uccacauuuguuuugccaa

SEQ ID NO: 216022 - RNA, 15 nt, Homo sapiens
acaucacagcuuauu

SEQ ID NO: 216023 - RNA, 17 nt, Homo sapiens
ugauuuaaacacauuaa

SEQ ID NO: 216024 - RNA, 16 nt, Homo sapiens
aagauucuauguuaau

SEQ ID NO: 216025 - RNA, 11 nt, Homo sapiens
gguagccacug

SEQ ID NO: 216026 - RNA, 19 nt, Homo sapiens
ggagcccugucuccucucu

SEQ ID NO: 216027 - RNA, 20 nt, Homo sapiens
ucuguuacacaaagaaccac

SEQ ID NO: 216028 - RNA, 21 nt, Homo sapiens
agucauucuucccuaaucuuc

SEQ ID NO: 216029 - RNA, 12 nt, Homo sapiens
gaugacauuccc

SEQ ID NO: 216030 - RNA, 13 nt, Homo sapiens
guacuuuuaagac

SEQ ID NO: 216031 - RNA, 16 nt, Homo sapiens
acagcaacacaaagcu

SEQ ID NO: 216032 - RNA, 16 nt, Homo sapiens
agaaacugacacaugc

SEQ ID NO: 216033 - RNA, 23 nt, Homo sapiens
agcaguuugguuucuagcaugaa

SEQ ID NO: 216034 - RNA, 17 nt, Homo sapiens
uauccuagucauucuuc

SEQ ID NO: 216035 - RNA, 15 nt, Homo sapiens
uucuuggcccaggau

SEQ ID NO: 216036 - RNA, 18 nt, Homo sapiens
aguagagguacacuugug

SEQ ID NO: 216037 - RNA, 20 nt, Homo sapiens
aggguauguuuuauauagca

SEQ ID NO: 216038 - RNA, 19 nt, Homo sapiens
acccucagaugcacaugag

SEQ ID NO: 216039 - RNA, 22 nt, Homo sapiens
gaccuugcugauggugacauug

SEQ ID NO: 216040 - RNA, 19 nt, Homo sapiens
uauccaaucugugaugaca

SEQ ID NO: 216041 - RNA, 15 nt, Homo sapiens
gaguuauugaagcag

SEQ ID NO: 216042 - RNA, 22 nt, Homo sapiens
aagauacagugucugacuauaa

SEQ ID NO: 216043 - RNA, 21 nt, Homo sapiens
ugagcuggcgggauugaagga

SEQ ID NO: 216044 - RNA, 15 nt, Homo sapiens
uuaccccucacaauc

SEQ ID NO: 216045 - RNA, 16 nt, Homo sapiens
ucaacugaaguucuau

SEQ ID NO: 216046 - RNA, 14 nt, Homo sapiens
acaguaacauagcu

SEQ ID NO: 216047 - RNA, 17 nt, Homo sapiens
aaugauuucacagugug

SEQ ID NO: 216048 - RNA, 22 nt, Homo sapiens
guaauaaacucauuucuagcag

SEQ ID NO: 216049 - RNA, 14 nt, Homo sapiens
uuugcauauugcau

SEQ ID NO: 216050 - RNA, 17 nt, Homo sapiens
ccuaacuaucacugguu

SEQ ID NO: 216051 - RNA, 16 nt, Homo sapiens
gcaccuggauguacua

SEQ ID NO: 216052 - RNA, 18 nt, Homo sapiens
acuucacgcccuuggcca

SEQ ID NO: 216053 - RNA, 14 nt, Homo sapiens
uuuugaaaugucaa

SEQ ID NO: 216054 - RNA, 13 nt, Homo sapiens
gaauaaagagggu

SEQ ID NO: 216055 - RNA, 14 nt, Homo sapiens
gaaugcccagugag

SEQ ID NO: 216056 - RNA, 17 nt, Homo sapiens
ccagucauuauguuaau

SEQ ID NO: 216057 - RNA, 19 nt, Homo sapiens
aauuuacuuuaaacuacau

SEQ ID NO: 216058 - RNA, 14 nt, Homo sapiens
ugacacaugcugaa

SEQ ID NO: 216059 - RNA, 18 nt, Homo sapiens
cuggaguuauugaagcag

SEQ ID NO: 216060 - RNA, 21 nt, Homo sapiens
gcuuaauuauugauguuuuca

SEQ ID NO: 216061 - RNA, 18 nt, Homo sapiens
cuuuguggucgacaucaa

SEQ ID NO: 216062 - RNA, 15 nt, Homo sapiens
uaugugcacaucugu

SEQ ID NO: 216063 - RNA, 15 nt, Homo sapiens
cccugugucauuuca

SEQ ID NO: 216064 - RNA, 13 nt, Homo sapiens
uggccaaugagau

SEQ ID NO: 216065 - RNA, 13 nt, Homo sapiens
aaucuggauucau

SEQ ID NO: 216066 - RNA, 17 nt, Homo sapiens
aauauccaauugcugcu

SEQ ID NO: 216067 - RNA, 22 nt, Homo sapiens
uuucuggaugaaugcccaguga

SEQ ID NO: 216068 - RNA, 16 nt, Homo sapiens
auugaaggaugcuguc

SEQ ID NO: 216069 - RNA, 21 nt, Homo sapiens
auuaauauccaauugcugcuu

SEQ ID NO: 216070 - RNA, 18 nt, Homo sapiens
uucuuuuugaaaugucaa

SEQ ID NO: 216071 - RNA, 18 nt, Homo sapiens
acaugccagccacuguga

SEQ ID NO: 216072 - RNA, 16 nt, Homo sapiens
gaggagccugcaacau

SEQ ID NO: 216073 - RNA, 21 nt, Homo sapiens
guucuccagucauuauguuaa

SEQ ID NO: 216074 - RNA, 20 nt, Homo sapiens
ucaaagaagucauucuuuaa

SEQ ID NO: 216075 - RNA, 13 nt, Homo sapiens
ugucaguauuuca

SEQ ID NO: 216076 - RNA, 16 nt, Homo sapiens
acuuccaugacauaag

SEQ ID NO: 216077 - RNA, 17 nt, Homo sapiens
ccuaaugcuugcugcug

SEQ ID NO: 216078 - RNA, 19 nt, Homo sapiens
ccuggcacugguuuguucc

SEQ ID NO: 216079 - RNA, 17 nt, Homo sapiens
uucaguuugcagaguag

SEQ ID NO: 216080 - RNA, 22 nt, Homo sapiens
augggugcuuaguaaguacuua

SEQ ID NO: 216081 - RNA, 14 nt, Homo sapiens
guauagauguugcu

SEQ ID NO: 216082 - RNA, 14 nt, Homo sapiens
caauauccuaauaa

SEQ ID NO: 216083 - RNA, 15 nt, Homo sapiens
ucuggaugcugugaa

SEQ ID NO: 216084 - RNA, 20 nt, Homo sapiens
cacuggacugacgacuugag

SEQ ID NO: 216085 - RNA, 22 nt, Homo sapiens
uuaagacuuugguuauuuuacu

SEQ ID NO: 216086 - RNA, 23 nt, Homo sapiens
aaugauuucacagugugugguca

SEQ ID NO: 216087 - RNA, 22 nt, Homo sapiens
acuauccaaucugugaugacau

SEQ ID NO: 216088 - RNA, 19 nt, Homo sapiens
cucccucccccuggcacug

SEQ ID NO: 216089 - RNA, 22 nt, Homo sapiens
gucaaccccaaguuaguucaau

SEQ ID NO: 216090 - RNA, 21 nt, Homo sapiens
uuccuagaaacugacacaugc

SEQ ID NO: 216091 - RNA, 18 nt, Homo sapiens
cugugcaucuagccucaa

SEQ ID NO: 216092 - RNA, 22 nt, Homo sapiens
ucaguuuaucuguucauaugga

SEQ ID NO: 216093 - RNA, 22 nt, Homo sapiens
caguuuaucuguucauauggau

SEQ ID NO: 216094 - RNA, 19 nt, Homo sapiens
cggagcccugucuccucuc

SEQ ID NO: 216095 - RNA, 16 nt, Homo sapiens
uugauugggcacauca

SEQ ID NO: 216096 - RNA, 14 nt, Homo sapiens
gaaaugauuucaca

SEQ ID NO: 216097 - RNA, 14 nt, Homo sapiens
aaucugugaugaca

SEQ ID NO: 216098 - RNA, 16 nt, Homo sapiens
aaagggauuuucagcc

SEQ ID NO: 216099 - RNA, 22 nt, Homo sapiens
cauuaaaugacucuucccucaa

SEQ ID NO: 216100 - RNA, 18 nt, Homo sapiens
agccacuggacugacgac

SEQ ID NO: 216101 - RNA, 19 nt, Homo sapiens
ugauggugacauugcaccu

SEQ ID NO: 216102 - RNA, 18 nt, Homo sapiens
ggauaguccgucucugcu

SEQ ID NO: 216103 - RNA, 19 nt, Homo sapiens
ccaaugagaucauugugaa

SEQ ID NO: 216104 - RNA, 15 nt, Homo sapiens
agacauuauauagca

SEQ ID NO: 216105 - RNA, 15 nt, Homo sapiens
gcugauggugacauu

SEQ ID NO: 216106 - RNA, 15 nt, Homo sapiens
aguaacauagcugug

SEQ ID NO: 216107 - RNA, 18 nt, Homo sapiens
cucacagaagaugaagca

SEQ ID NO: 216108 - RNA, 16 nt, Homo sapiens
ugacauaagugcuauu

SEQ ID NO: 216109 - RNA, 18 nt, Homo sapiens
gaaugcaaagaugaaggu

SEQ ID NO: 216110 - RNA, 17 nt, Homo sapiens
uggcaucuuacaucuga

SEQ ID NO: 216111 - RNA, 16 nt, Homo sapiens
agagugcuuuaccaau

SEQ ID NO: 216112 - RNA, 18 nt, Homo sapiens
gaugcacaugagcuggcg

SEQ ID NO: 216113 - RNA, 22 nt, Homo sapiens
ucuguauuccuagaaacugaca

SEQ ID NO: 216114 - RNA, 21 nt, Homo sapiens
cuauuuauuuauuuauucauu

SEQ ID NO: 216115 - RNA, 17 nt, Homo sapiens
auaagugcuauugcaga

SEQ ID NO: 216116 - RNA, 17 nt, Homo sapiens
uaaacauuucauuuccc

SEQ ID NO: 216117 - RNA, 13 nt, Homo sapiens
uugaagauucuau

SEQ ID NO: 216118 - RNA, 16 nt, Homo sapiens
ccucagaugcacauga

SEQ ID NO: 216119 - RNA, 17 nt, Homo sapiens
gcggauccaagcaaaug

SEQ ID NO: 216120 - RNA, 16 nt, Homo sapiens
auaaacauuucauuuc

SEQ ID NO: 216121 - RNA, 21 nt, Homo sapiens
agacccucaugcugccaauau

SEQ ID NO: 216122 - RNA, 20 nt, Homo sapiens
uuuuaaacucugagugcaaa

SEQ ID NO: 216123 - RNA, 20 nt, Homo sapiens
uuagacccucaugcugccaa

SEQ ID NO: 216124 - RNA, 16 nt, Homo sapiens
ucuggaugcugugaag

SEQ ID NO: 216125 - RNA, 19 nt, Homo sapiens
caacaugccagccacugug

SEQ ID NO: 216126 - RNA, 16 nt, Homo sapiens
uauccuagucauucuu

SEQ ID NO: 216127 - RNA, 16 nt, Homo sapiens
auugcaccuggaugua

SEQ ID NO: 216128 - RNA, 15 nt, Homo sapiens
cuuuuaaacucugag

SEQ ID NO: 216129 - RNA, 11 nt, Homo sapiens
aaaggugacca

SEQ ID NO: 216130 - RNA, 13 nt, Homo sapiens
agaauguuuucaa

SEQ ID NO: 216131 - RNA, 22 nt, Homo sapiens
aauaauuagguauuuucuccaa

SEQ ID NO: 216132 - RNA, 21 nt, Homo sapiens
uuggguuaggaagaaaauaau

SEQ ID NO: 216133 - RNA, 15 nt, Homo sapiens
aucuguuacacaaag

SEQ ID NO: 216134 - RNA, 16 nt, Homo sapiens
uucaaucuggauucau

SEQ ID NO: 216135 - RNA, 13 nt, Homo sapiens
gaugcugugaaga

SEQ ID NO: 216136 - RNA, 22 nt, Homo sapiens
cuuagacccucaugcugccaau

SEQ ID NO: 216137 - RNA, 20 nt, Homo sapiens
cagcuagaaaaggccuucuu

SEQ ID NO: 216138 - RNA, 20 nt, Homo sapiens
caaucuaaagauacaguguc

SEQ ID NO: 216139 - RNA, 12 nt, Homo sapiens
agcaacacaaag

SEQ ID NO: 216140 - RNA, 15 nt, Homo sapiens
aacuaaaauguucua

SEQ ID NO: 216141 - RNA, 21 nt, Homo sapiens
uggccaaugagaucauuguga

SEQ ID NO: 216142 - RNA, 21 nt, Homo sapiens
ggccacccaggaacuccugac

SEQ ID NO: 216143 - RNA, 16 nt, Homo sapiens
uuauauagcaguaaaa

SEQ ID NO: 216144 - RNA, 14 nt, Homo sapiens
agugagacuguguu

SEQ ID NO: 216145 - RNA, 20 nt, Homo sapiens
gacacaugcugaacaucaca

SEQ ID NO: 216146 - RNA, 15 nt, Homo sapiens
aaaguaaacgauaaa

SEQ ID NO: 216147 - RNA, 17 nt, Homo sapiens
cuggacuaaaacuacau

SEQ ID NO: 216148 - RNA, 23 nt, Homo sapiens
ugcugcugauuuaaacacauuaa

SEQ ID NO: 216149 - RNA, 13 nt, Homo sapiens
ggcagacuuucuu

SEQ ID NO: 216150 - RNA, 21 nt, Homo sapiens
auuuauugaaaugauuucaca

SEQ ID NO: 216151 - RNA, 21 nt, Homo sapiens
aauugcugcuuguacacucau

SEQ ID NO: 216152 - RNA, 17 nt, Homo sapiens
gugggauaucacuucca

SEQ ID NO: 216153 - RNA, 19 nt, Homo sapiens
uauccaauugcugcuugua

SEQ ID NO: 216154 - RNA, 16 nt, Homo sapiens
aauuauugauguuuuc

SEQ ID NO: 216155 - RNA, 21 nt, Homo sapiens
auccuaauaaaaaggugacca

SEQ ID NO: 216156 - RNA, 14 nt, Homo sapiens
auguaaaacugaac

SEQ ID NO: 216157 - RNA, 16 nt, Homo sapiens
aguuugguuucuagca

SEQ ID NO: 216158 - RNA, 18 nt, Homo sapiens
ugguuucuagcaugaaga

SEQ ID NO: 216159 - RNA, 21 nt, Homo sapiens
agaauguuuucaaauguucuc

SEQ ID NO: 216160 - RNA, 18 nt, Homo sapiens
ucaaauguucuccaguca

SEQ ID NO: 216161 - RNA, 17 nt, Homo sapiens
cuguccuauuauauuca

SEQ ID NO: 216162 - RNA, 22 nt, Homo sapiens
cugaggagccugcaacaugcca

SEQ ID NO: 216163 - RNA, 16 nt, Homo sapiens
gucuccucucucugua

SEQ ID NO: 216164 - RNA, 22 nt, Homo sapiens
auugauugggcacaucauuuca

SEQ ID NO: 216165 - RNA, 22 nt, Homo sapiens
uuggguuuauuuggaaaggaau

SEQ ID NO: 216166 - RNA, 15 nt, Homo sapiens
gaauguaugugcaca

SEQ ID NO: 216167 - RNA, 14 nt, Homo sapiens
aagcaaauggccaa

SEQ ID NO: 216168 - RNA, 18 nt, Homo sapiens
aaucgcuccaccuugcag

SEQ ID NO: 216169 - RNA, 18 nt, Homo sapiens
uagcaggaagcugugaga

SEQ ID NO: 216170 - RNA, 20 nt, Homo sapiens
cccugugucauuucaaacag

SEQ ID NO: 216171 - RNA, 16 nt, Homo sapiens
cuagucauucuucccu

SEQ ID NO: 216172 - RNA, 16 nt, Homo sapiens
ugggucccauucuugg

SEQ ID NO: 216173 - RNA, 21 nt, Homo sapiens
gaagcuuacaugccuaccaau

SEQ ID NO: 216174 - RNA, 15 nt, Homo sapiens
caaguuaguucaauc

SEQ ID NO: 216175 - RNA, 21 nt, Homo sapiens
augacuauucaguggcuaacu

SEQ ID NO: 216176 - RNA, 21 nt, Homo sapiens
aauuuguggaaaauaacucac

SEQ ID NO: 216177 - RNA, 16 nt, Homo sapiens
cuucccuaaucuucca

SEQ ID NO: 216178 - RNA, 20 nt, Homo sapiens
cccuuggccaugggucccau

SEQ ID NO: 216179 - RNA, 21 nt, Homo sapiens
gauaucacuuccaugacauaa

SEQ ID NO: 216180 - RNA, 23 nt, Homo sapiens
gcuggaguuauugaagcagagug

SEQ ID NO: 216181 - RNA, 23 nt, Homo sapiens
uuucuuguaaggcauacugccuu

SEQ ID NO: 216182 - RNA, 13 nt, Homo sapiens
auuucaacugaag

SEQ ID NO: 216183 - RNA, 20 nt, Homo sapiens
ccaauagcaaggcugugcau

SEQ ID NO: 216184 - RNA, 14 nt, Homo sapiens
gugaagagucuaca

SEQ ID NO: 216185 - RNA, 15 nt, Homo sapiens
ucuguuuuguguacu

SEQ ID NO: 216186 - RNA, 13 nt, Homo sapiens
uccaaucugugau

SEQ ID NO: 216187 - RNA, 22 nt, Homo sapiens
cugaacuuuguggucgacauca

SEQ ID NO: 216188 - RNA, 11 nt, Homo sapiens
uuuacaguguu

SEQ ID NO: 216189 - RNA, 17 nt, Homo sapiens
uaagcagcgccagugac

SEQ ID NO: 216190 - RNA, 21 nt, Homo sapiens
gcucaguagucagacuggaua

SEQ ID NO: 216191 - RNA, 17 nt, Homo sapiens
uccuaaugcuugcugcu

SEQ ID NO: 216192 - RNA, 22 nt, Homo sapiens
gaguggaguuacugaacaguaa

SEQ ID NO: 216193 - RNA, 20 nt, Homo sapiens
uuaccccucacaauccuugc

SEQ ID NO: 216194 - RNA, 20 nt, Homo sapiens
aauguggauuaaagugccca

SEQ ID NO: 216195 - RNA, 17 nt, Homo sapiens
auaaugucccuucacaa

SEQ ID NO: 216196 - RNA, 17 nt, Homo sapiens
uuggauguaaaacugaa

SEQ ID NO: 216197 - RNA, 20 nt, Homo sapiens
agcagaguggcagucuucag

SEQ ID NO: 216198 - RNA, 19 nt, Homo sapiens
uaauauccaauugcugcuu

SEQ ID NO: 216199 - RNA, 22 nt, Homo sapiens
cuuaauaaacuguggugcuuuu

SEQ ID NO: 216200 - RNA, 18 nt, Homo sapiens
gacauuuuaugucuuucu

SEQ ID NO: 216201 - RNA, 12 nt, Homo sapiens
guuugcagagua

SEQ ID NO: 216202 - RNA, 14 nt, Homo sapiens
ccagccacugugau

SEQ ID NO: 216203 - RNA, 17 nt, Homo sapiens
guuuagaugaaugucag

SEQ ID NO: 216204 - RNA, 12 nt, Homo sapiens
uugaaaugucaa

SEQ ID NO: 216205 - RNA, 24 nt, Homo sapiens
agucuggcagacuuucuucucuau

SEQ ID NO: 216206 - RNA, 17 nt, Homo sapiens
cagaaucgcuccaccuu

SEQ ID NO: 216207 - RNA, 19 nt, Homo sapiens
cuucucuauuucuggauga

SEQ ID NO: 216208 - RNA, 14 nt, Homo sapiens
aggauuauugucaa

SEQ ID NO: 216209 - RNA, 23 nt, Homo sapiens
augcuguucacuggacacuucac

SEQ ID NO: 216210 - RNA, 15 nt, Homo sapiens
gugcacgcacacugu

SEQ ID NO: 216211 - RNA, 23 nt, Homo sapiens
uugcugcugauuuaaacacauua

SEQ ID NO: 216212 - RNA, 19 nt, Homo sapiens
cagauugaauuugccuaau

SEQ ID NO: 216213 - RNA, 15 nt, Homo sapiens
ugcaccuggauguac

SEQ ID NO: 216214 - RNA, 22 nt, Homo sapiens
cauguccuaaugcuugcugcug

SEQ ID NO: 216215 - RNA, 20 nt, Homo sapiens
uggaugaaugcccagugaga

SEQ ID NO: 216216 - RNA, 14 nt, Homo sapiens
ucauuauguuaaua

SEQ ID NO: 216217 - RNA, 13 nt, Homo sapiens
auguugcuaacag

SEQ ID NO: 216218 - RNA, 20 nt, Homo sapiens
ccaaugagaucauugugaag

SEQ ID NO: 216219 - RNA, 22 nt, Homo sapiens
cuuccaugacauaagugcuauu

SEQ ID NO: 216220 - RNA, 23 nt, Homo sapiens
uuggccugucuuuggauuguuaa

SEQ ID NO: 216221 - RNA, 16 nt, Homo sapiens
uauugcauacuauuaa

SEQ ID NO: 216222 - RNA, 23 nt, Homo sapiens
guaacuguuuagaugaaugucag

SEQ ID NO: 216223 - RNA, 13 nt, Homo sapiens
gaugcugucuucg

SEQ ID NO: 216224 - RNA, 15 nt, Homo sapiens
ugauuucacagugug

SEQ ID NO: 216225 - RNA, 23 nt, Homo sapiens
aaauauuuugacuuguugagggu

SEQ ID NO: 216226 - RNA, 17 nt, Homo sapiens
acgugcacgcacacugu

SEQ ID NO: 216227 - RNA, 13 nt, Homo sapiens
aacuaaaauguuc

SEQ ID NO: 216228 - RNA, 17 nt, Homo sapiens
gcaaauggccaaugaga

SEQ ID NO: 216229 - RNA, 14 nt, Homo sapiens
uaccugcacacugu

SEQ ID NO: 216230 - RNA, 20 nt, Homo sapiens
cuuaagaaauuuguggaaaa

SEQ ID NO: 216231 - RNA, 14 nt, Homo sapiens
uuaaauagaugaca

SEQ ID NO: 216232 - RNA, 19 nt, Homo sapiens
gcauacugccuuguuuaau

SEQ ID NO: 216233 - RNA, 14 nt, Homo sapiens
agcaugagugccgu

SEQ ID NO: 216234 - RNA, 13 nt, Homo sapiens
uugcugaugguga

SEQ ID NO: 216235 - RNA, 21 nt, Homo sapiens
guaaaacugaacuucagagca

SEQ ID NO: 216236 - RNA, 12 nt, Homo sapiens
ucccauucuugg

SEQ ID NO: 216237 - RNA, 22 nt, Homo sapiens
cagagccguggccacccaggaa

SEQ ID NO: 216238 - RNA, 13 nt, Homo sapiens
gaugacuauucag

SEQ ID NO: 216239 - RNA, 13 nt, Homo sapiens
acacucgccagcu

SEQ ID NO: 216240 - RNA, 12 nt, Homo sapiens
uccaaucuguga

SEQ ID NO: 216241 - RNA, 23 nt, Homo sapiens
ugugagacuguaaguuacaugaa

SEQ ID NO: 216242 - RNA, 13 nt, Homo sapiens
uggugauuuagca

SEQ ID NO: 216243 - RNA, 22 nt, Homo sapiens
uuuuuauauucucagcagagug

SEQ ID NO: 216244 - RNA, 17 nt, Homo sapiens
uccuagucauucuuccc

SEQ ID NO: 216245 - RNA, 16 nt, Homo sapiens
ucaguauuucaacuga

SEQ ID NO: 216246 - RNA, 16 nt, Homo sapiens
caaugagaucauugug

SEQ ID NO: 216247 - RNA, 12 nt, Homo sapiens
gucaacauuucu

SEQ ID NO: 216248 - RNA, 14 nt, Homo sapiens
uggccugucuuugg

SEQ ID NO: 216249 - RNA, 20 nt, Homo sapiens
auuauugucaaagaagucau

SEQ ID NO: 216250 - RNA, 19 nt, Homo sapiens
uaguucaaucuggauucau

SEQ ID NO: 216251 - RNA, 14 nt, Homo sapiens
aauguaugugcaca

SEQ ID NO: 216252 - RNA, 21 nt, Homo sapiens
uaaugguaguuuuacaguguu

SEQ ID NO: 216253 - RNA, 14 nt, Homo sapiens
gcaggcuggaguua

SEQ ID NO: 216254 - RNA, 19 nt, Homo sapiens
caacugaaguucuauuuau

SEQ ID NO: 216255 - RNA, 20 nt, Homo sapiens
ucuacagagaagauucuugu

SEQ ID NO: 216256 - RNA, 22 nt, Homo sapiens
ugggugcuuaguaaguacuuaa

SEQ ID NO: 216257 - RNA, 12 nt, Homo sapiens
auacagugucug

SEQ ID NO: 216258 - RNA, 18 nt, Homo sapiens
agagccccacccucagau

SEQ ID NO: 216259 - RNA, 23 nt, Homo sapiens
uuucuggaugaaugcccagugag

SEQ ID NO: 216260 - RNA, 20 nt, Homo sapiens
uuuugaagauucuauguuaa

SEQ ID NO: 216261 - RNA, 20 nt, Homo sapiens
gauacagugucugacuauaa

SEQ ID NO: 216262 - RNA, 13 nt, Homo sapiens
caauugaaguaaa

SEQ ID NO: 216263 - RNA, 16 nt, Homo sapiens
cugaacaucacagcuu

SEQ ID NO: 216264 - RNA, 18 nt, Homo sapiens
agaauauaaaaauaaagc

SEQ ID NO: 216265 - RNA, 22 nt, Homo sapiens
aguaaguacuuaauaaacugug

SEQ ID NO: 216266 - RNA, 19 nt, Homo sapiens
gaccuugcugauggugaca

SEQ ID NO: 216267 - RNA, 16 nt, Homo sapiens
ucacacugucuucuga

SEQ ID NO: 216268 - RNA, 21 nt, Homo sapiens
aaguucuauuuauuugugaga

SEQ ID NO: 216269 - RNA, 16 nt, Homo sapiens
uucaguuugcagagua

SEQ ID NO: 216270 - RNA, 22 nt, Homo sapiens
gagcccugucuccucucucugu

SEQ ID NO: 216271 - RNA, 21 nt, Homo sapiens
cugcacacuguccuauuauau

SEQ ID NO: 216272 - RNA, 17 nt, Homo sapiens
cuucacgcccuuggcca

SEQ ID NO: 216273 - RNA, 15 nt, Homo sapiens
aaucacacugucuuc

SEQ ID NO: 216274 - RNA, 20 nt, Homo sapiens
gggauuuucagcccucagaa

SEQ ID NO: 216275 - RNA, 17 nt, Homo sapiens
uuccacuugagugucaa

SEQ ID NO: 216276 - RNA, 17 nt, Homo sapiens
gaagauucuauguuaau

SEQ ID NO: 216277 - RNA, 13 nt, Homo sapiens
auguacuauccaa

SEQ ID NO: 216278 - RNA, 13 nt, Homo sapiens
auagauguugcua

SEQ ID NO: 216279 - RNA, 22 nt, Homo sapiens
uagaaaaggccuucuucccaau

SEQ ID NO: 216280 - RNA, 20 nt, Homo sapiens
aggcauacugccuuguuuaa

SEQ ID NO: 216281 - RNA, 21 nt, Homo sapiens
gacagagccccacccucagau

SEQ ID NO: 216282 - RNA, 18 nt, Homo sapiens
gugagacuguaaguuaca

SEQ ID NO: 216283 - RNA, 16 nt, Homo sapiens
aggcaggggaauguau

SEQ ID NO: 216284 - RNA, 18 nt, Homo sapiens
cagaauauugugccccau

SEQ ID NO: 216285 - RNA, 13 nt, Homo sapiens
acugggaugaggu

SEQ ID NO: 216286 - RNA, 17 nt, Homo sapiens
ccuggauguacuaucca

SEQ ID NO: 216287 - RNA, 15 nt, Homo sapiens
gagaagauucuugua

SEQ ID NO: 216288 - RNA, 14 nt, Homo sapiens
ugcaccuggaugua

SEQ ID NO: 216289 - RNA, 17 nt, Homo sapiens
caauugcugcuuguaca

SEQ ID NO: 216290 - RNA, 16 nt, Homo sapiens
cacacuguccuauuau

SEQ ID NO: 216291 - RNA, 12 nt, Homo sapiens
ugaguggaguua

SEQ ID NO: 216292 - RNA, 18 nt, Homo sapiens
uuaccaauugaaguaaaa

SEQ ID NO: 216293 - RNA, 16 nt, Homo sapiens
uucaauaacuggaaca

SEQ ID NO: 216294 - RNA, 13 nt, Homo sapiens
aaauguggauuaa

SEQ ID NO: 216295 - RNA, 16 nt, Homo sapiens
ccaaauguucacuggu

SEQ ID NO: 216296 - RNA, 22 nt, Homo sapiens
agagcaguuugguuucuagcau

SEQ ID NO: 216297 - RNA, 17 nt, Homo sapiens
uuaauauggaucuguau

SEQ ID NO: 216298 - RNA, 13 nt, Homo sapiens
cucaaacuaacag

SEQ ID NO: 216299 - RNA, 14 nt, Homo sapiens
ugugagacuguaag

SEQ ID NO: 216300 - RNA, 16 nt, Homo sapiens
uucacuggacacuuca

SEQ ID NO: 216301 - RNA, 16 nt, Homo sapiens
acugaacuucagagca

SEQ ID NO: 216302 - RNA, 19 nt, Homo sapiens
uuaauauccaauugcugcu

SEQ ID NO: 216303 - RNA, 15 nt, Homo sapiens
acacugucuucugau

SEQ ID NO: 216304 - RNA, 17 nt, Homo sapiens
cuagaaacugacacaug

SEQ ID NO: 216305 - RNA, 14 nt, Homo sapiens
ggagccugcaacau

SEQ ID NO: 216306 - RNA, 18 nt, Homo sapiens
uccccucuccuccacauu

SEQ ID NO: 216307 - RNA, 17 nt, Homo sapiens
uauaaccuuguuccaaa

SEQ ID NO: 216308 - RNA, 18 nt, Homo sapiens
gucaaagaagucauucuu

SEQ ID NO: 216309 - RNA, 17 nt, Homo sapiens
aaucugugaugacauuc

SEQ ID NO: 216310 - RNA, 18 nt, Homo sapiens
gcucuccccuucucugua

SEQ ID NO: 216311 - RNA, 14 nt, Homo sapiens
gagucuacagagaa

SEQ ID NO: 216312 - RNA, 18 nt, Homo sapiens
uugcugcuuguacacuca

SEQ ID NO: 216313 - RNA, 20 nt, Homo sapiens
guggauuaaagugcccagca

SEQ ID NO: 216314 - RNA, 20 nt, Homo sapiens
acuguccuauuauauucauu

SEQ ID NO: 216315 - RNA, 15 nt, Homo sapiens
auugugccccaugcu

SEQ ID NO: 216316 - RNA, 16 nt, Homo sapiens
uaaagugcccagcaca

SEQ ID NO: 216317 - RNA, 18 nt, Homo sapiens
caauccuugccacagugu

SEQ ID NO: 216318 - RNA, 18 nt, Homo sapiens
gccacuggacugacgacu

SEQ ID NO: 216319 - RNA, 23 nt, Homo sapiens
auucauucuuuuugaaaugucaa

SEQ ID NO: 216320 - RNA, 21 nt, Homo sapiens
guaauuaugguuaguagaggu

SEQ ID NO: 216321 - RNA, 14 nt, Homo sapiens
gaaggaugcugucu

SEQ ID NO: 216322 - RNA, 11 nt, Homo sapiens
caaauguucuc

SEQ ID NO: 216323 - RNA, 19 nt, Homo sapiens
gauaucugcagggacagag

SEQ ID NO: 216324 - RNA, 16 nt, Homo sapiens
ggagcaugagugccgu

SEQ ID NO: 216325 - RNA, 23 nt, Homo sapiens
guaauuccuaacuaucacugguu

SEQ ID NO: 216326 - RNA, 15 nt, Homo sapiens
uucaaauguucucca

SEQ ID NO: 216327 - RNA, 11 nt, Homo sapiens
aacuccugacu

SEQ ID NO: 216328 - RNA, 23 nt, Homo sapiens
guacuauccaaucugugaugaca

SEQ ID NO: 216329 - RNA, 14 nt, Homo sapiens
augaaugcccagug

SEQ ID NO: 216330 - RNA, 13 nt, Homo sapiens
ucccuuggacauu

SEQ ID NO: 216331 - RNA, 14 nt, Homo sapiens
augcaaagaugaag

SEQ ID NO: 216332 - RNA, 18 nt, Homo sapiens
uuaagcagcgccagugac

SEQ ID NO: 216333 - RNA, 12 nt, Homo sapiens
ucauuucuagca

SEQ ID NO: 216334 - RNA, 16 nt, Homo sapiens
acaaagcagauccuca

SEQ ID NO: 216335 - RNA, 21 nt, Homo sapiens
aucuguauguguucuauucag

SEQ ID NO: 216336 - RNA, 14 nt, Homo sapiens
gaguuuggccagaa

SEQ ID NO: 216337 - RNA, 21 nt, Homo sapiens
uucccggguagccacuggacu

SEQ ID NO: 216338 - RNA, 15 nt, Homo sapiens
ucacagaagaugaag

SEQ ID NO: 216339 - RNA, 16 nt, Homo sapiens
uuauccuagucauucu

SEQ ID NO: 216340 - RNA, 19 nt, Homo sapiens
uaagaacuaaaauguucua

SEQ ID NO: 216341 - RNA, 10 nt, Homo sapiens
uuuguucccu

SEQ ID NO: 216342 - RNA, 21 nt, Homo sapiens
uuuaccccucacaauccuugc

SEQ ID NO: 216343 - RNA, 14 nt, Homo sapiens
ccagugagacugug

SEQ ID NO: 216344 - RNA, 23 nt, Homo sapiens
aaggcuuagacccucaugcugcc

SEQ ID NO: 216345 - RNA, 23 nt, Homo sapiens
aaacugaacuucagagcaugaaa

SEQ ID NO: 216346 - RNA, 12 nt, Homo sapiens
uuagguugugaa

SEQ ID NO: 216347 - RNA, 13 nt, Homo sapiens
aaaacuacauuga

SEQ ID NO: 216348 - RNA, 21 nt, Homo sapiens
uugagaaauuuuuuuuuccag

SEQ ID NO: 216349 - RNA, 12 nt, Homo sapiens
ugcuuggaugua

SEQ ID NO: 216350 - RNA, 18 nt, Homo sapiens
ucccugugucauuucaaa

SEQ ID NO: 216351 - RNA, 13 nt, Homo sapiens
gccuuggcugcag

SEQ ID NO: 216352 - RNA, 17 nt, Homo sapiens
ucucuguauuccuagaa

SEQ ID NO: 216353 - RNA, 14 nt, Homo sapiens
gaacuucagagcau

SEQ ID NO: 216354 - RNA, 18 nt, Homo sapiens
uaggagcaugagugccgu

SEQ ID NO: 216355 - RNA, 20 nt, Homo sapiens
gugagacuguaaguuacaug

SEQ ID NO: 216356 - RNA, 22 nt, Homo sapiens
uucuuuaagcagcgccagugac

SEQ ID NO: 216357 - RNA, 15 nt, Homo sapiens
cugugaugacauucc

SEQ ID NO: 216358 - RNA, 17 nt, Homo sapiens
auauccaauugcugcuu

SEQ ID NO: 216359 - RNA, 14 nt, Homo sapiens
uggccagaagucaa

SEQ ID NO: 216360 - RNA, 17 nt, Homo sapiens
cugauggugacauugca

SEQ ID NO: 216361 - RNA, 17 nt, Homo sapiens
agcagauccucaauaaa

SEQ ID NO: 216362 - RNA, 19 nt, Homo sapiens
aacaugccagccacuguga

SEQ ID NO: 216363 - RNA, 15 nt, Homo sapiens
ugagaucauugugaa

SEQ ID NO: 216364 - RNA, 13 nt, Homo sapiens
auuucacagugug

SEQ ID NO: 216365 - RNA, 16 nt, Homo sapiens
agagccccacccucag

SEQ ID NO: 216366 - RNA, 20 nt, Homo sapiens
auaguccgucucugcuuauc

SEQ ID NO: 216367 - RNA, 22 nt, Homo sapiens
augcuguucacuggacacuuca

SEQ ID NO: 216368 - RNA, 15 nt, Homo sapiens
agggacagagcauug

SEQ ID NO: 216369 - RNA, 12 nt, Homo sapiens
ucaaauguucuc

SEQ ID NO: 216370 - RNA, 17 nt, Homo sapiens
ccaauagcaaggcugug

SEQ ID NO: 216371 - RNA, 14 nt, Homo sapiens
cccuucucuguauu

SEQ ID NO: 216372 - RNA, 19 nt, Homo sapiens
acagagccccacccucaga

SEQ ID NO: 216373 - RNA, 23 nt, Homo sapiens
cuuggcccaggauuauugucaaa

SEQ ID NO: 216374 - RNA, 16 nt, Homo sapiens
uuccaguaaugagcuu

SEQ ID NO: 216375 - RNA, 17 nt, Homo sapiens
cuaacagcaacacaaag

SEQ ID NO: 216376 - RNA, 19 nt, Homo sapiens
caggauuauugucaaagaa

SEQ ID NO: 216377 - RNA, 24 nt, Homo sapiens
gacacaugcugaacaucacagcuu

SEQ ID NO: 216378 - RNA, 14 nt, Homo sapiens
ugcacgcacacugu

SEQ ID NO: 216379 - RNA, 13 nt, Homo sapiens
uacagagaagauu

SEQ ID NO: 216380 - RNA, 21 nt, Homo sapiens
cauacuauuaaacaugcugua

SEQ ID NO: 216381 - RNA, 20 nt, Homo sapiens
gcaacaugccagccacugug

SEQ ID NO: 216382 - RNA, 15 nt, Homo sapiens
uugguaacucuguaa

SEQ ID NO: 216383 - RNA, 20 nt, Homo sapiens
augcugucuucguacuggga

SEQ ID NO: 216384 - RNA, 22 nt, Homo sapiens
ggaugggugcuuaguaaguacu

SEQ ID NO: 216385 - RNA, 15 nt, Homo sapiens
aaaaucacacugucu

SEQ ID NO: 216386 - RNA, 20 nt, Homo sapiens
ucugacuauaaccuuguucc

SEQ ID NO: 216387 - RNA, 15 nt, Homo sapiens
gaagucuucuauuua

SEQ ID NO: 216388 - RNA, 19 nt, Homo sapiens
ugcccagugagacuguguu

SEQ ID NO: 216389 - RNA, 18 nt, Homo sapiens
acuucagagcaugaaaau

SEQ ID NO: 216390 - RNA, 19 nt, Homo sapiens
gucuccucucucuguaaua

SEQ ID NO: 216391 - RNA, 15 nt, Homo sapiens
uaaacauuucauuuc

SEQ ID NO: 216392 - RNA, 22 nt, Homo sapiens
ugucauuucaaacagucucccu

SEQ ID NO: 216393 - RNA, 18 nt, Homo sapiens
uccucaauaaacauuuca

SEQ ID NO: 216394 - RNA, 19 nt, Homo sapiens
cuuauccguuagccguggu

SEQ ID NO: 216395 - RNA, 12 nt, Homo sapiens
uaugugcacauc

SEQ ID NO: 216396 - RNA, 16 nt, Homo sapiens
cucaauaaacauuuca

SEQ ID NO: 216397 - RNA, 15 nt, Homo sapiens
acaaagcuuuugcau

SEQ ID NO: 216398 - RNA, 17 nt, Homo sapiens
uccugucggagcccugu

SEQ ID NO: 216399 - RNA, 16 nt, Homo sapiens
acccucagaugcacau

SEQ ID NO: 216400 - RNA, 18 nt, Homo sapiens
ggauaucacuuccaugac

SEQ ID NO: 216401 - RNA, 21 nt, Homo sapiens
cguucccggguagccacugga

SEQ ID NO: 216402 - RNA, 20 nt, Homo sapiens
acaucaaucuaaagauacag

SEQ ID NO: 216403 - RNA, 14 nt, Homo sapiens
cuuaauaaacugug

SEQ ID NO: 216404 - RNA, 19 nt, Homo sapiens
uggcacugguuuguucccu

SEQ ID NO: 216405 - RNA, 16 nt, Homo sapiens
ucuguauuccuagaaa

SEQ ID NO: 216406 - RNA, 13 nt, Homo sapiens
aaaauguggcagg

SEQ ID NO: 216407 - RNA, 16 nt, Homo sapiens
uuauugauguuuucau

SEQ ID NO: 216408 - RNA, 13 nt, Homo sapiens
aauuccuaacuau

SEQ ID NO: 216409 - RNA, 23 nt, Homo sapiens
caucaaucuaaagauacaguguc

SEQ ID NO: 216410 - RNA, 18 nt, Homo sapiens
ucuucucuauuucuggau

SEQ ID NO: 216411 - RNA, 19 nt, Homo sapiens
aggaagcugugagagcagu

SEQ ID NO: 216412 - RNA, 17 nt, Homo sapiens
caagcugaccuugcuga

SEQ ID NO: 216413 - RNA, 13 nt, Homo sapiens
auguucacuggua

SEQ ID NO: 216414 - RNA, 21 nt, Homo sapiens
cuuaauuauugauguuuucau

SEQ ID NO: 216415 - RNA, 21 nt, Homo sapiens
auagcagcccucaauugugaa

SEQ ID NO: 216416 - RNA, 21 nt, Homo sapiens
gaacuuuguggucgacaucaa

SEQ ID NO: 216417 - RNA, 18 nt, Homo sapiens
ugcugauuuaaacacauu

SEQ ID NO: 216418 - RNA, 17 nt, Homo sapiens
caaugagaucauuguga

SEQ ID NO: 216419 - RNA, 23 nt, Homo sapiens
ugcaacaugccagccacugugau

SEQ ID NO: 216420 - RNA, 15 nt, Homo sapiens
aaugauuucacagug

SEQ ID NO: 216421 - RNA, 22 nt, Homo sapiens
ccuugcugauggugacauugca

SEQ ID NO: 216422 - RNA, 17 nt, Homo sapiens
ucuccccuucucuguau

SEQ ID NO: 216423 - RNA, 22 nt, Homo sapiens
gcugcaguuuuuuuccuucaag

SEQ ID NO: 216424 - RNA, 15 nt, Homo sapiens
gcagcgccagugaca

SEQ ID NO: 216425 - RNA, 16 nt, Homo sapiens
uacuuaauaaacugug

SEQ ID NO: 216426 - RNA, 19 nt, Homo sapiens
auaaacauuucauuuccca

SEQ ID NO: 216427 - RNA, 19 nt, Homo sapiens
aguaaacgauaaaaugugg

SEQ ID NO: 216428 - RNA, 22 nt, Homo sapiens
caguguuuuaggagcaugagug

SEQ ID NO: 216429 - RNA, 15 nt, Homo sapiens
agacuuucuucucua

SEQ ID NO: 216430 - RNA, 19 nt, Homo sapiens
uaagacccucucaaacuaa

SEQ ID NO: 216431 - RNA, 18 nt, Homo sapiens
ggaaggugccucuggaug

SEQ ID NO: 216432 - RNA, 23 nt, Homo sapiens
aguaaguacuuaauaaacugugg

SEQ ID NO: 216433 - RNA, 20 nt, Homo sapiens
aaaaugguguuuuaucuucu

SEQ ID NO: 216434 - RNA, 16 nt, Homo sapiens
augcugaacaucacag

SEQ ID NO: 216435 - RNA, 15 nt, Homo sapiens
cccuuggacauuuua

SEQ ID NO: 216436 - RNA, 17 nt, Homo sapiens
cagugacagucagggaa

SEQ ID NO: 216437 - RNA, 21 nt, Homo sapiens
guauuucaacugaaguucuau

SEQ ID NO: 216438 - RNA, 20 nt, Homo sapiens
uagcaaggcugugcaucuag

SEQ ID NO: 216439 - RNA, 19 nt, Homo sapiens
auucuuuuugaaaugucaa

SEQ ID NO: 216440 - RNA, 24 nt, Homo sapiens
aaauagcauguccuaaugcuugcu

SEQ ID NO: 216441 - RNA, 20 nt, Homo sapiens
uguacuauccaaucugugau

SEQ ID NO: 216442 - RNA, 21 nt, Homo sapiens
cuuuaagcagcgccagugaca

SEQ ID NO: 216443 - RNA, 14 nt, Homo sapiens
uuaaacaugcugua

SEQ ID NO: 216444 - RNA, 21 nt, Homo sapiens
cuuuauuucucucaucuguua

SEQ ID NO: 216445 - RNA, 20 nt, Homo sapiens
uggaugcugugaagagucua

SEQ ID NO: 216446 - RNA, 16 nt, Homo sapiens
aauuugccuaauauga

SEQ ID NO: 216447 - RNA, 15 nt, Homo sapiens
guuugguuucuagca

SEQ ID NO: 216448 - RNA, 17 nt, Homo sapiens
ccaauuugcacauuaaa

SEQ ID NO: 216449 - RNA, 16 nt, Homo sapiens
cacaauccuugccaca

SEQ ID NO: 216450 - RNA, 16 nt, Homo sapiens
uauccaauugcugcuu

SEQ ID NO: 216451 - RNA, 15 nt, Homo sapiens
gaaacugacacaugc

SEQ ID NO: 216452 - RNA, 20 nt, Homo sapiens
gagacuguaaguuacaugaa

SEQ ID NO: 216453 - RNA, 17 nt, Homo sapiens
ggaauguaugugcacau

SEQ ID NO: 216454 - RNA, 21 nt, Homo sapiens
uuuaaauagaugacauugacu

SEQ ID NO: 216455 - RNA, 15 nt, Homo sapiens
cauuauauagcagua

SEQ ID NO: 216456 - RNA, 22 nt, Homo sapiens
uauugaaaugauuucacagugu

SEQ ID NO: 216457 - RNA, 10 nt, Homo sapiens
uacuuuuugg

SEQ ID NO: 216458 - RNA, 15 nt, Homo sapiens
ugacauaagugcuau

SEQ ID NO: 216459 - RNA, 18 nt, Homo sapiens
ugccaauuugcacauuaa

SEQ ID NO: 216460 - RNA, 20 nt, Homo sapiens
uuggcccaggauuauuguca

SEQ ID NO: 216461 - RNA, 22 nt, Homo sapiens
uguaauaaacucauuucuagca

SEQ ID NO: 216462 - RNA, 17 nt, Homo sapiens
caguuugguuucuagca

SEQ ID NO: 216463 - RNA, 18 nt, Homo sapiens
uccuaaugcuugcugcug

SEQ ID NO: 216464 - RNA, 17 nt, Homo sapiens
ucucuauuucuggauga

SEQ ID NO: 216465 - RNA, 13 nt, Homo sapiens
gacuaaaacuaca

SEQ ID NO: 216466 - RNA, 15 nt, Homo sapiens
acucauuucuagcag

SEQ ID NO: 216467 - RNA, 14 nt, Homo sapiens
cuaaaauguucuaa

SEQ ID NO: 216468 - RNA, 16 nt, Homo sapiens
aaauggccaaugagau

SEQ ID NO: 216469 - RNA, 18 nt, Homo sapiens
uauggggccaaaauagca

SEQ ID NO: 216470 - RNA, 22 nt, Homo sapiens
auuuccucauuuuuauaauguc

SEQ ID NO: 216471 - RNA, 23 nt, Homo sapiens
auguacuauccaaucugugauga

SEQ ID NO: 216472 - RNA, 14 nt, Homo sapiens
gcacacugucugcc

SEQ ID NO: 216473 - RNA, 17 nt, Homo sapiens
auuuauugaaaugauuu

SEQ ID NO: 216474 - RNA, 14 nt, Homo sapiens
aucuguuacacaaa

SEQ ID NO: 216475 - RNA, 15 nt, Homo sapiens
ugggauaucacuucc

SEQ ID NO: 216476 - RNA, 19 nt, Homo sapiens
cuuuaagcagcgccaguga

SEQ ID NO: 216477 - RNA, 19 nt, Homo sapiens
agaaaaggccuucuuccca

SEQ ID NO: 216478 - RNA, 19 nt, Homo sapiens
gcugauggugacauugcac

SEQ ID NO: 216479 - RNA, 19 nt, Homo sapiens
guuacaugaaggcagcaga

SEQ ID NO: 216480 - RNA, 11 nt, Homo sapiens
ugguacucugc

SEQ ID NO: 216481 - RNA, 14 nt, Homo sapiens
gcaaagaugaaggu

SEQ ID NO: 216482 - RNA, 13 nt, Homo sapiens
gauucuauguuaa

SEQ ID NO: 216483 - RNA, 16 nt, Homo sapiens
uugagugucaagcuga

SEQ ID NO: 216484 - RNA, 23 nt, Homo sapiens
uggauugugccuaauguguuuga

SEQ ID NO: 216485 - RNA, 18 nt, Homo sapiens
uuauccuagucauucuuc

SEQ ID NO: 216486 - RNA, 20 nt, Homo sapiens
uugacagauugaauuugccu

SEQ ID NO: 216487 - RNA, 15 nt, Homo sapiens
auccaauugcugcuu

SEQ ID NO: 216488 - RNA, 18 nt, Homo sapiens
agaaugcaguacuaacau

SEQ ID NO: 216489 - RNA, 13 nt, Homo sapiens
uucuggacuaaaa

SEQ ID NO: 216490 - RNA, 19 nt, Homo sapiens
augccagccacugugauag

SEQ ID NO: 216491 - RNA, 14 nt, Homo sapiens
auuauauucauucu

SEQ ID NO: 216492 - RNA, 19 nt, Homo sapiens
agucagggaaggugccucu

SEQ ID NO: 216493 - RNA, 14 nt, Homo sapiens
ccucaugcugccaa

SEQ ID NO: 216494 - RNA, 14 nt, Homo sapiens
acuaaaauguucua

SEQ ID NO: 216495 - RNA, 15 nt, Homo sapiens
ggguuaggaagaaaa

SEQ ID NO: 216496 - RNA, 19 nt, Homo sapiens
gagaagauucuuguauuua

SEQ ID NO: 216497 - RNA, 22 nt, Homo sapiens
gaugcugucuucguacugggaa

SEQ ID NO: 216498 - RNA, 22 nt, Homo sapiens
ugaccuugcugauggugacauu

SEQ ID NO: 216499 - RNA, 15 nt, Homo sapiens
uuaauauuucugagg

SEQ ID NO: 216500 - RNA, 17 nt, Homo sapiens
caggaaauccuugcacc

SEQ ID NO: 216501 - RNA, 17 nt, Homo sapiens
ugauaucugcagggaca

SEQ ID NO: 216502 - RNA, 20 nt, Homo sapiens
aguacuuaauaaacuguggu

SEQ ID NO: 216503 - RNA, 16 nt, Homo sapiens
uaacauuuauuugagu

SEQ ID NO: 216504 - RNA, 13 nt, Homo sapiens
ugagacuguguug

SEQ ID NO: 216505 - RNA, 16 nt, Homo sapiens
aaggccuucuucccaa

SEQ ID NO: 216506 - RNA, 17 nt, Homo sapiens
cucuaccugcacacugu

SEQ ID NO: 216507 - RNA, 22 nt, Homo sapiens
uugacagauugaauuugccuaa

SEQ ID NO: 216508 - RNA, 15 nt, Homo sapiens
acaguguuucuggcu

SEQ ID NO: 216509 - RNA, 17 nt, Homo sapiens
uccuagaaacugacaca

SEQ ID NO: 216510 - RNA, 20 nt, Homo sapiens
aaucugugaugacauucccu

SEQ ID NO: 216511 - RNA, 18 nt, Homo sapiens
ggaagcugugagagcagu

SEQ ID NO: 216512 - RNA, 16 nt, Homo sapiens
gcagcgccagugacag

SEQ ID NO: 216513 - RNA, 14 nt, Homo sapiens
cugauggugacauu

SEQ ID NO: 216514 - RNA, 23 nt, Homo sapiens
gcaagacauuauauagcaguaaa

SEQ ID NO: 216515 - RNA, 19 nt, Homo sapiens
augguaguuuuacaguguu

SEQ ID NO: 216516 - RNA, 19 nt, Homo sapiens
uauccuagucauucuuccc

SEQ ID NO: 216517 - RNA, 23 nt, Homo sapiens
ucacugguuugguucuggacuaa

SEQ ID NO: 216518 - RNA, 23 nt, Homo sapiens
cauuuguuuugccaauuugcaca

SEQ ID NO: 216519 - RNA, 20 nt, Homo sapiens
aaccuaggcaaagaguauau

SEQ ID NO: 216520 - RNA, 13 nt, Homo sapiens
gaccaggaccucc

SEQ ID NO: 216521 - RNA, 19 nt, Homo sapiens
guauuuauuacaacucuau

SEQ ID NO: 216522 - RNA, 19 nt, Homo sapiens
uugucaaagaagucauucu

SEQ ID NO: 216523 - RNA, 12 nt, Homo sapiens
ccuaaucuucca

SEQ ID NO: 216524 - RNA, 22 nt, Homo sapiens
gugaugacauucccugcuaaua

SEQ ID NO: 216525 - RNA, 14 nt, Homo sapiens
cuauuauauucauu

SEQ ID NO: 216526 - RNA, 13 nt, Homo sapiens
cuauuauauucau

SEQ ID NO: 216527 - RNA, 21 nt, Homo sapiens
gagcaguuugguuucuagcau

SEQ ID NO: 216528 - RNA, 14 nt, Homo sapiens
uagaugaaugucag

SEQ ID NO: 216529 - RNA, 15 nt, Homo sapiens
uucagcccucagaau

SEQ ID NO: 216530 - RNA, 20 nt, Homo sapiens
acucugagugcaaacuucag

SEQ ID NO: 216531 - RNA, 14 nt, Homo sapiens
uacauacuuuuugg

SEQ ID NO: 216532 - RNA, 13 nt, Homo sapiens
ccuagaaacugac

SEQ ID NO: 216533 - RNA, 23 nt, Homo sapiens
uucuuuaagcagcgccagugaca

SEQ ID NO: 216534 - RNA, 17 nt, Homo sapiens
cagaauauugugcccca

SEQ ID NO: 216535 - RNA, 21 nt, Homo sapiens
cuugcugauggugacauugca

SEQ ID NO: 216536 - RNA, 15 nt, Homo sapiens
auucucagcagagug

SEQ ID NO: 216537 - RNA, 12 nt, Homo sapiens
cuguauuccuag

SEQ ID NO: 216538 - RNA, 20 nt, Homo sapiens
aacaugccagccacugugau

SEQ ID NO: 216539 - RNA, 16 nt, Homo sapiens
caucuguuacacaaag

SEQ ID NO: 216540 - RNA, 21 nt, Homo sapiens
uggugacauugcaccuggaug

SEQ ID NO: 216541 - RNA, 19 nt, Homo sapiens
caccuggauguacuaucca

SEQ ID NO: 216542 - RNA, 22 nt, Homo sapiens
auuucugaggagccugcaacau

SEQ ID NO: 216543 - RNA, 16 nt, Homo sapiens
aacucuaccugcacac

SEQ ID NO: 216544 - RNA, 21 nt, Homo sapiens
aggaccucccucccccuggca

SEQ ID NO: 216545 - RNA, 21 nt, Homo sapiens
ugcucaguagucagacuggau

SEQ ID NO: 216546 - RNA, 23 nt, Homo sapiens
ggauuaaagugcccagcacaaag

SEQ ID NO: 216547 - RNA, 11 nt, Homo sapiens
ggcugcaguuu

SEQ ID NO: 216548 - RNA, 21 nt, Homo sapiens
cacaauccuugccacagugug

SEQ ID NO: 216549 - RNA, 13 nt, Homo sapiens
ugccucuggaugc

SEQ ID NO: 216550 - RNA, 21 nt, Homo sapiens
aaucgcuccaccuugcagcuc

SEQ ID NO: 216551 - RNA, 20 nt, Homo sapiens
acuguuuagaugaaugucag

SEQ ID NO: 216552 - RNA, 23 nt, Homo sapiens
uucccaauagcaaggcugugcau

SEQ ID NO: 216553 - RNA, 16 nt, Homo sapiens
caaauguucacuggua

SEQ ID NO: 216554 - RNA, 13 nt, Homo sapiens
cagcaacacaaag

SEQ ID NO: 216555 - RNA, 17 nt, Homo sapiens
uucccugugucauuuca

SEQ ID NO: 216556 - RNA, 13 nt, Homo sapiens
gaauuugccuaau

SEQ ID NO: 216557 - RNA, 24 nt, Homo sapiens
ccuuccuaugcuguucacuggaca

SEQ ID NO: 216558 - RNA, 14 nt, Homo sapiens
uucagcccucagaa

SEQ ID NO: 216559 - RNA, 22 nt, Homo sapiens
uccuuuuuuuuuuauccuaguc

SEQ ID NO: 216560 - RNA, 16 nt, Homo sapiens
auaucacuuccaugac

SEQ ID NO: 216561 - RNA, 13 nt, Homo sapiens
acaucauuucaag

SEQ ID NO: 216562 - RNA, 20 nt, Homo sapiens
agaaaaggccuucuucccaa

SEQ ID NO: 216563 - RNA, 15 nt, Homo sapiens
auagaugacauugac

SEQ ID NO: 216564 - RNA, 20 nt, Homo sapiens
gaauguuuucaaauguucuc

SEQ ID NO: 216565 - RNA, 13 nt, Homo sapiens
cucagaugcacau

SEQ ID NO: 216566 - RNA, 20 nt, Homo sapiens
aaugguaguuuuacaguguu

SEQ ID NO: 216567 - RNA, 20 nt, Homo sapiens
aagcuuacaugccuaccaau

SEQ ID NO: 216568 - RNA, 18 nt, Homo sapiens
gcagagugcuuuaccaau

SEQ ID NO: 216569 - RNA, 13 nt, Homo sapiens
ccucucucuguaa

SEQ ID NO: 216570 - RNA, 14 nt, Homo sapiens
acugacacaugcug

SEQ ID NO: 216571 - RNA, 23 nt, Homo sapiens
uuggccaugggucccauucuugg

SEQ ID NO: 216572 - RNA, 13 nt, Homo sapiens
uccuagucauucu

SEQ ID NO: 216573 - RNA, 13 nt, Homo sapiens
uuaaaaaacagag

SEQ ID NO: 216574 - RNA, 15 nt, Homo sapiens
cuauccaaucuguga

SEQ ID NO: 216575 - RNA, 18 nt, Homo sapiens
cagcgccagugacaguca

SEQ ID NO: 216576 - RNA, 14 nt, Homo sapiens
gcgccagugacagu

SEQ ID NO: 216577 - RNA, 19 nt, Homo sapiens
ucuucucuauuucuggaug

SEQ ID NO: 216578 - RNA, 19 nt, Homo sapiens
uacuauccaaucugugaug

SEQ ID NO: 216579 - RNA, 12 nt, Influenza A virus (A/Hong Kong/1073/99(H9N2))
aaaaaguaccuu

SEQ ID NO: 216580 - RNA, 15 nt, Influenza A virus (A/Hong Kong/1073/99(H9N2))
auuugcuauccauac

SEQ ID NO: 216581 - RNA, 20 nt, Influenza A virus (A/Hong Kong/1073/99(H9N2))
auuugcuauccauacugucc

SEQ ID NO: 216582 - RNA, 21 nt, Influenza A virus (A/Hong Kong/1073/99(H9N2))
auuugcuauccauacugucca

SEQ ID NO: 216583 - RNA, 18 nt, Influenza A virus (A/Hong Kong/1073/99(H9N2))
caaugcuacuauuugcua

SEQ ID NO: 216584 - RNA, 23 nt, Influenza A virus (A/Hong Kong/1073/99(H9N2))
caaugcuacuauuugcuauccau

SEQ ID NO: 216585 - RNA, 18 nt, Influenza A virus (A/Hong Kong/1073/99(H9N2))
acuauuugcuauccauac

SEQ ID NO: 216586 - RNA, 15 nt, Influenza A virus (A/Hong Kong/1073/99(H9N2))
acuauuugcuaucca

SEQ ID NO: 216587 - RNA, 13 nt, Influenza A virus (A/Hong Kong/1073/99(H9N2))
acuguccaaaaaa

SEQ ID NO: 216588 - RNA, 19 nt, Influenza A virus (A/Hong Kong/1073/99(H9N2))
cuuuucuucaaaugcauuu

SEQ ID NO: 216589 - RNA, 18 nt, Influenza A virus (A/Hong Kong/1073/99(H9N2))
gaauuguuuaaaaacgac

SEQ ID NO: 216590 - RNA, 22 nt, Influenza A virus (A/Hong Kong/1073/99(H9N2))
gaauuguuuaaaaacgaccuug

SEQ ID NO: 216591 - RNA, 16 nt, Influenza A virus (A/Hong Kong/1073/99(H9N2))
gcaaugcuacuauuug

SEQ ID NO: 216592 - RNA, 17 nt, Influenza A virus (A/Hong Kong/1073/99(H9N2))
ccauacuguccaaaaaa

SEQ ID NO: 216593 - RNA, 23 nt, Influenza A virus (A/Hong Kong/1073/99(H9N2))
ucgaauuguuuaaaaacgaccuu

SEQ ID NO: 216594 - RNA, 12 nt, Influenza A virus (A/Hong Kong/1073/99(H9N2))
uccuucaugaaa

SEQ ID NO: 216595 - RNA, 17 nt, Influenza A virus (A/Hong Kong/1073/99(H9N2))
uccauacuguccaaaaa

SEQ ID NO: 216596 - RNA, 15 nt, Influenza A virus (A/Hong Kong/1073/99(H9N2))
uacuguccaaaaaag

SEQ ID NO: 216597 - RNA, 23 nt, Influenza A virus (A/Hong Kong/1073/99(H9N2))
uuguggcaaugcuacuauuugcu

SEQ ID NO: 216598 - RNA, 20 nt, Influenza A virus (A/Hong Kong/1073/99(H9N2))
uugcuauccauacuguccaa

SEQ ID NO: 216599 - RNA, 13 nt, Influenza A virus (A/Hong Kong/1073/99(H9N2))
uguccaaaaaagu

SEQ ID NO: 216600 - RNA, 13 nt, Influenza A virus (A/Hong Kong/1073/99(H9N2))
uccauacugucca

SEQ ID NO: 216601 - RNA, 15 nt, Influenza A virus (A/Hong Kong/1073/99(H9N2))
uccauacuguccaaa

SEQ ID NO: 216602 - RNA, 15 nt, Influenza A virus (A/Hong Kong/1073/99(H9N2))
ugcuauccauacugu

SEQ ID NO: 216603 - RNA, 19 nt, Influenza A virus (A/Hong Kong/1073/99(H9N2))
ugcuauccauacuguccaa

SEQ ID NO: 216604 - RNA, 22 nt, Influenza A virus (A/Hong Kong/1073/99(H9N2))
ugcuauccauacuguccaaaaa

SEQ ID NO: 216605 - RNA, 23 nt, Influenza A virus (A/Hong Kong/1073/99(H9N2))
ugcuauccauacuguccaaaaaa

SEQ ID NO: 216606 - RNA, 22 nt, Influenza A virus (A/Hong Kong/1073/99(H9N2))
uguggcaaugcuacuauuugcu

SEQ ID NO: 216607 - RNA, 22 nt, Influenza A virus (A/Hong Kong/1073/99(H9N2))
uugcuauccauacuguccaaaa

SEQ ID NO: 216608 - RNA, 17 nt, Influenza A virus (A/Hong Kong/1073/99(H9N2))
acuauuugcuauccaua

SEQ ID NO: 216609 - RNA, 16 nt, Influenza A virus (A/Hong Kong/1073/99(H9N2))
acuauuugcuauccau

SEQ ID NO: 216610 - RNA, 11 nt, Influenza A virus (A/Hong Kong/1073/99(H9N2))
acgaccuuguu

SEQ ID NO: 216611 - RNA, 17 nt, Influenza A virus (A/Hong Kong/1073/99(H9N2))
gcuauccauacugucca

SEQ ID NO: 216612 - RNA, 16 nt, Influenza A virus (A/Hong Kong/1073/99(H9N2))
gcuuguccuucaugaa

SEQ ID NO: 216613 - RNA, 21 nt, Influenza A virus (A/Hong Kong/1073/99(H9N2))
ggcaaugcuacuauuugcuau

SEQ ID NO: 216614 - RNA, 19 nt, Influenza A virus (A/Hong Kong/1073/99(H9N2))
uauccauacuguccaaaaa

SEQ ID NO: 216615 - RNA, 14 nt, Influenza A virus (A/Hong Kong/1073/99(H9N2))
uacuguccaaaaaa

SEQ ID NO: 216616 - RNA, 20 nt, Influenza A virus (A/Hong Kong/1073/99(H9N2))
uacuguccaaaaaaguaccu

SEQ ID NO: 216617 - RNA, 22 nt, Influenza A virus (A/Hong Kong/1073/99(H9N2))
guggcaaugcuacuauuugcua

SEQ ID NO: 216618 - RNA, 15 nt, Influenza A virus (A/Hong Kong/1073/99(H9N2))
cuuguccuucaugaa

SEQ ID NO: 216619 - RNA, 16 nt, Influenza A virus (A/Hong Kong/1073/99(H9N2))
cuuguccuucaugaaa

SEQ ID NO: 216620 - RNA, 14 nt, Influenza A virus (A/Hong Kong/1073/99(H9N2))
caaaaaaguaccuu

SEQ ID NO: 216621 - RNA, 18 nt, Influenza A virus (A/Hong Kong/1073/99(H9N2))
auccauacuguccaaaaa

SEQ ID NO: 216622 - RNA, 19 nt, Influenza A virus (A/Hong Kong/1073/99(H9N2))
auccauacuguccaaaaaa

SEQ ID NO: 216623 - RNA, 17 nt, Influenza A virus (A/Hong Kong/1073/99(H9N2))
auccauacuguccaaaa

SEQ ID NO: 216624 - RNA, 19 nt, Influenza A virus (A/Hong Kong/1073/99(H9N2))
ugcuacuauuugcuaucca

SEQ ID NO: 216625 - RNA, 18 nt, Influenza A virus (A/Hong Kong/1073/99(H9N2))
uucuucaaaugcauuuau

SEQ ID NO: 216626 - RNA, 15 nt, Influenza A virus (A/Hong Kong/1073/99(H9N2))
uuguccuucaugaaa

SEQ ID NO: 216627 - RNA, 13 nt, Influenza A virus (A/Hong Kong/1073/99(H9N2))
uuugcuauccaua

SEQ ID NO: 216628 - RNA, 23 nt, Influenza A virus (A/Hong Kong/1073/99(H9N2))
uuugcuauccauacuguccaaaa

SEQ ID NO: 216629 - RNA, 17 nt, Influenza A virus (A/Hong Kong/1073/99(H9N2))
aaugcuacuauuugcua

SEQ ID NO: 216630 - RNA, 19 nt, Influenza A virus (A/Hong Kong/1073/99(H9N2))
aaugcuacuauuugcuauc

SEQ ID NO: 216631 - RNA, 15 nt, Influenza A virus (A/Hong Kong/1073/99(H9N2))
uccaaaaaaguaccu

SEQ ID NO: 216632 - RNA, 18 nt, Influenza A virus (A/Hong Kong/1073/99(H9N2))
uccaaaaaaguaccuugu

SEQ ID NO: 216633 - RNA, 15 nt, Influenza A virus (A/Hong Kong/1073/99(H9N2))
uagcuuugagcaaau

SEQ ID NO: 216634 - RNA, 13 nt, Influenza A virus (A/Hong Kong/1073/99(H9N2))
cuacuauuugcua

SEQ ID NO: 216635 - RNA, 14 nt, Influenza A virus (A/Hong Kong/1073/99(H9N2))
cuauccauacuguc

SEQ ID NO: 216636 - RNA, 17 nt, Influenza A virus (A/Hong Kong/1073/99(H9N2))
cuauuugcuauccauac

SEQ ID NO: 216637 - RNA, 23 nt, Influenza A virus (A/Hong Kong/1073/99(H9N2))
cuauuugcuauccauacugucca

SEQ ID NO: 216638 - RNA, 19 nt, Influenza A virus (A/Hong Kong/1073/99(H9N2))
cauugggauauugcacuug

SEQ ID NO: 216639 - RNA, 14 nt, Influenza A virus (A/Hong Kong/1073/99(H9N2))
cuuguccuucauga

SEQ ID NO: 216640 - RNA, 21 nt, Influenza A virus (A/Hong Kong/1073/99(H9N2))
gcuacuauuugcuauccauac

SEQ ID NO: 216641 - RNA, 22 nt, Influenza A virus (A/Hong Kong/1073/99(H9N2))
gcuacuauuugcuauccauacu

SEQ ID NO: 216642 - RNA, 14 nt, Influenza A virus (A/Hong Kong/1073/99(H9N2))
uuugcuauccauac

SEQ ID NO: 216643 - RNA, 17 nt, Influenza A virus (A/Hong Kong/1073/99(H9N2))
uuugcuauccauacugu

SEQ ID NO: 216644 - RNA, 14 nt, Influenza A virus (A/Hong Kong/1073/99(H9N2))
uuguccuucaugaa

SEQ ID NO: 216645 - RNA, 20 nt, Influenza A virus (A/Hong Kong/1073/99(H9N2))
uugcuugaaguggagcaaga

SEQ ID NO: 216646 - RNA, 20 nt, Influenza A virus (A/Hong Kong/1073/99(H9N2))
uggcaaugcuacuauuugcu

SEQ ID NO: 216647 - RNA, 22 nt, Influenza A virus (A/Hong Kong/1073/99(H9N2))
uggcaaugcuacuauuugcuau

SEQ ID NO: 216648 - RNA, 15 nt, Influenza A virus (A/Hong Kong/1073/99(H9N2))
uguccuucaugaaaa

SEQ ID NO: 216649 - RNA, 14 nt, Influenza A virus (A/Hong Kong/1073/99(H9N2))
uauuugcuauccau

SEQ ID NO: 216650 - RNA, 16 nt, Influenza A virus (A/Hong Kong/1073/99(H9N2))
uauuugcuauccauac

SEQ ID NO: 216651 - RNA, 19 nt, Influenza A virus (A/Hong Kong/1073/99(H9N2))
uacuauuugcuauccauac

SEQ ID NO: 216652 - RNA, 24 nt, Influenza A virus (A/Hong Kong/1073/99(H9N2))
uacuauuugcuauccauacugucc

SEQ ID NO: 216653 - RNA, 16 nt, Influenza A virus (A/Hong Kong/1073/99(H9N2))
guccaaaaaaguaccu

SEQ ID NO: 216654 - RNA, 14 nt, Influenza A virus (A/Hong Kong/1073/99(H9N2))
guccuucaugaaaa

SEQ ID NO: 216655 - RNA, 20 nt, Influenza A virus (A/Hong Kong/1073/99(H9N2))
cuguccaaaaaaguaccuug

SEQ ID NO: 216656 - RNA, 18 nt, Influenza A virus (A/Hong Kong/1073/99(H9N2))
cuguccaaaaaaguaccu

SEQ ID NO: 216657 - RNA, 18 nt, Influenza A virus (A/Hong Kong/1073/99(H9N2))
cuacuauuugcuauccau

SEQ ID NO: 216658 - RNA, 19 nt, Influenza A virus (A/Hong Kong/1073/99(H9N2))
cuacuauuugcuauccaua

SEQ ID NO: 216659 - RNA, 20 nt, Influenza A virus (A/Hong Kong/1073/99(H9N2))
cuacuauuugcuauccauac

SEQ ID NO: 216660 - RNA, 17 nt, Influenza A virus (A/Hong Kong/1073/99(H9N2))
cuacuauuugcuaucca

SEQ ID NO: 216661 - RNA, 22 nt, Influenza A virus (A/Hong Kong/1073/99(H9N2))
cgucuuuucuucaaaugcauuu

SEQ ID NO: 216662 - RNA, 13 nt, Influenza A virus (A/Hong Kong/1073/99(H9N2))
auuugcuauccau

SEQ ID NO: 216663 - RNA, 19 nt, Influenza A virus (A/Hong Kong/1073/99(H9N2))
auuugcuauccauacuguc

SEQ ID NO: 216664 - RNA, 13 nt, Influenza A virus (A/Hong Kong/1073/99(H9N2))
caaaaaaguaccu

SEQ ID NO: 216665 - RNA, 17 nt, Influenza A virus (A/Hong Kong/1073/99(H9N2))
caaugcuacuauuugcu

SEQ ID NO: 216666 - RNA, 22 nt, Influenza A virus (A/Hong Kong/1073/99(H9N2))
caaugcuacuauuugcuaucca

SEQ ID NO: 216667 - RNA, 12 nt, Influenza A virus (A/Hong Kong/1073/99(H9N2))
ccuucaugaaaa

SEQ ID NO: 216668 - RNA, 14 nt, Influenza A virus (A/Hong Kong/1073/99(H9N2))
cauacuguccaaaa

SEQ ID NO: 216669 - RNA, 15 nt, Influenza A virus (A/Hong Kong/1073/99(H9N2))
cauacuguccaaaaa

SEQ ID NO: 216670 - RNA, 18 nt, Influenza A virus (A/Hong Kong/1073/99(H9N2))
cauacuguccaaaaaagu

SEQ ID NO: 216671 - RNA, 15 nt, Influenza A virus (A/Hong Kong/1073/99(H9N2))
auacuguccaaaaaa

SEQ ID NO: 216672 - RNA, 23 nt, Influenza A virus (A/Hong Kong/1073/99(H9N2))
auacuguccaaaaaaguaccuug

SEQ ID NO: 216673 - RNA, 14 nt, Influenza A virus (A/Hong Kong/1073/99(H9N2))
auauugcacuugau

SEQ ID NO: 216674 - RNA, 13 nt, Influenza A virus (A/Hong Kong/1073/99(H9N2))
auccauacugucc

SEQ ID NO: 216675 - RNA, 14 nt, Influenza A virus (A/Hong Kong/1073/99(H9N2))
auccauacugucca

SEQ ID NO: 216676 - RNA, 16 nt, Influenza A virus (A/Hong Kong/1073/99(H9N2))
auccauacuguccaaa

SEQ ID NO: 216677 - RNA, 11 nt, Influenza A virus (A/Hong Kong/1073/99(H9N2))
acuguccaaaa

SEQ ID NO: 216678 - RNA, 23 nt, Influenza A virus (A/Hong Kong/1073/99(H9N2))
acuguccaaaaaaguaccuuguu

SEQ ID NO: 216679 - RNA, 18 nt, Influenza A virus (A/Hong Kong/1073/99(H9N2))
acuguccaaaaaaguacc

SEQ ID NO: 216680 - RNA, 22 nt, Homo sapiens
guaaguuacaugaaggcagcag

SEQ ID NO: 216681 - RNA, 23 nt, Homo sapiens
guauuccuagaaacugacacaug

SEQ ID NO: 216682 - RNA, 13 nt, Homo sapiens
gaauuugccuaau

SEQ ID NO: 216683 - RNA, 19 nt, Homo sapiens
agugcaaacuucagaguuc

SEQ ID NO: 216684 - RNA, 21 nt, Homo sapiens
gaagcuuacaugccuaccaau

SEQ ID NO: 216685 - RNA, 23 nt, Homo sapiens
ucaguuguuauuuauugaaauga

SEQ ID NO: 216686 - RNA, 17 nt, Homo sapiens
auaaugucccuucacaa

SEQ ID NO: 216687 - RNA, 14 nt, Homo sapiens
ugacacaugcugaa

SEQ ID NO: 216688 - RNA, 13 nt, Homo sapiens
gaauaaagagggu

SEQ ID NO: 216689 - RNA, 17 nt, Homo sapiens
uccuagaaacugacaca

SEQ ID NO: 216690 - RNA, 13 nt, Homo sapiens
uugaagauucuau

SEQ ID NO: 216691 - RNA, 14 nt, Homo sapiens
guucccugugucau

SEQ ID NO: 216692 - RNA, 13 nt, Homo sapiens
uccuagucauucu

SEQ ID NO: 216693 - RNA, 18 nt, Homo sapiens
cuuuguggucgacaucaa

SEQ ID NO: 216694 - RNA, 16 nt, Homo sapiens
aaggccuucuucccaa

SEQ ID NO: 216695 - RNA, 20 nt, Homo sapiens
uaauuaaugucaguauuuca

SEQ ID NO: 216696 - RNA, 14 nt, Homo sapiens
cugauggugacauu

SEQ ID NO: 216697 - RNA, 17 nt, Homo sapiens
uuccacuugagugucaa

SEQ ID NO: 216698 - RNA, 14 nt, Homo sapiens
aagcaaauggccaa

SEQ ID NO: 216699 - RNA, 21 nt, Homo sapiens
uugugaaaaaauuuacuuuaa

SEQ ID NO: 216700 - RNA, 16 nt, Homo sapiens
uuauuuauuuauucau

SEQ ID NO: 216701 - RNA, 19 nt, Homo sapiens
cucccucccccuggcacug

SEQ ID NO: 216702 - RNA, 23 nt, Homo sapiens
cauuuguuuugccaauuugcaca

SEQ ID NO: 216703 - RNA, 23 nt, Homo sapiens
uaguaaguacuuaauaaacugug

SEQ ID NO: 216704 - RNA, 14 nt, Homo sapiens
uaccugcacacugu

SEQ ID NO: 216705 - RNA, 14 nt, Homo sapiens
aauauugugcccca

SEQ ID NO: 216706 - RNA, 19 nt, Homo sapiens
uaauauccaauugcugcuu

SEQ ID NO: 216707 - RNA, 12 nt, Homo sapiens
uugaaaugucaa

SEQ ID NO: 216708 - RNA, 13 nt, Homo sapiens
auguacuauccaa

SEQ ID NO: 216709 - RNA, 16 nt, Homo sapiens
uucaaucuggauucau

SEQ ID NO: 216710 - RNA, 21 nt, Homo sapiens
ugcucaguagucagacuggau

SEQ ID NO: 216711 - RNA, 12 nt, Homo sapiens
gucagacuggau

SEQ ID NO: 216712 - RNA, 16 nt, Homo sapiens
auugcaccuggaugua

SEQ ID NO: 216713 - RNA, 22 nt, Homo sapiens
ugaggguauguuuuauauagca

SEQ ID NO: 216714 - RNA, 16 nt, Homo sapiens
auaucacuuccaugac

SEQ ID NO: 216715 - RNA, 19 nt, Homo sapiens
aggaagcugugagagcagu

SEQ ID NO: 216716 - RNA, 20 nt, Homo sapiens
gccacccaggaacuccugac

SEQ ID NO: 216717 - RNA, 18 nt, Homo sapiens
uagcaggaagcugugaga

SEQ ID NO: 216718 - RNA, 15 nt, Homo sapiens
gcugauggugacauu

SEQ ID NO: 216719 - RNA, 23 nt, Homo sapiens
guaacuguuuagaugaaugucag

SEQ ID NO: 216720 - RNA, 11 nt, Homo sapiens
uuuacaguguu

SEQ ID NO: 216721 - RNA, 13 nt, Homo sapiens
gcugauggugaca

SEQ ID NO: 216722 - RNA, 15 nt, Homo sapiens
aacuaaaauguucua

SEQ ID NO: 216723 - RNA, 20 nt, Homo sapiens
uuuuaaacucugagugcaaa

SEQ ID NO: 216724 - RNA, 16 nt, Homo sapiens
aauuugccuaauauga

SEQ ID NO: 216725 - RNA, 14 nt, Homo sapiens
gcuuacaugccuac

SEQ ID NO: 216726 - RNA, 13 nt, Homo sapiens
auuucaacugaag

SEQ ID NO: 216727 - RNA, 18 nt, Homo sapiens
uauggggccaaaauagca

SEQ ID NO: 216728 - RNA, 18 nt, Homo sapiens
ucaaauguucuccaguca

SEQ ID NO: 216729 - RNA, 16 nt, Homo sapiens
ccuaacuaucacuggu

SEQ ID NO: 216730 - RNA, 22 nt, Homo sapiens
cauagagaauauaaaaauaaag

SEQ ID NO: 216731 - RNA, 22 nt, Homo sapiens
agcaggaagcugugagagcagu

SEQ ID NO: 216732 - RNA, 21 nt, Homo sapiens
uauuuaaauagaugacauuga

SEQ ID NO: 216733 - RNA, 15 nt, Homo sapiens
gcagcgccagugaca

SEQ ID NO: 216734 - RNA, 19 nt, Homo sapiens
auaaacauuucauuuccca

SEQ ID NO: 216735 - RNA, 18 nt, Homo sapiens
gauguaaaacugaacuuc

SEQ ID NO: 216736 - RNA, 16 nt, Homo sapiens
cuagucauucuucccu

SEQ ID NO: 216737 - RNA, 11 nt, Homo sapiens
auucuuggccc

SEQ ID NO: 216738 - RNA, 21 nt, Homo sapiens
agaauguuuucaaauguucuc

SEQ ID NO: 216739 - RNA, 19 nt, Homo sapiens
cggagcccugucuccucuc

SEQ ID NO: 216740 - RNA, 21 nt, Homo sapiens
auagcagcccucaauugugaa

SEQ ID NO: 216741 - RNA, 18 nt, Homo sapiens
acaugccagccacuguga

SEQ ID NO: 216742 - RNA, 16 nt, Homo sapiens
aauuauugauguuuuc

SEQ ID NO: 216743 - RNA, 16 nt, Homo sapiens
guccuauuauauucau

SEQ ID NO: 216744 - RNA, 18 nt, Homo sapiens
guucacuggacacuucac

SEQ ID NO: 216745 - RNA, 18 nt, Homo sapiens
agccacuggacugacgac

SEQ ID NO: 216746 - RNA, 15 nt, Homo sapiens
uaugugcacaucugu

SEQ ID NO: 216747 - RNA, 14 nt, Homo sapiens
auauugugccccau

SEQ ID NO: 216748 - RNA, 22 nt, Homo sapiens
uuuuuauauucucagcagagug

SEQ ID NO: 216749 - RNA, 17 nt, Homo sapiens
cuucaguuugcagagua

SEQ ID NO: 216750 - RNA, 21 nt, Homo sapiens
uuggguuaggaagaaaauaau

SEQ ID NO: 216751 - RNA, 17 nt, Homo sapiens
guauagauguugcuaac

SEQ ID NO: 216752 - RNA, 14 nt, Homo sapiens
aaucugugaugaca

SEQ ID NO: 216753 - RNA, 16 nt, Homo sapiens
uacuuaauaaacugug

SEQ ID NO: 216754 - RNA, 21 nt, Homo sapiens
cugaccuugcugauggugaca

SEQ ID NO: 216755 - RNA, 16 nt, Homo sapiens
ugacauaagugcuauu

SEQ ID NO: 216756 - RNA, 22 nt, Homo sapiens
acuauccaaucugugaugacau

SEQ ID NO: 216757 - RNA, 21 nt, Homo sapiens
agcaugaaaaucacacugucu

SEQ ID NO: 216758 - RNA, 15 nt, Homo sapiens
cuuuuaaacucugag

SEQ ID NO: 216759 - RNA, 22 nt, Homo sapiens
cauuaaaugacucuucccucaa

SEQ ID NO: 216760 - RNA, 19 nt, Homo sapiens
uaagaacuaaaauguucua

SEQ ID NO: 216761 - RNA, 12 nt, Homo sapiens
aauagaugacau

SEQ ID NO: 216762 - RNA, 23 nt, Homo sapiens
auucauucuuuuugaaaugucaa

SEQ ID NO: 216763 - RNA, 20 nt, Homo sapiens
uuuugaagauucuauguuaa

SEQ ID NO: 216764 - RNA, 18 nt, Homo sapiens
uuaccaauugaaguaaaa

SEQ ID NO: 216765 - RNA, 18 nt, Homo sapiens
acaugcugaacaucacag

SEQ ID NO: 216766 - RNA, 19 nt, Homo sapiens
uacaacucuauuuaauuaa

SEQ ID NO: 216767 - RNA, 13 nt, Homo sapiens
acuuccaugacau

SEQ ID NO: 216768 - RNA, 20 nt, Homo sapiens
guggauuaaagugcccagca

SEQ ID NO: 216769 - RNA, 13 nt, Homo sapiens
aaauguggauuaa

SEQ ID NO: 216770 - RNA, 15 nt, Homo sapiens
cuuuaagaacuaaaa

SEQ ID NO: 216771 - RNA, 18 nt, Homo sapiens
gucaaagaagucauucuu

SEQ ID NO: 216772 - RNA, 20 nt, Homo sapiens
auuauugucaaagaagucau

SEQ ID NO: 216773 - RNA, 23 nt, Homo sapiens
acccaguguuuuaggagcaugag

SEQ ID NO: 216774 - RNA, 17 nt, Homo sapiens
uauaaccuuguuccaaa

SEQ ID NO: 216775 - RNA, 18 nt, Homo sapiens
uccccucuccuccacauu

SEQ ID NO: 216776 - RNA, 16 nt, Homo sapiens
ggagcaugagugccgu

SEQ ID NO: 216777 - RNA, 12 nt, Homo sapiens
ugaguggaguua

SEQ ID NO: 216778 - RNA, 12 nt, Homo sapiens
uccaaucuguga

SEQ ID NO: 216779 - RNA, 14 nt, Homo sapiens
ugugagacuguaag

SEQ ID NO: 216780 - RNA, 17 nt, Homo sapiens
uuggauguaaaacugaa

SEQ ID NO: 216781 - RNA, 12 nt, Homo sapiens
gaagucauucuu

SEQ ID NO: 216782 - RNA, 16 nt, Homo sapiens
ccaaauguucacuggu

SEQ ID NO: 216783 - RNA, 16 nt, Homo sapiens
uaaagugcccagcaca

SEQ ID NO: 216784 - RNA, 23 nt, Homo sapiens
guacuauccaaucugugaugaca

SEQ ID NO: 216785 - RNA, 15 nt, Homo sapiens
ugauuucacagugug

SEQ ID NO: 216786 - RNA, 14 nt, Homo sapiens
gaguuuggccagaa

SEQ ID NO: 216787 - RNA, 13 nt, Homo sapiens
cucaaacuaacag

SEQ ID NO: 216788 - RNA, 20 nt, Homo sapiens
caugagcuggcgggauugaa

SEQ ID NO: 216789 - RNA, 18 nt, Homo sapiens
gauaucugcagggacaga

SEQ ID NO: 216790 - RNA, 22 nt, Homo sapiens
aguaaguacuuaauaaacugug

SEQ ID NO: 216791 - RNA, 15 nt, Homo sapiens
uuggaaaggaaugca

SEQ ID NO: 216792 - RNA, 23 nt, Homo sapiens
guaauuccuaacuaucacugguu

SEQ ID NO: 216793 - RNA, 15 nt, Homo sapiens
cuauuauauucauuc

SEQ ID NO: 216794 - RNA, 23 nt, Homo sapiens
uugcugcugauuuaaacacauua

SEQ ID NO: 216795 - RNA, 15 nt, Homo sapiens
aaacauuucauuucc

SEQ ID NO: 216796 - RNA, 22 nt, Homo sapiens
agagcaugaaaaucacacuguc

SEQ ID NO: 216797 - RNA, 15 nt, Homo sapiens
agucucccuuccuau

SEQ ID NO: 216798 - RNA, 13 nt, Homo sapiens
auuugcacauuaa

SEQ ID NO: 216799 - RNA, 23 nt, Homo sapiens
augcuguucacuggacacuucac

SEQ ID NO: 216800 - RNA, 15 nt, Homo sapiens
aucuguuacacaaag

SEQ ID NO: 216801 - RNA, 15 nt, Homo sapiens
gaagucuucuauuua

SEQ ID NO: 216802 - RNA, 18 nt, Homo sapiens
gaaaaggccuucuuccca

SEQ ID NO: 216803 - RNA, 12 nt, Homo sapiens
ucauuucuagca

SEQ ID NO: 216804 - RNA, 12 nt, Homo sapiens
aaacacauuaaa

SEQ ID NO: 216805 - RNA, 22 nt, Homo sapiens
cuggaguuauugaagcagagug

SEQ ID NO: 216806 - RNA, 22 nt, Homo sapiens
ucaguuuaucuguucauaugga

SEQ ID NO: 216807 - RNA, 18 nt, Homo sapiens
gaugcacaugagcuggcg

SEQ ID NO: 216808 - RNA, 22 nt, Homo sapiens
caguuuaucuguucauauggau

SEQ ID NO: 216809 - RNA, 16 nt, Homo sapiens
auugaaaugauuucac

SEQ ID NO: 216810 - RNA, 11 nt, Homo sapiens
aacuccugacu

SEQ ID NO: 216811 - RNA, 14 nt, Homo sapiens
gaaggaugcugucu

SEQ ID NO: 216812 - RNA, 24 nt, Homo sapiens
agucuggcagacuuucuucucuau

SEQ ID NO: 216813 - RNA, 11 nt, Homo sapiens
aaucacacugu

SEQ ID NO: 216814 - RNA, 15 nt, Homo sapiens
acacugucuucugau

SEQ ID NO: 216815 - RNA, 16 nt, Homo sapiens
uauccaaucugugaug

SEQ ID NO: 216816 - RNA, 17 nt, Homo sapiens
aggagcaugagugccgu

SEQ ID NO: 216817 - RNA, 17 nt, Homo sapiens
ggcaguggaugggugcu

SEQ ID NO: 216818 - RNA, 19 nt, Homo sapiens
cuucucuauuucuggauga

SEQ ID NO: 216819 - RNA, 12 nt, Homo sapiens
auacagugucug

SEQ ID NO: 216820 - RNA, 20 nt, Homo sapiens
acuguccuauuauauucauu

SEQ ID NO: 216821 - RNA, 12 nt, Homo sapiens
gaaggugccucu

SEQ ID NO: 216822 - RNA, 14 nt, Homo sapiens
agcagcgccaguga

SEQ ID NO: 216823 - RNA, 16 nt, Homo sapiens
uucaguuugcagagua

SEQ ID NO: 216824 - RNA, 16 nt, Homo sapiens
auuccuaacuaucacu

SEQ ID NO: 216825 - RNA, 23 nt, Homo sapiens
aaacugaacuucagagcaugaaa

SEQ ID NO: 216826 - RNA, 18 nt, Homo sapiens
gcucuccccuucucugua

SEQ ID NO: 216827 - RNA, 14 nt, Homo sapiens
acuuccaugacaua

SEQ ID NO: 216828 - RNA, 23 nt, Homo sapiens
uagcaggaagcugugagagcagu

SEQ ID NO: 216829 - RNA, 18 nt, Homo sapiens
cagcucuccccuucucug

SEQ ID NO: 216830 - RNA, 17 nt, Homo sapiens
cugauggugacauugca

SEQ ID NO: 216831 - RNA, 16 nt, Homo sapiens
acugaacuucagagca

SEQ ID NO: 216832 - RNA, 14 nt, Homo sapiens
gagucuacagagaa

SEQ ID NO: 216833 - RNA, 12 nt, Homo sapiens
uuggcccaggau

SEQ ID NO: 216834 - RNA, 17 nt, Homo sapiens
uccuagucauucuuccc

SEQ ID NO: 216835 - RNA, 21 nt, Homo sapiens
cucuguauuccuagaaacuga

SEQ ID NO: 216836 - RNA, 16 nt, Homo sapiens
cuauucaguggcuaac

SEQ ID NO: 216837 - RNA, 21 nt, Homo sapiens
gauaucacuuccaugacauaa

SEQ ID NO: 216838 - RNA, 17 nt, Homo sapiens
cuagaaacugacacaug

SEQ ID NO: 216839 - RNA, 19 nt, Homo sapiens
caggauuauugucaaagaa

SEQ ID NO: 216840 - RNA, 15 nt, Homo sapiens
ucuggaugcugugaa

SEQ ID NO: 216841 - RNA, 18 nt, Homo sapiens
ccuaaucuuccacuugag

SEQ ID NO: 216842 - RNA, 14 nt, Homo sapiens
acgcacacugucug

SEQ ID NO: 216843 - RNA, 22 nt, Homo sapiens
uuggguuuauuuggaaaggaau

SEQ ID NO: 216844 - RNA, 11 nt, Homo sapiens
cucaugcugcc

SEQ ID NO: 216845 - RNA, 20 nt, Homo sapiens
agcacaaagcagauccucaa

SEQ ID NO: 216846 - RNA, 17 nt, Homo sapiens
ucucuguauuccuagaa

SEQ ID NO: 216847 - RNA, 17 nt, Homo sapiens
agcagauccucaauaaa

SEQ ID NO: 216848 - RNA, 11 nt, Homo sapiens
ggaaagcaaau

SEQ ID NO: 216849 - RNA, 14 nt, Homo sapiens
ccagccacugugau

SEQ ID NO: 216850 - RNA, 21 nt, Homo sapiens
aagggauuuucagcccucaga

SEQ ID NO: 216851 - RNA, 13 nt, Homo sapiens
cuuauuuccucau

SEQ ID NO: 216852 - RNA, 18 nt, Homo sapiens
uagagguacacuugugaa

SEQ ID NO: 216853 - RNA, 15 nt, Homo sapiens
aaaaucacacugucu

SEQ ID NO: 216854 - RNA, 17 nt, Homo sapiens
gcggauccaagcaaaug

SEQ ID NO: 216855 - RNA, 22 nt, Homo sapiens
aaacacauuaaagguacuuugc

SEQ ID NO: 216856 - RNA, 16 nt, Homo sapiens
cuaugcuguucacugg

SEQ ID NO: 216857 - RNA, 19 nt, Homo sapiens
caacugaaguucuauuuau

SEQ ID NO: 216858 - RNA, 15 nt, Homo sapiens
gaauauugugcccca

SEQ ID NO: 216859 - RNA, 14 nt, Homo sapiens
uucucagcagagug

SEQ ID NO: 216860 - RNA, 19 nt, Homo sapiens
uccacuugagugucaagcu

SEQ ID NO: 216861 - RNA, 15 nt, Homo sapiens
uucuuguaaggcaua

SEQ ID NO: 216862 - RNA, 18 nt, Homo sapiens
gccacuggacugacgacu

SEQ ID NO: 216863 - RNA, 21 nt, Homo sapiens
ugguaguuuuacaguguuucu

SEQ ID NO: 216864 - RNA, 17 nt, Homo sapiens
cacuuuauuucucucau

SEQ ID NO: 216865 - RNA, 13 nt, Homo sapiens
cacuggacacuuc

SEQ ID NO: 216866 - RNA, 22 nt, Homo sapiens
cugaggagccugcaacaugcca

SEQ ID NO: 216867 - RNA, 15 nt, Homo sapiens
uauccaaucugugau

SEQ ID NO: 216868 - RNA, 16 nt, Homo sapiens
cacacuguccuauuau

SEQ ID NO: 216869 - RNA, 13 nt, Homo sapiens
caauugaaguaaa

SEQ ID NO: 216870 - RNA, 14 nt, Homo sapiens
agucauucuucccu

SEQ ID NO: 216871 - RNA, 20 nt, Homo sapiens
gacgugcacgcacacugucu

SEQ ID NO: 216872 - RNA, 23 nt, Homo sapiens
gucucccuuccuaugcuguucac

SEQ ID NO: 216873 - RNA, 22 nt, Homo sapiens
gcugcaguuuuuuuccuucaag

SEQ ID NO: 216874 - RNA, 22 nt, Homo sapiens
gaugcugucuucguacugggaa

SEQ ID NO: 216875 - RNA, 20 nt, Homo sapiens
ccaauagcaaggcugugcau

SEQ ID NO: 216876 - RNA, 15 nt, Homo sapiens
ggguuaggaagaaaa

SEQ ID NO: 216877 - RNA, 16 nt, Homo sapiens
uaaacauuucauuucc

SEQ ID NO: 216878 - RNA, 17 nt, Homo sapiens
auuuauugaaaugauuu

SEQ ID NO: 216879 - RNA, 21 nt, Homo sapiens
cguucccggguagccacugga

SEQ ID NO: 216880 - RNA, 18 nt, Homo sapiens
uuugaagguagaauguuu

SEQ ID NO: 216881 - RNA, 20 nt, Homo sapiens
aaggcuuagacccucaugcu

SEQ ID NO: 216882 - RNA, 16 nt, Homo sapiens
uucaacugaaguucua

SEQ ID NO: 216883 - RNA, 23 nt, Homo sapiens
ugcaacaugccagccacugugau

SEQ ID NO: 216884 - RNA, 21 nt, Homo sapiens
uuuaaauagaugacauugacu

SEQ ID NO: 216885 - RNA, 15 nt, Homo sapiens
uuaauauuucugagg

SEQ ID NO: 216886 - RNA, 10 nt, Homo sapiens
uuuguucccu

SEQ ID NO: 216887 - RNA, 17 nt, Homo sapiens
uccuaaugcuugcugcu

SEQ ID NO: 216888 - RNA, 19 nt, Homo sapiens
caaucuaaagauacagugu

SEQ ID NO: 216889 - RNA, 19 nt, Homo sapiens
gcauacugccuuguuuaau

SEQ ID NO: 216890 - RNA, 22 nt, Homo sapiens
ucuguauuccuagaaacugaca

SEQ ID NO: 216891 - RNA, 13 nt, Homo sapiens
aaacuguggugcu

SEQ ID NO: 216892 - RNA, 20 nt, Homo sapiens
cccugugucauuucaaacag

SEQ ID NO: 216893 - RNA, 18 nt, Homo sapiens
ugcugauuuaaacacauu

SEQ ID NO: 216894 - RNA, 13 nt, Homo sapiens
gucagacuggaua

SEQ ID NO: 216895 - RNA, 16 nt, Homo sapiens
auaaacauuucauuuc

SEQ ID NO: 216896 - RNA, 13 nt, Homo sapiens
ggccacccaggaa

SEQ ID NO: 216897 - RNA, 22 nt, Homo sapiens
uaucugcagggacagagcauug

SEQ ID NO: 216898 - RNA, 16 nt, Homo sapiens
cacaaagaaccaccag

SEQ ID NO: 216899 - RNA, 15 nt, Homo sapiens
uaaagauacaguguc

SEQ ID NO: 216900 - RNA, 17 nt, Homo sapiens
ccuaaugcuugcugcug

SEQ ID NO: 216901 - RNA, 13 nt, Homo sapiens
gccuuggcugcag

SEQ ID NO: 216902 - RNA, 22 nt, Homo sapiens
gcccucagaaucgcuccaccuu

SEQ ID NO: 216903 - RNA, 14 nt, Homo sapiens
uuaaauagaugaca

SEQ ID NO: 216904 - RNA, 19 nt, Homo sapiens
auguggcaggcuggaguua

SEQ ID NO: 216905 - RNA, 16 nt, Homo sapiens
auugaaggaugcuguc

SEQ ID NO: 216906 - RNA, 16 nt, Homo sapiens
auuugaaacacugguu

SEQ ID NO: 216907 - RNA, 18 nt, Homo sapiens
gauggugacauugcaccu

SEQ ID NO: 216908 - RNA, 16 nt, Homo sapiens
uaacauuuauuugagu

SEQ ID NO: 216909 - RNA, 14 nt, Homo sapiens
ccucaugcugccaa

SEQ ID NO: 216910 - RNA, 21 nt, Homo sapiens
uggugacauugcaccuggaug

SEQ ID NO: 216911 - RNA, 17 nt, Homo sapiens
caaugagaucauuguga

SEQ ID NO: 216912 - RNA, 12 nt, Homo sapiens
ugcuuggaugua

SEQ ID NO: 216913 - RNA, 16 nt, Homo sapiens
augauuucacagugug

SEQ ID NO: 216914 - RNA, 13 nt, Homo sapiens
uggccaaugagau

SEQ ID NO: 216915 - RNA, 16 nt, Homo sapiens
cucaauaaacauuuca

SEQ ID NO: 216916 - RNA, 12 nt, Homo sapiens
ccucucucugua

SEQ ID NO: 216917 - RNA, 21 nt, Homo sapiens
agacccucaugcugccaauau

SEQ ID NO: 216918 - RNA, 22 nt, Homo sapiens
augcuguucacuggacacuuca

SEQ ID NO: 216919 - RNA, 18 nt, Homo sapiens
acuucagagcaugaaaau

SEQ ID NO: 216920 - RNA, 16 nt, Homo sapiens
ucaacugaaguucuau

SEQ ID NO: 216921 - RNA, 14 nt, Homo sapiens
gcgccagugacagu

SEQ ID NO: 216922 - RNA, 13 nt, Homo sapiens
auuucacagugug

SEQ ID NO: 216923 - RNA, 16 nt, Homo sapiens
aaauggccaaugagau

SEQ ID NO: 216924 - RNA, 21 nt, Homo sapiens
ugagcuggcgggauugaagga

SEQ ID NO: 216925 - RNA, 22 nt, Homo sapiens
agauccucaauaaacauuucau

SEQ ID NO: 216926 - RNA, 15 nt, Homo sapiens
auccaaucugugaug

SEQ ID NO: 216927 - RNA, 19 nt, Homo sapiens
acccucagaugcacaugag

SEQ ID NO: 216928 - RNA, 20 nt, Homo sapiens
aaaaugguguuuuaucuucu

SEQ ID NO: 216929 - RNA, 23 nt, Homo sapiens
agcaguuugguuucuagcaugaa

SEQ ID NO: 216930 - RNA, 17 nt, Homo sapiens
ugauuuaaacacauuaa

SEQ ID NO: 216931 - RNA, 17 nt, Homo sapiens
ucuccucucucuguaau

SEQ ID NO: 216932 - RNA, 15 nt, Homo sapiens
auccuagucauucuu

SEQ ID NO: 216933 - RNA, 16 nt, Homo sapiens
gcagcgccagugacag

SEQ ID NO: 216934 - RNA, 18 nt, Homo sapiens
ggcacaucauuucaagaa

SEQ ID NO: 216935 - RNA, 14 nt, Homo sapiens
auuuauuuauucau

SEQ ID NO: 216936 - RNA, 14 nt, Homo sapiens
uuaaacaugcugua

SEQ ID NO: 216937 - RNA, 17 nt, Homo sapiens
cucuaccugcacacugu

SEQ ID NO: 216938 - RNA, 20 nt, Homo sapiens
gaauguuuucaaauguucuc

SEQ ID NO: 216939 - RNA, 18 nt, Homo sapiens
uaacucuaccugcacacu

SEQ ID NO: 216940 - RNA, 17 nt, Homo sapiens
uauccuagucauucuuc

SEQ ID NO: 216941 - RNA, 14 nt, Homo sapiens
acuaaaauguucua

SEQ ID NO: 216942 - RNA, 20 nt, Homo sapiens
caaucuaaagauacaguguc

SEQ ID NO: 216943 - RNA, 23 nt, Homo sapiens
aacuaacaggcuuagugauguaa

SEQ ID NO: 216944 - RNA, 19 nt, Homo sapiens
auuaaaaggaagcuuacau

SEQ ID NO: 216945 - RNA, 17 nt, Homo sapiens
ccagucauuauguuaau

SEQ ID NO: 216946 - RNA, 18 nt, Homo sapiens
cuggaguuauugaagcag

SEQ ID NO: 216947 - RNA, 19 nt, Homo sapiens
uugucaaagaagucauucu

SEQ ID NO: 216948 - RNA, 23 nt, Homo sapiens
gcaagacauuauauagcaguaaa

SEQ ID NO: 216949 - RNA, 17 nt, Homo sapiens
ucuccccuucucuguau

SEQ ID NO: 216950 - RNA, 15 nt, Homo sapiens
auucucagcagagug

SEQ ID NO: 216951 - RNA, 15 nt, Homo sapiens
uucuuggcccaggau

SEQ ID NO: 216952 - RNA, 14 nt, Homo sapiens
uacauacuuuuugg

SEQ ID NO: 216953 - RNA, 21 nt, Homo sapiens
gagcaguuugguuucuagcau

SEQ ID NO: 216954 - RNA, 15 nt, Homo sapiens
uucagcccucagaau

SEQ ID NO: 216955 - RNA, 20 nt, Homo sapiens
ucuguuacacaaagaaccac

SEQ ID NO: 216956 - RNA, 14 nt, Homo sapiens
uuugcauauugcau

SEQ ID NO: 216957 - RNA, 15 nt, Homo sapiens
acaguguuucuggcu

SEQ ID NO: 216958 - RNA, 14 nt, Homo sapiens
gugaugacauuccc

SEQ ID NO: 216959 - RNA, 18 nt, Homo sapiens
ggaagcugugagagcagu

SEQ ID NO: 216960 - RNA, 16 nt, Homo sapiens
acagcaacacaaagcu

SEQ ID NO: 216961 - RNA, 22 nt, Homo sapiens
ccuuggccaugggucccauucu

SEQ ID NO: 216962 - RNA, 18 nt, Homo sapiens
ccuuccuaugcuguucac

SEQ ID NO: 216963 - RNA, 14 nt, Homo sapiens
acaguaacauagcu

SEQ ID NO: 216964 - RNA, 23 nt, Homo sapiens
ucacugguuugguucuggacuaa

SEQ ID NO: 216965 - RNA, 17 nt, Homo sapiens
gugggauaucacuucca

SEQ ID NO: 216966 - RNA, 13 nt, Homo sapiens
ugagacuguguug

SEQ ID NO: 216967 - RNA, 19 nt, Homo sapiens
agucagggaaggugccucu

SEQ ID NO: 216968 - RNA, 19 nt, Homo sapiens
gcugauggugacauugcac

SEQ ID NO: 216969 - RNA, 22 nt, Homo sapiens
cuauuuauuuauuuauucauua

SEQ ID NO: 216970 - RNA, 21 nt, Homo sapiens
aauuuguggaaaauaacucac

SEQ ID NO: 216971 - RNA, 19 nt, Homo sapiens
uggcacugguuuguucccu

SEQ ID NO: 216972 - RNA, 23 nt, Homo sapiens
auguacuauccaaucugugauga

SEQ ID NO: 216973 - RNA, 13 nt, Homo sapiens
gauucuauguuaa

SEQ ID NO: 216974 - RNA, 19 nt, Homo sapiens
uuacuuuuuggaaaagaau

SEQ ID NO: 216975 - RNA, 17 nt, Homo sapiens
aauccuugccacagugu

SEQ ID NO: 216976 - RNA, 13 nt, Homo sapiens
uccaaucugugau

SEQ ID NO: 216977 - RNA, 17 nt, Homo sapiens
uggccaugggucccauu

SEQ ID NO: 216978 - RNA, 17 nt, Homo sapiens
gcccaggauuauuguca

SEQ ID NO: 216979 - RNA, 18 nt, Homo sapiens
acuucacgcccuuggcca

SEQ ID NO: 216980 - RNA, 13 nt, Homo sapiens
aauguucacuggu

SEQ ID NO: 216981 - RNA, 21 nt, Homo sapiens
ggccacccaggaacuccugac

SEQ ID NO: 216982 - RNA, 17 nt, Homo sapiens
aaugauuucacagugug

SEQ ID NO: 216983 - RNA, 11 nt, Homo sapiens
ugguacucugc

SEQ ID NO: 216984 - RNA, 23 nt, Homo sapiens
uaaaacugaacuucagagcauga

SEQ ID NO: 216985 - RNA, 22 nt, Homo sapiens
gaguggaguuacugaacaguaa

SEQ ID NO: 216986 - RNA, 15 nt, Homo sapiens
ucacagaagaugaag

SEQ ID NO: 216987 - RNA, 20 nt, Homo sapiens
acaucaaucuaaagauacag

SEQ ID NO: 216988 - RNA, 22 nt, Homo sapiens
cugaacuuuguggucgacauca

SEQ ID NO: 216989 - RNA, 20 nt, Homo sapiens
uugacagauugaauuugccu

SEQ ID NO: 216990 - RNA, 14 nt, Homo sapiens
ccagugagacugug

SEQ ID NO: 216991 - RNA, 14 nt, Homo sapiens
ugcacgcacacugu

SEQ ID NO: 216992 - RNA, 12 nt, Homo sapiens
cugcacacuguc

SEQ ID NO: 216993 - RNA, 17 nt, Homo sapiens
uaaacauuucauuuccc

SEQ ID NO: 216994 - RNA, 15 nt, Homo sapiens
ccagugagacugugu

SEQ ID NO: 216995 - RNA, 17 nt, Homo sapiens
ugauaucugcagggaca

SEQ ID NO: 216996 - RNA, 19 nt, Homo sapiens
cucagaaucgcuccaccuu

SEQ ID NO: 216997 - RNA, 18 nt, Homo sapiens
ugcugaacaucacagcuu

SEQ ID NO: 216998 - RNA, 16 nt, Homo sapiens
ucuggaugcugugaag

SEQ ID NO: 216999 - RNA, 12 nt, Homo sapiens
uuagguugugaa

SEQ ID NO: 217000 - RNA, 19 nt, Homo sapiens
ugcccagugagacuguguu

SEQ ID NO: 217001 - RNA, 23 nt, Homo sapiens
ucuccucucucuguaauaaacuc

SEQ ID NO: 217002 - RNA, 15 nt, Homo sapiens
agggacagagcauug

SEQ ID NO: 217003 - RNA, 17 nt, Homo sapiens
gcaaauggccaaugaga

SEQ ID NO: 217004 - RNA, 22 nt, Homo sapiens
cauguccuaaugcuugcugcug

SEQ ID NO: 217005 - RNA, 17 nt, Homo sapiens
cuucccuaaucuuccac

SEQ ID NO: 217006 - RNA, 14 nt, Homo sapiens
gugaagagucuaca

SEQ ID NO: 217007 - RNA, 19 nt, Homo sapiens
caauccuugccacagugug

SEQ ID NO: 217008 - RNA, 16 nt, Homo sapiens
uauugcauacuauuaa

SEQ ID NO: 217009 - RNA, 18 nt, Homo sapiens
agaaugcaguacuaacau

SEQ ID NO: 217010 - RNA, 18 nt, Homo sapiens
ugacauugcaccuggaug

SEQ ID NO: 217011 - RNA, 17 nt, Homo sapiens
ccaauuugcacauuaaa

SEQ ID NO: 217012 - RNA, 17 nt, Homo sapiens
cagaauauugugcccca

SEQ ID NO: 217013 - RNA, 12 nt, Homo sapiens
cugugaugacau

SEQ ID NO: 217014 - RNA, 19 nt, Homo sapiens
caacaugccagccacugug

SEQ ID NO: 217015 - RNA, 21 nt, Homo sapiens
cuuuaagcagcgccagugaca

SEQ ID NO: 217016 - RNA, 15 nt, Homo sapiens
aacaguaacauagcu

SEQ ID NO: 217017 - RNA, 15 nt, Homo sapiens
augacauaagugcua

SEQ ID NO: 217018 - RNA, 20 nt, Homo sapiens
aggguauguuuuauauagca

SEQ ID NO: 217019 - RNA, 13 nt, Homo sapiens
cauucuuggccca

SEQ ID NO: 217020 - RNA, 16 nt, Homo sapiens
aaagggauuuucagcc

SEQ ID NO: 217021 - RNA, 14 nt, Homo sapiens
uggaugcugugaag

SEQ ID NO: 217022 - RNA, 14 nt, Homo sapiens
uagaugaaugucag

SEQ ID NO: 217023 - RNA, 21 nt, Homo sapiens
agucauucuucccuaaucuuc

SEQ ID NO: 217024 - RNA, 16 nt, Homo sapiens
agagugcuuuaccaau

SEQ ID NO: 217025 - RNA, 11 nt, Homo sapiens
ggcugcaguuu

SEQ ID NO: 217026 - RNA, 12 nt, Homo sapiens
ccuaaucuucca

SEQ ID NO: 217027 - RNA, 20 nt, Homo sapiens
ucuaaagauacagugucuga

SEQ ID NO: 217028 - RNA, 20 nt, Homo sapiens
uccuagaaacugacacaugc

SEQ ID NO: 217029 - RNA, 14 nt, Homo sapiens
cucagaugcacaug

SEQ ID NO: 217030 - RNA, 15 nt, Homo sapiens
uuaccccucacaauc

SEQ ID NO: 217031 - RNA, 23 nt, Homo sapiens
uucccaauagcaaggcugugcau

SEQ ID NO: 217032 - RNA, 17 nt, Homo sapiens
auaagugcuauugcaga

SEQ ID NO: 217033 - RNA, 11 nt, Homo sapiens
aaaggugacca

SEQ ID NO: 217034 - RNA, 23 nt, Homo sapiens
aaugauuucacagugugugguca

SEQ ID NO: 217035 - RNA, 19 nt, Homo sapiens
ccuggcacugguuuguucc

SEQ ID NO: 217036 - RNA, 15 nt, Homo sapiens
cuauccaaucuguga

SEQ ID NO: 217037 - RNA, 11 nt, Homo sapiens
ucuauguuaau

SEQ ID NO: 217038 - RNA, 20 nt, Homo sapiens
uagcaaggcugugcaucuag

SEQ ID NO: 217039 - RNA, 19 nt, Homo sapiens
uaaaugacucuucccucaa

SEQ ID NO: 217040 - RNA, 21 nt, Homo sapiens
uuccuagaaacugacacaugc

SEQ ID NO: 217041 - RNA, 19 nt, Homo sapiens
aguaaacgauaaaaugugg

SEQ ID NO: 217042 - RNA, 16 nt, Homo sapiens
agaaacugacacaugc

SEQ ID NO: 217043 - RNA, 18 nt, Homo sapiens
uucuuuuugaaaugucaa

SEQ ID NO: 217044 - RNA, 16 nt, Homo sapiens
uuauugaagcagagug

SEQ ID NO: 217045 - RNA, 16 nt, Homo sapiens
caaauguucacuggua

SEQ ID NO: 217046 - RNA, 21 nt, Homo sapiens
gccagcucaccccaucauccc

SEQ ID NO: 217047 - RNA, 21 nt, Homo sapiens
aaucgcuccaccuugcagcuc

SEQ ID NO: 217048 - RNA, 19 nt, Homo sapiens
uauccaauugcugcuugua

SEQ ID NO: 217049 - RNA, 13 nt, Homo sapiens
aaucuggauucau

SEQ ID NO: 217050 - RNA, 16 nt, Homo sapiens
cucaguagucagacug

SEQ ID NO: 217051 - RNA, 16 nt, Homo sapiens
uuauugauguuuucau

SEQ ID NO: 217052 - RNA, 22 nt, Homo sapiens
gauaucugcagggacagagcau

SEQ ID NO: 217053 - RNA, 21 nt, Homo sapiens
aaguucuauuuauuugugaga

SEQ ID NO: 217054 - RNA, 17 nt, Homo sapiens
uggcaucuuacaucuga

SEQ ID NO: 217055 - RNA, 21 nt, Homo sapiens
guggggguaaggugcaucugu

SEQ ID NO: 217056 - RNA, 14 nt, Homo sapiens
auaguccgucucug

SEQ ID NO: 217057 - RNA, 19 nt, Homo sapiens
ugauggugacauugcaccu

SEQ ID NO: 217058 - RNA, 16 nt, Homo sapiens
gucuccucucucugua

SEQ ID NO: 217059 - RNA, 20 nt, Homo sapiens
ccaaugagaucauugugaag

SEQ ID NO: 217060 - RNA, 17 nt, Homo sapiens
ugggauaucacuuccau

SEQ ID NO: 217061 - RNA, 15 nt, Homo sapiens
aaaguaaacgauaaa

SEQ ID NO: 217062 - RNA, 16 nt, Homo sapiens
acaugcuguacauacu

SEQ ID NO: 217063 - RNA, 19 nt, Homo sapiens
auucuuuuugaaaugucaa

SEQ ID NO: 217064 - RNA, 23 nt, Homo sapiens
gugagacuguguuguacagcuag

SEQ ID NO: 217065 - RNA, 17 nt, Homo sapiens
cugaacuuuguggucga

SEQ ID NO: 217066 - RNA, 17 nt, Homo sapiens
ccccaaguuaguucaau

SEQ ID NO: 217067 - RNA, 14 nt, Homo sapiens
agucuucuauuuau

SEQ ID NO: 217068 - RNA, 16 nt, Homo sapiens
uuauauagcaguaaaa

SEQ ID NO: 217069 - RNA, 17 nt, Homo sapiens
cuucacgcccuuggcca

SEQ ID NO: 217070 - RNA, 18 nt, Homo sapiens
aaucgcuccaccuugcag

SEQ ID NO: 217071 - RNA, 19 nt, Homo sapiens
agaaaaggccuucuuccca

SEQ ID NO: 217072 - RNA, 15 nt, Homo sapiens
acaaagcuuuugcau

SEQ ID NO: 217073 - RNA, 16 nt, Homo sapiens
auaaugucccuucaca

SEQ ID NO: 217074 - RNA, 14 nt, Homo sapiens
uuuugaaaugucaa

SEQ ID NO: 217075 - RNA, 16 nt, Homo sapiens
auguacuauccaaucu

SEQ ID NO: 217076 - RNA, 17 nt, Homo sapiens
cuaacagcaacacaaag

SEQ ID NO: 217077 - RNA, 21 nt, Homo sapiens
uucaagaaugcaguacuaaca

SEQ ID NO: 217078 - RNA, 18 nt, Homo sapiens
cucacagaagaugaagca

SEQ ID NO: 217079 - RNA, 22 nt, Homo sapiens
gucaaccccaaguuaguucaau

SEQ ID NO: 217080 - RNA, 13 nt, Homo sapiens
acugggaugaggu

SEQ ID NO: 217081 - RNA, 20 nt, Homo sapiens
auaguccgucucugcuuauc

SEQ ID NO: 217082 - RNA, 13 nt, Homo sapiens
acuaucacugguu

SEQ ID NO: 217083 - RNA, 15 nt, Homo sapiens
ugagaucauugugaa

SEQ ID NO: 217084 - RNA, 17 nt, Homo sapiens
cgugcacgcacacuguc

SEQ ID NO: 217085 - RNA, 16 nt, Homo sapiens
acaaagcagauccuca

SEQ ID NO: 217086 - RNA, 21 nt, Homo sapiens
guauuucaacugaaguucuau

SEQ ID NO: 217087 - RNA, 22 nt, Homo sapiens
uagaaaaggccuucuucccaau

SEQ ID NO: 217088 - RNA, 22 nt, Homo sapiens
ggaugggugcuuaguaaguacu

SEQ ID NO: 217089 - RNA, 18 nt, Homo sapiens
ggauaucacuuccaugac

SEQ ID NO: 217090 - RNA, 19 nt, Homo sapiens
aacaugccagccacuguga

SEQ ID NO: 217091 - RNA, 13 nt, Homo sapiens
agagggaugcuug

SEQ ID NO: 217092 - RNA, 17 nt, Homo sapiens
auccuagucauucuucc

SEQ ID NO: 217093 - RNA, 13 nt, Homo sapiens
auagauguugcua

SEQ ID NO: 217094 - RNA, 17 nt, Homo sapiens
uccugucggagcccugu

SEQ ID NO: 217095 - RNA, 22 nt, Homo sapiens
aaacgauaaaauguggauuaaa

SEQ ID NO: 217096 - RNA, 20 nt, Homo sapiens
ucuacagagaagauucuugu

SEQ ID NO: 217097 - RNA, 20 nt, Homo sapiens
uuaccccucacaauccuugc

SEQ ID NO: 217098 - RNA, 23 nt, Homo sapiens
ugugagacuguaaguuacaugaa

SEQ ID NO: 217099 - RNA, 21 nt, Homo sapiens
cauucuucccuaaucuuccac

SEQ ID NO: 217100 - RNA, 21 nt, Homo sapiens
aggaccucccucccccuggca

SEQ ID NO: 217101 - RNA, 15 nt, Homo sapiens
cugauuuaaacacau

SEQ ID NO: 217102 - RNA, 13 nt, Homo sapiens
agucuucuauuua

SEQ ID NO: 217103 - RNA, 22 nt, Homo sapiens
gaccuugcugauggugacauug

SEQ ID NO: 217104 - RNA, 14 nt, Homo sapiens
auguaaaacugaac

SEQ ID NO: 217105 - RNA, 16 nt, Homo sapiens
ggcagacuuucuucuc

SEQ ID NO: 217106 - RNA, 21 nt, Homo sapiens
guucaaucuggauucauauuu

SEQ ID NO: 217107 - RNA, 17 nt, Homo sapiens
gccucuggaugcuguga

SEQ ID NO: 217108 - RNA, 18 nt, Homo sapiens
aaaagacaacauaacuca

SEQ ID NO: 217109 - RNA, 14 nt, Homo sapiens
uggccagaagucaa

SEQ ID NO: 217110 - RNA, 20 nt, Homo sapiens
augcugucuucguacuggga

SEQ ID NO: 217111 - RNA, 22 nt, Homo sapiens
gcuagaaaaggccuucuuccca

SEQ ID NO: 217112 - RNA, 19 nt, Homo sapiens
ggagcccugucuccucucu

SEQ ID NO: 217113 - RNA, 17 nt, Homo sapiens
uggaaaggaaugcaaag

SEQ ID NO: 217114 - RNA, 14 nt, Homo sapiens
cacagaagaugaag

SEQ ID NO: 217115 - RNA, 19 nt, Homo sapiens
uguguggucaacauuucuc

SEQ ID NO: 217116 - RNA, 15 nt, Homo sapiens
cugugaugacauucc

SEQ ID NO: 217117 - RNA, 19 nt, Homo sapiens
uaguucaaucuggauucau

SEQ ID NO: 217118 - RNA, 20 nt, Homo sapiens
gauacagugucugacuauaa

SEQ ID NO: 217119 - RNA, 13 nt, Homo sapiens
agaugaaugucag

SEQ ID NO: 217120 - RNA, 23 nt, Homo sapiens
uuggccaugggucccauucuugg

SEQ ID NO: 217121 - RNA, 19 nt, Homo sapiens
gauaucugcagggacagag

SEQ ID NO: 217122 - RNA, 14 nt, Homo sapiens
gaaugauauaaggu

SEQ ID NO: 217123 - RNA, 21 nt, Homo sapiens
cagagaagauucuuguauuua

SEQ ID NO: 217124 - RNA, 23 nt, Homo sapiens
gcuggaguuauugaagcagagug

SEQ ID NO: 217125 - RNA, 17 nt, Homo sapiens
ccuggauguacuaucca

SEQ ID NO: 217126 - RNA, 15 nt, Homo sapiens
caugagugccgugug

SEQ ID NO: 217127 - RNA, 19 nt, Homo sapiens
gauuuagcaggaagcugug

SEQ ID NO: 217128 - RNA, 19 nt, Homo sapiens
uauccaaucugugaugaca

SEQ ID NO: 217129 - RNA, 20 nt, Homo sapiens
gguggggguaaggugcaucu

SEQ ID NO: 217130 - RNA, 13 nt, Homo sapiens
caacucuauuuaa

SEQ ID NO: 217131 - RNA, 20 nt, Homo sapiens
uuuuauaaugucccuucaca

SEQ ID NO: 217132 - RNA, 22 nt, Homo sapiens
auuuccucauuuuuauaauguc

SEQ ID NO: 217133 - RNA, 20 nt, Homo sapiens
cuuaagaaauuuguggaaaa

SEQ ID NO: 217134 - RNA, 18 nt, Homo sapiens
gaaugcaaagaugaaggu

SEQ ID NO: 217135 - RNA, 17 nt, Homo sapiens
cagaaucgcuccaccuu

SEQ ID NO: 217136 - RNA, 18 nt, Homo sapiens
agagccccacccucagau

SEQ ID NO: 217137 - RNA, 15 nt, Homo sapiens
cccuuggacauuuua

SEQ ID NO: 217138 - RNA, 16 nt, Homo sapiens
aaugagaucauuguga

SEQ ID NO: 217139 - RNA, 16 nt, Homo sapiens
uugauugggcacauca

SEQ ID NO: 217140 - RNA, 21 nt, Homo sapiens
auuaauauccaauugcugcuu

SEQ ID NO: 217141 - RNA, 20 nt, Homo sapiens
aacaugccagccacugugau

SEQ ID NO: 217142 - RNA, 15 nt, Homo sapiens
uucaaauguucucca

SEQ ID NO: 217143 - RNA, 19 nt, Homo sapiens
augacauucccugcuaaua

SEQ ID NO: 217144 - RNA, 21 nt, Homo sapiens
guaauuaugguuaguagaggu

SEQ ID NO: 217145 - RNA, 17 nt, Homo sapiens
uuuaagcagcgccagug

SEQ ID NO: 217146 - RNA, 16 nt, Homo sapiens
uauccuagucauucuu

SEQ ID NO: 217147 - RNA, 18 nt, Homo sapiens
gcagagugcuuuaccaau

SEQ ID NO: 217148 - RNA, 19 nt, Homo sapiens
uaagacccucucaaacuaa

SEQ ID NO: 217149 - RNA, 19 nt, Homo sapiens
ggauaucacuuccaugaca

SEQ ID NO: 217150 - RNA, 21 nt, Homo sapiens
uuuaaucuuuuaugauugccu

SEQ ID NO: 217151 - RNA, 16 nt, Homo sapiens
ccucagaugcacauga

SEQ ID NO: 217152 - RNA, 19 nt, Homo sapiens
cagauugaauuugccuaau

SEQ ID NO: 217153 - RNA, 23 nt, Homo sapiens
uauccaaucugugaugacauucc

SEQ ID NO: 217154 - RNA, 22 nt, Homo sapiens
auuuacuuuaaacuacauuagg

SEQ ID NO: 217155 - RNA, 18 nt, Homo sapiens
ugaaggcagcagaauauu

SEQ ID NO: 217156 - RNA, 15 nt, Homo sapiens
auugugccccaugcu

SEQ ID NO: 217157 - RNA, 12 nt, Homo sapiens
ucaaauguucuc

SEQ ID NO: 217158 - RNA, 21 nt, Homo sapiens
aggaggugggauaucacuucc

SEQ ID NO: 217159 - RNA, 13 nt, Homo sapiens
caauuugcacauu

SEQ ID NO: 217160 - RNA, 19 nt, Homo sapiens
cucagaugcacaugagcug

SEQ ID NO: 217161 - RNA, 19 nt, Homo sapiens
guuacaugaaggcagcaga

SEQ ID NO: 217162 - RNA, 20 nt, Homo sapiens
acagucucccuuccuaugcu

SEQ ID NO: 217163 - RNA, 20 nt, Homo sapiens
cauucuuuuugaaaugucaa

SEQ ID NO: 217164 - RNA, 18 nt, Homo sapiens
uuauccuagucauucuuc

SEQ ID NO: 217165 - RNA, 13 nt, Homo sapiens
gauaucacuucca

SEQ ID NO: 217166 - RNA, 15 nt, Homo sapiens
aaaacuacauugaca

SEQ ID NO: 217167 - RNA, 20 nt, Homo sapiens
cagacuggauaguccgucuc

SEQ ID NO: 217168 - RNA, 15 nt, Homo sapiens
caaguuaguucaauc

SEQ ID NO: 217169 - RNA, 12 nt, Homo sapiens
ugccacagugug

SEQ ID NO: 217170 - RNA, 15 nt, Homo sapiens
uuuagaugaauguca

SEQ ID NO: 217171 - RNA, 22 nt, Homo sapiens
ugucauuucaaacagucucccu

SEQ ID NO: 217172 - RNA, 18 nt, Homo sapiens
ugguuucuagcaugaaga

SEQ ID NO: 217173 - RNA, 13 nt, Homo sapiens
ggaacuccugacu

SEQ ID NO: 217174 - RNA, 19 nt, Homo sapiens
gucuccucucucuguaaua

SEQ ID NO: 217175 - RNA, 13 nt, Homo sapiens
aaugcccagugag

SEQ ID NO: 217176 - RNA, 17 nt, Homo sapiens
gaaaaggccuucuuccc

SEQ ID NO: 217177 - RNA, 20 nt, Homo sapiens
ucaaagaagucauucuuuaa

SEQ ID NO: 217178 - RNA, 12 nt, Homo sapiens
gcaaagaugaag

SEQ ID NO: 217179 - RNA, 23 nt, Homo sapiens
uuucuuguaaggcauacugccuu

SEQ ID NO: 217180 - RNA, 16 nt, Homo sapiens
cugcagggacagagca

SEQ ID NO: 217181 - RNA, 13 nt, Homo sapiens
ccaauugaaguaa

SEQ ID NO: 217182 - RNA, 14 nt, Homo sapiens
gaacuucagagcau

SEQ ID NO: 217183 - RNA, 23 nt, Homo sapiens
cuuccaugacauaagugcuauug

SEQ ID NO: 217184 - RNA, 18 nt, Homo sapiens
ggauaguccgucucugcu

SEQ ID NO: 217185 - RNA, 16 nt, Homo sapiens
ucacacugucuucuga

SEQ ID NO: 217186 - RNA, 16 nt, Homo sapiens
aagauucuauguuaau

SEQ ID NO: 217187 - RNA, 18 nt, Homo sapiens
guucccggguagccacug

SEQ ID NO: 217188 - RNA, 20 nt, Homo sapiens
gcaacaugccagccacugug

SEQ ID NO: 217189 - RNA, 13 nt, Homo sapiens
ugaugacauuccc

SEQ ID NO: 217190 - RNA, 16 nt, Homo sapiens
ugccagccacugugau

SEQ ID NO: 217191 - RNA, 21 nt, Homo sapiens
cuuuauuucucucaucuguua

SEQ ID NO: 217192 - RNA, 17 nt, Homo sapiens
gccuaauaugaugacug

SEQ ID NO: 217193 - RNA, 16 nt, Homo sapiens
aguuugguuucuagca

SEQ ID NO: 217194 - RNA, 22 nt, Homo sapiens
gagcccugucuccucucucugu

SEQ ID NO: 217195 - RNA, 13 nt, Homo sapiens
ugucaguauuuca

SEQ ID NO: 217196 - RNA, 13 nt, Homo sapiens
cccuucucuguau

SEQ ID NO: 217197 - RNA, 12 nt, Homo sapiens
gguaugauuaac

SEQ ID NO: 217198 - RNA, 13 nt, Homo sapiens
uuaaaaaacagag

SEQ ID NO: 217199 - RNA, 15 nt, Homo sapiens
aguaacauagcugug

SEQ ID NO: 217200 - RNA, 17 nt, Homo sapiens
ucaaucuggauucauau

SEQ ID NO: 217201 - RNA, 22 nt, Homo sapiens
cuuagacccucaugcugccaau

SEQ ID NO: 217202 - RNA, 14 nt, Homo sapiens
acugacacaugcug

SEQ ID NO: 217203 - RNA, 22 nt, Homo sapiens
uauugaaaugauuucacagugu

SEQ ID NO: 217204 - RNA, 16 nt, Homo sapiens
uucaauaacuggaaca

SEQ ID NO: 217205 - RNA, 20 nt, Homo sapiens
gagacuguaaguuacaugaa

SEQ ID NO: 217206 - RNA, 17 nt, Homo sapiens
guuuagaugaaugucag

SEQ ID NO: 217207 - RNA, 21 nt, Homo sapiens
cugcacacuguccuauuauau

SEQ ID NO: 217208 - RNA, 17 nt, Homo sapiens
guaaggugcaucuguuu

SEQ ID NO: 217209 - RNA, 13 nt, Homo sapiens
uguccuaaugcuu

SEQ ID NO: 217210 - RNA, 12 nt, Homo sapiens
gucaacauuucu

SEQ ID NO: 217211 - RNA, 16 nt, Homo sapiens
aggcaggggaauguau

SEQ ID NO: 217212 - RNA, 18 nt, Homo sapiens
uuaaacucugagugcaaa

SEQ ID NO: 217213 - RNA, 13 nt, Homo sapiens
gaugacuauucag

SEQ ID NO: 217214 - RNA, 14 nt, Homo sapiens
ugaccuugcugaug

SEQ ID NO: 217215 - RNA, 16 nt, Homo sapiens
agagccccacccucag

SEQ ID NO: 217216 - RNA, 15 nt, Homo sapiens
ugcaccuggauguac

SEQ ID NO: 217217 - RNA, 20 nt, Homo sapiens
ucugacuauaaccuuguucc

SEQ ID NO: 217218 - RNA, 12 nt, Homo sapiens
guuugcagagua

SEQ ID NO: 217219 - RNA, 13 nt, Homo sapiens
augcuugcugcug

SEQ ID NO: 217220 - RNA, 22 nt, Homo sapiens
uucuuuaagcagcgccagugac

SEQ ID NO: 217221 - RNA, 20 nt, Homo sapiens
gggauuuucagcccucagaa

SEQ ID NO: 217222 - RNA, 18 nt, Homo sapiens
cagaauauugugccccau

SEQ ID NO: 217223 - RNA, 19 nt, Homo sapiens
agggauuuucagcccucag

SEQ ID NO: 217224 - RNA, 23 nt, Homo sapiens
aaauauuuugacuuguugagggu

SEQ ID NO: 217225 - RNA, 16 nt, Homo sapiens
cauuucucauguugaa

SEQ ID NO: 217226 - RNA, 23 nt, Homo sapiens
cuuggcccaggauuauugucaaa

SEQ ID NO: 217227 - RNA, 18 nt, Homo sapiens
cugugcaucuagccucaa

SEQ ID NO: 217228 - RNA, 14 nt, Homo sapiens
ugcaccuggaugua

SEQ ID NO: 217229 - RNA, 15 nt, Homo sapiens
uugguaacucuguaa

SEQ ID NO: 217230 - RNA, 14 nt, Homo sapiens
gauuaaagugccca

SEQ ID NO: 217231 - RNA, 21 nt, Homo sapiens
aucuguauguguucuauucag

SEQ ID NO: 217232 - RNA, 15 nt, Homo sapiens
uaaugcuugcugcug

SEQ ID NO: 217233 - RNA, 14 nt, Homo sapiens
agcagagugcuuua

SEQ ID NO: 217234 - RNA, 18 nt, Homo sapiens
uacagagaagauucuugu

SEQ ID NO: 217235 - RNA, 13 nt, Homo sapiens
gaugcugucuucg

SEQ ID NO: 217236 - RNA, 16 nt, Homo sapiens
uucacuggacacuuca

SEQ ID NO: 217237 - RNA, 20 nt, Homo sapiens
aggcauacugccuuguuuaa

SEQ ID NO: 217238 - RNA, 13 nt, Homo sapiens
auguugcuaacag

SEQ ID NO: 217239 - RNA, 17 nt, Homo sapiens
uuaauauggaucuguau

SEQ ID NO: 217240 - RNA, 21 nt, Homo sapiens
uauucucagcagagugcuuua

SEQ ID NO: 217241 - RNA, 21 nt, Homo sapiens
uucccggguagccacuggacu

SEQ ID NO: 217242 - RNA, 15 nt, Homo sapiens
aauguaugugcacau

SEQ ID NO: 217243 - RNA, 20 nt, Homo sapiens
caggaagcugugagagcagu

SEQ ID NO: 217244 - RNA, 16 nt, Homo sapiens
aacucauuucuagcag

SEQ ID NO: 217245 - RNA, 18 nt, Homo sapiens
gacauuuuaugucuuucu

SEQ ID NO: 217246 - RNA, 20 nt, Homo sapiens
cacuggacugacgacuugag

SEQ ID NO: 217247 - RNA, 20 nt, Homo sapiens
uguccuaaugcuugcugcug

SEQ ID NO: 217248 - RNA, 22 nt, Homo sapiens
cuggauguacuauccaaucugu

SEQ ID NO: 217249 - RNA, 18 nt, Homo sapiens
uuuauuauuaacaaaaca

SEQ ID NO: 217250 - RNA, 23 nt, Homo sapiens
uuucuggaugaaugcccagugag

SEQ ID NO: 217251 - RNA, 15 nt, Homo sapiens
accuggcaucuuaca

SEQ ID NO: 217252 - RNA, 12 nt, Homo sapiens
agugacagucag

SEQ ID NO: 217253 - RNA, 15 nt, Homo sapiens
auuugugagacugua

SEQ ID NO: 217254 - RNA, 13 nt, Homo sapiens
aacuaaaauguuc

SEQ ID NO: 217255 - RNA, 17 nt, Homo sapiens
aauguucuccagucauu

SEQ ID NO: 217256 - RNA, 14 nt, Homo sapiens
uggugacauugcac

SEQ ID NO: 217257 - RNA, 14 nt, Homo sapiens
acauugacagauug

SEQ ID NO: 217258 - RNA, 15 nt, Homo sapiens
agggauuuucagccc

SEQ ID NO: 217259 - RNA, 22 nt, Homo sapiens
cuugcugauggugacauugcac

SEQ ID NO: 217260 - RNA, 13 nt, Homo sapiens
uggugauuuagca

SEQ ID NO: 217261 - RNA, 16 nt, Homo sapiens
caaugagaucauugug

SEQ ID NO: 217262 - RNA, 22 nt, Homo sapiens
cuuccaugacauaagugcuauu

SEQ ID NO: 217263 - RNA, 17 nt, Homo sapiens
uauagcaagacauuaua

SEQ ID NO: 217264 - RNA, 22 nt, Homo sapiens
uucuggaugaaugcccagugag

SEQ ID NO: 217265 - RNA, 13 nt, Homo sapiens
ucccuuggacauu

SEQ ID NO: 217266 - RNA, 17 nt, Homo sapiens
caauugcugcuuguaca

SEQ ID NO: 217267 - RNA, 22 nt, Homo sapiens
agagcaguuugguuucuagcau

SEQ ID NO: 217268 - RNA, 21 nt, Homo sapiens
auuuauugaaaugauuucaca

SEQ ID NO: 217269 - RNA, 14 nt, Homo sapiens
aggauuauugucaa

SEQ ID NO: 217270 - RNA, 21 nt, Homo sapiens
ucauucuuuuugaaaugucaa

SEQ ID NO: 217271 - RNA, 15 nt, Homo sapiens
aaucacacugucuuc

SEQ ID NO: 217272 - RNA, 14 nt, Homo sapiens
gcaggcuggaguua

SEQ ID NO: 217273 - RNA, 18 nt, Homo sapiens
uuaagcagcgccagugac

SEQ ID NO: 217274 - RNA, 15 nt, Homo sapiens
uuagaugaaugucag

SEQ ID NO: 217275 - RNA, 20 nt, Homo sapiens
ggccagaagucaaggcuuag

SEQ ID NO: 217276 - RNA, 19 nt, Homo sapiens
auauaaaaauaaagcacuu

SEQ ID NO: 217277 - RNA, 16 nt, Homo sapiens
ucccugugucauuuca

SEQ ID NO: 217278 - RNA, 17 nt, Homo sapiens
aaucugugaugacauuc

SEQ ID NO: 217279 - RNA, 18 nt, Homo sapiens
uugcugcuuguacacuca

SEQ ID NO: 217280 - RNA, 11 nt, Homo sapiens
caaauguucuc

SEQ ID NO: 217281 - RNA, 23 nt, Homo sapiens
gaaaaaauuuacuuuaaacuaca

SEQ ID NO: 217282 - RNA, 18 nt, Homo sapiens
caauccuugccacagugu

SEQ ID NO: 217283 - RNA, 14 nt, Homo sapiens
aauguaugugcaca

SEQ ID NO: 217284 - RNA, 14 nt, Homo sapiens
ggagccugcaacau

SEQ ID NO: 217285 - RNA, 17 nt, Homo sapiens
ugaaauaaggaaugaua

SEQ ID NO: 217286 - RNA, 17 nt, Homo sapiens
aucugugaugacauucc

SEQ ID NO: 217287 - RNA, 15 nt, Homo sapiens
gaauguaugugcaca

SEQ ID NO: 217288 - RNA, 18 nt, Homo sapiens
aaaugauuucacagugug

SEQ ID NO: 217289 - RNA, 18 nt, Homo sapiens
gucagggaaggugccucu

SEQ ID NO: 217290 - RNA, 23 nt, Homo sapiens
aguacuuaauaaacuguggugcu

SEQ ID NO: 217291 - RNA, 21 nt, Homo sapiens
cuauuuauuuauuuauucauu

SEQ ID NO: 217292 - RNA, 20 nt, Homo sapiens
ucuccagucauuauguuaau

SEQ ID NO: 217293 - RNA, 17 nt, Homo sapiens
aacagcaacacaaagcu

SEQ ID NO: 217294 - RNA, 18 nt, Homo sapiens
cugccaauauccuaauaa

SEQ ID NO: 217295 - RNA, 14 nt, Homo sapiens
auccaauugcugcu

SEQ ID NO: 217296 - RNA, 21 nt, Homo sapiens
uggccaaugagaucauuguga

SEQ ID NO: 217297 - RNA, 18 nt, Homo sapiens
ugccaauuugcacauuaa

SEQ ID NO: 217298 - RNA, 16 nt, Homo sapiens
aaauagaugacauuga

SEQ ID NO: 217299 - RNA, 20 nt, Homo sapiens
uuagacccucaugcugccaa

SEQ ID NO: 217300 - RNA, 15 nt, Homo sapiens
ucuguuuuguguacu

SEQ ID NO: 217301 - RNA, 23 nt, Homo sapiens
uuggccugucuuuggauuguuaa

SEQ ID NO: 217302 - RNA, 14 nt, Homo sapiens
auaaccuuguucca

SEQ ID NO: 217303 - RNA, 17 nt, Homo sapiens
gcacacaggaaccuaau

SEQ ID NO: 217304 - RNA, 15 nt, Homo sapiens
gaaacugacacaugc

SEQ ID NO: 217305 - RNA, 16 nt, Homo sapiens
gucuucguacugggaa

SEQ ID NO: 217306 - RNA, 15 nt, Homo sapiens
cauuucaaacagucu

SEQ ID NO: 217307 - RNA, 19 nt, Homo sapiens
gagaagauucuuguauuua

SEQ ID NO: 217308 - RNA, 17 nt, Homo sapiens
uuaaagguacuuugcag

SEQ ID NO: 217309 - RNA, 13 nt, Homo sapiens
aauuccuaacuau

SEQ ID NO: 217310 - RNA, 13 nt, Homo sapiens
cuguuacacaaag

SEQ ID NO: 217311 - RNA, 18 nt, Homo sapiens
caacaugccagccacugu

SEQ ID NO: 217312 - RNA, 20 nt, Homo sapiens
uuaaauagaugacauugacu

SEQ ID NO: 217313 - RNA, 14 nt, Homo sapiens
cuaaaauguucuaa

SEQ ID NO: 217314 - RNA, 17 nt, Homo sapiens
uccuaugcuguucacug

SEQ ID NO: 217315 - RNA, 18 nt, Homo sapiens
acuuuguggucgacauca

SEQ ID NO: 217316 - RNA, 13 nt, Homo sapiens
aaaacuacauuga

SEQ ID NO: 217317 - RNA, 23 nt, Homo sapiens
uggauugugccuaauguguuuga

SEQ ID NO: 217318 - RNA, 17 nt, Homo sapiens
ucucuauuucuggauga

SEQ ID NO: 217319 - RNA, 15 nt, Homo sapiens
gaagauucuauguua

SEQ ID NO: 217320 - RNA, 13 nt, Homo sapiens
gacuaaaacuaca

SEQ ID NO: 217321 - RNA, 14 nt, Homo sapiens
ugaugacauucccu

SEQ ID NO: 217322 - RNA, 22 nt, Homo sapiens
uguaauaaacucauuucuagca

SEQ ID NO: 217323 - RNA, 15 nt, Homo sapiens
aaugucaguauuuca

SEQ ID NO: 217324 - RNA, 13 nt, Homo sapiens
acaucauuucaag

SEQ ID NO: 217325 - RNA, 14 nt, Homo sapiens
agcaugagugccgu

SEQ ID NO: 217326 - RNA, 16 nt, Homo sapiens
ugggucccauucuugg

SEQ ID NO: 217327 - RNA, 13 nt, Homo sapiens
uucauuacuaaaa

SEQ ID NO: 217328 - RNA, 15 nt, Homo sapiens
uccaauugcugcuug

SEQ ID NO: 217329 - RNA, 16 nt, Homo sapiens
agacaacauaacucaa

SEQ ID NO: 217330 - RNA, 18 nt, Homo sapiens
ucccugugucauuucaaa

SEQ ID NO: 217331 - RNA, 20 nt, Homo sapiens
gacacaugcugaacaucaca

SEQ ID NO: 217332 - RNA, 15 nt, Homo sapiens
gagaagauucuugua

SEQ ID NO: 217333 - RNA, 14 nt, Homo sapiens
augcaaagaugaag

SEQ ID NO: 217334 - RNA, 21 nt, Homo sapiens
uaaugguaguuuuacaguguu

SEQ ID NO: 217335 - RNA, 21 nt, Homo sapiens
gacagagccccacccucagau

SEQ ID NO: 217336 - RNA, 23 nt, Homo sapiens
aauaucccuuggacauuuuaugu

SEQ ID NO: 217337 - RNA, 14 nt, Homo sapiens
caagcaaauggcca

SEQ ID NO: 217338 - RNA, 16 nt, Homo sapiens
ucaguauuucaacuga

SEQ ID NO: 217339 - RNA, 14 nt, Homo sapiens
gucauuauguuaau

SEQ ID NO: 217340 - RNA, 14 nt, Homo sapiens
auuccuagaaacug

SEQ ID NO: 217341 - RNA, 14 nt, Homo sapiens
auuauauucauucu

SEQ ID NO: 217342 - RNA, 14 nt, Homo sapiens
gcaaagaugaaggu

SEQ ID NO: 217343 - RNA, 15 nt, Homo sapiens
gugcacgcacacugu

SEQ ID NO: 217344 - RNA, 17 nt, Homo sapiens
caagcugaccuugcuga

SEQ ID NO: 217345 - RNA, 17 nt, Homo sapiens
caggaaauccuugcacc

SEQ ID NO: 217346 - RNA, 20 nt, Homo sapiens
aauguggauuaaagugccca

SEQ ID NO: 217347 - RNA, 23 nt, Homo sapiens
uguuuugccaauuugcacauuaa

SEQ ID NO: 217348 - RNA, 14 nt, Homo sapiens
gcacacugucugcc

SEQ ID NO: 217349 - RNA, 15 nt, Homo sapiens
uuaaauauuuugacu

SEQ ID NO: 217350 - RNA, 21 nt, Homo sapiens
gcucaguagucagacuggaua

SEQ ID NO: 217351 - RNA, 17 nt, Homo sapiens
aaaaauaaagcacuuau

SEQ ID NO: 217352 - RNA, 13 nt, Homo sapiens
gaugcugugaaga

SEQ ID NO: 217353 - RNA, 21 nt, Homo sapiens
aauguucuccagucauuaugu

SEQ ID NO: 217354 - RNA, 16 nt, Homo sapiens
ucuguauuccuagaaa

SEQ ID NO: 217355 - RNA, 21 nt, Homo sapiens
cuauuuauuugugagacugua

SEQ ID NO: 217356 - RNA, 13 nt, Homo sapiens
cugugucauuuca

SEQ ID NO: 217357 - RNA, 13 nt, Homo sapiens
gaugacauucccu

SEQ ID NO: 217358 - RNA, 20 nt, Homo sapiens
caugcugaacaucacagcuu

SEQ ID NO: 217359 - RNA, 21 nt, Homo sapiens
cuuagacccucaugcugccaa

SEQ ID NO: 217360 - RNA, 21 nt, Homo sapiens
cuugcugauggugacauugca

SEQ ID NO: 217361 - RNA, 22 nt, Homo sapiens
augggugcuuaguaaguacuua

SEQ ID NO: 217362 - RNA, 24 nt, Homo sapiens
ccuuccuaugcuguucacuggaca

SEQ ID NO: 217363 - RNA, 18 nt, Homo sapiens
cagcgccagugacaguca

SEQ ID NO: 217364 - RNA, 17 nt, Homo sapiens
caguuugguuucuagca

SEQ ID NO: 217365 - RNA, 13 nt, Homo sapiens
uacagagaagauu

SEQ ID NO: 217366 - RNA, 15 nt, Homo sapiens
uaaacauuucauuuc

SEQ ID NO: 217367 - RNA, 23 nt, Homo sapiens
uucuuuaagcagcgccagugaca

SEQ ID NO: 217368 - RNA, 22 nt, Homo sapiens
uccuuuuuuuuuuauccuaguc

SEQ ID NO: 217369 - RNA, 20 nt, Homo sapiens
ugugaaggcaggggaaugua

SEQ ID NO: 217370 - RNA, 24 nt, Homo sapiens
aaauagcauguccuaaugcuugcu

SEQ ID NO: 217371 - RNA, 21 nt, Homo sapiens
uuuaccccucacaauccuugc

SEQ ID NO: 217372 - RNA, 19 nt, Homo sapiens
ccaaugagaucauugugaa

SEQ ID NO: 217373 - RNA, 14 nt, Homo sapiens
augcuuggauguaa

SEQ ID NO: 217374 - RNA, 20 nt, Homo sapiens
guaacucuguaauuccuaac

SEQ ID NO: 217375 - RNA, 20 nt, Homo sapiens
agaaaaggccuucuucccaa

SEQ ID NO: 217376 - RNA, 12 nt, Homo sapiens
agcaacacaaag

SEQ ID NO: 217377 - RNA, 15 nt, Homo sapiens
agacauuauauagca

SEQ ID NO: 217378 - RNA, 18 nt, Homo sapiens
uaggagcaugagugccgu

SEQ ID NO: 217379 - RNA, 14 nt, Homo sapiens
uucagcccucagaa

SEQ ID NO: 217380 - RNA, 16 nt, Homo sapiens
uuauccuagucauucu

SEQ ID NO: 217381 - RNA, 13 nt, Homo sapiens
aaacuacauugac

SEQ ID NO: 217382 - RNA, 16 nt, Homo sapiens
uuccaguaaugagcuu

SEQ ID NO: 217383 - RNA, 13 nt, Homo sapiens
cucagaugcacau

SEQ ID NO: 217384 - RNA, 16 nt, Homo sapiens
acuuccaugacauaag

SEQ ID NO: 217385 - RNA, 17 nt, Homo sapiens
cuggacuaaaacuacau

SEQ ID NO: 217386 - RNA, 23 nt, Homo sapiens
guuuguucccugugucauuucaa

SEQ ID NO: 217387 - RNA, 16 nt, Homo sapiens
ggugacauugcaccug

SEQ ID NO: 217388 - RNA, 18 nt, Homo sapiens
ggaaggugccucuggaug

SEQ ID NO: 217389 - RNA, 13 nt, Homo sapiens
ucacuuccaugac

SEQ ID NO: 217390 - RNA, 17 nt, Homo sapiens
auauccaauugcugcuu

SEQ ID NO: 217391 - RNA, 13 nt, Homo sapiens
cuugccacagugu

SEQ ID NO: 217392 - RNA, 14 nt, Homo sapiens
uauagauguugcua

SEQ ID NO: 217393 - RNA, 22 nt, Homo sapiens
aacagcaacacaaagcuuuugc

SEQ ID NO: 217394 - RNA, 21 nt, Homo sapiens
cucaagucuggcagacuuucu

SEQ ID NO: 217395 - RNA, 17 nt, Homo sapiens
ccccucacaauccuugc

SEQ ID NO: 217396 - RNA, 22 nt, Homo sapiens
aagauacagugucugacuauaa

SEQ ID NO: 217397 - RNA, 16 nt, Homo sapiens
gcaccuggauguacua

SEQ ID NO: 217398 - RNA, 14 nt, Homo sapiens
gaaugcccagugag

SEQ ID NO: 217399 - RNA, 13 nt, Homo sapiens
ccucucucuguaa

SEQ ID NO: 217400 - RNA, 22 nt, Homo sapiens
uugacagauugaauuugccuaa

SEQ ID NO: 217401 - RNA, 14 nt, Homo sapiens
guauagauguugcu

SEQ ID NO: 217402 - RNA, 18 nt, Homo sapiens
aguagagguacacuugug

SEQ ID NO: 217403 - RNA, 19 nt, Homo sapiens
augguaguuuuacaguguu

SEQ ID NO: 217404 - RNA, 17 nt, Homo sapiens
acgcacacugucugccc

SEQ ID NO: 217405 - RNA, 13 nt, Homo sapiens
cuauuauauucau

SEQ ID NO: 217406 - RNA, 12 nt, Homo sapiens
cuguauuccuag

SEQ ID NO: 217407 - RNA, 20 nt, Homo sapiens
aaccuaggcaaagaguauau

SEQ ID NO: 217408 - RNA, 19 nt, Homo sapiens
guauuuauuacaacucuau

SEQ ID NO: 217409 - RNA, 23 nt, Homo sapiens
aaggcuuagacccucaugcugcc

SEQ ID NO: 217410 - RNA, 15 nt, Homo sapiens
agacuuucuucucua

SEQ ID NO: 217411 - RNA, 14 nt, Homo sapiens
cccuucucuguauu

SEQ ID NO: 217412 - RNA, 19 nt, Homo sapiens
uauccuagucauucuuccc

SEQ ID NO: 217413 - RNA, 20 nt, Homo sapiens
acucugagugcaaacuucag

SEQ ID NO: 217414 - RNA, 20 nt, Homo sapiens
ccaggauuauugucaaagaa

SEQ ID NO: 217415 - RNA, 20 nt, Homo sapiens
acacaugcugaacaucacag

SEQ ID NO: 217416 - RNA, 19 nt, Homo sapiens
uccacauuuguuuugccaa

SEQ ID NO: 217417 - RNA, 15 nt, Homo sapiens
guuugguuucuagca

SEQ ID NO: 217418 - RNA, 21 nt, Homo sapiens
auccuaauaaaaaggugacca

SEQ ID NO: 217419 - RNA, 12 nt, Homo sapiens
gaugacauuccc

SEQ ID NO: 217420 - RNA, 16 nt, Homo sapiens
augcugaacaucacag

SEQ ID NO: 217421 - RNA, 14 nt, Homo sapiens
caauauccuaauaa

SEQ ID NO: 217422 - RNA, 23 nt, Homo sapiens
ugggauaucacuuccaugacaua

SEQ ID NO: 217423 - RNA, 15 nt, Homo sapiens
ugacauaagugcuau

SEQ ID NO: 217424 - RNA, 20 nt, Homo sapiens
uuggcccaggauuauuguca

SEQ ID NO: 217425 - RNA, 20 nt, Homo sapiens
uggaugcugugaagagucua

SEQ ID NO: 217426 - RNA, 17 nt, Homo sapiens
aauauccaauugcugcu

SEQ ID NO: 217427 - RNA, 15 nt, Homo sapiens
uauagauguugcuaa

SEQ ID NO: 217428 - RNA, 21 nt, Homo sapiens
guucuccagucauuauguuaa

SEQ ID NO: 217429 - RNA, 24 nt, Homo sapiens
gacacaugcugaacaucacagcuu

SEQ ID NO: 217430 - RNA, 21 nt, Homo sapiens
ugcccagugagacuguguugu

SEQ ID NO: 217431 - RNA, 22 nt, Homo sapiens
gugaugacauucccugcuaaua

SEQ ID NO: 217432 - RNA, 14 nt, Homo sapiens
cuauuauauucauu

SEQ ID NO: 217433 - RNA, 16 nt, Homo sapiens
acaauccuugccacag

SEQ ID NO: 217434 - RNA, 17 nt, Homo sapiens
ggaauguaugugcacau

SEQ ID NO: 217435 - RNA, 23 nt, Homo sapiens
aacuucagagcaugaaaaucaca

SEQ ID NO: 217436 - RNA, 15 nt, Homo sapiens
guagucagacuggau

SEQ ID NO: 217437 - RNA, 20 nt, Homo sapiens
uguacuauccaaucugugau

SEQ ID NO: 217438 - RNA, 20 nt, Homo sapiens
aguacuuaauaaacuguggu

SEQ ID NO: 217439 - RNA, 17 nt, Homo sapiens
uucccugugucauuuca

SEQ ID NO: 217440 - RNA, 14 nt, Homo sapiens
aaugcuugcugcug

SEQ ID NO: 217441 - RNA, 15 nt, Homo sapiens
auccaauugcugcuu

SEQ ID NO: 217442 - RNA, 14 nt, Homo sapiens
agugagacuguguu

SEQ ID NO: 217443 - RNA, 22 nt, Homo sapiens
auuucugaggagccugcaacau

SEQ ID NO: 217444 - RNA, 22 nt, Homo sapiens
caguguuuuaggagcaugagug

SEQ ID NO: 217445 - RNA, 19 nt, Homo sapiens
caccuggauguacuaucca

SEQ ID NO: 217446 - RNA, 23 nt, Homo sapiens
cugcaacaugccagccacuguga

SEQ ID NO: 217447 - RNA, 20 nt, Homo sapiens
cccuuggccaugggucccau

SEQ ID NO: 217448 - RNA, 13 nt, Homo sapiens
gaucauugugaag

SEQ ID NO: 217449 - RNA, 22 nt, Homo sapiens
ccuugcugauggugacauugca

SEQ ID NO: 217450 - RNA, 23 nt, Homo sapiens
ggauuaaagugcccagcacaaag

SEQ ID NO: 217451 - RNA, 12 nt, Homo sapiens
cagaguggcagu

SEQ ID NO: 217452 - RNA, 22 nt, Homo sapiens
auugauugggcacaucauuuca

SEQ ID NO: 217453 - RNA, 21 nt, Homo sapiens
augacuauucaguggcuaacu

SEQ ID NO: 217454 - RNA, 15 nt, Homo sapiens
gaguuauugaagcag

SEQ ID NO: 217455 - RNA, 16 nt, Homo sapiens
caucuguuacacaaag

SEQ ID NO: 217456 - RNA, 20 nt, Homo sapiens
cuguaauuccuaacuaucac

SEQ ID NO: 217457 - RNA, 20 nt, Homo sapiens
aaucugugaugacauucccu

SEQ ID NO: 217458 - RNA, 19 nt, Homo sapiens
cacugguuuguucccugug

SEQ ID NO: 217459 - RNA, 13 nt, Homo sapiens
cagucucccuucc

SEQ ID NO: 217460 - RNA, 14 nt, Homo sapiens
uuuauccuagucau

SEQ ID NO: 217461 - RNA, 17 nt, Homo sapiens
ccuaacuaucacugguu

SEQ ID NO: 217462 - RNA, 18 nt, Homo sapiens
uccuaaugcuugcugcug

SEQ ID NO: 217463 - RNA, 15 nt, Homo sapiens
uccaaucugugauga

SEQ ID NO: 217464 - RNA, 17 nt, Homo sapiens
cucuccccuucucugua

SEQ ID NO: 217465 - RNA, 11 nt, Homo sapiens
gguagccacug

SEQ ID NO: 217466 - RNA, 17 nt, Homo sapiens
ucugugaugacauuccc

SEQ ID NO: 217467 - RNA, 19 nt, Homo sapiens
aguuuuuuuccuucaagaa

SEQ ID NO: 217468 - RNA, 16 nt, Homo sapiens
cacaauccuugccaca

SEQ ID NO: 217469 - RNA, 21 nt, Homo sapiens
gcuuaauuauugauguuuuca

SEQ ID NO: 217470 - RNA, 15 nt, Homo sapiens
acaucacagcuuauu

SEQ ID NO: 217471 - RNA, 20 nt, Homo sapiens
aaugguaguuuuacaguguu

SEQ ID NO: 217472 - RNA, 15 nt, Homo sapiens
auagaugacauugac

SEQ ID NO: 217473 - RNA, 16 nt, Homo sapiens
caguagucagacugga

SEQ ID NO: 217474 - RNA, 19 nt, Homo sapiens
uucucuauuucuggaugaa

SEQ ID NO: 217475 - RNA, 22 nt, Homo sapiens
guaauaaacucauuucuagcag

SEQ ID NO: 217476 - RNA, 22 nt, Homo sapiens
guaauuccuaacuaucacuggu

SEQ ID NO: 217477 - RNA, 13 nt, Homo sapiens
ugccucuggaugc

SEQ ID NO: 217478 - RNA, 14 nt, Homo sapiens
uccaauugcugcuu

SEQ ID NO: 217479 - RNA, 17 nt, Homo sapiens
gaugaagcacacaggaa

SEQ ID NO: 217480 - RNA, 22 nt, Homo sapiens
uggacacuucacgcccuuggcc

SEQ ID NO: 217481 - RNA, 16 nt, Homo sapiens
aacucuaccugcacac

SEQ ID NO: 217482 - RNA, 19 nt, Homo sapiens
aauuuacuuuaaacuacau

SEQ ID NO: 217483 - RNA, 23 nt, Homo sapiens
cacaaagcuuuugcauauugcau

SEQ ID NO: 217484 - RNA, 22 nt, Homo sapiens
cagagccguggccacccaggaa

SEQ ID NO: 217485 - RNA, 19 nt, Homo sapiens
guccuaaugcuugcugcug

SEQ ID NO: 217486 - RNA, 20 nt, Homo sapiens
gugagacuguaaguuacaug

SEQ ID NO: 217487 - RNA, 23 nt, Homo sapiens
gugcuuuaccaauugaaguaaaa

SEQ ID NO: 217488 - RNA, 16 nt, Homo sapiens
gaaaaucacacugucu

SEQ ID NO: 217489 - RNA, 17 nt, Homo sapiens
cuguccuauuauauuca

SEQ ID NO: 217490 - RNA, 20 nt, Homo sapiens
ugaccuugcugauggugaca

SEQ ID NO: 217491 - RNA, 16 nt, Homo sapiens
uauccaauugcugcuu

SEQ ID NO: 217492 - RNA, 18 nt, Homo sapiens
gugagacuguaaguuaca

SEQ ID NO: 217493 - RNA, 15 nt, Homo sapiens
cauuauauagcagua

SEQ ID NO: 217494 - RNA, 19 nt, Homo sapiens
caaucugugaugacauucc

SEQ ID NO: 217495 - RNA, 15 nt, Homo sapiens
agcagcgccagugac

SEQ ID NO: 217496 - RNA, 22 nt, Homo sapiens
uuaagacuuugguuauuuuacu

SEQ ID NO: 217497 - RNA, 13 nt, Homo sapiens
ugacauugacuau

SEQ ID NO: 217498 - RNA, 21 nt, Homo sapiens
gcaaacuucagaguucuugcc

SEQ ID NO: 217499 - RNA, 19 nt, Homo sapiens
cuuguaaggcauacugccu

SEQ ID NO: 217500 - RNA, 16 nt, Homo sapiens
uuccuagaaacugaca

SEQ ID NO: 217501 - RNA, 19 nt, Homo sapiens
cuguuuagaugaaugucag

SEQ ID NO: 217502 - RNA, 13 nt, Homo sapiens
uugcugaugguga

SEQ ID NO: 217503 - RNA, 12 nt, Homo sapiens
ucccauucuugg

SEQ ID NO: 217504 - RNA, 13 nt, Homo sapiens
agcauguccuaau

SEQ ID NO: 217505 - RNA, 13 nt, Homo sapiens
aaaauguggcagg

SEQ ID NO: 217506 - RNA, 14 nt, Homo sapiens
aucuguuacacaaa

SEQ ID NO: 217507 - RNA, 17 nt, Homo sapiens
uaagcagcgccagugac

SEQ ID NO: 217508 - RNA, 15 nt, Homo sapiens
ugggauaucacuucc

SEQ ID NO: 217509 - RNA, 13 nt, Homo sapiens
auguucacuggua

SEQ ID NO: 217510 - RNA, 22 nt, Homo sapiens
ugaccuugcugauggugacauu

SEQ ID NO: 217511 - RNA, 21 nt, Homo sapiens
aauugcugcuuguacacucau

SEQ ID NO: 217512 - RNA, 13 nt, Homo sapiens
acacucgccagcu

SEQ ID NO: 217513 - RNA, 18 nt, Homo sapiens
ucuucucuauuucuggau

SEQ ID NO: 217514 - RNA, 14 nt, Homo sapiens
ugcugaacaucaca

SEQ ID NO: 217515 - RNA, 22 nt, Homo sapiens
cuuaauaaacuguggugcuuuu

SEQ ID NO: 217516 - RNA, 17 nt, Homo sapiens
ccaauagcaaggcugug

SEQ ID NO: 217517 - RNA, 19 nt, Homo sapiens
augccagccacugugauag

SEQ ID NO: 217518 - RNA, 15 nt, Homo sapiens
gagugucaagcugac

SEQ ID NO: 217519 - RNA, 21 nt, Homo sapiens
gaacuuuguggucgacaucaa

SEQ ID NO: 217520 - RNA, 19 nt, Homo sapiens
cugaggagccugcaacaug

SEQ ID NO: 217521 - RNA, 15 nt, Homo sapiens
uacuauccaaucugu

SEQ ID NO: 217522 - RNA, 23 nt, Homo sapiens
ucucccuuccuaugcuguucacu

SEQ ID NO: 217523 - RNA, 19 nt, Homo sapiens
ugaagguagaauguuuuca

SEQ ID NO: 217524 - RNA, 12 nt, Homo sapiens
cccuucucugua

SEQ ID NO: 217525 - RNA, 17 nt, Homo sapiens
uucaguuugcagaguag

SEQ ID NO: 217526 - RNA, 22 nt, Homo sapiens
uuucuggaugaaugcccaguga

SEQ ID NO: 217527 - RNA, 13 nt, Homo sapiens
agaauguuuucaa

SEQ ID NO: 217528 - RNA, 14 nt, Homo sapiens
acucauucauuacu

SEQ ID NO: 217529 - RNA, 13 nt, Homo sapiens
ugaacaguaacau

SEQ ID NO: 217530 - RNA, 20 nt, Homo sapiens
auucugagaugacuauucag

SEQ ID NO: 217531 - RNA, 20 nt, Homo sapiens
uggaugaaugcccagugaga

SEQ ID NO: 217532 - RNA, 16 nt, Homo sapiens
acccucagaugcacau

SEQ ID NO: 217533 - RNA, 21 nt, Homo sapiens
guaaaacugaacuucagagca

SEQ ID NO: 217534 - RNA, 14 nt, Homo sapiens
gaaaugauuucaca

SEQ ID NO: 217535 - RNA, 22 nt, Homo sapiens
acuuauggggccaaaauagcau

SEQ ID NO: 217536 - RNA, 20 nt, Homo sapiens
uuuuauccuagucauucuuc

SEQ ID NO: 217537 - RNA, 22 nt, Homo sapiens
aauuaaggguaugauuaacucu

SEQ ID NO: 217538 - RNA, 12 nt, Homo sapiens
uaugugcacauc

SEQ ID NO: 217539 - RNA, 20 nt, Homo sapiens
agcagaguggcagucuucag

SEQ ID NO: 217540 - RNA, 12 nt, Homo sapiens
agaaacugacac

SEQ ID NO: 217541 - RNA, 12 nt, Homo sapiens
cuuagaacaaag

SEQ ID NO: 217542 - RNA, 22 nt, Homo sapiens
aauaauuagguauuuucuccaa

SEQ ID NO: 217543 - RNA, 19 nt, Homo sapiens
gaccuugcugauggugaca

SEQ ID NO: 217544 - RNA, 20 nt, Homo sapiens
aagcuuacaugccuaccaau

SEQ ID NO: 217545 - RNA, 18 nt, Homo sapiens
guauuugaaacacugguu

SEQ ID NO: 217546 - RNA, 23 nt, Homo sapiens
ugcugcugauuuaaacacauuaa

SEQ ID NO: 217547 - RNA, 21 nt, Homo sapiens
guuuuacaguguuucuggcuu

SEQ ID NO: 217548 - RNA, 21 nt, Homo sapiens
caauaaacauuucauuuccca

SEQ ID NO: 217549 - RNA, 15 nt, Homo sapiens
ccacaguguggggca

SEQ ID NO: 217550 - RNA, 15 nt, Homo sapiens
cccugugucauuuca

SEQ ID NO: 217551 - RNA, 23 nt, Homo sapiens
aguaaguacuuaauaaacugugg

SEQ ID NO: 217552 - RNA, 19 nt, Homo sapiens
acagagccccacccucaga

SEQ ID NO: 217553 - RNA, 16 nt, Homo sapiens
uuagguugugaaugca

SEQ ID NO: 217554 - RNA, 22 nt, Homo sapiens
gggaaagggauuuucagcccuc

SEQ ID NO: 217555 - RNA, 13 nt, Homo sapiens
caggaagcuguga

SEQ ID NO: 217556 - RNA, 19 nt, Homo sapiens
cuuauccguuagccguggu

SEQ ID NO: 217557 - RNA, 17 nt, Homo sapiens
auaucacuuccaugaca

SEQ ID NO: 217558 - RNA, 18 nt, Homo sapiens
uccucaauaaacauuuca

SEQ ID NO: 217559 - RNA, 13 nt, Homo sapiens
cagcaacacaaag

SEQ ID NO: 217560 - RNA, 13 nt, Homo sapiens
ggcagacuuucuu

SEQ ID NO: 217561 - RNA, 13 nt, Homo sapiens
cuggacacuucac

SEQ ID NO: 217562 - RNA, 12 nt, Homo sapiens
cagaugcacaug

SEQ ID NO: 217563 - RNA, 14 nt, Homo sapiens
uggccugucuuugg

SEQ ID NO: 217564 - RNA, 21 nt, Homo sapiens
cacaauccuugccacagugug

SEQ ID NO: 217565 - RNA, 10 nt, Homo sapiens
uacuuuuugg

SEQ ID NO: 217566 - RNA, 17 nt, Homo sapiens
cagugacagucagggaa

SEQ ID NO: 217567 - RNA, 16 nt, Homo sapiens
ccuaaugcuugcugcu

SEQ ID NO: 217568 - RNA, 18 nt, Homo sapiens
agaauauaaaaauaaagc

SEQ ID NO: 217569 - RNA, 16 nt, Homo sapiens
uugagugucaagcuga

SEQ ID NO: 217570 - RNA, 16 nt, Homo sapiens
gaggagccugcaacau

SEQ ID NO: 217571 - RNA, 21 nt, Homo sapiens
gcaacaugccagccacuguga

SEQ ID NO: 217572 - RNA, 15 nt, Homo sapiens
agugcuauugcagag

SEQ ID NO: 217573 - RNA, 15 nt, Homo sapiens
acucauuucuagcag

SEQ ID NO: 217574 - RNA, 22 nt, Homo sapiens
uuccuaugcuguucacuggaca

SEQ ID NO: 217575 - RNA, 13 nt, Homo sapiens
guacuuuuaagac

SEQ ID NO: 217576 - RNA, 13 nt, Homo sapiens
ccuagaaacugac

SEQ ID NO: 217577 - RNA, 14 nt, Homo sapiens
uuauauucauucuu

SEQ ID NO: 217578 - RNA, 17 nt, Homo sapiens
cugagaugacuauucag

SEQ ID NO: 217579 - RNA, 12 nt, Homo sapiens
uucaguuugcag

SEQ ID NO: 217580 - RNA, 21 nt, Homo sapiens
uugagaaauuuuuuuuuccag

SEQ ID NO: 217581 - RNA, 14 nt, Homo sapiens
gcuuagaacaaagg

SEQ ID NO: 217582 - RNA, 17 nt, Homo sapiens
ugaggugacuauucuga

SEQ ID NO: 217583 - RNA, 16 nt, Homo sapiens
cuucccuaaucuucca

SEQ ID NO: 217584 - RNA, 20 nt, Homo sapiens
cagcuagaaaaggccuucuu

SEQ ID NO: 217585 - RNA, 17 nt, Homo sapiens
guauguguucuauucag

SEQ ID NO: 217586 - RNA, 16 nt, Homo sapiens
cugaacaucacagcuu

SEQ ID NO: 217587 - RNA, 17 nt, Homo sapiens
acgugcacgcacacugu

SEQ ID NO: 217588 - RNA, 19 nt, Homo sapiens
uuaauauccaauugcugcu

SEQ ID NO: 217589 - RNA, 20 nt, Homo sapiens
acuguuuagaugaaugucag

SEQ ID NO: 217590 - RNA, 19 nt, Homo sapiens
cuuuaagcagcgccaguga

SEQ ID NO: 217591 - RNA, 14 nt, Homo sapiens
ucauuauguuaaua

SEQ ID NO: 217592 - RNA, 21 nt, Homo sapiens
cuuaauuauugauguuuucau

SEQ ID NO: 217593 - RNA, 22 nt, Homo sapiens
ugggugcuuaguaaguacuuaa

SEQ ID NO: 217594 - RNA, 23 nt, Homo sapiens
caucaaucuaaagauacaguguc

SEQ ID NO: 217595 - RNA, 14 nt, Homo sapiens
cuuaauaaacugug

SEQ ID NO: 217596 - RNA, 14 nt, Homo sapiens
augaaugcccagug

SEQ ID NO: 217597 - RNA, 16 nt, Homo sapiens
caguaacauagcugug

SEQ ID NO: 217598 - RNA, 19 nt, Homo sapiens
uucauucuuuuugaaaugu

SEQ ID NO: 217599 - RNA, 13 nt, Homo sapiens
gaccaggaccucc

SEQ ID NO: 217600 - RNA, 17 nt, Homo sapiens
cugucuucguacuggga

SEQ ID NO: 217601 - RNA, 21 nt, Homo sapiens
cauacuauuaaacaugcugua

SEQ ID NO: 217602 - RNA, 13 nt, Homo sapiens
uucuggacuaaaa

SEQ ID NO: 217603 - RNA, 16 nt, Homo sapiens
gcaaauggccaaugag

SEQ ID NO: 217604 - RNA, 17 nt, Homo sapiens
gaagauucuauguuaau

SEQ ID NO: 217605 - RNA, 15 nt, Homo sapiens
aaugauuucacagug

SEQ ID NO: 217606 - RNA, 19 nt, Homo sapiens
cugcagggacagagcauug

SEQ ID NO: 217607 - RNA, 18 nt, Homo sapiens
cugaacuucagagcauga

SEQ ID NO: 217608 - RNA, 11 nt, Influenza A virus (A/Puerto Rico/8/34/Mount Sinai(
acuguccaaaa

SEQ ID NO: 217609 - RNA, 14 nt, Influenza A virus (A/Puerto Rico/8/34/Mount Sinai(
agaagugagacaca

SEQ ID NO: 217610 - RNA, 20 nt, Influenza A virus (A/Puerto Rico/8/34/Mount Sinai(
aaggagugccaaagucuaug

SEQ ID NO: 217611 - RNA, 13 nt, Influenza A virus (A/Puerto Rico/8/34/Mount Sinai(
auuugcuauccau

SEQ ID NO: 217612 - RNA, 23 nt, Influenza A virus (A/Puerto Rico/8/34/Mount Sinai(
auacuguccaaaaaaguaccuug

SEQ ID NO: 217613 - RNA, 15 nt, Influenza A virus (A/Puerto Rico/8/34/Mount Sinai(
auacuguccaaaaaa

SEQ ID NO: 217614 - RNA, 16 nt, Influenza A virus (A/Puerto Rico/8/34/Mount Sinai(
auaugaggaaaaacac

SEQ ID NO: 217615 - RNA, 15 nt, Influenza A virus (A/Puerto Rico/8/34/Mount Sinai(
uguccuucaugaaaa

SEQ ID NO: 217616 - RNA, 22 nt, Influenza A virus (A/Puerto Rico/8/34/Mount Sinai(
uguggcagugcuacuauuugcu

SEQ ID NO: 217617 - RNA, 13 nt, Influenza A virus (A/Puerto Rico/8/34/Mount Sinai(
ugcuugaagugga

SEQ ID NO: 217618 - RNA, 21 nt, Influenza A virus (A/Puerto Rico/8/34/Mount Sinai(
ugaaaaaaugccuuguuucua

SEQ ID NO: 217619 - RNA, 17 nt, Influenza A virus (A/Puerto Rico/8/34/Mount Sinai(
ugauugaagaagugaga

SEQ ID NO: 217620 - RNA, 20 nt, Influenza A virus (A/Puerto Rico/8/34/Mount Sinai(
uugcuugaaguggagcaaga

SEQ ID NO: 217621 - RNA, 21 nt, Influenza A virus (A/Puerto Rico/8/34/Mount Sinai(
aaggaacagcagagugcugug

SEQ ID NO: 217622 - RNA, 17 nt, Influenza A virus (A/Puerto Rico/8/34/Mount Sinai(
uaugaggaaaaacaccc

SEQ ID NO: 217623 - RNA, 15 nt, Influenza A virus (A/Puerto Rico/8/34/Mount Sinai(
uccauacuguccaaa

SEQ ID NO: 217624 - RNA, 16 nt, Influenza A virus (A/Puerto Rico/8/34/Mount Sinai(
ucaugaaaaaaugccu

SEQ ID NO: 217625 - RNA, 12 nt, Influenza A virus (A/Puerto Rico/8/34/Mount Sinai(
uccuucaugaaa

SEQ ID NO: 217626 - RNA, 20 nt, Influenza A virus (A/Puerto Rico/8/34/Mount Sinai(
gaauuucagaaauaugagga

SEQ ID NO: 217627 - RNA, 13 nt, Influenza A virus (A/Puerto Rico/8/34/Mount Sinai(
gaggaaaaacacc

SEQ ID NO: 217628 - RNA, 18 nt, Influenza A virus (A/Puerto Rico/8/34/Mount Sinai(
gaaauaugaggaaaaaca

SEQ ID NO: 217629 - RNA, 12 nt, Influenza A virus (A/Puerto Rico/8/34/Mount Sinai(
uuuugagcaaau

SEQ ID NO: 217630 - RNA, 23 nt, Influenza A virus (A/Puerto Rico/8/34/Mount Sinai(
ugcuauccauacuguccaaaaaa

SEQ ID NO: 217631 - RNA, 15 nt, Influenza A virus (A/Puerto Rico/8/34/Mount Sinai(
ugcuauccauacugu

SEQ ID NO: 217632 - RNA, 20 nt, Influenza A virus (A/Puerto Rico/8/34/Mount Sinai(
uggcagugcuacuauuugcu

SEQ ID NO: 217633 - RNA, 17 nt, Influenza A virus (A/Puerto Rico/8/34/Mount Sinai(
uccauacuguccaaaaa

SEQ ID NO: 217634 - RNA, 19 nt, Influenza A virus (A/Puerto Rico/8/34/Mount Sinai(
ucuguucaaaaaacuccuu

SEQ ID NO: 217635 - RNA, 11 nt, Influenza A virus (A/Puerto Rico/8/34/Mount Sinai(
ucuugcacuug

SEQ ID NO: 217636 - RNA, 14 nt, Influenza A virus (A/Puerto Rico/8/34/Mount Sinai(
cuuguccuucauga

SEQ ID NO: 217637 - RNA, 14 nt, Influenza A virus (A/Puerto Rico/8/34/Mount Sinai(
gacacaaacugaag

SEQ ID NO: 217638 - RNA, 14 nt, Influenza A virus (A/Puerto Rico/8/34/Mount Sinai(
cuauccauacuguc

SEQ ID NO: 217639 - RNA, 20 nt, Influenza A virus (A/Puerto Rico/8/34/Mount Sinai(
uacuguccaaaaaaguaccu

SEQ ID NO: 217640 - RNA, 14 nt, Influenza A virus (A/Puerto Rico/8/34/Mount Sinai(
uacuguccaaaaaa

SEQ ID NO: 217641 - RNA, 19 nt, Influenza A virus (A/Puerto Rico/8/34/Mount Sinai(
uagcuuguccuucaugaaa

SEQ ID NO: 217642 - RNA, 16 nt, Influenza A virus (A/Puerto Rico/8/34/Mount Sinai(
gcuuguccuucaugaa

SEQ ID NO: 217643 - RNA, 22 nt, Influenza A virus (A/Puerto Rico/8/34/Mount Sinai(
gcuacuauuugcuauccauacu

SEQ ID NO: 217644 - RNA, 22 nt, Influenza A virus (A/Puerto Rico/8/34/Mount Sinai(
gccuuacaucuauugcuugaag

SEQ ID NO: 217645 - RNA, 16 nt, Influenza A virus (A/Puerto Rico/8/34/Mount Sinai(
acuauuugcuauccau

SEQ ID NO: 217646 - RNA, 17 nt, Influenza A virus (A/Puerto Rico/8/34/Mount Sinai(
agcuuguccuucaugaa

SEQ ID NO: 217647 - RNA, 20 nt, Influenza A virus (A/Puerto Rico/8/34/Mount Sinai(
aguuuaaaaacgaccuuguu

SEQ ID NO: 217648 - RNA, 16 nt, Influenza A virus (A/Puerto Rico/8/34/Mount Sinai(
caugaaaaaaugccuu

SEQ ID NO: 217649 - RNA, 17 nt, Influenza A virus (A/Puerto Rico/8/34/Mount Sinai(
caugaaaaaaugccuug

SEQ ID NO: 217650 - RNA, 13 nt, Influenza A virus (A/Puerto Rico/8/34/Mount Sinai(
augaaaaaaugcc

SEQ ID NO: 217651 - RNA, 13 nt, Influenza A virus (A/Puerto Rico/8/34/Mount Sinai(
uuugcuauccaua

SEQ ID NO: 217652 - RNA, 14 nt, Influenza A virus (A/Puerto Rico/8/34/Mount Sinai(
uucagaaauaugag

SEQ ID NO: 217653 - RNA, 17 nt, Influenza A virus (A/Puerto Rico/8/34/Mount Sinai(
uucaugaaaaaaugccu

SEQ ID NO: 217654 - RNA, 20 nt, Influenza A virus (A/Puerto Rico/8/34/Mount Sinai(
uuucagaaauaugaggaaaa

SEQ ID NO: 217655 - RNA, 22 nt, Influenza A virus (A/Puerto Rico/8/34/Mount Sinai(
ucgaauaguuuaaaaacgaccu

SEQ ID NO: 217656 - RNA, 23 nt, Influenza A virus (A/Puerto Rico/8/34/Mount Sinai(
ucgaauaguuuaaaaacgaccuu

SEQ ID NO: 217657 - RNA, 16 nt, Influenza A virus (A/Puerto Rico/8/34/Mount Sinai(
ugaaaaaaugccuugu

SEQ ID NO: 217658 - RNA, 23 nt, Influenza A virus (A/Puerto Rico/8/34/Mount Sinai(
acuguccaaaaaaguaccuuguu

SEQ ID NO: 217659 - RNA, 13 nt, Influenza A virus (A/Puerto Rico/8/34/Mount Sinai(
acuguccaaaaaa

SEQ ID NO: 217660 - RNA, 15 nt, Influenza A virus (A/Puerto Rico/8/34/Mount Sinai(
agaagugagacacaa

SEQ ID NO: 217661 - RNA, 15 nt, Influenza A virus (A/Puerto Rico/8/34/Mount Sinai(
agaaauaugaggaaa

SEQ ID NO: 217662 - RNA, 22 nt, Influenza A virus (A/Puerto Rico/8/34/Mount Sinai(
acagagaauaguuuugagcaaa

SEQ ID NO: 217663 - RNA, 19 nt, Influenza A virus (A/Puerto Rico/8/34/Mount Sinai(
aauuuagcuuguccuucau

SEQ ID NO: 217664 - RNA, 18 nt, Influenza A virus (A/Puerto Rico/8/34/Mount Sinai(
auccauacuguccaaaaa

SEQ ID NO: 217665 - RNA, 13 nt, Influenza A virus (A/Puerto Rico/8/34/Mount Sinai(
auccauacugucc

SEQ ID NO: 217666 - RNA, 17 nt, Influenza A virus (A/Puerto Rico/8/34/Mount Sinai(
agugcuacuauuugcua

SEQ ID NO: 217667 - RNA, 23 nt, Influenza A virus (A/Puerto Rico/8/34/Mount Sinai(
cagugcuacuauuugcuauccau

SEQ ID NO: 217668 - RNA, 17 nt, Influenza A virus (A/Puerto Rico/8/34/Mount Sinai(
ccauacuguccaaaaaa

SEQ ID NO: 217669 - RNA, 12 nt, Influenza A virus (A/Puerto Rico/8/34/Mount Sinai(
cagaaauaugag

SEQ ID NO: 217670 - RNA, 20 nt, Influenza A virus (A/Puerto Rico/8/34/Mount Sinai(
auuugcuauccauacugucc

SEQ ID NO: 217671 - RNA, 13 nt, Influenza A virus (A/Puerto Rico/8/34/Mount Sinai(
cuacuauuugcua

SEQ ID NO: 217672 - RNA, 18 nt, Influenza A virus (A/Puerto Rico/8/34/Mount Sinai(
cuguccaaaaaaguaccu

SEQ ID NO: 217673 - RNA, 20 nt, Influenza A virus (A/Puerto Rico/8/34/Mount Sinai(
cuguccaaaaaaguaccuug

SEQ ID NO: 217674 - RNA, 21 nt, Influenza A virus (A/Puerto Rico/8/34/Mount Sinai(
cuucaugaaaaaaugccuugu

SEQ ID NO: 217675 - RNA, 23 nt, Influenza A virus (A/Puerto Rico/8/34/Mount Sinai(
gaauuucagaaauaugaggaaaa

SEQ ID NO: 217676 - RNA, 18 nt, Influenza A virus (A/Puerto Rico/8/34/Mount Sinai(
gaauaguuuaaaaacgac

SEQ ID NO: 217677 - RNA, 22 nt, Influenza A virus (A/Puerto Rico/8/34/Mount Sinai(
gaggaaaaacacccuuguuucu

SEQ ID NO: 217678 - RNA, 21 nt, Influenza A virus (A/Puerto Rico/8/34/Mount Sinai(
gcagugcuacuauuugcuauc

SEQ ID NO: 217679 - RNA, 14 nt, Influenza A virus (A/Puerto Rico/8/34/Mount Sinai(
guccuucaugaaaa

SEQ ID NO: 217680 - RNA, 16 nt, Influenza A virus (A/Puerto Rico/8/34/Mount Sinai(
guccaaaaaaguaccu

SEQ ID NO: 217681 - RNA, 19 nt, Influenza A virus (A/Puerto Rico/8/34/Mount Sinai(
uacuauuugcuauccauac

SEQ ID NO: 217682 - RNA, 12 nt, Influenza A virus (A/Puerto Rico/8/34/Mount Sinai(
uacuauuugcua

SEQ ID NO: 217683 - RNA, 16 nt, Influenza A virus (A/Puerto Rico/8/34/Mount Sinai(
uaugaggaaaaacacc

SEQ ID NO: 217684 - RNA, 23 nt, Influenza A virus (A/Puerto Rico/8/34/Mount Sinai(
gcuugaaguggagcaagagauaa

SEQ ID NO: 217685 - RNA, 16 nt, Influenza A virus (A/Puerto Rico/8/34/Mount Sinai(
cuuguccuucaugaaa

SEQ ID NO: 217686 - RNA, 15 nt, Influenza A virus (A/Puerto Rico/8/34/Mount Sinai(
cuuguccuucaugaa

SEQ ID NO: 217687 - RNA, 22 nt, Influenza A virus (A/Puerto Rico/8/34/Mount Sinai(
gaauaguuuaaaaacgaccuug

SEQ ID NO: 217688 - RNA, 21 nt, Influenza A virus (A/Puerto Rico/8/34/Mount Sinai(
aaauaugaggaaaaacacccu

SEQ ID NO: 217689 - RNA, 18 nt, Influenza A virus (A/Puerto Rico/8/34/Mount Sinai(
caugaaaaaaugccuugu

SEQ ID NO: 217690 - RNA, 19 nt, Influenza A virus (A/Puerto Rico/8/34/Mount Sinai(
ccuucaugaaaaaaugccu

SEQ ID NO: 217691 - RNA, 12 nt, Influenza A virus (A/Puerto Rico/8/34/Mount Sinai(
ccuucaugaaaa

SEQ ID NO: 217692 - RNA, 17 nt, Influenza A virus (A/Puerto Rico/8/34/Mount Sinai(
cuauuugcuauccauac

SEQ ID NO: 217693 - RNA, 17 nt, Influenza A virus (A/Puerto Rico/8/34/Mount Sinai(
cuacuauuugcuaucca

SEQ ID NO: 217694 - RNA, 18 nt, Influenza A virus (A/Puerto Rico/8/34/Mount Sinai(
cuacuauuugcuauccau

SEQ ID NO: 217695 - RNA, 19 nt, Influenza A virus (A/Puerto Rico/8/34/Mount Sinai(
cuacuauuugcuauccaua

SEQ ID NO: 217696 - RNA, 20 nt, Influenza A virus (A/Puerto Rico/8/34/Mount Sinai(
cuacuauuugcuauccauac

SEQ ID NO: 217697 - RNA, 22 nt, Influenza A virus (A/Puerto Rico/8/34/Mount Sinai(
cgucuuuuuuucaaaugcauuu

SEQ ID NO: 217698 - RNA, 22 nt, Influenza A virus (A/Puerto Rico/8/34/Mount Sinai(
uagaauuucagaaauaugagga

SEQ ID NO: 217699 - RNA, 22 nt, Influenza A virus (A/Puerto Rico/8/34/Mount Sinai(
guggcagugcuacuauuugcua

SEQ ID NO: 217700 - RNA, 18 nt, Influenza A virus (A/Puerto Rico/8/34/Mount Sinai(
uccaaaaaaguaccuugu

SEQ ID NO: 217701 - RNA, 15 nt, Influenza A virus (A/Puerto Rico/8/34/Mount Sinai(
uccaaaaaaguaccu

SEQ ID NO: 217702 - RNA, 16 nt, Influenza A virus (A/Puerto Rico/8/34/Mount Sinai(
ucauugggaucuugca

SEQ ID NO: 217703 - RNA, 18 nt, Influenza A virus (A/Puerto Rico/8/34/Mount Sinai(
ucuguucaaaaaacuccu

SEQ ID NO: 217704 - RNA, 12 nt, Influenza A virus (A/Puerto Rico/8/34/Mount Sinai(
aauaugaggaaa

SEQ ID NO: 217705 - RNA, 15 nt, Influenza A virus (A/Puerto Rico/8/34/Mount Sinai(
uuguccuucaugaaa

SEQ ID NO: 217706 - RNA, 14 nt, Influenza A virus (A/Puerto Rico/8/34/Mount Sinai(
uuguccuucaugaa

SEQ ID NO: 217707 - RNA, 17 nt, Influenza A virus (A/Puerto Rico/8/34/Mount Sinai(
uuuagcuuguccuucau

SEQ ID NO: 217708 - RNA, 18 nt, Influenza A virus (A/Puerto Rico/8/34/Mount Sinai(
uucaugaaaaaaugccuu

SEQ ID NO: 217709 - RNA, 16 nt, Influenza A virus (A/Puerto Rico/8/34/Mount Sinai(
augaggaaaaacaccc

SEQ ID NO: 217710 - RNA, 14 nt, Influenza A virus (A/Puerto Rico/8/34/Mount Sinai(
agcuuguccuucau

SEQ ID NO: 217711 - RNA, 16 nt, Influenza A virus (A/Puerto Rico/8/34/Mount Sinai(
agcuuguccuucauga

SEQ ID NO: 217712 - RNA, 17 nt, Influenza A virus (A/Puerto Rico/8/34/Mount Sinai(
aguuuaaaaacgaccuu

SEQ ID NO: 217713 - RNA, 14 nt, Influenza A virus (A/Puerto Rico/8/34/Mount Sinai(
caaaaaaguaccuu

SEQ ID NO: 217714 - RNA, 15 nt, Influenza A virus (A/Puerto Rico/8/34/Mount Sinai(
caaaaaacuccuugu

SEQ ID NO: 217715 - RNA, 18 nt, Influenza A virus (A/Puerto Rico/8/34/Mount Sinai(
auuuagcuuguccuucau

SEQ ID NO: 217716 - RNA, 18 nt, Influenza A virus (A/Puerto Rico/8/34/Mount Sinai(
agaauuucagaaauauga

SEQ ID NO: 217717 - RNA, 21 nt, Influenza A virus (A/Puerto Rico/8/34/Mount Sinai(
agaauuucagaaauaugagga

SEQ ID NO: 217718 - RNA, 22 nt, Influenza A virus (A/Puerto Rico/8/34/Mount Sinai(
agaauuucagaaauaugaggaa

SEQ ID NO: 217719 - RNA, 18 nt, Influenza A virus (A/Puerto Rico/8/34/Mount Sinai(
aauaugaggaaaaacacc

SEQ ID NO: 217720 - RNA, 21 nt, Influenza A virus (A/Puerto Rico/8/34/Mount Sinai(
aauaugaggaaaaacacccuu

SEQ ID NO: 217721 - RNA, 23 nt, Influenza A virus (A/Puerto Rico/8/34/Mount Sinai(
acacaaacugaagauaacagaga

SEQ ID NO: 217722 - RNA, 12 nt, Influenza A virus (A/Puerto Rico/8/34/Mount Sinai(
aaaaacacccuu

SEQ ID NO: 217723 - RNA, 12 nt, Influenza A virus (A/Puerto Rico/8/34/Mount Sinai(
aaaaaguaccuu

SEQ ID NO: 217724 - RNA, 12 nt, Influenza A virus (A/Puerto Rico/8/34/Mount Sinai(
aaaaaaugccuu

SEQ ID NO: 217725 - RNA, 11 nt, Influenza A virus (A/Puerto Rico/8/34/Mount Sinai(
aaaaaaugccu

SEQ ID NO: 217726 - RNA, 11 nt, Influenza A virus (A/Puerto Rico/8/34/Mount Sinai(
aaaaaugccuu

SEQ ID NO: 217727 - RNA, 14 nt, Homo sapiens
auuuauuuauucau

SEQ ID NO: 217728 - RNA, 16 nt, Homo sapiens
cauuucucauguugaa

SEQ ID NO: 217729 - RNA, 20 nt, Homo sapiens
auaguccgucucugcuuauc

SEQ ID NO: 217730 - RNA, 10 nt, Homo sapiens
uuuguucccu

SEQ ID NO: 217731 - RNA, 17 nt, Homo sapiens
uggccaugggucccauu

SEQ ID NO: 217732 - RNA, 15 nt, Homo sapiens
cugugaugacauucc

SEQ ID NO: 217733 - RNA, 15 nt, Homo sapiens
ucacagaagaugaag

SEQ ID NO: 217734 - RNA, 16 nt, Homo sapiens
auugaaaugauuucac

SEQ ID NO: 217735 - RNA, 18 nt, Homo sapiens
uucuuuuugaaaugucaa

SEQ ID NO: 217736 - RNA, 22 nt, Homo sapiens
gggaaagggauuuucagcccuc

SEQ ID NO: 217737 - RNA, 13 nt, Homo sapiens
acuuccaugacau

SEQ ID NO: 217738 - RNA, 16 nt, Homo sapiens
uuauccuagucauucu

SEQ ID NO: 217739 - RNA, 15 nt, Homo sapiens
uuaauauuucugagg

SEQ ID NO: 217740 - RNA, 21 nt, Homo sapiens
uuuaccccucacaauccuugc

SEQ ID NO: 217741 - RNA, 15 nt, Homo sapiens
acaaagcuuuugcau

SEQ ID NO: 217742 - RNA, 17 nt, Homo sapiens
cuaacagcaacacaaag

SEQ ID NO: 217743 - RNA, 18 nt, Homo sapiens
ucccugugucauuucaaa

SEQ ID NO: 217744 - RNA, 13 nt, Homo sapiens
aauuccuaacuau

SEQ ID NO: 217745 - RNA, 17 nt, Homo sapiens
auauccaauugcugcuu

SEQ ID NO: 217746 - RNA, 16 nt, Homo sapiens
acaugcuguacauacu

SEQ ID NO: 217747 - RNA, 14 nt, Homo sapiens
ccagugagacugug

SEQ ID NO: 217748 - RNA, 20 nt, Homo sapiens
acucugagugcaaacuucag

SEQ ID NO: 217749 - RNA, 21 nt, Homo sapiens
uauuuaaauagaugacauuga

SEQ ID NO: 217750 - RNA, 19 nt, Homo sapiens
guuacaugaaggcagcaga

SEQ ID NO: 217751 - RNA, 21 nt, Homo sapiens
gcaacaugccagccacuguga

SEQ ID NO: 217752 - RNA, 22 nt, Homo sapiens
agagcaguuugguuucuagcau

SEQ ID NO: 217753 - RNA, 18 nt, Homo sapiens
uccccucuccuccacauu

SEQ ID NO: 217754 - RNA, 16 nt, Homo sapiens
uuccuagaaacugaca

SEQ ID NO: 217755 - RNA, 24 nt, Homo sapiens
gacacaugcugaacaucacagcuu

SEQ ID NO: 217756 - RNA, 18 nt, Homo sapiens
ccuuccuaugcuguucac

SEQ ID NO: 217757 - RNA, 22 nt, Homo sapiens
acuuauggggccaaaauagcau

SEQ ID NO: 217758 - RNA, 21 nt, Homo sapiens
cguucccggguagccacugga

SEQ ID NO: 217759 - RNA, 21 nt, Homo sapiens
cuuaauuauugauguuuucau

SEQ ID NO: 217760 - RNA, 13 nt, Homo sapiens
ccaauugaaguaa

SEQ ID NO: 217761 - RNA, 13 nt, Homo sapiens
cuggacacuucac

SEQ ID NO: 217762 - RNA, 21 nt, Homo sapiens
guggggguaaggugcaucugu

SEQ ID NO: 217763 - RNA, 15 nt, Homo sapiens
ugagaucauugugaa

SEQ ID NO: 217764 - RNA, 23 nt, Homo sapiens
auguacuauccaaucugugauga

SEQ ID NO: 217765 - RNA, 19 nt, Homo sapiens
acagagccccacccucaga

SEQ ID NO: 217766 - RNA, 13 nt, Homo sapiens
gauucuauguuaa

SEQ ID NO: 217767 - RNA, 15 nt, Homo sapiens
uucuuguaaggcaua

SEQ ID NO: 217768 - RNA, 17 nt, Homo sapiens
ugaggugacuauucuga

SEQ ID NO: 217769 - RNA, 17 nt, Homo sapiens
cuucccuaaucuuccac

SEQ ID NO: 217770 - RNA, 19 nt, Homo sapiens
agaaaaggccuucuuccca

SEQ ID NO: 217771 - RNA, 17 nt, Homo sapiens
ccagucauuauguuaau

SEQ ID NO: 217772 - RNA, 20 nt, Homo sapiens
aggguauguuuuauauagca

SEQ ID NO: 217773 - RNA, 19 nt, Homo sapiens
gauuuagcaggaagcugug

SEQ ID NO: 217774 - RNA, 14 nt, Homo sapiens
gcacacugucugcc

SEQ ID NO: 217775 - RNA, 17 nt, Homo sapiens
aaucugugaugacauuc

SEQ ID NO: 217776 - RNA, 14 nt, Homo sapiens
uacauacuuuuugg

SEQ ID NO: 217777 - RNA, 12 nt, Homo sapiens
ugccacagugug

SEQ ID NO: 217778 - RNA, 18 nt, Homo sapiens
gucaaagaagucauucuu

SEQ ID NO: 217779 - RNA, 14 nt, Homo sapiens
auuauauucauucu

SEQ ID NO: 217780 - RNA, 13 nt, Homo sapiens
auuucaacugaag

SEQ ID NO: 217781 - RNA, 14 nt, Homo sapiens
augaaugcccagug

SEQ ID NO: 217782 - RNA, 16 nt, Homo sapiens
ucccugugucauuuca

SEQ ID NO: 217783 - RNA, 13 nt, Homo sapiens
cuauuauauucau

SEQ ID NO: 217784 - RNA, 18 nt, Homo sapiens
ggcacaucauuucaagaa

SEQ ID NO: 217785 - RNA, 15 nt, Homo sapiens
acucauuucuagcag

SEQ ID NO: 217786 - RNA, 17 nt, Homo sapiens
gaugaagcacacaggaa

SEQ ID NO: 217787 - RNA, 23 nt, Homo sapiens
ucucccuuccuaugcuguucacu

SEQ ID NO: 217788 - RNA, 17 nt, Homo sapiens
uuaaagguacuuugcag

SEQ ID NO: 217789 - RNA, 17 nt, Homo sapiens
cugucuucguacuggga

SEQ ID NO: 217790 - RNA, 22 nt, Homo sapiens
guaauaaacucauuucuagcag

SEQ ID NO: 217791 - RNA, 15 nt, Homo sapiens
cugauuuaaacacau

SEQ ID NO: 217792 - RNA, 14 nt, Homo sapiens
guucccugugucau

SEQ ID NO: 217793 - RNA, 20 nt, Homo sapiens
uccuagaaacugacacaugc

SEQ ID NO: 217794 - RNA, 21 nt, Homo sapiens
cucuguauuccuagaaacuga

SEQ ID NO: 217795 - RNA, 12 nt, Homo sapiens
ucaaauguucuc

SEQ ID NO: 217796 - RNA, 16 nt, Homo sapiens
aagauucuauguuaau

SEQ ID NO: 217797 - RNA, 16 nt, Homo sapiens
ucuguauuccuagaaa

SEQ ID NO: 217798 - RNA, 21 nt, Homo sapiens
cacaauccuugccacagugug

SEQ ID NO: 217799 - RNA, 21 nt, Homo sapiens
uucaagaaugcaguacuaaca

SEQ ID NO: 217800 - RNA, 22 nt, Homo sapiens
aguaaguacuuaauaaacugug

SEQ ID NO: 217801 - RNA, 20 nt, Homo sapiens
aagcuuacaugccuaccaau

SEQ ID NO: 217802 - RNA, 14 nt, Homo sapiens
uuuugaaaugucaa

SEQ ID NO: 217803 - RNA, 19 nt, Homo sapiens
caacugaaguucuauuuau

SEQ ID NO: 217804 - RNA, 17 nt, Homo sapiens
cugagaugacuauucag

SEQ ID NO: 217805 - RNA, 14 nt, Homo sapiens
cuuaauaaacugug

SEQ ID NO: 217806 - RNA, 16 nt, Homo sapiens
ccuaaugcuugcugcu

SEQ ID NO: 217807 - RNA, 16 nt, Homo sapiens
uucaauaacuggaaca

SEQ ID NO: 217808 - RNA, 22 nt, Homo sapiens
gcugcaguuuuuuuccuucaag

SEQ ID NO: 217809 - RNA, 17 nt, Homo sapiens
cagugacagucagggaa

SEQ ID NO: 217810 - RNA, 22 nt, Homo sapiens
ugaccuugcugauggugacauu

SEQ ID NO: 217811 - RNA, 18 nt, Homo sapiens
ccuaaucuuccacuugag

SEQ ID NO: 217812 - RNA, 12 nt, Homo sapiens
uuagguugugaa

SEQ ID NO: 217813 - RNA, 17 nt, Homo sapiens
ccccaaguuaguucaau

SEQ ID NO: 217814 - RNA, 20 nt, Homo sapiens
acaucaaucuaaagauacag

SEQ ID NO: 217815 - RNA, 19 nt, Homo sapiens
cagauugaauuugccuaau

SEQ ID NO: 217816 - RNA, 20 nt, Homo sapiens
gugagacuguaaguuacaug

SEQ ID NO: 217817 - RNA, 19 nt, Homo sapiens
auucuuuuugaaaugucaa

SEQ ID NO: 217818 - RNA, 13 nt, Homo sapiens
uugcugaugguga

SEQ ID NO: 217819 - RNA, 22 nt, Homo sapiens
augcuguucacuggacacuuca

SEQ ID NO: 217820 - RNA, 13 nt, Homo sapiens
auagauguugcua

SEQ ID NO: 217821 - RNA, 18 nt, Homo sapiens
ugcugauuuaaacacauu

SEQ ID NO: 217822 - RNA, 21 nt, Homo sapiens
cugaccuugcugauggugaca

SEQ ID NO: 217823 - RNA, 17 nt, Homo sapiens
ccuaaugcuugcugcug

SEQ ID NO: 217824 - RNA, 15 nt, Homo sapiens
auagaugacauugac

SEQ ID NO: 217825 - RNA, 12 nt, Homo sapiens
uaugugcacauc

SEQ ID NO: 217826 - RNA, 14 nt, Homo sapiens
cacagaagaugaag

SEQ ID NO: 217827 - RNA, 18 nt, Homo sapiens
uccucaauaaacauuuca

SEQ ID NO: 217828 - RNA, 17 nt, Homo sapiens
uccugucggagcccugu

SEQ ID NO: 217829 - RNA, 15 nt, Homo sapiens
caugagugccgugug

SEQ ID NO: 217830 - RNA, 19 nt, Homo sapiens
ugcccagugagacuguguu

SEQ ID NO: 217831 - RNA, 13 nt, Homo sapiens
uuaaaaaacagag

SEQ ID NO: 217832 - RNA, 13 nt, Homo sapiens
auguacuauccaa

SEQ ID NO: 217833 - RNA, 20 nt, Homo sapiens
uggaugaaugcccagugaga

SEQ ID NO: 217834 - RNA, 16 nt, Homo sapiens
cucaauaaacauuuca

SEQ ID NO: 217835 - RNA, 21 nt, Homo sapiens
cauacuauuaaacaugcugua

SEQ ID NO: 217836 - RNA, 18 nt, Homo sapiens
gugagacuguaaguuaca

SEQ ID NO: 217837 - RNA, 14 nt, Homo sapiens
uucagcccucagaa

SEQ ID NO: 217838 - RNA, 22 nt, Homo sapiens
gauaucugcagggacagagcau

SEQ ID NO: 217839 - RNA, 16 nt, Homo sapiens
uuagguugugaaugca

SEQ ID NO: 217840 - RNA, 15 nt, Homo sapiens
ugggauaucacuucc

SEQ ID NO: 217841 - RNA, 14 nt, Homo sapiens
ugcacgcacacugu

SEQ ID NO: 217842 - RNA, 15 nt, Homo sapiens
gaagucuucuauuua

SEQ ID NO: 217843 - RNA, 22 nt, Homo sapiens
gcuagaaaaggccuucuuccca

SEQ ID NO: 217844 - RNA, 21 nt, Homo sapiens
guucaaucuggauucauauuu

SEQ ID NO: 217845 - RNA, 15 nt, Homo sapiens
aaaaucacacugucu

SEQ ID NO: 217846 - RNA, 17 nt, Homo sapiens
ugggauaucacuuccau

SEQ ID NO: 217847 - RNA, 17 nt, Homo sapiens
uauccuagucauucuuc

SEQ ID NO: 217848 - RNA, 13 nt, Homo sapiens
acaucauuucaag

SEQ ID NO: 217849 - RNA, 15 nt, Homo sapiens
agacuuucuucucua

SEQ ID NO: 217850 - RNA, 20 nt, Homo sapiens
aacaugccagccacugugau

SEQ ID NO: 217851 - RNA, 19 nt, Homo sapiens
gcugauggugacauugcac

SEQ ID NO: 217852 - RNA, 18 nt, Homo sapiens
gucagggaaggugccucu

SEQ ID NO: 217853 - RNA, 13 nt, Homo sapiens
caggaagcuguga

SEQ ID NO: 217854 - RNA, 18 nt, Homo sapiens
uaacucuaccugcacacu

SEQ ID NO: 217855 - RNA, 17 nt, Homo sapiens
cucuaccugcacacugu

SEQ ID NO: 217856 - RNA, 17 nt, Homo sapiens
auuuauugaaaugauuu

SEQ ID NO: 217857 - RNA, 17 nt, Homo sapiens
guauguguucuauucag

SEQ ID NO: 217858 - RNA, 19 nt, Homo sapiens
caccuggauguacuaucca

SEQ ID NO: 217859 - RNA, 17 nt, Homo sapiens
aauccuugccacagugu

SEQ ID NO: 217860 - RNA, 15 nt, Homo sapiens
caaguuaguucaauc

SEQ ID NO: 217861 - RNA, 16 nt, Homo sapiens
auguacuauccaaucu

SEQ ID NO: 217862 - RNA, 18 nt, Homo sapiens
aguagagguacacuugug

SEQ ID NO: 217863 - RNA, 15 nt, Homo sapiens
auccuagucauucuu

SEQ ID NO: 217864 - RNA, 13 nt, Homo sapiens
caacucuauuuaa

SEQ ID NO: 217865 - RNA, 21 nt, Homo sapiens
augacuauucaguggcuaacu

SEQ ID NO: 217866 - RNA, 17 nt, Homo sapiens
ucucuauuucuggauga

SEQ ID NO: 217867 - RNA, 18 nt, Homo sapiens
uccuaaugcuugcugcug

SEQ ID NO: 217868 - RNA, 15 nt, Homo sapiens
cauuucaaacagucu

SEQ ID NO: 217869 - RNA, 12 nt, Homo sapiens
cagaugcacaug

SEQ ID NO: 217870 - RNA, 21 nt, Homo sapiens
cauucuucccuaaucuuccac

SEQ ID NO: 217871 - RNA, 23 nt, Homo sapiens
uaguaaguacuuaauaaacugug

SEQ ID NO: 217872 - RNA, 19 nt, Homo sapiens
gcauacugccuuguuuaau

SEQ ID NO: 217873 - RNA, 16 nt, Homo sapiens
acaauccuugccacag

SEQ ID NO: 217874 - RNA, 20 nt, Homo sapiens
uuggcccaggauuauuguca

SEQ ID NO: 217875 - RNA, 16 nt, Homo sapiens
uauccaauugcugcuu

SEQ ID NO: 217876 - RNA, 13 nt, Homo sapiens
gaauuugccuaau

SEQ ID NO: 217877 - RNA, 19 nt, Homo sapiens
acccucagaugcacaugag

SEQ ID NO: 217878 - RNA, 10 nt, Homo sapiens
uacuuuuugg

SEQ ID NO: 217879 - RNA, 14 nt, Homo sapiens
ccucaugcugccaa

SEQ ID NO: 217880 - RNA, 22 nt, Homo sapiens
gcccucagaaucgcuccaccuu

SEQ ID NO: 217881 - RNA, 14 nt, Homo sapiens
uuaaacaugcugua

SEQ ID NO: 217882 - RNA, 14 nt, Homo sapiens
auaaccuuguucca

SEQ ID NO: 217883 - RNA, 20 nt, Homo sapiens
aaugguaguuuuacaguguu

SEQ ID NO: 217884 - RNA, 20 nt, Homo sapiens
cagacuggauaguccgucuc

SEQ ID NO: 217885 - RNA, 15 nt, Homo sapiens
uuuagaugaauguca

SEQ ID NO: 217886 - RNA, 22 nt, Homo sapiens
aacagcaacacaaagcuuuugc

SEQ ID NO: 217887 - RNA, 22 nt, Homo sapiens
aauuaaggguaugauuaacucu

SEQ ID NO: 217888 - RNA, 14 nt, Homo sapiens
acaguaacauagcu

SEQ ID NO: 217889 - RNA, 16 nt, Homo sapiens
caucuguuacacaaag

SEQ ID NO: 217890 - RNA, 17 nt, Homo sapiens
ccaauuugcacauuaaa

SEQ ID NO: 217891 - RNA, 20 nt, Homo sapiens
cagcuagaaaaggccuucuu

SEQ ID NO: 217892 - RNA, 14 nt, Homo sapiens
acugacacaugcug

SEQ ID NO: 217893 - RNA, 13 nt, Homo sapiens
caauuugcacauu

SEQ ID NO: 217894 - RNA, 21 nt, Homo sapiens
aggaccucccucccccuggca

SEQ ID NO: 217895 - RNA, 13 nt, Homo sapiens
cagucucccuucc

SEQ ID NO: 217896 - RNA, 18 nt, Homo sapiens
acaugccagccacuguga

SEQ ID NO: 217897 - RNA, 23 nt, Homo sapiens
ggauuaaagugcccagcacaaag

SEQ ID NO: 217898 - RNA, 15 nt, Homo sapiens
uccaaucugugauga

SEQ ID NO: 217899 - RNA, 20 nt, Homo sapiens
caugcugaacaucacagcuu

SEQ ID NO: 217900 - RNA, 16 nt, Homo sapiens
gcaccuggauguacua

SEQ ID NO: 217901 - RNA, 19 nt, Homo sapiens
ccuggcacugguuuguucc

SEQ ID NO: 217902 - RNA, 19 nt, Homo sapiens
cacugguuuguucccugug

SEQ ID NO: 217903 - RNA, 19 nt, Homo sapiens
caacaugccagccacugug

SEQ ID NO: 217904 - RNA, 18 nt, Homo sapiens
ugcugaacaucacagcuu

SEQ ID NO: 217905 - RNA, 14 nt, Homo sapiens
uagaugaaugucag

SEQ ID NO: 217906 - RNA, 15 nt, Homo sapiens
uucagcccucagaau

SEQ ID NO: 217907 - RNA, 13 nt, Homo sapiens
gcugauggugaca

SEQ ID NO: 217908 - RNA, 13 nt, Homo sapiens
agcauguccuaau

SEQ ID NO: 217909 - RNA, 20 nt, Homo sapiens
aaccuaggcaaagaguauau

SEQ ID NO: 217910 - RNA, 15 nt, Homo sapiens
acaguguuucuggcu

SEQ ID NO: 217911 - RNA, 12 nt, Homo sapiens
cuguauuccuag

SEQ ID NO: 217912 - RNA, 17 nt, Homo sapiens
gcacacaggaaccuaau

SEQ ID NO: 217913 - RNA, 17 nt, Homo sapiens
gcccaggauuauuguca

SEQ ID NO: 217914 - RNA, 19 nt, Homo sapiens
agugcaaacuucagaguuc

SEQ ID NO: 217915 - RNA, 12 nt, Homo sapiens
cagaguggcagu

SEQ ID NO: 217916 - RNA, 23 nt, Homo sapiens
uggauugugccuaauguguuuga

SEQ ID NO: 217917 - RNA, 16 nt, Homo sapiens
uucaacugaaguucua

SEQ ID NO: 217918 - RNA, 22 nt, Homo sapiens
gugaugacauucccugcuaaua

SEQ ID NO: 217919 - RNA, 22 nt, Homo sapiens
gaccuugcugauggugacauug

SEQ ID NO: 217920 - RNA, 15 nt, Homo sapiens
aaaguaaacgauaaa

SEQ ID NO: 217921 - RNA, 16 nt, Homo sapiens
aacucuaccugcacac

SEQ ID NO: 217922 - RNA, 20 nt, Homo sapiens
ucuguuacacaaagaaccac

SEQ ID NO: 217923 - RNA, 17 nt, Homo sapiens
acgcacacugucugccc

SEQ ID NO: 217924 - RNA, 18 nt, Homo sapiens
guucccggguagccacug

SEQ ID NO: 217925 - RNA, 20 nt, Homo sapiens
acuguuuagaugaaugucag

SEQ ID NO: 217926 - RNA, 23 nt, Homo sapiens
aaggcuuagacccucaugcugcc

SEQ ID NO: 217927 - RNA, 16 nt, Homo sapiens
acuuccaugacauaag

SEQ ID NO: 217928 - RNA, 16 nt, Homo sapiens
augcugaacaucacag

SEQ ID NO: 217929 - RNA, 23 nt, Homo sapiens
uucuuuaagcagcgccagugaca

SEQ ID NO: 217930 - RNA, 18 nt, Homo sapiens
ggaagcugugagagcagu

SEQ ID NO: 217931 - RNA, 15 nt, Homo sapiens
cccuuggacauuuua

SEQ ID NO: 217932 - RNA, 13 nt, Homo sapiens
ccuagaaacugac

SEQ ID NO: 217933 - RNA, 23 nt, Homo sapiens
uucccaauagcaaggcugugcau

SEQ ID NO: 217934 - RNA, 15 nt, Homo sapiens
guuugguuucuagca

SEQ ID NO: 217935 - RNA, 14 nt, Homo sapiens
caauauccuaauaa

SEQ ID NO: 217936 - RNA, 18 nt, Homo sapiens
uaggagcaugagugccgu

SEQ ID NO: 217937 - RNA, 13 nt, Homo sapiens
ugucaguauuuca

SEQ ID NO: 217938 - RNA, 12 nt, Homo sapiens
gaugacauuccc

SEQ ID NO: 217939 - RNA, 21 nt, Homo sapiens
uuccuagaaacugacacaugc

SEQ ID NO: 217940 - RNA, 16 nt, Homo sapiens
cacaauccuugccaca

SEQ ID NO: 217941 - RNA, 17 nt, Homo sapiens
cucuccccuucucugua

SEQ ID NO: 217942 - RNA, 21 nt, Homo sapiens
guucuccagucauuauguuaa

SEQ ID NO: 217943 - RNA, 22 nt, Homo sapiens
uuucuggaugaaugcccaguga

SEQ ID NO: 217944 - RNA, 17 nt, Homo sapiens
uucaguuugcagaguag

SEQ ID NO: 217945 - RNA, 13 nt, Homo sapiens
cccuucucuguau

SEQ ID NO: 217946 - RNA, 20 nt, Homo sapiens
gaauguuuucaaauguucuc

SEQ ID NO: 217947 - RNA, 21 nt, Homo sapiens
auccuaauaaaaaggugacca

SEQ ID NO: 217948 - RNA, 15 nt, Homo sapiens
uuaccccucacaauc

SEQ ID NO: 217949 - RNA, 21 nt, Homo sapiens
agucauucuucccuaaucuuc

SEQ ID NO: 217950 - RNA, 13 nt, Homo sapiens
uccuagucauucu

SEQ ID NO: 217951 - RNA, 13 nt, Homo sapiens
cagcaacacaaag

SEQ ID NO: 217952 - RNA, 16 nt, Homo sapiens
ucaacugaaguucuau

SEQ ID NO: 217953 - RNA, 20 nt, Homo sapiens
agaaaaggccuucuucccaa

SEQ ID NO: 217954 - RNA, 14 nt, Homo sapiens
uauagauguugcua

SEQ ID NO: 217955 - RNA, 16 nt, Homo sapiens
caguagucagacugga

SEQ ID NO: 217956 - RNA, 15 nt, Homo sapiens
aguaacauagcugug

SEQ ID NO: 217957 - RNA, 20 nt, Homo sapiens
ccaauagcaaggcugugcau

SEQ ID NO: 217958 - RNA, 22 nt, Homo sapiens
cauagagaauauaaaaauaaag

SEQ ID NO: 217959 - RNA, 17 nt, Homo sapiens
uuaauauggaucuguau

SEQ ID NO: 217960 - RNA, 17 nt, Homo sapiens
cuucaguuugcagagua

SEQ ID NO: 217961 - RNA, 15 nt, Homo sapiens
augacauaagugcua

SEQ ID NO: 217962 - RNA, 17 nt, Homo sapiens
gugggauaucacuucca

SEQ ID NO: 217963 - RNA, 15 nt, Homo sapiens
cauuauauagcagua

SEQ ID NO: 217964 - RNA, 20 nt, Homo sapiens
gacacaugcugaacaucaca

SEQ ID NO: 217965 - RNA, 23 nt, Homo sapiens
gugagacuguguuguacagcuag

SEQ ID NO: 217966 - RNA, 13 nt, Homo sapiens
ucacuuccaugac

SEQ ID NO: 217967 - RNA, 14 nt, Homo sapiens
gugaagagucuaca

SEQ ID NO: 217968 - RNA, 12 nt, Homo sapiens
gucagacuggau

SEQ ID NO: 217969 - RNA, 15 nt, Homo sapiens
aaugucaguauuuca

SEQ ID NO: 217970 - RNA, 11 nt, Homo sapiens
ggcugcaguuu

SEQ ID NO: 217971 - RNA, 18 nt, Homo sapiens
agccacuggacugacgac

SEQ ID NO: 217972 - RNA, 13 nt, Homo sapiens
uggccaaugagau

SEQ ID NO: 217973 - RNA, 20 nt, Homo sapiens
acagucucccuuccuaugcu

SEQ ID NO: 217974 - RNA, 13 nt, Homo sapiens
ugagacuguguug

SEQ ID NO: 217975 - RNA, 22 nt, Homo sapiens
uugacagauugaauuugccuaa

SEQ ID NO: 217976 - RNA, 14 nt, Homo sapiens
gugaugacauuccc

SEQ ID NO: 217977 - RNA, 19 nt, Homo sapiens
uuaauauccaauugcugcu

SEQ ID NO: 217978 - RNA, 17 nt, Homo sapiens
uccuagaaacugacaca

SEQ ID NO: 217979 - RNA, 14 nt, Homo sapiens
cucagaugcacaug

SEQ ID NO: 217980 - RNA, 15 nt, Homo sapiens
gaauauugugcccca

SEQ ID NO: 217981 - RNA, 23 nt, Homo sapiens
ugcugcugauuuaaacacauuaa

SEQ ID NO: 217982 - RNA, 16 nt, Homo sapiens
acugaacuucagagca

SEQ ID NO: 217983 - RNA, 12 nt, Homo sapiens
gaagucauucuu

SEQ ID NO: 217984 - RNA, 12 nt, Homo sapiens
cuuagaacaaag

SEQ ID NO: 217985 - RNA, 15 nt, Homo sapiens
aacuaaaauguucua

SEQ ID NO: 217986 - RNA, 15 nt, Homo sapiens
aacaguaacauagcu

SEQ ID NO: 217987 - RNA, 21 nt, Homo sapiens
ucauucuuuuugaaaugucaa

SEQ ID NO: 217988 - RNA, 20 nt, Homo sapiens
ccaggauuauugucaaagaa

SEQ ID NO: 217989 - RNA, 18 nt, Homo sapiens
aaaugauuucacagugug

SEQ ID NO: 217990 - RNA, 17 nt, Homo sapiens
uaaacauuucauuuccc

SEQ ID NO: 217991 - RNA, 14 nt, Homo sapiens
cugauggugacauu

SEQ ID NO: 217992 - RNA, 23 nt, Homo sapiens
auucauucuuuuugaaaugucaa

SEQ ID NO: 217993 - RNA, 15 nt, Homo sapiens
aaucacacugucuuc

SEQ ID NO: 217994 - RNA, 13 nt, Homo sapiens
gaugacauucccu

SEQ ID NO: 217995 - RNA, 15 nt, Homo sapiens
auccaaucugugaug

SEQ ID NO: 217996 - RNA, 19 nt, Homo sapiens
uauccuagucauucuuccc

SEQ ID NO: 217997 - RNA, 16 nt, Homo sapiens
auugcaccuggaugua

SEQ ID NO: 217998 - RNA, 15 nt, Homo sapiens
agcagcgccagugac

SEQ ID NO: 217999 - RNA, 18 nt, Homo sapiens
cugccaauauccuaauaa

SEQ ID NO: 218000 - RNA, 16 nt, Homo sapiens
ggagcaugagugccgu

SEQ ID NO: 218001 - RNA, 21 nt, Homo sapiens
guaauuaugguuaguagaggu

SEQ ID NO: 218002 - RNA, 14 nt, Homo sapiens
cuauuauauucauu

SEQ ID NO: 218003 - RNA, 19 nt, Homo sapiens
cucagaaucgcuccaccuu

SEQ ID NO: 218004 - RNA, 21 nt, Homo sapiens
gaagcuuacaugccuaccaau

SEQ ID NO: 218005 - RNA, 18 nt, Homo sapiens
uagagguacacuugugaa

SEQ ID NO: 218006 - RNA, 13 nt, Homo sapiens
ggcagacuuucuu

SEQ ID NO: 218007 - RNA, 16 nt, Homo sapiens
cuucccuaaucuucca

SEQ ID NO: 218008 - RNA, 22 nt, Homo sapiens
gagcccugucuccucucucugu

SEQ ID NO: 218009 - RNA, 13 nt, Homo sapiens
gucagacuggaua

SEQ ID NO: 218010 - RNA, 17 nt, Homo sapiens
aacagcaacacaaagcu

SEQ ID NO: 218011 - RNA, 19 nt, Homo sapiens
augacauucccugcuaaua

SEQ ID NO: 218012 - RNA, 23 nt, Homo sapiens
gcuggaguuauugaagcagagug

SEQ ID NO: 218013 - RNA, 21 nt, Homo sapiens
cuugcugauggugacauugca

SEQ ID NO: 218014 - RNA, 17 nt, Homo sapiens
uccuagucauucuuccc

SEQ ID NO: 218015 - RNA, 13 nt, Homo sapiens
aaacuguggugcu

SEQ ID NO: 218016 - RNA, 17 nt, Homo sapiens
cagaaucgcuccaccuu

SEQ ID NO: 218017 - RNA, 13 nt, Homo sapiens
agucuucuauuua

SEQ ID NO: 218018 - RNA, 13 nt, Homo sapiens
gaauaaagagggu

SEQ ID NO: 218019 - RNA, 11 nt, Homo sapiens
auucuuggccc

SEQ ID NO: 218020 - RNA, 20 nt, Homo sapiens
cccugugucauuucaaacag

SEQ ID NO: 218021 - RNA, 23 nt, Homo sapiens
aguacuuaauaaacuguggugcu

SEQ ID NO: 218022 - RNA, 19 nt, Homo sapiens
uaagacccucucaaacuaa

SEQ ID NO: 218023 - RNA, 16 nt, Homo sapiens
cacacuguccuauuau

SEQ ID NO: 218024 - RNA, 20 nt, Homo sapiens
ugaccuugcugauggugaca

SEQ ID NO: 218025 - RNA, 14 nt, Homo sapiens
ugaugacauucccu

SEQ ID NO: 218026 - RNA, 14 nt, Homo sapiens
ugcaccuggaugua

SEQ ID NO: 218027 - RNA, 17 nt, Homo sapiens
ugauaucugcagggaca

SEQ ID NO: 218028 - RNA, 15 nt, Homo sapiens
gaagauucuauguua

SEQ ID NO: 218029 - RNA, 18 nt, Homo sapiens
uuaccaauugaaguaaaa

SEQ ID NO: 218030 - RNA, 18 nt, Homo sapiens
ugaaggcagcagaauauu

SEQ ID NO: 218031 - RNA, 18 nt, Homo sapiens
gcucuccccuucucugua

SEQ ID NO: 218032 - RNA, 12 nt, Homo sapiens
aauagaugacau

SEQ ID NO: 218033 - RNA, 21 nt, Homo sapiens
aauguucuccagucauuaugu

SEQ ID NO: 218034 - RNA, 18 nt, Homo sapiens
gauaucugcagggacaga

SEQ ID NO: 218035 - RNA, 14 nt, Homo sapiens
ugcugaacaucaca

SEQ ID NO: 218036 - RNA, 15 nt, Homo sapiens
gagugucaagcugac

SEQ ID NO: 218037 - RNA, 20 nt, Homo sapiens
ccaaugagaucauugugaag

SEQ ID NO: 218038 - RNA, 15 nt, Homo sapiens
uauccaaucugugau

SEQ ID NO: 218039 - RNA, 12 nt, Homo sapiens
ucccauucuugg

SEQ ID NO: 218040 - RNA, 22 nt, Homo sapiens
cuugcugauggugacauugcac

SEQ ID NO: 218041 - RNA, 12 nt, Homo sapiens
ugaguggaguua

SEQ ID NO: 218042 - RNA, 18 nt, Homo sapiens
agaaugcaguacuaacau

SEQ ID NO: 218043 - RNA, 16 nt, Homo sapiens
agacaacauaacucaa

SEQ ID NO: 218044 - RNA, 12 nt, Homo sapiens
gaaggugccucu

SEQ ID NO: 218045 - RNA, 21 nt, Homo sapiens
uaaugguaguuuuacaguguu

SEQ ID NO: 218046 - RNA, 15 nt, Homo sapiens
accuggcaucuuaca

SEQ ID NO: 218047 - RNA, 14 nt, Homo sapiens
agucuucuauuuau

SEQ ID NO: 218048 - RNA, 21 nt, Homo sapiens
guaaaacugaacuucagagca

SEQ ID NO: 218049 - RNA, 17 nt, Homo sapiens
ggcaguggaugggugcu

SEQ ID NO: 218050 - RNA, 13 nt, Homo sapiens
uccaaucugugau

SEQ ID NO: 218051 - RNA, 14 nt, Homo sapiens
acuuccaugacaua

SEQ ID NO: 218052 - RNA, 14 nt, Homo sapiens
acauugacagauug

SEQ ID NO: 218053 - RNA, 15 nt, Homo sapiens
uccaauugcugcuug

SEQ ID NO: 218054 - RNA, 13 nt, Homo sapiens
aacuaaaauguuc

SEQ ID NO: 218055 - RNA, 21 nt, Homo sapiens
aaguucuauuuauuugugaga

SEQ ID NO: 218056 - RNA, 16 nt, Homo sapiens
ucacacugucuucuga

SEQ ID NO: 218057 - RNA, 15 nt, Homo sapiens
ccacaguguggggca

SEQ ID NO: 218058 - RNA, 17 nt, Homo sapiens
cugaacuuuguggucga

SEQ ID NO: 218059 - RNA, 16 nt, Homo sapiens
uucacuggacacuuca

SEQ ID NO: 218060 - RNA, 18 nt, Homo sapiens
gacauuuuaugucuuucu

SEQ ID NO: 218061 - RNA, 18 nt, Homo sapiens
uacagagaagauucuugu

SEQ ID NO: 218062 - RNA, 24 nt, Homo sapiens
aaauagcauguccuaaugcuugcu

SEQ ID NO: 218063 - RNA, 14 nt, Homo sapiens
agugagacuguguu

SEQ ID NO: 218064 - RNA, 20 nt, Homo sapiens
gagacuguaaguuacaugaa

SEQ ID NO: 218065 - RNA, 14 nt, Homo sapiens
gcgccagugacagu

SEQ ID NO: 218066 - RNA, 16 nt, Homo sapiens
auuccuaacuaucacu

SEQ ID NO: 218067 - RNA, 17 nt, Homo sapiens
ucuccccuucucuguau

SEQ ID NO: 218068 - RNA, 19 nt, Homo sapiens
auaaacauuucauuuccca

SEQ ID NO: 218069 - RNA, 18 nt, Homo sapiens
ugccaauuugcacauuaa

SEQ ID NO: 218070 - RNA, 22 nt, Homo sapiens
gaugcugucuucguacugggaa

SEQ ID NO: 218071 - RNA, 14 nt, Homo sapiens
agcagcgccaguga

SEQ ID NO: 218072 - RNA, 22 nt, Homo sapiens
uguaauaaacucauuucuagca

SEQ ID NO: 218073 - RNA, 15 nt, Homo sapiens
uaugugcacaucugu

SEQ ID NO: 218074 - RNA, 23 nt, Homo sapiens
augcuguucacuggacacuucac

SEQ ID NO: 218075 - RNA, 16 nt, Homo sapiens
cuagucauucuucccu

SEQ ID NO: 218076 - RNA, 17 nt, Homo sapiens
gaaaaggccuucuuccc

SEQ ID NO: 218077 - RNA, 15 nt, Homo sapiens
gaauguaugugcaca

SEQ ID NO: 218078 - RNA, 18 nt, Homo sapiens
ugacauugcaccuggaug

SEQ ID NO: 218079 - RNA, 14 nt, Homo sapiens
aauauugugcccca

SEQ ID NO: 218080 - RNA, 14 nt, Homo sapiens
gaaaugauuucaca

SEQ ID NO: 218081 - RNA, 18 nt, Homo sapiens
guucacuggacacuucac

SEQ ID NO: 218082 - RNA, 20 nt, Homo sapiens
auucugagaugacuauucag

SEQ ID NO: 218083 - RNA, 15 nt, Homo sapiens
aaugauuucacagug

SEQ ID NO: 218084 - RNA, 22 nt, Homo sapiens
auugauugggcacaucauuuca

SEQ ID NO: 218085 - RNA, 14 nt, Homo sapiens
auguaaaacugaac

SEQ ID NO: 218086 - RNA, 21 nt, Homo sapiens
uugugaaaaaauuuacuuuaa

SEQ ID NO: 218087 - RNA, 13 nt, Homo sapiens
ugaugacauuccc

SEQ ID NO: 218088 - RNA, 21 nt, Homo sapiens
cugcacacuguccuauuauau

SEQ ID NO: 218089 - RNA, 12 nt, Homo sapiens
gguaugauuaac

SEQ ID NO: 218090 - RNA, 22 nt, Homo sapiens
aauaauuagguauuuucuccaa

SEQ ID NO: 218091 - RNA, 15 nt, Homo sapiens
cccugugucauuuca

SEQ ID NO: 218092 - RNA, 23 nt, Homo sapiens
uuucuggaugaaugcccagugag

SEQ ID NO: 218093 - RNA, 22 nt, Homo sapiens
ggaugggugcuuaguaaguacu

SEQ ID NO: 218094 - RNA, 14 nt, Homo sapiens
gcaggcuggaguua

SEQ ID NO: 218095 - RNA, 14 nt, Homo sapiens
uuaaauagaugaca

SEQ ID NO: 218096 - RNA, 17 nt, Homo sapiens
aauguucuccagucauu

SEQ ID NO: 218097 - RNA, 17 nt, Homo sapiens
ccuggauguacuaucca

SEQ ID NO: 218098 - RNA, 22 nt, Homo sapiens
uggacacuucacgcccuuggcc

SEQ ID NO: 218099 - RNA, 13 nt, Homo sapiens
aaucuggauucau

SEQ ID NO: 218100 - RNA, 16 nt, Homo sapiens
aaugagaucauuguga

SEQ ID NO: 218101 - RNA, 18 nt, Homo sapiens
ggauaguccgucucugcu

SEQ ID NO: 218102 - RNA, 17 nt, Homo sapiens
gaagauucuauguuaau

SEQ ID NO: 218103 - RNA, 16 nt, Homo sapiens
uugauugggcacauca

SEQ ID NO: 218104 - RNA, 15 nt, Homo sapiens
aaacauuucauuucc

SEQ ID NO: 218105 - RNA, 17 nt, Homo sapiens
uggcaucuuacaucuga

SEQ ID NO: 218106 - RNA, 15 nt, Homo sapiens
gcugauggugacauu

SEQ ID NO: 218107 - RNA, 16 nt, Homo sapiens
aaagggauuuucagcc

SEQ ID NO: 218108 - RNA, 19 nt, Homo sapiens
agggauuuucagcccucag

SEQ ID NO: 218109 - RNA, 20 nt, Homo sapiens
gauacagugucugacuauaa

SEQ ID NO: 218110 - RNA, 15 nt, Homo sapiens
gugcacgcacacugu

SEQ ID NO: 218111 - RNA, 14 nt, Homo sapiens
ucauuauguuaaua

SEQ ID NO: 218112 - RNA, 19 nt, Homo sapiens
cuucucuauuucuggauga

SEQ ID NO: 218113 - RNA, 15 nt, Homo sapiens
aucuguuacacaaag

SEQ ID NO: 218114 - RNA, 22 nt, Homo sapiens
aaacacauuaaagguacuuugc

SEQ ID NO: 218115 - RNA, 17 nt, Homo sapiens
uauaaccuuguuccaaa

SEQ ID NO: 218116 - RNA, 23 nt, Homo sapiens
cuuggcccaggauuauugucaaa

SEQ ID NO: 218117 - RNA, 19 nt, Homo sapiens
gaccuugcugauggugaca

SEQ ID NO: 218118 - RNA, 23 nt, Homo sapiens
cuuccaugacauaagugcuauug

SEQ ID NO: 218119 - RNA, 17 nt, Homo sapiens
agcagauccucaauaaa

SEQ ID NO: 218120 - RNA, 18 nt, Homo sapiens
gaaaaggccuucuuccca

SEQ ID NO: 218121 - RNA, 17 nt, Homo sapiens
cacuuuauuucucucau

SEQ ID NO: 218122 - RNA, 16 nt, Homo sapiens
cuauucaguggcuaac

SEQ ID NO: 218123 - RNA, 14 nt, Homo sapiens
aggauuauugucaa

SEQ ID NO: 218124 - RNA, 15 nt, Homo sapiens
cuuuuaaacucugag

SEQ ID NO: 218125 - RNA, 17 nt, Homo sapiens
acgugcacgcacacugu

SEQ ID NO: 218126 - RNA, 14 nt, Homo sapiens
aauguaugugcaca

SEQ ID NO: 218127 - RNA, 22 nt, Homo sapiens
auuuacuuuaaacuacauuagg

SEQ ID NO: 218128 - RNA, 22 nt, Homo sapiens
ucaguuuaucuguucauaugga

SEQ ID NO: 218129 - RNA, 18 nt, Homo sapiens
uuuauuauuaacaaaaca

SEQ ID NO: 218130 - RNA, 23 nt, Homo sapiens
ugugagacuguaaguuacaugaa

SEQ ID NO: 218131 - RNA, 19 nt, Homo sapiens
caggauuauugucaaagaa

SEQ ID NO: 218132 - RNA, 16 nt, Homo sapiens
guccuauuauauucau

SEQ ID NO: 218133 - RNA, 20 nt, Homo sapiens
aggcauacugccuuguuuaa

SEQ ID NO: 218134 - RNA, 16 nt, Homo sapiens
cuaugcuguucacugg

SEQ ID NO: 218135 - RNA, 13 nt, Homo sapiens
caauugaaguaaa

SEQ ID NO: 218136 - RNA, 17 nt, Homo sapiens
guaaggugcaucuguuu

SEQ ID NO: 218137 - RNA, 15 nt, Homo sapiens
ucuggaugcugugaa

SEQ ID NO: 218138 - RNA, 14 nt, Homo sapiens
agcagagugcuuua

SEQ ID NO: 218139 - RNA, 13 nt, Homo sapiens
uggugauuuagca

SEQ ID NO: 218140 - RNA, 12 nt, Homo sapiens
auacagugucug

SEQ ID NO: 218141 - RNA, 11 nt, Homo sapiens
aaucacacugu

SEQ ID NO: 218142 - RNA, 13 nt, Homo sapiens
aaaacuacauuga

SEQ ID NO: 218143 - RNA, 21 nt, Homo sapiens
auagcagcccucaauugugaa

SEQ ID NO: 218144 - RNA, 17 nt, Homo sapiens
caagcugaccuugcuga

SEQ ID NO: 218145 - RNA, 16 nt, Homo sapiens
uuauuuauuuauucau

SEQ ID NO: 218146 - RNA, 18 nt, Homo sapiens
uuaagcagcgccagugac

SEQ ID NO: 218147 - RNA, 23 nt, Homo sapiens
aauaucccuuggacauuuuaugu

SEQ ID NO: 218148 - RNA, 20 nt, Homo sapiens
uuuugaagauucuauguuaa

SEQ ID NO: 218149 - RNA, 18 nt, Homo sapiens
cucacagaagaugaagca

SEQ ID NO: 218150 - RNA, 18 nt, Homo sapiens
agagccccacccucagau

SEQ ID NO: 218151 - RNA, 19 nt, Homo sapiens
cuuuaagcagcgccaguga

SEQ ID NO: 218152 - RNA, 16 nt, Homo sapiens
caguaacauagcugug

SEQ ID NO: 218153 - RNA, 14 nt, Homo sapiens
gucauuauguuaau

SEQ ID NO: 218154 - RNA, 15 nt, Homo sapiens
uucaaauguucucca

SEQ ID NO: 218155 - RNA, 14 nt, Homo sapiens
gauuaaagugccca

SEQ ID NO: 218156 - RNA, 15 nt, Homo sapiens
uuagaugaaugucag

SEQ ID NO: 218157 - RNA, 14 nt, Homo sapiens
aagcaaauggccaa

SEQ ID NO: 218158 - RNA, 22 nt, Homo sapiens
cugaggagccugcaacaugcca

SEQ ID NO: 218159 - RNA, 20 nt, Homo sapiens
uaauuaaugucaguauuuca

SEQ ID NO: 218160 - RNA, 19 nt, Homo sapiens
caauccuugccacagugug

SEQ ID NO: 218161 - RNA, 14 nt, Homo sapiens
ugugagacuguaag

SEQ ID NO: 218162 - RNA, 17 nt, Homo sapiens
gccuaauaugaugacug

SEQ ID NO: 218163 - RNA, 20 nt, Homo sapiens
uuuuauaaugucccuucaca

SEQ ID NO: 218164 - RNA, 14 nt, Homo sapiens
gcaaagaugaaggu

SEQ ID NO: 218165 - RNA, 15 nt, Homo sapiens
aaaacuacauugaca

SEQ ID NO: 218166 - RNA, 13 nt, Homo sapiens
ucccuuggacauu

SEQ ID NO: 218167 - RNA, 16 nt, Homo sapiens
ucuggaugcugugaag

SEQ ID NO: 218168 - RNA, 21 nt, Homo sapiens
gauaucacuuccaugacauaa

SEQ ID NO: 218169 - RNA, 20 nt, Homo sapiens
aauguggauuaaagugccca

SEQ ID NO: 218170 - RNA, 13 nt, Homo sapiens
augcuugcugcug

SEQ ID NO: 218171 - RNA, 19 nt, Homo sapiens
uccacuugagugucaagcu

SEQ ID NO: 218172 - RNA, 11 nt, Homo sapiens
aacuccugacu

SEQ ID NO: 218173 - RNA, 18 nt, Homo sapiens
gaugcacaugagcuggcg

SEQ ID NO: 218174 - RNA, 19 nt, Homo sapiens
uacaacucuauuuaauuaa

SEQ ID NO: 218175 - RNA, 12 nt, Homo sapiens
agaaacugacac

SEQ ID NO: 218176 - RNA, 16 nt, Homo sapiens
cacaaagaaccaccag

SEQ ID NO: 218177 - RNA, 20 nt, Homo sapiens
caugagcuggcgggauugaa

SEQ ID NO: 218178 - RNA, 16 nt, Homo sapiens
acaaagcagauccuca

SEQ ID NO: 218179 - RNA, 12 nt, Homo sapiens
ugcuuggaugua

SEQ ID NO: 218180 - RNA, 19 nt, Homo sapiens
ugaagguagaauguuuuca

SEQ ID NO: 218181 - RNA, 17 nt, Homo sapiens
cgugcacgcacacuguc

SEQ ID NO: 218182 - RNA, 20 nt, Homo sapiens
guaacucuguaauuccuaac

SEQ ID NO: 218183 - RNA, 13 nt, Homo sapiens
gccuuggcugcag

SEQ ID NO: 218184 - RNA, 18 nt, Homo sapiens
uugcugcuuguacacuca

SEQ ID NO: 218185 - RNA, 14 nt, Homo sapiens
acucauucauuacu

SEQ ID NO: 218186 - RNA, 20 nt, Homo sapiens
ucuacagagaagauucuugu

SEQ ID NO: 218187 - RNA, 18 nt, Homo sapiens
caauccuugccacagugu

SEQ ID NO: 218188 - RNA, 16 nt, Homo sapiens
uuccaguaaugagcuu

SEQ ID NO: 218189 - RNA, 19 nt, Homo sapiens
aguuuuuuuccuucaagaa

SEQ ID NO: 218190 - RNA, 17 nt, Homo sapiens
ccaauagcaaggcugug

SEQ ID NO: 218191 - RNA, 14 nt, Homo sapiens
cccuucucuguauu

SEQ ID NO: 218192 - RNA, 14 nt, Homo sapiens
uuauauucauucuu

SEQ ID NO: 218193 - RNA, 14 nt, Homo sapiens
uggccugucuuugg

SEQ ID NO: 218194 - RNA, 21 nt, Homo sapiens
uucccggguagccacuggacu

SEQ ID NO: 218195 - RNA, 22 nt, Homo sapiens
agcaggaagcugugagagcagu

SEQ ID NO: 218196 - RNA, 22 nt, Homo sapiens
uucuuuaagcagcgccagugac

SEQ ID NO: 218197 - RNA, 20 nt, Homo sapiens
augcugucuucguacuggga

SEQ ID NO: 218198 - RNA, 13 nt, Homo sapiens
cuugccacagugu

SEQ ID NO: 218199 - RNA, 16 nt, Homo sapiens
ggcagacuuucuucuc

SEQ ID NO: 218200 - RNA, 17 nt, Homo sapiens
gccucuggaugcuguga

SEQ ID NO: 218201 - RNA, 13 nt, Homo sapiens
agagggaugcuug

SEQ ID NO: 218202 - RNA, 18 nt, Homo sapiens
ucuucucuauuucuggau

SEQ ID NO: 218203 - RNA, 16 nt, Homo sapiens
acccucagaugcacau

SEQ ID NO: 218204 - RNA, 21 nt, Homo sapiens
uugagaaauuuuuuuuuccag

SEQ ID NO: 218205 - RNA, 23 nt, Homo sapiens
gaaaaaauuuacuuuaaacuaca

SEQ ID NO: 218206 - RNA, 15 nt, Homo sapiens
uacuauccaaucugu

SEQ ID NO: 218207 - RNA, 22 nt, Homo sapiens
uaucugcagggacagagcauug

SEQ ID NO: 218208 - RNA, 17 nt, Homo sapiens
ugauuuaaacacauuaa

SEQ ID NO: 218209 - RNA, 11 nt, Homo sapiens
ugguacucugc

SEQ ID NO: 218210 - RNA, 19 nt, Homo sapiens
uaagaacuaaaauguucua

SEQ ID NO: 218211 - RNA, 23 nt, Homo sapiens
aaacugaacuucagagcaugaaa

SEQ ID NO: 218212 - RNA, 20 nt, Homo sapiens
uuuuauccuagucauucuuc

SEQ ID NO: 218213 - RNA, 13 nt, Homo sapiens
acuaucacugguu

SEQ ID NO: 218214 - RNA, 19 nt, Homo sapiens
cuuauccguuagccguggu

SEQ ID NO: 218215 - RNA, 21 nt, Homo sapiens
uuuaaauagaugacauugacu

SEQ ID NO: 218216 - RNA, 16 nt, Homo sapiens
ccaaauguucacuggu

SEQ ID NO: 218217 - RNA, 23 nt, Homo sapiens
uaaaacugaacuucagagcauga

SEQ ID NO: 218218 - RNA, 13 nt, Homo sapiens
agaugaaugucag

SEQ ID NO: 218219 - RNA, 15 nt, Homo sapiens
agggacagagcauug

SEQ ID NO: 218220 - RNA, 18 nt, Homo sapiens
acaugcugaacaucacag

SEQ ID NO: 218221 - RNA, 20 nt, Homo sapiens
uguccuaaugcuugcugcug

SEQ ID NO: 218222 - RNA, 16 nt, Homo sapiens
agagccccacccucag

SEQ ID NO: 218223 - RNA, 23 nt, Homo sapiens
agcaguuugguuucuagcaugaa

SEQ ID NO: 218224 - RNA, 12 nt, Homo sapiens
gcaaagaugaag

SEQ ID NO: 218225 - RNA, 16 nt, Homo sapiens
gcagcgccagugacag

SEQ ID NO: 218226 - RNA, 13 nt, Homo sapiens
uucuggacuaaaa

SEQ ID NO: 218227 - RNA, 18 nt, Homo sapiens
gccacuggacugacgacu

SEQ ID NO: 218228 - RNA, 19 nt, Homo sapiens
auauaaaaauaaagcacuu

SEQ ID NO: 218229 - RNA, 19 nt, Homo sapiens
caaucugugaugacauucc

SEQ ID NO: 218230 - RNA, 15 nt, Homo sapiens
uuggaaaggaaugca

SEQ ID NO: 218231 - RNA, 18 nt, Homo sapiens
guauuugaaacacugguu

SEQ ID NO: 218232 - RNA, 16 nt, Homo sapiens
uauccaaucugugaug

SEQ ID NO: 218233 - RNA, 19 nt, Homo sapiens
gagaagauucuuguauuua

SEQ ID NO: 218234 - RNA, 19 nt, Homo sapiens
uaguucaaucuggauucau

SEQ ID NO: 218235 - RNA, 19 nt, Homo sapiens
gucuccucucucuguaaua

SEQ ID NO: 218236 - RNA, 14 nt, Homo sapiens
gaguuuggccagaa

SEQ ID NO: 218237 - RNA, 21 nt, Homo sapiens
ugcccagugagacuguguugu

SEQ ID NO: 218238 - RNA, 13 nt, Homo sapiens
guacuuuuaagac

SEQ ID NO: 218239 - RNA, 19 nt, Homo sapiens
uauccaaucugugaugaca

SEQ ID NO: 218240 - RNA, 21 nt, Homo sapiens
gagcaguuugguuucuagcau

SEQ ID NO: 218241 - RNA, 21 nt, Homo sapiens
gaacuuuguggucgacaucaa

SEQ ID NO: 218242 - RNA, 15 nt, Homo sapiens
auccaauugcugcuu

SEQ ID NO: 218243 - RNA, 14 nt, Homo sapiens
uucucagcagagug

SEQ ID NO: 218244 - RNA, 19 nt, Homo sapiens
uucauucuuuuugaaaugu

SEQ ID NO: 218245 - RNA, 11 nt, Homo sapiens
cucaugcugcc

SEQ ID NO: 218246 - RNA, 17 nt, Homo sapiens
cuucacgcccuuggcca

SEQ ID NO: 218247 - RNA, 13 nt, Homo sapiens
gaucauugugaag

SEQ ID NO: 218248 - RNA, 16 nt, Homo sapiens
ucaguauuucaacuga

SEQ ID NO: 218249 - RNA, 13 nt, Homo sapiens
auguucacuggua

SEQ ID NO: 218250 - RNA, 19 nt, Homo sapiens
aauuuacuuuaaacuacau

SEQ ID NO: 218251 - RNA, 16 nt, Homo sapiens
gcaaauggccaaugag

SEQ ID NO: 218252 - RNA, 16 nt, Homo sapiens
auuugaaacacugguu

SEQ ID NO: 218253 - RNA, 16 nt, Homo sapiens
aaggccuucuucccaa

SEQ ID NO: 218254 - RNA, 19 nt, Homo sapiens
caaucuaaagauacagugu

SEQ ID NO: 218255 - RNA, 14 nt, Homo sapiens
augcuuggauguaa

SEQ ID NO: 218256 - RNA, 18 nt, Homo sapiens
ggaaggugccucuggaug

SEQ ID NO: 218257 - RNA, 13 nt, Homo sapiens
gacuaaaacuaca

SEQ ID NO: 218258 - RNA, 20 nt, Homo sapiens
ucuccagucauuauguuaau

SEQ ID NO: 218259 - RNA, 16 nt, Homo sapiens
ugacauaagugcuauu

SEQ ID NO: 218260 - RNA, 22 nt, Homo sapiens
cuuaauaaacuguggugcuuuu

SEQ ID NO: 218261 - RNA, 20 nt, Homo sapiens
agcagaguggcagucuucag

SEQ ID NO: 218262 - RNA, 22 nt, Homo sapiens
augggugcuuaguaaguacuua

SEQ ID NO: 218263 - RNA, 19 nt, Homo sapiens
uugucaaagaagucauucu

SEQ ID NO: 218264 - RNA, 17 nt, Homo sapiens
caguuugguuucuagca

SEQ ID NO: 218265 - RNA, 14 nt, Homo sapiens
cuaaaauguucuaa

SEQ ID NO: 218266 - RNA, 14 nt, Homo sapiens
guauagauguugcu

SEQ ID NO: 218267 - RNA, 15 nt, Homo sapiens
agugcuauugcagag

SEQ ID NO: 218268 - RNA, 13 nt, Homo sapiens
cucagaugcacau

SEQ ID NO: 218269 - RNA, 21 nt, Homo sapiens
uuggguuaggaagaaaauaau

SEQ ID NO: 218270 - RNA, 18 nt, Homo sapiens
gcagagugcuuuaccaau

SEQ ID NO: 218271 - RNA, 16 nt, Homo sapiens
uaacauuuauuugagu

SEQ ID NO: 218272 - RNA, 16 nt, Homo sapiens
uauugcauacuauuaa

SEQ ID NO: 218273 - RNA, 21 nt, Homo sapiens
caauaaacauuucauuuccca

SEQ ID NO: 218274 - RNA, 22 nt, Homo sapiens
ccuuggccaugggucccauucu

SEQ ID NO: 218275 - RNA, 18 nt, Homo sapiens
gauggugacauugcaccu

SEQ ID NO: 218276 - RNA, 17 nt, Homo sapiens
ggaauguaugugcacau

SEQ ID NO: 218277 - RNA, 21 nt, Homo sapiens
cuuagacccucaugcugccaa

SEQ ID NO: 218278 - RNA, 16 nt, Homo sapiens
gucuccucucucugua

SEQ ID NO: 218279 - RNA, 16 nt, Homo sapiens
ccuaacuaucacuggu

SEQ ID NO: 218280 - RNA, 19 nt, Homo sapiens
uccacauuuguuuugccaa

SEQ ID NO: 218281 - RNA, 14 nt, Homo sapiens
acuaaaauguucua

SEQ ID NO: 218282 - RNA, 13 nt, Homo sapiens
ggccacccaggaa

SEQ ID NO: 218283 - RNA, 20 nt, Homo sapiens
cauucuuuuugaaaugucaa

SEQ ID NO: 218284 - RNA, 22 nt, Homo sapiens
cuauuuauuuauuuauucauua

SEQ ID NO: 218285 - RNA, 18 nt, Homo sapiens
ggauaucacuuccaugac

SEQ ID NO: 218286 - RNA, 15 nt, Homo sapiens
cuauccaaucuguga

SEQ ID NO: 218287 - RNA, 17 nt, Homo sapiens
cugauggugacauugca

SEQ ID NO: 218288 - RNA, 19 nt, Homo sapiens
uggcacugguuuguucccu

SEQ ID NO: 218289 - RNA, 15 nt, Homo sapiens
ggguuaggaagaaaa

SEQ ID NO: 218290 - RNA, 23 nt, Homo sapiens
ugcaacaugccagccacugugau

SEQ ID NO: 218291 - RNA, 19 nt, Homo sapiens
agucagggaaggugccucu

SEQ ID NO: 218292 - RNA, 13 nt, Homo sapiens
aaaauguggcagg

SEQ ID NO: 218293 - RNA, 15 nt, Homo sapiens
acaucacagcuuauu

SEQ ID NO: 218294 - RNA, 13 nt, Homo sapiens
uucauuacuaaaa

SEQ ID NO: 218295 - RNA, 21 nt, Homo sapiens
ugcucaguagucagacuggau

SEQ ID NO: 218296 - RNA, 18 nt, Homo sapiens
acuucagagcaugaaaau

SEQ ID NO: 218297 - RNA, 14 nt, Homo sapiens
uccaauugcugcuu

SEQ ID NO: 218298 - RNA, 20 nt, Homo sapiens
gcaacaugccagccacugug

SEQ ID NO: 218299 - RNA, 20 nt, Homo sapiens
uagcaaggcugugcaucuag

SEQ ID NO: 218300 - RNA, 19 nt, Homo sapiens
ggagcccugucuccucucu

SEQ ID NO: 218301 - RNA, 14 nt, Homo sapiens
aucuguuacacaaa

SEQ ID NO: 218302 - RNA, 17 nt, Homo sapiens
auaucacuuccaugaca

SEQ ID NO: 218303 - RNA, 23 nt, Homo sapiens
aguaaguacuuaauaaacugugg

SEQ ID NO: 218304 - RNA, 15 nt, Homo sapiens
uugguaacucuguaa

SEQ ID NO: 218305 - RNA, 24 nt, Homo sapiens
ccuuccuaugcuguucacuggaca

SEQ ID NO: 218306 - RNA, 15 nt, Homo sapiens
ccagugagacugugu

SEQ ID NO: 218307 - RNA, 21 nt, Homo sapiens
ugguaguuuuacaguguuucu

SEQ ID NO: 218308 - RNA, 14 nt, Homo sapiens
gaacuucagagcau

SEQ ID NO: 218309 - RNA, 13 nt, Homo sapiens
auuucacagugug

SEQ ID NO: 218310 - RNA, 16 nt, Homo sapiens
auugaaggaugcuguc

SEQ ID NO: 218311 - RNA, 13 nt, Homo sapiens
uacagagaagauu

SEQ ID NO: 218312 - RNA, 16 nt, Homo sapiens
gucuucguacugggaa

SEQ ID NO: 218313 - RNA, 21 nt, Homo sapiens
aucuguauguguucuauucag

SEQ ID NO: 218314 - RNA, 22 nt, Homo sapiens
cagagccguggccacccaggaa

SEQ ID NO: 218315 - RNA, 23 nt, Homo sapiens
aaauauuuugacuuguugagggu

SEQ ID NO: 218316 - RNA, 22 nt, Homo sapiens
cauguccuaaugcuugcugcug

SEQ ID NO: 218317 - RNA, 12 nt, Homo sapiens
ucauuucuagca

SEQ ID NO: 218318 - RNA, 17 nt, Homo sapiens
gcaaauggccaaugaga

SEQ ID NO: 218319 - RNA, 15 nt, Homo sapiens
uaaagauacaguguc

SEQ ID NO: 218320 - RNA, 16 nt, Homo sapiens
ggugacauugcaccug

SEQ ID NO: 218321 - RNA, 21 nt, Homo sapiens
guauuucaacugaaguucuau

SEQ ID NO: 218322 - RNA, 22 nt, Homo sapiens
uccuuuuuuuuuuauccuaguc

SEQ ID NO: 218323 - RNA, 23 nt, Homo sapiens
aacuaacaggcuuagugauguaa

SEQ ID NO: 218324 - RNA, 18 nt, Homo sapiens
acuucacgcccuuggcca

SEQ ID NO: 218325 - RNA, 16 nt, Homo sapiens
gaggagccugcaacau

SEQ ID NO: 218326 - RNA, 22 nt, Homo sapiens
agauccucaauaaacauuucau

SEQ ID NO: 218327 - RNA, 17 nt, Homo sapiens
ccuaacuaucacugguu

SEQ ID NO: 218328 - RNA, 20 nt, Homo sapiens
uguacuauccaaucugugau

SEQ ID NO: 218329 - RNA, 15 nt, Homo sapiens
guagucagacuggau

SEQ ID NO: 218330 - RNA, 13 nt, Homo sapiens
aaacuacauugac

SEQ ID NO: 218331 - RNA, 17 nt, Homo sapiens
aauauccaauugcugcu

SEQ ID NO: 218332 - RNA, 17 nt, Homo sapiens
ucuccucucucuguaau

SEQ ID NO: 218333 - RNA, 19 nt, Homo sapiens
auguggcaggcuggaguua

SEQ ID NO: 218334 - RNA, 16 nt, Homo sapiens
augauuucacagugug

SEQ ID NO: 218335 - RNA, 17 nt, Homo sapiens
uuuaagcagcgccagug

SEQ ID NO: 218336 - RNA, 23 nt, Homo sapiens
ugggauaucacuuccaugacaua

SEQ ID NO: 218337 - RNA, 19 nt, Homo sapiens
ccaaugagaucauugugaa

SEQ ID NO: 218338 - RNA, 14 nt, Homo sapiens
uuugcauauugcau

SEQ ID NO: 218339 - RNA, 19 nt, Homo sapiens
cucccucccccuggcacug

SEQ ID NO: 218340 - RNA, 21 nt, Homo sapiens
cuuuauuucucucaucuguua

SEQ ID NO: 218341 - RNA, 21 nt, Homo sapiens
cuuuaagcagcgccagugaca

SEQ ID NO: 218342 - RNA, 20 nt, Homo sapiens
uggaugcugugaagagucua

SEQ ID NO: 218343 - RNA, 16 nt, Homo sapiens
uucaaucuggauucau

SEQ ID NO: 218344 - RNA, 17 nt, Homo sapiens
cagaauauugugcccca

SEQ ID NO: 218345 - RNA, 22 nt, Homo sapiens
uuccuaugcuguucacuggaca

SEQ ID NO: 218346 - RNA, 21 nt, Homo sapiens
auuaauauccaauugcugcuu

SEQ ID NO: 218347 - RNA, 22 nt, Homo sapiens
uauugaaaugauuucacagugu

SEQ ID NO: 218348 - RNA, 13 nt, Homo sapiens
ugccucuggaugc

SEQ ID NO: 218349 - RNA, 13 nt, Homo sapiens
gaccaggaccucc

SEQ ID NO: 218350 - RNA, 16 nt, Homo sapiens
uuauugauguuuucau

SEQ ID NO: 218351 - RNA, 14 nt, Homo sapiens
aaugcuugcugcug

SEQ ID NO: 218352 - RNA, 20 nt, Homo sapiens
ucaaagaagucauucuuuaa

SEQ ID NO: 218353 - RNA, 21 nt, Homo sapiens
ggccacccaggaacuccugac

SEQ ID NO: 218354 - RNA, 20 nt, Homo sapiens
ugugaaggcaggggaaugua

SEQ ID NO: 218355 - RNA, 22 nt, Homo sapiens
guaauuccuaacuaucacuggu

SEQ ID NO: 218356 - RNA, 17 nt, Homo sapiens
uucccugugucauuuca

SEQ ID NO: 218357 - RNA, 13 nt, Homo sapiens
ugacauugacuau

SEQ ID NO: 218358 - RNA, 19 nt, Homo sapiens
augguaguuuuacaguguu

SEQ ID NO: 218359 - RNA, 16 nt, Homo sapiens
acagcaacacaaagcu

SEQ ID NO: 218360 - RNA, 22 nt, Homo sapiens
aagauacagugucugacuauaa

SEQ ID NO: 218361 - RNA, 11 nt, Homo sapiens
aaaggugacca

SEQ ID NO: 218362 - RNA, 19 nt, Homo sapiens
uaaaugacucuucccucaa

SEQ ID NO: 218363 - RNA, 15 nt, Homo sapiens
uaaacauuucauuuc

SEQ ID NO: 218364 - RNA, 13 nt, Homo sapiens
cauucuuggccca

SEQ ID NO: 218365 - RNA, 18 nt, Homo sapiens
cuggaguuauugaagcag

SEQ ID NO: 218366 - RNA, 17 nt, Homo sapiens
caaugagaucauuguga

SEQ ID NO: 218367 - RNA, 14 nt, Homo sapiens
uggaugcugugaag

SEQ ID NO: 218368 - RNA, 18 nt, Homo sapiens
cagcgccagugacaguca

SEQ ID NO: 218369 - RNA, 17 nt, Homo sapiens
aaugauuucacagugug

SEQ ID NO: 218370 - RNA, 19 nt, Homo sapiens
cuguuuagaugaaugucag

SEQ ID NO: 218371 - RNA, 21 nt, Homo sapiens
agcaugaaaaucacacugucu

SEQ ID NO: 218372 - RNA, 20 nt, Homo sapiens
aaaaugguguuuuaucuucu

SEQ ID NO: 218373 - RNA, 13 nt, Homo sapiens
ccucucucuguaa

SEQ ID NO: 218374 - RNA, 14 nt, Homo sapiens
ugacacaugcugaa

SEQ ID NO: 218375 - RNA, 14 nt, Homo sapiens
gaaugcccagugag

SEQ ID NO: 218376 - RNA, 19 nt, Homo sapiens
guccuaaugcuugcugcug

SEQ ID NO: 218377 - RNA, 15 nt, Homo sapiens
ugacauaagugcuau

SEQ ID NO: 218378 - RNA, 14 nt, Homo sapiens
gaaugauauaaggu

SEQ ID NO: 218379 - RNA, 21 nt, Homo sapiens
gcuuaauuauugauguuuuca

SEQ ID NO: 218380 - RNA, 15 nt, Homo sapiens
auucucagcagagug

SEQ ID NO: 218381 - RNA, 15 nt, Homo sapiens
gaaacugacacaugc

SEQ ID NO: 218382 - RNA, 19 nt, Homo sapiens
augccagccacugugauag

SEQ ID NO: 218383 - RNA, 20 nt, Homo sapiens
uugacagauugaauuugccu

SEQ ID NO: 218384 - RNA, 20 nt, Homo sapiens
cccuuggccaugggucccau

SEQ ID NO: 218385 - RNA, 17 nt, Homo sapiens
uaagcagcgccagugac

SEQ ID NO: 218386 - RNA, 20 nt, Homo sapiens
aaggcuuagacccucaugcu

SEQ ID NO: 218387 - RNA, 16 nt, Homo sapiens
aaauggccaaugagau

SEQ ID NO: 218388 - RNA, 16 nt, Homo sapiens
cucaguagucagacug

SEQ ID NO: 218389 - RNA, 19 nt, Homo sapiens
aggaagcugugagagcagu

SEQ ID NO: 218390 - RNA, 16 nt, Homo sapiens
agagugcuuuaccaau

SEQ ID NO: 218391 - RNA, 23 nt, Homo sapiens
aacuucagagcaugaaaaucaca

SEQ ID NO: 218392 - RNA, 16 nt, Homo sapiens
uugagugucaagcuga

SEQ ID NO: 218393 - RNA, 23 nt, Homo sapiens
ucacugguuugguucuggacuaa

SEQ ID NO: 218394 - RNA, 23 nt, Homo sapiens
cauuuguuuugccaauuugcaca

SEQ ID NO: 218395 - RNA, 15 nt, Homo sapiens
uucuuggcccaggau

SEQ ID NO: 218396 - RNA, 22 nt, Homo sapiens
gaguggaguuacugaacaguaa

SEQ ID NO: 218397 - RNA, 21 nt, Homo sapiens
aauuuguggaaaauaacucac

SEQ ID NO: 218398 - RNA, 13 nt, Homo sapiens
gauaucacuucca

SEQ ID NO: 218399 - RNA, 16 nt, Homo sapiens
uuauugaagcagagug

SEQ ID NO: 218400 - RNA, 18 nt, Homo sapiens
ugguuucuagcaugaaga

SEQ ID NO: 218401 - RNA, 23 nt, Homo sapiens
aaugauuucacagugugugguca

SEQ ID NO: 218402 - RNA, 22 nt, Homo sapiens
acuauccaaucugugaugacau

SEQ ID NO: 218403 - RNA, 11 nt, Homo sapiens
ucuauguuaau

SEQ ID NO: 218404 - RNA, 12 nt, Homo sapiens
cugcacacuguc

SEQ ID NO: 218405 - RNA, 16 nt, Homo sapiens
aauuauugauguuuuc

SEQ ID NO: 218406 - RNA, 14 nt, Homo sapiens
aaucugugaugaca

SEQ ID NO: 218407 - RNA, 17 nt, Homo sapiens
cuggacuaaaacuacau

SEQ ID NO: 218408 - RNA, 20 nt, Homo sapiens
uuuuaaacucugagugcaaa

SEQ ID NO: 218409 - RNA, 16 nt, Homo sapiens
aguuugguuucuagca

SEQ ID NO: 218410 - RNA, 19 nt, Homo sapiens
uauccaauugcugcuugua

SEQ ID NO: 218411 - RNA, 22 nt, Homo sapiens
caguguuuuaggagcaugagug

SEQ ID NO: 218412 - RNA, 16 nt, Homo sapiens
agaaacugacacaugc

SEQ ID NO: 218413 - RNA, 19 nt, Homo sapiens
guauuuauuacaacucuau

SEQ ID NO: 218414 - RNA, 21 nt, Homo sapiens
uuuaaucuuuuaugauugccu

SEQ ID NO: 218415 - RNA, 20 nt, Homo sapiens
acacaugcugaacaucacag

SEQ ID NO: 218416 - RNA, 17 nt, Homo sapiens
ccccucacaauccuugc

SEQ ID NO: 218417 - RNA, 15 nt, Homo sapiens
uauagauguugcuaa

SEQ ID NO: 218418 - RNA, 18 nt, Homo sapiens
acuuuguggucgacauca

SEQ ID NO: 218419 - RNA, 22 nt, Homo sapiens
auuuccucauuuuuauaauguc

SEQ ID NO: 218420 - RNA, 23 nt, Homo sapiens
uuggccaugggucccauucuugg

SEQ ID NO: 218421 - RNA, 18 nt, Homo sapiens
cuuuguggucgacaucaa

SEQ ID NO: 218422 - RNA, 18 nt, Homo sapiens
ucaaauguucuccaguca

SEQ ID NO: 218423 - RNA, 21 nt, Homo sapiens
agaauguuuucaaauguucuc

SEQ ID NO: 218424 - RNA, 14 nt, Homo sapiens
auauugugccccau

SEQ ID NO: 218425 - RNA, 21 nt, Homo sapiens
cucaagucuggcagacuuucu

SEQ ID NO: 218426 - RNA, 19 nt, Homo sapiens
cggagcccugucuccucuc

SEQ ID NO: 218427 - RNA, 19 nt, Homo sapiens
auuaaaaggaagcuuacau

SEQ ID NO: 218428 - RNA, 14 nt, Homo sapiens
ccagccacugugau

SEQ ID NO: 218429 - RNA, 21 nt, Homo sapiens
uggccaaugagaucauuguga

SEQ ID NO: 218430 - RNA, 20 nt, Homo sapiens
caaucuaaagauacaguguc

SEQ ID NO: 218431 - RNA, 11 nt, Homo sapiens
uuuacaguguu

SEQ ID NO: 218432 - RNA, 12 nt, Homo sapiens
agcaacacaaag

SEQ ID NO: 218433 - RNA, 22 nt, Homo sapiens
guaaguuacaugaaggcagcag

SEQ ID NO: 218434 - RNA, 16 nt, Homo sapiens
ugccagccacugugau

SEQ ID NO: 218435 - RNA, 14 nt, Homo sapiens
gcuuacaugccuac

SEQ ID NO: 218436 - RNA, 20 nt, Homo sapiens
ucuaaagauacagugucuga

SEQ ID NO: 218437 - RNA, 12 nt, Homo sapiens
ccuaaucuucca

SEQ ID NO: 218438 - RNA, 16 nt, Homo sapiens
ugggucccauucuugg

SEQ ID NO: 218439 - RNA, 17 nt, Homo sapiens
uccuaugcuguucacug

SEQ ID NO: 218440 - RNA, 22 nt, Homo sapiens
cuuagacccucaugcugccaau

SEQ ID NO: 218441 - RNA, 16 nt, Homo sapiens
uuauauagcaguaaaa

SEQ ID NO: 218442 - RNA, 13 nt, Homo sapiens
aaugcccagugag

SEQ ID NO: 218443 - RNA, 21 nt, Homo sapiens
auuuauugaaaugauuucaca

SEQ ID NO: 218444 - RNA, 14 nt, Homo sapiens
augcaaagaugaag

SEQ ID NO: 218445 - RNA, 21 nt, Homo sapiens
aggaggugggauaucacuucc

SEQ ID NO: 218446 - RNA, 23 nt, Homo sapiens
uauccaaucugugaugacauucc

SEQ ID NO: 218447 - RNA, 13 nt, Homo sapiens
cucaaacuaacag

SEQ ID NO: 218448 - RNA, 13 nt, Homo sapiens
cacuggacacuuc

SEQ ID NO: 218449 - RNA, 14 nt, Homo sapiens
agucauucuucccu

SEQ ID NO: 218450 - RNA, 13 nt, Homo sapiens
cuguuacacaaag

SEQ ID NO: 218451 - RNA, 13 nt, Homo sapiens
aaauguggauuaa

SEQ ID NO: 218452 - RNA, 17 nt, Homo sapiens
uccuaaugcuugcugcu

SEQ ID NO: 218453 - RNA, 16 nt, Homo sapiens
auaaacauuucauuuc

SEQ ID NO: 218454 - RNA, 21 nt, Homo sapiens
ugagcuggcgggauugaagga

SEQ ID NO: 218455 - RNA, 15 nt, Homo sapiens
gaguuauugaagcag

SEQ ID NO: 218456 - RNA, 20 nt, Homo sapiens
aguacuuaauaaacuguggu

SEQ ID NO: 218457 - RNA, 20 nt, Homo sapiens
acuguccuauuauauucauu

SEQ ID NO: 218458 - RNA, 15 nt, Homo sapiens
auugugccccaugcu

SEQ ID NO: 218459 - RNA, 12 nt, Homo sapiens
cugugaugacau

SEQ ID NO: 218460 - RNA, 14 nt, Homo sapiens
auuccuagaaacug

SEQ ID NO: 218461 - RNA, 18 nt, Homo sapiens
caacaugccagccacugu

SEQ ID NO: 218462 - RNA, 23 nt, Homo sapiens
gcaagacauuauauagcaguaaa

SEQ ID NO: 218463 - RNA, 19 nt, Homo sapiens
cucagaugcacaugagcug

SEQ ID NO: 218464 - RNA, 17 nt, Homo sapiens
auaaugucccuucacaa

SEQ ID NO: 218465 - RNA, 17 nt, Homo sapiens
ucugugaugacauuccc

SEQ ID NO: 218466 - RNA, 16 nt, Homo sapiens
ccucagaugcacauga

SEQ ID NO: 218467 - RNA, 14 nt, Homo sapiens
caagcaaauggcca

SEQ ID NO: 218468 - RNA, 13 nt, Homo sapiens
aauguucacuggu

SEQ ID NO: 218469 - RNA, 14 nt, Homo sapiens
uuuauccuagucau

SEQ ID NO: 218470 - RNA, 21 nt, Homo sapiens
uggugacauugcaccuggaug

SEQ ID NO: 218471 - RNA, 22 nt, Homo sapiens
auuucugaggagccugcaacau

SEQ ID NO: 218472 - RNA, 20 nt, Homo sapiens
gccacccaggaacuccugac

SEQ ID NO: 218473 - RNA, 20 nt, Homo sapiens
gggauuuucagcccucagaa

SEQ ID NO: 218474 - RNA, 21 nt, Homo sapiens
cuauuuauuuauuuauucauu

SEQ ID NO: 218475 - RNA, 21 nt, Homo sapiens
aauugcugcuuguacacucau

SEQ ID NO: 218476 - RNA, 20 nt, Homo sapiens
gacgugcacgcacacugucu

SEQ ID NO: 218477 - RNA, 22 nt, Homo sapiens
ucuguauuccuagaaacugaca

SEQ ID NO: 218478 - RNA, 18 nt, Homo sapiens
uuugaagguagaauguuu

SEQ ID NO: 218479 - RNA, 17 nt, Homo sapiens
auaagugcuauugcaga

SEQ ID NO: 218480 - RNA, 19 nt, Homo sapiens
uaauauccaauugcugcuu

SEQ ID NO: 218481 - RNA, 14 nt, Homo sapiens
auccaauugcugcu

SEQ ID NO: 218482 - RNA, 20 nt, Homo sapiens
uuagacccucaugcugccaa

SEQ ID NO: 218483 - RNA, 16 nt, Homo sapiens
aggcaggggaauguau

SEQ ID NO: 218484 - RNA, 21 nt, Homo sapiens
gccagcucaccccaucauccc

SEQ ID NO: 218485 - RNA, 12 nt, Homo sapiens
ccucucucugua

SEQ ID NO: 218486 - RNA, 21 nt, Homo sapiens
agacccucaugcugccaauau

SEQ ID NO: 218487 - RNA, 17 nt, Homo sapiens
uggaaaggaaugcaaag

SEQ ID NO: 218488 - RNA, 16 nt, Homo sapiens
auaucacuuccaugac

SEQ ID NO: 218489 - RNA, 22 nt, Homo sapiens
cauuaaaugacucuucccucaa

SEQ ID NO: 218490 - RNA, 19 nt, Homo sapiens
ugauggugacauugcaccu

SEQ ID NO: 218491 - RNA, 13 nt, Homo sapiens
cuuauuuccucau

SEQ ID NO: 218492 - RNA, 22 nt, Homo sapiens
uuaagacuuugguuauuuuacu

SEQ ID NO: 218493 - RNA, 13 nt, Homo sapiens
ggaacuccugacu

SEQ ID NO: 218494 - RNA, 17 nt, Homo sapiens
aucugugaugacauucc

SEQ ID NO: 218495 - RNA, 20 nt, Homo sapiens
cuguaauuccuaacuaucac

SEQ ID NO: 218496 - RNA, 13 nt, Homo sapiens
agaauguuuucaa

SEQ ID NO: 218497 - RNA, 23 nt, Homo sapiens
uguuuugccaauuugcacauuaa

SEQ ID NO: 218498 - RNA, 16 nt, Homo sapiens
cugcagggacagagca

SEQ ID NO: 218499 - RNA, 23 nt, Homo sapiens
uuggccugucuuuggauuguuaa

SEQ ID NO: 218500 - RNA, 23 nt, Homo sapiens
ucuccucucucuguaauaaacuc

SEQ ID NO: 218501 - RNA, 22 nt, Homo sapiens
ccuugcugauggugacauugca

SEQ ID NO: 218502 - RNA, 16 nt, Homo sapiens
uauccuagucauucuu

SEQ ID NO: 218503 - RNA, 16 nt, Homo sapiens
aauuugccuaauauga

SEQ ID NO: 218504 - RNA, 11 nt, Homo sapiens
gguagccacug

SEQ ID NO: 218505 - RNA, 14 nt, Homo sapiens
acgcacacugucug

SEQ ID NO: 218506 - RNA, 15 nt, Homo sapiens
agacauuauauagca

SEQ ID NO: 218507 - RNA, 22 nt, Homo sapiens
caguuuaucuguucauauggau

SEQ ID NO: 218508 - RNA, 19 nt, Homo sapiens
aguaaacgauaaaaugugg

SEQ ID NO: 218509 - RNA, 15 nt, Homo sapiens
gcagcgccagugaca

SEQ ID NO: 218510 - RNA, 17 nt, Homo sapiens
ucaaucuggauucauau

SEQ ID NO: 218511 - RNA, 16 nt, Homo sapiens
uacuuaauaaacugug

SEQ ID NO: 218512 - RNA, 16 nt, Homo sapiens
aaauagaugacauuga

SEQ ID NO: 218513 - RNA, 21 nt, Homo sapiens
aaucgcuccaccuugcagcuc

SEQ ID NO: 218514 - RNA, 15 nt, Homo sapiens
ucuguuuuguguacu

SEQ ID NO: 218515 - RNA, 19 nt, Homo sapiens
cugaggagccugcaacaug

SEQ ID NO: 218516 - RNA, 19 nt, Homo sapiens
ggauaucacuuccaugaca

SEQ ID NO: 218517 - RNA, 18 nt, Homo sapiens
uagcaggaagcugugaga

SEQ ID NO: 218518 - RNA, 13 nt, Homo sapiens
acacucgccagcu

SEQ ID NO: 218519 - RNA, 23 nt, Homo sapiens
uuucuuguaaggcauacugccuu

SEQ ID NO: 218520 - RNA, 23 nt, Homo sapiens
gucucccuuccuaugcuguucac

SEQ ID NO: 218521 - RNA, 22 nt, Homo sapiens
uuggguuuauuuggaaaggaau

SEQ ID NO: 218522 - RNA, 13 nt, Homo sapiens
uguccuaaugcuu

SEQ ID NO: 218523 - RNA, 20 nt, Homo sapiens
aaucugugaugacauucccu

SEQ ID NO: 218524 - RNA, 23 nt, Homo sapiens
guuuguucccugugucauuucaa

SEQ ID NO: 218525 - RNA, 17 nt, Homo sapiens
ugaaauaaggaaugaua

SEQ ID NO: 218526 - RNA, 16 nt, Homo sapiens
caaauguucacuggua

SEQ ID NO: 218527 - RNA, 17 nt, Homo sapiens
aggagcaugagugccgu

SEQ ID NO: 218528 - RNA, 23 nt, Homo sapiens
cugcaacaugccagccacuguga

SEQ ID NO: 218529 - RNA, 13 nt, Homo sapiens
gaugacuauucag

SEQ ID NO: 218530 - RNA, 22 nt, Homo sapiens
aaacgauaaaauguggauuaaa

SEQ ID NO: 218531 - RNA, 21 nt, Homo sapiens
cagagaagauucuuguauuua

SEQ ID NO: 218532 - RNA, 21 nt, Homo sapiens
uauucucagcagagugcuuua

SEQ ID NO: 218533 - RNA, 23 nt, Homo sapiens
gugcuuuaccaauugaaguaaaa

SEQ ID NO: 218534 - RNA, 23 nt, Homo sapiens
cacaaagcuuuugcauauugcau

SEQ ID NO: 218535 - RNA, 14 nt, Homo sapiens
agcaugagugccgu

SEQ ID NO: 218536 - RNA, 13 nt, Homo sapiens
ugaacaguaacau

SEQ ID NO: 218537 - RNA, 19 nt, Homo sapiens
cuuguaaggcauacugccu

SEQ ID NO: 218538 - RNA, 14 nt, Homo sapiens
uggccagaagucaa

SEQ ID NO: 218539 - RNA, 21 nt, Homo sapiens
guuuuacaguguuucuggcuu

SEQ ID NO: 218540 - RNA, 15 nt, Homo sapiens
ugauuucacagugug

SEQ ID NO: 218541 - RNA, 20 nt, Homo sapiens
uuaaauagaugacauugacu

SEQ ID NO: 218542 - RNA, 17 nt, Homo sapiens
cuguccuauuauauuca

SEQ ID NO: 218543 - RNA, 13 nt, Homo sapiens
gaugcugucuucg

SEQ ID NO: 218544 - RNA, 12 nt, Homo sapiens
agugacagucag

SEQ ID NO: 218545 - RNA, 14 nt, Homo sapiens
uaccugcacacugu

SEQ ID NO: 218546 - RNA, 23 nt, Homo sapiens
ucaguuguuauuuauugaaauga

SEQ ID NO: 218547 - RNA, 20 nt, Homo sapiens
cuuaagaaauuuguggaaaa

SEQ ID NO: 218548 - RNA, 18 nt, Homo sapiens
aaucgcuccaccuugcag

SEQ ID NO: 218549 - RNA, 17 nt, Homo sapiens
uuccacuugagugucaa

SEQ ID NO: 218550 - RNA, 16 nt, Homo sapiens
cugaacaucacagcuu

SEQ ID NO: 218551 - RNA, 23 nt, Homo sapiens
guacuauccaaucugugaugaca

SEQ ID NO: 218552 - RNA, 19 nt, Homo sapiens
uuacuuuuuggaaaagaau

SEQ ID NO: 218553 - RNA, 15 nt, Homo sapiens
acacugucuucugau

SEQ ID NO: 218554 - RNA, 22 nt, Homo sapiens
cuuccaugacauaagugcuauu

SEQ ID NO: 218555 - RNA, 24 nt, Homo sapiens
agucuggcagacuuucuucucuau

SEQ ID NO: 218556 - RNA, 14 nt, Homo sapiens
uggugacauugcac

SEQ ID NO: 218557 - RNA, 22 nt, Homo sapiens
cugaacuuuguggucgacauca

SEQ ID NO: 218558 - RNA, 22 nt, Homo sapiens
cuggauguacuauccaaucugu

SEQ ID NO: 218559 - RNA, 12 nt, Homo sapiens
aaacacauuaaa

SEQ ID NO: 218560 - RNA, 17 nt, Homo sapiens
guuuagaugaaugucag

SEQ ID NO: 218561 - RNA, 23 nt, Homo sapiens
guaacuguuuagaugaaugucag

SEQ ID NO: 218562 - RNA, 16 nt, Homo sapiens
caaugagaucauugug

SEQ ID NO: 218563 - RNA, 18 nt, Homo sapiens
aaaagacaacauaacuca

SEQ ID NO: 218564 - RNA, 14 nt, Homo sapiens
auaguccgucucug

SEQ ID NO: 218565 - RNA, 17 nt, Homo sapiens
gcggauccaagcaaaug

SEQ ID NO: 218566 - RNA, 21 nt, Homo sapiens
gcaaacuucagaguucuugcc

SEQ ID NO: 218567 - RNA, 18 nt, Homo sapiens
uauggggccaaaauagca

SEQ ID NO: 218568 - RNA, 12 nt, Homo sapiens
guuugcagagua

SEQ ID NO: 218569 - RNA, 15 nt, Homo sapiens
aauguaugugcacau

SEQ ID NO: 218570 - RNA, 16 nt, Homo sapiens
aacucauuucuagcag

SEQ ID NO: 218571 - RNA, 14 nt, Homo sapiens
ugaccuugcugaug

SEQ ID NO: 218572 - RNA, 18 nt, Homo sapiens
cugugcaucuagccucaa

SEQ ID NO: 218573 - RNA, 18 nt, Homo sapiens
gaaugcaaagaugaaggu

SEQ ID NO: 218574 - RNA, 18 nt, Homo sapiens
cagcucuccccuucucug

SEQ ID NO: 218575 - RNA, 20 nt, Homo sapiens
agcacaaagcagauccucaa

SEQ ID NO: 218576 - RNA, 20 nt, Homo sapiens
guggauuaaagugcccagca

SEQ ID NO: 218577 - RNA, 17 nt, Homo sapiens
caauugcugcuuguaca

SEQ ID NO: 218578 - RNA, 22 nt, Homo sapiens
gucaaccccaaguuaguucaau

SEQ ID NO: 218579 - RNA, 15 nt, Homo sapiens
ugcaccuggauguac

SEQ ID NO: 218580 - RNA, 22 nt, Homo sapiens
cuggaguuauugaagcagagug

SEQ ID NO: 218581 - RNA, 20 nt, Homo sapiens
auuauugucaaagaagucau

SEQ ID NO: 218582 - RNA, 22 nt, Homo sapiens
ugggugcuuaguaaguacuuaa

SEQ ID NO: 218583 - RNA, 19 nt, Homo sapiens
aacaugccagccacuguga

SEQ ID NO: 218584 - RNA, 13 nt, Homo sapiens
auguugcuaacag

SEQ ID NO: 218585 - RNA, 22 nt, Homo sapiens
uuuuuauauucucagcagagug

SEQ ID NO: 218586 - RNA, 11 nt, Homo sapiens
ggaaagcaaau

SEQ ID NO: 218587 - RNA, 15 nt, Homo sapiens
gagaagauucuugua

SEQ ID NO: 218588 - RNA, 13 nt, Homo sapiens
acugggaugaggu

SEQ ID NO: 218589 - RNA, 15 nt, Homo sapiens
uuaaauauuuugacu

SEQ ID NO: 218590 - RNA, 23 nt, Homo sapiens
uugcugcugauuuaaacacauua

SEQ ID NO: 218591 - RNA, 17 nt, Homo sapiens
ucucuguauuccuagaa

SEQ ID NO: 218592 - RNA, 22 nt, Homo sapiens
ugaggguauguuuuauauagca

SEQ ID NO: 218593 - RNA, 15 nt, Homo sapiens
uaaugcuugcugcug

SEQ ID NO: 218594 - RNA, 13 nt, Homo sapiens
auuugcacauuaa

SEQ ID NO: 218595 - RNA, 17 nt, Homo sapiens
auccuagucauucuucc

SEQ ID NO: 218596 - RNA, 15 nt, Homo sapiens
agggauuuucagccc

SEQ ID NO: 218597 - RNA, 13 nt, Homo sapiens
gaugcugugaaga

SEQ ID NO: 218598 - RNA, 22 nt, Homo sapiens
agagcaugaaaaucacacuguc

SEQ ID NO: 218599 - RNA, 20 nt, Homo sapiens
cacuggacugacgacuugag

SEQ ID NO: 218600 - RNA, 17 nt, Homo sapiens
guauagauguugcuaac

SEQ ID NO: 218601 - RNA, 18 nt, Homo sapiens
agaauauaaaaauaaagc

SEQ ID NO: 218602 - RNA, 21 nt, Homo sapiens
cuauuuauuugugagacugua

SEQ ID NO: 218603 - RNA, 18 nt, Homo sapiens
cagaauauugugccccau

SEQ ID NO: 218604 - RNA, 16 nt, Homo sapiens
auaaugucccuucaca

SEQ ID NO: 218605 - RNA, 12 nt, Homo sapiens
gucaacauuucu

SEQ ID NO: 218606 - RNA, 15 nt, Homo sapiens
agucucccuuccuau

SEQ ID NO: 218607 - RNA, 18 nt, Homo sapiens
uuaaacucugagugcaaa

SEQ ID NO: 218608 - RNA, 20 nt, Homo sapiens
gguggggguaaggugcaucu

SEQ ID NO: 218609 - RNA, 22 nt, Homo sapiens
uagaaaaggccuucuucccaau

SEQ ID NO: 218610 - RNA, 20 nt, Homo sapiens
caggaagcugugagagcagu

SEQ ID NO: 218611 - RNA, 21 nt, Homo sapiens
aagggauuuucagcccucaga

SEQ ID NO: 218612 - RNA, 16 nt, Homo sapiens
uucaguuugcagagua

SEQ ID NO: 218613 - RNA, 20 nt, Homo sapiens
ucugacuauaaccuuguucc

SEQ ID NO: 218614 - RNA, 17 nt, Homo sapiens
uauagcaagacauuaua

SEQ ID NO: 218615 - RNA, 21 nt, Homo sapiens
gacagagccccacccucagau

SEQ ID NO: 218616 - RNA, 23 nt, Homo sapiens
guauuccuagaaacugacacaug

SEQ ID NO: 218617 - RNA, 15 nt, Homo sapiens
auuugugagacugua

SEQ ID NO: 218618 - RNA, 15 nt, Homo sapiens
cuauuauauucauuc

SEQ ID NO: 218619 - RNA, 13 nt, Homo sapiens
cugugucauuuca

SEQ ID NO: 218620 - RNA, 23 nt, Homo sapiens
caucaaucuaaagauacaguguc

SEQ ID NO: 218621 - RNA, 13 nt, Homo sapiens
uugaagauucuau

SEQ ID NO: 218622 - RNA, 15 nt, Homo sapiens
cuuuaagaacuaaaa

SEQ ID NO: 218623 - RNA, 12 nt, Homo sapiens
cccuucucugua

SEQ ID NO: 218624 - RNA, 17 nt, Homo sapiens
aaaaauaaagcacuuau

SEQ ID NO: 218625 - RNA, 22 nt, Homo sapiens
ugucauuucaaacagucucccu

SEQ ID NO: 218626 - RNA, 17 nt, Homo sapiens
cuagaaacugacacaug

SEQ ID NO: 218627 - RNA, 12 nt, Homo sapiens
uccaaucuguga

SEQ ID NO: 218628 - RNA, 23 nt, Homo sapiens
acccaguguuuuaggagcaugag

SEQ ID NO: 218629 - RNA, 12 nt, Homo sapiens
uugaaaugucaa

SEQ ID NO: 218630 - RNA, 14 nt, Homo sapiens
gcuuagaacaaagg

SEQ ID NO: 218631 - RNA, 12 nt, Homo sapiens
uuggcccaggau

SEQ ID NO: 218632 - RNA, 17 nt, Homo sapiens
caggaaauccuugcacc

SEQ ID NO: 218633 - RNA, 20 nt, Homo sapiens
ggccagaagucaaggcuuag

SEQ ID NO: 218634 - RNA, 14 nt, Homo sapiens
gagucuacagagaa

SEQ ID NO: 218635 - RNA, 23 nt, Homo sapiens
uagcaggaagcugugagagcagu

SEQ ID NO: 218636 - RNA, 20 nt, Homo sapiens
uuaccccucacaauccuugc

SEQ ID NO: 218637 - RNA, 22 nt, Homo sapiens
uucuggaugaaugcccagugag

SEQ ID NO: 218638 - RNA, 14 nt, Homo sapiens
ggagccugcaacau

SEQ ID NO: 218639 - RNA, 18 nt, Homo sapiens
gauguaaaacugaacuuc

SEQ ID NO: 218640 - RNA, 16 nt, Homo sapiens
uaaagugcccagcaca

SEQ ID NO: 218641 - RNA, 16 nt, Homo sapiens
gaaaaucacacugucu

SEQ ID NO: 218642 - RNA, 16 nt, Homo sapiens
uaaacauuucauuucc

SEQ ID NO: 218643 - RNA, 19 nt, Homo sapiens
uguguggucaacauuucuc

SEQ ID NO: 218644 - RNA, 23 nt, Homo sapiens
guaauuccuaacuaucacugguu

SEQ ID NO: 218645 - RNA, 14 nt, Homo sapiens
gaaggaugcugucu

SEQ ID NO: 218646 - RNA, 11 nt, Homo sapiens
caaauguucuc

SEQ ID NO: 218647 - RNA, 17 nt, Homo sapiens
uuggauguaaaacugaa

SEQ ID NO: 218648 - RNA, 19 nt, Homo sapiens
gauaucugcagggacagag

SEQ ID NO: 218649 - RNA, 18 nt, Homo sapiens
uuauccuagucauucuuc

SEQ ID NO: 218650 - RNA, 12 nt, Homo sapiens
uucaguuugcag

SEQ ID NO: 218651 - RNA, 19 nt, Homo sapiens
uucucuauuucuggaugaa

SEQ ID NO: 218652 - RNA, 21 nt, Homo sapiens
gcucaguagucagacuggaua

SEQ ID NO: 218653 - RNA, 15 nt, Influenza B virus
uuuuccuuuacugua

SEQ ID NO: 218654 - RNA, 17 nt, Influenza B virus
uuuuauuugaacaguug

SEQ ID NO: 218655 - RNA, 21 nt, Influenza B virus
uuguaaucaaugucagugaau

SEQ ID NO: 218656 - RNA, 18 nt, Influenza B virus
uugucaccauuacaaaga

SEQ ID NO: 218657 - RNA, 15 nt, Influenza B virus
ucuguucuaaacccu

SEQ ID NO: 218658 - RNA, 16 nt, Influenza B virus
ucuuacuaugcauuua

SEQ ID NO: 218659 - RNA, 15 nt, Influenza B virus
ucauuugcuugucac

SEQ ID NO: 218660 - RNA, 20 nt, Influenza B virus
uccuuuacuguagugcucau

SEQ ID NO: 218661 - RNA, 16 nt, Influenza B virus
ucagcucuccauuuca

SEQ ID NO: 218662 - RNA, 18 nt, Influenza B virus
ucagugaauaaaacugga

SEQ ID NO: 218663 - RNA, 23 nt, Influenza B virus
uggucaaaauaaaauauggagaa

SEQ ID NO: 218664 - RNA, 23 nt, Influenza B virus
ugcagacacuuugcucugaccca

SEQ ID NO: 218665 - RNA, 20 nt, Influenza B virus
uggacaauagggcauuugaa

SEQ ID NO: 218666 - RNA, 16 nt, Influenza B virus
uggaagaauugcaaug

SEQ ID NO: 218667 - RNA, 21 nt, Influenza B virus
uggaaguauugggugaccaca

SEQ ID NO: 218668 - RNA, 21 nt, Influenza B virus
uuggagguggaagaauugcaa

SEQ ID NO: 218669 - RNA, 15 nt, Influenza B virus
uugaugauaguauau

SEQ ID NO: 218670 - RNA, 20 nt, Influenza B virus
uucuuucauuuuaucagcuc

SEQ ID NO: 218671 - RNA, 15 nt, Influenza B virus
uuaagcaaauuguaa

SEQ ID NO: 218672 - RNA, 20 nt, Influenza B virus
augcagacacuuugcucuga

SEQ ID NO: 218673 - RNA, 12 nt, Influenza B virus
augcucuuguua

SEQ ID NO: 218674 - RNA, 22 nt, Influenza B virus
auuuuaucagcucuccauuuca

SEQ ID NO: 218675 - RNA, 19 nt, Influenza B virus
auuucuuacuaugcauuua

SEQ ID NO: 218676 - RNA, 19 nt, Influenza B virus
caacauccuaagaacacaa

SEQ ID NO: 218677 - RNA, 20 nt, Influenza B virus
caaauaaggaauccaaauaa

SEQ ID NO: 218678 - RNA, 19 nt, Influenza B virus
caagaaagugccugcaauu

SEQ ID NO: 218679 - RNA, 16 nt, Influenza B virus
caauagggcauuugaa

SEQ ID NO: 218680 - RNA, 16 nt, Influenza B virus
cagugaauaaaacugg

SEQ ID NO: 218681 - RNA, 16 nt, Influenza B virus
cagcucuccauuucau

SEQ ID NO: 218682 - RNA, 17 nt, Influenza B virus
cagacacuuugcucuga

SEQ ID NO: 218683 - RNA, 13 nt, Influenza B virus
ccacauggcagcu

SEQ ID NO: 218684 - RNA, 18 nt, Influenza B virus
cauuugcuugucaccauu

SEQ ID NO: 218685 - RNA, 21 nt, Influenza B virus
aguuguucuuacuagauuuaa

SEQ ID NO: 218686 - RNA, 16 nt, Influenza B virus
aguacguuugggaugu

SEQ ID NO: 218687 - RNA, 16 nt, Influenza B virus
aucaaugucagugaau

SEQ ID NO: 218688 - RNA, 18 nt, Influenza B virus
acuugaaaauacaaauaa

SEQ ID NO: 218689 - RNA, 20 nt, Influenza B virus
acuugaaaauacaaauaagg

SEQ ID NO: 218690 - RNA, 20 nt, Influenza B virus
acguuauugaaaaaugcucu

SEQ ID NO: 218691 - RNA, 23 nt, Influenza B virus
acaauuaccaaaaggaaauccaa

SEQ ID NO: 218692 - RNA, 18 nt, Influenza B virus
acaaauaaggaauccaaa

SEQ ID NO: 218693 - RNA, 13 nt, Influenza B virus
acaauggaacaag

SEQ ID NO: 218694 - RNA, 14 nt, Influenza B virus
gcucuccauuucau

SEQ ID NO: 218695 - RNA, 18 nt, Influenza B virus
guauugggugaccacaua

SEQ ID NO: 218696 - RNA, 21 nt, Influenza B virus
guauuucuuacuaugcauuua

SEQ ID NO: 218697 - RNA, 21 nt, Influenza B virus
uagugcucauuugcuugucac

SEQ ID NO: 218698 - RNA, 13 nt, Influenza B virus
uacaauggaacaa

SEQ ID NO: 218699 - RNA, 21 nt, Influenza B virus
uaaggaggcaauaaacagaga

SEQ ID NO: 218700 - RNA, 19 nt, Influenza B virus
guguuuuccuuuacuguag

SEQ ID NO: 218701 - RNA, 22 nt, Influenza B virus
guucuaaacccuuuguuccuau

SEQ ID NO: 218702 - RNA, 18 nt, Influenza B virus
guugcuuguggaccaaaa

SEQ ID NO: 218703 - RNA, 20 nt, Influenza B virus
guuuacucuuauugaaauaa

SEQ ID NO: 218704 - RNA, 12 nt, Influenza B virus
uaaaaauccucu

SEQ ID NO: 218705 - RNA, 14 nt, Influenza B virus
uaaaaauccucuug

SEQ ID NO: 218706 - RNA, 22 nt, Influenza B virus
uaaaaauccucuuguuacuacu

SEQ ID NO: 218707 - RNA, 17 nt, Influenza B virus
ccuaagaacacaagaaa

SEQ ID NO: 218708 - RNA, 13 nt, Influenza B virus
gacaaugaugcau

SEQ ID NO: 218709 - RNA, 14 nt, Influenza B virus
gacaaugaugcauu

SEQ ID NO: 218710 - RNA, 14 nt, Influenza B virus
gauacuacaaugga

SEQ ID NO: 218711 - RNA, 19 nt, Influenza B virus
gaucaaaggaaacucagcu

SEQ ID NO: 218712 - RNA, 21 nt, Influenza B virus
gaucaaaggaaacucagcucc

SEQ ID NO: 218713 - RNA, 15 nt, Influenza B virus
cuuuacuguagugcu

SEQ ID NO: 218714 - RNA, 21 nt, Influenza B virus
cuguagugcucauuugcuugu

SEQ ID NO: 218715 - RNA, 12 nt, Influenza B virus
gaaacaguuuug

SEQ ID NO: 218716 - RNA, 23 nt, Influenza B virus
gaaacguuauugaaaaaugcucu

SEQ ID NO: 218717 - RNA, 16 nt, Influenza B virus
gaaacaagcugaggca

SEQ ID NO: 218718 - RNA, 18 nt, Influenza B virus
gacaacauggaaguauug

SEQ ID NO: 218719 - RNA, 18 nt, Influenza B virus
gaagcauauacugacaca

SEQ ID NO: 218720 - RNA, 19 nt, Influenza B virus
gaaaggacagaaacaagcu

SEQ ID NO: 218721 - RNA, 24 nt, Influenza B virus
gaagaaaauacucucugacaacau

SEQ ID NO: 218722 - RNA, 17 nt, Influenza B virus
gaagaacuuuaucucuu

SEQ ID NO: 218723 - RNA, 13 nt, Influenza B virus
aaagaaacaauga

SEQ ID NO: 218724 - RNA, 18 nt, Influenza B virus
gaauugcaaugagcccaa

SEQ ID NO: 218725 - RNA, 20 nt, Influenza B virus
gaaaaaaggcucguguuucu

SEQ ID NO: 218726 - RNA, 20 nt, Influenza B virus
gaaaacuccauuuuccacau

SEQ ID NO: 218727 - RNA, 20 nt, Influenza B virus
gagaaccuuuuguugcuugu

SEQ ID NO: 218728 - RNA, 21 nt, Influenza B virus
aaauacaaauaaggaauccaa

SEQ ID NO: 218729 - RNA, 22 nt, Influenza B virus
gcaauaaaauagacacuauggc

SEQ ID NO: 218730 - RNA, 21 nt, Influenza B virus
gcucugacccauuaugcagcu

SEQ ID NO: 218731 - RNA, 12 nt, Influenza B virus
gcucguguuucu

SEQ ID NO: 218732 - RNA, 15 nt, Influenza B virus
gcucuuguuacuacu

SEQ ID NO: 218733 - RNA, 15 nt, Influenza B virus
cauagcgcucaauuu

SEQ ID NO: 218734 - RNA, 19 nt, Influenza B virus
cauauacugacacauauca

SEQ ID NO: 218735 - RNA, 16 nt, Influenza B virus
cauauacugacacaua

SEQ ID NO: 218736 - RNA, 18 nt, Influenza B virus
ccaaauaaggaggcaaua

SEQ ID NO: 218737 - RNA, 22 nt, Influenza B virus
ccaacuguggaaaacuccauuu

SEQ ID NO: 218738 - RNA, 13 nt, Influenza B virus
ccaagccaaagaa

SEQ ID NO: 218739 - RNA, 18 nt, Influenza B virus
cuacaauggaacaagaaa

SEQ ID NO: 218740 - RNA, 16 nt, Influenza B virus
cuaagaacacaagaaa

SEQ ID NO: 218741 - RNA, 17 nt, Influenza B virus
uccugacaaugaugcau

SEQ ID NO: 218742 - RNA, 17 nt, Influenza B virus
uauggcugugacuguuu

SEQ ID NO: 218743 - RNA, 17 nt, Influenza B virus
uaucagcucuccauuuc

SEQ ID NO: 218744 - RNA, 18 nt, Influenza B virus
uaucauuccuaugcacac

SEQ ID NO: 218745 - RNA, 17 nt, Influenza B virus
uaucggaguugaugguc

SEQ ID NO: 218746 - RNA, 18 nt, Influenza B virus
uauaucggaguugauggu

SEQ ID NO: 218747 - RNA, 15 nt, Influenza B virus
ucaaugucagugaau

SEQ ID NO: 218748 - RNA, 13 nt, Influenza B virus
ucaaauaaaaaga

SEQ ID NO: 218749 - RNA, 15 nt, Influenza B virus
uacugacacauauca

SEQ ID NO: 218750 - RNA, 16 nt, Influenza B virus
uacaugcggugcacaa

SEQ ID NO: 218751 - RNA, 23 nt, Influenza B virus
uaaaauagacacuauggcuguga

SEQ ID NO: 218752 - RNA, 20 nt, Influenza B virus
uaagcaaauuguaaucaaug

SEQ ID NO: 218753 - RNA, 17 nt, Influenza B virus
gucaauucugagacaca

SEQ ID NO: 218754 - RNA, 23 nt, Influenza B virus
guacguuugggauguggguguuu

SEQ ID NO: 218755 - RNA, 16 nt, Influenza B virus
aaggaaacucagcucc

SEQ ID NO: 218756 - RNA, 12 nt, Influenza B virus
aaggaaauccaa

SEQ ID NO: 218757 - RNA, 19 nt, Influenza B virus
aagccaaagaaacaaugaa

SEQ ID NO: 218758 - RNA, 16 nt, Influenza B virus
aauccucuuguuacua

SEQ ID NO: 218759 - RNA, 20 nt, Influenza B virus
aauaaaauauggagaagcau

SEQ ID NO: 218760 - RNA, 15 nt, Influenza B virus
aauaaaaauccucuu

SEQ ID NO: 218761 - RNA, 14 nt, Influenza B virus
uuggaucuguucua

SEQ ID NO: 218762 - RNA, 11 nt, Influenza B virus
uuguggaccaa

SEQ ID NO: 218763 - RNA, 23 nt, Influenza B virus
uuguggaccaaaagaaugcagac

SEQ ID NO: 218764 - RNA, 15 nt, Influenza B virus
uuguaucauuaucau

SEQ ID NO: 218765 - RNA, 16 nt, Influenza B virus
uuucaacugaugagau

SEQ ID NO: 218766 - RNA, 22 nt, Influenza B virus
uuuuccacauggcagcuuggag

SEQ ID NO: 218767 - RNA, 21 nt, Influenza B virus
ugaugagauaauaaaaauggg

SEQ ID NO: 218768 - RNA, 22 nt, Influenza B virus
uggaagaauugcaaugagccca

SEQ ID NO: 218769 - RNA, 22 nt, Influenza B virus
uguggaccaaaagaaugcagac

SEQ ID NO: 218770 - RNA, 15 nt, Influenza B virus
uguggguguuuacuc

SEQ ID NO: 218771 - RNA, 20 nt, Influenza B virus
ugguagagaauggacauaua

SEQ ID NO: 218772 - RNA, 17 nt, Influenza B virus
ugguagagaauggacau

SEQ ID NO: 218773 - RNA, 14 nt, Influenza B virus
uguugcuuguggac

SEQ ID NO: 218774 - RNA, 17 nt, Influenza B virus
uguuccacaaaacagua

SEQ ID NO: 218775 - RNA, 12 nt, Influenza B virus
auccaaauaagg

SEQ ID NO: 218776 - RNA, 15 nt, Influenza B virus
auccucuuguuacua

SEQ ID NO: 218777 - RNA, 14 nt, Influenza B virus
auaauaaaaauggg

SEQ ID NO: 218778 - RNA, 20 nt, Influenza B virus
auaaauguaaaaaaugcugu

SEQ ID NO: 218779 - RNA, 15 nt, Influenza B virus
agauaauaaaaaugg

SEQ ID NO: 218780 - RNA, 19 nt, Influenza B virus
aggcaucuaguaucaguca

SEQ ID NO: 218781 - RNA, 19 nt, Influenza B virus
agggcuuucaacugaugag

SEQ ID NO: 218782 - RNA, 13 nt, Influenza B virus
auugaugauagua

SEQ ID NO: 218783 - RNA, 18 nt, Influenza B virus
augguuggaucuguucua

SEQ ID NO: 218784 - RNA, 14 nt, Influenza B virus
caaaaggaaaucca

SEQ ID NO: 218785 - RNA, 21 nt, Influenza B virus
caaaaggaaauccaagccaaa

SEQ ID NO: 218786 - RNA, 18 nt, Influenza B virus
caacauccuaagaacaca

SEQ ID NO: 218787 - RNA, 21 nt, Influenza B virus
caauagggcauuugaaucaaa

SEQ ID NO: 218788 - RNA, 14 nt, Influenza B virus
aauccucuuguuac

SEQ ID NO: 218789 - RNA, 13 nt, Influenza B virus
aauugcaaugagc

SEQ ID NO: 218790 - RNA, 14 nt, Influenza B virus
aaugucagugaaua

SEQ ID NO: 218791 - RNA, 16 nt, Influenza B virus
aaaugcucuuguuacu

SEQ ID NO: 218792 - RNA, 18 nt, Influenza B virus
aaaggacagaaacaagcu

SEQ ID NO: 218793 - RNA, 21 nt, Influenza B virus
aaaggaaauccaagccaaaga

SEQ ID NO: 218794 - RNA, 15 nt, Influenza B virus
aaaggaaacucagcu

SEQ ID NO: 218795 - RNA, 20 nt, Influenza B virus
aaagaauugaugauaguaua

SEQ ID NO: 218796 - RNA, 18 nt, Influenza B virus
aaaauccucuuguuacua

SEQ ID NO: 218797 - RNA, 19 nt, Influenza B virus
aaaauccucuuguuacuac

SEQ ID NO: 218798 - RNA, 18 nt, Influenza B virus
aaaaugcucuuguuacua

SEQ ID NO: 218799 - RNA, 14 nt, Influenza B virus
aaauugggaaaaau

SEQ ID NO: 218800 - RNA, 17 nt, Influenza B virus
acuauggcugugacugu

SEQ ID NO: 218801 - RNA, 23 nt, Influenza B virus
acguuugggauguggguguuuac

SEQ ID NO: 218802 - RNA, 17 nt, Influenza B virus
aaaacaguaauagcuaa

SEQ ID NO: 218803 - RNA, 21 nt, Influenza B virus
ugaauacaugcggugcacaaa

SEQ ID NO: 218804 - RNA, 20 nt, Influenza B virus
ugaggcaucuaguaucaguc

SEQ ID NO: 218805 - RNA, 15 nt, Influenza B virus
ugccugcaauugcau

SEQ ID NO: 218806 - RNA, 22 nt, Influenza B virus
ucggaguugaugguccugacaa

SEQ ID NO: 218807 - RNA, 14 nt, Influenza B virus
ucuaaacccuuugu

SEQ ID NO: 218808 - RNA, 18 nt, Influenza B virus
ucuaaacccuuuguuccu

SEQ ID NO: 218809 - RNA, 16 nt, Influenza B virus
ucauuccuaugcacac

SEQ ID NO: 218810 - RNA, 11 nt, Influenza B virus
uccaagccaaa

SEQ ID NO: 218811 - RNA, 12 nt, Influenza B virus
uccaagccaaag

SEQ ID NO: 218812 - RNA, 23 nt, Influenza B virus
uccaagccaaagaaacaaugaag

SEQ ID NO: 218813 - RNA, 13 nt, Influenza B virus
uccucuuguuacu

SEQ ID NO: 218814 - RNA, 19 nt, Influenza B virus
uccgcaugccaugauggua

SEQ ID NO: 218815 - RNA, 11 nt, Influenza B virus
uuuacucuuau

SEQ ID NO: 218816 - RNA, 20 nt, Influenza B virus
uuggacaauagggcauuuga

SEQ ID NO: 218817 - RNA, 15 nt, Influenza B virus
uucauggcuuggaca

SEQ ID NO: 218818 - RNA, 14 nt, Influenza B virus
uuccuuuacuguag

SEQ ID NO: 218819 - RNA, 20 nt, Influenza B virus
uuccuauuuuauuugaacag

SEQ ID NO: 218820 - RNA, 22 nt, Influenza B virus
ugucuaugggguuauuggucau

SEQ ID NO: 218821 - RNA, 16 nt, Influenza B virus
uguaugaaaugaagga

SEQ ID NO: 218822 - RNA, 12 nt, Influenza B virus
uguagugcucau

SEQ ID NO: 218823 - RNA, 17 nt, Influenza B virus
uguagugcucauuugcu

SEQ ID NO: 218824 - RNA, 16 nt, Influenza B virus
uauugaaaaaugcucu

SEQ ID NO: 218825 - RNA, 14 nt, Influenza B virus
ucaauucugagaca

SEQ ID NO: 218826 - RNA, 14 nt, Influenza B virus
ucaaugucagugaa

SEQ ID NO: 218827 - RNA, 14 nt, Influenza B virus
ucaaaggaaacuca

SEQ ID NO: 218828 - RNA, 21 nt, Influenza B virus
uaaaauagacacuauggcugu

SEQ ID NO: 218829 - RNA, 22 nt, Influenza B virus
guaucauuaucauuacuggaaa

SEQ ID NO: 218830 - RNA, 15 nt, Influenza B virus
guagagaauggacau

SEQ ID NO: 218831 - RNA, 19 nt, Influenza B virus
ggggauacuacaauggaac

SEQ ID NO: 218832 - RNA, 16 nt, Influenza B virus
gguagagaauggacau

SEQ ID NO: 218833 - RNA, 12 nt, Influenza B virus
guaaacuugaaa

SEQ ID NO: 218834 - RNA, 15 nt, Influenza B virus
guaaaagaauugaug

SEQ ID NO: 218835 - RNA, 13 nt, Influenza B virus
gcucuuguuacua

SEQ ID NO: 218836 - RNA, 11 nt, Influenza B virus
gcuaacagcuc

SEQ ID NO: 218837 - RNA, 21 nt, Influenza B virus
ggaauccaaauaaggaggcaa

SEQ ID NO: 218838 - RNA, 17 nt, Influenza B virus
gcagugcuuaugaaugu

SEQ ID NO: 218839 - RNA, 14 nt, Influenza B virus
gcauagcgcucaau

SEQ ID NO: 218840 - RNA, 22 nt, Influenza B virus
gcagacacuuugcucugaccca

SEQ ID NO: 218841 - RNA, 16 nt, Influenza B virus
gaccacauaguaguug

SEQ ID NO: 218842 - RNA, 15 nt, Influenza B virus
gaccaaaagaaugca

SEQ ID NO: 218843 - RNA, 16 nt, Influenza B virus
gaaagugccugcaauu

SEQ ID NO: 218844 - RNA, 21 nt, Influenza B virus
cuuggacaauagggcauuuga

SEQ ID NO: 218845 - RNA, 18 nt, Influenza B virus
gaacaguuguucuuacua

SEQ ID NO: 218846 - RNA, 16 nt, Influenza B virus
cuucagauucuuucaa

SEQ ID NO: 218847 - RNA, 22 nt, Influenza B virus
cugaggcaucuaguaucaguca

SEQ ID NO: 218848 - RNA, 22 nt, Influenza B virus
cucugacccauuaugcagcuca

SEQ ID NO: 218849 - RNA, 22 nt, Influenza B virus
cuaguaucagucaaauugggaa

SEQ ID NO: 218850 - RNA, 18 nt, Influenza B virus
cuaaacccuuuguuccua

SEQ ID NO: 218851 - RNA, 21 nt, Influenza B virus
auuugcuugucaccauuacaa

SEQ ID NO: 218852 - RNA, 22 nt, Influenza B virus
auuucauggcuuggacaauagg

SEQ ID NO: 218853 - RNA, 21 nt, Influenza B virus
auuguuucugaaaaaugcucu

SEQ ID NO: 218854 - RNA, 20 nt, Influenza B virus
caaauugggaaaaaucccaa

SEQ ID NO: 218855 - RNA, 18 nt, Influenza B virus
auucugagacacaauuac

SEQ ID NO: 218856 - RNA, 23 nt, Influenza B virus
auuggucaaaauaaaauauggag

SEQ ID NO: 218857 - RNA, 23 nt, Influenza B virus
augucuaugggguuauuggucau

SEQ ID NO: 218858 - RNA, 15 nt, Influenza B virus
cacuauggcugugac

SEQ ID NO: 218859 - RNA, 12 nt, Influenza B virus
caccauuacaaa

SEQ ID NO: 218860 - RNA, 12 nt, Influenza B virus
caaugagcccaa

SEQ ID NO: 218861 - RNA, 22 nt, Influenza B virus
caauaaacagagaggugucaau

SEQ ID NO: 218862 - RNA, 11 nt, Influenza B virus
ccuaugcacac

SEQ ID NO: 218863 - RNA, 13 nt, Influenza B virus
cagauucuuucaa

SEQ ID NO: 218864 - RNA, 14 nt, Influenza B virus
cauaguaguugaag

SEQ ID NO: 218865 - RNA, 19 nt, Influenza B virus
cauaguaguugaagggcuu

SEQ ID NO: 218866 - RNA, 19 nt, Influenza B virus
ccaaagaaacaaugaagaa

SEQ ID NO: 218867 - RNA, 12 nt, Influenza B virus
cauuuaagcaaa

SEQ ID NO: 218868 - RNA, 21 nt, Influenza B virus
auaaaaauccucuuguuacua

SEQ ID NO: 218869 - RNA, 20 nt, Influenza B virus
aguaguugaagggcuuucaa

SEQ ID NO: 218870 - RNA, 16 nt, Influenza B virus
agggcauagcgcucaa

SEQ ID NO: 218871 - RNA, 16 nt, Influenza B virus
agcucccuugauaaua

SEQ ID NO: 218872 - RNA, 19 nt, Influenza B virus
auccuaagaacacaagaaa

SEQ ID NO: 218873 - RNA, 19 nt, Influenza B virus
auccaaauaaggaggcaau

SEQ ID NO: 218874 - RNA, 12 nt, Influenza B virus
auccucuuguua

SEQ ID NO: 218875 - RNA, 21 nt, Influenza B virus
auacuacaauggaacaagaaa

SEQ ID NO: 218876 - RNA, 14 nt, Influenza B virus
acacuauggcugug

SEQ ID NO: 218877 - RNA, 19 nt, Influenza B virus
agaaccuuuuguugcuugu

SEQ ID NO: 218878 - RNA, 15 nt, Influenza B virus
agacacaauuaccaa

SEQ ID NO: 218879 - RNA, 19 nt, Influenza B virus
agacacuauggcugugacu

SEQ ID NO: 218880 - RNA, 16 nt, Influenza B virus
agacacuuugcucuga

SEQ ID NO: 218881 - RNA, 13 nt, Influenza B virus
acuguagugcuca

SEQ ID NO: 218882 - RNA, 14 nt, Influenza B virus
acuguagugcucau

SEQ ID NO: 218883 - RNA, 24 nt, Influenza B virus
aaaacuccauuuuccacauggcag

SEQ ID NO: 218884 - RNA, 16 nt, Influenza B virus
aaaauaaaauauggag

SEQ ID NO: 218885 - RNA, 20 nt, Influenza B virus
aauacaaauaaggaauccaa

SEQ ID NO: 218886 - RNA, 21 nt, Influenza B virus
aacaguuuuggagguggaaga

SEQ ID NO: 218887 - RNA, 24 nt, Influenza B virus
aacuccauuuuccacauggcagcu

SEQ ID NO: 218888 - RNA, 21 nt, Influenza B virus
aagagggguaaacuugaaaau

SEQ ID NO: 218889 - RNA, 13 nt, Influenza B virus
aagaaacaaugaa

SEQ ID NO: 218890 - RNA, 18 nt, Influenza B virus
aacacaagaaagugccug

SEQ ID NO: 218891 - RNA, 16 nt, Influenza B virus
aaauccucuuguuacu

SEQ ID NO: 218892 - RNA, 18 nt, Influenza B virus
aaauaaggaauccaaaua

SEQ ID NO: 218893 - RNA, 15 nt, Influenza B virus
aaauaaaaauccucu

SEQ ID NO: 218894 - RNA, 17 nt, Influenza B virus
agacacaauuaccaaaa

SEQ ID NO: 218895 - RNA, 13 nt, Influenza B virus
agauucuuucaau

SEQ ID NO: 218896 - RNA, 17 nt, Influenza B virus
agaucaaaggaaacuca

SEQ ID NO: 218897 - RNA, 20 nt, Influenza B virus
agagaaccuuuuguugcuug

SEQ ID NO: 218898 - RNA, 17 nt, Influenza B virus
accaaaagaaugcagac

SEQ ID NO: 218899 - RNA, 15 nt, Influenza B virus
acaugcggugcacaa

SEQ ID NO: 218900 - RNA, 16 nt, Influenza B virus
acaugcggugcacaaa

SEQ ID NO: 218901 - RNA, 22 nt, Influenza B virus
auuguaaucaaugucagugaau

SEQ ID NO: 218902 - RNA, 20 nt, Influenza B virus
auuuuauuugaacaguuguu

SEQ ID NO: 218903 - RNA, 24 nt, Influenza B virus
caaagaaacguuauugaaaaaugc

SEQ ID NO: 218904 - RNA, 15 nt, Influenza B virus
caaauaaggaaucca

SEQ ID NO: 218905 - RNA, 16 nt, Influenza B virus
caaauaaggaauccaa

SEQ ID NO: 218906 - RNA, 24 nt, Influenza B virus
cacuuugcucugacccauuaugca

SEQ ID NO: 218907 - RNA, 22 nt, Influenza B virus
caauuaccaaaaggaaauccaa

SEQ ID NO: 218908 - RNA, 18 nt, Influenza B virus
cacuauggcugugacugu

SEQ ID NO: 218909 - RNA, 23 nt, Influenza B virus
cacuauggcugugacuguuucag

SEQ ID NO: 218910 - RNA, 17 nt, Influenza B virus
aggaaauccaagccaaa

SEQ ID NO: 218911 - RNA, 16 nt, Influenza B virus
agcauauacugacaca

SEQ ID NO: 218912 - RNA, 18 nt, Influenza B virus
aggugucaauucugagac

SEQ ID NO: 218913 - RNA, 22 nt, Influenza B virus
aggugucaauucugagacacaa

SEQ ID NO: 218914 - RNA, 12 nt, Influenza B virus
uuccacauggca

SEQ ID NO: 218915 - RNA, 11 nt, Influenza B virus
uucuuacuaga

SEQ ID NO: 218916 - RNA, 22 nt, Influenza B virus
uucugagacacaauuaccaaaa

SEQ ID NO: 218917 - RNA, 17 nt, Influenza B virus
uuauugaaaaaugcucu

SEQ ID NO: 218918 - RNA, 17 nt, Influenza B virus
uggaagaauugcaauga

SEQ ID NO: 218919 - RNA, 14 nt, Influenza B virus
uggcugugacuguu

SEQ ID NO: 218920 - RNA, 15 nt, Influenza B virus
uguaaaaaaugcugu

SEQ ID NO: 218921 - RNA, 18 nt, Influenza B virus
ugguuggaucuguucuaa

SEQ ID NO: 218922 - RNA, 20 nt, Influenza B virus
uuguuucugaaaaaugcucu

SEQ ID NO: 218923 - RNA, 23 nt, Influenza B virus
uuuuccuuuacuguagugcucau

SEQ ID NO: 218924 - RNA, 18 nt, Influenza B virus
uuucuuacuaugcauuua

SEQ ID NO: 218925 - RNA, 21 nt, Influenza B virus
aacauuguaugaaaugaagga

SEQ ID NO: 218926 - RNA, 22 nt, Influenza B virus
aagaaaauacucucugacaaca

SEQ ID NO: 218927 - RNA, 16 nt, Influenza B virus
aagaacuuuaucucuu

SEQ ID NO: 218928 - RNA, 12 nt, Influenza B virus
aauggacauaua

SEQ ID NO: 218929 - RNA, 13 nt, Influenza B virus
aauccaagccaaa

SEQ ID NO: 218930 - RNA, 14 nt, Influenza B virus
aauccaagccaaag

SEQ ID NO: 218931 - RNA, 21 nt, Influenza B virus
aauccaaauaaggaggcaaua

SEQ ID NO: 218932 - RNA, 20 nt, Influenza B virus
aaugcagacacuuugcucug

SEQ ID NO: 218933 - RNA, 17 nt, Influenza B virus
aaugaugcauuggucaa

SEQ ID NO: 218934 - RNA, 21 nt, Influenza B virus
aauuaccaaaaggaaauccaa

SEQ ID NO: 218935 - RNA, 17 nt, Influenza B virus
aauugcaaugagcccaa

SEQ ID NO: 218936 - RNA, 19 nt, Influenza B virus
aauucugagacacaauuac

SEQ ID NO: 218937 - RNA, 22 nt, Influenza B virus
ucugaaaaaugcucuuguuacu

SEQ ID NO: 218938 - RNA, 19 nt, Influenza B virus
uccuauuuuauuugaacag

SEQ ID NO: 218939 - RNA, 14 nt, Influenza B virus
ugaaaugaaggaug

SEQ ID NO: 218940 - RNA, 18 nt, Influenza B virus
ugacaaugaugcauuggu

SEQ ID NO: 218941 - RNA, 22 nt, Influenza B virus
ugacacauaucauuccuaugca

SEQ ID NO: 218942 - RNA, 13 nt, Influenza B virus
ugaauaaaacugg

SEQ ID NO: 218943 - RNA, 14 nt, Influenza B virus
ugaagggcuuucaa

SEQ ID NO: 218944 - RNA, 22 nt, Influenza B virus
ucauuugcuugucaccauuaca

SEQ ID NO: 218945 - RNA, 18 nt, Influenza B virus
uccaaauaaggaggcaau

SEQ ID NO: 218946 - RNA, 15 nt, Influenza B virus
ucagauucuuucaau

SEQ ID NO: 218947 - RNA, 17 nt, Influenza B virus
gugcuuaugaauguaaa

SEQ ID NO: 218948 - RNA, 12 nt, Influenza B virus
guccugacaaug

SEQ ID NO: 218949 - RNA, 13 nt, Influenza B virus
uaaaaauccucuu

SEQ ID NO: 218950 - RNA, 17 nt, Influenza B virus
uaaaaaugggugaaaca

SEQ ID NO: 218951 - RNA, 17 nt, Influenza B virus
uagacacuauggcugug

SEQ ID NO: 218952 - RNA, 14 nt, Influenza B virus
uagggcauuugaau

SEQ ID NO: 218953 - RNA, 15 nt, Influenza B virus
uagugcucauuugcu

SEQ ID NO: 218954 - RNA, 18 nt, Influenza B virus
uaaucaaugucagugaau

SEQ ID NO: 218955 - RNA, 15 nt, Influenza B virus
aacaagcugaggcau

SEQ ID NO: 218956 - RNA, 20 nt, Influenza B virus
uacuaugcauuuaagcaaau

SEQ ID NO: 218957 - RNA, 15 nt, Influenza B virus
cguugaauacaugcg

SEQ ID NO: 218958 - RNA, 16 nt, Influenza B virus
cuaugcauuuaagcaa

SEQ ID NO: 218959 - RNA, 14 nt, Influenza B virus
cucuuguuacuacu

SEQ ID NO: 218960 - RNA, 21 nt, Influenza B virus
cugaugagauaauaaaaaugg

SEQ ID NO: 218961 - RNA, 19 nt, Influenza B virus
ccuuuacuguagugcucau

SEQ ID NO: 218962 - RNA, 14 nt, Influenza B virus
cauuugcuugucac

SEQ ID NO: 218963 - RNA, 21 nt, Influenza B virus
cauuugcuugucaccauuaca

SEQ ID NO: 218964 - RNA, 22 nt, Influenza B virus
cauggcuuggacaauagggcau

SEQ ID NO: 218965 - RNA, 16 nt, Influenza B virus
cauuaugcagcucagc

SEQ ID NO: 218966 - RNA, 22 nt, Influenza B virus
aaaauacaaauaaggaauccaa

SEQ ID NO: 218967 - RNA, 17 nt, Influenza B virus
ccacauaguaguugaag

SEQ ID NO: 218968 - RNA, 17 nt, Influenza B virus
gauuaagcccuguguuu

SEQ ID NO: 218969 - RNA, 15 nt, Influenza B virus
gauccgcaugccaug

SEQ ID NO: 218970 - RNA, 20 nt, Influenza B virus
gaauacaugcggugcacaaa

SEQ ID NO: 218971 - RNA, 16 nt, Influenza B virus
cuugucaccauuacaa

SEQ ID NO: 218972 - RNA, 16 nt, Influenza B virus
cuuuacuguagugcuc

SEQ ID NO: 218973 - RNA, 18 nt, Influenza B virus
gacacauaucauuccuau

SEQ ID NO: 218974 - RNA, 18 nt, Influenza B virus
gacaauagggcauuugaa

SEQ ID NO: 218975 - RNA, 21 nt, Influenza B virus
gacagaaacaagcugaggcau

SEQ ID NO: 218976 - RNA, 19 nt, Influenza B virus
gacacuuugcucugaccca

SEQ ID NO: 218977 - RNA, 21 nt, Influenza B virus
gacacuauggcugugacuguu

SEQ ID NO: 218978 - RNA, 16 nt, Influenza B virus
gacccauuaugcagcu

SEQ ID NO: 218979 - RNA, 14 nt, Influenza B virus
aaacguuauugaaa

SEQ ID NO: 218980 - RNA, 16 nt, Influenza B virus
aaaggcucguguuucu

SEQ ID NO: 218981 - RNA, 20 nt, Influenza B virus
gguccugacaaugaugcauu

SEQ ID NO: 218982 - RNA, 18 nt, Influenza B virus
gguucggagagaucaaag

SEQ ID NO: 218983 - RNA, 16 nt, Influenza B virus
gcucauuugcuuguca

SEQ ID NO: 218984 - RNA, 16 nt, Influenza B virus
gcauuugaaucaaaua

SEQ ID NO: 218985 - RNA, 13 nt, Homo sapiens
acaucauuucaag

SEQ ID NO: 218986 - RNA, 13 nt, Homo sapiens
cccuucucuguau

SEQ ID NO: 218987 - RNA, 16 nt, Homo sapiens
uucaaucuggauucau

SEQ ID NO: 218988 - RNA, 15 nt, Homo sapiens
aaaacuacauugaca

SEQ ID NO: 218989 - RNA, 14 nt, Homo sapiens
aggauuauugucaa

SEQ ID NO: 218990 - RNA, 13 nt, Homo sapiens
gaugacuauucag

SEQ ID NO: 218991 - RNA, 17 nt, Homo sapiens
aauauccaauugcugcu

SEQ ID NO: 218992 - RNA, 23 nt, Homo sapiens
uggauugugccuaauguguuuga

SEQ ID NO: 218993 - RNA, 15 nt, Homo sapiens
agucucccuuccuau

SEQ ID NO: 218994 - RNA, 14 nt, Homo sapiens
auuccuagaaacug

SEQ ID NO: 218995 - RNA, 18 nt, Homo sapiens
gucagggaaggugccucu

SEQ ID NO: 218996 - RNA, 16 nt, Homo sapiens
ucacacugucuucuga

SEQ ID NO: 218997 - RNA, 15 nt, Homo sapiens
uaaugcuugcugcug

SEQ ID NO: 218998 - RNA, 18 nt, Homo sapiens
uuauccuagucauucuuc

SEQ ID NO: 218999 - RNA, 20 nt, Homo sapiens
uaauuaaugucaguauuuca

SEQ ID NO: 219000 - RNA, 16 nt, Homo sapiens
caguagucagacugga

SEQ ID NO: 219001 - RNA, 16 nt, Homo sapiens
uuauauagcaguaaaa

SEQ ID NO: 219002 - RNA, 18 nt, Homo sapiens
cugccaauauccuaauaa

SEQ ID NO: 219003 - RNA, 21 nt, Homo sapiens
uuggguuaggaagaaaauaau

SEQ ID NO: 219004 - RNA, 16 nt, Homo sapiens
uucaguuugcagagua

SEQ ID NO: 219005 - RNA, 13 nt, Homo sapiens
caauuugcacauu

SEQ ID NO: 219006 - RNA, 15 nt, Homo sapiens
aacaguaacauagcu

SEQ ID NO: 219007 - RNA, 16 nt, Homo sapiens
ccuaacuaucacuggu

SEQ ID NO: 219008 - RNA, 20 nt, Homo sapiens
cacuggacugacgacuugag

SEQ ID NO: 219009 - RNA, 16 nt, Homo sapiens
cuagucauucuucccu

SEQ ID NO: 219010 - RNA, 14 nt, Homo sapiens
aauauugugcccca

SEQ ID NO: 219011 - RNA, 23 nt, Homo sapiens
ucacugguuugguucuggacuaa

SEQ ID NO: 219012 - RNA, 16 nt, Homo sapiens
auuugaaacacugguu

SEQ ID NO: 219013 - RNA, 20 nt, Homo sapiens
acacaugcugaacaucacag

SEQ ID NO: 219014 - RNA, 19 nt, Homo sapiens
uaauauccaauugcugcuu

SEQ ID NO: 219015 - RNA, 14 nt, Homo sapiens
guucccugugucau

SEQ ID NO: 219016 - RNA, 22 nt, Homo sapiens
uguaauaaacucauuucuagca

SEQ ID NO: 219017 - RNA, 14 nt, Homo sapiens
agcagagugcuuua

SEQ ID NO: 219018 - RNA, 15 nt, Homo sapiens
cuauuauauucauuc

SEQ ID NO: 219019 - RNA, 18 nt, Homo sapiens
uauggggccaaaauagca

SEQ ID NO: 219020 - RNA, 14 nt, Homo sapiens
gucauuauguuaau

SEQ ID NO: 219021 - RNA, 16 nt, Homo sapiens
uauccuagucauucuu

SEQ ID NO: 219022 - RNA, 16 nt, Homo sapiens
uucaacugaaguucua

SEQ ID NO: 219023 - RNA, 22 nt, Homo sapiens
gaugcugucuucguacugggaa

SEQ ID NO: 219024 - RNA, 12 nt, Homo sapiens
gguaugauuaac

SEQ ID NO: 219025 - RNA, 14 nt, Homo sapiens
ggagccugcaacau

SEQ ID NO: 219026 - RNA, 21 nt, Homo sapiens
uauucucagcagagugcuuua

SEQ ID NO: 219027 - RNA, 15 nt, Homo sapiens
uucagcccucagaau

SEQ ID NO: 219028 - RNA, 18 nt, Homo sapiens
gcagagugcuuuaccaau

SEQ ID NO: 219029 - RNA, 13 nt, Homo sapiens
uuaaaaaacagag

SEQ ID NO: 219030 - RNA, 16 nt, Homo sapiens
aauuugccuaauauga

SEQ ID NO: 219031 - RNA, 20 nt, Homo sapiens
ucaaagaagucauucuuuaa

SEQ ID NO: 219032 - RNA, 22 nt, Homo sapiens
ucuguauuccuagaaacugaca

SEQ ID NO: 219033 - RNA, 21 nt, Homo sapiens
cuuuauuucucucaucuguua

SEQ ID NO: 219034 - RNA, 23 nt, Homo sapiens
aguacuuaauaaacuguggugcu

SEQ ID NO: 219035 - RNA, 15 nt, Homo sapiens
gaauguaugugcaca

SEQ ID NO: 219036 - RNA, 11 nt, Homo sapiens
aacuccugacu

SEQ ID NO: 219037 - RNA, 14 nt, Homo sapiens
auaaccuuguucca

SEQ ID NO: 219038 - RNA, 22 nt, Homo sapiens
auugauugggcacaucauuuca

SEQ ID NO: 219039 - RNA, 17 nt, Homo sapiens
acgcacacugucugccc

SEQ ID NO: 219040 - RNA, 18 nt, Homo sapiens
uuugaagguagaauguuu

SEQ ID NO: 219041 - RNA, 21 nt, Homo sapiens
uggccaaugagaucauuguga

SEQ ID NO: 219042 - RNA, 22 nt, Homo sapiens
uccuuuuuuuuuuauccuaguc

SEQ ID NO: 219043 - RNA, 23 nt, Homo sapiens
ucaguuguuauuuauugaaauga

SEQ ID NO: 219044 - RNA, 14 nt, Homo sapiens
uuugcauauugcau

SEQ ID NO: 219045 - RNA, 15 nt, Homo sapiens
gaagauucuauguua

SEQ ID NO: 219046 - RNA, 18 nt, Homo sapiens
gauguaaaacugaacuuc

SEQ ID NO: 219047 - RNA, 22 nt, Homo sapiens
uugacagauugaauuugccuaa

SEQ ID NO: 219048 - RNA, 21 nt, Homo sapiens
guucuccagucauuauguuaa

SEQ ID NO: 219049 - RNA, 13 nt, Homo sapiens
auuucaacugaag

SEQ ID NO: 219050 - RNA, 13 nt, Homo sapiens
uucauuacuaaaa

SEQ ID NO: 219051 - RNA, 22 nt, Homo sapiens
cauuaaaugacucuucccucaa

SEQ ID NO: 219052 - RNA, 21 nt, Homo sapiens
agucauucuucccuaaucuuc

SEQ ID NO: 219053 - RNA, 14 nt, Homo sapiens
acgcacacugucug

SEQ ID NO: 219054 - RNA, 21 nt, Homo sapiens
uugugaaaaaauuuacuuuaa

SEQ ID NO: 219055 - RNA, 15 nt, Homo sapiens
caaguuaguucaauc

SEQ ID NO: 219056 - RNA, 14 nt, Homo sapiens
ugacacaugcugaa

SEQ ID NO: 219057 - RNA, 20 nt, Homo sapiens
agaaaaggccuucuucccaa

SEQ ID NO: 219058 - RNA, 19 nt, Homo sapiens
ggauaucacuuccaugaca

SEQ ID NO: 219059 - RNA, 12 nt, Homo sapiens
uugaaaugucaa

SEQ ID NO: 219060 - RNA, 19 nt, Homo sapiens
cagauugaauuugccuaau

SEQ ID NO: 219061 - RNA, 16 nt, Homo sapiens
cacaauccuugccaca

SEQ ID NO: 219062 - RNA, 19 nt, Homo sapiens
augacauucccugcuaaua

SEQ ID NO: 219063 - RNA, 20 nt, Homo sapiens
aacaugccagccacugugau

SEQ ID NO: 219064 - RNA, 15 nt, Homo sapiens
uucaaauguucucca

SEQ ID NO: 219065 - RNA, 23 nt, Homo sapiens
ugcaacaugccagccacugugau

SEQ ID NO: 219066 - RNA, 23 nt, Homo sapiens
agcaguuugguuucuagcaugaa

SEQ ID NO: 219067 - RNA, 20 nt, Homo sapiens
aaucugugaugacauucccu

SEQ ID NO: 219068 - RNA, 21 nt, Homo sapiens
cauucuucccuaaucuuccac

SEQ ID NO: 219069 - RNA, 14 nt, Homo sapiens
uuuauccuagucau

SEQ ID NO: 219070 - RNA, 20 nt, Homo sapiens
caaucuaaagauacaguguc

SEQ ID NO: 219071 - RNA, 12 nt, Homo sapiens
cugugaugacau

SEQ ID NO: 219072 - RNA, 12 nt, Homo sapiens
cagaugcacaug

SEQ ID NO: 219073 - RNA, 13 nt, Homo sapiens
gaauaaagagggu

SEQ ID NO: 219074 - RNA, 15 nt, Homo sapiens
aaugauuucacagug

SEQ ID NO: 219075 - RNA, 23 nt, Homo sapiens
guuuguucccugugucauuucaa

SEQ ID NO: 219076 - RNA, 15 nt, Homo sapiens
uauagauguugcuaa

SEQ ID NO: 219077 - RNA, 20 nt, Homo sapiens
uagcaaggcugugcaucuag

SEQ ID NO: 219078 - RNA, 15 nt, Homo sapiens
gaguuauugaagcag

SEQ ID NO: 219079 - RNA, 19 nt, Homo sapiens
agugcaaacuucagaguuc

SEQ ID NO: 219080 - RNA, 17 nt, Homo sapiens
ugaggugacuauucuga

SEQ ID NO: 219081 - RNA, 19 nt, Homo sapiens
ggagcccugucuccucucu

SEQ ID NO: 219082 - RNA, 16 nt, Homo sapiens
uuauugaagcagagug

SEQ ID NO: 219083 - RNA, 16 nt, Homo sapiens
aaauggccaaugagau

SEQ ID NO: 219084 - RNA, 18 nt, Homo sapiens
uaacucuaccugcacacu

SEQ ID NO: 219085 - RNA, 12 nt, Homo sapiens
uaugugcacauc

SEQ ID NO: 219086 - RNA, 19 nt, Homo sapiens
caccuggauguacuaucca

SEQ ID NO: 219087 - RNA, 23 nt, Homo sapiens
aacuucagagcaugaaaaucaca

SEQ ID NO: 219088 - RNA, 23 nt, Homo sapiens
aguaaguacuuaauaaacugugg

SEQ ID NO: 219089 - RNA, 21 nt, Homo sapiens
aaucgcuccaccuugcagcuc

SEQ ID NO: 219090 - RNA, 20 nt, Homo sapiens
aaccuaggcaaagaguauau

SEQ ID NO: 219091 - RNA, 16 nt, Homo sapiens
cucaauaaacauuuca

SEQ ID NO: 219092 - RNA, 14 nt, Homo sapiens
gaaaugauuucaca

SEQ ID NO: 219093 - RNA, 22 nt, Homo sapiens
gggaaagggauuuucagcccuc

SEQ ID NO: 219094 - RNA, 12 nt, Homo sapiens
ugcuuggaugua

SEQ ID NO: 219095 - RNA, 16 nt, Homo sapiens
acaaagcagauccuca

SEQ ID NO: 219096 - RNA, 21 nt, Homo sapiens
cuuagacccucaugcugccaa

SEQ ID NO: 219097 - RNA, 17 nt, Homo sapiens
uccuagaaacugacaca

SEQ ID NO: 219098 - RNA, 20 nt, Homo sapiens
aguacuuaauaaacuguggu

SEQ ID NO: 219099 - RNA, 13 nt, Homo sapiens
ugagacuguguug

SEQ ID NO: 219100 - RNA, 22 nt, Homo sapiens
gugaugacauucccugcuaaua

SEQ ID NO: 219101 - RNA, 22 nt, Homo sapiens
gcuagaaaaggccuucuuccca

SEQ ID NO: 219102 - RNA, 19 nt, Homo sapiens
acccucagaugcacaugag

SEQ ID NO: 219103 - RNA, 17 nt, Homo sapiens
ugggauaucacuuccau

SEQ ID NO: 219104 - RNA, 23 nt, Homo sapiens
uucccaauagcaaggcugugcau

SEQ ID NO: 219105 - RNA, 22 nt, Homo sapiens
ugaccuugcugauggugacauu

SEQ ID NO: 219106 - RNA, 16 nt, Homo sapiens
agaaacugacacaugc

SEQ ID NO: 219107 - RNA, 19 nt, Homo sapiens
uccacauuuguuuugccaa

SEQ ID NO: 219108 - RNA, 23 nt, Homo sapiens
cacaaagcuuuugcauauugcau

SEQ ID NO: 219109 - RNA, 22 nt, Homo sapiens
gcugcaguuuuuuuccuucaag

SEQ ID NO: 219110 - RNA, 23 nt, Homo sapiens
ucuccucucucuguaauaaacuc

SEQ ID NO: 219111 - RNA, 21 nt, Homo sapiens
cuuuaagcagcgccagugaca

SEQ ID NO: 219112 - RNA, 22 nt, Homo sapiens
ccuugcugauggugacauugca

SEQ ID NO: 219113 - RNA, 23 nt, Homo sapiens
ugggauaucacuuccaugacaua

SEQ ID NO: 219114 - RNA, 13 nt, Homo sapiens
ucacuuccaugac

SEQ ID NO: 219115 - RNA, 13 nt, Homo sapiens
auguucacuggua

SEQ ID NO: 219116 - RNA, 17 nt, Homo sapiens
aaugauuucacagugug

SEQ ID NO: 219117 - RNA, 16 nt, Homo sapiens
uuccaguaaugagcuu

SEQ ID NO: 219118 - RNA, 22 nt, Homo sapiens
gaccuugcugauggugacauug

SEQ ID NO: 219119 - RNA, 20 nt, Homo sapiens
uuggcccaggauuauuguca

SEQ ID NO: 219120 - RNA, 21 nt, Homo sapiens
gcaaacuucagaguucuugcc

SEQ ID NO: 219121 - RNA, 20 nt, Homo sapiens
cagcuagaaaaggccuucuu

SEQ ID NO: 219122 - RNA, 22 nt, Homo sapiens
aacagcaacacaaagcuuuugc

SEQ ID NO: 219123 - RNA, 12 nt, Homo sapiens
uuagguugugaa

SEQ ID NO: 219124 - RNA, 13 nt, Homo sapiens
cuugccacagugu

SEQ ID NO: 219125 - RNA, 14 nt, Homo sapiens
cugauggugacauu

SEQ ID NO: 219126 - RNA, 23 nt, Homo sapiens
aaugauuucacagugugugguca

SEQ ID NO: 219127 - RNA, 21 nt, Homo sapiens
uuuaccccucacaauccuugc

SEQ ID NO: 219128 - RNA, 14 nt, Homo sapiens
gcgccagugacagu

SEQ ID NO: 219129 - RNA, 13 nt, Homo sapiens
cucagaugcacau

SEQ ID NO: 219130 - RNA, 21 nt, Homo sapiens
gagcaguuugguuucuagcau

SEQ ID NO: 219131 - RNA, 22 nt, Homo sapiens
ccuuggccaugggucccauucu

SEQ ID NO: 219132 - RNA, 17 nt, Homo sapiens
auauccaauugcugcuu

SEQ ID NO: 219133 - RNA, 13 nt, Homo sapiens
caacucuauuuaa

SEQ ID NO: 219134 - RNA, 14 nt, Homo sapiens
uucagcccucagaa

SEQ ID NO: 219135 - RNA, 18 nt, Homo sapiens
acuucagagcaugaaaau

SEQ ID NO: 219136 - RNA, 17 nt, Homo sapiens
uauccuagucauucuuc

SEQ ID NO: 219137 - RNA, 15 nt, Homo sapiens
agugcuauugcagag

SEQ ID NO: 219138 - RNA, 14 nt, Homo sapiens
aucuguuacacaaa

SEQ ID NO: 219139 - RNA, 18 nt, Homo sapiens
ggaagcugugagagcagu

SEQ ID NO: 219140 - RNA, 19 nt, Homo sapiens
ugauggugacauugcaccu

SEQ ID NO: 219141 - RNA, 22 nt, Homo sapiens
gcccucagaaucgcuccaccuu

SEQ ID NO: 219142 - RNA, 22 nt, Homo sapiens
guaauuccuaacuaucacuggu

SEQ ID NO: 219143 - RNA, 17 nt, Homo sapiens
cucuccccuucucugua

SEQ ID NO: 219144 - RNA, 22 nt, Homo sapiens
aauaauuagguauuuucuccaa

SEQ ID NO: 219145 - RNA, 17 nt, Homo sapiens
ucugugaugacauuccc

SEQ ID NO: 219146 - RNA, 11 nt, Homo sapiens
gguagccacug

SEQ ID NO: 219147 - RNA, 16 nt, Homo sapiens
caaauguucacuggua

SEQ ID NO: 219148 - RNA, 18 nt, Homo sapiens
uaggagcaugagugccgu

SEQ ID NO: 219149 - RNA, 23 nt, Homo sapiens
cugcaacaugccagccacuguga

SEQ ID NO: 219150 - RNA, 17 nt, Homo sapiens
uggaaaggaaugcaaag

SEQ ID NO: 219151 - RNA, 19 nt, Homo sapiens
augguaguuuuacaguguu

SEQ ID NO: 219152 - RNA, 14 nt, Homo sapiens
gaaugcccagugag

SEQ ID NO: 219153 - RNA, 16 nt, Homo sapiens
caucuguuacacaaag

SEQ ID NO: 219154 - RNA, 19 nt, Homo sapiens
ccaaugagaucauugugaa

SEQ ID NO: 219155 - RNA, 15 nt, Homo sapiens
gcugauggugacauu

SEQ ID NO: 219156 - RNA, 22 nt, Homo sapiens
uaucugcagggacagagcauug

SEQ ID NO: 219157 - RNA, 21 nt, Homo sapiens
gcuuaauuauugauguuuuca

SEQ ID NO: 219158 - RNA, 13 nt, Homo sapiens
cuauuauauucau

SEQ ID NO: 219159 - RNA, 17 nt, Homo sapiens
caggaaauccuugcacc

SEQ ID NO: 219160 - RNA, 17 nt, Homo sapiens
ugauaucugcagggaca

SEQ ID NO: 219161 - RNA, 20 nt, Homo sapiens
gacacaugcugaacaucaca

SEQ ID NO: 219162 - RNA, 14 nt, Homo sapiens
uacauacuuuuugg

SEQ ID NO: 219163 - RNA, 15 nt, Homo sapiens
ucacagaagaugaag

SEQ ID NO: 219164 - RNA, 14 nt, Homo sapiens
auuauauucauucu

SEQ ID NO: 219165 - RNA, 16 nt, Homo sapiens
agacaacauaacucaa

SEQ ID NO: 219166 - RNA, 13 nt, Homo sapiens
agucuucuauuua

SEQ ID NO: 219167 - RNA, 17 nt, Homo sapiens
ccccucacaauccuugc

SEQ ID NO: 219168 - RNA, 22 nt, Homo sapiens
cugaacuuuguggucgacauca

SEQ ID NO: 219169 - RNA, 21 nt, Homo sapiens
cuugcugauggugacauugca

SEQ ID NO: 219170 - RNA, 21 nt, Homo sapiens
cugaccuugcugauggugaca

SEQ ID NO: 219171 - RNA, 18 nt, Homo sapiens
ccuuccuaugcuguucac

SEQ ID NO: 219172 - RNA, 18 nt, Homo sapiens
cuggaguuauugaagcag

SEQ ID NO: 219173 - RNA, 16 nt, Homo sapiens
auugcaccuggaugua

SEQ ID NO: 219174 - RNA, 20 nt, Homo sapiens
uuuuaaacucugagugcaaa

SEQ ID NO: 219175 - RNA, 14 nt, Homo sapiens
aaucugugaugaca

SEQ ID NO: 219176 - RNA, 13 nt, Homo sapiens
gacuaaaacuaca

SEQ ID NO: 219177 - RNA, 18 nt, Homo sapiens
acaugccagccacuguga

SEQ ID NO: 219178 - RNA, 16 nt, Homo sapiens
guccuauuauauucau

SEQ ID NO: 219179 - RNA, 14 nt, Homo sapiens
ugaugacauucccu

SEQ ID NO: 219180 - RNA, 18 nt, Homo sapiens
acuuuguggucgacauca

SEQ ID NO: 219181 - RNA, 15 nt, Homo sapiens
aaugucaguauuuca

SEQ ID NO: 219182 - RNA, 22 nt, Homo sapiens
uauugaaaugauuucacagugu

SEQ ID NO: 219183 - RNA, 21 nt, Homo sapiens
auagcagcccucaauugugaa

SEQ ID NO: 219184 - RNA, 13 nt, Homo sapiens
cuguuacacaaag

SEQ ID NO: 219185 - RNA, 14 nt, Homo sapiens
agucauucuucccu

SEQ ID NO: 219186 - RNA, 17 nt, Homo sapiens
uccuaugcuguucacug

SEQ ID NO: 219187 - RNA, 15 nt, Homo sapiens
augacauaagugcua

SEQ ID NO: 219188 - RNA, 19 nt, Homo sapiens
caacaugccagccacugug

SEQ ID NO: 219189 - RNA, 23 nt, Homo sapiens
cuuggcccaggauuauugucaaa

SEQ ID NO: 219190 - RNA, 17 nt, Homo sapiens
ucucuauuucuggauga

SEQ ID NO: 219191 - RNA, 22 nt, Homo sapiens
cugaggagccugcaacaugcca

SEQ ID NO: 219192 - RNA, 17 nt, Homo sapiens
guauagauguugcuaac

SEQ ID NO: 219193 - RNA, 13 nt, Homo sapiens
ggccacccaggaa

SEQ ID NO: 219194 - RNA, 15 nt, Homo sapiens
aaaguaaacgauaaa

SEQ ID NO: 219195 - RNA, 13 nt, Homo sapiens
gcugauggugaca

SEQ ID NO: 219196 - RNA, 18 nt, Homo sapiens
uucuuuuugaaaugucaa

SEQ ID NO: 219197 - RNA, 17 nt, Homo sapiens
gccuaauaugaugacug

SEQ ID NO: 219198 - RNA, 20 nt, Homo sapiens
uuagacccucaugcugccaa

SEQ ID NO: 219199 - RNA, 16 nt, Homo sapiens
auaaacauuucauuuc

SEQ ID NO: 219200 - RNA, 15 nt, Homo sapiens
gaaacugacacaugc

SEQ ID NO: 219201 - RNA, 12 nt, Homo sapiens
gucagacuggau

SEQ ID NO: 219202 - RNA, 15 nt, Homo sapiens
gaauauugugcccca

SEQ ID NO: 219203 - RNA, 19 nt, Homo sapiens
auguggcaggcuggaguua

SEQ ID NO: 219204 - RNA, 14 nt, Homo sapiens
acugacacaugcug

SEQ ID NO: 219205 - RNA, 18 nt, Homo sapiens
agccacuggacugacgac

SEQ ID NO: 219206 - RNA, 12 nt, Homo sapiens
gucaacauuucu

SEQ ID NO: 219207 - RNA, 13 nt, Homo sapiens
caauugaaguaaa

SEQ ID NO: 219208 - RNA, 16 nt, Homo sapiens
auugaaaugauuucac

SEQ ID NO: 219209 - RNA, 18 nt, Homo sapiens
ugguuucuagcaugaaga

SEQ ID NO: 219210 - RNA, 23 nt, Homo sapiens
ugcugcugauuuaaacacauuaa

SEQ ID NO: 219211 - RNA, 16 nt, Homo sapiens
cuauucaguggcuaac

SEQ ID NO: 219212 - RNA, 21 nt, Homo sapiens
uuuaaucuuuuaugauugccu

SEQ ID NO: 219213 - RNA, 18 nt, Homo sapiens
gaaaaggccuucuuccca

SEQ ID NO: 219214 - RNA, 17 nt, Homo sapiens
ugaaauaaggaaugaua

SEQ ID NO: 219215 - RNA, 16 nt, Homo sapiens
acugaacuucagagca

SEQ ID NO: 219216 - RNA, 14 nt, Homo sapiens
aauguaugugcaca

SEQ ID NO: 219217 - RNA, 23 nt, Homo sapiens
gaaaaaauuuacuuuaaacuaca

SEQ ID NO: 219218 - RNA, 18 nt, Homo sapiens
uuaccaauugaaguaaaa

SEQ ID NO: 219219 - RNA, 16 nt, Homo sapiens
ucccugugucauuuca

SEQ ID NO: 219220 - RNA, 17 nt, Homo sapiens
uuaauauggaucuguau

SEQ ID NO: 219221 - RNA, 12 nt, Homo sapiens
ucaaauguucuc

SEQ ID NO: 219222 - RNA, 16 nt, Homo sapiens
cuucccuaaucuucca

SEQ ID NO: 219223 - RNA, 12 nt, Homo sapiens
agugacagucag

SEQ ID NO: 219224 - RNA, 22 nt, Homo sapiens
uuaagacuuugguuauuuuacu

SEQ ID NO: 219225 - RNA, 15 nt, Homo sapiens
uaaagauacaguguc

SEQ ID NO: 219226 - RNA, 18 nt, Homo sapiens
acaugcugaacaucacag

SEQ ID NO: 219227 - RNA, 13 nt, Homo sapiens
gucagacuggaua

SEQ ID NO: 219228 - RNA, 18 nt, Homo sapiens
uuuauuauuaacaaaaca

SEQ ID NO: 219229 - RNA, 18 nt, Homo sapiens
ugcugauuuaaacacauu

SEQ ID NO: 219230 - RNA, 20 nt, Homo sapiens
gugagacuguaaguuacaug

SEQ ID NO: 219231 - RNA, 17 nt, Homo sapiens
uauagcaagacauuaua

SEQ ID NO: 219232 - RNA, 17 nt, Homo sapiens
uccuaaugcuugcugcu

SEQ ID NO: 219233 - RNA, 21 nt, Homo sapiens
cuauuuauuugugagacugua

SEQ ID NO: 219234 - RNA, 21 nt, Homo sapiens
guaauuaugguuaguagaggu

SEQ ID NO: 219235 - RNA, 12 nt, Homo sapiens
gaagucauucuu

SEQ ID NO: 219236 - RNA, 13 nt, Homo sapiens
auguacuauccaa

SEQ ID NO: 219237 - RNA, 22 nt, Homo sapiens
cagagccguggccacccaggaa

SEQ ID NO: 219238 - RNA, 15 nt, Homo sapiens
ccacaguguggggca

SEQ ID NO: 219239 - RNA, 21 nt, Homo sapiens
cugcacacuguccuauuauau

SEQ ID NO: 219240 - RNA, 14 nt, Homo sapiens
agcagcgccaguga

SEQ ID NO: 219241 - RNA, 14 nt, Homo sapiens
ugaccuugcugaug

SEQ ID NO: 219242 - RNA, 18 nt, Homo sapiens
uccucaauaaacauuuca

SEQ ID NO: 219243 - RNA, 18 nt, Homo sapiens
caauccuugccacagugu

SEQ ID NO: 219244 - RNA, 13 nt, Homo sapiens
uguccuaaugcuu

SEQ ID NO: 219245 - RNA, 16 nt, Homo sapiens
uucacuggacacuuca

SEQ ID NO: 219246 - RNA, 20 nt, Homo sapiens
uggaugaaugcccagugaga

SEQ ID NO: 219247 - RNA, 18 nt, Homo sapiens
uugcugcuuguacacuca

SEQ ID NO: 219248 - RNA, 18 nt, Homo sapiens
uccccucuccuccacauu

SEQ ID NO: 219249 - RNA, 23 nt, Homo sapiens
guaauuccuaacuaucacugguu

SEQ ID NO: 219250 - RNA, 22 nt, Homo sapiens
cuggauguacuauccaaucugu

SEQ ID NO: 219251 - RNA, 20 nt, Homo sapiens
uguccuaaugcuugcugcug

SEQ ID NO: 219252 - RNA, 22 nt, Homo sapiens
cuugcugauggugacauugcac

SEQ ID NO: 219253 - RNA, 23 nt, Homo sapiens
uauccaaucugugaugacauucc

SEQ ID NO: 219254 - RNA, 15 nt, Homo sapiens
uauccaaucugugau

SEQ ID NO: 219255 - RNA, 21 nt, Homo sapiens
aauguucuccagucauuaugu

SEQ ID NO: 219256 - RNA, 13 nt, Homo sapiens
gaugacauucccu

SEQ ID NO: 219257 - RNA, 22 nt, Homo sapiens
caguuuaucuguucauauggau

SEQ ID NO: 219258 - RNA, 16 nt, Homo sapiens
aguuugguuucuagca

SEQ ID NO: 219259 - RNA, 17 nt, Homo sapiens
cugagaugacuauucag

SEQ ID NO: 219260 - RNA, 22 nt, Homo sapiens
cuuccaugacauaagugcuauu

SEQ ID NO: 219261 - RNA, 24 nt, Homo sapiens
agucuggcagacuuucuucucuau

SEQ ID NO: 219262 - RNA, 22 nt, Homo sapiens
uucuuuaagcagcgccagugac

SEQ ID NO: 219263 - RNA, 16 nt, Homo sapiens
aggcaggggaauguau

SEQ ID NO: 219264 - RNA, 16 nt, Homo sapiens
ccaaauguucacuggu

SEQ ID NO: 219265 - RNA, 18 nt, Homo sapiens
gacauuuuaugucuuucu

SEQ ID NO: 219266 - RNA, 23 nt, Homo sapiens
guacuauccaaucugugaugaca

SEQ ID NO: 219267 - RNA, 22 nt, Homo sapiens
gagcccugucuccucucucugu

SEQ ID NO: 219268 - RNA, 12 nt, Homo sapiens
ucauuucuagca

SEQ ID NO: 219269 - RNA, 13 nt, Homo sapiens
aaugcccagugag

SEQ ID NO: 219270 - RNA, 13 nt, Homo sapiens
auagauguugcua

SEQ ID NO: 219271 - RNA, 15 nt, Homo sapiens
uucuuguaaggcaua

SEQ ID NO: 219272 - RNA, 16 nt, Homo sapiens
cauuucucauguugaa

SEQ ID NO: 219273 - RNA, 16 nt, Homo sapiens
uaaagugcccagcaca

SEQ ID NO: 219274 - RNA, 13 nt, Homo sapiens
ugaacaguaacau

SEQ ID NO: 219275 - RNA, 17 nt, Homo sapiens
aauguucuccagucauu

SEQ ID NO: 219276 - RNA, 16 nt, Homo sapiens
agagccccacccucag

SEQ ID NO: 219277 - RNA, 20 nt, Homo sapiens
gacgugcacgcacacugucu

SEQ ID NO: 219278 - RNA, 21 nt, Homo sapiens
uucccggguagccacuggacu

SEQ ID NO: 219279 - RNA, 23 nt, Homo sapiens
gugcuuuaccaauugaaguaaaa

SEQ ID NO: 219280 - RNA, 13 nt, Homo sapiens
cauucuuggccca

SEQ ID NO: 219281 - RNA, 16 nt, Homo sapiens
uauccaauugcugcuu

SEQ ID NO: 219282 - RNA, 17 nt, Homo sapiens
cuguccuauuauauuca

SEQ ID NO: 219283 - RNA, 13 nt, Homo sapiens
gccuuggcugcag

SEQ ID NO: 219284 - RNA, 20 nt, Homo sapiens
uuaccccucacaauccuugc

SEQ ID NO: 219285 - RNA, 17 nt, Homo sapiens
aaaaauaaagcacuuau

SEQ ID NO: 219286 - RNA, 22 nt, Homo sapiens
aauuaaggguaugauuaacucu

SEQ ID NO: 219287 - RNA, 12 nt, Homo sapiens
cagaguggcagu

SEQ ID NO: 219288 - RNA, 14 nt, Homo sapiens
gauuaaagugccca

SEQ ID NO: 219289 - RNA, 19 nt, Homo sapiens
guuacaugaaggcagcaga

SEQ ID NO: 219290 - RNA, 17 nt, Homo sapiens
ucucuguauuccuagaa

SEQ ID NO: 219291 - RNA, 13 nt, Homo sapiens
cuggacacuucac

SEQ ID NO: 219292 - RNA, 21 nt, Homo sapiens
guggggguaaggugcaucugu

SEQ ID NO: 219293 - RNA, 20 nt, Homo sapiens
uuuuauaaugucccuucaca

SEQ ID NO: 219294 - RNA, 13 nt, Homo sapiens
aaaacuacauuga

SEQ ID NO: 219295 - RNA, 19 nt, Homo sapiens
caggauuauugucaaagaa

SEQ ID NO: 219296 - RNA, 17 nt, Homo sapiens
uccuagucauucuuccc

SEQ ID NO: 219297 - RNA, 16 nt, Homo sapiens
cuaugcuguucacugg

SEQ ID NO: 219298 - RNA, 11 nt, Homo sapiens
aaaggugacca

SEQ ID NO: 219299 - RNA, 20 nt, Homo sapiens
cccuuggccaugggucccau

SEQ ID NO: 219300 - RNA, 18 nt, Homo sapiens
uccuaaugcuugcugcug

SEQ ID NO: 219301 - RNA, 16 nt, Homo sapiens
caguaacauagcugug

SEQ ID NO: 219302 - RNA, 15 nt, Homo sapiens
agggacagagcauug

SEQ ID NO: 219303 - RNA, 13 nt, Homo sapiens
cagucucccuucc

SEQ ID NO: 219304 - RNA, 20 nt, Homo sapiens
caugcugaacaucacagcuu

SEQ ID NO: 219305 - RNA, 20 nt, Homo sapiens
ccaaugagaucauugugaag

SEQ ID NO: 219306 - RNA, 17 nt, Homo sapiens
gcggauccaagcaaaug

SEQ ID NO: 219307 - RNA, 19 nt, Homo sapiens
gaccuugcugauggugaca

SEQ ID NO: 219308 - RNA, 14 nt, Homo sapiens
augcuuggauguaa

SEQ ID NO: 219309 - RNA, 23 nt, Homo sapiens
caucaaucuaaagauacaguguc

SEQ ID NO: 219310 - RNA, 21 nt, Homo sapiens
gacagagccccacccucagau

SEQ ID NO: 219311 - RNA, 13 nt, Homo sapiens
ugacauugacuau

SEQ ID NO: 219312 - RNA, 18 nt, Homo sapiens
ugcugaacaucacagcuu

SEQ ID NO: 219313 - RNA, 18 nt, Homo sapiens
cugugcaucuagccucaa

SEQ ID NO: 219314 - RNA, 17 nt, Homo sapiens
uaaacauuucauuuccc

SEQ ID NO: 219315 - RNA, 13 nt, Homo sapiens
agagggaugcuug

SEQ ID NO: 219316 - RNA, 10 nt, Homo sapiens
uacuuuuugg

SEQ ID NO: 219317 - RNA, 15 nt, Homo sapiens
agcagcgccagugac

SEQ ID NO: 219318 - RNA, 20 nt, Homo sapiens
gguggggguaaggugcaucu

SEQ ID NO: 219319 - RNA, 21 nt, Homo sapiens
gcucaguagucagacuggaua

SEQ ID NO: 219320 - RNA, 19 nt, Homo sapiens
gagaagauucuuguauuua

SEQ ID NO: 219321 - RNA, 15 nt, Homo sapiens
uaaacauuucauuuc

SEQ ID NO: 219322 - RNA, 15 nt, Homo sapiens
cauuauauagcagua

SEQ ID NO: 219323 - RNA, 17 nt, Homo sapiens
cuucccuaaucuuccac

SEQ ID NO: 219324 - RNA, 14 nt, Homo sapiens
ccagccacugugau

SEQ ID NO: 219325 - RNA, 19 nt, Homo sapiens
cuguuuagaugaaugucag

SEQ ID NO: 219326 - RNA, 14 nt, Homo sapiens
uauagauguugcua

SEQ ID NO: 219327 - RNA, 18 nt, Homo sapiens
gaugcacaugagcuggcg

SEQ ID NO: 219328 - RNA, 17 nt, Homo sapiens
auccuagucauucuucc

SEQ ID NO: 219329 - RNA, 11 nt, Homo sapiens
ggaaagcaaau

SEQ ID NO: 219330 - RNA, 20 nt, Homo sapiens
uuuugaagauucuauguuaa

SEQ ID NO: 219331 - RNA, 20 nt, Homo sapiens
auucugagaugacuauucag

SEQ ID NO: 219332 - RNA, 21 nt, Homo sapiens
aauuuguggaaaauaacucac

SEQ ID NO: 219333 - RNA, 17 nt, Homo sapiens
uggcaucuuacaucuga

SEQ ID NO: 219334 - RNA, 17 nt, Homo sapiens
aauccuugccacagugu

SEQ ID NO: 219335 - RNA, 14 nt, Homo sapiens
augcaaagaugaag

SEQ ID NO: 219336 - RNA, 17 nt, Homo sapiens
gaugaagcacacaggaa

SEQ ID NO: 219337 - RNA, 17 nt, Homo sapiens
cuagaaacugacacaug

SEQ ID NO: 219338 - RNA, 15 nt, Homo sapiens
ucuggaugcugugaa

SEQ ID NO: 219339 - RNA, 15 nt, Homo sapiens
aucuguuacacaaag

SEQ ID NO: 219340 - RNA, 15 nt, Homo sapiens
aaaaucacacugucu

SEQ ID NO: 219341 - RNA, 14 nt, Homo sapiens
gcuuagaacaaagg

SEQ ID NO: 219342 - RNA, 17 nt, Homo sapiens
auuuauugaaaugauuu

SEQ ID NO: 219343 - RNA, 23 nt, Homo sapiens
acccaguguuuuaggagcaugag

SEQ ID NO: 219344 - RNA, 15 nt, Homo sapiens
ucuguuuuguguacu

SEQ ID NO: 219345 - RNA, 16 nt, Homo sapiens
auguacuauccaaucu

SEQ ID NO: 219346 - RNA, 22 nt, Homo sapiens
aaacacauuaaagguacuuugc

SEQ ID NO: 219347 - RNA, 17 nt, Homo sapiens
aaucugugaugacauuc

SEQ ID NO: 219348 - RNA, 20 nt, Homo sapiens
gggauuuucagcccucagaa

SEQ ID NO: 219349 - RNA, 14 nt, Homo sapiens
gugaagagucuaca

SEQ ID NO: 219350 - RNA, 16 nt, Homo sapiens
ggagcaugagugccgu

SEQ ID NO: 219351 - RNA, 13 nt, Homo sapiens
cugugucauuuca

SEQ ID NO: 219352 - RNA, 19 nt, Homo sapiens
ugaagguagaauguuuuca

SEQ ID NO: 219353 - RNA, 14 nt, Homo sapiens
uucucagcagagug

SEQ ID NO: 219354 - RNA, 12 nt, Homo sapiens
agaaacugacac

SEQ ID NO: 219355 - RNA, 20 nt, Homo sapiens
aggcauacugccuuguuuaa

SEQ ID NO: 219356 - RNA, 13 nt, Homo sapiens
uccaaucugugau

SEQ ID NO: 219357 - RNA, 21 nt, Homo sapiens
auccuaauaaaaaggugacca

SEQ ID NO: 219358 - RNA, 16 nt, Homo sapiens
gucuccucucucugua

SEQ ID NO: 219359 - RNA, 21 nt, Homo sapiens
aaguucuauuuauuugugaga

SEQ ID NO: 219360 - RNA, 14 nt, Homo sapiens
uuaaacaugcugua

SEQ ID NO: 219361 - RNA, 14 nt, Homo sapiens
uuauauucauucuu

SEQ ID NO: 219362 - RNA, 10 nt, Homo sapiens
uuuguucccu

SEQ ID NO: 219363 - RNA, 13 nt, Homo sapiens
aacuaaaauguuc

SEQ ID NO: 219364 - RNA, 22 nt, Homo sapiens
cuauuuauuuauuuauucauua

SEQ ID NO: 219365 - RNA, 13 nt, Homo sapiens
gaugcugucuucg

SEQ ID NO: 219366 - RNA, 21 nt, Homo sapiens
cagagaagauucuuguauuua

SEQ ID NO: 219367 - RNA, 17 nt, Homo sapiens
uaagcagcgccagugac

SEQ ID NO: 219368 - RNA, 19 nt, Homo sapiens
uaaaugacucuucccucaa

SEQ ID NO: 219369 - RNA, 17 nt, Homo sapiens
cgugcacgcacacuguc

SEQ ID NO: 219370 - RNA, 17 nt, Homo sapiens
uggccaugggucccauu

SEQ ID NO: 219371 - RNA, 23 nt, Homo sapiens
ggauuaaagugcccagcacaaag

SEQ ID NO: 219372 - RNA, 16 nt, Homo sapiens
aacucuaccugcacac

SEQ ID NO: 219373 - RNA, 17 nt, Homo sapiens
ccuaacuaucacugguu

SEQ ID NO: 219374 - RNA, 13 nt, Homo sapiens
gauucuauguuaa

SEQ ID NO: 219375 - RNA, 22 nt, Homo sapiens
ugggugcuuaguaaguacuuaa

SEQ ID NO: 219376 - RNA, 17 nt, Homo sapiens
cuaacagcaacacaaag

SEQ ID NO: 219377 - RNA, 16 nt, Homo sapiens
acaauccuugccacag

SEQ ID NO: 219378 - RNA, 16 nt, Homo sapiens
ggcagacuuucuucuc

SEQ ID NO: 219379 - RNA, 21 nt, Homo sapiens
uucaagaaugcaguacuaaca

SEQ ID NO: 219380 - RNA, 13 nt, Homo sapiens
aauuccuaacuau

SEQ ID NO: 219381 - RNA, 21 nt, Homo sapiens
aggaccucccucccccuggca

SEQ ID NO: 219382 - RNA, 13 nt, Homo sapiens
gaucauugugaag

SEQ ID NO: 219383 - RNA, 15 nt, Homo sapiens
acucauuucuagcag

SEQ ID NO: 219384 - RNA, 16 nt, Homo sapiens
ucuguauuccuagaaa

SEQ ID NO: 219385 - RNA, 16 nt, Homo sapiens
uaacauuuauuugagu

SEQ ID NO: 219386 - RNA, 19 nt, Homo sapiens
augccagccacugugauag

SEQ ID NO: 219387 - RNA, 20 nt, Homo sapiens
acuguuuagaugaaugucag

SEQ ID NO: 219388 - RNA, 17 nt, Homo sapiens
ccccaaguuaguucaau

SEQ ID NO: 219389 - RNA, 19 nt, Homo sapiens
uccacuugagugucaagcu

SEQ ID NO: 219390 - RNA, 18 nt, Homo sapiens
agaauauaaaaauaaagc

SEQ ID NO: 219391 - RNA, 19 nt, Homo sapiens
uggcacugguuuguucccu

SEQ ID NO: 219392 - RNA, 17 nt, Homo sapiens
acgugcacgcacacugu

SEQ ID NO: 219393 - RNA, 17 nt, Homo sapiens
ugauuuaaacacauuaa

SEQ ID NO: 219394 - RNA, 19 nt, Homo sapiens
cuucucuauuucuggauga

SEQ ID NO: 219395 - RNA, 15 nt, Homo sapiens
cugauuuaaacacau

SEQ ID NO: 219396 - RNA, 22 nt, Homo sapiens
agauccucaauaaacauuucau

SEQ ID NO: 219397 - RNA, 13 nt, Homo sapiens
auuugcacauuaa

SEQ ID NO: 219398 - RNA, 15 nt, Homo sapiens
gagugucaagcugac

SEQ ID NO: 219399 - RNA, 17 nt, Homo sapiens
ccuggauguacuaucca

SEQ ID NO: 219400 - RNA, 17 nt, Homo sapiens
cugucuucguacuggga

SEQ ID NO: 219401 - RNA, 18 nt, Homo sapiens
gugagacuguaaguuaca

SEQ ID NO: 219402 - RNA, 23 nt, Homo sapiens
uaaaacugaacuucagagcauga

SEQ ID NO: 219403 - RNA, 24 nt, Homo sapiens
ccuuccuaugcuguucacuggaca

SEQ ID NO: 219404 - RNA, 17 nt, Homo sapiens
uucaguuugcagaguag

SEQ ID NO: 219405 - RNA, 21 nt, Homo sapiens
guauuucaacugaaguucuau

SEQ ID NO: 219406 - RNA, 20 nt, Homo sapiens
aagcuuacaugccuaccaau

SEQ ID NO: 219407 - RNA, 15 nt, Homo sapiens
acaguguuucuggcu

SEQ ID NO: 219408 - RNA, 19 nt, Homo sapiens
uucauucuuuuugaaaugu

SEQ ID NO: 219409 - RNA, 13 nt, Homo sapiens
aaaauguggcagg

SEQ ID NO: 219410 - RNA, 19 nt, Homo sapiens
aguuuuuuuccuucaagaa

SEQ ID NO: 219411 - RNA, 16 nt, Homo sapiens
gaggagccugcaacau

SEQ ID NO: 219412 - RNA, 15 nt, Homo sapiens
aauguaugugcacau

SEQ ID NO: 219413 - RNA, 12 nt, Homo sapiens
gaugacauuccc

SEQ ID NO: 219414 - RNA, 18 nt, Homo sapiens
gauggugacauugcaccu

SEQ ID NO: 219415 - RNA, 18 nt, Homo sapiens
ucuucucuauuucuggau

SEQ ID NO: 219416 - RNA, 23 nt, Homo sapiens
auguacuauccaaucugugauga

SEQ ID NO: 219417 - RNA, 19 nt, Homo sapiens
agucagggaaggugccucu

SEQ ID NO: 219418 - RNA, 15 nt, Homo sapiens
auuugugagacugua

SEQ ID NO: 219419 - RNA, 18 nt, Homo sapiens
ggaaggugccucuggaug

SEQ ID NO: 219420 - RNA, 20 nt, Homo sapiens
uggaugcugugaagagucua

SEQ ID NO: 219421 - RNA, 19 nt, Homo sapiens
guccuaaugcuugcugcug

SEQ ID NO: 219422 - RNA, 15 nt, Homo sapiens
guuugguuucuagca

SEQ ID NO: 219423 - RNA, 15 nt, Homo sapiens
caugagugccgugug

SEQ ID NO: 219424 - RNA, 17 nt, Homo sapiens
cucuaccugcacacugu

SEQ ID NO: 219425 - RNA, 22 nt, Homo sapiens
aguaaguacuuaauaaacugug

SEQ ID NO: 219426 - RNA, 15 nt, Homo sapiens
uucuuggcccaggau

SEQ ID NO: 219427 - RNA, 19 nt, Homo sapiens
uguguggucaacauuucuc

SEQ ID NO: 219428 - RNA, 22 nt, Homo sapiens
cauguccuaaugcuugcugcug

SEQ ID NO: 219429 - RNA, 17 nt, Homo sapiens
guauguguucuauucag

SEQ ID NO: 219430 - RNA, 18 nt, Homo sapiens
gaaugcaaagaugaaggu

SEQ ID NO: 219431 - RNA, 12 nt, Homo sapiens
gaaggugccucu

SEQ ID NO: 219432 - RNA, 13 nt, Homo sapiens
uucuggacuaaaa

SEQ ID NO: 219433 - RNA, 15 nt, Homo sapiens
ccagugagacugugu

SEQ ID NO: 219434 - RNA, 18 nt, Homo sapiens
cagcgccagugacaguca

SEQ ID NO: 219435 - RNA, 13 nt, Homo sapiens
gaccaggaccucc

SEQ ID NO: 219436 - RNA, 13 nt, Homo sapiens
caggaagcuguga

SEQ ID NO: 219437 - RNA, 15 nt, Homo sapiens
cccugugucauuuca

SEQ ID NO: 219438 - RNA, 23 nt, Homo sapiens
ucucccuuccuaugcuguucacu

SEQ ID NO: 219439 - RNA, 16 nt, Homo sapiens
aaugagaucauuguga

SEQ ID NO: 219440 - RNA, 21 nt, Homo sapiens
agcaugaaaaucacacugucu

SEQ ID NO: 219441 - RNA, 20 nt, Homo sapiens
aaaaugguguuuuaucuucu

SEQ ID NO: 219442 - RNA, 14 nt, Homo sapiens
uggaugcugugaag

SEQ ID NO: 219443 - RNA, 20 nt, Homo sapiens
cccugugucauuucaaacag

SEQ ID NO: 219444 - RNA, 17 nt, Homo sapiens
cagaaucgcuccaccuu

SEQ ID NO: 219445 - RNA, 16 nt, Homo sapiens
auaucacuuccaugac

SEQ ID NO: 219446 - RNA, 23 nt, Homo sapiens
guauuccuagaaacugacacaug

SEQ ID NO: 219447 - RNA, 20 nt, Homo sapiens
uguacuauccaaucugugau

SEQ ID NO: 219448 - RNA, 16 nt, Homo sapiens
uuauuuauuuauucau

SEQ ID NO: 219449 - RNA, 17 nt, Homo sapiens
uuuaagcagcgccagug

SEQ ID NO: 219450 - RNA, 14 nt, Homo sapiens
aagcaaauggccaa

SEQ ID NO: 219451 - RNA, 16 nt, Homo sapiens
gcagcgccagugacag

SEQ ID NO: 219452 - RNA, 16 nt, Homo sapiens
uacuuaauaaacugug

SEQ ID NO: 219453 - RNA, 16 nt, Homo sapiens
cugcagggacagagca

SEQ ID NO: 219454 - RNA, 14 nt, Homo sapiens
cuaaaauguucuaa

SEQ ID NO: 219455 - RNA, 21 nt, Homo sapiens
gaagcuuacaugccuaccaau

SEQ ID NO: 219456 - RNA, 22 nt, Homo sapiens
ugucauuucaaacagucucccu

SEQ ID NO: 219457 - RNA, 23 nt, Homo sapiens
cuuccaugacauaagugcuauug

SEQ ID NO: 219458 - RNA, 17 nt, Homo sapiens
auaaugucccuucacaa

SEQ ID NO: 219459 - RNA, 20 nt, Homo sapiens
aaggcuuagacccucaugcu

SEQ ID NO: 219460 - RNA, 13 nt, Homo sapiens
uggugauuuagca

SEQ ID NO: 219461 - RNA, 16 nt, Homo sapiens
uugauugggcacauca

SEQ ID NO: 219462 - RNA, 22 nt, Homo sapiens
uuuuuauauucucagcagagug

SEQ ID NO: 219463 - RNA, 15 nt, Homo sapiens
uuuagaugaauguca

SEQ ID NO: 219464 - RNA, 21 nt, Homo sapiens
cuauuuauuuauuuauucauu

SEQ ID NO: 219465 - RNA, 20 nt, Homo sapiens
cauucuuuuugaaaugucaa

SEQ ID NO: 219466 - RNA, 20 nt, Homo sapiens
acagucucccuuccuaugcu

SEQ ID NO: 219467 - RNA, 13 nt, Homo sapiens
gaugcugugaaga

SEQ ID NO: 219468 - RNA, 22 nt, Homo sapiens
cauagagaauauaaaaauaaag

SEQ ID NO: 219469 - RNA, 14 nt, Homo sapiens
uaccugcacacugu

SEQ ID NO: 219470 - RNA, 15 nt, Homo sapiens
cuuuuaaacucugag

SEQ ID NO: 219471 - RNA, 20 nt, Homo sapiens
cagacuggauaguccgucuc

SEQ ID NO: 219472 - RNA, 17 nt, Homo sapiens
aucugugaugacauucc

SEQ ID NO: 219473 - RNA, 13 nt, Homo sapiens
ccucucucuguaa

SEQ ID NO: 219474 - RNA, 19 nt, Homo sapiens
caaucuaaagauacagugu

SEQ ID NO: 219475 - RNA, 22 nt, Homo sapiens
auuuacuuuaaacuacauuagg

SEQ ID NO: 219476 - RNA, 12 nt, Homo sapiens
gcaaagaugaag

SEQ ID NO: 219477 - RNA, 14 nt, Homo sapiens
gcacacugucugcc

SEQ ID NO: 219478 - RNA, 15 nt, Homo sapiens
cccuuggacauuuua

SEQ ID NO: 219479 - RNA, 16 nt, Homo sapiens
acuuccaugacauaag

SEQ ID NO: 219480 - RNA, 15 nt, Homo sapiens
cauuucaaacagucu

SEQ ID NO: 219481 - RNA, 20 nt, Homo sapiens
ucuguuacacaaagaaccac

SEQ ID NO: 219482 - RNA, 21 nt, Homo sapiens
uuuaaauagaugacauugacu

SEQ ID NO: 219483 - RNA, 18 nt, Homo sapiens
cagcucuccccuucucug

SEQ ID NO: 219484 - RNA, 18 nt, Homo sapiens
aaaugauuucacagugug

SEQ ID NO: 219485 - RNA, 17 nt, Homo sapiens
uucccugugucauuuca

SEQ ID NO: 219486 - RNA, 16 nt, Homo sapiens
ccucagaugcacauga

SEQ ID NO: 219487 - RNA, 19 nt, Homo sapiens
uaagacccucucaaacuaa

SEQ ID NO: 219488 - RNA, 23 nt, Homo sapiens
uuggccugucuuuggauuguuaa

SEQ ID NO: 219489 - RNA, 20 nt, Homo sapiens
ucuccagucauuauguuaau

SEQ ID NO: 219490 - RNA, 18 nt, Homo sapiens
agagccccacccucagau

SEQ ID NO: 219491 - RNA, 18 nt, Homo sapiens
ugccaauuugcacauuaa

SEQ ID NO: 219492 - RNA, 17 nt, Homo sapiens
ucaaucuggauucauau

SEQ ID NO: 219493 - RNA, 22 nt, Homo sapiens
guaaguuacaugaaggcagcag

SEQ ID NO: 219494 - RNA, 16 nt, Homo sapiens
uaaacauuucauuucc

SEQ ID NO: 219495 - RNA, 23 nt, Homo sapiens
uagcaggaagcugugagagcagu

SEQ ID NO: 219496 - RNA, 19 nt, Homo sapiens
agggauuuucagcccucag

SEQ ID NO: 219497 - RNA, 13 nt, Homo sapiens
ugaugacauuccc

SEQ ID NO: 219498 - RNA, 11 nt, Homo sapiens
caaauguucuc

SEQ ID NO: 219499 - RNA, 18 nt, Homo sapiens
uagcaggaagcugugaga

SEQ ID NO: 219500 - RNA, 12 nt, Homo sapiens
ccuaaucuucca

SEQ ID NO: 219501 - RNA, 16 nt, Homo sapiens
acagcaacacaaagcu

SEQ ID NO: 219502 - RNA, 19 nt, Homo sapiens
uacaacucuauuuaauuaa

SEQ ID NO: 219503 - RNA, 14 nt, Homo sapiens
agcaugagugccgu

SEQ ID NO: 219504 - RNA, 21 nt, Homo sapiens
auuuauugaaaugauuucaca

SEQ ID NO: 219505 - RNA, 20 nt, Homo sapiens
gagacuguaaguuacaugaa

SEQ ID NO: 219506 - RNA, 15 nt, Homo sapiens
cuuuaagaacuaaaa

SEQ ID NO: 219507 - RNA, 19 nt, Homo sapiens
uucucuauuucuggaugaa

SEQ ID NO: 219508 - RNA, 17 nt, Homo sapiens
ucuccucucucuguaau

SEQ ID NO: 219509 - RNA, 14 nt, Homo sapiens
agucuucuauuuau

SEQ ID NO: 219510 - RNA, 16 nt, Homo sapiens
aaagggauuuucagcc

SEQ ID NO: 219511 - RNA, 20 nt, Homo sapiens
uccuagaaacugacacaugc

SEQ ID NO: 219512 - RNA, 22 nt, Homo sapiens
aagauacagugucugacuauaa

SEQ ID NO: 219513 - RNA, 20 nt, Homo sapiens
ccaggauuauugucaaagaa

SEQ ID NO: 219514 - RNA, 16 nt, Homo sapiens
ucaacugaaguucuau

SEQ ID NO: 219515 - RNA, 22 nt, Homo sapiens
agcaggaagcugugagagcagu

SEQ ID NO: 219516 - RNA, 20 nt, Homo sapiens
acucugagugcaaacuucag

SEQ ID NO: 219517 - RNA, 14 nt, Homo sapiens
cuauuauauucauu

SEQ ID NO: 219518 - RNA, 21 nt, Homo sapiens
uuccuagaaacugacacaugc

SEQ ID NO: 219519 - RNA, 23 nt, Homo sapiens
aaggcuuagacccucaugcugcc

SEQ ID NO: 219520 - RNA, 14 nt, Homo sapiens
acaguaacauagcu

SEQ ID NO: 219521 - RNA, 21 nt, Homo sapiens
gaacuuuguggucgacaucaa

SEQ ID NO: 219522 - RNA, 21 nt, Homo sapiens
gccagcucaccccaucauccc

SEQ ID NO: 219523 - RNA, 23 nt, Homo sapiens
uuucuuguaaggcauacugccuu

SEQ ID NO: 219524 - RNA, 15 nt, Homo sapiens
uacuauccaaucugu

SEQ ID NO: 219525 - RNA, 15 nt, Homo sapiens
cuauccaaucuguga

SEQ ID NO: 219526 - RNA, 15 nt, Homo sapiens
auccaauugcugcuu

SEQ ID NO: 219527 - RNA, 22 nt, Homo sapiens
caguguuuuaggagcaugagug

SEQ ID NO: 219528 - RNA, 11 nt, Homo sapiens
ggcugcaguuu

SEQ ID NO: 219529 - RNA, 18 nt, Homo sapiens
aguagagguacacuugug

SEQ ID NO: 219530 - RNA, 17 nt, Homo sapiens
cagaauauugugcccca

SEQ ID NO: 219531 - RNA, 16 nt, Homo sapiens
gucuucguacugggaa

SEQ ID NO: 219532 - RNA, 18 nt, Homo sapiens
ugacauugcaccuggaug

SEQ ID NO: 219533 - RNA, 17 nt, Homo sapiens
ucuccccuucucuguau

SEQ ID NO: 219534 - RNA, 19 nt, Homo sapiens
aguaaacgauaaaaugugg

SEQ ID NO: 219535 - RNA, 19 nt, Homo sapiens
auuaaaaggaagcuuacau

SEQ ID NO: 219536 - RNA, 22 nt, Homo sapiens
gauaucugcagggacagagcau

SEQ ID NO: 219537 - RNA, 24 nt, Homo sapiens
aaauagcauguccuaaugcuugcu

SEQ ID NO: 219538 - RNA, 14 nt, Homo sapiens
agugagacuguguu

SEQ ID NO: 219539 - RNA, 15 nt, Homo sapiens
auccaaucugugaug

SEQ ID NO: 219540 - RNA, 16 nt, Homo sapiens
ccuaaugcuugcugcu

SEQ ID NO: 219541 - RNA, 13 nt, Homo sapiens
gaauuugccuaau

SEQ ID NO: 219542 - RNA, 14 nt, Homo sapiens
guauagauguugcu

SEQ ID NO: 219543 - RNA, 17 nt, Homo sapiens
gaaaaggccuucuuccc

SEQ ID NO: 219544 - RNA, 21 nt, Homo sapiens
ugagcuggcgggauugaagga

SEQ ID NO: 219545 - RNA, 15 nt, Homo sapiens
acaucacagcuuauu

SEQ ID NO: 219546 - RNA, 13 nt, Homo sapiens
ggaacuccugacu

SEQ ID NO: 219547 - RNA, 17 nt, Homo sapiens
auaagugcuauugcaga

SEQ ID NO: 219548 - RNA, 17 nt, Homo sapiens
ccuaaugcuugcugcug

SEQ ID NO: 219549 - RNA, 19 nt, Homo sapiens
uauccaaucugugaugaca

SEQ ID NO: 219550 - RNA, 17 nt, Homo sapiens
gugggauaucacuucca

SEQ ID NO: 219551 - RNA, 19 nt, Homo sapiens
uugucaaagaagucauucu

SEQ ID NO: 219552 - RNA, 19 nt, Homo sapiens
cuuauccguuagccguggu

SEQ ID NO: 219553 - RNA, 14 nt, Homo sapiens
gugaugacauuccc

SEQ ID NO: 219554 - RNA, 21 nt, Homo sapiens
cucaagucuggcagacuuucu

SEQ ID NO: 219555 - RNA, 13 nt, Homo sapiens
auuucacagugug

SEQ ID NO: 219556 - RNA, 14 nt, Homo sapiens
cacagaagaugaag

SEQ ID NO: 219557 - RNA, 19 nt, Homo sapiens
guauuuauuacaacucuau

SEQ ID NO: 219558 - RNA, 13 nt, Homo sapiens
aaucuggauucau

SEQ ID NO: 219559 - RNA, 14 nt, Homo sapiens
cucagaugcacaug

SEQ ID NO: 219560 - RNA, 14 nt, Homo sapiens
cccuucucuguauu

SEQ ID NO: 219561 - RNA, 14 nt, Homo sapiens
gaacuucagagcau

SEQ ID NO: 219562 - RNA, 20 nt, Homo sapiens
uuaaauagaugacauugacu

SEQ ID NO: 219563 - RNA, 19 nt, Homo sapiens
auaaacauuucauuuccca

SEQ ID NO: 219564 - RNA, 15 nt, Homo sapiens
uaugugcacaucugu

SEQ ID NO: 219565 - RNA, 18 nt, Homo sapiens
ggauaguccgucucugcu

SEQ ID NO: 219566 - RNA, 21 nt, Homo sapiens
agacccucaugcugccaauau

SEQ ID NO: 219567 - RNA, 14 nt, Homo sapiens
ccucaugcugccaa

SEQ ID NO: 219568 - RNA, 13 nt, Homo sapiens
uggccaaugagau

SEQ ID NO: 219569 - RNA, 22 nt, Homo sapiens
acuauccaaucugugaugacau

SEQ ID NO: 219570 - RNA, 23 nt, Homo sapiens
cauuuguuuugccaauuugcaca

SEQ ID NO: 219571 - RNA, 20 nt, Homo sapiens
guaacucuguaauuccuaac

SEQ ID NO: 219572 - RNA, 21 nt, Homo sapiens
ugcucaguagucagacuggau

SEQ ID NO: 219573 - RNA, 15 nt, Homo sapiens
ugacauaagugcuau

SEQ ID NO: 219574 - RNA, 17 nt, Homo sapiens
cuggacuaaaacuacau

SEQ ID NO: 219575 - RNA, 11 nt, Homo sapiens
ucuauguuaau

SEQ ID NO: 219576 - RNA, 19 nt, Homo sapiens
aauuuacuuuaaacuacau

SEQ ID NO: 219577 - RNA, 19 nt, Homo sapiens
uauccuagucauucuuccc

SEQ ID NO: 219578 - RNA, 12 nt, Homo sapiens
cuguauuccuag

SEQ ID NO: 219579 - RNA, 13 nt, Homo sapiens
guacuuuuaagac

SEQ ID NO: 219580 - RNA, 15 nt, Homo sapiens
auucucagcagagug

SEQ ID NO: 219581 - RNA, 21 nt, Homo sapiens
ugcccagugagacuguguugu

SEQ ID NO: 219582 - RNA, 16 nt, Homo sapiens
ugccagccacugugau

SEQ ID NO: 219583 - RNA, 18 nt, Homo sapiens
ggauaucacuuccaugac

SEQ ID NO: 219584 - RNA, 16 nt, Homo sapiens
aaggccuucuucccaa

SEQ ID NO: 219585 - RNA, 20 nt, Homo sapiens
gcaacaugccagccacugug

SEQ ID NO: 219586 - RNA, 18 nt, Homo sapiens
ggcacaucauuucaagaa

SEQ ID NO: 219587 - RNA, 16 nt, Homo sapiens
aagauucuauguuaau

SEQ ID NO: 219588 - RNA, 19 nt, Homo sapiens
acagagccccacccucaga

SEQ ID NO: 219589 - RNA, 15 nt, Homo sapiens
auccuagucauucuu

SEQ ID NO: 219590 - RNA, 24 nt, Homo sapiens
gacacaugcugaacaucacagcuu

SEQ ID NO: 219591 - RNA, 21 nt, Homo sapiens
uggugacauugcaccuggaug

SEQ ID NO: 219592 - RNA, 16 nt, Homo sapiens
uuauccuagucauucu

SEQ ID NO: 219593 - RNA, 21 nt, Homo sapiens
cacaauccuugccacagugug

SEQ ID NO: 219594 - RNA, 20 nt, Homo sapiens
ucugacuauaaccuuguucc

SEQ ID NO: 219595 - RNA, 16 nt, Homo sapiens
cacaaagaaccaccag

SEQ ID NO: 219596 - RNA, 18 nt, Homo sapiens
guucccggguagccacug

SEQ ID NO: 219597 - RNA, 17 nt, Homo sapiens
gcacacaggaaccuaau

SEQ ID NO: 219598 - RNA, 22 nt, Homo sapiens
augggugcuuaguaaguacuua

SEQ ID NO: 219599 - RNA, 14 nt, Homo sapiens
uuaaauagaugaca

SEQ ID NO: 219600 - RNA, 23 nt, Homo sapiens
uugcugcugauuuaaacacauua

SEQ ID NO: 219601 - RNA, 16 nt, Homo sapiens
ugacauaagugcuauu

SEQ ID NO: 219602 - RNA, 16 nt, Homo sapiens
ugggucccauucuugg

SEQ ID NO: 219603 - RNA, 19 nt, Homo sapiens
ccuggcacugguuuguucc

SEQ ID NO: 219604 - RNA, 13 nt, Homo sapiens
ugucaguauuuca

SEQ ID NO: 219605 - RNA, 13 nt, Homo sapiens
uugaagauucuau

SEQ ID NO: 219606 - RNA, 22 nt, Homo sapiens
cuuagacccucaugcugccaau

SEQ ID NO: 219607 - RNA, 15 nt, Homo sapiens
uccaaucugugauga

SEQ ID NO: 219608 - RNA, 16 nt, Homo sapiens
aauuauugauguuuuc

SEQ ID NO: 219609 - RNA, 13 nt, Homo sapiens
uccuagucauucu

SEQ ID NO: 219610 - RNA, 13 nt, Homo sapiens
cacuggacacuuc

SEQ ID NO: 219611 - RNA, 23 nt, Homo sapiens
guaacuguuuagaugaaugucag

SEQ ID NO: 219612 - RNA, 17 nt, Homo sapiens
uuaaagguacuuugcag

SEQ ID NO: 219613 - RNA, 22 nt, Homo sapiens
ucaguuuaucuguucauaugga

SEQ ID NO: 219614 - RNA, 16 nt, Homo sapiens
augauuucacagugug

SEQ ID NO: 219615 - RNA, 15 nt, Homo sapiens
uccaauugcugcuug

SEQ ID NO: 219616 - RNA, 17 nt, Homo sapiens
ggaauguaugugcacau

SEQ ID NO: 219617 - RNA, 13 nt, Homo sapiens
aaacuguggugcu

SEQ ID NO: 219618 - RNA, 19 nt, Homo sapiens
uauccaauugcugcuugua

SEQ ID NO: 219619 - RNA, 20 nt, Homo sapiens
ccaauagcaaggcugugcau

SEQ ID NO: 219620 - RNA, 15 nt, Homo sapiens
aguaacauagcugug

SEQ ID NO: 219621 - RNA, 22 nt, Homo sapiens
ugaggguauguuuuauauagca

SEQ ID NO: 219622 - RNA, 13 nt, Homo sapiens
gauaucacuucca

SEQ ID NO: 219623 - RNA, 18 nt, Homo sapiens
cuuuguggucgacaucaa

SEQ ID NO: 219624 - RNA, 18 nt, Homo sapiens
uuaaacucugagugcaaa

SEQ ID NO: 219625 - RNA, 21 nt, Homo sapiens
agaauguuuucaaauguucuc

SEQ ID NO: 219626 - RNA, 17 nt, Homo sapiens
uuccacuugagugucaa

SEQ ID NO: 219627 - RNA, 23 nt, Homo sapiens
uaguaaguacuuaauaaacugug

SEQ ID NO: 219628 - RNA, 20 nt, Homo sapiens
gccacccaggaacuccugac

SEQ ID NO: 219629 - RNA, 14 nt, Homo sapiens
gcuuacaugccuac

SEQ ID NO: 219630 - RNA, 18 nt, Homo sapiens
ucccugugucauuucaaa

SEQ ID NO: 219631 - RNA, 20 nt, Homo sapiens
aaugguaguuuuacaguguu

SEQ ID NO: 219632 - RNA, 20 nt, Homo sapiens
gaauguuuucaaauguucuc

SEQ ID NO: 219633 - RNA, 19 nt, Homo sapiens
cucccucccccuggcacug

SEQ ID NO: 219634 - RNA, 19 nt, Homo sapiens
aggaagcugugagagcagu

SEQ ID NO: 219635 - RNA, 18 nt, Homo sapiens
ugaaggcagcagaauauu

SEQ ID NO: 219636 - RNA, 21 nt, Homo sapiens
aggaggugggauaucacuucc

SEQ ID NO: 219637 - RNA, 21 nt, Homo sapiens
auuaauauccaauugcugcuu

SEQ ID NO: 219638 - RNA, 15 nt, Homo sapiens
agacauuauauagca

SEQ ID NO: 219639 - RNA, 20 nt, Homo sapiens
ugugaaggcaggggaaugua

SEQ ID NO: 219640 - RNA, 14 nt, Homo sapiens
auccaauugcugcu

SEQ ID NO: 219641 - RNA, 13 nt, Homo sapiens
aauguucacuggu

SEQ ID NO: 219642 - RNA, 16 nt, Homo sapiens
aaauagaugacauuga

SEQ ID NO: 219643 - RNA, 22 nt, Homo sapiens
uuccuaugcuguucacuggaca

SEQ ID NO: 219644 - RNA, 22 nt, Homo sapiens
guaauaaacucauuucuagcag

SEQ ID NO: 219645 - RNA, 13 nt, Homo sapiens
ugccucuggaugc

SEQ ID NO: 219646 - RNA, 12 nt, Homo sapiens
agcaacacaaag

SEQ ID NO: 219647 - RNA, 14 nt, Homo sapiens
uccaauugcugcuu

SEQ ID NO: 219648 - RNA, 15 nt, Homo sapiens
auagaugacauugac

SEQ ID NO: 219649 - RNA, 21 nt, Homo sapiens
ggccacccaggaacuccugac

SEQ ID NO: 219650 - RNA, 20 nt, Homo sapiens
cuguaauuccuaacuaucac

SEQ ID NO: 219651 - RNA, 20 nt, Homo sapiens
ucuaaagauacagugucuga

SEQ ID NO: 219652 - RNA, 22 nt, Homo sapiens
uggacacuucacgcccuuggcc

SEQ ID NO: 219653 - RNA, 13 nt, Homo sapiens
aaacuacauugac

SEQ ID NO: 219654 - RNA, 16 nt, Homo sapiens
acaugcuguacauacu

SEQ ID NO: 219655 - RNA, 23 nt, Homo sapiens
gcuggaguuauugaagcagagug

SEQ ID NO: 219656 - RNA, 14 nt, Homo sapiens
gcaaagaugaaggu

SEQ ID NO: 219657 - RNA, 13 nt, Homo sapiens
uacagagaagauu

SEQ ID NO: 219658 - RNA, 20 nt, Homo sapiens
aauguggauuaaagugccca

SEQ ID NO: 219659 - RNA, 18 nt, Homo sapiens
guauuugaaacacugguu

SEQ ID NO: 219660 - RNA, 15 nt, Homo sapiens
gcagcgccagugaca

SEQ ID NO: 219661 - RNA, 14 nt, Homo sapiens
caauauccuaauaa

SEQ ID NO: 219662 - RNA, 19 nt, Homo sapiens
cugaggagccugcaacaug

SEQ ID NO: 219663 - RNA, 16 nt, Homo sapiens
auugaaggaugcuguc

SEQ ID NO: 219664 - RNA, 22 nt, Homo sapiens
auuucugaggagccugcaacau

SEQ ID NO: 219665 - RNA, 19 nt, Homo sapiens
uuacuuuuuggaaaagaau

SEQ ID NO: 219666 - RNA, 12 nt, Homo sapiens
ccucucucugua

SEQ ID NO: 219667 - RNA, 20 nt, Homo sapiens
aggguauguuuuauauagca

SEQ ID NO: 219668 - RNA, 17 nt, Homo sapiens
aacagcaacacaaagcu

SEQ ID NO: 219669 - RNA, 14 nt, Homo sapiens
uagaugaaugucag

SEQ ID NO: 219670 - RNA, 23 nt, Homo sapiens
uucuuuaagcagcgccagugaca

SEQ ID NO: 219671 - RNA, 17 nt, Homo sapiens
caaugagaucauuguga

SEQ ID NO: 219672 - RNA, 17 nt, Homo sapiens
ccagucauuauguuaau

SEQ ID NO: 219673 - RNA, 14 nt, Homo sapiens
ugcugaacaucaca

SEQ ID NO: 219674 - RNA, 16 nt, Homo sapiens
ggugacauugcaccug

SEQ ID NO: 219675 - RNA, 15 nt, Homo sapiens
uuaccccucacaauc

SEQ ID NO: 219676 - RNA, 21 nt, Homo sapiens
ugguaguuuuacaguguuucu

SEQ ID NO: 219677 - RNA, 13 nt, Homo sapiens
cucaaacuaacag

SEQ ID NO: 219678 - RNA, 20 nt, Homo sapiens
auuauugucaaagaagucau

SEQ ID NO: 219679 - RNA, 19 nt, Homo sapiens
gcauacugccuuguuuaau

SEQ ID NO: 219680 - RNA, 13 nt, Homo sapiens
acuuccaugacau

SEQ ID NO: 219681 - RNA, 11 nt, Homo sapiens
uuuacaguguu

SEQ ID NO: 219682 - RNA, 17 nt, Homo sapiens
ggcaguggaugggugcu

SEQ ID NO: 219683 - RNA, 23 nt, Homo sapiens
uuucuggaugaaugcccagugag

SEQ ID NO: 219684 - RNA, 23 nt, Homo sapiens
auucauucuuuuugaaaugucaa

SEQ ID NO: 219685 - RNA, 20 nt, Homo sapiens
agcacaaagcagauccucaa

SEQ ID NO: 219686 - RNA, 23 nt, Homo sapiens
gugagacuguguuguacagcuag

SEQ ID NO: 219687 - RNA, 17 nt, Homo sapiens
agcagauccucaauaaa

SEQ ID NO: 219688 - RNA, 19 nt, Homo sapiens
uaagaacuaaaauguucua

SEQ ID NO: 219689 - RNA, 20 nt, Homo sapiens
cuuaagaaauuuguggaaaa

SEQ ID NO: 219690 - RNA, 15 nt, Homo sapiens
agggauuuucagccc

SEQ ID NO: 219691 - RNA, 14 nt, Homo sapiens
uggugacauugcac

SEQ ID NO: 219692 - RNA, 15 nt, Homo sapiens
uuagaugaaugucag

SEQ ID NO: 219693 - RNA, 12 nt, Homo sapiens
auacagugucug

SEQ ID NO: 219694 - RNA, 14 nt, Homo sapiens
auguaaaacugaac

SEQ ID NO: 219695 - RNA, 13 nt, Homo sapiens
cuuauuuccucau

SEQ ID NO: 219696 - RNA, 23 nt, Homo sapiens
gucucccuuccuaugcuguucac

SEQ ID NO: 219697 - RNA, 19 nt, Homo sapiens
uuaauauccaauugcugcu

SEQ ID NO: 219698 - RNA, 17 nt, Homo sapiens
uauaaccuuguuccaaa

SEQ ID NO: 219699 - RNA, 22 nt, Homo sapiens
acuuauggggccaaaauagcau

SEQ ID NO: 219700 - RNA, 12 nt, Homo sapiens
aaacacauuaaa

SEQ ID NO: 219701 - RNA, 16 nt, Homo sapiens
aacucauuucuagcag

SEQ ID NO: 219702 - RNA, 18 nt, Homo sapiens
gccacuggacugacgacu

SEQ ID NO: 219703 - RNA, 20 nt, Homo sapiens
acuguccuauuauauucauu

SEQ ID NO: 219704 - RNA, 16 nt, Homo sapiens
uauccaaucugugaug

SEQ ID NO: 219705 - RNA, 21 nt, Homo sapiens
gcaacaugccagccacuguga

SEQ ID NO: 219706 - RNA, 14 nt, Homo sapiens
ugcacgcacacugu

SEQ ID NO: 219707 - RNA, 18 nt, Homo sapiens
gcucuccccuucucugua

SEQ ID NO: 219708 - RNA, 16 nt, Homo sapiens
auuccuaacuaucacu

SEQ ID NO: 219709 - RNA, 23 nt, Homo sapiens
aaacugaacuucagagcaugaaa

SEQ ID NO: 219710 - RNA, 14 nt, Homo sapiens
acuuccaugacaua

SEQ ID NO: 219711 - RNA, 16 nt, Homo sapiens
cacacuguccuauuau

SEQ ID NO: 219712 - RNA, 20 nt, Homo sapiens
uuuuauccuagucauucuuc

SEQ ID NO: 219713 - RNA, 23 nt, Homo sapiens
uguuuugccaauuugcacauuaa

SEQ ID NO: 219714 - RNA, 15 nt, Homo sapiens
gaagucuucuauuua

SEQ ID NO: 219715 - RNA, 22 nt, Homo sapiens
uuggguuuauuuggaaaggaau

SEQ ID NO: 219716 - RNA, 17 nt, Homo sapiens
guuuagaugaaugucag

SEQ ID NO: 219717 - RNA, 18 nt, Homo sapiens
uagagguacacuugugaa

SEQ ID NO: 219718 - RNA, 14 nt, Homo sapiens
acauugacagauug

SEQ ID NO: 219719 - RNA, 15 nt, Homo sapiens
auugugccccaugcu

SEQ ID NO: 219720 - RNA, 16 nt, Homo sapiens
gcaaauggccaaugag

SEQ ID NO: 219721 - RNA, 18 nt, Homo sapiens
guucacuggacacuucac

SEQ ID NO: 219722 - RNA, 11 nt, Homo sapiens
auucuuggccc

SEQ ID NO: 219723 - RNA, 12 nt, Homo sapiens
guuugcagagua

SEQ ID NO: 219724 - RNA, 22 nt, Homo sapiens
aaacgauaaaauguggauuaaa

SEQ ID NO: 219725 - RNA, 19 nt, Homo sapiens
caacugaaguucuauuuau

SEQ ID NO: 219726 - RNA, 17 nt, Homo sapiens
gcaaauggccaaugaga

SEQ ID NO: 219727 - RNA, 13 nt, Homo sapiens
ggcagacuuucuu

SEQ ID NO: 219728 - RNA, 21 nt, Homo sapiens
guaaaacugaacuucagagca

SEQ ID NO: 219729 - RNA, 15 nt, Homo sapiens
aaacauuucauuucc

SEQ ID NO: 219730 - RNA, 20 nt, Homo sapiens
ggccagaagucaaggcuuag

SEQ ID NO: 219731 - RNA, 14 nt, Homo sapiens
ugcaccuggaugua

SEQ ID NO: 219732 - RNA, 18 nt, Homo sapiens
uacagagaagauucuugu

SEQ ID NO: 219733 - RNA, 14 nt, Homo sapiens
caagcaaauggcca

SEQ ID NO: 219734 - RNA, 23 nt, Homo sapiens
augcuguucacuggacacuucac

SEQ ID NO: 219735 - RNA, 18 nt, Homo sapiens
aaaagacaacauaacuca

SEQ ID NO: 219736 - RNA, 21 nt, Homo sapiens
ucauucuuuuugaaaugucaa

SEQ ID NO: 219737 - RNA, 17 nt, Homo sapiens
auaucacuuccaugaca

SEQ ID NO: 219738 - RNA, 21 nt, Homo sapiens
uaaugguaguuuuacaguguu

SEQ ID NO: 219739 - RNA, 17 nt, Homo sapiens
uuggauguaaaacugaa

SEQ ID NO: 219740 - RNA, 17 nt, Homo sapiens
cuucaguuugcagagua

SEQ ID NO: 219741 - RNA, 16 nt, Homo sapiens
uuagguugugaaugca

SEQ ID NO: 219742 - RNA, 14 nt, Homo sapiens
augaaugcccagug

SEQ ID NO: 219743 - RNA, 19 nt, Homo sapiens
cggagcccugucuccucuc

SEQ ID NO: 219744 - RNA, 14 nt, Homo sapiens
gaaggaugcugucu

SEQ ID NO: 219745 - RNA, 14 nt, Homo sapiens
uggccugucuuugg

SEQ ID NO: 219746 - RNA, 22 nt, Homo sapiens
uucuggaugaaugcccagugag

SEQ ID NO: 219747 - RNA, 15 nt, Homo sapiens
aaucacacugucuuc

SEQ ID NO: 219748 - RNA, 21 nt, Homo sapiens
uugagaaauuuuuuuuuccag

SEQ ID NO: 219749 - RNA, 14 nt, Homo sapiens
auauugugccccau

SEQ ID NO: 219750 - RNA, 17 nt, Homo sapiens
gaagauucuauguuaau

SEQ ID NO: 219751 - RNA, 15 nt, Homo sapiens
uugguaacucuguaa

SEQ ID NO: 219752 - RNA, 14 nt, Homo sapiens
gaguuuggccagaa

SEQ ID NO: 219753 - RNA, 13 nt, Homo sapiens
aaauguggauuaa

SEQ ID NO: 219754 - RNA, 13 nt, Homo sapiens
agaauguuuucaa

SEQ ID NO: 219755 - RNA, 16 nt, Homo sapiens
cugaacaucacagcuu

SEQ ID NO: 219756 - RNA, 18 nt, Homo sapiens
caacaugccagccacugu

SEQ ID NO: 219757 - RNA, 20 nt, Homo sapiens
caggaagcugugagagcagu

SEQ ID NO: 219758 - RNA, 15 nt, Homo sapiens
uuggaaaggaaugca

SEQ ID NO: 219759 - RNA, 22 nt, Homo sapiens
gaguggaguuacugaacaguaa

SEQ ID NO: 219760 - RNA, 19 nt, Homo sapiens
auauaaaaauaaagcacuu

SEQ ID NO: 219761 - RNA, 17 nt, Homo sapiens
guaaggugcaucuguuu

SEQ ID NO: 219762 - RNA, 22 nt, Homo sapiens
agagcaugaaaaucacacuguc

SEQ ID NO: 219763 - RNA, 19 nt, Homo sapiens
cacugguuuguucccugug

SEQ ID NO: 219764 - RNA, 12 nt, Homo sapiens
cccuucucugua

SEQ ID NO: 219765 - RNA, 19 nt, Homo sapiens
cucagaugcacaugagcug

SEQ ID NO: 219766 - RNA, 16 nt, Homo sapiens
ucaguauuucaacuga

SEQ ID NO: 219767 - RNA, 21 nt, Homo sapiens
aucuguauguguucuauucag

SEQ ID NO: 219768 - RNA, 19 nt, Homo sapiens
ugcccagugagacuguguu

SEQ ID NO: 219769 - RNA, 12 nt, Homo sapiens
aauagaugacau

SEQ ID NO: 219770 - RNA, 18 nt, Homo sapiens
ucaaauguucuccaguca

SEQ ID NO: 219771 - RNA, 15 nt, Homo sapiens
accuggcaucuuaca

SEQ ID NO: 219772 - RNA, 19 nt, Homo sapiens
gucuccucucucuguaaua

SEQ ID NO: 219773 - RNA, 22 nt, Homo sapiens
agagcaguuugguuucuagcau

SEQ ID NO: 219774 - RNA, 21 nt, Homo sapiens
aagggauuuucagcccucaga

SEQ ID NO: 219775 - RNA, 18 nt, Homo sapiens
ccuaaucuuccacuugag

SEQ ID NO: 219776 - RNA, 21 nt, Homo sapiens
aauugcugcuuguacacucau

SEQ ID NO: 219777 - RNA, 16 nt, Homo sapiens
uucaauaacuggaaca

SEQ ID NO: 219778 - RNA, 14 nt, Homo sapiens
gagucuacagagaa

SEQ ID NO: 219779 - RNA, 16 nt, Homo sapiens
uuauugauguuuucau

SEQ ID NO: 219780 - RNA, 17 nt, Homo sapiens
cugauggugacauugca

SEQ ID NO: 219781 - RNA, 23 nt, Homo sapiens
aauaucccuuggacauuuuaugu

SEQ ID NO: 219782 - RNA, 15 nt, Homo sapiens
ggguuaggaagaaaa

SEQ ID NO: 219783 - RNA, 17 nt, Homo sapiens
gcccaggauuauuguca

SEQ ID NO: 219784 - RNA, 18 nt, Homo sapiens
gucaaagaagucauucuu

SEQ ID NO: 219785 - RNA, 17 nt, Homo sapiens
aggagcaugagugccgu

SEQ ID NO: 219786 - RNA, 18 nt, Homo sapiens
cagaauauugugccccau

SEQ ID NO: 219787 - RNA, 15 nt, Homo sapiens
gagaagauucuugua

SEQ ID NO: 219788 - RNA, 15 nt, Homo sapiens
ugggauaucacuucc

SEQ ID NO: 219789 - RNA, 21 nt, Homo sapiens
cucuguauuccuagaaacuga

SEQ ID NO: 219790 - RNA, 15 nt, Homo sapiens
aacuaaaauguucua

SEQ ID NO: 219791 - RNA, 16 nt, Homo sapiens
ucuggaugcugugaag

SEQ ID NO: 219792 - RNA, 18 nt, Homo sapiens
acuucacgcccuuggcca

SEQ ID NO: 219793 - RNA, 12 nt, Homo sapiens
ugccacagugug

SEQ ID NO: 219794 - RNA, 20 nt, Homo sapiens
ucuacagagaagauucuugu

SEQ ID NO: 219795 - RNA, 17 nt, Homo sapiens
ccaauagcaaggcugug

SEQ ID NO: 219796 - RNA, 15 nt, Homo sapiens
uuaaauauuuugacu

SEQ ID NO: 219797 - RNA, 14 nt, Homo sapiens
uggccagaagucaa

SEQ ID NO: 219798 - RNA, 21 nt, Homo sapiens
gauaucacuuccaugacauaa

SEQ ID NO: 219799 - RNA, 16 nt, Homo sapiens
uuccuagaaacugaca

SEQ ID NO: 219800 - RNA, 22 nt, Homo sapiens
ggaugggugcuuaguaaguacu

SEQ ID NO: 219801 - RNA, 15 nt, Homo sapiens
acaaagcuuuugcau

SEQ ID NO: 219802 - RNA, 20 nt, Homo sapiens
uugacagauugaauuugccu

SEQ ID NO: 219803 - RNA, 13 nt, Homo sapiens
agaugaaugucag

SEQ ID NO: 219804 - RNA, 22 nt, Homo sapiens
cuggaguuauugaagcagagug

SEQ ID NO: 219805 - RNA, 16 nt, Homo sapiens
gaaaaucacacugucu

SEQ ID NO: 219806 - RNA, 15 nt, Homo sapiens
cugugaugacauucc

SEQ ID NO: 219807 - RNA, 12 nt, Homo sapiens
ucccauucuugg

SEQ ID NO: 219808 - RNA, 15 nt, Homo sapiens
uuaauauuucugagg

SEQ ID NO: 219809 - RNA, 20 nt, Homo sapiens
auaguccgucucugcuuauc

SEQ ID NO: 219810 - RNA, 22 nt, Homo sapiens
gucaaccccaaguuaguucaau

SEQ ID NO: 219811 - RNA, 12 nt, Homo sapiens
cugcacacuguc

SEQ ID NO: 219812 - RNA, 19 nt, Homo sapiens
gcugauggugacauugcac

SEQ ID NO: 219813 - RNA, 13 nt, Homo sapiens
agcauguccuaau

SEQ ID NO: 219814 - RNA, 12 nt, Homo sapiens
uuggcccaggau

SEQ ID NO: 219815 - RNA, 16 nt, Homo sapiens
agagugcuuuaccaau

SEQ ID NO: 219816 - RNA, 16 nt, Homo sapiens
cucaguagucagacug

SEQ ID NO: 219817 - RNA, 19 nt, Homo sapiens
caauccuugccacagugug

SEQ ID NO: 219818 - RNA, 14 nt, Homo sapiens
gaaugauauaaggu

SEQ ID NO: 219819 - RNA, 19 nt, Homo sapiens
cucagaaucgcuccaccuu

SEQ ID NO: 219820 - RNA, 14 nt, Homo sapiens
acucauucauuacu

SEQ ID NO: 219821 - RNA, 19 nt, Homo sapiens
gauuuagcaggaagcugug

SEQ ID NO: 219822 - RNA, 16 nt, Homo sapiens
uugagugucaagcuga

SEQ ID NO: 219823 - RNA, 14 nt, Homo sapiens
ccagugagacugug

SEQ ID NO: 219824 - RNA, 21 nt, Homo sapiens
augacuauucaguggcuaacu

SEQ ID NO: 219825 - RNA, 17 nt, Homo sapiens
gccucuggaugcuguga

SEQ ID NO: 219826 - RNA, 13 nt, Homo sapiens
acugggaugaggu

SEQ ID NO: 219827 - RNA, 14 nt, Homo sapiens
aaugcuugcugcug

SEQ ID NO: 219828 - RNA, 17 nt, Homo sapiens
caagcugaccuugcuga

SEQ ID NO: 219829 - RNA, 21 nt, Homo sapiens
uauuuaaauagaugacauuga

SEQ ID NO: 219830 - RNA, 13 nt, Homo sapiens
acuaucacugguu

SEQ ID NO: 219831 - RNA, 13 nt, Homo sapiens
ccaauugaaguaa

SEQ ID NO: 219832 - RNA, 22 nt, Homo sapiens
uuucuggaugaaugcccaguga

SEQ ID NO: 219833 - RNA, 17 nt, Homo sapiens
ccaauuugcacauuaaa

SEQ ID NO: 219834 - RNA, 17 nt, Homo sapiens
cacuuuauuucucucau

SEQ ID NO: 219835 - RNA, 17 nt, Homo sapiens
caguuugguuucuagca

SEQ ID NO: 219836 - RNA, 21 nt, Homo sapiens
cuuaauuauugauguuuucau

SEQ ID NO: 219837 - RNA, 22 nt, Homo sapiens
cuuaauaaacuguggugcuuuu

SEQ ID NO: 219838 - RNA, 15 nt, Homo sapiens
guagucagacuggau

SEQ ID NO: 219839 - RNA, 14 nt, Homo sapiens
gcaggcuggaguua

SEQ ID NO: 219840 - RNA, 12 nt, Homo sapiens
ugaguggaguua

SEQ ID NO: 219841 - RNA, 15 nt, Homo sapiens
ugcaccuggauguac

SEQ ID NO: 219842 - RNA, 14 nt, Homo sapiens
ucauuauguuaaua

SEQ ID NO: 219843 - RNA, 18 nt, Homo sapiens
aaucgcuccaccuugcag

SEQ ID NO: 219844 - RNA, 21 nt, Homo sapiens
caauaaacauuucauuuccca

SEQ ID NO: 219845 - RNA, 15 nt, Homo sapiens
ugagaucauugugaa

SEQ ID NO: 219846 - RNA, 19 nt, Homo sapiens
aacaugccagccacuguga

SEQ ID NO: 219847 - RNA, 15 nt, Homo sapiens
gugcacgcacacugu

SEQ ID NO: 219848 - RNA, 20 nt, Homo sapiens
augcugucuucguacuggga

SEQ ID NO: 219849 - RNA, 19 nt, Homo sapiens
agaaaaggccuucuuccca

SEQ ID NO: 219850 - RNA, 17 nt, Homo sapiens
cugaacuuuguggucga

SEQ ID NO: 219851 - RNA, 16 nt, Homo sapiens
acccucagaugcacau

SEQ ID NO: 219852 - RNA, 11 nt, Homo sapiens
ugguacucugc

SEQ ID NO: 219853 - RNA, 15 nt, Homo sapiens
agacuuucuucucua

SEQ ID NO: 219854 - RNA, 20 nt, Homo sapiens
acaucaaucuaaagauacag

SEQ ID NO: 219855 - RNA, 16 nt, Homo sapiens
uauugcauacuauuaa

SEQ ID NO: 219856 - RNA, 14 nt, Homo sapiens
cuuaauaaacugug

SEQ ID NO: 219857 - RNA, 17 nt, Homo sapiens
caauugcugcuuguaca

SEQ ID NO: 219858 - RNA, 14 nt, Homo sapiens
auuuauuuauucau

SEQ ID NO: 219859 - RNA, 23 nt, Homo sapiens
uuggccaugggucccauucuugg

SEQ ID NO: 219860 - RNA, 12 nt, Homo sapiens
cuuagaacaaag

SEQ ID NO: 219861 - RNA, 23 nt, Homo sapiens
aacuaacaggcuuagugauguaa

SEQ ID NO: 219862 - RNA, 14 nt, Homo sapiens
auaguccgucucug

SEQ ID NO: 219863 - RNA, 13 nt, Homo sapiens
ccuagaaacugac

SEQ ID NO: 219864 - RNA, 19 nt, Homo sapiens
auucuuuuugaaaugucaa

SEQ ID NO: 219865 - RNA, 20 nt, Homo sapiens
agcagaguggcagucuucag

SEQ ID NO: 219866 - RNA, 21 nt, Homo sapiens
guucaaucuggauucauauuu

SEQ ID NO: 219867 - RNA, 13 nt, Homo sapiens
cagcaacacaaag

SEQ ID NO: 219868 - RNA, 13 nt, Homo sapiens
acacucgccagcu

SEQ ID NO: 219869 - RNA, 23 nt, Homo sapiens
ugugagacuguaaguuacaugaa

SEQ ID NO: 219870 - RNA, 20 nt, Homo sapiens
guggauuaaagugcccagca

SEQ ID NO: 219871 - RNA, 18 nt, Homo sapiens
agaaugcaguacuaacau

SEQ ID NO: 219872 - RNA, 13 nt, Homo sapiens
ucccuuggacauu

SEQ ID NO: 219873 - RNA, 23 nt, Homo sapiens
aaauauuuugacuuguugagggu

SEQ ID NO: 219874 - RNA, 20 nt, Homo sapiens
gauacagugucugacuauaa

SEQ ID NO: 219875 - RNA, 20 nt, Homo sapiens
caugagcuggcgggauugaa

SEQ ID NO: 219876 - RNA, 20 nt, Homo sapiens
ugaccuugcugauggugaca

SEQ ID NO: 219877 - RNA, 12 nt, Homo sapiens
uucaguuugcag

SEQ ID NO: 219878 - RNA, 17 nt, Homo sapiens
uccugucggagcccugu

SEQ ID NO: 219879 - RNA, 22 nt, Homo sapiens
uagaaaaggccuucuucccaau

SEQ ID NO: 219880 - RNA, 18 nt, Homo sapiens
cucacagaagaugaagca

SEQ ID NO: 219881 - RNA, 14 nt, Homo sapiens
ugugagacuguaag

SEQ ID NO: 219882 - RNA, 12 nt, Homo sapiens
uccaaucuguga

SEQ ID NO: 219883 - RNA, 23 nt, Homo sapiens
gcaagacauuauauagcaguaaa

SEQ ID NO: 219884 - RNA, 13 nt, Homo sapiens
augcuugcugcug

SEQ ID NO: 219885 - RNA, 22 nt, Homo sapiens
augcuguucacuggacacuuca

SEQ ID NO: 219886 - RNA, 13 nt, Homo sapiens
uugcugaugguga

SEQ ID NO: 219887 - RNA, 21 nt, Homo sapiens
cguucccggguagccacugga

SEQ ID NO: 219888 - RNA, 16 nt, Homo sapiens
auaaugucccuucaca

SEQ ID NO: 219889 - RNA, 19 nt, Homo sapiens
cuuguaaggcauacugccu

SEQ ID NO: 219890 - RNA, 19 nt, Homo sapiens
uaguucaaucuggauucau

SEQ ID NO: 219891 - RNA, 14 nt, Homo sapiens
acuaaaauguucua

SEQ ID NO: 219892 - RNA, 11 nt, Homo sapiens
aaucacacugu

SEQ ID NO: 219893 - RNA, 15 nt, Homo sapiens
acacugucuucugau

SEQ ID NO: 219894 - RNA, 21 nt, Homo sapiens
guuuuacaguguuucuggcuu

SEQ ID NO: 219895 - RNA, 19 nt, Homo sapiens
gauaucugcagggacagag

SEQ ID NO: 219896 - RNA, 19 nt, Homo sapiens
caaucugugaugacauucc

SEQ ID NO: 219897 - RNA, 16 nt, Homo sapiens
gcaccuggauguacua

SEQ ID NO: 219898 - RNA, 11 nt, Homo sapiens
cucaugcugcc

SEQ ID NO: 219899 - RNA, 18 nt, Homo sapiens
uuaagcagcgccagugac

SEQ ID NO: 219900 - RNA, 19 nt, Homo sapiens
cuuuaagcagcgccaguga

SEQ ID NO: 219901 - RNA, 14 nt, Homo sapiens
uuuugaaaugucaa

SEQ ID NO: 219902 - RNA, 16 nt, Homo sapiens
augcugaacaucacag

SEQ ID NO: 219903 - RNA, 21 nt, Homo sapiens
cauacuauuaaacaugcugua

SEQ ID NO: 219904 - RNA, 22 nt, Homo sapiens
auuuccucauuuuuauaauguc

SEQ ID NO: 219905 - RNA, 13 nt, Homo sapiens
auguugcuaacag

SEQ ID NO: 219906 - RNA, 17 nt, Homo sapiens
cagugacagucagggaa

SEQ ID NO: 219907 - RNA, 17 nt, Homo sapiens
cuucacgcccuuggcca

SEQ ID NO: 219908 - RNA, 18 nt, Homo sapiens
gauaucugcagggacaga

SEQ ID NO: 219909 - RNA, 15 nt, Homo sapiens
ugauuucacagugug

SEQ ID NO: 219910 - RNA, 16 nt, Homo sapiens
caaugagaucauugug

SEQ ID NO: 219911 - RNA, 14 nt, Influenza B virus (B/Memphis/12/97)
uuuuaucuuaucag

SEQ ID NO: 219912 - RNA, 14 nt, Influenza B virus (B/Memphis/12/97)
uuaaguaaaagaau

SEQ ID NO: 219913 - RNA, 17 nt, Influenza B virus (B/Memphis/12/97)
uuauccauuaauucaau

SEQ ID NO: 219914 - RNA, 17 nt, Influenza B virus (B/Memphis/12/97)
uucggagaaaccaaagg

SEQ ID NO: 219915 - RNA, 20 nt, Influenza B virus (B/Memphis/12/97)
uggacaauagggcauuugaa

SEQ ID NO: 219916 - RNA, 19 nt, Influenza B virus (B/Memphis/12/97)
ugucagcaaauaaacugga

SEQ ID NO: 219917 - RNA, 19 nt, Influenza B virus (B/Memphis/12/97)
uguaaucaaugucagcaaa

SEQ ID NO: 219918 - RNA, 23 nt, Influenza B virus (B/Memphis/12/97)
uauggcugugauuguuucaauac

SEQ ID NO: 219919 - RNA, 12 nt, Influenza B virus (B/Memphis/12/97)
uaugcauuuaag

SEQ ID NO: 219920 - RNA, 17 nt, Influenza B virus (B/Memphis/12/97)
uaugcauuuaagcaaau

SEQ ID NO: 219921 - RNA, 15 nt, Influenza B virus (B/Memphis/12/97)
uccauuaauucaaua

SEQ ID NO: 219922 - RNA, 20 nt, Influenza B virus (B/Memphis/12/97)
uccauuaauucaauaaacac

SEQ ID NO: 219923 - RNA, 15 nt, Influenza B virus (B/Memphis/12/97)
ucuguucuaaacccu

SEQ ID NO: 219924 - RNA, 16 nt, Influenza B virus (B/Memphis/12/97)
ucuaauuucagucaaa

SEQ ID NO: 219925 - RNA, 20 nt, Influenza B virus (B/Memphis/12/97)
ugagacacaguuaccaaaaa

SEQ ID NO: 219926 - RNA, 13 nt, Influenza B virus (B/Memphis/12/97)
gaaacucagcucc

SEQ ID NO: 219927 - RNA, 14 nt, Influenza B virus (B/Memphis/12/97)
gauaauaagggaac

SEQ ID NO: 219928 - RNA, 18 nt, Influenza B virus (B/Memphis/12/97)
gauucggagaaaccaaag

SEQ ID NO: 219929 - RNA, 17 nt, Influenza B virus (B/Memphis/12/97)
gauggcccugacaguaa

SEQ ID NO: 219930 - RNA, 18 nt, Influenza B virus (B/Memphis/12/97)
gacaauagggcauuugaa

SEQ ID NO: 219931 - RNA, 20 nt, Influenza B virus (B/Memphis/12/97)
gagacacaguuaccaaaaag

SEQ ID NO: 219932 - RNA, 23 nt, Influenza B virus (B/Memphis/12/97)
cuauggcugugauuguuucaaua

SEQ ID NO: 219933 - RNA, 12 nt, Influenza B virus (B/Memphis/12/97)
cuaugcaaacaa

SEQ ID NO: 219934 - RNA, 17 nt, Influenza B virus (B/Memphis/12/97)
cucuaacccauuaugca

SEQ ID NO: 219935 - RNA, 20 nt, Influenza B virus (B/Memphis/12/97)
uaaauuuauccauuaauuca

SEQ ID NO: 219936 - RNA, 15 nt, Influenza B virus (B/Memphis/12/97)
guucauuauguaucu

SEQ ID NO: 219937 - RNA, 20 nt, Influenza B virus (B/Memphis/12/97)
uaagcaaauuguaaucaaug

SEQ ID NO: 219938 - RNA, 23 nt, Influenza B virus (B/Memphis/12/97)
uaagcaaauuguaaucaauguca

SEQ ID NO: 219939 - RNA, 19 nt, Influenza B virus (B/Memphis/12/97)
uaagcaaauuguaaucaau

SEQ ID NO: 219940 - RNA, 13 nt, Influenza B virus (B/Memphis/12/97)
uacuacaauggaa

SEQ ID NO: 219941 - RNA, 19 nt, Influenza B virus (B/Memphis/12/97)
uacuacaauggaacaagag

SEQ ID NO: 219942 - RNA, 15 nt, Influenza B virus (B/Memphis/12/97)
uauccauuaauucaa

SEQ ID NO: 219943 - RNA, 16 nt, Influenza B virus (B/Memphis/12/97)
uauccauuaauucaau

SEQ ID NO: 219944 - RNA, 21 nt, Influenza B virus (B/Memphis/12/97)
uauccauuaauucaauaaaca

SEQ ID NO: 219945 - RNA, 20 nt, Influenza B virus (B/Memphis/12/97)
uagauucggagaaaccaaag

SEQ ID NO: 219946 - RNA, 13 nt, Influenza B virus (B/Memphis/12/97)
uagacacuauggc

SEQ ID NO: 219947 - RNA, 14 nt, Influenza B virus (B/Memphis/12/97)
uagacacuauggcu

SEQ ID NO: 219948 - RNA, 17 nt, Influenza B virus (B/Memphis/12/97)
uagacacuauggcugug

SEQ ID NO: 219949 - RNA, 18 nt, Influenza B virus (B/Memphis/12/97)
guauuucuuauuaugcau

SEQ ID NO: 219950 - RNA, 19 nt, Influenza B virus (B/Memphis/12/97)
guacuauuuuguucauuau

SEQ ID NO: 219951 - RNA, 20 nt, Influenza B virus (B/Memphis/12/97)
guacucaauuuaguacuauu

SEQ ID NO: 219952 - RNA, 16 nt, Influenza B virus (B/Memphis/12/97)
guacuauuuuguucau

SEQ ID NO: 219953 - RNA, 20 nt, Influenza B virus (B/Memphis/12/97)
guaaucaaugucagcaaaua

SEQ ID NO: 219954 - RNA, 16 nt, Influenza B virus (B/Memphis/12/97)
ggauacuacaauggaa

SEQ ID NO: 219955 - RNA, 14 nt, Influenza B virus (B/Memphis/12/97)
gcucuccauuucau

SEQ ID NO: 219956 - RNA, 16 nt, Influenza B virus (B/Memphis/12/97)
gcuuguggaccaaagg

SEQ ID NO: 219957 - RNA, 16 nt, Influenza B virus (B/Memphis/12/97)
gcugugauuguuucaa

SEQ ID NO: 219958 - RNA, 15 nt, Influenza B virus (B/Memphis/12/97)
acaacauggagguau

SEQ ID NO: 219959 - RNA, 22 nt, Influenza B virus (B/Memphis/12/97)
acaaaauagacacuauggcugu

SEQ ID NO: 219960 - RNA, 12 nt, Influenza B virus (B/Memphis/12/97)
acaauugcccuu

SEQ ID NO: 219961 - RNA, 15 nt, Influenza B virus (B/Memphis/12/97)
acuauggcugugauu

SEQ ID NO: 219962 - RNA, 14 nt, Influenza B virus (B/Memphis/12/97)
aucaaugucagcaa

SEQ ID NO: 219963 - RNA, 15 nt, Influenza B virus (B/Memphis/12/97)
auaguacucaauuua

SEQ ID NO: 219964 - RNA, 14 nt, Influenza B virus (B/Memphis/12/97)
auaauaaaaauggg

SEQ ID NO: 219965 - RNA, 20 nt, Influenza B virus (B/Memphis/12/97)
aguacucaauuuaguacuau

SEQ ID NO: 219966 - RNA, 13 nt, Influenza B virus (B/Memphis/12/97)
aguagaaaacucc

SEQ ID NO: 219967 - RNA, 16 nt, Influenza B virus (B/Memphis/12/97)
auaaacagagagguau

SEQ ID NO: 219968 - RNA, 14 nt, Influenza B virus (B/Memphis/12/97)
aguuaccaaaaaga

SEQ ID NO: 219969 - RNA, 16 nt, Influenza B virus (B/Memphis/12/97)
cauuugaaucaaauaa

SEQ ID NO: 219970 - RNA, 21 nt, Influenza B virus (B/Memphis/12/97)
cauuucauggcuuggacaaua

SEQ ID NO: 219971 - RNA, 21 nt, Influenza B virus (B/Memphis/12/97)
ccauuaauucaauaaacacaa

SEQ ID NO: 219972 - RNA, 15 nt, Influenza B virus (B/Memphis/12/97)
ccauuaauucaauaa

SEQ ID NO: 219973 - RNA, 16 nt, Influenza B virus (B/Memphis/12/97)
cagcucuccauuucau

SEQ ID NO: 219974 - RNA, 19 nt, Influenza B virus (B/Memphis/12/97)
caagaaagugccugcaauu

SEQ ID NO: 219975 - RNA, 19 nt, Influenza B virus (B/Memphis/12/97)
caaauaaacuggaaaaagu

SEQ ID NO: 219976 - RNA, 19 nt, Influenza B virus (B/Memphis/12/97)
caacauccuaagaacacaa

SEQ ID NO: 219977 - RNA, 17 nt, Influenza B virus (B/Memphis/12/97)
auuuuguuuggacaauu

SEQ ID NO: 219978 - RNA, 15 nt, Influenza B virus (B/Memphis/12/97)
augcauuuaagcaaa

SEQ ID NO: 219979 - RNA, 12 nt, Influenza B virus (B/Memphis/12/97)
augcauugcuca

SEQ ID NO: 219980 - RNA, 17 nt, Influenza B virus (B/Memphis/12/97)
augcaaacaacauccua

SEQ ID NO: 219981 - RNA, 19 nt, Influenza B virus (B/Memphis/12/97)
augcaaacacuuugcucua

SEQ ID NO: 219982 - RNA, 23 nt, Influenza B virus (B/Memphis/12/97)
augucagcaaauaaacuggaaaa

SEQ ID NO: 219983 - RNA, 22 nt, Influenza B virus (B/Memphis/12/97)
auggcugugauuguuucaauac

SEQ ID NO: 219984 - RNA, 15 nt, Influenza B virus (B/Memphis/12/97)
auucaauaaacacaa

SEQ ID NO: 219985 - RNA, 21 nt, Influenza B virus (B/Memphis/12/97)
aaaagaaauccaggccaaaga

SEQ ID NO: 219986 - RNA, 23 nt, Influenza B virus (B/Memphis/12/97)
acuguauuucuuauuaugcauuu

SEQ ID NO: 219987 - RNA, 19 nt, Influenza B virus (B/Memphis/12/97)
agacacuauggcugugauu

SEQ ID NO: 219988 - RNA, 23 nt, Influenza B virus (B/Memphis/12/97)
acaagagaagacagaaacaagcu

SEQ ID NO: 219989 - RNA, 16 nt, Influenza B virus (B/Memphis/12/97)
acacuauggcugugau

SEQ ID NO: 219990 - RNA, 18 nt, Influenza B virus (B/Memphis/12/97)
acacuauggcugugauug

SEQ ID NO: 219991 - RNA, 20 nt, Influenza B virus (B/Memphis/12/97)
acauaccauuccuaugcaaa

SEQ ID NO: 219992 - RNA, 18 nt, Influenza B virus (B/Memphis/12/97)
acauaguacucaauuuag

SEQ ID NO: 219993 - RNA, 17 nt, Influenza B virus (B/Memphis/12/97)
acaguagaaaacuccau

SEQ ID NO: 219994 - RNA, 16 nt, Influenza B virus (B/Memphis/12/97)
aaauuguaaucaaugu

SEQ ID NO: 219995 - RNA, 17 nt, Influenza B virus (B/Memphis/12/97)
aacagagagguaucaau

SEQ ID NO: 219996 - RNA, 21 nt, Influenza B virus (B/Memphis/12/97)
aacauuguaugaaaugaagga

SEQ ID NO: 219997 - RNA, 20 nt, Influenza B virus (B/Memphis/12/97)
aaagaaauccaggccaaaga

SEQ ID NO: 219998 - RNA, 13 nt, Influenza B virus (B/Memphis/12/97)
aaagaaacaauga

SEQ ID NO: 219999 - RNA, 15 nt, Influenza B virus (B/Memphis/12/97)
aaaggaaacucagcu

SEQ ID NO: 220000 - RNA, 21 nt, Influenza B virus (B/Memphis/12/97)
aaugucagcaaauaaacugga

SEQ ID NO: 220001 - RNA, 14 nt, Influenza B virus (B/Memphis/12/97)
aauugaugauaaca

SEQ ID NO: 220002 - RNA, 17 nt, Influenza B virus (B/Memphis/12/97)
aauuguaaucaauguca

SEQ ID NO: 220003 - RNA, 22 nt, Influenza B virus (B/Memphis/12/97)
aauugggcaaaaucccaacagu

SEQ ID NO: 220004 - RNA, 11 nt, Influenza B virus (B/Memphis/12/97)
aauugcccuua

SEQ ID NO: 220005 - RNA, 14 nt, Influenza B virus (B/Memphis/12/97)
aauagacacuaugg

SEQ ID NO: 220006 - RNA, 14 nt, Influenza B virus (B/Memphis/12/97)
aauagggcauuuga

SEQ ID NO: 220007 - RNA, 12 nt, Influenza B virus (B/Memphis/12/97)
aauggacauaua

SEQ ID NO: 220008 - RNA, 16 nt, Influenza B virus (B/Memphis/12/97)
aaggaaacucagcucc

SEQ ID NO: 220009 - RNA, 20 nt, Influenza B virus (B/Memphis/12/97)
aagggaaccuuuuauugcuu

SEQ ID NO: 220010 - RNA, 21 nt, Influenza B virus (B/Memphis/12/97)
aagggaaccuuuuauugcuug

SEQ ID NO: 220011 - RNA, 22 nt, Influenza B virus (B/Memphis/12/97)
aagcauauacugacacauacca

SEQ ID NO: 220012 - RNA, 21 nt, Influenza B virus (B/Memphis/12/97)
caauagggcauuugaaucaaa

SEQ ID NO: 220013 - RNA, 18 nt, Influenza B virus (B/Memphis/12/97)
caacauccuaagaacaca

SEQ ID NO: 220014 - RNA, 15 nt, Influenza B virus (B/Memphis/12/97)
caaaauagacacuau

SEQ ID NO: 220015 - RNA, 18 nt, Influenza B virus (B/Memphis/12/97)
caaaauagacacuauggc

SEQ ID NO: 220016 - RNA, 17 nt, Influenza B virus (B/Memphis/12/97)
caaacaaagagacaaua

SEQ ID NO: 220017 - RNA, 14 nt, Influenza B virus (B/Memphis/12/97)
caaacaaagagaca

SEQ ID NO: 220018 - RNA, 20 nt, Influenza B virus (B/Memphis/12/97)
caaauugggcaaaaucccaa

SEQ ID NO: 220019 - RNA, 20 nt, Influenza B virus (B/Memphis/12/97)
cacauaccauuccuaugcaa

SEQ ID NO: 220020 - RNA, 12 nt, Influenza B virus (B/Memphis/12/97)
auggcugugauu

SEQ ID NO: 220021 - RNA, 21 nt, Influenza B virus (B/Memphis/12/97)
augucagcaaauaaacuggaa

SEQ ID NO: 220022 - RNA, 19 nt, Influenza B virus (B/Memphis/12/97)
auuaauucaauaaacacaa

SEQ ID NO: 220023 - RNA, 19 nt, Influenza B virus (B/Memphis/12/97)
auugcuuguggaccaaagg

SEQ ID NO: 220024 - RNA, 20 nt, Influenza B virus (B/Memphis/12/97)
auugcuuguggaccaaagga

SEQ ID NO: 220025 - RNA, 21 nt, Influenza B virus (B/Memphis/12/97)
auugcccuuacugaacuuaau

SEQ ID NO: 220026 - RNA, 23 nt, Influenza B virus (B/Memphis/12/97)
auugcucaaaauaaaauauggag

SEQ ID NO: 220027 - RNA, 15 nt, Influenza B virus (B/Memphis/12/97)
auuucuuauuaugca

SEQ ID NO: 220028 - RNA, 14 nt, Influenza B virus (B/Memphis/12/97)
auuuuguucauuau

SEQ ID NO: 220029 - RNA, 17 nt, Influenza B virus (B/Memphis/12/97)
auuuuguucauuaugua

SEQ ID NO: 220030 - RNA, 12 nt, Influenza B virus (B/Memphis/12/97)
agguccaaacaa

SEQ ID NO: 220031 - RNA, 15 nt, Influenza B virus (B/Memphis/12/97)
agguccaaacaaaga

SEQ ID NO: 220032 - RNA, 22 nt, Influenza B virus (B/Memphis/12/97)
aggaaugguugagucuguucua

SEQ ID NO: 220033 - RNA, 20 nt, Influenza B virus (B/Memphis/12/97)
auagacacuauggcugugau

SEQ ID NO: 220034 - RNA, 12 nt, Influenza B virus (B/Memphis/12/97)
auccaggccaaa

SEQ ID NO: 220035 - RNA, 22 nt, Influenza B virus (B/Memphis/12/97)
auagauucggagaaaccaaagg

SEQ ID NO: 220036 - RNA, 17 nt, Influenza B virus (B/Memphis/12/97)
aucaauuuugagacaca

SEQ ID NO: 220037 - RNA, 16 nt, Influenza B virus (B/Memphis/12/97)
aucaauuuugagacac

SEQ ID NO: 220038 - RNA, 21 nt, Influenza B virus (B/Memphis/12/97)
uguuccuauuuuguuuggaca

SEQ ID NO: 220039 - RNA, 14 nt, Influenza B virus (B/Memphis/12/97)
uuacugaacuuaau

SEQ ID NO: 220040 - RNA, 17 nt, Influenza B virus (B/Memphis/12/97)
ugguagagaauggacau

SEQ ID NO: 220041 - RNA, 12 nt, Influenza B virus (B/Memphis/12/97)
uggaccaaagga

SEQ ID NO: 220042 - RNA, 21 nt, Influenza B virus (B/Memphis/12/97)
uguaaucaaugucagcaaaua

SEQ ID NO: 220043 - RNA, 16 nt, Influenza B virus (B/Memphis/12/97)
ugcuuguggaccaaag

SEQ ID NO: 220044 - RNA, 15 nt, Influenza B virus (B/Memphis/12/97)
ugaugauaacauauu

SEQ ID NO: 220045 - RNA, 19 nt, Influenza B virus (B/Memphis/12/97)
ugcaaacacuuugcucuaa

SEQ ID NO: 220046 - RNA, 21 nt, Influenza B virus (B/Memphis/12/97)
ugagacacaguuaccaaaaag

SEQ ID NO: 220047 - RNA, 21 nt, Influenza B virus (B/Memphis/12/97)
uuuucacauggcagcuuggag

SEQ ID NO: 220048 - RNA, 16 nt, Influenza B virus (B/Memphis/12/97)
uuucagauucuuucaa

SEQ ID NO: 220049 - RNA, 19 nt, Influenza B virus (B/Memphis/12/97)
uuguucauuauguaucuaa

SEQ ID NO: 220050 - RNA, 23 nt, Influenza B virus (B/Memphis/12/97)
uuggagcggguccgcaugccaug

SEQ ID NO: 220051 - RNA, 14 nt, Influenza B virus (B/Memphis/12/97)
uugcucuaacccau

SEQ ID NO: 220052 - RNA, 23 nt, Influenza B virus (B/Memphis/12/97)
aauaaaagguccaaacaaagaga

SEQ ID NO: 220053 - RNA, 14 nt, Influenza B virus (B/Memphis/12/97)
aauaaaagguccaa

SEQ ID NO: 220054 - RNA, 13 nt, Influenza B virus (B/Memphis/12/97)
aauaaacagagag

SEQ ID NO: 220055 - RNA, 22 nt, Influenza B virus (B/Memphis/12/97)
aauagcugacaugguuguauca

SEQ ID NO: 220056 - RNA, 20 nt, Influenza B virus (B/Memphis/12/97)
aauagacacuauggcuguga

SEQ ID NO: 220057 - RNA, 23 nt, Influenza B virus (B/Memphis/12/97)
aagcauauacugacacauaccau

SEQ ID NO: 220058 - RNA, 15 nt, Influenza B virus (B/Memphis/12/97)
guacuauuuuguuca

SEQ ID NO: 220059 - RNA, 17 nt, Influenza B virus (B/Memphis/12/97)
guacuauuuuguucauu

SEQ ID NO: 220060 - RNA, 21 nt, Influenza B virus (B/Memphis/12/97)
guauuucuuauuaugcauuua

SEQ ID NO: 220061 - RNA, 22 nt, Influenza B virus (B/Memphis/12/97)
guauuucuuauuaugcauuuaa

SEQ ID NO: 220062 - RNA, 11 nt, Influenza B virus (B/Memphis/12/97)
guggaccaaag

SEQ ID NO: 220063 - RNA, 12 nt, Influenza B virus (B/Memphis/12/97)
guggaccaaagg

SEQ ID NO: 220064 - RNA, 15 nt, Influenza B virus (B/Memphis/12/97)
guggaccaaaggaau

SEQ ID NO: 220065 - RNA, 22 nt, Influenza B virus (B/Memphis/12/97)
guucuaaacccuuuguuccuau

SEQ ID NO: 220066 - RNA, 15 nt, Influenza B virus (B/Memphis/12/97)
guugagucuguucua

SEQ ID NO: 220067 - RNA, 15 nt, Influenza B virus (B/Memphis/12/97)
uacucaauuuaguac

SEQ ID NO: 220068 - RNA, 17 nt, Influenza B virus (B/Memphis/12/97)
uacuauuuuguucauua

SEQ ID NO: 220069 - RNA, 18 nt, Influenza B virus (B/Memphis/12/97)
uacuauuuuguucauuau

SEQ ID NO: 220070 - RNA, 13 nt, Influenza B virus (B/Memphis/12/97)
uacaauggaacaa

SEQ ID NO: 220071 - RNA, 19 nt, Influenza B virus (B/Memphis/12/97)
ucaauuuugagacacaguu

SEQ ID NO: 220072 - RNA, 14 nt, Influenza B virus (B/Memphis/12/97)
ucaauuuaguacua

SEQ ID NO: 220073 - RNA, 16 nt, Influenza B virus (B/Memphis/12/97)
ucagcucuccauuuca

SEQ ID NO: 220074 - RNA, 19 nt, Influenza B virus (B/Memphis/12/97)
uagaagaauugcauuaaau

SEQ ID NO: 220075 - RNA, 13 nt, Influenza B virus (B/Memphis/12/97)
uauggcugugauu

SEQ ID NO: 220076 - RNA, 11 nt, Influenza B virus (B/Memphis/12/97)
uauggcuguga

SEQ ID NO: 220077 - RNA, 17 nt, Influenza B virus (B/Memphis/12/97)
uaugcagcccaaccagg

SEQ ID NO: 220078 - RNA, 15 nt, Influenza B virus (B/Memphis/12/97)
ucccaacaguagaaa

SEQ ID NO: 220079 - RNA, 18 nt, Influenza B virus (B/Memphis/12/97)
cuaaacccuuuguuccua

SEQ ID NO: 220080 - RNA, 15 nt, Influenza B virus (B/Memphis/12/97)
cggagaaaccaaagg

SEQ ID NO: 220081 - RNA, 20 nt, Influenza B virus (B/Memphis/12/97)
aaacaguuuuggagauagaa

SEQ ID NO: 220082 - RNA, 14 nt, Influenza B virus (B/Memphis/12/97)
cugugauuguuuca

SEQ ID NO: 220083 - RNA, 17 nt, Influenza B virus (B/Memphis/12/97)
cugugauuguuucaaua

SEQ ID NO: 220084 - RNA, 22 nt, Influenza B virus (B/Memphis/12/97)
cucauagauucggagaaaccaa

SEQ ID NO: 220085 - RNA, 17 nt, Influenza B virus (B/Memphis/12/97)
cucaauuuaguacuauu

SEQ ID NO: 220086 - RNA, 22 nt, Influenza B virus (B/Memphis/12/97)
cuauggcugugauuguuucaau

SEQ ID NO: 220087 - RNA, 14 nt, Influenza B virus (B/Memphis/12/97)
cuauggcugugauu

SEQ ID NO: 220088 - RNA, 18 nt, Influenza B virus (B/Memphis/12/97)
cucuaacccauuaugcag

SEQ ID NO: 220089 - RNA, 16 nt, Influenza B virus (B/Memphis/12/97)
ccaaaggaaugcaaac

SEQ ID NO: 220090 - RNA, 13 nt, Influenza B virus (B/Memphis/12/97)
cauuaauucaaua

SEQ ID NO: 220091 - RNA, 16 nt, Influenza B virus (B/Memphis/12/97)
cauauacugacacaua

SEQ ID NO: 220092 - RNA, 21 nt, Influenza B virus (B/Memphis/12/97)
cauauacugacacauaccauu

SEQ ID NO: 220093 - RNA, 22 nt, Influenza B virus (B/Memphis/12/97)
cauaguacucaauuuaguacua

SEQ ID NO: 220094 - RNA, 20 nt, Influenza B virus (B/Memphis/12/97)
cauaccauuccuaugcaaac

SEQ ID NO: 220095 - RNA, 15 nt, Influenza B virus (B/Memphis/12/97)
caggccaaagaaaca

SEQ ID NO: 220096 - RNA, 19 nt, Influenza B virus (B/Memphis/12/97)
gcuuguggaccaaaggaau

SEQ ID NO: 220097 - RNA, 19 nt, Influenza B virus (B/Memphis/12/97)
ggggauacuacaauggaac

SEQ ID NO: 220098 - RNA, 12 nt, Influenza B virus (B/Memphis/12/97)
ggaccaaaggaa

SEQ ID NO: 220099 - RNA, 18 nt, Influenza B virus (B/Memphis/12/97)
gacauaguacucaauuua

SEQ ID NO: 220100 - RNA, 16 nt, Influenza B virus (B/Memphis/12/97)
gaaacaagcugaggca

SEQ ID NO: 220101 - RNA, 19 nt, Influenza B virus (B/Memphis/12/97)
gaaaauuaagcccuguauu

SEQ ID NO: 220102 - RNA, 12 nt, Influenza B virus (B/Memphis/12/97)
aaagagacaaua

SEQ ID NO: 220103 - RNA, 24 nt, Influenza B virus (B/Memphis/12/97)
gaaggaaguacucucugacaacau

SEQ ID NO: 220104 - RNA, 18 nt, Influenza B virus (B/Memphis/12/97)
uggcugugauuguuucaa

SEQ ID NO: 220105 - RNA, 13 nt, Influenza B virus (B/Memphis/12/97)
uguuuggacaauu

SEQ ID NO: 220106 - RNA, 17 nt, Influenza B virus (B/Memphis/12/97)
uguuccacaaaacagua

SEQ ID NO: 220107 - RNA, 18 nt, Influenza B virus (B/Memphis/12/97)
uguucauuauguaucuaa

SEQ ID NO: 220108 - RNA, 16 nt, Influenza B virus (B/Memphis/12/97)
ugugauuguuucaaua

SEQ ID NO: 220109 - RNA, 23 nt, Influenza B virus (B/Memphis/12/97)
uuccuauuuuguuuggacaauug

SEQ ID NO: 220110 - RNA, 13 nt, Influenza B virus (B/Memphis/12/97)
uucauuauguauc

SEQ ID NO: 220111 - RNA, 14 nt, Influenza B virus (B/Memphis/12/97)
uucauuauguaucu

SEQ ID NO: 220112 - RNA, 16 nt, Influenza B virus (B/Memphis/12/97)
uugcauuaaauucaau

SEQ ID NO: 220113 - RNA, 20 nt, Influenza B virus (B/Memphis/12/97)
uuggacaauagggcauuuga

SEQ ID NO: 220114 - RNA, 16 nt, Influenza B virus (B/Memphis/12/97)
uuggacaauugcccuu

SEQ ID NO: 220115 - RNA, 20 nt, Influenza B virus (B/Memphis/12/97)
uuguuccacaaaacaguaau

SEQ ID NO: 220116 - RNA, 23 nt, Influenza B virus (B/Memphis/12/97)
uuuauccauuaauucaauaaaca

SEQ ID NO: 220117 - RNA, 17 nt, Influenza B virus (B/Memphis/12/97)
ucauuauuagaaacauu

SEQ ID NO: 220118 - RNA, 14 nt, Influenza B virus (B/Memphis/12/97)
ucuaaacccuuugu

SEQ ID NO: 220119 - RNA, 16 nt, Influenza B virus (B/Memphis/12/97)
ucggagaaaccaaagg

SEQ ID NO: 220120 - RNA, 15 nt, Influenza B virus (B/Memphis/12/97)
ugccugcaauugcau

SEQ ID NO: 220121 - RNA, 12 nt, Influenza B virus (B/Memphis/12/97)
ugcauugcucaa

SEQ ID NO: 220122 - RNA, 19 nt, Influenza B virus (B/Memphis/12/97)
ugaggcaucuaauuucagu

SEQ ID NO: 220123 - RNA, 15 nt, Influenza B virus (B/Memphis/12/97)
ugagugaccacauag

SEQ ID NO: 220124 - RNA, 21 nt, Influenza B virus (B/Memphis/12/97)
ugaaacaguuuuggagauaga

SEQ ID NO: 220125 - RNA, 17 nt, Influenza B virus (B/Memphis/12/97)
agacacaguuaccaaaa

SEQ ID NO: 220126 - RNA, 23 nt, Influenza B virus (B/Memphis/12/97)
agacaauaaacagagagguauca

SEQ ID NO: 220127 - RNA, 18 nt, Influenza B virus (B/Memphis/12/97)
agaacacaagaaagugcc

SEQ ID NO: 220128 - RNA, 19 nt, Influenza B virus (B/Memphis/12/97)
agaaaccaaaggaaacuca

SEQ ID NO: 220129 - RNA, 14 nt, Influenza B virus (B/Memphis/12/97)
acacuauggcugug

SEQ ID NO: 220130 - RNA, 17 nt, Influenza B virus (B/Memphis/12/97)
acacuauggcugugauu

SEQ ID NO: 220131 - RNA, 22 nt, Influenza B virus (B/Memphis/12/97)
acacuauggcugugauuguuuc

SEQ ID NO: 220132 - RNA, 16 nt, Influenza B virus (B/Memphis/12/97)
accaaaggaaugcaaa

SEQ ID NO: 220133 - RNA, 22 nt, Influenza B virus (B/Memphis/12/97)
auacuacaauggaacaagagaa

SEQ ID NO: 220134 - RNA, 18 nt, Influenza B virus (B/Memphis/12/97)
auacgaauaaaaggucca

SEQ ID NO: 220135 - RNA, 20 nt, Influenza B virus (B/Memphis/12/97)
auacgaauaaaagguccaaa

SEQ ID NO: 220136 - RNA, 12 nt, Influenza B virus (B/Memphis/12/97)
auagacacuaug

SEQ ID NO: 220137 - RNA, 21 nt, Influenza B virus (B/Memphis/12/97)
auaaauuuauccauuaauuca

SEQ ID NO: 220138 - RNA, 22 nt, Influenza B virus (B/Memphis/12/97)
auaaauuuauccauuaauucaa

SEQ ID NO: 220139 - RNA, 11 nt, Influenza B virus (B/Memphis/12/97)
aucagcucucc

SEQ ID NO: 220140 - RNA, 21 nt, Influenza B virus (B/Memphis/12/97)
auccauuaauucaauaaacac

SEQ ID NO: 220141 - RNA, 16 nt, Influenza B virus (B/Memphis/12/97)
auccauuaauucaaua

SEQ ID NO: 220142 - RNA, 14 nt, Influenza B virus (B/Memphis/12/97)
auccauuaauucaa

SEQ ID NO: 220143 - RNA, 15 nt, Influenza B virus (B/Memphis/12/97)
auccaggccaaagaa

SEQ ID NO: 220144 - RNA, 19 nt, Influenza B virus (B/Memphis/12/97)
aggcaucuaauuucaguca

SEQ ID NO: 220145 - RNA, 18 nt, Influenza B virus (B/Memphis/12/97)
aguugauggcccugacag

SEQ ID NO: 220146 - RNA, 12 nt, Influenza B virus (B/Memphis/12/97)
cauuuaagcaaa

SEQ ID NO: 220147 - RNA, 15 nt, Influenza B virus (B/Memphis/12/97)
cauuaaauucaauuu

SEQ ID NO: 220148 - RNA, 15 nt, Influenza B virus (B/Memphis/12/97)
cauuaauucaauaaa

SEQ ID NO: 220149 - RNA, 12 nt, Influenza B virus (B/Memphis/12/97)
cauaguacucaa

SEQ ID NO: 220150 - RNA, 16 nt, Influenza B virus (B/Memphis/12/97)
cauaguacucaauuua

SEQ ID NO: 220151 - RNA, 16 nt, Influenza B virus (B/Memphis/12/97)
cauauuguuccacaaa

SEQ ID NO: 220152 - RNA, 16 nt, Influenza B virus (B/Memphis/12/97)
cagauucuuucaauuu

SEQ ID NO: 220153 - RNA, 18 nt, Influenza B virus (B/Memphis/12/97)
cagcaaauaaacuggaaa

SEQ ID NO: 220154 - RNA, 23 nt, Influenza B virus (B/Memphis/12/97)
cauagauucggagaaaccaaagg

SEQ ID NO: 220155 - RNA, 13 nt, Influenza B virus (B/Memphis/12/97)
caguuaccaaaaa

SEQ ID NO: 220156 - RNA, 11 nt, Influenza B virus (B/Memphis/12/97)
ccuuacugaac

SEQ ID NO: 220157 - RNA, 14 nt, Influenza B virus (B/Memphis/12/97)
ccugcaauugcauc

SEQ ID NO: 220158 - RNA, 21 nt, Influenza B virus (B/Memphis/12/97)
ccugacaguaaugcauugcuc

SEQ ID NO: 220159 - RNA, 16 nt, Influenza B virus (B/Memphis/12/97)
caaugucagcaaauaa

SEQ ID NO: 220160 - RNA, 22 nt, Influenza B virus (B/Memphis/12/97)
caaugucagcaaauaaacugga

SEQ ID NO: 220161 - RNA, 15 nt, Influenza B virus (B/Memphis/12/97)
augguugagucuguu

SEQ ID NO: 220162 - RNA, 20 nt, Influenza B virus (B/Memphis/12/97)
auugggcaaaaucccaacag

SEQ ID NO: 220163 - RNA, 15 nt, Influenza B virus (B/Memphis/12/97)
caaacaaagagacaa

SEQ ID NO: 220164 - RNA, 20 nt, Influenza B virus (B/Memphis/12/97)
caaacaacauccuaagaaca

SEQ ID NO: 220165 - RNA, 16 nt, Influenza B virus (B/Memphis/12/97)
cggagaaaccaaagga

SEQ ID NO: 220166 - RNA, 22 nt, Influenza B virus (B/Memphis/12/97)
cugaggcaucuaauuucaguca

SEQ ID NO: 220167 - RNA, 14 nt, Influenza B virus (B/Memphis/12/97)
cuuauuaugcauuu

SEQ ID NO: 220168 - RNA, 11 nt, Influenza B virus (B/Memphis/12/97)
cuuacugaacu

SEQ ID NO: 220169 - RNA, 17 nt, Influenza B virus (B/Memphis/12/97)
gacacuauggcugugau

SEQ ID NO: 220170 - RNA, 18 nt, Influenza B virus (B/Memphis/12/97)
gacacuauggcugugauu

SEQ ID NO: 220171 - RNA, 14 nt, Influenza B virus (B/Memphis/12/97)
ggagaaaccaaagg

SEQ ID NO: 220172 - RNA, 10 nt, Influenza B virus (B/Memphis/12/97)
ggaccaaagg

SEQ ID NO: 220173 - RNA, 15 nt, Influenza B virus (B/Memphis/12/97)
guaaaagaauugaug

SEQ ID NO: 220174 - RNA, 17 nt, Influenza B virus (B/Memphis/12/97)
guagagaauggacauau

SEQ ID NO: 220175 - RNA, 18 nt, Influenza B virus (B/Memphis/12/97)
guauugagugaccacaua

SEQ ID NO: 220176 - RNA, 15 nt, Influenza B virus (B/Memphis/12/97)
uacuauuuuguucau

SEQ ID NO: 220177 - RNA, 16 nt, Influenza B virus (B/Memphis/12/97)
uaccauuccuaugcaa

SEQ ID NO: 220178 - RNA, 13 nt, Influenza B virus (B/Memphis/12/97)
ucaaauaaaaaga

SEQ ID NO: 220179 - RNA, 17 nt, Influenza B virus (B/Memphis/12/97)
ucaaugucagcaaauaa

SEQ ID NO: 220180 - RNA, 15 nt, Influenza B virus (B/Memphis/12/97)
ucaauaaacacaauu

SEQ ID NO: 220181 - RNA, 12 nt, Influenza B virus (B/Memphis/12/97)
ucaauaaacaca

SEQ ID NO: 220182 - RNA, 17 nt, Influenza B virus (B/Memphis/12/97)
uaucagcucuccauuuc

SEQ ID NO: 220183 - RNA, 22 nt, Influenza B virus (B/Memphis/12/97)
uauaaauuuauccauuaauuca

SEQ ID NO: 220184 - RNA, 16 nt, Influenza B virus (B/Memphis/12/97)
gcauuugaaucaaaua

SEQ ID NO: 220185 - RNA, 16 nt, Influenza B virus (B/Memphis/12/97)
gcaaauuguaaucaau

SEQ ID NO: 220186 - RNA, 11 nt, Influenza B virus (B/Memphis/12/97)
gcuaacagcuc

SEQ ID NO: 220187 - RNA, 16 nt, Influenza B virus (B/Memphis/12/97)
gguagagaauggacau

SEQ ID NO: 220188 - RNA, 21 nt, Influenza B virus (B/Memphis/12/97)
gguauugagugaccacauagu

SEQ ID NO: 220189 - RNA, 13 nt, Influenza B virus (B/Memphis/12/97)
aaagguccaaaca

SEQ ID NO: 220190 - RNA, 19 nt, Influenza B virus (B/Memphis/12/97)
aaauagacacuauggcugu

SEQ ID NO: 220191 - RNA, 23 nt, Influenza B virus (B/Memphis/12/97)
aaauagacacuauggcugugauu

SEQ ID NO: 220192 - RNA, 15 nt, Influenza B virus (B/Memphis/12/97)
cuuguggaccaaagg

SEQ ID NO: 220193 - RNA, 18 nt, Influenza B virus (B/Memphis/12/97)
gaagcauauacugacaca

SEQ ID NO: 220194 - RNA, 21 nt, Influenza B virus (B/Memphis/12/97)
gauagaagaauugcauuaaau

SEQ ID NO: 220195 - RNA, 13 nt, Influenza B virus (B/Memphis/12/97)
gauaauaagggaa

SEQ ID NO: 220196 - RNA, 19 nt, Influenza B virus (B/Memphis/12/97)
gauucggagaaaccaaagg

SEQ ID NO: 220197 - RNA, 21 nt, Influenza B virus (B/Memphis/12/97)
gauucggagaaaccaaaggaa

SEQ ID NO: 220198 - RNA, 19 nt, Influenza B virus (B/Memphis/12/97)
gaggaguaaacaugaaaau

SEQ ID NO: 220199 - RNA, 22 nt, Influenza B virus (B/Memphis/12/97)
gagguaucaauuuugagacaca

SEQ ID NO: 220200 - RNA, 15 nt, Influenza B virus (B/Memphis/12/97)
gagaaaccaaaggaa

SEQ ID NO: 220201 - RNA, 22 nt, Influenza B virus (B/Memphis/12/97)
ccaacaguagaaaacuccauuu

SEQ ID NO: 220202 - RNA, 16 nt, Influenza B virus (B/Memphis/12/97)
cauccuaagaacacaa

SEQ ID NO: 220203 - RNA, 23 nt, Influenza B virus (B/Memphis/12/97)
cgaauaaaagguccaaacaaaga

SEQ ID NO: 220204 - RNA, 16 nt, Influenza B virus (B/Memphis/12/97)
cuaacagcuccauaau

SEQ ID NO: 220205 - RNA, 15 nt, Influenza B virus (B/Memphis/12/97)
uaccauuccuaugca

SEQ ID NO: 220206 - RNA, 17 nt, Influenza B virus (B/Memphis/12/97)
uaguacuauuuuguuca

SEQ ID NO: 220207 - RNA, 21 nt, Influenza B virus (B/Memphis/12/97)
uaguacucaauuuaguacuau

SEQ ID NO: 220208 - RNA, 14 nt, Influenza B virus (B/Memphis/12/97)
uagggcauuugaau

SEQ ID NO: 220209 - RNA, 19 nt, Influenza B virus (B/Memphis/12/97)
uagacacuauggcugugau

SEQ ID NO: 220210 - RNA, 21 nt, Influenza B virus (B/Memphis/12/97)
uagauucggagaaaccaaagg

SEQ ID NO: 220211 - RNA, 17 nt, Influenza B virus (B/Memphis/12/97)
ucagcaaauaaacugga

SEQ ID NO: 220212 - RNA, 17 nt, Influenza B virus (B/Memphis/12/97)
ucaauaaacacaauuga

SEQ ID NO: 220213 - RNA, 20 nt, Influenza B virus (B/Memphis/12/97)
uauugagugaccacauagug

SEQ ID NO: 220214 - RNA, 20 nt, Influenza B virus (B/Memphis/12/97)
uauugcuuguggaccaaagg

SEQ ID NO: 220215 - RNA, 17 nt, Influenza B virus (B/Memphis/12/97)
uauugcuuguggaccaa

SEQ ID NO: 220216 - RNA, 15 nt, Influenza B virus (B/Memphis/12/97)
uauuuuguuuggaca

SEQ ID NO: 220217 - RNA, 23 nt, Influenza B virus (B/Memphis/12/97)
ucauagauucggagaaaccaaag

SEQ ID NO: 220218 - RNA, 13 nt, Influenza B virus (B/Memphis/12/97)
uccgcaugccaug

SEQ ID NO: 220219 - RNA, 23 nt, Influenza B virus (B/Memphis/12/97)
uccauuaauucaauaaacacaau

SEQ ID NO: 220220 - RNA, 12 nt, Influenza B virus (B/Memphis/12/97)
uccauuaauuca

SEQ ID NO: 220221 - RNA, 11 nt, Influenza B virus (B/Memphis/12/97)
ugaaucaaaua

SEQ ID NO: 220222 - RNA, 14 nt, Influenza B virus (B/Memphis/12/97)
ugacacauaccauu

SEQ ID NO: 220223 - RNA, 20 nt, Influenza B virus (B/Memphis/12/97)
ugacaguaaugcauugcuca

SEQ ID NO: 220224 - RNA, 18 nt, Influenza B virus (B/Memphis/12/97)
ugaccacauagugauuga

SEQ ID NO: 220225 - RNA, 14 nt, Influenza B virus (B/Memphis/12/97)
ugaaaugaaggaug

SEQ ID NO: 220226 - RNA, 21 nt, Influenza B virus (B/Memphis/12/97)
uccuauuuuguuuggacaauu

SEQ ID NO: 220227 - RNA, 18 nt, Influenza B virus (B/Memphis/12/97)
aauucaauaaacacaauu

SEQ ID NO: 220228 - RNA, 20 nt, Influenza B virus (B/Memphis/12/97)
aaugcaaacacuuugcucua

SEQ ID NO: 220229 - RNA, 13 nt, Influenza B virus (B/Memphis/12/97)
aaugucagcaaau

SEQ ID NO: 220230 - RNA, 15 nt, Influenza B virus (B/Memphis/12/97)
aaugguugagucugu

SEQ ID NO: 220231 - RNA, 14 nt, Influenza B virus (B/Memphis/12/97)
aagaauugcauuaa

SEQ ID NO: 220232 - RNA, 16 nt, Influenza B virus (B/Memphis/12/97)
aagaaauccaggccaa

SEQ ID NO: 220233 - RNA, 18 nt, Influenza B virus (B/Memphis/12/97)
uuucuuauuaugcauuua

SEQ ID NO: 220234 - RNA, 18 nt, Influenza B virus (B/Memphis/12/97)
uuuauccauuaauucaau

SEQ ID NO: 220235 - RNA, 18 nt, Influenza B virus (B/Memphis/12/97)
ugguugagucuguucuaa

SEQ ID NO: 220236 - RNA, 20 nt, Influenza B virus (B/Memphis/12/97)
uggagcggguccgcaugcca

SEQ ID NO: 220237 - RNA, 21 nt, Influenza B virus (B/Memphis/12/97)
uggagcggguccgcaugccau

SEQ ID NO: 220238 - RNA, 21 nt, Influenza B virus (B/Memphis/12/97)
uuauuaugcauuuaagcaaau

SEQ ID NO: 220239 - RNA, 20 nt, Influenza B virus (B/Memphis/12/97)
uuaucagcucuccauuucau

SEQ ID NO: 220240 - RNA, 15 nt, Influenza B virus (B/Memphis/12/97)
uucauuauguaucua

SEQ ID NO: 220241 - RNA, 13 nt, Influenza B virus (B/Memphis/12/97)
uucaauaaacaca

SEQ ID NO: 220242 - RNA, 14 nt, Influenza B virus (B/Memphis/12/97)
uucaauaaacacaa

SEQ ID NO: 220243 - RNA, 20 nt, Influenza B virus (B/Memphis/12/97)
uucaauaaacacaauugagu

SEQ ID NO: 220244 - RNA, 14 nt, Influenza B virus (B/Memphis/12/97)
aggaaguacucucu

SEQ ID NO: 220245 - RNA, 17 nt, Influenza B virus (B/Memphis/12/97)
aguacuauuuuguucau

SEQ ID NO: 220246 - RNA, 19 nt, Influenza B virus (B/Memphis/12/97)
aguacuauuuuguucauua

SEQ ID NO: 220247 - RNA, 21 nt, Influenza B virus (B/Memphis/12/97)
aguacucaauuuaguacuauu

SEQ ID NO: 220248 - RNA, 15 nt, Influenza B virus (B/Memphis/12/97)
augcagcccaaccag

SEQ ID NO: 220249 - RNA, 16 nt, Influenza B virus (B/Memphis/12/97)
augcagcccaaccagg

SEQ ID NO: 220250 - RNA, 14 nt, Influenza B virus (B/Memphis/12/97)
augcauugcucaaa

SEQ ID NO: 220251 - RNA, 13 nt, Influenza B virus (B/Memphis/12/97)
auccauuaauuca

SEQ ID NO: 220252 - RNA, 18 nt, Influenza B virus (B/Memphis/12/97)
auccauuaauucaauaaa

SEQ ID NO: 220253 - RNA, 15 nt, Influenza B virus (B/Memphis/12/97)
cacuauggcugugau

SEQ ID NO: 220254 - RNA, 17 nt, Influenza B virus (B/Memphis/12/97)
cacuauggcugugauug

SEQ ID NO: 220255 - RNA, 23 nt, Influenza B virus (B/Memphis/12/97)
cacuauggcugugauuguuucaa

SEQ ID NO: 220256 - RNA, 24 nt, Influenza B virus (B/Memphis/12/97)
cacuauggcugugauuguuucaau

SEQ ID NO: 220257 - RNA, 18 nt, Influenza B virus (B/Memphis/12/97)
caauugcccuuacugaac

SEQ ID NO: 220258 - RNA, 17 nt, Influenza B virus (B/Memphis/12/97)
caauuuugagacacagu

SEQ ID NO: 220259 - RNA, 13 nt, Influenza B virus (B/Memphis/12/97)
cagauucuuucaa

SEQ ID NO: 220260 - RNA, 15 nt, Influenza B virus (B/Memphis/12/97)
caaauaaaaagagga

SEQ ID NO: 220261 - RNA, 17 nt, Influenza B virus (B/Memphis/12/97)
caagaaagugccugcaa

SEQ ID NO: 220262 - RNA, 18 nt, Influenza B virus (B/Memphis/12/97)
caaaggaaugcaaacacu

SEQ ID NO: 220263 - RNA, 21 nt, Influenza B virus (B/Memphis/12/97)
auuguaaucaaugucagcaaa

SEQ ID NO: 220264 - RNA, 20 nt, Influenza B virus (B/Memphis/12/97)
auugagugaccacauaguga

SEQ ID NO: 220265 - RNA, 13 nt, Influenza B virus (B/Memphis/12/97)
auuuaguacuauu

SEQ ID NO: 220266 - RNA, 18 nt, Influenza B virus (B/Memphis/12/97)
auuuauccauuaauucaa

SEQ ID NO: 220267 - RNA, 14 nt, Influenza B virus (B/Memphis/12/97)
auuuauccauuaau

SEQ ID NO: 220268 - RNA, 16 nt, Influenza B virus (B/Memphis/12/97)
auuuauccauuaauuc

SEQ ID NO: 220269 - RNA, 22 nt, Influenza B virus (B/Memphis/12/97)
auuucauggcuuggacaauagg

SEQ ID NO: 220270 - RNA, 13 nt, Influenza B virus (B/Memphis/12/97)
auuaugcauuuaa

SEQ ID NO: 220271 - RNA, 16 nt, Influenza B virus (B/Memphis/12/97)
auuccuaugcaaacaa

SEQ ID NO: 220272 - RNA, 14 nt, Influenza B virus (B/Memphis/12/97)
auucaauaaacaca

SEQ ID NO: 220273 - RNA, 22 nt, Influenza B virus (B/Memphis/12/97)
acacauaccauuccuaugcaaa

SEQ ID NO: 220274 - RNA, 18 nt, Influenza B virus (B/Memphis/12/97)
agacacuauggcugugau

SEQ ID NO: 220275 - RNA, 23 nt, Influenza B virus (B/Memphis/12/97)
agagguaucaauuuugagacaca

SEQ ID NO: 220276 - RNA, 13 nt, Influenza B virus (B/Memphis/12/97)
agauucuuucaau

SEQ ID NO: 220277 - RNA, 20 nt, Influenza B virus (B/Memphis/12/97)
agauucggagaaaccaaagg

SEQ ID NO: 220278 - RNA, 21 nt, Influenza B virus (B/Memphis/12/97)
agauucggagaaaccaaagga

SEQ ID NO: 220279 - RNA, 21 nt, Influenza B virus (B/Memphis/12/97)
agcaaauuguaaucaauguca

SEQ ID NO: 220280 - RNA, 16 nt, Influenza B virus (B/Memphis/12/97)
agcaaauaaacuggaa

SEQ ID NO: 220281 - RNA, 19 nt, Influenza B virus (B/Memphis/12/97)
aaagugccugcaauugcau

SEQ ID NO: 220282 - RNA, 17 nt, Influenza B virus (B/Memphis/12/97)
aaagguccaaacaaaga

SEQ ID NO: 220283 - RNA, 16 nt, Influenza B virus (B/Memphis/12/97)
aacaagagaagacaga

SEQ ID NO: 220284 - RNA, 15 nt, Influenza B virus (B/Memphis/12/97)
aacaagcugaggcau

SEQ ID NO: 220285 - RNA, 13 nt, Influenza B virus (B/Memphis/12/97)
aagaaacaaugaa

SEQ ID NO: 220286 - RNA, 20 nt, Influenza B virus (B/Memphis/12/97)
aauaaaauauggagaagcau

SEQ ID NO: 220287 - RNA, 22 nt, Influenza B virus (B/Memphis/12/97)
aauaaaagguccaaacaaagag

SEQ ID NO: 220288 - RNA, 21 nt, Influenza B virus (B/Memphis/12/97)
aagguccaaacaaagagacaa

SEQ ID NO: 220289 - RNA, 13 nt, Influenza B virus (B/Memphis/12/97)
aauuucagucaaa

SEQ ID NO: 220290 - RNA, 19 nt, Influenza B virus (B/Memphis/12/97)
aauuuauccauuaauucaa

SEQ ID NO: 220291 - RNA, 16 nt, Influenza B virus (B/Memphis/12/97)
aaaauaaaauauggag

SEQ ID NO: 220292 - RNA, 18 nt, Influenza B virus (B/Memphis/12/97)
aaaagguccaaacaaaga

SEQ ID NO: 220293 - RNA, 14 nt, Influenza B virus (B/Memphis/12/97)
aaaagguccaaaca

SEQ ID NO: 220294 - RNA, 24 nt, Influenza B virus (B/Memphis/12/97)
aaaacuccauuuuucacauggcag

SEQ ID NO: 220295 - RNA, 15 nt, Influenza B virus (B/Memphis/12/97)
aaacacaauugagug

SEQ ID NO: 220296 - RNA, 15 nt, Influenza B virus (B/Memphis/12/97)
aaaaagaggaguaaa

SEQ ID NO: 220297 - RNA, 22 nt, Influenza B virus (B/Memphis/12/97)
aaaaagaaauccaggccaaaga

SEQ ID NO: 220298 - RNA, 12 nt, Influenza B virus (B/Memphis/12/97)
uuguuucaauac

SEQ ID NO: 220299 - RNA, 16 nt, Influenza B virus (B/Memphis/12/97)
uccauuaauucaauaa

SEQ ID NO: 220300 - RNA, 18 nt, Influenza B virus (B/Memphis/12/97-MA)
auuuugagaaagcaaugg

SEQ ID NO: 220301 - RNA, 16 nt, Homo sapiens
caaugagaucauugug

SEQ ID NO: 220302 - RNA, 21 nt, Homo sapiens
cugcacacuguccuauuauau

SEQ ID NO: 220303 - RNA, 22 nt, Homo sapiens
cuuccaugacauaagugcuauu

SEQ ID NO: 220304 - RNA, 21 nt, Homo sapiens
gcaaacuucagaguucuugcc

SEQ ID NO: 220305 - RNA, 20 nt, Homo sapiens
uuggcccaggauuauuguca

SEQ ID NO: 220306 - RNA, 16 nt, Homo sapiens
aggcaggggaauguau

SEQ ID NO: 220307 - RNA, 18 nt, Homo sapiens
ugcugaacaucacagcuu

SEQ ID NO: 220308 - RNA, 18 nt, Homo sapiens
aaaagacaacauaacuca

SEQ ID NO: 220309 - RNA, 17 nt, Homo sapiens
acgugcacgcacacugu

SEQ ID NO: 220310 - RNA, 16 nt, Homo sapiens
gaaaaucacacugucu

SEQ ID NO: 220311 - RNA, 14 nt, Homo sapiens
ugaccuugcugaug

SEQ ID NO: 220312 - RNA, 21 nt, Homo sapiens
agacccucaugcugccaauau

SEQ ID NO: 220313 - RNA, 12 nt, Homo sapiens
auacagugucug

SEQ ID NO: 220314 - RNA, 17 nt, Homo sapiens
ggcaguggaugggugcu

SEQ ID NO: 220315 - RNA, 16 nt, Homo sapiens
uauugcauacuauuaa

SEQ ID NO: 220316 - RNA, 18 nt, Homo sapiens
ggaaggugccucuggaug

SEQ ID NO: 220317 - RNA, 12 nt, Homo sapiens
agaaacugacac

SEQ ID NO: 220318 - RNA, 14 nt, Homo sapiens
acuaaaauguucua

SEQ ID NO: 220319 - RNA, 17 nt, Homo sapiens
ucuccccuucucuguau

SEQ ID NO: 220320 - RNA, 17 nt, Homo sapiens
cacuuuauuucucucau

SEQ ID NO: 220321 - RNA, 14 nt, Homo sapiens
ugcugaacaucaca

SEQ ID NO: 220322 - RNA, 13 nt, Homo sapiens
uggccaaugagau

SEQ ID NO: 220323 - RNA, 21 nt, Homo sapiens
cagagaagauucuuguauuua

SEQ ID NO: 220324 - RNA, 18 nt, Homo sapiens
aguagagguacacuugug

SEQ ID NO: 220325 - RNA, 18 nt, Homo sapiens
aaucgcuccaccuugcag

SEQ ID NO: 220326 - RNA, 21 nt, Homo sapiens
caauaaacauuucauuuccca

SEQ ID NO: 220327 - RNA, 19 nt, Homo sapiens
uugucaaagaagucauucu

SEQ ID NO: 220328 - RNA, 16 nt, Homo sapiens
uucacuggacacuuca

SEQ ID NO: 220329 - RNA, 15 nt, Homo sapiens
ugcaccuggauguac

SEQ ID NO: 220330 - RNA, 18 nt, Homo sapiens
uccuaaugcuugcugcug

SEQ ID NO: 220331 - RNA, 21 nt, Homo sapiens
guaaaacugaacuucagagca

SEQ ID NO: 220332 - RNA, 18 nt, Homo sapiens
gauggugacauugcaccu

SEQ ID NO: 220333 - RNA, 14 nt, Homo sapiens
uuaaacaugcugua

SEQ ID NO: 220334 - RNA, 17 nt, Homo sapiens
gcggauccaagcaaaug

SEQ ID NO: 220335 - RNA, 14 nt, Homo sapiens
gugaagagucuaca

SEQ ID NO: 220336 - RNA, 12 nt, Homo sapiens
cagaugcacaug

SEQ ID NO: 220337 - RNA, 18 nt, Homo sapiens
gacauuuuaugucuuucu

SEQ ID NO: 220338 - RNA, 13 nt, Homo sapiens
aaauguggauuaa

SEQ ID NO: 220339 - RNA, 20 nt, Homo sapiens
agcagaguggcagucuucag

SEQ ID NO: 220340 - RNA, 12 nt, Homo sapiens
cuuagaacaaag

SEQ ID NO: 220341 - RNA, 21 nt, Homo sapiens
gacagagccccacccucagau

SEQ ID NO: 220342 - RNA, 17 nt, Homo sapiens
ccccaaguuaguucaau

SEQ ID NO: 220343 - RNA, 12 nt, Homo sapiens
aaacacauuaaa

SEQ ID NO: 220344 - RNA, 15 nt, Homo sapiens
gugcacgcacacugu

SEQ ID NO: 220345 - RNA, 15 nt, Homo sapiens
guuugguuucuagca

SEQ ID NO: 220346 - RNA, 19 nt, Homo sapiens
cugaggagccugcaacaug

SEQ ID NO: 220347 - RNA, 23 nt, Homo sapiens
cugcaacaugccagccacuguga

SEQ ID NO: 220348 - RNA, 22 nt, Homo sapiens
ccuugcugauggugacauugca

SEQ ID NO: 220349 - RNA, 17 nt, Homo sapiens
cuucacgcccuuggcca

SEQ ID NO: 220350 - RNA, 17 nt, Homo sapiens
uggaaaggaaugcaaag

SEQ ID NO: 220351 - RNA, 13 nt, Homo sapiens
ugccucuggaugc

SEQ ID NO: 220352 - RNA, 17 nt, Homo sapiens
cucuccccuucucugua

SEQ ID NO: 220353 - RNA, 15 nt, Homo sapiens
agacuuucuucucua

SEQ ID NO: 220354 - RNA, 20 nt, Homo sapiens
auuauugucaaagaagucau

SEQ ID NO: 220355 - RNA, 15 nt, Homo sapiens
aauguaugugcacau

SEQ ID NO: 220356 - RNA, 22 nt, Homo sapiens
uuggguuuauuuggaaaggaau

SEQ ID NO: 220357 - RNA, 15 nt, Homo sapiens
ccagugagacugugu

SEQ ID NO: 220358 - RNA, 20 nt, Homo sapiens
guggauuaaagugcccagca

SEQ ID NO: 220359 - RNA, 14 nt, Homo sapiens
gcaggcuggaguua

SEQ ID NO: 220360 - RNA, 22 nt, Homo sapiens
caguguuuuaggagcaugagug

SEQ ID NO: 220361 - RNA, 20 nt, Homo sapiens
aagcuuacaugccuaccaau

SEQ ID NO: 220362 - RNA, 22 nt, Homo sapiens
cauguccuaaugcuugcugcug

SEQ ID NO: 220363 - RNA, 19 nt, Homo sapiens
cuuguaaggcauacugccu

SEQ ID NO: 220364 - RNA, 13 nt, Homo sapiens
agucuucuauuua

SEQ ID NO: 220365 - RNA, 15 nt, Homo sapiens
ucuggaugcugugaa

SEQ ID NO: 220366 - RNA, 21 nt, Homo sapiens
guuuuacaguguuucuggcuu

SEQ ID NO: 220367 - RNA, 14 nt, Homo sapiens
agucuucuauuuau

SEQ ID NO: 220368 - RNA, 17 nt, Homo sapiens
gcaaauggccaaugaga

SEQ ID NO: 220369 - RNA, 23 nt, Homo sapiens
gucucccuuccuaugcuguucac

SEQ ID NO: 220370 - RNA, 11 nt, Homo sapiens
aaucacacugu

SEQ ID NO: 220371 - RNA, 17 nt, Homo sapiens
aacagcaacacaaagcu

SEQ ID NO: 220372 - RNA, 19 nt, Homo sapiens
auucuuuuugaaaugucaa

SEQ ID NO: 220373 - RNA, 20 nt, Homo sapiens
cuguaauuccuaacuaucac

SEQ ID NO: 220374 - RNA, 16 nt, Homo sapiens
gaggagccugcaacau

SEQ ID NO: 220375 - RNA, 19 nt, Homo sapiens
cacugguuuguucccugug

SEQ ID NO: 220376 - RNA, 16 nt, Homo sapiens
uugagugucaagcuga

SEQ ID NO: 220377 - RNA, 15 nt, Homo sapiens
uccaaucugugauga

SEQ ID NO: 220378 - RNA, 18 nt, Homo sapiens
cagaauauugugccccau

SEQ ID NO: 220379 - RNA, 19 nt, Homo sapiens
cucagaaucgcuccaccuu

SEQ ID NO: 220380 - RNA, 13 nt, Homo sapiens
aaaauguggcagg

SEQ ID NO: 220381 - RNA, 13 nt, Homo sapiens
gucagacuggaua

SEQ ID NO: 220382 - RNA, 14 nt, Homo sapiens
gcuuagaacaaagg

SEQ ID NO: 220383 - RNA, 15 nt, Homo sapiens
uuaccccucacaauc

SEQ ID NO: 220384 - RNA, 14 nt, Homo sapiens
gaaugauauaaggu

SEQ ID NO: 220385 - RNA, 23 nt, Homo sapiens
ugugagacuguaaguuacaugaa

SEQ ID NO: 220386 - RNA, 13 nt, Homo sapiens
ugaacaguaacau

SEQ ID NO: 220387 - RNA, 18 nt, Homo sapiens
ucccugugucauuucaaa

SEQ ID NO: 220388 - RNA, 17 nt, Homo sapiens
uggcaucuuacaucuga

SEQ ID NO: 220389 - RNA, 10 nt, Homo sapiens
uuuguucccu

SEQ ID NO: 220390 - RNA, 14 nt, Homo sapiens
auauugugccccau

SEQ ID NO: 220391 - RNA, 21 nt, Homo sapiens
uucccggguagccacuggacu

SEQ ID NO: 220392 - RNA, 17 nt, Homo sapiens
uuaauauggaucuguau

SEQ ID NO: 220393 - RNA, 15 nt, Homo sapiens
uaaugcuugcugcug

SEQ ID NO: 220394 - RNA, 18 nt, Homo sapiens
uccccucuccuccacauu

SEQ ID NO: 220395 - RNA, 20 nt, Homo sapiens
auaguccgucucugcuuauc

SEQ ID NO: 220396 - RNA, 22 nt, Homo sapiens
acuuauggggccaaaauagcau

SEQ ID NO: 220397 - RNA, 19 nt, Homo sapiens
cggagcccugucuccucuc

SEQ ID NO: 220398 - RNA, 22 nt, Homo sapiens
uuuuuauauucucagcagagug

SEQ ID NO: 220399 - RNA, 13 nt, Homo sapiens
aaugcccagugag

SEQ ID NO: 220400 - RNA, 14 nt, Homo sapiens
uggccugucuuugg

SEQ ID NO: 220401 - RNA, 18 nt, Homo sapiens
uccucaauaaacauuuca

SEQ ID NO: 220402 - RNA, 17 nt, Homo sapiens
cuucaguuugcagagua

SEQ ID NO: 220403 - RNA, 17 nt, Homo sapiens
aaucugugaugacauuc

SEQ ID NO: 220404 - RNA, 20 nt, Homo sapiens
ccaauagcaaggcugugcau

SEQ ID NO: 220405 - RNA, 21 nt, Homo sapiens
uggccaaugagaucauuguga

SEQ ID NO: 220406 - RNA, 19 nt, Homo sapiens
gauuuagcaggaagcugug

SEQ ID NO: 220407 - RNA, 22 nt, Homo sapiens
cagagccguggccacccaggaa

SEQ ID NO: 220408 - RNA, 16 nt, Homo sapiens
aauuauugauguuuuc

SEQ ID NO: 220409 - RNA, 21 nt, Homo sapiens
guucaaucuggauucauauuu

SEQ ID NO: 220410 - RNA, 21 nt, Homo sapiens
auuuauugaaaugauuucaca

SEQ ID NO: 220411 - RNA, 16 nt, Homo sapiens
aguuugguuucuagca

SEQ ID NO: 220412 - RNA, 19 nt, Homo sapiens
gagaagauucuuguauuua

SEQ ID NO: 220413 - RNA, 22 nt, Homo sapiens
ggaugggugcuuaguaaguacu

SEQ ID NO: 220414 - RNA, 17 nt, Homo sapiens
gccucuggaugcuguga

SEQ ID NO: 220415 - RNA, 13 nt, Homo sapiens
acuuccaugacau

SEQ ID NO: 220416 - RNA, 20 nt, Homo sapiens
uuuuaaacucugagugcaaa

SEQ ID NO: 220417 - RNA, 13 nt, Homo sapiens
cuggacacuucac

SEQ ID NO: 220418 - RNA, 19 nt, Homo sapiens
uaagaacuaaaauguucua

SEQ ID NO: 220419 - RNA, 16 nt, Homo sapiens
ugggucccauucuugg

SEQ ID NO: 220420 - RNA, 18 nt, Homo sapiens
caacaugccagccacugu

SEQ ID NO: 220421 - RNA, 12 nt, Homo sapiens
cugcacacuguc

SEQ ID NO: 220422 - RNA, 20 nt, Homo sapiens
ugaccuugcugauggugaca

SEQ ID NO: 220423 - RNA, 16 nt, Homo sapiens
uauccaauugcugcuu

SEQ ID NO: 220424 - RNA, 21 nt, Homo sapiens
auccuaauaaaaaggugacca

SEQ ID NO: 220425 - RNA, 14 nt, Homo sapiens
agucauucuucccu

SEQ ID NO: 220426 - RNA, 15 nt, Homo sapiens
cauuauauagcagua

SEQ ID NO: 220427 - RNA, 22 nt, Homo sapiens
cuggaguuauugaagcagagug

SEQ ID NO: 220428 - RNA, 19 nt, Homo sapiens
gcugauggugacauugcac

SEQ ID NO: 220429 - RNA, 11 nt, Homo sapiens
aaaggugacca

SEQ ID NO: 220430 - RNA, 16 nt, Homo sapiens
augauuucacagugug

SEQ ID NO: 220431 - RNA, 23 nt, Homo sapiens
ucucccuuccuaugcuguucacu

SEQ ID NO: 220432 - RNA, 21 nt, Homo sapiens
aagggauuuucagcccucaga

SEQ ID NO: 220433 - RNA, 17 nt, Homo sapiens
cugucuucguacuggga

SEQ ID NO: 220434 - RNA, 13 nt, Homo sapiens
auuugcacauuaa

SEQ ID NO: 220435 - RNA, 12 nt, Homo sapiens
ucccauucuugg

SEQ ID NO: 220436 - RNA, 22 nt, Homo sapiens
gucaaccccaaguuaguucaau

SEQ ID NO: 220437 - RNA, 19 nt, Homo sapiens
gaccuugcugauggugaca

SEQ ID NO: 220438 - RNA, 17 nt, Homo sapiens
uaagcagcgccagugac

SEQ ID NO: 220439 - RNA, 14 nt, Homo sapiens
gauuaaagugccca

SEQ ID NO: 220440 - RNA, 20 nt, Homo sapiens
uugacagauugaauuugccu

SEQ ID NO: 220441 - RNA, 18 nt, Homo sapiens
cucacagaagaugaagca

SEQ ID NO: 220442 - RNA, 20 nt, Homo sapiens
acaucaaucuaaagauacag

SEQ ID NO: 220443 - RNA, 19 nt, Homo sapiens
uggcacugguuuguucccu

SEQ ID NO: 220444 - RNA, 21 nt, Homo sapiens
gcucaguagucagacuggaua

SEQ ID NO: 220445 - RNA, 17 nt, Homo sapiens
uccuaugcuguucacug

SEQ ID NO: 220446 - RNA, 13 nt, Homo sapiens
aauguucacuggu

SEQ ID NO: 220447 - RNA, 22 nt, Homo sapiens
uuucuggaugaaugcccaguga

SEQ ID NO: 220448 - RNA, 22 nt, Homo sapiens
gaguggaguuacugaacaguaa

SEQ ID NO: 220449 - RNA, 21 nt, Homo sapiens
ggccacccaggaacuccugac

SEQ ID NO: 220450 - RNA, 19 nt, Homo sapiens
cuuuaagcagcgccaguga

SEQ ID NO: 220451 - RNA, 21 nt, Homo sapiens
aauuuguggaaaauaacucac

SEQ ID NO: 220452 - RNA, 20 nt, Homo sapiens
ucuaaagauacagugucuga

SEQ ID NO: 220453 - RNA, 14 nt, Homo sapiens
augcuuggauguaa

SEQ ID NO: 220454 - RNA, 19 nt, Homo sapiens
guccuaaugcuugcugcug

SEQ ID NO: 220455 - RNA, 20 nt, Homo sapiens
gccacccaggaacuccugac

SEQ ID NO: 220456 - RNA, 22 nt, Homo sapiens
aauuaaggguaugauuaacucu

SEQ ID NO: 220457 - RNA, 13 nt, Homo sapiens
uucuggacuaaaa

SEQ ID NO: 220458 - RNA, 20 nt, Homo sapiens
aauguggauuaaagugccca

SEQ ID NO: 220459 - RNA, 16 nt, Homo sapiens
gucuccucucucugua

SEQ ID NO: 220460 - RNA, 22 nt, Homo sapiens
uuccuaugcuguucacuggaca

SEQ ID NO: 220461 - RNA, 12 nt, Homo sapiens
uuggcccaggau

SEQ ID NO: 220462 - RNA, 16 nt, Homo sapiens
uuccuagaaacugaca

SEQ ID NO: 220463 - RNA, 22 nt, Homo sapiens
cauagagaauauaaaaauaaag

SEQ ID NO: 220464 - RNA, 21 nt, Homo sapiens
gauaucacuuccaugacauaa

SEQ ID NO: 220465 - RNA, 23 nt, Homo sapiens
caucaaucuaaagauacaguguc

SEQ ID NO: 220466 - RNA, 14 nt, Homo sapiens
aaugcuugcugcug

SEQ ID NO: 220467 - RNA, 16 nt, Homo sapiens
cucaguagucagacug

SEQ ID NO: 220468 - RNA, 16 nt, Homo sapiens
agagccccacccucag

SEQ ID NO: 220469 - RNA, 21 nt, Homo sapiens
gcaacaugccagccacuguga

SEQ ID NO: 220470 - RNA, 15 nt, Homo sapiens
uuggaaaggaaugca

SEQ ID NO: 220471 - RNA, 20 nt, Homo sapiens
ggccagaagucaaggcuuag

SEQ ID NO: 220472 - RNA, 22 nt, Homo sapiens
agagcaguuugguuucuagcau

SEQ ID NO: 220473 - RNA, 21 nt, Homo sapiens
aauguucuccagucauuaugu

SEQ ID NO: 220474 - RNA, 14 nt, Homo sapiens
caagcaaauggcca

SEQ ID NO: 220475 - RNA, 21 nt, Homo sapiens
guaauuaugguuaguagaggu

SEQ ID NO: 220476 - RNA, 21 nt, Homo sapiens
ucauucuuuuugaaaugucaa

SEQ ID NO: 220477 - RNA, 23 nt, Homo sapiens
guacuauccaaucugugaugaca

SEQ ID NO: 220478 - RNA, 15 nt, Homo sapiens
ugauuucacagugug

SEQ ID NO: 220479 - RNA, 16 nt, Homo sapiens
ucccugugucauuuca

SEQ ID NO: 220480 - RNA, 16 nt, Homo sapiens
aacucauuucuagcag

SEQ ID NO: 220481 - RNA, 14 nt, Homo sapiens
augaaugcccagug

SEQ ID NO: 220482 - RNA, 12 nt, Homo sapiens
gaaggugccucu

SEQ ID NO: 220483 - RNA, 15 nt, Homo sapiens
uauccaaucugugau

SEQ ID NO: 220484 - RNA, 18 nt, Homo sapiens
uugcugcuuguacacuca

SEQ ID NO: 220485 - RNA, 22 nt, Homo sapiens
uucuuuaagcagcgccagugac

SEQ ID NO: 220486 - RNA, 17 nt, Homo sapiens
aggagcaugagugccgu

SEQ ID NO: 220487 - RNA, 14 nt, Homo sapiens
acgcacacugucug

SEQ ID NO: 220488 - RNA, 20 nt, Homo sapiens
acuguccuauuauauucauu

SEQ ID NO: 220489 - RNA, 13 nt, Homo sapiens
cucaaacuaacag

SEQ ID NO: 220490 - RNA, 14 nt, Homo sapiens
aauguaugugcaca

SEQ ID NO: 220491 - RNA, 22 nt, Homo sapiens
guaaguuacaugaaggcagcag

SEQ ID NO: 220492 - RNA, 14 nt, Homo sapiens
ugugagacuguaag

SEQ ID NO: 220493 - RNA, 16 nt, Homo sapiens
uucaauaacuggaaca

SEQ ID NO: 220494 - RNA, 16 nt, Homo sapiens
ucaguauuucaacuga

SEQ ID NO: 220495 - RNA, 17 nt, Homo sapiens
cugagaugacuauucag

SEQ ID NO: 220496 - RNA, 11 nt, Homo sapiens
aacuccugacu

SEQ ID NO: 220497 - RNA, 15 nt, Homo sapiens
uucaaauguucucca

SEQ ID NO: 220498 - RNA, 14 nt, Homo sapiens
augcaaagaugaag

SEQ ID NO: 220499 - RNA, 21 nt, Homo sapiens
aucuguauguguucuauucag

SEQ ID NO: 220500 - RNA, 20 nt, Homo sapiens
uuuugaagauucuauguuaa

SEQ ID NO: 220501 - RNA, 18 nt, Homo sapiens
ccuaaucuuccacuugag

SEQ ID NO: 220502 - RNA, 20 nt, Homo sapiens
gggauuuucagcccucagaa

SEQ ID NO: 220503 - RNA, 13 nt, Homo sapiens
ggcagacuuucuu

SEQ ID NO: 220504 - RNA, 14 nt, Homo sapiens
uucucagcagagug

SEQ ID NO: 220505 - RNA, 22 nt, Homo sapiens
caguuuaucuguucauauggau

SEQ ID NO: 220506 - RNA, 14 nt, Homo sapiens
gaguuuggccagaa

SEQ ID NO: 220507 - RNA, 16 nt, Homo sapiens
uaaagugcccagcaca

SEQ ID NO: 220508 - RNA, 22 nt, Homo sapiens
gagcccugucuccucucucugu

SEQ ID NO: 220509 - RNA, 17 nt, Homo sapiens
caauugcugcuuguaca

SEQ ID NO: 220510 - RNA, 15 nt, Homo sapiens
aaacauuucauuucc

SEQ ID NO: 220511 - RNA, 18 nt, Homo sapiens
gugagacuguaaguuaca

SEQ ID NO: 220512 - RNA, 23 nt, Homo sapiens
aaauauuuugacuuguugagggu

SEQ ID NO: 220513 - RNA, 15 nt, Homo sapiens
uaaagauacaguguc

SEQ ID NO: 220514 - RNA, 13 nt, Homo sapiens
cugugucauuuca

SEQ ID NO: 220515 - RNA, 11 nt, Homo sapiens
auucuuggccc

SEQ ID NO: 220516 - RNA, 12 nt, Homo sapiens
uccaaucuguga

SEQ ID NO: 220517 - RNA, 14 nt, Homo sapiens
auguaaaacugaac

SEQ ID NO: 220518 - RNA, 14 nt, Homo sapiens
guucccugugucau

SEQ ID NO: 220519 - RNA, 13 nt, Homo sapiens
aauuccuaacuau

SEQ ID NO: 220520 - RNA, 15 nt, Homo sapiens
auuugugagacugua

SEQ ID NO: 220521 - RNA, 21 nt, Homo sapiens
cauacuauuaaacaugcugua

SEQ ID NO: 220522 - RNA, 20 nt, Homo sapiens
cacuggacugacgacuugag

SEQ ID NO: 220523 - RNA, 18 nt, Homo sapiens
uuuauuauuaacaaaaca

SEQ ID NO: 220524 - RNA, 22 nt, Homo sapiens
uuaagacuuugguuauuuuacu

SEQ ID NO: 220525 - RNA, 23 nt, Homo sapiens
guauuccuagaaacugacacaug

SEQ ID NO: 220526 - RNA, 19 nt, Homo sapiens
ggauaucacuuccaugaca

SEQ ID NO: 220527 - RNA, 20 nt, Homo sapiens
gugagacuguaaguuacaug

SEQ ID NO: 220528 - RNA, 19 nt, Homo sapiens
aacaugccagccacuguga

SEQ ID NO: 220529 - RNA, 11 nt, Homo sapiens
ugguacucugc

SEQ ID NO: 220530 - RNA, 11 nt, Homo sapiens
uuuacaguguu

SEQ ID NO: 220531 - RNA, 18 nt, Homo sapiens
agagccccacccucagau

SEQ ID NO: 220532 - RNA, 22 nt, Homo sapiens
ucaguuuaucuguucauaugga

SEQ ID NO: 220533 - RNA, 15 nt, Homo sapiens
aucuguuacacaaag

SEQ ID NO: 220534 - RNA, 20 nt, Homo sapiens
gauacagugucugacuauaa

SEQ ID NO: 220535 - RNA, 15 nt, Homo sapiens
agucucccuuccuau

SEQ ID NO: 220536 - RNA, 15 nt, Homo sapiens
cuuuuaaacucugag

SEQ ID NO: 220537 - RNA, 13 nt, Homo sapiens
gaugcugugaaga

SEQ ID NO: 220538 - RNA, 17 nt, Homo sapiens
agcagauccucaauaaa

SEQ ID NO: 220539 - RNA, 14 nt, Homo sapiens
uggccagaagucaa

SEQ ID NO: 220540 - RNA, 22 nt, Homo sapiens
aaacacauuaaagguacuuugc

SEQ ID NO: 220541 - RNA, 23 nt, Homo sapiens
uggauugugccuaauguguuuga

SEQ ID NO: 220542 - RNA, 14 nt, Homo sapiens
uaccugcacacugu

SEQ ID NO: 220543 - RNA, 16 nt, Homo sapiens
uuauccuagucauucu

SEQ ID NO: 220544 - RNA, 14 nt, Homo sapiens
uggugacauugcac

SEQ ID NO: 220545 - RNA, 14 nt, Homo sapiens
uucagcccucagaa

SEQ ID NO: 220546 - RNA, 15 nt, Homo sapiens
uccaauugcugcuug

SEQ ID NO: 220547 - RNA, 20 nt, Homo sapiens
ucuccagucauuauguuaau

SEQ ID NO: 220548 - RNA, 16 nt, Homo sapiens
auugaaaugauuucac

SEQ ID NO: 220549 - RNA, 16 nt, Homo sapiens
uaaacauuucauuucc

SEQ ID NO: 220550 - RNA, 19 nt, Homo sapiens
ccuggcacugguuuguucc

SEQ ID NO: 220551 - RNA, 18 nt, Homo sapiens
gauaucugcagggacaga

SEQ ID NO: 220552 - RNA, 12 nt, Homo sapiens
gucaacauuucu

SEQ ID NO: 220553 - RNA, 22 nt, Homo sapiens
cuggauguacuauccaaucugu

SEQ ID NO: 220554 - RNA, 12 nt, Homo sapiens
uucaguuugcag

SEQ ID NO: 220555 - RNA, 21 nt, Homo sapiens
uuuaccccucacaauccuugc

SEQ ID NO: 220556 - RNA, 16 nt, Homo sapiens
auugaaggaugcuguc

SEQ ID NO: 220557 - RNA, 21 nt, Homo sapiens
cuuuaagcagcgccagugaca

SEQ ID NO: 220558 - RNA, 17 nt, Homo sapiens
guauagauguugcuaac

SEQ ID NO: 220559 - RNA, 18 nt, Homo sapiens
uucuuuuugaaaugucaa

SEQ ID NO: 220560 - RNA, 12 nt, Homo sapiens
gcaaagaugaag

SEQ ID NO: 220561 - RNA, 20 nt, Homo sapiens
aaugguaguuuuacaguguu

SEQ ID NO: 220562 - RNA, 21 nt, Homo sapiens
cuuuauuucucucaucuguua

SEQ ID NO: 220563 - RNA, 14 nt, Homo sapiens
guauagauguugcu

SEQ ID NO: 220564 - RNA, 18 nt, Homo sapiens
cuuuguggucgacaucaa

SEQ ID NO: 220565 - RNA, 23 nt, Homo sapiens
uucuuuaagcagcgccagugaca

SEQ ID NO: 220566 - RNA, 12 nt, Homo sapiens
guuugcagagua

SEQ ID NO: 220567 - RNA, 21 nt, Homo sapiens
cugaccuugcugauggugaca

SEQ ID NO: 220568 - RNA, 17 nt, Homo sapiens
guuuagaugaaugucag

SEQ ID NO: 220569 - RNA, 20 nt, Homo sapiens
uaauuaaugucaguauuuca

SEQ ID NO: 220570 - RNA, 14 nt, Homo sapiens
acuuccaugacaua

SEQ ID NO: 220571 - RNA, 11 nt, Homo sapiens
caaauguucuc

SEQ ID NO: 220572 - RNA, 19 nt, Homo sapiens
caccuggauguacuaucca

SEQ ID NO: 220573 - RNA, 20 nt, Homo sapiens
aacaugccagccacugugau

SEQ ID NO: 220574 - RNA, 16 nt, Homo sapiens
auuugaaacacugguu

SEQ ID NO: 220575 - RNA, 17 nt, Homo sapiens
cuagaaacugacacaug

SEQ ID NO: 220576 - RNA, 23 nt, Homo sapiens
uucccaauagcaaggcugugcau

SEQ ID NO: 220577 - RNA, 19 nt, Homo sapiens
caggauuauugucaaagaa

SEQ ID NO: 220578 - RNA, 17 nt, Homo sapiens
guaaggugcaucuguuu

SEQ ID NO: 220579 - RNA, 17 nt, Homo sapiens
uuccacuugagugucaa

SEQ ID NO: 220580 - RNA, 22 nt, Homo sapiens
gcugcaguuuuuuuccuucaag

SEQ ID NO: 220581 - RNA, 20 nt, Homo sapiens
agcacaaagcagauccucaa

SEQ ID NO: 220582 - RNA, 15 nt, Homo sapiens
auccaauugcugcuu

SEQ ID NO: 220583 - RNA, 13 nt, Homo sapiens
uggugauuuagca

SEQ ID NO: 220584 - RNA, 21 nt, Homo sapiens
uauucucagcagagugcuuua

SEQ ID NO: 220585 - RNA, 16 nt, Homo sapiens
cuauucaguggcuaac

SEQ ID NO: 220586 - RNA, 18 nt, Homo sapiens
ugcugauuuaaacacauu

SEQ ID NO: 220587 - RNA, 13 nt, Homo sapiens
uuaaaaaacagag

SEQ ID NO: 220588 - RNA, 14 nt, Homo sapiens
uccaauugcugcuu

SEQ ID NO: 220589 - RNA, 19 nt, Homo sapiens
cagauugaauuugccuaau

SEQ ID NO: 220590 - RNA, 20 nt, Homo sapiens
uguacuauccaaucugugau

SEQ ID NO: 220591 - RNA, 18 nt, Homo sapiens
uauggggccaaaauagca

SEQ ID NO: 220592 - RNA, 15 nt, Homo sapiens
gagaagauucuugua

SEQ ID NO: 220593 - RNA, 15 nt, Homo sapiens
auagaugacauugac

SEQ ID NO: 220594 - RNA, 14 nt, Homo sapiens
acugacacaugcug

SEQ ID NO: 220595 - RNA, 18 nt, Homo sapiens
gucagggaaggugccucu

SEQ ID NO: 220596 - RNA, 20 nt, Homo sapiens
gaauguuuucaaauguucuc

SEQ ID NO: 220597 - RNA, 14 nt, Homo sapiens
aggauuauugucaa

SEQ ID NO: 220598 - RNA, 12 nt, Homo sapiens
ucaaauguucuc

SEQ ID NO: 220599 - RNA, 16 nt, Homo sapiens
ccucagaugcacauga

SEQ ID NO: 220600 - RNA, 14 nt, Homo sapiens
agcagagugcuuua

SEQ ID NO: 220601 - RNA, 16 nt, Homo sapiens
auugcaccuggaugua

SEQ ID NO: 220602 - RNA, 16 nt, Homo sapiens
uucaacugaaguucua

SEQ ID NO: 220603 - RNA, 22 nt, Homo sapiens
uccuuuuuuuuuuauccuaguc

SEQ ID NO: 220604 - RNA, 15 nt, Homo sapiens
gaaacugacacaugc

SEQ ID NO: 220605 - RNA, 22 nt, Homo sapiens
ugaccuugcugauggugacauu

SEQ ID NO: 220606 - RNA, 17 nt, Homo sapiens
cuucccuaaucuuccac

SEQ ID NO: 220607 - RNA, 17 nt, Homo sapiens
caaugagaucauuguga

SEQ ID NO: 220608 - RNA, 17 nt, Homo sapiens
ccaauuugcacauuaaa

SEQ ID NO: 220609 - RNA, 16 nt, Homo sapiens
cuaugcuguucacugg

SEQ ID NO: 220610 - RNA, 23 nt, Homo sapiens
uuucuggaugaaugcccagugag

SEQ ID NO: 220611 - RNA, 21 nt, Homo sapiens
ugguaguuuuacaguguuucu

SEQ ID NO: 220612 - RNA, 18 nt, Homo sapiens
guucccggguagccacug

SEQ ID NO: 220613 - RNA, 22 nt, Homo sapiens
uauugaaaugauuucacagugu

SEQ ID NO: 220614 - RNA, 13 nt, Homo sapiens
uugaagauucuau

SEQ ID NO: 220615 - RNA, 21 nt, Homo sapiens
guucuccagucauuauguuaa

SEQ ID NO: 220616 - RNA, 17 nt, Homo sapiens
ggaauguaugugcacau

SEQ ID NO: 220617 - RNA, 20 nt, Homo sapiens
uccuagaaacugacacaugc

SEQ ID NO: 220618 - RNA, 16 nt, Homo sapiens
aauuugccuaauauga

SEQ ID NO: 220619 - RNA, 21 nt, Homo sapiens
aggaggugggauaucacuucc

SEQ ID NO: 220620 - RNA, 14 nt, Homo sapiens
gcacacugucugcc

SEQ ID NO: 220621 - RNA, 13 nt, Homo sapiens
gacuaaaacuaca

SEQ ID NO: 220622 - RNA, 19 nt, Homo sapiens
guuacaugaaggcagcaga

SEQ ID NO: 220623 - RNA, 17 nt, Homo sapiens
caggaaauccuugcacc

SEQ ID NO: 220624 - RNA, 15 nt, Homo sapiens
aaaacuacauugaca

SEQ ID NO: 220625 - RNA, 15 nt, Homo sapiens
gaagauucuauguua

SEQ ID NO: 220626 - RNA, 12 nt, Homo sapiens
uugaaaugucaa

SEQ ID NO: 220627 - RNA, 15 nt, Homo sapiens
aacaguaacauagcu

SEQ ID NO: 220628 - RNA, 14 nt, Homo sapiens
uuaaauagaugaca

SEQ ID NO: 220629 - RNA, 14 nt, Homo sapiens
aagcaaauggccaa

SEQ ID NO: 220630 - RNA, 16 nt, Homo sapiens
uuauuuauuuauucau

SEQ ID NO: 220631 - RNA, 18 nt, Homo sapiens
uuauccuagucauucuuc

SEQ ID NO: 220632 - RNA, 16 nt, Homo sapiens
auguacuauccaaucu

SEQ ID NO: 220633 - RNA, 17 nt, Homo sapiens
auuuauugaaaugauuu

SEQ ID NO: 220634 - RNA, 16 nt, Homo sapiens
acaugcuguacauacu

SEQ ID NO: 220635 - RNA, 14 nt, Homo sapiens
ugaugacauucccu

SEQ ID NO: 220636 - RNA, 18 nt, Homo sapiens
ugaaggcagcagaauauu

SEQ ID NO: 220637 - RNA, 22 nt, Homo sapiens
agagcaugaaaaucacacuguc

SEQ ID NO: 220638 - RNA, 18 nt, Homo sapiens
acaugccagccacuguga

SEQ ID NO: 220639 - RNA, 23 nt, Homo sapiens
cuuccaugacauaagugcuauug

SEQ ID NO: 220640 - RNA, 13 nt, Homo sapiens
acaucauuucaag

SEQ ID NO: 220641 - RNA, 16 nt, Homo sapiens
agacaacauaacucaa

SEQ ID NO: 220642 - RNA, 21 nt, Homo sapiens
auuaauauccaauugcugcuu

SEQ ID NO: 220643 - RNA, 15 nt, Homo sapiens
agggacagagcauug

SEQ ID NO: 220644 - RNA, 13 nt, Homo sapiens
auguucacuggua

SEQ ID NO: 220645 - RNA, 19 nt, Homo sapiens
augacauucccugcuaaua

SEQ ID NO: 220646 - RNA, 16 nt, Homo sapiens
guccuauuauauucau

SEQ ID NO: 220647 - RNA, 19 nt, Homo sapiens
auguggcaggcuggaguua

SEQ ID NO: 220648 - RNA, 22 nt, Homo sapiens
ugucauuucaaacagucucccu

SEQ ID NO: 220649 - RNA, 23 nt, Homo sapiens
aguacuuaauaaacuguggugcu

SEQ ID NO: 220650 - RNA, 21 nt, Homo sapiens
auagcagcccucaauugugaa

SEQ ID NO: 220651 - RNA, 20 nt, Homo sapiens
aaggcuuagacccucaugcu

SEQ ID NO: 220652 - RNA, 18 nt, Homo sapiens
uuugaagguagaauguuu

SEQ ID NO: 220653 - RNA, 21 nt, Homo sapiens
agcaugaaaaucacacugucu

SEQ ID NO: 220654 - RNA, 17 nt, Homo sapiens
ugaaauaaggaaugaua

SEQ ID NO: 220655 - RNA, 13 nt, Homo sapiens
uucauuacuaaaa

SEQ ID NO: 220656 - RNA, 20 nt, Homo sapiens
cccugugucauuucaaacag

SEQ ID NO: 220657 - RNA, 13 nt, Homo sapiens
aaacuacauugac

SEQ ID NO: 220658 - RNA, 15 nt, Homo sapiens
ggguuaggaagaaaa

SEQ ID NO: 220659 - RNA, 21 nt, Homo sapiens
gaacuuuguggucgacaucaa

SEQ ID NO: 220660 - RNA, 15 nt, Homo sapiens
uaaacauuucauuuc

SEQ ID NO: 220661 - RNA, 22 nt, Homo sapiens
guaauuccuaacuaucacuggu

SEQ ID NO: 220662 - RNA, 22 nt, Homo sapiens
ucuguauuccuagaaacugaca

SEQ ID NO: 220663 - RNA, 15 nt, Homo sapiens
caaguuaguucaauc

SEQ ID NO: 220664 - RNA, 22 nt, Homo sapiens
gcccucagaaucgcuccaccuu

SEQ ID NO: 220665 - RNA, 17 nt, Homo sapiens
uaaacauuucauuuccc

SEQ ID NO: 220666 - RNA, 22 nt, Homo sapiens
gcuagaaaaggccuucuuccca

SEQ ID NO: 220667 - RNA, 19 nt, Homo sapiens
aggaagcugugagagcagu

SEQ ID NO: 220668 - RNA, 15 nt, Homo sapiens
augacauaagugcua

SEQ ID NO: 220669 - RNA, 18 nt, Homo sapiens
agccacuggacugacgac

SEQ ID NO: 220670 - RNA, 15 nt, Homo sapiens
uuaauauuucugagg

SEQ ID NO: 220671 - RNA, 17 nt, Homo sapiens
ccccucacaauccuugc

SEQ ID NO: 220672 - RNA, 21 nt, Homo sapiens
guggggguaaggugcaucugu

SEQ ID NO: 220673 - RNA, 16 nt, Homo sapiens
uuauugaagcagagug

SEQ ID NO: 220674 - RNA, 22 nt, Homo sapiens
acuauccaaucugugaugacau

SEQ ID NO: 220675 - RNA, 23 nt, Homo sapiens
aaugauuucacagugugugguca

SEQ ID NO: 220676 - RNA, 16 nt, Homo sapiens
ugacauaagugcuauu

SEQ ID NO: 220677 - RNA, 16 nt, Homo sapiens
ugccagccacugugau

SEQ ID NO: 220678 - RNA, 16 nt, Homo sapiens
auaaacauuucauuuc

SEQ ID NO: 220679 - RNA, 18 nt, Homo sapiens
ggauaucacuuccaugac

SEQ ID NO: 220680 - RNA, 13 nt, Homo sapiens
cuauuauauucau

SEQ ID NO: 220681 - RNA, 20 nt, Homo sapiens
uuagacccucaugcugccaa

SEQ ID NO: 220682 - RNA, 13 nt, Homo sapiens
gauaucacuucca

SEQ ID NO: 220683 - RNA, 19 nt, Homo sapiens
acagagccccacccucaga

SEQ ID NO: 220684 - RNA, 23 nt, Homo sapiens
ugggauaucacuuccaugacaua

SEQ ID NO: 220685 - RNA, 21 nt, Homo sapiens
agucauucuucccuaaucuuc

SEQ ID NO: 220686 - RNA, 16 nt, Homo sapiens
uuccaguaaugagcuu

SEQ ID NO: 220687 - RNA, 21 nt, Homo sapiens
uuuaaucuuuuaugauugccu

SEQ ID NO: 220688 - RNA, 17 nt, Homo sapiens
uggccaugggucccauu

SEQ ID NO: 220689 - RNA, 12 nt, Homo sapiens
ugcuuggaugua

SEQ ID NO: 220690 - RNA, 13 nt, Homo sapiens
ugagacuguguug

SEQ ID NO: 220691 - RNA, 20 nt, Homo sapiens
gacacaugcugaacaucaca

SEQ ID NO: 220692 - RNA, 13 nt, Homo sapiens
acuaucacugguu

SEQ ID NO: 220693 - RNA, 24 nt, Homo sapiens
ccuuccuaugcuguucacuggaca

SEQ ID NO: 220694 - RNA, 22 nt, Homo sapiens
augcuguucacuggacacuuca

SEQ ID NO: 220695 - RNA, 13 nt, Homo sapiens
ggaacuccugacu

SEQ ID NO: 220696 - RNA, 13 nt, Homo sapiens
ugucaguauuuca

SEQ ID NO: 220697 - RNA, 16 nt, Homo sapiens
caguagucagacugga

SEQ ID NO: 220698 - RNA, 14 nt, Homo sapiens
cuauuauauucauu

SEQ ID NO: 220699 - RNA, 19 nt, Homo sapiens
guauuuauuacaacucuau

SEQ ID NO: 220700 - RNA, 23 nt, Homo sapiens
guuuguucccugugucauuucaa

SEQ ID NO: 220701 - RNA, 19 nt, Homo sapiens
cuuauccguuagccguggu

SEQ ID NO: 220702 - RNA, 12 nt, Homo sapiens
gucagacuggau

SEQ ID NO: 220703 - RNA, 18 nt, Homo sapiens
ugguuucuagcaugaaga

SEQ ID NO: 220704 - RNA, 15 nt, Homo sapiens
aaugauuucacagug

SEQ ID NO: 220705 - RNA, 21 nt, Homo sapiens
uggugacauugcaccuggaug

SEQ ID NO: 220706 - RNA, 15 nt, Homo sapiens
uaugugcacaucugu

SEQ ID NO: 220707 - RNA, 15 nt, Homo sapiens
acaucacagcuuauu

SEQ ID NO: 220708 - RNA, 17 nt, Homo sapiens
ugaggugacuauucuga

SEQ ID NO: 220709 - RNA, 23 nt, Homo sapiens
cauuuguuuugccaauuugcaca

SEQ ID NO: 220710 - RNA, 21 nt, Homo sapiens
ugagcuggcgggauugaagga

SEQ ID NO: 220711 - RNA, 14 nt, Homo sapiens
uagaugaaugucag

SEQ ID NO: 220712 - RNA, 13 nt, Homo sapiens
cuugccacagugu

SEQ ID NO: 220713 - RNA, 19 nt, Homo sapiens
agugcaaacuucagaguuc

SEQ ID NO: 220714 - RNA, 15 nt, Homo sapiens
auccaaucugugaug

SEQ ID NO: 220715 - RNA, 23 nt, Homo sapiens
gcaagacauuauauagcaguaaa

SEQ ID NO: 220716 - RNA, 13 nt, Homo sapiens
gaccaggaccucc

SEQ ID NO: 220717 - RNA, 14 nt, Homo sapiens
uuuugaaaugucaa

SEQ ID NO: 220718 - RNA, 14 nt, Homo sapiens
acaguaacauagcu

SEQ ID NO: 220719 - RNA, 23 nt, Homo sapiens
ucacugguuugguucuggacuaa

SEQ ID NO: 220720 - RNA, 20 nt, Homo sapiens
acucugagugcaaacuucag

SEQ ID NO: 220721 - RNA, 14 nt, Homo sapiens
gugaugacauuccc

SEQ ID NO: 220722 - RNA, 14 nt, Homo sapiens
gaaugcccagugag

SEQ ID NO: 220723 - RNA, 13 nt, Homo sapiens
ccucucucuguaa

SEQ ID NO: 220724 - RNA, 18 nt, Homo sapiens
ggcacaucauuucaagaa

SEQ ID NO: 220725 - RNA, 17 nt, Homo sapiens
auauccaauugcugcuu

SEQ ID NO: 220726 - RNA, 19 nt, Homo sapiens
uauccaaucugugaugaca

SEQ ID NO: 220727 - RNA, 14 nt, Homo sapiens
cugauggugacauu

SEQ ID NO: 220728 - RNA, 19 nt, Homo sapiens
ggagcccugucuccucucu

SEQ ID NO: 220729 - RNA, 13 nt, Homo sapiens
gaauuugccuaau

SEQ ID NO: 220730 - RNA, 14 nt, Homo sapiens
cucagaugcacaug

SEQ ID NO: 220731 - RNA, 20 nt, Homo sapiens
aaucugugaugacauucccu

SEQ ID NO: 220732 - RNA, 13 nt, Homo sapiens
gaauaaagagggu

SEQ ID NO: 220733 - RNA, 17 nt, Homo sapiens
cuggacuaaaacuacau

SEQ ID NO: 220734 - RNA, 15 nt, Homo sapiens
acaguguuucuggcu

SEQ ID NO: 220735 - RNA, 24 nt, Homo sapiens
gacacaugcugaacaucacagcuu

SEQ ID NO: 220736 - RNA, 19 nt, Homo sapiens
aauuuacuuuaaacuacau

SEQ ID NO: 220737 - RNA, 22 nt, Homo sapiens
ccuuggccaugggucccauucu

SEQ ID NO: 220738 - RNA, 22 nt, Homo sapiens
gugaugacauucccugcuaaua

SEQ ID NO: 220739 - RNA, 15 nt, Homo sapiens
agugcuauugcagag

SEQ ID NO: 220740 - RNA, 22 nt, Homo sapiens
aagauacagugucugacuauaa

SEQ ID NO: 220741 - RNA, 16 nt, Homo sapiens
auaucacuuccaugac

SEQ ID NO: 220742 - RNA, 16 nt, Homo sapiens
aaagggauuuucagcc

SEQ ID NO: 220743 - RNA, 16 nt, Homo sapiens
caaauguucacuggua

SEQ ID NO: 220744 - RNA, 17 nt, Homo sapiens
acgcacacugucugccc

SEQ ID NO: 220745 - RNA, 23 nt, Homo sapiens
aacuaacaggcuuagugauguaa

SEQ ID NO: 220746 - RNA, 16 nt, Homo sapiens
cucaauaaacauuuca

SEQ ID NO: 220747 - RNA, 20 nt, Homo sapiens
gcaacaugccagccacugug

SEQ ID NO: 220748 - RNA, 13 nt, Homo sapiens
guacuuuuaagac

SEQ ID NO: 220749 - RNA, 21 nt, Homo sapiens
cuugcugauggugacauugca

SEQ ID NO: 220750 - RNA, 15 nt, Homo sapiens
gaguuauugaagcag

SEQ ID NO: 220751 - RNA, 19 nt, Homo sapiens
augguaguuuuacaguguu

SEQ ID NO: 220752 - RNA, 22 nt, Homo sapiens
auuucugaggagccugcaacau

SEQ ID NO: 220753 - RNA, 16 nt, Homo sapiens
caucuguuacacaaag

SEQ ID NO: 220754 - RNA, 14 nt, Homo sapiens
uuuauccuagucau

SEQ ID NO: 220755 - RNA, 19 nt, Homo sapiens
uauccaauugcugcuugua

SEQ ID NO: 220756 - RNA, 19 nt, Homo sapiens
uaagacccucucaaacuaa

SEQ ID NO: 220757 - RNA, 17 nt, Homo sapiens
uccugucggagcccugu

SEQ ID NO: 220758 - RNA, 19 nt, Homo sapiens
uaaaugacucuucccucaa

SEQ ID NO: 220759 - RNA, 16 nt, Homo sapiens
ccuaaugcuugcugcu

SEQ ID NO: 220760 - RNA, 23 nt, Homo sapiens
ggauuaaagugcccagcacaaag

SEQ ID NO: 220761 - RNA, 23 nt, Homo sapiens
aaggcuuagacccucaugcugcc

SEQ ID NO: 220762 - RNA, 16 nt, Homo sapiens
aaauagaugacauuga

SEQ ID NO: 220763 - RNA, 22 nt, Homo sapiens
gauaucugcagggacagagcau

SEQ ID NO: 220764 - RNA, 22 nt, Homo sapiens
cauuaaaugacucuucccucaa

SEQ ID NO: 220765 - RNA, 17 nt, Homo sapiens
ucaaucuggauucauau

SEQ ID NO: 220766 - RNA, 12 nt, Homo sapiens
uaugugcacauc

SEQ ID NO: 220767 - RNA, 22 nt, Homo sapiens
aauaauuagguauuuucuccaa

SEQ ID NO: 220768 - RNA, 13 nt, Homo sapiens
uccuagucauucu

SEQ ID NO: 220769 - RNA, 14 nt, Homo sapiens
uggaugcugugaag

SEQ ID NO: 220770 - RNA, 16 nt, Homo sapiens
acaauccuugccacag

SEQ ID NO: 220771 - RNA, 15 nt, Homo sapiens
acucauuucuagcag

SEQ ID NO: 220772 - RNA, 16 nt, Homo sapiens
aaugagaucauuguga

SEQ ID NO: 220773 - RNA, 14 nt, Homo sapiens
auuuauuuauucau

SEQ ID NO: 220774 - RNA, 14 nt, Homo sapiens
uauagauguugcua

SEQ ID NO: 220775 - RNA, 15 nt, Homo sapiens
aguaacauagcugug

SEQ ID NO: 220776 - RNA, 14 nt, Homo sapiens
aauauugugcccca

SEQ ID NO: 220777 - RNA, 16 nt, Homo sapiens
agaaacugacacaugc

SEQ ID NO: 220778 - RNA, 12 nt, Homo sapiens
uuagguugugaa

SEQ ID NO: 220779 - RNA, 16 nt, Homo sapiens
cuagucauucuucccu

SEQ ID NO: 220780 - RNA, 17 nt, Homo sapiens
uucaguuugcagaguag

SEQ ID NO: 220781 - RNA, 21 nt, Homo sapiens
cauucuucccuaaucuuccac

SEQ ID NO: 220782 - RNA, 13 nt, Homo sapiens
cuuauuuccucau

SEQ ID NO: 220783 - RNA, 22 nt, Homo sapiens
aaacgauaaaauguggauuaaa

SEQ ID NO: 220784 - RNA, 13 nt, Homo sapiens
uccaaucugugau

SEQ ID NO: 220785 - RNA, 10 nt, Homo sapiens
uacuuuuugg

SEQ ID NO: 220786 - RNA, 19 nt, Homo sapiens
acccucagaugcacaugag

SEQ ID NO: 220787 - RNA, 16 nt, Homo sapiens
ucuggaugcugugaag

SEQ ID NO: 220788 - RNA, 13 nt, Homo sapiens
aaucuggauucau

SEQ ID NO: 220789 - RNA, 14 nt, Homo sapiens
ccagccacugugau

SEQ ID NO: 220790 - RNA, 20 nt, Homo sapiens
auucugagaugacuauucag

SEQ ID NO: 220791 - RNA, 15 nt, Homo sapiens
accuggcaucuuaca

SEQ ID NO: 220792 - RNA, 17 nt, Homo sapiens
gaagauucuauguuaau

SEQ ID NO: 220793 - RNA, 14 nt, Homo sapiens
auaguccgucucug

SEQ ID NO: 220794 - RNA, 23 nt, Homo sapiens
gcuggaguuauugaagcagagug

SEQ ID NO: 220795 - RNA, 13 nt, Homo sapiens
agaauguuuucaa

SEQ ID NO: 220796 - RNA, 16 nt, Homo sapiens
aacucuaccugcacac

SEQ ID NO: 220797 - RNA, 20 nt, Homo sapiens
acuguuuagaugaaugucag

SEQ ID NO: 220798 - RNA, 16 nt, Homo sapiens
uaacauuuauuugagu

SEQ ID NO: 220799 - RNA, 22 nt, Homo sapiens
uggacacuucacgcccuuggcc

SEQ ID NO: 220800 - RNA, 13 nt, Homo sapiens
auagauguugcua

SEQ ID NO: 220801 - RNA, 16 nt, Homo sapiens
cuucccuaaucuucca

SEQ ID NO: 220802 - RNA, 22 nt, Homo sapiens
cuuaauaaacuguggugcuuuu

SEQ ID NO: 220803 - RNA, 16 nt, Homo sapiens
acugaacuucagagca

SEQ ID NO: 220804 - RNA, 18 nt, Homo sapiens
cugugcaucuagccucaa

SEQ ID NO: 220805 - RNA, 21 nt, Homo sapiens
uucaagaaugcaguacuaaca

SEQ ID NO: 220806 - RNA, 23 nt, Homo sapiens
augcuguucacuggacacuucac

SEQ ID NO: 220807 - RNA, 22 nt, Homo sapiens
cuauuuauuuauuuauucauua

SEQ ID NO: 220808 - RNA, 21 nt, Homo sapiens
cuuagacccucaugcugccaa

SEQ ID NO: 220809 - RNA, 17 nt, Homo sapiens
aauccuugccacagugu

SEQ ID NO: 220810 - RNA, 13 nt, Homo sapiens
gaugcugucuucg

SEQ ID NO: 220811 - RNA, 15 nt, Homo sapiens
ccacaguguggggca

SEQ ID NO: 220812 - RNA, 24 nt, Homo sapiens
aaauagcauguccuaaugcuugcu

SEQ ID NO: 220813 - RNA, 22 nt, Homo sapiens
cugaacuuuguggucgacauca

SEQ ID NO: 220814 - RNA, 18 nt, Homo sapiens
gaaugcaaagaugaaggu

SEQ ID NO: 220815 - RNA, 14 nt, Homo sapiens
ccucaugcugccaa

SEQ ID NO: 220816 - RNA, 17 nt, Homo sapiens
auccuagucauucuucc

SEQ ID NO: 220817 - RNA, 18 nt, Homo sapiens
gcucuccccuucucugua

SEQ ID NO: 220818 - RNA, 17 nt, Homo sapiens
caguuugguuucuagca

SEQ ID NO: 220819 - RNA, 19 nt, Homo sapiens
aguaaacgauaaaaugugg

SEQ ID NO: 220820 - RNA, 17 nt, Homo sapiens
uauccuagucauucuuc

SEQ ID NO: 220821 - RNA, 12 nt, Homo sapiens
agugacagucag

SEQ ID NO: 220822 - RNA, 20 nt, Homo sapiens
cagcuagaaaaggccuucuu

SEQ ID NO: 220823 - RNA, 15 nt, Homo sapiens
cccugugucauuuca

SEQ ID NO: 220824 - RNA, 20 nt, Homo sapiens
aggcauacugccuuguuuaa

SEQ ID NO: 220825 - RNA, 17 nt, Homo sapiens
aaugauuucacagugug

SEQ ID NO: 220826 - RNA, 23 nt, Homo sapiens
cacaaagcuuuugcauauugcau

SEQ ID NO: 220827 - RNA, 20 nt, Homo sapiens
uggaugaaugcccagugaga

SEQ ID NO: 220828 - RNA, 21 nt, Homo sapiens
gccagcucaccccaucauccc

SEQ ID NO: 220829 - RNA, 21 nt, Homo sapiens
cuauuuauuugugagacugua

SEQ ID NO: 220830 - RNA, 16 nt, Homo sapiens
augcugaacaucacag

SEQ ID NO: 220831 - RNA, 18 nt, Homo sapiens
ugacauugcaccuggaug

SEQ ID NO: 220832 - RNA, 14 nt, Homo sapiens
ucauuauguuaaua

SEQ ID NO: 220833 - RNA, 19 nt, Homo sapiens
cuucucuauuucuggauga

SEQ ID NO: 220834 - RNA, 21 nt, Homo sapiens
aggaccucccucccccuggca

SEQ ID NO: 220835 - RNA, 22 nt, Homo sapiens
ugggugcuuaguaaguacuuaa

SEQ ID NO: 220836 - RNA, 19 nt, Homo sapiens
uccacauuuguuuugccaa

SEQ ID NO: 220837 - RNA, 20 nt, Homo sapiens
uggaugcugugaagagucua

SEQ ID NO: 220838 - RNA, 17 nt, Homo sapiens
ccuaacuaucacugguu

SEQ ID NO: 220839 - RNA, 13 nt, Homo sapiens
aacuaaaauguuc

SEQ ID NO: 220840 - RNA, 18 nt, Homo sapiens
acuucacgcccuuggcca

SEQ ID NO: 220841 - RNA, 15 nt, Homo sapiens
guagucagacuggau

SEQ ID NO: 220842 - RNA, 23 nt, Homo sapiens
gugagacuguguuguacagcuag

SEQ ID NO: 220843 - RNA, 13 nt, Homo sapiens
uugcugaugguga

SEQ ID NO: 220844 - RNA, 22 nt, Homo sapiens
agauccucaauaaacauuucau

SEQ ID NO: 220845 - RNA, 23 nt, Homo sapiens
uguuuugccaauuugcacauuaa

SEQ ID NO: 220846 - RNA, 17 nt, Homo sapiens
uauagcaagacauuaua

SEQ ID NO: 220847 - RNA, 20 nt, Homo sapiens
cuuaagaaauuuguggaaaa

SEQ ID NO: 220848 - RNA, 19 nt, Homo sapiens
agucagggaaggugccucu

SEQ ID NO: 220849 - RNA, 13 nt, Homo sapiens
agagggaugcuug

SEQ ID NO: 220850 - RNA, 20 nt, Homo sapiens
caugcugaacaucacagcuu

SEQ ID NO: 220851 - RNA, 22 nt, Homo sapiens
uagaaaaggccuucuucccaau

SEQ ID NO: 220852 - RNA, 23 nt, Homo sapiens
uuggccaugggucccauucuugg

SEQ ID NO: 220853 - RNA, 13 nt, Homo sapiens
ugacauugacuau

SEQ ID NO: 220854 - RNA, 21 nt, Homo sapiens
uuccuagaaacugacacaugc

SEQ ID NO: 220855 - RNA, 19 nt, Homo sapiens
ccaaugagaucauugugaa

SEQ ID NO: 220856 - RNA, 14 nt, Homo sapiens
aucuguuacacaaa

SEQ ID NO: 220857 - RNA, 18 nt, Homo sapiens
cagcgccagugacaguca

SEQ ID NO: 220858 - RNA, 13 nt, Homo sapiens
aaacuguggugcu

SEQ ID NO: 220859 - RNA, 12 nt, Homo sapiens
cccuucucugua

SEQ ID NO: 220860 - RNA, 15 nt, Homo sapiens
ucuguuuuguguacu

SEQ ID NO: 220861 - RNA, 13 nt, Homo sapiens
auguugcuaacag

SEQ ID NO: 220862 - RNA, 13 nt, Homo sapiens
acacucgccagcu

SEQ ID NO: 220863 - RNA, 21 nt, Homo sapiens
aauugcugcuuguacacucau

SEQ ID NO: 220864 - RNA, 15 nt, Homo sapiens
aaaguaaacgauaaa

SEQ ID NO: 220865 - RNA, 22 nt, Homo sapiens
cugaggagccugcaacaugcca

SEQ ID NO: 220866 - RNA, 23 nt, Homo sapiens
uugcugcugauuuaaacacauua

SEQ ID NO: 220867 - RNA, 15 nt, Homo sapiens
agcagcgccagugac

SEQ ID NO: 220868 - RNA, 18 nt, Homo sapiens
gaugcacaugagcuggcg

SEQ ID NO: 220869 - RNA, 15 nt, Homo sapiens
gagugucaagcugac

SEQ ID NO: 220870 - RNA, 13 nt, Homo sapiens
acugggaugaggu

SEQ ID NO: 220871 - RNA, 19 nt, Homo sapiens
augccagccacugugauag

SEQ ID NO: 220872 - RNA, 18 nt, Homo sapiens
agaaugcaguacuaacau

SEQ ID NO: 220873 - RNA, 21 nt, Homo sapiens
cuuaauuauugauguuuucau

SEQ ID NO: 220874 - RNA, 16 nt, Homo sapiens
auaaugucccuucaca

SEQ ID NO: 220875 - RNA, 23 nt, Homo sapiens
ugcugcugauuuaaacacauuaa

SEQ ID NO: 220876 - RNA, 16 nt, Homo sapiens
caguaacauagcugug

SEQ ID NO: 220877 - RNA, 13 nt, Homo sapiens
cuguuacacaaag

SEQ ID NO: 220878 - RNA, 20 nt, Homo sapiens
uuuuauaaugucccuucaca

SEQ ID NO: 220879 - RNA, 20 nt, Homo sapiens
ccaaugagaucauugugaag

SEQ ID NO: 220880 - RNA, 13 nt, Homo sapiens
gauucuauguuaa

SEQ ID NO: 220881 - RNA, 15 nt, Homo sapiens
uuaaauauuuugacu

SEQ ID NO: 220882 - RNA, 15 nt, Homo sapiens
aaugucaguauuuca

SEQ ID NO: 220883 - RNA, 20 nt, Homo sapiens
uuaccccucacaauccuugc

SEQ ID NO: 220884 - RNA, 12 nt, Homo sapiens
cagaguggcagu

SEQ ID NO: 220885 - RNA, 19 nt, Homo sapiens
cucagaugcacaugagcug

SEQ ID NO: 220886 - RNA, 17 nt, Homo sapiens
cugaacuuuguggucga

SEQ ID NO: 220887 - RNA, 14 nt, Homo sapiens
auccaauugcugcu

SEQ ID NO: 220888 - RNA, 19 nt, Homo sapiens
uuacuuuuuggaaaagaau

SEQ ID NO: 220889 - RNA, 16 nt, Homo sapiens
uuauauagcaguaaaa

SEQ ID NO: 220890 - RNA, 14 nt, Homo sapiens
gcuuacaugccuac

SEQ ID NO: 220891 - RNA, 23 nt, Homo sapiens
uuucuuguaaggcauacugccuu

SEQ ID NO: 220892 - RNA, 20 nt, Homo sapiens
acagucucccuuccuaugcu

SEQ ID NO: 220893 - RNA, 19 nt, Homo sapiens
uucucuauuucuggaugaa

SEQ ID NO: 220894 - RNA, 21 nt, Homo sapiens
aaguucuauuuauuugugaga

SEQ ID NO: 220895 - RNA, 19 nt, Homo sapiens
caaucugugaugacauucc

SEQ ID NO: 220896 - RNA, 17 nt, Homo sapiens
cuguccuauuauauuca

SEQ ID NO: 220897 - RNA, 18 nt, Homo sapiens
acuuuguggucgacauca

SEQ ID NO: 220898 - RNA, 20 nt, Homo sapiens
cccuuggccaugggucccau

SEQ ID NO: 220899 - RNA, 13 nt, Homo sapiens
cacuggacacuuc

SEQ ID NO: 220900 - RNA, 17 nt, Homo sapiens
gcccaggauuauuguca

SEQ ID NO: 220901 - RNA, 19 nt, Homo sapiens
caauccuugccacagugug

SEQ ID NO: 220902 - RNA, 16 nt, Homo sapiens
agagugcuuuaccaau

SEQ ID NO: 220903 - RNA, 15 nt, Homo sapiens
gaauauugugcccca

SEQ ID NO: 220904 - RNA, 23 nt, Homo sapiens
gugcuuuaccaauugaaguaaaa

SEQ ID NO: 220905 - RNA, 21 nt, Homo sapiens
augacuauucaguggcuaacu

SEQ ID NO: 220906 - RNA, 19 nt, Homo sapiens
uguguggucaacauuucuc

SEQ ID NO: 220907 - RNA, 13 nt, Homo sapiens
agcauguccuaau

SEQ ID NO: 220908 - RNA, 13 nt, Homo sapiens
agaugaaugucag

SEQ ID NO: 220909 - RNA, 15 nt, Homo sapiens
aacuaaaauguucua

SEQ ID NO: 220910 - RNA, 14 nt, Homo sapiens
ggagccugcaacau

SEQ ID NO: 220911 - RNA, 17 nt, Homo sapiens
uccuaaugcuugcugcu

SEQ ID NO: 220912 - RNA, 16 nt, Homo sapiens
cugcagggacagagca

SEQ ID NO: 220913 - RNA, 21 nt, Homo sapiens
uugagaaauuuuuuuuuccag

SEQ ID NO: 220914 - RNA, 19 nt, Homo sapiens
ugaagguagaauguuuuca

SEQ ID NO: 220915 - RNA, 18 nt, Homo sapiens
caauccuugccacagugu

SEQ ID NO: 220916 - RNA, 22 nt, Homo sapiens
auuuacuuuaaacuacauuagg

SEQ ID NO: 220917 - RNA, 18 nt, Homo sapiens
acaugcugaacaucacag

SEQ ID NO: 220918 - RNA, 18 nt, Homo sapiens
guucacuggacacuucac

SEQ ID NO: 220919 - RNA, 14 nt, Homo sapiens
cuuaauaaacugug

SEQ ID NO: 220920 - RNA, 18 nt, Homo sapiens
gaaaaggccuucuuccca

SEQ ID NO: 220921 - RNA, 21 nt, Homo sapiens
gaagcuuacaugccuaccaau

SEQ ID NO: 220922 - RNA, 16 nt, Homo sapiens
uauccuagucauucuu

SEQ ID NO: 220923 - RNA, 19 nt, Homo sapiens
ugcccagugagacuguguu

SEQ ID NO: 220924 - RNA, 14 nt, Homo sapiens
gucauuauguuaau

SEQ ID NO: 220925 - RNA, 16 nt, Homo sapiens
uugauugggcacauca

SEQ ID NO: 220926 - RNA, 23 nt, Homo sapiens
gaaaaaauuuacuuuaaacuaca

SEQ ID NO: 220927 - RNA, 23 nt, Homo sapiens
auguacuauccaaucugugauga

SEQ ID NO: 220928 - RNA, 19 nt, Homo sapiens
uuaauauccaauugcugcu

SEQ ID NO: 220929 - RNA, 13 nt, Homo sapiens
caauugaaguaaa

SEQ ID NO: 220930 - RNA, 16 nt, Homo sapiens
cauuucucauguugaa

SEQ ID NO: 220931 - RNA, 18 nt, Homo sapiens
ucaaauguucuccaguca

SEQ ID NO: 220932 - RNA, 14 nt, Homo sapiens
auaaccuuguucca

SEQ ID NO: 220933 - RNA, 23 nt, Homo sapiens
auucauucuuuuugaaaugucaa

SEQ ID NO: 220934 - RNA, 14 nt, Homo sapiens
aaucugugaugaca

SEQ ID NO: 220935 - RNA, 19 nt, Homo sapiens
cuguuuagaugaaugucag

SEQ ID NO: 220936 - RNA, 16 nt, Homo sapiens
ggagcaugagugccgu

SEQ ID NO: 220937 - RNA, 15 nt, Homo sapiens
gaagucuucuauuua

SEQ ID NO: 220938 - RNA, 20 nt, Homo sapiens
ucuacagagaagauucuugu

SEQ ID NO: 220939 - RNA, 13 nt, Homo sapiens
ggccacccaggaa

SEQ ID NO: 220940 - RNA, 20 nt, Homo sapiens
augcugucuucguacuggga

SEQ ID NO: 220941 - RNA, 16 nt, Homo sapiens
uuagguugugaaugca

SEQ ID NO: 220942 - RNA, 13 nt, Homo sapiens
ugaugacauuccc

SEQ ID NO: 220943 - RNA, 17 nt, Homo sapiens
ccaauagcaaggcugug

SEQ ID NO: 220944 - RNA, 13 nt, Homo sapiens
ucccuuggacauu

SEQ ID NO: 220945 - RNA, 15 nt, Homo sapiens
uuagaugaaugucag

SEQ ID NO: 220946 - RNA, 19 nt, Homo sapiens
gauaucugcagggacagag

SEQ ID NO: 220947 - RNA, 18 nt, Homo sapiens
uagagguacacuugugaa

SEQ ID NO: 220948 - RNA, 17 nt, Homo sapiens
uuggauguaaaacugaa

SEQ ID NO: 220949 - RNA, 15 nt, Homo sapiens
aaaaucacacugucu

SEQ ID NO: 220950 - RNA, 19 nt, Homo sapiens
caacugaaguucuauuuau

SEQ ID NO: 220951 - RNA, 15 nt, Homo sapiens
cuuuaagaacuaaaa

SEQ ID NO: 220952 - RNA, 21 nt, Homo sapiens
uaaugguaguuuuacaguguu

SEQ ID NO: 220953 - RNA, 12 nt, Homo sapiens
gaagucauucuu

SEQ ID NO: 220954 - RNA, 12 nt, Homo sapiens
ugaguggaguua

SEQ ID NO: 220955 - RNA, 17 nt, Homo sapiens
ccuggauguacuaucca

SEQ ID NO: 220956 - RNA, 23 nt, Homo sapiens
uagcaggaagcugugagagcagu

SEQ ID NO: 220957 - RNA, 17 nt, Homo sapiens
auaucacuuccaugaca

SEQ ID NO: 220958 - RNA, 14 nt, Homo sapiens
ugcaccuggaugua

SEQ ID NO: 220959 - RNA, 19 nt, Homo sapiens
auauaaaaauaaagcacuu

SEQ ID NO: 220960 - RNA, 22 nt, Homo sapiens
uucuggaugaaugcccagugag

SEQ ID NO: 220961 - RNA, 13 nt, Homo sapiens
augcuugcugcug

SEQ ID NO: 220962 - RNA, 20 nt, Homo sapiens
gguggggguaaggugcaucu

SEQ ID NO: 220963 - RNA, 16 nt, Homo sapiens
ucuguauuccuagaaa

SEQ ID NO: 220964 - RNA, 18 nt, Homo sapiens
agaauauaaaaauaaagc

SEQ ID NO: 220965 - RNA, 19 nt, Homo sapiens
uccacuugagugucaagcu

SEQ ID NO: 220966 - RNA, 15 nt, Homo sapiens
agggauuuucagccc

SEQ ID NO: 220967 - RNA, 22 nt, Homo sapiens
ugaggguauguuuuauauagca

SEQ ID NO: 220968 - RNA, 19 nt, Homo sapiens
uaauauccaauugcugcuu

SEQ ID NO: 220969 - RNA, 15 nt, Homo sapiens
cugauuuaaacacau

SEQ ID NO: 220970 - RNA, 19 nt, Homo sapiens
uucauucuuuuugaaaugu

SEQ ID NO: 220971 - RNA, 20 nt, Homo sapiens
caggaagcugugagagcagu

SEQ ID NO: 220972 - RNA, 18 nt, Homo sapiens
cagcucuccccuucucug

SEQ ID NO: 220973 - RNA, 14 nt, Homo sapiens
ugcacgcacacugu

SEQ ID NO: 220974 - RNA, 15 nt, Homo sapiens
caugagugccgugug

SEQ ID NO: 220975 - RNA, 16 nt, Homo sapiens
auuccuaacuaucacu

SEQ ID NO: 220976 - RNA, 23 nt, Homo sapiens
acccaguguuuuaggagcaugag

SEQ ID NO: 220977 - RNA, 19 nt, Homo sapiens
gucuccucucucuguaaua

SEQ ID NO: 220978 - RNA, 19 nt, Homo sapiens
uacaacucuauuuaauuaa

SEQ ID NO: 220979 - RNA, 18 nt, Homo sapiens
uuaagcagcgccagugac

SEQ ID NO: 220980 - RNA, 12 nt, Homo sapiens
ucauuucuagca

SEQ ID NO: 220981 - RNA, 14 nt, Homo sapiens
agcagcgccaguga

SEQ ID NO: 220982 - RNA, 15 nt, Homo sapiens
uugguaacucuguaa

SEQ ID NO: 220983 - RNA, 23 nt, Homo sapiens
uauccaaucugugaugacauucc

SEQ ID NO: 220984 - RNA, 12 nt, Homo sapiens
aauagaugacau

SEQ ID NO: 220985 - RNA, 20 nt, Homo sapiens
uuuuauccuagucauucuuc

SEQ ID NO: 220986 - RNA, 14 nt, Homo sapiens
gagucuacagagaa

SEQ ID NO: 220987 - RNA, 24 nt, Homo sapiens
agucuggcagacuuucuucucuau

SEQ ID NO: 220988 - RNA, 18 nt, Homo sapiens
uacagagaagauucuugu

SEQ ID NO: 220989 - RNA, 16 nt, Homo sapiens
cugaacaucacagcuu

SEQ ID NO: 220990 - RNA, 15 nt, Homo sapiens
acacugucuucugau

SEQ ID NO: 220991 - RNA, 22 nt, Homo sapiens
cuugcugauggugacauugcac

SEQ ID NO: 220992 - RNA, 16 nt, Homo sapiens
uauccaaucugugaug

SEQ ID NO: 220993 - RNA, 23 nt, Homo sapiens
guaauuccuaacuaucacugguu

SEQ ID NO: 220994 - RNA, 20 nt, Homo sapiens
caugagcuggcgggauugaa

SEQ ID NO: 220995 - RNA, 23 nt, Homo sapiens
aaacugaacuucagagcaugaaa

SEQ ID NO: 220996 - RNA, 13 nt, Homo sapiens
uguccuaaugcuu

SEQ ID NO: 220997 - RNA, 18 nt, Homo sapiens
gccacuggacugacgacu

SEQ ID NO: 220998 - RNA, 16 nt, Homo sapiens
cacacuguccuauuau

SEQ ID NO: 220999 - RNA, 20 nt, Homo sapiens
gacgugcacgcacacugucu

SEQ ID NO: 221000 - RNA, 19 nt, Homo sapiens
uaguucaaucuggauucau

SEQ ID NO: 221001 - RNA, 17 nt, Homo sapiens
aauguucuccagucauu

SEQ ID NO: 221002 - RNA, 17 nt, Homo sapiens
uccuagucauucuuccc

SEQ ID NO: 221003 - RNA, 15 nt, Homo sapiens
uucuuguaaggcaua

SEQ ID NO: 221004 - RNA, 16 nt, Homo sapiens
ccaaauguucacuggu

SEQ ID NO: 221005 - RNA, 16 nt, Homo sapiens
gcaaauggccaaugag

SEQ ID NO: 221006 - RNA, 18 nt, Homo sapiens
gucaaagaagucauucuu

SEQ ID NO: 221007 - RNA, 13 nt, Homo sapiens
gaugacauucccu

SEQ ID NO: 221008 - RNA, 14 nt, Homo sapiens
acauugacagauug

SEQ ID NO: 221009 - RNA, 15 nt, Homo sapiens
aaucacacugucuuc

SEQ ID NO: 221010 - RNA, 17 nt, Homo sapiens
cagaaucgcuccaccuu

SEQ ID NO: 221011 - RNA, 21 nt, Homo sapiens
cucuguauuccuagaaacuga

SEQ ID NO: 221012 - RNA, 15 nt, Homo sapiens
auugugccccaugcu

SEQ ID NO: 221013 - RNA, 11 nt, Homo sapiens
cucaugcugcc

SEQ ID NO: 221014 - RNA, 20 nt, Homo sapiens
uguccuaaugcuugcugcug

SEQ ID NO: 221015 - RNA, 22 nt, Homo sapiens
aguaaguacuuaauaaacugug

SEQ ID NO: 221016 - RNA, 23 nt, Homo sapiens
uuggccugucuuuggauuguuaa

SEQ ID NO: 221017 - RNA, 17 nt, Homo sapiens
ccuaaugcuugcugcug

SEQ ID NO: 221018 - RNA, 14 nt, Homo sapiens
gaaggaugcugucu

SEQ ID NO: 221019 - RNA, 17 nt, Homo sapiens
aucugugaugacauucc

SEQ ID NO: 221020 - RNA, 22 nt, Homo sapiens
augggugcuuaguaaguacuua

SEQ ID NO: 221021 - RNA, 17 nt, Homo sapiens
ucucuauuucuggauga

SEQ ID NO: 221022 - RNA, 13 nt, Homo sapiens
gaugacuauucag

SEQ ID NO: 221023 - RNA, 14 nt, Homo sapiens
agcaugagugccgu

SEQ ID NO: 221024 - RNA, 16 nt, Homo sapiens
cacaaagaaccaccag

SEQ ID NO: 221025 - RNA, 20 nt, Homo sapiens
aaccuaggcaaagaguauau

SEQ ID NO: 221026 - RNA, 19 nt, Homo sapiens
caaucuaaagauacagugu

SEQ ID NO: 221027 - RNA, 19 nt, Homo sapiens
gcauacugccuuguuuaau

SEQ ID NO: 221028 - RNA, 20 nt, Homo sapiens
cagacuggauaguccgucuc

SEQ ID NO: 221029 - RNA, 18 nt, Homo sapiens
uuaccaauugaaguaaaa

SEQ ID NO: 221030 - RNA, 20 nt, Homo sapiens
cauucuuuuugaaaugucaa

SEQ ID NO: 221031 - RNA, 15 nt, Homo sapiens
cauuucaaacagucu

SEQ ID NO: 221032 - RNA, 15 nt, Homo sapiens
cuauccaaucuguga

SEQ ID NO: 221033 - RNA, 16 nt, Homo sapiens
ccuaacuaucacuggu

SEQ ID NO: 221034 - RNA, 16 nt, Homo sapiens
uucaguuugcagagua

SEQ ID NO: 221035 - RNA, 17 nt, Homo sapiens
uauaaccuuguuccaaa

SEQ ID NO: 221036 - RNA, 13 nt, Homo sapiens
cucagaugcacau

SEQ ID NO: 221037 - RNA, 17 nt, Homo sapiens
cugauggugacauugca

SEQ ID NO: 221038 - RNA, 18 nt, Homo sapiens
ggaagcugugagagcagu

SEQ ID NO: 221039 - RNA, 21 nt, Homo sapiens
uuuaaauagaugacauugacu

SEQ ID NO: 221040 - RNA, 15 nt, Homo sapiens
cccuuggacauuuua

SEQ ID NO: 221041 - RNA, 13 nt, Homo sapiens
auguacuauccaa

SEQ ID NO: 221042 - RNA, 16 nt, Homo sapiens
ucaacugaaguucuau

SEQ ID NO: 221043 - RNA, 22 nt, Homo sapiens
aacagcaacacaaagcuuuugc

SEQ ID NO: 221044 - RNA, 17 nt, Homo sapiens
cagaauauugugcccca

SEQ ID NO: 221045 - RNA, 16 nt, Homo sapiens
gucuucguacugggaa

SEQ ID NO: 221046 - RNA, 22 nt, Homo sapiens
uguaauaaacucauuucuagca

SEQ ID NO: 221047 - RNA, 15 nt, Homo sapiens
gcagcgccagugaca

SEQ ID NO: 221048 - RNA, 15 nt, Homo sapiens
uuuagaugaauguca

SEQ ID NO: 221049 - RNA, 23 nt, Homo sapiens
uaguaaguacuuaauaaacugug

SEQ ID NO: 221050 - RNA, 17 nt, Homo sapiens
aauauccaauugcugcu

SEQ ID NO: 221051 - RNA, 15 nt, Homo sapiens
ugggauaucacuucc

SEQ ID NO: 221052 - RNA, 13 nt, Homo sapiens
caauuugcacauu

SEQ ID NO: 221053 - RNA, 20 nt, Homo sapiens
aaaaugguguuuuaucuucu

SEQ ID NO: 221054 - RNA, 15 nt, Homo sapiens
cuauuauauucauuc

SEQ ID NO: 221055 - RNA, 17 nt, Homo sapiens
ucucuguauuccuagaa

SEQ ID NO: 221056 - RNA, 20 nt, Homo sapiens
ugugaaggcaggggaaugua

SEQ ID NO: 221057 - RNA, 20 nt, Homo sapiens
ucugacuauaaccuuguucc

SEQ ID NO: 221058 - RNA, 13 nt, Homo sapiens
aaaacuacauuga

SEQ ID NO: 221059 - RNA, 20 nt, Homo sapiens
ucaaagaagucauucuuuaa

SEQ ID NO: 221060 - RNA, 23 nt, Homo sapiens
cuuggcccaggauuauugucaaa

SEQ ID NO: 221061 - RNA, 18 nt, Homo sapiens
ugccaauuugcacauuaa

SEQ ID NO: 221062 - RNA, 18 nt, Homo sapiens
uagcaggaagcugugaga

SEQ ID NO: 221063 - RNA, 17 nt, Homo sapiens
auaaugucccuucacaa

SEQ ID NO: 221064 - RNA, 18 nt, Homo sapiens
uaggagcaugagugccgu

SEQ ID NO: 221065 - RNA, 22 nt, Homo sapiens
gaugcugucuucguacugggaa

SEQ ID NO: 221066 - RNA, 11 nt, Homo sapiens
ggaaagcaaau

SEQ ID NO: 221067 - RNA, 17 nt, Homo sapiens
gaugaagcacacaggaa

SEQ ID NO: 221068 - RNA, 21 nt, Homo sapiens
cuauuuauuuauuuauucauu

SEQ ID NO: 221069 - RNA, 17 nt, Homo sapiens
uuaaagguacuuugcag

SEQ ID NO: 221070 - RNA, 19 nt, Homo sapiens
agggauuuucagcccucag

SEQ ID NO: 221071 - RNA, 17 nt, Homo sapiens
gccuaauaugaugacug

SEQ ID NO: 221072 - RNA, 20 nt, Homo sapiens
agaaaaggccuucuucccaa

SEQ ID NO: 221073 - RNA, 16 nt, Homo sapiens
uuauugauguuuucau

SEQ ID NO: 221074 - RNA, 15 nt, Homo sapiens
gaauguaugugcaca

SEQ ID NO: 221075 - RNA, 14 nt, Homo sapiens
auuauauucauucu

SEQ ID NO: 221076 - RNA, 17 nt, Homo sapiens
ugauaucugcagggaca

SEQ ID NO: 221077 - RNA, 13 nt, Homo sapiens
gcugauggugaca

SEQ ID NO: 221078 - RNA, 18 nt, Homo sapiens
uuaaacucugagugcaaa

SEQ ID NO: 221079 - RNA, 21 nt, Homo sapiens
guauuucaacugaaguucuau

SEQ ID NO: 221080 - RNA, 13 nt, Homo sapiens
uacagagaagauu

SEQ ID NO: 221081 - RNA, 17 nt, Homo sapiens
ucuccucucucuguaau

SEQ ID NO: 221082 - RNA, 15 nt, Homo sapiens
gcugauggugacauu

SEQ ID NO: 221083 - RNA, 21 nt, Homo sapiens
uugugaaaaaauuuacuuuaa

SEQ ID NO: 221084 - RNA, 16 nt, Homo sapiens
cacaauccuugccaca

SEQ ID NO: 221085 - RNA, 14 nt, Homo sapiens
cacagaagaugaag

SEQ ID NO: 221086 - RNA, 21 nt, Homo sapiens
agaauguuuucaaauguucuc

SEQ ID NO: 221087 - RNA, 15 nt, Homo sapiens
acaaagcuuuugcau

SEQ ID NO: 221088 - RNA, 19 nt, Homo sapiens
cucccucccccuggcacug

SEQ ID NO: 221089 - RNA, 17 nt, Homo sapiens
gaaaaggccuucuuccc

SEQ ID NO: 221090 - RNA, 13 nt, Homo sapiens
ucacuuccaugac

SEQ ID NO: 221091 - RNA, 13 nt, Homo sapiens
cagcaacacaaag

SEQ ID NO: 221092 - RNA, 13 nt, Homo sapiens
ccuagaaacugac

SEQ ID NO: 221093 - RNA, 15 nt, Homo sapiens
agacauuauauagca

SEQ ID NO: 221094 - RNA, 22 nt, Homo sapiens
agcaggaagcugugagagcagu

SEQ ID NO: 221095 - RNA, 12 nt, Homo sapiens
gguaugauuaac

SEQ ID NO: 221096 - RNA, 14 nt, Homo sapiens
caauauccuaauaa

SEQ ID NO: 221097 - RNA, 16 nt, Homo sapiens
acuuccaugacauaag

SEQ ID NO: 221098 - RNA, 17 nt, Homo sapiens
uucccugugucauuuca

SEQ ID NO: 221099 - RNA, 14 nt, Homo sapiens
gaacuucagagcau

SEQ ID NO: 221100 - RNA, 18 nt, Homo sapiens
ucuucucuauuucuggau

SEQ ID NO: 221101 - RNA, 11 nt, Homo sapiens
ucuauguuaau

SEQ ID NO: 221102 - RNA, 14 nt, Homo sapiens
cccuucucuguauu

SEQ ID NO: 221103 - RNA, 23 nt, Homo sapiens
uaaaacugaacuucagagcauga

SEQ ID NO: 221104 - RNA, 14 nt, Homo sapiens
uacauacuuuuugg

SEQ ID NO: 221105 - RNA, 20 nt, Homo sapiens
guaacucuguaauuccuaac

SEQ ID NO: 221106 - RNA, 13 nt, Homo sapiens
cccuucucuguau

SEQ ID NO: 221107 - RNA, 14 nt, Homo sapiens
uuauauucauucuu

SEQ ID NO: 221108 - RNA, 18 nt, Homo sapiens
ggauaguccgucucugcu

SEQ ID NO: 221109 - RNA, 18 nt, Homo sapiens
aaaugauuucacagugug

SEQ ID NO: 221110 - RNA, 21 nt, Homo sapiens
cucaagucuggcagacuuucu

SEQ ID NO: 221111 - RNA, 21 nt, Homo sapiens
cguucccggguagccacugga

SEQ ID NO: 221112 - RNA, 16 nt, Homo sapiens
uucaaucuggauucau

SEQ ID NO: 221113 - RNA, 17 nt, Homo sapiens
cuaacagcaacacaaag

SEQ ID NO: 221114 - RNA, 15 nt, Homo sapiens
uacuauccaaucugu

SEQ ID NO: 221115 - RNA, 16 nt, Homo sapiens
acccucagaugcacau

SEQ ID NO: 221116 - RNA, 15 nt, Homo sapiens
ugagaucauugugaa

SEQ ID NO: 221117 - RNA, 12 nt, Homo sapiens
ccuaaucuucca

SEQ ID NO: 221118 - RNA, 17 nt, Homo sapiens
cgugcacgcacacuguc

SEQ ID NO: 221119 - RNA, 14 nt, Homo sapiens
acucauucauuacu

SEQ ID NO: 221120 - RNA, 16 nt, Homo sapiens
acaaagcagauccuca

SEQ ID NO: 221121 - RNA, 15 nt, Homo sapiens
ucacagaagaugaag

SEQ ID NO: 221122 - RNA, 21 nt, Homo sapiens
uuggguuaggaagaaaauaau

SEQ ID NO: 221123 - RNA, 19 nt, Homo sapiens
aguuuuuuuccuucaagaa

SEQ ID NO: 221124 - RNA, 18 nt, Homo sapiens
gcagagugcuuuaccaau

SEQ ID NO: 221125 - RNA, 16 nt, Homo sapiens
ggcagacuuucuucuc

SEQ ID NO: 221126 - RNA, 14 nt, Homo sapiens
cuaaaauguucuaa

SEQ ID NO: 221127 - RNA, 17 nt, Homo sapiens
uuuaagcagcgccagug

SEQ ID NO: 221128 - RNA, 18 nt, Homo sapiens
guauuugaaacacugguu

SEQ ID NO: 221129 - RNA, 21 nt, Homo sapiens
uauuuaaauagaugacauuga

SEQ ID NO: 221130 - RNA, 14 nt, Homo sapiens
auuccuagaaacug

SEQ ID NO: 221131 - RNA, 16 nt, Homo sapiens
ucacacugucuucuga

SEQ ID NO: 221132 - RNA, 23 nt, Homo sapiens
ucaguuguuauuuauugaaauga

SEQ ID NO: 221133 - RNA, 23 nt, Homo sapiens
ugcaacaugccagccacugugau

SEQ ID NO: 221134 - RNA, 13 nt, Homo sapiens
auuucaacugaag

SEQ ID NO: 221135 - RNA, 12 nt, Homo sapiens
ugccacagugug

SEQ ID NO: 221136 - RNA, 23 nt, Homo sapiens
guaacuguuuagaugaaugucag

SEQ ID NO: 221137 - RNA, 14 nt, Homo sapiens
gcaaagaugaaggu

SEQ ID NO: 221138 - RNA, 14 nt, Homo sapiens
ccagugagacugug

SEQ ID NO: 221139 - RNA, 13 nt, Homo sapiens
ccaauugaaguaa

SEQ ID NO: 221140 - RNA, 23 nt, Homo sapiens
aauaucccuuggacauuuuaugu

SEQ ID NO: 221141 - RNA, 18 nt, Homo sapiens
gauguaaaacugaacuuc

SEQ ID NO: 221142 - RNA, 13 nt, Homo sapiens
gccuuggcugcag

SEQ ID NO: 221143 - RNA, 13 nt, Homo sapiens
cauucuuggccca

SEQ ID NO: 221144 - RNA, 19 nt, Homo sapiens
caacaugccagccacugug

SEQ ID NO: 221145 - RNA, 22 nt, Homo sapiens
gggaaagggauuuucagcccuc

SEQ ID NO: 221146 - RNA, 17 nt, Homo sapiens
ccagucauuauguuaau

SEQ ID NO: 221147 - RNA, 15 nt, Homo sapiens
auucucagcagagug

SEQ ID NO: 221148 - RNA, 12 nt, Homo sapiens
gaugacauuccc

SEQ ID NO: 221149 - RNA, 17 nt, Homo sapiens
caagcugaccuugcuga

SEQ ID NO: 221150 - RNA, 22 nt, Homo sapiens
cuuagacccucaugcugccaau

SEQ ID NO: 221151 - RNA, 17 nt, Homo sapiens
gugggauaucacuucca

SEQ ID NO: 221152 - RNA, 19 nt, Homo sapiens
uauccuagucauucuuccc

SEQ ID NO: 221153 - RNA, 18 nt, Homo sapiens
cugccaauauccuaauaa

SEQ ID NO: 221154 - RNA, 17 nt, Homo sapiens
gcacacaggaaccuaau

SEQ ID NO: 221155 - RNA, 17 nt, Homo sapiens
aaaaauaaagcacuuau

SEQ ID NO: 221156 - RNA, 19 nt, Homo sapiens
agaaaaggccuucuuccca

SEQ ID NO: 221157 - RNA, 13 nt, Homo sapiens
cagucucccuucc

SEQ ID NO: 221158 - RNA, 12 nt, Homo sapiens
cugugaugacau

SEQ ID NO: 221159 - RNA, 22 nt, Homo sapiens
uugacagauugaauuugccuaa

SEQ ID NO: 221160 - RNA, 17 nt, Homo sapiens
cucuaccugcacacugu

SEQ ID NO: 221161 - RNA, 18 nt, Homo sapiens
uaacucuaccugcacacu

SEQ ID NO: 221162 - RNA, 15 nt, Homo sapiens
uucuuggcccaggau

SEQ ID NO: 221163 - RNA, 20 nt, Homo sapiens
caaucuaaagauacaguguc

SEQ ID NO: 221164 - RNA, 13 nt, Homo sapiens
caacucuauuuaa

SEQ ID NO: 221165 - RNA, 13 nt, Homo sapiens
caggaagcuguga

SEQ ID NO: 221166 - RNA, 18 nt, Homo sapiens
acuucagagcaugaaaau

SEQ ID NO: 221167 - RNA, 11 nt, Homo sapiens
gguagccacug

SEQ ID NO: 221168 - RNA, 15 nt, Homo sapiens
auccuagucauucuu

SEQ ID NO: 221169 - RNA, 12 nt, Homo sapiens
agcaacacaaag

SEQ ID NO: 221170 - RNA, 17 nt, Homo sapiens
ucugugaugacauuccc

SEQ ID NO: 221171 - RNA, 20 nt, Homo sapiens
uagcaaggcugugcaucuag

SEQ ID NO: 221172 - RNA, 21 nt, Homo sapiens
gagcaguuugguuucuagcau

SEQ ID NO: 221173 - RNA, 19 nt, Homo sapiens
auuaaaaggaagcuuacau

SEQ ID NO: 221174 - RNA, 15 nt, Homo sapiens
uucagcccucagaau

SEQ ID NO: 221175 - RNA, 12 nt, Homo sapiens
cuguauuccuag

SEQ ID NO: 221176 - RNA, 21 nt, Homo sapiens
ugcccagugagacuguguugu

SEQ ID NO: 221177 - RNA, 15 nt, Homo sapiens
ugacauaagugcuau

SEQ ID NO: 221178 - RNA, 18 nt, Homo sapiens
ccuuccuaugcuguucac

SEQ ID NO: 221179 - RNA, 23 nt, Homo sapiens
aacuucagagcaugaaaaucaca

SEQ ID NO: 221180 - RNA, 22 nt, Homo sapiens
gaccuugcugauggugacauug

SEQ ID NO: 221181 - RNA, 20 nt, Homo sapiens
aggguauguuuuauauagca

SEQ ID NO: 221182 - RNA, 22 nt, Homo sapiens
guaauaaacucauuucuagcag

SEQ ID NO: 221183 - RNA, 15 nt, Homo sapiens
uauagauguugcuaa

SEQ ID NO: 221184 - RNA, 16 nt, Homo sapiens
aaauggccaaugagau

SEQ ID NO: 221185 - RNA, 20 nt, Homo sapiens
aguacuuaauaaacuguggu

SEQ ID NO: 221186 - RNA, 16 nt, Homo sapiens
aaggccuucuucccaa

SEQ ID NO: 221187 - RNA, 23 nt, Homo sapiens
agcaguuugguuucuagcaugaa

SEQ ID NO: 221188 - RNA, 16 nt, Homo sapiens
gcagcgccagugacag

SEQ ID NO: 221189 - RNA, 17 nt, Homo sapiens
guauguguucuauucag

SEQ ID NO: 221190 - RNA, 17 nt, Homo sapiens
uccuagaaacugacaca

SEQ ID NO: 221191 - RNA, 19 nt, Homo sapiens
ugauggugacauugcaccu

SEQ ID NO: 221192 - RNA, 20 nt, Homo sapiens
ucuguuacacaaagaaccac

SEQ ID NO: 221193 - RNA, 21 nt, Homo sapiens
ugcucaguagucagacuggau

SEQ ID NO: 221194 - RNA, 14 nt, Homo sapiens
gcgccagugacagu

SEQ ID NO: 221195 - RNA, 18 nt, Homo sapiens
cuggaguuauugaagcag

SEQ ID NO: 221196 - RNA, 20 nt, Homo sapiens
gagacuguaaguuacaugaa

SEQ ID NO: 221197 - RNA, 23 nt, Homo sapiens
aguaaguacuuaauaaacugugg

SEQ ID NO: 221198 - RNA, 21 nt, Homo sapiens
gcuuaauuauugauguuuuca

SEQ ID NO: 221199 - RNA, 16 nt, Homo sapiens
acagcaacacaaagcu

SEQ ID NO: 221200 - RNA, 21 nt, Homo sapiens
aaucgcuccaccuugcagcuc

SEQ ID NO: 221201 - RNA, 20 nt, Homo sapiens
ccaggauuauugucaaagaa

SEQ ID NO: 221202 - RNA, 17 nt, Homo sapiens
cagugacagucagggaa

SEQ ID NO: 221203 - RNA, 19 nt, Homo sapiens
auaaacauuucauuuccca

SEQ ID NO: 221204 - RNA, 16 nt, Homo sapiens
uacuuaauaaacugug

SEQ ID NO: 221205 - RNA, 14 nt, Homo sapiens
ugacacaugcugaa

SEQ ID NO: 221206 - RNA, 13 nt, Homo sapiens
auuucacagugug

SEQ ID NO: 221207 - RNA, 14 nt, Homo sapiens
gaaaugauuucaca

SEQ ID NO: 221208 - RNA, 16 nt, Homo sapiens
ggugacauugcaccug

SEQ ID NO: 221209 - RNA, 17 nt, Homo sapiens
ugggauaucacuuccau

SEQ ID NO: 221210 - RNA, 20 nt, Homo sapiens
uuaaauagaugacauugacu

SEQ ID NO: 221211 - RNA, 15 nt, Homo sapiens
cugugaugacauucc

SEQ ID NO: 221212 - RNA, 17 nt, Homo sapiens
auaagugcuauugcaga

SEQ ID NO: 221213 - RNA, 20 nt, Homo sapiens
acacaugcugaacaucacag

SEQ ID NO: 221214 - RNA, 13 nt, Homo sapiens
gaucauugugaag

SEQ ID NO: 221215 - RNA, 14 nt, Homo sapiens
uuugcauauugcau

SEQ ID NO: 221216 - RNA, 22 nt, Homo sapiens
auuuccucauuuuuauaauguc

SEQ ID NO: 221217 - RNA, 22 nt, Homo sapiens
auugauugggcacaucauuuca

SEQ ID NO: 221218 - RNA, 14 nt, Homo sapiens
agugagacuguguu

SEQ ID NO: 221219 - RNA, 11 nt, Homo sapiens
ggcugcaguuu

SEQ ID NO: 221220 - RNA, 22 nt, Homo sapiens
uaucugcagggacagagcauug

SEQ ID NO: 221221 - RNA, 21 nt, Homo sapiens
cacaauccuugccacagugug

SEQ ID NO: 221222 - RNA, 16 nt, Homo sapiens
gcaccuggauguacua

SEQ ID NO: 221223 - RNA, 16 nt, Homo sapiens
aagauucuauguuaau

SEQ ID NO: 221224 - RNA, 12 nt, Homo sapiens
ccucucucugua

SEQ ID NO: 221225 - RNA, 23 nt, Homo sapiens
ucuccucucucuguaauaaacuc

SEQ ID NO: 221226 - RNA, 17 nt, Homo sapiens
ugauuuaaacacauuaa

SEQ ID NO: 221227 - RNA, 18 nt, Influenza B virus (B/Memphis/12/97-MA)
uuugagaaagcaauggcu

SEQ ID NO: 221228 - RNA, 14 nt, Influenza B virus (B/Memphis/12/97-MA)
ugaaaugaaggaug

SEQ ID NO: 221229 - RNA, 20 nt, Influenza B virus (B/Memphis/12/97-MA)
ugacaguaaugcauugcuca

SEQ ID NO: 221230 - RNA, 15 nt, Influenza B virus (B/Memphis/12/97-MA)
ugagugaccacauag

SEQ ID NO: 221231 - RNA, 16 nt, Influenza B virus (B/Memphis/12/97-MA)
ugagucuguucuaaac

SEQ ID NO: 221232 - RNA, 21 nt, Influenza B virus (B/Memphis/12/97-MA)
ugagucuguucuaaacccuuu

SEQ ID NO: 221233 - RNA, 19 nt, Influenza B virus (B/Memphis/12/97-MA)
ugaggcaucuaauuucagu

SEQ ID NO: 221234 - RNA, 18 nt, Influenza B virus (B/Memphis/12/97-MA)
ugaccacauagugauuga

SEQ ID NO: 221235 - RNA, 19 nt, Influenza B virus (B/Memphis/12/97-MA)
ugcaaacacuuugcucuaa

SEQ ID NO: 221236 - RNA, 21 nt, Influenza B virus (B/Memphis/12/97-MA)
ugauuuugagaaagcaauggc

SEQ ID NO: 221237 - RNA, 15 nt, Influenza B virus (B/Memphis/12/97-MA)
ugccugcaauugcau

SEQ ID NO: 221238 - RNA, 14 nt, Influenza B virus (B/Memphis/12/97-MA)
ucuaaacccuuugu

SEQ ID NO: 221239 - RNA, 13 nt, Influenza B virus (B/Memphis/12/97-MA)
uccgcaugccaug

SEQ ID NO: 221240 - RNA, 23 nt, Influenza B virus (B/Memphis/12/97-MA)
uuuauccauuaauucaauaaaca

SEQ ID NO: 221241 - RNA, 16 nt, Influenza B virus (B/Memphis/12/97-MA)
uuucagauucuuucaa

SEQ ID NO: 221242 - RNA, 12 nt, Influenza B virus (B/Memphis/12/97-MA)
uuguuccuauuu

SEQ ID NO: 221243 - RNA, 20 nt, Influenza B virus (B/Memphis/12/97-MA)
uuggacaauagggcauuuga

SEQ ID NO: 221244 - RNA, 16 nt, Influenza B virus (B/Memphis/12/97-MA)
uugcauuaaauucaau

SEQ ID NO: 221245 - RNA, 14 nt, Influenza B virus (B/Memphis/12/97-MA)
uugcucuaacccau

SEQ ID NO: 221246 - RNA, 14 nt, Influenza B virus (B/Memphis/12/97-MA)
uugagaaagcaaug

SEQ ID NO: 221247 - RNA, 14 nt, Influenza B virus (B/Memphis/12/97-MA)
uucauuauguaucu

SEQ ID NO: 221248 - RNA, 15 nt, Influenza B virus (B/Memphis/12/97-MA)
uucauuauguaucua

SEQ ID NO: 221249 - RNA, 20 nt, Influenza B virus (B/Memphis/12/97-MA)
uuccuauuuuguuugaacaa

SEQ ID NO: 221250 - RNA, 16 nt, Influenza B virus (B/Memphis/12/97-MA)
ugugauuguuucaaua

SEQ ID NO: 221251 - RNA, 17 nt, Influenza B virus (B/Memphis/12/97-MA)
uguuccacaaaacagua

SEQ ID NO: 221252 - RNA, 21 nt, Influenza B virus (B/Memphis/12/97-MA)
uguuccuauuuuguuugaaca

SEQ ID NO: 221253 - RNA, 14 nt, Influenza B virus (B/Memphis/12/97-MA)
uguucuaaacccuu

SEQ ID NO: 221254 - RNA, 18 nt, Influenza B virus (B/Memphis/12/97-MA)
ugguugagucuguucuaa

SEQ ID NO: 221255 - RNA, 13 nt, Influenza B virus (B/Memphis/12/97-MA)
uguccuuacugaa

SEQ ID NO: 221256 - RNA, 17 nt, Influenza B virus (B/Memphis/12/97-MA)
uaguacuauuuuguuca

SEQ ID NO: 221257 - RNA, 21 nt, Influenza B virus (B/Memphis/12/97-MA)
uaguacucaauuuaguacuau

SEQ ID NO: 221258 - RNA, 14 nt, Influenza B virus (B/Memphis/12/97-MA)
uagggcauuugaau

SEQ ID NO: 221259 - RNA, 17 nt, Influenza B virus (B/Memphis/12/97-MA)
uaucagcucuccauuuc

SEQ ID NO: 221260 - RNA, 17 nt, Influenza B virus (B/Memphis/12/97-MA)
uaugcagcccaaccagg

SEQ ID NO: 221261 - RNA, 12 nt, Influenza B virus (B/Memphis/12/97-MA)
ucaauaaacaca

SEQ ID NO: 221262 - RNA, 17 nt, Influenza B virus (B/Memphis/12/97-MA)
ucaaugucagcaaauaa

SEQ ID NO: 221263 - RNA, 19 nt, Influenza B virus (B/Memphis/12/97-MA)
ucaauuuugagacacaguu

SEQ ID NO: 221264 - RNA, 22 nt, Influenza B virus (B/Memphis/12/97-MA)
ucaaaggaugauuuugagaaag

SEQ ID NO: 221265 - RNA, 20 nt, Influenza B virus (B/Memphis/12/97-MA)
uauugagugaccacauagug

SEQ ID NO: 221266 - RNA, 15 nt, Influenza B virus (B/Memphis/12/97-MA)
uauuuuguuugaaca

SEQ ID NO: 221267 - RNA, 15 nt, Influenza B virus (B/Memphis/12/97-MA)
uacuauuuuguucau

SEQ ID NO: 221268 - RNA, 14 nt, Influenza B virus (B/Memphis/12/97-MA)
uaaacccuuuguuc

SEQ ID NO: 221269 - RNA, 18 nt, Influenza B virus (B/Memphis/12/97-MA)
guauugagugaccacaua

SEQ ID NO: 221270 - RNA, 17 nt, Influenza B virus (B/Memphis/12/97-MA)
guagagaauggacauau

SEQ ID NO: 221271 - RNA, 15 nt, Influenza B virus (B/Memphis/12/97-MA)
guaaaagaauugaug

SEQ ID NO: 221272 - RNA, 16 nt, Influenza B virus (B/Memphis/12/97-MA)
gguagagaauggacau

SEQ ID NO: 221273 - RNA, 12 nt, Influenza B virus (B/Memphis/12/97-MA)
ggguacauauaa

SEQ ID NO: 221274 - RNA, 10 nt, Influenza B virus (B/Memphis/12/97-MA)
ggaccaaagg

SEQ ID NO: 221275 - RNA, 14 nt, Influenza B virus (B/Memphis/12/97-MA)
ggagaaaccaaagg

SEQ ID NO: 221276 - RNA, 16 nt, Influenza B virus (B/Memphis/12/97-MA)
gcucaccuuggugaga

SEQ ID NO: 221277 - RNA, 18 nt, Influenza B virus (B/Memphis/12/97-MA)
gacacuauggcugugauu

SEQ ID NO: 221278 - RNA, 12 nt, Influenza B virus (B/Memphis/12/97-MA)
cuuacugaacuu

SEQ ID NO: 221279 - RNA, 16 nt, Influenza B virus (B/Memphis/12/97-MA)
cggagaaaccaaagga

SEQ ID NO: 221280 - RNA, 15 nt, Influenza B virus (B/Memphis/12/97-MA)
cggagaaaccaaagg

SEQ ID NO: 221281 - RNA, 16 nt, Influenza B virus (B/Memphis/12/97-MA)
cuaacagcuccauaau

SEQ ID NO: 221282 - RNA, 17 nt, Influenza B virus (B/Memphis/12/97-MA)
caaacaaagagacaaua

SEQ ID NO: 221283 - RNA, 21 nt, Influenza B virus (B/Memphis/12/97-MA)
auuguaaucaaugucagcaaa

SEQ ID NO: 221284 - RNA, 15 nt, Influenza B virus (B/Memphis/12/97-MA)
auuguccuuacugaa

SEQ ID NO: 221285 - RNA, 17 nt, Influenza B virus (B/Memphis/12/97-MA)
auuguccuuacugaacu

SEQ ID NO: 221286 - RNA, 14 nt, Influenza B virus (B/Memphis/12/97-MA)
auuuauccauuaau

SEQ ID NO: 221287 - RNA, 18 nt, Influenza B virus (B/Memphis/12/97-MA)
auuuauccauuaauucaa

SEQ ID NO: 221288 - RNA, 13 nt, Influenza B virus (B/Memphis/12/97-MA)
auuggguacauau

SEQ ID NO: 221289 - RNA, 23 nt, Influenza B virus (B/Memphis/12/97-MA)
auugcucaaaauaaaauauggag

SEQ ID NO: 221290 - RNA, 19 nt, Influenza B virus (B/Memphis/12/97-MA)
auugcuuguggaccaaagg

SEQ ID NO: 221291 - RNA, 20 nt, Influenza B virus (B/Memphis/12/97-MA)
auugcuuguggaccaaagga

SEQ ID NO: 221292 - RNA, 15 nt, Influenza B virus (B/Memphis/12/97-MA)
augguugagucuguu

SEQ ID NO: 221293 - RNA, 18 nt, Influenza B virus (B/Memphis/12/97-MA)
augguugagucuguucua

SEQ ID NO: 221294 - RNA, 17 nt, Influenza B virus (B/Memphis/12/97-MA)
cacuauggcugugauug

SEQ ID NO: 221295 - RNA, 24 nt, Influenza B virus (B/Memphis/12/97-MA)
cacuauggcugugauuguuucaau

SEQ ID NO: 221296 - RNA, 13 nt, Influenza B virus (B/Memphis/12/97-MA)
caguuaccaaaaa

SEQ ID NO: 221297 - RNA, 16 nt, Influenza B virus (B/Memphis/12/97-MA)
cauauuguuccacaaa

SEQ ID NO: 221298 - RNA, 22 nt, Influenza B virus (B/Memphis/12/97-MA)
cauaguacucaauuuaguacua

SEQ ID NO: 221299 - RNA, 15 nt, Influenza B virus (B/Memphis/12/97-MA)
cauuaaauucaauuu

SEQ ID NO: 221300 - RNA, 22 nt, Influenza B virus (B/Memphis/12/97-MA)
agugcuuguuugcuuguuauca

SEQ ID NO: 221301 - RNA, 12 nt, Influenza B virus (B/Memphis/12/97-MA)
agguccaaacaa

SEQ ID NO: 221302 - RNA, 15 nt, Influenza B virus (B/Memphis/12/97-MA)
auccaggccaaagaa

SEQ ID NO: 221303 - RNA, 14 nt, Influenza B virus (B/Memphis/12/97-MA)
auccauuaauucaa

SEQ ID NO: 221304 - RNA, 13 nt, Influenza B virus (B/Memphis/12/97-MA)
auccauuaauuca

SEQ ID NO: 221305 - RNA, 16 nt, Influenza B virus (B/Memphis/12/97-MA)
auccauuaauucaaua

SEQ ID NO: 221306 - RNA, 18 nt, Influenza B virus (B/Memphis/12/97-MA)
auccauuaauucaauaaa

SEQ ID NO: 221307 - RNA, 22 nt, Influenza B virus (B/Memphis/12/97-MA)
auagauucggagaaaccaaagg

SEQ ID NO: 221308 - RNA, 18 nt, Influenza B virus (B/Memphis/12/97-MA)
auacgaauaaaaggucca

SEQ ID NO: 221309 - RNA, 22 nt, Influenza B virus (B/Memphis/12/97-MA)
auacuacaauggaacaagagaa

SEQ ID NO: 221310 - RNA, 17 nt, Influenza B virus (B/Memphis/12/97-MA)
acacuauggcugugauu

SEQ ID NO: 221311 - RNA, 19 nt, Influenza B virus (B/Memphis/12/97-MA)
aauuuauccauuaauucaa

SEQ ID NO: 221312 - RNA, 21 nt, Influenza B virus (B/Memphis/12/97-MA)
accuuggugagauuggguaca

SEQ ID NO: 221313 - RNA, 23 nt, Influenza B virus (B/Memphis/12/97-MA)
accuuggugagauuggguacaua

SEQ ID NO: 221314 - RNA, 19 nt, Influenza B virus (B/Memphis/12/97-MA)
agaaaccaaaggaaacuca

SEQ ID NO: 221315 - RNA, 18 nt, Influenza B virus (B/Memphis/12/97-MA)
agaacacaagaaagugcc

SEQ ID NO: 221316 - RNA, 17 nt, Influenza B virus (B/Memphis/12/97-MA)
agacacaguuaccaaaa

SEQ ID NO: 221317 - RNA, 16 nt, Influenza B virus (B/Memphis/12/97-MA)
aaacccuuuguuccua

SEQ ID NO: 221318 - RNA, 17 nt, Influenza B virus (B/Memphis/12/97-MA)
aaacccuuuguuccuau

SEQ ID NO: 221319 - RNA, 24 nt, Influenza B virus (B/Memphis/12/97-MA)
aaaacuccauuuuccacauggcag

SEQ ID NO: 221320 - RNA, 14 nt, Influenza B virus (B/Memphis/12/97-MA)
aaaagguccaaaca

SEQ ID NO: 221321 - RNA, 18 nt, Influenza B virus (B/Memphis/12/97-MA)
aaaagguccaaacaaaga

SEQ ID NO: 221322 - RNA, 16 nt, Influenza B virus (B/Memphis/12/97-MA)
aaaauaaaauauggag

SEQ ID NO: 221323 - RNA, 13 nt, Influenza B virus (B/Memphis/12/97-MA)
aauuucagucaaa

SEQ ID NO: 221324 - RNA, 21 nt, Influenza B virus (B/Memphis/12/97-MA)
aagguccaaacaaagagacaa

SEQ ID NO: 221325 - RNA, 13 nt, Influenza B virus (B/Memphis/12/97-MA)
aagcaauggcuca

SEQ ID NO: 221326 - RNA, 20 nt, Influenza B virus (B/Memphis/12/97-MA)
aauaaaauauggagaagcau

SEQ ID NO: 221327 - RNA, 19 nt, Influenza B virus (B/Memphis/12/97-MA)
aacaauuguccuuacugaa

SEQ ID NO: 221328 - RNA, 21 nt, Influenza B virus (B/Memphis/12/97-MA)
aacaauuguccuuacugaacu

SEQ ID NO: 221329 - RNA, 17 nt, Influenza B virus (B/Memphis/12/97-MA)
aaagguccaaacaaaga

SEQ ID NO: 221330 - RNA, 14 nt, Influenza B virus (B/Memphis/12/97-MA)
aaacguuauugaaa

SEQ ID NO: 221331 - RNA, 19 nt, Influenza B virus (B/Memphis/12/97-MA)
aaagugccugcaauugcau

SEQ ID NO: 221332 - RNA, 16 nt, Influenza B virus (B/Memphis/12/97-MA)
agcaaauaaacuggaa

SEQ ID NO: 221333 - RNA, 21 nt, Influenza B virus (B/Memphis/12/97-MA)
agcaaauuguaaucaauguca

SEQ ID NO: 221334 - RNA, 16 nt, Influenza B virus (B/Memphis/12/97-MA)
agauuggguacauaua

SEQ ID NO: 221335 - RNA, 17 nt, Influenza B virus (B/Memphis/12/97-MA)
agauuggguacauauaa

SEQ ID NO: 221336 - RNA, 23 nt, Influenza B virus (B/Memphis/12/97-MA)
agagguaucaauuuugagacaca

SEQ ID NO: 221337 - RNA, 18 nt, Influenza B virus (B/Memphis/12/97-MA)
agacacuauggcugugau

SEQ ID NO: 221338 - RNA, 23 nt, Influenza B virus (B/Memphis/12/97-MA)
agacaauaaacagagagguauca

SEQ ID NO: 221339 - RNA, 12 nt, Influenza B virus (B/Memphis/12/97-MA)
agaaagcaaugg

SEQ ID NO: 221340 - RNA, 13 nt, Influenza B virus (B/Memphis/12/97-MA)
agaaagcaauggc

SEQ ID NO: 221341 - RNA, 14 nt, Influenza B virus (B/Memphis/12/97-MA)
agaaagcaauggcu

SEQ ID NO: 221342 - RNA, 16 nt, Influenza B virus (B/Memphis/12/97-MA)
accaaaggaaugcaaa

SEQ ID NO: 221343 - RNA, 14 nt, Influenza B virus (B/Memphis/12/97-MA)
auucaauaaacaca

SEQ ID NO: 221344 - RNA, 16 nt, Influenza B virus (B/Memphis/12/97-MA)
auuccuaugcaaacaa

SEQ ID NO: 221345 - RNA, 13 nt, Influenza B virus (B/Memphis/12/97-MA)
auuaugcauuuaa

SEQ ID NO: 221346 - RNA, 16 nt, Influenza B virus (B/Memphis/12/97-MA)
auuuauccauuaauuc

SEQ ID NO: 221347 - RNA, 13 nt, Influenza B virus (B/Memphis/12/97-MA)
auuuaguacuauu

SEQ ID NO: 221348 - RNA, 20 nt, Influenza B virus (B/Memphis/12/97-MA)
auuguagugcuuguuugcuu

SEQ ID NO: 221349 - RNA, 13 nt, Influenza B virus (B/Memphis/12/97-MA)
auuguccuuacug

SEQ ID NO: 221350 - RNA, 18 nt, Influenza B virus (B/Memphis/12/97-MA)
caaaggaaugcaaacacu

SEQ ID NO: 221351 - RNA, 24 nt, Influenza B virus (B/Memphis/12/97-MA)
caaagaaacguuauugaaaaaugc

SEQ ID NO: 221352 - RNA, 13 nt, Influenza B virus (B/Memphis/12/97-MA)
cagauucuuucaa

SEQ ID NO: 221353 - RNA, 16 nt, Influenza B virus (B/Memphis/12/97-MA)
cagauucuuucaauuu

SEQ ID NO: 221354 - RNA, 18 nt, Influenza B virus (B/Memphis/12/97-MA)
cagcaaauaaacuggaaa

SEQ ID NO: 221355 - RNA, 16 nt, Influenza B virus (B/Memphis/12/97-MA)
cagcucuccauuucau

SEQ ID NO: 221356 - RNA, 12 nt, Influenza B virus (B/Memphis/12/97-MA)
caauuguccuua

SEQ ID NO: 221357 - RNA, 17 nt, Influenza B virus (B/Memphis/12/97-MA)
caauuguccuuacugaa

SEQ ID NO: 221358 - RNA, 16 nt, Influenza B virus (B/Memphis/12/97-MA)
caaugucagcaaauaa

SEQ ID NO: 221359 - RNA, 22 nt, Influenza B virus (B/Memphis/12/97-MA)
caaugucagcaaauaaacugga

SEQ ID NO: 221360 - RNA, 23 nt, Influenza B virus (B/Memphis/12/97-MA)
cacuauggcugugauuguuucaa

SEQ ID NO: 221361 - RNA, 15 nt, Influenza B virus (B/Memphis/12/97-MA)
cacuauggcugugau

SEQ ID NO: 221362 - RNA, 21 nt, Influenza B virus (B/Memphis/12/97-MA)
auccauuaauucaauaaacac

SEQ ID NO: 221363 - RNA, 15 nt, Influenza B virus (B/Memphis/12/97-MA)
auaguacucaauuua

SEQ ID NO: 221364 - RNA, 15 nt, Influenza B virus (B/Memphis/12/97-MA)
augcauuuaagcaaa

SEQ ID NO: 221365 - RNA, 12 nt, Influenza B virus (B/Memphis/12/97-MA)
augcauugcuca

SEQ ID NO: 221366 - RNA, 16 nt, Influenza B virus (B/Memphis/12/97-MA)
augcagcccaaccagg

SEQ ID NO: 221367 - RNA, 15 nt, Influenza B virus (B/Memphis/12/97-MA)
augcagcccaaccag

SEQ ID NO: 221368 - RNA, 22 nt, Influenza B virus (B/Memphis/12/97-MA)
augauuuugagaaagcaauggc

SEQ ID NO: 221369 - RNA, 21 nt, Influenza B virus (B/Memphis/12/97-MA)
aguacucaauuuaguacuauu

SEQ ID NO: 221370 - RNA, 19 nt, Influenza B virus (B/Memphis/12/97-MA)
aguacuauuuuguucauua

SEQ ID NO: 221371 - RNA, 13 nt, Influenza B virus (B/Memphis/12/97-MA)
aguagaaaacucc

SEQ ID NO: 221372 - RNA, 17 nt, Influenza B virus (B/Memphis/12/97-MA)
aguacuauuuuguucau

SEQ ID NO: 221373 - RNA, 18 nt, Influenza B virus (B/Memphis/12/97-MA)
aguugauggcccugacag

SEQ ID NO: 221374 - RNA, 21 nt, Influenza B virus (B/Memphis/12/97-MA)
auaaauuuauccauuaauuca

SEQ ID NO: 221375 - RNA, 22 nt, Influenza B virus (B/Memphis/12/97-MA)
auaaauuuauccauuaauucaa

SEQ ID NO: 221376 - RNA, 22 nt, Influenza B virus (B/Memphis/12/97-MA)
aggaugauuuugagaaagcaau

SEQ ID NO: 221377 - RNA, 13 nt, Influenza B virus (B/Memphis/12/97-MA)
uucauuauguauc

SEQ ID NO: 221378 - RNA, 23 nt, Influenza B virus (B/Memphis/12/97-MA)
uuccuauuuuguuugaacaauug

SEQ ID NO: 221379 - RNA, 20 nt, Influenza B virus (B/Memphis/12/97-MA)
uuaucagcucuccauuucau

SEQ ID NO: 221380 - RNA, 17 nt, Influenza B virus (B/Memphis/12/97-MA)
uuauccauuaauucaau

SEQ ID NO: 221381 - RNA, 14 nt, Influenza B virus (B/Memphis/12/97-MA)
uuaaguaaaagaau

SEQ ID NO: 221382 - RNA, 21 nt, Influenza B virus (B/Memphis/12/97-MA)
uggagcggguccgcaugccau

SEQ ID NO: 221383 - RNA, 18 nt, Influenza B virus (B/Memphis/12/97-MA)
uggcugugauuguuucaa

SEQ ID NO: 221384 - RNA, 13 nt, Influenza B virus (B/Memphis/12/97-MA)
uggguacauauaa

SEQ ID NO: 221385 - RNA, 17 nt, Influenza B virus (B/Memphis/12/97-MA)
uguaucuaaaacgucca

SEQ ID NO: 221386 - RNA, 15 nt, Influenza B virus (B/Memphis/12/97-MA)
ugagaaagcaauggc

SEQ ID NO: 221387 - RNA, 17 nt, Influenza B virus (B/Memphis/12/97-MA)
ugagaaagcaauggcuc

SEQ ID NO: 221388 - RNA, 12 nt, Influenza B virus (B/Memphis/12/97-MA)
ugcauugcucaa

SEQ ID NO: 221389 - RNA, 18 nt, Influenza B virus (B/Memphis/12/97-MA)
uuuauccauuaauucaau

SEQ ID NO: 221390 - RNA, 18 nt, Influenza B virus (B/Memphis/12/97-MA)
uuucuuauuaugcauuua

SEQ ID NO: 221391 - RNA, 19 nt, Influenza B virus (B/Memphis/12/97-MA)
uuugagaaagcaauggcuc

SEQ ID NO: 221392 - RNA, 17 nt, Influenza B virus (B/Memphis/12/97-MA)
uuugaacaauuguccuu

SEQ ID NO: 221393 - RNA, 15 nt, Influenza B virus (B/Memphis/12/97-MA)
uuuuccuuuauugua

SEQ ID NO: 221394 - RNA, 16 nt, Influenza B virus (B/Memphis/12/97-MA)
aagaaauccaggccaa

SEQ ID NO: 221395 - RNA, 13 nt, Influenza B virus (B/Memphis/12/97-MA)
aagaaacaaugaa

SEQ ID NO: 221396 - RNA, 21 nt, Influenza B virus (B/Memphis/12/97-MA)
uuuugagaaagcaauggcuca

SEQ ID NO: 221397 - RNA, 20 nt, Influenza B virus (B/Memphis/12/97-MA)
aagggaaccuuuuauugcuu

SEQ ID NO: 221398 - RNA, 15 nt, Influenza B virus (B/Memphis/12/97-MA)
aaugguugagucugu

SEQ ID NO: 221399 - RNA, 13 nt, Influenza B virus (B/Memphis/12/97-MA)
aaugucagcaaau

SEQ ID NO: 221400 - RNA, 12 nt, Influenza B virus (B/Memphis/12/97-MA)
aauggacauaua

SEQ ID NO: 221401 - RNA, 11 nt, Influenza B virus (B/Memphis/12/97-MA)
aauggcucacc

SEQ ID NO: 221402 - RNA, 17 nt, Influenza B virus (B/Memphis/12/97-MA)
aauuguaaucaauguca

SEQ ID NO: 221403 - RNA, 22 nt, Influenza B virus (B/Memphis/12/97-MA)
aauugggcaaaaucccaacagu

SEQ ID NO: 221404 - RNA, 19 nt, Influenza B virus (B/Memphis/12/97-MA)
uccuauuuuguuugaacaa

SEQ ID NO: 221405 - RNA, 16 nt, Influenza B virus (B/Memphis/12/97-MA)
ucggagaaaccaaagg

SEQ ID NO: 221406 - RNA, 18 nt, Influenza B virus (B/Memphis/12/97-MA)
ucuguucuaaacccuuug

SEQ ID NO: 221407 - RNA, 22 nt, Influenza B virus (B/Memphis/12/97-MA)
ugaacaauuguccuuacugaac

SEQ ID NO: 221408 - RNA, 21 nt, Influenza B virus (B/Memphis/12/97-MA)
ugaaacaguuuuggagauaga

SEQ ID NO: 221409 - RNA, 22 nt, Influenza B virus (B/Memphis/12/97-MA)
ugacacauaccauuccuaugca

SEQ ID NO: 221410 - RNA, 11 nt, Influenza B virus (B/Memphis/12/97-MA)
ugaaucaaaua

SEQ ID NO: 221411 - RNA, 12 nt, Influenza B virus (B/Memphis/12/97-MA)
uccauuaauuca

SEQ ID NO: 221412 - RNA, 15 nt, Influenza B virus (B/Memphis/12/97-MA)
uccauuaauucaaua

SEQ ID NO: 221413 - RNA, 20 nt, Influenza B virus (B/Memphis/12/97-MA)
uccauuaauucaauaaacac

SEQ ID NO: 221414 - RNA, 23 nt, Influenza B virus (B/Memphis/12/97-MA)
ucauagauucggagaaaccaaag

SEQ ID NO: 221415 - RNA, 17 nt, Influenza B virus (B/Memphis/12/97-MA)
ucauuauuagaaacauu

SEQ ID NO: 221416 - RNA, 17 nt, Influenza B virus (B/Memphis/12/97-MA)
uauugcuuguggaccaa

SEQ ID NO: 221417 - RNA, 20 nt, Influenza B virus (B/Memphis/12/97-MA)
uauugcuuguggaccaaagg

SEQ ID NO: 221418 - RNA, 22 nt, Influenza B virus (B/Memphis/12/97-MA)
uauaaauuuauccauuaauuca

SEQ ID NO: 221419 - RNA, 17 nt, Influenza B virus (B/Memphis/12/97-MA)
ucagcaaauaaacugga

SEQ ID NO: 221420 - RNA, 19 nt, Influenza B virus (B/Memphis/12/97-MA)
uagacacuauggcugugau

SEQ ID NO: 221421 - RNA, 13 nt, Influenza B virus (B/Memphis/12/97-MA)
uagacacuauggc

SEQ ID NO: 221422 - RNA, 14 nt, Influenza B virus (B/Memphis/12/97-MA)
uagacacuauggcu

SEQ ID NO: 221423 - RNA, 15 nt, Influenza B virus (B/Memphis/12/97-MA)
uaccauuccuaugca

SEQ ID NO: 221424 - RNA, 16 nt, Influenza B virus (B/Memphis/12/97-MA)
uaccauuccuaugcaa

SEQ ID NO: 221425 - RNA, 15 nt, Influenza B virus (B/Memphis/12/97-MA)
aacaagcugaggcau

SEQ ID NO: 221426 - RNA, 13 nt, Influenza B virus (B/Memphis/12/97-MA)
uacuacaauggaa

SEQ ID NO: 221427 - RNA, 19 nt, Influenza B virus (B/Memphis/12/97-MA)
uacuacaauggaacaagag

SEQ ID NO: 221428 - RNA, 15 nt, Influenza B virus (B/Memphis/12/97-MA)
guuugcuuguuauca

SEQ ID NO: 221429 - RNA, 14 nt, Influenza B virus (B/Memphis/12/97-MA)
guccuuacugaacu

SEQ ID NO: 221430 - RNA, 18 nt, Influenza B virus (B/Memphis/12/97-MA)
cuauuuuguuugaacaau

SEQ ID NO: 221431 - RNA, 22 nt, Influenza B virus (B/Memphis/12/97-MA)
cucauagauucggagaaaccaa

SEQ ID NO: 221432 - RNA, 17 nt, Influenza B virus (B/Memphis/12/97-MA)
cucaccuuggugagauu

SEQ ID NO: 221433 - RNA, 22 nt, Influenza B virus (B/Memphis/12/97-MA)
cugaggcaucuaauuucaguca

SEQ ID NO: 221434 - RNA, 14 nt, Influenza B virus (B/Memphis/12/97-MA)
cuuauuaugcauuu

SEQ ID NO: 221435 - RNA, 13 nt, Influenza B virus (B/Memphis/12/97-MA)
cuuggugagauug

SEQ ID NO: 221436 - RNA, 23 nt, Influenza B virus (B/Memphis/12/97-MA)
cuuggugagauuggguacauaua

SEQ ID NO: 221437 - RNA, 23 nt, Influenza B virus (B/Memphis/12/97-MA)
cgaauaaaagguccaaacaaaga

SEQ ID NO: 221438 - RNA, 21 nt, Influenza B virus (B/Memphis/12/97-MA)
ccugacaguaaugcauugcuc

SEQ ID NO: 221439 - RNA, 16 nt, Influenza B virus (B/Memphis/12/97-MA)
cauccuaagaacacaa

SEQ ID NO: 221440 - RNA, 17 nt, Influenza B virus (B/Memphis/12/97-MA)
cauuauguaucuaaaac

SEQ ID NO: 221441 - RNA, 22 nt, Influenza B virus (B/Memphis/12/97-MA)
ccaacaguagaaaacuccauuu

SEQ ID NO: 221442 - RNA, 15 nt, Influenza B virus (B/Memphis/12/97-MA)
gagaaaccaaaggaa

SEQ ID NO: 221443 - RNA, 17 nt, Influenza B virus (B/Memphis/12/97-MA)
gagaaagcaauggcuca

SEQ ID NO: 221444 - RNA, 22 nt, Influenza B virus (B/Memphis/12/97-MA)
gagguaucaauuuugagacaca

SEQ ID NO: 221445 - RNA, 19 nt, Influenza B virus (B/Memphis/12/97-MA)
gauucggagaaaccaaagg

SEQ ID NO: 221446 - RNA, 14 nt, Influenza B virus (B/Memphis/12/97-MA)
gauaauaagggaac

SEQ ID NO: 221447 - RNA, 21 nt, Influenza B virus (B/Memphis/12/97-MA)
gaugauuuugagaaagcaaug

SEQ ID NO: 221448 - RNA, 23 nt, Influenza B virus (B/Memphis/12/97-MA)
gaugauuuugagaaagcaauggc

SEQ ID NO: 221449 - RNA, 18 nt, Influenza B virus (B/Memphis/12/97-MA)
gaagcauauacugacaca

SEQ ID NO: 221450 - RNA, 15 nt, Influenza B virus (B/Memphis/12/97-MA)
cuuguggaccaaagg

SEQ ID NO: 221451 - RNA, 23 nt, Influenza B virus (B/Memphis/12/97-MA)
gaacaauuguccuuacugaacuu

SEQ ID NO: 221452 - RNA, 23 nt, Influenza B virus (B/Memphis/12/97-MA)
aaauagacacuauggcugugauu

SEQ ID NO: 221453 - RNA, 19 nt, Influenza B virus (B/Memphis/12/97-MA)
aaauagacacuauggcugu

SEQ ID NO: 221454 - RNA, 17 nt, Influenza B virus (B/Memphis/12/97-MA)
gacacuauggcugugau

SEQ ID NO: 221455 - RNA, 13 nt, Influenza B virus (B/Memphis/12/97-MA)
aaagguccaaaca

SEQ ID NO: 221456 - RNA, 22 nt, Influenza B virus (B/Memphis/12/97-MA)
aaaggaugauuuugagaaagca

SEQ ID NO: 221457 - RNA, 15 nt, Influenza B virus (B/Memphis/12/97-MA)
aaaggaaacucagcu

SEQ ID NO: 221458 - RNA, 21 nt, Influenza B virus (B/Memphis/12/97-MA)
gguauugagugaccacauagu

SEQ ID NO: 221459 - RNA, 16 nt, Influenza B virus (B/Memphis/12/97-MA)
ggauacuacaauggaa

SEQ ID NO: 221460 - RNA, 11 nt, Influenza B virus (B/Memphis/12/97-MA)
gcuaacagcuc

SEQ ID NO: 221461 - RNA, 18 nt, Influenza B virus (B/Memphis/12/97-MA)
gcucaccuuggugagauu

SEQ ID NO: 221462 - RNA, 16 nt, Influenza B virus (B/Memphis/12/97-MA)
gcaaauuguaaucaau

SEQ ID NO: 221463 - RNA, 16 nt, Influenza B virus (B/Memphis/12/97-MA)
gcauuugaaucaaaua

SEQ ID NO: 221464 - RNA, 13 nt, Influenza B virus (B/Memphis/12/97-MA)
uuuguuugaacaa

SEQ ID NO: 221465 - RNA, 22 nt, Influenza B virus (B/Memphis/12/97-MA)
uuuuccacauggcagcuuggag

SEQ ID NO: 221466 - RNA, 21 nt, Influenza B virus (B/Memphis/12/97-MA)
ugagacacaguuaccaaaaag

SEQ ID NO: 221467 - RNA, 13 nt, Influenza B virus (B/Memphis/12/97-MA)
ugagaaagcaaug

SEQ ID NO: 221468 - RNA, 18 nt, Influenza B virus (B/Memphis/12/97-MA)
ugagauuggguacauaua

SEQ ID NO: 221469 - RNA, 19 nt, Influenza B virus (B/Memphis/12/97-MA)
ugagauuggguacauauaa

SEQ ID NO: 221470 - RNA, 15 nt, Influenza B virus (B/Memphis/12/97-MA)
ugaugauaacauauu

SEQ ID NO: 221471 - RNA, 14 nt, Influenza B virus (B/Memphis/12/97-MA)
ugacacauaccauu

SEQ ID NO: 221472 - RNA, 20 nt, Influenza B virus (B/Memphis/12/97-MA)
ugaacaauuguccuuacuga

SEQ ID NO: 221473 - RNA, 15 nt, Influenza B virus (B/Memphis/12/97-MA)
ucuguucuaaacccu

SEQ ID NO: 221474 - RNA, 24 nt, Influenza B virus (B/Memphis/12/97-MA)
ucuguucuaaacccuuuguuccua

SEQ ID NO: 221475 - RNA, 22 nt, Influenza B virus (B/Memphis/12/97-MA)
uccauuaauucaauaaacacau

SEQ ID NO: 221476 - RNA, 21 nt, Influenza B virus (B/Memphis/12/97-MA)
uccuauuuuguuugaacaauu

SEQ ID NO: 221477 - RNA, 13 nt, Influenza B virus (B/Memphis/12/97-MA)
uccuuacugaacu

SEQ ID NO: 221478 - RNA, 17 nt, Influenza B virus (B/Memphis/12/97-MA)
uaugcauuuaagcaaau

SEQ ID NO: 221479 - RNA, 11 nt, Influenza B virus (B/Memphis/12/97-MA)
uauggcuguga

SEQ ID NO: 221480 - RNA, 13 nt, Influenza B virus (B/Memphis/12/97-MA)
uauggcugugauu

SEQ ID NO: 221481 - RNA, 16 nt, Influenza B virus (B/Memphis/12/97-MA)
ucaccuuggugagauu

SEQ ID NO: 221482 - RNA, 21 nt, Influenza B virus (B/Memphis/12/97-MA)
uguaaucaaugucagcaaaua

SEQ ID NO: 221483 - RNA, 19 nt, Influenza B virus (B/Memphis/12/97-MA)
ugucagcaaauaaacugga

SEQ ID NO: 221484 - RNA, 20 nt, Influenza B virus (B/Memphis/12/97-MA)
uggagcggguccgcaugcca

SEQ ID NO: 221485 - RNA, 16 nt, Influenza B virus (B/Memphis/12/97-MA)
ugcuuguggaccaaag

SEQ ID NO: 221486 - RNA, 17 nt, Influenza B virus (B/Memphis/12/97-MA)
uucggagaaaccaaagg

SEQ ID NO: 221487 - RNA, 12 nt, Influenza B virus (B/Memphis/12/97-MA)
uuccacauggca

SEQ ID NO: 221488 - RNA, 13 nt, Influenza B virus (B/Memphis/12/97-MA)
uucaauaaacaca

SEQ ID NO: 221489 - RNA, 14 nt, Influenza B virus (B/Memphis/12/97-MA)
uucaauaaacacau

SEQ ID NO: 221490 - RNA, 23 nt, Influenza B virus (B/Memphis/12/97-MA)
uuggagcggguccgcaugccaug

SEQ ID NO: 221491 - RNA, 21 nt, Influenza B virus (B/Memphis/12/97-MA)
uuauuaugcauuuaagcaaau

SEQ ID NO: 221492 - RNA, 20 nt, Influenza B virus (B/Memphis/12/97-MA)
auugagugaccacauaguga

SEQ ID NO: 221493 - RNA, 12 nt, Influenza B virus (B/Memphis/12/97-MA)
auggcugugauu

SEQ ID NO: 221494 - RNA, 22 nt, Influenza B virus (B/Memphis/12/97-MA)
auggcucaccuuggugagauug

SEQ ID NO: 221495 - RNA, 21 nt, Influenza B virus (B/Memphis/12/97-MA)
augucagcaaauaaacuggaa

SEQ ID NO: 221496 - RNA, 19 nt, Influenza B virus (B/Memphis/12/97-MA)
augcaaacacuuugcucua

SEQ ID NO: 221497 - RNA, 17 nt, Influenza B virus (B/Memphis/12/97-MA)
augcaaacaacauccua

SEQ ID NO: 221498 - RNA, 19 nt, Influenza B virus (B/Memphis/12/97-MA)
augauuuugagaaagcaau

SEQ ID NO: 221499 - RNA, 21 nt, Influenza B virus (B/Memphis/12/97-MA)
augauuuugagaaagcaaugg

SEQ ID NO: 221500 - RNA, 14 nt, Influenza B virus (B/Memphis/12/97-MA)
augcauugcucaaa

SEQ ID NO: 221501 - RNA, 14 nt, Influenza B virus (B/Memphis/12/97-MA)
auuuuguucauuau

SEQ ID NO: 221502 - RNA, 17 nt, Influenza B virus (B/Memphis/12/97-MA)
auuuuguucauuaugua

SEQ ID NO: 221503 - RNA, 17 nt, Influenza B virus (B/Memphis/12/97-MA)
auuuugagaaagcaaug

SEQ ID NO: 221504 - RNA, 22 nt, Influenza B virus (B/Memphis/12/97-MA)
auuucauggcuuggacaauagg

SEQ ID NO: 221505 - RNA, 19 nt, Influenza B virus (B/Memphis/12/97-MA)
caacauccuaagaacacaa

SEQ ID NO: 221506 - RNA, 19 nt, Influenza B virus (B/Memphis/12/97-MA)
caaauaaacuggaaaaagu

SEQ ID NO: 221507 - RNA, 15 nt, Influenza B virus (B/Memphis/12/97-MA)
caaauaaaaagagga

SEQ ID NO: 221508 - RNA, 19 nt, Influenza B virus (B/Memphis/12/97-MA)
caaaggaugauuuugagaa

SEQ ID NO: 221509 - RNA, 22 nt, Influenza B virus (B/Memphis/12/97-MA)
caaaggaugauuuugagaaagc

SEQ ID NO: 221510 - RNA, 15 nt, Influenza B virus (B/Memphis/12/97-MA)
caaaauagacacuau

SEQ ID NO: 221511 - RNA, 18 nt, Influenza B virus (B/Memphis/12/97-MA)
caaaauagacacuauggc

SEQ ID NO: 221512 - RNA, 19 nt, Influenza B virus (B/Memphis/12/97-MA)
caagaaagugccugcaauu

SEQ ID NO: 221513 - RNA, 17 nt, Influenza B virus (B/Memphis/12/97-MA)
caagaaagugccugcaa

SEQ ID NO: 221514 - RNA, 21 nt, Influenza B virus (B/Memphis/12/97-MA)
caauagggcauuugaaucaaa

SEQ ID NO: 221515 - RNA, 18 nt, Influenza B virus (B/Memphis/12/97-MA)
caauuguccuuacugaac

SEQ ID NO: 221516 - RNA, 17 nt, Influenza B virus (B/Memphis/12/97-MA)
caauuuugagacacagu

SEQ ID NO: 221517 - RNA, 16 nt, Influenza B virus (B/Memphis/12/97-MA)
cauauacugacacaua

SEQ ID NO: 221518 - RNA, 15 nt, Influenza B virus (B/Memphis/12/97-MA)
ccauuaauucaauaa

SEQ ID NO: 221519 - RNA, 14 nt, Influenza B virus (B/Memphis/12/97-MA)
aguuaccaaaaaga

SEQ ID NO: 221520 - RNA, 16 nt, Influenza B virus (B/Memphis/12/97-MA)
auaaacagagagguau

SEQ ID NO: 221521 - RNA, 20 nt, Influenza B virus (B/Memphis/12/97-MA)
aguacucaauuuaguacuau

SEQ ID NO: 221522 - RNA, 14 nt, Influenza B virus (B/Memphis/12/97-MA)
auaauaaaaauggg

SEQ ID NO: 221523 - RNA, 17 nt, Influenza B virus (B/Memphis/12/97-MA)
aucaauuuugagacaca

SEQ ID NO: 221524 - RNA, 14 nt, Influenza B virus (B/Memphis/12/97-MA)
aggaaguacucucu

SEQ ID NO: 221525 - RNA, 19 nt, Influenza B virus (B/Memphis/12/97-MA)
aggaaugguugagucuguu

SEQ ID NO: 221526 - RNA, 23 nt, Influenza B virus (B/Memphis/12/97-MA)
aggaaugguugagucuguucuaa

SEQ ID NO: 221527 - RNA, 13 nt, Influenza B virus (B/Memphis/12/97-MA)
agcaauggcucac

SEQ ID NO: 221528 - RNA, 13 nt, Influenza B virus (B/Memphis/12/97-MA)
agauucuuucaau

SEQ ID NO: 221529 - RNA, 20 nt, Influenza B virus (B/Memphis/12/97-MA)
agauucggagaaaccaaagg

SEQ ID NO: 221530 - RNA, 21 nt, Influenza B virus (B/Memphis/12/97-MA)
agauucggagaaaccaaagga

SEQ ID NO: 221531 - RNA, 22 nt, Influenza B virus (B/Memphis/12/97-MA)
acacauaccauuccuaugcaaa

SEQ ID NO: 221532 - RNA, 18 nt, Influenza B virus (B/Memphis/12/97-MA)
acauaguacucaauuuag

SEQ ID NO: 221533 - RNA, 22 nt, Influenza B virus (B/Memphis/12/97-MA)
acaaaauagacacuauggcugu

SEQ ID NO: 221534 - RNA, 15 nt, Influenza B virus (B/Memphis/12/97-MA)
acaacauggagguau

SEQ ID NO: 221535 - RNA, 23 nt, Influenza B virus (B/Memphis/12/97-MA)
acaagagaagacagaaacaagcu

SEQ ID NO: 221536 - RNA, 16 nt, Influenza B virus (B/Memphis/12/97-MA)
gcuuguggaccaaagg

SEQ ID NO: 221537 - RNA, 19 nt, Influenza B virus (B/Memphis/12/97-MA)
gcuuguggaccaaaggaau

SEQ ID NO: 221538 - RNA, 14 nt, Influenza B virus (B/Memphis/12/97-MA)
gcucuccauuucau

SEQ ID NO: 221539 - RNA, 22 nt, Influenza B virus (B/Memphis/12/97-MA)
ggaugauuuugagaaagcaaug

SEQ ID NO: 221540 - RNA, 20 nt, Influenza B virus (B/Memphis/12/97-MA)
guaaucaaugucagcaaaua

SEQ ID NO: 221541 - RNA, 16 nt, Influenza B virus (B/Memphis/12/97-MA)
guacuauuuuguucau

SEQ ID NO: 221542 - RNA, 20 nt, Influenza B virus (B/Memphis/12/97-MA)
guacucaauuuaguacuauu

SEQ ID NO: 221543 - RNA, 21 nt, Influenza B virus (B/Memphis/12/97-MA)
guauuucuuauuaugcauuua

SEQ ID NO: 221544 - RNA, 22 nt, Influenza B virus (B/Memphis/12/97-MA)
guauuucuuauuaugcauuuaa

SEQ ID NO: 221545 - RNA, 17 nt, Influenza B virus (B/Memphis/12/97-MA)
uagacacuauggcugug

SEQ ID NO: 221546 - RNA, 19 nt, Influenza B virus (B/Memphis/12/97-MA)
uagaagaauugcauuaaau

SEQ ID NO: 221547 - RNA, 20 nt, Influenza B virus (B/Memphis/12/97-MA)
uagauucggagaaaccaaag

SEQ ID NO: 221548 - RNA, 21 nt, Influenza B virus (B/Memphis/12/97-MA)
uagauucggagaaaccaaagg

SEQ ID NO: 221549 - RNA, 21 nt, Influenza B virus (B/Memphis/12/97-MA)
uauccauuaauucaauaaaca

SEQ ID NO: 221550 - RNA, 16 nt, Influenza B virus (B/Memphis/12/97-MA)
uauccauuaauucaau

SEQ ID NO: 221551 - RNA, 15 nt, Influenza B virus (B/Memphis/12/97-MA)
uauccauuaauucaa

SEQ ID NO: 221552 - RNA, 19 nt, Influenza B virus (B/Memphis/12/97-MA)
uaagcaaauuguaaucaau

SEQ ID NO: 221553 - RNA, 18 nt, Influenza B virus (B/Memphis/12/97-MA)
uaagcccuguauuuuccu

SEQ ID NO: 221554 - RNA, 13 nt, Influenza B virus (B/Memphis/12/97-MA)
uacaauggaacaa

SEQ ID NO: 221555 - RNA, 15 nt, Influenza B virus (B/Memphis/12/97-MA)
guucauuauguaucu

SEQ ID NO: 221556 - RNA, 22 nt, Influenza B virus (B/Memphis/12/97-MA)
guucuaaacccuuuguuccuau

SEQ ID NO: 221557 - RNA, 11 nt, Influenza B virus (B/Memphis/12/97-MA)
guggaccaaag

SEQ ID NO: 221558 - RNA, 12 nt, Influenza B virus (B/Memphis/12/97-MA)
guggaccaaagg

SEQ ID NO: 221559 - RNA, 15 nt, Influenza B virus (B/Memphis/12/97-MA)
guggaccaaaggaau

SEQ ID NO: 221560 - RNA, 20 nt, Influenza B virus (B/Memphis/12/97-MA)
uaaauuuauccauuaauuca

SEQ ID NO: 221561 - RNA, 15 nt, Influenza B virus (B/Memphis/12/97-MA)
guugagucuguucua

SEQ ID NO: 221562 - RNA, 12 nt, Influenza B virus (B/Memphis/12/97-MA)
cuaugcaaacaa

SEQ ID NO: 221563 - RNA, 23 nt, Influenza B virus (B/Memphis/12/97-MA)
cuauggcugugauuguuucaaua

SEQ ID NO: 221564 - RNA, 15 nt, Influenza B virus (B/Memphis/12/97-MA)
cucaccuuggugaga

SEQ ID NO: 221565 - RNA, 20 nt, Influenza B virus (B/Memphis/12/97-MA)
gagacacaguuaccaaaaag

SEQ ID NO: 221566 - RNA, 18 nt, Influenza B virus (B/Memphis/12/97-MA)
gacaauagggcauuugaa

SEQ ID NO: 221567 - RNA, 18 nt, Influenza B virus (B/Memphis/12/97-MA)
gacacauaccauuccuau

SEQ ID NO: 221568 - RNA, 20 nt, Influenza B virus (B/Memphis/12/97-MA)
gagucuguucuaaacccuuu

SEQ ID NO: 221569 - RNA, 19 nt, Influenza B virus (B/Memphis/12/97-MA)
gaggaguaaacaugaaaau

SEQ ID NO: 221570 - RNA, 17 nt, Influenza B virus (B/Memphis/12/97-MA)
gauggcccugacaguaa

SEQ ID NO: 221571 - RNA, 18 nt, Influenza B virus (B/Memphis/12/97-MA)
gauucggagaaaccaaag

SEQ ID NO: 221572 - RNA, 21 nt, Influenza B virus (B/Memphis/12/97-MA)
gauucggagaaaccaaaggaa

SEQ ID NO: 221573 - RNA, 21 nt, Influenza B virus (B/Memphis/12/97-MA)
gauagaagaauugcauuaaau

SEQ ID NO: 221574 - RNA, 13 nt, Influenza B virus (B/Memphis/12/97-MA)
gauaauaagggaa

SEQ ID NO: 221575 - RNA, 19 nt, Influenza B virus (B/Memphis/12/97-MA)
gcaauggcucaccuuggug

SEQ ID NO: 221576 - RNA, 13 nt, Influenza B virus (B/Memphis/12/97-MA)
gaaacucagcucc

SEQ ID NO: 221577 - RNA, 16 nt, Influenza B virus (B/Memphis/12/97-MA)
gaaacaagcugaggca

SEQ ID NO: 221578 - RNA, 24 nt, Influenza B virus (B/Memphis/12/97-MA)
gaaggaaguacucucugacaacau

SEQ ID NO: 221579 - RNA, 15 nt, Influenza B virus (B/Memphis/12/97-MA)
cuuuauuguagugcu

SEQ ID NO: 221580 - RNA, 16 nt, Influenza B virus (B/Memphis/12/97-MA)
cuuuauuguagugcuu

SEQ ID NO: 221581 - RNA, 16 nt, Influenza B virus (B/Memphis/12/97-MA)
cuuguuaucauuacaa

SEQ ID NO: 221582 - RNA, 17 nt, Influenza B virus (B/Memphis/12/97-MA)
cuuguuaucauuacaaa

SEQ ID NO: 221583 - RNA, 20 nt, Influenza B virus (B/Memphis/12/97-MA)
gaaaacuccauuuuccacau

SEQ ID NO: 221584 - RNA, 21 nt, Influenza B virus (B/Memphis/12/97-MA)
aaaagaaauccaggccaaaga

SEQ ID NO: 221585 - RNA, 22 nt, Influenza B virus (B/Memphis/12/97-MA)
aaaaagaaauccaggccaaaga

SEQ ID NO: 221586 - RNA, 15 nt, Influenza B virus (B/Memphis/12/97-MA)
aaaaagaggaguaaa

SEQ ID NO: 221587 - RNA, 16 nt, Influenza B virus (B/Memphis/12/97-MA)
aucaauuuugagacac

SEQ ID NO: 221588 - RNA, 14 nt, Influenza B virus (B/Memphis/12/97-MA)
aucaaugucagcaa

SEQ ID NO: 221589 - RNA, 11 nt, Influenza B virus (B/Memphis/12/97-MA)
aucagcucucc

SEQ ID NO: 221590 - RNA, 12 nt, Influenza B virus (B/Memphis/12/97-MA)
auccaggccaaa

SEQ ID NO: 221591 - RNA, 20 nt, Influenza B virus (B/Memphis/12/97-MA)
auagacacuauggcugugau

SEQ ID NO: 221592 - RNA, 12 nt, Influenza B virus (B/Memphis/12/97-MA)
auagacacuaug

SEQ ID NO: 221593 - RNA, 20 nt, Influenza B virus (B/Memphis/12/97-MA)
auacgaauaaaagguccaaa

SEQ ID NO: 221594 - RNA, 22 nt, Influenza B virus (B/Memphis/12/97-MA)
aggaaugguugagucuguucua

SEQ ID NO: 221595 - RNA, 19 nt, Influenza B virus (B/Memphis/12/97-MA)
aggcaucuaauuucaguca

SEQ ID NO: 221596 - RNA, 15 nt, Influenza B virus (B/Memphis/12/97-MA)
agguccaaacaaaga

SEQ ID NO: 221597 - RNA, 18 nt, Influenza B virus (B/Memphis/12/97-MA)
auuuugagaaagcaaugg

SEQ ID NO: 221598 - RNA, 19 nt, Influenza B virus (B/Memphis/12/97-MA)
auuuugagaaagcaauggc

SEQ ID NO: 221599 - RNA, 15 nt, Influenza B virus (B/Memphis/12/97-MA)
auuucuuauuaugca

SEQ ID NO: 221600 - RNA, 20 nt, Influenza B virus (B/Memphis/12/97-MA)
auugggcaaaaucccaacag

SEQ ID NO: 221601 - RNA, 23 nt, Influenza B virus (B/Memphis/12/97-MA)
augucagcaaauaaacuggaaaa

SEQ ID NO: 221602 - RNA, 22 nt, Influenza B virus (B/Memphis/12/97-MA)
auggcugugauuguuucaauac

SEQ ID NO: 221603 - RNA, 20 nt, Influenza B virus (B/Memphis/12/97-MA)
cacauaccauuccuaugcaa

SEQ ID NO: 221604 - RNA, 21 nt, Influenza B virus (B/Memphis/12/97-MA)
caccuuggugagauuggguac

SEQ ID NO: 221605 - RNA, 20 nt, Influenza B virus (B/Memphis/12/97-MA)
caaauugggcaaaaucccaa

SEQ ID NO: 221606 - RNA, 14 nt, Influenza B virus (B/Memphis/12/97-MA)
caaacaaagagaca

SEQ ID NO: 221607 - RNA, 15 nt, Influenza B virus (B/Memphis/12/97-MA)
caaacaaagagacaa

SEQ ID NO: 221608 - RNA, 20 nt, Influenza B virus (B/Memphis/12/97-MA)
caaacaacauccuaagaaca

SEQ ID NO: 221609 - RNA, 18 nt, Influenza B virus (B/Memphis/12/97-MA)
caacauccuaagaacaca

SEQ ID NO: 221610 - RNA, 22 nt, Influenza B virus (B/Memphis/12/97-MA)
aagcauauacugacacauacca

SEQ ID NO: 221611 - RNA, 14 nt, Influenza B virus (B/Memphis/12/97-MA)
aagaauugcauuaa

SEQ ID NO: 221612 - RNA, 21 nt, Influenza B virus (B/Memphis/12/97-MA)
aagggaaccuuuuauugcuug

SEQ ID NO: 221613 - RNA, 16 nt, Influenza B virus (B/Memphis/12/97-MA)
aaggaaacucagcucc

SEQ ID NO: 221614 - RNA, 20 nt, Influenza B virus (B/Memphis/12/97-MA)
aaugcaaacacuuugcucua

SEQ ID NO: 221615 - RNA, 17 nt, Influenza B virus (B/Memphis/12/97-MA)
aauuguccuuacugaac

SEQ ID NO: 221616 - RNA, 14 nt, Influenza B virus (B/Memphis/12/97-MA)
aauugaugauaaca

SEQ ID NO: 221617 - RNA, 21 nt, Influenza B virus (B/Memphis/12/97-MA)
aaugucagcaaauaaacugga

SEQ ID NO: 221618 - RNA, 19 nt, Influenza B virus (B/Memphis/12/97-MA)
aaaggaugauuuugagaaa

SEQ ID NO: 221619 - RNA, 15 nt, Influenza B virus (B/Memphis/12/97-MA)
aaagcaauggcucac

SEQ ID NO: 221620 - RNA, 12 nt, Influenza B virus (B/Memphis/12/97-MA)
aaagagacaaua

SEQ ID NO: 221621 - RNA, 21 nt, Influenza B virus (B/Memphis/12/97-MA)
aacauuguaugaaaugaagga

SEQ ID NO: 221622 - RNA, 17 nt, Influenza B virus (B/Memphis/12/97-MA)
aacagagagguaucaau

SEQ ID NO: 221623 - RNA, 17 nt, Influenza B virus (B/Memphis/12/97-MA)
acaguagaaaacuccau

SEQ ID NO: 221624 - RNA, 20 nt, Influenza B virus (B/Memphis/12/97-MA)
acauaccauuccuaugcaaa

SEQ ID NO: 221625 - RNA, 18 nt, Influenza B virus (B/Memphis/12/97-MA)
acacuauggcugugauug

SEQ ID NO: 221626 - RNA, 22 nt, Influenza B virus (B/Memphis/12/97-MA)
acacuauggcugugauuguuuc

SEQ ID NO: 221627 - RNA, 16 nt, Influenza B virus (B/Memphis/12/97-MA)
acacuauggcugugau

SEQ ID NO: 221628 - RNA, 14 nt, Influenza B virus (B/Memphis/12/97-MA)
acacuauggcugug

SEQ ID NO: 221629 - RNA, 19 nt, Influenza B virus (B/Memphis/12/97-MA)
agacacuauggcugugauu

SEQ ID NO: 221630 - RNA, 15 nt, Influenza B virus (B/Memphis/12/97-MA)
agaaagcaauggcuc

SEQ ID NO: 221631 - RNA, 23 nt, Influenza B virus (B/Memphis/12/97-MA)
acuguauuucuuauuaugcauuu

SEQ ID NO: 221632 - RNA, 15 nt, Influenza B virus (B/Memphis/12/97-MA)
acuauggcugugauu

SEQ ID NO: 221633 - RNA, 13 nt, Influenza B virus (B/Memphis/12/97-MA)
aaagaaacaauga

SEQ ID NO: 221634 - RNA, 20 nt, Influenza B virus (B/Memphis/12/97-MA)
aaagaaauccaggccaaaga

SEQ ID NO: 221635 - RNA, 20 nt, Influenza B virus (B/Memphis/12/97-MA)
gaaagcaauggcucaccuug

SEQ ID NO: 221636 - RNA, 21 nt, Influenza B virus (B/Memphis/12/97-MA)
cuuuguuccuauuuuguuuga

SEQ ID NO: 221637 - RNA, 18 nt, Influenza B virus (B/Memphis/12/97-MA)
gacauaguacucaauuua

SEQ ID NO: 221638 - RNA, 16 nt, Influenza B virus (B/Memphis/12/97-MA)
aaauuguaaucaaugu

SEQ ID NO: 221639 - RNA, 12 nt, Influenza B virus (B/Memphis/12/97-MA)
ggaccaaaggaa

SEQ ID NO: 221640 - RNA, 19 nt, Influenza B virus (B/Memphis/12/97-MA)
ggggauacuacaauggaac

SEQ ID NO: 221641 - RNA, 16 nt, Influenza B virus (B/Memphis/12/97-MA)
gcugugauuguuucaa

SEQ ID NO: 221642 - RNA, 15 nt, Influenza B virus (B/Memphis/12/97-MA)
caggccaaagaaaca

SEQ ID NO: 221643 - RNA, 20 nt, Influenza B virus (B/Memphis/12/97-MA)
cauaccauuccuaugcaaac

SEQ ID NO: 221644 - RNA, 12 nt, Influenza B virus (B/Memphis/12/97-MA)
cauaguacucaa

SEQ ID NO: 221645 - RNA, 16 nt, Influenza B virus (B/Memphis/12/97-MA)
cauaguacucaauuua

SEQ ID NO: 221646 - RNA, 21 nt, Influenza B virus (B/Memphis/12/97-MA)
cauauacugacacauaccauu

SEQ ID NO: 221647 - RNA, 23 nt, Influenza B virus (B/Memphis/12/97-MA)
cauagauucggagaaaccaaagg

SEQ ID NO: 221648 - RNA, 13 nt, Influenza B virus (B/Memphis/12/97-MA)
cauuaauucaaua

SEQ ID NO: 221649 - RNA, 15 nt, Influenza B virus (B/Memphis/12/97-MA)
cauuaauucaauaaa

SEQ ID NO: 221650 - RNA, 12 nt, Influenza B virus (B/Memphis/12/97-MA)
cauuuaagcaaa

SEQ ID NO: 221651 - RNA, 21 nt, Influenza B virus (B/Memphis/12/97-MA)
cauuucauggcuuggacaaua

SEQ ID NO: 221652 - RNA, 16 nt, Influenza B virus (B/Memphis/12/97-MA)
cauuugaaucaaauaa

SEQ ID NO: 221653 - RNA, 16 nt, Influenza B virus (B/Memphis/12/97-MA)
ccaaaggaaugcaaac

SEQ ID NO: 221654 - RNA, 14 nt, Influenza B virus (B/Memphis/12/97-MA)
ccugcaauugcauc

SEQ ID NO: 221655 - RNA, 18 nt, Influenza B virus (B/Memphis/12/97-MA)
cucuaacccauuaugcag

SEQ ID NO: 221656 - RNA, 17 nt, Influenza B virus (B/Memphis/12/97-MA)
cucuaacccauuaugca

SEQ ID NO: 221657 - RNA, 14 nt, Influenza B virus (B/Memphis/12/97-MA)
cuauggcugugauu

SEQ ID NO: 221658 - RNA, 22 nt, Influenza B virus (B/Memphis/12/97-MA)
cuauggcugugauuguuucaau

SEQ ID NO: 221659 - RNA, 17 nt, Influenza B virus (B/Memphis/12/97-MA)
cucaauuuaguacuauu

SEQ ID NO: 221660 - RNA, 17 nt, Influenza B virus (B/Memphis/12/97-MA)
cugugauuguuucaaua

SEQ ID NO: 221661 - RNA, 14 nt, Influenza B virus (B/Memphis/12/97-MA)
cugugauuguuuca

SEQ ID NO: 221662 - RNA, 20 nt, Influenza B virus (B/Memphis/12/97-MA)
aaacaguuuuggagauagaa

SEQ ID NO: 221663 - RNA, 18 nt, Influenza B virus (B/Memphis/12/97-MA)
cuaaacccuuuguuccua

SEQ ID NO: 221664 - RNA, 15 nt, Influenza B virus (B/Memphis/12/97-MA)
ucccaacaguagaaa

SEQ ID NO: 221665 - RNA, 16 nt, Influenza B virus (B/Memphis/12/97-MA)
ucuaauuucagucaaa

SEQ ID NO: 221666 - RNA, 18 nt, Influenza B virus (B/Memphis/12/97-MA)
ucuaaacccuuuguuccu

SEQ ID NO: 221667 - RNA, 12 nt, Influenza B virus (B/Memphis/12/97-MA)
uaugcauuuaag

SEQ ID NO: 221668 - RNA, 23 nt, Influenza B virus (B/Memphis/12/97-MA)
uauggcugugauuguuucaauac

SEQ ID NO: 221669 - RNA, 16 nt, Influenza B virus (B/Memphis/12/97-MA)
ucagcucuccauuuca

SEQ ID NO: 221670 - RNA, 14 nt, Influenza B virus (B/Memphis/12/97-MA)
ucaauuuaguacua

SEQ ID NO: 221671 - RNA, 13 nt, Influenza B virus (B/Memphis/12/97-MA)
ucaaauaaaaaga

SEQ ID NO: 221672 - RNA, 18 nt, Influenza B virus (B/Memphis/12/97-MA)
uacuauuuuguucauuau

SEQ ID NO: 221673 - RNA, 17 nt, Influenza B virus (B/Memphis/12/97-MA)
uacuauuuuguucauua

SEQ ID NO: 221674 - RNA, 15 nt, Influenza B virus (B/Memphis/12/97-MA)
uacucaauuuaguac

SEQ ID NO: 221675 - RNA, 16 nt, Influenza B virus (B/Memphis/12/97-MA)
aacaagagaagacaga

SEQ ID NO: 221676 - RNA, 20 nt, Influenza B virus (B/Memphis/12/97-MA)
uaagcaaauuguaaucaaug

SEQ ID NO: 221677 - RNA, 23 nt, Influenza B virus (B/Memphis/12/97-MA)
uaagcaaauuguaaucaauguca

SEQ ID NO: 221678 - RNA, 18 nt, Influenza B virus (B/Memphis/12/97-MA)
guauuucuuauuaugcau

SEQ ID NO: 221679 - RNA, 17 nt, Influenza B virus (B/Memphis/12/97-MA)
guacuauuuuguucauu

SEQ ID NO: 221680 - RNA, 19 nt, Influenza B virus (B/Memphis/12/97-MA)
guacuauuuuguucauuau

SEQ ID NO: 221681 - RNA, 15 nt, Influenza B virus (B/Memphis/12/97-MA)
guacuauuuuguuca

SEQ ID NO: 221682 - RNA, 23 nt, Influenza B virus (B/Memphis/12/97-MA)
aagcauauacugacacauaccau

SEQ ID NO: 221683 - RNA, 20 nt, Influenza B virus (B/Memphis/12/97-MA)
aauagacacuauggcuguga

SEQ ID NO: 221684 - RNA, 14 nt, Influenza B virus (B/Memphis/12/97-MA)
aauagacacuaugg

SEQ ID NO: 221685 - RNA, 22 nt, Influenza B virus (B/Memphis/12/97-MA)
aauagcugacaugguuguauca

SEQ ID NO: 221686 - RNA, 14 nt, Influenza B virus (B/Memphis/12/97-MA)
aauagggcauuuga

SEQ ID NO: 221687 - RNA, 13 nt, Influenza B virus (B/Memphis/12/97-MA)
aauaaacagagag

SEQ ID NO: 221688 - RNA, 14 nt, Influenza B virus (B/Memphis/12/97-MA)
aauaaaagguccaa

SEQ ID NO: 221689 - RNA, 22 nt, Influenza B virus (B/Memphis/12/97-MA)
aauaaaagguccaaacaaagag

SEQ ID NO: 221690 - RNA, 23 nt, Influenza B virus (B/Memphis/12/97-MA)
aauaaaagguccaaacaaagaga

SEQ ID NO: 221691 - RNA, 16 nt, Influenza B virus (B/Memphis/12/97-MA)
uugcuuguuaucauua

SEQ ID NO: 221692 - RNA, 18 nt, Influenza B virus (B/Memphis/12/97-MA)
uugagaaagcaauggcuc

SEQ ID NO: 221693 - RNA, 19 nt, Influenza B virus (B/Memphis/12/97-MA)
uugagaaagcaauggcuca

SEQ ID NO: 221694 - RNA, 17 nt, Influenza B virus (B/Memphis/12/97-MA)
uugagucuguucuaaac

SEQ ID NO: 221695 - RNA, 19 nt, Influenza B virus (B/Memphis/12/97-MA)
uuguucauuauguaucuaa

SEQ ID NO: 221696 - RNA, 20 nt, Influenza B virus (B/Memphis/12/97-MA)
uuguuccacaaaacaguaau

SEQ ID NO: 221697 - RNA, 14 nt, Influenza B virus (B/Memphis/12/97-MA)
uuuuaucuuaucag

SEQ ID NO: 221698 - RNA, 20 nt, Influenza B virus (B/Memphis/12/97-MA)
ugagacacaguuaccaaaaa

SEQ ID NO: 221699 - RNA, 20 nt, Influenza B virus (B/Memphis/12/97-MA)
uggacaauagggcauuugaa

SEQ ID NO: 221700 - RNA, 19 nt, Influenza B virus (B/Memphis/12/97-MA)
uguaaucaaugucagcaaa

SEQ ID NO: 221701 - RNA, 14 nt, Influenza B virus (B/Memphis/12/97-MA)
uguccuuacugaac

SEQ ID NO: 221702 - RNA, 12 nt, Influenza B virus (B/Memphis/12/97-MA)
uggaccaaagga

SEQ ID NO: 221703 - RNA, 17 nt, Influenza B virus (B/Memphis/12/97-MA)
ugguagagaauggacau

SEQ ID NO: 221704 - RNA, 19 nt, Influenza B virus (B/Memphis/12/97-MA)
uguuccuauuuuguuugaa

SEQ ID NO: 221705 - RNA, 18 nt, Influenza B virus (B/Memphis/12/97-MA)
uguucauuauguaucuaa

SEQ ID NO: 221706 - RNA, 22 nt, Influenza B virus (B/Memphis/12/97-MA)
uguucuaaacccuuuguuccua

SEQ ID NO: 221707 - RNA, 13 nt, Homo sapiens
gcacuccaugagu

SEQ ID NO: 221708 - RNA, 21 nt, Homo sapiens
aggggauagagagagaccacu

SEQ ID NO: 221709 - RNA, 18 nt, Homo sapiens
ggagggucugcagggaau

SEQ ID NO: 221710 - RNA, 16 nt, Homo sapiens
ucuuauuuaaugaaag

SEQ ID NO: 221711 - RNA, 20 nt, Homo sapiens
aagcacaugccucucucagg

SEQ ID NO: 221712 - RNA, 14 nt, Homo sapiens
aaaguacuucucca

SEQ ID NO: 221713 - RNA, 17 nt, Homo sapiens
ccgaauagcugggacua

SEQ ID NO: 221714 - RNA, 17 nt, Homo sapiens
aaugaaugucaguguga

SEQ ID NO: 221715 - RNA, 20 nt, Homo sapiens
aggcagggucucacucuguc

SEQ ID NO: 221716 - RNA, 21 nt, Homo sapiens
cuuccaacucaaacucuuaaa

SEQ ID NO: 221717 - RNA, 22 nt, Homo sapiens
ugauucuccugccucagccucc

SEQ ID NO: 221718 - RNA, 13 nt, Homo sapiens
uucuuccacaaga

SEQ ID NO: 221719 - RNA, 18 nt, Homo sapiens
ucucacuauguugcccag

SEQ ID NO: 221720 - RNA, 18 nt, Homo sapiens
uuuccuucauucaaccca

SEQ ID NO: 221721 - RNA, 23 nt, Homo sapiens
caaagacugaguacguugugcau

SEQ ID NO: 221722 - RNA, 18 nt, Homo sapiens
gaucauccacugugccau

SEQ ID NO: 221723 - RNA, 20 nt, Homo sapiens
cauuccuguucccaugagau

SEQ ID NO: 221724 - RNA, 15 nt, Homo sapiens
acaugcacgugugug

SEQ ID NO: 221725 - RNA, 12 nt, Homo sapiens
gacagcucuuau

SEQ ID NO: 221726 - RNA, 20 nt, Homo sapiens
acuugggccacugugaagag

SEQ ID NO: 221727 - RNA, 22 nt, Homo sapiens
ucuaaacaaaaaaaggcgguga

SEQ ID NO: 221728 - RNA, 16 nt, Homo sapiens
gaaaaaauaacacugu

SEQ ID NO: 221729 - RNA, 20 nt, Homo sapiens
cuuacacuuuaugcacaaaa

SEQ ID NO: 221730 - RNA, 15 nt, Homo sapiens
ucauacucaccucac

SEQ ID NO: 221731 - RNA, 14 nt, Homo sapiens
uuggagaaaggauu

SEQ ID NO: 221732 - RNA, 15 nt, Homo sapiens
auaauuaguuccuca

SEQ ID NO: 221733 - RNA, 13 nt, Homo sapiens
cauccaguaucuu

SEQ ID NO: 221734 - RNA, 12 nt, Homo sapiens
acggacacucaa

SEQ ID NO: 221735 - RNA, 18 nt, Homo sapiens
aagaccuucuccuucacc

SEQ ID NO: 221736 - RNA, 20 nt, Homo sapiens
ugcggaaugaaccacaucuu

SEQ ID NO: 221737 - RNA, 21 nt, Homo sapiens
cuuaccugccaggaagccagc

SEQ ID NO: 221738 - RNA, 18 nt, Homo sapiens
gccaaaaaaugcuugcuu

SEQ ID NO: 221739 - RNA, 14 nt, Homo sapiens
cugaugcagaaaga

SEQ ID NO: 221740 - RNA, 18 nt, Homo sapiens
ucuagcauggcugccaau

SEQ ID NO: 221741 - RNA, 15 nt, Homo sapiens
cuuuugagugccuua

SEQ ID NO: 221742 - RNA, 16 nt, Homo sapiens
acccaccaucaugucu

SEQ ID NO: 221743 - RNA, 22 nt, Homo sapiens
aagcagugcaugcugucccuua

SEQ ID NO: 221744 - RNA, 20 nt, Homo sapiens
uugcaggaccucaggugaga

SEQ ID NO: 221745 - RNA, 16 nt, Homo sapiens
auaucugaaaauguau

SEQ ID NO: 221746 - RNA, 12 nt, Homo sapiens
uacguugugcau

SEQ ID NO: 221747 - RNA, 20 nt, Homo sapiens
uccauguuugauguaucuga

SEQ ID NO: 221748 - RNA, 17 nt, Homo sapiens
caugugcacaugcacgu

SEQ ID NO: 221749 - RNA, 18 nt, Homo sapiens
gaaaaaauaacacuguac

SEQ ID NO: 221750 - RNA, 16 nt, Homo sapiens
aaugcucuuuacuuca

SEQ ID NO: 221751 - RNA, 13 nt, Homo sapiens
cugcacuccauga

SEQ ID NO: 221752 - RNA, 21 nt, Homo sapiens
gaaugauuaauuaaaacacaa

SEQ ID NO: 221753 - RNA, 17 nt, Homo sapiens
uccuaguuccaccauca

SEQ ID NO: 221754 - RNA, 17 nt, Homo sapiens
ucaaaauaaaaaugagg

SEQ ID NO: 221755 - RNA, 14 nt, Homo sapiens
guaugaggcauuug

SEQ ID NO: 221756 - RNA, 22 nt, Homo sapiens
agcuaggccuggccagaugcac

SEQ ID NO: 221757 - RNA, 15 nt, Homo sapiens
auaguggugugauuu

SEQ ID NO: 221758 - RNA, 13 nt, Homo sapiens
ggugccuugggga

SEQ ID NO: 221759 - RNA, 15 nt, Homo sapiens
auccacugugccaug

SEQ ID NO: 221760 - RNA, 12 nt, Homo sapiens
gucuacacugug

SEQ ID NO: 221761 - RNA, 14 nt, Homo sapiens
ucucucgugauuga

SEQ ID NO: 221762 - RNA, 22 nt, Homo sapiens
aagagacuuggaaaugggagac

SEQ ID NO: 221763 - RNA, 21 nt, Homo sapiens
cccagccccuucugacccaug

SEQ ID NO: 221764 - RNA, 13 nt, Homo sapiens
aacacaacaucuu

SEQ ID NO: 221765 - RNA, 15 nt, Homo sapiens
ucccaucacuucccu

SEQ ID NO: 221766 - RNA, 16 nt, Homo sapiens
ucacugcuuaacuuca

SEQ ID NO: 221767 - RNA, 17 nt, Homo sapiens
ucuuaauucuuagcuca

SEQ ID NO: 221768 - RNA, 23 nt, Homo sapiens
ugccaugccagcuuaucucaggg

SEQ ID NO: 221769 - RNA, 19 nt, Homo sapiens
ggcacccggccccugcugg

SEQ ID NO: 221770 - RNA, 22 nt, Homo sapiens
gcacacugcuugugaaaggaaa

SEQ ID NO: 221771 - RNA, 20 nt, Homo sapiens
guacuggagaaaauggacgu

SEQ ID NO: 221772 - RNA, 17 nt, Homo sapiens
gaaaguacguuaugaua

SEQ ID NO: 221773 - RNA, 16 nt, Homo sapiens
ugccugguggcagcug

SEQ ID NO: 221774 - RNA, 20 nt, Homo sapiens
ccuuucaccacaugugcaca

SEQ ID NO: 221775 - RNA, 17 nt, Homo sapiens
uaguaugaggcauuugu

SEQ ID NO: 221776 - RNA, 17 nt, Homo sapiens
cuugaaugaugccauga

SEQ ID NO: 221777 - RNA, 20 nt, Homo sapiens
aaugcucuuuacuucaugga

SEQ ID NO: 221778 - RNA, 20 nt, Homo sapiens
augagccuggcaagaaugug

SEQ ID NO: 221779 - RNA, 20 nt, Homo sapiens
cuuaaauauguggaguucau

SEQ ID NO: 221780 - RNA, 18 nt, Homo sapiens
acugugccaugugccagg

SEQ ID NO: 221781 - RNA, 24 nt, Homo sapiens
ugcacuuuguucuggcucuuccag

SEQ ID NO: 221782 - RNA, 19 nt, Homo sapiens
cugaguacguugugcauuu

SEQ ID NO: 221783 - RNA, 19 nt, Homo sapiens
caaggcugggggaagaagc

SEQ ID NO: 221784 - RNA, 16 nt, Homo sapiens
aagagggucugaggaa

SEQ ID NO: 221785 - RNA, 23 nt, Homo sapiens
cacagcugggguggggaccucag

SEQ ID NO: 221786 - RNA, 12 nt, Homo sapiens
uucuuuccugag

SEQ ID NO: 221787 - RNA, 21 nt, Homo sapiens
cagcuaacauggaaguacuau

SEQ ID NO: 221788 - RNA, 13 nt, Homo sapiens
caacugaccaguu

SEQ ID NO: 221789 - RNA, 16 nt, Homo sapiens
aagacuuuucuuucag

SEQ ID NO: 221790 - RNA, 12 nt, Homo sapiens
acaguaucucag

SEQ ID NO: 221791 - RNA, 17 nt, Homo sapiens
gugggaggggaagaaaa

SEQ ID NO: 221792 - RNA, 20 nt, Homo sapiens
cccagcccacuucugccaua

SEQ ID NO: 221793 - RNA, 18 nt, Homo sapiens
guccuacucugugucagg

SEQ ID NO: 221794 - RNA, 13 nt, Homo sapiens
caccucugcacaa

SEQ ID NO: 221795 - RNA, 14 nt, Homo sapiens
augucaagccauaa

SEQ ID NO: 221796 - RNA, 19 nt, Homo sapiens
cucacauuuauucugcuca

SEQ ID NO: 221797 - RNA, 15 nt, Homo sapiens
auucuccugccucag

SEQ ID NO: 221798 - RNA, 23 nt, Homo sapiens
ccucagggucccugguggcagcu

SEQ ID NO: 221799 - RNA, 20 nt, Homo sapiens
aguagcugggacuacaggca

SEQ ID NO: 221800 - RNA, 19 nt, Homo sapiens
uaaccaguguuguggauuu

SEQ ID NO: 221801 - RNA, 17 nt, Homo sapiens
gugaacagaacaaaagg

SEQ ID NO: 221802 - RNA, 19 nt, Homo sapiens
agauagccaaggccaaagg

SEQ ID NO: 221803 - RNA, 19 nt, Homo sapiens
gaugaccuugaaugaugcc

SEQ ID NO: 221804 - RNA, 20 nt, Homo sapiens
ucauggagggagaagaaaga

SEQ ID NO: 221805 - RNA, 22 nt, Homo sapiens
cucugccugaagucacacagug

SEQ ID NO: 221806 - RNA, 14 nt, Homo sapiens
uucagcucugcaag

SEQ ID NO: 221807 - RNA, 19 nt, Homo sapiens
aagcaggacuaaaugucua

SEQ ID NO: 221808 - RNA, 11 nt, Homo sapiens
agccagaggag

SEQ ID NO: 221809 - RNA, 16 nt, Homo sapiens
ugggcagagcagagac

SEQ ID NO: 221810 - RNA, 22 nt, Homo sapiens
agaugaugccaugggcccucuc

SEQ ID NO: 221811 - RNA, 13 nt, Homo sapiens
gugauccucccac

SEQ ID NO: 221812 - RNA, 13 nt, Homo sapiens
ucaagaugugaca

SEQ ID NO: 221813 - RNA, 21 nt, Homo sapiens
acccacugcuuuuggucugug

SEQ ID NO: 221814 - RNA, 18 nt, Homo sapiens
guugugugugcuuucuaa

SEQ ID NO: 221815 - RNA, 14 nt, Homo sapiens
caaaugcccagcuu

SEQ ID NO: 221816 - RNA, 17 nt, Homo sapiens
cagcucuguccugggag

SEQ ID NO: 221817 - RNA, 21 nt, Homo sapiens
uacacuaaaaggugaccaaug

SEQ ID NO: 221818 - RNA, 13 nt, Homo sapiens
aaagcugcugaca

SEQ ID NO: 221819 - RNA, 19 nt, Homo sapiens
cuacagagcagacaguuaa

SEQ ID NO: 221820 - RNA, 14 nt, Homo sapiens
acacugcuugugaa

SEQ ID NO: 221821 - RNA, 16 nt, Homo sapiens
cagaaguuugagauca

SEQ ID NO: 221822 - RNA, 21 nt, Homo sapiens
uuugcuaaaugugaaugauga

SEQ ID NO: 221823 - RNA, 15 nt, Homo sapiens
ccaaugggagcucau

SEQ ID NO: 221824 - RNA, 19 nt, Homo sapiens
cacagaaaauggaagacag

SEQ ID NO: 221825 - RNA, 22 nt, Homo sapiens
guuuuaugagaaaugccagugu

SEQ ID NO: 221826 - RNA, 13 nt, Homo sapiens
cuagauacuguau

SEQ ID NO: 221827 - RNA, 23 nt, Homo sapiens
agcugggguggggaccucaggcc

SEQ ID NO: 221828 - RNA, 19 nt, Homo sapiens
uacuacaguccucccaucu

SEQ ID NO: 221829 - RNA, 14 nt, Homo sapiens
caggaaguacugga

SEQ ID NO: 221830 - RNA, 22 nt, Homo sapiens
cauguguguucaugcacacuug

SEQ ID NO: 221831 - RNA, 16 nt, Homo sapiens
ucauccacugugccau

SEQ ID NO: 221832 - RNA, 23 nt, Homo sapiens
uaucuaauauguaacaagccacc

SEQ ID NO: 221833 - RNA, 14 nt, Homo sapiens
auaaccuagccuua

SEQ ID NO: 221834 - RNA, 15 nt, Homo sapiens
uucacagccaugauu

SEQ ID NO: 221835 - RNA, 16 nt, Homo sapiens
ggaaugaaugucagug

SEQ ID NO: 221836 - RNA, 17 nt, Homo sapiens
caguauuacuucugcua

SEQ ID NO: 221837 - RNA, 16 nt, Homo sapiens
augaaacauuuuguca

SEQ ID NO: 221838 - RNA, 22 nt, Homo sapiens
accuuuguauucucuccuguac

SEQ ID NO: 221839 - RNA, 15 nt, Homo sapiens
ugagaccaaccuggg

SEQ ID NO: 221840 - RNA, 17 nt, Homo sapiens
gaggacuuuucuuugug

SEQ ID NO: 221841 - RNA, 17 nt, Homo sapiens
ugaaguaauaugcacac

SEQ ID NO: 221842 - RNA, 19 nt, Homo sapiens
cagccugggugacagagca

SEQ ID NO: 221843 - RNA, 14 nt, Homo sapiens
ucuacgccagggga

SEQ ID NO: 221844 - RNA, 22 nt, Homo sapiens
gcagagcagagaccaucccuga

SEQ ID NO: 221845 - RNA, 20 nt, Homo sapiens
auguuuuucuucucccucag

SEQ ID NO: 221846 - RNA, 14 nt, Homo sapiens
caaggcugcaguga

SEQ ID NO: 221847 - RNA, 20 nt, Homo sapiens
gcuuguaaauagcucaggug

SEQ ID NO: 221848 - RNA, 14 nt, Homo sapiens
auguucugggacac

SEQ ID NO: 221849 - RNA, 15 nt, Homo sapiens
ugguugagguuucaa

SEQ ID NO: 221850 - RNA, 17 nt, Homo sapiens
uauuuaccagaccacaa

SEQ ID NO: 221851 - RNA, 12 nt, Homo sapiens
aagaugaagcug

SEQ ID NO: 221852 - RNA, 15 nt, Homo sapiens
uagccaaguguggua

SEQ ID NO: 221853 - RNA, 17 nt, Homo sapiens
cacaugcaaggucauuu

SEQ ID NO: 221854 - RNA, 14 nt, Homo sapiens
accaucaagccacc

SEQ ID NO: 221855 - RNA, 13 nt, Homo sapiens
ccaguucuuuuaa

SEQ ID NO: 221856 - RNA, 17 nt, Homo sapiens
uguucagcuccagcuca

SEQ ID NO: 221857 - RNA, 18 nt, Homo sapiens
auuucuaaaucuccaaaa

SEQ ID NO: 221858 - RNA, 20 nt, Homo sapiens
cuccuucaccuuugucccca

SEQ ID NO: 221859 - RNA, 13 nt, Homo sapiens
agagccagggucu

SEQ ID NO: 221860 - RNA, 20 nt, Homo sapiens
cuagcacuuugggaggccaa

SEQ ID NO: 221861 - RNA, 15 nt, Homo sapiens
auauauaagccaaaa

SEQ ID NO: 221862 - RNA, 15 nt, Homo sapiens
ucugacccacugcuu

SEQ ID NO: 221863 - RNA, 17 nt, Homo sapiens
cuguuucugcagccacu

SEQ ID NO: 221864 - RNA, 12 nt, Homo sapiens
acuuuaccuuuu

SEQ ID NO: 221865 - RNA, 22 nt, Homo sapiens
ugggggaucacagccucugaaa

SEQ ID NO: 221866 - RNA, 22 nt, Homo sapiens
cgggaggauguucugggacaca

SEQ ID NO: 221867 - RNA, 14 nt, Homo sapiens
gugcagcucuggag

SEQ ID NO: 221868 - RNA, 20 nt, Homo sapiens
auuaacuuuuauaaacuuua

SEQ ID NO: 221869 - RNA, 18 nt, Homo sapiens
auggcugccaaugggagc

SEQ ID NO: 221870 - RNA, 12 nt, Homo sapiens
uuccugaggcug

SEQ ID NO: 221871 - RNA, 20 nt, Homo sapiens
ggaaacagcuaaugggacac

SEQ ID NO: 221872 - RNA, 14 nt, Homo sapiens
uaucaggugcugcc

SEQ ID NO: 221873 - RNA, 15 nt, Homo sapiens
ucuuuguacagacaa

SEQ ID NO: 221874 - RNA, 21 nt, Homo sapiens
cuguuggccagugugacaagg

SEQ ID NO: 221875 - RNA, 18 nt, Homo sapiens
cucuggcuaaauucaugc

SEQ ID NO: 221876 - RNA, 15 nt, Homo sapiens
caccacaugugcaca

SEQ ID NO: 221877 - RNA, 21 nt, Homo sapiens
cuuccaauuuacauacucugc

SEQ ID NO: 221878 - RNA, 15 nt, Homo sapiens
cauguauuaccugaa

SEQ ID NO: 221879 - RNA, 18 nt, Homo sapiens
aaacucuccucugcugcu

SEQ ID NO: 221880 - RNA, 21 nt, Homo sapiens
cuuuguuuagcccaaaaccaa

SEQ ID NO: 221881 - RNA, 12 nt, Homo sapiens
gauccuccaggu

SEQ ID NO: 221882 - RNA, 17 nt, Homo sapiens
uaaugacuuaagcacac

SEQ ID NO: 221883 - RNA, 13 nt, Homo sapiens
ugcuucagccucc

SEQ ID NO: 221884 - RNA, 17 nt, Homo sapiens
auaccugucccccugac

SEQ ID NO: 221885 - RNA, 14 nt, Homo sapiens
ucacuggaacacua

SEQ ID NO: 221886 - RNA, 21 nt, Homo sapiens
guggcagcugcuuuugucuau

SEQ ID NO: 221887 - RNA, 14 nt, Homo sapiens
ugaucuuugcagac

SEQ ID NO: 221888 - RNA, 21 nt, Homo sapiens
ucagugccaaaaacaacaaca

SEQ ID NO: 221889 - RNA, 23 nt, Homo sapiens
cugcagagggcacagaaaaugga

SEQ ID NO: 221890 - RNA, 14 nt, Homo sapiens
ccuggccucaagug

SEQ ID NO: 221891 - RNA, 18 nt, Homo sapiens
acaugaucuucuuuauaa

SEQ ID NO: 221892 - RNA, 22 nt, Homo sapiens
ggaagccucccacgacugcccg

SEQ ID NO: 221893 - RNA, 19 nt, Homo sapiens
cuaggaaucaugugccaag

SEQ ID NO: 221894 - RNA, 21 nt, Homo sapiens
agcuugaccgugaggccagag

SEQ ID NO: 221895 - RNA, 20 nt, Homo sapiens
cccacuggaggcaugugaug

SEQ ID NO: 221896 - RNA, 20 nt, Homo sapiens
uccaggggugggacacccug

SEQ ID NO: 221897 - RNA, 15 nt, Homo sapiens
ugugcgccuacagga

SEQ ID NO: 221898 - RNA, 21 nt, Homo sapiens
cucugagaguagagucacugg

SEQ ID NO: 221899 - RNA, 15 nt, Homo sapiens
aacacuguacugcaa

SEQ ID NO: 221900 - RNA, 13 nt, Homo sapiens
ugcacacaccaga

SEQ ID NO: 221901 - RNA, 17 nt, Homo sapiens
aaagcugcugacagugu

SEQ ID NO: 221902 - RNA, 17 nt, Homo sapiens
gagccuccugcccuuac

SEQ ID NO: 221903 - RNA, 16 nt, Homo sapiens
cugggggccucagugc

SEQ ID NO: 221904 - RNA, 15 nt, Homo sapiens
gcagggaaacagcua

SEQ ID NO: 221905 - RNA, 20 nt, Homo sapiens
caucauccuaagcuauucag

SEQ ID NO: 221906 - RNA, 18 nt, Homo sapiens
agcuaggccuggccagau

SEQ ID NO: 221907 - RNA, 22 nt, Homo sapiens
aacuuuuauaaacuuuaccuuu

SEQ ID NO: 221908 - RNA, 16 nt, Homo sapiens
agucccauugauguac

SEQ ID NO: 221909 - RNA, 20 nt, Homo sapiens
uauuaaggaagacaauguga

SEQ ID NO: 221910 - RNA, 21 nt, Homo sapiens
uuguuaguaugaggcauuugu

SEQ ID NO: 221911 - RNA, 17 nt, Homo sapiens
uguggaugauaaaacac

SEQ ID NO: 221912 - RNA, 17 nt, Homo sapiens
cucacauuuauucugcu

SEQ ID NO: 221913 - RNA, 18 nt, Homo sapiens
aggacagggaggugaccc

SEQ ID NO: 221914 - RNA, 23 nt, Homo sapiens
cuggcugcaaaggguaucaggug

SEQ ID NO: 221915 - RNA, 17 nt, Homo sapiens
cuaggcauuugcugaau

SEQ ID NO: 221916 - RNA, 16 nt, Homo sapiens
ucuuagaaaaaccacc

SEQ ID NO: 221917 - RNA, 15 nt, Homo sapiens
ucccuucuuacuuaa

SEQ ID NO: 221918 - RNA, 14 nt, Homo sapiens
gagggagugacaga

SEQ ID NO: 221919 - RNA, 17 nt, Homo sapiens
ggccaggcuggucucaa

SEQ ID NO: 221920 - RNA, 21 nt, Homo sapiens
aaugacuuacuguacaugaaa

SEQ ID NO: 221921 - RNA, 19 nt, Homo sapiens
cgaggacagggaggugacc

SEQ ID NO: 221922 - RNA, 20 nt, Homo sapiens
gucagauuugaacucuucaa

SEQ ID NO: 221923 - RNA, 15 nt, Homo sapiens
ccaaacucaccugcc

SEQ ID NO: 221924 - RNA, 20 nt, Homo sapiens
gauacccaucccauaugccu

SEQ ID NO: 221925 - RNA, 17 nt, Homo sapiens
cuccaugagugcagcuc

SEQ ID NO: 221926 - RNA, 17 nt, Homo sapiens
ccucaggcaggugggau

SEQ ID NO: 221927 - RNA, 21 nt, Homo sapiens
aauagcugggacuacaggugu

SEQ ID NO: 221928 - RNA, 20 nt, Homo sapiens
uuuaugagaaaugccagugu

SEQ ID NO: 221929 - RNA, 15 nt, Homo sapiens
aguagagucacugga

SEQ ID NO: 221930 - RNA, 20 nt, Homo sapiens
cauuucugagaucaaaacgg

SEQ ID NO: 221931 - RNA, 14 nt, Homo sapiens
aagauaaaugugcu

SEQ ID NO: 221932 - RNA, 22 nt, Homo sapiens
gacgccaucccagccccaauga

SEQ ID NO: 221933 - RNA, 13 nt, Homo sapiens
agcugcacccuca

SEQ ID NO: 221934 - RNA, 18 nt, Homo sapiens
agaagaaaauaguggugu

SEQ ID NO: 221935 - RNA, 22 nt, Homo sapiens
uucaguguacauggaauaacau

SEQ ID NO: 221936 - RNA, 18 nt, Homo sapiens
uuccucauuagcauuuug

SEQ ID NO: 221937 - RNA, 15 nt, Homo sapiens
guggucuaaacaaaa

SEQ ID NO: 221938 - RNA, 12 nt, Homo sapiens
aaucucuaguug

SEQ ID NO: 221939 - RNA, 16 nt, Homo sapiens
ugaagucacacaguga

SEQ ID NO: 221940 - RNA, 20 nt, Homo sapiens
cccacuguggcugauuugga

SEQ ID NO: 221941 - RNA, 19 nt, Homo sapiens
uuuuagacccuauugcugc

SEQ ID NO: 221942 - RNA, 17 nt, Homo sapiens
gacguguuaugacucca

SEQ ID NO: 221943 - RNA, 17 nt, Homo sapiens
uuccacaaguuaaauaa

SEQ ID NO: 221944 - RNA, 17 nt, Homo sapiens
uguaagcaccccuucau

SEQ ID NO: 221945 - RNA, 16 nt, Homo sapiens
acuugcacccaugugu

SEQ ID NO: 221946 - RNA, 13 nt, Homo sapiens
aagugaggaugaa

SEQ ID NO: 221947 - RNA, 12 nt, Homo sapiens
uagaagucacac

SEQ ID NO: 221948 - RNA, 16 nt, Homo sapiens
aacuacccucuggaga

SEQ ID NO: 221949 - RNA, 19 nt, Homo sapiens
ccgugaggccagagacaca

SEQ ID NO: 221950 - RNA, 17 nt, Homo sapiens
guuuccuggcacugcuu

SEQ ID NO: 221951 - RNA, 20 nt, Homo sapiens
uugagaauuacccuuuugcc

SEQ ID NO: 221952 - RNA, 19 nt, Homo sapiens
guugcaggaccucagguga

SEQ ID NO: 221953 - RNA, 14 nt, Homo sapiens
cuuauacauuugau

SEQ ID NO: 221954 - RNA, 20 nt, Homo sapiens
ggcacucagaagacacugau

SEQ ID NO: 221955 - RNA, 13 nt, Homo sapiens
ugaaaaaauaaca

SEQ ID NO: 221956 - RNA, 17 nt, Homo sapiens
cccaauauuuaccagac

SEQ ID NO: 221957 - RNA, 14 nt, Homo sapiens
caccuugacagggc

SEQ ID NO: 221958 - RNA, 23 nt, Homo sapiens
uaccugaagucuuuguacagaca

SEQ ID NO: 221959 - RNA, 18 nt, Homo sapiens
cagauagauauaugcucu

SEQ ID NO: 221960 - RNA, 23 nt, Homo sapiens
uuuuauuuuuagacagagucuca

SEQ ID NO: 221961 - RNA, 23 nt, Homo sapiens
auggcugccaaugggagcucaug

SEQ ID NO: 221962 - RNA, 16 nt, Homo sapiens
agcauacguacacauu

SEQ ID NO: 221963 - RNA, 19 nt, Homo sapiens
aaaaucagccugcuccagc

SEQ ID NO: 221964 - RNA, 17 nt, Homo sapiens
ugaguacguugugcauu

SEQ ID NO: 221965 - RNA, 15 nt, Homo sapiens
uaaaaauccccaaaa

SEQ ID NO: 221966 - RNA, 21 nt, Homo sapiens
cagggucucacucugucgccc

SEQ ID NO: 221967 - RNA, 22 nt, Homo sapiens
gcaauacagacuacuucuuccc

SEQ ID NO: 221968 - RNA, 21 nt, Homo sapiens
gccaguuggucccccuuccau

SEQ ID NO: 221969 - RNA, 22 nt, Homo sapiens
ucugauccuaguuccaccauca

SEQ ID NO: 221970 - RNA, 15 nt, Homo sapiens
agccugggcaaugug

SEQ ID NO: 221971 - RNA, 14 nt, Homo sapiens
acuuuguguucacc

SEQ ID NO: 221972 - RNA, 23 nt, Homo sapiens
ggacaaggaugaucuaggaagac

SEQ ID NO: 221973 - RNA, 21 nt, Homo sapiens
cacucacauuuauucugcuca

SEQ ID NO: 221974 - RNA, 20 nt, Homo sapiens
aucgucacugcuuaacuuca

SEQ ID NO: 221975 - RNA, 15 nt, Homo sapiens
cuguucuuuccaaag

SEQ ID NO: 221976 - RNA, 15 nt, Homo sapiens
gccugaagucacaca

SEQ ID NO: 221977 - RNA, 21 nt, Homo sapiens
agauauuuugcuuugugauuu

SEQ ID NO: 221978 - RNA, 23 nt, Homo sapiens
agccacuauuguuagucucuuga

SEQ ID NO: 221979 - RNA, 13 nt, Homo sapiens
aucaaucucuagu

SEQ ID NO: 221980 - RNA, 19 nt, Homo sapiens
uaguuugcaguuacacuaa

SEQ ID NO: 221981 - RNA, 14 nt, Homo sapiens
uaucccuacuguaa

SEQ ID NO: 221982 - RNA, 14 nt, Homo sapiens
caguguacauggaa

SEQ ID NO: 221983 - RNA, 20 nt, Homo sapiens
aggcaggaggaucacuugag

SEQ ID NO: 221984 - RNA, 21 nt, Homo sapiens
uuuguagagccagggucucac

SEQ ID NO: 221985 - RNA, 22 nt, Homo sapiens
accuagguggggccugggguag

SEQ ID NO: 221986 - RNA, 20 nt, Homo sapiens
augucucuuuaaugucacag

SEQ ID NO: 221987 - RNA, 12 nt, Homo sapiens
cucuacaaaaag

SEQ ID NO: 221988 - RNA, 20 nt, Homo sapiens
agaaaauaguggugugauuu

SEQ ID NO: 221989 - RNA, 21 nt, Homo sapiens
cugacccaugcugcccuguga

SEQ ID NO: 221990 - RNA, 20 nt, Homo sapiens
aauauuucccucaccuuucc

SEQ ID NO: 221991 - RNA, 18 nt, Homo sapiens
ccacgcuggagugcagug

SEQ ID NO: 221992 - RNA, 13 nt, Homo sapiens
gggguaugggaga

SEQ ID NO: 221993 - RNA, 19 nt, Homo sapiens
ugaagucccagauacuugg

SEQ ID NO: 221994 - RNA, 14 nt, Homo sapiens
cagaugcaccagcc

SEQ ID NO: 221995 - RNA, 16 nt, Homo sapiens
cuuagacagucccugc

SEQ ID NO: 221996 - RNA, 20 nt, Homo sapiens
gcgaucuggguucacugcaa

SEQ ID NO: 221997 - RNA, 24 nt, Homo sapiens
uuaaaucagccguguaaccaugga

SEQ ID NO: 221998 - RNA, 14 nt, Homo sapiens
ggagacgggggcag

SEQ ID NO: 221999 - RNA, 18 nt, Homo sapiens
uguuaacauggacaugau

SEQ ID NO: 222000 - RNA, 21 nt, Homo sapiens
agguuuuccugaagaauugaa

SEQ ID NO: 222001 - RNA, 14 nt, Homo sapiens
uucaaccaguuuga

SEQ ID NO: 222002 - RNA, 16 nt, Homo sapiens
ucugccugaagucaca

SEQ ID NO: 222003 - RNA, 13 nt, Homo sapiens
gccucacaguccu

SEQ ID NO: 222004 - RNA, 14 nt, Homo sapiens
uacuuguggacaca

SEQ ID NO: 222005 - RNA, 13 nt, Homo sapiens
aaagcagugcaug

SEQ ID NO: 222006 - RNA, 23 nt, Homo sapiens
aaggaugaucuaggaagacuuug

SEQ ID NO: 222007 - RNA, 22 nt, Homo sapiens
caauuauuuauuaaaugcccag

SEQ ID NO: 222008 - RNA, 13 nt, Homo sapiens
uucugaaagggac

SEQ ID NO: 222009 - RNA, 14 nt, Homo sapiens
uuccaauuuacaua

SEQ ID NO: 222010 - RNA, 12 nt, Homo sapiens
gaaccaagaacu

SEQ ID NO: 222011 - RNA, 16 nt, Homo sapiens
cuggcuaugcauuuga

SEQ ID NO: 222012 - RNA, 15 nt, Homo sapiens
gaaugcgggggagca

SEQ ID NO: 222013 - RNA, 15 nt, Homo sapiens
acagggaggugaccc

SEQ ID NO: 222014 - RNA, 13 nt, Homo sapiens
uuuuagacagagu

SEQ ID NO: 222015 - RNA, 15 nt, Homo sapiens
acuaagagucucuau

SEQ ID NO: 222016 - RNA, 20 nt, Homo sapiens
ucccuacauggaguauaugu

SEQ ID NO: 222017 - RNA, 12 nt, Homo sapiens
uaaagcugccag

SEQ ID NO: 222018 - RNA, 12 nt, Homo sapiens
gucuugaacucc

SEQ ID NO: 222019 - RNA, 16 nt, Homo sapiens
gcaucaagaugugaca

SEQ ID NO: 222020 - RNA, 20 nt, Homo sapiens
cugaucucucgugauugaua

SEQ ID NO: 222021 - RNA, 14 nt, Homo sapiens
guuacauaagauaa

SEQ ID NO: 222022 - RNA, 17 nt, Homo sapiens
accacaagaaggaugau

SEQ ID NO: 222023 - RNA, 14 nt, Homo sapiens
ccaaugauggucac

SEQ ID NO: 222024 - RNA, 14 nt, Homo sapiens
agaaauguguuauc

SEQ ID NO: 222025 - RNA, 14 nt, Homo sapiens
aggaauaccugucc

SEQ ID NO: 222026 - RNA, 20 nt, Homo sapiens
cgaucuggguucacugcaac

SEQ ID NO: 222027 - RNA, 17 nt, Homo sapiens
uccuuuagcgcccaguu

SEQ ID NO: 222028 - RNA, 13 nt, Homo sapiens
ucuuuauaauucu

SEQ ID NO: 222029 - RNA, 18 nt, Homo sapiens
cugacacacagcucuguc

SEQ ID NO: 222030 - RNA, 15 nt, Homo sapiens
caaaucagcugcuac

SEQ ID NO: 222031 - RNA, 13 nt, Homo sapiens
gugcccccaugua

SEQ ID NO: 222032 - RNA, 18 nt, Homo sapiens
gagccacugcaccgggcc

SEQ ID NO: 222033 - RNA, 15 nt, Homo sapiens
aauucuuucaguggc

SEQ ID NO: 222034 - RNA, 15 nt, Homo sapiens
agggggugcccuccc

SEQ ID NO: 222035 - RNA, 15 nt, Homo sapiens
ugauuaaauucuugc

SEQ ID NO: 222036 - RNA, 13 nt, Homo sapiens
ugcuaaaugugaa

SEQ ID NO: 222037 - RNA, 23 nt, Homo sapiens
ucucuugauucauaaugacuuaa

SEQ ID NO: 222038 - RNA, 14 nt, Homo sapiens
cucugccugaaguc

SEQ ID NO: 222039 - RNA, 14 nt, Homo sapiens
gcuuuugugcauua

SEQ ID NO: 222040 - RNA, 21 nt, Homo sapiens
gcacugacauuguuggccaaa

SEQ ID NO: 222041 - RNA, 16 nt, Homo sapiens
aauccagacccggcug

SEQ ID NO: 222042 - RNA, 20 nt, Homo sapiens
acugcacuauagccuaggug

SEQ ID NO: 222043 - RNA, 14 nt, Homo sapiens
ugcacaaacagagg

SEQ ID NO: 222044 - RNA, 21 nt, Homo sapiens
ggaaauauuaagaaagacuau

SEQ ID NO: 222045 - RNA, 13 nt, Homo sapiens
cacagaggcugcc

SEQ ID NO: 222046 - RNA, 20 nt, Homo sapiens
gaagguucuacgccagggga

SEQ ID NO: 222047 - RNA, 19 nt, Homo sapiens
uuccaaugcuuugaucccu

SEQ ID NO: 222048 - RNA, 20 nt, Homo sapiens
ugggugaauaauacaguauc

SEQ ID NO: 222049 - RNA, 19 nt, Homo sapiens
aucuaggaagacuuuggaa

SEQ ID NO: 222050 - RNA, 19 nt, Homo sapiens
cagagucucacuguugccc

SEQ ID NO: 222051 - RNA, 17 nt, Homo sapiens
gaaccaaaaagaggcua

SEQ ID NO: 222052 - RNA, 15 nt, Homo sapiens
uggcuuuugugcauu

SEQ ID NO: 222053 - RNA, 18 nt, Homo sapiens
uuuuuaaaaaacugcuga

SEQ ID NO: 222054 - RNA, 14 nt, Homo sapiens
cagggaggugaccc

SEQ ID NO: 222055 - RNA, 19 nt, Homo sapiens
uuugcuaaaugugaaugau

SEQ ID NO: 222056 - RNA, 19 nt, Homo sapiens
cacugcacuauagccuagg

SEQ ID NO: 222057 - RNA, 19 nt, Homo sapiens
ucuucuccacuuucuagcc

SEQ ID NO: 222058 - RNA, 21 nt, Homo sapiens
ugaacuccuggccucaaguga

SEQ ID NO: 222059 - RNA, 15 nt, Homo sapiens
gagaccaucccugaa

SEQ ID NO: 222060 - RNA, 15 nt, Homo sapiens
cuuauacauuugaua

SEQ ID NO: 222061 - RNA, 16 nt, Homo sapiens
cacuaaggugugcucu

SEQ ID NO: 222062 - RNA, 15 nt, Homo sapiens
agugggggaucacag

SEQ ID NO: 222063 - RNA, 20 nt, Homo sapiens
cgcuacccgggaagggggcu

SEQ ID NO: 222064 - RNA, 21 nt, Homo sapiens
acacaggcccggcuccaggcu

SEQ ID NO: 222065 - RNA, 18 nt, Homo sapiens
guuugguucauggugaag

SEQ ID NO: 222066 - RNA, 14 nt, Homo sapiens
cugucgcccagucu

SEQ ID NO: 222067 - RNA, 15 nt, Homo sapiens
uaaggaauaccuguc

SEQ ID NO: 222068 - RNA, 17 nt, Homo sapiens
auaauacaguaucucag

SEQ ID NO: 222069 - RNA, 19 nt, Homo sapiens
cuauguugcccaggcaggu

SEQ ID NO: 222070 - RNA, 20 nt, Homo sapiens
cacuauaauguaagcucuac

SEQ ID NO: 222071 - RNA, 17 nt, Homo sapiens
ggagauuuacaacuggg

SEQ ID NO: 222072 - RNA, 21 nt, Homo sapiens
gacacucacacggacacucaa

SEQ ID NO: 222073 - RNA, 23 nt, Homo sapiens
gugccaagcagagguugggaggc

SEQ ID NO: 222074 - RNA, 17 nt, Homo sapiens
gcacagggucucuacca

SEQ ID NO: 222075 - RNA, 16 nt, Homo sapiens
aaaaggggggugggag

SEQ ID NO: 222076 - RNA, 14 nt, Homo sapiens
auguguuuccauau

SEQ ID NO: 222077 - RNA, 18 nt, Homo sapiens
ccagcaggcucucaggcc

SEQ ID NO: 222078 - RNA, 16 nt, Homo sapiens
agccaaggccaaagga

SEQ ID NO: 222079 - RNA, 10 nt, Homo sapiens
acccaagggc

SEQ ID NO: 222080 - RNA, 21 nt, Homo sapiens
agaguaacccugucuaaugaa

SEQ ID NO: 222081 - RNA, 14 nt, Homo sapiens
uacguugugcauuu

SEQ ID NO: 222082 - RNA, 20 nt, Homo sapiens
cucuggacaggcauguucuc

SEQ ID NO: 222083 - RNA, 16 nt, Homo sapiens
ugcuugagcucaggag

SEQ ID NO: 222084 - RNA, 15 nt, Homo sapiens
aucuagauacuguau

SEQ ID NO: 222085 - RNA, 14 nt, Homo sapiens
aaaugccagugugc

SEQ ID NO: 222086 - RNA, 15 nt, Homo sapiens
uagugugugcaauuu

SEQ ID NO: 222087 - RNA, 15 nt, Homo sapiens
gugauguguuuccau

SEQ ID NO: 222088 - RNA, 17 nt, Homo sapiens
uuguaaauagcucaggu

SEQ ID NO: 222089 - RNA, 23 nt, Homo sapiens
ucuguggguuucuaaagcugcca

SEQ ID NO: 222090 - RNA, 20 nt, Homo sapiens
augagguacucuccuggaaa

SEQ ID NO: 222091 - RNA, 18 nt, Homo sapiens
cuccugggcuaagugauc

SEQ ID NO: 222092 - RNA, 22 nt, Homo sapiens
gcacaugccucucucaggccaa

SEQ ID NO: 222093 - RNA, 12 nt, Homo sapiens
ccauccagguuc

SEQ ID NO: 222094 - RNA, 18 nt, Homo sapiens
uaaaacccaagugccuua

SEQ ID NO: 222095 - RNA, 16 nt, Homo sapiens
uauuuuuagacagagu

SEQ ID NO: 222096 - RNA, 13 nt, Homo sapiens
uguucugggacac

SEQ ID NO: 222097 - RNA, 16 nt, Homo sapiens
agcgugagccacugca

SEQ ID NO: 222098 - RNA, 21 nt, Homo sapiens
auaacacuguacugcaauaag

SEQ ID NO: 222099 - RNA, 12 nt, Homo sapiens
uuucaaacuuua

SEQ ID NO: 222100 - RNA, 20 nt, Homo sapiens
uggggcagcuugaggguugg

SEQ ID NO: 222101 - RNA, 20 nt, Homo sapiens
agagugagacucugucucaa

SEQ ID NO: 222102 - RNA, 19 nt, Homo sapiens
uacuggagaaaauggacgu

SEQ ID NO: 222103 - RNA, 22 nt, Homo sapiens
cauagagagcaagacgcugugc

SEQ ID NO: 222104 - RNA, 22 nt, Homo sapiens
uucuacucgaguuacagacaaa

SEQ ID NO: 222105 - RNA, 20 nt, Homo sapiens
gcuuaaaggggcuagaguga

SEQ ID NO: 222106 - RNA, 13 nt, Homo sapiens
cucauaguauggu

SEQ ID NO: 222107 - RNA, 13 nt, Homo sapiens
ugaauaauacagu

SEQ ID NO: 222108 - RNA, 10 nt, Homo sapiens
uuggggacca

SEQ ID NO: 222109 - RNA, 14 nt, Homo sapiens
aagcauuuacuuug

SEQ ID NO: 222110 - RNA, 21 nt, Homo sapiens
uacacacacacgcgugcacac

SEQ ID NO: 222111 - RNA, 17 nt, Homo sapiens
cucgcgacaaugcaaac

SEQ ID NO: 222112 - RNA, 14 nt, Homo sapiens
gauccuccaggugc

SEQ ID NO: 222113 - RNA, 18 nt, Homo sapiens
agaaaugagcugcacucc

SEQ ID NO: 222114 - RNA, 19 nt, Homo sapiens
gcucagcggggacagcucc

SEQ ID NO: 222115 - RNA, 20 nt, Homo sapiens
aagugagacccugucucaaa

SEQ ID NO: 222116 - RNA, 16 nt, Homo sapiens
gcuugggcuucauccu

SEQ ID NO: 222117 - RNA, 21 nt, Homo sapiens
cagacuacuucuuccccagau

SEQ ID NO: 222118 - RNA, 14 nt, Homo sapiens
acauacucccaucu

SEQ ID NO: 222119 - RNA, 21 nt, Homo sapiens
gaacacuaaugaggaaacugc

SEQ ID NO: 222120 - RNA, 12 nt, Homo sapiens
gaauuucucaca

SEQ ID NO: 222121 - RNA, 14 nt, Homo sapiens
cguugugcauuugg

SEQ ID NO: 222122 - RNA, 18 nt, Homo sapiens
aagccagcaggcucucag

SEQ ID NO: 222123 - RNA, 19 nt, Homo sapiens
ucagcaaaagaugcuucuc

SEQ ID NO: 222124 - RNA, 16 nt, Homo sapiens
cagugguuggcaauug

SEQ ID NO: 222125 - RNA, 21 nt, Homo sapiens
gaaugcucuuuacuucaugga

SEQ ID NO: 222126 - RNA, 14 nt, Homo sapiens
uugcagacaggcaa

SEQ ID NO: 222127 - RNA, 14 nt, Homo sapiens
caggugcugccauc

SEQ ID NO: 222128 - RNA, 22 nt, Homo sapiens
ucucgugauugauaagaaccuu

SEQ ID NO: 222129 - RNA, 17 nt, Homo sapiens
auauuuaccagaccaca

SEQ ID NO: 222130 - RNA, 22 nt, Homo sapiens
ucccagacccccuugcccaggc

SEQ ID NO: 222131 - RNA, 15 nt, Homo sapiens
cucuuuaaugucaca

SEQ ID NO: 222132 - RNA, 19 nt, Homo sapiens
auggcuuggggggcuccag

SEQ ID NO: 222133 - RNA, 19 nt, Homo sapiens
cugacccugcuucaaauau

SEQ ID NO: 222134 - RNA, 17 nt, Homo sapiens
acaugccucucucaggc

SEQ ID NO: 222135 - RNA, 16 nt, Homo sapiens
auaauucuacuuugag

SEQ ID NO: 222136 - RNA, 15 nt, Homo sapiens
cuucuguccuacucu

SEQ ID NO: 222137 - RNA, 19 nt, Homo sapiens
cauucuccuuguguuacua

SEQ ID NO: 222138 - RNA, 22 nt, Homo sapiens
ggcccagagggccugcaaggga

SEQ ID NO: 222139 - RNA, 22 nt, Homo sapiens
cucuugauucauaaugacuuaa

SEQ ID NO: 222140 - RNA, 15 nt, Homo sapiens
ucuuccacuuugaua

SEQ ID NO: 222141 - RNA, 14 nt, Homo sapiens
accaaccacugcga

SEQ ID NO: 222142 - RNA, 19 nt, Homo sapiens
aagauaaaugugcugaaug

SEQ ID NO: 222143 - RNA, 19 nt, Homo sapiens
agcucugcuccucucccca

SEQ ID NO: 222144 - RNA, 16 nt, Homo sapiens
agguuuuuggucugac

SEQ ID NO: 222145 - RNA, 18 nt, Homo sapiens
cugcaucaagaugugaca

SEQ ID NO: 222146 - RNA, 23 nt, Homo sapiens
augggauggcuuggggggcucca

SEQ ID NO: 222147 - RNA, 20 nt, Homo sapiens
cucaaacucuugaccucagg

SEQ ID NO: 222148 - RNA, 22 nt, Homo sapiens
uuuguuaguaugaggcauuugu

SEQ ID NO: 222149 - RNA, 19 nt, Homo sapiens
cagcugcgguccacccagg

SEQ ID NO: 222150 - RNA, 21 nt, Homo sapiens
aagaaccuuuugagugccuua

SEQ ID NO: 222151 - RNA, 17 nt, Homo sapiens
uauaauguaagcucuac

SEQ ID NO: 222152 - RNA, 15 nt, Homo sapiens
cccuggccuagcaua

SEQ ID NO: 222153 - RNA, 15 nt, Homo sapiens
aaagaguaggaagac

SEQ ID NO: 222154 - RNA, 21 nt, Homo sapiens
aaaugucucuuuaaugucaca

SEQ ID NO: 222155 - RNA, 23 nt, Homo sapiens
acuuugaccucugcagcaauaaa

SEQ ID NO: 222156 - RNA, 20 nt, Homo sapiens
acugagugagcaucauggag

SEQ ID NO: 222157 - RNA, 15 nt, Homo sapiens
aacccauuuuagaga

SEQ ID NO: 222158 - RNA, 16 nt, Homo sapiens
agcaucuaugugagac

SEQ ID NO: 222159 - RNA, 14 nt, Homo sapiens
ccccgaugggaugg

SEQ ID NO: 222160 - RNA, 20 nt, Homo sapiens
ggaggugaccccagguuucu

SEQ ID NO: 222161 - RNA, 20 nt, Homo sapiens
accucugccugaagucacac

SEQ ID NO: 222162 - RNA, 17 nt, Homo sapiens
cuggcacuauaauguaa

SEQ ID NO: 222163 - RNA, 20 nt, Homo sapiens
auguucugggacacaguuca

SEQ ID NO: 222164 - RNA, 20 nt, Homo sapiens
aggguaucaggugcugccau

SEQ ID NO: 222165 - RNA, 22 nt, Homo sapiens
gacucgauagugguggugaaca

SEQ ID NO: 222166 - RNA, 17 nt, Homo sapiens
gcacagcuaacauggaa

SEQ ID NO: 222167 - RNA, 15 nt, Homo sapiens
ggaaacugcacuguu

SEQ ID NO: 222168 - RNA, 18 nt, Homo sapiens
aauaucaagagagguuaa

SEQ ID NO: 222169 - RNA, 16 nt, Homo sapiens
gagagggggauguuuc

SEQ ID NO: 222170 - RNA, 22 nt, Homo sapiens
gggccuggccugagcugggaug

SEQ ID NO: 222171 - RNA, 23 nt, Homo sapiens
cccugguggaaugcgggggagca

SEQ ID NO: 222172 - RNA, 12 nt, Homo sapiens
auggacuuuguu

SEQ ID NO: 222173 - RNA, 14 nt, Homo sapiens
aaacucaccugccc

SEQ ID NO: 222174 - RNA, 18 nt, Homo sapiens
augaaaaaauaacacugu

SEQ ID NO: 222175 - RNA, 15 nt, Homo sapiens
aguugauucagcucu

SEQ ID NO: 222176 - RNA, 23 nt, Homo sapiens
cuauagccuaggugacagaguga

SEQ ID NO: 222177 - RNA, 20 nt, Homo sapiens
gauagauauaugcucugcau

SEQ ID NO: 222178 - RNA, 13 nt, Homo sapiens
uuucuugcaugag

SEQ ID NO: 222179 - RNA, 20 nt, Homo sapiens
agacugaguacguugugcau

SEQ ID NO: 222180 - RNA, 15 nt, Homo sapiens
cacagcuaacaugga

SEQ ID NO: 222181 - RNA, 19 nt, Homo sapiens
guuuuuaaaaaacugcuga

SEQ ID NO: 222182 - RNA, 20 nt, Homo sapiens
uauaguuaucaaucucuagu

SEQ ID NO: 222183 - RNA, 13 nt, Homo sapiens
aaaacauuuuacu

SEQ ID NO: 222184 - RNA, 13 nt, Homo sapiens
gagaaaugagcug

SEQ ID NO: 222185 - RNA, 18 nt, Homo sapiens
aaagaggggaagagacuu

SEQ ID NO: 222186 - RNA, 18 nt, Homo sapiens
cugagugggggaucacag

SEQ ID NO: 222187 - RNA, 19 nt, Homo sapiens
uuaucaaucucuaguuguc

SEQ ID NO: 222188 - RNA, 21 nt, Homo sapiens
agcauacguacacauuuuauu

SEQ ID NO: 222189 - RNA, 14 nt, Homo sapiens
ccucugaaaaccaa

SEQ ID NO: 222190 - RNA, 16 nt, Homo sapiens
cauauuaccacagaca

SEQ ID NO: 222191 - RNA, 23 nt, Homo sapiens
auaauauuaaggaagacaaugug

SEQ ID NO: 222192 - RNA, 13 nt, Homo sapiens
gggaccucaggcc

SEQ ID NO: 222193 - RNA, 11 nt, Homo sapiens
guuuucagugu

SEQ ID NO: 222194 - RNA, 17 nt, Homo sapiens
gccuggccccucagggu

SEQ ID NO: 222195 - RNA, 22 nt, Homo sapiens
cacacccagcccacuucugcca

SEQ ID NO: 222196 - RNA, 18 nt, Homo sapiens
ggacauugcggacagcca

SEQ ID NO: 222197 - RNA, 18 nt, Homo sapiens
cccucaacaccucugcac

SEQ ID NO: 222198 - RNA, 19 nt, Homo sapiens
aagaauugaaaaaccauuu

SEQ ID NO: 222199 - RNA, 18 nt, Homo sapiens
cucagccucccaaagugc

SEQ ID NO: 222200 - RNA, 18 nt, Homo sapiens
augcacagcuaacaugga

SEQ ID NO: 222201 - RNA, 20 nt, Homo sapiens
augaucuuugcagacaggca

SEQ ID NO: 222202 - RNA, 14 nt, Homo sapiens
ggugugugaagcug

SEQ ID NO: 222203 - RNA, 16 nt, Homo sapiens
cuaagagucucuauua

SEQ ID NO: 222204 - RNA, 20 nt, Homo sapiens
aaugacuuaagcacacuuga

SEQ ID NO: 222205 - RNA, 18 nt, Homo sapiens
cacaggcagguccagggu

SEQ ID NO: 222206 - RNA, 15 nt, Homo sapiens
cuuccccccaaaacu

SEQ ID NO: 222207 - RNA, 20 nt, Homo sapiens
uccugugucuugcaauggca

SEQ ID NO: 222208 - RNA, 15 nt, Homo sapiens
aaauauuucccucac

SEQ ID NO: 222209 - RNA, 14 nt, Homo sapiens
guugugugugcuuu

SEQ ID NO: 222210 - RNA, 17 nt, Homo sapiens
acaaugacuuacuguac

SEQ ID NO: 222211 - RNA, 21 nt, Homo sapiens
cagaaguuugagaucagccug

SEQ ID NO: 222212 - RNA, 21 nt, Homo sapiens
ucuuucaguggcuaccuacau

SEQ ID NO: 222213 - RNA, 22 nt, Homo sapiens
accccagugcuuguuccucuca

SEQ ID NO: 222214 - RNA, 21 nt, Homo sapiens
ugggcagagcagagaccaucc

SEQ ID NO: 222215 - RNA, 18 nt, Homo sapiens
guuaucuaauauguaaca

SEQ ID NO: 222216 - RNA, 12 nt, Homo sapiens
cagagucucacu

SEQ ID NO: 222217 - RNA, 22 nt, Homo sapiens
auguccaagaagcccaggaaag

SEQ ID NO: 222218 - RNA, 17 nt, Homo sapiens
acacuugggagcaaaag

SEQ ID NO: 222219 - RNA, 13 nt, Homo sapiens
ucuacccaggugc

SEQ ID NO: 222220 - RNA, 18 nt, Homo sapiens
gcuuaaaacaacacucac

SEQ ID NO: 222221 - RNA, 17 nt, Homo sapiens
cugggagaaccaaaaag

SEQ ID NO: 222222 - RNA, 13 nt, Homo sapiens
caggaaguacugg

SEQ ID NO: 222223 - RNA, 13 nt, Homo sapiens
gcauguguguuca

SEQ ID NO: 222224 - RNA, 16 nt, Homo sapiens
gaacuggguacuugug

SEQ ID NO: 222225 - RNA, 16 nt, Homo sapiens
gauccacccaccucag

SEQ ID NO: 222226 - RNA, 20 nt, Homo sapiens
cuuuuauaaacuuuaccuuu

SEQ ID NO: 222227 - RNA, 20 nt, Homo sapiens
uguuggccaaagccaaagcu

SEQ ID NO: 222228 - RNA, 19 nt, Homo sapiens
ugggauuacaggugugaac

SEQ ID NO: 222229 - RNA, 14 nt, Homo sapiens
auguugcccaggca

SEQ ID NO: 222230 - RNA, 14 nt, Homo sapiens
auucagcucugcaa

SEQ ID NO: 222231 - RNA, 14 nt, Homo sapiens
uaauguaagcucua

SEQ ID NO: 222232 - RNA, 18 nt, Homo sapiens
cuuacacuuuaugcacaa

SEQ ID NO: 222233 - RNA, 15 nt, Homo sapiens
gugaggaagcaaaag

SEQ ID NO: 222234 - RNA, 16 nt, Homo sapiens
uccuguagucccauug

SEQ ID NO: 222235 - RNA, 18 nt, Homo sapiens
accacaugugcacaugca

SEQ ID NO: 222236 - RNA, 14 nt, Homo sapiens
cuauguugcccagg

SEQ ID NO: 222237 - RNA, 18 nt, Homo sapiens
accaccaaccacugcgac

SEQ ID NO: 222238 - RNA, 14 nt, Homo sapiens
ucuaugacacaugc

SEQ ID NO: 222239 - RNA, 21 nt, Homo sapiens
cuuuuuuggcugcugaaggcu

SEQ ID NO: 222240 - RNA, 20 nt, Homo sapiens
gccaagcagagguugggagg

SEQ ID NO: 222241 - RNA, 16 nt, Homo sapiens
cccaaacccuucagug

SEQ ID NO: 222242 - RNA, 15 nt, Homo sapiens
gucacucuggcagcu

SEQ ID NO: 222243 - RNA, 17 nt, Homo sapiens
aguaauaugcacacauu

SEQ ID NO: 222244 - RNA, 16 nt, Homo sapiens
uagcacagacccugcc

SEQ ID NO: 222245 - RNA, 19 nt, Homo sapiens
uuuccuguagucccauuga

SEQ ID NO: 222246 - RNA, 22 nt, Homo sapiens
ugaaaauguauguguaaguauu

SEQ ID NO: 222247 - RNA, 23 nt, Homo sapiens
aauagcugggacuacagguguga

SEQ ID NO: 222248 - RNA, 17 nt, Homo sapiens
agacauacuaaccagca

SEQ ID NO: 222249 - RNA, 18 nt, Homo sapiens
cacuuacacuuuaugcac

SEQ ID NO: 222250 - RNA, 12 nt, Homo sapiens
uguuugugauug

SEQ ID NO: 222251 - RNA, 15 nt, Homo sapiens
agcugccaccugccu

SEQ ID NO: 222252 - RNA, 16 nt, Homo sapiens
aggaaacugcacuguu

SEQ ID NO: 222253 - RNA, 16 nt, Homo sapiens
ugcgucucauacucac

SEQ ID NO: 222254 - RNA, 17 nt, Homo sapiens
uuccccccaaaacugau

SEQ ID NO: 222255 - RNA, 15 nt, Homo sapiens
ccccagugcccacag

SEQ ID NO: 222256 - RNA, 20 nt, Homo sapiens
agcuguaaaguugcagguug

SEQ ID NO: 222257 - RNA, 22 nt, Homo sapiens
auucaugcugcuuagaugacau

SEQ ID NO: 222258 - RNA, 15 nt, Homo sapiens
agacuggaagcacag

SEQ ID NO: 222259 - RNA, 15 nt, Homo sapiens
ggagggcuccagaca

SEQ ID NO: 222260 - RNA, 17 nt, Homo sapiens
aggcuaugugagcacaa

SEQ ID NO: 222261 - RNA, 20 nt, Homo sapiens
aggccuggccagaugcacca

SEQ ID NO: 222262 - RNA, 21 nt, Homo sapiens
cucaaaagcugggcagguugg

SEQ ID NO: 222263 - RNA, 13 nt, Homo sapiens
uccuagcacuuug

SEQ ID NO: 222264 - RNA, 14 nt, Homo sapiens
aaauggaagacagc

SEQ ID NO: 222265 - RNA, 21 nt, Homo sapiens
uugaaaaaaaaaaacacaaaa

SEQ ID NO: 222266 - RNA, 21 nt, Homo sapiens
aagauucauauuuacuucuua

SEQ ID NO: 222267 - RNA, 13 nt, Homo sapiens
uggcccacgcacu

SEQ ID NO: 222268 - RNA, 16 nt, Homo sapiens
ccaugagaugaugcca

SEQ ID NO: 222269 - RNA, 14 nt, Homo sapiens
caggugugagucac

SEQ ID NO: 222270 - RNA, 23 nt, Homo sapiens
auagugguggugaacagaacaaa

SEQ ID NO: 222271 - RNA, 19 nt, Homo sapiens
agacaaugacuuacuguac

SEQ ID NO: 222272 - RNA, 18 nt, Homo sapiens
aaacuacccucuggagau

SEQ ID NO: 222273 - RNA, 14 nt, Homo sapiens
uggucagauuugaa

SEQ ID NO: 222274 - RNA, 12 nt, Homo sapiens
cagauacuuggg

SEQ ID NO: 222275 - RNA, 19 nt, Homo sapiens
uggaagagcuccuugauau

SEQ ID NO: 222276 - RNA, 20 nt, Homo sapiens
aggacauugcggacagccac

SEQ ID NO: 222277 - RNA, 13 nt, Homo sapiens
ugaaaauucuuga

SEQ ID NO: 222278 - RNA, 15 nt, Homo sapiens
aucccaugagccuca

SEQ ID NO: 222279 - RNA, 18 nt, Homo sapiens
ccaaggguacuaaggaau

SEQ ID NO: 222280 - RNA, 14 nt, Homo sapiens
accacuucagcuga

SEQ ID NO: 222281 - RNA, 16 nt, Homo sapiens
ucccaucucacacaug

SEQ ID NO: 222282 - RNA, 22 nt, Homo sapiens
ucauuuaggugaggaagcaaaa

SEQ ID NO: 222283 - RNA, 14 nt, Homo sapiens
caucaagaugugac

SEQ ID NO: 222284 - RNA, 21 nt, Homo sapiens
aggaagguagaaauaucugaa

SEQ ID NO: 222285 - RNA, 11 nt, Homo sapiens
ucuggcagcuc

SEQ ID NO: 222286 - RNA, 19 nt, Homo sapiens
gguggaaugcgggggagca

SEQ ID NO: 222287 - RNA, 14 nt, Homo sapiens
uaagagucucuauu

SEQ ID NO: 222288 - RNA, 13 nt, Homo sapiens
cauacaauuccaa

SEQ ID NO: 222289 - RNA, 21 nt, Homo sapiens
aaugagcugcacuccaugagu

SEQ ID NO: 222290 - RNA, 21 nt, Homo sapiens
accgggcacucagaagacacu

SEQ ID NO: 222291 - RNA, 21 nt, Homo sapiens
cccuauugcugcuugaggcaa

SEQ ID NO: 222292 - RNA, 21 nt, Homo sapiens
cuccugguguggaagagcucc

SEQ ID NO: 222293 - RNA, 13 nt, Homo sapiens
aauaacauguaau

SEQ ID NO: 222294 - RNA, 18 nt, Homo sapiens
ugcaucaagaugugacau

SEQ ID NO: 222295 - RNA, 13 nt, Homo sapiens
uguucccaugaga

SEQ ID NO: 222296 - RNA, 20 nt, Homo sapiens
cagaauucucagaaucucaa

SEQ ID NO: 222297 - RNA, 14 nt, Homo sapiens
guuuucaguguaca

SEQ ID NO: 222298 - RNA, 24 nt, Homo sapiens
caacacucacauuuauucugcuca

SEQ ID NO: 222299 - RNA, 21 nt, Homo sapiens
cuggcaugggaaugaauguca

SEQ ID NO: 222300 - RNA, 20 nt, Homo sapiens
ugccucugacacacagcucu

SEQ ID NO: 222301 - RNA, 21 nt, Homo sapiens
cuugaccgugaggccagagac

SEQ ID NO: 222302 - RNA, 14 nt, Homo sapiens
cauccacugugcca

SEQ ID NO: 222303 - RNA, 21 nt, Homo sapiens
aagagguuuuaaaaaaauccc

SEQ ID NO: 222304 - RNA, 21 nt, Homo sapiens
ggaagcuccgcuuucuaccca

SEQ ID NO: 222305 - RNA, 17 nt, Homo sapiens
cugcgugguugaugauc

SEQ ID NO: 222306 - RNA, 17 nt, Homo sapiens
gacagcugccugggauc

SEQ ID NO: 222307 - RNA, 17 nt, Homo sapiens
augccugguggcagcug

SEQ ID NO: 222308 - RNA, 18 nt, Homo sapiens
aaccuuuugagugccuua

SEQ ID NO: 222309 - RNA, 12 nt, Homo sapiens
gccugcccuccc

SEQ ID NO: 222310 - RNA, 18 nt, Homo sapiens
aaugucagugugacugau

SEQ ID NO: 222311 - RNA, 15 nt, Homo sapiens
ugaguccuggcaugg

SEQ ID NO: 222312 - RNA, 18 nt, Homo sapiens
gcucaccagccccagugc

SEQ ID NO: 222313 - RNA, 24 nt, Homo sapiens
aaaaccaauguucucucuucucca

SEQ ID NO: 222314 - RNA, 19 nt, Homo sapiens
gacaguuaagagaaaugag

SEQ ID NO: 222315 - RNA, 17 nt, Homo sapiens
ugggauuacagguguga

SEQ ID NO: 222316 - RNA, 16 nt, Homo sapiens
aaaggugaccaaugau

SEQ ID NO: 222317 - RNA, 19 nt, Homo sapiens
cauauucaggaagcucagg

SEQ ID NO: 222318 - RNA, 19 nt, Homo sapiens
uaauuuaccugaagucuuu

SEQ ID NO: 222319 - RNA, 18 nt, Homo sapiens
ccucaaccuccugggcua

SEQ ID NO: 222320 - RNA, 15 nt, Homo sapiens
accugaaacaaccca

SEQ ID NO: 222321 - RNA, 17 nt, Homo sapiens
uguccuacccacccucc

SEQ ID NO: 222322 - RNA, 22 nt, Homo sapiens
uaaaugucucuuuaaugucaca

SEQ ID NO: 222323 - RNA, 15 nt, Homo sapiens
gagagaaggggccca

SEQ ID NO: 222324 - RNA, 15 nt, Homo sapiens
gucuuagauguauau

SEQ ID NO: 222325 - RNA, 18 nt, Homo sapiens
ucuaugggacucaaugca

SEQ ID NO: 222326 - RNA, 15 nt, Homo sapiens
guaggaagacuuugg

SEQ ID NO: 222327 - RNA, 18 nt, Homo sapiens
ugaucccuucuuacuuaa

SEQ ID NO: 222328 - RNA, 18 nt, Homo sapiens
aaggggcccaaauucuuu

SEQ ID NO: 222329 - RNA, 23 nt, Homo sapiens
aggaagcaaaagcaucuauguga

SEQ ID NO: 222330 - RNA, 16 nt, Homo sapiens
cuugccgucuaccuga

SEQ ID NO: 222331 - RNA, 16 nt, Homo sapiens
acuaaggaaucuuucu

SEQ ID NO: 222332 - RNA, 10 nt, Homo sapiens
cuucugccau

SEQ ID NO: 222333 - RNA, 18 nt, Homo sapiens
agacaggguuuugccaug

SEQ ID NO: 222334 - RNA, 22 nt, Homo sapiens
aggcauccaguaucuugaagac

SEQ ID NO: 222335 - RNA, 12 nt, Homo sapiens
accaaccacugc

SEQ ID NO: 222336 - RNA, 13 nt, Homo sapiens
uuaucucaggggu

SEQ ID NO: 222337 - RNA, 21 nt, Homo sapiens
auucuucuccacuuucuagcc

SEQ ID NO: 222338 - RNA, 23 nt, Homo sapiens
gcauaaagucagggguucccuuu

SEQ ID NO: 222339 - RNA, 14 nt, Homo sapiens
cccugucucaaaaa

SEQ ID NO: 222340 - RNA, 18 nt, Homo sapiens
cagacacaggcccggcuc

SEQ ID NO: 222341 - RNA, 17 nt, Homo sapiens
aggauguucugggacac

SEQ ID NO: 222342 - RNA, 13 nt, Homo sapiens
uugcaugaggcua

SEQ ID NO: 222343 - RNA, 15 nt, Homo sapiens
ugccaugccagcuua

SEQ ID NO: 222344 - RNA, 22 nt, Homo sapiens
aagcugagaugggacaggauca

SEQ ID NO: 222345 - RNA, 13 nt, Homo sapiens
ccucucucaggcc

SEQ ID NO: 222346 - RNA, 17 nt, Homo sapiens
ccacaucuugcucugcu

SEQ ID NO: 222347 - RNA, 17 nt, Homo sapiens
auugauaugcuuauaca

SEQ ID NO: 222348 - RNA, 16 nt, Homo sapiens
cuuggcgcugccccug

SEQ ID NO: 222349 - RNA, 23 nt, Homo sapiens
uggguugcaggaccucaggugag

SEQ ID NO: 222350 - RNA, 22 nt, Homo sapiens
caguuguugauaaccacuaaga

SEQ ID NO: 222351 - RNA, 13 nt, Homo sapiens
gccucucucaggc

SEQ ID NO: 222352 - RNA, 13 nt, Homo sapiens
caaaaacaacaac

SEQ ID NO: 222353 - RNA, 15 nt, Homo sapiens
acacucacauuuauu

SEQ ID NO: 222354 - RNA, 23 nt, Homo sapiens
caaagcucuuuugagcauuuaga

SEQ ID NO: 222355 - RNA, 21 nt, Homo sapiens
cuuggggaccagagcugccac

SEQ ID NO: 222356 - RNA, 11 nt, Homo sapiens
uaugugagcac

SEQ ID NO: 222357 - RNA, 20 nt, Homo sapiens
guggugaacagaacaaaagg

SEQ ID NO: 222358 - RNA, 18 nt, Homo sapiens
ugggacaugggaaagggg

SEQ ID NO: 222359 - RNA, 13 nt, Homo sapiens
accuuguuucccu

SEQ ID NO: 222360 - RNA, 23 nt, Homo sapiens
auaaaguuucuguugauaaucau

SEQ ID NO: 222361 - RNA, 13 nt, Homo sapiens
guaacuuacuuag

SEQ ID NO: 222362 - RNA, 18 nt, Homo sapiens
ugcagugguaugaucacg

SEQ ID NO: 222363 - RNA, 13 nt, Homo sapiens
cuuauauacagac

SEQ ID NO: 222364 - RNA, 18 nt, Homo sapiens
aaaaguuuaaaaagcuca

SEQ ID NO: 222365 - RNA, 23 nt, Homo sapiens
gcccugugggcccccaaauggaa

SEQ ID NO: 222366 - RNA, 19 nt, Homo sapiens
gugacaacacuuguguuau

SEQ ID NO: 222367 - RNA, 21 nt, Homo sapiens
uuguacauaaugcgugcauac

SEQ ID NO: 222368 - RNA, 11 nt, Homo sapiens
uauaugcucug

SEQ ID NO: 222369 - RNA, 12 nt, Homo sapiens
gagccugcaguu

SEQ ID NO: 222370 - RNA, 12 nt, Homo sapiens
uguuuuccauga

SEQ ID NO: 222371 - RNA, 13 nt, Homo sapiens
cucugcacaagcu

SEQ ID NO: 222372 - RNA, 17 nt, Homo sapiens
agucugauucccaagcu

SEQ ID NO: 222373 - RNA, 18 nt, Homo sapiens
aaucucaaauaacuaaaa

SEQ ID NO: 222374 - RNA, 13 nt, Homo sapiens
gagugagcugguu

SEQ ID NO: 222375 - RNA, 19 nt, Homo sapiens
uaggaagguuaauguucau

SEQ ID NO: 222376 - RNA, 12 nt, Homo sapiens
aaaacacaacau

SEQ ID NO: 222377 - RNA, 16 nt, Homo sapiens
cuacccuggcacuaua

SEQ ID NO: 222378 - RNA, 19 nt, Homo sapiens
acaccuugacagggcacac

SEQ ID NO: 222379 - RNA, 23 nt, Homo sapiens
ccuacaguugaaaaacagcugag

SEQ ID NO: 222380 - RNA, 17 nt, Homo sapiens
uucuccaccugccaggg

SEQ ID NO: 222381 - RNA, 21 nt, Homo sapiens
ccaauauuuaccagaccacaa

SEQ ID NO: 222382 - RNA, 16 nt, Homo sapiens
cgcuggaccuugaacu

SEQ ID NO: 222383 - RNA, 19 nt, Homo sapiens
ccugugaguacuacagucc

SEQ ID NO: 222384 - RNA, 18 nt, Homo sapiens
ccagcgugugacuacucc

SEQ ID NO: 222385 - RNA, 17 nt, Homo sapiens
augacaucugucuagga

SEQ ID NO: 222386 - RNA, 18 nt, Homo sapiens
cgaucuggguucacugca

SEQ ID NO: 222387 - RNA, 20 nt, Homo sapiens
augaucacggcucacugcag

SEQ ID NO: 222388 - RNA, 14 nt, Homo sapiens
gacuuggaaauggg

SEQ ID NO: 222389 - RNA, 17 nt, Homo sapiens
ccauggacccaauauuu

SEQ ID NO: 222390 - RNA, 13 nt, Homo sapiens
aucccuacuguaa

SEQ ID NO: 222391 - RNA, 16 nt, Homo sapiens
aaaauaccagccagua

SEQ ID NO: 222392 - RNA, 17 nt, Homo sapiens
uacuucauggacuucca

SEQ ID NO: 222393 - RNA, 17 nt, Homo sapiens
ugaauuguaaggaauga

SEQ ID NO: 222394 - RNA, 12 nt, Homo sapiens
ccagauugcaac

SEQ ID NO: 222395 - RNA, 18 nt, Homo sapiens
ugcccggcaggguccuag

SEQ ID NO: 222396 - RNA, 9 nt, Homo sapiens
gacuuggaa

SEQ ID NO: 222397 - RNA, 21 nt, Homo sapiens
gugagggaacagagagguuaa

SEQ ID NO: 222398 - RNA, 17 nt, Homo sapiens
gaucacgccacugcacu

SEQ ID NO: 222399 - RNA, 21 nt, Homo sapiens
aauacagacuacuucuucccc

SEQ ID NO: 222400 - RNA, 14 nt, Homo sapiens
auaacuuuuuccaa

SEQ ID NO: 222401 - RNA, 23 nt, Homo sapiens
auuuccugugucuuuuuucacua

SEQ ID NO: 222402 - RNA, 16 nt, Homo sapiens
uucugaggauugcaga

SEQ ID NO: 222403 - RNA, 13 nt, Homo sapiens
ugcacccaugugu

SEQ ID NO: 222404 - RNA, 19 nt, Homo sapiens
uggcugggggccucagugc

SEQ ID NO: 222405 - RNA, 18 nt, Homo sapiens
cugggauuacagguguga

SEQ ID NO: 222406 - RNA, 20 nt, Homo sapiens
aagugauccucccaccucag

SEQ ID NO: 222407 - RNA, 17 nt, Homo sapiens
uacauaaugcgugcaua

SEQ ID NO: 222408 - RNA, 17 nt, Homo sapiens
uuccacuuugauaccau

SEQ ID NO: 222409 - RNA, 11 nt, Homo sapiens
cuuucuucccu

SEQ ID NO: 222410 - RNA, 17 nt, Homo sapiens
uuauuauggcacaucag

SEQ ID NO: 222411 - RNA, 18 nt, Homo sapiens
aggaguuugagaccaacc

SEQ ID NO: 222412 - RNA, 15 nt, Homo sapiens
caggaagguagaaau

SEQ ID NO: 222413 - RNA, 14 nt, Homo sapiens
aguagagacagggu

SEQ ID NO: 222414 - RNA, 23 nt, Homo sapiens
ugaaaggaaagaggcucuggcua

SEQ ID NO: 222415 - RNA, 23 nt, Homo sapiens
cacuguuuuauuuuaauucaguu

SEQ ID NO: 222416 - RNA, 21 nt, Homo sapiens
uuuuaaaaaaaucccauuuaa

SEQ ID NO: 222417 - RNA, 22 nt, Homo sapiens
acaggguuuugccauguuggcc

SEQ ID NO: 222418 - RNA, 22 nt, Homo sapiens
acccuccuuucaccacaugugc

SEQ ID NO: 222419 - RNA, 15 nt, Homo sapiens
cagggugagcacucu

SEQ ID NO: 222420 - RNA, 18 nt, Homo sapiens
uguacgucugacaggcaa

SEQ ID NO: 222421 - RNA, 21 nt, Homo sapiens
guacauggaauaacauguaau

SEQ ID NO: 222422 - RNA, 22 nt, Homo sapiens
uggucaccaaaucagcugcuac

SEQ ID NO: 222423 - RNA, 13 nt, Homo sapiens
ggcuuggggacca

SEQ ID NO: 222424 - RNA, 19 nt, Homo sapiens
cuuuccuguagucccauug

SEQ ID NO: 222425 - RNA, 21 nt, Homo sapiens
ucuuagauguauauauuuccu

SEQ ID NO: 222426 - RNA, 17 nt, Homo sapiens
acucagaagacacugau

SEQ ID NO: 222427 - RNA, 14 nt, Homo sapiens
gccugccucuucuc

SEQ ID NO: 222428 - RNA, 17 nt, Homo sapiens
uauggcuuuugugcauu

SEQ ID NO: 222429 - RNA, 22 nt, Homo sapiens
guuuuuauggcuuuugugcauu

SEQ ID NO: 222430 - RNA, 15 nt, Homo sapiens
gauguuuccaaugcu

SEQ ID NO: 222431 - RNA, 12 nt, Homo sapiens
gaagcacagcuu

SEQ ID NO: 222432 - RNA, 17 nt, Homo sapiens
augccagcuuaucucag

SEQ ID NO: 222433 - RNA, 14 nt, Homo sapiens
gcucuggacaggca

SEQ ID NO: 222434 - RNA, 20 nt, Homo sapiens
gugcagugagccgagaucac

SEQ ID NO: 222435 - RNA, 16 nt, Homo sapiens
aucaagaugugacaug

SEQ ID NO: 222436 - RNA, 13 nt, Homo sapiens
uaaugggacacua

SEQ ID NO: 222437 - RNA, 13 nt, Homo sapiens
ccugaagucacac

SEQ ID NO: 222438 - RNA, 22 nt, Homo sapiens
gaagacagcucuuauauugcca

SEQ ID NO: 222439 - RNA, 17 nt, Homo sapiens
gggggcuccagggggug

SEQ ID NO: 222440 - RNA, 16 nt, Homo sapiens
ggccuccugugugugc

SEQ ID NO: 222441 - RNA, 19 nt, Homo sapiens
cccaggcuggcgugcagug

SEQ ID NO: 222442 - RNA, 18 nt, Homo sapiens
gcagacaguuaagagaaa

SEQ ID NO: 222443 - RNA, 23 nt, Homo sapiens
acaucaacugcaucaagauguga

SEQ ID NO: 222444 - RNA, 13 nt, Homo sapiens
gagcaggcuucuu

SEQ ID NO: 222445 - RNA, 17 nt, Homo sapiens
gagucgaggacagggag

SEQ ID NO: 222446 - RNA, 19 nt, Homo sapiens
uuuuacuggggauucuuga

SEQ ID NO: 222447 - RNA, 18 nt, Homo sapiens
cagagucucacuguugcc

SEQ ID NO: 222448 - RNA, 21 nt, Homo sapiens
aggauauaguuaucaaucucu

SEQ ID NO: 222449 - RNA, 18 nt, Homo sapiens
agccauuccuguucccau

SEQ ID NO: 222450 - RNA, 14 nt, Homo sapiens
cagagaaaguacuu

SEQ ID NO: 222451 - RNA, 15 nt, Homo sapiens
ugaacagaacaaaag

SEQ ID NO: 222452 - RNA, 23 nt, Homo sapiens
aaauucuucuccacuuucuagcc

SEQ ID NO: 222453 - RNA, 14 nt, Homo sapiens
gugaggaagcaaaa

SEQ ID NO: 222454 - RNA, 15 nt, Homo sapiens
ucaagaugugacaug

SEQ ID NO: 222455 - RNA, 18 nt, Homo sapiens
ucucacuguugcccaggc

SEQ ID NO: 222456 - RNA, 12 nt, Homo sapiens
gguuucauucug

SEQ ID NO: 222457 - RNA, 20 nt, Homo sapiens
cugugucuugcaauggcagc

SEQ ID NO: 222458 - RNA, 15 nt, Homo sapiens
agguggggucacucu

SEQ ID NO: 222459 - RNA, 15 nt, Homo sapiens
aggguaaggcugugg

SEQ ID NO: 222460 - RNA, 23 nt, Homo sapiens
aguacacuguuucaaacuuuacu

SEQ ID NO: 222461 - RNA, 17 nt, Homo sapiens
accucuugagccuugaa

SEQ ID NO: 222462 - RNA, 14 nt, Homo sapiens
gccucucucaggcc

SEQ ID NO: 222463 - RNA, 14 nt, Homo sapiens
ucccaccucagccu

SEQ ID NO: 222464 - RNA, 23 nt, Homo sapiens
augcuugcuucaaccccaugaga

SEQ ID NO: 222465 - RNA, 13 nt, Homo sapiens
ccacagggugagc

SEQ ID NO: 222466 - RNA, 23 nt, Homo sapiens
cacguuucuaaaggcuaccuuug

SEQ ID NO: 222467 - RNA, 24 nt, Homo sapiens
accaugauuaaccacuucagcuga

SEQ ID NO: 222468 - RNA, 15 nt, Homo sapiens
uaaauucaugcugcu

SEQ ID NO: 222469 - RNA, 18 nt, Homo sapiens
cacugaugggcaaccccc

SEQ ID NO: 222470 - RNA, 13 nt, Homo sapiens
gugauccacccac

SEQ ID NO: 222471 - RNA, 19 nt, Homo sapiens
ucugccucugacacacagc

SEQ ID NO: 222472 - RNA, 18 nt, Homo sapiens
aagcgugguggacaugca

SEQ ID NO: 222473 - RNA, 14 nt, Homo sapiens
cuguucccaugaga

SEQ ID NO: 222474 - RNA, 16 nt, Homo sapiens
cauauucuguuggcca

SEQ ID NO: 222475 - RNA, 16 nt, Homo sapiens
ucauacucaccucacc

SEQ ID NO: 222476 - RNA, 13 nt, Homo sapiens
caaccccaugaga

SEQ ID NO: 222477 - RNA, 13 nt, Homo sapiens
ucaaucucuaguu

SEQ ID NO: 222478 - RNA, 22 nt, Homo sapiens
cagcguuucuaugacacaugca

SEQ ID NO: 222479 - RNA, 23 nt, Homo sapiens
aucuacccuccgauuguuccuga

SEQ ID NO: 222480 - RNA, 11 nt, Homo sapiens
augacacgaau

SEQ ID NO: 222481 - RNA, 15 nt, Homo sapiens
ucuaugacacaugca

SEQ ID NO: 222482 - RNA, 19 nt, Homo sapiens
acuucuuauacauuugaua

SEQ ID NO: 222483 - RNA, 20 nt, Homo sapiens
ccagguuuuuggucugaccc

SEQ ID NO: 222484 - RNA, 20 nt, Homo sapiens
acacaaacgggcucagcaaa

SEQ ID NO: 222485 - RNA, 17 nt, Homo sapiens
uugaccgugaggccaga

SEQ ID NO: 222486 - RNA, 19 nt, Homo sapiens
aaauaacacuguacugcaa

SEQ ID NO: 222487 - RNA, 20 nt, Homo sapiens
cuccuggccucaagugauuc

SEQ ID NO: 222488 - RNA, 16 nt, Homo sapiens
cacagacccugcccug

SEQ ID NO: 222489 - RNA, 12 nt, Homo sapiens
uucaaacuuuac

SEQ ID NO: 222490 - RNA, 17 nt, Homo sapiens
agcugggacuacaggug

SEQ ID NO: 222491 - RNA, 14 nt, Homo sapiens
cucucaggccagcu

SEQ ID NO: 222492 - RNA, 21 nt, Homo sapiens
agccgagaucacgccacugca

SEQ ID NO: 222493 - RNA, 16 nt, Homo sapiens
cccaguuagcucucaa

SEQ ID NO: 222494 - RNA, 20 nt, Homo sapiens
acacugcauguuugugauug

SEQ ID NO: 222495 - RNA, 16 nt, Homo sapiens
ucaccacaugugcaca

SEQ ID NO: 222496 - RNA, 18 nt, Homo sapiens
cagccugggcaaugugau

SEQ ID NO: 222497 - RNA, 21 nt, Homo sapiens
caggugauccacccaccucag

SEQ ID NO: 222498 - RNA, 16 nt, Homo sapiens
aagucagcacuaccuc

SEQ ID NO: 222499 - RNA, 14 nt, Homo sapiens
ucucucuucuccac

SEQ ID NO: 222500 - RNA, 17 nt, Homo sapiens
uaacauggaaguacuau

SEQ ID NO: 222501 - RNA, 11 nt, Homo sapiens
cagcucugcaa

SEQ ID NO: 222502 - RNA, 16 nt, Homo sapiens
cuuuugagugccuuac

SEQ ID NO: 222503 - RNA, 23 nt, Homo sapiens
uugaagacuuuucuuucagccaa

SEQ ID NO: 222504 - RNA, 20 nt, Homo sapiens
uaaaacaacacucacauuua

SEQ ID NO: 222505 - RNA, 15 nt, Homo sapiens
ucccaucugugaaag

SEQ ID NO: 222506 - RNA, 17 nt, Homo sapiens
uugaggauuuugaucca

SEQ ID NO: 222507 - RNA, 14 nt, Homo sapiens
augagaaaugccag

SEQ ID NO: 222508 - RNA, 20 nt, Homo sapiens
acacagcucuucuccaggcu

SEQ ID NO: 222509 - RNA, 10 nt, Homo sapiens
ggaagagcuc

SEQ ID NO: 222510 - RNA, 20 nt, Homo sapiens
agauagccaaggccaaagga

SEQ ID NO: 222511 - RNA, 13 nt, Homo sapiens
ggagaggggcaca

SEQ ID NO: 222512 - RNA, 22 nt, Homo sapiens
uugcccacacuugggagcaaaa

SEQ ID NO: 222513 - RNA, 22 nt, Homo sapiens
ccugcccuuaccugccaggaag

SEQ ID NO: 222514 - RNA, 17 nt, Homo sapiens
gaagaauugaaaaacca

SEQ ID NO: 222515 - RNA, 17 nt, Homo sapiens
auuguuuucaguguaca

SEQ ID NO: 222516 - RNA, 21 nt, Homo sapiens
uggcagugggagcugccuguu

SEQ ID NO: 222517 - RNA, 19 nt, Homo sapiens
aaacuacccucuggagaua

SEQ ID NO: 222518 - RNA, 15 nt, Homo sapiens
agucucuugauucau

SEQ ID NO: 222519 - RNA, 15 nt, Homo sapiens
gucggaaaacaugcu

SEQ ID NO: 222520 - RNA, 18 nt, Homo sapiens
cagagcugccaccugccu

SEQ ID NO: 222521 - RNA, 14 nt, Homo sapiens
ugcacuccaugagu

SEQ ID NO: 222522 - RNA, 17 nt, Homo sapiens
gacacaugcaaggucau

SEQ ID NO: 222523 - RNA, 21 nt, Homo sapiens
ugggguacccacugcucuggu

SEQ ID NO: 222524 - RNA, 14 nt, Homo sapiens
ccaaacucaccugc

SEQ ID NO: 222525 - RNA, 18 nt, Homo sapiens
aucccauaugccugggca

SEQ ID NO: 222526 - RNA, 22 nt, Homo sapiens
cauguuggccaggcuggucuca

SEQ ID NO: 222527 - RNA, 14 nt, Homo sapiens
cuaugugagcacaa

SEQ ID NO: 222528 - RNA, 19 nt, Homo sapiens
ugggcccccaaauggaaau

SEQ ID NO: 222529 - RNA, 18 nt, Homo sapiens
gccaugaggaacaaggca

SEQ ID NO: 222530 - RNA, 18 nt, Homo sapiens
gcucugaucauccacugu

SEQ ID NO: 222531 - RNA, 17 nt, Homo sapiens
cauucugccugcccagg

SEQ ID NO: 222532 - RNA, 20 nt, Homo sapiens
uacguuaugauaguguccca

SEQ ID NO: 222533 - RNA, 15 nt, Homo sapiens
ccccuguucuggcag

SEQ ID NO: 222534 - RNA, 19 nt, Homo sapiens
gugugggggaagcaccaua

SEQ ID NO: 222535 - RNA, 16 nt, Homo sapiens
auaauacaguaucuca

SEQ ID NO: 222536 - RNA, 18 nt, Homo sapiens
ugccucugacacacagcu

SEQ ID NO: 222537 - RNA, 13 nt, Homo sapiens
aaggagauuuaca

SEQ ID NO: 222538 - RNA, 17 nt, Homo sapiens
uuccuguucccaugaga

SEQ ID NO: 222539 - RNA, 21 nt, Homo sapiens
ggaagcacaugccucucucag

SEQ ID NO: 222540 - RNA, 13 nt, Homo sapiens
uauaagaaauaca

SEQ ID NO: 222541 - RNA, 21 nt, Homo sapiens
gugcugggauuacagguguga

SEQ ID NO: 222542 - RNA, 16 nt, Homo sapiens
aauuacaggaaguacu

SEQ ID NO: 222543 - RNA, 20 nt, Homo sapiens
ggagcaaaaucgaugcagug

SEQ ID NO: 222544 - RNA, 19 nt, Homo sapiens
cugccagccgagauagcca

SEQ ID NO: 222545 - RNA, 21 nt, Homo sapiens
guagcuuuucccaaacugauc

SEQ ID NO: 222546 - RNA, 17 nt, Homo sapiens
cagauuguaccauugag

SEQ ID NO: 222547 - RNA, 16 nt, Homo sapiens
cagugccaaaaacaac

SEQ ID NO: 222548 - RNA, 15 nt, Homo sapiens
cucaaauaacuaaaa

SEQ ID NO: 222549 - RNA, 14 nt, Homo sapiens
gaacacuccuucac

SEQ ID NO: 222550 - RNA, 17 nt, Homo sapiens
caugccucucucaggcc

SEQ ID NO: 222551 - RNA, 15 nt, Homo sapiens
ucaacucuccuccag

SEQ ID NO: 222552 - RNA, 13 nt, Homo sapiens
aggggugggacac

SEQ ID NO: 222553 - RNA, 20 nt, Homo sapiens
aaggcuaccuuuguauucuc

SEQ ID NO: 222554 - RNA, 13 nt, Homo sapiens
guccgagcuuuga

SEQ ID NO: 222555 - RNA, 16 nt, Homo sapiens
cagagagcagugugga

SEQ ID NO: 222556 - RNA, 14 nt, Homo sapiens
acuggcugcaaagg

SEQ ID NO: 222557 - RNA, 15 nt, Homo sapiens
gagacagcacaggca

SEQ ID NO: 222558 - RNA, 17 nt, Homo sapiens
uuucaccacaugugcac

SEQ ID NO: 222559 - RNA, 21 nt, Homo sapiens
uugugcauuaucuagauacug

SEQ ID NO: 222560 - RNA, 16 nt, Homo sapiens
cagagaugugccccca

SEQ ID NO: 222561 - RNA, 18 nt, Homo sapiens
aguacguugugcauuugg

SEQ ID NO: 222562 - RNA, 19 nt, Homo sapiens
augcacagcuaacauggaa

SEQ ID NO: 222563 - RNA, 17 nt, Homo sapiens
gucuugcaauggcagcc

SEQ ID NO: 222564 - RNA, 21 nt, Homo sapiens
auucacuagguucgaauccag

SEQ ID NO: 222565 - RNA, 21 nt, Homo sapiens
uccucugacagaagaacccca

SEQ ID NO: 222566 - RNA, 21 nt, Homo sapiens
ugaaauaucaagagagguuaa

SEQ ID NO: 222567 - RNA, 20 nt, Homo sapiens
ugagcauuuagacucucgac

SEQ ID NO: 222568 - RNA, 21 nt, Homo sapiens
acaacaaaccuguuucugcag

SEQ ID NO: 222569 - RNA, 21 nt, Homo sapiens
auauuaagaaagacuaucuaa

SEQ ID NO: 222570 - RNA, 14 nt, Homo sapiens
ucaagaugugacau

SEQ ID NO: 222571 - RNA, 16 nt, Homo sapiens
ccuauauuguuuucag

SEQ ID NO: 222572 - RNA, 17 nt, Homo sapiens
gugcucugaucauccac

SEQ ID NO: 222573 - RNA, 13 nt, Homo sapiens
uuaugacuccaga

SEQ ID NO: 222574 - RNA, 19 nt, Homo sapiens
cacuaaugaggaaacugca

SEQ ID NO: 222575 - RNA, 23 nt, Homo sapiens
agcuccuucuguccuacucugug

SEQ ID NO: 222576 - RNA, 22 nt, Homo sapiens
uuguguuuauauauaagccaaa

SEQ ID NO: 222577 - RNA, 21 nt, Homo sapiens
uuaacuuccaauuuacauacu

SEQ ID NO: 222578 - RNA, 16 nt, Homo sapiens
aagagaaccauaucaa

SEQ ID NO: 222579 - RNA, 20 nt, Homo sapiens
aggugggaggaucucuugag

SEQ ID NO: 222580 - RNA, 17 nt, Homo sapiens
aaaucagcugcuacuac

SEQ ID NO: 222581 - RNA, 17 nt, Homo sapiens
guggcagcucaccucuc

SEQ ID NO: 222582 - RNA, 11 nt, Homo sapiens
cuuccaaggau

SEQ ID NO: 222583 - RNA, 22 nt, Homo sapiens
cuucuuccccccaaaacugauu

SEQ ID NO: 222584 - RNA, 22 nt, Homo sapiens
acaguugaaaaacagcugaggg

SEQ ID NO: 222585 - RNA, 14 nt, Homo sapiens
gcaggcucucaggc

SEQ ID NO: 222586 - RNA, 21 nt, Homo sapiens
aucuugaauuguaaggaauga

SEQ ID NO: 222587 - RNA, 15 nt, Homo sapiens
uaauuaaaacacaac

SEQ ID NO: 222588 - RNA, 20 nt, Homo sapiens
aauaauacaguaucucaggg

SEQ ID NO: 222589 - RNA, 21 nt, Homo sapiens
gaacucuucaaucucuugcac

SEQ ID NO: 222590 - RNA, 13 nt, Homo sapiens
cuugggagcaaaa

SEQ ID NO: 222591 - RNA, 14 nt, Homo sapiens
auuguuucuuucaa

SEQ ID NO: 222592 - RNA, 14 nt, Homo sapiens
uucuacccaggugc

SEQ ID NO: 222593 - RNA, 21 nt, Homo sapiens
aaaaauagccugccucuucuc

SEQ ID NO: 222594 - RNA, 22 nt, Homo sapiens
cagugguuggcaauuguuucaa

SEQ ID NO: 222595 - RNA, 13 nt, Homo sapiens
ggaaaugggagac

SEQ ID NO: 222596 - RNA, 19 nt, Homo sapiens
aaggaugaucuaggaagac

SEQ ID NO: 222597 - RNA, 16 nt, Homo sapiens
agccucugaaaaccaa

SEQ ID NO: 222598 - RNA, 22 nt, Homo sapiens
gccauauucuguuggccagugu

SEQ ID NO: 222599 - RNA, 17 nt, Homo sapiens
uagucucuugauucaua

SEQ ID NO: 222600 - RNA, 23 nt, Homo sapiens
caucuuggucagauuugaacucu

SEQ ID NO: 222601 - RNA, 21 nt, Homo sapiens
acaguuaagagaaaugagcuu

SEQ ID NO: 222602 - RNA, 13 nt, Homo sapiens
cucuacaaaaagc

SEQ ID NO: 222603 - RNA, 17 nt, Homo sapiens
caugauguuuuccauga

SEQ ID NO: 222604 - RNA, 19 nt, Homo sapiens
ugaccuugaaugaugccau

SEQ ID NO: 222605 - RNA, 19 nt, Homo sapiens
cuccugguguggaagagcu

SEQ ID NO: 222606 - RNA, 20 nt, Homo sapiens
cacagaaaauggaagacagc

SEQ ID NO: 222607 - RNA, 15 nt, Homo sapiens
acaccuugacagggc

SEQ ID NO: 222608 - RNA, 17 nt, Homo sapiens
uuccucuuccacuuuga

SEQ ID NO: 222609 - RNA, 12 nt, Homo sapiens
gguggacaugca

SEQ ID NO: 222610 - RNA, 20 nt, Homo sapiens
cuuuuuaauauugauaugcu

SEQ ID NO: 222611 - RNA, 13 nt, Homo sapiens
gacccaugcugcc

SEQ ID NO: 222612 - RNA, 16 nt, Homo sapiens
agaacgaagccaccuu

SEQ ID NO: 222613 - RNA, 15 nt, Homo sapiens
auuuugauccaagcu

SEQ ID NO: 222614 - RNA, 17 nt, Homo sapiens
uccagagagcagugugg

SEQ ID NO: 222615 - RNA, 13 nt, Homo sapiens
cuauguucuuagu

SEQ ID NO: 222616 - RNA, 18 nt, Homo sapiens
uaagagaaaugagcugca

SEQ ID NO: 222617 - RNA, 22 nt, Homo sapiens
uugaagacuuuucuuucagcca

SEQ ID NO: 222618 - RNA, 21 nt, Homo sapiens
acccccugaauuucucacaaa

SEQ ID NO: 222619 - RNA, 22 nt, Homo sapiens
guuacauaagauaaaugugcug

SEQ ID NO: 222620 - RNA, 15 nt, Homo sapiens
agggagaagaaagaa

SEQ ID NO: 222621 - RNA, 16 nt, Homo sapiens
ccuggccccucagggu

SEQ ID NO: 222622 - RNA, 16 nt, Homo sapiens
ggcccaaugcacuuug

SEQ ID NO: 222623 - RNA, 14 nt, Homo sapiens
uggaacacuaauga

SEQ ID NO: 222624 - RNA, 22 nt, Homo sapiens
ucagaagacacugaugggcaac

SEQ ID NO: 222625 - RNA, 17 nt, Homo sapiens
gcucuuuugagcauuua

SEQ ID NO: 222626 - RNA, 14 nt, Homo sapiens
uagggaaaaaccag

SEQ ID NO: 222627 - RNA, 20 nt, Homo sapiens
agacucgauaguggugguga

SEQ ID NO: 222628 - RNA, 14 nt, Homo sapiens
aauauugcugaugg

SEQ ID NO: 222629 - RNA, 18 nt, Homo sapiens
gagcaagugagacccugu

SEQ ID NO: 222630 - RNA, 23 nt, Homo sapiens
cuguacaaaguagaagucuuaga

SEQ ID NO: 222631 - RNA, 14 nt, Homo sapiens
aggaaaggcuccag

SEQ ID NO: 222632 - RNA, 22 nt, Homo sapiens
uaagaaccuuuugagugccuua

SEQ ID NO: 222633 - RNA, 23 nt, Homo sapiens
ugacuuaagcacacuugacauca

SEQ ID NO: 222634 - RNA, 20 nt, Homo sapiens
agguacgaaaagaggggaag

SEQ ID NO: 222635 - RNA, 14 nt, Homo sapiens
caugagaugaugcc

SEQ ID NO: 222636 - RNA, 11 nt, Homo sapiens
caucuauguga

SEQ ID NO: 222637 - RNA, 14 nt, Homo sapiens
ucucccuucauccu

SEQ ID NO: 222638 - RNA, 17 nt, Homo sapiens
agauguauauauuuccu

SEQ ID NO: 222639 - RNA, 16 nt, Homo sapiens
aaagguugaagcacca

SEQ ID NO: 222640 - RNA, 23 nt, Homo sapiens
cuuaccagcagagcaccuuagac

SEQ ID NO: 222641 - RNA, 18 nt, Homo sapiens
uggaaagaguaggaagac

SEQ ID NO: 222642 - RNA, 21 nt, Homo sapiens
gacacagcucuucuccaggcu

SEQ ID NO: 222643 - RNA, 15 nt, Homo sapiens
augagguacucuccu

SEQ ID NO: 222644 - RNA, 17 nt, Homo sapiens
ccugaaacaacccaaag

SEQ ID NO: 222645 - RNA, 22 nt, Homo sapiens
ugccccucaacucuccuccaga

SEQ ID NO: 222646 - RNA, 20 nt, Homo sapiens
gaacagguuuaaaaaucccc

SEQ ID NO: 222647 - RNA, 17 nt, Homo sapiens
aaagacuguacaaagua

SEQ ID NO: 222648 - RNA, 16 nt, Homo sapiens
cucgaguuacagacaa

SEQ ID NO: 222649 - RNA, 13 nt, Homo sapiens
ucugacacacagc

SEQ ID NO: 222650 - RNA, 14 nt, Homo sapiens
aggauugcuacugu

SEQ ID NO: 222651 - RNA, 16 nt, Homo sapiens
uaaaauuacugaugca

SEQ ID NO: 222652 - RNA, 17 nt, Homo sapiens
aucacggcucacugcag

SEQ ID NO: 222653 - RNA, 17 nt, Homo sapiens
agacuggaagcacagcu

SEQ ID NO: 222654 - RNA, 13 nt, Homo sapiens
accaauguucucu

SEQ ID NO: 222655 - RNA, 20 nt, Homo sapiens
ggaugcauucccuacagauu

SEQ ID NO: 222656 - RNA, 14 nt, Homo sapiens
agauaaaugugcug

SEQ ID NO: 222657 - RNA, 19 nt, Homo sapiens
ucaccaacgucugugccau

SEQ ID NO: 222658 - RNA, 15 nt, Homo sapiens
acuuaaccugaagcu

SEQ ID NO: 222659 - RNA, 22 nt, Homo sapiens
gauuacaagcgugagccacugc

SEQ ID NO: 222660 - RNA, 16 nt, Homo sapiens
aggggaagagacuugg

SEQ ID NO: 222661 - RNA, 11 nt, Homo sapiens
acuuacuguac

SEQ ID NO: 222662 - RNA, 15 nt, Homo sapiens
cagguuuuuggucug

SEQ ID NO: 222663 - RNA, 12 nt, Homo sapiens
gcgugcacacac

SEQ ID NO: 222664 - RNA, 20 nt, Homo sapiens
gcccacgcuggagugcagug

SEQ ID NO: 222665 - RNA, 18 nt, Homo sapiens
cuuuucauaaccuagccu

SEQ ID NO: 222666 - RNA, 21 nt, Homo sapiens
gcacaugccucucucaggcca

SEQ ID NO: 222667 - RNA, 20 nt, Homo sapiens
gauguucugacccugcuuca

SEQ ID NO: 222668 - RNA, 22 nt, Homo sapiens
gauauaugcucugcauguuaca

SEQ ID NO: 222669 - RNA, 14 nt, Homo sapiens
aguuugaaccaaga

SEQ ID NO: 222670 - RNA, 23 nt, Homo sapiens
cccucaacaccucugcacaagcu

SEQ ID NO: 222671 - RNA, 14 nt, Homo sapiens
ggcagggucucacu

SEQ ID NO: 222672 - RNA, 17 nt, Homo sapiens
aagcgugagccacugca

SEQ ID NO: 222673 - RNA, 14 nt, Homo sapiens
gacccuauugcugc

SEQ ID NO: 222674 - RNA, 14 nt, Homo sapiens
aucugaaaauguau

SEQ ID NO: 222675 - RNA, 16 nt, Homo sapiens
uuccuacugggggcaa

SEQ ID NO: 222676 - RNA, 16 nt, Homo sapiens
guccccgcacugggcu

SEQ ID NO: 222677 - RNA, 22 nt, Homo sapiens
cagcuuguaaauagcucaggug

SEQ ID NO: 222678 - RNA, 13 nt, Homo sapiens
uggucugacccac

SEQ ID NO: 222679 - RNA, 18 nt, Homo sapiens
cccugagcuuucugcuau

SEQ ID NO: 222680 - RNA, 17 nt, Homo sapiens
cagauagauauaugcuc

SEQ ID NO: 222681 - RNA, 14 nt, Homo sapiens
uugccauguuggcc

SEQ ID NO: 222682 - RNA, 23 nt, Homo sapiens
cccauguaagcaccccuucauuu

SEQ ID NO: 222683 - RNA, 21 nt, Homo sapiens
uagucccauugauguacuuua

SEQ ID NO: 222684 - RNA, 15 nt, Homo sapiens
ugccaaaaacaacaa

SEQ ID NO: 222685 - RNA, 22 nt, Homo sapiens
ccuucagugccaaaaacaacaa

SEQ ID NO: 222686 - RNA, 17 nt, Homo sapiens
uguacauggaauaacau

SEQ ID NO: 222687 - RNA, 14 nt, Homo sapiens
cacuguugcccagg

SEQ ID NO: 222688 - RNA, 14 nt, Homo sapiens
ucacagccucugaa

SEQ ID NO: 222689 - RNA, 18 nt, Homo sapiens
ugagaaaugccagugugc

SEQ ID NO: 222690 - RNA, 20 nt, Homo sapiens
ugaggauuuugauccaagcu

SEQ ID NO: 222691 - RNA, 21 nt, Homo sapiens
cacucacacggacacucaaaa

SEQ ID NO: 222692 - RNA, 17 nt, Homo sapiens
caggcacccaccaucau

SEQ ID NO: 222693 - RNA, 18 nt, Homo sapiens
accauuuagcacacugcu

SEQ ID NO: 222694 - RNA, 21 nt, Homo sapiens
caaaaagaggcuaugugagca

SEQ ID NO: 222695 - RNA, 14 nt, Homo sapiens
aggaagacuuugga

SEQ ID NO: 222696 - RNA, 21 nt, Homo sapiens
accaucucuccuccuuuucac

SEQ ID NO: 222697 - RNA, 15 nt, Homo sapiens
agugugacugaucuc

SEQ ID NO: 222698 - RNA, 14 nt, Homo sapiens
aucagcugcuacua

SEQ ID NO: 222699 - RNA, 13 nt, Homo sapiens
accuguuucugca

SEQ ID NO: 222700 - RNA, 14 nt, Homo sapiens
uggaagcacagcuu

SEQ ID NO: 222701 - RNA, 18 nt, Homo sapiens
acuuguggacacagcucu

SEQ ID NO: 222702 - RNA, 16 nt, Homo sapiens
guuggucccccuucca

SEQ ID NO: 222703 - RNA, 17 nt, Homo sapiens
cucagagagggugggag

SEQ ID NO: 222704 - RNA, 19 nt, Homo sapiens
agcuuucugcuaucaaaga

SEQ ID NO: 222705 - RNA, 20 nt, Homo sapiens
auuuacauacucugcuuaga

SEQ ID NO: 222706 - RNA, 20 nt, Homo sapiens
aaaaacaacugaccaguugu

SEQ ID NO: 222707 - RNA, 17 nt, Homo sapiens
uggaauaaggagaauga

SEQ ID NO: 222708 - RNA, 15 nt, Homo sapiens
acuauguugcccagg

SEQ ID NO: 222709 - RNA, 13 nt, Homo sapiens
cauacucaccuca

SEQ ID NO: 222710 - RNA, 15 nt, Homo sapiens
gggcuggaagcagaa

SEQ ID NO: 222711 - RNA, 20 nt, Homo sapiens
auaacuuuguuuagcccaaa

SEQ ID NO: 222712 - RNA, 16 nt, Homo sapiens
uccuaagcuauucagu

SEQ ID NO: 222713 - RNA, 22 nt, Homo sapiens
agugcuuguuccucucaucucc

SEQ ID NO: 222714 - RNA, 15 nt, Homo sapiens
ugggacacccuguga

SEQ ID NO: 222715 - RNA, 12 nt, Homo sapiens
aaacugcacugu

SEQ ID NO: 222716 - RNA, 13 nt, Homo sapiens
uggccaaagccaa

SEQ ID NO: 222717 - RNA, 18 nt, Homo sapiens
gaucuaggaagacuuugg

SEQ ID NO: 222718 - RNA, 17 nt, Homo sapiens
uaaaugggggugcauuu

SEQ ID NO: 222719 - RNA, 22 nt, Homo sapiens
ugccucagccucccaaagugcu

SEQ ID NO: 222720 - RNA, 19 nt, Homo sapiens
gucaggugccucaagagaa

SEQ ID NO: 222721 - RNA, 19 nt, Homo sapiens
cuucaaucucuugcacuca

SEQ ID NO: 222722 - RNA, 12 nt, Homo sapiens
acccaccucagc

SEQ ID NO: 222723 - RNA, 13 nt, Homo sapiens
cagcuuaucucag

SEQ ID NO: 222724 - RNA, 17 nt, Homo sapiens
guggugaacagaacaaa

SEQ ID NO: 222725 - RNA, 13 nt, Homo sapiens
aggcuaugugagc

SEQ ID NO: 222726 - RNA, 13 nt, Homo sapiens
gaagacaauguga

SEQ ID NO: 222727 - RNA, 12 nt, Homo sapiens
aauucuucucca

SEQ ID NO: 222728 - RNA, 22 nt, Homo sapiens
cagcuuaucucaggggugugcg

SEQ ID NO: 222729 - RNA, 16 nt, Homo sapiens
cccacugcucugguua

SEQ ID NO: 222730 - RNA, 12 nt, Homo sapiens
aguguacaugga

SEQ ID NO: 222731 - RNA, 13 nt, Homo sapiens
ucccuuucuuccc

SEQ ID NO: 222732 - RNA, 19 nt, Homo sapiens
uauaagauucauauuuacu

SEQ ID NO: 222733 - RNA, 19 nt, Homo sapiens
ccaucucuacaaaaagcau

SEQ ID NO: 222734 - RNA, 14 nt, Homo sapiens
ugaagucacacagu

SEQ ID NO: 222735 - RNA, 15 nt, Homo sapiens
auccuaggcauuugc

SEQ ID NO: 222736 - RNA, 19 nt, Homo sapiens
ugcaucguuucaucuucca

SEQ ID NO: 222737 - RNA, 14 nt, Homo sapiens
ugguucaggguugg

SEQ ID NO: 222738 - RNA, 23 nt, Homo sapiens
acaggcaaugcuggcuguuggcu

SEQ ID NO: 222739 - RNA, 15 nt, Homo sapiens
uggaagcacagcuuc

SEQ ID NO: 222740 - RNA, 13 nt, Homo sapiens
aggcuggucucaa

SEQ ID NO: 222741 - RNA, 14 nt, Homo sapiens
cacaugcacgugug

SEQ ID NO: 222742 - RNA, 16 nt, Homo sapiens
gggcuguucacucucu

SEQ ID NO: 222743 - RNA, 12 nt, Homo sapiens
acgcgugcacac

SEQ ID NO: 222744 - RNA, 19 nt, Homo sapiens
agaauuucccaaagcagug

SEQ ID NO: 222745 - RNA, 13 nt, Homo sapiens
gagaaggggccca

SEQ ID NO: 222746 - RNA, 18 nt, Homo sapiens
cuaacuuuccuucauuca

SEQ ID NO: 222747 - RNA, 23 nt, Homo sapiens
ugccauccucccaaggggcccaa

SEQ ID NO: 222748 - RNA, 16 nt, Homo sapiens
ccuuucaccacaugug

SEQ ID NO: 222749 - RNA, 19 nt, Homo sapiens
augccagcuuaucucaggg

SEQ ID NO: 222750 - RNA, 12 nt, Homo sapiens
gcaguguggaaa

SEQ ID NO: 222751 - RNA, 15 nt, Homo sapiens
caggugcugccaucc

SEQ ID NO: 222752 - RNA, 23 nt, Homo sapiens
ucuuuccuguagucccauugaug

SEQ ID NO: 222753 - RNA, 18 nt, Homo sapiens
aggcauccaguaucuuga

SEQ ID NO: 222754 - RNA, 18 nt, Homo sapiens
agaaccuuuugagugccu

SEQ ID NO: 222755 - RNA, 22 nt, Homo sapiens
gucaccaaaucagcugcuacua

SEQ ID NO: 222756 - RNA, 18 nt, Homo sapiens
gguaugaucacggcucac

SEQ ID NO: 222757 - RNA, 15 nt, Homo sapiens
ugauuaugaauacag

SEQ ID NO: 222758 - RNA, 18 nt, Homo sapiens
cauuuaaaaaaaaucccu

SEQ ID NO: 222759 - RNA, 13 nt, Homo sapiens
ugaugaucuuugc

SEQ ID NO: 222760 - RNA, 13 nt, Homo sapiens
ugaacagaacaaa

SEQ ID NO: 222761 - RNA, 17 nt, Homo sapiens
agcugggguggggaccu

SEQ ID NO: 222762 - RNA, 16 nt, Homo sapiens
augcuggcuguuggcu

SEQ ID NO: 222763 - RNA, 14 nt, Homo sapiens
auucucuccuguac

SEQ ID NO: 222764 - RNA, 19 nt, Homo sapiens
cugaugcagaaagaccgug

SEQ ID NO: 222765 - RNA, 14 nt, Homo sapiens
gaagucacacagua

SEQ ID NO: 222766 - RNA, 14 nt, Homo sapiens
agagaaaugagcuu

SEQ ID NO: 222767 - RNA, 15 nt, Homo sapiens
cauuuauucugcuca

SEQ ID NO: 222768 - RNA, 24 nt, Homo sapiens
uucuccaagcaggacauggacaag

SEQ ID NO: 222769 - RNA, 21 nt, Homo sapiens
uucccuuuuuuggcugcugaa

SEQ ID NO: 222770 - RNA, 13 nt, Homo sapiens
uggauguucugac

SEQ ID NO: 222771 - RNA, 24 nt, Homo sapiens
cacugcuuaacuucacauauugau

SEQ ID NO: 222772 - RNA, 15 nt, Homo sapiens
uagauauaugcucug

SEQ ID NO: 222773 - RNA, 15 nt, Homo sapiens
gcuuugaaaauucag

SEQ ID NO: 222774 - RNA, 15 nt, Homo sapiens
aacaacugaccaguu

SEQ ID NO: 222775 - RNA, 13 nt, Homo sapiens
ugcagugcuucca

SEQ ID NO: 222776 - RNA, 22 nt, Homo sapiens
ugguuuuuaaaaaacugcugac

SEQ ID NO: 222777 - RNA, 16 nt, Homo sapiens
ggagggagaagaaaga

SEQ ID NO: 222778 - RNA, 16 nt, Homo sapiens
uacucaccucacccca

SEQ ID NO: 222779 - RNA, 19 nt, Homo sapiens
ucaaacucuugaccucagg

SEQ ID NO: 222780 - RNA, 15 nt, Homo sapiens
gauagccaaggccaa

SEQ ID NO: 222781 - RNA, 17 nt, Homo sapiens
uucaccacaugugcaca

SEQ ID NO: 222782 - RNA, 22 nt, Homo sapiens
ccgagcuuugaaaauucagugg

SEQ ID NO: 222783 - RNA, 12 nt, Homo sapiens
ugugucagcaua

SEQ ID NO: 222784 - RNA, 20 nt, Homo sapiens
ccuggcccacugcaucguuu

SEQ ID NO: 222785 - RNA, 13 nt, Homo sapiens
ugaaaacacuguu

SEQ ID NO: 222786 - RNA, 14 nt, Homo sapiens
ugccaaaaacaaca

SEQ ID NO: 222787 - RNA, 13 nt, Homo sapiens
aauaacacuguac

SEQ ID NO: 222788 - RNA, 19 nt, Homo sapiens
cuuacuuaaccugaagcua

SEQ ID NO: 222789 - RNA, 21 nt, Homo sapiens
agaucagccugggcaauguga

SEQ ID NO: 222790 - RNA, 19 nt, Homo sapiens
gcacucagaagacacugau

SEQ ID NO: 222791 - RNA, 14 nt, Homo sapiens
accaccaaccacug

SEQ ID NO: 222792 - RNA, 21 nt, Homo sapiens
guccucccaucucacacauga

SEQ ID NO: 222793 - RNA, 23 nt, Homo sapiens
gugaaccaccacacccagcccac

SEQ ID NO: 222794 - RNA, 22 nt, Homo sapiens
gcagaguugaagacagagcuac

SEQ ID NO: 222795 - RNA, 16 nt, Homo sapiens
guuugaaccaagaacu

SEQ ID NO: 222796 - RNA, 22 nt, Homo sapiens
aagacugaguacguugugcauu

SEQ ID NO: 222797 - RNA, 18 nt, Homo sapiens
uuuugcccacacuuggga

SEQ ID NO: 222798 - RNA, 17 nt, Homo sapiens
gccagcaggcucucagg

SEQ ID NO: 222799 - RNA, 23 nt, Homo sapiens
gguaugaucacggcucacugcag

SEQ ID NO: 222800 - RNA, 19 nt, Homo sapiens
cagccucccgaguagcugg

SEQ ID NO: 222801 - RNA, 22 nt, Homo sapiens
uuaaaauaaauuuguaugcuca

SEQ ID NO: 222802 - RNA, 14 nt, Homo sapiens
cacaucuugcucug

SEQ ID NO: 222803 - RNA, 20 nt, Homo sapiens
aaaaaggaugcauucccuac

SEQ ID NO: 222804 - RNA, 15 nt, Homo sapiens
ggugaccagcaccau

SEQ ID NO: 222805 - RNA, 14 nt, Homo sapiens
cuaaggugugcucu

SEQ ID NO: 222806 - RNA, 21 nt, Homo sapiens
cugauucccaagcucugcucc

SEQ ID NO: 222807 - RNA, 15 nt, Homo sapiens
cucuuauauugccau

SEQ ID NO: 222808 - RNA, 14 nt, Homo sapiens
aguacguugugcau

SEQ ID NO: 222809 - RNA, 23 nt, Homo sapiens
uacagacaaagcgugguggacau

SEQ ID NO: 222810 - RNA, 18 nt, Homo sapiens
caggcccggcuccaggcu

SEQ ID NO: 222811 - RNA, 16 nt, Homo sapiens
aggugaggaagcaaaa

SEQ ID NO: 222812 - RNA, 17 nt, Homo sapiens
gacucuuuggacacuca

SEQ ID NO: 222813 - RNA, 15 nt, Homo sapiens
acacucuugguagaa

SEQ ID NO: 222814 - RNA, 16 nt, Homo sapiens
aauucucagaaucuca

SEQ ID NO: 222815 - RNA, 18 nt, Homo sapiens
cauuccuguucccaugag

SEQ ID NO: 222816 - RNA, 15 nt, Homo sapiens
cagcuccuucugucc

SEQ ID NO: 222817 - RNA, 16 nt, Homo sapiens
agugaagcugggagaa

SEQ ID NO: 222818 - RNA, 17 nt, Homo sapiens
agaaaaaggaugcacag

SEQ ID NO: 222819 - RNA, 16 nt, Homo sapiens
gaauccagacccggcu

SEQ ID NO: 222820 - RNA, 15 nt, Homo sapiens
cagaagaaacuaccc

SEQ ID NO: 222821 - RNA, 14 nt, Homo sapiens
cacacgcgugcaca

SEQ ID NO: 222822 - RNA, 18 nt, Homo sapiens
uggucccccuuccaugga

SEQ ID NO: 222823 - RNA, 18 nt, Homo sapiens
ggagauaaaauaaaaaga

SEQ ID NO: 222824 - RNA, 17 nt, Homo sapiens
gggaccagagcugccac

SEQ ID NO: 222825 - RNA, 19 nt, Homo sapiens
acagcugggguggggaccu

SEQ ID NO: 222826 - RNA, 15 nt, Homo sapiens
ucagcugaaccuggg

SEQ ID NO: 222827 - RNA, 16 nt, Homo sapiens
augucagugugacuga

SEQ ID NO: 222828 - RNA, 19 nt, Homo sapiens
cacuauaauguaagcucua

SEQ ID NO: 222829 - RNA, 19 nt, Homo sapiens
gcacagacccugcccugug

SEQ ID NO: 222830 - RNA, 23 nt, Homo sapiens
ugugaaacuggauuaaacuuaau

SEQ ID NO: 222831 - RNA, 14 nt, Homo sapiens
acccaccccagugc

SEQ ID NO: 222832 - RNA, 21 nt, Homo sapiens
gcacuauaauguaagcucuac

SEQ ID NO: 222833 - RNA, 20 nt, Homo sapiens
cagggcacaccgggcacuca

SEQ ID NO: 222834 - RNA, 22 nt, Homo sapiens
augugcugaaugguuuucaaaa

SEQ ID NO: 222835 - RNA, 19 nt, Homo sapiens
ccucauuagcauuuugcua

SEQ ID NO: 222836 - RNA, 14 nt, Homo sapiens
gcucacugcagccu

SEQ ID NO: 222837 - RNA, 14 nt, Homo sapiens
agcuuaucucaggg

SEQ ID NO: 222838 - RNA, 16 nt, Homo sapiens
cacugcuuaacuucac

SEQ ID NO: 222839 - RNA, 17 nt, Homo sapiens
aaguaucccuacuguaa

SEQ ID NO: 222840 - RNA, 20 nt, Homo sapiens
cuggcagaguugaagacaga

SEQ ID NO: 222841 - RNA, 22 nt, Homo sapiens
ccaauuuaaagaaaacuguuaa

SEQ ID NO: 222842 - RNA, 13 nt, Homo sapiens
augaggcauuugu

SEQ ID NO: 222843 - RNA, 19 nt, Homo sapiens
agguagaaauaucugaaaa

SEQ ID NO: 222844 - RNA, 20 nt, Homo sapiens
gaaugaaugucagugugacu

SEQ ID NO: 222845 - RNA, 14 nt, Homo sapiens
uucucugaaggaca

SEQ ID NO: 222846 - RNA, 17 nt, Homo sapiens
acccaguuagcucucaa

SEQ ID NO: 222847 - RNA, 16 nt, Homo sapiens
gcccaaauucuuucag

SEQ ID NO: 222848 - RNA, 22 nt, Homo sapiens
ugggucgcgugaugcgcauguc

SEQ ID NO: 222849 - RNA, 17 nt, Homo sapiens
aggaggggugugggcac

SEQ ID NO: 222850 - RNA, 13 nt, Homo sapiens
uuucuacucgagu

SEQ ID NO: 222851 - RNA, 14 nt, Homo sapiens
cuaggaggucucua

SEQ ID NO: 222852 - RNA, 22 nt, Homo sapiens
ccuuuccaaaugcccagcuuaa

SEQ ID NO: 222853 - RNA, 19 nt, Homo sapiens
cuuagaauuugggggaaaa

SEQ ID NO: 222854 - RNA, 17 nt, Homo sapiens
acuuggaaaugggagac

SEQ ID NO: 222855 - RNA, 15 nt, Homo sapiens
agcaggcucucaggc

SEQ ID NO: 222856 - RNA, 16 nt, Homo sapiens
acucagaagacacuga

SEQ ID NO: 222857 - RNA, 18 nt, Homo sapiens
guaaaugggggugcauuu

SEQ ID NO: 222858 - RNA, 19 nt, Homo sapiens
uauauuguuuucaguguac

SEQ ID NO: 222859 - RNA, 21 nt, Homo sapiens
cauuuuuaguagagacagggu

SEQ ID NO: 222860 - RNA, 17 nt, Homo sapiens
uccugggcuaagugauc

SEQ ID NO: 222861 - RNA, 22 nt, Homo sapiens
gaggcagccccauucugccugc

SEQ ID NO: 222862 - RNA, 21 nt, Homo sapiens
ugcauguuacauaagauaaau

SEQ ID NO: 222863 - RNA, 22 nt, Homo sapiens
guuguuugauucagacagcugc

SEQ ID NO: 222864 - RNA, 16 nt, Homo sapiens
aacucuugaccucagg

SEQ ID NO: 222865 - RNA, 14 nt, Homo sapiens
ugacaggcaaugcu

SEQ ID NO: 222866 - RNA, 18 nt, Homo sapiens
uuguuucaaccaguuuga

SEQ ID NO: 222867 - RNA, 20 nt, Homo sapiens
guaauuugugauacaaugcu

SEQ ID NO: 222868 - RNA, 15 nt, Homo sapiens
aaggguaucugguga

SEQ ID NO: 222869 - RNA, 14 nt, Homo sapiens
ggccccucaggguc

SEQ ID NO: 222870 - RNA, 16 nt, Homo sapiens
uaaaagguaugcaauc

SEQ ID NO: 222871 - RNA, 19 nt, Homo sapiens
cgggcacucagaagacacu

SEQ ID NO: 222872 - RNA, 23 nt, Homo sapiens
gaagaaaauaguggugugauuug

SEQ ID NO: 222873 - RNA, 12 nt, Homo sapiens
gaaaacacuguu

SEQ ID NO: 222874 - RNA, 13 nt, Homo sapiens
uguggacacagcu

SEQ ID NO: 222875 - RNA, 13 nt, Homo sapiens
aauucuacuuuga

SEQ ID NO: 222876 - RNA, 21 nt, Homo sapiens
uuuuaagaaaaaggaugcaca

SEQ ID NO: 222877 - RNA, 24 nt, Homo sapiens
acaaaggagagcuagcagcaggga

SEQ ID NO: 222878 - RNA, 17 nt, Homo sapiens
ucuuuaaugucacaggc

SEQ ID NO: 222879 - RNA, 15 nt, Homo sapiens
cugcaucaagaugug

SEQ ID NO: 222880 - RNA, 23 nt, Homo sapiens
aagugggggaguggccacagaaa

SEQ ID NO: 222881 - RNA, 12 nt, Homo sapiens
ggcuaagugauc

SEQ ID NO: 222882 - RNA, 13 nt, Homo sapiens
aggguggugaccu

SEQ ID NO: 222883 - RNA, 16 nt, Homo sapiens
acccugcuucaaauau

SEQ ID NO: 222884 - RNA, 10 nt, Homo sapiens
cucacuccuu

SEQ ID NO: 222885 - RNA, 15 nt, Homo sapiens
ugaacacucuuggua

SEQ ID NO: 222886 - RNA, 21 nt, Homo sapiens
cuugagaauuacccuuuugcc

SEQ ID NO: 222887 - RNA, 18 nt, Homo sapiens
gccaggcaugguggccca

SEQ ID NO: 222888 - RNA, 16 nt, Homo sapiens
uacucgaguuacagac

SEQ ID NO: 222889 - RNA, 16 nt, Homo sapiens
aaugaggaaacugcac

SEQ ID NO: 222890 - RNA, 14 nt, Homo sapiens
gucagcacuaccuc

SEQ ID NO: 222891 - RNA, 15 nt, Homo sapiens
uuccaaacacauaca

SEQ ID NO: 222892 - RNA, 13 nt, Homo sapiens
guacucuccugga

SEQ ID NO: 222893 - RNA, 20 nt, Homo sapiens
acagagugagacucugucuc

SEQ ID NO: 222894 - RNA, 17 nt, Homo sapiens
gugauuuucauugcugg

SEQ ID NO: 222895 - RNA, 12 nt, Homo sapiens
ugagugccuuac

SEQ ID NO: 222896 - RNA, 18 nt, Homo sapiens
uuucuaugacacaugcaa

SEQ ID NO: 222897 - RNA, 23 nt, Homo sapiens
aggaagccagcaggcucucaggc

SEQ ID NO: 222898 - RNA, 13 nt, Homo sapiens
acacugcuuguga

SEQ ID NO: 222899 - RNA, 12 nt, Homo sapiens
aauaacacugua

SEQ ID NO: 222900 - RNA, 15 nt, Homo sapiens
ccaccaacauacucc

SEQ ID NO: 222901 - RNA, 23 nt, Homo sapiens
aagcucugcuccucuccccagca

SEQ ID NO: 222902 - RNA, 22 nt, Homo sapiens
cccaggugguuauggagagggu

SEQ ID NO: 222903 - RNA, 13 nt, Homo sapiens
uacgccaggggaa

SEQ ID NO: 222904 - RNA, 18 nt, Homo sapiens
uggcaugggaaugaaugu

SEQ ID NO: 222905 - RNA, 19 nt, Homo sapiens
uuagaaaaaccaccaccau

SEQ ID NO: 222906 - RNA, 15 nt, Homo sapiens
acagcuaacauggaa

SEQ ID NO: 222907 - RNA, 14 nt, Homo sapiens
acaaguccucagug

SEQ ID NO: 222908 - RNA, 21 nt, Homo sapiens
uguucaugcacacuugcaccc

SEQ ID NO: 222909 - RNA, 16 nt, Homo sapiens
aaaagaggcuauguga

SEQ ID NO: 222910 - RNA, 22 nt, Homo sapiens
ucaacaucuuggucagauuuga

SEQ ID NO: 222911 - RNA, 17 nt, Homo sapiens
ccaccuuggcucaaguc

SEQ ID NO: 222912 - RNA, 13 nt, Homo sapiens
gccucagugccac

SEQ ID NO: 222913 - RNA, 15 nt, Homo sapiens
cagugguaugaucac

SEQ ID NO: 222914 - RNA, 21 nt, Homo sapiens
cuuaagcacacuugacaucaa

SEQ ID NO: 222915 - RNA, 13 nt, Homo sapiens
agauaaaugugcu

SEQ ID NO: 222916 - RNA, 13 nt, Homo sapiens
ugaagcugagaug

SEQ ID NO: 222917 - RNA, 20 nt, Homo sapiens
ugccagcuuaucucaggggu

SEQ ID NO: 222918 - RNA, 22 nt, Homo sapiens
cuaaaugugaaugaugauccua

SEQ ID NO: 222919 - RNA, 19 nt, Homo sapiens
guugauucagcucugcaag

SEQ ID NO: 222920 - RNA, 16 nt, Homo sapiens
cagccaugauucuuuu

SEQ ID NO: 222921 - RNA, 15 nt, Homo sapiens
cucauccucauaccc

SEQ ID NO: 222922 - RNA, 13 nt, Homo sapiens
cuccuuguguuac

SEQ ID NO: 222923 - RNA, 10 nt, Homo sapiens
uguagagugg

SEQ ID NO: 222924 - RNA, 18 nt, Homo sapiens
aguggcuaccuacauaca

SEQ ID NO: 222925 - RNA, 14 nt, Homo sapiens
ccugaagucacaca

SEQ ID NO: 222926 - RNA, 21 nt, Homo sapiens
auuacaacugcuacagagcag

SEQ ID NO: 222927 - RNA, 16 nt, Homo sapiens
auacucccaucuguga

SEQ ID NO: 222928 - RNA, 16 nt, Homo sapiens
cagcaggcucucaggc

SEQ ID NO: 222929 - RNA, 18 nt, Homo sapiens
ucaccucaccccacugug

SEQ ID NO: 222930 - RNA, 15 nt, Homo sapiens
agagaugugccccca

SEQ ID NO: 222931 - RNA, 18 nt, Homo sapiens
ucuggagguacgaaaaga

SEQ ID NO: 222932 - RNA, 15 nt, Homo sapiens
gcuucaaccccauga

SEQ ID NO: 222933 - RNA, 21 nt, Homo sapiens
uaacauguaauuaaguacuau

SEQ ID NO: 222934 - RNA, 24 nt, Homo sapiens
acaaagcgugguggacaugcacag

SEQ ID NO: 222935 - RNA, 21 nt, Homo sapiens
aggaucaaaguugaugaaaua

SEQ ID NO: 222936 - RNA, 16 nt, Homo sapiens
uccuggccucaaguga

SEQ ID NO: 222937 - RNA, 23 nt, Homo sapiens
agcggcuggcagcccaccccuca

SEQ ID NO: 222938 - RNA, 22 nt, Homo sapiens
uucucuugagaggguggaauau

SEQ ID NO: 222939 - RNA, 21 nt, Homo sapiens
accaguuugaaccaagaacuu

SEQ ID NO: 222940 - RNA, 19 nt, Homo sapiens
gaagugacaccaguucuuu

SEQ ID NO: 222941 - RNA, 11 nt, Homo sapiens
uccuucuuccc

SEQ ID NO: 222942 - RNA, 15 nt, Homo sapiens
cacugcgaccacaag

SEQ ID NO: 222943 - RNA, 12 nt, Homo sapiens
cugaggugggag

SEQ ID NO: 222944 - RNA, 22 nt, Homo sapiens
ggacucaaugcacugacauugu

SEQ ID NO: 222945 - RNA, 21 nt, Homo sapiens
aagugcugggauuacaggugu

SEQ ID NO: 222946 - RNA, 21 nt, Homo sapiens
cuuguacauaaugcgugcaua

SEQ ID NO: 222947 - RNA, 22 nt, Homo sapiens
acagacaaagcgugguggacau

SEQ ID NO: 222948 - RNA, 20 nt, Homo sapiens
agugggagcugaguggggga

SEQ ID NO: 222949 - RNA, 12 nt, Homo sapiens
ucucaggccagc

SEQ ID NO: 222950 - RNA, 16 nt, Homo sapiens
ugagacccugucucaa

SEQ ID NO: 222951 - RNA, 16 nt, Homo sapiens
ucacggcucacugcag

SEQ ID NO: 222952 - RNA, 15 nt, Homo sapiens
cuuacuuaggugugg

SEQ ID NO: 222953 - RNA, 18 nt, Homo sapiens
cuugaaaacacuguucuc

SEQ ID NO: 222954 - RNA, 14 nt, Homo sapiens
cacagaguuguuac

SEQ ID NO: 222955 - RNA, 20 nt, Homo sapiens
augugagaccauuuagcaca

SEQ ID NO: 222956 - RNA, 16 nt, Homo sapiens
cagcgagcccuggugg

SEQ ID NO: 222957 - RNA, 20 nt, Homo sapiens
aaacuuuucuaauacucuac

SEQ ID NO: 222958 - RNA, 17 nt, Homo sapiens
uggccccugcccggcug

SEQ ID NO: 222959 - RNA, 19 nt, Homo sapiens
aauaacacuguacugcaau

SEQ ID NO: 222960 - RNA, 14 nt, Homo sapiens
agccucacaguccu

SEQ ID NO: 222961 - RNA, 20 nt, Homo sapiens
caagacucuuuggacacuca

SEQ ID NO: 222962 - RNA, 22 nt, Homo sapiens
uucaguggcuaccuacauacaa

SEQ ID NO: 222963 - RNA, 23 nt, Homo sapiens
gcagguuggugggggccucggug

SEQ ID NO: 222964 - RNA, 16 nt, Homo sapiens
gcagccacauuccuga

SEQ ID NO: 222965 - RNA, 19 nt, Homo sapiens
cuguuggccagugugacaa

SEQ ID NO: 222966 - RNA, 16 nt, Homo sapiens
uaucuagauacuguau

SEQ ID NO: 222967 - RNA, 17 nt, Homo sapiens
ucgaugcagugcuucca

SEQ ID NO: 222968 - RNA, 14 nt, Homo sapiens
uuaagagaaaugag

SEQ ID NO: 222969 - RNA, 16 nt, Homo sapiens
agaaaaaggaugcauu

SEQ ID NO: 222970 - RNA, 20 nt, Homo sapiens
aggucauugguggcagagug

SEQ ID NO: 222971 - RNA, 18 nt, Homo sapiens
gugcacguacacacacau

SEQ ID NO: 222972 - RNA, 12 nt, Homo sapiens
ucaccaagccca

SEQ ID NO: 222973 - RNA, 14 nt, Homo sapiens
cucccacaaaggag

SEQ ID NO: 222974 - RNA, 12 nt, Homo sapiens
uauacauuugau

SEQ ID NO: 222975 - RNA, 20 nt, Homo sapiens
aguccucagugguuggcaau

SEQ ID NO: 222976 - RNA, 13 nt, Homo sapiens
agauggccaugua

SEQ ID NO: 222977 - RNA, 16 nt, Homo sapiens
ugcuuguacauaaugc

SEQ ID NO: 222978 - RNA, 23 nt, Homo sapiens
aaaaccaccaccaucaccagaca

SEQ ID NO: 222979 - RNA, 16 nt, Homo sapiens
ggaacacucugagacu

SEQ ID NO: 222980 - RNA, 17 nt, Homo sapiens
auucucauuugucacac

SEQ ID NO: 222981 - RNA, 17 nt, Homo sapiens
auuuaccugaagucuuu

SEQ ID NO: 222982 - RNA, 15 nt, Homo sapiens
cugaaugguuuucaa

SEQ ID NO: 222983 - RNA, 12 nt, Homo sapiens
uuuacaacuggg

SEQ ID NO: 222984 - RNA, 21 nt, Homo sapiens
acacauuuuuuaaaugcaccu

SEQ ID NO: 222985 - RNA, 23 nt, Homo sapiens
agaaccaaaaagaggcuauguga

SEQ ID NO: 222986 - RNA, 15 nt, Homo sapiens
cuggcaagaaugugu

SEQ ID NO: 222987 - RNA, 22 nt, Homo sapiens
acucuauuuuuguaaaaaggga

SEQ ID NO: 222988 - RNA, 17 nt, Homo sapiens
cacuucccuacauggag

SEQ ID NO: 222989 - RNA, 21 nt, Homo sapiens
cugaagucuuuguacagacaa

SEQ ID NO: 222990 - RNA, 14 nt, Homo sapiens
ccaggaagccagca

SEQ ID NO: 222991 - RNA, 20 nt, Homo sapiens
gaguucauacccuguuacca

SEQ ID NO: 222992 - RNA, 17 nt, Homo sapiens
ugagacucugucucaaa

SEQ ID NO: 222993 - RNA, 17 nt, Homo sapiens
gccagcuuaucucaggg

SEQ ID NO: 222994 - RNA, 15 nt, Homo sapiens
cuuuucauaaccuag

SEQ ID NO: 222995 - RNA, 18 nt, Homo sapiens
gagauagccaaggccaaa

SEQ ID NO: 222996 - RNA, 23 nt, Homo sapiens
guaauuuuuuuaucgucacugcu

SEQ ID NO: 222997 - RNA, 16 nt, Homo sapiens
uucuucccuacaguug

SEQ ID NO: 222998 - RNA, 15 nt, Homo sapiens
acacuguacugcaau

SEQ ID NO: 222999 - RNA, 14 nt, Homo sapiens
uuuuccugccaggc

SEQ ID NO: 223000 - RNA, 16 nt, Homo sapiens
uaggaacacuccuuca

SEQ ID NO: 223001 - RNA, 18 nt, Homo sapiens
accuggccucugcacucc

SEQ ID NO: 223002 - RNA, 14 nt, Homo sapiens
uuagaagucacaca

SEQ ID NO: 223003 - RNA, 22 nt, Homo sapiens
aaaaaugcuugcuucaacccca

SEQ ID NO: 223004 - RNA, 18 nt, Homo sapiens
ugucuuuuuucacuacau

SEQ ID NO: 223005 - RNA, 18 nt, Homo sapiens
ccaggcaggucuugaacu

SEQ ID NO: 223006 - RNA, 22 nt, Homo sapiens
aaaacuugauguguuaucucuu

SEQ ID NO: 223007 - RNA, 22 nt, Homo sapiens
agcuaacauggaaguacuauaa

SEQ ID NO: 223008 - RNA, 21 nt, Homo sapiens
uugaagacagagcuacacagg

SEQ ID NO: 223009 - RNA, 15 nt, Homo sapiens
uaucaggguauucca

SEQ ID NO: 223010 - RNA, 15 nt, Homo sapiens
gaugcagugcuucca

SEQ ID NO: 223011 - RNA, 15 nt, Homo sapiens
aaaccgaauuuucac

SEQ ID NO: 223012 - RNA, 19 nt, Homo sapiens
cuuucugcuaucaaagagg

SEQ ID NO: 223013 - RNA, 16 nt, Homo sapiens
ugggacacccugugau

SEQ ID NO: 223014 - RNA, 17 nt, Homo sapiens
ccaauauuuaccagacc

SEQ ID NO: 223015 - RNA, 14 nt, Homo sapiens
agaaucucaaauaa

SEQ ID NO: 223016 - RNA, 18 nt, Homo sapiens
gucacacacuuuggcuau

SEQ ID NO: 223017 - RNA, 20 nt, Homo sapiens
aaggcugucaauuacaggaa

SEQ ID NO: 223018 - RNA, 22 nt, Homo sapiens
cacagugagucgaggacaggga

SEQ ID NO: 223019 - RNA, 19 nt, Homo sapiens
ccuugaaaacacuguucuc

SEQ ID NO: 223020 - RNA, 19 nt, Homo sapiens
agaagacacugaugggcaa

SEQ ID NO: 223021 - RNA, 15 nt, Homo sapiens
cuaugugagcacaaa

SEQ ID NO: 223022 - RNA, 20 nt, Homo sapiens
cuggcaugggaaugaauguc

SEQ ID NO: 223023 - RNA, 14 nt, Homo sapiens
ucugccucugacac

SEQ ID NO: 223024 - RNA, 16 nt, Homo sapiens
ugaguacuacaguccu

SEQ ID NO: 223025 - RNA, 21 nt, Homo sapiens
augaccuugaaugaugccaug

SEQ ID NO: 223026 - RNA, 15 nt, Homo sapiens
uucaaccccaugaga

SEQ ID NO: 223027 - RNA, 22 nt, Homo sapiens
aagaagcccaggaaaggcucca

SEQ ID NO: 223028 - RNA, 20 nt, Homo sapiens
caaggccaaaggaagcacau

SEQ ID NO: 223029 - RNA, 17 nt, Homo sapiens
uagaagucuuagaugua

SEQ ID NO: 223030 - RNA, 14 nt, Homo sapiens
uugcaauggcagcc

SEQ ID NO: 223031 - RNA, 22 nt, Homo sapiens
uccuuaccagcagagcaccuua

SEQ ID NO: 223032 - RNA, 15 nt, Homo sapiens
cugccaugccagcuu

SEQ ID NO: 223033 - RNA, 16 nt, Homo sapiens
aaaagcaucuauguga

SEQ ID NO: 223034 - RNA, 14 nt, Homo sapiens
caucaugucuggcu

SEQ ID NO: 223035 - RNA, 21 nt, Homo sapiens
gaacagguuuaaaaaucccca

SEQ ID NO: 223036 - RNA, 20 nt, Homo sapiens
ucaugcugcuuagaugacau

SEQ ID NO: 223037 - RNA, 14 nt, Homo sapiens
uaguggugugauuu

SEQ ID NO: 223038 - RNA, 16 nt, Homo sapiens
cuccagcucaccagcc

SEQ ID NO: 223039 - RNA, 20 nt, Homo sapiens
aagacccuuguggucccacc

SEQ ID NO: 223040 - RNA, 13 nt, Homo sapiens
agcagugugauug

SEQ ID NO: 223041 - RNA, 21 nt, Homo sapiens
gugaugaugaaaugaggucag

SEQ ID NO: 223042 - RNA, 14 nt, Homo sapiens
ccaucaccagacag

SEQ ID NO: 223043 - RNA, 16 nt, Homo sapiens
uaugacuccagaauuu

SEQ ID NO: 223044 - RNA, 21 nt, Homo sapiens
gggcucccuucccaccucucu

SEQ ID NO: 223045 - RNA, 16 nt, Homo sapiens
ucucaggccagcugcu

SEQ ID NO: 223046 - RNA, 15 nt, Homo sapiens
aacugaccaguuguu

SEQ ID NO: 223047 - RNA, 18 nt, Homo sapiens
uagccuuagaagucacac

SEQ ID NO: 223048 - RNA, 20 nt, Homo sapiens
auuuugggguacccacugcu

SEQ ID NO: 223049 - RNA, 15 nt, Homo sapiens
ccuccaggugcacaa

SEQ ID NO: 223050 - RNA, 19 nt, Homo sapiens
aggguugggcuggugucac

SEQ ID NO: 223051 - RNA, 18 nt, Homo sapiens
uagcagggaaacagcuaa

SEQ ID NO: 223052 - RNA, 15 nt, Homo sapiens
cagagaccaucccug

SEQ ID NO: 223053 - RNA, 16 nt, Homo sapiens
cauguguguucaugca

SEQ ID NO: 223054 - RNA, 15 nt, Homo sapiens
aaaaagaaugcagag

SEQ ID NO: 223055 - RNA, 12 nt, Homo sapiens
uggcaccagcag

SEQ ID NO: 223056 - RNA, 21 nt, Homo sapiens
cccacgacugcccggcagggu

SEQ ID NO: 223057 - RNA, 13 nt, Homo sapiens
gccaggaagccag

SEQ ID NO: 223058 - RNA, 23 nt, Homo sapiens
uagauuuuagacccuauugcugc

SEQ ID NO: 223059 - RNA, 21 nt, Homo sapiens
aggccaaaggaagcacaugcc

SEQ ID NO: 223060 - RNA, 14 nt, Homo sapiens
aucacaagucagca

SEQ ID NO: 223061 - RNA, 15 nt, Homo sapiens
gggaggggaagaaaa

SEQ ID NO: 223062 - RNA, 17 nt, Homo sapiens
gcugguugagguuucaa

SEQ ID NO: 223063 - RNA, 16 nt, Homo sapiens
gcaggcucucaggcca

SEQ ID NO: 223064 - RNA, 15 nt, Homo sapiens
gccaccuuugaagaa

SEQ ID NO: 223065 - RNA, 15 nt, Homo sapiens
caugcugcccuguga

SEQ ID NO: 223066 - RNA, 13 nt, Homo sapiens
ugccucucucagg

SEQ ID NO: 223067 - RNA, 14 nt, Homo sapiens
acaguaucucaggg

SEQ ID NO: 223068 - RNA, 12 nt, Homo sapiens
cccggcccagug

SEQ ID NO: 223069 - RNA, 16 nt, Homo sapiens
ugcacuccagccuggg

SEQ ID NO: 223070 - RNA, 16 nt, Homo sapiens
ucucugcccuccaaga

SEQ ID NO: 223071 - RNA, 20 nt, Homo sapiens
ugaauaauacaguaucucag

SEQ ID NO: 223072 - RNA, 20 nt, Homo sapiens
uucuacucgaguuacagaca

SEQ ID NO: 223073 - RNA, 12 nt, Homo sapiens
caccccacugug

SEQ ID NO: 223074 - RNA, 21 nt, Homo sapiens
gagacagcacaggcagcccca

SEQ ID NO: 223075 - RNA, 15 nt, Homo sapiens
guauucuuauuuaau

SEQ ID NO: 223076 - RNA, 17 nt, Homo sapiens
guaaauagcucaggugu

SEQ ID NO: 223077 - RNA, 16 nt, Homo sapiens
uggggcuggaagcaga

SEQ ID NO: 223078 - RNA, 20 nt, Homo sapiens
cugcaucaagaugugacaug

SEQ ID NO: 223079 - RNA, 16 nt, Homo sapiens
guuugguucaugguga

SEQ ID NO: 223080 - RNA, 23 nt, Homo sapiens
cacaguauuacuucugcuacaua

SEQ ID NO: 223081 - RNA, 13 nt, Homo sapiens
auacccaucccau

SEQ ID NO: 223082 - RNA, 21 nt, Homo sapiens
cucuacucuagggaaaaacca

SEQ ID NO: 223083 - RNA, 19 nt, Homo sapiens
cagaaaugccuuacccuca

SEQ ID NO: 223084 - RNA, 18 nt, Homo sapiens
cauacaauuccaaacaca

SEQ ID NO: 223085 - RNA, 19 nt, Homo sapiens
ccccuucauuuggcauucc

SEQ ID NO: 223086 - RNA, 14 nt, Homo sapiens
uugggcuucauccu

SEQ ID NO: 223087 - RNA, 18 nt, Homo sapiens
ucacuucccuacauggag

SEQ ID NO: 223088 - RNA, 21 nt, Homo sapiens
caucccucuggggcuguucac

SEQ ID NO: 223089 - RNA, 22 nt, Homo sapiens
caugugccagguuuuuggucug

SEQ ID NO: 223090 - RNA, 13 nt, Homo sapiens
uucaguaauaacu

SEQ ID NO: 223091 - RNA, 19 nt, Homo sapiens
gcacaugccucucucaggc

SEQ ID NO: 223092 - RNA, 23 nt, Homo sapiens
uucuaccuuccugcaacaccuug

SEQ ID NO: 223093 - RNA, 12 nt, Homo sapiens
uucacuacauua

SEQ ID NO: 223094 - RNA, 15 nt, Homo sapiens
uaucagaauucucag

SEQ ID NO: 223095 - RNA, 17 nt, Homo sapiens
acaugcacagcuaacau

SEQ ID NO: 223096 - RNA, 21 nt, Homo sapiens
uucagagacuccugcaggcag

SEQ ID NO: 223097 - RNA, 20 nt, Homo sapiens
uucgcaggauucuuccuccc

SEQ ID NO: 223098 - RNA, 15 nt, Homo sapiens
acagggugagcacuc

SEQ ID NO: 223099 - RNA, 15 nt, Homo sapiens
aaaauuacugaugca

SEQ ID NO: 223100 - RNA, 12 nt, Homo sapiens
gagaaaugagcu

SEQ ID NO: 223101 - RNA, 17 nt, Homo sapiens
uagcugggacuacaggu

SEQ ID NO: 223102 - RNA, 22 nt, Homo sapiens
cucaaccuccugggcuaaguga

SEQ ID NO: 223103 - RNA, 21 nt, Homo sapiens
caggguuuugccauguuggcc

SEQ ID NO: 223104 - RNA, 16 nt, Homo sapiens
uccaugauguuuucca

SEQ ID NO: 223105 - RNA, 13 nt, Homo sapiens
ccucuuccacuuu

SEQ ID NO: 223106 - RNA, 21 nt, Homo sapiens
gguggaugccugguggcagcu

SEQ ID NO: 223107 - RNA, 17 nt, Homo sapiens
gcaggcucucaggccag

SEQ ID NO: 223108 - RNA, 15 nt, Homo sapiens
aauuguuuggggaug

SEQ ID NO: 223109 - RNA, 23 nt, Homo sapiens
gaauccagagagcaguguggaaa

SEQ ID NO: 223110 - RNA, 20 nt, Homo sapiens
uuaagcacacuugacaucaa

SEQ ID NO: 223111 - RNA, 14 nt, Homo sapiens
gcucucaggccagc

SEQ ID NO: 223112 - RNA, 22 nt, Homo sapiens
ucauaguggcuuaaaacaacac

SEQ ID NO: 223113 - RNA, 16 nt, Homo sapiens
auaaguuaacuuccaa

SEQ ID NO: 223114 - RNA, 15 nt, Homo sapiens
guucugggacacagu

SEQ ID NO: 223115 - RNA, 18 nt, Homo sapiens
auuaagaaagacuaucua

SEQ ID NO: 223116 - RNA, 19 nt, Homo sapiens
acaucuugcucugcugaca

SEQ ID NO: 223117 - RNA, 14 nt, Homo sapiens
ggcuuggggaccag

SEQ ID NO: 223118 - RNA, 16 nt, Homo sapiens
aggcucucaggccagc

SEQ ID NO: 223119 - RNA, 20 nt, Homo sapiens
gugagcaauccugcaagaac

SEQ ID NO: 223120 - RNA, 22 nt, Homo sapiens
agacucgauagugguggugaac

SEQ ID NO: 223121 - RNA, 17 nt, Homo sapiens
uuguuggccaaagccaa

SEQ ID NO: 223122 - RNA, 21 nt, Homo sapiens
cuccacuuucuagccagagga

SEQ ID NO: 223123 - RNA, 20 nt, Homo sapiens
ugggugacagagcaagugag

SEQ ID NO: 223124 - RNA, 23 nt, Homo sapiens
aaugugacuugagcccagaguga

SEQ ID NO: 223125 - RNA, 21 nt, Homo sapiens
ucagugccuuauggaacacuc

SEQ ID NO: 223126 - RNA, 22 nt, Homo sapiens
acuauagccuaggugacagagu

SEQ ID NO: 223127 - RNA, 16 nt, Homo sapiens
ccacaaccgaccagau

SEQ ID NO: 223128 - RNA, 15 nt, Homo sapiens
cuaacuuuccuucau

SEQ ID NO: 223129 - RNA, 23 nt, Homo sapiens
cgccagauucuuuccugaggcug

SEQ ID NO: 223130 - RNA, 18 nt, Homo sapiens
cuacugggggcaacccug

SEQ ID NO: 223131 - RNA, 17 nt, Homo sapiens
ccucuuugagugaagcu

SEQ ID NO: 223132 - RNA, 12 nt, Homo sapiens
cagugugacaag

SEQ ID NO: 223133 - RNA, 19 nt, Homo sapiens
ucauacucaccucacccca

SEQ ID NO: 223134 - RNA, 14 nt, Homo sapiens
gcucugccucccau

SEQ ID NO: 223135 - RNA, 23 nt, Homo sapiens
gauguacuuuaccugaaacaacc

SEQ ID NO: 223136 - RNA, 17 nt, Homo sapiens
aucuugcucugcugaca

SEQ ID NO: 223137 - RNA, 18 nt, Homo sapiens
cacguacacacacauaca

SEQ ID NO: 223138 - RNA, 19 nt, Homo sapiens
ucagcuuguaaauagcuca

SEQ ID NO: 223139 - RNA, 13 nt, Homo sapiens
aaauaacacugua

SEQ ID NO: 223140 - RNA, 17 nt, Homo sapiens
cagacccugcccugugg

SEQ ID NO: 223141 - RNA, 14 nt, Homo sapiens
agcauggcugccaa

SEQ ID NO: 223142 - RNA, 16 nt, Homo sapiens
gaguucaucuugaauu

SEQ ID NO: 223143 - RNA, 16 nt, Homo sapiens
cucuucaaucucuugc

SEQ ID NO: 223144 - RNA, 16 nt, Homo sapiens
cauuucugagaucaaa

SEQ ID NO: 223145 - RNA, 15 nt, Homo sapiens
auacacuuacacuuu

SEQ ID NO: 223146 - RNA, 19 nt, Homo sapiens
cagcuaacauggaaguacu

SEQ ID NO: 223147 - RNA, 17 nt, Homo sapiens
cuucuguccuacucugu

SEQ ID NO: 223148 - RNA, 15 nt, Homo sapiens
gaggugggauccucc

SEQ ID NO: 223149 - RNA, 21 nt, Homo sapiens
cuaaaaggugaccaaugaugg

SEQ ID NO: 223150 - RNA, 20 nt, Homo sapiens
uacaguuacucagaauucuc

SEQ ID NO: 223151 - RNA, 18 nt, Homo sapiens
uugcaggaccucagguga

SEQ ID NO: 223152 - RNA, 13 nt, Homo sapiens
cuacagagcagac

SEQ ID NO: 223153 - RNA, 15 nt, Homo sapiens
ucccacucaguccau

SEQ ID NO: 223154 - RNA, 19 nt, Homo sapiens
caaccaguuugaaccaaga

SEQ ID NO: 223155 - RNA, 19 nt, Homo sapiens
agacaggguuuugccaugu

SEQ ID NO: 223156 - RNA, 23 nt, Homo sapiens
cagcuuuguuuguugucagcuga

SEQ ID NO: 223157 - RNA, 15 nt, Homo sapiens
cauacccuguuacca

SEQ ID NO: 223158 - RNA, 12 nt, Homo sapiens
aagaaacuaccc

SEQ ID NO: 223159 - RNA, 19 nt, Homo sapiens
uuaaggaugcuuguacaua

SEQ ID NO: 223160 - RNA, 20 nt, Homo sapiens
aguuugggguaugggagaga

SEQ ID NO: 223161 - RNA, 18 nt, Homo sapiens
ccgugugugaaauucucu

SEQ ID NO: 223162 - RNA, 16 nt, Homo sapiens
ucucacuguugcccag

SEQ ID NO: 223163 - RNA, 19 nt, Homo sapiens
ugaaaaaauaacacuguac

SEQ ID NO: 223164 - RNA, 16 nt, Homo sapiens
cugcuucaaauauuuc

SEQ ID NO: 223165 - RNA, 21 nt, Homo sapiens
cccuucauccuucuggaauaa

SEQ ID NO: 223166 - RNA, 13 nt, Homo sapiens
cagagcaagugag

SEQ ID NO: 223167 - RNA, 20 nt, Homo sapiens
agcugcuugggcuucauccu

SEQ ID NO: 223168 - RNA, 15 nt, Homo sapiens
ccugggcaaugugau

SEQ ID NO: 223169 - RNA, 19 nt, Homo sapiens
uuagugguuacccaguuag

SEQ ID NO: 223170 - RNA, 16 nt, Homo sapiens
caggugugaaccacca

SEQ ID NO: 223171 - RNA, 15 nt, Homo sapiens
uucgaauccagagag

SEQ ID NO: 223172 - RNA, 19 nt, Homo sapiens
acugaguacguugugcauu

SEQ ID NO: 223173 - RNA, 16 nt, Homo sapiens
ugcagccucaaccucc

SEQ ID NO: 223174 - RNA, 21 nt, Homo sapiens
uucucagaaucucaaauaacu

SEQ ID NO: 223175 - RNA, 22 nt, Homo sapiens
acuuuguuuagcccaaaaccaa

SEQ ID NO: 223176 - RNA, 13 nt, Homo sapiens
aaggauggaccac

SEQ ID NO: 223177 - RNA, 18 nt, Homo sapiens
aagaguaggaagacuuug

SEQ ID NO: 223178 - RNA, 20 nt, Homo sapiens
augaccuugaaugaugccau

SEQ ID NO: 223179 - RNA, 20 nt, Homo sapiens
gggcacagaaaauggaagac

SEQ ID NO: 223180 - RNA, 20 nt, Homo sapiens
aaacucuugaccucagguga

SEQ ID NO: 223181 - RNA, 23 nt, Homo sapiens
acaaagcgugguggacaugcaca

SEQ ID NO: 223182 - RNA, 18 nt, Homo sapiens
gcaccgggccacagagaa

SEQ ID NO: 223183 - RNA, 12 nt, Homo sapiens
agaucacgccac

SEQ ID NO: 223184 - RNA, 15 nt, Homo sapiens
caaaggaagcacaug

SEQ ID NO: 223185 - RNA, 13 nt, Homo sapiens
uaagaaagacuau

SEQ ID NO: 223186 - RNA, 13 nt, Homo sapiens
caucuaugugaga

SEQ ID NO: 223187 - RNA, 13 nt, Homo sapiens
uaaguacuaugua

SEQ ID NO: 223188 - RNA, 22 nt, Homo sapiens
uaaugaaagacuguacaaagua

SEQ ID NO: 223189 - RNA, 23 nt, Homo sapiens
ucggcgccuuaaggauguucuag

SEQ ID NO: 223190 - RNA, 21 nt, Homo sapiens
auaaugcgugcauaccacuuu

SEQ ID NO: 223191 - RNA, 20 nt, Homo sapiens
accuuuaagagaaaugagcu

SEQ ID NO: 223192 - RNA, 21 nt, Homo sapiens
uagacgagcaggcuucuuccc

SEQ ID NO: 223193 - RNA, 15 nt, Homo sapiens
agaaagacuaucuaa

SEQ ID NO: 223194 - RNA, 12 nt, Homo sapiens
ugccgcauuugg

SEQ ID NO: 223195 - RNA, 12 nt, Homo sapiens
uggacacagcuc

SEQ ID NO: 223196 - RNA, 16 nt, Homo sapiens
uauuuaccagaccaca

SEQ ID NO: 223197 - RNA, 15 nt, Homo sapiens
gaacgaagccaccuu

SEQ ID NO: 223198 - RNA, 21 nt, Homo sapiens
acucacacggacacucaaaag

SEQ ID NO: 223199 - RNA, 14 nt, Homo sapiens
gcugggagaaccaa

SEQ ID NO: 223200 - RNA, 20 nt, Homo sapiens
uggucguuuucaacagaauu

SEQ ID NO: 223201 - RNA, 14 nt, Homo sapiens
ucauacucaccuca

SEQ ID NO: 223202 - RNA, 15 nt, Homo sapiens
agagaaggggcccaa

SEQ ID NO: 223203 - RNA, 13 nt, Homo sapiens
agcagaaaugccu

SEQ ID NO: 223204 - RNA, 19 nt, Homo sapiens
ugugugaaauucucuuucc

SEQ ID NO: 223205 - RNA, 17 nt, Homo sapiens
aaggaaagaggcucugg

SEQ ID NO: 223206 - RNA, 23 nt, Homo sapiens
auaacucuacccuggcacuauaa

SEQ ID NO: 223207 - RNA, 15 nt, Homo sapiens
aaaaaucccuuaccu

SEQ ID NO: 223208 - RNA, 22 nt, Homo sapiens
gccaguaaaugggggugcauuu

SEQ ID NO: 223209 - RNA, 14 nt, Homo sapiens
uugugguuaaucug

SEQ ID NO: 223210 - RNA, 23 nt, Homo sapiens
aaaacuuuucuaauacucuaccc

SEQ ID NO: 223211 - RNA, 17 nt, Homo sapiens
gucucacuauguugccc

SEQ ID NO: 223212 - RNA, 16 nt, Homo sapiens
caaugacuuacuguac

SEQ ID NO: 223213 - RNA, 23 nt, Homo sapiens
gagaaaaaauauuuuccugccag

SEQ ID NO: 223214 - RNA, 19 nt, Homo sapiens
cagaaagaccgugugugaa

SEQ ID NO: 223215 - RNA, 14 nt, Homo sapiens
augacaaagacuga

SEQ ID NO: 223216 - RNA, 11 nt, Homo sapiens
agaaugcucuu

SEQ ID NO: 223217 - RNA, 12 nt, Homo sapiens
augccagugugc

SEQ ID NO: 223218 - RNA, 17 nt, Homo sapiens
gauccuaguuccaccau

SEQ ID NO: 223219 - RNA, 13 nt, Homo sapiens
agugggugaauaa

SEQ ID NO: 223220 - RNA, 13 nt, Homo sapiens
ugaaccacaucuu

SEQ ID NO: 223221 - RNA, 20 nt, Homo sapiens
cuggcacugcuuccagugag

SEQ ID NO: 223222 - RNA, 20 nt, Homo sapiens
cuaucaaguauuauaccuuu

SEQ ID NO: 223223 - RNA, 19 nt, Homo sapiens
aguucauacccuguuacca

SEQ ID NO: 223224 - RNA, 12 nt, Homo sapiens
uguaucaugaca

SEQ ID NO: 223225 - RNA, 16 nt, Homo sapiens
aagcugggagaaccaa

SEQ ID NO: 223226 - RNA, 20 nt, Homo sapiens
ccauguaagcaccccuucau

SEQ ID NO: 223227 - RNA, 12 nt, Homo sapiens
cuuugagugaag

SEQ ID NO: 223228 - RNA, 18 nt, Homo sapiens
caaagcgugguggacaug

SEQ ID NO: 223229 - RNA, 11 nt, Homo sapiens
uaugcauuuga

SEQ ID NO: 223230 - RNA, 13 nt, Homo sapiens
cacacugcuugug

SEQ ID NO: 223231 - RNA, 23 nt, Homo sapiens
cuuuccaggaaggcuaaagggaa

SEQ ID NO: 223232 - RNA, 23 nt, Homo sapiens
gauaaaauaaaaagaugaagcug

SEQ ID NO: 223233 - RNA, 17 nt, Homo sapiens
agcaauccugcaagaac

SEQ ID NO: 223234 - RNA, 23 nt, Homo sapiens
acccuggugaccagcaccaucuc

SEQ ID NO: 223235 - RNA, 12 nt, Homo sapiens
aaauucuugaua

SEQ ID NO: 223236 - RNA, 17 nt, Homo sapiens
cagagcugccaccugcc

SEQ ID NO: 223237 - RNA, 15 nt, Homo sapiens
gaaaagcugcugaca

SEQ ID NO: 223238 - RNA, 13 nt, Homo sapiens
gauuaaacuuaau

SEQ ID NO: 223239 - RNA, 17 nt, Homo sapiens
cacuguugcccaggcug

SEQ ID NO: 223240 - RNA, 15 nt, Homo sapiens
acuggaagcacagcu

SEQ ID NO: 223241 - RNA, 13 nt, Homo sapiens
uugagacagaguu

SEQ ID NO: 223242 - RNA, 15 nt, Homo sapiens
ugcauuuggugguuu

SEQ ID NO: 223243 - RNA, 18 nt, Homo sapiens
cacacuugggagcaaaag

SEQ ID NO: 223244 - RNA, 13 nt, Homo sapiens
gauauaugcucug

SEQ ID NO: 223245 - RNA, 16 nt, Homo sapiens
uacaguaucucagggc

SEQ ID NO: 223246 - RNA, 15 nt, Homo sapiens
cugcacuccaugagu

SEQ ID NO: 223247 - RNA, 21 nt, Homo sapiens
uagagacaggguuuugccaug

SEQ ID NO: 223248 - RNA, 22 nt, Homo sapiens
ucugaucauccacugugccaug

SEQ ID NO: 223249 - RNA, 19 nt, Homo sapiens
ucacauuuauucugcucac

SEQ ID NO: 223250 - RNA, 20 nt, Homo sapiens
uaacauguaauuaaguacua

SEQ ID NO: 223251 - RNA, 16 nt, Homo sapiens
ggcccugccuccuuug

SEQ ID NO: 223252 - RNA, 15 nt, Homo sapiens
gaccgugugugaaau

SEQ ID NO: 223253 - RNA, 19 nt, Homo sapiens
aacuagggaagauaauauu

SEQ ID NO: 223254 - RNA, 23 nt, Homo sapiens
aggauauaguuaucaaucucuag

SEQ ID NO: 223255 - RNA, 15 nt, Homo sapiens
auugauaagaaccuu

SEQ ID NO: 223256 - RNA, 23 nt, Homo sapiens
aucaaaucugcuuuuuaaagaau

SEQ ID NO: 223257 - RNA, 18 nt, Homo sapiens
acauuuauucugcucaca

SEQ ID NO: 223258 - RNA, 21 nt, Homo sapiens
cugaucauccacugugccaug

SEQ ID NO: 223259 - RNA, 16 nt, Homo sapiens
ugauucagacagcugc

SEQ ID NO: 223260 - RNA, 14 nt, Homo sapiens
caggcucucaggcc

SEQ ID NO: 223261 - RNA, 23 nt, Homo sapiens
agacagucccugccaauggacua

SEQ ID NO: 223262 - RNA, 22 nt, Homo sapiens
uacucaccucaccccacugugg

SEQ ID NO: 223263 - RNA, 20 nt, Homo sapiens
acuaaugaggaaacugcacu

SEQ ID NO: 223264 - RNA, 23 nt, Homo sapiens
aaaagaugcuucucacugccaug

SEQ ID NO: 223265 - RNA, 19 nt, Homo sapiens
caugucuuuucuugcauga

SEQ ID NO: 223266 - RNA, 23 nt, Homo sapiens
ccuccuccagccgccaugcuccu

SEQ ID NO: 223267 - RNA, 14 nt, Homo sapiens
auacaguaucucag

SEQ ID NO: 223268 - RNA, 20 nt, Homo sapiens
gggaggucaaggcugcagug

SEQ ID NO: 223269 - RNA, 12 nt, Homo sapiens
aggcucucaggc

SEQ ID NO: 223270 - RNA, 19 nt, Homo sapiens
guuuaaaaauccccaaaaa

SEQ ID NO: 223271 - RNA, 21 nt, Homo sapiens
uaguugucacuuuccucuucc

SEQ ID NO: 223272 - RNA, 20 nt, Homo sapiens
cugaagucuuuguacagaca

SEQ ID NO: 223273 - RNA, 14 nt, Homo sapiens
uuugcagacaggca

SEQ ID NO: 223274 - RNA, 20 nt, Homo sapiens
gaacauguuuuucuucuccc

SEQ ID NO: 223275 - RNA, 18 nt, Homo sapiens
gaagucuuuguacagaca

SEQ ID NO: 223276 - RNA, 16 nt, Homo sapiens
acacuugggagcaaaa

SEQ ID NO: 223277 - RNA, 14 nt, Homo sapiens
gucacuuuccucuu

SEQ ID NO: 223278 - RNA, 11 nt, Homo sapiens
aucaccagaca

SEQ ID NO: 223279 - RNA, 20 nt, Homo sapiens
cagagugaacacucuuggua

SEQ ID NO: 223280 - RNA, 22 nt, Homo sapiens
acaguucaauucucauuuguca

SEQ ID NO: 223281 - RNA, 12 nt, Homo sapiens
accaucccugaa

SEQ ID NO: 223282 - RNA, 19 nt, Homo sapiens
agugggugaauaauacagu

SEQ ID NO: 223283 - RNA, 23 nt, Homo sapiens
uugguggcagaguggauucuuga

SEQ ID NO: 223284 - RNA, 18 nt, Homo sapiens
auccagagagcagugugg

SEQ ID NO: 223285 - RNA, 15 nt, Homo sapiens
cccccuuccauggac

SEQ ID NO: 223286 - RNA, 15 nt, Homo sapiens
ucccugccaauggac

SEQ ID NO: 223287 - RNA, 23 nt, Homo sapiens
uaaguacuauguaucaaugagua

SEQ ID NO: 223288 - RNA, 17 nt, Homo sapiens
caaaaaacaacugacca

SEQ ID NO: 223289 - RNA, 19 nt, Homo sapiens
guuaauaaaggaacauuaa

SEQ ID NO: 223290 - RNA, 18 nt, Homo sapiens
gcauccuggcacccggcc

SEQ ID NO: 223291 - RNA, 15 nt, Homo sapiens
uaggcauuugcugaa

SEQ ID NO: 223292 - RNA, 18 nt, Homo sapiens
uccuacucugugucaggu

SEQ ID NO: 223293 - RNA, 16 nt, Homo sapiens
ugugugcacguacaca

SEQ ID NO: 223294 - RNA, 11 nt, Homo sapiens
gaggcuaugug

SEQ ID NO: 223295 - RNA, 22 nt, Homo sapiens
agcagagcaccuuagacagucc

SEQ ID NO: 223296 - RNA, 23 nt, Homo sapiens
ucuaugggacucaaugcacugac

SEQ ID NO: 223297 - RNA, 15 nt, Homo sapiens
guguuuauugucaaa

SEQ ID NO: 223298 - RNA, 20 nt, Homo sapiens
cugugucuuuuuucacuaca

SEQ ID NO: 223299 - RNA, 19 nt, Homo sapiens
gaucccccgccccauccuc

SEQ ID NO: 223300 - RNA, 16 nt, Homo sapiens
ucaaggcugcagugag

SEQ ID NO: 223301 - RNA, 13 nt, Homo sapiens
guuucuccaagca

SEQ ID NO: 223302 - RNA, 21 nt, Homo sapiens
guuucuuuuuucggcuaaaaa

SEQ ID NO: 223303 - RNA, 21 nt, Homo sapiens
cagugguuggcaauuguuuca

SEQ ID NO: 223304 - RNA, 19 nt, Homo sapiens
aacuggguacuuguggaca

SEQ ID NO: 223305 - RNA, 17 nt, Homo sapiens
agugcuuguuccucuca

SEQ ID NO: 223306 - RNA, 21 nt, Homo sapiens
uuguagagccagggucucacu

SEQ ID NO: 223307 - RNA, 17 nt, Homo sapiens
cccauaugccugggcag

SEQ ID NO: 223308 - RNA, 19 nt, Homo sapiens
gacagucccugccaaugga

SEQ ID NO: 223309 - RNA, 15 nt, Homo sapiens
aucacgccacugcac

SEQ ID NO: 223310 - RNA, 17 nt, Homo sapiens
agaucacgccacugcac

SEQ ID NO: 223311 - RNA, 13 nt, Homo sapiens
guaaaaagggaaa

SEQ ID NO: 223312 - RNA, 12 nt, Homo sapiens
aguuuuaugaga

SEQ ID NO: 223313 - RNA, 23 nt, Homo sapiens
ggcccuggccuagcauacguaca

SEQ ID NO: 223314 - RNA, 18 nt, Homo sapiens
gaauaauacaguaucuca

SEQ ID NO: 223315 - RNA, 17 nt, Homo sapiens
gacuacaggcacccacc

SEQ ID NO: 223316 - RNA, 17 nt, Homo sapiens
cugaguacguugugcau

SEQ ID NO: 223317 - RNA, 21 nt, Homo sapiens
ggauugcuacuguccuaccca

SEQ ID NO: 223318 - RNA, 22 nt, Homo sapiens
guuauaauaauguuaacaugga

SEQ ID NO: 223319 - RNA, 14 nt, Homo sapiens
agccuuagaaguca

SEQ ID NO: 223320 - RNA, 18 nt, Homo sapiens
ccacagggugagcacucu

SEQ ID NO: 223321 - RNA, 13 nt, Homo sapiens
agggaaaaaccag

SEQ ID NO: 223322 - RNA, 18 nt, Homo sapiens
uuaacauggacaugaucu

SEQ ID NO: 223323 - RNA, 18 nt, Homo sapiens
aguuggucccccuuccau

SEQ ID NO: 223324 - RNA, 21 nt, Homo sapiens
auuuuguuuuugucuuaaaaa

SEQ ID NO: 223325 - RNA, 19 nt, Homo sapiens
uaagaaaaaggaugcacag

SEQ ID NO: 223326 - RNA, 20 nt, Homo sapiens
uagaauuugggggaaaauuu

SEQ ID NO: 223327 - RNA, 15 nt, Homo sapiens
auguaagcucuacug

SEQ ID NO: 223328 - RNA, 21 nt, Homo sapiens
cgcaaccaccaccaaccacug

SEQ ID NO: 223329 - RNA, 16 nt, Homo sapiens
aggggcccaagagaga

SEQ ID NO: 223330 - RNA, 17 nt, Homo sapiens
cacucuggcagcucaga

SEQ ID NO: 223331 - RNA, 14 nt, Homo sapiens
gccuaggugacaga

SEQ ID NO: 223332 - RNA, 16 nt, Homo sapiens
gacacaggcccggcuc

SEQ ID NO: 223333 - RNA, 14 nt, Homo sapiens
uccacugugccaug

SEQ ID NO: 223334 - RNA, 20 nt, Homo sapiens
ccaguaaaugggggugcauu

SEQ ID NO: 223335 - RNA, 17 nt, Homo sapiens
uacuuguggacacagcu

SEQ ID NO: 223336 - RNA, 21 nt, Homo sapiens
gaauuucccaaagcagugcau

SEQ ID NO: 223337 - RNA, 17 nt, Homo sapiens
cuuuccuguagucccau

SEQ ID NO: 223338 - RNA, 13 nt, Homo sapiens
acagggugagcac

SEQ ID NO: 223339 - RNA, 15 nt, Homo sapiens
cuucauggacuucca

SEQ ID NO: 223340 - RNA, 22 nt, Homo sapiens
uauucuguuggccagugugaca

SEQ ID NO: 223341 - RNA, 18 nt, Homo sapiens
guggugaacagaacaaaa

SEQ ID NO: 223342 - RNA, 11 nt, Homo sapiens
uacauggaaua

SEQ ID NO: 223343 - RNA, 17 nt, Homo sapiens
caggaaaggcuccagga

SEQ ID NO: 223344 - RNA, 19 nt, Homo sapiens
cugccauauucuguuggcc

SEQ ID NO: 223345 - RNA, 13 nt, Homo sapiens
uucaugcugcuua

SEQ ID NO: 223346 - RNA, 15 nt, Homo sapiens
gugagcacaaaggua

SEQ ID NO: 223347 - RNA, 16 nt, Homo sapiens
gcuuucuacccagcga

SEQ ID NO: 223348 - RNA, 18 nt, Homo sapiens
cacuugggagcaaaagau

SEQ ID NO: 223349 - RNA, 19 nt, Homo sapiens
cuguuucugcagccacuau

SEQ ID NO: 223350 - RNA, 16 nt, Homo sapiens
gacauuguuggccaaa

SEQ ID NO: 223351 - RNA, 17 nt, Homo sapiens
agaaaauggaagacagc

SEQ ID NO: 223352 - RNA, 14 nt, Homo sapiens
ucccauuugcuccu

SEQ ID NO: 223353 - RNA, 14 nt, Homo sapiens
aguagagucacugg

SEQ ID NO: 223354 - RNA, 17 nt, Homo sapiens
cgugcacacaccagagc

SEQ ID NO: 223355 - RNA, 22 nt, Homo sapiens
cagccucugaaaaccaauguuc

SEQ ID NO: 223356 - RNA, 14 nt, Homo sapiens
caugugcacaugca

SEQ ID NO: 223357 - RNA, 16 nt, Homo sapiens
uucagugccaaaaaca

SEQ ID NO: 223358 - RNA, 20 nt, Homo sapiens
aacucaaacucuuaaaaccc

SEQ ID NO: 223359 - RNA, 21 nt, Homo sapiens
ucacaggcagguccaggguuu

SEQ ID NO: 223360 - RNA, 20 nt, Homo sapiens
ccuuagcagggaaacagcua

SEQ ID NO: 223361 - RNA, 21 nt, Homo sapiens
aggugcuauguucuuagugga

SEQ ID NO: 223362 - RNA, 14 nt, Homo sapiens
gauccaagcugguc

SEQ ID NO: 223363 - RNA, 17 nt, Homo sapiens
cagaguggauucuugaa

SEQ ID NO: 223364 - RNA, 19 nt, Homo sapiens
cuuuucgcaggauucuucc

SEQ ID NO: 223365 - RNA, 15 nt, Homo sapiens
uggucccccuuccau

SEQ ID NO: 223366 - RNA, 14 nt, Homo sapiens
ccucaggcaggugg

SEQ ID NO: 223367 - RNA, 13 nt, Homo sapiens
caguguacaugga

SEQ ID NO: 223368 - RNA, 20 nt, Homo sapiens
uaagcacacuugacaucaac

SEQ ID NO: 223369 - RNA, 19 nt, Homo sapiens
ucagacagcugccugggau

SEQ ID NO: 223370 - RNA, 22 nt, Homo sapiens
gaaugaaugucagugugacuga

SEQ ID NO: 223371 - RNA, 16 nt, Homo sapiens
gaugagaggaaaucac

SEQ ID NO: 223372 - RNA, 15 nt, Homo sapiens
uaaugauagcuacug

SEQ ID NO: 223373 - RNA, 19 nt, Homo sapiens
acauguaauuaaguacuau

SEQ ID NO: 223374 - RNA, 20 nt, Homo sapiens
uuaugagaaaugccagugug

SEQ ID NO: 223375 - RNA, 21 nt, Homo sapiens
ccucucagauuguaccauuga

SEQ ID NO: 223376 - RNA, 16 nt, Homo sapiens
uagacagagucucacu

SEQ ID NO: 223377 - RNA, 15 nt, Homo sapiens
uacccucuggagaua

SEQ ID NO: 223378 - RNA, 22 nt, Homo sapiens
ggagugggcccaaugcacuuug

SEQ ID NO: 223379 - RNA, 15 nt, Homo sapiens
gaagaacgaagccac

SEQ ID NO: 223380 - RNA, 15 nt, Homo sapiens
aaguuaacuuccaau

SEQ ID NO: 223381 - RNA, 19 nt, Homo sapiens
aagccagcaggcucucagg

SEQ ID NO: 223382 - RNA, 14 nt, Homo sapiens
agacuucaucccuc

SEQ ID NO: 223383 - RNA, 17 nt, Homo sapiens
auguucuuucacccuuu

SEQ ID NO: 223384 - RNA, 23 nt, Homo sapiens
ucugcuuuuuaaagaaugcucuu

SEQ ID NO: 223385 - RNA, 19 nt, Homo sapiens
guagcugggacuacaggca

SEQ ID NO: 223386 - RNA, 14 nt, Homo sapiens
auugauguacuuua

SEQ ID NO: 223387 - RNA, 17 nt, Homo sapiens
cuuucuagccagaggag

SEQ ID NO: 223388 - RNA, 22 nt, Homo sapiens
uuaaaacaacacucacauuuau

SEQ ID NO: 223389 - RNA, 13 nt, Homo sapiens
aagaaacuacccu

SEQ ID NO: 223390 - RNA, 16 nt, Homo sapiens
augaguaacaggaaaa

SEQ ID NO: 223391 - RNA, 14 nt, Homo sapiens
cucuacucuaggga

SEQ ID NO: 223392 - RNA, 18 nt, Homo sapiens
gucuaugggacucaaugc

SEQ ID NO: 223393 - RNA, 15 nt, Homo sapiens
guaaggaauaccugu

SEQ ID NO: 223394 - RNA, 13 nt, Homo sapiens
acaggugugaacc

SEQ ID NO: 223395 - RNA, 15 nt, Homo sapiens
auccucccaccucag

SEQ ID NO: 223396 - RNA, 16 nt, Homo sapiens
caagaccacguuucua

SEQ ID NO: 223397 - RNA, 16 nt, Homo sapiens
uguucucugaggacac

SEQ ID NO: 223398 - RNA, 19 nt, Homo sapiens
uccaaggauggaccacaca

SEQ ID NO: 223399 - RNA, 15 nt, Homo sapiens
aagaagcucucuccu

SEQ ID NO: 223400 - RNA, 17 nt, Homo sapiens
ugccucugccucugaca

SEQ ID NO: 223401 - RNA, 19 nt, Homo sapiens
uuuauuuuuguagagccag

SEQ ID NO: 223402 - RNA, 15 nt, Homo sapiens
auauguggaguucau

SEQ ID NO: 223403 - RNA, 16 nt, Homo sapiens
guacuauguaucaaug

SEQ ID NO: 223404 - RNA, 13 nt, Homo sapiens
uugacaggauuau

SEQ ID NO: 223405 - RNA, 20 nt, Homo sapiens
gcaccacugcacuccagccu

SEQ ID NO: 223406 - RNA, 13 nt, Homo sapiens
uucugcucacaua

SEQ ID NO: 223407 - RNA, 20 nt, Homo sapiens
guagagacaggguuuugcca

SEQ ID NO: 223408 - RNA, 17 nt, Homo sapiens
uaugaucacggcucacu

SEQ ID NO: 223409 - RNA, 22 nt, Homo sapiens
aggggcccaaauucuuucagug

SEQ ID NO: 223410 - RNA, 18 nt, Homo sapiens
ugcuucaaccccaugaga

SEQ ID NO: 223411 - RNA, 18 nt, Homo sapiens
aauuuucacagccaugau

SEQ ID NO: 223412 - RNA, 14 nt, Homo sapiens
uggaauaacaugua

SEQ ID NO: 223413 - RNA, 21 nt, Homo sapiens
aucacaagucagcacuaccuc

SEQ ID NO: 223414 - RNA, 16 nt, Homo sapiens
cacgaauauugcugau

SEQ ID NO: 223415 - RNA, 13 nt, Homo sapiens
cuggcgugcagug

SEQ ID NO: 223416 - RNA, 18 nt, Homo sapiens
ucucuugcacucaaagcu

SEQ ID NO: 223417 - RNA, 20 nt, Homo sapiens
uucccaucuuccaaggguac

SEQ ID NO: 223418 - RNA, 14 nt, Homo sapiens
gagguacgaaaaga

SEQ ID NO: 223419 - RNA, 12 nt, Homo sapiens
agcucaccagcc

SEQ ID NO: 223420 - RNA, 23 nt, Homo sapiens
uucacaguucucuccuucuuccc

SEQ ID NO: 223421 - RNA, 22 nt, Homo sapiens
acguuucuaaaggcuaccuuug

SEQ ID NO: 223422 - RNA, 16 nt, Homo sapiens
aggcccuucucuccag

SEQ ID NO: 223423 - RNA, 18 nt, Homo sapiens
auauugccauuucuucca

SEQ ID NO: 223424 - RNA, 14 nt, Homo sapiens
aauucuacuuugag

SEQ ID NO: 223425 - RNA, 18 nt, Homo sapiens
gauacaggaaaagcugcu

SEQ ID NO: 223426 - RNA, 23 nt, Homo sapiens
gccaagguuuggggaagaacgaa

SEQ ID NO: 223427 - RNA, 22 nt, Homo sapiens
gggaaugaaugucagugugacu

SEQ ID NO: 223428 - RNA, 17 nt, Homo sapiens
uagauguauauauuucc

SEQ ID NO: 223429 - RNA, 22 nt, Homo sapiens
aaccuagccuuagaagucacac

SEQ ID NO: 223430 - RNA, 18 nt, Homo sapiens
cugggauuacaagcguga

SEQ ID NO: 223431 - RNA, 17 nt, Homo sapiens
ucuggcuaugcauuuga

SEQ ID NO: 223432 - RNA, 18 nt, Homo sapiens
aucacuucccuacaugga

SEQ ID NO: 223433 - RNA, 16 nt, Homo sapiens
aagguaugcaaucaaa

SEQ ID NO: 223434 - RNA, 18 nt, Homo sapiens
uuccaaugcuuugauccc

SEQ ID NO: 223435 - RNA, 17 nt, Homo sapiens
cugggacuacaggugug

SEQ ID NO: 223436 - RNA, 19 nt, Homo sapiens
aucauccacugugccaugu

SEQ ID NO: 223437 - RNA, 16 nt, Homo sapiens
cuuauuuaaugaaaga

SEQ ID NO: 223438 - RNA, 21 nt, Homo sapiens
cauaguaugguggcuggguug

SEQ ID NO: 223439 - RNA, 13 nt, Homo sapiens
aaaagcugggcag

SEQ ID NO: 223440 - RNA, 18 nt, Homo sapiens
aaggacacuagaagauuu

SEQ ID NO: 223441 - RNA, 15 nt, Homo sapiens
gucccauugauguac

SEQ ID NO: 223442 - RNA, 20 nt, Homo sapiens
aggugauccacccaccucag

SEQ ID NO: 223443 - RNA, 22 nt, Homo sapiens
agguuuuuggucugacccacug

SEQ ID NO: 223444 - RNA, 17 nt, Homo sapiens
uagccuuagaagucaca

SEQ ID NO: 223445 - RNA, 16 nt, Homo sapiens
augggacucaaugcac

SEQ ID NO: 223446 - RNA, 22 nt, Homo sapiens
uucuuccccccaaaacugauua

SEQ ID NO: 223447 - RNA, 17 nt, Homo sapiens
caugggaaugaauguca

SEQ ID NO: 223448 - RNA, 23 nt, Homo sapiens
guuuuuauggcuuuugugcauua

SEQ ID NO: 223449 - RNA, 16 nt, Homo sapiens
agccuaggugacagag

SEQ ID NO: 223450 - RNA, 19 nt, Homo sapiens
gccaccaacauacucccau

SEQ ID NO: 223451 - RNA, 22 nt, Homo sapiens
cauacacacacacgcgugcaca

SEQ ID NO: 223452 - RNA, 14 nt, Homo sapiens
uggucuacacugug

SEQ ID NO: 223453 - RNA, 21 nt, Homo sapiens
cagacucuacagaggccaugg

SEQ ID NO: 223454 - RNA, 15 nt, Homo sapiens
uuggaauuuugugcc

SEQ ID NO: 223455 - RNA, 18 nt, Homo sapiens
caaaaagaggcuauguga

SEQ ID NO: 223456 - RNA, 20 nt, Homo sapiens
accaugauuaaccacuucag

SEQ ID NO: 223457 - RNA, 23 nt, Homo sapiens
accaugauuaaccacuucagcug

SEQ ID NO: 223458 - RNA, 16 nt, Homo sapiens
aucuaggaagacuuug

SEQ ID NO: 223459 - RNA, 22 nt, Homo sapiens
agaaaguacuucuccacccugc

SEQ ID NO: 223460 - RNA, 17 nt, Homo sapiens
uccaaaguacacuguuu

SEQ ID NO: 223461 - RNA, 13 nt, Homo sapiens
gcugccugggauc

SEQ ID NO: 223462 - RNA, 19 nt, Homo sapiens
ccauuuagcacacugcuug

SEQ ID NO: 223463 - RNA, 17 nt, Homo sapiens
gaagcauuuacuuugug

SEQ ID NO: 223464 - RNA, 18 nt, Homo sapiens
cacaugccucucucaggc

SEQ ID NO: 223465 - RNA, 17 nt, Homo sapiens
aauucucauuugucaca

SEQ ID NO: 223466 - RNA, 20 nt, Homo sapiens
guuacagacaaagcguggug

SEQ ID NO: 223467 - RNA, 16 nt, Homo sapiens
uggacaugcacagcua

SEQ ID NO: 223468 - RNA, 22 nt, Homo sapiens
agugaagcugggagaaccaaaa

SEQ ID NO: 223469 - RNA, 19 nt, Homo sapiens
uccaugauguuuuccauga

SEQ ID NO: 223470 - RNA, 15 nt, Homo sapiens
gugagcacuaaggug

SEQ ID NO: 223471 - RNA, 16 nt, Homo sapiens
aucccuuaccucggug

SEQ ID NO: 223472 - RNA, 21 nt, Homo sapiens
cccacccuccuuucaccacau

SEQ ID NO: 223473 - RNA, 15 nt, Homo sapiens
uggccucaagugauu

SEQ ID NO: 223474 - RNA, 17 nt, Homo sapiens
agcacacuugacaucaa

SEQ ID NO: 223475 - RNA, 18 nt, Homo sapiens
agaauugaaaaaccauuu

SEQ ID NO: 223476 - RNA, 21 nt, Homo sapiens
ccugcaaccugauugugucuc

SEQ ID NO: 223477 - RNA, 11 nt, Homo sapiens
aacuggcugca

SEQ ID NO: 223478 - RNA, 16 nt, Homo sapiens
acuguaauuugugaua

SEQ ID NO: 223479 - RNA, 14 nt, Homo sapiens
gaagacuucauccc

SEQ ID NO: 223480 - RNA, 14 nt, Homo sapiens
ugauuuaaaucagc

SEQ ID NO: 223481 - RNA, 14 nt, Homo sapiens
caaaggaagcacau

SEQ ID NO: 223482 - RNA, 21 nt, Homo sapiens
ugauucuuuugcccacacuug

SEQ ID NO: 223483 - RNA, 15 nt, Homo sapiens
gaccgugaggccaga

SEQ ID NO: 223484 - RNA, 16 nt, Homo sapiens
cucccaggcauucccc

SEQ ID NO: 223485 - RNA, 18 nt, Homo sapiens
uauuucccucaccuuucc

SEQ ID NO: 223486 - RNA, 13 nt, Homo sapiens
auguguguucaug

SEQ ID NO: 223487 - RNA, 19 nt, Homo sapiens
uuucuggcuaugcauuuga

SEQ ID NO: 223488 - RNA, 18 nt, Homo sapiens
gaccuugaaugaugccau

SEQ ID NO: 223489 - RNA, 11 nt, Homo sapiens
cuaugggacuc

SEQ ID NO: 223490 - RNA, 18 nt, Homo sapiens
ccaaggauggaccacaca

SEQ ID NO: 223491 - RNA, 17 nt, Homo sapiens
ggauucuuauggacaau

SEQ ID NO: 223492 - RNA, 14 nt, Homo sapiens
ucccugcaaccuga

SEQ ID NO: 223493 - RNA, 19 nt, Homo sapiens
caaaaaaaggcggugagca

SEQ ID NO: 223494 - RNA, 23 nt, Homo sapiens
acucuauuuuuguaaaaagggaa

SEQ ID NO: 223495 - RNA, 14 nt, Homo sapiens
acuguccuacccac

SEQ ID NO: 223496 - RNA, 22 nt, Homo sapiens
guaagcucuacugaggugcuau

SEQ ID NO: 223497 - RNA, 12 nt, Homo sapiens
cuggggugggag

SEQ ID NO: 223498 - RNA, 22 nt, Homo sapiens
aacgccuguaggaagaaaaagg

SEQ ID NO: 223499 - RNA, 13 nt, Homo sapiens
ggcauccaguauc

SEQ ID NO: 223500 - RNA, 16 nt, Homo sapiens
gcccacuucugccaua

SEQ ID NO: 223501 - RNA, 21 nt, Homo sapiens
caugagccucagcauccuggc

SEQ ID NO: 223502 - RNA, 14 nt, Homo sapiens
gcuaggaacacucc

SEQ ID NO: 223503 - RNA, 23 nt, Homo sapiens
auuacaagcgugagccacugcac

SEQ ID NO: 223504 - RNA, 17 nt, Homo sapiens
cagaaggaagacuucau

SEQ ID NO: 223505 - RNA, 23 nt, Homo sapiens
aggggcccaaauucuuucagugg

SEQ ID NO: 223506 - RNA, 14 nt, Homo sapiens
acgggcucagcaaa

SEQ ID NO: 223507 - RNA, 12 nt, Homo sapiens
ccuggcaagaau

SEQ ID NO: 223508 - RNA, 20 nt, Homo sapiens
acuuuucuuucagccaagaa

SEQ ID NO: 223509 - RNA, 20 nt, Homo sapiens
uacucaccucaccccacugu

SEQ ID NO: 223510 - RNA, 11 nt, Homo sapiens
cuuaccugcca

SEQ ID NO: 223511 - RNA, 20 nt, Homo sapiens
ugugauugacgggacuguug

SEQ ID NO: 223512 - RNA, 22 nt, Homo sapiens
ccugggugacagagcaagugag

SEQ ID NO: 223513 - RNA, 16 nt, Homo sapiens
gccucugcacuccccu

SEQ ID NO: 223514 - RNA, 21 nt, Homo sapiens
cuaaaguguauuuuuuuacua

SEQ ID NO: 223515 - RNA, 16 nt, Homo sapiens
caaggcaaggcuguca

SEQ ID NO: 223516 - RNA, 15 nt, Homo sapiens
ucuacccuggcacua

SEQ ID NO: 223517 - RNA, 23 nt, Homo sapiens
gaucacagccucugaaaaccaau

SEQ ID NO: 223518 - RNA, 13 nt, Homo sapiens
ucucaggccaaac

SEQ ID NO: 223519 - RNA, 14 nt, Homo sapiens
cacaggcccggcuc

SEQ ID NO: 223520 - RNA, 16 nt, Homo sapiens
ccccaggcugggcugu

SEQ ID NO: 223521 - RNA, 12 nt, Homo sapiens
uucaaucucuug

SEQ ID NO: 223522 - RNA, 19 nt, Homo sapiens
cucuggcuaaauucaugcu

SEQ ID NO: 223523 - RNA, 18 nt, Homo sapiens
cauguguguucaugcaca

SEQ ID NO: 223524 - RNA, 18 nt, Homo sapiens
gaauauaacuuuuuccaa

SEQ ID NO: 223525 - RNA, 15 nt, Homo sapiens
augccucucucaggc

SEQ ID NO: 223526 - RNA, 22 nt, Homo sapiens
uucaaccaguuugaaccaagaa

SEQ ID NO: 223527 - RNA, 17 nt, Homo sapiens
ucucauacucaccucac

SEQ ID NO: 223528 - RNA, 20 nt, Homo sapiens
acgugugugcacguacacac

SEQ ID NO: 223529 - RNA, 17 nt, Homo sapiens
cuacucgaguuacagac

SEQ ID NO: 223530 - RNA, 14 nt, Homo sapiens
agcagaaaugccuu

SEQ ID NO: 223531 - RNA, 23 nt, Homo sapiens
acaucuuggucagauuugaacuc

SEQ ID NO: 223532 - RNA, 17 nt, Homo sapiens
gucuaggaaucaugugc

SEQ ID NO: 223533 - RNA, 22 nt, Homo sapiens
aaccacuucagcugacuuuucu

SEQ ID NO: 223534 - RNA, 17 nt, Homo sapiens
ccacauuccugaugcuu

SEQ ID NO: 223535 - RNA, 21 nt, Homo sapiens
aaaauggacguguuaugacuc

SEQ ID NO: 223536 - RNA, 14 nt, Homo sapiens
caggccccugccac

SEQ ID NO: 223537 - RNA, 18 nt, Homo sapiens
gccagcaggcucucaggc

SEQ ID NO: 223538 - RNA, 17 nt, Homo sapiens
uuggagggugucccaaa

SEQ ID NO: 223539 - RNA, 16 nt, Homo sapiens
gucuggaaugcagugg

SEQ ID NO: 223540 - RNA, 21 nt, Homo sapiens
uccucauuagcauuuugcuaa

SEQ ID NO: 223541 - RNA, 20 nt, Homo sapiens
uaaguacuauguaucaauga

SEQ ID NO: 223542 - RNA, 11 nt, Homo sapiens
agccuuccagg

SEQ ID NO: 223543 - RNA, 17 nt, Homo sapiens
ggaagguucuacgccag

SEQ ID NO: 223544 - RNA, 12 nt, Homo sapiens
aacuugggccac

SEQ ID NO: 223545 - RNA, 18 nt, Homo sapiens
gaccucugccugaaguca

SEQ ID NO: 223546 - RNA, 18 nt, Homo sapiens
ugccauauucuguuggcc

SEQ ID NO: 223547 - RNA, 15 nt, Homo sapiens
ucucauuugucacac

SEQ ID NO: 223548 - RNA, 14 nt, Homo sapiens
gaguugaagacaga

SEQ ID NO: 223549 - RNA, 20 nt, Homo sapiens
uacauggaauaacauguaau

SEQ ID NO: 223550 - RNA, 14 nt, Homo sapiens
acagcuaacaugga

SEQ ID NO: 223551 - RNA, 19 nt, Homo sapiens
aaaguuuaaaaagcucaca

SEQ ID NO: 223552 - RNA, 20 nt, Homo sapiens
gaggucaaggcugcagugag

SEQ ID NO: 223553 - RNA, 15 nt, Homo sapiens
auguguguucaugca

SEQ ID NO: 223554 - RNA, 22 nt, Homo sapiens
ucuugaaauauaggaacuuaaa

SEQ ID NO: 223555 - RNA, 19 nt, Homo sapiens
gaccagggauuuccaugau

SEQ ID NO: 223556 - RNA, 14 nt, Homo sapiens
ugggccacugugaa

SEQ ID NO: 223557 - RNA, 23 nt, Homo sapiens
cugcacuauagccuaggugacag

SEQ ID NO: 223558 - RNA, 17 nt, Homo sapiens
ccauguuggccaggcug

SEQ ID NO: 223559 - RNA, 19 nt, Homo sapiens
cagggucucacucugucgc

SEQ ID NO: 223560 - RNA, 19 nt, Homo sapiens
auuuuuguagagccagggu

SEQ ID NO: 223561 - RNA, 21 nt, Homo sapiens
aauucucuuauccaacaucaa

SEQ ID NO: 223562 - RNA, 20 nt, Homo sapiens
uggauuaaacuuaaucuaaa

SEQ ID NO: 223563 - RNA, 14 nt, Homo sapiens
uuccagugaggcuc

SEQ ID NO: 223564 - RNA, 21 nt, Homo sapiens
gcuuccuccugguguggaaga

SEQ ID NO: 223565 - RNA, 20 nt, Homo sapiens
gaccucaggugauccaccca

SEQ ID NO: 223566 - RNA, 17 nt, Homo sapiens
aaagauucuacaaagcu

SEQ ID NO: 223567 - RNA, 23 nt, Homo sapiens
guucaauucucauuugucacaca

SEQ ID NO: 223568 - RNA, 12 nt, Homo sapiens
uaaaugugaaug

SEQ ID NO: 223569 - RNA, 20 nt, Homo sapiens
ccugaagucacacagugagu

SEQ ID NO: 223570 - RNA, 16 nt, Homo sapiens
ggcucucaggccagcu

SEQ ID NO: 223571 - RNA, 20 nt, Homo sapiens
ucugcucacauaucugucau

SEQ ID NO: 223572 - RNA, 12 nt, Homo sapiens
ucuaaagcugcc

SEQ ID NO: 223573 - RNA, 20 nt, Homo sapiens
augagcugcacuccaugagu

SEQ ID NO: 223574 - RNA, 16 nt, Homo sapiens
cccauugauguacuuu

SEQ ID NO: 223575 - RNA, 21 nt, Homo sapiens
aaagcgugguggacaugcaca

SEQ ID NO: 223576 - RNA, 21 nt, Homo sapiens
aaugcccagccccuucugacc

SEQ ID NO: 223577 - RNA, 15 nt, Homo sapiens
cugccugaagucaca

SEQ ID NO: 223578 - RNA, 20 nt, Homo sapiens
gcccuucuaccuuccugcaa

SEQ ID NO: 223579 - RNA, 21 nt, Homo sapiens
augugacuugagcccagagug

SEQ ID NO: 223580 - RNA, 22 nt, Homo sapiens
agacagaguuuucacucuuauu

SEQ ID NO: 223581 - RNA, 21 nt, Homo sapiens
ugaaaaaaaaaaacacaaaaa

SEQ ID NO: 223582 - RNA, 17 nt, Homo sapiens
ucaccacaugugcacau

SEQ ID NO: 223583 - RNA, 20 nt, Homo sapiens
uaggugacagagugagacuc

SEQ ID NO: 223584 - RNA, 16 nt, Homo sapiens
uuggaauuuugugccc

SEQ ID NO: 223585 - RNA, 22 nt, Homo sapiens
ucaaaauaaaaaugagguacuc

SEQ ID NO: 223586 - RNA, 13 nt, Homo sapiens
cucuugcacucaa

SEQ ID NO: 223587 - RNA, 22 nt, Homo sapiens
accauucuccaccugccaggga

SEQ ID NO: 223588 - RNA, 14 nt, Homo sapiens
agccuggacccugu

SEQ ID NO: 223589 - RNA, 19 nt, Homo sapiens
gaauucuuaaauaugugga

SEQ ID NO: 223590 - RNA, 17 nt, Homo sapiens
auagccaaggccaaagg

SEQ ID NO: 223591 - RNA, 20 nt, Homo sapiens
cugaggugggaggaucucuu

SEQ ID NO: 223592 - RNA, 18 nt, Homo sapiens
accagcgugugacuacuc

SEQ ID NO: 223593 - RNA, 18 nt, Homo sapiens
auuauaauuaguuccuca

SEQ ID NO: 223594 - RNA, 13 nt, Homo sapiens
uggucaccaaauc

SEQ ID NO: 223595 - RNA, 20 nt, Homo sapiens
ccagagaggguggugaccuc

SEQ ID NO: 223596 - RNA, 21 nt, Homo sapiens
agcaccuuagacagucccugc

SEQ ID NO: 223597 - RNA, 16 nt, Homo sapiens
agucucuugauucaua

SEQ ID NO: 223598 - RNA, 18 nt, Homo sapiens
gcauaaguuaacuuccaa

SEQ ID NO: 223599 - RNA, 20 nt, Homo sapiens
uaagcucuacugaggugcua

SEQ ID NO: 223600 - RNA, 19 nt, Homo sapiens
cuugauucauaaugacuua

SEQ ID NO: 223601 - RNA, 20 nt, Homo sapiens
ucucacucugucgcccaguc

SEQ ID NO: 223602 - RNA, 15 nt, Homo sapiens
acaaaaaacaacuga

SEQ ID NO: 223603 - RNA, 15 nt, Homo sapiens
gauauaagaaauaca

SEQ ID NO: 223604 - RNA, 14 nt, Homo sapiens
aaucucuugcacuc

SEQ ID NO: 223605 - RNA, 16 nt, Homo sapiens
caguccauagcagaga

SEQ ID NO: 223606 - RNA, 23 nt, Homo sapiens
ugugcauuaucuagauacuguau

SEQ ID NO: 223607 - RNA, 14 nt, Homo sapiens
aacacauacaggaa

SEQ ID NO: 223608 - RNA, 16 nt, Homo sapiens
ugggaggccaaggugg

SEQ ID NO: 223609 - RNA, 17 nt, Homo sapiens
uuaagagaaaugagcug

SEQ ID NO: 223610 - RNA, 14 nt, Homo sapiens
gcuggcgugcagug

SEQ ID NO: 223611 - RNA, 19 nt, Homo sapiens
gauugugcgugcaugugug

SEQ ID NO: 223612 - RNA, 22 nt, Homo sapiens
caucuugcucugcugacagaca

SEQ ID NO: 223613 - RNA, 14 nt, Homo sapiens
cagcaggcucucag

SEQ ID NO: 223614 - RNA, 15 nt, Homo sapiens
agaaaacuguuaaua

SEQ ID NO: 223615 - RNA, 23 nt, Homo sapiens
gacccacggagcccuuaugacau

SEQ ID NO: 223616 - RNA, 14 nt, Homo sapiens
agaagaaacuaccc

SEQ ID NO: 223617 - RNA, 15 nt, Homo sapiens
aagagaaaugagcug

SEQ ID NO: 223618 - RNA, 17 nt, Homo sapiens
agccugcuccagcuguu

SEQ ID NO: 223619 - RNA, 22 nt, Homo sapiens
gggccaguuggucccccuucca

SEQ ID NO: 223620 - RNA, 14 nt, Homo sapiens
uuccccacuugaga

SEQ ID NO: 223621 - RNA, 17 nt, Homo sapiens
agaguaggaagacuuug

SEQ ID NO: 223622 - RNA, 14 nt, Homo sapiens
ugauaaccacuaag

SEQ ID NO: 223623 - RNA, 20 nt, Homo sapiens
gaggcaggaggaucacuuga

SEQ ID NO: 223624 - RNA, 13 nt, Homo sapiens
ccagacccggcug

SEQ ID NO: 223625 - RNA, 13 nt, Homo sapiens
aggaacacuccuu

SEQ ID NO: 223626 - RNA, 19 nt, Homo sapiens
acgcaaccaccaccaacca

SEQ ID NO: 223627 - RNA, 15 nt, Homo sapiens
uuggccagugugaca

SEQ ID NO: 223628 - RNA, 16 nt, Homo sapiens
agagaaaguacuucuc

SEQ ID NO: 223629 - RNA, 19 nt, Homo sapiens
uuccaaacacauacaggaa

SEQ ID NO: 223630 - RNA, 16 nt, Homo sapiens
cauaauuguucuuagu

SEQ ID NO: 223631 - RNA, 16 nt, Homo sapiens
auggaguauaugucaa

SEQ ID NO: 223632 - RNA, 14 nt, Homo sapiens
gaccuucuccuuca

SEQ ID NO: 223633 - RNA, 23 nt, Homo sapiens
aaaguuuuaugagaaaugccagu

SEQ ID NO: 223634 - RNA, 17 nt, Homo sapiens
aaccaccaccaaccacu

SEQ ID NO: 223635 - RNA, 15 nt, Homo sapiens
aaagaggcuauguga

SEQ ID NO: 223636 - RNA, 21 nt, Homo sapiens
aauuaguuccucauuagcauu

SEQ ID NO: 223637 - RNA, 14 nt, Homo sapiens
uaggcauuugcuga

SEQ ID NO: 223638 - RNA, 14 nt, Homo sapiens
ucacgccacugcac

SEQ ID NO: 223639 - RNA, 21 nt, Homo sapiens
cgagcaugccuggauggggcu

SEQ ID NO: 223640 - RNA, 21 nt, Homo sapiens
ucaaccuccugggcuaaguga

SEQ ID NO: 223641 - RNA, 15 nt, Homo sapiens
uagcugggacuacag

SEQ ID NO: 223642 - RNA, 22 nt, Homo sapiens
ggaaggagaggagaggggcaca

SEQ ID NO: 223643 - RNA, 17 nt, Homo sapiens
caaaaagaggcuaugug

SEQ ID NO: 223644 - RNA, 18 nt, Homo sapiens
agauagccaaggccaaag

SEQ ID NO: 223645 - RNA, 14 nt, Homo sapiens
aaauucaugcugcu

SEQ ID NO: 223646 - RNA, 17 nt, Homo sapiens
cagaaucucaaauaacu

SEQ ID NO: 223647 - RNA, 17 nt, Homo sapiens
aaggaagacuucauccc

SEQ ID NO: 223648 - RNA, 15 nt, Homo sapiens
uuucaaccaguuuga

SEQ ID NO: 223649 - RNA, 23 nt, Homo sapiens
gagugggcccaaugcacuuuguu

SEQ ID NO: 223650 - RNA, 16 nt, Homo sapiens
uaacaggcagauacag

SEQ ID NO: 223651 - RNA, 16 nt, Homo sapiens
uuacuuuguguucacc

SEQ ID NO: 223652 - RNA, 21 nt, Homo sapiens
ucuuauccaacaucaacaucu

SEQ ID NO: 223653 - RNA, 14 nt, Homo sapiens
agagaaggggccca

SEQ ID NO: 223654 - RNA, 17 nt, Homo sapiens
cuccacuuucuagccag

SEQ ID NO: 223655 - RNA, 17 nt, Homo sapiens
accaaaucagcugcuac

SEQ ID NO: 223656 - RNA, 17 nt, Homo sapiens
ccuuccaggggugggac

SEQ ID NO: 223657 - RNA, 19 nt, Homo sapiens
auuccuguucccaugagau

SEQ ID NO: 223658 - RNA, 20 nt, Homo sapiens
cggaaugaaccacaucuugc

SEQ ID NO: 223659 - RNA, 13 nt, Homo sapiens
uauauaagccaaa

SEQ ID NO: 223660 - RNA, 16 nt, Homo sapiens
agcccaccuuggcuca

SEQ ID NO: 223661 - RNA, 19 nt, Homo sapiens
agcacuaaggugugcucug

SEQ ID NO: 223662 - RNA, 16 nt, Homo sapiens
aaucucuugcacucaa

SEQ ID NO: 223663 - RNA, 20 nt, Homo sapiens
uuuccuucauucaacccacc

SEQ ID NO: 223664 - RNA, 13 nt, Homo sapiens
agcugaaccuggg

SEQ ID NO: 223665 - RNA, 20 nt, Homo sapiens
uuuccuguagucccauugau

SEQ ID NO: 223666 - RNA, 11 nt, Homo sapiens
cagagcugcca

SEQ ID NO: 223667 - RNA, 23 nt, Homo sapiens
cuucccacuggaggcaugugaug

SEQ ID NO: 223668 - RNA, 17 nt, Homo sapiens
cucuccccagcaaguga

SEQ ID NO: 223669 - RNA, 20 nt, Homo sapiens
accucaggugagaagcagag

SEQ ID NO: 223670 - RNA, 22 nt, Homo sapiens
cuggaugcagccucacaguccu

SEQ ID NO: 223671 - RNA, 19 nt, Homo sapiens
cucauuugucacacacuuu

SEQ ID NO: 223672 - RNA, 22 nt, Homo sapiens
ccuggaugcagccucacagucc

SEQ ID NO: 223673 - RNA, 20 nt, Homo sapiens
caggcugggcuucaguggca

SEQ ID NO: 223674 - RNA, 13 nt, Homo sapiens
ccucaggugaucc

SEQ ID NO: 223675 - RNA, 21 nt, Homo sapiens
ccugcccuuaccugccaggaa

SEQ ID NO: 223676 - RNA, 18 nt, Homo sapiens
uacucgaguuacagacaa

SEQ ID NO: 223677 - RNA, 13 nt, Homo sapiens
ggcuaccuacaua

SEQ ID NO: 223678 - RNA, 13 nt, Homo sapiens
cugugauggggcc

SEQ ID NO: 223679 - RNA, 13 nt, Homo sapiens
agauauaugcucu

SEQ ID NO: 223680 - RNA, 14 nt, Homo sapiens
gaggcaugugauga

SEQ ID NO: 223681 - RNA, 16 nt, Homo sapiens
cagccccagugcccac

SEQ ID NO: 223682 - RNA, 18 nt, Homo sapiens
acaucuugcucugcugac

SEQ ID NO: 223683 - RNA, 12 nt, Homo sapiens
ccaagcucugcu

SEQ ID NO: 223684 - RNA, 15 nt, Homo sapiens
accacaugugcacau

SEQ ID NO: 223685 - RNA, 19 nt, Homo sapiens
gagugggcccaaugcacuu

SEQ ID NO: 223686 - RNA, 16 nt, Homo sapiens
gaagagcuccuugaua

SEQ ID NO: 223687 - RNA, 18 nt, Homo sapiens
auguaucaaugaguaaca

SEQ ID NO: 223688 - RNA, 22 nt, Homo sapiens
ugccuuauggaacacucugaga

SEQ ID NO: 223689 - RNA, 21 nt, Homo sapiens
guaaaugggggugcauuugag

SEQ ID NO: 223690 - RNA, 19 nt, Homo sapiens
ucaccaaaucagcugcuac

SEQ ID NO: 223691 - RNA, 16 nt, Homo sapiens
gcugggauuacaggug

SEQ ID NO: 223692 - RNA, 15 nt, Homo sapiens
cuugcacccaugugu

SEQ ID NO: 223693 - RNA, 21 nt, Homo sapiens
cuuuugagugccuuacacaau

SEQ ID NO: 223694 - RNA, 23 nt, Homo sapiens
uacucccaucugugaaaggaaag

SEQ ID NO: 223695 - RNA, 18 nt, Homo sapiens
ucucaaguuaucagggua

SEQ ID NO: 223696 - RNA, 21 nt, Homo sapiens
acuccagaauuucccaaagca

SEQ ID NO: 223697 - RNA, 15 nt, Homo sapiens
auggagggagaagaa

SEQ ID NO: 223698 - RNA, 16 nt, Homo sapiens
aguaugaggcauuugu

SEQ ID NO: 223699 - RNA, 18 nt, Homo sapiens
uuccucuuuccaucuacc

SEQ ID NO: 223700 - RNA, 14 nt, Homo sapiens
cuacagaggccaug

SEQ ID NO: 223701 - RNA, 20 nt, Homo sapiens
cuggcgugcaguggugcgau

SEQ ID NO: 223702 - RNA, 15 nt, Homo sapiens
ucuggcucuuccagg

SEQ ID NO: 223703 - RNA, 18 nt, Homo sapiens
cucagcaggggaggguag

SEQ ID NO: 223704 - RNA, 11 nt, Homo sapiens
cacuccaugag

SEQ ID NO: 223705 - RNA, 13 nt, Homo sapiens
aaaggaggggaua

SEQ ID NO: 223706 - RNA, 23 nt, Homo sapiens
caccaaaucagcugcuacuacuc

SEQ ID NO: 223707 - RNA, 16 nt, Homo sapiens
accugucccccugaca

SEQ ID NO: 223708 - RNA, 17 nt, Homo sapiens
cgaugcagugcuuccaa

SEQ ID NO: 223709 - RNA, 19 nt, Homo sapiens
aaacugauuacaacugcua

SEQ ID NO: 223710 - RNA, 13 nt, Homo sapiens
ugacuuacuguac

SEQ ID NO: 223711 - RNA, 12 nt, Homo sapiens
acaugugcacau

SEQ ID NO: 223712 - RNA, 13 nt, Homo sapiens
aauugacaggauu

SEQ ID NO: 223713 - RNA, 20 nt, Homo sapiens
ccagccugggugacagagca

SEQ ID NO: 223714 - RNA, 21 nt, Homo sapiens
cuucaaucucuugcacucaaa

SEQ ID NO: 223715 - RNA, 14 nt, Homo sapiens
ucgcgugaugcgca

SEQ ID NO: 223716 - RNA, 22 nt, Homo sapiens
guagagacaggguuuugccaug

SEQ ID NO: 223717 - RNA, 19 nt, Homo sapiens
aagugagacccugucucaa

SEQ ID NO: 223718 - RNA, 18 nt, Homo sapiens
ucucacacaugagcauca

SEQ ID NO: 223719 - RNA, 15 nt, Homo sapiens
ggacagggaggugac

SEQ ID NO: 223720 - RNA, 16 nt, Homo sapiens
aagugagagaggggga

SEQ ID NO: 223721 - RNA, 19 nt, Homo sapiens
gugcugggauuacaggugu

SEQ ID NO: 223722 - RNA, 17 nt, Homo sapiens
uacuaaggaaucuuucu

SEQ ID NO: 223723 - RNA, 22 nt, Homo sapiens
ccucagccucccaaagugcugg

SEQ ID NO: 223724 - RNA, 12 nt, Homo sapiens
acugggggcaac

SEQ ID NO: 223725 - RNA, 22 nt, Homo sapiens
ggcugggggccucagugccacu

SEQ ID NO: 223726 - RNA, 19 nt, Homo sapiens
auuugaacucuucaaucuc

SEQ ID NO: 223727 - RNA, 19 nt, Homo sapiens
cgaaaagaggggaagagac

SEQ ID NO: 223728 - RNA, 17 nt, Homo sapiens
gaucuaggaagacuuug

SEQ ID NO: 223729 - RNA, 22 nt, Homo sapiens
acagccaugauucuuuugccca

SEQ ID NO: 223730 - RNA, 15 nt, Homo sapiens
uguguucaugcacac

SEQ ID NO: 223731 - RNA, 17 nt, Homo sapiens
aauacaguaucucaggg

SEQ ID NO: 223732 - RNA, 21 nt, Homo sapiens
cccagauagcuggcugggugg

SEQ ID NO: 223733 - RNA, 17 nt, Homo sapiens
ggaagggggcugggaca

SEQ ID NO: 223734 - RNA, 15 nt, Homo sapiens
gggagagccuuccag

SEQ ID NO: 223735 - RNA, 11 nt, Homo sapiens
aaugcagagau

SEQ ID NO: 223736 - RNA, 14 nt, Homo sapiens
ucuuuggacccuga

SEQ ID NO: 223737 - RNA, 19 nt, Homo sapiens
uacaggaagguagaaauau

SEQ ID NO: 223738 - RNA, 10 nt, Homo sapiens
ccauggacuu

SEQ ID NO: 223739 - RNA, 14 nt, Homo sapiens
aguaauaugcacac

SEQ ID NO: 223740 - RNA, 17 nt, Homo sapiens
ugcgaucuggguucacu

SEQ ID NO: 223741 - RNA, 17 nt, Homo sapiens
uuaagcacacuugacau

SEQ ID NO: 223742 - RNA, 20 nt, Homo sapiens
uaugcaugaaguaauaugca

SEQ ID NO: 223743 - RNA, 18 nt, Homo sapiens
agagcuacacaggggaaa

SEQ ID NO: 223744 - RNA, 18 nt, Homo sapiens
cgcugugucagcauagaa

SEQ ID NO: 223745 - RNA, 22 nt, Homo sapiens
auuguuuucaguguacauggaa

SEQ ID NO: 223746 - RNA, 18 nt, Homo sapiens
agguaaggaauaccuguc

SEQ ID NO: 223747 - RNA, 12 nt, Homo sapiens
aacguggcugcu

SEQ ID NO: 223748 - RNA, 15 nt, Homo sapiens
agaguugaagacaga

SEQ ID NO: 223749 - RNA, 17 nt, Homo sapiens
uccuucauucaacccac

SEQ ID NO: 223750 - RNA, 16 nt, Homo sapiens
uugcugucccuuuucc

SEQ ID NO: 223751 - RNA, 14 nt, Homo sapiens
ugccuuggggacaa

SEQ ID NO: 223752 - RNA, 20 nt, Homo sapiens
ugguccauagagagcaagac

SEQ ID NO: 223753 - RNA, 20 nt, Homo sapiens
aggcuccaggagcagccaca

SEQ ID NO: 223754 - RNA, 21 nt, Homo sapiens
cauauucaggaagcucagggc

SEQ ID NO: 223755 - RNA, 12 nt, Homo sapiens
acacacagcucu

SEQ ID NO: 223756 - RNA, 22 nt, Homo sapiens
auucuccaccugccagggacag

SEQ ID NO: 223757 - RNA, 22 nt, Homo sapiens
cugggcagaggaaagcaaagga

SEQ ID NO: 223758 - RNA, 13 nt, Homo sapiens
ugugacugaucuc

SEQ ID NO: 223759 - RNA, 18 nt, Homo sapiens
ugcggccuuuggcuucac

SEQ ID NO: 223760 - RNA, 23 nt, Homo sapiens
aacuuuguuuagcccaaaaccaa

SEQ ID NO: 223761 - RNA, 21 nt, Homo sapiens
cacugcaccgggccacagaga

SEQ ID NO: 223762 - RNA, 19 nt, Homo sapiens
ucugcauguuacauaagau

SEQ ID NO: 223763 - RNA, 13 nt, Homo sapiens
cugaagucacaca

SEQ ID NO: 223764 - RNA, 21 nt, Homo sapiens
cucuugagccugggaggucaa

SEQ ID NO: 223765 - RNA, 23 nt, Homo sapiens
cuaagugauccucccaccucagc

SEQ ID NO: 223766 - RNA, 17 nt, Homo sapiens
cuaacuugucuuuggac

SEQ ID NO: 223767 - RNA, 21 nt, Homo sapiens
augaaaccugugucucugaga

SEQ ID NO: 223768 - RNA, 13 nt, Homo sapiens
cugacccacugcu

SEQ ID NO: 223769 - RNA, 19 nt, Homo sapiens
gaugaaaaaauaacacugu

SEQ ID NO: 223770 - RNA, 13 nt, Homo sapiens
uacagacaacaaa

SEQ ID NO: 223771 - RNA, 14 nt, Homo sapiens
augacuuacuguac

SEQ ID NO: 223772 - RNA, 23 nt, Homo sapiens
agaagcccuucuaccuuccugca

SEQ ID NO: 223773 - RNA, 12 nt, Homo sapiens
aaagcagugcau

SEQ ID NO: 223774 - RNA, 18 nt, Homo sapiens
uagcugggacuacaggug

SEQ ID NO: 223775 - RNA, 21 nt, Homo sapiens
acagugagucgaggacaggga

SEQ ID NO: 223776 - RNA, 13 nt, Homo sapiens
uucugggacacag

SEQ ID NO: 223777 - RNA, 22 nt, Homo sapiens
agccccauucugccugcccagg

SEQ ID NO: 223778 - RNA, 21 nt, Homo sapiens
aggacacuagaagauuuugaa

SEQ ID NO: 223779 - RNA, 22 nt, Homo sapiens
uaaguacuauguaucaaugagu

SEQ ID NO: 223780 - RNA, 20 nt, Homo sapiens
agagaauucucuuauccaac

SEQ ID NO: 223781 - RNA, 20 nt, Homo sapiens
aagcugggagaaccaaaaag

SEQ ID NO: 223782 - RNA, 20 nt, Homo sapiens
accauuuagcacacugcuug

SEQ ID NO: 223783 - RNA, 23 nt, Homo sapiens
ccugacaacacucauugaccuga

SEQ ID NO: 223784 - RNA, 20 nt, Homo sapiens
acugcacuccagccugggug

SEQ ID NO: 223785 - RNA, 21 nt, Homo sapiens
aaaucgugacaacacuugugu

SEQ ID NO: 223786 - RNA, 23 nt, Homo sapiens
uucauuuggcauuccccacuuga

SEQ ID NO: 223787 - RNA, 22 nt, Homo sapiens
uacaaaaguuuaaaaagcucac

SEQ ID NO: 223788 - RNA, 15 nt, Homo sapiens
cagccugcuccagcu

SEQ ID NO: 223789 - RNA, 23 nt, Homo sapiens
guguuuccuggcacugcuuccag

SEQ ID NO: 223790 - RNA, 18 nt, Homo sapiens
ccaggcuggcgugcagug

SEQ ID NO: 223791 - RNA, 14 nt, Homo sapiens
gauacccaucccau

SEQ ID NO: 223792 - RNA, 17 nt, Homo sapiens
acacaguauuacuucug

SEQ ID NO: 223793 - RNA, 12 nt, Homo sapiens
aaaaaaaagggg

SEQ ID NO: 223794 - RNA, 21 nt, Homo sapiens
cacuaaggugugcucugauca

SEQ ID NO: 223795 - RNA, 20 nt, Homo sapiens
augccucucucaggccaaac

SEQ ID NO: 223796 - RNA, 21 nt, Homo sapiens
ucuuucagccaagaauucuua

SEQ ID NO: 223797 - RNA, 18 nt, Homo sapiens
gcacucaaagcuuguuaa

SEQ ID NO: 223798 - RNA, 21 nt, Homo sapiens
auauguuuuaagaggcagggu

SEQ ID NO: 223799 - RNA, 13 nt, Homo sapiens
uacaggugugaac

SEQ ID NO: 223800 - RNA, 13 nt, Homo sapiens
gguggaugccugg

SEQ ID NO: 223801 - RNA, 18 nt, Homo sapiens
auuggaaauuuguuauaa

SEQ ID NO: 223802 - RNA, 16 nt, Homo sapiens
gaguaggaagacuuug

SEQ ID NO: 223803 - RNA, 17 nt, Homo sapiens
cucuuauccaacaucaa

SEQ ID NO: 223804 - RNA, 20 nt, Homo sapiens
aauuucccaaagcagugcau

SEQ ID NO: 223805 - RNA, 18 nt, Homo sapiens
uguggaugauaaaacaca

SEQ ID NO: 223806 - RNA, 18 nt, Homo sapiens
uuuaagagaaaugagcug

SEQ ID NO: 223807 - RNA, 14 nt, Homo sapiens
ugggacuacaggca

SEQ ID NO: 223808 - RNA, 22 nt, Homo sapiens
ggcugguuagagguucccuuug

SEQ ID NO: 223809 - RNA, 23 nt, Homo sapiens
cuuucccucccuuccucuuucca

SEQ ID NO: 223810 - RNA, 22 nt, Homo sapiens
uaaaauaaauuuguaugcucaa

SEQ ID NO: 223811 - RNA, 19 nt, Homo sapiens
auuacaggaaguacuggag

SEQ ID NO: 223812 - RNA, 14 nt, Homo sapiens
gccagggucucacu

SEQ ID NO: 223813 - RNA, 19 nt, Homo sapiens
gguuccuaauccucuagga

SEQ ID NO: 223814 - RNA, 13 nt, Homo sapiens
aguugaagacaga

SEQ ID NO: 223815 - RNA, 23 nt, Homo sapiens
augacuccagaauuucccaaagc

SEQ ID NO: 223816 - RNA, 14 nt, Homo sapiens
gcccuuaccugcca

SEQ ID NO: 223817 - RNA, 19 nt, Homo sapiens
agugagucgaggacaggga

SEQ ID NO: 223818 - RNA, 17 nt, Homo sapiens
ccaaagugcugggauua

SEQ ID NO: 223819 - RNA, 18 nt, Homo sapiens
uauggcuuuugugcauua

SEQ ID NO: 223820 - RNA, 16 nt, Homo sapiens
gggcaacccuggugac

SEQ ID NO: 223821 - RNA, 18 nt, Homo sapiens
auacucaccucaccccac

SEQ ID NO: 223822 - RNA, 14 nt, Homo sapiens
acccaccucagccu

SEQ ID NO: 223823 - RNA, 20 nt, Homo sapiens
gaaaagcugcugacaguguu

SEQ ID NO: 223824 - RNA, 18 nt, Homo sapiens
ccugggugugugaagcug

SEQ ID NO: 223825 - RNA, 22 nt, Homo sapiens
gaaaagaggggaagagacuugg

SEQ ID NO: 223826 - RNA, 19 nt, Homo sapiens
agccagcaggcucucaggc

SEQ ID NO: 223827 - RNA, 19 nt, Homo sapiens
uguccggucccugucccag

SEQ ID NO: 223828 - RNA, 20 nt, Homo sapiens
cugagaugggacaggaucaa

SEQ ID NO: 223829 - RNA, 21 nt, Homo sapiens
aacaucuuggucagauuugaa

SEQ ID NO: 223830 - RNA, 18 nt, Homo sapiens
acagacaacaaaccuguu

SEQ ID NO: 223831 - RNA, 20 nt, Homo sapiens
acgcgugcacacaccagagc

SEQ ID NO: 223832 - RNA, 14 nt, Homo sapiens
agagcaguguggaa

SEQ ID NO: 223833 - RNA, 14 nt, Homo sapiens
ucccccuuccaugg

SEQ ID NO: 223834 - RNA, 23 nt, Homo sapiens
ggaagcacaugccucucucaggc

SEQ ID NO: 223835 - RNA, 13 nt, Homo sapiens
aaugcacuuuguu

SEQ ID NO: 223836 - RNA, 18 nt, Homo sapiens
ccaaaggaagcacaugcc

SEQ ID NO: 223837 - RNA, 14 nt, Homo sapiens
ugaagacaaugacu

SEQ ID NO: 223838 - RNA, 23 nt, Homo sapiens
aaauggacguguuaugacuccag

SEQ ID NO: 223839 - RNA, 20 nt, Homo sapiens
uuggggaugagaaagguuga

SEQ ID NO: 223840 - RNA, 17 nt, Homo sapiens
ggaauccagacccggcu

SEQ ID NO: 223841 - RNA, 15 nt, Homo sapiens
gugaaaggaaagagg

SEQ ID NO: 223842 - RNA, 16 nt, Homo sapiens
caccucugcacaagcu

SEQ ID NO: 223843 - RNA, 23 nt, Homo sapiens
accucugccugaagucacacagu

SEQ ID NO: 223844 - RNA, 23 nt, Homo sapiens
agucgaggacagggaggugaccc

SEQ ID NO: 223845 - RNA, 20 nt, Homo sapiens
ccuagcacuuugggaggcca

SEQ ID NO: 223846 - RNA, 20 nt, Homo sapiens
agacucuacagaggccaugg

SEQ ID NO: 223847 - RNA, 16 nt, Homo sapiens
acuguccuacccaccc

SEQ ID NO: 223848 - RNA, 19 nt, Homo sapiens
uuuuuaagugcugcauuua

SEQ ID NO: 223849 - RNA, 22 nt, Homo sapiens
gacuggccaagguuuggggaag

SEQ ID NO: 223850 - RNA, 19 nt, Homo sapiens
cuggccagaugcaccagcc

SEQ ID NO: 223851 - RNA, 14 nt, Homo sapiens
caccacaugugcac

SEQ ID NO: 223852 - RNA, 14 nt, Homo sapiens
aacauggaaguacu

SEQ ID NO: 223853 - RNA, 15 nt, Homo sapiens
aucaagaugugacau

SEQ ID NO: 223854 - RNA, 17 nt, Homo sapiens
auguucucugaggacac

SEQ ID NO: 223855 - RNA, 20 nt, Homo sapiens
auaaugacuuaagcacacuu

SEQ ID NO: 223856 - RNA, 19 nt, Homo sapiens
aaugaggaaacugcacugu

SEQ ID NO: 223857 - RNA, 19 nt, Homo sapiens
gaaugaaugucagugugac

SEQ ID NO: 223858 - RNA, 18 nt, Homo sapiens
ugaucacggcucacugca

SEQ ID NO: 223859 - RNA, 16 nt, Homo sapiens
cacacgcgugcacaca

SEQ ID NO: 223860 - RNA, 19 nt, Homo sapiens
agggagggcuccagacaca

SEQ ID NO: 223861 - RNA, 19 nt, Homo sapiens
accauuuugggguacccac

SEQ ID NO: 223862 - RNA, 20 nt, Homo sapiens
agccacagggugagcacucu

SEQ ID NO: 223863 - RNA, 11 nt, Homo sapiens
agagcugccac

SEQ ID NO: 223864 - RNA, 19 nt, Homo sapiens
aguaacccugucuaaugaa

SEQ ID NO: 223865 - RNA, 21 nt, Homo sapiens
cggccccugcugguucagggu

SEQ ID NO: 223866 - RNA, 15 nt, Homo sapiens
gcaucaagaugugac

SEQ ID NO: 223867 - RNA, 24 nt, Homo sapiens
cuccuuucaccacaugugcacaug

SEQ ID NO: 223868 - RNA, 23 nt, Homo sapiens
ucuacuuugagugcugucuccau

SEQ ID NO: 223869 - RNA, 14 nt, Homo sapiens
uacaagcgugagcc

SEQ ID NO: 223870 - RNA, 22 nt, Homo sapiens
ugcccacacuugggagcaaaag

SEQ ID NO: 223871 - RNA, 18 nt, Homo sapiens
agacaccuugacagggca

SEQ ID NO: 223872 - RNA, 18 nt, Homo sapiens
aauuccaaacacauacag

SEQ ID NO: 223873 - RNA, 21 nt, Homo sapiens
uaaaugugaaugaugauccua

SEQ ID NO: 223874 - RNA, 15 nt, Homo sapiens
accucugcacaagcu

SEQ ID NO: 223875 - RNA, 17 nt, Homo sapiens
auucagcucugcaagaa

SEQ ID NO: 223876 - RNA, 23 nt, Homo sapiens
gaacacuaaugaggaaacugcac

SEQ ID NO: 223877 - RNA, 17 nt, Homo sapiens
aaauacagauagauaua

SEQ ID NO: 223878 - RNA, 19 nt, Homo sapiens
ggccagagggagugacaga

SEQ ID NO: 223879 - RNA, 21 nt, Homo sapiens
ugcuuuuuaaagaaugcucuu

SEQ ID NO: 223880 - RNA, 18 nt, Homo sapiens
ccuggguaacuagggaag

SEQ ID NO: 223881 - RNA, 19 nt, Homo sapiens
ucacaagucagcacuaccu

SEQ ID NO: 223882 - RNA, 22 nt, Homo sapiens
ugagcaauccugcaagaacaag

SEQ ID NO: 223883 - RNA, 18 nt, Homo sapiens
uauucaguaauaacucua

SEQ ID NO: 223884 - RNA, 22 nt, Homo sapiens
acacugugcugagucugaaggc

SEQ ID NO: 223885 - RNA, 13 nt, Homo sapiens
agaaguuucugcc

SEQ ID NO: 223886 - RNA, 19 nt, Homo sapiens
ugcccacgcuggagugcag

SEQ ID NO: 223887 - RNA, 16 nt, Homo sapiens
auguguguucaugcac

SEQ ID NO: 223888 - RNA, 12 nt, Homo sapiens
acuuugauacca

SEQ ID NO: 223889 - RNA, 20 nt, Homo sapiens
acaggaaguacuggagaaaa

SEQ ID NO: 223890 - RNA, 14 nt, Homo sapiens
cugcacuccagccu

SEQ ID NO: 223891 - RNA, 20 nt, Homo sapiens
acugcaucaagaugugacau

SEQ ID NO: 223892 - RNA, 12 nt, Homo sapiens
gacucaaugcac

SEQ ID NO: 223893 - RNA, 15 nt, Homo sapiens
gaggaaagcaaagga

SEQ ID NO: 223894 - RNA, 14 nt, Homo sapiens
ucuuaguuugcagu

SEQ ID NO: 223895 - RNA, 17 nt, Homo sapiens
agucuuuguacagacaa

SEQ ID NO: 223896 - RNA, 15 nt, Homo sapiens
ggaagacaaugugaa

SEQ ID NO: 223897 - RNA, 20 nt, Homo sapiens
caaccccuucgcuccugugu

SEQ ID NO: 223898 - RNA, 21 nt, Homo sapiens
acuggaacacuaaugaggaaa

SEQ ID NO: 223899 - RNA, 18 nt, Homo sapiens
gugauccacccaccucag

SEQ ID NO: 223900 - RNA, 18 nt, Homo sapiens
agugccaaaaacaacaac

SEQ ID NO: 223901 - RNA, 17 nt, Homo sapiens
ugugaaauucucuuucc

SEQ ID NO: 223902 - RNA, 15 nt, Homo sapiens
agaucacgccacugc

SEQ ID NO: 223903 - RNA, 18 nt, Homo sapiens
accuuuuuuauacauaaa

SEQ ID NO: 223904 - RNA, 18 nt, Homo sapiens
aaguacuucuccacccug

SEQ ID NO: 223905 - RNA, 16 nt, Homo sapiens
aguaucccuacuguaa

SEQ ID NO: 223906 - RNA, 21 nt, Homo sapiens
uacucgaguuacagacaaagc

SEQ ID NO: 223907 - RNA, 14 nt, Homo sapiens
ucuucucuacucua

SEQ ID NO: 223908 - RNA, 19 nt, Homo sapiens
gcacuccaugagugcagcu

SEQ ID NO: 223909 - RNA, 19 nt, Homo sapiens
cccaggccuccccagcacc

SEQ ID NO: 223910 - RNA, 22 nt, Homo sapiens
cucuacccucuuagaaaaacca

SEQ ID NO: 223911 - RNA, 14 nt, Homo sapiens
aggauguucuagca

SEQ ID NO: 223912 - RNA, 18 nt, Homo sapiens
uucuugaacaaacuggaa

SEQ ID NO: 223913 - RNA, 12 nt, Homo sapiens
aagguaugcaau

SEQ ID NO: 223914 - RNA, 17 nt, Homo sapiens
ugcacagcuaacaugga

SEQ ID NO: 223915 - RNA, 17 nt, Homo sapiens
cauacucugcuuagaau

SEQ ID NO: 223916 - RNA, 19 nt, Homo sapiens
cucuuucccucccuuccuc

SEQ ID NO: 223917 - RNA, 18 nt, Homo sapiens
ucaccaaaucagcugcua

SEQ ID NO: 223918 - RNA, 16 nt, Homo sapiens
guucagguaacaggca

SEQ ID NO: 223919 - RNA, 15 nt, Homo sapiens
cagguuggugggggc

SEQ ID NO: 223920 - RNA, 16 nt, Homo sapiens
ggauguucugggacac

SEQ ID NO: 223921 - RNA, 12 nt, Homo sapiens
acucugugucag

SEQ ID NO: 223922 - RNA, 20 nt, Homo sapiens
aggugggaggauugcuugag

SEQ ID NO: 223923 - RNA, 15 nt, Homo sapiens
guugaaagaucaaaa

SEQ ID NO: 223924 - RNA, 11 nt, Homo sapiens
acgccacugca

SEQ ID NO: 223925 - RNA, 14 nt, Homo sapiens
cuguucuuucuggc

SEQ ID NO: 223926 - RNA, 15 nt, Homo sapiens
uuguaugagguuuga

SEQ ID NO: 223927 - RNA, 24 nt, Homo sapiens
agcgugcauaaguuaacuuccaau

SEQ ID NO: 223928 - RNA, 13 nt, Homo sapiens
uauaagccaaaaa

SEQ ID NO: 223929 - RNA, 17 nt, Homo sapiens
gaagacaaugacuuacu

SEQ ID NO: 223930 - RNA, 19 nt, Homo sapiens
auuuugcuaaaugugaaug

SEQ ID NO: 223931 - RNA, 22 nt, Homo sapiens
aaugugacuugagcccagagug

SEQ ID NO: 223932 - RNA, 21 nt, Homo sapiens
ucugagacucgcgacaaugca

SEQ ID NO: 223933 - RNA, 16 nt, Homo sapiens
uugggaggccauuugu

SEQ ID NO: 223934 - RNA, 18 nt, Homo sapiens
aagcgugagccacugcac

SEQ ID NO: 223935 - RNA, 15 nt, Homo sapiens
uccacugugccaugu

SEQ ID NO: 223936 - RNA, 18 nt, Homo sapiens
aaagaugaagcugagaug

SEQ ID NO: 223937 - RNA, 19 nt, Homo sapiens
aggcugucaauuacaggaa

SEQ ID NO: 223938 - RNA, 19 nt, Homo sapiens
gagcaaaaucgaugcagug

SEQ ID NO: 223939 - RNA, 13 nt, Homo sapiens
ccuguucccauga

SEQ ID NO: 223940 - RNA, 16 nt, Homo sapiens
cuucaaccccaugaga

SEQ ID NO: 223941 - RNA, 19 nt, Homo sapiens
cacgacugcccggcagggu

SEQ ID NO: 223942 - RNA, 13 nt, Homo sapiens
caccagcagccug

SEQ ID NO: 223943 - RNA, 16 nt, Homo sapiens
gccucucucaggccaa

SEQ ID NO: 223944 - RNA, 14 nt, Homo sapiens
uacaggugugaguc

SEQ ID NO: 223945 - RNA, 21 nt, Homo sapiens
gugaccucugccugaagucac

SEQ ID NO: 223946 - RNA, 16 nt, Homo sapiens
cuccucuccccagcaa

SEQ ID NO: 223947 - RNA, 16 nt, Homo sapiens
uauaauguaagcucua

SEQ ID NO: 223948 - RNA, 16 nt, Homo sapiens
agauguauauauuucc

SEQ ID NO: 223949 - RNA, 17 nt, Homo sapiens
acuggaacacuaaugag

SEQ ID NO: 223950 - RNA, 18 nt, Homo sapiens
gcaaaagcaucuauguga

SEQ ID NO: 223951 - RNA, 19 nt, Homo sapiens
auuuaacagaaauguacag

SEQ ID NO: 223952 - RNA, 16 nt, Homo sapiens
ugguggacaugcacag

SEQ ID NO: 223953 - RNA, 20 nt, Homo sapiens
ucauugaccugaggcccuuc

SEQ ID NO: 223954 - RNA, 15 nt, Homo sapiens
cccaccaucaugucu

SEQ ID NO: 223955 - RNA, 12 nt, Homo sapiens
cagggucucacu

SEQ ID NO: 223956 - RNA, 14 nt, Homo sapiens
auccuagcacuuug

SEQ ID NO: 223957 - RNA, 23 nt, Homo sapiens
cacagcuaacauggaaguacuau

SEQ ID NO: 223958 - RNA, 22 nt, Homo sapiens
ucauaaugacuuaagcacacuu

SEQ ID NO: 223959 - RNA, 22 nt, Homo sapiens
uagccugccucuucucuacucu

SEQ ID NO: 223960 - RNA, 15 nt, Homo sapiens
agaccgugugugaaa

SEQ ID NO: 223961 - RNA, 15 nt, Homo sapiens
ugggauggauuucca

SEQ ID NO: 223962 - RNA, 20 nt, Homo sapiens
cuuggugucgggcaugacac

SEQ ID NO: 223963 - RNA, 20 nt, Homo sapiens
auagauauaugcucugcaug

SEQ ID NO: 223964 - RNA, 20 nt, Homo sapiens
acacauuuuuuaaaugcacc

SEQ ID NO: 223965 - RNA, 18 nt, Homo sapiens
aauccccaaaaaagcgaa

SEQ ID NO: 223966 - RNA, 20 nt, Homo sapiens
agcuugaccgugaggccaga

SEQ ID NO: 223967 - RNA, 13 nt, Homo sapiens
cuaaagcugccag

SEQ ID NO: 223968 - RNA, 18 nt, Homo sapiens
cugccauuucugagauca

SEQ ID NO: 223969 - RNA, 18 nt, Homo sapiens
aguuuuauuuuuguagag

SEQ ID NO: 223970 - RNA, 19 nt, Homo sapiens
cuucuuccccccgcuguca

SEQ ID NO: 223971 - RNA, 22 nt, Homo sapiens
gcucagcaaaagaugcuucuca

SEQ ID NO: 223972 - RNA, 13 nt, Homo sapiens
cuguucccaugag

SEQ ID NO: 223973 - RNA, 13 nt, Homo sapiens
uuauacauuugau

SEQ ID NO: 223974 - RNA, 20 nt, Homo sapiens
ccugaauuucucacaaagga

SEQ ID NO: 223975 - RNA, 20 nt, Homo sapiens
cagacucuacagaggccaug

SEQ ID NO: 223976 - RNA, 15 nt, Homo sapiens
accaccaccaucacc

SEQ ID NO: 223977 - RNA, 15 nt, Homo sapiens
gccucucccaucacu

SEQ ID NO: 223978 - RNA, 20 nt, Homo sapiens
ucucaaacucuugaccucag

SEQ ID NO: 223979 - RNA, 11 nt, Homo sapiens
aaagcugccag

SEQ ID NO: 223980 - RNA, 12 nt, Homo sapiens
ugggcagaggaa

SEQ ID NO: 223981 - RNA, 20 nt, Homo sapiens
ccaggcuggcgugcaguggu

SEQ ID NO: 223982 - RNA, 21 nt, Homo sapiens
uuugucauauaagauucauau

SEQ ID NO: 223983 - RNA, 18 nt, Homo sapiens
uugucacuuuccucuucc

SEQ ID NO: 223984 - RNA, 20 nt, Homo sapiens
gaccuucuccuucaccuuug

SEQ ID NO: 223985 - RNA, 17 nt, Homo sapiens
cauguuuuucuucuccc

SEQ ID NO: 223986 - RNA, 12 nt, Homo sapiens
ugguggcagcuc

SEQ ID NO: 223987 - RNA, 21 nt, Homo sapiens
guacacuguuucaaacuuuac

SEQ ID NO: 223988 - RNA, 12 nt, Homo sapiens
gcaggaccucag

SEQ ID NO: 223989 - RNA, 21 nt, Homo sapiens
gacuugagcccagagugaaca

SEQ ID NO: 223990 - RNA, 18 nt, Homo sapiens
gucacuuuccucuuccac

SEQ ID NO: 223991 - RNA, 19 nt, Homo sapiens
cucugagacucgcgacaau

SEQ ID NO: 223992 - RNA, 15 nt, Homo sapiens
uuggauuguccccga

SEQ ID NO: 223993 - RNA, 16 nt, Homo sapiens
ggaaaggcuccaggag

SEQ ID NO: 223994 - RNA, 19 nt, Homo sapiens
gaccuuuaagagaaaugag

SEQ ID NO: 223995 - RNA, 23 nt, Homo sapiens
agacuuuuccaacccucaucacc

SEQ ID NO: 223996 - RNA, 18 nt, Homo sapiens
gcccaguuggguggaugc

SEQ ID NO: 223997 - RNA, 18 nt, Homo sapiens
cucaggaguuugagacca

SEQ ID NO: 223998 - RNA, 22 nt, Homo sapiens
ucuuucagccaagaauucuuaa

SEQ ID NO: 223999 - RNA, 16 nt, Homo sapiens
uacaggugugagucac

SEQ ID NO: 224000 - RNA, 23 nt, Homo sapiens
uucugacccaugcugcccuguga

SEQ ID NO: 224001 - RNA, 16 nt, Homo sapiens
ugcaggaccucaggug

SEQ ID NO: 224002 - RNA, 17 nt, Homo sapiens
ucuguccuacucugugu

SEQ ID NO: 224003 - RNA, 16 nt, Homo sapiens
gccuggucguuuucaa

SEQ ID NO: 224004 - RNA, 16 nt, Homo sapiens
cuaguugucacuuucc

SEQ ID NO: 224005 - RNA, 20 nt, Homo sapiens
ugggugucaagagggucuga

SEQ ID NO: 224006 - RNA, 16 nt, Homo sapiens
guucaugcacacuugc

SEQ ID NO: 224007 - RNA, 17 nt, Homo sapiens
gagucucacuguugccc

SEQ ID NO: 224008 - RNA, 17 nt, Homo sapiens
uuaucagaauucucaga

SEQ ID NO: 224009 - RNA, 16 nt, Homo sapiens
gcuaugugagcacaaa

SEQ ID NO: 224010 - RNA, 23 nt, Homo sapiens
gugaagacaaugacuuacuguac

SEQ ID NO: 224011 - RNA, 19 nt, Homo sapiens
cuugcuucaaccccaugag

SEQ ID NO: 224012 - RNA, 16 nt, Homo sapiens
acacucuugguagaag

SEQ ID NO: 224013 - RNA, 17 nt, Homo sapiens
aaugaggaaacugcacu

SEQ ID NO: 224014 - RNA, 19 nt, Homo sapiens
aguugaugaaauaucaaga

SEQ ID NO: 224015 - RNA, 17 nt, Homo sapiens
uguucaugcacacuugc

SEQ ID NO: 224016 - RNA, 20 nt, Homo sapiens
gcagccucacaguccuuacc

SEQ ID NO: 224017 - RNA, 17 nt, Homo sapiens
uauacauaaacaagacc

SEQ ID NO: 224018 - RNA, 13 nt, Homo sapiens
acaucaacugcau

SEQ ID NO: 224019 - RNA, 19 nt, Homo sapiens
acccucuggagauaaaaua

SEQ ID NO: 224020 - RNA, 17 nt, Homo sapiens
auucgcugugucagcau

SEQ ID NO: 224021 - RNA, 17 nt, Homo sapiens
cauucuccuuguguuac

SEQ ID NO: 224022 - RNA, 14 nt, Homo sapiens
uagaaauuccccac

SEQ ID NO: 224023 - RNA, 23 nt, Homo sapiens
gcaggcuucuuccccccaaaacu

SEQ ID NO: 224024 - RNA, 18 nt, Homo sapiens
gacccaugcugcccugug

SEQ ID NO: 224025 - RNA, 21 nt, Homo sapiens
cauuuaggugaggaagcaaaa

SEQ ID NO: 224026 - RNA, 13 nt, Homo sapiens
cuuuggacacuca

SEQ ID NO: 224027 - RNA, 16 nt, Homo sapiens
gguuucuaaagcugcc

SEQ ID NO: 224028 - RNA, 15 nt, Homo sapiens
uuagacagucccugc

SEQ ID NO: 224029 - RNA, 16 nt, Homo sapiens
uaaaacccaagugccu

SEQ ID NO: 224030 - RNA, 13 nt, Homo sapiens
aaugcaccuggaa

SEQ ID NO: 224031 - RNA, 16 nt, Homo sapiens
ggccuggccagaugca

SEQ ID NO: 224032 - RNA, 19 nt, Homo sapiens
uaacaccaugauuaaccac

SEQ ID NO: 224033 - RNA, 18 nt, Homo sapiens
uggguacuuguggacaca

SEQ ID NO: 224034 - RNA, 15 nt, Homo sapiens
acuuuccucuuccac

SEQ ID NO: 224035 - RNA, 17 nt, Homo sapiens
acuaaggugugcucuga

SEQ ID NO: 224036 - RNA, 19 nt, Homo sapiens
ugauccuaggcauuugcug

SEQ ID NO: 224037 - RNA, 14 nt, Homo sapiens
agcucuacugaggu

SEQ ID NO: 224038 - RNA, 20 nt, Homo sapiens
ucuuugcagacaggcaagca

SEQ ID NO: 224039 - RNA, 18 nt, Homo sapiens
gaaagaccgugugugaaa

SEQ ID NO: 224040 - RNA, 22 nt, Homo sapiens
ccacaagacccuugugguccca

SEQ ID NO: 224041 - RNA, 16 nt, Homo sapiens
caaugcuuugaucccu

SEQ ID NO: 224042 - RNA, 19 nt, Homo sapiens
cuccgcuuucuacccagcg

SEQ ID NO: 224043 - RNA, 16 nt, Homo sapiens
agaucucuaacuucac

SEQ ID NO: 224044 - RNA, 17 nt, Homo sapiens
gagaaaugccagugugc

SEQ ID NO: 224045 - RNA, 16 nt, Homo sapiens
ccagacacauguccaa

SEQ ID NO: 224046 - RNA, 18 nt, Homo sapiens
caccaucaccagacaggu

SEQ ID NO: 224047 - RNA, 16 nt, Homo sapiens
gaguuacagacaaagc

SEQ ID NO: 224048 - RNA, 12 nt, Homo sapiens
cuaugggacuca

SEQ ID NO: 224049 - RNA, 21 nt, Homo sapiens
gcaugacacgaauauugcuga

SEQ ID NO: 224050 - RNA, 20 nt, Homo sapiens
cuugaccucaggugauccac

SEQ ID NO: 224051 - RNA, 18 nt, Homo sapiens
agcaggcucucaggccag

SEQ ID NO: 224052 - RNA, 22 nt, Homo sapiens
gaaaaucgugacaacacuugug

SEQ ID NO: 224053 - RNA, 14 nt, Homo sapiens
uaauuaguuccuca

SEQ ID NO: 224054 - RNA, 22 nt, Homo sapiens
uaugaggcauuuguuugaacug

SEQ ID NO: 224055 - RNA, 17 nt, Homo sapiens
aauccagagagcagugu

SEQ ID NO: 224056 - RNA, 13 nt, Homo sapiens
agcgugagccacu

SEQ ID NO: 224057 - RNA, 19 nt, Homo sapiens
cacgugguccuaaucuucu

SEQ ID NO: 224058 - RNA, 14 nt, Homo sapiens
ccuuagacaguccc

SEQ ID NO: 224059 - RNA, 21 nt, Homo sapiens
gcacccccggcccagugcccc

SEQ ID NO: 224060 - RNA, 17 nt, Homo sapiens
aucagccugcuccagcu

SEQ ID NO: 224061 - RNA, 14 nt, Homo sapiens
aaagcaugugagac

SEQ ID NO: 224062 - RNA, 16 nt, Homo sapiens
ucaacaccucugcaca

SEQ ID NO: 224063 - RNA, 17 nt, Homo sapiens
cucacauaucugucauu

SEQ ID NO: 224064 - RNA, 21 nt, Homo sapiens
aagcacaugccucucucaggc

SEQ ID NO: 224065 - RNA, 22 nt, Homo sapiens
agcuacuguuuauuauuuuauu

SEQ ID NO: 224066 - RNA, 19 nt, Homo sapiens
gcacugggcuuggggacca

SEQ ID NO: 224067 - RNA, 21 nt, Homo sapiens
uaggcauuugcugaauacaga

SEQ ID NO: 224068 - RNA, 16 nt, Homo sapiens
accaguuguugauaac

SEQ ID NO: 224069 - RNA, 16 nt, Homo sapiens
acuugagaauuacccu

SEQ ID NO: 224070 - RNA, 11 nt, Homo sapiens
cgaguuacaga

SEQ ID NO: 224071 - RNA, 19 nt, Homo sapiens
cuggugaccagcaccaucu

SEQ ID NO: 224072 - RNA, 21 nt, Homo sapiens
gaaaacaugcuacacacugca

SEQ ID NO: 224073 - RNA, 11 nt, Homo sapiens
ggccaguguga

SEQ ID NO: 224074 - RNA, 19 nt, Homo sapiens
gcauuuggugguuucagaa

SEQ ID NO: 224075 - RNA, 14 nt, Homo sapiens
uguuuucucuugag

SEQ ID NO: 224076 - RNA, 23 nt, Homo sapiens
ggauguucuagcauggcugccaa

SEQ ID NO: 224077 - RNA, 16 nt, Homo sapiens
acacucaaaagcuggg

SEQ ID NO: 224078 - RNA, 20 nt, Homo sapiens
cagagaauucucuuauccaa

SEQ ID NO: 224079 - RNA, 18 nt, Homo sapiens
aggggagaguaacccugu

SEQ ID NO: 224080 - RNA, 18 nt, Homo sapiens
ggggaagaaaaacucuau

SEQ ID NO: 224081 - RNA, 21 nt, Homo sapiens
ccacaucuugcucugcugaca

SEQ ID NO: 224082 - RNA, 16 nt, Homo sapiens
auuccccacccugaaa

SEQ ID NO: 224083 - RNA, 18 nt, Homo sapiens
auucuguuggccagugug

SEQ ID NO: 224084 - RNA, 18 nt, Homo sapiens
ugaaugaugccaugagga

SEQ ID NO: 224085 - RNA, 16 nt, Homo sapiens
ucuuuugagcauuuag

SEQ ID NO: 224086 - RNA, 17 nt, Homo sapiens
cuucaaccccaugagac

SEQ ID NO: 224087 - RNA, 18 nt, Homo sapiens
aggccuggccagaugcac

SEQ ID NO: 224088 - RNA, 13 nt, Homo sapiens
ugcccacacuugg

SEQ ID NO: 224089 - RNA, 19 nt, Homo sapiens
aagacuuuggaaagacuuu

SEQ ID NO: 224090 - RNA, 18 nt, Homo sapiens
uccuaggcauuugcugaa

SEQ ID NO: 224091 - RNA, 14 nt, Homo sapiens
cucugugucaggug

SEQ ID NO: 224092 - RNA, 17 nt, Homo sapiens
cacaugugcacaugcac

SEQ ID NO: 224093 - RNA, 18 nt, Homo sapiens
agccuaggugacagagug

SEQ ID NO: 224094 - RNA, 22 nt, Homo sapiens
aucuuccaaggguacuaaggaa

SEQ ID NO: 224095 - RNA, 16 nt, Homo sapiens
aucauaaaacuugaug

SEQ ID NO: 224096 - RNA, 13 nt, Homo sapiens
uugaacaaacugg

SEQ ID NO: 224097 - RNA, 21 nt, Homo sapiens
gccgagauagccaaggccaaa

SEQ ID NO: 224098 - RNA, 19 nt, Homo sapiens
uacucgaguuacagacaaa

SEQ ID NO: 224099 - RNA, 17 nt, Homo sapiens
ucuugauucauaaugac

SEQ ID NO: 224100 - RNA, 23 nt, Homo sapiens
uucauuuaggugaggaagcaaaa

SEQ ID NO: 224101 - RNA, 16 nt, Homo sapiens
cugucaauuacaggaa

SEQ ID NO: 224102 - RNA, 23 nt, Homo sapiens
caucuugcucugcugacagacac

SEQ ID NO: 224103 - RNA, 22 nt, Homo sapiens
aguuuuuauggcuuuugugcau

SEQ ID NO: 224104 - RNA, 21 nt, Homo sapiens
uuaccugccaggaagccagca

SEQ ID NO: 224105 - RNA, 15 nt, Homo sapiens
acugccaugccagcu

SEQ ID NO: 224106 - RNA, 17 nt, Homo sapiens
gcugauggugcaaugac

SEQ ID NO: 224107 - RNA, 17 nt, Homo sapiens
cccacuguggcugauuu

SEQ ID NO: 224108 - RNA, 17 nt, Homo sapiens
gccacagggugagcacu

SEQ ID NO: 224109 - RNA, 18 nt, Homo sapiens
aauaaauuuguaugcuca

SEQ ID NO: 224110 - RNA, 18 nt, Homo sapiens
aauacagauauaagaaau

SEQ ID NO: 224111 - RNA, 21 nt, Homo sapiens
caugggaaugaaugucagugu

SEQ ID NO: 224112 - RNA, 15 nt, Homo sapiens
aacuuccaauuuaca

SEQ ID NO: 224113 - RNA, 17 nt, Homo sapiens
agagaggguggugaccu

SEQ ID NO: 224114 - RNA, 22 nt, Homo sapiens
aacugcaucaagaugugacaug

SEQ ID NO: 224115 - RNA, 9 nt, Homo sapiens
augcacaaa

SEQ ID NO: 224116 - RNA, 13 nt, Homo sapiens
aagacuucauccc

SEQ ID NO: 224117 - RNA, 15 nt, Homo sapiens
gcuucaguggcagcu

SEQ ID NO: 224118 - RNA, 16 nt, Homo sapiens
aaaaaggaugcacaga

SEQ ID NO: 224119 - RNA, 22 nt, Homo sapiens
gacagccacggccaggccagag

SEQ ID NO: 224120 - RNA, 17 nt, Homo sapiens
auuagccaaguguggua

SEQ ID NO: 224121 - RNA, 16 nt, Homo sapiens
auagugucccacggug

SEQ ID NO: 224122 - RNA, 14 nt, Homo sapiens
aagaaagacuaucu

SEQ ID NO: 224123 - RNA, 18 nt, Homo sapiens
gauuaauuaaaacacaac

SEQ ID NO: 224124 - RNA, 17 nt, Homo sapiens
ggccuggucguuuucaa

SEQ ID NO: 224125 - RNA, 16 nt, Homo sapiens
gauccucccaccucag

SEQ ID NO: 224126 - RNA, 20 nt, Homo sapiens
ucuguggucuaaacaaaaaa

SEQ ID NO: 224127 - RNA, 15 nt, Homo sapiens
cagaaucucaaauaa

SEQ ID NO: 224128 - RNA, 13 nt, Homo sapiens
ccagaugccaggg

SEQ ID NO: 224129 - RNA, 17 nt, Homo sapiens
gcaauccugcaagaaca

SEQ ID NO: 224130 - RNA, 17 nt, Homo sapiens
acccugcucuccgacca

SEQ ID NO: 224131 - RNA, 19 nt, Homo sapiens
acuccuguaggaagguuaa

SEQ ID NO: 224132 - RNA, 13 nt, Homo sapiens
aagcacacuugac

SEQ ID NO: 224133 - RNA, 17 nt, Homo sapiens
uagcugggacuacaggc

SEQ ID NO: 224134 - RNA, 19 nt, Homo sapiens
aagcacaugccucucucag

SEQ ID NO: 224135 - RNA, 15 nt, Homo sapiens
agauaauacaccacu

SEQ ID NO: 224136 - RNA, 18 nt, Homo sapiens
cuccccagcaagugagag

SEQ ID NO: 224137 - RNA, 21 nt, Homo sapiens
uaacuaaaagguaugcaauca

SEQ ID NO: 224138 - RNA, 19 nt, Homo sapiens
acaggauuauuggaaauuu

SEQ ID NO: 224139 - RNA, 15 nt, Homo sapiens
gcauguuugugauug

SEQ ID NO: 224140 - RNA, 12 nt, Homo sapiens
agacaaugacuu

SEQ ID NO: 224141 - RNA, 18 nt, Homo sapiens
uacuucuuauacauuuga

SEQ ID NO: 224142 - RNA, 13 nt, Homo sapiens
agcuguucagcug

SEQ ID NO: 224143 - RNA, 19 nt, Homo sapiens
aaagcgugguggacaugca

SEQ ID NO: 224144 - RNA, 23 nt, Homo sapiens
cgaauuuucacagccaugauucu

SEQ ID NO: 224145 - RNA, 14 nt, Homo sapiens
agaacuuuccagga

SEQ ID NO: 224146 - RNA, 17 nt, Homo sapiens
uuaugacuccagaauuu

SEQ ID NO: 224147 - RNA, 14 nt, Homo sapiens
uaugugagcacaaa

SEQ ID NO: 224148 - RNA, 14 nt, Homo sapiens
gccugguggcagcu

SEQ ID NO: 224149 - RNA, 15 nt, Homo sapiens
acugcuuuuggucug

SEQ ID NO: 224150 - RNA, 21 nt, Homo sapiens
gaagccagcaggcucucaggc

SEQ ID NO: 224151 - RNA, 21 nt, Homo sapiens
aggcuucuuccccccaaaacu

SEQ ID NO: 224152 - RNA, 23 nt, Homo sapiens
acauuuuuaagugcugcauuuaa

SEQ ID NO: 224153 - RNA, 23 nt, Homo sapiens
caaagcgugguggacaugcacag

SEQ ID NO: 224154 - RNA, 16 nt, Homo sapiens
aucacagccucugaaa

SEQ ID NO: 224155 - RNA, 16 nt, Homo sapiens
gacacauguccaagaa

SEQ ID NO: 224156 - RNA, 12 nt, Homo sapiens
uagauacuguau

SEQ ID NO: 224157 - RNA, 22 nt, Homo sapiens
auucauauuuacuucuuauaca

SEQ ID NO: 224158 - RNA, 15 nt, Homo sapiens
ugagugggugaauaa

SEQ ID NO: 224159 - RNA, 19 nt, Homo sapiens
ggccgggcgcgguggcuca

SEQ ID NO: 224160 - RNA, 19 nt, Homo sapiens
gaucagccugggcaaugug

SEQ ID NO: 224161 - RNA, 23 nt, Homo sapiens
gugaagcugggagaaccaaaaag

SEQ ID NO: 224162 - RNA, 18 nt, Homo sapiens
gcaugaaguaauaugcac

SEQ ID NO: 224163 - RNA, 17 nt, Homo sapiens
ugaggaaacugcacugu

SEQ ID NO: 224164 - RNA, 16 nt, Homo sapiens
gaauuuuuacugggga

SEQ ID NO: 224165 - RNA, 15 nt, Homo sapiens
gaaagugaccauguu

SEQ ID NO: 224166 - RNA, 16 nt, Homo sapiens
uaacauggaaguacua

SEQ ID NO: 224167 - RNA, 14 nt, Homo sapiens
agagucacuggaac

SEQ ID NO: 224168 - RNA, 12 nt, Homo sapiens
agagccuuccag

SEQ ID NO: 224169 - RNA, 15 nt, Homo sapiens
caggcauguucucug

SEQ ID NO: 224170 - RNA, 18 nt, Homo sapiens
cugcagagggcacagaaa

SEQ ID NO: 224171 - RNA, 14 nt, Homo sapiens
guaugguaggguaa

SEQ ID NO: 224172 - RNA, 17 nt, Homo sapiens
ucucaacugagugagca

SEQ ID NO: 224173 - RNA, 19 nt, Homo sapiens
gaccaguuguugauaacca

SEQ ID NO: 224174 - RNA, 15 nt, Homo sapiens
ucaguguacauggaa

SEQ ID NO: 224175 - RNA, 14 nt, Homo sapiens
auggauuuccagcc

SEQ ID NO: 224176 - RNA, 20 nt, Homo sapiens
aagagggagggagggcucca

SEQ ID NO: 224177 - RNA, 17 nt, Homo sapiens
accucugccugaaguca

SEQ ID NO: 224178 - RNA, 21 nt, Homo sapiens
cagggucucacuauguugccc

SEQ ID NO: 224179 - RNA, 17 nt, Homo sapiens
cugcuuccagugaggcu

SEQ ID NO: 224180 - RNA, 20 nt, Homo sapiens
ugcccacgcuggagugcagu

SEQ ID NO: 224181 - RNA, 17 nt, Homo sapiens
gaauuucucacaaagga

SEQ ID NO: 224182 - RNA, 16 nt, Homo sapiens
auuaaccacuucagcu

SEQ ID NO: 224183 - RNA, 20 nt, Homo sapiens
uugaaauauaggaacuuaaa

SEQ ID NO: 224184 - RNA, 15 nt, Homo sapiens
aggucauugguggca

SEQ ID NO: 224185 - RNA, 16 nt, Homo sapiens
ugacagacacaggccc

SEQ ID NO: 224186 - RNA, 14 nt, Homo sapiens
guauuauaccuuuu

SEQ ID NO: 224187 - RNA, 20 nt, Homo sapiens
cuuuaagagaaaugagcugc

SEQ ID NO: 224188 - RNA, 17 nt, Homo sapiens
gcccaggcaggucuuga

SEQ ID NO: 224189 - RNA, 19 nt, Homo sapiens
uguuucugcagccacuauu

SEQ ID NO: 224190 - RNA, 21 nt, Homo sapiens
gcuuauacacuuacacuuuau

SEQ ID NO: 224191 - RNA, 16 nt, Homo sapiens
agcaccauaacuuugu

SEQ ID NO: 224192 - RNA, 17 nt, Homo sapiens
guggugagaggcaucca

SEQ ID NO: 224193 - RNA, 15 nt, Homo sapiens
auggcuuuugugcau

SEQ ID NO: 224194 - RNA, 20 nt, Homo sapiens
cucuacccuggcacuauaau

SEQ ID NO: 224195 - RNA, 23 nt, Homo sapiens
auuagccaagugugguagagugu

SEQ ID NO: 224196 - RNA, 13 nt, Homo sapiens
ccagagcugccac

SEQ ID NO: 224197 - RNA, 15 nt, Homo sapiens
cuuagugugugcaau

SEQ ID NO: 224198 - RNA, 14 nt, Homo sapiens
cagagauggccaug

SEQ ID NO: 224199 - RNA, 11 nt, Homo sapiens
caagcucugcu

SEQ ID NO: 224200 - RNA, 15 nt, Homo sapiens
ugccugaagucacac

SEQ ID NO: 224201 - RNA, 12 nt, Homo sapiens
aaauucuuucag

SEQ ID NO: 224202 - RNA, 16 nt, Homo sapiens
uuccaaacacauacag

SEQ ID NO: 224203 - RNA, 18 nt, Homo sapiens
gcugcuacuacuccugua

SEQ ID NO: 224204 - RNA, 18 nt, Homo sapiens
gcagccuggggucugaca

SEQ ID NO: 224205 - RNA, 11 nt, Homo sapiens
cugaaaaccaa

SEQ ID NO: 224206 - RNA, 20 nt, Homo sapiens
aauucucuaguuugauuaaa

SEQ ID NO: 224207 - RNA, 14 nt, Homo sapiens
gcgcgguggcucac

SEQ ID NO: 224208 - RNA, 20 nt, Homo sapiens
uucuguccgagcuuugaaaa

SEQ ID NO: 224209 - RNA, 15 nt, Homo sapiens
ccacugcgaccacaa

SEQ ID NO: 224210 - RNA, 18 nt, Homo sapiens
gcaggacuaaaugucuag

SEQ ID NO: 224211 - RNA, 20 nt, Homo sapiens
gauuuugaaauuuuuauuaa

SEQ ID NO: 224212 - RNA, 13 nt, Homo sapiens
acaugugcacaug

SEQ ID NO: 224213 - RNA, 16 nt, Homo sapiens
uacuaaggaaucuuuc

SEQ ID NO: 224214 - RNA, 13 nt, Homo sapiens
ccagggucucacu

SEQ ID NO: 224215 - RNA, 20 nt, Homo sapiens
ccacccuccuuucaccacau

SEQ ID NO: 224216 - RNA, 17 nt, Homo sapiens
ccauuucugagaucaaa

SEQ ID NO: 224217 - RNA, 15 nt, Homo sapiens
guacguugugcauuu

SEQ ID NO: 224218 - RNA, 23 nt, Homo sapiens
aauacagauagauauaugcucug

SEQ ID NO: 224219 - RNA, 15 nt, Homo sapiens
ggacaggcauguucu

SEQ ID NO: 224220 - RNA, 17 nt, Homo sapiens
caaugaguaacaggaaa

SEQ ID NO: 224221 - RNA, 23 nt, Homo sapiens
aaaugcccagcuuaaaggggcua

SEQ ID NO: 224222 - RNA, 17 nt, Homo sapiens
cuuuucccaaacugauc

SEQ ID NO: 224223 - RNA, 21 nt, Homo sapiens
ugacccaugcugcccugugag

SEQ ID NO: 224224 - RNA, 19 nt, Homo sapiens
acuugauguguuaucucuu

SEQ ID NO: 224225 - RNA, 22 nt, Homo sapiens
ccccgcacugggcuuggggacc

SEQ ID NO: 224226 - RNA, 19 nt, Homo sapiens
cucaaacucuuaaaaccca

SEQ ID NO: 224227 - RNA, 15 nt, Homo sapiens
acccucuggagauaa

SEQ ID NO: 224228 - RNA, 20 nt, Homo sapiens
gugcccccacccccacccuc

SEQ ID NO: 224229 - RNA, 14 nt, Homo sapiens
augugcacaugcac

SEQ ID NO: 224230 - RNA, 18 nt, Homo sapiens
cugaagucuuuguacaga

SEQ ID NO: 224231 - RNA, 22 nt, Homo sapiens
gauacuguaucaugacaaagac

SEQ ID NO: 224232 - RNA, 18 nt, Homo sapiens
agcccagagugaacacuc

SEQ ID NO: 224233 - RNA, 19 nt, Homo sapiens
aagagaaaaaauauuuucc

SEQ ID NO: 224234 - RNA, 17 nt, Homo sapiens
uuaaauaaaucauaaaa

SEQ ID NO: 224235 - RNA, 14 nt, Homo sapiens
acagaguuguuaca

SEQ ID NO: 224236 - RNA, 18 nt, Homo sapiens
cuguggaugauaaaacac

SEQ ID NO: 224237 - RNA, 21 nt, Homo sapiens
uuuaagaaaaaggaugcacag

SEQ ID NO: 224238 - RNA, 14 nt, Homo sapiens
aguugauucagcuc

SEQ ID NO: 224239 - RNA, 16 nt, Homo sapiens
cuaaaagguaugcaau

SEQ ID NO: 224240 - RNA, 19 nt, Homo sapiens
cguuucuaugacacaugca

SEQ ID NO: 224241 - RNA, 23 nt, Homo sapiens
ugauagugucccacggugccuug

SEQ ID NO: 224242 - RNA, 17 nt, Homo sapiens
caggugccucaagagaa

SEQ ID NO: 224243 - RNA, 11 nt, Homo sapiens
cuuuugugcau

SEQ ID NO: 224244 - RNA, 16 nt, Homo sapiens
aaucauaaaacuugau

SEQ ID NO: 224245 - RNA, 20 nt, Homo sapiens
cagccucccgaguagcuggg

SEQ ID NO: 224246 - RNA, 17 nt, Homo sapiens
aucuggguucacugcaa

SEQ ID NO: 224247 - RNA, 19 nt, Homo sapiens
cccagucuggaaugcagug

SEQ ID NO: 224248 - RNA, 17 nt, Homo sapiens
agaauugaaaaaccauu

SEQ ID NO: 224249 - RNA, 12 nt, Homo sapiens
ccagaauuuccc

SEQ ID NO: 224250 - RNA, 21 nt, Homo sapiens
cuucagugccaaaaacaacaa

SEQ ID NO: 224251 - RNA, 19 nt, Homo sapiens
caugcacagcuaacaugga

SEQ ID NO: 224252 - RNA, 13 nt, Homo sapiens
ggauguucuagca

SEQ ID NO: 224253 - RNA, 13 nt, Homo sapiens
gucccccuuccau

SEQ ID NO: 224254 - RNA, 21 nt, Homo sapiens
gcacacuugcacccaugugua

SEQ ID NO: 224255 - RNA, 13 nt, Homo sapiens
aggcggugagcaa

SEQ ID NO: 224256 - RNA, 19 nt, Homo sapiens
agaggcagggucucacucu

SEQ ID NO: 224257 - RNA, 23 nt, Homo sapiens
cggagacggagucccaccuuggc

SEQ ID NO: 224258 - RNA, 15 nt, Homo sapiens
auccagacccggcug

SEQ ID NO: 224259 - RNA, 18 nt, Homo sapiens
uaaccagcagaaaugccu

SEQ ID NO: 224260 - RNA, 21 nt, Homo sapiens
acccugucuaaugaaaccugu

SEQ ID NO: 224261 - RNA, 20 nt, Homo sapiens
ugcagacucuacagaggcca

SEQ ID NO: 224262 - RNA, 11 nt, Homo sapiens
acacccuguga

SEQ ID NO: 224263 - RNA, 12 nt, Homo sapiens
ugacacacagcu

SEQ ID NO: 224264 - RNA, 12 nt, Homo sapiens
ucaaccccauga

SEQ ID NO: 224265 - RNA, 22 nt, Homo sapiens
uguaagcucuacugaggugcua

SEQ ID NO: 224266 - RNA, 13 nt, Homo sapiens
uugcggacagcca

SEQ ID NO: 224267 - RNA, 15 nt, Homo sapiens
guaugaggcauuugu

SEQ ID NO: 224268 - RNA, 22 nt, Homo sapiens
guuugaagaugccgcauuugga

SEQ ID NO: 224269 - RNA, 23 nt, Homo sapiens
gccaggccagagggagugacaga

SEQ ID NO: 224270 - RNA, 18 nt, Homo sapiens
agcacacugcuugugaaa

SEQ ID NO: 224271 - RNA, 14 nt, Homo sapiens
cgaguuacagacaa

SEQ ID NO: 224272 - RNA, 18 nt, Homo sapiens
auggacaugaucuucuuu

SEQ ID NO: 224273 - RNA, 19 nt, Homo sapiens
uucuucagagacuccugca

SEQ ID NO: 224274 - RNA, 17 nt, Homo sapiens
aggaugcuuguacauaa

SEQ ID NO: 224275 - RNA, 12 nt, Homo sapiens
uagaaaaaccac

SEQ ID NO: 224276 - RNA, 12 nt, Homo sapiens
ucugaaaaccaa

SEQ ID NO: 224277 - RNA, 20 nt, Homo sapiens
guaauuaaguacuauguauc

SEQ ID NO: 224278 - RNA, 17 nt, Homo sapiens
cacacuugggagcaaaa

SEQ ID NO: 224279 - RNA, 19 nt, Homo sapiens
cugaaaaccaauguucucu

SEQ ID NO: 224280 - RNA, 12 nt, Homo sapiens
gggcucagcaaa

SEQ ID NO: 224281 - RNA, 15 nt, Homo sapiens
ucgugacaacacuug

SEQ ID NO: 224282 - RNA, 22 nt, Homo sapiens
auacacacacacgcgugcacac

SEQ ID NO: 224283 - RNA, 15 nt, Homo sapiens
cuuacuuaaccugaa

SEQ ID NO: 224284 - RNA, 16 nt, Homo sapiens
acagacuggaagcaca

SEQ ID NO: 224285 - RNA, 16 nt, Homo sapiens
accacaaaacuuuucu

SEQ ID NO: 224286 - RNA, 16 nt, Homo sapiens
cuaagcuauucaguaa

SEQ ID NO: 224287 - RNA, 22 nt, Homo sapiens
caacaccucugcacaagcugca

SEQ ID NO: 224288 - RNA, 14 nt, Homo sapiens
gugccuuacacaau

SEQ ID NO: 224289 - RNA, 15 nt, Homo sapiens
ucuauauccauaacu

SEQ ID NO: 224290 - RNA, 17 nt, Homo sapiens
aaaaccagcgugugacu

SEQ ID NO: 224291 - RNA, 18 nt, Homo sapiens
ggcaugggaaugaauguc

SEQ ID NO: 224292 - RNA, 22 nt, Homo sapiens
uacugaggugcuauguucuuag

SEQ ID NO: 224293 - RNA, 22 nt, Homo sapiens
ucccaucacuucccuacaugga

SEQ ID NO: 224294 - RNA, 19 nt, Homo sapiens
gaggauugcuugagcucag

SEQ ID NO: 224295 - RNA, 16 nt, Homo sapiens
ccugcggugcuaucuc

SEQ ID NO: 224296 - RNA, 15 nt, Homo sapiens
gcuggagugcaguga

SEQ ID NO: 224297 - RNA, 22 nt, Homo sapiens
acugugaagagaaccauaucaa

SEQ ID NO: 224298 - RNA, 21 nt, Homo sapiens
cacuauagccuaggugacaga

SEQ ID NO: 224299 - RNA, 13 nt, Homo sapiens
auucuucugcuuc

SEQ ID NO: 224300 - RNA, 16 nt, Homo sapiens
augaggaaacugcacu

SEQ ID NO: 224301 - RNA, 12 nt, Homo sapiens
cccagauugcaa

SEQ ID NO: 224302 - RNA, 18 nt, Homo sapiens
cuacuguaauuugugaua

SEQ ID NO: 224303 - RNA, 18 nt, Homo sapiens
ugacaucagcaauacaga

SEQ ID NO: 224304 - RNA, 14 nt, Homo sapiens
aaauauaauugaca

SEQ ID NO: 224305 - RNA, 14 nt, Homo sapiens
agccagggucucac

SEQ ID NO: 224306 - RNA, 22 nt, Homo sapiens
cucacacggacacucaaaagcu

SEQ ID NO: 224307 - RNA, 18 nt, Homo sapiens
uagagccagggucucacu

SEQ ID NO: 224308 - RNA, 16 nt, Homo sapiens
acuuccacugccaucc

SEQ ID NO: 224309 - RNA, 15 nt, Homo sapiens
auacaguaucucagg

SEQ ID NO: 224310 - RNA, 15 nt, Homo sapiens
uucucucuucuccac

SEQ ID NO: 224311 - RNA, 17 nt, Homo sapiens
ugauccacccaccucag

SEQ ID NO: 224312 - RNA, 15 nt, Homo sapiens
gcuugggcuucaucc

SEQ ID NO: 224313 - RNA, 14 nt, Homo sapiens
cuuagaaaaaccac

SEQ ID NO: 224314 - RNA, 21 nt, Homo sapiens
accucaccccacuguggcuga

SEQ ID NO: 224315 - RNA, 19 nt, Homo sapiens
ugaucacggcucacugcag

SEQ ID NO: 224316 - RNA, 22 nt, Homo sapiens
ccuugaaaacacuguucucugc

SEQ ID NO: 224317 - RNA, 22 nt, Homo sapiens
aaugguuuucuuguguguuuau

SEQ ID NO: 224318 - RNA, 13 nt, Homo sapiens
gaagaaaaaggau

SEQ ID NO: 224319 - RNA, 21 nt, Homo sapiens
gagccgagauugcaccacugc

SEQ ID NO: 224320 - RNA, 21 nt, Homo sapiens
ccugcaguuauuaacacuaac

SEQ ID NO: 224321 - RNA, 23 nt, Homo sapiens
cucuucuccaccucccacaaagg

SEQ ID NO: 224322 - RNA, 20 nt, Homo sapiens
cccaggccuccccagcaccu

SEQ ID NO: 224323 - RNA, 17 nt, Homo sapiens
acauuccugaugcuucu

SEQ ID NO: 224324 - RNA, 18 nt, Homo sapiens
aauucucauuugucacac

SEQ ID NO: 224325 - RNA, 19 nt, Homo sapiens
augucucuuuaaugucaca

SEQ ID NO: 224326 - RNA, 22 nt, Homo sapiens
caucuaugugagaccauuuagc

SEQ ID NO: 224327 - RNA, 13 nt, Homo sapiens
cccugcccggcug

SEQ ID NO: 224328 - RNA, 20 nt, Homo sapiens
agcucacauagauaugacuu

SEQ ID NO: 224329 - RNA, 14 nt, Homo sapiens
cugcccuccaagac

SEQ ID NO: 224330 - RNA, 12 nt, Homo sapiens
ucuggcagcuca

SEQ ID NO: 224331 - RNA, 22 nt, Homo sapiens
cuccagcucaccagccccagug

SEQ ID NO: 224332 - RNA, 14 nt, Homo sapiens
ugggcaaugugaua

SEQ ID NO: 224333 - RNA, 17 nt, Homo sapiens
ccaaaggaagcacaugc

SEQ ID NO: 224334 - RNA, 22 nt, Homo sapiens
ccccuguagagugggagcugag

SEQ ID NO: 224335 - RNA, 18 nt, Homo sapiens
auaaaguuuuaugagaaa

SEQ ID NO: 224336 - RNA, 23 nt, Homo sapiens
uucgaauccagagagcagugugg

SEQ ID NO: 224337 - RNA, 14 nt, Homo sapiens
augacaucagcaau

SEQ ID NO: 224338 - RNA, 19 nt, Homo sapiens
gcuuccuccugguguggaa

SEQ ID NO: 224339 - RNA, 12 nt, Homo sapiens
ggcucucaggcc

SEQ ID NO: 224340 - RNA, 22 nt, Homo sapiens
ucuaaauaauaauaaaacaaca

SEQ ID NO: 224341 - RNA, 16 nt, Homo sapiens
ggcuucaguggcagcu

SEQ ID NO: 224342 - RNA, 13 nt, Homo sapiens
aagcauucuucaa

SEQ ID NO: 224343 - RNA, 12 nt, Homo sapiens
aauaaaacaaca

SEQ ID NO: 224344 - RNA, 13 nt, Homo sapiens
uagaaaaaccacc

SEQ ID NO: 224345 - RNA, 19 nt, Homo sapiens
acuuaagcacacuugacau

SEQ ID NO: 224346 - RNA, 15 nt, Homo sapiens
ugaaugaugccauga

SEQ ID NO: 224347 - RNA, 14 nt, Homo sapiens
uaaaacacaacauc

SEQ ID NO: 224348 - RNA, 15 nt, Homo sapiens
aaguaaggcaugguu

SEQ ID NO: 224349 - RNA, 23 nt, Homo sapiens
cuuguaaauagcucagguguccc

SEQ ID NO: 224350 - RNA, 20 nt, Homo sapiens
uccaauauucgcugugucag

SEQ ID NO: 224351 - RNA, 23 nt, Homo sapiens
aaaaccccaucucuacaaaaagc

SEQ ID NO: 224352 - RNA, 12 nt, Homo sapiens
acuguacaugaa

SEQ ID NO: 224353 - RNA, 15 nt, Homo sapiens
cuuaccugccaggaa

SEQ ID NO: 224354 - RNA, 17 nt, Homo sapiens
agcuuguaaauagcuca

SEQ ID NO: 224355 - RNA, 21 nt, Homo sapiens
aucagccugggcaaugugaua

SEQ ID NO: 224356 - RNA, 22 nt, Homo sapiens
ugaauaauacaguaucucaggg

SEQ ID NO: 224357 - RNA, 16 nt, Homo sapiens
auacaguaucucaggg

SEQ ID NO: 224358 - RNA, 18 nt, Homo sapiens
ugcaugaaguaauaugca

SEQ ID NO: 224359 - RNA, 15 nt, Homo sapiens
uaagagaaaugagcu

SEQ ID NO: 224360 - RNA, 19 nt, Homo sapiens
cagccucccgaauagcugg

SEQ ID NO: 224361 - RNA, 16 nt, Homo sapiens
ccaauauuuaccagac

SEQ ID NO: 224362 - RNA, 20 nt, Homo sapiens
augcuugcuucaaccccaug

SEQ ID NO: 224363 - RNA, 22 nt, Homo sapiens
agcucaggugucccugcacuug

SEQ ID NO: 224364 - RNA, 16 nt, Homo sapiens
gucuuuguacagacaa

SEQ ID NO: 224365 - RNA, 18 nt, Homo sapiens
agcuccgcuuucuaccca

SEQ ID NO: 224366 - RNA, 19 nt, Homo sapiens
ugaguacuacaguccuccc

SEQ ID NO: 224367 - RNA, 13 nt, Homo sapiens
cuggagugcagug

SEQ ID NO: 224368 - RNA, 22 nt, Homo sapiens
ugggacuacaggugugagucac

SEQ ID NO: 224369 - RNA, 16 nt, Homo sapiens
gccaaugggagcucau

SEQ ID NO: 224370 - RNA, 15 nt, Homo sapiens
aaauaacacuguacu

SEQ ID NO: 224371 - RNA, 19 nt, Homo sapiens
ggguuucuaaagcugccag

SEQ ID NO: 224372 - RNA, 11 nt, Homo sapiens
gagcugggaug

SEQ ID NO: 224373 - RNA, 20 nt, Homo sapiens
ggacaaggaugaucuaggaa

SEQ ID NO: 224374 - RNA, 16 nt, Homo sapiens
acuuagguguggggga

SEQ ID NO: 224375 - RNA, 21 nt, Homo sapiens
auauuaaggaagacaauguga

SEQ ID NO: 224376 - RNA, 21 nt, Homo sapiens
caggaagccagcaggcucuca

SEQ ID NO: 224377 - RNA, 13 nt, Homo sapiens
cauauuuacuucu

SEQ ID NO: 224378 - RNA, 20 nt, Homo sapiens
aaucagcugcuacuacuccu

SEQ ID NO: 224379 - RNA, 20 nt, Homo sapiens
aucacaagucagcacuaccu

SEQ ID NO: 224380 - RNA, 15 nt, Homo sapiens
cucuccgaccagaca

SEQ ID NO: 224381 - RNA, 16 nt, Homo sapiens
gcgugagccacugcac

SEQ ID NO: 224382 - RNA, 14 nt, Homo sapiens
ucaaauaacuaaaa

SEQ ID NO: 224383 - RNA, 16 nt, Homo sapiens
uggaagacagcucuua

SEQ ID NO: 224384 - RNA, 11 nt, Homo sapiens
uggaagacagc

SEQ ID NO: 224385 - RNA, 20 nt, Homo sapiens
gcccaggcuggcgugcagug

SEQ ID NO: 224386 - RNA, 21 nt, Homo sapiens
aggccagagggagugacagag

SEQ ID NO: 224387 - RNA, 15 nt, Homo sapiens
guagagucacuggaa

SEQ ID NO: 224388 - RNA, 20 nt, Homo sapiens
uuaaaacaacacucacauuu

SEQ ID NO: 224389 - RNA, 16 nt, Homo sapiens
cuauuguuucuuucaa

SEQ ID NO: 224390 - RNA, 19 nt, Homo sapiens
cacuauagccuaggugaca

SEQ ID NO: 224391 - RNA, 18 nt, Homo sapiens
gccaugggccuccugugu

SEQ ID NO: 224392 - RNA, 19 nt, Homo sapiens
caugaaguaauaugcacac

SEQ ID NO: 224393 - RNA, 14 nt, Homo sapiens
agaguagagucacu

SEQ ID NO: 224394 - RNA, 15 nt, Homo sapiens
cgaguuacagacaaa

SEQ ID NO: 224395 - RNA, 13 nt, Homo sapiens
ccaucaagccacc

SEQ ID NO: 224396 - RNA, 13 nt, Homo sapiens
uccagccccugga

SEQ ID NO: 224397 - RNA, 14 nt, Homo sapiens
aagagucucuauua

SEQ ID NO: 224398 - RNA, 20 nt, Homo sapiens
ccaacaucaacaucuugguc

SEQ ID NO: 224399 - RNA, 22 nt, Homo sapiens
aaugcacugacauuguuggcca

SEQ ID NO: 224400 - RNA, 20 nt, Homo sapiens
cgagauugcaccacugcacu

SEQ ID NO: 224401 - RNA, 20 nt, Homo sapiens
aaucuaaauggaaccacucu

SEQ ID NO: 224402 - RNA, 20 nt, Homo sapiens
acauacaauuccaaacacau

SEQ ID NO: 224403 - RNA, 17 nt, Homo sapiens
ccaaagggccccuuucu

SEQ ID NO: 224404 - RNA, 22 nt, Homo sapiens
cacucuuauugcccacgcugga

SEQ ID NO: 224405 - RNA, 22 nt, Homo sapiens
ucagccauuccuguucccauga

SEQ ID NO: 224406 - RNA, 16 nt, Homo sapiens
uacguugugcauuugg

SEQ ID NO: 224407 - RNA, 22 nt, Homo sapiens
ucuccauguuugauguaucuga

SEQ ID NO: 224408 - RNA, 20 nt, Homo sapiens
ggugggagugggcccaaugc

SEQ ID NO: 224409 - RNA, 17 nt, Homo sapiens
aaugucagugugacuga

SEQ ID NO: 224410 - RNA, 15 nt, Homo sapiens
auggacaaugaccca

SEQ ID NO: 224411 - RNA, 15 nt, Homo sapiens
uuccuguagucccau

SEQ ID NO: 224412 - RNA, 16 nt, Homo sapiens
gcuucauuuccugugu

SEQ ID NO: 224413 - RNA, 14 nt, Homo sapiens
gccuggacccugug

SEQ ID NO: 224414 - RNA, 15 nt, Homo sapiens
cagccucacaguccu

SEQ ID NO: 224415 - RNA, 19 nt, Homo sapiens
uuauauauaagccaaaaaa

SEQ ID NO: 224416 - RNA, 13 nt, Homo sapiens
caggccagcugcu

SEQ ID NO: 224417 - RNA, 19 nt, Homo sapiens
cuggcacugcuuccaguga

SEQ ID NO: 224418 - RNA, 13 nt, Homo sapiens
acaggcacccacc

SEQ ID NO: 224419 - RNA, 22 nt, Homo sapiens
caucauggagggagaagaaaga

SEQ ID NO: 224420 - RNA, 16 nt, Homo sapiens
agcccuuagcagggaa

SEQ ID NO: 224421 - RNA, 11 nt, Homo sapiens
cccuacaugga

SEQ ID NO: 224422 - RNA, 21 nt, Homo sapiens
aaauucuguuuuucuaggccu

SEQ ID NO: 224423 - RNA, 13 nt, Homo sapiens
ugacacacagcuc

SEQ ID NO: 224424 - RNA, 18 nt, Homo sapiens
aucaacaucuuggucaga

SEQ ID NO: 224425 - RNA, 19 nt, Homo sapiens
uccuucacagaugggugcu

SEQ ID NO: 224426 - RNA, 20 nt, Homo sapiens
cagagugagacucugucuca

SEQ ID NO: 224427 - RNA, 20 nt, Homo sapiens
uuaaauaaugugaaacugga

SEQ ID NO: 224428 - RNA, 13 nt, Homo sapiens
cagagcugccacc

SEQ ID NO: 224429 - RNA, 16 nt, Homo sapiens
caaaaguuuaaaaagc

SEQ ID NO: 224430 - RNA, 18 nt, Homo sapiens
uguuuagcccaaaaccaa

SEQ ID NO: 224431 - RNA, 14 nt, Homo sapiens
cauguccaagaagc

SEQ ID NO: 224432 - RNA, 13 nt, Homo sapiens
ggguucacugcaa

SEQ ID NO: 224433 - RNA, 23 nt, Homo sapiens
uuuuaugagaaaugccagugugc

SEQ ID NO: 224434 - RNA, 22 nt, Homo sapiens
augaaaugaggucagagccugc

SEQ ID NO: 224435 - RNA, 14 nt, Homo sapiens
acagcucuucucca

SEQ ID NO: 224436 - RNA, 19 nt, Homo sapiens
caggccaaacucaccugcc

SEQ ID NO: 224437 - RNA, 12 nt, Homo sapiens
ucucuugauuca

SEQ ID NO: 224438 - RNA, 23 nt, Homo sapiens
agccaagaauucuuaaauaugug

SEQ ID NO: 224439 - RNA, 14 nt, Homo sapiens
ucuuaauucuuagc

SEQ ID NO: 224440 - RNA, 16 nt, Homo sapiens
uagaagucacacagua

SEQ ID NO: 224441 - RNA, 15 nt, Homo sapiens
augcugucccuuacg

SEQ ID NO: 224442 - RNA, 14 nt, Homo sapiens
cucugguccauaga

SEQ ID NO: 224443 - RNA, 15 nt, Homo sapiens
ugaaugucaguguga

SEQ ID NO: 224444 - RNA, 15 nt, Homo sapiens
ucacugcagccucaa

SEQ ID NO: 224445 - RNA, 19 nt, Homo sapiens
uucuuuuuccccaauaaau

SEQ ID NO: 224446 - RNA, 12 nt, Homo sapiens
gcccacacuugg

SEQ ID NO: 224447 - RNA, 19 nt, Homo sapiens
gacagagugagacucuguc

SEQ ID NO: 224448 - RNA, 15 nt, Homo sapiens
ugacuuaagcacacu

SEQ ID NO: 224449 - RNA, 12 nt, Homo sapiens
gucugacaggca

SEQ ID NO: 224450 - RNA, 22 nt, Homo sapiens
ggggcccaaauucuuucagugg

SEQ ID NO: 224451 - RNA, 13 nt, Homo sapiens
accucucucacuc

SEQ ID NO: 224452 - RNA, 13 nt, Homo sapiens
uacguugugcauu

SEQ ID NO: 224453 - RNA, 18 nt, Homo sapiens
cugcgucucauacucacc

SEQ ID NO: 224454 - RNA, 14 nt, Homo sapiens
auccucccaccuca

SEQ ID NO: 224455 - RNA, 19 nt, Homo sapiens
guacuggagaaaauggacg

SEQ ID NO: 224456 - RNA, 12 nt, Homo sapiens
aaaaaaaauccc

SEQ ID NO: 224457 - RNA, 16 nt, Homo sapiens
ugcaugcugucccuua

SEQ ID NO: 224458 - RNA, 12 nt, Homo sapiens
uaagagaaauga

SEQ ID NO: 224459 - RNA, 13 nt, Homo sapiens
acguugugcauuu

SEQ ID NO: 224460 - RNA, 16 nt, Homo sapiens
cuacugaggugcuaug

SEQ ID NO: 224461 - RNA, 15 nt, Homo sapiens
cauaaugcgugcaua

SEQ ID NO: 224462 - RNA, 14 nt, Homo sapiens
auccacccaccuca

SEQ ID NO: 224463 - RNA, 12 nt, Homo sapiens
ggacucaaugca

SEQ ID NO: 224464 - RNA, 16 nt, Homo sapiens
ucuagauacuguauca

SEQ ID NO: 224465 - RNA, 13 nt, Homo sapiens
cugugugaugaug

SEQ ID NO: 224466 - RNA, 13 nt, Homo sapiens
cgaccagacaccu

SEQ ID NO: 224467 - RNA, 19 nt, Homo sapiens
aguuugagaccaaccuggg

SEQ ID NO: 224468 - RNA, 18 nt, Homo sapiens
acuucuuauacauuugau

SEQ ID NO: 224469 - RNA, 17 nt, Homo sapiens
acuugacaucaacugca

SEQ ID NO: 224470 - RNA, 17 nt, Homo sapiens
auucauauuuacuucuu

SEQ ID NO: 224471 - RNA, 13 nt, Homo sapiens
aaucuaaauggaa

SEQ ID NO: 224472 - RNA, 23 nt, Homo sapiens
ucuucuccaggcuguaucccaug

SEQ ID NO: 224473 - RNA, 16 nt, Homo sapiens
ggccccugcccggcug

SEQ ID NO: 224474 - RNA, 19 nt, Homo sapiens
caauuacaggaaguacugg

SEQ ID NO: 224475 - RNA, 13 nt, Homo sapiens
agugagacccugu

SEQ ID NO: 224476 - RNA, 18 nt, Homo sapiens
aggccaaacucaccugcc

SEQ ID NO: 224477 - RNA, 23 nt, Homo sapiens
caaagccuccuccagccgccaug

SEQ ID NO: 224478 - RNA, 14 nt, Homo sapiens
aaaaugagguacuc

SEQ ID NO: 224479 - RNA, 12 nt, Homo sapiens
caaauauuuccc

SEQ ID NO: 224480 - RNA, 13 nt, Homo sapiens
ggcggugagcaau

SEQ ID NO: 224481 - RNA, 21 nt, Homo sapiens
gagaucacgccacugcacuau

SEQ ID NO: 224482 - RNA, 21 nt, Homo sapiens
agaauuauaauuaguuccuca

SEQ ID NO: 224483 - RNA, 15 nt, Homo sapiens
cugauggugcaauga

SEQ ID NO: 224484 - RNA, 13 nt, Homo sapiens
ucauucaacccac

SEQ ID NO: 224485 - RNA, 12 nt, Homo sapiens
aaaugccagugu

SEQ ID NO: 224486 - RNA, 20 nt, Homo sapiens
caggguuuugccauguuggc

SEQ ID NO: 224487 - RNA, 13 nt, Homo sapiens
auacucaccucac

SEQ ID NO: 224488 - RNA, 17 nt, Homo sapiens
uuaagagaaaugagcuu

SEQ ID NO: 224489 - RNA, 14 nt, Homo sapiens
uggcuaaauucaug

SEQ ID NO: 224490 - RNA, 17 nt, Homo sapiens
gcuaccuacauacaauu

SEQ ID NO: 224491 - RNA, 23 nt, Homo sapiens
auucuuaaauauguggaguucau

SEQ ID NO: 224492 - RNA, 16 nt, Homo sapiens
caaaaaaagaaaaaga

SEQ ID NO: 224493 - RNA, 14 nt, Homo sapiens
aagaggcagggucu

SEQ ID NO: 224494 - RNA, 13 nt, Homo sapiens
cucugaaaaccaa

SEQ ID NO: 224495 - RNA, 23 nt, Homo sapiens
auucaacagguuuuccugaagaa

SEQ ID NO: 224496 - RNA, 22 nt, Homo sapiens
aggauccugagccagauuucac

SEQ ID NO: 224497 - RNA, 16 nt, Homo sapiens
cuccauguuugaugua

SEQ ID NO: 224498 - RNA, 17 nt, Homo sapiens
gaaaugagcugcacucc

SEQ ID NO: 224499 - RNA, 22 nt, Homo sapiens
cugugggucgcgugaugcgcau

SEQ ID NO: 224500 - RNA, 19 nt, Homo sapiens
acaggcccggcuccaggcu

SEQ ID NO: 224501 - RNA, 20 nt, Homo sapiens
uaucaaugaguaacaggaaa

SEQ ID NO: 224502 - RNA, 18 nt, Homo sapiens
ugccgucuaccugagggg

SEQ ID NO: 224503 - RNA, 12 nt, Homo sapiens
uauguugcccag

SEQ ID NO: 224504 - RNA, 15 nt, Homo sapiens
uugauguucuuucac

SEQ ID NO: 224505 - RNA, 19 nt, Homo sapiens
acacuugacaucaacugca

SEQ ID NO: 224506 - RNA, 20 nt, Homo sapiens
cacacaguauuacuucugcu

SEQ ID NO: 224507 - RNA, 13 nt, Homo sapiens
gcauuuguuugaa

SEQ ID NO: 224508 - RNA, 18 nt, Homo sapiens
cucucaggccaaacucac

SEQ ID NO: 224509 - RNA, 23 nt, Homo sapiens
uacugcagcuuuguuuguuguca

SEQ ID NO: 224510 - RNA, 15 nt, Homo sapiens
gauagauauaugcuc

SEQ ID NO: 224511 - RNA, 22 nt, Homo sapiens
cccaagggccuggccugagcug

SEQ ID NO: 224512 - RNA, 22 nt, Homo sapiens
ucuugaccucaggugauccacc

SEQ ID NO: 224513 - RNA, 18 nt, Homo sapiens
uaggaggaacagguuuaa

SEQ ID NO: 224514 - RNA, 16 nt, Homo sapiens
gacaucugucuaggaa

SEQ ID NO: 224515 - RNA, 14 nt, Homo sapiens
auccuggaguucug

SEQ ID NO: 224516 - RNA, 11 nt, Homo sapiens
uggugugauuu

SEQ ID NO: 224517 - RNA, 15 nt, Homo sapiens
cgcuggagugcagug

SEQ ID NO: 224518 - RNA, 18 nt, Homo sapiens
cuuucugcuaucaaagag

SEQ ID NO: 224519 - RNA, 13 nt, Homo sapiens
guucccaugagau

SEQ ID NO: 224520 - RNA, 18 nt, Homo sapiens
acacauuuuucuuaggga

SEQ ID NO: 224521 - RNA, 16 nt, Homo sapiens
gggacucaaugcacug

SEQ ID NO: 224522 - RNA, 23 nt, Homo sapiens
cacuauagccuaggugacagagu

SEQ ID NO: 224523 - RNA, 20 nt, Homo sapiens
guauuuuguuuuugucuuaa

SEQ ID NO: 224524 - RNA, 13 nt, Homo sapiens
auaaaucauaaaa

SEQ ID NO: 224525 - RNA, 17 nt, Homo sapiens
uucccuacaguugaaaa

SEQ ID NO: 224526 - RNA, 17 nt, Homo sapiens
aaagaggcuaugugagc

SEQ ID NO: 224527 - RNA, 15 nt, Homo sapiens
auagccaaggccaaa

SEQ ID NO: 224528 - RNA, 13 nt, Homo sapiens
gguaucaggugcu

SEQ ID NO: 224529 - RNA, 14 nt, Homo sapiens
cuccauguuugaug

SEQ ID NO: 224530 - RNA, 19 nt, Homo sapiens
ggcucagcggggacagcuc

SEQ ID NO: 224531 - RNA, 12 nt, Homo sapiens
aagucacacagu

SEQ ID NO: 224532 - RNA, 22 nt, Homo sapiens
cccuuuuuuggcugcugaaggc

SEQ ID NO: 224533 - RNA, 21 nt, Homo sapiens
gauuauuggaaauuuguuaua

SEQ ID NO: 224534 - RNA, 19 nt, Homo sapiens
acccucuuagaaaaaccac

SEQ ID NO: 224535 - RNA, 22 nt, Homo sapiens
caccauauuaccacagacauac

SEQ ID NO: 224536 - RNA, 14 nt, Homo sapiens
agaaaguacuucuu

SEQ ID NO: 224537 - RNA, 16 nt, Homo sapiens
uccugggagugagcug

SEQ ID NO: 224538 - RNA, 14 nt, Homo sapiens
ucugacacacagcu

SEQ ID NO: 224539 - RNA, 19 nt, Homo sapiens
aauccagagagcagugugg

SEQ ID NO: 224540 - RNA, 15 nt, Homo sapiens
gauuucuguuuagau

SEQ ID NO: 224541 - RNA, 12 nt, Homo sapiens
aucuuugcagac

SEQ ID NO: 224542 - RNA, 14 nt, Homo sapiens
ccuacucuguguca

SEQ ID NO: 224543 - RNA, 15 nt, Homo sapiens
cuggaugcagccuca

SEQ ID NO: 224544 - RNA, 23 nt, Homo sapiens
aaauaacuaaaagguaugcaauc

SEQ ID NO: 224545 - RNA, 19 nt, Homo sapiens
cuugaccucaggugaucca

SEQ ID NO: 224546 - RNA, 12 nt, Homo sapiens
gagacaggguuu

SEQ ID NO: 224547 - RNA, 21 nt, Homo sapiens
aguuccucauuagcauuuugc

SEQ ID NO: 224548 - RNA, 15 nt, Homo sapiens
cuuuagcgcccaguu

SEQ ID NO: 224549 - RNA, 21 nt, Homo sapiens
aggaguuugggguaugggaga

SEQ ID NO: 224550 - RNA, 13 nt, Homo sapiens
uugaaugaugcca

SEQ ID NO: 224551 - RNA, 21 nt, Homo sapiens
ugcgaucuggguucacugcaa

SEQ ID NO: 224552 - RNA, 16 nt, Homo sapiens
gaggaaacugcacugu

SEQ ID NO: 224553 - RNA, 18 nt, Homo sapiens
ugaacucuucaaucucuu

SEQ ID NO: 224554 - RNA, 16 nt, Homo sapiens
uauauaagccaaaaaa

SEQ ID NO: 224555 - RNA, 17 nt, Homo sapiens
auguugaaagaucaaaa

SEQ ID NO: 224556 - RNA, 17 nt, Homo sapiens
auaaaaccccaucucua

SEQ ID NO: 224557 - RNA, 17 nt, Homo sapiens
gcaagugagacccuguc

SEQ ID NO: 224558 - RNA, 14 nt, Homo sapiens
ucagccucccaaag

SEQ ID NO: 224559 - RNA, 17 nt, Homo sapiens
acacuguacugcaauaa

SEQ ID NO: 224560 - RNA, 21 nt, Homo sapiens
caggcucucaggccagcugcu

SEQ ID NO: 224561 - RNA, 16 nt, Homo sapiens
auugaauauaacuuuu

SEQ ID NO: 224562 - RNA, 23 nt, Homo sapiens
gagcccacgcccccacuggugac

SEQ ID NO: 224563 - RNA, 22 nt, Homo sapiens
aagugagacccugucucaaaaa

SEQ ID NO: 224564 - RNA, 13 nt, Homo sapiens
agcccaccccuca

SEQ ID NO: 224565 - RNA, 20 nt, Homo sapiens
gcauggcugccaaugggagc

SEQ ID NO: 224566 - RNA, 16 nt, Homo sapiens
gaugauaaaacacaaa

SEQ ID NO: 224567 - RNA, 17 nt, Homo sapiens
gacucuacagaggccau

SEQ ID NO: 224568 - RNA, 19 nt, Homo sapiens
ccacugugaagagaaccau

SEQ ID NO: 224569 - RNA, 22 nt, Homo sapiens
ggaugaaaaaauaacacuguac

SEQ ID NO: 224570 - RNA, 21 nt, Homo sapiens
caaaaaagcgaaccgugagga

SEQ ID NO: 224571 - RNA, 14 nt, Homo sapiens
auuguuagucucuu

SEQ ID NO: 224572 - RNA, 20 nt, Homo sapiens
uucuccacuuucuagccaga

SEQ ID NO: 224573 - RNA, 23 nt, Homo sapiens
acucacacggacacucaaaagcu

SEQ ID NO: 224574 - RNA, 14 nt, Homo sapiens
agguuggcaaaaag

SEQ ID NO: 224575 - RNA, 13 nt, Homo sapiens
gagguacucuccu

SEQ ID NO: 224576 - RNA, 12 nt, Homo sapiens
uccagacacaug

SEQ ID NO: 224577 - RNA, 20 nt, Homo sapiens
uuaagaggcagggucucacu

SEQ ID NO: 224578 - RNA, 16 nt, Homo sapiens
acuuguggacacagcu

SEQ ID NO: 224579 - RNA, 16 nt, Homo sapiens
auauuguuuucagugu

SEQ ID NO: 224580 - RNA, 13 nt, Homo sapiens
cacuugacaucaa

SEQ ID NO: 224581 - RNA, 23 nt, Homo sapiens
auaagaaccuuuugagugccuua

SEQ ID NO: 224582 - RNA, 13 nt, Homo sapiens
caggcaagcaccu

SEQ ID NO: 224583 - RNA, 20 nt, Homo sapiens
cccagagaggguggugaccu

SEQ ID NO: 224584 - RNA, 23 nt, Homo sapiens
uaagugaggaugaaaaaauaaca

SEQ ID NO: 224585 - RNA, 22 nt, Homo sapiens
augugauaaaaccccaucucua

SEQ ID NO: 224586 - RNA, 19 nt, Homo sapiens
ugcugcuugaggcaacuca

SEQ ID NO: 224587 - RNA, 13 nt, Homo sapiens
cacacacauacac

SEQ ID NO: 224588 - RNA, 13 nt, Homo sapiens
gaaacugcacugu

SEQ ID NO: 224589 - RNA, 17 nt, Homo sapiens
agcugcacuccaugagu

SEQ ID NO: 224590 - RNA, 18 nt, Homo sapiens
cuauagccuaggugacag

SEQ ID NO: 224591 - RNA, 14 nt, Homo sapiens
ggcaugguggccca

SEQ ID NO: 224592 - RNA, 20 nt, Homo sapiens
acaugccucucucaggccaa

SEQ ID NO: 224593 - RNA, 18 nt, Homo sapiens
acagccucugaaaaccaa

SEQ ID NO: 224594 - RNA, 15 nt, Homo sapiens
aaauaccagccagua

SEQ ID NO: 224595 - RNA, 23 nt, Homo sapiens
gcauuuagacucucgacuggcca

SEQ ID NO: 224596 - RNA, 17 nt, Homo sapiens
agauagccaaggccaaa

SEQ ID NO: 224597 - RNA, 16 nt, Homo sapiens
uggcccacgcacuucg

SEQ ID NO: 224598 - RNA, 21 nt, Homo sapiens
ccucccaaagugcugggauua

SEQ ID NO: 224599 - RNA, 12 nt, Homo sapiens
aagaaugcucuu

SEQ ID NO: 224600 - RNA, 15 nt, Homo sapiens
ggcuguaucccauga

SEQ ID NO: 224601 - RNA, 19 nt, Homo sapiens
aagugguacuaacuuuccu

SEQ ID NO: 224602 - RNA, 17 nt, Homo sapiens
ucccccagcagccuggg

SEQ ID NO: 224603 - RNA, 16 nt, Homo sapiens
uucagccaagaauucu

SEQ ID NO: 224604 - RNA, 11 nt, Homo sapiens
agugacagagg

SEQ ID NO: 224605 - RNA, 18 nt, Homo sapiens
gcacagacccugcccugu

SEQ ID NO: 224606 - RNA, 15 nt, Homo sapiens
uguuggccaguguga

SEQ ID NO: 224607 - RNA, 23 nt, Homo sapiens
aauaacuaaaagguaugcaauca

SEQ ID NO: 224608 - RNA, 22 nt, Homo sapiens
gcagcagggagggcuucugcca

SEQ ID NO: 224609 - RNA, 21 nt, Homo sapiens
gauuaauuaaaacacaacauc

SEQ ID NO: 224610 - RNA, 15 nt, Homo sapiens
acaguccucccaucu

SEQ ID NO: 224611 - RNA, 18 nt, Homo sapiens
gcugggcuucaguggcag

SEQ ID NO: 224612 - RNA, 18 nt, Homo sapiens
gcuugaccgugaggccag

SEQ ID NO: 224613 - RNA, 16 nt, Homo sapiens
uucugggacacaguuc

SEQ ID NO: 224614 - RNA, 18 nt, Homo sapiens
cagcugcuugggcuucau

SEQ ID NO: 224615 - RNA, 21 nt, Homo sapiens
gcccaggaaaggcuccaggag

SEQ ID NO: 224616 - RNA, 21 nt, Homo sapiens
cuuuguuuguugucagcugaa

SEQ ID NO: 224617 - RNA, 19 nt, Homo sapiens
uacagacaacaaaccuguu

SEQ ID NO: 224618 - RNA, 21 nt, Homo sapiens
ccucuucucuacucuagggaa

SEQ ID NO: 224619 - RNA, 21 nt, Homo sapiens
cugcagcuuuguuuguuguca

SEQ ID NO: 224620 - RNA, 23 nt, Homo sapiens
uuucaguggcuaccuacauacaa

SEQ ID NO: 224621 - RNA, 16 nt, Homo sapiens
aaagaaugcucuuuac

SEQ ID NO: 224622 - RNA, 15 nt, Homo sapiens
agaaccaaaaagagg

SEQ ID NO: 224623 - RNA, 14 nt, Homo sapiens
agugguggugaaca

SEQ ID NO: 224624 - RNA, 14 nt, Homo sapiens
cacaugugcacaug

SEQ ID NO: 224625 - RNA, 22 nt, Homo sapiens
uccugugugugcgccuacagga

SEQ ID NO: 224626 - RNA, 16 nt, Homo sapiens
gaagucuuuguacaga

SEQ ID NO: 224627 - RNA, 20 nt, Homo sapiens
ggaagccagcaggcucucag

SEQ ID NO: 224628 - RNA, 20 nt, Homo sapiens
gcgagcccugguggcagugg

SEQ ID NO: 224629 - RNA, 17 nt, Homo sapiens
gacaccuugacagggca

SEQ ID NO: 224630 - RNA, 16 nt, Homo sapiens
cugccacccuggggag

SEQ ID NO: 224631 - RNA, 18 nt, Homo sapiens
ugggcccaaugcacuuug

SEQ ID NO: 224632 - RNA, 15 nt, Homo sapiens
ucaguaauaacucua

SEQ ID NO: 224633 - RNA, 21 nt, Homo sapiens
aucuuccaaggguacuaagga

SEQ ID NO: 224634 - RNA, 17 nt, Homo sapiens
auagccuaggugacaga

SEQ ID NO: 224635 - RNA, 14 nt, Homo sapiens
aguugccagucacc

SEQ ID NO: 224636 - RNA, 17 nt, Homo sapiens
cuguacaaaguagaagu

SEQ ID NO: 224637 - RNA, 15 nt, Homo sapiens
agcucuuuugagcau

SEQ ID NO: 224638 - RNA, 19 nt, Homo sapiens
cuacauggaguauauguca

SEQ ID NO: 224639 - RNA, 13 nt, Homo sapiens
gauggauuuccag

SEQ ID NO: 224640 - RNA, 20 nt, Homo sapiens
caugccucucucaggccaaa

SEQ ID NO: 224641 - RNA, 18 nt, Homo sapiens
ugagaggggaacagacug

SEQ ID NO: 224642 - RNA, 13 nt, Homo sapiens
ccagcugcuuggg

SEQ ID NO: 224643 - RNA, 20 nt, Homo sapiens
cagccugggugacagagcaa

SEQ ID NO: 224644 - RNA, 17 nt, Homo sapiens
caucacuucccuacaug

SEQ ID NO: 224645 - RNA, 17 nt, Homo sapiens
ucucugaggacacuaac

SEQ ID NO: 224646 - RNA, 16 nt, Homo sapiens
ccgugaggccagagac

SEQ ID NO: 224647 - RNA, 22 nt, Homo sapiens
agccauuccuguucccaugaga

SEQ ID NO: 224648 - RNA, 15 nt, Homo sapiens
uacagauagauauau

SEQ ID NO: 224649 - RNA, 15 nt, Homo sapiens
uaugacaucagcaau

SEQ ID NO: 224650 - RNA, 15 nt, Homo sapiens
ccuaauccucuagga

SEQ ID NO: 224651 - RNA, 23 nt, Homo sapiens
aaagaccgugugugaaauucucu

SEQ ID NO: 224652 - RNA, 16 nt, Homo sapiens
gcucugcugacagaca

SEQ ID NO: 224653 - RNA, 15 nt, Homo sapiens
aauauauaaccagug

SEQ ID NO: 224654 - RNA, 22 nt, Homo sapiens
aaacugauuacaacugcuacag

SEQ ID NO: 224655 - RNA, 21 nt, Homo sapiens
caaaucagcugcuacuacucc

SEQ ID NO: 224656 - RNA, 18 nt, Homo sapiens
uuaacuuccaauuuacau

SEQ ID NO: 224657 - RNA, 15 nt, Homo sapiens
aagccgugauuuuca

SEQ ID NO: 224658 - RNA, 13 nt, Homo sapiens
acuguugcccagg

SEQ ID NO: 224659 - RNA, 20 nt, Homo sapiens
gaucagccugggcaauguga

SEQ ID NO: 224660 - RNA, 20 nt, Homo sapiens
gcaaaguaucccuacuguaa

SEQ ID NO: 224661 - RNA, 21 nt, Homo sapiens
uucuugauaaagaagauucug

SEQ ID NO: 224662 - RNA, 20 nt, Homo sapiens
uacuaacuuuccuucauuca

SEQ ID NO: 224663 - RNA, 13 nt, Homo sapiens
acaaugugaaaag

SEQ ID NO: 224664 - RNA, 13 nt, Homo sapiens
ucuuccccagaua

SEQ ID NO: 224665 - RNA, 19 nt, Homo sapiens
cuggagaaaauggacgugu

SEQ ID NO: 224666 - RNA, 14 nt, Homo sapiens
gagcuuucugcuau

SEQ ID NO: 224667 - RNA, 19 nt, Homo sapiens
auuuuguuuuugucuuaaa

SEQ ID NO: 224668 - RNA, 16 nt, Homo sapiens
cuguuggccaguguga

SEQ ID NO: 224669 - RNA, 18 nt, Homo sapiens
uucuagcauggcugccaa

SEQ ID NO: 224670 - RNA, 12 nt, Homo sapiens
gaagcauuuacu

SEQ ID NO: 224671 - RNA, 21 nt, Homo sapiens
cuguaauccuagcacuuuggg

SEQ ID NO: 224672 - RNA, 14 nt, Homo sapiens
acggcucacugcag

SEQ ID NO: 224673 - RNA, 20 nt, Homo sapiens
uguuucugcagccacuauug

SEQ ID NO: 224674 - RNA, 16 nt, Homo sapiens
ugccaggaagccagca

SEQ ID NO: 224675 - RNA, 14 nt, Homo sapiens
cuuuguacagacaa

SEQ ID NO: 224676 - RNA, 12 nt, Homo sapiens
uccuccaggugc

SEQ ID NO: 224677 - RNA, 17 nt, Homo sapiens
gccuggggucugacaau

SEQ ID NO: 224678 - RNA, 18 nt, Homo sapiens
cuugagcccagagugaac

SEQ ID NO: 224679 - RNA, 22 nt, Homo sapiens
cgagauagccaaggccaaagga

SEQ ID NO: 224680 - RNA, 20 nt, Homo sapiens
agccaagaauucuuaaauau

SEQ ID NO: 224681 - RNA, 17 nt, Homo sapiens
ugcccuccaagaccuuc

SEQ ID NO: 224682 - RNA, 23 nt, Homo sapiens
auuacaggugugaaccaccacac

SEQ ID NO: 224683 - RNA, 22 nt, Homo sapiens
uuccugaagaauugaaaaacca

SEQ ID NO: 224684 - RNA, 17 nt, Homo sapiens
acuugauguguuaucuc

SEQ ID NO: 224685 - RNA, 12 nt, Homo sapiens
ccggcugcgugg

SEQ ID NO: 224686 - RNA, 16 nt, Homo sapiens
guaucaggugcugcca

SEQ ID NO: 224687 - RNA, 18 nt, Homo sapiens
ucaauuacaggaaguacu

SEQ ID NO: 224688 - RNA, 13 nt, Homo sapiens
aggggcacagggu

SEQ ID NO: 224689 - RNA, 15 nt, Homo sapiens
caagugccuuagcaa

SEQ ID NO: 224690 - RNA, 21 nt, Homo sapiens
aagcugggagaaccaaaaaga

SEQ ID NO: 224691 - RNA, 12 nt, Homo sapiens
ccagccuugacc

SEQ ID NO: 224692 - RNA, 15 nt, Homo sapiens
cucaaugcacugaca

SEQ ID NO: 224693 - RNA, 15 nt, Homo sapiens
cagcucugcaagaau

SEQ ID NO: 224694 - RNA, 19 nt, Homo sapiens
guuuauugucaaaguggug

SEQ ID NO: 224695 - RNA, 13 nt, Homo sapiens
gaugauaaaacac

SEQ ID NO: 224696 - RNA, 16 nt, Homo sapiens
uugggcuggugucacc

SEQ ID NO: 224697 - RNA, 19 nt, Homo sapiens
ucagcaauacagacuacuu

SEQ ID NO: 224698 - RNA, 19 nt, Homo sapiens
aagaguaggaagacuuugg

SEQ ID NO: 224699 - RNA, 20 nt, Homo sapiens
agacagaguuuucacucuua

SEQ ID NO: 224700 - RNA, 23 nt, Homo sapiens
agagucacuggaacacuaaugag

SEQ ID NO: 224701 - RNA, 16 nt, Homo sapiens
uuagaagucacacagu

SEQ ID NO: 224702 - RNA, 18 nt, Homo sapiens
acuauguugcccaggcag

SEQ ID NO: 224703 - RNA, 13 nt, Homo sapiens
uacgggaggguaa

SEQ ID NO: 224704 - RNA, 23 nt, Homo sapiens
acaagaucacaagucagcacuac

SEQ ID NO: 224705 - RNA, 22 nt, Homo sapiens
ggagaguaacccugucuaauga

SEQ ID NO: 224706 - RNA, 13 nt, Homo sapiens
agugguuacccag

SEQ ID NO: 224707 - RNA, 24 nt, Homo sapiens
ggauccuccaggugcacaagcucc

SEQ ID NO: 224708 - RNA, 22 nt, Homo sapiens
gcacuuuguucuggcucuucca

SEQ ID NO: 224709 - RNA, 12 nt, Homo sapiens
cuaaugggacac

SEQ ID NO: 224710 - RNA, 12 nt, Homo sapiens
cuaugcauuuga

SEQ ID NO: 224711 - RNA, 13 nt, Homo sapiens
auacaauuccaaa

SEQ ID NO: 224712 - RNA, 18 nt, Homo sapiens
gaccagggauuuccauga

SEQ ID NO: 224713 - RNA, 19 nt, Homo sapiens
agaaauaucugaaaaugua

SEQ ID NO: 224714 - RNA, 18 nt, Homo sapiens
aagaauguguuuaaacuu

SEQ ID NO: 224715 - RNA, 16 nt, Homo sapiens
augccagcuuaucuca

SEQ ID NO: 224716 - RNA, 17 nt, Homo sapiens
gaccaguuguugauaac

SEQ ID NO: 224717 - RNA, 14 nt, Homo sapiens
aauauuuaccagac

SEQ ID NO: 224718 - RNA, 19 nt, Homo sapiens
cuccccgggcagcagagag

SEQ ID NO: 224719 - RNA, 16 nt, Homo sapiens
uccuguucccaugaga

SEQ ID NO: 224720 - RNA, 14 nt, Homo sapiens
caguggcuaccuac

SEQ ID NO: 224721 - RNA, 20 nt, Homo sapiens
uauguggaguucaucuugaa

SEQ ID NO: 224722 - RNA, 18 nt, Homo sapiens
ugaguacguugugcauuu

SEQ ID NO: 224723 - RNA, 22 nt, Homo sapiens
uggauguucugacccugcuuca

SEQ ID NO: 224724 - RNA, 16 nt, Homo sapiens
cuggucccacucaguc

SEQ ID NO: 224725 - RNA, 16 nt, Homo sapiens
acuuuaccugaaacaa

SEQ ID NO: 224726 - RNA, 19 nt, Homo sapiens
uaagccaaaaaaugcuugc

SEQ ID NO: 224727 - RNA, 21 nt, Homo sapiens
ggguguggcgcagcauauuca

SEQ ID NO: 224728 - RNA, 17 nt, Homo sapiens
ugaauuuuggcuguguc

SEQ ID NO: 224729 - RNA, 14 nt, Homo sapiens
agaaaguacuucuc

SEQ ID NO: 224730 - RNA, 16 nt, Homo sapiens
auacagauagauauau

SEQ ID NO: 224731 - RNA, 21 nt, Homo sapiens
uaaugacuuaagcacacuuga

SEQ ID NO: 224732 - RNA, 22 nt, Homo sapiens
ugacaaggggcaguggugguuu

SEQ ID NO: 224733 - RNA, 16 nt, Homo sapiens
gcccacacuugggagc

SEQ ID NO: 224734 - RNA, 19 nt, Homo sapiens
gaaugcagagaugugcccc

SEQ ID NO: 224735 - RNA, 13 nt, Homo sapiens
acauaucugucau

SEQ ID NO: 224736 - RNA, 19 nt, Homo sapiens
uggacuuccacugccaucc

SEQ ID NO: 224737 - RNA, 17 nt, Homo sapiens
uuagacagagucucacu

SEQ ID NO: 224738 - RNA, 13 nt, Homo sapiens
aauggaagacagc

SEQ ID NO: 224739 - RNA, 15 nt, Homo sapiens
acaguauuacuucug

SEQ ID NO: 224740 - RNA, 21 nt, Homo sapiens
aguggugcgaucuggguucac

SEQ ID NO: 224741 - RNA, 16 nt, Homo sapiens
caugcuacacacugca

SEQ ID NO: 224742 - RNA, 14 nt, Homo sapiens
aguagcugggacua

SEQ ID NO: 224743 - RNA, 19 nt, Homo sapiens
cccacgcuggagugcagug

SEQ ID NO: 224744 - RNA, 15 nt, Homo sapiens
cgugugacuacuccc

SEQ ID NO: 224745 - RNA, 23 nt, Homo sapiens
ugcacacauuuuuuaaaugcacc

SEQ ID NO: 224746 - RNA, 17 nt, Homo sapiens
ccucuuagaaaaaccac

SEQ ID NO: 224747 - RNA, 20 nt, Homo sapiens
aggccagagggagugacaga

SEQ ID NO: 224748 - RNA, 16 nt, Homo sapiens
agcuuugaaaauucag

SEQ ID NO: 224749 - RNA, 22 nt, Homo sapiens
gacaaagcgugguggacaugca

SEQ ID NO: 224750 - RNA, 17 nt, Homo sapiens
ucauuagcauuuugcua

SEQ ID NO: 224751 - RNA, 15 nt, Homo sapiens
cugccucugacacac

SEQ ID NO: 224752 - RNA, 17 nt, Homo sapiens
gccucucucaggccaaa

SEQ ID NO: 224753 - RNA, 18 nt, Homo sapiens
cuugucuuuggacccuga

SEQ ID NO: 224754 - RNA, 17 nt, Homo sapiens
cuaauauguaacaagcc

SEQ ID NO: 224755 - RNA, 18 nt, Homo sapiens
ccaccaccaucaccagac

SEQ ID NO: 224756 - RNA, 23 nt, Homo sapiens
uuaaauaaaucauaaaacuugau

SEQ ID NO: 224757 - RNA, 20 nt, Homo sapiens
auaugcuuauacacuuacac

SEQ ID NO: 224758 - RNA, 15 nt, Homo sapiens
ugaaacaacccaaag

SEQ ID NO: 224759 - RNA, 17 nt, Homo sapiens
gacucaaugcacugaca

SEQ ID NO: 224760 - RNA, 22 nt, Homo sapiens
ccaggugcuaggaacacuccuu

SEQ ID NO: 224761 - RNA, 17 nt, Homo sapiens
cuuagguuggcaaaaag

SEQ ID NO: 224762 - RNA, 12 nt, Homo sapiens
agcuuaucucag

SEQ ID NO: 224763 - RNA, 16 nt, Homo sapiens
uuguacagacaacaaa

SEQ ID NO: 224764 - RNA, 16 nt, Homo sapiens
cgugcacacaccagag

SEQ ID NO: 224765 - RNA, 12 nt, Homo sapiens
ggaggauguucu

SEQ ID NO: 224766 - RNA, 16 nt, Homo sapiens
cauccaguaucuugaa

SEQ ID NO: 224767 - RNA, 18 nt, Homo sapiens
aaaacuuuucuaauacuc

SEQ ID NO: 224768 - RNA, 16 nt, Homo sapiens
guugaugaaauaucaa

SEQ ID NO: 224769 - RNA, 17 nt, Homo sapiens
gccauccucccaagggg

SEQ ID NO: 224770 - RNA, 17 nt, Homo sapiens
aagcaugugagacuggu

SEQ ID NO: 224771 - RNA, 21 nt, Homo sapiens
aucgucacugcuuaacuucac

SEQ ID NO: 224772 - RNA, 14 nt, Homo sapiens
ccaauuuacauacu

SEQ ID NO: 224773 - RNA, 18 nt, Homo sapiens
ucacauuuauucugcuca

SEQ ID NO: 224774 - RNA, 21 nt, Homo sapiens
aucaacugcaucaagauguga

SEQ ID NO: 224775 - RNA, 19 nt, Homo sapiens
acugaugggcaacccccag

SEQ ID NO: 224776 - RNA, 12 nt, Homo sapiens
uugugcauuugg

SEQ ID NO: 224777 - RNA, 17 nt, Homo sapiens
gaaaacacuguucucug

SEQ ID NO: 224778 - RNA, 20 nt, Homo sapiens
aggcugggagagccuuccag

SEQ ID NO: 224779 - RNA, 17 nt, Homo sapiens
caugccuggauggggcu

SEQ ID NO: 224780 - RNA, 18 nt, Homo sapiens
ccgcauuuggauuggaug

SEQ ID NO: 224781 - RNA, 14 nt, Homo sapiens
agccccauccucug

SEQ ID NO: 224782 - RNA, 21 nt, Homo sapiens
agugcagugagccgagaucac

SEQ ID NO: 224783 - RNA, 14 nt, Homo sapiens
ugggguaugggaga

SEQ ID NO: 224784 - RNA, 13 nt, Homo sapiens
ugcuuugugauuu

SEQ ID NO: 224785 - RNA, 22 nt, Homo sapiens
caauaaggggagaguaacccug

SEQ ID NO: 224786 - RNA, 15 nt, Homo sapiens
aaugggggugcauuu

SEQ ID NO: 224787 - RNA, 19 nt, Homo sapiens
cauaaugacuuaagcacac

SEQ ID NO: 224788 - RNA, 14 nt, Homo sapiens
acaggcaagcaccu

SEQ ID NO: 224789 - RNA, 20 nt, Homo sapiens
agccccuggaugcagccuca

SEQ ID NO: 224790 - RNA, 19 nt, Homo sapiens
agugauccucccaccucag

SEQ ID NO: 224791 - RNA, 18 nt, Homo sapiens
agguaugcaaucaaaucu

SEQ ID NO: 224792 - RNA, 19 nt, Homo sapiens
aaccacuaagagucucuau

SEQ ID NO: 224793 - RNA, 18 nt, Homo sapiens
cuccugugucuugcaaug

SEQ ID NO: 224794 - RNA, 13 nt, Homo sapiens
ugagccacugcac

SEQ ID NO: 224795 - RNA, 19 nt, Homo sapiens
ggcacucagaagacacuga

SEQ ID NO: 224796 - RNA, 14 nt, Homo sapiens
agguggggcagcuu

SEQ ID NO: 224797 - RNA, 13 nt, Homo sapiens
agggugacggggg

SEQ ID NO: 224798 - RNA, 17 nt, Homo sapiens
aauaacacuguacugca

SEQ ID NO: 224799 - RNA, 20 nt, Homo sapiens
aaaucagcugcuacuacucc

SEQ ID NO: 224800 - RNA, 20 nt, Homo sapiens
aacaucuuuuucuacucgag

SEQ ID NO: 224801 - RNA, 21 nt, Homo sapiens
ugucagccauuccuguuccca

SEQ ID NO: 224802 - RNA, 13 nt, Homo sapiens
uauguguaaguau

SEQ ID NO: 224803 - RNA, 19 nt, Homo sapiens
ugggcuggugucaccugaa

SEQ ID NO: 224804 - RNA, 13 nt, Homo sapiens
gcuaugcauuuga

SEQ ID NO: 224805 - RNA, 13 nt, Homo sapiens
cugcugacagugu

SEQ ID NO: 224806 - RNA, 21 nt, Homo sapiens
agugcugggauuacaggugug

SEQ ID NO: 224807 - RNA, 22 nt, Homo sapiens
cgcuaaaugaaaaucgugacaa

SEQ ID NO: 224808 - RNA, 19 nt, Homo sapiens
agcccaccccucaacaccu

SEQ ID NO: 224809 - RNA, 11 nt, Homo sapiens
uuucaccacau

SEQ ID NO: 224810 - RNA, 17 nt, Homo sapiens
uaaugaaaccugugucu

SEQ ID NO: 224811 - RNA, 20 nt, Homo sapiens
ugguggacaugcacagcuaa

SEQ ID NO: 224812 - RNA, 19 nt, Homo sapiens
cacugugccaugugccagg

SEQ ID NO: 224813 - RNA, 21 nt, Homo sapiens
ccaguaaaugggggugcauuu

SEQ ID NO: 224814 - RNA, 13 nt, Homo sapiens
cucauuugucaca

SEQ ID NO: 224815 - RNA, 14 nt, Homo sapiens
ucuacagaggccau

SEQ ID NO: 224816 - RNA, 16 nt, Homo sapiens
accccucaacaccucu

SEQ ID NO: 224817 - RNA, 11 nt, Homo sapiens
cgcgugcacac

SEQ ID NO: 224818 - RNA, 16 nt, Homo sapiens
acccaguuagcucuca

SEQ ID NO: 224819 - RNA, 15 nt, Homo sapiens
agcauuuagacucuc

SEQ ID NO: 224820 - RNA, 21 nt, Homo sapiens
gaaccacucuaucaaguauua

SEQ ID NO: 224821 - RNA, 15 nt, Homo sapiens
cugcauguuacauaa

SEQ ID NO: 224822 - RNA, 16 nt, Homo sapiens
acagcuccuucugucc

SEQ ID NO: 224823 - RNA, 15 nt, Homo sapiens
aggaagcacaugccu

SEQ ID NO: 224824 - RNA, 15 nt, Homo sapiens
uuagcccaaaaccaa

SEQ ID NO: 224825 - RNA, 16 nt, Homo sapiens
caaggauccugagcca

SEQ ID NO: 224826 - RNA, 15 nt, Homo sapiens
ccaaggccaaaggaa

SEQ ID NO: 224827 - RNA, 19 nt, Homo sapiens
cauguaauuaaguacuaug

SEQ ID NO: 224828 - RNA, 15 nt, Homo sapiens
auccacccaccucag

SEQ ID NO: 224829 - RNA, 15 nt, Homo sapiens
gcugcacuccaugag

SEQ ID NO: 224830 - RNA, 20 nt, Homo sapiens
cagggucucacuauguugcc

SEQ ID NO: 224831 - RNA, 15 nt, Homo sapiens
caaggcugcagugag

SEQ ID NO: 224832 - RNA, 21 nt, Homo sapiens
ugaagcugggagaaccaaaaa

SEQ ID NO: 224833 - RNA, 20 nt, Homo sapiens
gacuuaagcacacuugacau

SEQ ID NO: 224834 - RNA, 22 nt, Homo sapiens
aaacacauacaggaagguagaa

SEQ ID NO: 224835 - RNA, 17 nt, Homo sapiens
aaauauguggaguucau

SEQ ID NO: 224836 - RNA, 15 nt, Homo sapiens
ccaccaucaccagac

SEQ ID NO: 224837 - RNA, 16 nt, Homo sapiens
aacucaaacucuuaaa

SEQ ID NO: 224838 - RNA, 14 nt, Homo sapiens
cguguuaugacucc

SEQ ID NO: 224839 - RNA, 18 nt, Homo sapiens
agcacaaagguagcuuuu

SEQ ID NO: 224840 - RNA, 15 nt, Homo sapiens
gacagagcaagugag

SEQ ID NO: 224841 - RNA, 23 nt, Homo sapiens
cuguggguuucuaaagcugccag

SEQ ID NO: 224842 - RNA, 18 nt, Homo sapiens
auuguaaggaaugauuaa

SEQ ID NO: 224843 - RNA, 14 nt, Homo sapiens
aacucuuaaaaccc

SEQ ID NO: 224844 - RNA, 16 nt, Homo sapiens
aaucucuaguugucac

SEQ ID NO: 224845 - RNA, 23 nt, Homo sapiens
ugcagugguaugaucacggcuca

SEQ ID NO: 224846 - RNA, 22 nt, Homo sapiens
aauaaauuuguaugcucaauua

SEQ ID NO: 224847 - RNA, 14 nt, Homo sapiens
uaacaccaugauua

SEQ ID NO: 224848 - RNA, 18 nt, Homo sapiens
augaucuaggaagacuuu

SEQ ID NO: 224849 - RNA, 22 nt, Homo sapiens
agccaaggccaaaggaagcaca

SEQ ID NO: 224850 - RNA, 15 nt, Homo sapiens
uccuucauucaaccc

SEQ ID NO: 224851 - RNA, 14 nt, Homo sapiens
ggucugugugauga

SEQ ID NO: 224852 - RNA, 21 nt, Homo sapiens
cugggguggggaccucaggcc

SEQ ID NO: 224853 - RNA, 21 nt, Homo sapiens
uauuuuuagacagagucucac

SEQ ID NO: 224854 - RNA, 16 nt, Homo sapiens
gaugccagggacccac

SEQ ID NO: 224855 - RNA, 14 nt, Homo sapiens
uagugguuacccag

SEQ ID NO: 224856 - RNA, 18 nt, Homo sapiens
gaguacuacaguccuccc

SEQ ID NO: 224857 - RNA, 13 nt, Homo sapiens
cucagcaaaagau

SEQ ID NO: 224858 - RNA, 22 nt, Homo sapiens
uuauauugccauuucuuccaca

SEQ ID NO: 224859 - RNA, 19 nt, Homo sapiens
augacaucagcaauacaga

SEQ ID NO: 224860 - RNA, 21 nt, Homo sapiens
auuaacuuuuauaaacuuuac

SEQ ID NO: 224861 - RNA, 19 nt, Homo sapiens
caggugugaaccaccacac

SEQ ID NO: 224862 - RNA, 12 nt, Homo sapiens
gaaccauaucaa

SEQ ID NO: 224863 - RNA, 23 nt, Homo sapiens
aggggagcaaaaucgaugcagug

SEQ ID NO: 224864 - RNA, 21 nt, Homo sapiens
ucuggagauaaaauaaaaaga

SEQ ID NO: 224865 - RNA, 14 nt, Homo sapiens
agcaaaagauucua

SEQ ID NO: 224866 - RNA, 14 nt, Homo sapiens
gaccagagcugcca

SEQ ID NO: 224867 - RNA, 15 nt, Homo sapiens
ggcacaccgggcacu

SEQ ID NO: 224868 - RNA, 15 nt, Homo sapiens
gcugggcuucagugg

SEQ ID NO: 224869 - RNA, 20 nt, Homo sapiens
ccugugaguacuacaguccu

SEQ ID NO: 224870 - RNA, 18 nt, Homo sapiens
guuuagcccaaaaccaag

SEQ ID NO: 224871 - RNA, 13 nt, Homo sapiens
ccaaugaugguca

SEQ ID NO: 224872 - RNA, 12 nt, Homo sapiens
uguuaugacucc

SEQ ID NO: 224873 - RNA, 18 nt, Homo sapiens
agugggcccaaugcacuu

SEQ ID NO: 224874 - RNA, 18 nt, Homo sapiens
agcugggacuacaggcac

SEQ ID NO: 224875 - RNA, 12 nt, Homo sapiens
agcuuuucccaa

SEQ ID NO: 224876 - RNA, 11 nt, Homo sapiens
accugaagucu

SEQ ID NO: 224877 - RNA, 21 nt, Homo sapiens
acgccacugcacuauagccua

SEQ ID NO: 224878 - RNA, 21 nt, Homo sapiens
acauacucugcuuagaauuug

SEQ ID NO: 224879 - RNA, 11 nt, Homo sapiens
gccuuacacaa

SEQ ID NO: 224880 - RNA, 16 nt, Homo sapiens
augcucuuuacuucau

SEQ ID NO: 224881 - RNA, 24 nt, Homo sapiens
cagcugacuuuucuguccgagcuu

SEQ ID NO: 224882 - RNA, 15 nt, Homo sapiens
ggaccagagcugcca

SEQ ID NO: 224883 - RNA, 14 nt, Homo sapiens
cucaccugccccuc

SEQ ID NO: 224884 - RNA, 12 nt, Homo sapiens
ccaaggugggag

SEQ ID NO: 224885 - RNA, 15 nt, Homo sapiens
cugggcuugucugua

SEQ ID NO: 224886 - RNA, 16 nt, Homo sapiens
uguucugggacacagu

SEQ ID NO: 224887 - RNA, 15 nt, Homo sapiens
gaggccucgacccac

SEQ ID NO: 224888 - RNA, 21 nt, Homo sapiens
gauucauauuuacuucuuaua

SEQ ID NO: 224889 - RNA, 21 nt, Homo sapiens
cuuuucgcaggauucuuccuc

SEQ ID NO: 224890 - RNA, 16 nt, Homo sapiens
agcucaccucucccuu

SEQ ID NO: 224891 - RNA, 14 nt, Homo sapiens
ucuaaagcugccag

SEQ ID NO: 224892 - RNA, 20 nt, Homo sapiens
cacagcuucauuuccugugu

SEQ ID NO: 224893 - RNA, 12 nt, Homo sapiens
ugggacacaguu

SEQ ID NO: 224894 - RNA, 11 nt, Homo sapiens
acugaccaguu

SEQ ID NO: 224895 - RNA, 20 nt, Homo sapiens
ggaaaagcugcugacagugu

SEQ ID NO: 224896 - RNA, 16 nt, Homo sapiens
acaagcugcacccuca

SEQ ID NO: 224897 - RNA, 18 nt, Homo sapiens
aaaugggggugcauuuga

SEQ ID NO: 224898 - RNA, 19 nt, Homo sapiens
aggaggggugugggcaccc

SEQ ID NO: 224899 - RNA, 22 nt, Homo sapiens
ggaaaauuuuaaaaauacagau

SEQ ID NO: 224900 - RNA, 20 nt, Homo sapiens
aacucuacccuggcacuaua

SEQ ID NO: 224901 - RNA, 22 nt, Homo sapiens
guagucaggugccucaagagaa

SEQ ID NO: 224902 - RNA, 13 nt, Homo sapiens
ggagaaaauggac

SEQ ID NO: 224903 - RNA, 19 nt, Homo sapiens
aacauguaauuaaguacua

SEQ ID NO: 224904 - RNA, 17 nt, Homo sapiens
caagagagacagcacag

SEQ ID NO: 224905 - RNA, 18 nt, Homo sapiens
gagaagagaaugcacaaa

SEQ ID NO: 224906 - RNA, 13 nt, Homo sapiens
aguguacauggaa

SEQ ID NO: 224907 - RNA, 22 nt, Homo sapiens
agacaaugugaaaagaaaaaug

SEQ ID NO: 224908 - RNA, 20 nt, Homo sapiens
aaccuggguaacuagggaag

SEQ ID NO: 224909 - RNA, 18 nt, Homo sapiens
ccaccucucucacuccuu

SEQ ID NO: 224910 - RNA, 22 nt, Homo sapiens
uaccugaagucuuuguacagac

SEQ ID NO: 224911 - RNA, 18 nt, Homo sapiens
cagcaagugagagcuggg

SEQ ID NO: 224912 - RNA, 9 nt, Homo sapiens
ucccagugc

SEQ ID NO: 224913 - RNA, 12 nt, Homo sapiens
cgaucuggguuc

SEQ ID NO: 224914 - RNA, 21 nt, Homo sapiens
acacagcucuucuccaggcug

SEQ ID NO: 224915 - RNA, 21 nt, Homo sapiens
cugggcagaaggaagacuuca

SEQ ID NO: 224916 - RNA, 14 nt, Homo sapiens
uggcuuuugugcau

SEQ ID NO: 224917 - RNA, 18 nt, Homo sapiens
gcaggcucucaggccagc

SEQ ID NO: 224918 - RNA, 12 nt, Homo sapiens
uugaccucaggu

SEQ ID NO: 224919 - RNA, 14 nt, Homo sapiens
gcccaaugcacuuu

SEQ ID NO: 224920 - RNA, 18 nt, Homo sapiens
acaugccucucucaggcc

SEQ ID NO: 224921 - RNA, 17 nt, Homo sapiens
ggagguacgaaaagagg

SEQ ID NO: 224922 - RNA, 14 nt, Homo sapiens
acuuguggacacag

SEQ ID NO: 224923 - RNA, 18 nt, Homo sapiens
auuuuagagacagaagaa

SEQ ID NO: 224924 - RNA, 16 nt, Homo sapiens
uagcugggacuacagg

SEQ ID NO: 224925 - RNA, 19 nt, Homo sapiens
gagacagaguuuucacucu

SEQ ID NO: 224926 - RNA, 19 nt, Homo sapiens
gggugacagagcaagugag

SEQ ID NO: 224927 - RNA, 16 nt, Homo sapiens
cuugaggcaacucauc

SEQ ID NO: 224928 - RNA, 13 nt, Homo sapiens
cuuagacaguccc

SEQ ID NO: 224929 - RNA, 22 nt, Homo sapiens
agcugggguggggaccucaggc

SEQ ID NO: 224930 - RNA, 21 nt, Homo sapiens
ucgagccacaaccgaccagau

SEQ ID NO: 224931 - RNA, 15 nt, Homo sapiens
ucaccaagcccaguu

SEQ ID NO: 224932 - RNA, 15 nt, Homo sapiens
gcuccuucuguccua

SEQ ID NO: 224933 - RNA, 14 nt, Homo sapiens
ugguggacaugcac

SEQ ID NO: 224934 - RNA, 15 nt, Homo sapiens
cacccugaaagcccu

SEQ ID NO: 224935 - RNA, 23 nt, Homo sapiens
cuaagugaggaugaaaaaauaac

SEQ ID NO: 224936 - RNA, 12 nt, Homo sapiens
gacuacaggugu

SEQ ID NO: 224937 - RNA, 20 nt, Homo sapiens
auacagacagagauggccau

SEQ ID NO: 224938 - RNA, 17 nt, Homo sapiens
cugggagagccuuccag

SEQ ID NO: 224939 - RNA, 19 nt, Homo sapiens
cacauuuauucugcucaca

SEQ ID NO: 224940 - RNA, 14 nt, Homo sapiens
augaaaauucuuga

SEQ ID NO: 224941 - RNA, 16 nt, Homo sapiens
uuggucccccuuccau

SEQ ID NO: 224942 - RNA, 18 nt, Homo sapiens
caggccuccccagcaccu

SEQ ID NO: 224943 - RNA, 17 nt, Homo sapiens
cuguucucugcccucca

SEQ ID NO: 224944 - RNA, 22 nt, Homo sapiens
ucgaauccagagagcagugugg

SEQ ID NO: 224945 - RNA, 16 nt, Homo sapiens
aaaggaugcccaaaga

SEQ ID NO: 224946 - RNA, 15 nt, Homo sapiens
uccaccugccaggga

SEQ ID NO: 224947 - RNA, 16 nt, Homo sapiens
ccuuucccaucuucca

SEQ ID NO: 224948 - RNA, 18 nt, Homo sapiens
auuuuuuugagacagagu

SEQ ID NO: 224949 - RNA, 16 nt, Homo sapiens
cuugguucccauuugc

SEQ ID NO: 224950 - RNA, 18 nt, Homo sapiens
ccccucaacaccucugca

SEQ ID NO: 224951 - RNA, 18 nt, Homo sapiens
gcgggggagcaggcagug

SEQ ID NO: 224952 - RNA, 17 nt, Homo sapiens
ccuaggcauuugcugaa

SEQ ID NO: 224953 - RNA, 21 nt, Homo sapiens
uuaugagaaaugccagugugc

SEQ ID NO: 224954 - RNA, 23 nt, Homo sapiens
acacuaacgauuuguuaaugaua

SEQ ID NO: 224955 - RNA, 12 nt, Homo sapiens
ugguaugaucac

SEQ ID NO: 224956 - RNA, 15 nt, Homo sapiens
uuccauggacuuugu

SEQ ID NO: 224957 - RNA, 12 nt, Homo sapiens
acauacucccau

SEQ ID NO: 224958 - RNA, 12 nt, Homo sapiens
aagcugggagaa

SEQ ID NO: 224959 - RNA, 22 nt, Homo sapiens
ccuucuuacuuaaccugaagcu

SEQ ID NO: 224960 - RNA, 22 nt, Homo sapiens
cucaagugauucuccugccuca

SEQ ID NO: 224961 - RNA, 12 nt, Homo sapiens
ucccaaacccuu

SEQ ID NO: 224962 - RNA, 17 nt, Homo sapiens
uaauaauaaaacaacag

SEQ ID NO: 224963 - RNA, 18 nt, Homo sapiens
auuaucuagauacuguau

SEQ ID NO: 224964 - RNA, 15 nt, Homo sapiens
gaagcauuuacuuug

SEQ ID NO: 224965 - RNA, 18 nt, Homo sapiens
aucuuccaaggguacuaa

SEQ ID NO: 224966 - RNA, 18 nt, Homo sapiens
guacuacaguccucccau

SEQ ID NO: 224967 - RNA, 16 nt, Homo sapiens
caggcagguccagggu

SEQ ID NO: 224968 - RNA, 21 nt, Homo sapiens
cacuugcagacucuacagagg

SEQ ID NO: 224969 - RNA, 18 nt, Homo sapiens
acuauaauguaagcucua

SEQ ID NO: 224970 - RNA, 17 nt, Homo sapiens
agacaccuugacagggc

SEQ ID NO: 224971 - RNA, 19 nt, Homo sapiens
ugcucacauaucugucauu

SEQ ID NO: 224972 - RNA, 19 nt, Homo sapiens
ccacuuucuagccagagga

SEQ ID NO: 224973 - RNA, 22 nt, Homo sapiens
ugcaagaauugaagcaggacua

SEQ ID NO: 224974 - RNA, 15 nt, Homo sapiens
ugggaggccauuugu

SEQ ID NO: 224975 - RNA, 14 nt, Homo sapiens
aagagaaaugagcu

SEQ ID NO: 224976 - RNA, 15 nt, Homo sapiens
caaaguagaagucuu

SEQ ID NO: 224977 - RNA, 19 nt, Homo sapiens
cacauguccaagaagccca

SEQ ID NO: 224978 - RNA, 22 nt, Homo sapiens
aagcgugguggacaugcacagc

SEQ ID NO: 224979 - RNA, 12 nt, Homo sapiens
cugcuccagcug

SEQ ID NO: 224980 - RNA, 15 nt, Homo sapiens
auuuuuuugagacag

SEQ ID NO: 224981 - RNA, 14 nt, Homo sapiens
cucuacaaaaagca

SEQ ID NO: 224982 - RNA, 16 nt, Homo sapiens
ugaguacguugugcau

SEQ ID NO: 224983 - RNA, 16 nt, Homo sapiens
aaaccuguuucugcag

SEQ ID NO: 224984 - RNA, 22 nt, Homo sapiens
acuaaggugugcucugaucauc

SEQ ID NO: 224985 - RNA, 18 nt, Homo sapiens
auuccuguucccaugaga

SEQ ID NO: 224986 - RNA, 18 nt, Homo sapiens
aaagggcccagagagggu

SEQ ID NO: 224987 - RNA, 20 nt, Homo sapiens
cugggagagccuuccagggg

SEQ ID NO: 224988 - RNA, 15 nt, Homo sapiens
ccagcucugguccau

SEQ ID NO: 224989 - RNA, 23 nt, Homo sapiens
gcugagggugagugggugaauaa

SEQ ID NO: 224990 - RNA, 14 nt, Homo sapiens
cugcacuugcagac

SEQ ID NO: 224991 - RNA, 20 nt, Homo sapiens
cagaaggaagacuucauccc

SEQ ID NO: 224992 - RNA, 18 nt, Homo sapiens
cuugaccgugaggccaga

SEQ ID NO: 224993 - RNA, 18 nt, Homo sapiens
cacuaauggggcggugag

SEQ ID NO: 224994 - RNA, 20 nt, Homo sapiens
cuuuacuucauggacuucca

SEQ ID NO: 224995 - RNA, 23 nt, Homo sapiens
acuaaugaggaaacugcacuguu

SEQ ID NO: 224996 - RNA, 21 nt, Homo sapiens
aacagguuuaaaaauccccaa

SEQ ID NO: 224997 - RNA, 15 nt, Homo sapiens
aagagaaaugagcuu

SEQ ID NO: 224998 - RNA, 12 nt, Homo sapiens
uaaauagcucag

SEQ ID NO: 224999 - RNA, 20 nt, Homo sapiens
gcagaaggaagacuucaucc

SEQ ID NO: 225000 - RNA, 21 nt, Homo sapiens
cucugaggacacuaaccacgc

SEQ ID NO: 225001 - RNA, 15 nt, Homo sapiens
uccagcucaccagcc

SEQ ID NO: 225002 - RNA, 21 nt, Homo sapiens
augagccucagcauccuggca

SEQ ID NO: 225003 - RNA, 20 nt, Homo sapiens
acgccagauucuuuccugag

SEQ ID NO: 225004 - RNA, 19 nt, Homo sapiens
auauuuugcuuugugauuu

SEQ ID NO: 225005 - RNA, 15 nt, Homo sapiens
cauuuuuuaaaugca

SEQ ID NO: 225006 - RNA, 16 nt, Homo sapiens
cugcaucaagauguga

SEQ ID NO: 225007 - RNA, 12 nt, Homo sapiens
acagacaaagcg

SEQ ID NO: 225008 - RNA, 23 nt, Homo sapiens
caacugcaucaagaugugacaug

SEQ ID NO: 225009 - RNA, 19 nt, Homo sapiens
gauacaggaaaagcugcug

SEQ ID NO: 225010 - RNA, 23 nt, Homo sapiens
uuccucauuagcauuuugcuaaa

SEQ ID NO: 225011 - RNA, 14 nt, Homo sapiens
ggcuggguggcacc

SEQ ID NO: 225012 - RNA, 11 nt, Homo sapiens
gaccucaggug

SEQ ID NO: 225013 - RNA, 17 nt, Homo sapiens
ugcacaugcacgugugu

SEQ ID NO: 225014 - RNA, 18 nt, Homo sapiens
ucccccugacaacacuca

SEQ ID NO: 225015 - RNA, 23 nt, Homo sapiens
gagccuccugcccuuaccugcca

SEQ ID NO: 225016 - RNA, 20 nt, Homo sapiens
uuccaauuuacauacucugc

SEQ ID NO: 225017 - RNA, 16 nt, Homo sapiens
gcacaugccucucuca

SEQ ID NO: 225018 - RNA, 23 nt, Homo sapiens
augugagaccauuuagcacacug

SEQ ID NO: 225019 - RNA, 17 nt, Homo sapiens
caucaagaugugacaug

SEQ ID NO: 225020 - RNA, 13 nt, Homo sapiens
aaugccagugugc

SEQ ID NO: 225021 - RNA, 18 nt, Homo sapiens
aaaggaugcacagaguug

SEQ ID NO: 225022 - RNA, 16 nt, Homo sapiens
uucauacccuguuacc

SEQ ID NO: 225023 - RNA, 16 nt, Homo sapiens
aggccauuuguguuua

SEQ ID NO: 225024 - RNA, 15 nt, Homo sapiens
auuuuauuaugcaug

SEQ ID NO: 225025 - RNA, 16 nt, Homo sapiens
ugaauuuuggcugugu

SEQ ID NO: 225026 - RNA, 14 nt, Homo sapiens
ccagcuuaucucag

SEQ ID NO: 225027 - RNA, 24 nt, Homo sapiens
ugugcucugaucauccacugugcc

SEQ ID NO: 225028 - RNA, 20 nt, Homo sapiens
aaagacuguacaaaguagaa

SEQ ID NO: 225029 - RNA, 17 nt, Homo sapiens
cacuaaggugugcucug

SEQ ID NO: 225030 - RNA, 13 nt, Homo sapiens
auacacuuacacu

SEQ ID NO: 225031 - RNA, 17 nt, Homo sapiens
auaaugacuuaagcaca

SEQ ID NO: 225032 - RNA, 15 nt, Homo sapiens
ucaaggcugcaguga

SEQ ID NO: 225033 - RNA, 14 nt, Homo sapiens
gacagagucucacu

SEQ ID NO: 225034 - RNA, 20 nt, Homo sapiens
gcucaggugucccugcacuu

SEQ ID NO: 225035 - RNA, 19 nt, Homo sapiens
uggacccugaggcccagag

SEQ ID NO: 225036 - RNA, 23 nt, Homo sapiens
gugagcaauccugcaagaacaag

SEQ ID NO: 225037 - RNA, 18 nt, Homo sapiens
accaacauacucccaucu

SEQ ID NO: 225038 - RNA, 15 nt, Homo sapiens
ggacuuggaagcucc

SEQ ID NO: 225039 - RNA, 23 nt, Homo sapiens
aaagcagugcaugcugucccuua

SEQ ID NO: 225040 - RNA, 22 nt, Homo sapiens
guuggccagugugacaaggauu

SEQ ID NO: 225041 - RNA, 20 nt, Homo sapiens
aagccagcaggcucucaggc

SEQ ID NO: 225042 - RNA, 15 nt, Homo sapiens
ucuacugaggugcua

SEQ ID NO: 225043 - RNA, 16 nt, Homo sapiens
auguucugggacacag

SEQ ID NO: 225044 - RNA, 19 nt, Homo sapiens
aaugaugauccuaggcauu

SEQ ID NO: 225045 - RNA, 20 nt, Homo sapiens
aguggcuaccuacauacaau

SEQ ID NO: 225046 - RNA, 13 nt, Homo sapiens
acugcagcuuugu

SEQ ID NO: 225047 - RNA, 20 nt, Homo sapiens
guguuuauauauaagccaaa

SEQ ID NO: 225048 - RNA, 20 nt, Homo sapiens
acaagcgugagccacugcac

SEQ ID NO: 225049 - RNA, 16 nt, Homo sapiens
augcucugcauguuac

SEQ ID NO: 225050 - RNA, 22 nt, Homo sapiens
aucacggcucacugcagccuca

SEQ ID NO: 225051 - RNA, 16 nt, Homo sapiens
ugaaaauucuugauaa

SEQ ID NO: 225052 - RNA, 21 nt, Homo sapiens
gagggcacagaaaauggaaga

SEQ ID NO: 225053 - RNA, 20 nt, Homo sapiens
acaguuaagagaaaugagcu

SEQ ID NO: 225054 - RNA, 16 nt, Homo sapiens
cagaguugaagacaga

SEQ ID NO: 225055 - RNA, 17 nt, Homo sapiens
acaccaugauuaaccac

SEQ ID NO: 225056 - RNA, 18 nt, Homo sapiens
caacaggguuuuuuucca

SEQ ID NO: 225057 - RNA, 17 nt, Homo sapiens
ucuagcauggcugccaa

SEQ ID NO: 225058 - RNA, 23 nt, Homo sapiens
ucuuauauugccauuucuuccac

SEQ ID NO: 225059 - RNA, 22 nt, Homo sapiens
cacugugcugagucugaaggcu

SEQ ID NO: 225060 - RNA, 13 nt, Homo sapiens
gcaggauucuucc

SEQ ID NO: 225061 - RNA, 15 nt, Homo sapiens
auacauuugauaaag

SEQ ID NO: 225062 - RNA, 20 nt, Homo sapiens
agcugggagaaccaaaaaga

SEQ ID NO: 225063 - RNA, 20 nt, Homo sapiens
ucuguuggccagugugacaa

SEQ ID NO: 225064 - RNA, 14 nt, Homo sapiens
cauaacucugauua

SEQ ID NO: 225065 - RNA, 15 nt, Homo sapiens
ccucaccccacugug

SEQ ID NO: 225066 - RNA, 16 nt, Homo sapiens
acgccuguaauccuag

SEQ ID NO: 225067 - RNA, 20 nt, Homo sapiens
agccgagauugcaccacugc

SEQ ID NO: 225068 - RNA, 17 nt, Homo sapiens
gcugggagagccuucca

SEQ ID NO: 225069 - RNA, 12 nt, Homo sapiens
aggaagcucagg

SEQ ID NO: 225070 - RNA, 18 nt, Homo sapiens
gcucacauaucugucauu

SEQ ID NO: 225071 - RNA, 15 nt, Homo sapiens
aaggcggugagcaau

SEQ ID NO: 225072 - RNA, 18 nt, Homo sapiens
ccacaaccgaccagaugc

SEQ ID NO: 225073 - RNA, 18 nt, Homo sapiens
aaccacugcgaccacaag

SEQ ID NO: 225074 - RNA, 14 nt, Homo sapiens
ggcagcucagagag

SEQ ID NO: 225075 - RNA, 20 nt, Homo sapiens
uaggagggcuggcaacuuag

SEQ ID NO: 225076 - RNA, 17 nt, Homo sapiens
cuguucagcugguugag

SEQ ID NO: 225077 - RNA, 15 nt, Homo sapiens
uucagcugguugagg

SEQ ID NO: 225078 - RNA, 18 nt, Homo sapiens
aauacaccacuacauucu

SEQ ID NO: 225079 - RNA, 20 nt, Homo sapiens
cccagcucugguccauagag

SEQ ID NO: 225080 - RNA, 14 nt, Homo sapiens
gugggauccuccag

SEQ ID NO: 225081 - RNA, 12 nt, Homo sapiens
acagccaugauu

SEQ ID NO: 225082 - RNA, 20 nt, Homo sapiens
uugugauacaaugcugugcc

SEQ ID NO: 225083 - RNA, 15 nt, Homo sapiens
agguacgaaaagagg

SEQ ID NO: 225084 - RNA, 19 nt, Homo sapiens
auaauguuaacauggacau

SEQ ID NO: 225085 - RNA, 13 nt, Homo sapiens
ucucucuucucca

SEQ ID NO: 225086 - RNA, 16 nt, Homo sapiens
cucuuagaaaaaccac

SEQ ID NO: 225087 - RNA, 15 nt, Homo sapiens
gccugggaucccuca

SEQ ID NO: 225088 - RNA, 21 nt, Homo sapiens
cuggccccucagggucccugg

SEQ ID NO: 225089 - RNA, 14 nt, Homo sapiens
guaagcucuacuga

SEQ ID NO: 225090 - RNA, 13 nt, Homo sapiens
aaacucaccugcc

SEQ ID NO: 225091 - RNA, 23 nt, Homo sapiens
cuugcaaaguaucccuacuguaa

SEQ ID NO: 225092 - RNA, 16 nt, Homo sapiens
aaagaagauucugugg

SEQ ID NO: 225093 - RNA, 21 nt, Homo sapiens
uucgaauccagagagcagugu

SEQ ID NO: 225094 - RNA, 14 nt, Homo sapiens
gacaggaccaggga

SEQ ID NO: 225095 - RNA, 18 nt, Homo sapiens
ucuaaaggcuaccuuugu

SEQ ID NO: 225096 - RNA, 13 nt, Homo sapiens
ccaggcugggcug

SEQ ID NO: 225097 - RNA, 15 nt, Homo sapiens
ccugccaggaagcca

SEQ ID NO: 225098 - RNA, 15 nt, Homo sapiens
aaugagccuggcaag

SEQ ID NO: 225099 - RNA, 16 nt, Homo sapiens
uggggagaaaguacuu

SEQ ID NO: 225100 - RNA, 23 nt, Homo sapiens
ugugaaugaugauccuaggcauu

SEQ ID NO: 225101 - RNA, 16 nt, Homo sapiens
uaacaggaaaauuuua

SEQ ID NO: 225102 - RNA, 21 nt, Homo sapiens
ugugugcacguacacacacau

SEQ ID NO: 225103 - RNA, 14 nt, Homo sapiens
aggggcaguggugg

SEQ ID NO: 225104 - RNA, 14 nt, Homo sapiens
agaguaacccuguc

SEQ ID NO: 225105 - RNA, 15 nt, Homo sapiens
uggggaccucaggcc

SEQ ID NO: 225106 - RNA, 23 nt, Homo sapiens
aacacucacauuuauucugcuca

SEQ ID NO: 225107 - RNA, 20 nt, Homo sapiens
aaagcuuaccaaggggaaug

SEQ ID NO: 225108 - RNA, 15 nt, Homo sapiens
uagcauggcugccaa

SEQ ID NO: 225109 - RNA, 14 nt, Homo sapiens
uuugauucagacag

SEQ ID NO: 225110 - RNA, 14 nt, Homo sapiens
uccuuucaccacau

SEQ ID NO: 225111 - RNA, 19 nt, Homo sapiens
accagagcugccaccugcc

SEQ ID NO: 225112 - RNA, 14 nt, Homo sapiens
uagaguugauacua

SEQ ID NO: 225113 - RNA, 14 nt, Homo sapiens
uaacagaaauguac

SEQ ID NO: 225114 - RNA, 16 nt, Homo sapiens
uccccaagcaguguga

SEQ ID NO: 225115 - RNA, 20 nt, Homo sapiens
ugcccaggcuggcgugcagu

SEQ ID NO: 225116 - RNA, 14 nt, Homo sapiens
auauauaagccaaa

SEQ ID NO: 225117 - RNA, 17 nt, Homo sapiens
cacgcuggagugcagug

SEQ ID NO: 225118 - RNA, 14 nt, Homo sapiens
gagcccuuaugaca

SEQ ID NO: 225119 - RNA, 22 nt, Homo sapiens
acugaguacguugugcauuugg

SEQ ID NO: 225120 - RNA, 19 nt, Homo sapiens
gcagagguugggaggccau

SEQ ID NO: 225121 - RNA, 12 nt, Homo sapiens
uaagccaaaaaa

SEQ ID NO: 225122 - RNA, 20 nt, Homo sapiens
augccaugaggaacaaggca

SEQ ID NO: 225123 - RNA, 16 nt, Homo sapiens
cugccugaagucacac

SEQ ID NO: 225124 - RNA, 20 nt, Homo sapiens
cucuuccacuuugauaccau

SEQ ID NO: 225125 - RNA, 13 nt, Homo sapiens
gagacucugucuc

SEQ ID NO: 225126 - RNA, 20 nt, Homo sapiens
cugggauuacaggugugaac

SEQ ID NO: 225127 - RNA, 20 nt, Homo sapiens
uugaguccagaaguuugaga

SEQ ID NO: 225128 - RNA, 13 nt, Homo sapiens
gcggcuggcagcc

SEQ ID NO: 225129 - RNA, 21 nt, Homo sapiens
gcacagcugggguggggaccu

SEQ ID NO: 225130 - RNA, 16 nt, Homo sapiens
auuugcugaauacaga

SEQ ID NO: 225131 - RNA, 22 nt, Homo sapiens
acauguuuuucuucucccucag

SEQ ID NO: 225132 - RNA, 21 nt, Homo sapiens
uucauuuaggugaggaagcaa

SEQ ID NO: 225133 - RNA, 16 nt, Homo sapiens
uucaguguacauggaa

SEQ ID NO: 225134 - RNA, 17 nt, Homo sapiens
auauugcugauggugca

SEQ ID NO: 225135 - RNA, 16 nt, Homo sapiens
uaacagaaauguacag

SEQ ID NO: 225136 - RNA, 15 nt, Homo sapiens
ugaagucacacagug

SEQ ID NO: 225137 - RNA, 22 nt, Homo sapiens
acucauucuucuguacgucuga

SEQ ID NO: 225138 - RNA, 22 nt, Homo sapiens
acugcaucguuucaucuuccaa

SEQ ID NO: 225139 - RNA, 22 nt, Homo sapiens
ugaacuggguacuuguggacac

SEQ ID NO: 225140 - RNA, 22 nt, Homo sapiens
guacauggaauaacauguaauu

SEQ ID NO: 225141 - RNA, 23 nt, Homo sapiens
aucacggcucacugcagccucaa

SEQ ID NO: 225142 - RNA, 14 nt, Homo sapiens
uaucagaauucuca

SEQ ID NO: 225143 - RNA, 16 nt, Homo sapiens
cuagcauggcugccaa

SEQ ID NO: 225144 - RNA, 20 nt, Homo sapiens
augagaggaaaucaccgaaa

SEQ ID NO: 225145 - RNA, 19 nt, Homo sapiens
ugagcacaaagguagcuuu

SEQ ID NO: 225146 - RNA, 13 nt, Homo sapiens
uugaacuuugacc

SEQ ID NO: 225147 - RNA, 14 nt, Homo sapiens
uguggcgcagcaua

SEQ ID NO: 225148 - RNA, 20 nt, Homo sapiens
uggaugcagccucacagucc

SEQ ID NO: 225149 - RNA, 22 nt, Homo sapiens
uagucccauugauguacuuuac

SEQ ID NO: 225150 - RNA, 16 nt, Homo sapiens
uuuaaaugcaccugga

SEQ ID NO: 225151 - RNA, 16 nt, Homo sapiens
auucauaaugacuuaa

SEQ ID NO: 225152 - RNA, 15 nt, Homo sapiens
augcuuguacauaau

SEQ ID NO: 225153 - RNA, 15 nt, Homo sapiens
uuuuaaaugcaccug

SEQ ID NO: 225154 - RNA, 13 nt, Homo sapiens
augaauacagaua

SEQ ID NO: 225155 - RNA, 22 nt, Homo sapiens
cucaaacucuugaccucaggug

SEQ ID NO: 225156 - RNA, 19 nt, Homo sapiens
cauuaucuagauacuguau

SEQ ID NO: 225157 - RNA, 16 nt, Homo sapiens
augggggugcauuuga

SEQ ID NO: 225158 - RNA, 21 nt, Homo sapiens
aaauucucuuuccuguagucc

SEQ ID NO: 225159 - RNA, 20 nt, Homo sapiens
aagcauaaaaauuagccaag

SEQ ID NO: 225160 - RNA, 16 nt, Homo sapiens
cugauggugcaaugac

SEQ ID NO: 225161 - RNA, 16 nt, Homo sapiens
cauccacugugccaug

SEQ ID NO: 225162 - RNA, 22 nt, Homo sapiens
augauccuaggcauuugcugaa

SEQ ID NO: 225163 - RNA, 15 nt, Homo sapiens
caaacucaccugccc

SEQ ID NO: 225164 - RNA, 21 nt, Homo sapiens
ugcagaaagaccgugugugaa

SEQ ID NO: 225165 - RNA, 22 nt, Homo sapiens
gaggcugggcucccuucccacc

SEQ ID NO: 225166 - RNA, 17 nt, Homo sapiens
auauugccauuucuucc

SEQ ID NO: 225167 - RNA, 19 nt, Homo sapiens
cagugccaaaaacaacaac

SEQ ID NO: 225168 - RNA, 14 nt, Homo sapiens
ugagucgaggacag

SEQ ID NO: 225169 - RNA, 13 nt, Homo sapiens
gugauacaaugcu

SEQ ID NO: 225170 - RNA, 24 nt, Homo sapiens
uuuccuggcacugcuuccagugag

SEQ ID NO: 225171 - RNA, 15 nt, Homo sapiens
caccaaccacugcga

SEQ ID NO: 225172 - RNA, 16 nt, Homo sapiens
auccacccaccucagc

SEQ ID NO: 225173 - RNA, 14 nt, Homo sapiens
gcuggagugcagug

SEQ ID NO: 225174 - RNA, 14 nt, Homo sapiens
cauggaaguacuau

SEQ ID NO: 225175 - RNA, 19 nt, Homo sapiens
gcauuuacuuuguguucac

SEQ ID NO: 225176 - RNA, 22 nt, Homo sapiens
aaugaaaccugugucucugaga

SEQ ID NO: 225177 - RNA, 15 nt, Homo sapiens
cuuguguuaugaagc

SEQ ID NO: 225178 - RNA, 20 nt, Homo sapiens
agccccaucccaaacccuuc

SEQ ID NO: 225179 - RNA, 14 nt, Homo sapiens
auaaagcagcguuu

SEQ ID NO: 225180 - RNA, 12 nt, Homo sapiens
cacauuccugau

SEQ ID NO: 225181 - RNA, 21 nt, Homo sapiens
aaagguagcuuuucccaaacu

SEQ ID NO: 225182 - RNA, 23 nt, Homo sapiens
ugcauaccacuuuuguucuuggu

SEQ ID NO: 225183 - RNA, 19 nt, Homo sapiens
ggaagccacagggugagca

SEQ ID NO: 225184 - RNA, 15 nt, Homo sapiens
uccucccaccucagc

SEQ ID NO: 225185 - RNA, 18 nt, Homo sapiens
agcaauacagacuacuuc

SEQ ID NO: 225186 - RNA, 19 nt, Homo sapiens
agaaaauggacguguuaug

SEQ ID NO: 225187 - RNA, 21 nt, Homo sapiens
uguuaacauggacaugaucuu

SEQ ID NO: 225188 - RNA, 14 nt, Homo sapiens
ggguaucuggugac

SEQ ID NO: 225189 - RNA, 14 nt, Homo sapiens
gauucauaaugacu

SEQ ID NO: 225190 - RNA, 23 nt, Homo sapiens
ugcagccucacaguccuuaccag

SEQ ID NO: 225191 - RNA, 16 nt, Homo sapiens
ugaauaauacaguauc

SEQ ID NO: 225192 - RNA, 16 nt, Homo sapiens
aaauucaugcugcuua

SEQ ID NO: 225193 - RNA, 19 nt, Homo sapiens
ugccagcuuaucucagggg

SEQ ID NO: 225194 - RNA, 14 nt, Homo sapiens
agagaaaugagcug

SEQ ID NO: 225195 - RNA, 15 nt, Homo sapiens
ccaaaucagcugcua

SEQ ID NO: 225196 - RNA, 20 nt, Homo sapiens
aacuuuguuuagcccaaaac

SEQ ID NO: 225197 - RNA, 17 nt, Homo sapiens
agaccaucccugaaggc

SEQ ID NO: 225198 - RNA, 12 nt, Homo sapiens
auucuucuguac

SEQ ID NO: 225199 - RNA, 15 nt, Homo sapiens
cagugcccccuggug

SEQ ID NO: 225200 - RNA, 13 nt, Homo sapiens
uggcccacugcau

SEQ ID NO: 225201 - RNA, 17 nt, Homo sapiens
cugccugaagucacaca

SEQ ID NO: 225202 - RNA, 14 nt, Homo sapiens
uccaaggguacuaa

SEQ ID NO: 225203 - RNA, 21 nt, Homo sapiens
auacauaaacaagaccacguu

SEQ ID NO: 225204 - RNA, 16 nt, Homo sapiens
caggcaagcaccuccu

SEQ ID NO: 225205 - RNA, 20 nt, Homo sapiens
uguaauuugugauacaaugc

SEQ ID NO: 225206 - RNA, 14 nt, Homo sapiens
ugugccaugugcca

SEQ ID NO: 225207 - RNA, 14 nt, Homo sapiens
cuccccgggcagca

SEQ ID NO: 225208 - RNA, 18 nt, Homo sapiens
agucccaccuuggcugca

SEQ ID NO: 225209 - RNA, 20 nt, Homo sapiens
aggaagccucccacgacugc

SEQ ID NO: 225210 - RNA, 17 nt, Homo sapiens
ucagaucucuaacuuca

SEQ ID NO: 225211 - RNA, 11 nt, Homo sapiens
agaaaaaccac

SEQ ID NO: 225212 - RNA, 13 nt, Homo sapiens
uacaggaaguacu

SEQ ID NO: 225213 - RNA, 16 nt, Homo sapiens
ugccagcuuaucucag

SEQ ID NO: 225214 - RNA, 21 nt, Homo sapiens
aguucagccugggugugugaa

SEQ ID NO: 225215 - RNA, 14 nt, Homo sapiens
uugcaccacugcac

SEQ ID NO: 225216 - RNA, 21 nt, Homo sapiens
acugcauaugaaaggacacua

SEQ ID NO: 225217 - RNA, 15 nt, Homo sapiens
ccuuagaagucacac

SEQ ID NO: 225218 - RNA, 16 nt, Homo sapiens
ccuaguuccaccauca

SEQ ID NO: 225219 - RNA, 19 nt, Homo sapiens
accucagccucccaaagug

SEQ ID NO: 225220 - RNA, 13 nt, Homo sapiens
auccacugugcca

SEQ ID NO: 225221 - RNA, 15 nt, Homo sapiens
ccuaggcauuugcug

SEQ ID NO: 225222 - RNA, 16 nt, Homo sapiens
ugacuuaagcacacuu

SEQ ID NO: 225223 - RNA, 16 nt, Homo sapiens
cacuucccuacaugga

SEQ ID NO: 225224 - RNA, 15 nt, Homo sapiens
ugggagaaccaaaaa

SEQ ID NO: 225225 - RNA, 15 nt, Homo sapiens
agugagcaucaugga

SEQ ID NO: 225226 - RNA, 14 nt, Homo sapiens
ugaccucaggugau

SEQ ID NO: 225227 - RNA, 15 nt, Homo sapiens
agcccugagcuuucu

SEQ ID NO: 225228 - RNA, 15 nt, Homo sapiens
ugaggcugggcuccc

SEQ ID NO: 225229 - RNA, 19 nt, Homo sapiens
gagugagacucugucucaa

SEQ ID NO: 225230 - RNA, 19 nt, Homo sapiens
uccaaaguacacuguuuca

SEQ ID NO: 225231 - RNA, 23 nt, Homo sapiens
ucuaaugaaaccugugucucuga

SEQ ID NO: 225232 - RNA, 16 nt, Homo sapiens
gaucaaaguugaugaa

SEQ ID NO: 225233 - RNA, 19 nt, Homo sapiens
cuuucaccacaugugcaca

SEQ ID NO: 225234 - RNA, 20 nt, Homo sapiens
cuuucuucccuacaguugaa

SEQ ID NO: 225235 - RNA, 18 nt, Homo sapiens
caagucaagugaaaaagg

SEQ ID NO: 225236 - RNA, 16 nt, Homo sapiens
acugacauuguuggcc

SEQ ID NO: 225237 - RNA, 16 nt, Homo sapiens
cagacaggaccaggga

SEQ ID NO: 225238 - RNA, 18 nt, Homo sapiens
ggccagagggagugacag

SEQ ID NO: 225239 - RNA, 16 nt, Homo sapiens
uggggauaugauuuaa

SEQ ID NO: 225240 - RNA, 18 nt, Homo sapiens
gcuucaguggcagcugcu

SEQ ID NO: 225241 - RNA, 16 nt, Homo sapiens
acuaaaaggugaccaa

SEQ ID NO: 225242 - RNA, 9 nt, Homo sapiens
ucuuuccau

SEQ ID NO: 225243 - RNA, 13 nt, Homo sapiens
auuuauucugcuc

SEQ ID NO: 225244 - RNA, 20 nt, Homo sapiens
uacagauagauauaugcucu

SEQ ID NO: 225245 - RNA, 21 nt, Homo sapiens
guggguuucuaaagcugccag

SEQ ID NO: 225246 - RNA, 18 nt, Homo sapiens
ucuguacgucugacaggc

SEQ ID NO: 225247 - RNA, 13 nt, Homo sapiens
auauaacuuuuuc

SEQ ID NO: 225248 - RNA, 18 nt, Homo sapiens
cuaagcuauucaguaaua

SEQ ID NO: 225249 - RNA, 15 nt, Homo sapiens
aggaagacaauguga

SEQ ID NO: 225250 - RNA, 18 nt, Homo sapiens
gauuacaggugugaacca

SEQ ID NO: 225251 - RNA, 19 nt, Homo sapiens
gcagauacaggaaaagcug

SEQ ID NO: 225252 - RNA, 19 nt, Homo sapiens
uuuugucuaugggacucaa

SEQ ID NO: 225253 - RNA, 15 nt, Homo sapiens
uguacagacaacaaa

SEQ ID NO: 225254 - RNA, 15 nt, Homo sapiens
ggcuaugugagcaca

SEQ ID NO: 225255 - RNA, 22 nt, Homo sapiens
ccugaagucuuuguacagacaa

SEQ ID NO: 225256 - RNA, 15 nt, Homo sapiens
uaggaagacuuugga

SEQ ID NO: 225257 - RNA, 15 nt, Homo sapiens
uguuucugaaaggga

SEQ ID NO: 225258 - RNA, 15 nt, Homo sapiens
uggccucccaacuca

SEQ ID NO: 225259 - RNA, 18 nt, Homo sapiens
ggcacucagaagacacug

SEQ ID NO: 225260 - RNA, 23 nt, Homo sapiens
aggccuggccagaugcaccagcc

SEQ ID NO: 225261 - RNA, 21 nt, Homo sapiens
gccgagaucacgccacugcac

SEQ ID NO: 225262 - RNA, 23 nt, Homo sapiens
aaaacauuuuacuuuaaaaggag

SEQ ID NO: 225263 - RNA, 19 nt, Homo sapiens
gaagucacacaguauuacu

SEQ ID NO: 225264 - RNA, 12 nt, Homo sapiens
uuucauugcugg

SEQ ID NO: 225265 - RNA, 19 nt, Homo sapiens
uccucuccccagcaaguga

SEQ ID NO: 225266 - RNA, 14 nt, Homo sapiens
auccuaggcauuug

SEQ ID NO: 225267 - RNA, 13 nt, Homo sapiens
gaaaugccagugu

SEQ ID NO: 225268 - RNA, 19 nt, Homo sapiens
ggagcugccuguucagcuc

SEQ ID NO: 225269 - RNA, 21 nt, Homo sapiens
acugcacuauagccuagguga

SEQ ID NO: 225270 - RNA, 14 nt, Homo sapiens
ucacugcaaccucc

SEQ ID NO: 225271 - RNA, 16 nt, Homo sapiens
uggcuuuugugcauua

SEQ ID NO: 225272 - RNA, 17 nt, Homo sapiens
agacacaggcccggcuc

SEQ ID NO: 225273 - RNA, 21 nt, Homo sapiens
auuguuagucucuugauucau

SEQ ID NO: 225274 - RNA, 16 nt, Homo sapiens
cugcccuuaccugcca

SEQ ID NO: 225275 - RNA, 19 nt, Homo sapiens
cugauucccaagcucugcu

SEQ ID NO: 225276 - RNA, 21 nt, Homo sapiens
accagcagagcaccuuagaca

SEQ ID NO: 225277 - RNA, 17 nt, Homo sapiens
aggugaggaagcaaaag

SEQ ID NO: 225278 - RNA, 23 nt, Homo sapiens
cuaacuuuccuucauucaaccca

SEQ ID NO: 225279 - RNA, 17 nt, Homo sapiens
guaugaucacggcucac

SEQ ID NO: 225280 - RNA, 13 nt, Homo sapiens
cuuuugugcauua

SEQ ID NO: 225281 - RNA, 12 nt, Homo sapiens
ccacuucugcca

SEQ ID NO: 225282 - RNA, 19 nt, Homo sapiens
ggaugcagccucacagucc

SEQ ID NO: 225283 - RNA, 13 nt, Homo sapiens
aggugacagagug

SEQ ID NO: 225284 - RNA, 17 nt, Homo sapiens
gucucauacucaccuca

SEQ ID NO: 225285 - RNA, 22 nt, Homo sapiens
gacugaguacguugugcauuug

SEQ ID NO: 225286 - RNA, 21 nt, Homo sapiens
gaguugauucagcucugcaag

SEQ ID NO: 225287 - RNA, 20 nt, Homo sapiens
ugagucaccaagcccaguua

SEQ ID NO: 225288 - RNA, 14 nt, Homo sapiens
uguguuaucucuua

SEQ ID NO: 225289 - RNA, 18 nt, Homo sapiens
cuccaagaccuucuccuu

SEQ ID NO: 225290 - RNA, 13 nt, Homo sapiens
auagacaauuuau

SEQ ID NO: 225291 - RNA, 16 nt, Homo sapiens
cuugaaugaugccaug

SEQ ID NO: 225292 - RNA, 14 nt, Homo sapiens
acauucuguuaauc

SEQ ID NO: 225293 - RNA, 20 nt, Homo sapiens
ccaaaaaaugcuugcuucaa

SEQ ID NO: 225294 - RNA, 16 nt, Homo sapiens
agcgugugacuacucc

SEQ ID NO: 225295 - RNA, 11 nt, Homo sapiens
ggggugcccuc

SEQ ID NO: 225296 - RNA, 16 nt, Homo sapiens
aaugacuuaagcacac

SEQ ID NO: 225297 - RNA, 21 nt, Homo sapiens
gcaugugaugagaggaaauca

SEQ ID NO: 225298 - RNA, 17 nt, Homo sapiens
cugggguggggaccuca

SEQ ID NO: 225299 - RNA, 18 nt, Homo sapiens
gaggacacuaaccacgcu

SEQ ID NO: 225300 - RNA, 19 nt, Homo sapiens
gaaaaaccaccaccaucac

SEQ ID NO: 225301 - RNA, 13 nt, Homo sapiens
ucuucucuacucu

SEQ ID NO: 225302 - RNA, 20 nt, Homo sapiens
aguaacccugucuaaugaaa

SEQ ID NO: 225303 - RNA, 19 nt, Homo sapiens
gccagcuuaucucaggggu

SEQ ID NO: 225304 - RNA, 23 nt, Homo sapiens
ucuuauuuaaugaaagacuguac

SEQ ID NO: 225305 - RNA, 16 nt, Homo sapiens
auuuuuagacagaguc

SEQ ID NO: 225306 - RNA, 13 nt, Homo sapiens
ggacuacaggcac

SEQ ID NO: 225307 - RNA, 15 nt, Homo sapiens
cuaaugaaaccugug

SEQ ID NO: 225308 - RNA, 17 nt, Homo sapiens
ugcccuaaaguguauuu

SEQ ID NO: 225309 - RNA, 16 nt, Homo sapiens
ccgcacugggcuuggg

SEQ ID NO: 225310 - RNA, 16 nt, Homo sapiens
aaauuuguaugcucaa

SEQ ID NO: 225311 - RNA, 20 nt, Homo sapiens
uugagcucaggaguuugaga

SEQ ID NO: 225312 - RNA, 13 nt, Homo sapiens
cugauggugcaau

SEQ ID NO: 225313 - RNA, 14 nt, Homo sapiens
aaggaagcacaugc

SEQ ID NO: 225314 - RNA, 20 nt, Homo sapiens
gccuccccagcaccuaggug

SEQ ID NO: 225315 - RNA, 16 nt, Homo sapiens
ccuuuugagugccuua

SEQ ID NO: 225316 - RNA, 22 nt, Homo sapiens
aucuucuuuauaauucuacuuu

SEQ ID NO: 225317 - RNA, 13 nt, Homo sapiens
accagagcugcca

SEQ ID NO: 225318 - RNA, 15 nt, Homo sapiens
acacuuacacuuuau

SEQ ID NO: 225319 - RNA, 14 nt, Homo sapiens
ucuuauauugccau

SEQ ID NO: 225320 - RNA, 21 nt, Homo sapiens
augccaugggcccucucagca

SEQ ID NO: 225321 - RNA, 21 nt, Homo sapiens
cucugagacucgcgacaaugc

SEQ ID NO: 225322 - RNA, 19 nt, Homo sapiens
aauuuagaaauauaauuga

SEQ ID NO: 225323 - RNA, 21 nt, Homo sapiens
ccuagccuuagaagucacaca

SEQ ID NO: 225324 - RNA, 23 nt, Homo sapiens
acagaagaaacuacccucuggag

SEQ ID NO: 225325 - RNA, 18 nt, Homo sapiens
aguaggaagacuuuggaa

SEQ ID NO: 225326 - RNA, 21 nt, Homo sapiens
gccgagauugcaccacugcac

SEQ ID NO: 225327 - RNA, 12 nt, Homo sapiens
cugcauguuaca

SEQ ID NO: 225328 - RNA, 19 nt, Homo sapiens
guucuggcucuuccaggcu

SEQ ID NO: 225329 - RNA, 19 nt, Homo sapiens
auacaauuccaaacacaua

SEQ ID NO: 225330 - RNA, 15 nt, Homo sapiens
cuucaaauauuuccc

SEQ ID NO: 225331 - RNA, 14 nt, Homo sapiens
gcugcacuccauga

SEQ ID NO: 225332 - RNA, 14 nt, Homo sapiens
uaacacuguacugc

SEQ ID NO: 225333 - RNA, 14 nt, Homo sapiens
ucaguguacaugga

SEQ ID NO: 225334 - RNA, 19 nt, Homo sapiens
cucccaaagugcugggauu

SEQ ID NO: 225335 - RNA, 20 nt, Homo sapiens
cagccucccgaauagcuggg

SEQ ID NO: 225336 - RNA, 13 nt, Homo sapiens
aaagauacaguua

SEQ ID NO: 225337 - RNA, 18 nt, Homo sapiens
ucugcugacagacacagg

SEQ ID NO: 225338 - RNA, 13 nt, Homo sapiens
ucagggucccugg

SEQ ID NO: 225339 - RNA, 13 nt, Homo sapiens
cacgcgugcacac

SEQ ID NO: 225340 - RNA, 13 nt, Homo sapiens
uguggguuucuaa

SEQ ID NO: 225341 - RNA, 14 nt, Homo sapiens
gaauguuugccucu

SEQ ID NO: 225342 - RNA, 15 nt, Homo sapiens
ucccaacucacccca

SEQ ID NO: 225343 - RNA, 20 nt, Homo sapiens
agcauuuugcuaaaugugaa

SEQ ID NO: 225344 - RNA, 22 nt, Homo sapiens
caugcuccuggcccacugcauc

SEQ ID NO: 225345 - RNA, 22 nt, Homo sapiens
aggaugaucuaggaagacuuug

SEQ ID NO: 225346 - RNA, 16 nt, Homo sapiens
auucucauuugucaca

SEQ ID NO: 225347 - RNA, 18 nt, Homo sapiens
aaagcaucuaugugagac

SEQ ID NO: 225348 - RNA, 14 nt, Homo sapiens
cuccagggggugcc

SEQ ID NO: 225349 - RNA, 14 nt, Homo sapiens
cuguaucaugacaa

SEQ ID NO: 225350 - RNA, 16 nt, Homo sapiens
acaugugcacaugcac

SEQ ID NO: 225351 - RNA, 22 nt, Homo sapiens
cucuuccacuuugauaccauug

SEQ ID NO: 225352 - RNA, 18 nt, Homo sapiens
cauaaugacuuaagcaca

SEQ ID NO: 225353 - RNA, 21 nt, Homo sapiens
gggcccaaauucuuucagugg

SEQ ID NO: 225354 - RNA, 23 nt, Homo sapiens
accucaggccugggggcugggca

SEQ ID NO: 225355 - RNA, 14 nt, Homo sapiens
caccaagcccaguu

SEQ ID NO: 225356 - RNA, 21 nt, Homo sapiens
uacugaugcagaaagaccgug

SEQ ID NO: 225357 - RNA, 18 nt, Homo sapiens
aaggggagaguaacccug

SEQ ID NO: 225358 - RNA, 16 nt, Homo sapiens
cuagguucgaauccag

SEQ ID NO: 225359 - RNA, 20 nt, Homo sapiens
uggagaaaauggacguguua

SEQ ID NO: 225360 - RNA, 16 nt, Homo sapiens
agauagauauaugcuc

SEQ ID NO: 225361 - RNA, 13 nt, Homo sapiens
ucauaaugacuua

SEQ ID NO: 225362 - RNA, 18 nt, Homo sapiens
gugcugggauuacaggug

SEQ ID NO: 225363 - RNA, 20 nt, Homo sapiens
caugacacgaauauugcuga

SEQ ID NO: 225364 - RNA, 12 nt, Homo sapiens
gcuaaagggaaa

SEQ ID NO: 225365 - RNA, 20 nt, Homo sapiens
gaauuauaauuaguuccuca

SEQ ID NO: 225366 - RNA, 21 nt, Homo sapiens
aggacagggaggugaccccag

SEQ ID NO: 225367 - RNA, 16 nt, Homo sapiens
ccaguguuguggauuu

SEQ ID NO: 225368 - RNA, 22 nt, Homo sapiens
caaguccucagugguuggcaau

SEQ ID NO: 225369 - RNA, 13 nt, Homo sapiens
acagaaaauggaa

SEQ ID NO: 225370 - RNA, 17 nt, Homo sapiens
acuucuuauacauuuga

SEQ ID NO: 225371 - RNA, 19 nt, Homo sapiens
cgccagauucuuuccugag

SEQ ID NO: 225372 - RNA, 22 nt, Homo sapiens
uucaauucucauuugucacaca

SEQ ID NO: 225373 - RNA, 22 nt, Homo sapiens
agugguggugaacagaacaaaa

SEQ ID NO: 225374 - RNA, 11 nt, Homo sapiens
gcuucugccau

SEQ ID NO: 225375 - RNA, 19 nt, Homo sapiens
caacugcaucaagauguga

SEQ ID NO: 225376 - RNA, 15 nt, Homo sapiens
acacuaaaaggugac

SEQ ID NO: 225377 - RNA, 13 nt, Homo sapiens
caaagcagugcau

SEQ ID NO: 225378 - RNA, 16 nt, Homo sapiens
cccugguggcagcuca

SEQ ID NO: 225379 - RNA, 18 nt, Homo sapiens
augcauucccuacagauu

SEQ ID NO: 225380 - RNA, 12 nt, Homo sapiens
caaaaaacaacu

SEQ ID NO: 225381 - RNA, 12 nt, Homo sapiens
aggcggugagca

SEQ ID NO: 225382 - RNA, 17 nt, Homo sapiens
guucuuaguuugcaguu

SEQ ID NO: 225383 - RNA, 13 nt, Homo sapiens
ugcaaggucauuu

SEQ ID NO: 225384 - RNA, 17 nt, Homo sapiens
cucuuuucaaaacauuu

SEQ ID NO: 225385 - RNA, 20 nt, Homo sapiens
uguguucaugcacacuugca

SEQ ID NO: 225386 - RNA, 21 nt, Homo sapiens
caagcuggucccacucagucc

SEQ ID NO: 225387 - RNA, 16 nt, Homo sapiens
ucaggaagcucagggc

SEQ ID NO: 225388 - RNA, 19 nt, Homo sapiens
gaaaauaguggugugauuu

SEQ ID NO: 225389 - RNA, 15 nt, Homo sapiens
agcaggacauggaca

SEQ ID NO: 225390 - RNA, 20 nt, Homo sapiens
acugcaccgggccacagaga

SEQ ID NO: 225391 - RNA, 18 nt, Homo sapiens
augcagugguaugaucac

SEQ ID NO: 225392 - RNA, 20 nt, Homo sapiens
uauggcuuuugugcauuauc

SEQ ID NO: 225393 - RNA, 22 nt, Homo sapiens
aggucagagccugcaguuauua

SEQ ID NO: 225394 - RNA, 13 nt, Homo sapiens
ugaacacucuugg

SEQ ID NO: 225395 - RNA, 14 nt, Homo sapiens
guacgggaggguaa

SEQ ID NO: 225396 - RNA, 15 nt, Homo sapiens
gauguucugggacac

SEQ ID NO: 225397 - RNA, 13 nt, Homo sapiens
uauuuaccagacc

SEQ ID NO: 225398 - RNA, 18 nt, Homo sapiens
ugucucuuuaaugucaca

SEQ ID NO: 225399 - RNA, 16 nt, Homo sapiens
gaaugcagugguauga

SEQ ID NO: 225400 - RNA, 17 nt, Homo sapiens
guacguugugcauuugg

SEQ ID NO: 225401 - RNA, 18 nt, Homo sapiens
cgauuguuccugaaccga

SEQ ID NO: 225402 - RNA, 13 nt, Homo sapiens
aucuuccaagggu

SEQ ID NO: 225403 - RNA, 14 nt, Homo sapiens
acacgcgugcacac

SEQ ID NO: 225404 - RNA, 22 nt, Homo sapiens
guuuuaagaggcagggucucac

SEQ ID NO: 225405 - RNA, 15 nt, Homo sapiens
gugaagcugggagaa

SEQ ID NO: 225406 - RNA, 16 nt, Homo sapiens
ucuaugacacaugcaa

SEQ ID NO: 225407 - RNA, 16 nt, Homo sapiens
ucagguggggcagcuu

SEQ ID NO: 225408 - RNA, 17 nt, Homo sapiens
uguuagugguuacccag

SEQ ID NO: 225409 - RNA, 14 nt, Homo sapiens
gugucgggcaugac

SEQ ID NO: 225410 - RNA, 19 nt, Homo sapiens
uaaaugggggugcauuuga

SEQ ID NO: 225411 - RNA, 19 nt, Homo sapiens
acccaauauuuaccagacc

SEQ ID NO: 225412 - RNA, 14 nt, Homo sapiens
cuuuccuucauuca

SEQ ID NO: 225413 - RNA, 17 nt, Homo sapiens
cgauagugguggugaac

SEQ ID NO: 225414 - RNA, 14 nt, Homo sapiens
auuacuucugcuac

SEQ ID NO: 225415 - RNA, 19 nt, Homo sapiens
accugccaggaagccagca

SEQ ID NO: 225416 - RNA, 17 nt, Homo sapiens
aaggaagacaaugugaa

SEQ ID NO: 225417 - RNA, 18 nt, Homo sapiens
gagccagauuucacucuc

SEQ ID NO: 225418 - RNA, 11 nt, Homo sapiens
cucagugccac

SEQ ID NO: 225419 - RNA, 21 nt, Homo sapiens
agagacaggguuuugccaugu

SEQ ID NO: 225420 - RNA, 22 nt, Homo sapiens
cauuuuggauucuuauggacaa

SEQ ID NO: 225421 - RNA, 20 nt, Homo sapiens
aggagagcuagcagcaggga

SEQ ID NO: 225422 - RNA, 20 nt, Homo sapiens
gggcucccuucccaccucuc

SEQ ID NO: 225423 - RNA, 13 nt, Homo sapiens
acuuugaccucug

SEQ ID NO: 225424 - RNA, 17 nt, Homo sapiens
aucgaugcagugcuucc

SEQ ID NO: 225425 - RNA, 13 nt, Homo sapiens
aggacauggacaa

SEQ ID NO: 225426 - RNA, 22 nt, Homo sapiens
uuccuggcacugcuuccaguga

SEQ ID NO: 225427 - RNA, 20 nt, Homo sapiens
ggugugaaccaccacaccca

SEQ ID NO: 225428 - RNA, 16 nt, Homo sapiens
ggaccagagcugccac

SEQ ID NO: 225429 - RNA, 18 nt, Homo sapiens
uuucauaaccuagccuua

SEQ ID NO: 225430 - RNA, 21 nt, Homo sapiens
gccguacucuuuggggcagcu

SEQ ID NO: 225431 - RNA, 15 nt, Homo sapiens
aguaggaagacuuug

SEQ ID NO: 225432 - RNA, 18 nt, Homo sapiens
uuucauuuaggugaggaa

SEQ ID NO: 225433 - RNA, 13 nt, Homo sapiens
ccuuagacagucc

SEQ ID NO: 225434 - RNA, 16 nt, Homo sapiens
ccccaggguccuguag

SEQ ID NO: 225435 - RNA, 15 nt, Homo sapiens
ugaaaauucuugaua

SEQ ID NO: 225436 - RNA, 14 nt, Homo sapiens
guuacugucuucag

SEQ ID NO: 225437 - RNA, 19 nt, Homo sapiens
augccucucucaggccaaa

SEQ ID NO: 225438 - RNA, 14 nt, Homo sapiens
augauagcuacugu

SEQ ID NO: 225439 - RNA, 22 nt, Homo sapiens
uaggccuggggacggcuuuuac

SEQ ID NO: 225440 - RNA, 19 nt, Homo sapiens
cauuccuguucccaugaga

SEQ ID NO: 225441 - RNA, 19 nt, Homo sapiens
gcagccuggggucugacaa

SEQ ID NO: 225442 - RNA, 13 nt, Homo sapiens
gagagcagugugg

SEQ ID NO: 225443 - RNA, 17 nt, Homo sapiens
ugcaugaaguaauaugc

SEQ ID NO: 225444 - RNA, 15 nt, Homo sapiens
cccacuucugccaua

SEQ ID NO: 225445 - RNA, 21 nt, Homo sapiens
gugagcacuaaggugugcucu

SEQ ID NO: 225446 - RNA, 23 nt, Homo sapiens
agcacuaaggugugcucugauca

SEQ ID NO: 225447 - RNA, 23 nt, Homo sapiens
ggacucaaugcacugacauuguu

SEQ ID NO: 225448 - RNA, 22 nt, Homo sapiens
uaucuugaagacuuuucuuuca

SEQ ID NO: 225449 - RNA, 17 nt, Homo sapiens
ugugccugaagucccag

SEQ ID NO: 225450 - RNA, 20 nt, Homo sapiens
ccucauuagcauuuugcuaa

SEQ ID NO: 225451 - RNA, 15 nt, Homo sapiens
ucaaccccaugagac

SEQ ID NO: 225452 - RNA, 15 nt, Homo sapiens
acaggugugagucac

SEQ ID NO: 225453 - RNA, 21 nt, Homo sapiens
uugcccacacuugggagcaaa

SEQ ID NO: 225454 - RNA, 13 nt, Homo sapiens
ccaguaucuugaa

SEQ ID NO: 225455 - RNA, 15 nt, Homo sapiens
aaggaugcccaaaga

SEQ ID NO: 225456 - RNA, 23 nt, Homo sapiens
uauacacuuacacuuuaugcaca

SEQ ID NO: 225457 - RNA, 16 nt, Homo sapiens
ucuacugaggugcuau

SEQ ID NO: 225458 - RNA, 19 nt, Homo sapiens
auaacacuguacugcaaua

SEQ ID NO: 225459 - RNA, 12 nt, Homo sapiens
cauggugaaggu

SEQ ID NO: 225460 - RNA, 22 nt, Homo sapiens
uagcagcagggagggcuucugc

SEQ ID NO: 225461 - RNA, 23 nt, Homo sapiens
acaguucaauucucauuugucac

SEQ ID NO: 225462 - RNA, 13 nt, Homo sapiens
ggugaacagaaca

SEQ ID NO: 225463 - RNA, 14 nt, Homo sapiens
ccaaaggaagcaca

SEQ ID NO: 225464 - RNA, 20 nt, Homo sapiens
gccgugauuuucauugcugg

SEQ ID NO: 225465 - RNA, 22 nt, Homo sapiens
gugugugcacguacacacacau

SEQ ID NO: 225466 - RNA, 17 nt, Homo sapiens
ugaaaaaauaacacugu

SEQ ID NO: 225467 - RNA, 19 nt, Homo sapiens
auucauaaugacuuaagca

SEQ ID NO: 225468 - RNA, 22 nt, Homo sapiens
uucccuacaguugaaaaacagc

SEQ ID NO: 225469 - RNA, 18 nt, Homo sapiens
caagucagcacuaccucc

SEQ ID NO: 225470 - RNA, 18 nt, Homo sapiens
ugggguacccacugcucu

SEQ ID NO: 225471 - RNA, 11 nt, Homo sapiens
caaggccaaag

SEQ ID NO: 225472 - RNA, 16 nt, Homo sapiens
aaccccaucucuacaa

SEQ ID NO: 225473 - RNA, 22 nt, Homo sapiens
aacuggaaaguacguuaugaua

SEQ ID NO: 225474 - RNA, 13 nt, Homo sapiens
agagacagaagaa

SEQ ID NO: 225475 - RNA, 14 nt, Homo sapiens
augaucacggcuca

SEQ ID NO: 225476 - RNA, 21 nt, Homo sapiens
ugaugccaugggcccucucag

SEQ ID NO: 225477 - RNA, 21 nt, Homo sapiens
cgcccagucuggaaugcagug

SEQ ID NO: 225478 - RNA, 19 nt, Homo sapiens
cccacuggaggcaugugau

SEQ ID NO: 225479 - RNA, 12 nt, Homo sapiens
agagcagugugg

SEQ ID NO: 225480 - RNA, 12 nt, Homo sapiens
guucccauuugc

SEQ ID NO: 225481 - RNA, 20 nt, Homo sapiens
ucucacuauguugcccaggc

SEQ ID NO: 225482 - RNA, 23 nt, Homo sapiens
uucaauauccccaagcaguguga

SEQ ID NO: 225483 - RNA, 20 nt, Homo sapiens
uguuccugaaccgaugagaa

SEQ ID NO: 225484 - RNA, 19 nt, Homo sapiens
uuuuauggcuuuugugcau

SEQ ID NO: 225485 - RNA, 15 nt, Homo sapiens
cucugacacacagcu

SEQ ID NO: 225486 - RNA, 15 nt, Homo sapiens
aaugggagacggggg

SEQ ID NO: 225487 - RNA, 23 nt, Homo sapiens
acaggaagguagaaauaucugaa

SEQ ID NO: 225488 - RNA, 16 nt, Homo sapiens
aggugauccacccacc

SEQ ID NO: 225489 - RNA, 14 nt, Homo sapiens
cagaaauguguuau

SEQ ID NO: 225490 - RNA, 18 nt, Homo sapiens
aggagaggggcacagggu

SEQ ID NO: 225491 - RNA, 15 nt, Homo sapiens
cuucccuacauggag

SEQ ID NO: 225492 - RNA, 12 nt, Homo sapiens
uuucuacccagc

SEQ ID NO: 225493 - RNA, 20 nt, Homo sapiens
caaaaguuuaaaaagcucac

SEQ ID NO: 225494 - RNA, 22 nt, Homo sapiens
ucccacuggaggcaugugauga

SEQ ID NO: 225495 - RNA, 20 nt, Homo sapiens
ggaugaaaaaauaacacugu

SEQ ID NO: 225496 - RNA, 14 nt, Homo sapiens
aguucaucuugaau

SEQ ID NO: 225497 - RNA, 19 nt, Homo sapiens
caauaaagcagcguuucua

SEQ ID NO: 225498 - RNA, 18 nt, Homo sapiens
cugcucuccgaccagaca

SEQ ID NO: 225499 - RNA, 15 nt, Homo sapiens
guucuacccaggugc

SEQ ID NO: 225500 - RNA, 14 nt, Homo sapiens
aauacaguaucuca

SEQ ID NO: 225501 - RNA, 18 nt, Homo sapiens
agcaccuuagacaguccc

SEQ ID NO: 225502 - RNA, 21 nt, Homo sapiens
gauggccauguauuaccugaa

SEQ ID NO: 225503 - RNA, 23 nt, Homo sapiens
aaacuggaaaguacguuaugaua

SEQ ID NO: 225504 - RNA, 13 nt, Homo sapiens
ggcuuuugugcau

SEQ ID NO: 225505 - RNA, 16 nt, Homo sapiens
cucuauuaaaauuacu

SEQ ID NO: 225506 - RNA, 19 nt, Homo sapiens
uucagugccaaaaacaaca

SEQ ID NO: 225507 - RNA, 19 nt, Homo sapiens
cagcuuguaaauagcucag

SEQ ID NO: 225508 - RNA, 16 nt, Homo sapiens
uucuaaaggcuaccuu

SEQ ID NO: 225509 - RNA, 17 nt, Homo sapiens
uccaaggguacuaagga

SEQ ID NO: 225510 - RNA, 16 nt, Homo sapiens
cacuuugauaccauug

SEQ ID NO: 225511 - RNA, 13 nt, Homo sapiens
aguuacacuaaaa

SEQ ID NO: 225512 - RNA, 14 nt, Homo sapiens
agcagagguuggga

SEQ ID NO: 225513 - RNA, 20 nt, Homo sapiens
cuucagaucucuaacuucac

SEQ ID NO: 225514 - RNA, 20 nt, Homo sapiens
aagauucauauuuacuucuu

SEQ ID NO: 225515 - RNA, 21 nt, Homo sapiens
aguagagucacuggaacacua

SEQ ID NO: 225516 - RNA, 14 nt, Homo sapiens
gucucauacucacc

SEQ ID NO: 225517 - RNA, 18 nt, Homo sapiens
cauaaguuaacuuccaau

SEQ ID NO: 225518 - RNA, 14 nt, Homo sapiens
ccaaggccaaagga

SEQ ID NO: 225519 - RNA, 22 nt, Homo sapiens
gugccucugggacuggacaauu

SEQ ID NO: 225520 - RNA, 19 nt, Homo sapiens
gcuugaccuuuaagagaaa

SEQ ID NO: 225521 - RNA, 18 nt, Homo sapiens
acucuagggaaaaaccag

SEQ ID NO: 225522 - RNA, 19 nt, Homo sapiens
cacagcugggguggggacc

SEQ ID NO: 225523 - RNA, 10 nt, Homo sapiens
ggacuuuguu

SEQ ID NO: 225524 - RNA, 23 nt, Homo sapiens
gaagagccuugcggaagguucua

SEQ ID NO: 225525 - RNA, 17 nt, Homo sapiens
aagugaagacaaugacu

SEQ ID NO: 225526 - RNA, 14 nt, Homo sapiens
ucauaaugacuuaa

SEQ ID NO: 225527 - RNA, 19 nt, Homo sapiens
ccagagaggguggugaccu

SEQ ID NO: 225528 - RNA, 14 nt, Homo sapiens
cuuucuacccagcg

SEQ ID NO: 225529 - RNA, 23 nt, Homo sapiens
augaugccaugaggaacaaggca

SEQ ID NO: 225530 - RNA, 19 nt, Homo sapiens
aaucauaaaacuugaugug

SEQ ID NO: 225531 - RNA, 20 nt, Homo sapiens
ucaaagauauuuugcuuugu

SEQ ID NO: 225532 - RNA, 21 nt, Homo sapiens
aggaugaaagugaccauguuu

SEQ ID NO: 225533 - RNA, 14 nt, Homo sapiens
agacucugucucaa

SEQ ID NO: 225534 - RNA, 13 nt, Homo sapiens
caucucuacaaaa

SEQ ID NO: 225535 - RNA, 18 nt, Homo sapiens
ccaaacacauacaggaag

SEQ ID NO: 225536 - RNA, 19 nt, Homo sapiens
ucccuuugacgccauccca

SEQ ID NO: 225537 - RNA, 13 nt, Homo sapiens
caggaagcucagg

SEQ ID NO: 225538 - RNA, 20 nt, Homo sapiens
auggacuuccacugccaucc

SEQ ID NO: 225539 - RNA, 18 nt, Homo sapiens
auuagcauuuugcuaaau

SEQ ID NO: 225540 - RNA, 22 nt, Homo sapiens
ucaaaagguuaauaaaguaauu

SEQ ID NO: 225541 - RNA, 17 nt, Homo sapiens
uaggugaggaagcaaaa

SEQ ID NO: 225542 - RNA, 20 nt, Homo sapiens
aagaugcuucucacugccau

SEQ ID NO: 225543 - RNA, 17 nt, Homo sapiens
uacaggugugagucacc

SEQ ID NO: 225544 - RNA, 14 nt, Homo sapiens
aauugaaaaaccau

SEQ ID NO: 225545 - RNA, 22 nt, Homo sapiens
uaaaguuucuguugauaaucau

SEQ ID NO: 225546 - RNA, 23 nt, Homo sapiens
guucaucauccuaagcuauucag

SEQ ID NO: 225547 - RNA, 18 nt, Homo sapiens
uggccaggcuggucucaa

SEQ ID NO: 225548 - RNA, 16 nt, Homo sapiens
cugggcuuggggacca

SEQ ID NO: 225549 - RNA, 13 nt, Homo sapiens
caacucaucuuag

SEQ ID NO: 225550 - RNA, 22 nt, Homo sapiens
ucgcuccugugucuugcaaugg

SEQ ID NO: 225551 - RNA, 13 nt, Homo sapiens
cauggaaguacua

SEQ ID NO: 225552 - RNA, 13 nt, Homo sapiens
gguagaagcccuu

SEQ ID NO: 225553 - RNA, 22 nt, Homo sapiens
cucuacugaggugcuauguucu

SEQ ID NO: 225554 - RNA, 21 nt, Homo sapiens
gcagacucuacagaggccaug

SEQ ID NO: 225555 - RNA, 11 nt, Homo sapiens
agaaugcacaa

SEQ ID NO: 225556 - RNA, 15 nt, Homo sapiens
gcccccugguggaau

SEQ ID NO: 225557 - RNA, 15 nt, Homo sapiens
cugggauuacaggug

SEQ ID NO: 225558 - RNA, 19 nt, Homo sapiens
cgagaucacgccacugcac

SEQ ID NO: 225559 - RNA, 18 nt, Homo sapiens
acaucuuggucagauuug

SEQ ID NO: 225560 - RNA, 22 nt, Homo sapiens
uaugcaugaaguaauaugcaca

SEQ ID NO: 225561 - RNA, 20 nt, Homo sapiens
aacuuuccuucauucaaccc

SEQ ID NO: 225562 - RNA, 17 nt, Homo sapiens
cuucuaccuuccugcaa

SEQ ID NO: 225563 - RNA, 14 nt, Homo sapiens
accagagcugccac

SEQ ID NO: 225564 - RNA, 18 nt, Homo sapiens
augccagcuuaucucagg

SEQ ID NO: 225565 - RNA, 20 nt, Homo sapiens
gcugggcagaggaaagcaaa

SEQ ID NO: 225566 - RNA, 13 nt, Homo sapiens
cccaucucuacaa

SEQ ID NO: 225567 - RNA, 13 nt, Homo sapiens
aaguuugagauca

SEQ ID NO: 225568 - RNA, 15 nt, Homo sapiens
uguuacugucuucag

SEQ ID NO: 225569 - RNA, 19 nt, Homo sapiens
aacagguuuuccugaagaa

SEQ ID NO: 225570 - RNA, 15 nt, Homo sapiens
ugugaaccaccacac

SEQ ID NO: 225571 - RNA, 14 nt, Homo sapiens
agcugccaccugcc

SEQ ID NO: 225572 - RNA, 17 nt, Homo sapiens
uguccuacucuguguca

SEQ ID NO: 225573 - RNA, 19 nt, Homo sapiens
agaaccaaaaagaggcuau

SEQ ID NO: 225574 - RNA, 21 nt, Homo sapiens
accauuuugggguacccacug

SEQ ID NO: 225575 - RNA, 14 nt, Homo sapiens
ugggccuggcuccc

SEQ ID NO: 225576 - RNA, 21 nt, Homo sapiens
accuagccuuagaagucacac

SEQ ID NO: 225577 - RNA, 20 nt, Homo sapiens
ggaucaaaguugaugaaaua

SEQ ID NO: 225578 - RNA, 17 nt, Homo sapiens
ucacucuuauugcccac

SEQ ID NO: 225579 - RNA, 18 nt, Homo sapiens
acagcucuucuccaggcu

SEQ ID NO: 225580 - RNA, 14 nt, Homo sapiens
acuugggagcaaaa

SEQ ID NO: 225581 - RNA, 16 nt, Homo sapiens
ucccaaagcagugcau

SEQ ID NO: 225582 - RNA, 16 nt, Homo sapiens
uguucaugcacacuug

SEQ ID NO: 225583 - RNA, 17 nt, Homo sapiens
gcaauacagacuacuuc

SEQ ID NO: 225584 - RNA, 18 nt, Homo sapiens
accuugaaugaugccaug

SEQ ID NO: 225585 - RNA, 19 nt, Homo sapiens
gccuacaggagugagcacu

SEQ ID NO: 225586 - RNA, 14 nt, Homo sapiens
cugcugacaguguu

SEQ ID NO: 225587 - RNA, 12 nt, Homo sapiens
cacuccaugagu

SEQ ID NO: 225588 - RNA, 21 nt, Homo sapiens
auuccaaacacauacaggaag

SEQ ID NO: 225589 - RNA, 19 nt, Homo sapiens
aaaagcaucuaugugagac

SEQ ID NO: 225590 - RNA, 22 nt, Homo sapiens
cucagaagacacugaugggcaa

SEQ ID NO: 225591 - RNA, 14 nt, Homo sapiens
cagcuaaugggaca

SEQ ID NO: 225592 - RNA, 14 nt, Homo sapiens
aaacagcugagggu

SEQ ID NO: 225593 - RNA, 20 nt, Homo sapiens
uucagcuccagcucaccagc

SEQ ID NO: 225594 - RNA, 15 nt, Homo sapiens
ccacuuugauaccau

SEQ ID NO: 225595 - RNA, 18 nt, Homo sapiens
gacauugcggacagccac

SEQ ID NO: 225596 - RNA, 11 nt, Homo sapiens
uucugagauca

SEQ ID NO: 225597 - RNA, 19 nt, Homo sapiens
aacucugauuaugaauaca

SEQ ID NO: 225598 - RNA, 19 nt, Homo sapiens
acuaaaagguaugcaauca

SEQ ID NO: 225599 - RNA, 13 nt, Homo sapiens
aaauguacagcaa

SEQ ID NO: 225600 - RNA, 14 nt, Homo sapiens
guaucaaugaguaa

SEQ ID NO: 225601 - RNA, 17 nt, Homo sapiens
acggacacucaaaagcu

SEQ ID NO: 225602 - RNA, 12 nt, Homo sapiens
cagcuaacaugg

SEQ ID NO: 225603 - RNA, 16 nt, Homo sapiens
agagcugggugucaag

SEQ ID NO: 225604 - RNA, 17 nt, Homo sapiens
uuccugaaccgaugaga

SEQ ID NO: 225605 - RNA, 20 nt, Homo sapiens
ugaagacagagcuacacagg

SEQ ID NO: 225606 - RNA, 19 nt, Homo sapiens
cacaugcacgugugugcac

SEQ ID NO: 225607 - RNA, 18 nt, Homo sapiens
gcuaggaacacuccuuca

SEQ ID NO: 225608 - RNA, 21 nt, Homo sapiens
gaguuauuuuuauuuauuuaa

SEQ ID NO: 225609 - RNA, 22 nt, Homo sapiens
gccugggggcugggcagaggaa

SEQ ID NO: 225610 - RNA, 23 nt, Homo sapiens
ugcagcucuggagguacgaaaag

SEQ ID NO: 225611 - RNA, 15 nt, Homo sapiens
cucucaggccaaacu

SEQ ID NO: 225612 - RNA, 13 nt, Homo sapiens
ucccucauccuca

SEQ ID NO: 225613 - RNA, 19 nt, Homo sapiens
uaaugacuuaagcacacuu

SEQ ID NO: 225614 - RNA, 19 nt, Homo sapiens
gacagaagaaacuacccuc

SEQ ID NO: 225615 - RNA, 14 nt, Homo sapiens
aggcagggucucac

SEQ ID NO: 225616 - RNA, 16 nt, Homo sapiens
acuucccuacauggag

SEQ ID NO: 225617 - RNA, 18 nt, Homo sapiens
cuacucgaguuacagaca

SEQ ID NO: 225618 - RNA, 15 nt, Homo sapiens
gccccugcccggcug

SEQ ID NO: 225619 - RNA, 23 nt, Homo sapiens
uccaggggugggacacccuguga

SEQ ID NO: 225620 - RNA, 21 nt, Homo sapiens
cugcacuccaugagugcagcu

SEQ ID NO: 225621 - RNA, 15 nt, Homo sapiens
aggcucgagcaugcc

SEQ ID NO: 225622 - RNA, 15 nt, Homo sapiens
aucuuuucauuuagg

SEQ ID NO: 225623 - RNA, 16 nt, Homo sapiens
cuccuggcccacugca

SEQ ID NO: 225624 - RNA, 22 nt, Homo sapiens
cacgaauauugcugauggugca

SEQ ID NO: 225625 - RNA, 19 nt, Homo sapiens
aaagacuguacaaaguaga

SEQ ID NO: 225626 - RNA, 14 nt, Homo sapiens
auuguuuucagugu

SEQ ID NO: 225627 - RNA, 18 nt, Homo sapiens
aaaagaugaagcugagau

SEQ ID NO: 225628 - RNA, 19 nt, Homo sapiens
uggaggggggaggugggau

SEQ ID NO: 225629 - RNA, 19 nt, Homo sapiens
cagauugcaacaggcuggg

SEQ ID NO: 225630 - RNA, 20 nt, Homo sapiens
cuacucuagggaaaaaccag

SEQ ID NO: 225631 - RNA, 19 nt, Homo sapiens
cugaauuucucacaaagga

SEQ ID NO: 225632 - RNA, 19 nt, Homo sapiens
uuguauucucuccuguacc

SEQ ID NO: 225633 - RNA, 23 nt, Homo sapiens
cuuaaaccgccaaggcuggggga

SEQ ID NO: 225634 - RNA, 22 nt, Homo sapiens
ccagccugcuaauuccccagau

SEQ ID NO: 225635 - RNA, 11 nt, Homo sapiens
ccaaugcuuug

SEQ ID NO: 225636 - RNA, 14 nt, Homo sapiens
uagcccaaaaccaa

SEQ ID NO: 225637 - RNA, 20 nt, Homo sapiens
ccagugaggcucugcccuug

SEQ ID NO: 225638 - RNA, 17 nt, Homo sapiens
aaaacacaaaaguuucu

SEQ ID NO: 225639 - RNA, 16 nt, Homo sapiens
ggcuucauccuccuca

SEQ ID NO: 225640 - RNA, 19 nt, Homo sapiens
aguggggcuggaagcagaa

SEQ ID NO: 225641 - RNA, 21 nt, Homo sapiens
cuaaaugaaaaucgugacaac

SEQ ID NO: 225642 - RNA, 17 nt, Homo sapiens
cauaagauaaaugugcu

SEQ ID NO: 225643 - RNA, 22 nt, Homo sapiens
cucaucuuagguuggcaaaaag

SEQ ID NO: 225644 - RNA, 12 nt, Homo sapiens
guaaggcugugg

SEQ ID NO: 225645 - RNA, 20 nt, Homo sapiens
aacacaaacgggcucagcaa

SEQ ID NO: 225646 - RNA, 13 nt, Homo sapiens
ucuaaagcugcca

SEQ ID NO: 225647 - RNA, 13 nt, Homo sapiens
uuagaaaaaccac

SEQ ID NO: 225648 - RNA, 14 nt, Homo sapiens
caccaccaaccacu

SEQ ID NO: 225649 - RNA, 18 nt, Homo sapiens
cccaaauucuuucagugg

SEQ ID NO: 225650 - RNA, 14 nt, Homo sapiens
guuuuacugcagcu

SEQ ID NO: 225651 - RNA, 16 nt, Homo sapiens
aaggggcccaagagag

SEQ ID NO: 225652 - RNA, 18 nt, Homo sapiens
uuugcuaagugaggauga

SEQ ID NO: 225653 - RNA, 17 nt, Homo sapiens
ucuguuggccaguguga

SEQ ID NO: 225654 - RNA, 12 nt, Homo sapiens
uuacacaauggu

SEQ ID NO: 225655 - RNA, 19 nt, Homo sapiens
ccuuucaauaggaaaaacu

SEQ ID NO: 225656 - RNA, 14 nt, Homo sapiens
acgucugacaggca

SEQ ID NO: 225657 - RNA, 21 nt, Homo sapiens
caaagcgugguggacaugcac

SEQ ID NO: 225658 - RNA, 15 nt, Homo sapiens
augcagugcuuccaa

SEQ ID NO: 225659 - RNA, 24 nt, Homo sapiens
ugucacuuuccucuuccacuuuga

SEQ ID NO: 225660 - RNA, 14 nt, Homo sapiens
ccugggcaauguga

SEQ ID NO: 225661 - RNA, 15 nt, Homo sapiens
uacaaaagcauguga

SEQ ID NO: 225662 - RNA, 19 nt, Homo sapiens
agcugggagaaccaaaaag

SEQ ID NO: 225663 - RNA, 21 nt, Homo sapiens
aaaguggugagaggcauccag

SEQ ID NO: 225664 - RNA, 23 nt, Homo sapiens
cacugugaagagaaccauaucaa

SEQ ID NO: 225665 - RNA, 14 nt, Homo sapiens
uugauguacuuuac

SEQ ID NO: 225666 - RNA, 14 nt, Homo sapiens
cucugcauguuaca

SEQ ID NO: 225667 - RNA, 16 nt, Homo sapiens
gcugggacuacaggug

SEQ ID NO: 225668 - RNA, 16 nt, Homo sapiens
auggcuuuugugcauu

SEQ ID NO: 225669 - RNA, 18 nt, Homo sapiens
uuuuguuccacaaguuaa

SEQ ID NO: 225670 - RNA, 14 nt, Homo sapiens
uccucccaccucag

SEQ ID NO: 225671 - RNA, 23 nt, Homo sapiens
cccaaacccauuuuagagacaga

SEQ ID NO: 225672 - RNA, 22 nt, Homo sapiens
cuugagaggguggaauauccaa

SEQ ID NO: 225673 - RNA, 19 nt, Homo sapiens
uggggaccagagcugccac

SEQ ID NO: 225674 - RNA, 23 nt, Homo sapiens
ugguggcagaguggauucuugaa

SEQ ID NO: 225675 - RNA, 13 nt, Homo sapiens
ccucuuucccucc

SEQ ID NO: 225676 - RNA, 18 nt, Homo sapiens
gugauccucccaccucag

SEQ ID NO: 225677 - RNA, 14 nt, Homo sapiens
gagauggccaugua

SEQ ID NO: 225678 - RNA, 14 nt, Homo sapiens
ccacaugugcacau

SEQ ID NO: 225679 - RNA, 18 nt, Homo sapiens
uacgugaguccuggcaug

SEQ ID NO: 225680 - RNA, 19 nt, Homo sapiens
ccuauauuguuuucagugu

SEQ ID NO: 225681 - RNA, 14 nt, Homo sapiens
uccagacccggcug

SEQ ID NO: 225682 - RNA, 17 nt, Homo sapiens
ggacuacaggcacccac

SEQ ID NO: 225683 - RNA, 15 nt, Homo sapiens
augcaaggucauuuu

SEQ ID NO: 225684 - RNA, 20 nt, Homo sapiens
ggaggauguucugggacaca

SEQ ID NO: 225685 - RNA, 17 nt, Homo sapiens
ucuccaccugccaggga

SEQ ID NO: 225686 - RNA, 21 nt, Homo sapiens
gacaguuaagagaaaugagcu

SEQ ID NO: 225687 - RNA, 14 nt, Homo sapiens
caucccugaaggcc

SEQ ID NO: 225688 - RNA, 21 nt, Homo sapiens
gaaccaagaacuuuccaggaa

SEQ ID NO: 225689 - RNA, 13 nt, Homo sapiens
uucccaaacugau

SEQ ID NO: 225690 - RNA, 17 nt, Homo sapiens
cugguguggaagagcuc

SEQ ID NO: 225691 - RNA, 20 nt, Homo sapiens
cacaaaauguaggguuauaa

SEQ ID NO: 225692 - RNA, 19 nt, Homo sapiens
uaauucuuagcucauucuc

SEQ ID NO: 225693 - RNA, 16 nt, Homo sapiens
caucuugaauuguaag

SEQ ID NO: 225694 - RNA, 19 nt, Homo sapiens
auucucauuugucacacac

SEQ ID NO: 225695 - RNA, 18 nt, Homo sapiens
cugccuguugggccagga

SEQ ID NO: 225696 - RNA, 18 nt, Homo sapiens
uacuguaauuugugauac

SEQ ID NO: 225697 - RNA, 17 nt, Homo sapiens
ugucauauaagauucau

SEQ ID NO: 225698 - RNA, 14 nt, Homo sapiens
uagccaaggccaaa

SEQ ID NO: 225699 - RNA, 20 nt, Homo sapiens
aucuccaaaauaaaacuuuu

SEQ ID NO: 225700 - RNA, 11 nt, Homo sapiens
accaaccuggg

SEQ ID NO: 225701 - RNA, 22 nt, Homo sapiens
uggaauuuugugcccccaugua

SEQ ID NO: 225702 - RNA, 24 nt, Homo sapiens
gaugggauggcuuggggggcucca

SEQ ID NO: 225703 - RNA, 12 nt, Homo sapiens
agcucagguguc

SEQ ID NO: 225704 - RNA, 15 nt, Homo sapiens
aaaaauaacacugua

SEQ ID NO: 225705 - RNA, 17 nt, Homo sapiens
aaaguuucucuuuucaa

SEQ ID NO: 225706 - RNA, 13 nt, Homo sapiens
gaccaucccugaa

SEQ ID NO: 225707 - RNA, 18 nt, Homo sapiens
caguuaagagaaaugagc

SEQ ID NO: 225708 - RNA, 14 nt, Homo sapiens
ugcaccacugcacu

SEQ ID NO: 225709 - RNA, 18 nt, Homo sapiens
cuuucccucccuuccucu

SEQ ID NO: 225710 - RNA, 22 nt, Homo sapiens
gaccucaggugauccacccacc

SEQ ID NO: 225711 - RNA, 23 nt, Homo sapiens
aacacuaaugaggaaacugcacu

SEQ ID NO: 225712 - RNA, 13 nt, Homo sapiens
ccucauuagcauu

SEQ ID NO: 225713 - RNA, 24 nt, Homo sapiens
aaggugugcucugaucauccacug

SEQ ID NO: 225714 - RNA, 20 nt, Homo sapiens
uaauuuuuuugagacagagu

SEQ ID NO: 225715 - RNA, 19 nt, Homo sapiens
cuuccaaggguacuaagga

SEQ ID NO: 225716 - RNA, 22 nt, Homo sapiens
cagugcccacaggaucagucug

SEQ ID NO: 225717 - RNA, 22 nt, Homo sapiens
cuuuugcccacacuugggagca

SEQ ID NO: 225718 - RNA, 16 nt, Homo sapiens
agucucacuguugccc

SEQ ID NO: 225719 - RNA, 20 nt, Homo sapiens
uguucugacccugcuucaaa

SEQ ID NO: 225720 - RNA, 16 nt, Homo sapiens
gagccuggcaagaaug

SEQ ID NO: 225721 - RNA, 22 nt, Homo sapiens
ggagggcuccagacacaugucc

SEQ ID NO: 225722 - RNA, 23 nt, Homo sapiens
aagugcugggauuacagguguga

SEQ ID NO: 225723 - RNA, 16 nt, Homo sapiens
cacaugugcacaugca

SEQ ID NO: 225724 - RNA, 22 nt, Homo sapiens
ucaggugucccugcacuugcag

SEQ ID NO: 225725 - RNA, 11 nt, Homo sapiens
gguggggaccu

SEQ ID NO: 225726 - RNA, 16 nt, Homo sapiens
gucccauugauguacu

SEQ ID NO: 225727 - RNA, 19 nt, Homo sapiens
uuccaaggguacuaaggaa

SEQ ID NO: 225728 - RNA, 16 nt, Homo sapiens
aauugcuucaagcauu

SEQ ID NO: 225729 - RNA, 21 nt, Homo sapiens
acagauuuuuggagaaaggau

SEQ ID NO: 225730 - RNA, 21 nt, Homo sapiens
cuuuucuguccgagcuuugaa

SEQ ID NO: 225731 - RNA, 18 nt, Homo sapiens
ugccucgaacuggcugca

SEQ ID NO: 225732 - RNA, 19 nt, Homo sapiens
gcuguucacucucucgucu

SEQ ID NO: 225733 - RNA, 20 nt, Homo sapiens
aauucucauuugucacacac

SEQ ID NO: 225734 - RNA, 13 nt, Homo sapiens
augagaugaugcc

SEQ ID NO: 225735 - RNA, 19 nt, Homo sapiens
aucucuugcacucaaagcu

SEQ ID NO: 225736 - RNA, 13 nt, Homo sapiens
ucuugaagacuuu

SEQ ID NO: 225737 - RNA, 20 nt, Homo sapiens
ugguuaucuaauauguaaca

SEQ ID NO: 225738 - RNA, 14 nt, Homo sapiens
cucauacucaccuc

SEQ ID NO: 225739 - RNA, 18 nt, Homo sapiens
guuaagagaaaugagcuu

SEQ ID NO: 225740 - RNA, 12 nt, Homo sapiens
aacuuuccuuca

SEQ ID NO: 225741 - RNA, 23 nt, Homo sapiens
cuaagagggagggagggcuccag

SEQ ID NO: 225742 - RNA, 22 nt, Homo sapiens
cauggaaguacuauaauuuacc

SEQ ID NO: 225743 - RNA, 13 nt, Homo sapiens
ugugauaaaaccc

SEQ ID NO: 225744 - RNA, 22 nt, Homo sapiens
gcuucucacugccaugccagcu

SEQ ID NO: 225745 - RNA, 19 nt, Homo sapiens
agccuuagaagucacacag

SEQ ID NO: 225746 - RNA, 13 nt, Homo sapiens
guacuacaguccu

SEQ ID NO: 225747 - RNA, 23 nt, Homo sapiens
gugcuaggaacacuccuucacag

SEQ ID NO: 225748 - RNA, 13 nt, Homo sapiens
aacaccucugcac

SEQ ID NO: 225749 - RNA, 16 nt, Homo sapiens
uaagagaaaugagcug

SEQ ID NO: 225750 - RNA, 21 nt, Homo sapiens
aaccuuuugagugccuuacac

SEQ ID NO: 225751 - RNA, 14 nt, Homo sapiens
gagccuuccagggg

SEQ ID NO: 225752 - RNA, 19 nt, Homo sapiens
cauggacaaggaugaucua

SEQ ID NO: 225753 - RNA, 11 nt, Homo sapiens
aguuugcaguu

SEQ ID NO: 225754 - RNA, 23 nt, Homo sapiens
ccccaggcugggcuguucacucu

SEQ ID NO: 225755 - RNA, 20 nt, Homo sapiens
agagaaugcacaaacagagg

SEQ ID NO: 225756 - RNA, 18 nt, Homo sapiens
ccaacgucugugccauuu

SEQ ID NO: 225757 - RNA, 22 nt, Homo sapiens
uuuggcauuccccacuugagaa

SEQ ID NO: 225758 - RNA, 10 nt, Homo sapiens
uuuccaugau

SEQ ID NO: 225759 - RNA, 18 nt, Homo sapiens
cucuuugggccuggcucc

SEQ ID NO: 225760 - RNA, 23 nt, Homo sapiens
aaguuuuuauggcuuuugugcau

SEQ ID NO: 225761 - RNA, 20 nt, Homo sapiens
uugaaagaucaaaagguuaa

SEQ ID NO: 225762 - RNA, 22 nt, Homo sapiens
accucugccugaagucacacag

SEQ ID NO: 225763 - RNA, 15 nt, Homo sapiens
uacaggagugagcac

SEQ ID NO: 225764 - RNA, 14 nt, Homo sapiens
caagaugugacaug

SEQ ID NO: 225765 - RNA, 22 nt, Homo sapiens
cacggacgacgcgagggcccca

SEQ ID NO: 225766 - RNA, 12 nt, Homo sapiens
cucacgccugua

SEQ ID NO: 225767 - RNA, 18 nt, Homo sapiens
cguuaugauaguguccca

SEQ ID NO: 225768 - RNA, 15 nt, Homo sapiens
acaggaucaaaguug

SEQ ID NO: 225769 - RNA, 14 nt, Homo sapiens
caguuagcucucaa

SEQ ID NO: 225770 - RNA, 13 nt, Homo sapiens
auucaugcugcuu

SEQ ID NO: 225771 - RNA, 17 nt, Homo sapiens
cccagagugaacacucu

SEQ ID NO: 225772 - RNA, 20 nt, Homo sapiens
agcacaugccucucucaggc

SEQ ID NO: 225773 - RNA, 16 nt, Homo sapiens
ugaccaguuguugaua

SEQ ID NO: 225774 - RNA, 16 nt, Homo sapiens
agagcaguguggaaaa

SEQ ID NO: 225775 - RNA, 18 nt, Homo sapiens
cagaggagagaggacccc

SEQ ID NO: 225776 - RNA, 21 nt, Homo sapiens
guaugcucaauuauuuugcau

SEQ ID NO: 225777 - RNA, 15 nt, Homo sapiens
cagagacacaagccu

SEQ ID NO: 225778 - RNA, 19 nt, Homo sapiens
ucagccucccgaauagcug

SEQ ID NO: 225779 - RNA, 19 nt, Homo sapiens
caccucugcacaagcugca

SEQ ID NO: 225780 - RNA, 17 nt, Homo sapiens
uucuccaagcaggacau

SEQ ID NO: 225781 - RNA, 18 nt, Homo sapiens
uucaccacaugugcacau

SEQ ID NO: 225782 - RNA, 15 nt, Homo sapiens
agaccuucuccuuca

SEQ ID NO: 225783 - RNA, 15 nt, Homo sapiens
cuuacuguacaugaa

SEQ ID NO: 225784 - RNA, 14 nt, Homo sapiens
aguuccaccaucaa

SEQ ID NO: 225785 - RNA, 14 nt, Homo sapiens
aacucuugaccuca

SEQ ID NO: 225786 - RNA, 16 nt, Homo sapiens
ucuagggaaaaaccag

SEQ ID NO: 225787 - RNA, 14 nt, Homo sapiens
cuugacagggcaca

SEQ ID NO: 225788 - RNA, 15 nt, Homo sapiens
ccaggagcagccaca

SEQ ID NO: 225789 - RNA, 15 nt, Homo sapiens
uucucauuugucaca

SEQ ID NO: 225790 - RNA, 23 nt, Homo sapiens
ugcacagcuaacauggaaguacu

SEQ ID NO: 225791 - RNA, 13 nt, Homo sapiens
acuuaagcacacu

SEQ ID NO: 225792 - RNA, 14 nt, Homo sapiens
uacaggaaguacug

SEQ ID NO: 225793 - RNA, 17 nt, Homo sapiens
acauaaugcgugcauac

SEQ ID NO: 225794 - RNA, 22 nt, Homo sapiens
gaagcacaugccucucucaggc

SEQ ID NO: 225795 - RNA, 17 nt, Homo sapiens
ccuggguaacuagggaa

SEQ ID NO: 225796 - RNA, 21 nt, Homo sapiens
uaagagggagggagggcucca

SEQ ID NO: 225797 - RNA, 21 nt, Homo sapiens
gucucuuuaaugucacaggca

SEQ ID NO: 225798 - RNA, 20 nt, Homo sapiens
caagacgcugugcugcccug

SEQ ID NO: 225799 - RNA, 19 nt, Homo sapiens
aagugauccucccaccuca

SEQ ID NO: 225800 - RNA, 20 nt, Homo sapiens
agaggggaacagacuggaag

SEQ ID NO: 225801 - RNA, 20 nt, Homo sapiens
aacuugauguguuaucucuu

SEQ ID NO: 225802 - RNA, 22 nt, Homo sapiens
uucauuuaggugaggaagcaaa

SEQ ID NO: 225803 - RNA, 18 nt, Homo sapiens
agcugccugggaucccuc

SEQ ID NO: 225804 - RNA, 15 nt, Homo sapiens
aggauuuugauccaa

SEQ ID NO: 225805 - RNA, 18 nt, Homo sapiens
cuuuuuaaagaaugcucu

SEQ ID NO: 225806 - RNA, 21 nt, Homo sapiens
gaugaucuaggaagacuuugg

SEQ ID NO: 225807 - RNA, 17 nt, Homo sapiens
caaaacauuuuacuuua

SEQ ID NO: 225808 - RNA, 18 nt, Homo sapiens
cugggagaaccaaaaaga

SEQ ID NO: 225809 - RNA, 15 nt, Homo sapiens
auccuagcacuuugg

SEQ ID NO: 225810 - RNA, 16 nt, Homo sapiens
cauccagguucagcuu

SEQ ID NO: 225811 - RNA, 16 nt, Homo sapiens
gguucuacccaggugc

SEQ ID NO: 225812 - RNA, 14 nt, Homo sapiens
uaugaggcauuugu

SEQ ID NO: 225813 - RNA, 20 nt, Homo sapiens
gugccuuauggaacacucug

SEQ ID NO: 225814 - RNA, 23 nt, Homo sapiens
gccuggggucugacaauaccucg

SEQ ID NO: 225815 - RNA, 16 nt, Homo sapiens
uucucccucagucugg

SEQ ID NO: 225816 - RNA, 12 nt, Homo sapiens
ggccauguauua

SEQ ID NO: 225817 - RNA, 16 nt, Homo sapiens
uccaaaugcccagcuu

SEQ ID NO: 225818 - RNA, 14 nt, Homo sapiens
aucccucauccuca

SEQ ID NO: 225819 - RNA, 19 nt, Homo sapiens
acacugcauguuugugauu

SEQ ID NO: 225820 - RNA, 15 nt, Homo sapiens
cuuuccuucauucaa

SEQ ID NO: 225821 - RNA, 16 nt, Homo sapiens
ugucccugcacuugca

SEQ ID NO: 225822 - RNA, 13 nt, Homo sapiens
uggcagcucagag

SEQ ID NO: 225823 - RNA, 15 nt, Homo sapiens
caaaagauucuacaa

SEQ ID NO: 225824 - RNA, 23 nt, Homo sapiens
agccugcaguuauuaacacuaac

SEQ ID NO: 225825 - RNA, 16 nt, Homo sapiens
gaagacuucaucccuc

SEQ ID NO: 225826 - RNA, 19 nt, Homo sapiens
cuguuggcugggggccuca

SEQ ID NO: 225827 - RNA, 16 nt, Homo sapiens
cacgcuggagugcagu

SEQ ID NO: 225828 - RNA, 16 nt, Homo sapiens
acacaguucaauucuc

SEQ ID NO: 225829 - RNA, 22 nt, Homo sapiens
cacccuccuuucaccacaugug

SEQ ID NO: 225830 - RNA, 18 nt, Homo sapiens
ggaggccauuuguguuua

SEQ ID NO: 225831 - RNA, 11 nt, Homo sapiens
caucuuccaag

SEQ ID NO: 225832 - RNA, 15 nt, Homo sapiens
acacuugcacccaug

SEQ ID NO: 225833 - RNA, 15 nt, Homo sapiens
gccuccccagcaccu

SEQ ID NO: 225834 - RNA, 17 nt, Homo sapiens
augcucugcauguuaca

SEQ ID NO: 225835 - RNA, 14 nt, Homo sapiens
ugcacgugugugca

SEQ ID NO: 225836 - RNA, 19 nt, Homo sapiens
ucucagauuguaccauuga

SEQ ID NO: 225837 - RNA, 22 nt, Homo sapiens
cucugcacaagcugcacccuca

SEQ ID NO: 225838 - RNA, 23 nt, Homo sapiens
agugguggugaacagaacaaaag

SEQ ID NO: 225839 - RNA, 18 nt, Homo sapiens
guaucccaugagccucag

SEQ ID NO: 225840 - RNA, 20 nt, Homo sapiens
gcuggcgugcaguggugcga

SEQ ID NO: 225841 - RNA, 22 nt, Homo sapiens
ugaaacgcaaccaccaccaacc

SEQ ID NO: 225842 - RNA, 21 nt, Homo sapiens
aagacugaguacguugugcau

SEQ ID NO: 225843 - RNA, 22 nt, Homo sapiens
aagaugcuucucacugccaugc

SEQ ID NO: 225844 - RNA, 13 nt, Homo sapiens
caauuauuuugca

SEQ ID NO: 225845 - RNA, 12 nt, Homo sapiens
aaauaacacugu

SEQ ID NO: 225846 - RNA, 12 nt, Homo sapiens
ccaucaccagac

SEQ ID NO: 225847 - RNA, 16 nt, Homo sapiens
cuuucccaucuuccaa

SEQ ID NO: 225848 - RNA, 20 nt, Homo sapiens
ccucuuucccucccuuccuc

SEQ ID NO: 225849 - RNA, 14 nt, Homo sapiens
ugacauuguuggcc

SEQ ID NO: 225850 - RNA, 15 nt, Homo sapiens
ccacggccaggccag

SEQ ID NO: 225851 - RNA, 21 nt, Homo sapiens
cagcugcuugggcuucauccu

SEQ ID NO: 225852 - RNA, 14 nt, Homo sapiens
aaccacuucagcug

SEQ ID NO: 225853 - RNA, 20 nt, Homo sapiens
gagaaggcaaccuugacucu

SEQ ID NO: 225854 - RNA, 15 nt, Homo sapiens
uuagcauuuugcuaa

SEQ ID NO: 225855 - RNA, 17 nt, Homo sapiens
ucagaaauguguuauca

SEQ ID NO: 225856 - RNA, 14 nt, Homo sapiens
uucaguggcagcug

SEQ ID NO: 225857 - RNA, 15 nt, Homo sapiens
gguuuuacugcagcu

SEQ ID NO: 225858 - RNA, 20 nt, Homo sapiens
gggucucacuauguugccca

SEQ ID NO: 225859 - RNA, 22 nt, Homo sapiens
caaccacugcgaccacaagaag

SEQ ID NO: 225860 - RNA, 15 nt, Homo sapiens
aguucaucuugaauu

SEQ ID NO: 225861 - RNA, 14 nt, Homo sapiens
gcuaugcauuugaa

SEQ ID NO: 225862 - RNA, 21 nt, Homo sapiens
uugcaaaguaucccuacugua

SEQ ID NO: 225863 - RNA, 18 nt, Homo sapiens
accacaucuugcucugcu

SEQ ID NO: 225864 - RNA, 19 nt, Homo sapiens
ucuuuucuugcaugaggcu

SEQ ID NO: 225865 - RNA, 19 nt, Homo sapiens
auucucuccuguaccucuu

SEQ ID NO: 225866 - RNA, 16 nt, Homo sapiens
gaaaauggaagacagc

SEQ ID NO: 225867 - RNA, 13 nt, Homo sapiens
gagagccuuccag

SEQ ID NO: 225868 - RNA, 14 nt, Homo sapiens
caucuuccaacuca

SEQ ID NO: 225869 - RNA, 23 nt, Homo sapiens
aaguuuuaugagaaaugccagug

SEQ ID NO: 225870 - RNA, 15 nt, Homo sapiens
cuacucgaguuacag

SEQ ID NO: 225871 - RNA, 23 nt, Homo sapiens
ugaggaugaaaaaauaacacugu

SEQ ID NO: 225872 - RNA, 19 nt, Homo sapiens
ccuguagucccauugaugu

SEQ ID NO: 225873 - RNA, 13 nt, Homo sapiens
aggcaacugcauu

SEQ ID NO: 225874 - RNA, 20 nt, Homo sapiens
aauacagauagauauaugcu

SEQ ID NO: 225875 - RNA, 12 nt, Homo sapiens
agacccggcugc

SEQ ID NO: 225876 - RNA, 13 nt, Homo sapiens
auugaaaaaccau

SEQ ID NO: 225877 - RNA, 17 nt, Homo sapiens
ucugccugaagucacac

SEQ ID NO: 225878 - RNA, 15 nt, Homo sapiens
ugguucccauuugcu

SEQ ID NO: 225879 - RNA, 20 nt, Homo sapiens
guaaaugggggugcauuuga

SEQ ID NO: 225880 - RNA, 16 nt, Homo sapiens
cacuaaccacgcugga

SEQ ID NO: 225881 - RNA, 15 nt, Homo sapiens
cucacauaucuguca

SEQ ID NO: 225882 - RNA, 23 nt, Homo sapiens
aauucucuuuccuguagucccau

SEQ ID NO: 225883 - RNA, 19 nt, Homo sapiens
acguguuaugacuccagaa

SEQ ID NO: 225884 - RNA, 18 nt, Homo sapiens
uuauggcuuuugugcauu

SEQ ID NO: 225885 - RNA, 18 nt, Homo sapiens
acauggaauaacauguaa

SEQ ID NO: 225886 - RNA, 20 nt, Homo sapiens
caguuaagagaaaugagcuu

SEQ ID NO: 225887 - RNA, 17 nt, Homo sapiens
aaugaaaaaaaaagggg

SEQ ID NO: 225888 - RNA, 15 nt, Homo sapiens
aagagaaaugagcug

SEQ ID NO: 225889 - RNA, 23 nt, Homo sapiens
aacucuauuuuuguaaaaaggga

SEQ ID NO: 225890 - RNA, 15 nt, Japanese encephalitis virus
agaaagcccucagaa

SEQ ID NO: 225891 - RNA, 12 nt, Japanese encephalitis virus
agaaaaguagac

SEQ ID NO: 225892 - RNA, 22 nt, Japanese encephalitis virus
agacggugcugucugcgucuca

SEQ ID NO: 225893 - RNA, 23 nt, Japanese encephalitis virus
aauguaaaugagaaaaugcaugc

SEQ ID NO: 225894 - RNA, 22 nt, Japanese encephalitis virus
aagcccucagaaccgucucgga

SEQ ID NO: 225895 - RNA, 14 nt, Japanese encephalitis virus
aagccucgucuagg

SEQ ID NO: 225896 - RNA, 23 nt, Japanese encephalitis virus
aagcugccaccggauacugggua

SEQ ID NO: 225897 - RNA, 13 nt, Japanese encephalitis virus
auguaaaugagaa

SEQ ID NO: 225898 - RNA, 15 nt, Japanese encephalitis virus
aggucccugcucacu

SEQ ID NO: 225899 - RNA, 19 nt, Japanese encephalitis virus
agucccaggaggacugggu

SEQ ID NO: 225900 - RNA, 20 nt, Japanese encephalitis virus
aggccacaaauuugugccac

SEQ ID NO: 225901 - RNA, 20 nt, Japanese encephalitis virus
agccccaggaggacuggguu

SEQ ID NO: 225902 - RNA, 19 nt, Japanese encephalitis virus
agcccucagaaccgucucg

SEQ ID NO: 225903 - RNA, 19 nt, Japanese encephalitis virus
auauggagucaggccagca

SEQ ID NO: 225904 - RNA, 19 nt, Japanese encephalitis virus
uugagcccccacggcccaa

SEQ ID NO: 225905 - RNA, 22 nt, Japanese encephalitis virus
uugaaagaccaacgucaggcca

SEQ ID NO: 225906 - RNA, 21 nt, Japanese encephalitis virus
aagcccucagaaccgucucgg

SEQ ID NO: 225907 - RNA, 19 nt, Japanese encephalitis virus
gucccaggaggacuggguu

SEQ ID NO: 225908 - RNA, 11 nt, Japanese encephalitis virus
ucaggccacaa

SEQ ID NO: 225909 - RNA, 19 nt, Japanese encephalitis virus
uauggagucaggccagcaa

SEQ ID NO: 225910 - RNA, 11 nt, Japanese encephalitis virus
ucccugcucac

SEQ ID NO: 225911 - RNA, 20 nt, Japanese encephalitis virus
cguggaaacaacaauaugcg

SEQ ID NO: 225912 - RNA, 16 nt, Japanese encephalitis virus
ccacaaauuugugcca

SEQ ID NO: 225913 - RNA, 22 nt, Japanese encephalitis virus
caggccacaaauuugugccacc

SEQ ID NO: 225914 - RNA, 23 nt, Japanese encephalitis virus
gagaccccguggaaacaacaaua

SEQ ID NO: 225915 - RNA, 19 nt, Japanese encephalitis virus
gaaagaccaacgucaggcc

SEQ ID NO: 225916 - RNA, 13 nt, Japanese encephalitis virus
gaaacaacaauau

SEQ ID NO: 225917 - RNA, 15 nt, Japanese encephalitis virus
uauggagucaggcca

SEQ ID NO: 225918 - RNA, 22 nt, Japanese encephalitis virus
ucaggccagcaaaagcugccac

SEQ ID NO: 225919 - RNA, 21 nt, Japanese encephalitis virus
gaaagaccaacgucaggccac

SEQ ID NO: 225920 - RNA, 17 nt, Japanese encephalitis virus
acaacagaaagugagaa

SEQ ID NO: 225921 - RNA, 18 nt, Japanese encephalitis virus
acaaaucugacaacagaa

SEQ ID NO: 225922 - RNA, 14 nt, Japanese encephalitis virus
aggaugcaauagac

SEQ ID NO: 225923 - RNA, 16 nt, Japanese encephalitis virus
auaauguaaaugagaa

SEQ ID NO: 225924 - RNA, 20 nt, Japanese encephalitis virus
agucccaggaggacuggguu

SEQ ID NO: 225925 - RNA, 17 nt, Japanese encephalitis virus
ccccaggaggacugggu

SEQ ID NO: 225926 - RNA, 22 nt, Japanese encephalitis virus
caggccagcaaaagcugccacc

SEQ ID NO: 225927 - RNA, 13 nt, Japanese encephalitis virus
cagaaccgucucg

SEQ ID NO: 225928 - RNA, 22 nt, Japanese encephalitis virus
cagaaccgucucggaaguaggu

SEQ ID NO: 225929 - RNA, 20 nt, Japanese encephalitis virus
augcauauggagucaggcca

SEQ ID NO: 225930 - RNA, 15 nt, Japanese encephalitis virus
auggagucaggccag

SEQ ID NO: 225931 - RNA, 17 nt, Japanese encephalitis virus
ucccaggaggacugggu

SEQ ID NO: 225932 - RNA, 21 nt, Japanese encephalitis virus
ugaaagaccaacgucaggcca

SEQ ID NO: 225933 - RNA, 17 nt, Japanese encephalitis virus
acuggguagacggugcu

SEQ ID NO: 225934 - RNA, 22 nt, Japanese encephalitis virus
acggugcugucugcgucucagu

SEQ ID NO: 225935 - RNA, 12 nt, Japanese encephalitis virus
acgucaggccac

SEQ ID NO: 225936 - RNA, 20 nt, Japanese encephalitis virus
aggucccugcucacuggaag

SEQ ID NO: 225937 - RNA, 20 nt, Japanese encephalitis virus
aggccagcaaaagcugccac

SEQ ID NO: 225938 - RNA, 17 nt, Japanese encephalitis virus
ccaggaggacuggguua

SEQ ID NO: 225939 - RNA, 17 nt, Japanese encephalitis virus
ccaccggauacugggua

SEQ ID NO: 225940 - RNA, 16 nt, Japanese encephalitis virus
cccaggaggacugggu

SEQ ID NO: 225941 - RNA, 20 nt, Japanese encephalitis virus
auguaaauaauguaaaugag

SEQ ID NO: 225942 - RNA, 19 nt, Japanese encephalitis virus
cugccaccggauacugggu

SEQ ID NO: 225943 - RNA, 22 nt, Japanese encephalitis virus
gaccaacgucaggccacaaauu

SEQ ID NO: 225944 - RNA, 17 nt, Japanese encephalitis virus
gcauauggagucaggcc

SEQ ID NO: 225945 - RNA, 18 nt, Japanese encephalitis virus
gccaccggauacugggua

SEQ ID NO: 225946 - RNA, 18 nt, Japanese encephalitis virus
gccaccccgcuagggggu

SEQ ID NO: 225947 - RNA, 19 nt, Japanese encephalitis virus
gccccaggaggacuggguu

SEQ ID NO: 225948 - RNA, 13 nt, Japanese encephalitis virus
ggagucaggccag

SEQ ID NO: 225949 - RNA, 17 nt, Japanese encephalitis virus
gucuaggaugcaauaga

SEQ ID NO: 225950 - RNA, 17 nt, Japanese encephalitis virus
gccaccggauacugggu

SEQ ID NO: 225951 - RNA, 23 nt, Japanese encephalitis virus
gguuaacaaaucugacaacagaa

SEQ ID NO: 225952 - RNA, 20 nt, Japanese encephalitis virus
aaagcccucagaaccgucuc

SEQ ID NO: 225953 - RNA, 21 nt, Japanese encephalitis virus
aaagcccucagaaccgucucg

SEQ ID NO: 225954 - RNA, 19 nt, Japanese encephalitis virus
gcaaaagcugccaccggau

SEQ ID NO: 225955 - RNA, 17 nt, Japanese encephalitis virus
gacuggguuaacaaauc

SEQ ID NO: 225956 - RNA, 15 nt, Japanese encephalitis virus
cuggaaguugaaaga

SEQ ID NO: 225957 - RNA, 23 nt, Japanese encephalitis virus
cuggguuaacaaaucugacaaca

SEQ ID NO: 225958 - RNA, 19 nt, Japanese encephalitis virus
cggugcugucugcgucuca

SEQ ID NO: 225959 - RNA, 18 nt, Japanese encephalitis virus
gucuaggaugcaauagac

SEQ ID NO: 225960 - RNA, 15 nt, Japanese encephalitis virus
aagccucgucuagga

SEQ ID NO: 225961 - RNA, 18 nt, Japanese encephalitis virus
uggagucaggccagcaaa

SEQ ID NO: 225962 - RNA, 14 nt, Japanese encephalitis virus
aggaggacuggguu

SEQ ID NO: 225963 - RNA, 13 nt, Japanese encephalitis virus
aggaggacugggu

SEQ ID NO: 225964 - RNA, 11 nt, Japanese encephalitis virus
caacaauaugc

SEQ ID NO: 225965 - RNA, 19 nt, Japanese encephalitis virus
acggugcugucugcgucuc

SEQ ID NO: 225966 - RNA, 20 nt, Japanese encephalitis virus
acggugcugucugcgucuca

SEQ ID NO: 225967 - RNA, 23 nt, Japanese encephalitis virus
aaguaggucccugcucacuggaa

SEQ ID NO: 225968 - RNA, 14 nt, Japanese encephalitis virus
aaacaacaauaugc

SEQ ID NO: 225969 - RNA, 23 nt, JC virus
aaacacaggaucccaacacucua

SEQ ID NO: 225970 - RNA, 12 nt, JC virus
aaacaugccaca

SEQ ID NO: 225971 - RNA, 14 nt, JC virus
aaacauaugcugua

SEQ ID NO: 225972 - RNA, 16 nt, JC virus
aaacauaugcuguaau

SEQ ID NO: 225973 - RNA, 11 nt, JC virus
aaaagugcagu

SEQ ID NO: 225974 - RNA, 12 nt, JC virus
aaaagugcaguu

SEQ ID NO: 225975 - RNA, 18 nt, JC virus
aaaaauauucuguaacuu

SEQ ID NO: 225976 - RNA, 22 nt, JC virus
aaaaacugagguuauaggggug

SEQ ID NO: 225977 - RNA, 14 nt, JC virus
aaguauaaccagcu

SEQ ID NO: 225978 - RNA, 13 nt, JC virus
aagucaauaucua

SEQ ID NO: 225979 - RNA, 22 nt, JC virus
aauaucuauaucagauacauuu

SEQ ID NO: 225980 - RNA, 19 nt, JC virus
aauaucuggagaguccucu

SEQ ID NO: 225981 - RNA, 23 nt, JC virus
aauaucuggagaguccucuccac

SEQ ID NO: 225982 - RNA, 20 nt, JC virus
acaaguaccucugaggcuau

SEQ ID NO: 225983 - RNA, 20 nt, JC virus
acaaguuugaugaaugugca

SEQ ID NO: 225984 - RNA, 14 nt, JC virus
aaagugacucccca

SEQ ID NO: 225985 - RNA, 23 nt, JC virus
aaagucaagaaugggucucccca

SEQ ID NO: 225986 - RNA, 13 nt, JC virus
aaaguauaaccag

SEQ ID NO: 225987 - RNA, 13 nt, JC virus
aaagguagaagac

SEQ ID NO: 225988 - RNA, 20 nt, JC virus
aaauccagccuuucuuucca

SEQ ID NO: 225989 - RNA, 17 nt, JC virus
aaauguuugccagugau

SEQ ID NO: 225990 - RNA, 16 nt, JC virus
aagaaauguuugccag

SEQ ID NO: 225991 - RNA, 19 nt, JC virus
aacuggugguagugcuauu

SEQ ID NO: 225992 - RNA, 15 nt, JC virus
aacucaugacaaugg

SEQ ID NO: 225993 - RNA, 15 nt, JC virus
aacuccagaaauggg

SEQ ID NO: 225994 - RNA, 23 nt, JC virus
aacucuaggaguccuucuguuaa

SEQ ID NO: 225995 - RNA, 21 nt, JC virus
aacacucuaccccaccuaaaa

SEQ ID NO: 225996 - RNA, 16 nt, JC virus
acccagaugagcaucu

SEQ ID NO: 225997 - RNA, 14 nt, JC virus
acauuuaaugagaa

SEQ ID NO: 225998 - RNA, 23 nt, JC virus
acaugccacagacaucaacagcu

SEQ ID NO: 225999 - RNA, 22 nt, JC virus
acaugcuuauuucuaaauccag

SEQ ID NO: 226000 - RNA, 16 nt, JC virus
accaacauuagcuuuc

SEQ ID NO: 226001 - RNA, 16 nt, JC virus
agaauuccacuaccca

SEQ ID NO: 226002 - RNA, 22 nt, JC virus
acuuuauuaaaauguacugcau

SEQ ID NO: 226003 - RNA, 17 nt, JC virus
acugagguuauaggggu

SEQ ID NO: 226004 - RNA, 14 nt, JC virus
acuguugcuucuuu

SEQ ID NO: 226005 - RNA, 18 nt, JC virus
acucaugacaauggugca

SEQ ID NO: 226006 - RNA, 22 nt, JC virus
acuccugaaacauaugcuguaa

SEQ ID NO: 226007 - RNA, 19 nt, JC virus
agauuuuuugcugacuggg

SEQ ID NO: 226008 - RNA, 14 nt, JC virus
agcaacucaugaca

SEQ ID NO: 226009 - RNA, 13 nt, JC virus
caaccuauggaac

SEQ ID NO: 226010 - RNA, 23 nt, JC virus
caaccuauggaacagaugaaugg

SEQ ID NO: 226011 - RNA, 12 nt, JC virus
caaacuguaacu

SEQ ID NO: 226012 - RNA, 16 nt, JC virus
auuuucaguagcugaa

SEQ ID NO: 226013 - RNA, 13 nt, JC virus
auuuuuugcugac

SEQ ID NO: 226014 - RNA, 16 nt, JC virus
auuuuaauaaaguaua

SEQ ID NO: 226015 - RNA, 23 nt, JC virus
auugguucaaacuguaacuggug

SEQ ID NO: 226016 - RNA, 22 nt, JC virus
augcuuccuuguuacagugugg

SEQ ID NO: 226017 - RNA, 19 nt, JC virus
augcuuauuucuaaaucca

SEQ ID NO: 226018 - RNA, 13 nt, JC virus
auggaacagauga

SEQ ID NO: 226019 - RNA, 20 nt, JC virus
auucagugcuugauccaugu

SEQ ID NO: 226020 - RNA, 16 nt, JC virus
cagcuuuacuuaacag

SEQ ID NO: 226021 - RNA, 14 nt, JC virus
cagcugcaaaguca

SEQ ID NO: 226022 - RNA, 22 nt, JC virus
cagcaacuggccuaaaccagau

SEQ ID NO: 226023 - RNA, 23 nt, JC virus
cagcaacuggccuaaaccagauu

SEQ ID NO: 226024 - RNA, 21 nt, JC virus
cagagguagaaugcuuuuuaa

SEQ ID NO: 226025 - RNA, 18 nt, JC virus
agcuuuacuuaacaguug

SEQ ID NO: 226026 - RNA, 16 nt, JC virus
agcuuucauaguagaa

SEQ ID NO: 226027 - RNA, 15 nt, JC virus
agcauccaugccaua

SEQ ID NO: 226028 - RNA, 13 nt, JC virus
aggcugcugcuac

SEQ ID NO: 226029 - RNA, 12 nt, JC virus
aggcugcugcug

SEQ ID NO: 226030 - RNA, 14 nt, JC virus
agggggugcuuuuu

SEQ ID NO: 226031 - RNA, 17 nt, JC virus
agguuauaggggugaca

SEQ ID NO: 226032 - RNA, 21 nt, JC virus
agggguuuuuaacccuccuuu

SEQ ID NO: 226033 - RNA, 11 nt, JC virus
aguugcuacug

SEQ ID NO: 226034 - RNA, 19 nt, JC virus
aguagcugaaauugcugcu

SEQ ID NO: 226035 - RNA, 20 nt, JC virus
aguagcugaaauugcugcug

SEQ ID NO: 226036 - RNA, 16 nt, JC virus
aguauaaccagcuuua

SEQ ID NO: 226037 - RNA, 16 nt, JC virus
aguauaaguugucacc

SEQ ID NO: 226038 - RNA, 14 nt, JC virus
agugcuauugcuca

SEQ ID NO: 226039 - RNA, 23 nt, JC virus
agugcagggcaccagcuuucauu

SEQ ID NO: 226040 - RNA, 16 nt, JC virus
augaaugugcacucua

SEQ ID NO: 226041 - RNA, 17 nt, JC virus
augaauggcagcugcaa

SEQ ID NO: 226042 - RNA, 22 nt, JC virus
augaagaaauguuugccaguga

SEQ ID NO: 226043 - RNA, 20 nt, JC virus
augaagaccuguuuugccau

SEQ ID NO: 226044 - RNA, 16 nt, JC virus
aucuaaaugaggaucu

SEQ ID NO: 226045 - RNA, 11 nt, JC virus
auagcugcuau

SEQ ID NO: 226046 - RNA, 12 nt, JC virus
auaggggugaca

SEQ ID NO: 226047 - RNA, 12 nt, JC virus
auauacucaugu

SEQ ID NO: 226048 - RNA, 13 nt, JC virus
aucccuugcuacu

SEQ ID NO: 226049 - RNA, 14 nt, JC virus
aucccuugcuacug

SEQ ID NO: 226050 - RNA, 15 nt, JC virus
aucccuugcuacugu

SEQ ID NO: 226051 - RNA, 19 nt, JC virus
aucccuugcuacuguagag

SEQ ID NO: 226052 - RNA, 23 nt, JC virus
uggagcuccgggggcuguagcug

SEQ ID NO: 226053 - RNA, 19 nt, JC virus
uggagaggcugcugcuacu

SEQ ID NO: 226054 - RNA, 22 nt, JC virus
uggagaggcugcugcuacuaua

SEQ ID NO: 226055 - RNA, 14 nt, JC virus
uggcagcugcaaag

SEQ ID NO: 226056 - RNA, 23 nt, JC virus
ugggauauagauuuuuugcugac

SEQ ID NO: 226057 - RNA, 14 nt, JC virus
ugggaugaagaccu

SEQ ID NO: 226058 - RNA, 19 nt, JC virus
ugggaggcugugaccuuaa

SEQ ID NO: 226059 - RNA, 16 nt, JC virus
uguauaccacuaaaga

SEQ ID NO: 226060 - RNA, 17 nt, JC virus
uguauaccacuaaagaa

SEQ ID NO: 226061 - RNA, 20 nt, JC virus
uguagcuggguuugcugcau

SEQ ID NO: 226062 - RNA, 21 nt, JC virus
ugggugccgcacuugcacuuu

SEQ ID NO: 226063 - RNA, 19 nt, JC virus
ugguuuuuugaaacauuga

SEQ ID NO: 226064 - RNA, 20 nt, JC virus
ugcaucccuugcuacuguag

SEQ ID NO: 226065 - RNA, 16 nt, JC virus
uggaacagaugaaugg

SEQ ID NO: 226066 - RNA, 16 nt, JC virus
ugcuggagaggcugcu

SEQ ID NO: 226067 - RNA, 21 nt, JC virus
ugcuggagaggcugcugcuac

SEQ ID NO: 226068 - RNA, 16 nt, JC virus
ugcuguaauaacugga

SEQ ID NO: 226069 - RNA, 17 nt, JC virus
ugcuauugcucaguugg

SEQ ID NO: 226070 - RNA, 19 nt, JC virus
uguuucugaggcugcugcu

SEQ ID NO: 226071 - RNA, 17 nt, JC virus
uucugaggcugcugcug

SEQ ID NO: 226072 - RNA, 23 nt, JC virus
uucaugggugccgcacuugcacu

SEQ ID NO: 226073 - RNA, 21 nt, JC virus
uucaguagcugaaauugcugc

SEQ ID NO: 226074 - RNA, 22 nt, JC virus
aaggcuuuugauuacagcauuu

SEQ ID NO: 226075 - RNA, 15 nt, JC virus
aagugggaugaagac

SEQ ID NO: 226076 - RNA, 15 nt, JC virus
aaguauaaccagcuu

SEQ ID NO: 226077 - RNA, 14 nt, JC virus
aaguugucaccuuu

SEQ ID NO: 226078 - RNA, 16 nt, JC virus
aaguugaaauugcauc

SEQ ID NO: 226079 - RNA, 22 nt, JC virus
aauuacagagguagaaugcuuu

SEQ ID NO: 226080 - RNA, 12 nt, JC virus
aauuacaggggg

SEQ ID NO: 226081 - RNA, 13 nt, JC virus
aauguuugccagu

SEQ ID NO: 226082 - RNA, 16 nt, JC virus
aauguuugccagugau

SEQ ID NO: 226083 - RNA, 21 nt, JC virus
uuuugcugacugggaucauaa

SEQ ID NO: 226084 - RNA, 19 nt, JC virus
uuuuuaggugccaaccuau

SEQ ID NO: 226085 - RNA, 23 nt, JC virus
aaccagcuuuacuuaacaguugc

SEQ ID NO: 226086 - RNA, 14 nt, JC virus
aagaaauguuugcc

SEQ ID NO: 226087 - RNA, 22 nt, JC virus
aagaaauguuugccagugauga

SEQ ID NO: 226088 - RNA, 22 nt, JC virus
aacuggagcuccgggggcugua

SEQ ID NO: 226089 - RNA, 19 nt, JC virus
aaccuguggaaauauacuc

SEQ ID NO: 226090 - RNA, 22 nt, JC virus
uuuuccuuagcugcaccuuaaa

SEQ ID NO: 226091 - RNA, 14 nt, JC virus
uuuugaaacauuga

SEQ ID NO: 226092 - RNA, 20 nt, JC virus
uuugcuguguauaccacuaa

SEQ ID NO: 226093 - RNA, 21 nt, JC virus
uuugaugaaugugcacucuaa

SEQ ID NO: 226094 - RNA, 18 nt, JC virus
uuuauauaagaaacuuau

SEQ ID NO: 226095 - RNA, 17 nt, JC virus
uugucaacguaucucau

SEQ ID NO: 226096 - RNA, 22 nt, JC virus
uugucaacguaucucaucaugu

SEQ ID NO: 226097 - RNA, 17 nt, JC virus
gugcuuuuuaauuacag

SEQ ID NO: 226098 - RNA, 17 nt, JC virus
guuuguaaacaugccac

SEQ ID NO: 226099 - RNA, 11 nt, JC virus
guugcuacugu

SEQ ID NO: 226100 - RNA, 12 nt, JC virus
uaaacaugccac

SEQ ID NO: 226101 - RNA, 15 nt, JC virus
uaaaauguacugcau

SEQ ID NO: 226102 - RNA, 15 nt, JC virus
uaaauccagccuuuc

SEQ ID NO: 226103 - RNA, 16 nt, JC virus
uaaccagcuuuacuua

SEQ ID NO: 226104 - RNA, 22 nt, JC virus
uacuguuucugaggcugcugcu

SEQ ID NO: 226105 - RNA, 14 nt, JC virus
uagauuuuuugcug

SEQ ID NO: 226106 - RNA, 15 nt, JC virus
uagauuuuuugcuga

SEQ ID NO: 226107 - RNA, 13 nt, JC virus
uaggggugacaag

SEQ ID NO: 226108 - RNA, 11 nt, JC virus
uagcugaaauu

SEQ ID NO: 226109 - RNA, 22 nt, JC virus
uagcugaaauugcugcuggaga

SEQ ID NO: 226110 - RNA, 11 nt, JC virus
uaguugcuacu

SEQ ID NO: 226111 - RNA, 21 nt, JC virus
ucagauacauuugaaagugac

SEQ ID NO: 226112 - RNA, 15 nt, JC virus
ucaauaucuauauca

SEQ ID NO: 226113 - RNA, 16 nt, JC virus
uauuugucaacguauc

SEQ ID NO: 226114 - RNA, 20 nt, JC virus
ucaguagcugaaauugcugc

SEQ ID NO: 226115 - RNA, 14 nt, JC virus
uccaugccauacau

SEQ ID NO: 226116 - RNA, 22 nt, JC virus
uccacugcugggaaccagaccu

SEQ ID NO: 226117 - RNA, 22 nt, JC virus
ugaauggcagcugcaaagucag

SEQ ID NO: 226118 - RNA, 15 nt, JC virus
ugaaugugcacucua

SEQ ID NO: 226119 - RNA, 17 nt, JC virus
ugacaauggugcaggga

SEQ ID NO: 226120 - RNA, 19 nt, JC virus
ugacccagaugagcaucuu

SEQ ID NO: 226121 - RNA, 17 nt, JC virus
ugaccuuaaaaacugag

SEQ ID NO: 226122 - RNA, 14 nt, JC virus
ugaaacauugaaag

SEQ ID NO: 226123 - RNA, 14 nt, JC virus
ugaaaagugcaguu

SEQ ID NO: 226124 - RNA, 21 nt, JC virus
ugaagaaauguuugccaguga

SEQ ID NO: 226125 - RNA, 14 nt, JC virus
ugaaauugcugcug

SEQ ID NO: 226126 - RNA, 22 nt, JC virus
ugaaauugcugcuggagaggcu

SEQ ID NO: 226127 - RNA, 16 nt, JC virus
ucugaggcugcugcug

SEQ ID NO: 226128 - RNA, 14 nt, JC virus
cucaugaauggcag

SEQ ID NO: 226129 - RNA, 21 nt, JC virus
cuacuguagaggggauuacaa

SEQ ID NO: 226130 - RNA, 12 nt, JC virus
cuaguugcuacu

SEQ ID NO: 226131 - RNA, 21 nt, JC virus
cuauagaaguugaaauugcau

SEQ ID NO: 226132 - RNA, 18 nt, JC virus
cugcuggagaggcugcug

SEQ ID NO: 226133 - RNA, 18 nt, JC virus
cugaggcuauagcugcua

SEQ ID NO: 226134 - RNA, 19 nt, JC virus
cugaggcuauagcugcuau

SEQ ID NO: 226135 - RNA, 15 nt, JC virus
cugaggcugcugcug

SEQ ID NO: 226136 - RNA, 20 nt, JC virus
cugaaacauaugcuguaaua

SEQ ID NO: 226137 - RNA, 10 nt, JC virus
cuuauggaaa

SEQ ID NO: 226138 - RNA, 21 nt, JC virus
cuuagggguuuuaguaaguca

SEQ ID NO: 226139 - RNA, 13 nt, JC virus
aaaauauucugua

SEQ ID NO: 226140 - RNA, 23 nt, JC virus
aaaauguacugcauauuacaaua

SEQ ID NO: 226141 - RNA, 22 nt, JC virus
aaaauguauacaugcuuauuuc

SEQ ID NO: 226142 - RNA, 22 nt, JC virus
ccaugccauacauaggcugccc

SEQ ID NO: 226143 - RNA, 22 nt, JC virus
ccagaugagcaucuuagggguu

SEQ ID NO: 226144 - RNA, 17 nt, JC virus
cauugguucaaacugua

SEQ ID NO: 226145 - RNA, 18 nt, JC virus
cauugguucaaacuguaa

SEQ ID NO: 226146 - RNA, 17 nt, JC virus
caucccuugcuacugua

SEQ ID NO: 226147 - RNA, 12 nt, JC virus
cauccaugccau

SEQ ID NO: 226148 - RNA, 12 nt, JC virus
caucaacucuag

SEQ ID NO: 226149 - RNA, 21 nt, JC virus
ccucugaggcuauagcugcua

SEQ ID NO: 226150 - RNA, 15 nt, JC virus
ccucuccacugcugg

SEQ ID NO: 226151 - RNA, 11 nt, JC virus
cccuugcuacu

SEQ ID NO: 226152 - RNA, 20 nt, JC virus
ccuuucuuuccacugcacaa

SEQ ID NO: 226153 - RNA, 18 nt, JC virus
ccuuuuccuuagcugcac

SEQ ID NO: 226154 - RNA, 14 nt, JC virus
ccuugcuacuguag

SEQ ID NO: 226155 - RNA, 12 nt, JC virus
aaauauacucau

SEQ ID NO: 226156 - RNA, 15 nt, JC virus
aaauauacucaugug

SEQ ID NO: 226157 - RNA, 15 nt, JC virus
gagguagaaugcuuu

SEQ ID NO: 226158 - RNA, 12 nt, JC virus
gaggcuauagcu

SEQ ID NO: 226159 - RNA, 18 nt, JC virus
gaggcuuuagaauuacag

SEQ ID NO: 226160 - RNA, 13 nt, JC virus
gaggcugugaccu

SEQ ID NO: 226161 - RNA, 18 nt, JC virus
gaggcuauagcugcuaua

SEQ ID NO: 226162 - RNA, 13 nt, JC virus
gaggcugcugcug

SEQ ID NO: 226163 - RNA, 16 nt, JC virus
gaggcugcugcugcca

SEQ ID NO: 226164 - RNA, 15 nt, JC virus
gauuuuuugcugacu

SEQ ID NO: 226165 - RNA, 19 nt, JC virus
gauuuuuugcugacuggga

SEQ ID NO: 226166 - RNA, 15 nt, JC virus
gauuacaaguaccuc

SEQ ID NO: 226167 - RNA, 17 nt, JC virus
gaugugaaaagugcagu

SEQ ID NO: 226168 - RNA, 20 nt, JC virus
gauccauguccagagucuuc

SEQ ID NO: 226169 - RNA, 21 nt, JC virus
aaagccuuuacagaugugaaa

SEQ ID NO: 226170 - RNA, 20 nt, JC virus
aaacuuauggaaaaauauuc

SEQ ID NO: 226171 - RNA, 21 nt, JC virus
aaagguagaagacccuaaaga

SEQ ID NO: 226172 - RNA, 17 nt, JC virus
gaccuaguugcuacugu

SEQ ID NO: 226173 - RNA, 15 nt, JC virus
cuuuacagaugugaa

SEQ ID NO: 226174 - RNA, 17 nt, JC virus
cuuuagaauuacagggg

SEQ ID NO: 226175 - RNA, 20 nt, JC virus
cuuuauuaaaauguacugca

SEQ ID NO: 226176 - RNA, 13 nt, JC virus
gaaauguuugcca

SEQ ID NO: 226177 - RNA, 15 nt, JC virus
gaagugggaugaaga

SEQ ID NO: 226178 - RNA, 14 nt, JC virus
ggugguagugcuau

SEQ ID NO: 226179 - RNA, 13 nt, JC virus
guaauaacuggag

SEQ ID NO: 226180 - RNA, 21 nt, JC virus
guaacuggugguagugcuauu

SEQ ID NO: 226181 - RNA, 16 nt, JC virus
ggcuuuagaauuacag

SEQ ID NO: 226182 - RNA, 15 nt, JC virus
ggaguccuucuguua

SEQ ID NO: 226183 - RNA, 13 nt, JC virus
gcuugauccaugu

SEQ ID NO: 226184 - RNA, 16 nt, JC virus
ggcaccagcuuucauu

SEQ ID NO: 226185 - RNA, 15 nt, JC virus
ggcuauagcugcuau

SEQ ID NO: 226186 - RNA, 22 nt, JC virus
gccacaggauuuucaguagcug

SEQ ID NO: 226187 - RNA, 13 nt, JC virus
gcauccaugccau

SEQ ID NO: 226188 - RNA, 16 nt, JC virus
gcaucccuugcuacug

SEQ ID NO: 226189 - RNA, 16 nt, JC virus
gccagugaugaugaaa

SEQ ID NO: 226190 - RNA, 13 nt, JC virus
gcugcugcuacua

SEQ ID NO: 226191 - RNA, 15 nt, JC virus
gcugcugcuacuaua

SEQ ID NO: 226192 - RNA, 22 nt, JC virus
gcugcuggagaggcugcugcua

SEQ ID NO: 226193 - RNA, 12 nt, JC virus
gcugcugcugcc

SEQ ID NO: 226194 - RNA, 19 nt, JC virus
gcuggagaggcugcugcua

SEQ ID NO: 226195 - RNA, 17 nt, JC virus
guccucuccacugcugg

SEQ ID NO: 226196 - RNA, 17 nt, JC virus
gugcagggaagccagug

SEQ ID NO: 226197 - RNA, 13 nt, JC virus
gugcuauugcuca

SEQ ID NO: 226198 - RNA, 15 nt, JC virus
gguagaaugcuuuuu

SEQ ID NO: 226199 - RNA, 15 nt, JC virus
gguagaagacccuaa

SEQ ID NO: 226200 - RNA, 22 nt, JC virus
gguagaagacccuaaagacuuu

SEQ ID NO: 226201 - RNA, 16 nt, JC virus
ggcuauagcugcuaua

SEQ ID NO: 226202 - RNA, 12 nt, JC virus
guaaacaugcca

SEQ ID NO: 226203 - RNA, 18 nt, JC virus
ggugccgcacuugcacuu

SEQ ID NO: 226204 - RNA, 20 nt, JC virus
ggugacaaguuugaugaaug

SEQ ID NO: 226205 - RNA, 17 nt, JC virus
ggugacccagaugagca

SEQ ID NO: 226206 - RNA, 12 nt, JC virus
gguagugcuauu

SEQ ID NO: 226207 - RNA, 19 nt, JC virus
guagaaaauguauacaugc

SEQ ID NO: 226208 - RNA, 23 nt, JC virus
guagaaugcuuuuuaacuccaga

SEQ ID NO: 226209 - RNA, 17 nt, JC virus
guagcugaaauugcugc

SEQ ID NO: 226210 - RNA, 19 nt, JC virus
guagcuggguuugcugcau

SEQ ID NO: 226211 - RNA, 17 nt, JC virus
ggagaggcugcugcuac

SEQ ID NO: 226212 - RNA, 16 nt, JC virus
ggaccuaguugcuacu

SEQ ID NO: 226213 - RNA, 21 nt, JC virus
gcugacaaguauaaguuguca

SEQ ID NO: 226214 - RNA, 23 nt, JC virus
gcuucuuuugcuguguauaccac

SEQ ID NO: 226215 - RNA, 15 nt, JC virus
gcuggguuugcugca

SEQ ID NO: 226216 - RNA, 16 nt, JC virus
guuuuuugaaacauug

SEQ ID NO: 226217 - RNA, 21 nt, JC virus
uaaaguauaaccagcuuuacu

SEQ ID NO: 226218 - RNA, 16 nt, JC virus
uacccaaucuaaauga

SEQ ID NO: 226219 - RNA, 13 nt, JC virus
uaccaacauuagc

SEQ ID NO: 226220 - RNA, 17 nt, JC virus
uaccaacauuagcuuuc

SEQ ID NO: 226221 - RNA, 19 nt, JC virus
uaccaacauuagcuuucau

SEQ ID NO: 226222 - RNA, 20 nt, JC virus
uacagagguagaaugcuuuu

SEQ ID NO: 226223 - RNA, 21 nt, JC virus
uacagagguagaaugcuuuuu

SEQ ID NO: 226224 - RNA, 19 nt, JC virus
uaaugggcaagcaacucau

SEQ ID NO: 226225 - RNA, 13 nt, JC virus
uaauaacuggagc

SEQ ID NO: 226226 - RNA, 20 nt, JC virus
uaauaaaguauaaccagcuu

SEQ ID NO: 226227 - RNA, 22 nt, JC virus
uaauaaaguauaaccagcuuua

SEQ ID NO: 226228 - RNA, 16 nt, JC virus
ucaaacuguaacuggu

SEQ ID NO: 226229 - RNA, 18 nt, JC virus
ucaaacuguaacuggugg

SEQ ID NO: 226230 - RNA, 21 nt, JC virus
uauuucuaaauccagccuuuc

SEQ ID NO: 226231 - RNA, 15 nt, JC virus
ucaauuacagaggua

SEQ ID NO: 226232 - RNA, 20 nt, JC virus
uaggcugcccaucaacucua

SEQ ID NO: 226233 - RNA, 23 nt, JC virus
uacuccugaaacauaugcuguaa

SEQ ID NO: 226234 - RNA, 20 nt, JC virus
uaggugccaaccuauggaac

SEQ ID NO: 226235 - RNA, 12 nt, JC virus
uaguugcuacug

SEQ ID NO: 226236 - RNA, 13 nt, JC virus
uaguugcuacugu

SEQ ID NO: 226237 - RNA, 14 nt, JC virus
uaguugcuacuguu

SEQ ID NO: 226238 - RNA, 19 nt, JC virus
uauaagaaacuuauggaaa

SEQ ID NO: 226239 - RNA, 22 nt, JC virus
uauaaguugucaccuuugcaaa

SEQ ID NO: 226240 - RNA, 15 nt, JC virus
gccagugaugaugaa

SEQ ID NO: 226241 - RNA, 15 nt, JC virus
gcauuuuugucugca

SEQ ID NO: 226242 - RNA, 21 nt, JC virus
gccacagacaucaacagcuga

SEQ ID NO: 226243 - RNA, 17 nt, JC virus
gcauauuacaauaaagg

SEQ ID NO: 226244 - RNA, 15 nt, JC virus
gcaucccuugcuacu

SEQ ID NO: 226245 - RNA, 14 nt, JC virus
gcaucuuagggguu

SEQ ID NO: 226246 - RNA, 12 nt, JC virus
gcacuugcacuu

SEQ ID NO: 226247 - RNA, 15 nt, JC virus
gaucugcaugcauuc

SEQ ID NO: 226248 - RNA, 21 nt, JC virus
gaccuguuuguaaacaugcca

SEQ ID NO: 226249 - RNA, 15 nt, JC virus
gaauuccacuaccca

SEQ ID NO: 226250 - RNA, 16 nt, JC virus
gaagaaauguuugcca

SEQ ID NO: 226251 - RNA, 17 nt, JC virus
cuugagcauccaugcca

SEQ ID NO: 226252 - RNA, 12 nt, JC virus
gaaagugacucc

SEQ ID NO: 226253 - RNA, 15 nt, JC virus
cugggguugacucaa

SEQ ID NO: 226254 - RNA, 22 nt, JC virus
cuggagaggcugcugcuacuau

SEQ ID NO: 226255 - RNA, 17 nt, JC virus
cugagguuauaggggug

SEQ ID NO: 226256 - RNA, 17 nt, JC virus
cugaaacauaugcugua

SEQ ID NO: 226257 - RNA, 18 nt, JC virus
cugaaacauaugcuguaa

SEQ ID NO: 226258 - RNA, 15 nt, JC virus
cugaaauugcugcug

SEQ ID NO: 226259 - RNA, 17 nt, JC virus
cugaaauugcugcugga

SEQ ID NO: 226260 - RNA, 22 nt, JC virus
cucugaggcuauagcugcuaua

SEQ ID NO: 226261 - RNA, 21 nt, JC virus
cuguucccucaaaaacucuaa

SEQ ID NO: 226262 - RNA, 14 nt, JC virus
cuucugcuucagaa

SEQ ID NO: 226263 - RNA, 22 nt, JC virus
cuacuugagcauccaugccaua

SEQ ID NO: 226264 - RNA, 17 nt, JC virus
cuacuguuucugaggcu

SEQ ID NO: 226265 - RNA, 21 nt, JC virus
cuacuguuucugaggcugcug

SEQ ID NO: 226266 - RNA, 23 nt, JC virus
cuacuauagaaguugaaauugca

SEQ ID NO: 226267 - RNA, 13 nt, JC virus
cuauagcugcuau

SEQ ID NO: 226268 - RNA, 23 nt, JC virus
cuauaggccuuacuccugaaaca

SEQ ID NO: 226269 - RNA, 13 nt, JC virus
cuaguugcuacug

SEQ ID NO: 226270 - RNA, 14 nt, JC virus
cuaguugcuacugu

SEQ ID NO: 226271 - RNA, 15 nt, JC virus
cuaguugcuacuguu

SEQ ID NO: 226272 - RNA, 12 nt, JC virus
cucaugacaaug

SEQ ID NO: 226273 - RNA, 22 nt, JC virus
augugcacucuaaugggcaagc

SEQ ID NO: 226274 - RNA, 15 nt, JC virus
augugaaaagugcag

SEQ ID NO: 226275 - RNA, 15 nt, JC virus
auuguaauaugcagu

SEQ ID NO: 226276 - RNA, 18 nt, JC virus
cacuauuuuucuuuugca

SEQ ID NO: 226277 - RNA, 16 nt, JC virus
cagaaaugggugaccc

SEQ ID NO: 226278 - RNA, 19 nt, JC virus
cagaugugaaaagugcagu

SEQ ID NO: 226279 - RNA, 21 nt, JC virus
cagaugugaaaagugcaguuu

SEQ ID NO: 226280 - RNA, 17 nt, JC virus
cacuacccaaucuaaau

SEQ ID NO: 226281 - RNA, 16 nt, JC virus
caauuacagagguaga

SEQ ID NO: 226282 - RNA, 23 nt, JC virus
caauuacagagguagaaugcuuu

SEQ ID NO: 226283 - RNA, 19 nt, JC virus
ccuauggaacagaugaaug

SEQ ID NO: 226284 - RNA, 12 nt, JC virus
ccuaguugcuac

SEQ ID NO: 226285 - RNA, 15 nt, JC virus
ccucuguucccucaa

SEQ ID NO: 226286 - RNA, 22 nt, JC virus
ccuuacuccugaaacauaugcu

SEQ ID NO: 226287 - RNA, 12 nt, JC virus
ccuguuuugcca

SEQ ID NO: 226288 - RNA, 12 nt, JC virus
ccuuagcugcac

SEQ ID NO: 226289 - RNA, 20 nt, JC virus
ccuguuuguaaacaugccac

SEQ ID NO: 226290 - RNA, 18 nt, JC virus
ccuguggaaauauacuca

SEQ ID NO: 226291 - RNA, 14 nt, JC virus
ccuuuacagaugug

SEQ ID NO: 226292 - RNA, 13 nt, JC virus
ccuugcuacugua

SEQ ID NO: 226293 - RNA, 14 nt, JC virus
ccuuguuacagugu

SEQ ID NO: 226294 - RNA, 19 nt, JC virus
ccacuauuuuucuuuugca

SEQ ID NO: 226295 - RNA, 19 nt, JC virus
ccacugcugggaaccagac

SEQ ID NO: 226296 - RNA, 15 nt, JC virus
cauugaaagccuuua

SEQ ID NO: 226297 - RNA, 18 nt, JC virus
cauugaaagccuuuacag

SEQ ID NO: 226298 - RNA, 14 nt, JC virus
cauuuuugucugca

SEQ ID NO: 226299 - RNA, 15 nt, JC virus
cauuuuugucugcaa

SEQ ID NO: 226300 - RNA, 23 nt, JC virus
cauuuuugucugcaacuguccau

SEQ ID NO: 226301 - RNA, 20 nt, JC virus
cauugguucaaacuguaacu

SEQ ID NO: 226302 - RNA, 20 nt, JC virus
cauaguagaaaauguauaca

SEQ ID NO: 226303 - RNA, 13 nt, JC virus
cauauuugucaac

SEQ ID NO: 226304 - RNA, 16 nt, JC virus
cagugcuugauccaug

SEQ ID NO: 226305 - RNA, 14 nt, JC virus
aggcuauagcugcu

SEQ ID NO: 226306 - RNA, 16 nt, JC virus
aggcuauagcugcuau

SEQ ID NO: 226307 - RNA, 20 nt, JC virus
aggcuuuagaauuacagggg

SEQ ID NO: 226308 - RNA, 16 nt, JC virus
aggcugcugcugccac

SEQ ID NO: 226309 - RNA, 12 nt, JC virus
aggcugcugcua

SEQ ID NO: 226310 - RNA, 15 nt, JC virus
aggcugcugcuacua

SEQ ID NO: 226311 - RNA, 21 nt, JC virus
aggcugcugcuacuauagaag

SEQ ID NO: 226312 - RNA, 16 nt, JC virus
agcuggguuugcugca

SEQ ID NO: 226313 - RNA, 14 nt, JC virus
agaggcugcugcua

SEQ ID NO: 226314 - RNA, 16 nt, JC virus
agaggcugcugcuacu

SEQ ID NO: 226315 - RNA, 23 nt, JC virus
agaggcuucugagaccugggaaa

SEQ ID NO: 226316 - RNA, 20 nt, JC virus
aguaaagcugguuauacuuu

SEQ ID NO: 226317 - RNA, 13 nt, JC virus
aguauaaccagcu

SEQ ID NO: 226318 - RNA, 21 nt, JC virus
aggggauuacaaguaccucug

SEQ ID NO: 226319 - RNA, 22 nt, JC virus
agugggaugaagaccuguuuug

SEQ ID NO: 226320 - RNA, 11 nt, JC virus
aguugcaguua

SEQ ID NO: 226321 - RNA, 16 nt, JC virus
aucccuugcuacugua

SEQ ID NO: 226322 - RNA, 12 nt, JC virus
auccagccuuuc

SEQ ID NO: 226323 - RNA, 14 nt, JC virus
aucuaaaugaggau

SEQ ID NO: 226324 - RNA, 14 nt, JC virus
aucugcaugcauuc

SEQ ID NO: 226325 - RNA, 22 nt, JC virus
acuauagaaguugaaauugcau

SEQ ID NO: 226326 - RNA, 13 nt, JC virus
acucuaaugggca

SEQ ID NO: 226327 - RNA, 14 nt, JC virus
acuguaacuggugg

SEQ ID NO: 226328 - RNA, 16 nt, JC virus
acuggccuaaaccaga

SEQ ID NO: 226329 - RNA, 21 nt, JC virus
acugagguuauaggggugaca

SEQ ID NO: 226330 - RNA, 15 nt, JC virus
agaccuguuuguaaa

SEQ ID NO: 226331 - RNA, 23 nt, JC virus
agaccuguuuguaaacaugccac

SEQ ID NO: 226332 - RNA, 22 nt, JC virus
agaauuccacuacccaaucuaa

SEQ ID NO: 226333 - RNA, 19 nt, JC virus
accucugaggcuauagcug

SEQ ID NO: 226334 - RNA, 22 nt, JC virus
accucugaggcuauagcugcua

SEQ ID NO: 226335 - RNA, 11 nt, JC virus
acccuaaagac

SEQ ID NO: 226336 - RNA, 14 nt, JC virus
accccaccuaaaaa

SEQ ID NO: 226337 - RNA, 16 nt, JC virus
acagacaucaacagcu

SEQ ID NO: 226338 - RNA, 20 nt, JC virus
acaggauuuucaguagcuga

SEQ ID NO: 226339 - RNA, 19 nt, JC virus
acauuuuaauaaaguauaa

SEQ ID NO: 226340 - RNA, 12 nt, JC virus
acauuagcuuuc

SEQ ID NO: 226341 - RNA, 19 nt, JC virus
acauuugaaagugacuccc

SEQ ID NO: 226342 - RNA, 21 nt, JC virus
acauuugaaagugacucccca

SEQ ID NO: 226343 - RNA, 23 nt, JC virus
acauuugaaagugacuccccaaa

SEQ ID NO: 226344 - RNA, 23 nt, JC virus
ugaaagugacuccccaaauaggg

SEQ ID NO: 226345 - RNA, 12 nt, JC virus
ugaaagccuuua

SEQ ID NO: 226346 - RNA, 16 nt, JC virus
ugaaugugcacucuaa

SEQ ID NO: 226347 - RNA, 17 nt, JC virus
ugaaacauugaaagccu

SEQ ID NO: 226348 - RNA, 20 nt, JC virus
ugaaacauugaaagccuuua

SEQ ID NO: 226349 - RNA, 16 nt, JC virus
ugaaacauaugcugua

SEQ ID NO: 226350 - RNA, 14 nt, JC virus
ugaggcugcugcug

SEQ ID NO: 226351 - RNA, 19 nt, JC virus
ugcauugguucaaacugua

SEQ ID NO: 226352 - RNA, 18 nt, JC virus
ugcaucccuugcuacugu

SEQ ID NO: 226353 - RNA, 16 nt, JC virus
ugccaaccuauggaac

SEQ ID NO: 226354 - RNA, 23 nt, JC virus
ugccaaccuauggaacagaugaa

SEQ ID NO: 226355 - RNA, 15 nt, JC virus
ugccagugaugauga

SEQ ID NO: 226356 - RNA, 16 nt, JC virus
ugccagugaugaugaa

SEQ ID NO: 226357 - RNA, 15 nt, JC virus
ucuaaccuccucuac

SEQ ID NO: 226358 - RNA, 23 nt, JC virus
ucuaaccuguggaaauauacuca

SEQ ID NO: 226359 - RNA, 23 nt, JC virus
ugguucaaacuguaacugguggu

SEQ ID NO: 226360 - RNA, 16 nt, JC virus
uguauacaugcuuauu

SEQ ID NO: 226361 - RNA, 19 nt, JC virus
uguagcuggguuugcugca

SEQ ID NO: 226362 - RNA, 22 nt, JC virus
ugggcaagcaacucaugacaau

SEQ ID NO: 226363 - RNA, 18 nt, JC virus
ugggugccgcacuugcac

SEQ ID NO: 226364 - RNA, 20 nt, JC virus
ugggugccgcacuugcacuu

SEQ ID NO: 226365 - RNA, 19 nt, JC virus
ugggggaccuaguugcuac

SEQ ID NO: 226366 - RNA, 21 nt, JC virus
ugggggaccuaguugcuacug

SEQ ID NO: 226367 - RNA, 13 nt, JC virus
ugcuacuguagag

SEQ ID NO: 226368 - RNA, 17 nt, JC virus
ugugauugugauucagu

SEQ ID NO: 226369 - RNA, 16 nt, JC virus
uguuucugaggcugcu

SEQ ID NO: 226370 - RNA, 16 nt, JC virus
uguuuugccaugaaga

SEQ ID NO: 226371 - RNA, 18 nt, JC virus
uuaguaagucaauaucua

SEQ ID NO: 226372 - RNA, 21 nt, JC virus
uuccugugugucugcaccaga

SEQ ID NO: 226373 - RNA, 20 nt, JC virus
uuccucucuaggaaagucaa

SEQ ID NO: 226374 - RNA, 14 nt, JC virus
uugagcauccaugc

SEQ ID NO: 226375 - RNA, 18 nt, JC virus
uugagcauccaugccaua

SEQ ID NO: 226376 - RNA, 23 nt, JC virus
uugcugcuggagaggcugcugcu

SEQ ID NO: 226377 - RNA, 20 nt, JC virus
uugcaucccuugcuacugua

SEQ ID NO: 226378 - RNA, 15 nt, JC virus
uugguucaaacugua

SEQ ID NO: 226379 - RNA, 17 nt, JC virus
uugguucaaacuguaac

SEQ ID NO: 226380 - RNA, 14 nt, JC virus
uuuaacuccagaaa

SEQ ID NO: 226381 - RNA, 15 nt, JC virus
uuuaauuacagaaca

SEQ ID NO: 226382 - RNA, 23 nt, JC virus
uuuaaugagaagugggaugaaga

SEQ ID NO: 226383 - RNA, 23 nt, JC virus
uuuccugugugucugcaccagag

SEQ ID NO: 226384 - RNA, 17 nt, JC virus
uuuacaauaaacuuaau

SEQ ID NO: 226385 - RNA, 16 nt, JC virus
uuuagaauuacagggg

SEQ ID NO: 226386 - RNA, 14 nt, JC virus
uuucugaggcugcu

SEQ ID NO: 226387 - RNA, 16 nt, JC virus
auucuguaacuuuuau

SEQ ID NO: 226388 - RNA, 17 nt, JC virus
auuaaaauguacugcau

SEQ ID NO: 226389 - RNA, 18 nt, JC virus
auuaaaauguacugcaua

SEQ ID NO: 226390 - RNA, 14 nt, JC virus
augaaaacacagga

SEQ ID NO: 226391 - RNA, 18 nt, JC virus
augaagaccuguuuugcc

SEQ ID NO: 226392 - RNA, 23 nt, JC virus
aucuuccucucuaggaaagucaa

SEQ ID NO: 226393 - RNA, 18 nt, JC virus
caaguauaaguugucacc

SEQ ID NO: 226394 - RNA, 19 nt, JC virus
caaguaccucugaggcuau

SEQ ID NO: 226395 - RNA, 19 nt, JC virus
caacuguccauauuuguca

SEQ ID NO: 226396 - RNA, 19 nt, JC virus
caaacuguaacugguggua

SEQ ID NO: 226397 - RNA, 21 nt, JC virus
auugcaucccuugcuacugua

SEQ ID NO: 226398 - RNA, 20 nt, JC virus
auuucuaaauccagccuuuc

SEQ ID NO: 226399 - RNA, 19 nt, JC virus
auuuuguuuuuuacaauaa

SEQ ID NO: 226400 - RNA, 16 nt, JC virus
cagacaucaacagcug

SEQ ID NO: 226401 - RNA, 16 nt, JC virus
cagggaagccagugca

SEQ ID NO: 226402 - RNA, 21 nt, JC virus
cagggcauuuuguuuuuuaca

SEQ ID NO: 226403 - RNA, 19 nt, JC virus
caggauuuucaguagcuga

SEQ ID NO: 226404 - RNA, 20 nt, JC virus
cauacauaggcugcccauca

SEQ ID NO: 226405 - RNA, 14 nt, JC virus
cauaugcuguaaua

SEQ ID NO: 226406 - RNA, 13 nt, JC virus
caucuuagggguu

SEQ ID NO: 226407 - RNA, 15 nt, JC virus
caucccuugcuacug

SEQ ID NO: 226408 - RNA, 19 nt, JC virus
cagugcagggcaccagcuu

SEQ ID NO: 226409 - RNA, 17 nt, JC virus
cagggggugcuuuuuaa

SEQ ID NO: 226410 - RNA, 21 nt, JC virus
caguagcugaaauugcugcug

SEQ ID NO: 226411 - RNA, 14 nt, JC virus
ccgcacuugcacuu

SEQ ID NO: 226412 - RNA, 14 nt, JC virus
ccaaccuauggaac

SEQ ID NO: 226413 - RNA, 22 nt, JC virus
ccagugaugaugaaaacacagg

SEQ ID NO: 226414 - RNA, 19 nt, JC virus
ccagugcagggcaccagcu

SEQ ID NO: 226415 - RNA, 15 nt, JC virus
agucaagcuguguuu

SEQ ID NO: 226416 - RNA, 13 nt, JC virus
aguugcuacuguu

SEQ ID NO: 226417 - RNA, 12 nt, JC virus
auaccacuaaag

SEQ ID NO: 226418 - RNA, 13 nt, JC virus
auaccacuaaaga

SEQ ID NO: 226419 - RNA, 22 nt, JC virus
auaaguugucaccuuugcaaag

SEQ ID NO: 226420 - RNA, 13 nt, JC virus
auaaccagcuuua

SEQ ID NO: 226421 - RNA, 17 nt, JC virus
auaaccagcuuuacuua

SEQ ID NO: 226422 - RNA, 21 nt, JC virus
auaaccagcuuuacuuaacag

SEQ ID NO: 226423 - RNA, 14 nt, JC virus
auaggggugacaag

SEQ ID NO: 226424 - RNA, 20 nt, JC virus
aggaucccaacacucuaccc

SEQ ID NO: 226425 - RNA, 14 nt, JC virus
aggccuuacuccug

SEQ ID NO: 226426 - RNA, 20 nt, JC virus
agcuuuacuuaacaguugca

SEQ ID NO: 226427 - RNA, 11 nt, JC virus
aggaaagucaa

SEQ ID NO: 226428 - RNA, 12 nt, JC virus
aggaaagucaag

SEQ ID NO: 226429 - RNA, 23 nt, JC virus
agcauugugauugugauucagug

SEQ ID NO: 226430 - RNA, 22 nt, JC virus
agaugugaaaagugcaguuuuc

SEQ ID NO: 226431 - RNA, 19 nt, JC virus
agaugagcaucuuaggggu

SEQ ID NO: 226432 - RNA, 16 nt, JC virus
agcaacucaugacaau

SEQ ID NO: 226433 - RNA, 22 nt, JC virus
agauacauuugaaagugacucc

SEQ ID NO: 226434 - RNA, 22 nt, JC virus
agaucugcaugcauuccucagu

SEQ ID NO: 226435 - RNA, 15 nt, JC virus
acaauggugcaggga

SEQ ID NO: 226436 - RNA, 21 nt, JC virus
acaaguuugaugaaugugcac

SEQ ID NO: 226437 - RNA, 19 nt, JC virus
acagcauuuuugucugcaa

SEQ ID NO: 226438 - RNA, 14 nt, JC virus
acaucaacagcuga

SEQ ID NO: 226439 - RNA, 22 nt, JC virus
acacucuaccccaccuaaaaag

SEQ ID NO: 226440 - RNA, 21 nt, JC virus
acuacccaaucuaaaugagga

SEQ ID NO: 226441 - RNA, 19 nt, JC virus
acuugagcauccaugccau

SEQ ID NO: 226442 - RNA, 22 nt, JC virus
acuguuucugaggcugcugcug

SEQ ID NO: 226443 - RNA, 16 nt, JC virus
acuuaacaguugcagu

SEQ ID NO: 226444 - RNA, 18 nt, JC virus
acuuaacaguugcaguua

SEQ ID NO: 226445 - RNA, 21 nt, JC virus
acuccccaaauagggacaugc

SEQ ID NO: 226446 - RNA, 21 nt, JC virus
acuccugaaacauaugcugua

SEQ ID NO: 226447 - RNA, 17 nt, JC virus
accuaguugcuacuguu

SEQ ID NO: 226448 - RNA, 14 nt, JC virus
gaaacuuauggaaa

SEQ ID NO: 226449 - RNA, 22 nt, JC virus
gaaauugcaucccuugcuacug

SEQ ID NO: 226450 - RNA, 21 nt, JC virus
gaaauguuugccagugaugau

SEQ ID NO: 226451 - RNA, 19 nt, JC virus
gaaaugggugacccagaug

SEQ ID NO: 226452 - RNA, 21 nt, JC virus
gaaaauguauacaugcuuauu

SEQ ID NO: 226453 - RNA, 15 nt, JC virus
gaaacauaugcugua

SEQ ID NO: 226454 - RNA, 19 nt, JC virus
gaaacauugaaagccuuua

SEQ ID NO: 226455 - RNA, 22 nt, JC virus
gaauccugguggaauacauuua

SEQ ID NO: 226456 - RNA, 22 nt, JC virus
cuuuugggggaccuaguugcua

SEQ ID NO: 226457 - RNA, 22 nt, JC virus
cuuucauaguagaaaauguaua

SEQ ID NO: 226458 - RNA, 14 nt, JC virus
cuuucuuuccacug

SEQ ID NO: 226459 - RNA, 23 nt, JC virus
cugugaccuuaaaaacugagguu

SEQ ID NO: 226460 - RNA, 19 nt, JC virus
gaugugaaaagugcaguuu

SEQ ID NO: 226461 - RNA, 22 nt, JC virus
gaugugaaaagugcaguuuucc

SEQ ID NO: 226462 - RNA, 16 nt, JC virus
gaugaaaacacaggau

SEQ ID NO: 226463 - RNA, 20 nt, JC virus
gaugaagaccuguuuugcca

SEQ ID NO: 226464 - RNA, 22 nt, JC virus
gaguccucuccacugcugggaa

SEQ ID NO: 226465 - RNA, 17 nt, JC virus
gaggcuauagcugcuau

SEQ ID NO: 226466 - RNA, 17 nt, JC virus
gaggcugcugcugccac

SEQ ID NO: 226467 - RNA, 16 nt, JC virus
gaggcugugaccuuaa

SEQ ID NO: 226468 - RNA, 16 nt, JC virus
cuccgggggcuguagc

SEQ ID NO: 226469 - RNA, 22 nt, JC virus
cucuguucccucaaaaacucua

SEQ ID NO: 226470 - RNA, 10 nt, JC virus
cugcugcuac

SEQ ID NO: 226471 - RNA, 22 nt, JC virus
cugcuggagaggcugcugcuac

SEQ ID NO: 226472 - RNA, 21 nt, JC virus
cuguagcuggguuugcugcau

SEQ ID NO: 226473 - RNA, 23 nt, JC virus
cuggugguagugcuauugcucag

SEQ ID NO: 226474 - RNA, 14 nt, JC virus
cugggaaaagcauu

SEQ ID NO: 226475 - RNA, 12 nt, JC virus
guugcuacuguu

SEQ ID NO: 226476 - RNA, 17 nt, JC virus
guuucugaggcugcugc

SEQ ID NO: 226477 - RNA, 14 nt, JC virus
uaaacaugccacag

SEQ ID NO: 226478 - RNA, 15 nt, JC virus
guuauaggggugaca

SEQ ID NO: 226479 - RNA, 20 nt, JC virus
guuauaggggugacaaguuu

SEQ ID NO: 226480 - RNA, 18 nt, JC virus
uacagcauuuuugucugc

SEQ ID NO: 226481 - RNA, 20 nt, JC virus
uacagcauuuuugucugcaa

SEQ ID NO: 226482 - RNA, 23 nt, JC virus
uacagcauuuuugucugcaacug

SEQ ID NO: 226483 - RNA, 20 nt, JC virus
uacagaugugaaaagugcag

SEQ ID NO: 226484 - RNA, 16 nt, JC virus
uacagggggugcuuuu

SEQ ID NO: 226485 - RNA, 17 nt, JC virus
uacagggggugcuuuuu

SEQ ID NO: 226486 - RNA, 18 nt, JC virus
uaacuggugguagugcua

SEQ ID NO: 226487 - RNA, 23 nt, JC virus
uauacuuuauuaaaauguacugc

SEQ ID NO: 226488 - RNA, 12 nt, JC virus
uauagcugcuau

SEQ ID NO: 226489 - RNA, 15 nt, JC virus
uagugcuauugcuca

SEQ ID NO: 226490 - RNA, 16 nt, JC virus
uagugcuauugcucag

SEQ ID NO: 226491 - RNA, 18 nt, JC virus
uagcuggguuugcugcau

SEQ ID NO: 226492 - RNA, 17 nt, JC virus
uagauuuuuugcugacu

SEQ ID NO: 226493 - RNA, 21 nt, JC virus
uagauuuuuugcugacuggga

SEQ ID NO: 226494 - RNA, 14 nt, JC virus
uagcugaaauugcu

SEQ ID NO: 226495 - RNA, 17 nt, JC virus
uagcugaaauugcugcu

SEQ ID NO: 226496 - RNA, 18 nt, JC virus
uagcugaaauugcugcug

SEQ ID NO: 226497 - RNA, 10 nt, JC virus
uagaagaccc

SEQ ID NO: 226498 - RNA, 22 nt, JC virus
uacuuuauuaaaauguacugca

SEQ ID NO: 226499 - RNA, 19 nt, JC virus
uacuugagcauccaugcca

SEQ ID NO: 226500 - RNA, 18 nt, JC virus
uagaaguugaaauugcau

SEQ ID NO: 226501 - RNA, 19 nt, JC virus
uagaaguugaaauugcauc

SEQ ID NO: 226502 - RNA, 20 nt, JC virus
uagaaguugaaauugcaucc

SEQ ID NO: 226503 - RNA, 12 nt, JC virus
guaauaacugga

SEQ ID NO: 226504 - RNA, 13 nt, JC virus
guaauaugcagua

SEQ ID NO: 226505 - RNA, 17 nt, JC virus
guaccucugaggcuaua

SEQ ID NO: 226506 - RNA, 17 nt, JC virus
gguugacucaauuacag

SEQ ID NO: 226507 - RNA, 13 nt, JC virus
gguuauaggggug

SEQ ID NO: 226508 - RNA, 19 nt, JC virus
gguucaaacuguaacuggu

SEQ ID NO: 226509 - RNA, 21 nt, JC virus
ggcaagcaacucaugacaaug

SEQ ID NO: 226510 - RNA, 23 nt, JC virus
gcuuuacuuaacaguugcaguua

SEQ ID NO: 226511 - RNA, 13 nt, JC virus
gggacaugcuucc

SEQ ID NO: 226512 - RNA, 15 nt, JC virus
ggcugcugcuacuau

SEQ ID NO: 226513 - RNA, 11 nt, JC virus
gcugcugcuac

SEQ ID NO: 226514 - RNA, 14 nt, JC virus
gcuauagcugcuau

SEQ ID NO: 226515 - RNA, 15 nt, JC virus
gcuauagcugcuaua

SEQ ID NO: 226516 - RNA, 22 nt, JC virus
gccuuuauuguaauaugcagua

SEQ ID NO: 226517 - RNA, 21 nt, JC virus
ucaguagcugaaauugcugcu

SEQ ID NO: 226518 - RNA, 22 nt, JC virus
ucagcagccagcuauggcuuua

SEQ ID NO: 226519 - RNA, 14 nt, JC virus
ucaccuuugcaaag

SEQ ID NO: 226520 - RNA, 20 nt, JC virus
uccugguggaauacauuuaa

SEQ ID NO: 226521 - RNA, 16 nt, JC virus
ucccuugcuacuguag

SEQ ID NO: 226522 - RNA, 15 nt, JC virus
uccauauuugucaac

SEQ ID NO: 226523 - RNA, 21 nt, JC virus
uccacugcacaauccucucau

SEQ ID NO: 226524 - RNA, 13 nt, JC virus
uccagaaaugggu

SEQ ID NO: 226525 - RNA, 11 nt, JC virus
uccagccuuuc

SEQ ID NO: 226526 - RNA, 13 nt, JC virus
ucuguucccucaa

SEQ ID NO: 226527 - RNA, 13 nt, JC virus
ucuucugcuucag

SEQ ID NO: 226528 - RNA, 14 nt, JC virus
ucuaggaaagucaa

SEQ ID NO: 226529 - RNA, 16 nt, JC virus
ucucuaggaaagucaa

SEQ ID NO: 226530 - RNA, 22 nt, JC virus
ugaaauugcaucccuugcuacu

SEQ ID NO: 226531 - RNA, 13 nt, JC virus
ugaaauugcugcu

SEQ ID NO: 226532 - RNA, 16 nt, JC virus
ugaaauugcugcugga

SEQ ID NO: 226533 - RNA, 19 nt, JC virus
ugaugaaugugcacucuaa

SEQ ID NO: 226534 - RNA, 22 nt, JC virus
ugcaacuguccauauuugucaa

SEQ ID NO: 226535 - RNA, 16 nt, JC virus
ugagcauccaugccau

SEQ ID NO: 226536 - RNA, 18 nt, JC virus
uuauuaaaauguacugca

SEQ ID NO: 226537 - RNA, 15 nt, JC virus
uuagaauuacagggg

SEQ ID NO: 226538 - RNA, 18 nt, JC virus
uuaacuccagaaaugggu

SEQ ID NO: 226539 - RNA, 11 nt, JC virus
uugcuacuguu

SEQ ID NO: 226540 - RNA, 18 nt, JC virus
uucaacaguugggcuuuu

SEQ ID NO: 226541 - RNA, 13 nt, JC virus
uuccacugcacaa

SEQ ID NO: 226542 - RNA, 17 nt, JC virus
uuccacugcacaauccu

SEQ ID NO: 226543 - RNA, 14 nt, JC virus
ugcugcuacuauag

SEQ ID NO: 226544 - RNA, 16 nt, JC virus
ugcugcuacuauagaa

SEQ ID NO: 226545 - RNA, 17 nt, JC virus
ugcuguaauaacuggag

SEQ ID NO: 226546 - RNA, 13 nt, JC virus
ugcugacugggau

SEQ ID NO: 226547 - RNA, 15 nt, JC virus
ugcugacugggauca

SEQ ID NO: 226548 - RNA, 13 nt, JC virus
ugcacucuaaugg

SEQ ID NO: 226549 - RNA, 16 nt, JC virus
ugcaccuuaaaauauc

SEQ ID NO: 226550 - RNA, 15 nt, JC virus
ugcucaguugggaua

SEQ ID NO: 226551 - RNA, 14 nt, JC virus
uggagaguccucuc

SEQ ID NO: 226552 - RNA, 18 nt, JC virus
uggagaggcugcugcuac

SEQ ID NO: 226553 - RNA, 12 nt, JC virus
uguaacuuuuau

SEQ ID NO: 226554 - RNA, 21 nt, JC virus
uguaacuggugguagugcuau

SEQ ID NO: 226555 - RNA, 13 nt, JC virus
uguaaacaugcca

SEQ ID NO: 226556 - RNA, 21 nt, JC virus
ugucugcaccagaggcuucug

SEQ ID NO: 226557 - RNA, 14 nt, JC virus
ugugaaaagugcag

SEQ ID NO: 226558 - RNA, 21 nt, JC virus
ugguagugcuauugcucaguu

SEQ ID NO: 226559 - RNA, 15 nt, JC virus
uggccuaaaccagau

SEQ ID NO: 226560 - RNA, 13 nt, JC virus
uuuuugucugcaa

SEQ ID NO: 226561 - RNA, 19 nt, JC virus
uuuuuacaauaaacuuaau

SEQ ID NO: 226562 - RNA, 22 nt, JC virus
uuuuuaggugccaaccuaugga

SEQ ID NO: 226563 - RNA, 13 nt, JC virus
uuuuaguaaguca

SEQ ID NO: 226564 - RNA, 17 nt, JC virus
uuuguaaacaugccaca

SEQ ID NO: 226565 - RNA, 22 nt, JC virus
uuugggggaccuaguugcuacu

SEQ ID NO: 226566 - RNA, 13 nt, JC virus
gaaaagugcaguu

SEQ ID NO: 226567 - RNA, 22 nt, JC virus
cuuugguuuuuugaaacauuga

SEQ ID NO: 226568 - RNA, 12 nt, JC virus
cuuuuuaacucc

SEQ ID NO: 226569 - RNA, 19 nt, JC virus
cuuucuuuccacugcacaa

SEQ ID NO: 226570 - RNA, 15 nt, JC virus
aaagacuuuccugua

SEQ ID NO: 226571 - RNA, 18 nt, JC virus
aaagacuuuccuguagau

SEQ ID NO: 226572 - RNA, 18 nt, JC virus
gaauuccacuacccaauc

SEQ ID NO: 226573 - RNA, 19 nt, JC virus
gaauuacagggggugcuuu

SEQ ID NO: 226574 - RNA, 17 nt, JC virus
gaauggcagcugcaaag

SEQ ID NO: 226575 - RNA, 17 nt, JC virus
gaagaaauguuugccag

SEQ ID NO: 226576 - RNA, 21 nt, JC virus
gaagaaauguuugccagugau

SEQ ID NO: 226577 - RNA, 17 nt, JC virus
gaagaccuguuuugcca

SEQ ID NO: 226578 - RNA, 14 nt, JC virus
gaagacccuaaaga

SEQ ID NO: 226579 - RNA, 15 nt, JC virus
gaagacccuaaagac

SEQ ID NO: 226580 - RNA, 15 nt, JC virus
gaaagugacucccca

SEQ ID NO: 226581 - RNA, 12 nt, JC virus
gaaauauacuca

SEQ ID NO: 226582 - RNA, 13 nt, JC virus
gaaaugggugacc

SEQ ID NO: 226583 - RNA, 17 nt, JC virus
gaaaugggugacccaga

SEQ ID NO: 226584 - RNA, 16 nt, JC virus
gagaggcugcugcuac

SEQ ID NO: 226585 - RNA, 19 nt, JC virus
gagaggcugcugcuacuau

SEQ ID NO: 226586 - RNA, 21 nt, JC virus
gagaggcugcugcuacuauag

SEQ ID NO: 226587 - RNA, 22 nt, JC virus
gagaggcugcugcuacuauaga

SEQ ID NO: 226588 - RNA, 16 nt, JC virus
gagcaucuuagggguu

SEQ ID NO: 226589 - RNA, 14 nt, JC virus
gagcauccaugcca

SEQ ID NO: 226590 - RNA, 11 nt, JC virus
aaauugcugcu

SEQ ID NO: 226591 - RNA, 12 nt, JC virus
aaauugcugcug

SEQ ID NO: 226592 - RNA, 21 nt, JC virus
aaauugcaucccuugcuacug

SEQ ID NO: 226593 - RNA, 11 nt, JC virus
aaauguuugcc

SEQ ID NO: 226594 - RNA, 18 nt, JC virus
gacaucaacagcugacaa

SEQ ID NO: 226595 - RNA, 18 nt, JC virus
aaauccagccuuucuuuc

SEQ ID NO: 226596 - RNA, 23 nt, JC virus
gcuacuguuucugaggcugcugc

SEQ ID NO: 226597 - RNA, 15 nt, JC virus
gcuuuuuaauuacag

SEQ ID NO: 226598 - RNA, 17 nt, JC virus
ggaagcuccucuguucc

SEQ ID NO: 226599 - RNA, 22 nt, JC virus
ggaauccugguggaauacauuu

SEQ ID NO: 226600 - RNA, 23 nt, JC virus
gggaggcuuuagaauuacagggg

SEQ ID NO: 226601 - RNA, 15 nt, JC virus
ggaugaagaccuguu

SEQ ID NO: 226602 - RNA, 21 nt, JC virus
ggaugaagaccuguuuugcca

SEQ ID NO: 226603 - RNA, 22 nt, JC virus
ggaugaagaccuguuuugccau

SEQ ID NO: 226604 - RNA, 18 nt, JC virus
ggcagcugcaaagucagc

SEQ ID NO: 226605 - RNA, 16 nt, JC virus
gcagcugcaaagucag

SEQ ID NO: 226606 - RNA, 19 nt, JC virus
gccagaauuccacuaccca

SEQ ID NO: 226607 - RNA, 23 nt, JC virus
caggauuuucaguagcugaaauu

SEQ ID NO: 226608 - RNA, 22 nt, JC virus
cauaccaacauuagcuuucaua

SEQ ID NO: 226609 - RNA, 21 nt, JC virus
caguuuuccugugugucugca

SEQ ID NO: 226610 - RNA, 12 nt, JC virus
cagugaugauga

SEQ ID NO: 226611 - RNA, 12 nt, JC virus
caguugcaguua

SEQ ID NO: 226612 - RNA, 14 nt, JC virus
cauuagcuuucaua

SEQ ID NO: 226613 - RNA, 21 nt, JC virus
cauaggcugcccaucaacucu

SEQ ID NO: 226614 - RNA, 20 nt, JC virus
cauaugcuguaauaacugga

SEQ ID NO: 226615 - RNA, 19 nt, JC virus
ccagaaaugggugacccag

SEQ ID NO: 226616 - RNA, 21 nt, JC virus
ccagaaaugggugacccagau

SEQ ID NO: 226617 - RNA, 16 nt, JC virus
ccagcuauggcuuuac

SEQ ID NO: 226618 - RNA, 20 nt, JC virus
ccagcuuuacuuaacaguug

SEQ ID NO: 226619 - RNA, 24 nt, JC virus
ccagcuuuacuuaacaguugcagu

SEQ ID NO: 226620 - RNA, 16 nt, JC virus
ccaucaacucuaggag

SEQ ID NO: 226621 - RNA, 17 nt, JC virus
aaacauaugcuguaaua

SEQ ID NO: 226622 - RNA, 22 nt, JC virus
aaaccacuauuuuucuuuugca

SEQ ID NO: 226623 - RNA, 17 nt, JC virus
ccuuaaaauaucuggag

SEQ ID NO: 226624 - RNA, 19 nt, JC virus
ccuguuuguaaacaugcca

SEQ ID NO: 226625 - RNA, 21 nt, JC virus
ccuguuuguaaacaugccaca

SEQ ID NO: 226626 - RNA, 20 nt, JC virus
ccugugugucugcaccagag

SEQ ID NO: 226627 - RNA, 20 nt, JC virus
cuguagcuggguuugcugca

SEQ ID NO: 226628 - RNA, 19 nt, JC virus
cuguagaucugcaugcauu

SEQ ID NO: 226629 - RNA, 21 nt, JC virus
cuguaacuggugguagugcua

SEQ ID NO: 226630 - RNA, 22 nt, JC virus
cuguaacuggugguagugcuau

SEQ ID NO: 226631 - RNA, 14 nt, JC virus
cuguaauaacugga

SEQ ID NO: 226632 - RNA, 15 nt, JC virus
cuguaauaacuggag

SEQ ID NO: 226633 - RNA, 15 nt, JC virus
cugguggaauacauu

SEQ ID NO: 226634 - RNA, 15 nt, JC virus
cuggugguagugcua

SEQ ID NO: 226635 - RNA, 20 nt, JC virus
cuguguauaccacuaaagaa

SEQ ID NO: 226636 - RNA, 13 nt, JC virus
cuguuucugaggc

SEQ ID NO: 226637 - RNA, 19 nt, JC virus
cuggagaggcugcugcuac

SEQ ID NO: 226638 - RNA, 21 nt, JC virus
cucaauuacagagguagaaug

SEQ ID NO: 226639 - RNA, 18 nt, JC virus
cuccagaaaugggugacc

SEQ ID NO: 226640 - RNA, 22 nt, JC virus
cucuacuugagcauccaugcca

SEQ ID NO: 226641 - RNA, 16 nt, JC virus
cucucuaggaaaguca

SEQ ID NO: 226642 - RNA, 17 nt, JC virus
cuccugaaacauaugcu

SEQ ID NO: 226643 - RNA, 21 nt, JC virus
cuccugaaacauaugcuguaa

SEQ ID NO: 226644 - RNA, 23 nt, JC virus
cuccugaaacauaugcuguaaua

SEQ ID NO: 226645 - RNA, 18 nt, JC virus
uccuuagcugcaccuuaa

SEQ ID NO: 226646 - RNA, 19 nt, JC virus
uccucucuaggaaagucaa

SEQ ID NO: 226647 - RNA, 14 nt, JC virus
ucccuugcuacugu

SEQ ID NO: 226648 - RNA, 19 nt, JC virus
ucuaaugggcaagcaacuc

SEQ ID NO: 226649 - RNA, 23 nt, JC virus
ucuaaugggcaagcaacucauga

SEQ ID NO: 226650 - RNA, 13 nt, JC virus
ucuaaauccagcc

SEQ ID NO: 226651 - RNA, 17 nt, JC virus
ucugcuucagaaucuuc

SEQ ID NO: 226652 - RNA, 23 nt, JC virus
ucucaugaauggcagcugcaaag

SEQ ID NO: 226653 - RNA, 23 nt, JC virus
ucuggguccccuggaagcuccuc

SEQ ID NO: 226654 - RNA, 14 nt, JC virus
ucuggagaguccuc

SEQ ID NO: 226655 - RNA, 18 nt, JC virus
uaugcuguaauaacugga

SEQ ID NO: 226656 - RNA, 15 nt, JC virus
uacugcauauuacaa

SEQ ID NO: 226657 - RNA, 17 nt, JC virus
uauagauuuuuugcuga

SEQ ID NO: 226658 - RNA, 20 nt, JC virus
ucaacguaucucaucauguc

SEQ ID NO: 226659 - RNA, 20 nt, JC virus
ucaaacuguaacugguggua

SEQ ID NO: 226660 - RNA, 21 nt, JC virus
ucaaaagccuuuauuguaaua

SEQ ID NO: 226661 - RNA, 15 nt, JC virus
guccauauuugucaa

SEQ ID NO: 226662 - RNA, 18 nt, JC virus
guccccuggaagcuccuc

SEQ ID NO: 226663 - RNA, 15 nt, JC virus
guggaaauauacuca

SEQ ID NO: 226664 - RNA, 13 nt, JC virus
gugguagugcuau

SEQ ID NO: 226665 - RNA, 22 nt, JC virus
guaccucugaggcuauagcugc

SEQ ID NO: 226666 - RNA, 19 nt, JC virus
gggugccgcacuugcacuu

SEQ ID NO: 226667 - RNA, 21 nt, JC virus
guagaaugcuuuuuaacucca

SEQ ID NO: 226668 - RNA, 15 nt, JC virus
guauaaccagcuuua

SEQ ID NO: 226669 - RNA, 16 nt, JC virus
guagugcuauugcuca

SEQ ID NO: 226670 - RNA, 18 nt, JC virus
guagcuggguuugcugca

SEQ ID NO: 226671 - RNA, 14 nt, JC virus
gucaccuuugcaaa

SEQ ID NO: 226672 - RNA, 19 nt, JC virus
uaacuggugguagugcuau

SEQ ID NO: 226673 - RNA, 20 nt, JC virus
uaacuggugguagugcuauu

SEQ ID NO: 226674 - RNA, 15 nt, JC virus
uaacaguugcaguua

SEQ ID NO: 226675 - RNA, 16 nt, JC virus
uaaaucaguaagaagg

SEQ ID NO: 226676 - RNA, 16 nt, JC virus
guugacucaauuacag

SEQ ID NO: 226677 - RNA, 12 nt, JC virus
uaaaccagauua

SEQ ID NO: 226678 - RNA, 16 nt, JC virus
uaaagaaaaagcucaa

SEQ ID NO: 226679 - RNA, 19 nt, JC virus
uaaaguauaaccagcuuua

SEQ ID NO: 226680 - RNA, 22 nt, JC virus
uacuccugaaacauaugcugua

SEQ ID NO: 226681 - RNA, 12 nt, JC virus
uaccucugaggc

SEQ ID NO: 226682 - RNA, 16 nt, JC virus
uaccucugaggcuaua

SEQ ID NO: 226683 - RNA, 23 nt, JC virus
uaccucugaggcuauagcugcua

SEQ ID NO: 226684 - RNA, 16 nt, JC virus
uacaaguaccucugag

SEQ ID NO: 226685 - RNA, 21 nt, JC virus
uacaaguaccucugaggcuau

SEQ ID NO: 226686 - RNA, 21 nt, JC virus
uacagcauuuuugucugcaac

SEQ ID NO: 226687 - RNA, 15 nt, JC virus
uacauaggcugccca

SEQ ID NO: 226688 - RNA, 20 nt, JC virus
uaagucaauaucuauaucag

SEQ ID NO: 226689 - RNA, 18 nt, JC virus
uaauaaaguauaaccagc

SEQ ID NO: 226690 - RNA, 21 nt, JC virus
aagguagaagacccuaaagac

SEQ ID NO: 226691 - RNA, 16 nt, JC virus
aauagaacuguugcuu

SEQ ID NO: 226692 - RNA, 20 nt, JC virus
aauccugguggaauacauuu

SEQ ID NO: 226693 - RNA, 20 nt, JC virus
aagaccuguuuugccaugaa

SEQ ID NO: 226694 - RNA, 22 nt, JC virus
aacuccagaaaugggugaccca

SEQ ID NO: 226695 - RNA, 16 nt, JC virus
aacucuaggaguccuu

SEQ ID NO: 226696 - RNA, 11 nt, JC virus
uugaaauugca

SEQ ID NO: 226697 - RNA, 22 nt, JC virus
uugaaauugcaucccuugcuac

SEQ ID NO: 226698 - RNA, 17 nt, JC virus
uugagcauccaugccau

SEQ ID NO: 226699 - RNA, 22 nt, JC virus
uugagcauccaugccauacaua

SEQ ID NO: 226700 - RNA, 12 nt, JC virus
uugcuacuguag

SEQ ID NO: 226701 - RNA, 19 nt, JC virus
uuuuauauaagaaacuuau

SEQ ID NO: 226702 - RNA, 22 nt, JC virus
uuuuauauaagaaacuuaugga

SEQ ID NO: 226703 - RNA, 18 nt, JC virus
uuuuaggugccaaccuau

SEQ ID NO: 226704 - RNA, 13 nt, JC virus
aacaguugcaguu

SEQ ID NO: 226705 - RNA, 12 nt, JC virus
uuucuaaaucca

SEQ ID NO: 226706 - RNA, 19 nt, JC virus
uuucuaaauccagccuuuc

SEQ ID NO: 226707 - RNA, 21 nt, JC virus
uuucugaggcugcugcugcca

SEQ ID NO: 226708 - RNA, 23 nt, JC virus
uuugggggaccuaguugcuacug

SEQ ID NO: 226709 - RNA, 16 nt, JC virus
uuuacaauaaacuuaa

SEQ ID NO: 226710 - RNA, 16 nt, JC virus
uuucaacaguugggcu

SEQ ID NO: 226711 - RNA, 16 nt, JC virus
uuguaaacaugccaca

SEQ ID NO: 226712 - RNA, 14 nt, JC virus
uuaacaguugcagu

SEQ ID NO: 226713 - RNA, 16 nt, JC virus
uuacuuaacaguugca

SEQ ID NO: 226714 - RNA, 20 nt, JC virus
uuacaaguaccucugaggcu

SEQ ID NO: 226715 - RNA, 11 nt, JC virus
uuauaggggug

SEQ ID NO: 226716 - RNA, 22 nt, JC virus
uuauauaagaaacuuauggaaa

SEQ ID NO: 226717 - RNA, 14 nt, JC virus
uguaauaacuggag

SEQ ID NO: 226718 - RNA, 14 nt, JC virus
uguaauaugcagua

SEQ ID NO: 226719 - RNA, 19 nt, JC virus
uguaauaugcaguacauuu

SEQ ID NO: 226720 - RNA, 15 nt, JC virus
ugguucaaacuguaa

SEQ ID NO: 226721 - RNA, 23 nt, JC virus
ugggggaccuaguugcuacuguu

SEQ ID NO: 226722 - RNA, 15 nt, JC virus
ugugaaaagugcagu

SEQ ID NO: 226723 - RNA, 15 nt, JC virus
uguguauaccacuaa

SEQ ID NO: 226724 - RNA, 18 nt, JC virus
ugugauugugauucagug

SEQ ID NO: 226725 - RNA, 17 nt, JC virus
uguggaaauauacucau

SEQ ID NO: 226726 - RNA, 18 nt, JC virus
ugcacucuaaugggcaag

SEQ ID NO: 226727 - RNA, 21 nt, JC virus
ugcagggcaccagcuuucauu

SEQ ID NO: 226728 - RNA, 19 nt, JC virus
ugagaccugggaaaagcau

SEQ ID NO: 226729 - RNA, 15 nt, JC virus
ugagcauccaugcca

SEQ ID NO: 226730 - RNA, 18 nt, JC virus
ugagcauccaugccauac

SEQ ID NO: 226731 - RNA, 13 nt, JC virus
ugaaaacacagga

SEQ ID NO: 226732 - RNA, 18 nt, JC virus
ugaggcuauagcugcuau

SEQ ID NO: 226733 - RNA, 21 nt, JC virus
ugcaacuguccauauuuguca

SEQ ID NO: 226734 - RNA, 21 nt, JC virus
ugcaacuguuaaguaaagcug

SEQ ID NO: 226735 - RNA, 21 nt, JC virus
ugauccauguccagagucuuc

SEQ ID NO: 226736 - RNA, 22 nt, JC virus
aucauaaaguuucaacaguugg

SEQ ID NO: 226737 - RNA, 22 nt, JC virus
aucugcaugcauuccucaguca

SEQ ID NO: 226738 - RNA, 14 nt, JC virus
auaccacuaaagaa

SEQ ID NO: 226739 - RNA, 21 nt, JC virus
agcuccgggggcuguagcugg

SEQ ID NO: 226740 - RNA, 13 nt, JC virus
aggcugugaccuu

SEQ ID NO: 226741 - RNA, 16 nt, JC virus
agcugaaauugcugcu

SEQ ID NO: 226742 - RNA, 18 nt, JC virus
aguaccucugaggcuaua

SEQ ID NO: 226743 - RNA, 16 nt, JC virus
agguagaaugcuuuuu

SEQ ID NO: 226744 - RNA, 21 nt, JC virus
augggugccgcacuugcacuu

SEQ ID NO: 226745 - RNA, 16 nt, JC virus
augugaaaagugcagu

SEQ ID NO: 226746 - RNA, 21 nt, JC virus
auuacaaguaccucugaggcu

SEQ ID NO: 226747 - RNA, 17 nt, JC virus
caacucuaggaguccuu

SEQ ID NO: 226748 - RNA, 23 nt, JC virus
caacucuaggaguccuucuguua

SEQ ID NO: 226749 - RNA, 19 nt, JC virus
caacuggccuaaaccagau

SEQ ID NO: 226750 - RNA, 13 nt, JC virus
caauccucucaug

SEQ ID NO: 226751 - RNA, 21 nt, JC virus
caaguauaaguugucaccuuu

SEQ ID NO: 226752 - RNA, 15 nt, JC virus
caagcaacucaugac

SEQ ID NO: 226753 - RNA, 15 nt, JC virus
cacuacccaaucuaa

SEQ ID NO: 226754 - RNA, 17 nt, JC virus
cacagacaucaacagcu

SEQ ID NO: 226755 - RNA, 12 nt, JC virus
aagccuuuacag

SEQ ID NO: 226756 - RNA, 18 nt, JC virus
aagccuuuacagauguga

SEQ ID NO: 226757 - RNA, 14 nt, JC virus
aagugggaugaaga

SEQ ID NO: 226758 - RNA, 23 nt, JC virus
aaguuugaugaaugugcacucua

SEQ ID NO: 226759 - RNA, 19 nt, JC virus
aauugcaucccuugcuacu

SEQ ID NO: 226760 - RNA, 20 nt, JC virus
aauugcaucccuugcuacug

SEQ ID NO: 226761 - RNA, 22 nt, JC virus
aauugcaucccuugcuacugua

SEQ ID NO: 226762 - RNA, 23 nt, JC virus
aauugcaucccuugcuacuguag

SEQ ID NO: 226763 - RNA, 15 nt, JC virus
aaugagaagugggau

SEQ ID NO: 226764 - RNA, 20 nt, JC virus
aaugggaauccugguggaau

SEQ ID NO: 226765 - RNA, 13 nt, JC virus
aauccucucauga

SEQ ID NO: 226766 - RNA, 12 nt, JC virus
aacauuagcuuu

SEQ ID NO: 226767 - RNA, 15 nt, JC virus
aacagcugacaagua

SEQ ID NO: 226768 - RNA, 14 nt, JC virus
aaacuguaacuggu

SEQ ID NO: 226769 - RNA, 13 nt, JC virus
aaaagcauuguga

SEQ ID NO: 226770 - RNA, 23 nt, JC virus
aaaggcuuuugauuacagcauuu

SEQ ID NO: 226771 - RNA, 19 nt, JC virus
aaagccuuuacagauguga

SEQ ID NO: 226772 - RNA, 23 nt, JC virus
aaagccuuuacagaugugaaaag

SEQ ID NO: 226773 - RNA, 18 nt, JC virus
aaagccuuuauuguaaua

SEQ ID NO: 226774 - RNA, 14 nt, JC virus
aaagcauugugauu

SEQ ID NO: 226775 - RNA, 22 nt, JC virus
aaauugcaucccuugcuacugu

SEQ ID NO: 226776 - RNA, 19 nt, JC virus
aaauugcaucccuugcuac

SEQ ID NO: 226777 - RNA, 22 nt, JC virus
agaccugggaaaagcauuguga

SEQ ID NO: 226778 - RNA, 20 nt, JC virus
agaccuguuuguaaacaugc

SEQ ID NO: 226779 - RNA, 22 nt, JC virus
agaccuguuuugccaugaagaa

SEQ ID NO: 226780 - RNA, 16 nt, JC virus
agaaugggucucccca

SEQ ID NO: 226781 - RNA, 23 nt, JC virus
agaaugcuuuuuaacuccagaaa

SEQ ID NO: 226782 - RNA, 18 nt, JC virus
agaaauguuugccaguga

SEQ ID NO: 226783 - RNA, 16 nt, JC virus
agaaaugggugaccca

SEQ ID NO: 226784 - RNA, 18 nt, JC virus
agaaguugaaauugcauc

SEQ ID NO: 226785 - RNA, 17 nt, JC virus
acuggugguagugcuau

SEQ ID NO: 226786 - RNA, 13 nt, JC virus
acugcacaauccu

SEQ ID NO: 226787 - RNA, 20 nt, JC virus
acauaggcugcccaucaacu

SEQ ID NO: 226788 - RNA, 19 nt, JC virus
acagaugugaaaagugcag

SEQ ID NO: 226789 - RNA, 23 nt, JC virus
acagaugugaaaagugcaguuuu

SEQ ID NO: 226790 - RNA, 20 nt, JC virus
accacuauuuuucuuuugca

SEQ ID NO: 226791 - RNA, 17 nt, JC virus
accuuaaaaacugaggu

SEQ ID NO: 226792 - RNA, 18 nt, JC virus
accuauggaacagaugaa

SEQ ID NO: 226793 - RNA, 19 nt, JC virus
accuauggaacagaugaau

SEQ ID NO: 226794 - RNA, 14 nt, JC virus
accuaguugcuacu

SEQ ID NO: 226795 - RNA, 16 nt, JC virus
accuaguugcuacugu

SEQ ID NO: 226796 - RNA, 23 nt, JC virus
aaaaagguagaagacccuaaaga

SEQ ID NO: 226797 - RNA, 20 nt, JC virus
aaaacugagguuauaggggu

SEQ ID NO: 226798 - RNA, 16 nt, Machupo virus
acacccuucagucuga

SEQ ID NO: 226799 - RNA, 18 nt, Machupo virus
acuggguggggcuguucu

SEQ ID NO: 226800 - RNA, 21 nt, Machupo virus
aaaauaaccugugauguugcu

SEQ ID NO: 226801 - RNA, 20 nt, Machupo virus
aaccugugauguugcuuuca

SEQ ID NO: 226802 - RNA, 16 nt, Machupo virus
cacaguuggugcagca

SEQ ID NO: 226803 - RNA, 12 nt, Machupo virus
caaugcuuucac

SEQ ID NO: 226804 - RNA, 16 nt, Machupo virus
caauggugaaaucuuc

SEQ ID NO: 226805 - RNA, 15 nt, Machupo virus
auuuugugagcuguu

SEQ ID NO: 226806 - RNA, 21 nt, Machupo virus
aggccucuugggaggcuuauu

SEQ ID NO: 226807 - RNA, 11 nt, Machupo virus
ugauggauguc

SEQ ID NO: 226808 - RNA, 14 nt, Machupo virus
ugauuuugugagcu

SEQ ID NO: 226809 - RNA, 23 nt, Machupo virus
ugagcuguuucuuguacaaauca

SEQ ID NO: 226810 - RNA, 21 nt, Machupo virus
ugcugaggguugguuggauga

SEQ ID NO: 226811 - RNA, 12 nt, Machupo virus
ugugauggaugu

SEQ ID NO: 226812 - RNA, 19 nt, Machupo virus
uguucauggugggggggca

SEQ ID NO: 226813 - RNA, 22 nt, Machupo virus
uuggcuccacgggaacugugau

SEQ ID NO: 226814 - RNA, 15 nt, Machupo virus
uuggaugauguuugu

SEQ ID NO: 226815 - RNA, 17 nt, Machupo virus
aacucgguccacaagac

SEQ ID NO: 226816 - RNA, 22 nt, Machupo virus
ucuagggcccccaaugcuuuca

SEQ ID NO: 226817 - RNA, 20 nt, Machupo virus
ucggcaaaccaacagcauuu

SEQ ID NO: 226818 - RNA, 14 nt, Machupo virus
uccuguugaaacaa

SEQ ID NO: 226819 - RNA, 17 nt, Machupo virus
uccugagcauuguuuga

SEQ ID NO: 226820 - RNA, 19 nt, Machupo virus
uccacaagacccccggggg

SEQ ID NO: 226821 - RNA, 18 nt, Machupo virus
cuccacgggaacugugau

SEQ ID NO: 226822 - RNA, 18 nt, Machupo virus
aaaccaacagcauuugca

SEQ ID NO: 226823 - RNA, 12 nt, Machupo virus
cuacacaucaca

SEQ ID NO: 226824 - RNA, 14 nt, Machupo virus
gccaaagcuuucaa

SEQ ID NO: 226825 - RNA, 19 nt, Machupo virus
aaaucaugaacaaugguga

SEQ ID NO: 226826 - RNA, 22 nt, Machupo virus
aaauaaggccacaguuggugca

SEQ ID NO: 226827 - RNA, 18 nt, Machupo virus
ugauguugcuuucaaaua

SEQ ID NO: 226828 - RNA, 14 nt, Machupo virus
ucuuguacaaauca

SEQ ID NO: 226829 - RNA, 16 nt, Machupo virus
ucugauaucacaagcu

SEQ ID NO: 226830 - RNA, 21 nt, Machupo virus
uccacuuggggcgugcuugcc

SEQ ID NO: 226831 - RNA, 13 nt, Machupo virus
gcuuauugcaguu

SEQ ID NO: 226832 - RNA, 14 nt, Machupo virus
ggcuuauugcaguu

SEQ ID NO: 226833 - RNA, 22 nt, Machupo virus
guucagaauuccugagcauugu

SEQ ID NO: 226834 - RNA, 22 nt, Machupo virus
guucauggugggggggcacuug

SEQ ID NO: 226835 - RNA, 15 nt, Machupo virus
cuccugaacucugcu

SEQ ID NO: 226836 - RNA, 11 nt, Machupo virus
cgguagugguu

SEQ ID NO: 226837 - RNA, 23 nt, Machupo virus
gagcauuguuugaugacaucuca

SEQ ID NO: 226838 - RNA, 19 nt, Machupo virus
gcaaaccaacagcauuugc

SEQ ID NO: 226839 - RNA, 22 nt, Machupo virus
cuugccaggggucuacacauca

SEQ ID NO: 226840 - RNA, 13 nt, Machupo virus
cuuguacaaauca

SEQ ID NO: 226841 - RNA, 20 nt, Machupo virus
cuuguacaaaucaugaacaa

SEQ ID NO: 226842 - RNA, 20 nt, Machupo virus
accgaguuuggggauguuca

SEQ ID NO: 226843 - RNA, 19 nt, Machupo virus
accugugauguugcuuuca

SEQ ID NO: 226844 - RNA, 21 nt, Machupo virus
acaucacacccuucagucuga

SEQ ID NO: 226845 - RNA, 14 nt, Machupo virus
auaaccugugaugu

SEQ ID NO: 226846 - RNA, 15 nt, Machupo virus
ccagcauaugugaca

SEQ ID NO: 226847 - RNA, 15 nt, Machupo virus
ccauucgccaaagcu

SEQ ID NO: 226848 - RNA, 14 nt, Machupo virus
cacaaguagugguc

SEQ ID NO: 226849 - RNA, 18 nt, Machupo virus
uuuccagcauaugugaca

SEQ ID NO: 226850 - RNA, 22 nt, Machupo virus
uugugagcuguuucuuguacaa

SEQ ID NO: 226851 - RNA, 16 nt, Machupo virus
ugugauguugcuuuca

SEQ ID NO: 226852 - RNA, 20 nt, Machupo virus
uggcuccacgggaacuguga

SEQ ID NO: 226853 - RNA, 18 nt, Machupo virus
ucuccugaacucugcuga

SEQ ID NO: 226854 - RNA, 12 nt, Machupo virus
uccugagcauug

SEQ ID NO: 226855 - RNA, 22 nt, Machupo virus
uccugagcauuguuugaugaca

SEQ ID NO: 226856 - RNA, 15 nt, Machupo virus
acaguuggugcagca

SEQ ID NO: 226857 - RNA, 16 nt, Machupo virus
accauagagacugggu

SEQ ID NO: 226858 - RNA, 13 nt, Machupo virus
acuggguggggcu

SEQ ID NO: 226859 - RNA, 15 nt, Machupo virus
auaucacaagcucuu

SEQ ID NO: 226860 - RNA, 16 nt, Machupo virus
aggggucuacacauca

SEQ ID NO: 226861 - RNA, 20 nt, Machupo virus
aguaguggucguuacaugua

SEQ ID NO: 226862 - RNA, 12 nt, Machupo virus
aggcuuauugca

SEQ ID NO: 226863 - RNA, 15 nt, Machupo virus
cagcauuugcaguug

SEQ ID NO: 226864 - RNA, 22 nt, Machupo virus
cagcauagaaacaacacucuca

SEQ ID NO: 226865 - RNA, 22 nt, Machupo virus
cagcauaugugacagaguucag

SEQ ID NO: 226866 - RNA, 15 nt, Machupo virus
cauagaaacaacacu

SEQ ID NO: 226867 - RNA, 13 nt, Machupo virus
cacaguuggugca

SEQ ID NO: 226868 - RNA, 11 nt, Machupo virus
auggugggggg

SEQ ID NO: 226869 - RNA, 20 nt, Machupo virus
cggggaucccccgugggggc

SEQ ID NO: 226870 - RNA, 17 nt, Machupo virus
cuuccuguugaaacaaa

SEQ ID NO: 226871 - RNA, 19 nt, Machupo virus
cuguuucuuguacaaauca

SEQ ID NO: 226872 - RNA, 17 nt, Machupo virus
cucugcgcugucuugca

SEQ ID NO: 226873 - RNA, 20 nt, Machupo virus
cucuugggaggcuuauugca

SEQ ID NO: 226874 - RNA, 15 nt, Machupo virus
cugauaucacaagcu

SEQ ID NO: 226875 - RNA, 16 nt, Machupo virus
gaauuccugagcauug

SEQ ID NO: 226876 - RNA, 22 nt, Machupo virus
gaccgaguuuggggauguucau

SEQ ID NO: 226877 - RNA, 20 nt, Machupo virus
gagcucugcgcugucuugca

SEQ ID NO: 226878 - RNA, 13 nt, Machupo virus
gcauaugugacag

SEQ ID NO: 226879 - RNA, 17 nt, Machupo virus
gcauuguuugaugacau

SEQ ID NO: 226880 - RNA, 12 nt, Machupo virus
gcauuugcaguu

SEQ ID NO: 226881 - RNA, 19 nt, Machupo virus
ucaauugauuuugugagcu

SEQ ID NO: 226882 - RNA, 23 nt, Machupo virus
gcuugccaggggucuacacauca

SEQ ID NO: 226883 - RNA, 12 nt, Machupo virus
gccccccggggg

SEQ ID NO: 226884 - RNA, 18 nt, Machupo virus
gcccaagacccccgggga

SEQ ID NO: 226885 - RNA, 22 nt, Machupo virus
ggugcagcauagaaacaacacu

SEQ ID NO: 226886 - RNA, 19 nt, Machupo virus
ggucuacacaucacacccu

SEQ ID NO: 226887 - RNA, 13 nt, Machupo virus
gaccccugggugu

SEQ ID NO: 226888 - RNA, 12 nt, Machupo virus
gacagaguucag

SEQ ID NO: 226889 - RNA, 12 nt, Machupo virus
gauccccggggg

SEQ ID NO: 226890 - RNA, 14 nt, Machupo virus
gauguugcuuucaa

SEQ ID NO: 226891 - RNA, 23 nt, Machupo virus
gcaaaccaacagcauuugcaguu

SEQ ID NO: 226892 - RNA, 17 nt, Machupo virus
gaggcuuauugcaguug

SEQ ID NO: 226893 - RNA, 15 nt, Machupo virus
cauaugugacagagu

SEQ ID NO: 226894 - RNA, 15 nt, Machupo virus
caugaacaaugguga

SEQ ID NO: 226895 - RNA, 18 nt, Machupo virus
cauucgccaaagcuuuca

SEQ ID NO: 226896 - RNA, 22 nt, Machupo virus
cauucgccaaagcuuucaauug

SEQ ID NO: 226897 - RNA, 15 nt, Machupo virus
ccaacagcauuugca

SEQ ID NO: 226898 - RNA, 12 nt, Machupo virus
cugauaucacaa

SEQ ID NO: 226899 - RNA, 23 nt, Machupo virus
ucugcugaggguugguuggauga

SEQ ID NO: 226900 - RNA, 17 nt, Machupo virus
ucuacacaucacacccu

SEQ ID NO: 226901 - RNA, 22 nt, Machupo virus
ugaacaauggugaaaucuuccu

SEQ ID NO: 226902 - RNA, 21 nt, Machupo virus
ucuuguacaaaucaugaacaa

SEQ ID NO: 226903 - RNA, 17 nt, Machupo virus
uucuccugaacucugcu

SEQ ID NO: 226904 - RNA, 17 nt, Machupo virus
uucgccaaagcuuucaa

SEQ ID NO: 226905 - RNA, 12 nt, Machupo virus
aucaugaacaau

SEQ ID NO: 226906 - RNA, 18 nt, Machupo virus
cagcauuugcaguuguag

SEQ ID NO: 226907 - RNA, 13 nt, Machupo virus
auuguggggagcu

SEQ ID NO: 226908 - RNA, 19 nt, Machupo virus
agaauuccugagcauuguu

SEQ ID NO: 226909 - RNA, 19 nt, Machupo virus
acaauggugaaaucuuccu

SEQ ID NO: 226910 - RNA, 22 nt, Machupo virus
aauucgauccauucgccaaagc

SEQ ID NO: 226911 - RNA, 17 nt, Marburg virus
aauuguuaucauaguca

SEQ ID NO: 226912 - RNA, 16 nt, Marburg virus
aauuuaaugugaauca

SEQ ID NO: 226913 - RNA, 21 nt, Marburg virus
aauguuggaggcacaguacau

SEQ ID NO: 226914 - RNA, 19 nt, Marburg virus
aaucugauugugagauuau

SEQ ID NO: 226915 - RNA, 13 nt, Marburg virus
acaauucuacuaa

SEQ ID NO: 226916 - RNA, 19 nt, Marburg virus
acaaaaggggucuaccuaa

SEQ ID NO: 226917 - RNA, 21 nt, Marburg virus
acaaaaggggucuaccuaaca

SEQ ID NO: 226918 - RNA, 18 nt, Marburg virus
acaacauagaaaacauau

SEQ ID NO: 226919 - RNA, 23 nt, Marburg virus
aacaggcuguuccuauaaucuga

SEQ ID NO: 226920 - RNA, 16 nt, Marburg virus
aacauagaaaacauau

SEQ ID NO: 226921 - RNA, 16 nt, Marburg virus
aacauaagcuaucaaa

SEQ ID NO: 226922 - RNA, 13 nt, Marburg virus
aaccguacacaag

SEQ ID NO: 226923 - RNA, 19 nt, Marburg virus
aacuuuuguugcaauucaa

SEQ ID NO: 226924 - RNA, 17 nt, Marburg virus
aagacacuaaacauuuc

SEQ ID NO: 226925 - RNA, 21 nt, Marburg virus
aagagaacuucauuuaauuca

SEQ ID NO: 226926 - RNA, 23 nt, Marburg virus
aacacaauucuacuaacuucaau

SEQ ID NO: 226927 - RNA, 19 nt, Marburg virus
aaaguugacaaucaaauca

SEQ ID NO: 226928 - RNA, 18 nt, Marburg virus
agaacuucauuuaauuca

SEQ ID NO: 226929 - RNA, 21 nt, Marburg virus
acgugccguucaaagagucuu

SEQ ID NO: 226930 - RNA, 18 nt, Marburg virus
agacacuaaacauuucaa

SEQ ID NO: 226931 - RNA, 19 nt, Marburg virus
agaucacaguaaucaaauu

SEQ ID NO: 226932 - RNA, 16 nt, Marburg virus
acaugacuugauucag

SEQ ID NO: 226933 - RNA, 16 nt, Marburg virus
acauugcugcuuuaaa

SEQ ID NO: 226934 - RNA, 15 nt, Marburg virus
acacaauucuacuaa

SEQ ID NO: 226935 - RNA, 16 nt, Marburg virus
accuccauacauuugc

SEQ ID NO: 226936 - RNA, 20 nt, Marburg virus
acgaaccuccauacauuugc

SEQ ID NO: 226937 - RNA, 14 nt, Marburg virus
acgaaaauaaucua

SEQ ID NO: 226938 - RNA, 15 nt, Marburg virus
accucuuaagcuuuu

SEQ ID NO: 226939 - RNA, 18 nt, Marburg virus
auugugcccuucauugcu

SEQ ID NO: 226940 - RNA, 23 nt, Marburg virus
auucuugcuuaguuuuacuuuga

SEQ ID NO: 226941 - RNA, 19 nt, Marburg virus
auuucaauguuacagcuau

SEQ ID NO: 226942 - RNA, 16 nt, Marburg virus
auucagugcuacaaau

SEQ ID NO: 226943 - RNA, 22 nt, Marburg virus
augcuuuaaccuuacauugcug

SEQ ID NO: 226944 - RNA, 15 nt, Marburg virus
auuauccuguauaac

SEQ ID NO: 226945 - RNA, 18 nt, Marburg virus
caaagagaacuucauuua

SEQ ID NO: 226946 - RNA, 23 nt, Marburg virus
caacauaagcuaucaaauaacaa

SEQ ID NO: 226947 - RNA, 14 nt, Marburg virus
caauugcuacugag

SEQ ID NO: 226948 - RNA, 13 nt, Marburg virus
caauucauuguaa

SEQ ID NO: 226949 - RNA, 15 nt, Marburg virus
auauucuuaagcuau

SEQ ID NO: 226950 - RNA, 14 nt, Marburg virus
aucacaguaaucaa

SEQ ID NO: 226951 - RNA, 19 nt, Marburg virus
auccuuuguugauacccuu

SEQ ID NO: 226952 - RNA, 17 nt, Marburg virus
aucauugugcccuucau

SEQ ID NO: 226953 - RNA, 13 nt, Marburg virus
auauuacuaacaa

SEQ ID NO: 226954 - RNA, 16 nt, Marburg virus
auaguuaagacuggcc

SEQ ID NO: 226955 - RNA, 16 nt, Marburg virus
auaguuuaaccacaua

SEQ ID NO: 226956 - RNA, 19 nt, Marburg virus
auaaucaccaauucauugu

SEQ ID NO: 226957 - RNA, 20 nt, Marburg virus
augaugcagcucuguuucac

SEQ ID NO: 226958 - RNA, 14 nt, Marburg virus
augcucuccaguca

SEQ ID NO: 226959 - RNA, 14 nt, Marburg virus
agugcuacaaauuc

SEQ ID NO: 226960 - RNA, 19 nt, Marburg virus
aguucuuuaaauuugacca

SEQ ID NO: 226961 - RNA, 12 nt, Marburg virus
agcauauuucau

SEQ ID NO: 226962 - RNA, 17 nt, Marburg virus
agcuugcuuuacacaag

SEQ ID NO: 226963 - RNA, 18 nt, Marburg virus
agcuugcuuuacacaaga

SEQ ID NO: 226964 - RNA, 19 nt, Marburg virus
aaaaaccaaugauggauau

SEQ ID NO: 226965 - RNA, 22 nt, Marburg virus
aaaacgugacuagaccaucuua

SEQ ID NO: 226966 - RNA, 14 nt, Marburg virus
aaacaugacuugau

SEQ ID NO: 226967 - RNA, 15 nt, Marburg virus
uucuaaucuacugaa

SEQ ID NO: 226968 - RNA, 21 nt, Marburg virus
uucucauuguuaacaguugca

SEQ ID NO: 226969 - RNA, 17 nt, Marburg virus
uucuuauuuuucaacua

SEQ ID NO: 226970 - RNA, 17 nt, Marburg virus
uucaguuuuuaguuuca

SEQ ID NO: 226971 - RNA, 15 nt, Marburg virus
uuccaaaauauaucu

SEQ ID NO: 226972 - RNA, 23 nt, Marburg virus
uuaauaaacaugacuugauucag

SEQ ID NO: 226973 - RNA, 14 nt, Marburg virus
uuaaauggugauag

SEQ ID NO: 226974 - RNA, 14 nt, Marburg virus
uuaugacauaccau

SEQ ID NO: 226975 - RNA, 18 nt, Marburg virus
uuauauuuacugguauaa

SEQ ID NO: 226976 - RNA, 12 nt, Marburg virus
uucaaguuuacu

SEQ ID NO: 226977 - RNA, 18 nt, Marburg virus
uucaaguuuacugaagac

SEQ ID NO: 226978 - RNA, 12 nt, Marburg virus
uuaccuacuuau

SEQ ID NO: 226979 - RNA, 22 nt, Marburg virus
ugcagcucuguuucaccuuucu

SEQ ID NO: 226980 - RNA, 18 nt, Marburg virus
ugguuugauauucaauug

SEQ ID NO: 226981 - RNA, 15 nt, Marburg virus
uggauauuaaauauc

SEQ ID NO: 226982 - RNA, 23 nt, Marburg virus
uugucauauaacaggcuguuccu

SEQ ID NO: 226983 - RNA, 17 nt, Marburg virus
uuucauaugcugccaua

SEQ ID NO: 226984 - RNA, 15 nt, Marburg virus
uuucuguugauuuca

SEQ ID NO: 226985 - RNA, 19 nt, Marburg virus
uuugaaaguugacaaucaa

SEQ ID NO: 226986 - RNA, 12 nt, Marburg virus
uuucuuguugca

SEQ ID NO: 226987 - RNA, 14 nt, Marburg virus
uuuguugcaauuca

SEQ ID NO: 226988 - RNA, 22 nt, Marburg virus
aaccuuacauugcugcuuuaaa

SEQ ID NO: 226989 - RNA, 17 nt, Marburg virus
aacuaaacuugcauauc

SEQ ID NO: 226990 - RNA, 14 nt, Marburg virus
aaccguacacaagu

SEQ ID NO: 226991 - RNA, 18 nt, Marburg virus
aacauuucaaaagcauau

SEQ ID NO: 226992 - RNA, 18 nt, Marburg virus
aauucuacuaacuucaau

SEQ ID NO: 226993 - RNA, 22 nt, Marburg virus
aaugcuuuaaccuuacauugcu

SEQ ID NO: 226994 - RNA, 23 nt, Marburg virus
aaugcuuuaaccuuacauugcug

SEQ ID NO: 226995 - RNA, 15 nt, Marburg virus
aaugcucuccaguca

SEQ ID NO: 226996 - RNA, 19 nt, Marburg virus
aaguucucacaagauuagu

SEQ ID NO: 226997 - RNA, 12 nt, Marburg virus
aaucacuuucag

SEQ ID NO: 226998 - RNA, 21 nt, Marburg virus
aauauaccuacccugauuuau

SEQ ID NO: 226999 - RNA, 13 nt, Marburg virus
aaggauguucuua

SEQ ID NO: 227000 - RNA, 12 nt, Marburg virus
ugaagaacauua

SEQ ID NO: 227001 - RNA, 16 nt, Marburg virus
ugaaaguugacaauca

SEQ ID NO: 227002 - RNA, 17 nt, Marburg virus
ugacauaccauauauca

SEQ ID NO: 227003 - RNA, 13 nt, Marburg virus
ugaaguaacuuuu

SEQ ID NO: 227004 - RNA, 17 nt, Marburg virus
ucuacuaacuucaauaa

SEQ ID NO: 227005 - RNA, 13 nt, Marburg virus
ucuguuucaccuu

SEQ ID NO: 227006 - RNA, 19 nt, Marburg virus
ucuuaaacuugaugaugca

SEQ ID NO: 227007 - RNA, 19 nt, Marburg virus
ucucaaaccguacacaagu

SEQ ID NO: 227008 - RNA, 18 nt, Marburg virus
ucauaauugguauugaua

SEQ ID NO: 227009 - RNA, 16 nt, Marburg virus
ucaucagaucuauaau

SEQ ID NO: 227010 - RNA, 11 nt, Marburg virus
ucauugcuaag

SEQ ID NO: 227011 - RNA, 17 nt, Marburg virus
uauugcgagacuugaac

SEQ ID NO: 227012 - RNA, 15 nt, Marburg virus
ucaaguuuacugaag

SEQ ID NO: 227013 - RNA, 15 nt, Marburg virus
ucaccuuucuguuga

SEQ ID NO: 227014 - RNA, 21 nt, Marburg virus
uaguugaauugaguuaugaca

SEQ ID NO: 227015 - RNA, 13 nt, Marburg virus
uaguuuaaccaca

SEQ ID NO: 227016 - RNA, 17 nt, Marburg virus
uagaaaacauauuuauc

SEQ ID NO: 227017 - RNA, 23 nt, Marburg virus
uagacagcuugcuuuacacaaga

SEQ ID NO: 227018 - RNA, 14 nt, Marburg virus
uagaggaacuaaua

SEQ ID NO: 227019 - RNA, 17 nt, Marburg virus
uacaaagacacuaaaca

SEQ ID NO: 227020 - RNA, 15 nt, Marburg virus
uacuaacuucaauaa

SEQ ID NO: 227021 - RNA, 19 nt, Marburg virus
uaccagggguuucauaugc

SEQ ID NO: 227022 - RNA, 16 nt, Marburg virus
uaaauuugaccaaagu

SEQ ID NO: 227023 - RNA, 14 nt, Marburg virus
uaaaauauucuuaa

SEQ ID NO: 227024 - RNA, 18 nt, Marburg virus
uaaacaugacuugauuca

SEQ ID NO: 227025 - RNA, 20 nt, Marburg virus
gugugauuuucaccuugaaa

SEQ ID NO: 227026 - RNA, 13 nt, Marburg virus
guuaccuacuuau

SEQ ID NO: 227027 - RNA, 22 nt, Marburg virus
guuaccuacuuaucuacuuuga

SEQ ID NO: 227028 - RNA, 20 nt, Marburg virus
gucucaaaccguacacaagu

SEQ ID NO: 227029 - RNA, 19 nt, Marburg virus
gucgauauaauacauacua

SEQ ID NO: 227030 - RNA, 14 nt, Marburg virus
cuuaucuacuuuga

SEQ ID NO: 227031 - RNA, 20 nt, Marburg virus
cuuauaucgucucaaaccgu

SEQ ID NO: 227032 - RNA, 19 nt, Marburg virus
cuuauugcgagacuugaac

SEQ ID NO: 227033 - RNA, 16 nt, Marburg virus
cuugagagacaacuuu

SEQ ID NO: 227034 - RNA, 17 nt, Marburg virus
cuaauuaacaacuugua

SEQ ID NO: 227035 - RNA, 18 nt, Marburg virus
cuaucuuaaacuugauga

SEQ ID NO: 227036 - RNA, 17 nt, Marburg virus
cuaaugaagaacauuaa

SEQ ID NO: 227037 - RNA, 11 nt, Marburg virus
cuaacauauau

SEQ ID NO: 227038 - RNA, 17 nt, Marburg virus
ccauacauuugccgcaa

SEQ ID NO: 227039 - RNA, 14 nt, Marburg virus
cauugcugcuuuaa

SEQ ID NO: 227040 - RNA, 20 nt, Marburg virus
cauugugcccuucauugcua

SEQ ID NO: 227041 - RNA, 21 nt, Marburg virus
cgauaauaaucaccaauucau

SEQ ID NO: 227042 - RNA, 18 nt, Marburg virus
aaauaguugucauauaac

SEQ ID NO: 227043 - RNA, 15 nt, Marburg virus
aaauagugguaucau

SEQ ID NO: 227044 - RNA, 16 nt, Marburg virus
gauuuucaccuugaaa

SEQ ID NO: 227045 - RNA, 15 nt, Marburg virus
gauuuauauuuacug

SEQ ID NO: 227046 - RNA, 20 nt, Marburg virus
gauuucaauaaugcuuuaac

SEQ ID NO: 227047 - RNA, 21 nt, Marburg virus
gauuucaauguuacagcuaua

SEQ ID NO: 227048 - RNA, 14 nt, Marburg virus
gauuaaaauauucu

SEQ ID NO: 227049 - RNA, 23 nt, Marburg virus
gauuaaaauauucuuaagcuauc

SEQ ID NO: 227050 - RNA, 19 nt, Marburg virus
gauaauaaucaccaauuca

SEQ ID NO: 227051 - RNA, 20 nt, Marburg virus
gauggauauuaaauauccau

SEQ ID NO: 227052 - RNA, 20 nt, Marburg virus
gacaaucaaaucacuuucag

SEQ ID NO: 227053 - RNA, 15 nt, Marburg virus
gacaauugcuacuga

SEQ ID NO: 227054 - RNA, 22 nt, Marburg virus
aaacgugacuagaccaucuuaa

SEQ ID NO: 227055 - RNA, 15 nt, Marburg virus
gaacguucggucaca

SEQ ID NO: 227056 - RNA, 22 nt, Marburg virus
ggucaucagaucuauaaugggu

SEQ ID NO: 227057 - RNA, 16 nt, Marburg virus
ggugcacuauccuacu

SEQ ID NO: 227058 - RNA, 18 nt, Marburg virus
ggguuuacuagauuauau

SEQ ID NO: 227059 - RNA, 19 nt, Marburg virus
gguuaccuacuuaucuacu

SEQ ID NO: 227060 - RNA, 14 nt, Marburg virus
ggauccuauuacuu

SEQ ID NO: 227061 - RNA, 18 nt, Marburg virus
ggaucaagcauauuucau

SEQ ID NO: 227062 - RNA, 18 nt, Marburg virus
guccucagaucacaguaa

SEQ ID NO: 227063 - RNA, 22 nt, Marburg virus
gcugauaauuuaaugugaauca

SEQ ID NO: 227064 - RNA, 22 nt, Marburg virus
ggaaaaucaugaagaacauuaa

SEQ ID NO: 227065 - RNA, 22 nt, Marburg virus
ggagugaucuuuccgaguugau

SEQ ID NO: 227066 - RNA, 13 nt, Marburg virus
ggccuaaaugggu

SEQ ID NO: 227067 - RNA, 14 nt, Marburg virus
ucaauaaugcuuua

SEQ ID NO: 227068 - RNA, 22 nt, Marburg virus
ucaaauuuauuugaauauucaa

SEQ ID NO: 227069 - RNA, 14 nt, Marburg virus
uaguuuaaccacau

SEQ ID NO: 227070 - RNA, 22 nt, Marburg virus
uaguuuuacuuugauuuacuaa

SEQ ID NO: 227071 - RNA, 15 nt, Marburg virus
uaguuucaacucuua

SEQ ID NO: 227072 - RNA, 22 nt, Marburg virus
uauuaaauaguugucauauaac

SEQ ID NO: 227073 - RNA, 18 nt, Marburg virus
uaugacauaccauauauc

SEQ ID NO: 227074 - RNA, 19 nt, Marburg virus
uaucuuccaaaauauaucu

SEQ ID NO: 227075 - RNA, 20 nt, Marburg virus
uauauuuuauaaaccaagca

SEQ ID NO: 227076 - RNA, 13 nt, Marburg virus
uauaauggguuua

SEQ ID NO: 227077 - RNA, 21 nt, Marburg virus
uauaaucugauugugagauua

SEQ ID NO: 227078 - RNA, 22 nt, Marburg virus
uaaugauacaacuacgaaccuc

SEQ ID NO: 227079 - RNA, 23 nt, Marburg virus
uacccuugagagacaacuuuuga

SEQ ID NO: 227080 - RNA, 17 nt, Marburg virus
uaagaaucaacuaacaa

SEQ ID NO: 227081 - RNA, 14 nt, Marburg virus
gcauggauauucau

SEQ ID NO: 227082 - RNA, 22 nt, Marburg virus
gcagaauaccagggguuucaua

SEQ ID NO: 227083 - RNA, 21 nt, Marburg virus
gaugauauuccuucugaaaua

SEQ ID NO: 227084 - RNA, 18 nt, Marburg virus
gauuaagaaaaaccaaug

SEQ ID NO: 227085 - RNA, 14 nt, Marburg virus
gauauaauacauac

SEQ ID NO: 227086 - RNA, 18 nt, Marburg virus
gauauucaauuguuauca

SEQ ID NO: 227087 - RNA, 13 nt, Marburg virus
gauauuaaauauc

SEQ ID NO: 227088 - RNA, 19 nt, Marburg virus
gauagauuaauccuugaag

SEQ ID NO: 227089 - RNA, 20 nt, Marburg virus
gacuacgacgauaauaauca

SEQ ID NO: 227090 - RNA, 20 nt, Marburg virus
gaauacgucgauauaauaca

SEQ ID NO: 227091 - RNA, 23 nt, Marburg virus
gaaaucaacuugggagauuuuua

SEQ ID NO: 227092 - RNA, 22 nt, Marburg virus
cuuaguuuuacuuugauuuacu

SEQ ID NO: 227093 - RNA, 22 nt, Marburg virus
cuuaagcuaucuuaaacuugau

SEQ ID NO: 227094 - RNA, 16 nt, Marburg virus
cuucucaaauggugca

SEQ ID NO: 227095 - RNA, 22 nt, Marburg virus
cuuauugcgagacuugaacaca

SEQ ID NO: 227096 - RNA, 16 nt, Marburg virus
cuucaagccaucugau

SEQ ID NO: 227097 - RNA, 14 nt, Marburg virus
cuucauuuaauuca

SEQ ID NO: 227098 - RNA, 21 nt, Marburg virus
cgggcauacuauggugaugcg

SEQ ID NO: 227099 - RNA, 15 nt, Marburg virus
cuaauauuacuaaca

SEQ ID NO: 227100 - RNA, 16 nt, Marburg virus
cuaauauuacuaacaa

SEQ ID NO: 227101 - RNA, 17 nt, Marburg virus
cucaacugaugaugaua

SEQ ID NO: 227102 - RNA, 15 nt, Marburg virus
cuaauuaacaacuug

SEQ ID NO: 227103 - RNA, 22 nt, Marburg virus
cuacccugauuuauauuuacug

SEQ ID NO: 227104 - RNA, 13 nt, Marburg virus
auggugcacuauc

SEQ ID NO: 227105 - RNA, 22 nt, Marburg virus
augugcguagagguuaauuuaa

SEQ ID NO: 227106 - RNA, 23 nt, Marburg virus
auguuauugauugagcuucucaa

SEQ ID NO: 227107 - RNA, 14 nt, Marburg virus
auguuaguuacuca

SEQ ID NO: 227108 - RNA, 15 nt, Marburg virus
auguuacagcuauau

SEQ ID NO: 227109 - RNA, 17 nt, Marburg virus
auugcuacugagcccuu

SEQ ID NO: 227110 - RNA, 23 nt, Marburg virus
auuguuugaaaguugacaaucaa

SEQ ID NO: 227111 - RNA, 18 nt, Marburg virus
auuuacugguauaaaaua

SEQ ID NO: 227112 - RNA, 14 nt, Marburg virus
auuugaauauucaa

SEQ ID NO: 227113 - RNA, 13 nt, Marburg virus
caaaucacuuuca

SEQ ID NO: 227114 - RNA, 14 nt, Marburg virus
caaaucacuuucag

SEQ ID NO: 227115 - RNA, 16 nt, Marburg virus
caauguuaguuacuca

SEQ ID NO: 227116 - RNA, 13 nt, Marburg virus
cacaauucuacua

SEQ ID NO: 227117 - RNA, 21 nt, Marburg virus
caauacuguaaucaacacugc

SEQ ID NO: 227118 - RNA, 13 nt, Marburg virus
caagauaaucuua

SEQ ID NO: 227119 - RNA, 20 nt, Marburg virus
caagauaaucuuauaucguc

SEQ ID NO: 227120 - RNA, 13 nt, Marburg virus
caagcgaugugug

SEQ ID NO: 227121 - RNA, 20 nt, Marburg virus
caccuuucuguugauuucaa

SEQ ID NO: 227122 - RNA, 13 nt, Marburg virus
cagagagugugcu

SEQ ID NO: 227123 - RNA, 16 nt, Marburg virus
cauaagcuaucaaaua

SEQ ID NO: 227124 - RNA, 12 nt, Marburg virus
caugacuugauu

SEQ ID NO: 227125 - RNA, 20 nt, Marburg virus
ccuuuucuauuugaugcauu

SEQ ID NO: 227126 - RNA, 14 nt, Marburg virus
ccucuuaagcuuuu

SEQ ID NO: 227127 - RNA, 17 nt, Marburg virus
ccucuaaggaaaaucau

SEQ ID NO: 227128 - RNA, 18 nt, Marburg virus
ccugauuuauauuuacug

SEQ ID NO: 227129 - RNA, 18 nt, Marburg virus
cccuugagagacaacuuu

SEQ ID NO: 227130 - RNA, 15 nt, Marburg virus
ccauauuuacuaaau

SEQ ID NO: 227131 - RNA, 15 nt, Marburg virus
aggcuguuccuauaa

SEQ ID NO: 227132 - RNA, 12 nt, Marburg virus
agcuaucaaaua

SEQ ID NO: 227133 - RNA, 22 nt, Marburg virus
aguauauuuuauaaaccaagca

SEQ ID NO: 227134 - RNA, 19 nt, Marburg virus
aguaagaaaaacuaaugaa

SEQ ID NO: 227135 - RNA, 21 nt, Marburg virus
aguaaucaaauuuauuugaau

SEQ ID NO: 227136 - RNA, 21 nt, Marburg virus
aguugcagggggagugaucuu

SEQ ID NO: 227137 - RNA, 14 nt, Marburg virus
agugaucaguauau

SEQ ID NO: 227138 - RNA, 15 nt, Marburg virus
agugaucaguauauu

SEQ ID NO: 227139 - RNA, 20 nt, Marburg virus
agugaucuuuccgaguugau

SEQ ID NO: 227140 - RNA, 21 nt, Marburg virus
auauuuauccuuguguaauuc

SEQ ID NO: 227141 - RNA, 23 nt, Marburg virus
aucaaauuuauuugaauauucaa

SEQ ID NO: 227142 - RNA, 13 nt, Marburg virus
auagaggaacuaa

SEQ ID NO: 227143 - RNA, 17 nt, Marburg virus
auaacaaagaauauacc

SEQ ID NO: 227144 - RNA, 18 nt, Marburg virus
aucugauugugagauuau

SEQ ID NO: 227145 - RNA, 15 nt, Marburg virus
aucuacuuugauccg

SEQ ID NO: 227146 - RNA, 17 nt, Marburg virus
auccuugaaguaacuuu

SEQ ID NO: 227147 - RNA, 21 nt, Marburg virus
aucgucucaaaccguacacaa

SEQ ID NO: 227148 - RNA, 22 nt, Marburg virus
acugguauaaaauagugguauc

SEQ ID NO: 227149 - RNA, 16 nt, Marburg virus
acuuaucuacuuugau

SEQ ID NO: 227150 - RNA, 21 nt, Marburg virus
acucuuauugcgagacuugaa

SEQ ID NO: 227151 - RNA, 13 nt, Marburg virus
acucaacugauga

SEQ ID NO: 227152 - RNA, 22 nt, Marburg virus
agaaucaacuaacaacauagaa

SEQ ID NO: 227153 - RNA, 15 nt, Marburg virus
agaagcauggccuaa

SEQ ID NO: 227154 - RNA, 12 nt, Marburg virus
agacaacauaag

SEQ ID NO: 227155 - RNA, 13 nt, Marburg virus
accguacacaagu

SEQ ID NO: 227156 - RNA, 20 nt, Marburg virus
accuuucuguugauuucaau

SEQ ID NO: 227157 - RNA, 19 nt, Marburg virus
acaggaguccaucugcaua

SEQ ID NO: 227158 - RNA, 16 nt, Marburg virus
acacuaaacauuucaa

SEQ ID NO: 227159 - RNA, 14 nt, Marburg virus
ucuaaucuacugaa

SEQ ID NO: 227160 - RNA, 20 nt, Marburg virus
ucacaacuguugcauaucuu

SEQ ID NO: 227161 - RNA, 21 nt, Marburg virus
ugauuuacuaacauauaucau

SEQ ID NO: 227162 - RNA, 20 nt, Marburg virus
ugaaaauguuauugauugag

SEQ ID NO: 227163 - RNA, 17 nt, Marburg virus
ugaaaguugacaaucaa

SEQ ID NO: 227164 - RNA, 23 nt, Marburg virus
ugaaagaguuaaauggugauaga

SEQ ID NO: 227165 - RNA, 15 nt, Marburg virus
ugcuaaguaaacuca

SEQ ID NO: 227166 - RNA, 12 nt, Marburg virus
uggguuuacuag

SEQ ID NO: 227167 - RNA, 21 nt, Marburg virus
uguauaacaaagaauauaccu

SEQ ID NO: 227168 - RNA, 17 nt, Marburg virus
ugucuaauuaacaacuu

SEQ ID NO: 227169 - RNA, 12 nt, Marburg virus
uguugauuucaa

SEQ ID NO: 227170 - RNA, 16 nt, Marburg virus
uguuugaaaguugaca

SEQ ID NO: 227171 - RNA, 16 nt, Marburg virus
uuaguuuuacuuugau

SEQ ID NO: 227172 - RNA, 15 nt, Marburg virus
uuaggauccuauuac

SEQ ID NO: 227173 - RNA, 14 nt, Marburg virus
uuagggaaauacug

SEQ ID NO: 227174 - RNA, 15 nt, Marburg virus
uuacuuguuacuauu

SEQ ID NO: 227175 - RNA, 22 nt, Marburg virus
uuacuauugugugagacaacau

SEQ ID NO: 227176 - RNA, 18 nt, Marburg virus
uuacacaagauaaucuua

SEQ ID NO: 227177 - RNA, 15 nt, Marburg virus
uugcuuuacacaaga

SEQ ID NO: 227178 - RNA, 14 nt, Marburg virus
uuuaagaagcugau

SEQ ID NO: 227179 - RNA, 18 nt, Marburg virus
uuuaagaaucaacuaaca

SEQ ID NO: 227180 - RNA, 17 nt, Marburg virus
uuuaacuuaauaaacau

SEQ ID NO: 227181 - RNA, 16 nt, Marburg virus
uuuaaacuaccucuua

SEQ ID NO: 227182 - RNA, 13 nt, Marburg virus
uuucaacucuuau

SEQ ID NO: 227183 - RNA, 18 nt, Marburg virus
uuucaauaaugcuuuaac

SEQ ID NO: 227184 - RNA, 14 nt, Marburg virus
uuuccgaguugaua

SEQ ID NO: 227185 - RNA, 17 nt, Marburg virus
uuuacuuugauuuacua

SEQ ID NO: 227186 - RNA, 20 nt, Marburg virus
uuuaggauccuauuacuugu

SEQ ID NO: 227187 - RNA, 16 nt, Marburg virus
uugcuuaguuuuacuu

SEQ ID NO: 227188 - RNA, 13 nt, Marburg virus
uugacuucucacu

SEQ ID NO: 227189 - RNA, 18 nt, Marburg virus
uugagagacaacuuuuga

SEQ ID NO: 227190 - RNA, 14 nt, Marburg virus
uucuauuugaugca

SEQ ID NO: 227191 - RNA, 14 nt, Marburg virus
uugaagacauaguu

SEQ ID NO: 227192 - RNA, 17 nt, Marburg virus
uuugccgcaauacugua

SEQ ID NO: 227193 - RNA, 15 nt, Marburg virus
cacaagauaaucuua

SEQ ID NO: 227194 - RNA, 15 nt, Marburg virus
cacaacuguugcaua

SEQ ID NO: 227195 - RNA, 22 nt, Marburg virus
auuuuauaaaccaagcaauuga

SEQ ID NO: 227196 - RNA, 14 nt, Marburg virus
auuuucaccuugaa

SEQ ID NO: 227197 - RNA, 19 nt, Marburg virus
auuucugucuuaaguguga

SEQ ID NO: 227198 - RNA, 16 nt, Marburg virus
auugauuaaagcuuua

SEQ ID NO: 227199 - RNA, 21 nt, Marburg virus
auugauuucaauaaugcuuua

SEQ ID NO: 227200 - RNA, 23 nt, Marburg virus
aucuuaauagaaguaguaauuua

SEQ ID NO: 227201 - RNA, 17 nt, Marburg virus
augcuuuaaccuuacau

SEQ ID NO: 227202 - RNA, 12 nt, Marburg virus
auuaaagcuuua

SEQ ID NO: 227203 - RNA, 18 nt, Marburg virus
auuauccuguauaacaaa

SEQ ID NO: 227204 - RNA, 18 nt, Marburg virus
auucuuaagcuaucuuaa

SEQ ID NO: 227205 - RNA, 14 nt, Marburg virus
auugagcuucucaa

SEQ ID NO: 227206 - RNA, 23 nt, Marburg virus
auguuuuaaacuaccucuuaagc

SEQ ID NO: 227207 - RNA, 17 nt, Marburg virus
cauaauugguauugaua

SEQ ID NO: 227208 - RNA, 20 nt, Marburg virus
caggaguccaucugcauaag

SEQ ID NO: 227209 - RNA, 18 nt, Marburg virus
cagaucacaguaaucaaa

SEQ ID NO: 227210 - RNA, 15 nt, Marburg virus
auacaaagacacuaa

SEQ ID NO: 227211 - RNA, 19 nt, Marburg virus
auaguuaauuauccuguau

SEQ ID NO: 227212 - RNA, 14 nt, Marburg virus
auaguuuaaccaca

SEQ ID NO: 227213 - RNA, 19 nt, Marburg virus
aucacaacuguugcauauc

SEQ ID NO: 227214 - RNA, 12 nt, Marburg virus
aucaagcauauu

SEQ ID NO: 227215 - RNA, 14 nt, Marburg virus
auauuaaauaucca

SEQ ID NO: 227216 - RNA, 19 nt, Marburg virus
auaaaccaagcaauugacu

SEQ ID NO: 227217 - RNA, 14 nt, Marburg virus
aguuggaauuaacu

SEQ ID NO: 227218 - RNA, 17 nt, Marburg virus
aguuggaauuaacuuuu

SEQ ID NO: 227219 - RNA, 20 nt, Marburg virus
aguaauuuauuucugucuua

SEQ ID NO: 227220 - RNA, 21 nt, Marburg virus
agccaucugauuuaacuuaau

SEQ ID NO: 227221 - RNA, 16 nt, Marburg virus
agcuugcuuuacacaa

SEQ ID NO: 227222 - RNA, 18 nt, Marburg virus
aggacaauugcuacugag

SEQ ID NO: 227223 - RNA, 18 nt, Marburg virus
acaggcuguuccuauaau

SEQ ID NO: 227224 - RNA, 21 nt, Marburg virus
acagguaugacugagugauca

SEQ ID NO: 227225 - RNA, 13 nt, Marburg virus
acauacuaauaac

SEQ ID NO: 227226 - RNA, 17 nt, Marburg virus
acaauugcuacugagcc

SEQ ID NO: 227227 - RNA, 17 nt, Marburg virus
acaauucuacuaacuuc

SEQ ID NO: 227228 - RNA, 19 nt, Marburg virus
acaauucuacuaacuucaa

SEQ ID NO: 227229 - RNA, 17 nt, Marburg virus
acaaguagggaaaucac

SEQ ID NO: 227230 - RNA, 16 nt, Marburg virus
acaaucaaaucacuuu

SEQ ID NO: 227231 - RNA, 17 nt, Marburg virus
acaacauaagcuaucaa

SEQ ID NO: 227232 - RNA, 22 nt, Marburg virus
acaacuguugcauaucuuccaa

SEQ ID NO: 227233 - RNA, 16 nt, Marburg virus
acaaagacacuaaaca

SEQ ID NO: 227234 - RNA, 16 nt, Marburg virus
acuucauuuaauucac

SEQ ID NO: 227235 - RNA, 18 nt, Marburg virus
acuaccucuuaagcuuuu

SEQ ID NO: 227236 - RNA, 15 nt, Marburg virus
acuauggugaugcga

SEQ ID NO: 227237 - RNA, 16 nt, Marburg virus
acuaauauuacuaaca

SEQ ID NO: 227238 - RNA, 20 nt, Marburg virus
acgugacuagaccaucuuaa

SEQ ID NO: 227239 - RNA, 22 nt, Marburg virus
gaaaaaccaaugauggauauua

SEQ ID NO: 227240 - RNA, 13 nt, Marburg virus
gaaucaacuaaca

SEQ ID NO: 227241 - RNA, 18 nt, Marburg virus
gacaacauaagcuaucaa

SEQ ID NO: 227242 - RNA, 16 nt, Marburg virus
gacaauugcuacugag

SEQ ID NO: 227243 - RNA, 19 nt, Marburg virus
gagacuugaacacaauucu

SEQ ID NO: 227244 - RNA, 13 nt, Marburg virus
cuauuacuuguua

SEQ ID NO: 227245 - RNA, 15 nt, Marburg virus
cuaagugucuaauua

SEQ ID NO: 227246 - RNA, 15 nt, Marburg virus
cugccauauuuacua

SEQ ID NO: 227247 - RNA, 15 nt, Marburg virus
cugauuuauauuuac

SEQ ID NO: 227248 - RNA, 22 nt, Marburg virus
guucaaagagucuugauuuaua

SEQ ID NO: 227249 - RNA, 14 nt, Marburg virus
guuaaauggugaua

SEQ ID NO: 227250 - RNA, 14 nt, Marburg virus
uaaaccaagcaauu

SEQ ID NO: 227251 - RNA, 15 nt, Marburg virus
uaaaccaagcaauug

SEQ ID NO: 227252 - RNA, 23 nt, Marburg virus
uaaacaauucuugcuuaguuuua

SEQ ID NO: 227253 - RNA, 14 nt, Marburg virus
uaaaugguuaauua

SEQ ID NO: 227254 - RNA, 22 nt, Marburg virus
uaaaugggugucuguuaaguuc

SEQ ID NO: 227255 - RNA, 17 nt, Marburg virus
guuuguauugauuucaa

SEQ ID NO: 227256 - RNA, 14 nt, Marburg virus
guuuacuagauuau

SEQ ID NO: 227257 - RNA, 23 nt, Marburg virus
guuucaauaugugcguagagguu

SEQ ID NO: 227258 - RNA, 22 nt, Marburg virus
uacuuugauccgauucguccuc

SEQ ID NO: 227259 - RNA, 20 nt, Marburg virus
uagaaaacauauuuauccuu

SEQ ID NO: 227260 - RNA, 16 nt, Marburg virus
uaggacaauugcuacu

SEQ ID NO: 227261 - RNA, 22 nt, Marburg virus
uaacuuaauaaacaugacuuga

SEQ ID NO: 227262 - RNA, 16 nt, Marburg virus
uacacaagauaaucuu

SEQ ID NO: 227263 - RNA, 16 nt, Marburg virus
uaccguggaucacaac

SEQ ID NO: 227264 - RNA, 13 nt, Marburg virus
gcuuuacacaaga

SEQ ID NO: 227265 - RNA, 24 nt, Marburg virus
ggauauucauaguuuaaccacaua

SEQ ID NO: 227266 - RNA, 13 nt, Marburg virus
gguuaccuacuua

SEQ ID NO: 227267 - RNA, 20 nt, Marburg virus
gguuaccuacuuaucuacuu

SEQ ID NO: 227268 - RNA, 14 nt, Marburg virus
ucgauauaauacau

SEQ ID NO: 227269 - RNA, 16 nt, Marburg virus
ucacgaaaauaaucua

SEQ ID NO: 227270 - RNA, 23 nt, Marburg virus
uauggugaugcgagggcauuauu

SEQ ID NO: 227271 - RNA, 14 nt, Marburg virus
ucuuauugcgagac

SEQ ID NO: 227272 - RNA, 18 nt, Marburg virus
ucuauaauggguuuacua

SEQ ID NO: 227273 - RNA, 13 nt, Marburg virus
ucuacuaacuuca

SEQ ID NO: 227274 - RNA, 17 nt, Marburg virus
ugcaagauguaaucucu

SEQ ID NO: 227275 - RNA, 20 nt, Marburg virus
ugaugcgagggcauuauuca

SEQ ID NO: 227276 - RNA, 21 nt, Marburg virus
ugagacaacauaagcuaucaa

SEQ ID NO: 227277 - RNA, 22 nt, Marburg virus
ugagagacaacuuuugacacua

SEQ ID NO: 227278 - RNA, 13 nt, Marburg virus
ugauagauuaauc

SEQ ID NO: 227279 - RNA, 16 nt, Marburg virus
ugauagauuaauccuu

SEQ ID NO: 227280 - RNA, 19 nt, Marburg virus
ugggcaaaacgugacuaga

SEQ ID NO: 227281 - RNA, 14 nt, Marburg virus
uggauauucauagu

SEQ ID NO: 227282 - RNA, 14 nt, Marburg virus
uucuaaucuacuga

SEQ ID NO: 227283 - RNA, 16 nt, Marburg virus
uucaaagagucuugau

SEQ ID NO: 227284 - RNA, 18 nt, Marburg virus
uucacgaaaauaaucuau

SEQ ID NO: 227285 - RNA, 16 nt, Marburg virus
uugcuaaguaaacuca

SEQ ID NO: 227286 - RNA, 19 nt, Marburg virus
uugauuaagaaaaaccaau

SEQ ID NO: 227287 - RNA, 22 nt, Marburg virus
uuaccuacuuaucuacuuugau

SEQ ID NO: 227288 - RNA, 16 nt, Marburg virus
uuaauuauccuguaua

SEQ ID NO: 227289 - RNA, 21 nt, Marburg virus
uuaauucacgaaaauaaucua

SEQ ID NO: 227290 - RNA, 16 nt, Marburg virus
uuauccuuguguaauu

SEQ ID NO: 227291 - RNA, 15 nt, Marburg virus
uuauucagugcuaca

SEQ ID NO: 227292 - RNA, 14 nt, Marburg virus
uuguagaauuaccg

SEQ ID NO: 227293 - RNA, 19 nt, Marburg virus
uuuuauaaacaauucuugc

SEQ ID NO: 227294 - RNA, 21 nt, Marburg virus
uuuuaggauccuauuacuugu

SEQ ID NO: 227295 - RNA, 22 nt, Marburg virus
uuuuaggauccuauuacuuguu

SEQ ID NO: 227296 - RNA, 21 nt, Marburg virus
uuuugggucaucagaucuaua

SEQ ID NO: 227297 - RNA, 22 nt, Marburg virus
gacaacauaagcuaucaaauaa

SEQ ID NO: 227298 - RNA, 15 nt, Marburg virus
aaauguuauugauug

SEQ ID NO: 227299 - RNA, 16 nt, Marburg virus
aaauuagcauggauau

SEQ ID NO: 227300 - RNA, 21 nt, Marburg virus
aaauuuauuugaauauucaaa

SEQ ID NO: 227301 - RNA, 20 nt, Marburg virus
gauauaauacauacuaauaa

SEQ ID NO: 227302 - RNA, 17 nt, Marburg virus
gaguugauacaaagaca

SEQ ID NO: 227303 - RNA, 15 nt, Marburg virus
gaaaguugacaauca

SEQ ID NO: 227304 - RNA, 17 nt, Marburg virus
aaagaaauaguaauguu

SEQ ID NO: 227305 - RNA, 20 nt, Marburg virus
cuuaauaaacaugacuugau

SEQ ID NO: 227306 - RNA, 21 nt, Marburg virus
cuuuuguggaugguuucaaua

SEQ ID NO: 227307 - RNA, 23 nt, Marburg virus
cuuugauuuacuaacauauauca

SEQ ID NO: 227308 - RNA, 12 nt, Marburg virus
gaaaauaaucua

SEQ ID NO: 227309 - RNA, 13 nt, Marburg virus
gcgagacuugaac

SEQ ID NO: 227310 - RNA, 16 nt, Marburg virus
gcagggggagugaucu

SEQ ID NO: 227311 - RNA, 18 nt, Marburg virus
gaucacggaucaagcaua

SEQ ID NO: 227312 - RNA, 17 nt, Marburg virus
gaucacaacuguugcau

SEQ ID NO: 227313 - RNA, 16 nt, Marburg virus
gaucaagcauauuuca

SEQ ID NO: 227314 - RNA, 14 nt, Marburg virus
gaucagcuugcaag

SEQ ID NO: 227315 - RNA, 19 nt, Marburg virus
ggaacuaauauuacuaaca

SEQ ID NO: 227316 - RNA, 18 nt, Marburg virus
gcuaucuuaaacuugaug

SEQ ID NO: 227317 - RNA, 16 nt, Marburg virus
gcugccauauuuacua

SEQ ID NO: 227318 - RNA, 22 nt, Marburg virus
cuaacuucaauaagugacccca

SEQ ID NO: 227319 - RNA, 13 nt, Marburg virus
cuguugauuucaa

SEQ ID NO: 227320 - RNA, 12 nt, Marburg virus
cuuaaacuugau

SEQ ID NO: 227321 - RNA, 18 nt, Marburg virus
cuuaaauuagcauggaua

SEQ ID NO: 227322 - RNA, 23 nt, Marburg virus
cugucuuaagugugauuuucacc

SEQ ID NO: 227323 - RNA, 21 nt, Marburg virus
cccccucagaagagacgugcc

SEQ ID NO: 227324 - RNA, 19 nt, Marburg virus
cauaugcugccauauuuac

SEQ ID NO: 227325 - RNA, 14 nt, Marburg virus
cauaucuuccaaaa

SEQ ID NO: 227326 - RNA, 19 nt, Marburg virus
caucugauuuaacuuaaua

SEQ ID NO: 227327 - RNA, 21 nt, Marburg virus
cauaguuuaaccacauaauaa

SEQ ID NO: 227328 - RNA, 16 nt, Marburg virus
caguuuuuaguuucaa

SEQ ID NO: 227329 - RNA, 10 nt, Marburg virus
cauacuaugg

SEQ ID NO: 227330 - RNA, 14 nt, Marburg virus
cauacuauggugau

SEQ ID NO: 227331 - RNA, 13 nt, Marburg virus
caguaaucaaauu

SEQ ID NO: 227332 - RNA, 15 nt, Marburg virus
cagggggagugaucu

SEQ ID NO: 227333 - RNA, 24 nt, Marburg virus
uccuguauaacaaagaauauaccu

SEQ ID NO: 227334 - RNA, 15 nt, Marburg virus
ucuaaggaaaaucau

SEQ ID NO: 227335 - RNA, 18 nt, Marburg virus
ucuaaggaaaaucaugaa

SEQ ID NO: 227336 - RNA, 15 nt, Marburg virus
ucuuaagugugauuu

SEQ ID NO: 227337 - RNA, 15 nt, Marburg virus
ucaacuaaacuugca

SEQ ID NO: 227338 - RNA, 14 nt, Marburg virus
ucaaaucacuuuca

SEQ ID NO: 227339 - RNA, 15 nt, Marburg virus
uauucagugcuacaa

SEQ ID NO: 227340 - RNA, 23 nt, Marburg virus
uauucauaguuuaaccacauaau

SEQ ID NO: 227341 - RNA, 22 nt, Marburg virus
uaugugggcaaaacgugacuag

SEQ ID NO: 227342 - RNA, 16 nt, Marburg virus
uauagaggaacuaaua

SEQ ID NO: 227343 - RNA, 11 nt, Marburg virus
uauauuuacug

SEQ ID NO: 227344 - RNA, 16 nt, Marburg virus
uauauuuacugguaua

SEQ ID NO: 227345 - RNA, 12 nt, Marburg virus
uagaauuaccgu

SEQ ID NO: 227346 - RNA, 19 nt, Marburg virus
uauaccuacccugauuuau

SEQ ID NO: 227347 - RNA, 19 nt, Marburg virus
uaugcugccauauuuacua

SEQ ID NO: 227348 - RNA, 17 nt, Marburg virus
uaugacauaccauauau

SEQ ID NO: 227349 - RNA, 15 nt, Marburg virus
uauccuuuguugaua

SEQ ID NO: 227350 - RNA, 15 nt, Marburg virus
uauccuuaauauaau

SEQ ID NO: 227351 - RNA, 14 nt, Marburg virus
uaauacauacuaau

SEQ ID NO: 227352 - RNA, 18 nt, Marburg virus
uaagugaccccaaauuca

SEQ ID NO: 227353 - RNA, 20 nt, Marburg virus
uacgucgauauaauacauac

SEQ ID NO: 227354 - RNA, 14 nt, Marburg virus
uaaauauccaucaa

SEQ ID NO: 227355 - RNA, 19 nt, Marburg virus
uaaaauagugguaucaucu

SEQ ID NO: 227356 - RNA, 19 nt, Marburg virus
uaaacauuucaaaagcaua

SEQ ID NO: 227357 - RNA, 20 nt, Marburg virus
uaaacauuucaaaagcauau

SEQ ID NO: 227358 - RNA, 20 nt, Marburg virus
guugcagggggagugaucuu

SEQ ID NO: 227359 - RNA, 17 nt, Marburg virus
uaacaaagaauauaccu

SEQ ID NO: 227360 - RNA, 18 nt, Marburg virus
uaacuuaauaaacaugac

SEQ ID NO: 227361 - RNA, 18 nt, Marburg virus
uaacuuuuguugcaauuc

SEQ ID NO: 227362 - RNA, 22 nt, Marburg virus
uaagaaaaaccaaugauggaua

SEQ ID NO: 227363 - RNA, 13 nt, Marburg virus
uaagaaaaacuaa

SEQ ID NO: 227364 - RNA, 16 nt, Marburg virus
uaagaaucaacuaaca

SEQ ID NO: 227365 - RNA, 17 nt, Marburg virus
uaagagugauuaaguuc

SEQ ID NO: 227366 - RNA, 18 nt, Marburg virus
uaagcuaucaaauaacaa

SEQ ID NO: 227367 - RNA, 17 nt, Marburg virus
guauugauauugguaca

SEQ ID NO: 227368 - RNA, 16 nt, Marburg virus
guagagguuaauuuaa

SEQ ID NO: 227369 - RNA, 22 nt, Marburg virus
guuaauuauccuguauaacaaa

SEQ ID NO: 227370 - RNA, 14 nt, Marburg virus
gugaucaguauauu

SEQ ID NO: 227371 - RNA, 18 nt, Marburg virus
gugcacuauccuacuguu

SEQ ID NO: 227372 - RNA, 14 nt, Marburg virus
gucuuaagugugau

SEQ ID NO: 227373 - RNA, 15 nt, Marburg virus
gucuuaagugugauu

SEQ ID NO: 227374 - RNA, 23 nt, Marburg virus
aacucuuauugcgagacuugaac

SEQ ID NO: 227375 - RNA, 17 nt, Marburg virus
aacauagaaaacauauu

SEQ ID NO: 227376 - RNA, 20 nt, Marburg virus
aagagauuucuuguugcaca

SEQ ID NO: 227377 - RNA, 22 nt, Marburg virus
aacuucaauaagugaccccaaa

SEQ ID NO: 227378 - RNA, 18 nt, Marburg virus
aacuugaugaugcagcuc

SEQ ID NO: 227379 - RNA, 13 nt, Marburg virus
aagagugauuaag

SEQ ID NO: 227380 - RNA, 11 nt, Marburg virus
aauccuugaag

SEQ ID NO: 227381 - RNA, 12 nt, Marburg virus
aaucaacuaaca

SEQ ID NO: 227382 - RNA, 20 nt, Marburg virus
aauauucuuaagcuaucuua

SEQ ID NO: 227383 - RNA, 14 nt, Marburg virus
aauacuguaaucaa

SEQ ID NO: 227384 - RNA, 19 nt, Marburg virus
aagcuuuuguggaugguuu

SEQ ID NO: 227385 - RNA, 22 nt, Marburg virus
aagccaucugauuuaacuuaau

SEQ ID NO: 227386 - RNA, 14 nt, Marburg virus
aagcauggccuaaa

SEQ ID NO: 227387 - RNA, 19 nt, Marburg virus
uugcuauaaugauacaacu

SEQ ID NO: 227388 - RNA, 13 nt, Marburg virus
uugcugcuuuaaa

SEQ ID NO: 227389 - RNA, 17 nt, Marburg virus
uugcuaaguaaacucaa

SEQ ID NO: 227390 - RNA, 18 nt, Marburg virus
uugcaagauguaaucucu

SEQ ID NO: 227391 - RNA, 21 nt, Marburg virus
uugccgcaauacuguaaucaa

SEQ ID NO: 227392 - RNA, 11 nt, Marburg virus
uugacaaucaa

SEQ ID NO: 227393 - RNA, 14 nt, Marburg virus
uugauuucaauaau

SEQ ID NO: 227394 - RNA, 22 nt, Marburg virus
uugauacaaagacacuaaacau

SEQ ID NO: 227395 - RNA, 17 nt, Marburg virus
uucuuuuuucaauugcu

SEQ ID NO: 227396 - RNA, 20 nt, Marburg virus
uugaauauucaaacuacuuu

SEQ ID NO: 227397 - RNA, 15 nt, Marburg virus
uucagagagugugcu

SEQ ID NO: 227398 - RNA, 17 nt, Marburg virus
uucaacuaaacuugcau

SEQ ID NO: 227399 - RNA, 15 nt, Marburg virus
uucacgaaaauaauc

SEQ ID NO: 227400 - RNA, 17 nt, Marburg virus
uucacgaaaauaaucua

SEQ ID NO: 227401 - RNA, 16 nt, Marburg virus
uuguaaauuacucgau

SEQ ID NO: 227402 - RNA, 17 nt, Marburg virus
uuucaccuuucuguuga

SEQ ID NO: 227403 - RNA, 19 nt, Marburg virus
uuuuaguuucaacucuuau

SEQ ID NO: 227404 - RNA, 13 nt, Marburg virus
uguuaucauaguc

SEQ ID NO: 227405 - RNA, 15 nt, Marburg virus
uuaguuuguauugau

SEQ ID NO: 227406 - RNA, 17 nt, Marburg virus
uuaauuauccuguauaa

SEQ ID NO: 227407 - RNA, 18 nt, Marburg virus
uuaacuuuuguugcaauu

SEQ ID NO: 227408 - RNA, 22 nt, Marburg virus
uuaagaaucaacuaacaacaua

SEQ ID NO: 227409 - RNA, 13 nt, Marburg virus
uuacuuguuacua

SEQ ID NO: 227410 - RNA, 19 nt, Marburg virus
uuacacaagauaaucuuau

SEQ ID NO: 227411 - RNA, 15 nt, Marburg virus
ugucgcagaauacca

SEQ ID NO: 227412 - RNA, 22 nt, Marburg virus
ugcauaucuuccaaaauauauc

SEQ ID NO: 227413 - RNA, 21 nt, Marburg virus
ugagcccuucuucuaaucuac

SEQ ID NO: 227414 - RNA, 14 nt, Marburg virus
ugauuucaauguua

SEQ ID NO: 227415 - RNA, 14 nt, Marburg virus
ugauuguuaugguu

SEQ ID NO: 227416 - RNA, 21 nt, Marburg virus
ugauucagagagugugcugaa

SEQ ID NO: 227417 - RNA, 13 nt, Marburg virus
ugauggauauuaa

SEQ ID NO: 227418 - RNA, 22 nt, Marburg virus
ugauacccuugagagacaacuu

SEQ ID NO: 227419 - RNA, 14 nt, Marburg virus
agcugauaauuuaa

SEQ ID NO: 227420 - RNA, 14 nt, Marburg virus
agcucuguuucacc

SEQ ID NO: 227421 - RNA, 19 nt, Marburg virus
agcuauaucuaagugucua

SEQ ID NO: 227422 - RNA, 18 nt, Marburg virus
auacaaagacacuaaaca

SEQ ID NO: 227423 - RNA, 20 nt, Marburg virus
auacgucgauauaauacaua

SEQ ID NO: 227424 - RNA, 15 nt, Marburg virus
aguuuuuaguuucaa

SEQ ID NO: 227425 - RNA, 18 nt, Marburg virus
aucucuccuucaagccau

SEQ ID NO: 227426 - RNA, 18 nt, Marburg virus
aucuauaauggguuuacu

SEQ ID NO: 227427 - RNA, 18 nt, Marburg virus
aucagaucuauaaugggu

SEQ ID NO: 227428 - RNA, 14 nt, Marburg virus
aucaacuaacaaca

SEQ ID NO: 227429 - RNA, 20 nt, Marburg virus
auauuuuauaaaccaagcaa

SEQ ID NO: 227430 - RNA, 20 nt, Marburg virus
auaugcugccauauuuacua

SEQ ID NO: 227431 - RNA, 20 nt, Marburg virus
auuuuucaacuaaacuugca

SEQ ID NO: 227432 - RNA, 21 nt, Marburg virus
auuuuucaacuaaacuugcau

SEQ ID NO: 227433 - RNA, 17 nt, Marburg virus
caaaacgugacuagacc

SEQ ID NO: 227434 - RNA, 21 nt, Marburg virus
auuguuaugguuugauauuca

SEQ ID NO: 227435 - RNA, 20 nt, Marburg virus
auuguugauuguuaugguuu

SEQ ID NO: 227436 - RNA, 21 nt, Marburg virus
auuucugucuuaagugugauu

SEQ ID NO: 227437 - RNA, 22 nt, Marburg virus
auuucugucuuaagugugauuu

SEQ ID NO: 227438 - RNA, 22 nt, Marburg virus
auugcuauaaugauacaacuac

SEQ ID NO: 227439 - RNA, 12 nt, Marburg virus
auugcugcuuua

SEQ ID NO: 227440 - RNA, 19 nt, Marburg virus
auugauuaagaaaaaccaa

SEQ ID NO: 227441 - RNA, 12 nt, Marburg virus
auuacuaacaaa

SEQ ID NO: 227442 - RNA, 13 nt, Marburg virus
auuaauccuugaa

SEQ ID NO: 227443 - RNA, 15 nt, Marburg virus
cacuaaacauuucaa

SEQ ID NO: 227444 - RNA, 12 nt, Marburg virus
caagauaaucuu

SEQ ID NO: 227445 - RNA, 15 nt, Marburg virus
caagauaaucuuaua

SEQ ID NO: 227446 - RNA, 14 nt, Marburg virus
caagcauauuucau

SEQ ID NO: 227447 - RNA, 17 nt, Marburg virus
caauacuguaaucaaca

SEQ ID NO: 227448 - RNA, 14 nt, Marburg virus
aacuaacaacauag

SEQ ID NO: 227449 - RNA, 13 nt, Marburg virus
aacaugacuugau

SEQ ID NO: 227450 - RNA, 15 nt, Marburg virus
aacaugacuugauuc

SEQ ID NO: 227451 - RNA, 19 nt, Marburg virus
aaauagugguaucaucuua

SEQ ID NO: 227452 - RNA, 17 nt, Marburg virus
aaauauaucuuuugcaa

SEQ ID NO: 227453 - RNA, 22 nt, Marburg virus
aaauacugagauauacuaguug

SEQ ID NO: 227454 - RNA, 15 nt, Marburg virus
aaucuacugaaauca

SEQ ID NO: 227455 - RNA, 17 nt, Marburg virus
aauacugagauauacua

SEQ ID NO: 227456 - RNA, 21 nt, Marburg virus
aaugcuuuaaccuuacauugc

SEQ ID NO: 227457 - RNA, 12 nt, Marburg virus
aauucaaguuua

SEQ ID NO: 227458 - RNA, 18 nt, Marburg virus
aauuagcauggauauuca

SEQ ID NO: 227459 - RNA, 19 nt, Marburg virus
aauuagcauggauauucau

SEQ ID NO: 227460 - RNA, 14 nt, Marburg virus
aauuaccguggauc

SEQ ID NO: 227461 - RNA, 22 nt, Marburg virus
aauugccggguaagagugauua

SEQ ID NO: 227462 - RNA, 19 nt, Marburg virus
aauugcuauaaugauacaa

SEQ ID NO: 227463 - RNA, 23 nt, Marburg virus
aauaccagggguuucauaugcug

SEQ ID NO: 227464 - RNA, 19 nt, Marburg virus
aagcuaucuuaaacuugau

SEQ ID NO: 227465 - RNA, 18 nt, Marburg virus
aagcuaucaaauaacaau

SEQ ID NO: 227466 - RNA, 13 nt, Marburg virus
aacuuguaccucu

SEQ ID NO: 227467 - RNA, 15 nt, Marburg virus
aacuuguaccucuaa

SEQ ID NO: 227468 - RNA, 22 nt, Marburg virus
acuuuuuaagaaucaacuaaca

SEQ ID NO: 227469 - RNA, 15 nt, Marburg virus
acuuaucuacuuuga

SEQ ID NO: 227470 - RNA, 17 nt, Marburg virus
agaccaucuuaauagaa

SEQ ID NO: 227471 - RNA, 13 nt, Marburg virus
acaagauaaucuu

SEQ ID NO: 227472 - RNA, 22 nt, Marburg virus
acagguaugacugagugaucag

SEQ ID NO: 227473 - RNA, 20 nt, Marburg virus
aaaacgugacuagaccaucu

SEQ ID NO: 227474 - RNA, 12 nt, Marburg virus
aaaaaacuauua

SEQ ID NO: 227475 - RNA, 17 nt, Mason-Pfizer monkey virus
accgacuggaugauguc

SEQ ID NO: 227476 - RNA, 12 nt, Mason-Pfizer monkey virus
agagagugacau

SEQ ID NO: 227477 - RNA, 12 nt, Mason-Pfizer monkey virus
acugucuugucu

SEQ ID NO: 227478 - RNA, 18 nt, Mason-Pfizer monkey virus
agaaauguaucacuccaa

SEQ ID NO: 227479 - RNA, 14 nt, Mason-Pfizer monkey virus
acuggaugaugucu

SEQ ID NO: 227480 - RNA, 19 nt, Mason-Pfizer monkey virus
acuggaugaugucuuggcc

SEQ ID NO: 227481 - RNA, 18 nt, Mason-Pfizer monkey virus
acugccuaauccaaugac

SEQ ID NO: 227482 - RNA, 19 nt, Mason-Pfizer monkey virus
acugccuaauccaaugacg

SEQ ID NO: 227483 - RNA, 12 nt, Mason-Pfizer monkey virus
acuaaccuaaga

SEQ ID NO: 227484 - RNA, 13 nt, Mason-Pfizer monkey virus
acuaaccuaagac

SEQ ID NO: 227485 - RNA, 15 nt, Mason-Pfizer monkey virus
acuaaccuaagacag

SEQ ID NO: 227486 - RNA, 16 nt, Mason-Pfizer monkey virus
acuaaccuaagacagg

SEQ ID NO: 227487 - RNA, 13 nt, Mason-Pfizer monkey virus
aagcuacugccua

SEQ ID NO: 227488 - RNA, 23 nt, Mason-Pfizer monkey virus
aagcuacugccuaauccaaugac

SEQ ID NO: 227489 - RNA, 23 nt, Mason-Pfizer monkey virus
aaugacggguaagagagugacau

SEQ ID NO: 227490 - RNA, 15 nt, Mason-Pfizer monkey virus
aaugacggguaauag

SEQ ID NO: 227491 - RNA, 14 nt, Mason-Pfizer monkey virus
aaaugagacuugau

SEQ ID NO: 227492 - RNA, 15 nt, Mason-Pfizer monkey virus
aacacugucuugucu

SEQ ID NO: 227493 - RNA, 21 nt, Mason-Pfizer monkey virus
aacacugucuugucuccauuu

SEQ ID NO: 227494 - RNA, 20 nt, Mason-Pfizer monkey virus
caaugacggguaauagugac

SEQ ID NO: 227495 - RNA, 22 nt, Mason-Pfizer monkey virus
caaugacggguaauagugacaa

SEQ ID NO: 227496 - RNA, 20 nt, Mason-Pfizer monkey virus
auguaucacuccaaccuaag

SEQ ID NO: 227497 - RNA, 21 nt, Mason-Pfizer monkey virus
auguaucacuccaaccuaaga

SEQ ID NO: 227498 - RNA, 22 nt, Mason-Pfizer monkey virus
aucagaacacugucuugucucc

SEQ ID NO: 227499 - RNA, 18 nt, Mason-Pfizer monkey virus
aguuuucguuuucugucc

SEQ ID NO: 227500 - RNA, 14 nt, Mason-Pfizer monkey virus
agugacauuucuca

SEQ ID NO: 227501 - RNA, 18 nt, Mason-Pfizer monkey virus
agcuacugccuaauccaa

SEQ ID NO: 227502 - RNA, 14 nt, Mason-Pfizer monkey virus
agucccaugcucua

SEQ ID NO: 227503 - RNA, 16 nt, Mason-Pfizer monkey virus
agucccaugcucuacc

SEQ ID NO: 227504 - RNA, 22 nt, Mason-Pfizer monkey virus
agucccaugcucuaccgacugg

SEQ ID NO: 227505 - RNA, 14 nt, Mason-Pfizer monkey virus
ugaucagaacacug

SEQ ID NO: 227506 - RNA, 20 nt, Mason-Pfizer monkey virus
ugccaccauuaaaugagacu

SEQ ID NO: 227507 - RNA, 15 nt, Mason-Pfizer monkey virus
ugcccggaugauguc

SEQ ID NO: 227508 - RNA, 18 nt, Mason-Pfizer monkey virus
ugcccggaugaugucuug

SEQ ID NO: 227509 - RNA, 14 nt, Mason-Pfizer monkey virus
ugcucugcuacuga

SEQ ID NO: 227510 - RNA, 23 nt, Mason-Pfizer monkey virus
ugcucuaccgacuggaugauguc

SEQ ID NO: 227511 - RNA, 24 nt, Mason-Pfizer monkey virus
ugcucuaccgacuggaugaugucu

SEQ ID NO: 227512 - RNA, 20 nt, Mason-Pfizer monkey virus
uggacagccaaugacgggua

SEQ ID NO: 227513 - RNA, 23 nt, Mason-Pfizer monkey virus
uggaugaugucuuggccucuguu

SEQ ID NO: 227514 - RNA, 16 nt, Mason-Pfizer monkey virus
uuuccuugcucugcua

SEQ ID NO: 227515 - RNA, 20 nt, Mason-Pfizer monkey virus
uuucucacuaaccuaagaca

SEQ ID NO: 227516 - RNA, 16 nt, Mason-Pfizer monkey virus
uugcucugcuacugag

SEQ ID NO: 227517 - RNA, 22 nt, Mason-Pfizer monkey virus
aauagugacaagaaauguauca

SEQ ID NO: 227518 - RNA, 17 nt, Mason-Pfizer monkey virus
aagagucccaugcucua

SEQ ID NO: 227519 - RNA, 23 nt, Mason-Pfizer monkey virus
guauauaaggcaacacauugcca

SEQ ID NO: 227520 - RNA, 20 nt, Mason-Pfizer monkey virus
guaucacuccaaccuaagac

SEQ ID NO: 227521 - RNA, 19 nt, Mason-Pfizer monkey virus
uaucacuccaaccuaagac

SEQ ID NO: 227522 - RNA, 22 nt, Mason-Pfizer monkey virus
uaucuuuccccucccacuugcu

SEQ ID NO: 227523 - RNA, 13 nt, Mason-Pfizer monkey virus
ucaaagcuacugc

SEQ ID NO: 227524 - RNA, 16 nt, Mason-Pfizer monkey virus
ucaauucccacucccu

SEQ ID NO: 227525 - RNA, 16 nt, Mason-Pfizer monkey virus
uccgagggaugugucu

SEQ ID NO: 227526 - RNA, 14 nt, Mason-Pfizer monkey virus
uccuugcucugcua

SEQ ID NO: 227527 - RNA, 23 nt, Mason-Pfizer monkey virus
uccuugcucugcuacugagcaug

SEQ ID NO: 227528 - RNA, 23 nt, Mason-Pfizer monkey virus
uccaaugacggguaauagugaca

SEQ ID NO: 227529 - RNA, 17 nt, Mason-Pfizer monkey virus
caugcgcccaguaucuu

SEQ ID NO: 227530 - RNA, 20 nt, Mason-Pfizer monkey virus
cccgcgggucgggacaguuu

SEQ ID NO: 227531 - RNA, 14 nt, Mason-Pfizer monkey virus
cccggaugaugucu

SEQ ID NO: 227532 - RNA, 19 nt, Mason-Pfizer monkey virus
ccauuaaaugagacuugau

SEQ ID NO: 227533 - RNA, 17 nt, Mason-Pfizer monkey virus
ccacuugcugccugugu

SEQ ID NO: 227534 - RNA, 16 nt, Mason-Pfizer monkey virus
cuguuugcucuagcuc

SEQ ID NO: 227535 - RNA, 17 nt, Mason-Pfizer monkey virus
cuguuugcucuagcucc

SEQ ID NO: 227536 - RNA, 17 nt, Mason-Pfizer monkey virus
cuggaugaugucuuggc

SEQ ID NO: 227537 - RNA, 19 nt, Mason-Pfizer monkey virus
cucuguuugcucuagcucc

SEQ ID NO: 227538 - RNA, 13 nt, Mason-Pfizer monkey virus
cuaccgacuggau

SEQ ID NO: 227539 - RNA, 19 nt, Mason-Pfizer monkey virus
cuaccgacuggaugauguc

SEQ ID NO: 227540 - RNA, 23 nt, Mason-Pfizer monkey virus
gcucuaccgacuggaugaugucu

SEQ ID NO: 227541 - RNA, 12 nt, Mason-Pfizer monkey virus
gcucugcuacug

SEQ ID NO: 227542 - RNA, 19 nt, Mason-Pfizer monkey virus
gcuagacuggacagccaau

SEQ ID NO: 227543 - RNA, 23 nt, Mason-Pfizer monkey virus
gcuuacguggcuuuccuugcucu

SEQ ID NO: 227544 - RNA, 23 nt, Mason-Pfizer monkey virus
gcgaauguuucccgcucuugggc

SEQ ID NO: 227545 - RNA, 13 nt, Mason-Pfizer monkey virus
gccucuguuugcu

SEQ ID NO: 227546 - RNA, 16 nt, Mason-Pfizer monkey virus
gccucuguuugcucua

SEQ ID NO: 227547 - RNA, 17 nt, Mason-Pfizer monkey virus
gccgucaaagcuacugc

SEQ ID NO: 227548 - RNA, 20 nt, Mason-Pfizer monkey virus
gacggguaagagagugacau

SEQ ID NO: 227549 - RNA, 18 nt, Mason-Pfizer monkey virus
gacggguaauagugacaa

SEQ ID NO: 227550 - RNA, 19 nt, Mason-Pfizer monkey virus
uuggccucuguuugcucua

SEQ ID NO: 227551 - RNA, 17 nt, Mason-Pfizer monkey virus
ugcugcccggaugaugu

SEQ ID NO: 227552 - RNA, 21 nt, Mason-Pfizer monkey virus
uggccucuguuugcucuagcu

SEQ ID NO: 227553 - RNA, 15 nt, Mason-Pfizer monkey virus
uggcuuuccuugcuc

SEQ ID NO: 227554 - RNA, 23 nt, Mason-Pfizer monkey virus
ugucuuggccucuguuugcucua

SEQ ID NO: 227555 - RNA, 16 nt, Mason-Pfizer monkey virus
ugaucagaacacuguc

SEQ ID NO: 227556 - RNA, 13 nt, Mason-Pfizer monkey virus
ugaugucuuggcc

SEQ ID NO: 227557 - RNA, 17 nt, Mason-Pfizer monkey virus
ugaugucuuggccucug

SEQ ID NO: 227558 - RNA, 21 nt, Mason-Pfizer monkey virus
ucuaccgacuggaugaugucu

SEQ ID NO: 227559 - RNA, 20 nt, Mason-Pfizer monkey virus
ucuucuccgucuuacuuucc

SEQ ID NO: 227560 - RNA, 17 nt, Mason-Pfizer monkey virus
ucacuaaccuaagacag

SEQ ID NO: 227561 - RNA, 18 nt, Mason-Pfizer monkey virus
ucacuccaaccuaagaca

SEQ ID NO: 227562 - RNA, 14 nt, Mason-Pfizer monkey virus
uccaaccuaagaca

SEQ ID NO: 227563 - RNA, 15 nt, Mason-Pfizer monkey virus
uccaaccuaagacag

SEQ ID NO: 227564 - RNA, 15 nt, Mason-Pfizer monkey virus
gguaagagagugaca

SEQ ID NO: 227565 - RNA, 13 nt, Mason-Pfizer monkey virus
guaauagugacaa

SEQ ID NO: 227566 - RNA, 20 nt, Mason-Pfizer monkey virus
guauauaaggcaacacauug

SEQ ID NO: 227567 - RNA, 15 nt, Mason-Pfizer monkey virus
gcuuuccuugcucug

SEQ ID NO: 227568 - RNA, 22 nt, Mason-Pfizer monkey virus
gcuuuccuugcucugcuacuga

SEQ ID NO: 227569 - RNA, 17 nt, Mason-Pfizer monkey virus
ggaugaugucuuggccu

SEQ ID NO: 227570 - RNA, 16 nt, Mason-Pfizer monkey virus
ggcuuuccuugcucug

SEQ ID NO: 227571 - RNA, 20 nt, Mason-Pfizer monkey virus
gcugcccggaugaugucuug

SEQ ID NO: 227572 - RNA, 23 nt, Mason-Pfizer monkey virus
gcugcccggaugaugucuuggcc

SEQ ID NO: 227573 - RNA, 18 nt, Mason-Pfizer monkey virus
gcuacugccuaauccaau

SEQ ID NO: 227574 - RNA, 17 nt, Mason-Pfizer monkey virus
gccggcgcgaauguuuc

SEQ ID NO: 227575 - RNA, 22 nt, Mason-Pfizer monkey virus
uacguggcuuuccuugcucugc

SEQ ID NO: 227576 - RNA, 12 nt, Mason-Pfizer monkey virus
guuccuacuguu

SEQ ID NO: 227577 - RNA, 17 nt, Mason-Pfizer monkey virus
gucccaugcucuaccga

SEQ ID NO: 227578 - RNA, 22 nt, Mason-Pfizer monkey virus
gucaaagcuacugccuaaucca

SEQ ID NO: 227579 - RNA, 13 nt, Mason-Pfizer monkey virus
gugucucuuguuc

SEQ ID NO: 227580 - RNA, 14 nt, Mason-Pfizer monkey virus
cucuguuugcucua

SEQ ID NO: 227581 - RNA, 18 nt, Mason-Pfizer monkey virus
cugcccggaugaugucuu

SEQ ID NO: 227582 - RNA, 19 nt, Mason-Pfizer monkey virus
cugcccggaugaugucuug

SEQ ID NO: 227583 - RNA, 16 nt, Mason-Pfizer monkey virus
cuagacuggacagcca

SEQ ID NO: 227584 - RNA, 15 nt, Mason-Pfizer monkey virus
cucacuaaccuaaga

SEQ ID NO: 227585 - RNA, 13 nt, Mason-Pfizer monkey virus
cuccaaccuaaga

SEQ ID NO: 227586 - RNA, 17 nt, Mason-Pfizer monkey virus
cuccaaccuaagacagg

SEQ ID NO: 227587 - RNA, 18 nt, Mason-Pfizer monkey virus
ccuaauccaaugacgggu

SEQ ID NO: 227588 - RNA, 15 nt, Mason-Pfizer monkey virus
cgagggaugugucuu

SEQ ID NO: 227589 - RNA, 15 nt, Mason-Pfizer monkey virus
cgcccaguaucuuuc

SEQ ID NO: 227590 - RNA, 17 nt, Mason-Pfizer monkey virus
gacuggaugaugucuug

SEQ ID NO: 227591 - RNA, 20 nt, Mason-Pfizer monkey virus
gagggccgucaaagcuacug

SEQ ID NO: 227592 - RNA, 18 nt, Mason-Pfizer monkey virus
acuaaccuaagacaggag

SEQ ID NO: 227593 - RNA, 13 nt, Mason-Pfizer monkey virus
acugucuugucuc

SEQ ID NO: 227594 - RNA, 14 nt, Mason-Pfizer monkey virus
acugucuugucucc

SEQ ID NO: 227595 - RNA, 15 nt, Mason-Pfizer monkey virus
acugucuugucucca

SEQ ID NO: 227596 - RNA, 17 nt, Mason-Pfizer monkey virus
acuggaugaugucuugg

SEQ ID NO: 227597 - RNA, 21 nt, Mason-Pfizer monkey virus
acuggaugaugucuuggccuc

SEQ ID NO: 227598 - RNA, 15 nt, Mason-Pfizer monkey virus
acugccuaauccaau

SEQ ID NO: 227599 - RNA, 17 nt, Mason-Pfizer monkey virus
acuggacagccaaugac

SEQ ID NO: 227600 - RNA, 13 nt, Mason-Pfizer monkey virus
acucccuccucca

SEQ ID NO: 227601 - RNA, 12 nt, Mason-Pfizer monkey virus
acuccaaccuaa

SEQ ID NO: 227602 - RNA, 13 nt, Mason-Pfizer monkey virus
acuccaaccuaag

SEQ ID NO: 227603 - RNA, 15 nt, Mason-Pfizer monkey virus
acuccaaccuaagac

SEQ ID NO: 227604 - RNA, 23 nt, Mason-Pfizer monkey virus
accgacuggaugaugucuuggcc

SEQ ID NO: 227605 - RNA, 20 nt, Mason-Pfizer monkey virus
acauuucucacuaaccuaag

SEQ ID NO: 227606 - RNA, 17 nt, Mason-Pfizer monkey virus
aaugacggguaagagag

SEQ ID NO: 227607 - RNA, 15 nt, Mason-Pfizer monkey virus
aaugagacuugauca

SEQ ID NO: 227608 - RNA, 12 nt, Mason-Pfizer monkey virus
acagccaaugac

SEQ ID NO: 227609 - RNA, 13 nt, Mason-Pfizer monkey virus
acagccaaugacg

SEQ ID NO: 227610 - RNA, 15 nt, Mason-Pfizer monkey virus
acauugccaccauua

SEQ ID NO: 227611 - RNA, 23 nt, Mason-Pfizer monkey virus
agccgugcugcccggaugauguc

SEQ ID NO: 227612 - RNA, 16 nt, Mason-Pfizer monkey virus
agagugacauuucuca

SEQ ID NO: 227613 - RNA, 16 nt, Mason-Pfizer monkey virus
agguuccuacuguuga

SEQ ID NO: 227614 - RNA, 19 nt, Mason-Pfizer monkey virus
cagaacacugucuugucuc

SEQ ID NO: 227615 - RNA, 20 nt, Mason-Pfizer monkey virus
ccaugcucuaccgacuggau

SEQ ID NO: 227616 - RNA, 23 nt, Mason-Pfizer monkey virus
ccaugcucuaccgacuggaugau

SEQ ID NO: 227617 - RNA, 13 nt, Mason-Pfizer monkey virus
cccggaugauguc

SEQ ID NO: 227618 - RNA, 13 nt, Mason-Pfizer monkey virus
ccgagggaugugu

SEQ ID NO: 227619 - RNA, 17 nt, Mason-Pfizer monkey virus
ccgacuggaugaugucu

SEQ ID NO: 227620 - RNA, 22 nt, Mason-Pfizer monkey virus
ccgacuggaugaugucuuggcc

SEQ ID NO: 227621 - RNA, 19 nt, Mason-Pfizer monkey virus
ccagguuccuacuguugau

SEQ ID NO: 227622 - RNA, 12 nt, Mason-Pfizer monkey virus
ccaaugacgggu

SEQ ID NO: 227623 - RNA, 17 nt, Mason-Pfizer monkey virus
cauuucucacuaaccua

SEQ ID NO: 227624 - RNA, 22 nt, Mason-Pfizer monkey virus
cauuucucacuaaccuaagaca

SEQ ID NO: 227625 - RNA, 20 nt, Mason-Pfizer monkey virus
caugcgcccaguaucuuucc

SEQ ID NO: 227626 - RNA, 14 nt, Mason-Pfizer monkey virus
augaugucuuggcc

SEQ ID NO: 227627 - RNA, 18 nt, Mason-Pfizer monkey virus
auuucucacuaaccuaag

SEQ ID NO: 227628 - RNA, 18 nt, Mason-Pfizer monkey virus
auuuccugguucuucucc

SEQ ID NO: 227629 - RNA, 15 nt, Mason-Pfizer monkey virus
caaagcuacugccua

SEQ ID NO: 227630 - RNA, 12 nt, Mason-Pfizer monkey virus
caaccuaagaca

SEQ ID NO: 227631 - RNA, 19 nt, Mason-Pfizer monkey virus
caagaaauguaucacucca

SEQ ID NO: 227632 - RNA, 21 nt, Mason-Pfizer monkey virus
caagaaauguaucacuccaac

SEQ ID NO: 227633 - RNA, 15 nt, Mason-Pfizer monkey virus
uugcucugcuacuga

SEQ ID NO: 227634 - RNA, 22 nt, Mason-Pfizer monkey virus
uucccuucaauucccacucccu

SEQ ID NO: 227635 - RNA, 12 nt, Mason-Pfizer monkey virus
uuuccuugcucu

SEQ ID NO: 227636 - RNA, 13 nt, Mason-Pfizer monkey virus
uuuccuugcucug

SEQ ID NO: 227637 - RNA, 18 nt, Mason-Pfizer monkey virus
uuuccuugcucugcuacu

SEQ ID NO: 227638 - RNA, 20 nt, Mason-Pfizer monkey virus
uuuccuugcucugcuacuga

SEQ ID NO: 227639 - RNA, 16 nt, Mason-Pfizer monkey virus
uuucucacuaaccuaa

SEQ ID NO: 227640 - RNA, 17 nt, Mason-Pfizer monkey virus
uugugucucuuguuccc

SEQ ID NO: 227641 - RNA, 19 nt, Mason-Pfizer monkey virus
uguaucacuccaaccuaag

SEQ ID NO: 227642 - RNA, 21 nt, Mason-Pfizer monkey virus
uguauauaaggcaacacauug

SEQ ID NO: 227643 - RNA, 21 nt, Mason-Pfizer monkey virus
ugacggguaagagagugacau

SEQ ID NO: 227644 - RNA, 19 nt, Mason-Pfizer monkey virus
ugacggguaauagugacaa

SEQ ID NO: 227645 - RNA, 22 nt, Mason-Pfizer monkey virus
ugacauuucucacuaaccuaag

SEQ ID NO: 227646 - RNA, 23 nt, Mason-Pfizer monkey virus
ugacauuucucacuaaccuaaga

SEQ ID NO: 227647 - RNA, 21 nt, Mason-Pfizer monkey virus
ugccuaauccaaugacgggua

SEQ ID NO: 227648 - RNA, 16 nt, Mason-Pfizer monkey virus
ugcccggaugaugucu

SEQ ID NO: 227649 - RNA, 21 nt, Mason-Pfizer monkey virus
ugcccggaugaugucuuggcc

SEQ ID NO: 227650 - RNA, 12 nt, Mason-Pfizer monkey virus
ucccaugcucua

SEQ ID NO: 227651 - RNA, 16 nt, Mason-Pfizer monkey virus
uccuacuguugauccc

SEQ ID NO: 227652 - RNA, 19 nt, Mason-Pfizer monkey virus
agacuggacagccaaugac

SEQ ID NO: 227653 - RNA, 19 nt, Mason-Pfizer monkey virus
agacuugaucagaacacug

SEQ ID NO: 227654 - RNA, 21 nt, Mason-Pfizer monkey virus
acuugcugccuguguauauaa

SEQ ID NO: 227655 - RNA, 22 nt, Mason-Pfizer monkey virus
acugagcaugcgcccaguaucu

SEQ ID NO: 227656 - RNA, 11 nt, Mason-Pfizer monkey virus
aucacuccaac

SEQ ID NO: 227657 - RNA, 20 nt, Mason-Pfizer monkey virus
aucacuccaaccuaagacag

SEQ ID NO: 227658 - RNA, 15 nt, Mason-Pfizer monkey virus
agugacauuucucac

SEQ ID NO: 227659 - RNA, 17 nt, Mason-Pfizer monkey virus
aggcaacacauugccac

SEQ ID NO: 227660 - RNA, 19 nt, Mason-Pfizer monkey virus
cccgccggcgcgaauguuu

SEQ ID NO: 227661 - RNA, 15 nt, Mason-Pfizer monkey virus
ccucuguuugcucua

SEQ ID NO: 227662 - RNA, 18 nt, Mason-Pfizer monkey virus
cauuaaaugagacuugau

SEQ ID NO: 227663 - RNA, 19 nt, Mason-Pfizer monkey virus
cacuccaaccuaagacagg

SEQ ID NO: 227664 - RNA, 17 nt, Mason-Pfizer monkey virus
cacuaaccuaagacagg

SEQ ID NO: 227665 - RNA, 22 nt, Mason-Pfizer monkey virus
caaugacggguaagagagugac

SEQ ID NO: 227666 - RNA, 22 nt, Mason-Pfizer monkey virus
cuaccgacuggaugaugucuug

SEQ ID NO: 227667 - RNA, 19 nt, Mason-Pfizer monkey virus
cguggcuuuccuugcucug

SEQ ID NO: 227668 - RNA, 17 nt, Mason-Pfizer monkey virus
cggguaagagagugaca

SEQ ID NO: 227669 - RNA, 23 nt, Mason-Pfizer monkey virus
cggguaagagagugacauuucuc

SEQ ID NO: 227670 - RNA, 15 nt, Mason-Pfizer monkey virus
cggguaauagugaca

SEQ ID NO: 227671 - RNA, 16 nt, Mason-Pfizer monkey virus
cggaugaugucuuggc

SEQ ID NO: 227672 - RNA, 23 nt, Mason-Pfizer monkey virus
cggaugaugucuuggccucuguu

SEQ ID NO: 227673 - RNA, 15 nt, Mason-Pfizer monkey virus
cuggaugaugucuug

SEQ ID NO: 227674 - RNA, 13 nt, Mason-Pfizer monkey virus
gacagccaaugac

SEQ ID NO: 227675 - RNA, 14 nt, Mason-Pfizer monkey virus
gacagccaaugacg

SEQ ID NO: 227676 - RNA, 22 nt, Mason-Pfizer monkey virus
gacauuucucacuaaccuaaga

SEQ ID NO: 227677 - RNA, 23 nt, Mason-Pfizer monkey virus
gacauuucucacuaaccuaagac

SEQ ID NO: 227678 - RNA, 19 nt, Mason-Pfizer monkey virus
gagcuagacuggacagcca

SEQ ID NO: 227679 - RNA, 12 nt, Mason-Pfizer monkey virus
uaaccuaagaca

SEQ ID NO: 227680 - RNA, 14 nt, Mason-Pfizer monkey virus
uaagagagugacau

SEQ ID NO: 227681 - RNA, 18 nt, Mason-Pfizer monkey virus
uaagagagugacauuucu

SEQ ID NO: 227682 - RNA, 20 nt, Mason-Pfizer monkey virus
uaauuaaaaagggugacaug

SEQ ID NO: 227683 - RNA, 17 nt, Mason-Pfizer monkey virus
uaauccaaugacgggua

SEQ ID NO: 227684 - RNA, 15 nt, Mason-Pfizer monkey virus
uaucacuccaaccua

SEQ ID NO: 227685 - RNA, 18 nt, Mason-Pfizer monkey virus
uaucacuccaaccuaaga

SEQ ID NO: 227686 - RNA, 22 nt, Mason-Pfizer monkey virus
uaucacuccaaccuaagacagg

SEQ ID NO: 227687 - RNA, 20 nt, Mason-Pfizer monkey virus
uauaaggcaacacauugcca

SEQ ID NO: 227688 - RNA, 17 nt, Mason-Pfizer monkey virus
ggccucuguuugcucua

SEQ ID NO: 227689 - RNA, 18 nt, Mason-Pfizer monkey virus
ggccucuguuugcucuag

SEQ ID NO: 227690 - RNA, 19 nt, Mason-Pfizer monkey virus
gugcugcccggaugauguc

SEQ ID NO: 227691 - RNA, 20 nt, Mason-Pfizer monkey virus
gugacauuucucacuaaccu

SEQ ID NO: 227692 - RNA, 19 nt, Mason-Pfizer monkey virus
guaucacuccaaccuaaga

SEQ ID NO: 227693 - RNA, 15 nt, Mason-Pfizer monkey virus
ggcaacacauugcca

SEQ ID NO: 227694 - RNA, 14 nt, Mason-Pfizer monkey virus
guaagagagugaca

SEQ ID NO: 227695 - RNA, 15 nt, Mason-Pfizer monkey virus
guaagagagugacau

SEQ ID NO: 227696 - RNA, 16 nt, Mason-Pfizer monkey virus
gguaagagagugacau

SEQ ID NO: 227697 - RNA, 13 nt, Mason-Pfizer monkey virus
gguaauagugaca

SEQ ID NO: 227698 - RNA, 16 nt, Mason-Pfizer monkey virus
gaaauguaucacucca

SEQ ID NO: 227699 - RNA, 20 nt, Mason-Pfizer monkey virus
cuuguucccuucaauuccca

SEQ ID NO: 227700 - RNA, 12 nt, Mason-Pfizer monkey virus
gaugucuuggcc

SEQ ID NO: 227701 - RNA, 22 nt, Mason-Pfizer monkey virus
aaauguaucacuccaaccuaag

SEQ ID NO: 227702 - RNA, 23 nt, Mason-Pfizer monkey virus
aaauguaucacuccaaccuaaga

SEQ ID NO: 227703 - RNA, 15 nt, Mason-Pfizer monkey virus
gacuggaugaugucu

SEQ ID NO: 227704 - RNA, 20 nt, Mason-Pfizer monkey virus
gagacuugaucagaacacug

SEQ ID NO: 227705 - RNA, 17 nt, Mason-Pfizer monkey virus
ccuugcucugcuacuga

SEQ ID NO: 227706 - RNA, 21 nt, Mason-Pfizer monkey virus
ccgacuggaugaugucuuggc

SEQ ID NO: 227707 - RNA, 12 nt, Mason-Pfizer monkey virus
ccucuguuugcu

SEQ ID NO: 227708 - RNA, 13 nt, Mason-Pfizer monkey virus
ccucuguuugcuc

SEQ ID NO: 227709 - RNA, 18 nt, Mason-Pfizer monkey virus
ccgugcugcccggaugau

SEQ ID NO: 227710 - RNA, 22 nt, Mason-Pfizer monkey virus
ccaccauuaaaugagacuugau

SEQ ID NO: 227711 - RNA, 15 nt, Mason-Pfizer monkey virus
cuaaccuaagacagg

SEQ ID NO: 227712 - RNA, 13 nt, Mason-Pfizer monkey virus
cuaauccaaugac

SEQ ID NO: 227713 - RNA, 23 nt, Mason-Pfizer monkey virus
cgugcugcccggaugaugucuug

SEQ ID NO: 227714 - RNA, 17 nt, Mason-Pfizer monkey virus
cggaugaugucuuggcc

SEQ ID NO: 227715 - RNA, 16 nt, Mason-Pfizer monkey virus
cggcgcgaauguuucc

SEQ ID NO: 227716 - RNA, 20 nt, Mason-Pfizer monkey virus
cuacugccuaauccaaugac

SEQ ID NO: 227717 - RNA, 12 nt, Mason-Pfizer monkey virus
cuagcuccaugu

SEQ ID NO: 227718 - RNA, 14 nt, Mason-Pfizer monkey virus
cuagcuccauguua

SEQ ID NO: 227719 - RNA, 18 nt, Mason-Pfizer monkey virus
cuucaauucccacucccu

SEQ ID NO: 227720 - RNA, 23 nt, Mason-Pfizer monkey virus
cugggauuaagagucccaugcuc

SEQ ID NO: 227721 - RNA, 18 nt, Mason-Pfizer monkey virus
guggcuuuccuugcucug

SEQ ID NO: 227722 - RNA, 20 nt, Mason-Pfizer monkey virus
gugcugcccggaugaugucu

SEQ ID NO: 227723 - RNA, 18 nt, Mason-Pfizer monkey virus
uaaaaagggugacauguc

SEQ ID NO: 227724 - RNA, 18 nt, Mason-Pfizer monkey virus
uaccgacuggaugauguc

SEQ ID NO: 227725 - RNA, 12 nt, Mason-Pfizer monkey virus
uaauagugacaa

SEQ ID NO: 227726 - RNA, 14 nt, Mason-Pfizer monkey virus
uaaccuaagacagg

SEQ ID NO: 227727 - RNA, 13 nt, Mason-Pfizer monkey virus
uaauccaaugacg

SEQ ID NO: 227728 - RNA, 20 nt, Mason-Pfizer monkey virus
uagugacaagaaauguauca

SEQ ID NO: 227729 - RNA, 14 nt, Mason-Pfizer monkey virus
ucucacuaaccuaa

SEQ ID NO: 227730 - RNA, 16 nt, Mason-Pfizer monkey virus
ucucacuaaccuaaga

SEQ ID NO: 227731 - RNA, 19 nt, Mason-Pfizer monkey virus
ucuaccgacuggaugaugu

SEQ ID NO: 227732 - RNA, 23 nt, Mason-Pfizer monkey virus
ucuaccgacuggaugaugucuug

SEQ ID NO: 227733 - RNA, 23 nt, Mason-Pfizer monkey virus
ugacaagaaauguaucacuccaa

SEQ ID NO: 227734 - RNA, 15 nt, Mason-Pfizer monkey virus
aauguaucacuccaa

SEQ ID NO: 227735 - RNA, 21 nt, Mason-Pfizer monkey virus
aauguaucacuccaaccuaag

SEQ ID NO: 227736 - RNA, 13 nt, Mason-Pfizer monkey virus
aacccacgacccu

SEQ ID NO: 227737 - RNA, 13 nt, Mason-Pfizer monkey virus
aagaaauguauca

SEQ ID NO: 227738 - RNA, 22 nt, Mason-Pfizer monkey virus
uuuccccucccacuugcugccu

SEQ ID NO: 227739 - RNA, 19 nt, Mason-Pfizer monkey virus
ugcugcccggaugaugucu

SEQ ID NO: 227740 - RNA, 14 nt, Mason-Pfizer monkey virus
ugucuuggccucug

SEQ ID NO: 227741 - RNA, 24 nt, Mason-Pfizer monkey virus
ugucuuggccucuguuugcucuag

SEQ ID NO: 227742 - RNA, 22 nt, Mason-Pfizer monkey virus
uucccgccggcgcgaauguuuc

SEQ ID NO: 227743 - RNA, 17 nt, Mason-Pfizer monkey virus
uucucacuaaccuaaga

SEQ ID NO: 227744 - RNA, 14 nt, Mason-Pfizer monkey virus
uucguuuucugucc

SEQ ID NO: 227745 - RNA, 14 nt, Mason-Pfizer monkey virus
agggugacaugucc

SEQ ID NO: 227746 - RNA, 14 nt, Mason-Pfizer monkey virus
agguuccuacuguu

SEQ ID NO: 227747 - RNA, 23 nt, Mason-Pfizer monkey virus
aggagggccgucaaagcuacugc

SEQ ID NO: 227748 - RNA, 12 nt, Mason-Pfizer monkey virus
augaugucuugg

SEQ ID NO: 227749 - RNA, 15 nt, Mason-Pfizer monkey virus
augaugucuuggccu

SEQ ID NO: 227750 - RNA, 22 nt, Mason-Pfizer monkey virus
augacggguaagagagugacau

SEQ ID NO: 227751 - RNA, 21 nt, Mason-Pfizer monkey virus
augacggguaauagugacaag

SEQ ID NO: 227752 - RNA, 21 nt, Mason-Pfizer monkey virus
aucacuccaaccuaagacagg

SEQ ID NO: 227753 - RNA, 16 nt, Mason-Pfizer monkey virus
caauucccacucccuc

SEQ ID NO: 227754 - RNA, 14 nt, Mason-Pfizer monkey virus
caaccuaagacagg

SEQ ID NO: 227755 - RNA, 20 nt, Mason-Pfizer monkey virus
augcucuaccgacuggauga

SEQ ID NO: 227756 - RNA, 13 nt, Mason-Pfizer monkey virus
auucccacucccu

SEQ ID NO: 227757 - RNA, 19 nt, Mason-Pfizer monkey virus
auuucucacuaaccuaaga

SEQ ID NO: 227758 - RNA, 14 nt, Mason-Pfizer monkey virus
acccacgacccugg

SEQ ID NO: 227759 - RNA, 19 nt, Mason-Pfizer monkey virus
acggguaagagagugacau

SEQ ID NO: 227760 - RNA, 17 nt, Mason-Pfizer monkey virus
acggguaauagugacaa

SEQ ID NO: 227761 - RNA, 24 nt, Mason-Pfizer monkey virus
acauuucucacuaaccuaagacag

SEQ ID NO: 227762 - RNA, 21 nt, Mason-Pfizer monkey virus
agacuugaucagaacacuguc

SEQ ID NO: 227763 - RNA, 22 nt, Mason-Pfizer monkey virus
agacuugaucagaacacugucu

SEQ ID NO: 227764 - RNA, 23 nt, Mason-Pfizer monkey virus
agacuugaucagaacacugucuu

SEQ ID NO: 227765 - RNA, 14 nt, Mason-Pfizer monkey virus
acuccaaccuaaga

SEQ ID NO: 227766 - RNA, 17 nt, Mason-Pfizer monkey virus
acuccaaccuaagacag

SEQ ID NO: 227767 - RNA, 23 nt, Mason-Pfizer monkey virus
acuugaucagaacacugucuugu

SEQ ID NO: 227768 - RNA, 13 nt, Mason-Pfizer monkey virus
aagagucccaugc

SEQ ID NO: 227769 - RNA, 18 nt, Mason-Pfizer monkey virus
aagagucccaugcucuac

SEQ ID NO: 227770 - RNA, 23 nt, Mason-Pfizer monkey virus
aagaaauguaucacuccaaccua

SEQ ID NO: 227771 - RNA, 21 nt, Mason-Pfizer monkey virus
aauuaaaaagggugacauguc

SEQ ID NO: 227772 - RNA, 14 nt, Mason-Pfizer monkey virus
aauucccacucccu

SEQ ID NO: 227773 - RNA, 16 nt, Homo sapiens
aauugcuucaagcauu

SEQ ID NO: 227774 - RNA, 20 nt, Homo sapiens
gauuuugaaauuuuuauuaa

SEQ ID NO: 227775 - RNA, 21 nt, Homo sapiens
aggacacuagaagauuuugaa

SEQ ID NO: 227776 - RNA, 18 nt, Homo sapiens
aaggacacuagaagauuu

SEQ ID NO: 227777 - RNA, 13 nt, Homo sapiens
aagcauucuucaa

SEQ ID NO: 227778 - RNA, 21 nt, Homo sapiens
acugcauaugaaaggacacua

SEQ ID NO: 227779 - RNA, 21 nt, Homo sapiens
gaguuauuuuuauuuauuuaa

SEQ ID NO: 227780 - RNA, 22 nt, Homo sapiens
gugccucugggacuggacaauu

SEQ ID NO: 227781 - RNA, 11 nt, Measles virus
uccaaccaaau

SEQ ID NO: 227782 - RNA, 13 nt, Measles virus
uccaaccaaauga

SEQ ID NO: 227783 - RNA, 18 nt, Measles virus
uccacggaccaagcgaga

SEQ ID NO: 227784 - RNA, 23 nt, Measles virus
uccagaagacuccacggaccaag

SEQ ID NO: 227785 - RNA, 17 nt, Measles virus
uccagaggcaacaacuu

SEQ ID NO: 227786 - RNA, 18 nt, Measles virus
uccaucgugcagccaucu

SEQ ID NO: 227787 - RNA, 16 nt, Measles virus
uccauaagagccucag

SEQ ID NO: 227788 - RNA, 13 nt, Measles virus
uccauauccaaau

SEQ ID NO: 227789 - RNA, 21 nt, Measles virus
ucgaucgcuccgauacaaccu

SEQ ID NO: 227790 - RNA, 23 nt, Measles virus
ucgaucgcuccgauacaaccuac

SEQ ID NO: 227791 - RNA, 15 nt, Measles virus
ucacccagacaucag

SEQ ID NO: 227792 - RNA, 16 nt, Measles virus
ucacccagacaucagg

SEQ ID NO: 227793 - RNA, 14 nt, Measles virus
ucacaugaugucac

SEQ ID NO: 227794 - RNA, 17 nt, Measles virus
ucagagucauagauccu

SEQ ID NO: 227795 - RNA, 22 nt, Measles virus
ucagggaucuggagaaagcgau

SEQ ID NO: 227796 - RNA, 19 nt, Measles virus
ucuacaaagacaacccaca

SEQ ID NO: 227797 - RNA, 20 nt, Measles virus
ucuacaacucuugaaacaca

SEQ ID NO: 227798 - RNA, 18 nt, Measles virus
ugcaaggaagaggaggca

SEQ ID NO: 227799 - RNA, 14 nt, Measles virus
ugcaagaucaucca

SEQ ID NO: 227800 - RNA, 13 nt, Measles virus
ugucaucaagucc

SEQ ID NO: 227801 - RNA, 17 nt, Measles virus
uggcagaagagcaggca

SEQ ID NO: 227802 - RNA, 21 nt, Measles virus
uggucagaaauaucagacaac

SEQ ID NO: 227803 - RNA, 22 nt, Measles virus
uuccacaaugacagagaucuac

SEQ ID NO: 227804 - RNA, 16 nt, Measles virus
uuccauauccaaauug

SEQ ID NO: 227805 - RNA, 23 nt, Measles virus
ugugugagcaaugccgcacugau

SEQ ID NO: 227806 - RNA, 19 nt, Measles virus
ugugucagaacaucaagca

SEQ ID NO: 227807 - RNA, 22 nt, Measles virus
caagucuccucuucgucaucaa

SEQ ID NO: 227808 - RNA, 13 nt, Measles virus
caacgcaagaacc

SEQ ID NO: 227809 - RNA, 23 nt, Measles virus
caacucuugaaacacagauuucc

SEQ ID NO: 227810 - RNA, 13 nt, Measles virus
caacccacauccu

SEQ ID NO: 227811 - RNA, 12 nt, Measles virus
auuucgacaagu

SEQ ID NO: 227812 - RNA, 18 nt, Measles virus
augcauccgggcucucaa

SEQ ID NO: 227813 - RNA, 21 nt, Measles virus
aucuuaugauugauagaccuu

SEQ ID NO: 227814 - RNA, 19 nt, Measles virus
augucacccagacaucagg

SEQ ID NO: 227815 - RNA, 19 nt, Measles virus
ccaggucagagucauagau

SEQ ID NO: 227816 - RNA, 20 nt, Measles virus
ccgaggaacuccucaaagag

SEQ ID NO: 227817 - RNA, 14 nt, Measles virus
cccacuagugugaa

SEQ ID NO: 227818 - RNA, 15 nt, Measles virus
cccacuagugugaaa

SEQ ID NO: 227819 - RNA, 19 nt, Measles virus
ccauggcagcauggucaga

SEQ ID NO: 227820 - RNA, 21 nt, Measles virus
cagaacagccccgacacaagg

SEQ ID NO: 227821 - RNA, 14 nt, Measles virus
cagaacaucaagca

SEQ ID NO: 227822 - RNA, 12 nt, Measles virus
caggaguggaca

SEQ ID NO: 227823 - RNA, 22 nt, Measles virus
caguucgggucucagcaaacca

SEQ ID NO: 227824 - RNA, 22 nt, Measles virus
caucagggccaggugcaccugc

SEQ ID NO: 227825 - RNA, 14 nt, Measles virus
aguuaggcauuauu

SEQ ID NO: 227826 - RNA, 17 nt, Measles virus
agucuccucuucgucau

SEQ ID NO: 227827 - RNA, 13 nt, Measles virus
auacaaccuacca

SEQ ID NO: 227828 - RNA, 15 nt, Measles virus
auaaugacagccaga

SEQ ID NO: 227829 - RNA, 22 nt, Measles virus
auaaugacagccagaaggcccg

SEQ ID NO: 227830 - RNA, 14 nt, Measles virus
agagccucagcacc

SEQ ID NO: 227831 - RNA, 17 nt, Measles virus
agaucauccacaauguc

SEQ ID NO: 227832 - RNA, 20 nt, Measles virus
agaucauccacaaugucacc

SEQ ID NO: 227833 - RNA, 21 nt, Measles virus
agccucagcaccaaucuagau

SEQ ID NO: 227834 - RNA, 18 nt, Measles virus
aggaagaggaggcaggca

SEQ ID NO: 227835 - RNA, 18 nt, Measles virus
aggccgaggaccagaaca

SEQ ID NO: 227836 - RNA, 13 nt, Measles virus
aggauaguuauua

SEQ ID NO: 227837 - RNA, 19 nt, Measles virus
acagcaaguguggacacca

SEQ ID NO: 227838 - RNA, 23 nt, Measles virus
acaccaggcggcccaagcacaga

SEQ ID NO: 227839 - RNA, 14 nt, Measles virus
acaaugacagagau

SEQ ID NO: 227840 - RNA, 16 nt, Measles virus
accgagccaccugcaa

SEQ ID NO: 227841 - RNA, 21 nt, Measles virus
acugugucagaacaucaagca

SEQ ID NO: 227842 - RNA, 20 nt, Measles virus
gagcaggcacgccaugucaa

SEQ ID NO: 227843 - RNA, 22 nt, Measles virus
gagcccaucggcucacuggccg

SEQ ID NO: 227844 - RNA, 15 nt, Measles virus
gagccgauggcagaa

SEQ ID NO: 227845 - RNA, 18 nt, Measles virus
gagaccgaauaaaugccu

SEQ ID NO: 227846 - RNA, 19 nt, Measles virus
gacacaaggccaccaccag

SEQ ID NO: 227847 - RNA, 15 nt, Measles virus
gauucuccaaccaaa

SEQ ID NO: 227848 - RNA, 17 nt, Measles virus
gcaaguguggacaccag

SEQ ID NO: 227849 - RNA, 18 nt, Measles virus
gaucuggagaaagcgaug

SEQ ID NO: 227850 - RNA, 20 nt, Measles virus
gaaggucgcuccgaacacag

SEQ ID NO: 227851 - RNA, 13 nt, Measles virus
gaagccauggcag

SEQ ID NO: 227852 - RNA, 18 nt, Measles virus
gaaccccaguagggccag

SEQ ID NO: 227853 - RNA, 12 nt, Measles virus
gaaaacuuugaa

SEQ ID NO: 227854 - RNA, 15 nt, Measles virus
ccuacacugugucag

SEQ ID NO: 227855 - RNA, 16 nt, Measles virus
ccuacacugugucaga

SEQ ID NO: 227856 - RNA, 14 nt, Measles virus
cuccacggaccaag

SEQ ID NO: 227857 - RNA, 22 nt, Measles virus
cuccagaagacuccacggacca

SEQ ID NO: 227858 - RNA, 17 nt, Measles virus
cuccaucgugcagccau

SEQ ID NO: 227859 - RNA, 13 nt, Measles virus
cugcccuuaggug

SEQ ID NO: 227860 - RNA, 14 nt, Measles virus
cucuugaaacacag

SEQ ID NO: 227861 - RNA, 16 nt, Measles virus
gccgaggaccagaaca

SEQ ID NO: 227862 - RNA, 17 nt, Measles virus
gcuaucugucaaccaga

SEQ ID NO: 227863 - RNA, 17 nt, Measles virus
gcuccgaacacagacca

SEQ ID NO: 227864 - RNA, 13 nt, Measles virus
gggaucuggagaa

SEQ ID NO: 227865 - RNA, 11 nt, Measles virus
ggccagccagc

SEQ ID NO: 227866 - RNA, 16 nt, Measles virus
ggcauuauuugcaaua

SEQ ID NO: 227867 - RNA, 15 nt, Measles virus
gagaggccagccagc

SEQ ID NO: 227868 - RNA, 17 nt, Measles virus
gagauccauaagagccu

SEQ ID NO: 227869 - RNA, 18 nt, Measles virus
gaggaagccauggcagca

SEQ ID NO: 227870 - RNA, 16 nt, Measles virus
gccagccaaccaacca

SEQ ID NO: 227871 - RNA, 12 nt, Measles virus
gaucauccacaa

SEQ ID NO: 227872 - RNA, 17 nt, Measles virus
gaucauccacaauguca

SEQ ID NO: 227873 - RNA, 23 nt, Measles virus
gaucauccacaaugucaccacaa

SEQ ID NO: 227874 - RNA, 18 nt, Measles virus
gcaagaaccccacaaccg

SEQ ID NO: 227875 - RNA, 15 nt, Measles virus
gcagccgacagcaag

SEQ ID NO: 227876 - RNA, 17 nt, Measles virus
gcacuuccgagacaccc

SEQ ID NO: 227877 - RNA, 18 nt, Measles virus
ggaaaacucucaauguuc

SEQ ID NO: 227878 - RNA, 17 nt, Measles virus
ggaaccaucagggccag

SEQ ID NO: 227879 - RNA, 21 nt, Measles virus
ggccaccaccagccaucccaa

SEQ ID NO: 227880 - RNA, 15 nt, Measles virus
cgcauccccacagcu

SEQ ID NO: 227881 - RNA, 16 nt, Measles virus
cucauaaugacagcca

SEQ ID NO: 227882 - RNA, 19 nt, Measles virus
cucauaaugacagccagaa

SEQ ID NO: 227883 - RNA, 18 nt, Measles virus
cccuagguaguuaggcau

SEQ ID NO: 227884 - RNA, 13 nt, Measles virus
cccgaggaccaac

SEQ ID NO: 227885 - RNA, 15 nt, Measles virus
cccucggaaccauca

SEQ ID NO: 227886 - RNA, 18 nt, Measles virus
ccuaauuaguacaaccua

SEQ ID NO: 227887 - RNA, 16 nt, Measles virus
caggcacgccauguca

SEQ ID NO: 227888 - RNA, 13 nt, Measles virus
cagacaucaggca

SEQ ID NO: 227889 - RNA, 19 nt, Measles virus
cagacaucaggcauaccca

SEQ ID NO: 227890 - RNA, 16 nt, Measles virus
cagacaacccaggaca

SEQ ID NO: 227891 - RNA, 21 nt, Measles virus
uccacaaugucaccacaacga

SEQ ID NO: 227892 - RNA, 17 nt, Measles virus
uccagcaucaagcccac

SEQ ID NO: 227893 - RNA, 23 nt, Measles virus
ucgaccuaauuaguacaaccuaa

SEQ ID NO: 227894 - RNA, 14 nt, Measles virus
uccgauacaaccua

SEQ ID NO: 227895 - RNA, 15 nt, Measles virus
uccgauacaaccuac

SEQ ID NO: 227896 - RNA, 18 nt, Measles virus
ucacccucggaaccauca

SEQ ID NO: 227897 - RNA, 19 nt, Measles virus
uauuaaagaaaacuuugaa

SEQ ID NO: 227898 - RNA, 13 nt, Measles virus
gggucucagcaaa

SEQ ID NO: 227899 - RNA, 16 nt, Measles virus
uaauuaguacaaccua

SEQ ID NO: 227900 - RNA, 18 nt, Measles virus
aacuuaggagcaaaguga

SEQ ID NO: 227901 - RNA, 20 nt, Measles virus
aacugaaggcggugcaccuc

SEQ ID NO: 227902 - RNA, 19 nt, Measles virus
aacggacuggaaugcaucc

SEQ ID NO: 227903 - RNA, 12 nt, Measles virus
aauagacaucag

SEQ ID NO: 227904 - RNA, 13 nt, Measles virus
aauagacaucaga

SEQ ID NO: 227905 - RNA, 18 nt, Measles virus
aauaaaugccuucuacaa

SEQ ID NO: 227906 - RNA, 21 nt, Measles virus
aauaaaugccuucuacaaaga

SEQ ID NO: 227907 - RNA, 17 nt, Measles virus
aaguccaagcuuaggag

SEQ ID NO: 227908 - RNA, 12 nt, Measles virus
aacacagaccac

SEQ ID NO: 227909 - RNA, 14 nt, Measles virus
uuauaaacaaugug

SEQ ID NO: 227910 - RNA, 19 nt, Measles virus
uggaaguugggaaugucau

SEQ ID NO: 227911 - RNA, 18 nt, Measles virus
agucccucacgcuuacag

SEQ ID NO: 227912 - RNA, 22 nt, Measles virus
aggcaguucgggucucagcaaa

SEQ ID NO: 227913 - RNA, 12 nt, Measles virus
agccaucuacac

SEQ ID NO: 227914 - RNA, 13 nt, Measles virus
agccaucuacacc

SEQ ID NO: 227915 - RNA, 11 nt, Measles virus
auaagagccuc

SEQ ID NO: 227916 - RNA, 12 nt, Measles virus
aucagggccagg

SEQ ID NO: 227917 - RNA, 16 nt, Measles virus
auccaaauuguaauca

SEQ ID NO: 227918 - RNA, 19 nt, Measles virus
auccacaaugucaccacaa

SEQ ID NO: 227919 - RNA, 13 nt, Measles virus
aucuacaccgcag

SEQ ID NO: 227920 - RNA, 20 nt, Measles virus
auggcagcauggucagaaau

SEQ ID NO: 227921 - RNA, 16 nt, Measles virus
aucugucaaccagauc

SEQ ID NO: 227922 - RNA, 14 nt, Measles virus
cacccagacaucag

SEQ ID NO: 227923 - RNA, 21 nt, Measles virus
caccaggcggcccaagcacag

SEQ ID NO: 227924 - RNA, 13 nt, Measles virus
caacuggaaggcc

SEQ ID NO: 227925 - RNA, 18 nt, Measles virus
caacucuugaaacacaga

SEQ ID NO: 227926 - RNA, 19 nt, Measles virus
aacauccgccuacccucca

SEQ ID NO: 227927 - RNA, 13 nt, Measles virus
aaccaaccaucca

SEQ ID NO: 227928 - RNA, 16 nt, Measles virus
aacuuaggaaccaggu

SEQ ID NO: 227929 - RNA, 13 nt, Measles virus
aacuuaccugcca

SEQ ID NO: 227930 - RNA, 18 nt, Measles virus
aaccaugccucucagcaa

SEQ ID NO: 227931 - RNA, 19 nt, Measles virus
aaccuaccaccuacaguga

SEQ ID NO: 227932 - RNA, 13 nt, Measles virus
aaauagacaucag

SEQ ID NO: 227933 - RNA, 18 nt, Measles virus
aaugccuucuacaaagac

SEQ ID NO: 227934 - RNA, 22 nt, Measles virus
acaaagacaacccacauccuaa

SEQ ID NO: 227935 - RNA, 15 nt, Measles virus
aaugucaucaagucc

SEQ ID NO: 227936 - RNA, 19 nt, Measles virus
aaugucaccacaacgagac

SEQ ID NO: 227937 - RNA, 15 nt, Measles virus
aauuaguacaaccua

SEQ ID NO: 227938 - RNA, 15 nt, Measles virus
aagcgagaggccagc

SEQ ID NO: 227939 - RNA, 23 nt, Measles virus
acuagugugaaauagacaucaga

SEQ ID NO: 227940 - RNA, 16 nt, Measles virus
agaccgaauaaaugcc

SEQ ID NO: 227941 - RNA, 19 nt, Measles virus
agacaucaaaacagccuug

SEQ ID NO: 227942 - RNA, 19 nt, Measles virus
accuaccaccuacagugau

SEQ ID NO: 227943 - RNA, 19 nt, Measles virus
acccugaaguucaccuaga

SEQ ID NO: 227944 - RNA, 11 nt, Measles virus
accauccacuc

SEQ ID NO: 227945 - RNA, 23 nt, Measles virus
accccccucauaaugacagccag

SEQ ID NO: 227946 - RNA, 15 nt, Measles virus
acagguggugcaacc

SEQ ID NO: 227947 - RNA, 17 nt, Measles virus
acaccgcagagauccau

SEQ ID NO: 227948 - RNA, 24 nt, Measles virus
aaaacuuagggugcaagaucaucc

SEQ ID NO: 227949 - RNA, 22 nt, Measles virus
aaaaacuuaggagcaaagugau

SEQ ID NO: 227950 - RNA, 16 nt, Measles virus
uccgggcucucaaggc

SEQ ID NO: 227951 - RNA, 14 nt, Measles virus
ucccacaagucucc

SEQ ID NO: 227952 - RNA, 21 nt, Measles virus
ucuccgauguccaagacauca

SEQ ID NO: 227953 - RNA, 23 nt, Measles virus
ugccuccuaaguuccacaaugac

SEQ ID NO: 227954 - RNA, 17 nt, Measles virus
ugcaacccaaugugcuc

SEQ ID NO: 227955 - RNA, 12 nt, Measles virus
ugcuagccauug

SEQ ID NO: 227956 - RNA, 13 nt, Measles virus
uuaguacaaccua

SEQ ID NO: 227957 - RNA, 14 nt, Measles virus
uuaguacaaccuaa

SEQ ID NO: 227958 - RNA, 15 nt, Measles virus
uguucuauucgucau

SEQ ID NO: 227959 - RNA, 16 nt, Measles virus
guagggccagcacuuc

SEQ ID NO: 227960 - RNA, 19 nt, Measles virus
ggugcaacccaaugugcuc

SEQ ID NO: 227961 - RNA, 12 nt, Measles virus
ggguccaagugg

SEQ ID NO: 227962 - RNA, 19 nt, Measles virus
gugagcaaugccgcacuga

SEQ ID NO: 227963 - RNA, 21 nt, Measles virus
gugagcaaugccgcacugaua

SEQ ID NO: 227964 - RNA, 17 nt, Measles virus
gugaaauagacaucaga

SEQ ID NO: 227965 - RNA, 23 nt, Measles virus
gucgaucgcuccgauacaaccua

SEQ ID NO: 227966 - RNA, 17 nt, Measles virus
guccaagacaucaaaac

SEQ ID NO: 227967 - RNA, 17 nt, Measles virus
ggcccaagcacagaaca

SEQ ID NO: 227968 - RNA, 14 nt, Measles virus
ggagccgauggcag

SEQ ID NO: 227969 - RNA, 13 nt, Measles virus
ggcacgccauguc

SEQ ID NO: 227970 - RNA, 14 nt, Measles virus
ggacucgcuaucug

SEQ ID NO: 227971 - RNA, 17 nt, Measles virus
uaggcauuauuugcaau

SEQ ID NO: 227972 - RNA, 15 nt, Measles virus
ucaaccagaucuuau

SEQ ID NO: 227973 - RNA, 14 nt, Measles virus
uaaucaggauuuau

SEQ ID NO: 227974 - RNA, 15 nt, Measles virus
uaauuaguacaaccu

SEQ ID NO: 227975 - RNA, 22 nt, Measles virus
uacaacucuugaaacacagauu

SEQ ID NO: 227976 - RNA, 15 nt, Measles virus
uacaccgcagagauc

SEQ ID NO: 227977 - RNA, 21 nt, Measles virus
gacuauuaugaugaugagcug

SEQ ID NO: 227978 - RNA, 18 nt, Measles virus
gacaucaaaacagccuug

SEQ ID NO: 227979 - RNA, 16 nt, Measles virus
gacccccgaggaccaa

SEQ ID NO: 227980 - RNA, 13 nt, Measles virus
gaccgagccaccu

SEQ ID NO: 227981 - RNA, 21 nt, Measles virus
gacagcaaguguggacaccag

SEQ ID NO: 227982 - RNA, 21 nt, Measles virus
cuugaucggguugcuagccau

SEQ ID NO: 227983 - RNA, 23 nt, Measles virus
gaaccagguccacacagccgcca

SEQ ID NO: 227984 - RNA, 16 nt, Measles virus
gcacugauacaggagu

SEQ ID NO: 227985 - RNA, 16 nt, Measles virus
gauuauaaacaaugug

SEQ ID NO: 227986 - RNA, 17 nt, Measles virus
gauuauaaacaaugugg

SEQ ID NO: 227987 - RNA, 12 nt, Measles virus
gauuucccacaa

SEQ ID NO: 227988 - RNA, 23 nt, Measles virus
gcauccgacuccuuagacagauc

SEQ ID NO: 227989 - RNA, 15 nt, Measles virus
gccaggugcaccugc

SEQ ID NO: 227990 - RNA, 13 nt, Measles virus
cuccgaacacaga

SEQ ID NO: 227991 - RNA, 15 nt, Measles virus
cuucuacaaagacaa

SEQ ID NO: 227992 - RNA, 21 nt, Measles virus
cuuagguguugguagauccac

SEQ ID NO: 227993 - RNA, 18 nt, Measles virus
cugugucagaacaucaag

SEQ ID NO: 227994 - RNA, 20 nt, Measles virus
cugugucagaacaucaagca

SEQ ID NO: 227995 - RNA, 22 nt, Measles virus
cgacagcaaguguggacaccag

SEQ ID NO: 227996 - RNA, 22 nt, Measles virus
cgugggacccccgaggaccaac

SEQ ID NO: 227997 - RNA, 15 nt, Measles virus
cuacacugugucaga

SEQ ID NO: 227998 - RNA, 18 nt, Measles virus
cuacacugugucagaaca

SEQ ID NO: 227999 - RNA, 12 nt, Measles virus
cuacaaagacaa

SEQ ID NO: 228000 - RNA, 19 nt, Measles virus
cuacaacucuugaaacaca

SEQ ID NO: 228001 - RNA, 14 nt, Measles virus
caaugccgcacuga

SEQ ID NO: 228002 - RNA, 13 nt, Measles virus
cagagauccauaa

SEQ ID NO: 228003 - RNA, 14 nt, Measles virus
auuaguacaaccua

SEQ ID NO: 228004 - RNA, 16 nt, Measles virus
augucaucaaguccaa

SEQ ID NO: 228005 - RNA, 14 nt, Measles virus
cauuauuugcaaua

SEQ ID NO: 228006 - RNA, 12 nt, Measles virus
ccaagcacagaa

SEQ ID NO: 228007 - RNA, 16 nt, Measles virus
cauuaaaaagggcaca

SEQ ID NO: 228008 - RNA, 15 nt, Measles virus
cauauuccauaucca

SEQ ID NO: 228009 - RNA, 21 nt, Measles virus
caucgugcagccaucuacacc

SEQ ID NO: 228010 - RNA, 16 nt, Measles virus
cagcagccgacagcaa

SEQ ID NO: 228011 - RNA, 14 nt, Measles virus
cagccaaccaacca

SEQ ID NO: 228012 - RNA, 13 nt, Measles virus
cagccagaaggcc

SEQ ID NO: 228013 - RNA, 18 nt, Measles virus
cagcaauuggaucaacug

SEQ ID NO: 228014 - RNA, 23 nt, Measles virus
ccugcccuagguaguuaggcauu

SEQ ID NO: 228015 - RNA, 15 nt, Measles virus
cgaaccgcacaagcg

SEQ ID NO: 228016 - RNA, 14 nt, Measles virus
ccuggucuagguga

SEQ ID NO: 228017 - RNA, 17 nt, Measles virus
ccuuagguguugguaga

SEQ ID NO: 228018 - RNA, 24 nt, Measles virus
cccgaaggucgcuccgaacacaga

SEQ ID NO: 228019 - RNA, 20 nt, Measles virus
cccucauaaugacagccaga

SEQ ID NO: 228020 - RNA, 20 nt, Measles virus
ccaggcggcccaagcacaga

SEQ ID NO: 228021 - RNA, 18 nt, Measles virus
cccauuaaaaagggcaca

SEQ ID NO: 228022 - RNA, 22 nt, Measles virus
ccgaaggucgcuccgaacacag

SEQ ID NO: 228023 - RNA, 23 nt, Measles virus
ccgaaggucgcuccgaacacaga

SEQ ID NO: 228024 - RNA, 16 nt, Measles virus
aggcacgccaugucaa

SEQ ID NO: 228025 - RNA, 21 nt, Measles virus
agccccgacacaaggccacca

SEQ ID NO: 228026 - RNA, 21 nt, Measles virus
auaaaaaacuuaggaaccagg

SEQ ID NO: 228027 - RNA, 18 nt, Measles virus
aguuccacaaugacagag

SEQ ID NO: 228028 - RNA, 12 nt, Measles virus
aguagggccagc

SEQ ID NO: 228029 - RNA, 23 nt, Measles virus
agguaguuaggcauuauuugcaa

SEQ ID NO: 228030 - RNA, 14 nt, Measles virus
agggccagcacuuc

SEQ ID NO: 228031 - RNA, 20 nt, Measles virus
aucacaugaugucacccaga

SEQ ID NO: 228032 - RNA, 22 nt, Measles virus
auagauccuggucuaggugaua

SEQ ID NO: 228033 - RNA, 15 nt, Measles virus
auccuggucuaggug

SEQ ID NO: 228034 - RNA, 23 nt, Measles virus
auccagcaucaagcccaccugaa

SEQ ID NO: 228035 - RNA, 14 nt, Measles virus
auccagaggcaaca

SEQ ID NO: 228036 - RNA, 11 nt, Measles virus
aucagggccag

SEQ ID NO: 228037 - RNA, 15 nt, Measles virus
aucagacaacccagg

SEQ ID NO: 228038 - RNA, 16 nt, Measles virus
aucagacaacccagga

SEQ ID NO: 228039 - RNA, 18 nt, Measles virus
acuuaggagcaaagugau

SEQ ID NO: 228040 - RNA, 19 nt, Measles virus
acucgcuaucugucaacca

SEQ ID NO: 228041 - RNA, 15 nt, Measles virus
agacaacccaggaca

SEQ ID NO: 228042 - RNA, 13 nt, Measles virus
agaagagcaggca

SEQ ID NO: 228043 - RNA, 23 nt, Measles virus
agaagagcaggcacgccauguca

SEQ ID NO: 228044 - RNA, 15 nt, Measles virus
accaaccauccacuc

SEQ ID NO: 228045 - RNA, 17 nt, Measles virus
acggacuggaaugcauc

SEQ ID NO: 228046 - RNA, 14 nt, Measles virus
acaaccuaccaccu

SEQ ID NO: 228047 - RNA, 17 nt, Measles virus
aagacuccacggaccaa

SEQ ID NO: 228048 - RNA, 21 nt, Measles virus
aacccaggacaggaccgagcc

SEQ ID NO: 228049 - RNA, 16 nt, Measles virus
acguaggguccaagug

SEQ ID NO: 228050 - RNA, 16 nt, Measles virus
acucuugaaacacaga

SEQ ID NO: 228051 - RNA, 15 nt, Measles virus
acuccuuagacagau

SEQ ID NO: 228052 - RNA, 16 nt, Measles virus
agauaguagcuauccu

SEQ ID NO: 228053 - RNA, 17 nt, Measles virus
agcaaguguggacacca

SEQ ID NO: 228054 - RNA, 17 nt, Measles virus
agcaaccaccgcaucca

SEQ ID NO: 228055 - RNA, 14 nt, Measles virus
agcaaaccaugccu

SEQ ID NO: 228056 - RNA, 18 nt, Measles virus
agcaaaccaugccucuca

SEQ ID NO: 228057 - RNA, 18 nt, Measles virus
accaagcgagaggccagc

SEQ ID NO: 228058 - RNA, 21 nt, Measles virus
acagcaaguguggacaccagg

SEQ ID NO: 228059 - RNA, 22 nt, Measles virus
acaucaggcauacccacuagug

SEQ ID NO: 228060 - RNA, 21 nt, Measles virus
auugacagguggugcaaccca

SEQ ID NO: 228061 - RNA, 13 nt, Measles virus
cacaaggccacca

SEQ ID NO: 228062 - RNA, 18 nt, Measles virus
cacaugaugucacccaga

SEQ ID NO: 228063 - RNA, 15 nt, Measles virus
cacaaugucaccaca

SEQ ID NO: 228064 - RNA, 18 nt, Measles virus
caccgcauccagcaucaa

SEQ ID NO: 228065 - RNA, 13 nt, Measles virus
caccacaacgaga

SEQ ID NO: 228066 - RNA, 16 nt, Measles virus
cagauuucccacaagu

SEQ ID NO: 228067 - RNA, 17 nt, Measles virus
auaguuauuaacagaga

SEQ ID NO: 228068 - RNA, 21 nt, Measles virus
augaugucacccagacaucag

SEQ ID NO: 228069 - RNA, 15 nt, Measles virus
augccucucagcaau

SEQ ID NO: 228070 - RNA, 18 nt, Measles virus
aggcggcccaagcacaga

SEQ ID NO: 228071 - RNA, 22 nt, Measles virus
aggcuggugccccaggucagag

SEQ ID NO: 228072 - RNA, 11 nt, Measles virus
aguagggccag

SEQ ID NO: 228073 - RNA, 14 nt, Measles virus
aaacacagauuucc

SEQ ID NO: 228074 - RNA, 17 nt, Measles virus
uuccacaaugacagaga

SEQ ID NO: 228075 - RNA, 14 nt, Measles virus
uuauugacaggugg

SEQ ID NO: 228076 - RNA, 19 nt, Measles virus
uggaggacccuacacugug

SEQ ID NO: 228077 - RNA, 17 nt, Measles virus
aacagagaacaucuuau

SEQ ID NO: 228078 - RNA, 14 nt, Measles virus
aacuggaaggcccc

SEQ ID NO: 228079 - RNA, 20 nt, Measles virus
aaccuaccaccuacagugau

SEQ ID NO: 228080 - RNA, 14 nt, Measles virus
aacccacauccuaa

SEQ ID NO: 228081 - RNA, 17 nt, Measles virus
aaccccaguagggccag

SEQ ID NO: 228082 - RNA, 15 nt, Measles virus
aaccauccacuccca

SEQ ID NO: 228083 - RNA, 18 nt, Measles virus
aaccagguccacacagcc

SEQ ID NO: 228084 - RNA, 16 nt, Measles virus
aaugucaccacaacga

SEQ ID NO: 228085 - RNA, 19 nt, Measles virus
aagcgagaggccagccagc

SEQ ID NO: 228086 - RNA, 18 nt, Measles virus
aagucacccucggaacca

SEQ ID NO: 228087 - RNA, 14 nt, Measles virus
aaguuccacaauga

SEQ ID NO: 228088 - RNA, 12 nt, Measles virus
ucagcaaaccau

SEQ ID NO: 228089 - RNA, 16 nt, Measles virus
uccaaauuguaaucag

SEQ ID NO: 228090 - RNA, 21 nt, Measles virus
uccaagacaucaaaacagccu

SEQ ID NO: 228091 - RNA, 19 nt, Measles virus
uagguguugguagauccac

SEQ ID NO: 228092 - RNA, 14 nt, Measles virus
uaaugacagccaga

SEQ ID NO: 228093 - RNA, 16 nt, Measles virus
uaccaccuacagugau

SEQ ID NO: 228094 - RNA, 15 nt, Measles virus
gucgaggaagccaug

SEQ ID NO: 228095 - RNA, 18 nt, Measles virus
cugauacaggaguggaca

SEQ ID NO: 228096 - RNA, 19 nt, Measles virus
cuccgauguccaagacauc

SEQ ID NO: 228097 - RNA, 15 nt, Measles virus
cuccgauacaaccua

SEQ ID NO: 228098 - RNA, 23 nt, Measles virus
cuagugugaaauagacaucagaa

SEQ ID NO: 228099 - RNA, 16 nt, Measles virus
cuaauuaguacaaccu

SEQ ID NO: 228100 - RNA, 14 nt, Measles virus
ccaccaccagccau

SEQ ID NO: 228101 - RNA, 19 nt, Measles virus
ccugaaguucaccuagaua

SEQ ID NO: 228102 - RNA, 23 nt, Measles virus
ccucucagcaauuggaucaacug

SEQ ID NO: 228103 - RNA, 13 nt, Measles virus
ccucggaaccauc

SEQ ID NO: 228104 - RNA, 13 nt, Measles virus
ccgauacaaccua

SEQ ID NO: 228105 - RNA, 23 nt, Measles virus
ccgaacgauaucgguaguuaauu

SEQ ID NO: 228106 - RNA, 22 nt, Measles virus
cgaaggucgcuccgaacacaga

SEQ ID NO: 228107 - RNA, 17 nt, Measles virus
cgagccaccugcaagga

SEQ ID NO: 228108 - RNA, 16 nt, Measles virus
gaggugacccaaccgc

SEQ ID NO: 228109 - RNA, 15 nt, Measles virus
gacuccacggaccaa

SEQ ID NO: 228110 - RNA, 20 nt, Measles virus
gaugucacccagacaucagg

SEQ ID NO: 228111 - RNA, 16 nt, Measles virus
gauuucccacaagucu

SEQ ID NO: 228112 - RNA, 19 nt, Measles virus
gauacaggaguggacaccc

SEQ ID NO: 228113 - RNA, 17 nt, Measles virus
gaaccaucagggccagg

SEQ ID NO: 228114 - RNA, 13 nt, Measles virus
gacacaaggccac

SEQ ID NO: 228115 - RNA, 15 nt, Measles virus
gacacccauuaaaaa

SEQ ID NO: 228116 - RNA, 16 nt, Measles virus
gacagccagaaggccc

SEQ ID NO: 228117 - RNA, 22 nt, Measles virus
gacccaaccgcaggcauccgac

SEQ ID NO: 228118 - RNA, 21 nt, Measles virus
ggccgucgaggaagccauggc

SEQ ID NO: 228119 - RNA, 23 nt, Measles virus
ggccgucgaggaagccauggcag

SEQ ID NO: 228120 - RNA, 23 nt, Measles virus
ggaguuauccggcccacucucau

SEQ ID NO: 228121 - RNA, 17 nt, Measles virus
ggagacuauuaugauga

SEQ ID NO: 228122 - RNA, 15 nt, Measles virus
gcuccgaacacagac

SEQ ID NO: 228123 - RNA, 13 nt, Measles virus
gccccgacacaag

SEQ ID NO: 228124 - RNA, 15 nt, Measles virus
gcauccccacagcuc

SEQ ID NO: 228125 - RNA, 18 nt, Molluscum contagiosum virus
gcaucccucgucuuugcg

SEQ ID NO: 228126 - RNA, 13 nt, Molluscum contagiosum virus
gcaacgucuuccg

SEQ ID NO: 228127 - RNA, 13 nt, Molluscum contagiosum virus
gcaacgugcugcg

SEQ ID NO: 228128 - RNA, 15 nt, Molluscum contagiosum virus
gcaacgcacaaaaca

SEQ ID NO: 228129 - RNA, 17 nt, Molluscum contagiosum virus
gcaacgcaggacacugu

SEQ ID NO: 228130 - RNA, 20 nt, Molluscum contagiosum virus
gcauccucaaccgcugcaau

SEQ ID NO: 228131 - RNA, 15 nt, Molluscum contagiosum virus
gcauccucuccauca

SEQ ID NO: 228132 - RNA, 17 nt, Molluscum contagiosum virus
gcaaagucaucugccuc

SEQ ID NO: 228133 - RNA, 15 nt, Molluscum contagiosum virus
gcaaaggaugaacgu

SEQ ID NO: 228134 - RNA, 21 nt, Molluscum contagiosum virus
gcaacaagaguugucuuccaa

SEQ ID NO: 228135 - RNA, 12 nt, Molluscum contagiosum virus
gcaacaaggaaa

SEQ ID NO: 228136 - RNA, 19 nt, Molluscum contagiosum virus
gcaacaugcggagacuguu

SEQ ID NO: 228137 - RNA, 20 nt, Molluscum contagiosum virus
gcaacgaaccgugcgagcuu

SEQ ID NO: 228138 - RNA, 23 nt, Molluscum contagiosum virus
gccacaccugugcccuguccaca

SEQ ID NO: 228139 - RNA, 13 nt, Molluscum contagiosum virus
gcauguugcucua

SEQ ID NO: 228140 - RNA, 21 nt, Molluscum contagiosum virus
gcauguugucgaagaacauau

SEQ ID NO: 228141 - RNA, 23 nt, Molluscum contagiosum virus
gcauuggcauccggcacgcacaa

SEQ ID NO: 228142 - RNA, 18 nt, Molluscum contagiosum virus
gcauuccuucacacagac

SEQ ID NO: 228143 - RNA, 14 nt, Molluscum contagiosum virus
gcaugcgugcaaca

SEQ ID NO: 228144 - RNA, 14 nt, Molluscum contagiosum virus
gcaugcgugcuuca

SEQ ID NO: 228145 - RNA, 16 nt, Molluscum contagiosum virus
gcaugacagccauggc

SEQ ID NO: 228146 - RNA, 17 nt, Molluscum contagiosum virus
gcaugcgcgcagugccg

SEQ ID NO: 228147 - RNA, 12 nt, Molluscum contagiosum virus
gcauguucucuu

SEQ ID NO: 228148 - RNA, 19 nt, Molluscum contagiosum virus
gcaugggcaaggacaucua

SEQ ID NO: 228149 - RNA, 20 nt, Molluscum contagiosum virus
gcauggggaacagcuuggca

SEQ ID NO: 228150 - RNA, 21 nt, Molluscum contagiosum virus
gccccggcgcgaaacaagcgu

SEQ ID NO: 228151 - RNA, 15 nt, Molluscum contagiosum virus
gccccccgcaacaag

SEQ ID NO: 228152 - RNA, 18 nt, Molluscum contagiosum virus
gccccccgcaacaaggaa

SEQ ID NO: 228153 - RNA, 13 nt, Molluscum contagiosum virus
gcccccggucuga

SEQ ID NO: 228154 - RNA, 14 nt, Molluscum contagiosum virus
gcccuuugaugucg

SEQ ID NO: 228155 - RNA, 16 nt, Molluscum contagiosum virus
gcccaggaacaucugc

SEQ ID NO: 228156 - RNA, 19 nt, Molluscum contagiosum virus
gccagugcgugcacugucu

SEQ ID NO: 228157 - RNA, 15 nt, Molluscum contagiosum virus
gccacugccacggcu

SEQ ID NO: 228158 - RNA, 20 nt, Molluscum contagiosum virus
gccaugaacaacauggugcu

SEQ ID NO: 228159 - RNA, 21 nt, Molluscum contagiosum virus
gccaugaacaacauggugcug

SEQ ID NO: 228160 - RNA, 17 nt, Molluscum contagiosum virus
gccaucgagaugcucaa

SEQ ID NO: 228161 - RNA, 17 nt, Molluscum contagiosum virus
gccaucucgcacacugc

SEQ ID NO: 228162 - RNA, 17 nt, Molluscum contagiosum virus
gccgagccgcuggccga

SEQ ID NO: 228163 - RNA, 21 nt, Molluscum contagiosum virus
gccgagcgugaccagugcgug

SEQ ID NO: 228164 - RNA, 17 nt, Molluscum contagiosum virus
gccgagauggagcucac

SEQ ID NO: 228165 - RNA, 21 nt, Molluscum contagiosum virus
gccgagugcgacgcgcgucac

SEQ ID NO: 228166 - RNA, 12 nt, Molluscum contagiosum virus
gccgcaagcaca

SEQ ID NO: 228167 - RNA, 18 nt, Molluscum contagiosum virus
gccgaugcagugcggaug

SEQ ID NO: 228168 - RNA, 12 nt, Molluscum contagiosum virus
gccgcaccucac

SEQ ID NO: 228169 - RNA, 16 nt, Molluscum contagiosum virus
gccgcacgugcugcgc

SEQ ID NO: 228170 - RNA, 16 nt, Molluscum contagiosum virus
gccgcagcccacgugc

SEQ ID NO: 228171 - RNA, 15 nt, Molluscum contagiosum virus
gccgccaugcugcgc

SEQ ID NO: 228172 - RNA, 18 nt, Molluscum contagiosum virus
gccgccgugugcacauug

SEQ ID NO: 228173 - RNA, 20 nt, Molluscum contagiosum virus
gccgccuggccgaacugcuc

SEQ ID NO: 228174 - RNA, 18 nt, Molluscum contagiosum virus
gccgcgcaauacggugga

SEQ ID NO: 228175 - RNA, 18 nt, Molluscum contagiosum virus
gccuacagcgcgcugcac

SEQ ID NO: 228176 - RNA, 19 nt, Molluscum contagiosum virus
gccguucguuguccuugcc

SEQ ID NO: 228177 - RNA, 11 nt, Molluscum contagiosum virus
gccgugcugcg

SEQ ID NO: 228178 - RNA, 13 nt, Molluscum contagiosum virus
gccguggaugaac

SEQ ID NO: 228179 - RNA, 15 nt, Molluscum contagiosum virus
gccgugugcacauug

SEQ ID NO: 228180 - RNA, 13 nt, Molluscum contagiosum virus
gccuagccugcag

SEQ ID NO: 228181 - RNA, 14 nt, Molluscum contagiosum virus
gccuacgugcugcg

SEQ ID NO: 228182 - RNA, 20 nt, Molluscum contagiosum virus
gccuguaguagcagcuucuu

SEQ ID NO: 228183 - RNA, 14 nt, Molluscum contagiosum virus
gccuguaaauggac

SEQ ID NO: 228184 - RNA, 23 nt, Molluscum contagiosum virus
gccuguaaauggaccacaagcag

SEQ ID NO: 228185 - RNA, 18 nt, Molluscum contagiosum virus
gccuccgagcgcgcgugc

SEQ ID NO: 228186 - RNA, 12 nt, Molluscum contagiosum virus
gccuccaagaag

SEQ ID NO: 228187 - RNA, 19 nt, Molluscum contagiosum virus
gccucaaccugaacaucuu

SEQ ID NO: 228188 - RNA, 21 nt, Molluscum contagiosum virus
gccuccagcagcggcgcgugc

SEQ ID NO: 228189 - RNA, 14 nt, Molluscum contagiosum virus
gcuccuucucaggg

SEQ ID NO: 228190 - RNA, 18 nt, Molluscum contagiosum virus
gcuccuucuucaaguacc

SEQ ID NO: 228191 - RNA, 20 nt, Molluscum contagiosum virus
gcuccuucuucaaguaccug

SEQ ID NO: 228192 - RNA, 22 nt, Molluscum contagiosum virus
gcuccuucuucaaguaccuguc

SEQ ID NO: 228193 - RNA, 18 nt, Molluscum contagiosum virus
gcucgacguguuuuaccc

SEQ ID NO: 228194 - RNA, 22 nt, Molluscum contagiosum virus
gcucgaaaaaguucuuggugga

SEQ ID NO: 228195 - RNA, 11 nt, Molluscum contagiosum virus
gcucccgcugu

SEQ ID NO: 228196 - RNA, 13 nt, Molluscum contagiosum virus
gcuccgcacgugg

SEQ ID NO: 228197 - RNA, 14 nt, Molluscum contagiosum virus
gcuccgcacgugga

SEQ ID NO: 228198 - RNA, 15 nt, Molluscum contagiosum virus
gcuccgccgggaaua

SEQ ID NO: 228199 - RNA, 23 nt, Molluscum contagiosum virus
gcuccgccgggaauaccggagac

SEQ ID NO: 228200 - RNA, 12 nt, Molluscum contagiosum virus
gcuccaugacag

SEQ ID NO: 228201 - RNA, 16 nt, Molluscum contagiosum virus
gcucggacacacgcac

SEQ ID NO: 228202 - RNA, 22 nt, Molluscum contagiosum virus
gcucggacacacgcacccaaau

SEQ ID NO: 228203 - RNA, 17 nt, Molluscum contagiosum virus
gcucggaggcuugcccc

SEQ ID NO: 228204 - RNA, 15 nt, Molluscum contagiosum virus
gcucgggaacaaagg

SEQ ID NO: 228205 - RNA, 19 nt, Molluscum contagiosum virus
gcucgggcuagcaagcacg

SEQ ID NO: 228206 - RNA, 21 nt, Molluscum contagiosum virus
gcucgagggcgccgugcugcg

SEQ ID NO: 228207 - RNA, 14 nt, Molluscum contagiosum virus
gcucgcaaacacaa

SEQ ID NO: 228208 - RNA, 18 nt, Molluscum contagiosum virus
gcucgacucggaugcgcu

SEQ ID NO: 228209 - RNA, 20 nt, Molluscum contagiosum virus
gcucgacucggaugcgcugc

SEQ ID NO: 228210 - RNA, 14 nt, Molluscum contagiosum virus
gcucgccuuucccc

SEQ ID NO: 228211 - RNA, 16 nt, Molluscum contagiosum virus
gcucgcggugcagcug

SEQ ID NO: 228212 - RNA, 18 nt, Molluscum contagiosum virus
gcucgguacaacuuuucc

SEQ ID NO: 228213 - RNA, 18 nt, Molluscum contagiosum virus
gcucgcgugcgugcugcg

SEQ ID NO: 228214 - RNA, 14 nt, Molluscum contagiosum virus
gcucgcgugcuagg

SEQ ID NO: 228215 - RNA, 23 nt, Molluscum contagiosum virus
gcugccgcuucgugcgcggagac

SEQ ID NO: 228216 - RNA, 22 nt, Molluscum contagiosum virus
gcugcccgugcccgaguuugcc

SEQ ID NO: 228217 - RNA, 20 nt, Molluscum contagiosum virus
gcuggagaucgacaagauca

SEQ ID NO: 228218 - RNA, 22 nt, Molluscum contagiosum virus
gcuggagaacggcgugcgagug

SEQ ID NO: 228219 - RNA, 16 nt, Molluscum contagiosum virus
gcuggagacggcagug

SEQ ID NO: 228220 - RNA, 12 nt, Molluscum contagiosum virus
gcuggagggcac

SEQ ID NO: 228221 - RNA, 13 nt, Molluscum contagiosum virus
gcuggcacggccg

SEQ ID NO: 228222 - RNA, 13 nt, Molluscum contagiosum virus
gcuggacacucgc

SEQ ID NO: 228223 - RNA, 13 nt, Molluscum contagiosum virus
gcugcugcacagc

SEQ ID NO: 228224 - RNA, 19 nt, Molluscum contagiosum virus
gcugcugcagaacugccug

SEQ ID NO: 228225 - RNA, 23 nt, Molluscum contagiosum virus
gcugcugcagaacugccugguca

SEQ ID NO: 228226 - RNA, 20 nt, Molluscum contagiosum virus
gcugcucaaggacuaccagc

SEQ ID NO: 228227 - RNA, 17 nt, Molluscum contagiosum virus
gcugcuccccgccagca

SEQ ID NO: 228228 - RNA, 15 nt, Molluscum contagiosum virus
gcugcucuacuucca

SEQ ID NO: 228229 - RNA, 18 nt, Molluscum contagiosum virus
gcugcucuccgaagaaga

SEQ ID NO: 228230 - RNA, 15 nt, Molluscum contagiosum virus
gcugcgccacugcca

SEQ ID NO: 228231 - RNA, 21 nt, Molluscum contagiosum virus
gcugcgcgcgcucauggcgcg

SEQ ID NO: 228232 - RNA, 13 nt, Molluscum contagiosum virus
gcugcgcuucuau

SEQ ID NO: 228233 - RNA, 17 nt, Molluscum contagiosum virus
gcugcgcuugcgcguga

SEQ ID NO: 228234 - RNA, 16 nt, Molluscum contagiosum virus
gcugcggacaagacaa

SEQ ID NO: 228235 - RNA, 15 nt, Molluscum contagiosum virus
gcugcgcuaccacga

SEQ ID NO: 228236 - RNA, 17 nt, Molluscum contagiosum virus
gcugcgucacaagcacc

SEQ ID NO: 228237 - RNA, 21 nt, Molluscum contagiosum virus
gcugcgguaucuacacuccgu

SEQ ID NO: 228238 - RNA, 12 nt, Molluscum contagiosum virus
gcucacaucugu

SEQ ID NO: 228239 - RNA, 21 nt, Molluscum contagiosum virus
gcucaccgccgagauggagcu

SEQ ID NO: 228240 - RNA, 19 nt, Molluscum contagiosum virus
gcucagaacgacaccgcga

SEQ ID NO: 228241 - RNA, 17 nt, Molluscum contagiosum virus
gcucaucggcgagcucu

SEQ ID NO: 228242 - RNA, 19 nt, Molluscum contagiosum virus
gcucaucggcgagcucuuu

SEQ ID NO: 228243 - RNA, 20 nt, Molluscum contagiosum virus
gcucaaccaguacuucaucu

SEQ ID NO: 228244 - RNA, 18 nt, Molluscum contagiosum virus
gcucaagcaccugcgcuu

SEQ ID NO: 228245 - RNA, 16 nt, Molluscum contagiosum virus
gcucaagcuggcaacg

SEQ ID NO: 228246 - RNA, 23 nt, Molluscum contagiosum virus
gcuacgugcgcaccaucuucaac

SEQ ID NO: 228247 - RNA, 18 nt, Molluscum contagiosum virus
gcuacgacgacaugcaca

SEQ ID NO: 228248 - RNA, 19 nt, Molluscum contagiosum virus
gcuacgaggccuacgugcu

SEQ ID NO: 228249 - RNA, 14 nt, Molluscum contagiosum virus
gcuacgcgagcacu

SEQ ID NO: 228250 - RNA, 16 nt, Molluscum contagiosum virus
gcuacgcgagcacugc

SEQ ID NO: 228251 - RNA, 17 nt, Molluscum contagiosum virus
gcuacgcgagcacugcg

SEQ ID NO: 228252 - RNA, 19 nt, Molluscum contagiosum virus
gcuaacuauguucuucgca

SEQ ID NO: 228253 - RNA, 23 nt, Molluscum contagiosum virus
gcguuugauacaguacgacaaag

SEQ ID NO: 228254 - RNA, 15 nt, Molluscum contagiosum virus
gcguuucucagguac

SEQ ID NO: 228255 - RNA, 12 nt, Molluscum contagiosum virus
gcguuccaggaa

SEQ ID NO: 228256 - RNA, 17 nt, Molluscum contagiosum virus
gcguucgcuacuucaca

SEQ ID NO: 228257 - RNA, 15 nt, Molluscum contagiosum virus
gcguucuccaggaac

SEQ ID NO: 228258 - RNA, 19 nt, Molluscum contagiosum virus
gcuaaguuccgaacaguac

SEQ ID NO: 228259 - RNA, 14 nt, Molluscum contagiosum virus
gcuacaugcacaga

SEQ ID NO: 228260 - RNA, 18 nt, Molluscum contagiosum virus
gcuaccaagaacagagaa

SEQ ID NO: 228261 - RNA, 15 nt, Molluscum contagiosum virus
gcuaccgcaagcuca

SEQ ID NO: 228262 - RNA, 20 nt, Molluscum contagiosum virus
gcuaccacgagcacugccug

SEQ ID NO: 228263 - RNA, 20 nt, Molluscum contagiosum virus
gcuacccguugcugcgccac

SEQ ID NO: 228264 - RNA, 19 nt, Molluscum contagiosum virus
gcuaccugguggagcacuu

SEQ ID NO: 228265 - RNA, 23 nt, Molluscum contagiosum virus
gcuaccuaccggcagcaugcuca

SEQ ID NO: 228266 - RNA, 15 nt, Molluscum contagiosum virus
gcuaccugaugcgca

SEQ ID NO: 228267 - RNA, 16 nt, Molluscum contagiosum virus
gccuugauucggccaa

SEQ ID NO: 228268 - RNA, 22 nt, Molluscum contagiosum virus
gccuugccgaggaggugcucug

SEQ ID NO: 228269 - RNA, 23 nt, Molluscum contagiosum virus
gccugucggcacaucucucaggg

SEQ ID NO: 228270 - RNA, 16 nt, Molluscum contagiosum virus
gccugugcccaguuau

SEQ ID NO: 228271 - RNA, 19 nt, Molluscum contagiosum virus
gccugugcgccaacaacca

SEQ ID NO: 228272 - RNA, 21 nt, Molluscum contagiosum virus
gccugugcuacgcgagcacug

SEQ ID NO: 228273 - RNA, 14 nt, Molluscum contagiosum virus
gccugugcuggcga

SEQ ID NO: 228274 - RNA, 14 nt, Molluscum contagiosum virus
gcgcgcgugcugcu

SEQ ID NO: 228275 - RNA, 14 nt, Molluscum contagiosum virus
gcgcgcgugcuguc

SEQ ID NO: 228276 - RNA, 15 nt, Molluscum contagiosum virus
gcgcgcguugccuga

SEQ ID NO: 228277 - RNA, 12 nt, Molluscum contagiosum virus
gccuuguucaca

SEQ ID NO: 228278 - RNA, 14 nt, Molluscum contagiosum virus
gcgcgugagccaau

SEQ ID NO: 228279 - RNA, 14 nt, Molluscum contagiosum virus
gcgcgugcucuuuc

SEQ ID NO: 228280 - RNA, 14 nt, Molluscum contagiosum virus
gcgcguaaaagacu

SEQ ID NO: 228281 - RNA, 15 nt, Molluscum contagiosum virus
gcgcguaagaccaug

SEQ ID NO: 228282 - RNA, 16 nt, Molluscum contagiosum virus
gcgcguccgcaaagac

SEQ ID NO: 228283 - RNA, 22 nt, Molluscum contagiosum virus
gcgcggccguggcaaacaggca

SEQ ID NO: 228284 - RNA, 15 nt, Molluscum contagiosum virus
gcgcggcgcacaauc

SEQ ID NO: 228285 - RNA, 14 nt, Molluscum contagiosum virus
gcgcggcgcagugc

SEQ ID NO: 228286 - RNA, 15 nt, Molluscum contagiosum virus
gcgcggaagaagcug

SEQ ID NO: 228287 - RNA, 19 nt, Molluscum contagiosum virus
gcggacgaagcugugcaag

SEQ ID NO: 228288 - RNA, 17 nt, Molluscum contagiosum virus
gcggacgcguagcacga

SEQ ID NO: 228289 - RNA, 13 nt, Molluscum contagiosum virus
gcggacaagacaa

SEQ ID NO: 228290 - RNA, 14 nt, Molluscum contagiosum virus
gcggaaguggugcc

SEQ ID NO: 228291 - RNA, 14 nt, Molluscum contagiosum virus
gcggagcucgccaa

SEQ ID NO: 228292 - RNA, 19 nt, Molluscum contagiosum virus
gcggagcugugccgcagca

SEQ ID NO: 228293 - RNA, 19 nt, Molluscum contagiosum virus
gcggcauggaaagcuucuc

SEQ ID NO: 228294 - RNA, 23 nt, Molluscum contagiosum virus
gcggauguccuugaugccguggu

SEQ ID NO: 228295 - RNA, 16 nt, Molluscum contagiosum virus
gcggcacacacuugca

SEQ ID NO: 228296 - RNA, 18 nt, Molluscum contagiosum virus
gcggcacaugcagcugca

SEQ ID NO: 228297 - RNA, 23 nt, Molluscum contagiosum virus
gcgcgugucuacccggcacgugc

SEQ ID NO: 228298 - RNA, 16 nt, Molluscum contagiosum virus
gcgcguucgcaaagac

SEQ ID NO: 228299 - RNA, 19 nt, Molluscum contagiosum virus
gcgcuacgacgacaugcac

SEQ ID NO: 228300 - RNA, 13 nt, Molluscum contagiosum virus
gcgcuacuugcug

SEQ ID NO: 228301 - RNA, 19 nt, Molluscum contagiosum virus
gcgcuaguggcaagggccu

SEQ ID NO: 228302 - RNA, 18 nt, Molluscum contagiosum virus
gcgcuccgacgcgguggu

SEQ ID NO: 228303 - RNA, 17 nt, Molluscum contagiosum virus
gcgcucggcguggugcu

SEQ ID NO: 228304 - RNA, 19 nt, Molluscum contagiosum virus
gcgcucuucguggugcuca

SEQ ID NO: 228305 - RNA, 22 nt, Molluscum contagiosum virus
gcgcugcaaccucgacauuucg

SEQ ID NO: 228306 - RNA, 13 nt, Molluscum contagiosum virus
gcgcugcacaguu

SEQ ID NO: 228307 - RNA, 22 nt, Molluscum contagiosum virus
gcgcuguauucggcguacgugc

SEQ ID NO: 228308 - RNA, 20 nt, Molluscum contagiosum virus
gcgcugguuaccaagggcau

SEQ ID NO: 228309 - RNA, 12 nt, Molluscum contagiosum virus
gcgcuugcucac

SEQ ID NO: 228310 - RNA, 15 nt, Molluscum contagiosum virus
gcgcuugggcacugc

SEQ ID NO: 228311 - RNA, 15 nt, Molluscum contagiosum virus
gcggaaacaagcaca

SEQ ID NO: 228312 - RNA, 22 nt, Molluscum contagiosum virus
gcgcuggagacggcaguguccu

SEQ ID NO: 228313 - RNA, 16 nt, Molluscum contagiosum virus
gcgcuggaugcugcuc

SEQ ID NO: 228314 - RNA, 14 nt, Molluscum contagiosum virus
gcgcuggcccgugc

SEQ ID NO: 228315 - RNA, 14 nt, Molluscum contagiosum virus
gcgggagagcacuu

SEQ ID NO: 228316 - RNA, 21 nt, Molluscum contagiosum virus
gcgggccaugucugugcgcga

SEQ ID NO: 228317 - RNA, 22 nt, Molluscum contagiosum virus
gcgggcacggguguacaaagag

SEQ ID NO: 228318 - RNA, 12 nt, Molluscum contagiosum virus
gcggcgcagugc

SEQ ID NO: 228319 - RNA, 13 nt, Molluscum contagiosum virus
gcggcgcugcuac

SEQ ID NO: 228320 - RNA, 20 nt, Molluscum contagiosum virus
gcggccccgggcugcacgac

SEQ ID NO: 228321 - RNA, 18 nt, Molluscum contagiosum virus
gcggccgccgugugcaca

SEQ ID NO: 228322 - RNA, 12 nt, Molluscum contagiosum virus
gcguaagaccau

SEQ ID NO: 228323 - RNA, 13 nt, Molluscum contagiosum virus
gcggugcgcacau

SEQ ID NO: 228324 - RNA, 19 nt, Molluscum contagiosum virus
gcggugcgggcgcgagcga

SEQ ID NO: 228325 - RNA, 21 nt, Molluscum contagiosum virus
gcggucucggcagcagcgugc

SEQ ID NO: 228326 - RNA, 12 nt, Molluscum contagiosum virus
gcggucuuccag

SEQ ID NO: 228327 - RNA, 18 nt, Molluscum contagiosum virus
gcggggcaggcagugccg

SEQ ID NO: 228328 - RNA, 13 nt, Molluscum contagiosum virus
gcguccacaaaga

SEQ ID NO: 228329 - RNA, 22 nt, Molluscum contagiosum virus
gcguccgcccuuacgacaagcg

SEQ ID NO: 228330 - RNA, 16 nt, Molluscum contagiosum virus
gcguacauaaaaugga

SEQ ID NO: 228331 - RNA, 11 nt, Molluscum contagiosum virus
gcguaccagcg

SEQ ID NO: 228332 - RNA, 22 nt, Molluscum contagiosum virus
gcguacgcacgugccgugcugu

SEQ ID NO: 228333 - RNA, 16 nt, Molluscum contagiosum virus
gcguacgugcacgugg

SEQ ID NO: 228334 - RNA, 17 nt, Molluscum contagiosum virus
gcguacguguccaugca

SEQ ID NO: 228335 - RNA, 22 nt, Molluscum contagiosum virus
gcguacucgugucacaauggca

SEQ ID NO: 228336 - RNA, 13 nt, Molluscum contagiosum virus
gcguacuuggaag

SEQ ID NO: 228337 - RNA, 14 nt, Molluscum contagiosum virus
gcgucuuacugcug

SEQ ID NO: 228338 - RNA, 18 nt, Molluscum contagiosum virus
gcgugacagguccggugu

SEQ ID NO: 228339 - RNA, 17 nt, Molluscum contagiosum virus
gcgugacccucuucgac

SEQ ID NO: 228340 - RNA, 19 nt, Molluscum contagiosum virus
gcgugagcgccuaccgcaa

SEQ ID NO: 228341 - RNA, 21 nt, Molluscum contagiosum virus
gcgugaggaggcggcacugcu

SEQ ID NO: 228342 - RNA, 23 nt, Molluscum contagiosum virus
gcgugaggaggcggcacugcuag

SEQ ID NO: 228343 - RNA, 21 nt, Molluscum contagiosum virus
gcgucucaagacaagucacac

SEQ ID NO: 228344 - RNA, 15 nt, Molluscum contagiosum virus
gcgucgcgcacagaa

SEQ ID NO: 228345 - RNA, 16 nt, Molluscum contagiosum virus
gcgugcugucagugga

SEQ ID NO: 228346 - RNA, 16 nt, Molluscum contagiosum virus
gcgugccuuguucuga

SEQ ID NO: 228347 - RNA, 20 nt, Molluscum contagiosum virus
gcgugcguacgugcacgugg

SEQ ID NO: 228348 - RNA, 14 nt, Molluscum contagiosum virus
gcgugcgugcugcg

SEQ ID NO: 228349 - RNA, 11 nt, Molluscum contagiosum virus
gcguggcgcgc

SEQ ID NO: 228350 - RNA, 19 nt, Molluscum contagiosum virus
gcguggacaacagcacgac

SEQ ID NO: 228351 - RNA, 17 nt, Molluscum contagiosum virus
gcgugugguugcuugca

SEQ ID NO: 228352 - RNA, 15 nt, Molluscum contagiosum virus
ggagacauauguucu

SEQ ID NO: 228353 - RNA, 19 nt, Molluscum contagiosum virus
ggagaccuggucacacugg

SEQ ID NO: 228354 - RNA, 20 nt, Molluscum contagiosum virus
ggagaccuggucacacuggu

SEQ ID NO: 228355 - RNA, 22 nt, Molluscum contagiosum virus
ggagaagugcuccgcacgugga

SEQ ID NO: 228356 - RNA, 12 nt, Molluscum contagiosum virus
ggagacaccagc

SEQ ID NO: 228357 - RNA, 16 nt, Molluscum contagiosum virus
ggagauggaacugcag

SEQ ID NO: 228358 - RNA, 16 nt, Molluscum contagiosum virus
ggagauggacacagca

SEQ ID NO: 228359 - RNA, 23 nt, Molluscum contagiosum virus
ggagcucacggcuguggacauga

SEQ ID NO: 228360 - RNA, 19 nt, Molluscum contagiosum virus
ggagcuggccacucucgcg

SEQ ID NO: 228361 - RNA, 17 nt, Molluscum contagiosum virus
ggagcugugccgcagca

SEQ ID NO: 228362 - RNA, 17 nt, Molluscum contagiosum virus
ggaguaccggcucaaga

SEQ ID NO: 228363 - RNA, 16 nt, Molluscum contagiosum virus
ggagggcagugccaag

SEQ ID NO: 228364 - RNA, 15 nt, Molluscum contagiosum virus
ggauagccccucgag

SEQ ID NO: 228365 - RNA, 12 nt, Molluscum contagiosum virus
ggauacuguugg

SEQ ID NO: 228366 - RNA, 15 nt, Molluscum contagiosum virus
gcuugcauguucucu

SEQ ID NO: 228367 - RNA, 23 nt, Molluscum contagiosum virus
gcuugcccgaccuuggugcucau

SEQ ID NO: 228368 - RNA, 22 nt, Molluscum contagiosum virus
gcuugccggcggcgcaagcacc

SEQ ID NO: 228369 - RNA, 12 nt, Molluscum contagiosum virus
ggacuucuugcg

SEQ ID NO: 228370 - RNA, 12 nt, Molluscum contagiosum virus
gcuucuagcucg

SEQ ID NO: 228371 - RNA, 16 nt, Molluscum contagiosum virus
gcuucgcguacauccc

SEQ ID NO: 228372 - RNA, 18 nt, Molluscum contagiosum virus
gcuuccucuacaccagcu

SEQ ID NO: 228373 - RNA, 22 nt, Molluscum contagiosum virus
gcuucgacuucuccgcgcugca

SEQ ID NO: 228374 - RNA, 17 nt, Molluscum contagiosum virus
gcuucuuggagcccuug

SEQ ID NO: 228375 - RNA, 15 nt, Molluscum contagiosum virus
gcuggccgagcguga

SEQ ID NO: 228376 - RNA, 15 nt, Molluscum contagiosum virus
gcuggcccacgcugg

SEQ ID NO: 228377 - RNA, 17 nt, Molluscum contagiosum virus
gcuggcccgugcacguc

SEQ ID NO: 228378 - RNA, 17 nt, Molluscum contagiosum virus
gcuggcggcgcacgcga

SEQ ID NO: 228379 - RNA, 18 nt, Molluscum contagiosum virus
gcuggcggggcuggcaga

SEQ ID NO: 228380 - RNA, 18 nt, Molluscum contagiosum virus
gcuggcgugcgcagugcu

SEQ ID NO: 228381 - RNA, 15 nt, Molluscum contagiosum virus
gcuggcgcgcggaga

SEQ ID NO: 228382 - RNA, 21 nt, Molluscum contagiosum virus
gcuggcgcucggcguggugcu

SEQ ID NO: 228383 - RNA, 12 nt, Molluscum contagiosum virus
gcugguggugcu

SEQ ID NO: 228384 - RNA, 18 nt, Molluscum contagiosum virus
gcuggugaucacgcacga

SEQ ID NO: 228385 - RNA, 15 nt, Molluscum contagiosum virus
gcugggcguggcgca

SEQ ID NO: 228386 - RNA, 14 nt, Molluscum contagiosum virus
gcugggcgugggca

SEQ ID NO: 228387 - RNA, 13 nt, Molluscum contagiosum virus
gcuguacaugccg

SEQ ID NO: 228388 - RNA, 13 nt, Molluscum contagiosum virus
gcugguucugcuc

SEQ ID NO: 228389 - RNA, 14 nt, Molluscum contagiosum virus
gcugguuugcgcga

SEQ ID NO: 228390 - RNA, 17 nt, Molluscum contagiosum virus
gcuucaucaagcacggc

SEQ ID NO: 228391 - RNA, 22 nt, Molluscum contagiosum virus
gcuucauggaggccaacuaccu

SEQ ID NO: 228392 - RNA, 18 nt, Molluscum contagiosum virus
gcuucacgcugcucgugc

SEQ ID NO: 228393 - RNA, 22 nt, Molluscum contagiosum virus
gcuucacgcugcucgugcugcu

SEQ ID NO: 228394 - RNA, 16 nt, Molluscum contagiosum virus
ggccgaggucuuccac

SEQ ID NO: 228395 - RNA, 21 nt, Molluscum contagiosum virus
ggccgcccacgcucaaccagu

SEQ ID NO: 228396 - RNA, 18 nt, Molluscum contagiosum virus
ggccgcgcccaagaagaa

SEQ ID NO: 228397 - RNA, 18 nt, Molluscum contagiosum virus
ggccgcgcccacgggcuu

SEQ ID NO: 228398 - RNA, 18 nt, Molluscum contagiosum virus
ggcccgaagccguagucu

SEQ ID NO: 228399 - RNA, 14 nt, Molluscum contagiosum virus
ggcccgcaaacacg

SEQ ID NO: 228400 - RNA, 17 nt, Molluscum contagiosum virus
ggcccuaaauaaugaac

SEQ ID NO: 228401 - RNA, 19 nt, Molluscum contagiosum virus
ggccccccgcaacaaggaa

SEQ ID NO: 228402 - RNA, 14 nt, Molluscum contagiosum virus
ggcaccugcaggaa

SEQ ID NO: 228403 - RNA, 13 nt, Molluscum contagiosum virus
ggcccaugcucac

SEQ ID NO: 228404 - RNA, 13 nt, Molluscum contagiosum virus
ggccccagcaaca

SEQ ID NO: 228405 - RNA, 20 nt, Molluscum contagiosum virus
ggcaccggcgcucacugcga

SEQ ID NO: 228406 - RNA, 15 nt, Molluscum contagiosum virus
ggcacccaccaggaa

SEQ ID NO: 228407 - RNA, 22 nt, Molluscum contagiosum virus
ggcacccaccaggaacagggaa

SEQ ID NO: 228408 - RNA, 18 nt, Molluscum contagiosum virus
ggaucgcgcgcaccugca

SEQ ID NO: 228409 - RNA, 22 nt, Molluscum contagiosum virus
ggcacaccccuguaacaaggaa

SEQ ID NO: 228410 - RNA, 12 nt, Molluscum contagiosum virus
ggcacacgcagu

SEQ ID NO: 228411 - RNA, 14 nt, Molluscum contagiosum virus
ggcacacacuugca

SEQ ID NO: 228412 - RNA, 12 nt, Molluscum contagiosum virus
ggcaacgcugcc

SEQ ID NO: 228413 - RNA, 22 nt, Molluscum contagiosum virus
ggcaacuggcuuuucaugugcg

SEQ ID NO: 228414 - RNA, 15 nt, Molluscum contagiosum virus
ggcaagaaacgggag

SEQ ID NO: 228415 - RNA, 18 nt, Molluscum contagiosum virus
ggcaagaacgacugcuac

SEQ ID NO: 228416 - RNA, 18 nt, Molluscum contagiosum virus
ggcaaggacaucuacauc

SEQ ID NO: 228417 - RNA, 23 nt, Molluscum contagiosum virus
ggcaagggccugcgggcggcaca

SEQ ID NO: 228418 - RNA, 18 nt, Molluscum contagiosum virus
ggcuagugccauugugac

SEQ ID NO: 228419 - RNA, 17 nt, Molluscum contagiosum virus
ggcuaccacgagcacug

SEQ ID NO: 228420 - RNA, 16 nt, Molluscum contagiosum virus
ggcuagcgcugcucua

SEQ ID NO: 228421 - RNA, 17 nt, Molluscum contagiosum virus
ggcuagcgcugcucuac

SEQ ID NO: 228422 - RNA, 14 nt, Molluscum contagiosum virus
ggcguucgcagugc

SEQ ID NO: 228423 - RNA, 15 nt, Molluscum contagiosum virus
ggcguuggcuuucug

SEQ ID NO: 228424 - RNA, 17 nt, Molluscum contagiosum virus
ggcguuggucuugugac

SEQ ID NO: 228425 - RNA, 20 nt, Molluscum contagiosum virus
ggcgugcccaaccuacgcua

SEQ ID NO: 228426 - RNA, 14 nt, Molluscum contagiosum virus
ggcgugcgccgugc

SEQ ID NO: 228427 - RNA, 16 nt, Molluscum contagiosum virus
ggcguggcgcaccugc

SEQ ID NO: 228428 - RNA, 17 nt, Molluscum contagiosum virus
ggcuucuccaccuucag

SEQ ID NO: 228429 - RNA, 17 nt, Molluscum contagiosum virus
ggcuaugaggaggccaa

SEQ ID NO: 228430 - RNA, 13 nt, Molluscum contagiosum virus
ggcggugagcgcc

SEQ ID NO: 228431 - RNA, 18 nt, Molluscum contagiosum virus
ggcguaagagcgugaaca

SEQ ID NO: 228432 - RNA, 14 nt, Molluscum contagiosum virus
ggcgucaagacucg

SEQ ID NO: 228433 - RNA, 17 nt, Molluscum contagiosum virus
ggcguacucgugucaca

SEQ ID NO: 228434 - RNA, 18 nt, Molluscum contagiosum virus
ggcguacucgugucacaa

SEQ ID NO: 228435 - RNA, 19 nt, Molluscum contagiosum virus
ggcguacucgugucacaau

SEQ ID NO: 228436 - RNA, 23 nt, Molluscum contagiosum virus
ggcggccccugccuuugccaaga

SEQ ID NO: 228437 - RNA, 13 nt, Molluscum contagiosum virus
ggcggcacugcua

SEQ ID NO: 228438 - RNA, 15 nt, Molluscum contagiosum virus
ggcggcuggaccugc

SEQ ID NO: 228439 - RNA, 21 nt, Molluscum contagiosum virus
ggcggccguguccuacacgcc

SEQ ID NO: 228440 - RNA, 20 nt, Molluscum contagiosum virus
ggcgcgugccagucgcgcga

SEQ ID NO: 228441 - RNA, 22 nt, Molluscum contagiosum virus
ggcgcgugccagucgcgcgaga

SEQ ID NO: 228442 - RNA, 17 nt, Molluscum contagiosum virus
ggcgcuagugcagauga

SEQ ID NO: 228443 - RNA, 13 nt, Molluscum contagiosum virus
ggcgcgccauggc

SEQ ID NO: 228444 - RNA, 23 nt, Molluscum contagiosum virus
ggcgcgcccggcgcccgcagcgc

SEQ ID NO: 228445 - RNA, 20 nt, Molluscum contagiosum virus
ggcgcgcgacgacguugugc

SEQ ID NO: 228446 - RNA, 18 nt, Molluscum contagiosum virus
ggcgcucggcguggugcu

SEQ ID NO: 228447 - RNA, 21 nt, Molluscum contagiosum virus
ggcgcugcugcccggcagcga

SEQ ID NO: 228448 - RNA, 19 nt, Molluscum contagiosum virus
ggcgcuugggcacugcuac

SEQ ID NO: 228449 - RNA, 23 nt, Molluscum contagiosum virus
ggcgcaaccgcgugcgugcacag

SEQ ID NO: 228450 - RNA, 15 nt, Molluscum contagiosum virus
ggcgcacgcuugucc

SEQ ID NO: 228451 - RNA, 17 nt, Molluscum contagiosum virus
ggcgcagucccuuguca

SEQ ID NO: 228452 - RNA, 21 nt, Molluscum contagiosum virus
ggcgccaucgagaugcucaag

SEQ ID NO: 228453 - RNA, 18 nt, Molluscum contagiosum virus
ggcgccccuccuaucuca

SEQ ID NO: 228454 - RNA, 12 nt, Molluscum contagiosum virus
ggcgcagcacuu

SEQ ID NO: 228455 - RNA, 23 nt, Molluscum contagiosum virus
ggcgccgacaacgugcugcucaa

SEQ ID NO: 228456 - RNA, 23 nt, Molluscum contagiosum virus
ggcgccgccaaccgagcuugcca

SEQ ID NO: 228457 - RNA, 20 nt, Molluscum contagiosum virus
gguagacgacgaugcaaaca

SEQ ID NO: 228458 - RNA, 17 nt, Molluscum contagiosum virus
gguacugccgccaggaa

SEQ ID NO: 228459 - RNA, 22 nt, Molluscum contagiosum virus
gguacugcggacaccagaaccu

SEQ ID NO: 228460 - RNA, 15 nt, Molluscum contagiosum virus
ggucaagaacaugug

SEQ ID NO: 228461 - RNA, 18 nt, Molluscum contagiosum virus
ggucaagaacaugugcuc

SEQ ID NO: 228462 - RNA, 19 nt, Molluscum contagiosum virus
gguaguccugcuagcguga

SEQ ID NO: 228463 - RNA, 21 nt, Molluscum contagiosum virus
gguaguugcgagccagccagg

SEQ ID NO: 228464 - RNA, 14 nt, Molluscum contagiosum virus
gggacagacaucac

SEQ ID NO: 228465 - RNA, 18 nt, Molluscum contagiosum virus
ggcuugccgcucggcaca

SEQ ID NO: 228466 - RNA, 21 nt, Molluscum contagiosum virus
gggaacucggcuucugcugca

SEQ ID NO: 228467 - RNA, 14 nt, Molluscum contagiosum virus
gggaaagggcugcu

SEQ ID NO: 228468 - RNA, 21 nt, Molluscum contagiosum virus
gggaauaccggagacaccagc

SEQ ID NO: 228469 - RNA, 18 nt, Molluscum contagiosum virus
gggaauggggauguggac

SEQ ID NO: 228470 - RNA, 12 nt, Molluscum contagiosum virus
gggaagcacagu

SEQ ID NO: 228471 - RNA, 13 nt, Molluscum contagiosum virus
gggaagcacaguc

SEQ ID NO: 228472 - RNA, 14 nt, Molluscum contagiosum virus
gggaagcacguagc

SEQ ID NO: 228473 - RNA, 18 nt, Molluscum contagiosum virus
gggaagcugcacgugcag

SEQ ID NO: 228474 - RNA, 16 nt, Molluscum contagiosum virus
ggugcacggugaucau

SEQ ID NO: 228475 - RNA, 15 nt, Molluscum contagiosum virus
ggugcacgugcugca

SEQ ID NO: 228476 - RNA, 21 nt, Molluscum contagiosum virus
ggugcagccgcugcugcugca

SEQ ID NO: 228477 - RNA, 21 nt, Molluscum contagiosum virus
ggugagcucgccaauggagcc

SEQ ID NO: 228478 - RNA, 17 nt, Molluscum contagiosum virus
ggugcgcgcaacacugc

SEQ ID NO: 228479 - RNA, 16 nt, Molluscum contagiosum virus
ggucaucgggcugcag

SEQ ID NO: 228480 - RNA, 20 nt, Molluscum contagiosum virus
ggucaaucccacguacgagc

SEQ ID NO: 228481 - RNA, 12 nt, Molluscum contagiosum virus
ggucacacuggu

SEQ ID NO: 228482 - RNA, 21 nt, Molluscum contagiosum virus
gguccaguauuucaaugcagu

SEQ ID NO: 228483 - RNA, 18 nt, Molluscum contagiosum virus
ggucgcguccacgcagga

SEQ ID NO: 228484 - RNA, 16 nt, Molluscum contagiosum virus
ggucuacaacgagcuc

SEQ ID NO: 228485 - RNA, 17 nt, Molluscum contagiosum virus
guaagcccgcuaugaac

SEQ ID NO: 228486 - RNA, 18 nt, Molluscum contagiosum virus
guaauaguacacuuugag

SEQ ID NO: 228487 - RNA, 17 nt, Molluscum contagiosum virus
guaagucgaagaggguc

SEQ ID NO: 228488 - RNA, 20 nt, Molluscum contagiosum virus
guaacagcgcgcgacugucu

SEQ ID NO: 228489 - RNA, 23 nt, Molluscum contagiosum virus
guaacagcgcgcgacugucuuga

SEQ ID NO: 228490 - RNA, 23 nt, Molluscum contagiosum virus
guaacaauggacacgcacuggcg

SEQ ID NO: 228491 - RNA, 20 nt, Molluscum contagiosum virus
guaaagagcguccagccgca

SEQ ID NO: 228492 - RNA, 13 nt, Molluscum contagiosum virus
guaaacgcgguga

SEQ ID NO: 228493 - RNA, 15 nt, Molluscum contagiosum virus
gguguugaccaaagg

SEQ ID NO: 228494 - RNA, 15 nt, Molluscum contagiosum virus
ggugugcacaugccc

SEQ ID NO: 228495 - RNA, 17 nt, Molluscum contagiosum virus
gguugugcuuguucucu

SEQ ID NO: 228496 - RNA, 14 nt, Molluscum contagiosum virus
guaaaagacuggcu

SEQ ID NO: 228497 - RNA, 23 nt, Molluscum contagiosum virus
gaccauggacacgcugcgcgugc

SEQ ID NO: 228498 - RNA, 13 nt, Molluscum contagiosum virus
gaccccaagaaga

SEQ ID NO: 228499 - RNA, 21 nt, Molluscum contagiosum virus
gacccaucggagaagugcucc

SEQ ID NO: 228500 - RNA, 23 nt, Molluscum contagiosum virus
gacccgcucgugaagcugucaac

SEQ ID NO: 228501 - RNA, 14 nt, Molluscum contagiosum virus
gaccgcaagugcac

SEQ ID NO: 228502 - RNA, 15 nt, Molluscum contagiosum virus
gaccggcgugccuuu

SEQ ID NO: 228503 - RNA, 13 nt, Molluscum contagiosum virus
gaccuccuugcac

SEQ ID NO: 228504 - RNA, 18 nt, Molluscum contagiosum virus
gaccugcacgacccucuu

SEQ ID NO: 228505 - RNA, 22 nt, Molluscum contagiosum virus
gaccugcacgacccucuucgac

SEQ ID NO: 228506 - RNA, 12 nt, Molluscum contagiosum virus
aaauagcauguc

SEQ ID NO: 228507 - RNA, 21 nt, Molluscum contagiosum virus
gaccuggaagccgccagccac

SEQ ID NO: 228508 - RNA, 21 nt, Molluscum contagiosum virus
gacagcggaagaaacagccau

SEQ ID NO: 228509 - RNA, 13 nt, Molluscum contagiosum virus
gaccaguacauca

SEQ ID NO: 228510 - RNA, 22 nt, Molluscum contagiosum virus
gacagcauccccaacauccugc

SEQ ID NO: 228511 - RNA, 14 nt, Molluscum contagiosum virus
gacagcaugaacuc

SEQ ID NO: 228512 - RNA, 22 nt, Molluscum contagiosum virus
gacacgcugcgcgugcugggcc

SEQ ID NO: 228513 - RNA, 17 nt, Molluscum contagiosum virus
gacacguugcacugcgc

SEQ ID NO: 228514 - RNA, 14 nt, Molluscum contagiosum virus
gacagacuaggcaa

SEQ ID NO: 228515 - RNA, 14 nt, Molluscum contagiosum virus
gacacgcacuugcg

SEQ ID NO: 228516 - RNA, 13 nt, Molluscum contagiosum virus
gacaaugagcacu

SEQ ID NO: 228517 - RNA, 14 nt, Molluscum contagiosum virus
gacaaugagcacuu

SEQ ID NO: 228518 - RNA, 20 nt, Molluscum contagiosum virus
aaacucuccgacgugcugcg

SEQ ID NO: 228519 - RNA, 12 nt, Molluscum contagiosum virus
aaacucuugcac

SEQ ID NO: 228520 - RNA, 18 nt, Molluscum contagiosum virus
aaacugcauccuggggaa

SEQ ID NO: 228521 - RNA, 15 nt, Molluscum contagiosum virus
gacaaggaaaggcac

SEQ ID NO: 228522 - RNA, 10 nt, Molluscum contagiosum virus
aaagcacagu

SEQ ID NO: 228523 - RNA, 14 nt, Molluscum contagiosum virus
aaagcacaguccaa

SEQ ID NO: 228524 - RNA, 15 nt, Molluscum contagiosum virus
aaagcgcacacuugc

SEQ ID NO: 228525 - RNA, 13 nt, Molluscum contagiosum virus
aaagggcugcuug

SEQ ID NO: 228526 - RNA, 12 nt, Molluscum contagiosum virus
aaagucaucugc

SEQ ID NO: 228527 - RNA, 21 nt, Molluscum contagiosum virus
aaagcuggccgaggucuucca

SEQ ID NO: 228528 - RNA, 22 nt, Molluscum contagiosum virus
aaagcuggccgaggucuuccac

SEQ ID NO: 228529 - RNA, 13 nt, Molluscum contagiosum virus
aaagcucucuuag

SEQ ID NO: 228530 - RNA, 20 nt, Molluscum contagiosum virus
aaaggacaugggcacaaguc

SEQ ID NO: 228531 - RNA, 20 nt, Molluscum contagiosum virus
aaaggcacccgcaacaagga

SEQ ID NO: 228532 - RNA, 21 nt, Molluscum contagiosum virus
aaaggccccccgcaacaagga

SEQ ID NO: 228533 - RNA, 15 nt, Molluscum contagiosum virus
gaacccgcauugggc

SEQ ID NO: 228534 - RNA, 17 nt, Molluscum contagiosum virus
gaacgagccugccgcga

SEQ ID NO: 228535 - RNA, 19 nt, Molluscum contagiosum virus
gaacgagggaugcacacac

SEQ ID NO: 228536 - RNA, 12 nt, Molluscum contagiosum virus
gaacgaccucaa

SEQ ID NO: 228537 - RNA, 17 nt, Molluscum contagiosum virus
gaacgaccucaaccgca

SEQ ID NO: 228538 - RNA, 17 nt, Molluscum contagiosum virus
gaacgacgguaaacucu

SEQ ID NO: 228539 - RNA, 20 nt, Molluscum contagiosum virus
gaacgacgguaaacucuugc

SEQ ID NO: 228540 - RNA, 22 nt, Molluscum contagiosum virus
gaacaauuacuccagcguggug

SEQ ID NO: 228541 - RNA, 18 nt, Molluscum contagiosum virus
gaacaccccgagcuggug

SEQ ID NO: 228542 - RNA, 19 nt, Molluscum contagiosum virus
gaacaccuccugcuuugca

SEQ ID NO: 228543 - RNA, 15 nt, Molluscum contagiosum virus
gaacaccaagagcau

SEQ ID NO: 228544 - RNA, 21 nt, Molluscum contagiosum virus
gaacaccaagagcaucgagcu

SEQ ID NO: 228545 - RNA, 20 nt, Molluscum contagiosum virus
gaacaaaaagugaacuucua

SEQ ID NO: 228546 - RNA, 19 nt, Molluscum contagiosum virus
cuugugcgcgcaucagcac

SEQ ID NO: 228547 - RNA, 22 nt, Molluscum contagiosum virus
cuuuaacgcgugcggugacuug

SEQ ID NO: 228548 - RNA, 14 nt, Molluscum contagiosum virus
cuuuagaggggcaa

SEQ ID NO: 228549 - RNA, 20 nt, Molluscum contagiosum virus
cuuuagaggggcaacaugcg

SEQ ID NO: 228550 - RNA, 18 nt, Molluscum contagiosum virus
cuuuacgggcgccagcua

SEQ ID NO: 228551 - RNA, 15 nt, Molluscum contagiosum virus
gaacgcugcagcuag

SEQ ID NO: 228552 - RNA, 15 nt, Molluscum contagiosum virus
gaacgcgcaagugug

SEQ ID NO: 228553 - RNA, 13 nt, Molluscum contagiosum virus
gaacgcaaggugu

SEQ ID NO: 228554 - RNA, 20 nt, Molluscum contagiosum virus
gaacgcaaguacaacccaaa

SEQ ID NO: 228555 - RNA, 17 nt, Molluscum contagiosum virus
gaagcagcagaccaaga

SEQ ID NO: 228556 - RNA, 22 nt, Molluscum contagiosum virus
gaagcaagacccagcaaggccc

SEQ ID NO: 228557 - RNA, 10 nt, Molluscum contagiosum virus
gaagcacagu

SEQ ID NO: 228558 - RNA, 14 nt, Molluscum contagiosum virus
gaacucgcugcugc

SEQ ID NO: 228559 - RNA, 15 nt, Molluscum contagiosum virus
gaacucgcugcugcu

SEQ ID NO: 228560 - RNA, 22 nt, Molluscum contagiosum virus
gaagugcuccgcacguggaauc

SEQ ID NO: 228561 - RNA, 23 nt, Molluscum contagiosum virus
gaagucucucagcggcacugcgc

SEQ ID NO: 228562 - RNA, 21 nt, Molluscum contagiosum virus
gaaguguugccgccggccuug

SEQ ID NO: 228563 - RNA, 15 nt, Molluscum contagiosum virus
gaagcccaaggagcu

SEQ ID NO: 228564 - RNA, 14 nt, Molluscum contagiosum virus
gaagcccucagggg

SEQ ID NO: 228565 - RNA, 14 nt, Molluscum contagiosum virus
gaagcccgaggugc

SEQ ID NO: 228566 - RNA, 17 nt, Molluscum contagiosum virus
gaagcgcccgugaugca

SEQ ID NO: 228567 - RNA, 15 nt, Molluscum contagiosum virus
gaagcgcuucuuugc

SEQ ID NO: 228568 - RNA, 18 nt, Molluscum contagiosum virus
gaauacccccuucuuacc

SEQ ID NO: 228569 - RNA, 15 nt, Molluscum contagiosum virus
gaauaccggagacac

SEQ ID NO: 228570 - RNA, 20 nt, Molluscum contagiosum virus
gaauaccggagacaccagcu

SEQ ID NO: 228571 - RNA, 21 nt, Molluscum contagiosum virus
gaauaccggagacaccagcuc

SEQ ID NO: 228572 - RNA, 22 nt, Molluscum contagiosum virus
aaacgcacagccccugcugcuc

SEQ ID NO: 228573 - RNA, 12 nt, Molluscum contagiosum virus
aaacgcacuguc

SEQ ID NO: 228574 - RNA, 23 nt, Molluscum contagiosum virus
aaacgcacugucguaacaaugga

SEQ ID NO: 228575 - RNA, 15 nt, Molluscum contagiosum virus
gaucccgacacugcg

SEQ ID NO: 228576 - RNA, 12 nt, Molluscum contagiosum virus
gaucgcgguggc

SEQ ID NO: 228577 - RNA, 20 nt, Molluscum contagiosum virus
gaucgcuacgugcgcaccau

SEQ ID NO: 228578 - RNA, 16 nt, Molluscum contagiosum virus
gaucgcgcgcaccugc

SEQ ID NO: 228579 - RNA, 18 nt, Molluscum contagiosum virus
gaucugcgugacccucuu

SEQ ID NO: 228580 - RNA, 20 nt, Molluscum contagiosum virus
gauggacaaagaugcagcca

SEQ ID NO: 228581 - RNA, 15 nt, Molluscum contagiosum virus
gauggacgccagcuu

SEQ ID NO: 228582 - RNA, 16 nt, Molluscum contagiosum virus
gauguacuccaccaug

SEQ ID NO: 228583 - RNA, 20 nt, Molluscum contagiosum virus
gauggcuguuccggcgugga

SEQ ID NO: 228584 - RNA, 19 nt, Molluscum contagiosum virus
gaugccgucguacuuucac

SEQ ID NO: 228585 - RNA, 18 nt, Molluscum contagiosum virus
gaugccgugguacacgua

SEQ ID NO: 228586 - RNA, 17 nt, Molluscum contagiosum virus
gaugcgcugccggugga

SEQ ID NO: 228587 - RNA, 14 nt, Molluscum contagiosum virus
gaugcucgcuugcc

SEQ ID NO: 228588 - RNA, 15 nt, Molluscum contagiosum virus
gaugcugcgcgugga

SEQ ID NO: 228589 - RNA, 15 nt, Molluscum contagiosum virus
gaugcacacacucgc

SEQ ID NO: 228590 - RNA, 17 nt, Molluscum contagiosum virus
gaugacgggcacgcuca

SEQ ID NO: 228591 - RNA, 19 nt, Molluscum contagiosum virus
gaugacgggcacgcucaua

SEQ ID NO: 228592 - RNA, 18 nt, Molluscum contagiosum virus
gaugaacccgcauugggc

SEQ ID NO: 228593 - RNA, 19 nt, Molluscum contagiosum virus
gauuucggcgcgcgugcuu

SEQ ID NO: 228594 - RNA, 15 nt, Molluscum contagiosum virus
gauugucaagcacua

SEQ ID NO: 228595 - RNA, 14 nt, Molluscum contagiosum virus
gcaaaagcaaguac

SEQ ID NO: 228596 - RNA, 16 nt, Molluscum contagiosum virus
gcaaaagcacagcagg

SEQ ID NO: 228597 - RNA, 23 nt, Molluscum contagiosum virus
gcaaaccucugagcgagcgcagu

SEQ ID NO: 228598 - RNA, 14 nt, Molluscum contagiosum virus
gcaaacacaaccuu

SEQ ID NO: 228599 - RNA, 13 nt, Molluscum contagiosum virus
gcaaaagcuuuuu

SEQ ID NO: 228600 - RNA, 22 nt, Molluscum contagiosum virus
gcaaacuucauccucuaccgcc

SEQ ID NO: 228601 - RNA, 14 nt, Molluscum contagiosum virus
gcaaacgcuccaug

SEQ ID NO: 228602 - RNA, 18 nt, Molluscum contagiosum virus
gcaaacgcacuguguucc

SEQ ID NO: 228603 - RNA, 20 nt, Molluscum contagiosum virus
gauuccgcuguacgugcugc

SEQ ID NO: 228604 - RNA, 21 nt, Molluscum contagiosum virus
gauuccgcuguacgugcugcc

SEQ ID NO: 228605 - RNA, 19 nt, Molluscum contagiosum virus
gacucagcauguugcucua

SEQ ID NO: 228606 - RNA, 20 nt, Molluscum contagiosum virus
gacucagcauguugcucuac

SEQ ID NO: 228607 - RNA, 23 nt, Molluscum contagiosum virus
gacuccuuccggagacaccagcu

SEQ ID NO: 228608 - RNA, 13 nt, Molluscum contagiosum virus
gacucgagcauuu

SEQ ID NO: 228609 - RNA, 16 nt, Molluscum contagiosum virus
gacucggacacuggag

SEQ ID NO: 228610 - RNA, 14 nt, Molluscum contagiosum virus
gacucggugcucau

SEQ ID NO: 228611 - RNA, 23 nt, Molluscum contagiosum virus
gacuacgcgcugcuagagaaccu

SEQ ID NO: 228612 - RNA, 23 nt, Molluscum contagiosum virus
gacuagaugcguccuaugcaucu

SEQ ID NO: 228613 - RNA, 16 nt, Molluscum contagiosum virus
gacuagccugugcccu

SEQ ID NO: 228614 - RNA, 17 nt, Molluscum contagiosum virus
gacuagccugugcccug

SEQ ID NO: 228615 - RNA, 16 nt, Molluscum contagiosum virus
gacugagccgcaagca

SEQ ID NO: 228616 - RNA, 16 nt, Molluscum contagiosum virus
gacugacgccgauguc

SEQ ID NO: 228617 - RNA, 13 nt, Molluscum contagiosum virus
gacuuguccucaa

SEQ ID NO: 228618 - RNA, 20 nt, Molluscum contagiosum virus
gacuucuugguggacagccu

SEQ ID NO: 228619 - RNA, 22 nt, Molluscum contagiosum virus
gacugugucgacuucaccuucg

SEQ ID NO: 228620 - RNA, 17 nt, Molluscum contagiosum virus
gacguggugcucgugga

SEQ ID NO: 228621 - RNA, 15 nt, Molluscum contagiosum virus
aaaugcuugcuuccg

SEQ ID NO: 228622 - RNA, 23 nt, Molluscum contagiosum virus
aaauggccuugcgagcgcugccu

SEQ ID NO: 228623 - RNA, 17 nt, Molluscum contagiosum virus
aaauggcguuaccagga

SEQ ID NO: 228624 - RNA, 20 nt, Molluscum contagiosum virus
aaaugcgggaggcucucgag

SEQ ID NO: 228625 - RNA, 16 nt, Molluscum contagiosum virus
aaaugcgcacacuugc

SEQ ID NO: 228626 - RNA, 18 nt, Molluscum contagiosum virus
gaggugcgcgcaacacug

SEQ ID NO: 228627 - RNA, 21 nt, Molluscum contagiosum virus
gaggugcgcuaucgcuugcua

SEQ ID NO: 228628 - RNA, 15 nt, Molluscum contagiosum virus
gagggccuuucucag

SEQ ID NO: 228629 - RNA, 17 nt, Molluscum contagiosum virus
gagggcgccgugcugcg

SEQ ID NO: 228630 - RNA, 20 nt, Molluscum contagiosum virus
gagggguguggcuacaugca

SEQ ID NO: 228631 - RNA, 14 nt, Molluscum contagiosum virus
gagggucgugcagg

SEQ ID NO: 228632 - RNA, 20 nt, Molluscum contagiosum virus
gagggugcgccuuuccucuc

SEQ ID NO: 228633 - RNA, 21 nt, Molluscum contagiosum virus
gaggcuagugccauugugaca

SEQ ID NO: 228634 - RNA, 14 nt, Molluscum contagiosum virus
gaggcggcacugcu

SEQ ID NO: 228635 - RNA, 16 nt, Molluscum contagiosum virus
gaggccuucaacaaga

SEQ ID NO: 228636 - RNA, 19 nt, Molluscum contagiosum virus
gaggcgcuugggcacugcu

SEQ ID NO: 228637 - RNA, 20 nt, Molluscum contagiosum virus
gaggauucuugcacgggcau

SEQ ID NO: 228638 - RNA, 21 nt, Molluscum contagiosum virus
gaggccuacgugcugcgcacg

SEQ ID NO: 228639 - RNA, 13 nt, Molluscum contagiosum virus
gaggccagcacaa

SEQ ID NO: 228640 - RNA, 19 nt, Molluscum contagiosum virus
gaggcccgucuccacaaag

SEQ ID NO: 228641 - RNA, 18 nt, Molluscum contagiosum virus
gaggacuucacaacacug

SEQ ID NO: 228642 - RNA, 22 nt, Molluscum contagiosum virus
gaggacgcgugcaagcccagca

SEQ ID NO: 228643 - RNA, 15 nt, Molluscum contagiosum virus
gaggacgagcugcua

SEQ ID NO: 228644 - RNA, 16 nt, Molluscum contagiosum virus
gaggacgagcugcuaa

SEQ ID NO: 228645 - RNA, 21 nt, Molluscum contagiosum virus
gaggaccgcgagcgcaugcgc

SEQ ID NO: 228646 - RNA, 22 nt, Molluscum contagiosum virus
gaggaccucgcgcgccgccgca

SEQ ID NO: 228647 - RNA, 15 nt, Molluscum contagiosum virus
gagcucgcguaccug

SEQ ID NO: 228648 - RNA, 14 nt, Molluscum contagiosum virus
gagcgugaccagug

SEQ ID NO: 228649 - RNA, 20 nt, Molluscum contagiosum virus
gagcgugaccagugcgugcu

SEQ ID NO: 228650 - RNA, 12 nt, Molluscum contagiosum virus
gagcgugggcga

SEQ ID NO: 228651 - RNA, 23 nt, Molluscum contagiosum virus
gagcgugucgaagcgcgcagcgc

SEQ ID NO: 228652 - RNA, 14 nt, Molluscum contagiosum virus
gagcguugucuuga

SEQ ID NO: 228653 - RNA, 23 nt, Molluscum contagiosum virus
gagcguugucuugaugcuguuac

SEQ ID NO: 228654 - RNA, 21 nt, Molluscum contagiosum virus
gagagacaacaaacauuguga

SEQ ID NO: 228655 - RNA, 20 nt, Molluscum contagiosum virus
gagagagacaugcacacuca

SEQ ID NO: 228656 - RNA, 17 nt, Molluscum contagiosum virus
gagagccauucuuaauc

SEQ ID NO: 228657 - RNA, 18 nt, Molluscum contagiosum virus
gagagcaaagaaugcaug

SEQ ID NO: 228658 - RNA, 16 nt, Molluscum contagiosum virus
gagagcagugccgcuc

SEQ ID NO: 228659 - RNA, 21 nt, Molluscum contagiosum virus
gagagcuuuucuuugugguca

SEQ ID NO: 228660 - RNA, 22 nt, Molluscum contagiosum virus
gagaggauucuucucgaaaaug

SEQ ID NO: 228661 - RNA, 12 nt, Molluscum contagiosum virus
gagccgcugcac

SEQ ID NO: 228662 - RNA, 21 nt, Molluscum contagiosum virus
gagccgcuggccgaugccuau

SEQ ID NO: 228663 - RNA, 16 nt, Molluscum contagiosum virus
gagcgcgugcucuuuc

SEQ ID NO: 228664 - RNA, 16 nt, Molluscum contagiosum virus
gagcgcuaucucugga

SEQ ID NO: 228665 - RNA, 17 nt, Molluscum contagiosum virus
gagcgcggggcagauag

SEQ ID NO: 228666 - RNA, 19 nt, Molluscum contagiosum virus
gagcgagcacgccaaccac

SEQ ID NO: 228667 - RNA, 15 nt, Molluscum contagiosum virus
gagcgcgagauucug

SEQ ID NO: 228668 - RNA, 17 nt, Molluscum contagiosum virus
gagcgcgcgccugcugg

SEQ ID NO: 228669 - RNA, 13 nt, Molluscum contagiosum virus
gagcgcaucagca

SEQ ID NO: 228670 - RNA, 14 nt, Molluscum contagiosum virus
gagcgccgccagcu

SEQ ID NO: 228671 - RNA, 15 nt, Molluscum contagiosum virus
gagcgccgccagcuc

SEQ ID NO: 228672 - RNA, 16 nt, Molluscum contagiosum virus
gagaaaggcacccacc

SEQ ID NO: 228673 - RNA, 18 nt, Molluscum contagiosum virus
gagaaaggcacccaccag

SEQ ID NO: 228674 - RNA, 14 nt, Molluscum contagiosum virus
gagaaagaacaaaa

SEQ ID NO: 228675 - RNA, 22 nt, Molluscum contagiosum virus
gacuuucugcagucagauugua

SEQ ID NO: 228676 - RNA, 18 nt, Molluscum contagiosum virus
gagacgucuggcucguac

SEQ ID NO: 228677 - RNA, 19 nt, Molluscum contagiosum virus
gagaaaucccaagagccau

SEQ ID NO: 228678 - RNA, 22 nt, Molluscum contagiosum virus
gagaaaucccaagagccauguu

SEQ ID NO: 228679 - RNA, 14 nt, Molluscum contagiosum virus
gagaccuggucaca

SEQ ID NO: 228680 - RNA, 19 nt, Molluscum contagiosum virus
gagaccuggucacacuggu

SEQ ID NO: 228681 - RNA, 14 nt, Molluscum contagiosum virus
gagacgcugcgcga

SEQ ID NO: 228682 - RNA, 20 nt, Molluscum contagiosum virus
gagacggaaauguuguuuga

SEQ ID NO: 228683 - RNA, 15 nt, Molluscum contagiosum virus
gagacggcagugucc

SEQ ID NO: 228684 - RNA, 13 nt, Molluscum contagiosum virus
cgagcccaccgau

SEQ ID NO: 228685 - RNA, 23 nt, Molluscum contagiosum virus
cgagcccgcccccgagcgcuucu

SEQ ID NO: 228686 - RNA, 16 nt, Molluscum contagiosum virus
cgagcgcaaaugcauu

SEQ ID NO: 228687 - RNA, 15 nt, Molluscum contagiosum virus
cgagccgcacaaaga

SEQ ID NO: 228688 - RNA, 15 nt, Molluscum contagiosum virus
cgagcgggcaauggg

SEQ ID NO: 228689 - RNA, 16 nt, Molluscum contagiosum virus
cgagcgcguccaugag

SEQ ID NO: 228690 - RNA, 19 nt, Molluscum contagiosum virus
cgagcgcuaccugaugcgc

SEQ ID NO: 228691 - RNA, 12 nt, Molluscum contagiosum virus
cgagcgcugccg

SEQ ID NO: 228692 - RNA, 20 nt, Molluscum contagiosum virus
cgagcgcugccugugcuacg

SEQ ID NO: 228693 - RNA, 21 nt, Molluscum contagiosum virus
cgagaugcgagcgcgucugcu

SEQ ID NO: 228694 - RNA, 18 nt, Molluscum contagiosum virus
cgagcagaggcaugcuuu

SEQ ID NO: 228695 - RNA, 19 nt, Molluscum contagiosum virus
cgagcagauucacgagcuc

SEQ ID NO: 228696 - RNA, 17 nt, Molluscum contagiosum virus
cgagcacgccuccaaga

SEQ ID NO: 228697 - RNA, 19 nt, Molluscum contagiosum virus
cgagcacgccuccaagaag

SEQ ID NO: 228698 - RNA, 19 nt, Molluscum contagiosum virus
cgagcacguggacagcauc

SEQ ID NO: 228699 - RNA, 15 nt, Molluscum contagiosum virus
cgagacugagugcug

SEQ ID NO: 228700 - RNA, 23 nt, Molluscum contagiosum virus
cgagacuauaugcgaagcgucga

SEQ ID NO: 228701 - RNA, 19 nt, Molluscum contagiosum virus
cgagagacacgcacacucg

SEQ ID NO: 228702 - RNA, 13 nt, Molluscum contagiosum virus
cgacuugcugcgg

SEQ ID NO: 228703 - RNA, 18 nt, Molluscum contagiosum virus
cgacuguauccuuggcaa

SEQ ID NO: 228704 - RNA, 21 nt, Molluscum contagiosum virus
cgacgauuacaucgaaaccau

SEQ ID NO: 228705 - RNA, 18 nt, Molluscum contagiosum virus
cgacgagcacgagcauuc

SEQ ID NO: 228706 - RNA, 14 nt, Molluscum contagiosum virus
cgaccgacccaucg

SEQ ID NO: 228707 - RNA, 17 nt, Molluscum contagiosum virus
cgacuccuuccggagac

SEQ ID NO: 228708 - RNA, 23 nt, Molluscum contagiosum virus
cgacuccuuccggagacaccagc

SEQ ID NO: 228709 - RNA, 15 nt, Molluscum contagiosum virus
cgaccagcugguccu

SEQ ID NO: 228710 - RNA, 22 nt, Molluscum contagiosum virus
cgacgccgccaaugcugccgug

SEQ ID NO: 228711 - RNA, 22 nt, Molluscum contagiosum virus
cgacguaaugauugucaagcac

SEQ ID NO: 228712 - RNA, 16 nt, Molluscum contagiosum virus
cgacagucuagugcgu

SEQ ID NO: 228713 - RNA, 18 nt, Molluscum contagiosum virus
cgacaagcguaagccacc

SEQ ID NO: 228714 - RNA, 18 nt, Molluscum contagiosum virus
cgacaaggaggcuuucuu

SEQ ID NO: 228715 - RNA, 12 nt, Molluscum contagiosum virus
cgacagcucuuc

SEQ ID NO: 228716 - RNA, 17 nt, Molluscum contagiosum virus
cgacagcauccuggagu

SEQ ID NO: 228717 - RNA, 16 nt, Molluscum contagiosum virus
cgauacaaaacaugcu

SEQ ID NO: 228718 - RNA, 19 nt, Molluscum contagiosum virus
cgagugugugcaucccucg

SEQ ID NO: 228719 - RNA, 19 nt, Molluscum contagiosum virus
cgagugauccuugccaagc

SEQ ID NO: 228720 - RNA, 22 nt, Molluscum contagiosum virus
cgagucgcgccucgaacugcuc

SEQ ID NO: 228721 - RNA, 15 nt, Molluscum contagiosum virus
cgagucucuguaaca

SEQ ID NO: 228722 - RNA, 14 nt, Molluscum contagiosum virus
cgagugcuggccga

SEQ ID NO: 228723 - RNA, 21 nt, Molluscum contagiosum virus
cgagcuggugauccuggauau

SEQ ID NO: 228724 - RNA, 13 nt, Molluscum contagiosum virus
cgaggcgcugccg

SEQ ID NO: 228725 - RNA, 18 nt, Molluscum contagiosum virus
cgaggccggcaagcucaa

SEQ ID NO: 228726 - RNA, 17 nt, Molluscum contagiosum virus
cgaguccccagacuucu

SEQ ID NO: 228727 - RNA, 15 nt, Molluscum contagiosum virus
cgaggucuuccacau

SEQ ID NO: 228728 - RNA, 21 nt, Molluscum contagiosum virus
cgaggugcgcgcaacacugca

SEQ ID NO: 228729 - RNA, 13 nt, Molluscum contagiosum virus
cgagguggccaag

SEQ ID NO: 228730 - RNA, 13 nt, Molluscum contagiosum virus
cgaguacaagcuc

SEQ ID NO: 228731 - RNA, 19 nt, Molluscum contagiosum virus
cgagggaugcacacacucg

SEQ ID NO: 228732 - RNA, 14 nt, Molluscum contagiosum virus
cgagggcacagggu

SEQ ID NO: 228733 - RNA, 18 nt, Molluscum contagiosum virus
cgagggcgccgugcugcg

SEQ ID NO: 228734 - RNA, 14 nt, Molluscum contagiosum virus
cgauggacgccagc

SEQ ID NO: 228735 - RNA, 15 nt, Molluscum contagiosum virus
cgaucccgacacugc

SEQ ID NO: 228736 - RNA, 18 nt, Molluscum contagiosum virus
cgauuacaucgaaaccau

SEQ ID NO: 228737 - RNA, 18 nt, Molluscum contagiosum virus
cgauggccggcaacuggc

SEQ ID NO: 228738 - RNA, 22 nt, Molluscum contagiosum virus
cgaaguacuucgcgaugugcac

SEQ ID NO: 228739 - RNA, 18 nt, Molluscum contagiosum virus
cgaauccuuuacugcaag

SEQ ID NO: 228740 - RNA, 18 nt, Molluscum contagiosum virus
cgaacgagaaaugcgcac

SEQ ID NO: 228741 - RNA, 23 nt, Molluscum contagiosum virus
cgaacgagggaugcacacacucg

SEQ ID NO: 228742 - RNA, 19 nt, Molluscum contagiosum virus
cgaacggaacacagugcgu

SEQ ID NO: 228743 - RNA, 18 nt, Molluscum contagiosum virus
cgaacugcaacgugagua

SEQ ID NO: 228744 - RNA, 18 nt, Molluscum contagiosum virus
cgaacugcucgaccaaau

SEQ ID NO: 228745 - RNA, 16 nt, Molluscum contagiosum virus
cgaagcccagcuucag

SEQ ID NO: 228746 - RNA, 18 nt, Molluscum contagiosum virus
cgaagagggucgugcagg

SEQ ID NO: 228747 - RNA, 13 nt, Molluscum contagiosum virus
cgaagaggucucu

SEQ ID NO: 228748 - RNA, 22 nt, Molluscum contagiosum virus
cgaagaguggcucacagccgug

SEQ ID NO: 228749 - RNA, 19 nt, Molluscum contagiosum virus
cgaagaguuggacagccau

SEQ ID NO: 228750 - RNA, 15 nt, Molluscum contagiosum virus
cgaaaacuguuccca

SEQ ID NO: 228751 - RNA, 21 nt, Molluscum contagiosum virus
cgaaaggcacccgcaggaaag

SEQ ID NO: 228752 - RNA, 16 nt, Molluscum contagiosum virus
cgaaacuggacugagc

SEQ ID NO: 228753 - RNA, 21 nt, Molluscum contagiosum virus
cgaaacuggacugagccgcaa

SEQ ID NO: 228754 - RNA, 21 nt, Molluscum contagiosum virus
ccuuucuugcggcacccucag

SEQ ID NO: 228755 - RNA, 15 nt, Molluscum contagiosum virus
ccuuuacugcaagau

SEQ ID NO: 228756 - RNA, 15 nt, Molluscum contagiosum virus
ccuugaagggcacaa

SEQ ID NO: 228757 - RNA, 18 nt, Molluscum contagiosum virus
ccuugccaagucggggcc

SEQ ID NO: 228758 - RNA, 20 nt, Molluscum contagiosum virus
ccuugccgaggaggugcucu

SEQ ID NO: 228759 - RNA, 22 nt, Molluscum contagiosum virus
ccuugauaaaagcacaguccaa

SEQ ID NO: 228760 - RNA, 18 nt, Molluscum contagiosum virus
ccuugaugccgugguaca

SEQ ID NO: 228761 - RNA, 22 nt, Molluscum contagiosum virus
ccuugaugccgugguacacgua

SEQ ID NO: 228762 - RNA, 12 nt, Molluscum contagiosum virus
ccuuccacgaca

SEQ ID NO: 228763 - RNA, 23 nt, Molluscum contagiosum virus
ccuucgcuugucgugcuuccugc

SEQ ID NO: 228764 - RNA, 18 nt, Molluscum contagiosum virus
ccuucuccucgcucugcu

SEQ ID NO: 228765 - RNA, 21 nt, Molluscum contagiosum virus
ccuggaagcuuccuuuuucac

SEQ ID NO: 228766 - RNA, 15 nt, Molluscum contagiosum virus
ccuggagcgcagucc

SEQ ID NO: 228767 - RNA, 21 nt, Molluscum contagiosum virus
ccuggaguaccggcucaagaa

SEQ ID NO: 228768 - RNA, 18 nt, Molluscum contagiosum virus
ccuggccuucuaccacag

SEQ ID NO: 228769 - RNA, 14 nt, Molluscum contagiosum virus
ccuggcugcugcgc

SEQ ID NO: 228770 - RNA, 19 nt, Molluscum contagiosum virus
ccuggcggcagcacgggcg

SEQ ID NO: 228771 - RNA, 20 nt, Molluscum contagiosum virus
ccuggcggcuuuccugucau

SEQ ID NO: 228772 - RNA, 22 nt, Molluscum contagiosum virus
ccugggcgagcagugugaugcc

SEQ ID NO: 228773 - RNA, 21 nt, Molluscum contagiosum virus
ccugggcgcgcacuaccgcaa

SEQ ID NO: 228774 - RNA, 12 nt, Molluscum contagiosum virus
ccuggucuucgu

SEQ ID NO: 228775 - RNA, 14 nt, Molluscum contagiosum virus
ccuggugcacacac

SEQ ID NO: 228776 - RNA, 12 nt, Molluscum contagiosum virus
ccuggugcugcg

SEQ ID NO: 228777 - RNA, 21 nt, Molluscum contagiosum virus
ccuucaggaacuaccccgaga

SEQ ID NO: 228778 - RNA, 16 nt, Molluscum contagiosum virus
cccuugcucgcuugcc

SEQ ID NO: 228779 - RNA, 15 nt, Molluscum contagiosum virus
cccaccagcaggugg

SEQ ID NO: 228780 - RNA, 12 nt, Molluscum contagiosum virus
cccaccaggaac

SEQ ID NO: 228781 - RNA, 19 nt, Molluscum contagiosum virus
cccacgcuggcgcgcucca

SEQ ID NO: 228782 - RNA, 13 nt, Molluscum contagiosum virus
ccgaggucuucca

SEQ ID NO: 228783 - RNA, 14 nt, Molluscum contagiosum virus
ccgagguggccaag

SEQ ID NO: 228784 - RNA, 22 nt, Molluscum contagiosum virus
ccgaguacgccaucguggugga

SEQ ID NO: 228785 - RNA, 14 nt, Molluscum contagiosum virus
ccgcaacaaggaaa

SEQ ID NO: 228786 - RNA, 17 nt, Molluscum contagiosum virus
ccgcaaguaccuagugc

SEQ ID NO: 228787 - RNA, 22 nt, Molluscum contagiosum virus
ccgcaaugcagugcaccagcac

SEQ ID NO: 228788 - RNA, 15 nt, Molluscum contagiosum virus
ccgacgcggugguga

SEQ ID NO: 228789 - RNA, 15 nt, Molluscum contagiosum virus
ccgagacugcuacgu

SEQ ID NO: 228790 - RNA, 16 nt, Molluscum contagiosum virus
ccgagacccgcaccgc

SEQ ID NO: 228791 - RNA, 15 nt, Molluscum contagiosum virus
ccgacccgugcugcu

SEQ ID NO: 228792 - RNA, 18 nt, Molluscum contagiosum virus
ccgacccaucggagaagu

SEQ ID NO: 228793 - RNA, 16 nt, Molluscum contagiosum virus
ccgagcgugaccagug

SEQ ID NO: 228794 - RNA, 17 nt, Molluscum contagiosum virus
ccgagcgccgccagcuc

SEQ ID NO: 228795 - RNA, 18 nt, Molluscum contagiosum virus
ccgagcgcgcgcgcugcu

SEQ ID NO: 228796 - RNA, 16 nt, Molluscum contagiosum virus
ccgagcgggcaauggg

SEQ ID NO: 228797 - RNA, 17 nt, Molluscum contagiosum virus
ccgcgcccgcgccgcaa

SEQ ID NO: 228798 - RNA, 17 nt, Molluscum contagiosum virus
ccgcgccgaaacacggc

SEQ ID NO: 228799 - RNA, 14 nt, Molluscum contagiosum virus
ccgcgcgagugcca

SEQ ID NO: 228800 - RNA, 22 nt, Molluscum contagiosum virus
ccgcgcgcggcuaagcucugcg

SEQ ID NO: 228801 - RNA, 18 nt, Molluscum contagiosum virus
ccgcgcggcgcucugcca

SEQ ID NO: 228802 - RNA, 22 nt, Molluscum contagiosum virus
ccgcgcuaagaaccgucuuccc

SEQ ID NO: 228803 - RNA, 14 nt, Molluscum contagiosum virus
ccgcgccagcaguc

SEQ ID NO: 228804 - RNA, 22 nt, Molluscum contagiosum virus
ccgcgccagcgacagacaccgg

SEQ ID NO: 228805 - RNA, 16 nt, Molluscum contagiosum virus
ccgccgugugcacauu

SEQ ID NO: 228806 - RNA, 23 nt, Molluscum contagiosum virus
ccgccguguugcguagagcaaag

SEQ ID NO: 228807 - RNA, 12 nt, Molluscum contagiosum virus
ccgccuccgggc

SEQ ID NO: 228808 - RNA, 17 nt, Molluscum contagiosum virus
ccgccgcaacauaguca

SEQ ID NO: 228809 - RNA, 14 nt, Molluscum contagiosum virus
ccgccgcaaguacc

SEQ ID NO: 228810 - RNA, 22 nt, Molluscum contagiosum virus
ccgccgcugacuagaugcauag

SEQ ID NO: 228811 - RNA, 21 nt, Molluscum contagiosum virus
ccgcgaacgagggaugcacac

SEQ ID NO: 228812 - RNA, 19 nt, Molluscum contagiosum virus
ccgcgacaggggccacaag

SEQ ID NO: 228813 - RNA, 14 nt, Molluscum contagiosum virus
ccgcgacgagcaga

SEQ ID NO: 228814 - RNA, 13 nt, Molluscum contagiosum virus
ccgcgacgagcuc

SEQ ID NO: 228815 - RNA, 15 nt, Molluscum contagiosum virus
ccgcgcagaagccaa

SEQ ID NO: 228816 - RNA, 20 nt, Molluscum contagiosum virus
ccgcgcaugacagccauggc

SEQ ID NO: 228817 - RNA, 20 nt, Molluscum contagiosum virus
ccgcaccgucaagaacaauu

SEQ ID NO: 228818 - RNA, 16 nt, Molluscum contagiosum virus
ccgcaggaaaggcacc

SEQ ID NO: 228819 - RNA, 12 nt, Molluscum contagiosum virus
ccgccagcacca

SEQ ID NO: 228820 - RNA, 15 nt, Molluscum contagiosum virus
ccgccagccacgaag

SEQ ID NO: 228821 - RNA, 22 nt, Molluscum contagiosum virus
ccgcccgggcguagccuagcca

SEQ ID NO: 228822 - RNA, 20 nt, Molluscum contagiosum virus
ccgcccacgcucaaccagua

SEQ ID NO: 228823 - RNA, 19 nt, Molluscum contagiosum virus
ccgcccagcguggccagcu

SEQ ID NO: 228824 - RNA, 18 nt, Molluscum contagiosum virus
ccgcucggcacaaaaccu

SEQ ID NO: 228825 - RNA, 16 nt, Molluscum contagiosum virus
ccgcucguguuuguca

SEQ ID NO: 228826 - RNA, 20 nt, Molluscum contagiosum virus
ccgcgucguagcaaaugcgc

SEQ ID NO: 228827 - RNA, 14 nt, Molluscum contagiosum virus
ccggcucaagaaca

SEQ ID NO: 228828 - RNA, 18 nt, Molluscum contagiosum virus
ccggcucaagaacaccaa

SEQ ID NO: 228829 - RNA, 21 nt, Molluscum contagiosum virus
ccggcucaagaacaccaagag

SEQ ID NO: 228830 - RNA, 19 nt, Molluscum contagiosum virus
ccggcucaagcuggcaacg

SEQ ID NO: 228831 - RNA, 22 nt, Molluscum contagiosum virus
ccgcgcucgacgcgugcauggc

SEQ ID NO: 228832 - RNA, 14 nt, Molluscum contagiosum virus
ccgcgggcugcaag

SEQ ID NO: 228833 - RNA, 20 nt, Molluscum contagiosum virus
ccgcggauguccuugaugcc

SEQ ID NO: 228834 - RNA, 21 nt, Molluscum contagiosum virus
ccgcguuuuuucuugguugcc

SEQ ID NO: 228835 - RNA, 17 nt, Molluscum contagiosum virus
ccggggcccaugcucac

SEQ ID NO: 228836 - RNA, 20 nt, Molluscum contagiosum virus
ccgggugcgagucucuguaa

SEQ ID NO: 228837 - RNA, 15 nt, Molluscum contagiosum virus
ccggcuuggccaagc

SEQ ID NO: 228838 - RNA, 16 nt, Molluscum contagiosum virus
ccucguggaacaaaga

SEQ ID NO: 228839 - RNA, 21 nt, Molluscum contagiosum virus
ccucuacacgcacgaccucac

SEQ ID NO: 228840 - RNA, 21 nt, Molluscum contagiosum virus
ccucaccuuucucuuucucaa

SEQ ID NO: 228841 - RNA, 16 nt, Molluscum contagiosum virus
ccucaccgcgcacauc

SEQ ID NO: 228842 - RNA, 17 nt, Molluscum contagiosum virus
ccuccugcuuugcacgc

SEQ ID NO: 228843 - RNA, 21 nt, Molluscum contagiosum virus
ccucgagcacgccuccaagaa

SEQ ID NO: 228844 - RNA, 22 nt, Molluscum contagiosum virus
ccucgccuccgggcgcacaacu

SEQ ID NO: 228845 - RNA, 18 nt, Molluscum contagiosum virus
ccucgcgcgccgccgcaa

SEQ ID NO: 228846 - RNA, 13 nt, Molluscum contagiosum virus
ccugaacaagcug

SEQ ID NO: 228847 - RNA, 20 nt, Molluscum contagiosum virus
ccucugggcgucgcacaguu

SEQ ID NO: 228848 - RNA, 21 nt, Molluscum contagiosum virus
ccucuguccugcgugcuuccc

SEQ ID NO: 228849 - RNA, 19 nt, Molluscum contagiosum virus
ccugacggcagcaagcgca

SEQ ID NO: 228850 - RNA, 20 nt, Molluscum contagiosum virus
ccugacggcagcaagcgcac

SEQ ID NO: 228851 - RNA, 18 nt, Molluscum contagiosum virus
ccgugggcagcuucugcu

SEQ ID NO: 228852 - RNA, 20 nt, Molluscum contagiosum virus
ccgugggcagcuucugcucg

SEQ ID NO: 228853 - RNA, 22 nt, Molluscum contagiosum virus
ccgugcgcgacggcgagcucuu

SEQ ID NO: 228854 - RNA, 19 nt, Molluscum contagiosum virus
ccgugcgcagggcaaucgc

SEQ ID NO: 228855 - RNA, 16 nt, Molluscum contagiosum virus
ccgugugaaaguccac

SEQ ID NO: 228856 - RNA, 16 nt, Molluscum contagiosum virus
ccguggaguccaugcc

SEQ ID NO: 228857 - RNA, 14 nt, Molluscum contagiosum virus
ccgucguacuuuca

SEQ ID NO: 228858 - RNA, 17 nt, Molluscum contagiosum virus
ccgucucgcggggcaag

SEQ ID NO: 228859 - RNA, 16 nt, Molluscum contagiosum virus
ccgugcagagcaaggc

SEQ ID NO: 228860 - RNA, 21 nt, Molluscum contagiosum virus
ccgugacggccguguacaugc

SEQ ID NO: 228861 - RNA, 13 nt, Molluscum contagiosum virus
ccgugaugcaccc

SEQ ID NO: 228862 - RNA, 19 nt, Molluscum contagiosum virus
ccggugcugcugccaauac

SEQ ID NO: 228863 - RNA, 14 nt, Molluscum contagiosum virus
ccgguguccacgac

SEQ ID NO: 228864 - RNA, 14 nt, Molluscum contagiosum virus
ccgguacugcugca

SEQ ID NO: 228865 - RNA, 20 nt, Molluscum contagiosum virus
ccgguugcgcgugugcagca

SEQ ID NO: 228866 - RNA, 18 nt, Molluscum contagiosum virus
ccaccacguggaccugau

SEQ ID NO: 228867 - RNA, 18 nt, Molluscum contagiosum virus
ccacaugaccaagcacau

SEQ ID NO: 228868 - RNA, 19 nt, Molluscum contagiosum virus
ccacaugaccaagcacauu

SEQ ID NO: 228869 - RNA, 19 nt, Molluscum contagiosum virus
aaaauggcugcgaccaaga

SEQ ID NO: 228870 - RNA, 22 nt, Molluscum contagiosum virus
aaaauggaccagaaacugggcu

SEQ ID NO: 228871 - RNA, 16 nt, Molluscum contagiosum virus
ccaacacuaccacagc

SEQ ID NO: 228872 - RNA, 19 nt, Molluscum contagiosum virus
ccaacacuaccacagccau

SEQ ID NO: 228873 - RNA, 20 nt, Molluscum contagiosum virus
ccaacguuuucggcuuugac

SEQ ID NO: 228874 - RNA, 22 nt, Molluscum contagiosum virus
ccaaccgagcuugccacgagaa

SEQ ID NO: 228875 - RNA, 15 nt, Molluscum contagiosum virus
ccaucggaacuagcc

SEQ ID NO: 228876 - RNA, 17 nt, Molluscum contagiosum virus
ccaucggagaagugcuc

SEQ ID NO: 228877 - RNA, 16 nt, Molluscum contagiosum virus
ccagugcgugcacugu

SEQ ID NO: 228878 - RNA, 20 nt, Molluscum contagiosum virus
ccagucucgaugugacaaca

SEQ ID NO: 228879 - RNA, 22 nt, Molluscum contagiosum virus
ccagucucgaugugacaacaug

SEQ ID NO: 228880 - RNA, 21 nt, Molluscum contagiosum virus
ccauggaggcgcuagugcaga

SEQ ID NO: 228881 - RNA, 16 nt, Molluscum contagiosum virus
ccaucuucaacuucca

SEQ ID NO: 228882 - RNA, 18 nt, Molluscum contagiosum virus
ccaugagguacuccacgc

SEQ ID NO: 228883 - RNA, 21 nt, Molluscum contagiosum virus
ccaugucgaacaccuccugcu

SEQ ID NO: 228884 - RNA, 14 nt, Molluscum contagiosum virus
cccaagagccaugu

SEQ ID NO: 228885 - RNA, 13 nt, Molluscum contagiosum virus
cccaagaccugcu

SEQ ID NO: 228886 - RNA, 15 nt, Molluscum contagiosum virus
ccacuguugcuuccg

SEQ ID NO: 228887 - RNA, 15 nt, Molluscum contagiosum virus
ccagcagccaggcua

SEQ ID NO: 228888 - RNA, 18 nt, Molluscum contagiosum virus
ccagcagcgaggccggag

SEQ ID NO: 228889 - RNA, 14 nt, Molluscum contagiosum virus
ccagcagagcugcc

SEQ ID NO: 228890 - RNA, 17 nt, Molluscum contagiosum virus
ccagcauagaacacagc

SEQ ID NO: 228891 - RNA, 18 nt, Molluscum contagiosum virus
ccagcggcagacuaagaa

SEQ ID NO: 228892 - RNA, 23 nt, Molluscum contagiosum virus
ccagcgggaccugguucaugcug

SEQ ID NO: 228893 - RNA, 18 nt, Molluscum contagiosum virus
ccagccgcucguccagcu

SEQ ID NO: 228894 - RNA, 11 nt, Molluscum contagiosum virus
ccagccucauc

SEQ ID NO: 228895 - RNA, 12 nt, Molluscum contagiosum virus
ccagccuggagu

SEQ ID NO: 228896 - RNA, 15 nt, Molluscum contagiosum virus
ccagcgcggccgugg

SEQ ID NO: 228897 - RNA, 15 nt, Molluscum contagiosum virus
ccagcgcaucaugcg

SEQ ID NO: 228898 - RNA, 13 nt, Molluscum contagiosum virus
ccacuacugggag

SEQ ID NO: 228899 - RNA, 14 nt, Molluscum contagiosum virus
ccacugggucuguu

SEQ ID NO: 228900 - RNA, 16 nt, Molluscum contagiosum virus
ccacgcuugcacgggg

SEQ ID NO: 228901 - RNA, 18 nt, Molluscum contagiosum virus
ccacgcuugcacggggaa

SEQ ID NO: 228902 - RNA, 23 nt, Molluscum contagiosum virus
ccacgcggagcucgccaaagcgc

SEQ ID NO: 228903 - RNA, 18 nt, Molluscum contagiosum virus
ccacgcgugcgcgccagg

SEQ ID NO: 228904 - RNA, 12 nt, Molluscum contagiosum virus
ccacgaucuucu

SEQ ID NO: 228905 - RNA, 23 nt, Molluscum contagiosum virus
ccacgcaaaaaacgaaaagccag

SEQ ID NO: 228906 - RNA, 20 nt, Molluscum contagiosum virus
cauugcgucuuacugcugca

SEQ ID NO: 228907 - RNA, 22 nt, Molluscum contagiosum virus
cauugcgucuuacugcugcaau

SEQ ID NO: 228908 - RNA, 15 nt, Molluscum contagiosum virus
cauuggcagcgcuuu

SEQ ID NO: 228909 - RNA, 15 nt, Molluscum contagiosum virus
cauuggcauccggca

SEQ ID NO: 228910 - RNA, 22 nt, Molluscum contagiosum virus
cauuggcauccggcacgcacaa

SEQ ID NO: 228911 - RNA, 23 nt, Molluscum contagiosum virus
cauuggcauccggcacgcacaaa

SEQ ID NO: 228912 - RNA, 16 nt, Molluscum contagiosum virus
cauucuuaauccagua

SEQ ID NO: 228913 - RNA, 17 nt, Molluscum contagiosum virus
cauucuucuccgaugug

SEQ ID NO: 228914 - RNA, 12 nt, Molluscum contagiosum virus
cauuccucggcg

SEQ ID NO: 228915 - RNA, 21 nt, Molluscum contagiosum virus
cauggcgagcuagugcacacc

SEQ ID NO: 228916 - RNA, 17 nt, Molluscum contagiosum virus
caugggcaaggacaucu

SEQ ID NO: 228917 - RNA, 14 nt, Molluscum contagiosum virus
caugggcacaaguc

SEQ ID NO: 228918 - RNA, 16 nt, Molluscum contagiosum virus
caugcacacgcaccgc

SEQ ID NO: 228919 - RNA, 20 nt, Molluscum contagiosum virus
cauggaugcgacugcgcaau

SEQ ID NO: 228920 - RNA, 14 nt, Molluscum contagiosum virus
caugcaggccgaga

SEQ ID NO: 228921 - RNA, 11 nt, Molluscum contagiosum virus
caugcagucac

SEQ ID NO: 228922 - RNA, 15 nt, Molluscum contagiosum virus
caugaacucgcugcu

SEQ ID NO: 228923 - RNA, 15 nt, Molluscum contagiosum virus
caugaccaagcacau

SEQ ID NO: 228924 - RNA, 21 nt, Molluscum contagiosum virus
caugaacaacauggugcuggc

SEQ ID NO: 228925 - RNA, 16 nt, Molluscum contagiosum virus
caucuucugccaggcg

SEQ ID NO: 228926 - RNA, 20 nt, Molluscum contagiosum virus
caucuuuuuuaugcacuuuc

SEQ ID NO: 228927 - RNA, 21 nt, Molluscum contagiosum virus
caucuuuuuuaugcacuuuca

SEQ ID NO: 228928 - RNA, 22 nt, Molluscum contagiosum virus
caucuuuuuuaugcacuuucaa

SEQ ID NO: 228929 - RNA, 22 nt, Molluscum contagiosum virus
caucgagaugcucaagcacugc

SEQ ID NO: 228930 - RNA, 19 nt, Molluscum contagiosum virus
caucgcaguucggcgacac

SEQ ID NO: 228931 - RNA, 22 nt, Molluscum contagiosum virus
cauccacauuacgcucguggaa

SEQ ID NO: 228932 - RNA, 21 nt, Molluscum contagiosum virus
caucccugccacaugcaguac

SEQ ID NO: 228933 - RNA, 19 nt, Molluscum contagiosum virus
cauccccaacauccugcca

SEQ ID NO: 228934 - RNA, 11 nt, Molluscum contagiosum virus
cauccugauga

SEQ ID NO: 228935 - RNA, 21 nt, Molluscum contagiosum virus
cauccuggggaaccgcugcuu

SEQ ID NO: 228936 - RNA, 14 nt, Molluscum contagiosum virus
cauccgcuaccugg

SEQ ID NO: 228937 - RNA, 17 nt, Molluscum contagiosum virus
cauccggcacgcacaaa

SEQ ID NO: 228938 - RNA, 14 nt, Molluscum contagiosum virus
caggauggcgcuga

SEQ ID NO: 228939 - RNA, 21 nt, Molluscum contagiosum virus
cauauucccuuguacaauaca

SEQ ID NO: 228940 - RNA, 15 nt, Molluscum contagiosum virus
caggagaacuacaaa

SEQ ID NO: 228941 - RNA, 22 nt, Molluscum contagiosum virus
caggagaacuacaaaacugaau

SEQ ID NO: 228942 - RNA, 18 nt, Molluscum contagiosum virus
caggacgacgacacagcc

SEQ ID NO: 228943 - RNA, 14 nt, Molluscum contagiosum virus
caucaagaaguuca

SEQ ID NO: 228944 - RNA, 16 nt, Molluscum contagiosum virus
caucagagaagugcuc

SEQ ID NO: 228945 - RNA, 17 nt, Molluscum contagiosum virus
caucagagaagugcucc

SEQ ID NO: 228946 - RNA, 23 nt, Molluscum contagiosum virus
caucagcgcggaggcgcuaccuc

SEQ ID NO: 228947 - RNA, 16 nt, Molluscum contagiosum virus
caucaugagccagucu

SEQ ID NO: 228948 - RNA, 18 nt, Molluscum contagiosum virus
cuacaagcagccgcagua

SEQ ID NO: 228949 - RNA, 21 nt, Molluscum contagiosum virus
cuagcagacaacugcgucuca

SEQ ID NO: 228950 - RNA, 17 nt, Molluscum contagiosum virus
cuaguucccauggaugc

SEQ ID NO: 228951 - RNA, 15 nt, Molluscum contagiosum virus
cuagcugcgugcgua

SEQ ID NO: 228952 - RNA, 23 nt, Molluscum contagiosum virus
cuagcguucccaagcaaagccuc

SEQ ID NO: 228953 - RNA, 14 nt, Molluscum contagiosum virus
cuagcgcaggcagu

SEQ ID NO: 228954 - RNA, 18 nt, Molluscum contagiosum virus
cuagccccagcaccaggu

SEQ ID NO: 228955 - RNA, 16 nt, Molluscum contagiosum virus
cuagugcacaccggcg

SEQ ID NO: 228956 - RNA, 19 nt, Molluscum contagiosum virus
cuaucgcuugcuaauugaa

SEQ ID NO: 228957 - RNA, 14 nt, Molluscum contagiosum virus
cuaucgcaaucuga

SEQ ID NO: 228958 - RNA, 15 nt, Molluscum contagiosum virus
cuaucgcaaucugac

SEQ ID NO: 228959 - RNA, 20 nt, Molluscum contagiosum virus
cuaucacgcgucgacuauca

SEQ ID NO: 228960 - RNA, 19 nt, Molluscum contagiosum virus
cucaaaaugaaagaauauc

SEQ ID NO: 228961 - RNA, 13 nt, Molluscum contagiosum virus
cucaucaagaaga

SEQ ID NO: 228962 - RNA, 17 nt, Molluscum contagiosum virus
cucauccaccugcgcaa

SEQ ID NO: 228963 - RNA, 20 nt, Molluscum contagiosum virus
cucauggcgcgcaaccagcu

SEQ ID NO: 228964 - RNA, 14 nt, Molluscum contagiosum virus
cuccaacuagacaa

SEQ ID NO: 228965 - RNA, 22 nt, Molluscum contagiosum virus
cuccaagaagaggccagcacaa

SEQ ID NO: 228966 - RNA, 23 nt, Molluscum contagiosum virus
cuccaagaagaggccagcacaag

SEQ ID NO: 228967 - RNA, 23 nt, Molluscum contagiosum virus
cuccaagaagaggccggcacaag

SEQ ID NO: 228968 - RNA, 14 nt, Molluscum contagiosum virus
cucacgcgcuaccg

SEQ ID NO: 228969 - RNA, 22 nt, Molluscum contagiosum virus
cucacgcgcuaccgcaagcuca

SEQ ID NO: 228970 - RNA, 18 nt, Molluscum contagiosum virus
cucaccucgcaugaugaa

SEQ ID NO: 228971 - RNA, 16 nt, Molluscum contagiosum virus
cucaccgcgcacaucu

SEQ ID NO: 228972 - RNA, 14 nt, Molluscum contagiosum virus
cucaccgcgcagaa

SEQ ID NO: 228973 - RNA, 16 nt, Molluscum contagiosum virus
cucacccugcacgcua

SEQ ID NO: 228974 - RNA, 12 nt, Molluscum contagiosum virus
cucaacauccaa

SEQ ID NO: 228975 - RNA, 13 nt, Molluscum contagiosum virus
cucagaccagagu

SEQ ID NO: 228976 - RNA, 16 nt, Molluscum contagiosum virus
cucagaacguggucaa

SEQ ID NO: 228977 - RNA, 16 nt, Molluscum contagiosum virus
cggcgcgagaugcucg

SEQ ID NO: 228978 - RNA, 22 nt, Molluscum contagiosum virus
cggcgcucgccccuucccggcg

SEQ ID NO: 228979 - RNA, 15 nt, Molluscum contagiosum virus
cggcgcucugccacc

SEQ ID NO: 228980 - RNA, 15 nt, Molluscum contagiosum virus
cggcggaaguggugc

SEQ ID NO: 228981 - RNA, 12 nt, Molluscum contagiosum virus
cggcgagcucuu

SEQ ID NO: 228982 - RNA, 19 nt, Molluscum contagiosum virus
cggcgccccuccuaucuca

SEQ ID NO: 228983 - RNA, 17 nt, Molluscum contagiosum virus
cggcgccgcagcuuuuu

SEQ ID NO: 228984 - RNA, 18 nt, Molluscum contagiosum virus
cggccgccgugugcacau

SEQ ID NO: 228985 - RNA, 18 nt, Molluscum contagiosum virus
cggccgcgcgcgacuuug

SEQ ID NO: 228986 - RNA, 16 nt, Molluscum contagiosum virus
cggccuguaaauggac

SEQ ID NO: 228987 - RNA, 16 nt, Molluscum contagiosum virus
cggcccgcgggcugca

SEQ ID NO: 228988 - RNA, 16 nt, Molluscum contagiosum virus
cggccaugcuccugau

SEQ ID NO: 228989 - RNA, 16 nt, Molluscum contagiosum virus
cggccagcgugcagac

SEQ ID NO: 228990 - RNA, 15 nt, Molluscum contagiosum virus
cggcaucgaguccau

SEQ ID NO: 228991 - RNA, 13 nt, Molluscum contagiosum virus
cggcagcaugcuc

SEQ ID NO: 228992 - RNA, 22 nt, Molluscum contagiosum virus
cggcacgggcucgagcucuucu

SEQ ID NO: 228993 - RNA, 14 nt, Molluscum contagiosum virus
cggcacaaaaccuu

SEQ ID NO: 228994 - RNA, 16 nt, Molluscum contagiosum virus
cggcacacaugcuagc

SEQ ID NO: 228995 - RNA, 23 nt, Molluscum contagiosum virus
cggcaacgcugccgcuggcgcua

SEQ ID NO: 228996 - RNA, 22 nt, Molluscum contagiosum virus
cggcaagcccggaagcuugcuc

SEQ ID NO: 228997 - RNA, 14 nt, Molluscum contagiosum virus
cggcaagccgagcc

SEQ ID NO: 228998 - RNA, 17 nt, Molluscum contagiosum virus
cggaugaacagcuucac

SEQ ID NO: 228999 - RNA, 17 nt, Molluscum contagiosum virus
cggaguuuguagcucua

SEQ ID NO: 229000 - RNA, 20 nt, Molluscum contagiosum virus
cggagucggagaaagacaaa

SEQ ID NO: 229001 - RNA, 13 nt, Molluscum contagiosum virus
cgcaaacaagcag

SEQ ID NO: 229002 - RNA, 23 nt, Molluscum contagiosum virus
cgauuuaacuaagcuaaaagagc

SEQ ID NO: 229003 - RNA, 14 nt, Molluscum contagiosum virus
cgauuuaacucuag

SEQ ID NO: 229004 - RNA, 15 nt, Molluscum contagiosum virus
cggaggcugcgccua

SEQ ID NO: 229005 - RNA, 22 nt, Molluscum contagiosum virus
cggaggcgcagacguaugcgua

SEQ ID NO: 229006 - RNA, 12 nt, Molluscum contagiosum virus
cgcaacaaggaa

SEQ ID NO: 229007 - RNA, 16 nt, Molluscum contagiosum virus
cgcaaccgcgugcgug

SEQ ID NO: 229008 - RNA, 20 nt, Molluscum contagiosum virus
cgcaaccgcgugcgugcaca

SEQ ID NO: 229009 - RNA, 17 nt, Molluscum contagiosum virus
cggcguuucucagguac

SEQ ID NO: 229010 - RNA, 15 nt, Molluscum contagiosum virus
cggcuacgaugaacu

SEQ ID NO: 229011 - RNA, 19 nt, Molluscum contagiosum virus
cggcggugcccgccaagag

SEQ ID NO: 229012 - RNA, 21 nt, Molluscum contagiosum virus
cggcuugccgcucggcacaaa

SEQ ID NO: 229013 - RNA, 22 nt, Molluscum contagiosum virus
cggcuugccgcucggcacaaaa

SEQ ID NO: 229014 - RNA, 17 nt, Molluscum contagiosum virus
cggcucgcgcacuacuc

SEQ ID NO: 229015 - RNA, 22 nt, Molluscum contagiosum virus
cggcuguaaugugcuggucaag

SEQ ID NO: 229016 - RNA, 21 nt, Molluscum contagiosum virus
cgggaggcucucgagcacuuc

SEQ ID NO: 229017 - RNA, 17 nt, Molluscum contagiosum virus
cgggacgcggaugccac

SEQ ID NO: 229018 - RNA, 20 nt, Molluscum contagiosum virus
cgggaauaccggagacacca

SEQ ID NO: 229019 - RNA, 12 nt, Molluscum contagiosum virus
cgggaagcacag

SEQ ID NO: 229020 - RNA, 17 nt, Molluscum contagiosum virus
cgggaagcacaguccag

SEQ ID NO: 229021 - RNA, 17 nt, Molluscum contagiosum virus
cgggaagcacguagcuc

SEQ ID NO: 229022 - RNA, 21 nt, Molluscum contagiosum virus
cgggcucgaggugugccuguu

SEQ ID NO: 229023 - RNA, 16 nt, Molluscum contagiosum virus
cgggccaggcacuggc

SEQ ID NO: 229024 - RNA, 18 nt, Molluscum contagiosum virus
cgggcgccaacacgagcg

SEQ ID NO: 229025 - RNA, 13 nt, Molluscum contagiosum virus
cgggccuuugccg

SEQ ID NO: 229026 - RNA, 13 nt, Molluscum contagiosum virus
cgggucucggggc

SEQ ID NO: 229027 - RNA, 16 nt, Molluscum contagiosum virus
cgggucucggggcucc

SEQ ID NO: 229028 - RNA, 16 nt, Molluscum contagiosum virus
cggguccgucuuugcg

SEQ ID NO: 229029 - RNA, 21 nt, Molluscum contagiosum virus
cgggucgaucccgacacugcg

SEQ ID NO: 229030 - RNA, 19 nt, Molluscum contagiosum virus
cgggugcgagucucuguaa

SEQ ID NO: 229031 - RNA, 17 nt, Molluscum contagiosum virus
cggguguugaccaaagg

SEQ ID NO: 229032 - RNA, 19 nt, Molluscum contagiosum virus
cgugcugcgccgccugcuc

SEQ ID NO: 229033 - RNA, 19 nt, Molluscum contagiosum virus
cgugcugcgucacaagcac

SEQ ID NO: 229034 - RNA, 21 nt, Molluscum contagiosum virus
cgugugccgccgcacuaugga

SEQ ID NO: 229035 - RNA, 17 nt, Molluscum contagiosum virus
cgugugcguacugggag

SEQ ID NO: 229036 - RNA, 15 nt, Molluscum contagiosum virus
cgugugcgugacacg

SEQ ID NO: 229037 - RNA, 20 nt, Molluscum contagiosum virus
cgugcuagcccgcaccugcg

SEQ ID NO: 229038 - RNA, 15 nt, Molluscum contagiosum virus
cgugcuacuacugua

SEQ ID NO: 229039 - RNA, 21 nt, Molluscum contagiosum virus
cgugcggugacuugccguguu

SEQ ID NO: 229040 - RNA, 15 nt, Molluscum contagiosum virus
cgugcgugcacagcg

SEQ ID NO: 229041 - RNA, 22 nt, Molluscum contagiosum virus
cgugcaacaagcggacuacauc

SEQ ID NO: 229042 - RNA, 23 nt, Molluscum contagiosum virus
cgugcgccgccgcaggcccggcg

SEQ ID NO: 229043 - RNA, 21 nt, Molluscum contagiosum virus
cgugcggcggcgcgugcugcg

SEQ ID NO: 229044 - RNA, 16 nt, Molluscum contagiosum virus
cgugaacuccaagguc

SEQ ID NO: 229045 - RNA, 15 nt, Molluscum contagiosum virus
cgugaccagugcgug

SEQ ID NO: 229046 - RNA, 15 nt, Molluscum contagiosum virus
cgugaccuucgugcu

SEQ ID NO: 229047 - RNA, 13 nt, Molluscum contagiosum virus
cgugacacuaccg

SEQ ID NO: 229048 - RNA, 15 nt, Molluscum contagiosum virus
cgugcacguccucca

SEQ ID NO: 229049 - RNA, 17 nt, Molluscum contagiosum virus
cgugcacugucuuuucc

SEQ ID NO: 229050 - RNA, 15 nt, Molluscum contagiosum virus
cgugcagacgcucaa

SEQ ID NO: 229051 - RNA, 12 nt, Molluscum contagiosum virus
cgugccauuucg

SEQ ID NO: 229052 - RNA, 16 nt, Molluscum contagiosum virus
cgugagcgccuaccgc

SEQ ID NO: 229053 - RNA, 18 nt, Molluscum contagiosum virus
cgguguccacgacacugg

SEQ ID NO: 229054 - RNA, 15 nt, Molluscum contagiosum virus
cgguaaacucuugca

SEQ ID NO: 229055 - RNA, 14 nt, Molluscum contagiosum virus
cgguugaccagcuc

SEQ ID NO: 229056 - RNA, 23 nt, Molluscum contagiosum virus
cgguucacgcccgcaaugcagug

SEQ ID NO: 229057 - RNA, 13 nt, Molluscum contagiosum virus
cguaauccauguc

SEQ ID NO: 229058 - RNA, 14 nt, Molluscum contagiosum virus
cuaaucagcgccau

SEQ ID NO: 229059 - RNA, 15 nt, Molluscum contagiosum virus
cguugccugcacuga

SEQ ID NO: 229060 - RNA, 13 nt, Molluscum contagiosum virus
cguugcagcagca

SEQ ID NO: 229061 - RNA, 14 nt, Molluscum contagiosum virus
cguuggacaucagc

SEQ ID NO: 229062 - RNA, 13 nt, Molluscum contagiosum virus
cguugugcuccuu

SEQ ID NO: 229063 - RNA, 17 nt, Molluscum contagiosum virus
cuaaauaugaaccacuu

SEQ ID NO: 229064 - RNA, 14 nt, Molluscum contagiosum virus
cguuccaaaagaca

SEQ ID NO: 229065 - RNA, 14 nt, Molluscum contagiosum virus
cguucgcgaccugg

SEQ ID NO: 229066 - RNA, 14 nt, Molluscum contagiosum virus
cuccgcgcaccgcg

SEQ ID NO: 229067 - RNA, 20 nt, Molluscum contagiosum virus
cuccggcgucgaaacacugc

SEQ ID NO: 229068 - RNA, 16 nt, Molluscum contagiosum virus
cuccgccgggaauacc

SEQ ID NO: 229069 - RNA, 21 nt, Molluscum contagiosum virus
cuccgccgggaauaccggaga

SEQ ID NO: 229070 - RNA, 22 nt, Molluscum contagiosum virus
cuccgccgggaauaccggagag

SEQ ID NO: 229071 - RNA, 14 nt, Molluscum contagiosum virus
cuccgaguccagcu

SEQ ID NO: 229072 - RNA, 16 nt, Molluscum contagiosum virus
cuccgaccgugcccug

SEQ ID NO: 229073 - RNA, 23 nt, Molluscum contagiosum virus
cuccgacgugcugcgcaaccuca

SEQ ID NO: 229074 - RNA, 20 nt, Molluscum contagiosum virus
cuccgcaagaagcgaaacac

SEQ ID NO: 229075 - RNA, 22 nt, Molluscum contagiosum virus
cuccgcaagaagcgaaacacgc

SEQ ID NO: 229076 - RNA, 20 nt, Molluscum contagiosum virus
cuccgcacagcuucacguac

SEQ ID NO: 229077 - RNA, 15 nt, Molluscum contagiosum virus
cuccucgaccugcac

SEQ ID NO: 229078 - RNA, 14 nt, Molluscum contagiosum virus
cucuuccaccggca

SEQ ID NO: 229079 - RNA, 17 nt, Molluscum contagiosum virus
cucuuccgcgagcacgu

SEQ ID NO: 229080 - RNA, 19 nt, Molluscum contagiosum virus
cucuucgcaggcgugcuca

SEQ ID NO: 229081 - RNA, 20 nt, Molluscum contagiosum virus
cucuucgcaggcgugcucag

SEQ ID NO: 229082 - RNA, 20 nt, Molluscum contagiosum virus
cucuucgucuuaacucagcg

SEQ ID NO: 229083 - RNA, 22 nt, Molluscum contagiosum virus
cucuugugaggaaacacccagg

SEQ ID NO: 229084 - RNA, 22 nt, Molluscum contagiosum virus
cucuugcacgccuacgagcaca

SEQ ID NO: 229085 - RNA, 21 nt, Molluscum contagiosum virus
cugaaguccaucggugggcuc

SEQ ID NO: 229086 - RNA, 13 nt, Molluscum contagiosum virus
cugauaugcauau

SEQ ID NO: 229087 - RNA, 17 nt, Molluscum contagiosum virus
cugagugcugagccaca

SEQ ID NO: 229088 - RNA, 13 nt, Molluscum contagiosum virus
cugaggaagcaag

SEQ ID NO: 229089 - RNA, 15 nt, Molluscum contagiosum virus
cugagcgagcgcagu

SEQ ID NO: 229090 - RNA, 19 nt, Molluscum contagiosum virus
cugagcuagugccgagcuc

SEQ ID NO: 229091 - RNA, 23 nt, Molluscum contagiosum virus
cugagaagcuguaccuggugcgc

SEQ ID NO: 229092 - RNA, 11 nt, Molluscum contagiosum virus
cugacugcugc

SEQ ID NO: 229093 - RNA, 12 nt, Molluscum contagiosum virus
cugacugcugcc

SEQ ID NO: 229094 - RNA, 14 nt, Molluscum contagiosum virus
cugagcaagcucaa

SEQ ID NO: 229095 - RNA, 23 nt, Molluscum contagiosum virus
cugagcaagcucaagaagcccaa

SEQ ID NO: 229096 - RNA, 21 nt, Molluscum contagiosum virus
cugagauacaaccgcugcuau

SEQ ID NO: 229097 - RNA, 19 nt, Molluscum contagiosum virus
cugacgaacggaacacagu

SEQ ID NO: 229098 - RNA, 16 nt, Molluscum contagiosum virus
cugacuagaugcauag

SEQ ID NO: 229099 - RNA, 22 nt, Molluscum contagiosum virus
cugacuccguuuuucugugcuc

SEQ ID NO: 229100 - RNA, 16 nt, Molluscum contagiosum virus
cugacucggacacugg

SEQ ID NO: 229101 - RNA, 18 nt, Molluscum contagiosum virus
cugggccgcaugcaccua

SEQ ID NO: 229102 - RNA, 21 nt, Molluscum contagiosum virus
cugggcgccgcgcugaugcua

SEQ ID NO: 229103 - RNA, 17 nt, Molluscum contagiosum virus
cugggcgucgcacaguu

SEQ ID NO: 229104 - RNA, 19 nt, Molluscum contagiosum virus
cugggcgucgcacaguuca

SEQ ID NO: 229105 - RNA, 17 nt, Molluscum contagiosum virus
cugggagcuuuccuugc

SEQ ID NO: 229106 - RNA, 17 nt, Molluscum contagiosum virus
cuggggcuggacagcau

SEQ ID NO: 229107 - RNA, 15 nt, Molluscum contagiosum virus
cuguauccuuggcaa

SEQ ID NO: 229108 - RNA, 12 nt, Molluscum contagiosum virus
cuggucaacagc

SEQ ID NO: 229109 - RNA, 19 nt, Molluscum contagiosum virus
cuggugaccuucaccauca

SEQ ID NO: 229110 - RNA, 23 nt, Molluscum contagiosum virus
cuggccgaacugcucugcgugua

SEQ ID NO: 229111 - RNA, 21 nt, Molluscum contagiosum virus
cuggccaaggacgacaacacu

SEQ ID NO: 229112 - RNA, 14 nt, Molluscum contagiosum virus
cuggccagccucau

SEQ ID NO: 229113 - RNA, 21 nt, Molluscum contagiosum virus
cuggccggcucgcuacgcgua

SEQ ID NO: 229114 - RNA, 14 nt, Molluscum contagiosum virus
cuggcgacacauug

SEQ ID NO: 229115 - RNA, 16 nt, Molluscum contagiosum virus
cuggcgacacauugcc

SEQ ID NO: 229116 - RNA, 17 nt, Molluscum contagiosum virus
cuggcgacacauugccg

SEQ ID NO: 229117 - RNA, 14 nt, Molluscum contagiosum virus
cuggcgggcgcggu

SEQ ID NO: 229118 - RNA, 20 nt, Molluscum contagiosum virus
cuggcguacucgugucacaa

SEQ ID NO: 229119 - RNA, 14 nt, Molluscum contagiosum virus
cuggcgaaaccugg

SEQ ID NO: 229120 - RNA, 17 nt, Molluscum contagiosum virus
cuggcgcgcgccgagcc

SEQ ID NO: 229121 - RNA, 14 nt, Molluscum contagiosum virus
cuggcgcugcuaua

SEQ ID NO: 229122 - RNA, 18 nt, Molluscum contagiosum virus
cuggcucguacugcugca

SEQ ID NO: 229123 - RNA, 22 nt, Molluscum contagiosum virus
cuggcuucuccaccuucaggac

SEQ ID NO: 229124 - RNA, 16 nt, Molluscum contagiosum virus
cugcuggagcuagcgc

SEQ ID NO: 229125 - RNA, 12 nt, Molluscum contagiosum virus
cugcuggugcuc

SEQ ID NO: 229126 - RNA, 17 nt, Molluscum contagiosum virus
cugcugguggugcugga

SEQ ID NO: 229127 - RNA, 16 nt, Molluscum contagiosum virus
cugcugguucugcucg

SEQ ID NO: 229128 - RNA, 15 nt, Molluscum contagiosum virus
cugccacaugcagua

SEQ ID NO: 229129 - RNA, 14 nt, Molluscum contagiosum virus
cuggaaacacgugg

SEQ ID NO: 229130 - RNA, 15 nt, Molluscum contagiosum virus
cuggaaacacguggc

SEQ ID NO: 229131 - RNA, 12 nt, Molluscum contagiosum virus
cugcuuugcacg

SEQ ID NO: 229132 - RNA, 14 nt, Molluscum contagiosum virus
cugcagcaccugca

SEQ ID NO: 229133 - RNA, 17 nt, Molluscum contagiosum virus
cugcagcagccccgacg

SEQ ID NO: 229134 - RNA, 23 nt, Molluscum contagiosum virus
cugcagcagccccgacgccagcg

SEQ ID NO: 229135 - RNA, 12 nt, Molluscum contagiosum virus
cugcagcagcug

SEQ ID NO: 229136 - RNA, 17 nt, Molluscum contagiosum virus
cugcauacacuuccugc

SEQ ID NO: 229137 - RNA, 14 nt, Molluscum contagiosum virus
cugcagguguguau

SEQ ID NO: 229138 - RNA, 21 nt, Molluscum contagiosum virus
cugcaucuuuuuuaugcacuu

SEQ ID NO: 229139 - RNA, 13 nt, Molluscum contagiosum virus
cuucaaguuccug

SEQ ID NO: 229140 - RNA, 13 nt, Molluscum contagiosum virus
cuucaaguaccug

SEQ ID NO: 229141 - RNA, 12 nt, Molluscum contagiosum virus
cuucaagacugg

SEQ ID NO: 229142 - RNA, 15 nt, Molluscum contagiosum virus
cuucaagacuggcac

SEQ ID NO: 229143 - RNA, 17 nt, Molluscum contagiosum virus
cuucaacuacaaggugc

SEQ ID NO: 229144 - RNA, 12 nt, Molluscum contagiosum virus
cuucaacuucca

SEQ ID NO: 229145 - RNA, 21 nt, Molluscum contagiosum virus
cuuauuggacguccacaaagc

SEQ ID NO: 229146 - RNA, 19 nt, Molluscum contagiosum virus
cuuaugcauccugaugcuu

SEQ ID NO: 229147 - RNA, 18 nt, Molluscum contagiosum virus
cuuccauugcauggacau

SEQ ID NO: 229148 - RNA, 20 nt, Molluscum contagiosum virus
cuuccauugcauggacaucc

SEQ ID NO: 229149 - RNA, 21 nt, Molluscum contagiosum virus
cuuccauugcauggacauccu

SEQ ID NO: 229150 - RNA, 19 nt, Molluscum contagiosum virus
cuuccacgccuucguggag

SEQ ID NO: 229151 - RNA, 14 nt, Molluscum contagiosum virus
cuuccacgucucca

SEQ ID NO: 229152 - RNA, 16 nt, Molluscum contagiosum virus
cuuccagaagguacug

SEQ ID NO: 229153 - RNA, 13 nt, Molluscum contagiosum virus
cuucaugggaacu

SEQ ID NO: 229154 - RNA, 18 nt, Molluscum contagiosum virus
cuucaugaaauacuucaa

SEQ ID NO: 229155 - RNA, 17 nt, Molluscum contagiosum virus
cuucaucaagcacggcu

SEQ ID NO: 229156 - RNA, 20 nt, Molluscum contagiosum virus
cuucaucaccgggauggucu

SEQ ID NO: 229157 - RNA, 22 nt, Molluscum contagiosum virus
cuuaucccagaaaacgcacugu

SEQ ID NO: 229158 - RNA, 20 nt, Molluscum contagiosum virus
cuuagccaacagcgcaagcu

SEQ ID NO: 229159 - RNA, 22 nt, Molluscum contagiosum virus
cuguccaaggugaacgaccuca

SEQ ID NO: 229160 - RNA, 19 nt, Molluscum contagiosum virus
cuguccacaaaaccaaaac

SEQ ID NO: 229161 - RNA, 13 nt, Molluscum contagiosum virus
cuguaugaucugc

SEQ ID NO: 229162 - RNA, 18 nt, Molluscum contagiosum virus
cuguaugaucugcaguuc

SEQ ID NO: 229163 - RNA, 19 nt, Molluscum contagiosum virus
cugucaucaccccgcuggg

SEQ ID NO: 229164 - RNA, 14 nt, Molluscum contagiosum virus
cugucaacagugcg

SEQ ID NO: 229165 - RNA, 16 nt, Molluscum contagiosum virus
cugucgcgcacgagcg

SEQ ID NO: 229166 - RNA, 15 nt, Molluscum contagiosum virus
cuguccuucaagaac

SEQ ID NO: 229167 - RNA, 21 nt, Molluscum contagiosum virus
cuuacgcuugucguaagggcg

SEQ ID NO: 229168 - RNA, 19 nt, Molluscum contagiosum virus
cugucguugucgccgugaa

SEQ ID NO: 229169 - RNA, 17 nt, Molluscum contagiosum virus
cuugacaaguacaugca

SEQ ID NO: 229170 - RNA, 16 nt, Molluscum contagiosum virus
cuugauaaaagcacag

SEQ ID NO: 229171 - RNA, 17 nt, Molluscum contagiosum virus
cuugauaaaagcacagu

SEQ ID NO: 229172 - RNA, 20 nt, Molluscum contagiosum virus
cuugcacucgaccgucuuca

SEQ ID NO: 229173 - RNA, 17 nt, Molluscum contagiosum virus
cuugcgagcgcugccug

SEQ ID NO: 229174 - RNA, 17 nt, Molluscum contagiosum virus
cuugccgaggaggugcu

SEQ ID NO: 229175 - RNA, 14 nt, Molluscum contagiosum virus
cuugccguguucua

SEQ ID NO: 229176 - RNA, 16 nt, Molluscum contagiosum virus
cuugaugcuguuacuu

SEQ ID NO: 229177 - RNA, 12 nt, Molluscum contagiosum virus
cuugggcacugc

SEQ ID NO: 229178 - RNA, 15 nt, Molluscum contagiosum virus
cuugggcacugcuac

SEQ ID NO: 229179 - RNA, 18 nt, Molluscum contagiosum virus
cuugcuggcgcgcggaga

SEQ ID NO: 229180 - RNA, 18 nt, Molluscum contagiosum virus
cuugcucggacacacgca

SEQ ID NO: 229181 - RNA, 19 nt, Molluscum contagiosum virus
cuugcgcggaagaagcugc

SEQ ID NO: 229182 - RNA, 20 nt, Molluscum contagiosum virus
cuugcgcguucgcaaagacg

SEQ ID NO: 229183 - RNA, 21 nt, Molluscum contagiosum virus
cuugcgcguucgcaaagacga

SEQ ID NO: 229184 - RNA, 19 nt, Molluscum contagiosum virus
cuugcuagcaacuugcucu

SEQ ID NO: 229185 - RNA, 19 nt, Molluscum contagiosum virus
cuuggaagacaacucuugu

SEQ ID NO: 229186 - RNA, 11 nt, Molluscum contagiosum virus
cuuggcaaagg

SEQ ID NO: 229187 - RNA, 17 nt, Molluscum contagiosum virus
cuucucgaaaaugaaaa

SEQ ID NO: 229188 - RNA, 18 nt, Molluscum contagiosum virus
cuucucgcagcguuccag

SEQ ID NO: 229189 - RNA, 21 nt, Molluscum contagiosum virus
cuucuggaucaccacuggaca

SEQ ID NO: 229190 - RNA, 17 nt, Molluscum contagiosum virus
cuucuugguguucugcg

SEQ ID NO: 229191 - RNA, 13 nt, Molluscum contagiosum virus
cuugaagggcaca

SEQ ID NO: 229192 - RNA, 20 nt, Molluscum contagiosum virus
cuuccugcugcgcagcaucc

SEQ ID NO: 229193 - RNA, 18 nt, Molluscum contagiosum virus
cuuccuggaguaccggcu

SEQ ID NO: 229194 - RNA, 16 nt, Molluscum contagiosum virus
cuuccuggggcuggac

SEQ ID NO: 229195 - RNA, 22 nt, Molluscum contagiosum virus
cuuccgauagguccgauucacu

SEQ ID NO: 229196 - RNA, 21 nt, Molluscum contagiosum virus
cuuccgcaacgaggucuucca

SEQ ID NO: 229197 - RNA, 18 nt, Molluscum contagiosum virus
cuuccggagacaccagcu

SEQ ID NO: 229198 - RNA, 20 nt, Molluscum contagiosum virus
cuucgcgacgacgagcacua

SEQ ID NO: 229199 - RNA, 15 nt, Molluscum contagiosum virus
cuucgcgaugugcac

SEQ ID NO: 229200 - RNA, 21 nt, Molluscum contagiosum virus
cuucgcguaccaagccgugac

SEQ ID NO: 229201 - RNA, 13 nt, Molluscum contagiosum virus
cuucgcauugacc

SEQ ID NO: 229202 - RNA, 16 nt, Molluscum contagiosum virus
cuucgaagaggucucu

SEQ ID NO: 229203 - RNA, 18 nt, Molluscum contagiosum virus
cuucgacaacaugcucgu

SEQ ID NO: 229204 - RNA, 18 nt, Molluscum contagiosum virus
cuucgcaagugcacacca

SEQ ID NO: 229205 - RNA, 18 nt, Molluscum contagiosum virus
cuucgcagagaccgucaa

SEQ ID NO: 229206 - RNA, 22 nt, Molluscum contagiosum virus
cuucguggacgagcgcuaccug

SEQ ID NO: 229207 - RNA, 13 nt, Molluscum contagiosum virus
cuucguggccaaa

SEQ ID NO: 229208 - RNA, 14 nt, Molluscum contagiosum virus
cuucgucaagcagc

SEQ ID NO: 229209 - RNA, 17 nt, Molluscum contagiosum virus
cuucggcucgggaacaa

SEQ ID NO: 229210 - RNA, 20 nt, Molluscum contagiosum virus
cuucggcucgggaacaaagg

SEQ ID NO: 229211 - RNA, 18 nt, Molluscum contagiosum virus
guccuuucacacacggaa

SEQ ID NO: 229212 - RNA, 18 nt, Molluscum contagiosum virus
gucgaagaccaccagcac

SEQ ID NO: 229213 - RNA, 15 nt, Molluscum contagiosum virus
gucgaaacacugcgg

SEQ ID NO: 229214 - RNA, 14 nt, Molluscum contagiosum virus
gucgagcagauuca

SEQ ID NO: 229215 - RNA, 14 nt, Molluscum contagiosum virus
gucgagaauagcug

SEQ ID NO: 229216 - RNA, 20 nt, Molluscum contagiosum virus
gucgagaccuuccuccaggg

SEQ ID NO: 229217 - RNA, 14 nt, Molluscum contagiosum virus
gucgagaugcucua

SEQ ID NO: 229218 - RNA, 14 nt, Molluscum contagiosum virus
guccuugccaaguc

SEQ ID NO: 229219 - RNA, 16 nt, Molluscum contagiosum virus
guccuggagggguguu

SEQ ID NO: 229220 - RNA, 19 nt, Molluscum contagiosum virus
guccuggagggguguuucc

SEQ ID NO: 229221 - RNA, 15 nt, Molluscum contagiosum virus
guccuacuucgucaa

SEQ ID NO: 229222 - RNA, 21 nt, Molluscum contagiosum virus
guccucgacaaugagcacuug

SEQ ID NO: 229223 - RNA, 22 nt, Molluscum contagiosum virus
guccucgacaaugagcacuugc

SEQ ID NO: 229224 - RNA, 23 nt, Molluscum contagiosum virus
guccucgugggauaggcacacac

SEQ ID NO: 229225 - RNA, 16 nt, Molluscum contagiosum virus
guccucuccgucaggg

SEQ ID NO: 229226 - RNA, 17 nt, Molluscum contagiosum virus
guaccggccaaggcaaa

SEQ ID NO: 229227 - RNA, 17 nt, Molluscum contagiosum virus
guaccggcucaagaaca

SEQ ID NO: 229228 - RNA, 14 nt, Molluscum contagiosum virus
guacaugcgugcua

SEQ ID NO: 229229 - RNA, 18 nt, Molluscum contagiosum virus
guacaugcgugcuagccc

SEQ ID NO: 229230 - RNA, 13 nt, Molluscum contagiosum virus
guacaugcucaag

SEQ ID NO: 229231 - RNA, 18 nt, Molluscum contagiosum virus
guacaacccaaacauguc

SEQ ID NO: 229232 - RNA, 19 nt, Molluscum contagiosum virus
guacaacccaaacaugucc

SEQ ID NO: 229233 - RNA, 15 nt, Molluscum contagiosum virus
guacagcgcgcgugc

SEQ ID NO: 229234 - RNA, 21 nt, Molluscum contagiosum virus
guacauaaaauggaccagaaa

SEQ ID NO: 229235 - RNA, 21 nt, Molluscum contagiosum virus
guacauauucccuuguacaau

SEQ ID NO: 229236 - RNA, 21 nt, Molluscum contagiosum virus
guacaucccgcacgugggcua

SEQ ID NO: 229237 - RNA, 12 nt, Molluscum contagiosum virus
gucguuugcucg

SEQ ID NO: 229238 - RNA, 21 nt, Molluscum contagiosum virus
gucguaagggcggacgcacua

SEQ ID NO: 229239 - RNA, 21 nt, Molluscum contagiosum virus
gucgcccgugacacuaccguc

SEQ ID NO: 229240 - RNA, 16 nt, Molluscum contagiosum virus
gucgcguccacgcagg

SEQ ID NO: 229241 - RNA, 16 nt, Molluscum contagiosum virus
gucgcguugcuacucu

SEQ ID NO: 229242 - RNA, 23 nt, Molluscum contagiosum virus
gucucggagaagaacagcacgaa

SEQ ID NO: 229243 - RNA, 13 nt, Molluscum contagiosum virus
gucucucugucuc

SEQ ID NO: 229244 - RNA, 19 nt, Molluscum contagiosum virus
gucuccucgcgcacagaca

SEQ ID NO: 229245 - RNA, 15 nt, Molluscum contagiosum virus
gucucgaugugacaa

SEQ ID NO: 229246 - RNA, 20 nt, Molluscum contagiosum virus
gucuccaacaagcucaucca

SEQ ID NO: 229247 - RNA, 16 nt, Molluscum contagiosum virus
gucugcgaguggcgcg

SEQ ID NO: 229248 - RNA, 20 nt, Molluscum contagiosum virus
gucugcaagcgugacucacc

SEQ ID NO: 229249 - RNA, 20 nt, Molluscum contagiosum virus
gugaacucuucccguuccug

SEQ ID NO: 229250 - RNA, 16 nt, Molluscum contagiosum virus
gugcugcgccacgugc

SEQ ID NO: 229251 - RNA, 17 nt, Molluscum contagiosum virus
gugcugcgcgacaugcu

SEQ ID NO: 229252 - RNA, 18 nt, Molluscum contagiosum virus
gugcugcggcgcgugccg

SEQ ID NO: 229253 - RNA, 13 nt, Molluscum contagiosum virus
gugcucacgcugu

SEQ ID NO: 229254 - RNA, 22 nt, Molluscum contagiosum virus
gugcuccgcaccgucaagaaca

SEQ ID NO: 229255 - RNA, 16 nt, Molluscum contagiosum virus
gugcuccgcacgugga

SEQ ID NO: 229256 - RNA, 20 nt, Molluscum contagiosum virus
gugcuccugaggaagcaaga

SEQ ID NO: 229257 - RNA, 10 nt, Molluscum contagiosum virus
gugcucuuua

SEQ ID NO: 229258 - RNA, 19 nt, Molluscum contagiosum virus
gugcuucccgaguacuacu

SEQ ID NO: 229259 - RNA, 15 nt, Molluscum contagiosum virus
gugcuuccugcaaac

SEQ ID NO: 229260 - RNA, 23 nt, Molluscum contagiosum virus
gugcuggagcagacguacgagca

SEQ ID NO: 229261 - RNA, 13 nt, Molluscum contagiosum virus
gugcuuguucucu

SEQ ID NO: 229262 - RNA, 16 nt, Molluscum contagiosum virus
gugcuggucaagaaca

SEQ ID NO: 229263 - RNA, 21 nt, Molluscum contagiosum virus
guggcgcgcgagcugcugcgc

SEQ ID NO: 229264 - RNA, 13 nt, Molluscum contagiosum virus
guggcggauguca

SEQ ID NO: 229265 - RNA, 15 nt, Molluscum contagiosum virus
guggcggcucugccg

SEQ ID NO: 229266 - RNA, 13 nt, Molluscum contagiosum virus
guggcgugacagg

SEQ ID NO: 229267 - RNA, 17 nt, Molluscum contagiosum virus
guggcgagcaucugcgc

SEQ ID NO: 229268 - RNA, 14 nt, Molluscum contagiosum virus
guggcgcgaaguga

SEQ ID NO: 229269 - RNA, 20 nt, Molluscum contagiosum virus
guggcaugcgcccucacgug

SEQ ID NO: 229270 - RNA, 23 nt, Molluscum contagiosum virus
guggccaagcgcuccaacuucca

SEQ ID NO: 229271 - RNA, 22 nt, Molluscum contagiosum virus
guggccagacaugucguaccug

SEQ ID NO: 229272 - RNA, 17 nt, Molluscum contagiosum virus
guggccguagugcucau

SEQ ID NO: 229273 - RNA, 14 nt, Molluscum contagiosum virus
gugacaacauguga

SEQ ID NO: 229274 - RNA, 18 nt, Molluscum contagiosum virus
gugacaaggauggacaaa

SEQ ID NO: 229275 - RNA, 23 nt, Molluscum contagiosum virus
gugacagguccgguguccacgac

SEQ ID NO: 229276 - RNA, 12 nt, Molluscum contagiosum virus
gugacacuaccg

SEQ ID NO: 229277 - RNA, 15 nt, Molluscum contagiosum virus
gugacgccucgagaa

SEQ ID NO: 229278 - RNA, 20 nt, Molluscum contagiosum virus
gugcgcgaccaguacaucac

SEQ ID NO: 229279 - RNA, 15 nt, Molluscum contagiosum virus
gugcgcgacgggcuc

SEQ ID NO: 229280 - RNA, 11 nt, Molluscum contagiosum virus
gugagaacaag

SEQ ID NO: 229281 - RNA, 17 nt, Molluscum contagiosum virus
gugcgcaccgcgggcug

SEQ ID NO: 229282 - RNA, 13 nt, Molluscum contagiosum virus
gugcgcgcacggc

SEQ ID NO: 229283 - RNA, 14 nt, Molluscum contagiosum virus
gugcgcgcuacaga

SEQ ID NO: 229284 - RNA, 18 nt, Molluscum contagiosum virus
gugcuacgcgagcacugc

SEQ ID NO: 229285 - RNA, 14 nt, Molluscum contagiosum virus
gugcgugcacuguc

SEQ ID NO: 229286 - RNA, 15 nt, Molluscum contagiosum virus
gugcgugcacugucu

SEQ ID NO: 229287 - RNA, 18 nt, Molluscum contagiosum virus
gugcguacgugcacgugg

SEQ ID NO: 229288 - RNA, 13 nt, Molluscum contagiosum virus
gugcgggcacggc

SEQ ID NO: 229289 - RNA, 15 nt, Molluscum contagiosum virus
gugcgcgugagccaa

SEQ ID NO: 229290 - RNA, 12 nt, Molluscum contagiosum virus
guuacucucaga

SEQ ID NO: 229291 - RNA, 17 nt, Molluscum contagiosum virus
guuagaaaugcuugcuu

SEQ ID NO: 229292 - RNA, 19 nt, Molluscum contagiosum virus
guguucgcaggccagugua

SEQ ID NO: 229293 - RNA, 22 nt, Molluscum contagiosum virus
gugugguugcuugcauguucuc

SEQ ID NO: 229294 - RNA, 21 nt, Molluscum contagiosum virus
gugggcagccgccuggccgaa

SEQ ID NO: 229295 - RNA, 13 nt, Molluscum contagiosum virus
gugggcgacguga

SEQ ID NO: 229296 - RNA, 17 nt, Molluscum contagiosum virus
guggguacauguccaag

SEQ ID NO: 229297 - RNA, 18 nt, Molluscum contagiosum virus
uaaacaaacgugcaugca

SEQ ID NO: 229298 - RNA, 18 nt, Molluscum contagiosum virus
uaaauggaccacaagcag

SEQ ID NO: 229299 - RNA, 16 nt, Molluscum contagiosum virus
uaaagagcguccagcc

SEQ ID NO: 229300 - RNA, 22 nt, Molluscum contagiosum virus
guuguucguacucaacaagcug

SEQ ID NO: 229301 - RNA, 14 nt, Molluscum contagiosum virus
guuguugugacacg

SEQ ID NO: 229302 - RNA, 19 nt, Molluscum contagiosum virus
guuucccgcggcgugcccg

SEQ ID NO: 229303 - RNA, 15 nt, Molluscum contagiosum virus
guuugcuaacaggaa

SEQ ID NO: 229304 - RNA, 21 nt, Molluscum contagiosum virus
guuugccaggcaacgcacaaa

SEQ ID NO: 229305 - RNA, 15 nt, Molluscum contagiosum virus
guuucggaacgcuau

SEQ ID NO: 229306 - RNA, 19 nt, Molluscum contagiosum virus
guuucucgcgaaucacaaa

SEQ ID NO: 229307 - RNA, 19 nt, Molluscum contagiosum virus
uaccaggccacgugcucaa

SEQ ID NO: 229308 - RNA, 19 nt, Molluscum contagiosum virus
uaccgacguuuucuuugcg

SEQ ID NO: 229309 - RNA, 13 nt, Molluscum contagiosum virus
uaccgcaagcuca

SEQ ID NO: 229310 - RNA, 15 nt, Molluscum contagiosum virus
uacccguugcugcgc

SEQ ID NO: 229311 - RNA, 16 nt, Molluscum contagiosum virus
uacccgagcugugcca

SEQ ID NO: 229312 - RNA, 15 nt, Molluscum contagiosum virus
uaccggagacaccag

SEQ ID NO: 229313 - RNA, 16 nt, Molluscum contagiosum virus
uaccggagacaccagc

SEQ ID NO: 229314 - RNA, 18 nt, Molluscum contagiosum virus
uacuaagccgcgugcugg

SEQ ID NO: 229315 - RNA, 20 nt, Molluscum contagiosum virus
uacuacggagcgacauagcg

SEQ ID NO: 229316 - RNA, 14 nt, Molluscum contagiosum virus
uacuacuacacugu

SEQ ID NO: 229317 - RNA, 22 nt, Molluscum contagiosum virus
uacuagguggcaugcgcccuca

SEQ ID NO: 229318 - RNA, 11 nt, Molluscum contagiosum virus
aacaagcugca

SEQ ID NO: 229319 - RNA, 11 nt, Molluscum contagiosum virus
aacaagcugcu

SEQ ID NO: 229320 - RNA, 14 nt, Molluscum contagiosum virus
aacaagcucaucca

SEQ ID NO: 229321 - RNA, 15 nt, Molluscum contagiosum virus
aacaagcucauccac

SEQ ID NO: 229322 - RNA, 22 nt, Molluscum contagiosum virus
aacaagaucaccccgcagcuca

SEQ ID NO: 229323 - RNA, 15 nt, Molluscum contagiosum virus
aacaagcacaugugu

SEQ ID NO: 229324 - RNA, 20 nt, Molluscum contagiosum virus
aacaauggacacgcacuggc

SEQ ID NO: 229325 - RNA, 22 nt, Molluscum contagiosum virus
uacaccagcuggacggugcugg

SEQ ID NO: 229326 - RNA, 14 nt, Molluscum contagiosum virus
uacaccgagaucau

SEQ ID NO: 229327 - RNA, 16 nt, Molluscum contagiosum virus
uacacgcacgaccuca

SEQ ID NO: 229328 - RNA, 17 nt, Molluscum contagiosum virus
uacacgcacgaccucac

SEQ ID NO: 229329 - RNA, 18 nt, Molluscum contagiosum virus
uacacgcacgaccucaca

SEQ ID NO: 229330 - RNA, 19 nt, Molluscum contagiosum virus
uaaucacgaugaugaugaa

SEQ ID NO: 229331 - RNA, 14 nt, Molluscum contagiosum virus
uagucaucaaagca

SEQ ID NO: 229332 - RNA, 11 nt, Molluscum contagiosum virus
uagugcagaug

SEQ ID NO: 229333 - RNA, 18 nt, Molluscum contagiosum virus
uaguuuggacgagcugcu

SEQ ID NO: 229334 - RNA, 19 nt, Molluscum contagiosum virus
uaguugcagcccaccagca

SEQ ID NO: 229335 - RNA, 23 nt, Molluscum contagiosum virus
uagcuccagcauagaacacagcu

SEQ ID NO: 229336 - RNA, 12 nt, Molluscum contagiosum virus
uagcuagcucug

SEQ ID NO: 229337 - RNA, 17 nt, Molluscum contagiosum virus
uagcguccgcauccuca

SEQ ID NO: 229338 - RNA, 13 nt, Molluscum contagiosum virus
uagcgcaggcagu

SEQ ID NO: 229339 - RNA, 18 nt, Molluscum contagiosum virus
uagcggcgcuugaugucc

SEQ ID NO: 229340 - RNA, 22 nt, Molluscum contagiosum virus
uagacuucuugguggacagccu

SEQ ID NO: 229341 - RNA, 14 nt, Molluscum contagiosum virus
uagagaaccugugc

SEQ ID NO: 229342 - RNA, 22 nt, Molluscum contagiosum virus
uagacacgagcgcggcaacagc

SEQ ID NO: 229343 - RNA, 22 nt, Molluscum contagiosum virus
uacuugcucguguucguguguu

SEQ ID NO: 229344 - RNA, 21 nt, Molluscum contagiosum virus
uacuucaagcacgagcugcug

SEQ ID NO: 229345 - RNA, 19 nt, Molluscum contagiosum virus
uacuucgcgaugugcaccu

SEQ ID NO: 229346 - RNA, 22 nt, Molluscum contagiosum virus
uagcaacgugaaaaaagaaucc

SEQ ID NO: 229347 - RNA, 14 nt, Molluscum contagiosum virus
uagaugcgucauau

SEQ ID NO: 229348 - RNA, 23 nt, Molluscum contagiosum virus
uagcagcgugcgcaccagcugca

SEQ ID NO: 229349 - RNA, 12 nt, Molluscum contagiosum virus
uagccugugccc

SEQ ID NO: 229350 - RNA, 20 nt, Molluscum contagiosum virus
uagccccucgagcagcggua

SEQ ID NO: 229351 - RNA, 22 nt, Molluscum contagiosum virus
uccaagaagaggccagcacaag

SEQ ID NO: 229352 - RNA, 19 nt, Molluscum contagiosum virus
uccaaggugaacgaccuca

SEQ ID NO: 229353 - RNA, 20 nt, Molluscum contagiosum virus
uccaaggugaacgaccucaa

SEQ ID NO: 229354 - RNA, 17 nt, Molluscum contagiosum virus
uccaaggaggucccuag

SEQ ID NO: 229355 - RNA, 14 nt, Molluscum contagiosum virus
uccaacaagcucau

SEQ ID NO: 229356 - RNA, 13 nt, Molluscum contagiosum virus
uccaacagcagcu

SEQ ID NO: 229357 - RNA, 17 nt, Molluscum contagiosum virus
uccacguggccagacau

SEQ ID NO: 229358 - RNA, 17 nt, Molluscum contagiosum virus
uccacuuucucuauuca

SEQ ID NO: 229359 - RNA, 20 nt, Molluscum contagiosum virus
uccacgcaggacuggcaccu

SEQ ID NO: 229360 - RNA, 13 nt, Molluscum contagiosum virus
uccacgcgcagcu

SEQ ID NO: 229361 - RNA, 12 nt, Molluscum contagiosum virus
uccacgucucca

SEQ ID NO: 229362 - RNA, 19 nt, Molluscum contagiosum virus
uccacgucuccaacaagcu

SEQ ID NO: 229363 - RNA, 13 nt, Molluscum contagiosum virus
uccaugcccacgc

SEQ ID NO: 229364 - RNA, 22 nt, Molluscum contagiosum virus
uccaugacagaaaaaacacaac

SEQ ID NO: 229365 - RNA, 23 nt, Molluscum contagiosum virus
uccaugagagaauggacauuggg

SEQ ID NO: 229366 - RNA, 18 nt, Molluscum contagiosum virus
uccaucggaacuagcccu

SEQ ID NO: 229367 - RNA, 15 nt, Molluscum contagiosum virus
uccauucucucgaga

SEQ ID NO: 229368 - RNA, 21 nt, Molluscum contagiosum virus
ucccgaauccuuuacugcaag

SEQ ID NO: 229369 - RNA, 13 nt, Molluscum contagiosum virus
ucccgcaagccac

SEQ ID NO: 229370 - RNA, 12 nt, Molluscum contagiosum virus
uccgcacgcacg

SEQ ID NO: 229371 - RNA, 18 nt, Molluscum contagiosum virus
uccgcaggcgucaugcgc

SEQ ID NO: 229372 - RNA, 15 nt, Molluscum contagiosum virus
ucccgcgccacgagc

SEQ ID NO: 229373 - RNA, 13 nt, Molluscum contagiosum virus
ucccggugcugcu

SEQ ID NO: 229374 - RNA, 13 nt, Molluscum contagiosum virus
uccggcacgcaca

SEQ ID NO: 229375 - RNA, 12 nt, Molluscum contagiosum virus
uccggcacgugc

SEQ ID NO: 229376 - RNA, 14 nt, Molluscum contagiosum virus
uccggcgcucgccc

SEQ ID NO: 229377 - RNA, 18 nt, Molluscum contagiosum virus
uccgcuguacgugcugcc

SEQ ID NO: 229378 - RNA, 16 nt, Molluscum contagiosum virus
uccggagacaccagcu

SEQ ID NO: 229379 - RNA, 14 nt, Molluscum contagiosum virus
uccgcggggcuccu

SEQ ID NO: 229380 - RNA, 20 nt, Molluscum contagiosum virus
uccgcguuggcagcggcaaa

SEQ ID NO: 229381 - RNA, 12 nt, Molluscum contagiosum virus
uccgcuaccugg

SEQ ID NO: 229382 - RNA, 15 nt, Molluscum contagiosum virus
uccaaaccaacguga

SEQ ID NO: 229383 - RNA, 14 nt, Molluscum contagiosum virus
ucauucgaugacag

SEQ ID NO: 229384 - RNA, 13 nt, Molluscum contagiosum virus
ucaugcugcucau

SEQ ID NO: 229385 - RNA, 14 nt, Molluscum contagiosum virus
ucaugcugcucaug

SEQ ID NO: 229386 - RNA, 15 nt, Molluscum contagiosum virus
ucauggacaugcucg

SEQ ID NO: 229387 - RNA, 13 nt, Molluscum contagiosum virus
ucaucaaagcaca

SEQ ID NO: 229388 - RNA, 22 nt, Molluscum contagiosum virus
ucagauuuugcgucaaggugaa

SEQ ID NO: 229389 - RNA, 16 nt, Molluscum contagiosum virus
ucagaggauucuugca

SEQ ID NO: 229390 - RNA, 15 nt, Molluscum contagiosum virus
ucagcaggcuguguu

SEQ ID NO: 229391 - RNA, 16 nt, Molluscum contagiosum virus
ucagcaggcuguguuc

SEQ ID NO: 229392 - RNA, 12 nt, Molluscum contagiosum virus
ucagcaccaagg

SEQ ID NO: 229393 - RNA, 16 nt, Molluscum contagiosum virus
ucacgaccgacccauc

SEQ ID NO: 229394 - RNA, 13 nt, Molluscum contagiosum virus
ucacgacuguguu

SEQ ID NO: 229395 - RNA, 15 nt, Molluscum contagiosum virus
ucacguacuugagca

SEQ ID NO: 229396 - RNA, 19 nt, Molluscum contagiosum virus
ucacgcugcucgugcugcu

SEQ ID NO: 229397 - RNA, 21 nt, Molluscum contagiosum virus
ucacggaggccgcgugaacaa

SEQ ID NO: 229398 - RNA, 22 nt, Molluscum contagiosum virus
ucacgcgugaguagcaacaaag

SEQ ID NO: 229399 - RNA, 19 nt, Molluscum contagiosum virus
ucacgcuagcgggccugua

SEQ ID NO: 229400 - RNA, 18 nt, Molluscum contagiosum virus
ucacucacaugugcugcc

SEQ ID NO: 229401 - RNA, 17 nt, Molluscum contagiosum virus
ucacuagcgcaggcagu

SEQ ID NO: 229402 - RNA, 20 nt, Molluscum contagiosum virus
ucacuagcgcaggcaguugc

SEQ ID NO: 229403 - RNA, 11 nt, Molluscum contagiosum virus
ucaaguaccug

SEQ ID NO: 229404 - RNA, 16 nt, Molluscum contagiosum virus
ucaaggacuaccagcu

SEQ ID NO: 229405 - RNA, 17 nt, Molluscum contagiosum virus
ucaaggacuaccagcuc

SEQ ID NO: 229406 - RNA, 13 nt, Molluscum contagiosum virus
ucaagcugcucau

SEQ ID NO: 229407 - RNA, 17 nt, Molluscum contagiosum virus
ucaauauacgcaaagga

SEQ ID NO: 229408 - RNA, 16 nt, Molluscum contagiosum virus
ucacaagcaccgccug

SEQ ID NO: 229409 - RNA, 14 nt, Molluscum contagiosum virus
ucacaagguaguca

SEQ ID NO: 229410 - RNA, 22 nt, Molluscum contagiosum virus
ucacaugcuucgcgcaaacaag

SEQ ID NO: 229411 - RNA, 13 nt, Molluscum contagiosum virus
ucacaucuguccc

SEQ ID NO: 229412 - RNA, 23 nt, Molluscum contagiosum virus
ucacagguagugguccaccagcu

SEQ ID NO: 229413 - RNA, 20 nt, Molluscum contagiosum virus
ucaacaacacgaucaaggug

SEQ ID NO: 229414 - RNA, 22 nt, Molluscum contagiosum virus
uauucucguggcguugcugcug

SEQ ID NO: 229415 - RNA, 15 nt, Molluscum contagiosum virus
uauucccuuguacaa

SEQ ID NO: 229416 - RNA, 20 nt, Molluscum contagiosum virus
uauucgcccaucaucgccag

SEQ ID NO: 229417 - RNA, 16 nt, Molluscum contagiosum virus
ugacaaggauggacaa

SEQ ID NO: 229418 - RNA, 18 nt, Molluscum contagiosum virus
ugacagguccggugucca

SEQ ID NO: 229419 - RNA, 19 nt, Molluscum contagiosum virus
ugacacgagccgugugcuc

SEQ ID NO: 229420 - RNA, 18 nt, Molluscum contagiosum virus
ugaccuucaccaucaaca

SEQ ID NO: 229421 - RNA, 19 nt, Molluscum contagiosum virus
ugaccucggucaacggcac

SEQ ID NO: 229422 - RNA, 19 nt, Molluscum contagiosum virus
ugaccgcgggcacgggcac

SEQ ID NO: 229423 - RNA, 16 nt, Molluscum contagiosum virus
ugaccaagcacauucu

SEQ ID NO: 229424 - RNA, 18 nt, Molluscum contagiosum virus
ugaccaagcacauucuca

SEQ ID NO: 229425 - RNA, 17 nt, Molluscum contagiosum virus
ugaagcugucaacagug

SEQ ID NO: 229426 - RNA, 15 nt, Molluscum contagiosum virus
ugaaucccacaaauc

SEQ ID NO: 229427 - RNA, 17 nt, Molluscum contagiosum virus
ugaacucgcugcugcuc

SEQ ID NO: 229428 - RNA, 18 nt, Molluscum contagiosum virus
ugaacucgcugcugcucu

SEQ ID NO: 229429 - RNA, 20 nt, Molluscum contagiosum virus
ugaacaccauccugcgcuuu

SEQ ID NO: 229430 - RNA, 16 nt, Molluscum contagiosum virus
ugaacacgacauguac

SEQ ID NO: 229431 - RNA, 15 nt, Molluscum contagiosum virus
ugaacaucuaugcac

SEQ ID NO: 229432 - RNA, 21 nt, Molluscum contagiosum virus
ucuuucacgcugcacgagcug

SEQ ID NO: 229433 - RNA, 23 nt, Molluscum contagiosum virus
ucuuucucaagaucguuuugcac

SEQ ID NO: 229434 - RNA, 13 nt, Molluscum contagiosum virus
ucuugaugcuguu

SEQ ID NO: 229435 - RNA, 20 nt, Molluscum contagiosum virus
ucuucuuguuguugugacac

SEQ ID NO: 229436 - RNA, 18 nt, Molluscum contagiosum virus
ucuuccuggggcuggaca

SEQ ID NO: 229437 - RNA, 15 nt, Molluscum contagiosum virus
ucuucgcaagugcac

SEQ ID NO: 229438 - RNA, 15 nt, Molluscum contagiosum virus
ucuucguggugcuca

SEQ ID NO: 229439 - RNA, 17 nt, Molluscum contagiosum virus
ucuucggaaagaaccau

SEQ ID NO: 229440 - RNA, 20 nt, Molluscum contagiosum virus
ucuucgggaaggaacaaugc

SEQ ID NO: 229441 - RNA, 18 nt, Molluscum contagiosum virus
ucuucucgcagcguucca

SEQ ID NO: 229442 - RNA, 20 nt, Molluscum contagiosum virus
ucuucuucgggaaggaacaa

SEQ ID NO: 229443 - RNA, 14 nt, Molluscum contagiosum virus
ucuacgacaugcuc

SEQ ID NO: 229444 - RNA, 13 nt, Molluscum contagiosum virus
ucuacaccagcug

SEQ ID NO: 229445 - RNA, 20 nt, Molluscum contagiosum virus
ucuacacgcacgaccucaca

SEQ ID NO: 229446 - RNA, 15 nt, Molluscum contagiosum virus
ucuacacguggaauu

SEQ ID NO: 229447 - RNA, 23 nt, Molluscum contagiosum virus
ucuacuaaaguacgagagcgcau

SEQ ID NO: 229448 - RNA, 14 nt, Molluscum contagiosum virus
ucuaugcccagccu

SEQ ID NO: 229449 - RNA, 18 nt, Molluscum contagiosum virus
ucggagaagugcuccgca

SEQ ID NO: 229450 - RNA, 18 nt, Molluscum contagiosum virus
ucggacggaggucugcuu

SEQ ID NO: 229451 - RNA, 21 nt, Molluscum contagiosum virus
ucguaacaauggacacgcacu

SEQ ID NO: 229452 - RNA, 12 nt, Molluscum contagiosum virus
ucguacugcugc

SEQ ID NO: 229453 - RNA, 16 nt, Molluscum contagiosum virus
ucguggaguuuagcaa

SEQ ID NO: 229454 - RNA, 16 nt, Molluscum contagiosum virus
ucguggcaacaacaug

SEQ ID NO: 229455 - RNA, 22 nt, Molluscum contagiosum virus
ucgugguggaggacgacaauac

SEQ ID NO: 229456 - RNA, 16 nt, Molluscum contagiosum virus
ucgucuucaccugcau

SEQ ID NO: 229457 - RNA, 14 nt, Molluscum contagiosum virus
uccuacacauuccu

SEQ ID NO: 229458 - RNA, 22 nt, Molluscum contagiosum virus
uccgugggcggcauccugauga

SEQ ID NO: 229459 - RNA, 20 nt, Molluscum contagiosum virus
uccgucuugcgcacacacuu

SEQ ID NO: 229460 - RNA, 17 nt, Molluscum contagiosum virus
uccgguguccacgacac

SEQ ID NO: 229461 - RNA, 15 nt, Molluscum contagiosum virus
ucggacacacgcacc

SEQ ID NO: 229462 - RNA, 12 nt, Molluscum contagiosum virus
ucggacaccuca

SEQ ID NO: 229463 - RNA, 13 nt, Molluscum contagiosum virus
ucggacaccucac

SEQ ID NO: 229464 - RNA, 19 nt, Molluscum contagiosum virus
ucggacacguugcagcagc

SEQ ID NO: 229465 - RNA, 20 nt, Molluscum contagiosum virus
ucggacacguugcagcagca

SEQ ID NO: 229466 - RNA, 18 nt, Molluscum contagiosum virus
ucggaacuagcccuagcc

SEQ ID NO: 229467 - RNA, 23 nt, Molluscum contagiosum virus
ucgcgaaucacaaacacgcaaac

SEQ ID NO: 229468 - RNA, 14 nt, Molluscum contagiosum virus
ucgcgauguuuuga

SEQ ID NO: 229469 - RNA, 15 nt, Molluscum contagiosum virus
ucgcgagugugcaug

SEQ ID NO: 229470 - RNA, 18 nt, Molluscum contagiosum virus
ucgcgagagacacaguuc

SEQ ID NO: 229471 - RNA, 14 nt, Molluscum contagiosum virus
ucgcgcgcaccugc

SEQ ID NO: 229472 - RNA, 13 nt, Molluscum contagiosum virus
ucgcgcgccagca

SEQ ID NO: 229473 - RNA, 19 nt, Molluscum contagiosum virus
ucgcgcgcccccgcaaaag

SEQ ID NO: 229474 - RNA, 19 nt, Molluscum contagiosum virus
ucgcgcgcggccguggcaa

SEQ ID NO: 229475 - RNA, 20 nt, Molluscum contagiosum virus
ucgcgcguaaaagacuggcu

SEQ ID NO: 229476 - RNA, 18 nt, Molluscum contagiosum virus
ucgcggguccgucuuugc

SEQ ID NO: 229477 - RNA, 21 nt, Molluscum contagiosum virus
ucucacgcccgcgcugcgcaa

SEQ ID NO: 229478 - RNA, 15 nt, Molluscum contagiosum virus
ucuagacuucuuggu

SEQ ID NO: 229479 - RNA, 16 nt, Molluscum contagiosum virus
ucucaagagccgcuuc

SEQ ID NO: 229480 - RNA, 21 nt, Molluscum contagiosum virus
ucucaacaugaauuuuugaga

SEQ ID NO: 229481 - RNA, 22 nt, Molluscum contagiosum virus
ucugacggucguccuggagccu

SEQ ID NO: 229482 - RNA, 13 nt, Molluscum contagiosum virus
ucugaaaggacau

SEQ ID NO: 229483 - RNA, 16 nt, Molluscum contagiosum virus
ucuucaccugcauuga

SEQ ID NO: 229484 - RNA, 17 nt, Molluscum contagiosum virus
ucugcucuugaugcuga

SEQ ID NO: 229485 - RNA, 22 nt, Molluscum contagiosum virus
ucugucccugcauacacuuccu

SEQ ID NO: 229486 - RNA, 22 nt, Molluscum contagiosum virus
ucugucgccgcgggcugggaaa

SEQ ID NO: 229487 - RNA, 13 nt, Molluscum contagiosum virus
ucugcccgaccac

SEQ ID NO: 229488 - RNA, 22 nt, Molluscum contagiosum virus
ucugccagccgcucguccagcu

SEQ ID NO: 229489 - RNA, 16 nt, Molluscum contagiosum virus
ucugcgcaaccuggau

SEQ ID NO: 229490 - RNA, 17 nt, Molluscum contagiosum virus
aauaccggagacaccag

SEQ ID NO: 229491 - RNA, 12 nt, Molluscum contagiosum virus
aauaccggagag

SEQ ID NO: 229492 - RNA, 15 nt, Molluscum contagiosum virus
aauacgcgcuccuau

SEQ ID NO: 229493 - RNA, 15 nt, Molluscum contagiosum virus
aaguauauucuuuac

SEQ ID NO: 229494 - RNA, 19 nt, Molluscum contagiosum virus
aagggcagcucaagcugcu

SEQ ID NO: 229495 - RNA, 14 nt, Molluscum contagiosum virus
aagggcucugccac

SEQ ID NO: 229496 - RNA, 15 nt, Molluscum contagiosum virus
aaggcaccccgcagg

SEQ ID NO: 229497 - RNA, 16 nt, Molluscum contagiosum virus
aagcgcccgugaugca

SEQ ID NO: 229498 - RNA, 13 nt, Molluscum contagiosum virus
aagcgcgucugca

SEQ ID NO: 229499 - RNA, 13 nt, Molluscum contagiosum virus
aagcgcuugcucu

SEQ ID NO: 229500 - RNA, 15 nt, Molluscum contagiosum virus
aagcguguucgugcc

SEQ ID NO: 229501 - RNA, 19 nt, Molluscum contagiosum virus
aaggaggucuagccgugaa

SEQ ID NO: 229502 - RNA, 12 nt, Molluscum contagiosum virus
aagcucaagccc

SEQ ID NO: 229503 - RNA, 11 nt, Molluscum contagiosum virus
aagccgugacg

SEQ ID NO: 229504 - RNA, 15 nt, Molluscum contagiosum virus
aagcgcacacuugcg

SEQ ID NO: 229505 - RNA, 17 nt, Molluscum contagiosum virus
aagcgcaccuuuuccac

SEQ ID NO: 229506 - RNA, 17 nt, Molluscum contagiosum virus
aagacaacacucgugcu

SEQ ID NO: 229507 - RNA, 13 nt, Molluscum contagiosum virus
aagaacagcacga

SEQ ID NO: 229508 - RNA, 14 nt, Molluscum contagiosum virus
aagaacgucuucua

SEQ ID NO: 229509 - RNA, 21 nt, Molluscum contagiosum virus
aagaagaggccagcacaagcc

SEQ ID NO: 229510 - RNA, 21 nt, Molluscum contagiosum virus
aagaagaggccggcacaagcc

SEQ ID NO: 229511 - RNA, 15 nt, Molluscum contagiosum virus
aagaagcccaaggag

SEQ ID NO: 229512 - RNA, 20 nt, Molluscum contagiosum virus
aauguacgcggugugcacau

SEQ ID NO: 229513 - RNA, 14 nt, Molluscum contagiosum virus
aaugcuugcuuccg

SEQ ID NO: 229514 - RNA, 19 nt, Molluscum contagiosum virus
aaugcugcgcacgcuaguc

SEQ ID NO: 229515 - RNA, 21 nt, Molluscum contagiosum virus
aaugccguguauccaagaggc

SEQ ID NO: 229516 - RNA, 14 nt, Molluscum contagiosum virus
aaugcgcacacuug

SEQ ID NO: 229517 - RNA, 16 nt, Molluscum contagiosum virus
aaugcgcacacuugcg

SEQ ID NO: 229518 - RNA, 18 nt, Molluscum contagiosum virus
aauggaccacaagcagua

SEQ ID NO: 229519 - RNA, 16 nt, Molluscum contagiosum virus
aauggcguuaccagga

SEQ ID NO: 229520 - RNA, 18 nt, Molluscum contagiosum virus
aauggcgcgcgagcacag

SEQ ID NO: 229521 - RNA, 16 nt, Molluscum contagiosum virus
aaugauugucaagcac

SEQ ID NO: 229522 - RNA, 23 nt, Molluscum contagiosum virus
aaugcaguaugugaacacgacau

SEQ ID NO: 229523 - RNA, 14 nt, Molluscum contagiosum virus
aaugcagugcccgg

SEQ ID NO: 229524 - RNA, 23 nt, Molluscum contagiosum virus
aauucuggcguacucgugucaca

SEQ ID NO: 229525 - RNA, 20 nt, Molluscum contagiosum virus
aauuccucgagagggagcag

SEQ ID NO: 229526 - RNA, 21 nt, Molluscum contagiosum virus
aauugggcguuggucuuguga

SEQ ID NO: 229527 - RNA, 21 nt, Molluscum contagiosum virus
aauugagugcgggucacaaga

SEQ ID NO: 229528 - RNA, 18 nt, Molluscum contagiosum virus
aaugugcuggucaagaac

SEQ ID NO: 229529 - RNA, 21 nt, Molluscum contagiosum virus
aauuauguguaguuaaaugac

SEQ ID NO: 229530 - RNA, 23 nt, Molluscum contagiosum virus
aauucaaaggugcucacccuuaa

SEQ ID NO: 229531 - RNA, 17 nt, Molluscum contagiosum virus
aacauugugacaaagac

SEQ ID NO: 229532 - RNA, 12 nt, Molluscum contagiosum virus
aacaugcuguau

SEQ ID NO: 229533 - RNA, 21 nt, Molluscum contagiosum virus
aacagcacguuguucuugcgc

SEQ ID NO: 229534 - RNA, 19 nt, Molluscum contagiosum virus
aaccgugcuggucucggaa

SEQ ID NO: 229535 - RNA, 12 nt, Molluscum contagiosum virus
aaccgcugcuuc

SEQ ID NO: 229536 - RNA, 22 nt, Molluscum contagiosum virus
aaccucacucacaugugcugcc

SEQ ID NO: 229537 - RNA, 18 nt, Molluscum contagiosum virus
aacuacuuccugcagcug

SEQ ID NO: 229538 - RNA, 24 nt, Molluscum contagiosum virus
aacuaccgugugaaaguccacgug

SEQ ID NO: 229539 - RNA, 13 nt, Molluscum contagiosum virus
aacugacugcugc

SEQ ID NO: 229540 - RNA, 13 nt, Molluscum contagiosum virus
aacuggacugagc

SEQ ID NO: 229541 - RNA, 16 nt, Molluscum contagiosum virus
aacugcccgaguuccu

SEQ ID NO: 229542 - RNA, 22 nt, Molluscum contagiosum virus
aacugcaggccccuacacgcaa

SEQ ID NO: 229543 - RNA, 11 nt, Molluscum contagiosum virus
aagaacaacca

SEQ ID NO: 229544 - RNA, 17 nt, Molluscum contagiosum virus
aagaacaauuacuccag

SEQ ID NO: 229545 - RNA, 14 nt, Molluscum contagiosum virus
aagaacaccaagag

SEQ ID NO: 229546 - RNA, 21 nt, Molluscum contagiosum virus
aagaaaaucgccuuugugaca

SEQ ID NO: 229547 - RNA, 15 nt, Molluscum contagiosum virus
aagaaacagccaugu

SEQ ID NO: 229548 - RNA, 20 nt, Molluscum contagiosum virus
aacagagaaaggcacccacc

SEQ ID NO: 229549 - RNA, 17 nt, Molluscum contagiosum virus
uuuuccugaacaagcug

SEQ ID NO: 229550 - RNA, 14 nt, Molluscum contagiosum virus
uuuucgucauggag

SEQ ID NO: 229551 - RNA, 10 nt, Molluscum contagiosum virus
uuuguguugg

SEQ ID NO: 229552 - RNA, 12 nt, Molluscum contagiosum virus
uuugcucggggc

SEQ ID NO: 229553 - RNA, 15 nt, Molluscum contagiosum virus
uuucuuuuuccggga

SEQ ID NO: 229554 - RNA, 22 nt, Molluscum contagiosum virus
uuugccaagagggggcuguuau

SEQ ID NO: 229555 - RNA, 18 nt, Molluscum contagiosum virus
uuugcgcucucagagcau

SEQ ID NO: 229556 - RNA, 16 nt, Molluscum contagiosum virus
uuugcgagcacuguac

SEQ ID NO: 229557 - RNA, 22 nt, Molluscum contagiosum virus
uuugcgaacgcgcaagugugcg

SEQ ID NO: 229558 - RNA, 20 nt, Molluscum contagiosum virus
uuugacuacuacguggugcg

SEQ ID NO: 229559 - RNA, 21 nt, Molluscum contagiosum virus
uuuccaaauggagaugaugua

SEQ ID NO: 229560 - RNA, 12 nt, Molluscum contagiosum virus
uucuugguggag

SEQ ID NO: 229561 - RNA, 20 nt, Molluscum contagiosum virus
uucuugguugccaggcacac

SEQ ID NO: 229562 - RNA, 18 nt, Molluscum contagiosum virus
uucuugacgcgagacugu

SEQ ID NO: 229563 - RNA, 17 nt, Molluscum contagiosum virus
uucuuguugugcuuuga

SEQ ID NO: 229564 - RNA, 21 nt, Molluscum contagiosum virus
uucuugcgcggcggccacacc

SEQ ID NO: 229565 - RNA, 16 nt, Molluscum contagiosum virus
uggagggcacgcugca

SEQ ID NO: 229566 - RNA, 20 nt, Molluscum contagiosum virus
uggagggguguuuccuugcc

SEQ ID NO: 229567 - RNA, 12 nt, Molluscum contagiosum virus
uggagguacugu

SEQ ID NO: 229568 - RNA, 13 nt, Molluscum contagiosum virus
uggaguccaugcc

SEQ ID NO: 229569 - RNA, 21 nt, Molluscum contagiosum virus
uggaguaccggcucaagaaca

SEQ ID NO: 229570 - RNA, 14 nt, Molluscum contagiosum virus
uggaggauucuugu

SEQ ID NO: 229571 - RNA, 17 nt, Molluscum contagiosum virus
uggaggccaacuaccug

SEQ ID NO: 229572 - RNA, 18 nt, Molluscum contagiosum virus
uggaggcgcuagugcaga

SEQ ID NO: 229573 - RNA, 18 nt, Molluscum contagiosum virus
uggagcgcagucccagca

SEQ ID NO: 229574 - RNA, 16 nt, Molluscum contagiosum virus
uggccaaagucuuccu

SEQ ID NO: 229575 - RNA, 21 nt, Molluscum contagiosum virus
uggccaacacuaccacagcca

SEQ ID NO: 229576 - RNA, 22 nt, Molluscum contagiosum virus
uggccaagcgcuccaacuucca

SEQ ID NO: 229577 - RNA, 21 nt, Molluscum contagiosum virus
uggccagcuucaucaagcacg

SEQ ID NO: 229578 - RNA, 22 nt, Molluscum contagiosum virus
uggccugcaaacgcgaaacugg

SEQ ID NO: 229579 - RNA, 23 nt, Molluscum contagiosum virus
uggccgcgccgggcgccagaaca

SEQ ID NO: 229580 - RNA, 17 nt, Molluscum contagiosum virus
uggccguagugcucauc

SEQ ID NO: 229581 - RNA, 14 nt, Molluscum contagiosum virus
ugggagggggacaa

SEQ ID NO: 229582 - RNA, 17 nt, Molluscum contagiosum virus
ugggagcuuuccuugcg

SEQ ID NO: 229583 - RNA, 21 nt, Molluscum contagiosum virus
uggcuugcucggacacacgca

SEQ ID NO: 229584 - RNA, 12 nt, Molluscum contagiosum virus
uggcuacaugca

SEQ ID NO: 229585 - RNA, 13 nt, Molluscum contagiosum virus
uggcucacagccg

SEQ ID NO: 229586 - RNA, 18 nt, Molluscum contagiosum virus
uggcgauccuguccaucu

SEQ ID NO: 229587 - RNA, 18 nt, Molluscum contagiosum virus
uggcgauagcgauggcug

SEQ ID NO: 229588 - RNA, 13 nt, Molluscum contagiosum virus
uggcgacacggag

SEQ ID NO: 229589 - RNA, 13 nt, Molluscum contagiosum virus
uggcgagcaagau

SEQ ID NO: 229590 - RNA, 17 nt, Molluscum contagiosum virus
uggcgagcgcucugcau

SEQ ID NO: 229591 - RNA, 14 nt, Molluscum contagiosum virus
uggcgagcgcugcc

SEQ ID NO: 229592 - RNA, 14 nt, Molluscum contagiosum virus
uggcgcagcacuuc

SEQ ID NO: 229593 - RNA, 15 nt, Molluscum contagiosum virus
uggcgccgaugcagu

SEQ ID NO: 229594 - RNA, 17 nt, Molluscum contagiosum virus
uggcgccgaugcagugc

SEQ ID NO: 229595 - RNA, 15 nt, Molluscum contagiosum virus
uggcgcugcacaguu

SEQ ID NO: 229596 - RNA, 17 nt, Molluscum contagiosum virus
uggcgcugcacaguuca

SEQ ID NO: 229597 - RNA, 22 nt, Molluscum contagiosum virus
uggcgcucgcgcgcacgcgcac

SEQ ID NO: 229598 - RNA, 19 nt, Molluscum contagiosum virus
ugguugcuugcauguucuc

SEQ ID NO: 229599 - RNA, 14 nt, Molluscum contagiosum virus
ugguugugcuuguu

SEQ ID NO: 229600 - RNA, 11 nt, Molluscum contagiosum virus
ugguucugcuc

SEQ ID NO: 229601 - RNA, 14 nt, Molluscum contagiosum virus
ugguaacaagagcu

SEQ ID NO: 229602 - RNA, 21 nt, Molluscum contagiosum virus
ugggccgcuucgcguacaucc

SEQ ID NO: 229603 - RNA, 18 nt, Molluscum contagiosum virus
ugggcacaagcuuucuca

SEQ ID NO: 229604 - RNA, 21 nt, Molluscum contagiosum virus
ugggcaggccgcccacgcuca

SEQ ID NO: 229605 - RNA, 12 nt, Molluscum contagiosum virus
ugggcacguggc

SEQ ID NO: 229606 - RNA, 12 nt, Molluscum contagiosum virus
ugggcacugcua

SEQ ID NO: 229607 - RNA, 18 nt, Molluscum contagiosum virus
ugggcacugcuacgagcc

SEQ ID NO: 229608 - RNA, 16 nt, Molluscum contagiosum virus
ugcugcccgugguggg

SEQ ID NO: 229609 - RNA, 11 nt, Molluscum contagiosum virus
ugcugcucaag

SEQ ID NO: 229610 - RNA, 21 nt, Molluscum contagiosum virus
ugcugcucaaggacuaccagc

SEQ ID NO: 229611 - RNA, 14 nt, Molluscum contagiosum virus
ugcugcgagagcau

SEQ ID NO: 229612 - RNA, 20 nt, Molluscum contagiosum virus
ugcugcgcgacgucgucaag

SEQ ID NO: 229613 - RNA, 22 nt, Molluscum contagiosum virus
ugcugcgucacaagcaccgccu

SEQ ID NO: 229614 - RNA, 15 nt, Molluscum contagiosum virus
ugcugguucugcucg

SEQ ID NO: 229615 - RNA, 19 nt, Molluscum contagiosum virus
ugcugggagcuugcacgaa

SEQ ID NO: 229616 - RNA, 18 nt, Molluscum contagiosum virus
ugcuggacgggcacgagc

SEQ ID NO: 229617 - RNA, 23 nt, Molluscum contagiosum virus
ugcuggauggccuugggcacuuc

SEQ ID NO: 229618 - RNA, 22 nt, Molluscum contagiosum virus
ugcuggcacgcgagguuccaga

SEQ ID NO: 229619 - RNA, 23 nt, Molluscum contagiosum virus
ugcuggcgcucgcgcgcacgcgc

SEQ ID NO: 229620 - RNA, 15 nt, Molluscum contagiosum virus
ugcuggcggagacac

SEQ ID NO: 229621 - RNA, 15 nt, Molluscum contagiosum virus
ugcucaagcaccugc

SEQ ID NO: 229622 - RNA, 14 nt, Molluscum contagiosum virus
ugcucaagcacugc

SEQ ID NO: 229623 - RNA, 17 nt, Molluscum contagiosum virus
ugcucaaggacuaccag

SEQ ID NO: 229624 - RNA, 22 nt, Molluscum contagiosum virus
ugcucaaggacuaccagcucuu

SEQ ID NO: 229625 - RNA, 14 nt, Molluscum contagiosum virus
ugcucacccuuaau

SEQ ID NO: 229626 - RNA, 18 nt, Molluscum contagiosum virus
ugcucaggccagcaucuu

SEQ ID NO: 229627 - RNA, 20 nt, Molluscum contagiosum virus
ugcucaggccagcaucuugg

SEQ ID NO: 229628 - RNA, 23 nt, Molluscum contagiosum virus
ugcucaugcgcgggaugcuggac

SEQ ID NO: 229629 - RNA, 16 nt, Molluscum contagiosum virus
ugcuccgcacguggag

SEQ ID NO: 229630 - RNA, 13 nt, Molluscum contagiosum virus
ugcuccaugacag

SEQ ID NO: 229631 - RNA, 13 nt, Molluscum contagiosum virus
ugcuacugcacug

SEQ ID NO: 229632 - RNA, 19 nt, Molluscum contagiosum virus
ugcggcggcgcgugcugcg

SEQ ID NO: 229633 - RNA, 22 nt, Molluscum contagiosum virus
ugcggcgcucgcagcacaugca

SEQ ID NO: 229634 - RNA, 16 nt, Molluscum contagiosum virus
ugcuagcgugugccgc

SEQ ID NO: 229635 - RNA, 19 nt, Molluscum contagiosum virus
ugcuagagcauauccugau

SEQ ID NO: 229636 - RNA, 23 nt, Molluscum contagiosum virus
ugcgcucggaggggcuccgggcc

SEQ ID NO: 229637 - RNA, 21 nt, Molluscum contagiosum virus
ugcgcucucgggcaugcacuu

SEQ ID NO: 229638 - RNA, 22 nt, Molluscum contagiosum virus
ugcgcucucgggcaugcacuuc

SEQ ID NO: 229639 - RNA, 15 nt, Molluscum contagiosum virus
ugcgcguccacaaag

SEQ ID NO: 229640 - RNA, 18 nt, Molluscum contagiosum virus
ugcgcgugacacaccgcg

SEQ ID NO: 229641 - RNA, 16 nt, Molluscum contagiosum virus
ugcgcgugugcagcag

SEQ ID NO: 229642 - RNA, 17 nt, Molluscum contagiosum virus
ugcgcguucgcaaagac

SEQ ID NO: 229643 - RNA, 18 nt, Molluscum contagiosum virus
ugcgcguucgcaaagacg

SEQ ID NO: 229644 - RNA, 14 nt, Molluscum contagiosum virus
ugcggacaagacaa

SEQ ID NO: 229645 - RNA, 13 nt, Molluscum contagiosum virus
ugcggagacuguu

SEQ ID NO: 229646 - RNA, 23 nt, Molluscum contagiosum virus
ugcggagagccgccuuugcgcug

SEQ ID NO: 229647 - RNA, 15 nt, Molluscum contagiosum virus
ugcgcuucuauugcc

SEQ ID NO: 229648 - RNA, 16 nt, Molluscum contagiosum virus
ugcgcuggaugcugcu

SEQ ID NO: 229649 - RNA, 22 nt, Molluscum contagiosum virus
uggaaacgcuggcgagcaagau

SEQ ID NO: 229650 - RNA, 21 nt, Molluscum contagiosum virus
ugcuuacggacaggaugccug

SEQ ID NO: 229651 - RNA, 14 nt, Molluscum contagiosum virus
ugcuguuacuugca

SEQ ID NO: 229652 - RNA, 20 nt, Molluscum contagiosum virus
ugcuguuucugugucacgac

SEQ ID NO: 229653 - RNA, 20 nt, Molluscum contagiosum virus
uggacgcgcucaagauccga

SEQ ID NO: 229654 - RNA, 16 nt, Molluscum contagiosum virus
uggaacaggugcgcaa

SEQ ID NO: 229655 - RNA, 17 nt, Molluscum contagiosum virus
uggaacggcgacuugua

SEQ ID NO: 229656 - RNA, 17 nt, Molluscum contagiosum virus
uggagaaggcauaccag

SEQ ID NO: 229657 - RNA, 16 nt, Molluscum contagiosum virus
uggacguggacgugga

SEQ ID NO: 229658 - RNA, 20 nt, Molluscum contagiosum virus
uggacugagccgcaagcaca

SEQ ID NO: 229659 - RNA, 19 nt, Molluscum contagiosum virus
ugcagcguauggaucuucu

SEQ ID NO: 229660 - RNA, 18 nt, Molluscum contagiosum virus
ugcaggaaaggcacccgc

SEQ ID NO: 229661 - RNA, 18 nt, Molluscum contagiosum virus
ugcaggcaaaacugaaau

SEQ ID NO: 229662 - RNA, 16 nt, Molluscum contagiosum virus
ugcaggccgugcucac

SEQ ID NO: 229663 - RNA, 21 nt, Molluscum contagiosum virus
ugcaggcguaugccgucuacg

SEQ ID NO: 229664 - RNA, 21 nt, Molluscum contagiosum virus
ugcagagcaaggcgagucaau

SEQ ID NO: 229665 - RNA, 20 nt, Molluscum contagiosum virus
ugcagccgcugcugcugcaa

SEQ ID NO: 229666 - RNA, 22 nt, Molluscum contagiosum virus
ugcagccgcugcugcugcaaag

SEQ ID NO: 229667 - RNA, 15 nt, Molluscum contagiosum virus
ugcagacaaggagau

SEQ ID NO: 229668 - RNA, 23 nt, Molluscum contagiosum virus
ugacuucgcacguuggcgcucac

SEQ ID NO: 229669 - RNA, 15 nt, Molluscum contagiosum virus
ugacucggacacugg

SEQ ID NO: 229670 - RNA, 15 nt, Molluscum contagiosum virus
ugacuagaugcauag

SEQ ID NO: 229671 - RNA, 14 nt, Molluscum contagiosum virus
ugacgucgcagggg

SEQ ID NO: 229672 - RNA, 15 nt, Molluscum contagiosum virus
ugacgcgagacugug

SEQ ID NO: 229673 - RNA, 13 nt, Molluscum contagiosum virus
ugccgcgcaauac

SEQ ID NO: 229674 - RNA, 15 nt, Molluscum contagiosum virus
ugccgcucacagcuu

SEQ ID NO: 229675 - RNA, 16 nt, Molluscum contagiosum virus
ugccgcucggcacaaa

SEQ ID NO: 229676 - RNA, 21 nt, Molluscum contagiosum virus
ugccggaguuuguagcucuag

SEQ ID NO: 229677 - RNA, 12 nt, Molluscum contagiosum virus
ugccggcucagc

SEQ ID NO: 229678 - RNA, 13 nt, Molluscum contagiosum virus
ugccgcaguacgu

SEQ ID NO: 229679 - RNA, 21 nt, Molluscum contagiosum virus
ugccgccgcgcaaaagcacag

SEQ ID NO: 229680 - RNA, 23 nt, Molluscum contagiosum virus
ugcauccuggggaaccgcugcuu

SEQ ID NO: 229681 - RNA, 19 nt, Molluscum contagiosum virus
ugcaucuuuuuuaugcacu

SEQ ID NO: 229682 - RNA, 21 nt, Molluscum contagiosum virus
ugcaucuuuuuuaugcacuuu

SEQ ID NO: 229683 - RNA, 12 nt, Molluscum contagiosum virus
ugccugcucaac

SEQ ID NO: 229684 - RNA, 15 nt, Molluscum contagiosum virus
ugccugcugcgcuuc

SEQ ID NO: 229685 - RNA, 15 nt, Molluscum contagiosum virus
ugccugagaagcugu

SEQ ID NO: 229686 - RNA, 23 nt, Molluscum contagiosum virus
ugccugagaagcuguaccuggug

SEQ ID NO: 229687 - RNA, 21 nt, Molluscum contagiosum virus
ugccgucgcgcauagugccgu

SEQ ID NO: 229688 - RNA, 19 nt, Molluscum contagiosum virus
ugcgcauucccguggaccu

SEQ ID NO: 229689 - RNA, 14 nt, Molluscum contagiosum virus
ugccuguuugccac

SEQ ID NO: 229690 - RNA, 15 nt, Molluscum contagiosum virus
ugccuguuugccacg

SEQ ID NO: 229691 - RNA, 18 nt, Molluscum contagiosum virus
ugcgccacgccaagcgcu

SEQ ID NO: 229692 - RNA, 14 nt, Molluscum contagiosum virus
ugcgccaacaacca

SEQ ID NO: 229693 - RNA, 15 nt, Molluscum contagiosum virus
ugcgccaacaaccac

SEQ ID NO: 229694 - RNA, 16 nt, Molluscum contagiosum virus
ugcgcgcgcugagaua

SEQ ID NO: 229695 - RNA, 16 nt, Molluscum contagiosum virus
ugcgcggagacuuccu

SEQ ID NO: 229696 - RNA, 16 nt, Molluscum contagiosum virus
ugcgcgagacgcugcu

SEQ ID NO: 229697 - RNA, 14 nt, Molluscum contagiosum virus
ugcgcgaguaccug

SEQ ID NO: 229698 - RNA, 16 nt, Molluscum contagiosum virus
ugcgcccgcaaaccuu

SEQ ID NO: 229699 - RNA, 14 nt, Molluscum contagiosum virus
ugcgccugcacuuc

SEQ ID NO: 229700 - RNA, 11 nt, Molluscum contagiosum virus
uuaugcacuuu

SEQ ID NO: 229701 - RNA, 22 nt, Molluscum contagiosum virus
uuaucaacucgcucauccacgc

SEQ ID NO: 229702 - RNA, 9 nt, Molluscum contagiosum virus
uuaccaagg

SEQ ID NO: 229703 - RNA, 23 nt, Molluscum contagiosum virus
uuagcguggcgcgcgagcugcua

SEQ ID NO: 229704 - RNA, 21 nt, Molluscum contagiosum virus
uuacgugcgcgagcucgagaa

SEQ ID NO: 229705 - RNA, 16 nt, Molluscum contagiosum virus
uguuguucguacucaa

SEQ ID NO: 229706 - RNA, 23 nt, Molluscum contagiosum virus
uguuuccugcggcgcugcuacaa

SEQ ID NO: 229707 - RNA, 12 nt, Molluscum contagiosum virus
uguuuccuugcc

SEQ ID NO: 229708 - RNA, 13 nt, Molluscum contagiosum virus
uguuuccuugccu

SEQ ID NO: 229709 - RNA, 14 nt, Molluscum contagiosum virus
ugucgugcaauggc

SEQ ID NO: 229710 - RNA, 16 nt, Molluscum contagiosum virus
ugucguaacaauggac

SEQ ID NO: 229711 - RNA, 20 nt, Molluscum contagiosum virus
ugucucccgccgcgugcccg

SEQ ID NO: 229712 - RNA, 22 nt, Molluscum contagiosum virus
ugucgcgcgagcgcuacaugca

SEQ ID NO: 229713 - RNA, 17 nt, Molluscum contagiosum virus
ugucgcuggaggauucu

SEQ ID NO: 229714 - RNA, 20 nt, Molluscum contagiosum virus
ugucgcuggaggauucuugu

SEQ ID NO: 229715 - RNA, 22 nt, Molluscum contagiosum virus
ugucacucgcgagacggaaaug

SEQ ID NO: 229716 - RNA, 15 nt, Molluscum contagiosum virus
ugucacaauggcacu

SEQ ID NO: 229717 - RNA, 15 nt, Molluscum contagiosum virus
ugucaacguggguga

SEQ ID NO: 229718 - RNA, 22 nt, Molluscum contagiosum virus
uguuugcggaugcucgcuugcc

SEQ ID NO: 229719 - RNA, 20 nt, Molluscum contagiosum virus
uguuucuuccggcgguucuc

SEQ ID NO: 229720 - RNA, 18 nt, Molluscum contagiosum virus
uuccaagaagacuaccac

SEQ ID NO: 229721 - RNA, 22 nt, Molluscum contagiosum virus
uuccaaauggagaugauguagu

SEQ ID NO: 229722 - RNA, 14 nt, Molluscum contagiosum virus
uuccagagcacugc

SEQ ID NO: 229723 - RNA, 16 nt, Molluscum contagiosum virus
uuccggagacaccagc

SEQ ID NO: 229724 - RNA, 14 nt, Molluscum contagiosum virus
uuccggcaccacgu

SEQ ID NO: 229725 - RNA, 20 nt, Molluscum contagiosum virus
uuccguagccguccaguaag

SEQ ID NO: 229726 - RNA, 17 nt, Molluscum contagiosum virus
uuccgcgagucugccag

SEQ ID NO: 229727 - RNA, 17 nt, Molluscum contagiosum virus
uucacacacggaagcuc

SEQ ID NO: 229728 - RNA, 18 nt, Molluscum contagiosum virus
uucuacgggaagcugcac

SEQ ID NO: 229729 - RNA, 21 nt, Molluscum contagiosum virus
uucgccggcaucgcgcugcug

SEQ ID NO: 229730 - RNA, 23 nt, Molluscum contagiosum virus
uucgggaaggaacaaugcugcau

SEQ ID NO: 229731 - RNA, 19 nt, Molluscum contagiosum virus
uucggcucgggaacaaagg

SEQ ID NO: 229732 - RNA, 12 nt, Molluscum contagiosum virus
uucgagcugcug

SEQ ID NO: 229733 - RNA, 19 nt, Molluscum contagiosum virus
uucgcgacgacgagcacua

SEQ ID NO: 229734 - RNA, 16 nt, Molluscum contagiosum virus
uucgcgcgugcuggac

SEQ ID NO: 229735 - RNA, 23 nt, Molluscum contagiosum virus
uucgcgggaccgcccuuguggac

SEQ ID NO: 229736 - RNA, 19 nt, Molluscum contagiosum virus
uucgcggguccgucuuugc

SEQ ID NO: 229737 - RNA, 23 nt, Molluscum contagiosum virus
uucgcuacuucacacgucuugca

SEQ ID NO: 229738 - RNA, 12 nt, Molluscum contagiosum virus
uucgacgcugcc

SEQ ID NO: 229739 - RNA, 17 nt, Molluscum contagiosum virus
uucgacgugguacuggc

SEQ ID NO: 229740 - RNA, 14 nt, Molluscum contagiosum virus
uucgacuuacggac

SEQ ID NO: 229741 - RNA, 17 nt, Molluscum contagiosum virus
uuccugaacaagcugca

SEQ ID NO: 229742 - RNA, 21 nt, Molluscum contagiosum virus
uuccugcuagaaugcgugugg

SEQ ID NO: 229743 - RNA, 23 nt, Molluscum contagiosum virus
uuccugcgcccauuccuguugcu

SEQ ID NO: 229744 - RNA, 17 nt, Molluscum contagiosum virus
uucuagcgcgaggacaa

SEQ ID NO: 229745 - RNA, 18 nt, Molluscum contagiosum virus
uucuccgaccgugcccug

SEQ ID NO: 229746 - RNA, 22 nt, Molluscum contagiosum virus
uucucgaaaaugaaaauaaaga

SEQ ID NO: 229747 - RNA, 16 nt, Molluscum contagiosum virus
uucucgccgcaccaca

SEQ ID NO: 229748 - RNA, 19 nt, Molluscum contagiosum virus
uucucgcucgugcucucug

SEQ ID NO: 229749 - RNA, 20 nt, Molluscum contagiosum virus
uucugccaggcggucuucca

SEQ ID NO: 229750 - RNA, 19 nt, Molluscum contagiosum virus
uucuggcaaacgcacugug

SEQ ID NO: 229751 - RNA, 12 nt, Molluscum contagiosum virus
aaacacaacaag

SEQ ID NO: 229752 - RNA, 12 nt, Molluscum contagiosum virus
aaacagccaugu

SEQ ID NO: 229753 - RNA, 13 nt, Molluscum contagiosum virus
aaaccaacgugag

SEQ ID NO: 229754 - RNA, 21 nt, Molluscum contagiosum virus
aaacagcggcuuguagucgcc

SEQ ID NO: 229755 - RNA, 19 nt, Molluscum contagiosum virus
aaaacccugauaugcauau

SEQ ID NO: 229756 - RNA, 13 nt, Molluscum contagiosum virus
aaaacuguuccca

SEQ ID NO: 229757 - RNA, 17 nt, Molluscum contagiosum virus
aaaaggcucaggacaaa

SEQ ID NO: 229758 - RNA, 20 nt, Molluscum contagiosum virus
aaaagugaacuucuacgcca

SEQ ID NO: 229759 - RNA, 15 nt, Molluscum contagiosum virus
aguagcgguguugcu

SEQ ID NO: 229760 - RNA, 19 nt, Molluscum contagiosum virus
aguagcgcucgcccagcuc

SEQ ID NO: 229761 - RNA, 22 nt, Molluscum contagiosum virus
aguacugcagcagcuccuccac

SEQ ID NO: 229762 - RNA, 18 nt, Molluscum contagiosum virus
aguacuacuacacugucg

SEQ ID NO: 229763 - RNA, 13 nt, Molluscum contagiosum virus
aguauccgugacg

SEQ ID NO: 229764 - RNA, 12 nt, Molluscum contagiosum virus
agugaucuccac

SEQ ID NO: 229765 - RNA, 12 nt, Molluscum contagiosum virus
agugcccggggg

SEQ ID NO: 229766 - RNA, 22 nt, Molluscum contagiosum virus
agugccgagcucgccuccuugc

SEQ ID NO: 229767 - RNA, 16 nt, Molluscum contagiosum virus
agugcgcaacaugucc

SEQ ID NO: 229768 - RNA, 15 nt, Molluscum contagiosum virus
agugcagaugaggcu

SEQ ID NO: 229769 - RNA, 17 nt, Molluscum contagiosum virus
agugcacaccagacaaa

SEQ ID NO: 229770 - RNA, 18 nt, Molluscum contagiosum virus
agugcacaccagacaaag

SEQ ID NO: 229771 - RNA, 20 nt, Molluscum contagiosum virus
agugcgugcacugucuuuuc

SEQ ID NO: 229772 - RNA, 21 nt, Molluscum contagiosum virus
agugcgugcacugucuuuucc

SEQ ID NO: 229773 - RNA, 16 nt, Molluscum contagiosum virus
agugcggaugugcuag

SEQ ID NO: 229774 - RNA, 17 nt, Molluscum contagiosum virus
agugcggaugugcuagc

SEQ ID NO: 229775 - RNA, 15 nt, Molluscum contagiosum virus
agugcgggucacaag

SEQ ID NO: 229776 - RNA, 20 nt, Molluscum contagiosum virus
agugcuccgcacguggaauc

SEQ ID NO: 229777 - RNA, 18 nt, Molluscum contagiosum virus
agugcucuuuaguacaac

SEQ ID NO: 229778 - RNA, 15 nt, Molluscum contagiosum virus
agugguccaccagcu

SEQ ID NO: 229779 - RNA, 14 nt, Molluscum contagiosum virus
aguuaaggguuuau

SEQ ID NO: 229780 - RNA, 21 nt, Molluscum contagiosum virus
agugucgagcuucggacgagc

SEQ ID NO: 229781 - RNA, 18 nt, Molluscum contagiosum virus
agugugcaugcugucaac

SEQ ID NO: 229782 - RNA, 12 nt, Molluscum contagiosum virus
agugugugcauc

SEQ ID NO: 229783 - RNA, 13 nt, Molluscum contagiosum virus
aguucgagcugcu

SEQ ID NO: 229784 - RNA, 14 nt, Molluscum contagiosum virus
aguucgagcugcug

SEQ ID NO: 229785 - RNA, 19 nt, Molluscum contagiosum virus
aguugcagcccaccagcag

SEQ ID NO: 229786 - RNA, 22 nt, Molluscum contagiosum virus
aguugagcaggucggccagcag

SEQ ID NO: 229787 - RNA, 17 nt, Molluscum contagiosum virus
aguuccacuccugugag

SEQ ID NO: 229788 - RNA, 14 nt, Molluscum contagiosum virus
aguugcucuagcac

SEQ ID NO: 229789 - RNA, 21 nt, Molluscum contagiosum virus
aguuggacagccaugaggaca

SEQ ID NO: 229790 - RNA, 21 nt, Molluscum contagiosum virus
aguugcgcgagaacucgugcc

SEQ ID NO: 229791 - RNA, 14 nt, Molluscum contagiosum virus
aguuguuccacgac

SEQ ID NO: 229792 - RNA, 22 nt, Molluscum contagiosum virus
aguuguguggcuugcgggacag

SEQ ID NO: 229793 - RNA, 13 nt, Molluscum contagiosum virus
aguuggucaccac

SEQ ID NO: 229794 - RNA, 12 nt, Molluscum contagiosum virus
auaaaagcacag

SEQ ID NO: 229795 - RNA, 22 nt, Molluscum contagiosum virus
aggggagccagccucucucgga

SEQ ID NO: 229796 - RNA, 16 nt, Molluscum contagiosum virus
aggggccacaagcacg

SEQ ID NO: 229797 - RNA, 17 nt, Molluscum contagiosum virus
aggcugcucuccgaaga

SEQ ID NO: 229798 - RNA, 13 nt, Molluscum contagiosum virus
aggcucagcgcuu

SEQ ID NO: 229799 - RNA, 22 nt, Molluscum contagiosum virus
aggcucagcgcuucgacuucca

SEQ ID NO: 229800 - RNA, 12 nt, Molluscum contagiosum virus
aggcggagcugc

SEQ ID NO: 229801 - RNA, 14 nt, Molluscum contagiosum virus
aggcggcacugcua

SEQ ID NO: 229802 - RNA, 13 nt, Molluscum contagiosum virus
aggcggucuucca

SEQ ID NO: 229803 - RNA, 22 nt, Molluscum contagiosum virus
aggcggucuuccagcacugcgc

SEQ ID NO: 229804 - RNA, 16 nt, Molluscum contagiosum virus
aggcguaugaguaccu

SEQ ID NO: 229805 - RNA, 16 nt, Molluscum contagiosum virus
aggaugccugucuugu

SEQ ID NO: 229806 - RNA, 19 nt, Molluscum contagiosum virus
aggagggcguccguaaguc

SEQ ID NO: 229807 - RNA, 15 nt, Molluscum contagiosum virus
aggagggagagcugc

SEQ ID NO: 229808 - RNA, 23 nt, Molluscum contagiosum virus
aggagggcaagaacgacugcuac

SEQ ID NO: 229809 - RNA, 14 nt, Molluscum contagiosum virus
aggaguuggcgcgc

SEQ ID NO: 229810 - RNA, 22 nt, Molluscum contagiosum virus
aggugggaaugcccgcaaugca

SEQ ID NO: 229811 - RNA, 23 nt, Molluscum contagiosum virus
agguggcacccuggcugcugcgc

SEQ ID NO: 229812 - RNA, 14 nt, Molluscum contagiosum virus
agggucgugcaggu

SEQ ID NO: 229813 - RNA, 16 nt, Molluscum contagiosum virus
agggguguuuccuugc

SEQ ID NO: 229814 - RNA, 18 nt, Molluscum contagiosum virus
agggguguuuccuugccu

SEQ ID NO: 229815 - RNA, 20 nt, Molluscum contagiosum virus
aggguuccgcgccugcccau

SEQ ID NO: 229816 - RNA, 17 nt, Molluscum contagiosum virus
aggugcgcgacuccauc

SEQ ID NO: 229817 - RNA, 17 nt, Molluscum contagiosum virus
aggucucgagcuccagg

SEQ ID NO: 229818 - RNA, 16 nt, Molluscum contagiosum virus
aggucuucaggaacaa

SEQ ID NO: 229819 - RNA, 16 nt, Molluscum contagiosum virus
agcuugcucagcagcu

SEQ ID NO: 229820 - RNA, 18 nt, Molluscum contagiosum virus
agcuucuuggagcccuug

SEQ ID NO: 229821 - RNA, 15 nt, Molluscum contagiosum virus
agcuuccucaaggcg

SEQ ID NO: 229822 - RNA, 18 nt, Molluscum contagiosum virus
agcuuccuuuuucacuuu

SEQ ID NO: 229823 - RNA, 19 nt, Molluscum contagiosum virus
agcuucggacgagcucgcc

SEQ ID NO: 229824 - RNA, 14 nt, Molluscum contagiosum virus
agcuucgucuucac

SEQ ID NO: 229825 - RNA, 14 nt, Molluscum contagiosum virus
agcuuggugcagcg

SEQ ID NO: 229826 - RNA, 12 nt, Molluscum contagiosum virus
agcuuucucacg

SEQ ID NO: 229827 - RNA, 14 nt, Molluscum contagiosum virus
aggagcuccgugcu

SEQ ID NO: 229828 - RNA, 16 nt, Molluscum contagiosum virus
aggaagcaacaacagc

SEQ ID NO: 229829 - RNA, 12 nt, Molluscum contagiosum virus
aggaagcaagac

SEQ ID NO: 229830 - RNA, 21 nt, Molluscum contagiosum virus
aggaacaaugcugcaucuagc

SEQ ID NO: 229831 - RNA, 19 nt, Molluscum contagiosum virus
aggaacucuacgacaugcu

SEQ ID NO: 229832 - RNA, 20 nt, Molluscum contagiosum virus
aggaacucuacgacaugcuc

SEQ ID NO: 229833 - RNA, 18 nt, Molluscum contagiosum virus
aggaaagcgcacacuugc

SEQ ID NO: 229834 - RNA, 11 nt, Molluscum contagiosum virus
aggaaaggcac

SEQ ID NO: 229835 - RNA, 18 nt, Molluscum contagiosum virus
aggaaaggcacccaccag

SEQ ID NO: 229836 - RNA, 21 nt, Molluscum contagiosum virus
aggaaaggcacccaccaggaa

SEQ ID NO: 229837 - RNA, 21 nt, Molluscum contagiosum virus
aggaaaggcaccugcaggaaa

SEQ ID NO: 229838 - RNA, 21 nt, Molluscum contagiosum virus
aggaaagguaccccgcaggaa

SEQ ID NO: 229839 - RNA, 22 nt, Molluscum contagiosum virus
aggaaagguaccccgcaggaaa

SEQ ID NO: 229840 - RNA, 22 nt, Molluscum contagiosum virus
agcaguucgcgcgccugcgcga

SEQ ID NO: 229841 - RNA, 12 nt, Molluscum contagiosum virus
agcaugcucacg

SEQ ID NO: 229842 - RNA, 17 nt, Molluscum contagiosum virus
agcauccucgaugagaa

SEQ ID NO: 229843 - RNA, 21 nt, Molluscum contagiosum virus
agcagcuggccggcucgcuac

SEQ ID NO: 229844 - RNA, 17 nt, Molluscum contagiosum virus
agcagcggcgcgugcuc

SEQ ID NO: 229845 - RNA, 14 nt, Molluscum contagiosum virus
agcagcgugcgcac

SEQ ID NO: 229846 - RNA, 15 nt, Molluscum contagiosum virus
agcagcgugcgcacc

SEQ ID NO: 229847 - RNA, 12 nt, Molluscum contagiosum virus
agcagcuccagc

SEQ ID NO: 229848 - RNA, 21 nt, Molluscum contagiosum virus
agcagcuccagcauggcgcca

SEQ ID NO: 229849 - RNA, 14 nt, Molluscum contagiosum virus
agcagcuccuccac

SEQ ID NO: 229850 - RNA, 13 nt, Molluscum contagiosum virus
agcagcucggggc

SEQ ID NO: 229851 - RNA, 23 nt, Molluscum contagiosum virus
agcaggaugcuggugucgagcuc

SEQ ID NO: 229852 - RNA, 22 nt, Molluscum contagiosum virus
agcagugccgcucgcuguccuu

SEQ ID NO: 229853 - RNA, 19 nt, Molluscum contagiosum virus
agcaggugcacgugcugca

SEQ ID NO: 229854 - RNA, 19 nt, Molluscum contagiosum virus
agcauguuaaaaaugagaa

SEQ ID NO: 229855 - RNA, 14 nt, Molluscum contagiosum virus
agcauguugcucua

SEQ ID NO: 229856 - RNA, 15 nt, Molluscum contagiosum virus
agcauguugcucuac

SEQ ID NO: 229857 - RNA, 19 nt, Molluscum contagiosum virus
agcugcugcgcuccaugcu

SEQ ID NO: 229858 - RNA, 17 nt, Molluscum contagiosum virus
agcugcggcgcgugcug

SEQ ID NO: 229859 - RNA, 19 nt, Molluscum contagiosum virus
agcuggagcgagugcgcgu

SEQ ID NO: 229860 - RNA, 13 nt, Molluscum contagiosum virus
agcuggagcugcc

SEQ ID NO: 229861 - RNA, 20 nt, Molluscum contagiosum virus
agcuggucgccggcgcuucu

SEQ ID NO: 229862 - RNA, 13 nt, Molluscum contagiosum virus
agcuguaccuggu

SEQ ID NO: 229863 - RNA, 13 nt, Molluscum contagiosum virus
agcugucaacagu

SEQ ID NO: 229864 - RNA, 23 nt, Molluscum contagiosum virus
agcugucaacagugcgugccagg

SEQ ID NO: 229865 - RNA, 15 nt, Molluscum contagiosum virus
agcugugcgcuacgu

SEQ ID NO: 229866 - RNA, 16 nt, Molluscum contagiosum virus
agcuucaucaagcacg

SEQ ID NO: 229867 - RNA, 15 nt, Molluscum contagiosum virus
agcuucaucuuuccc

SEQ ID NO: 229868 - RNA, 15 nt, Molluscum contagiosum virus
augccuuucuuccag

SEQ ID NO: 229869 - RNA, 16 nt, Molluscum contagiosum virus
augcgagcgcggcuua

SEQ ID NO: 229870 - RNA, 19 nt, Molluscum contagiosum virus
augcgcgggaugcuggacg

SEQ ID NO: 229871 - RNA, 18 nt, Molluscum contagiosum virus
augcgguccgacucggug

SEQ ID NO: 229872 - RNA, 18 nt, Molluscum contagiosum virus
augcgguguguguucuca

SEQ ID NO: 229873 - RNA, 18 nt, Molluscum contagiosum virus
augcgcccucacgugcug

SEQ ID NO: 229874 - RNA, 15 nt, Molluscum contagiosum virus
augcgccugcacuuc

SEQ ID NO: 229875 - RNA, 12 nt, Molluscum contagiosum virus
augcgccugugc

SEQ ID NO: 229876 - RNA, 14 nt, Molluscum contagiosum virus
augcgcacacuugc

SEQ ID NO: 229877 - RNA, 16 nt, Molluscum contagiosum virus
augcgcacacuugcgc

SEQ ID NO: 229878 - RNA, 15 nt, Molluscum contagiosum virus
augcgcacagcacuu

SEQ ID NO: 229879 - RNA, 20 nt, Molluscum contagiosum virus
augcucguccccgugcacga

SEQ ID NO: 229880 - RNA, 19 nt, Molluscum contagiosum virus
augcucacguacgacugcu

SEQ ID NO: 229881 - RNA, 15 nt, Molluscum contagiosum virus
augcauccugaugcu

SEQ ID NO: 229882 - RNA, 16 nt, Molluscum contagiosum virus
augcagugcaccagca

SEQ ID NO: 229883 - RNA, 18 nt, Molluscum contagiosum virus
augcagugcggaugugcu

SEQ ID NO: 229884 - RNA, 19 nt, Molluscum contagiosum virus
augcagugcggaugugcua

SEQ ID NO: 229885 - RNA, 20 nt, Molluscum contagiosum virus
augcagugcggaugugcuag

SEQ ID NO: 229886 - RNA, 18 nt, Molluscum contagiosum virus
augcauucguaacgugau

SEQ ID NO: 229887 - RNA, 23 nt, Molluscum contagiosum virus
augccgcgcugcuccgugcccac

SEQ ID NO: 229888 - RNA, 17 nt, Molluscum contagiosum virus
augccgcgugcucugcu

SEQ ID NO: 229889 - RNA, 21 nt, Molluscum contagiosum virus
augccggggaugaacgcgcug

SEQ ID NO: 229890 - RNA, 19 nt, Molluscum contagiosum virus
augauguaguccagguggu

SEQ ID NO: 229891 - RNA, 18 nt, Molluscum contagiosum virus
augauuugauggcugcuc

SEQ ID NO: 229892 - RNA, 19 nt, Molluscum contagiosum virus
augcaacgcaggacacugu

SEQ ID NO: 229893 - RNA, 13 nt, Molluscum contagiosum virus
augcacacacucg

SEQ ID NO: 229894 - RNA, 11 nt, Molluscum contagiosum virus
augcacacuca

SEQ ID NO: 229895 - RNA, 21 nt, Molluscum contagiosum virus
augcagcugcaggaccugcug

SEQ ID NO: 229896 - RNA, 15 nt, Molluscum contagiosum virus
augcaguaugugaac

SEQ ID NO: 229897 - RNA, 21 nt, Molluscum contagiosum virus
augcaguaugugaacacgaca

SEQ ID NO: 229898 - RNA, 12 nt, Molluscum contagiosum virus
augcacuuucaa

SEQ ID NO: 229899 - RNA, 18 nt, Molluscum contagiosum virus
augaggagaggaaccagg

SEQ ID NO: 229900 - RNA, 12 nt, Molluscum contagiosum virus
augaggcugcuc

SEQ ID NO: 229901 - RNA, 22 nt, Molluscum contagiosum virus
augaguaccuguaugaucugca

SEQ ID NO: 229902 - RNA, 19 nt, Molluscum contagiosum virus
augaaccugggcaucgucu

SEQ ID NO: 229903 - RNA, 17 nt, Molluscum contagiosum virus
aucgcuacgugcgcacc

SEQ ID NO: 229904 - RNA, 14 nt, Molluscum contagiosum virus
aucgcggagcugcg

SEQ ID NO: 229905 - RNA, 16 nt, Molluscum contagiosum virus
aucgccuuugugacaa

SEQ ID NO: 229906 - RNA, 17 nt, Molluscum contagiosum virus
augaacucgcugcugcu

SEQ ID NO: 229907 - RNA, 18 nt, Molluscum contagiosum virus
augaacucgcugcugcuc

SEQ ID NO: 229908 - RNA, 23 nt, Molluscum contagiosum virus
augaacucgcugcugcucuucca

SEQ ID NO: 229909 - RNA, 18 nt, Molluscum contagiosum virus
augaacgcgcugcgccac

SEQ ID NO: 229910 - RNA, 23 nt, Molluscum contagiosum virus
augaacgcgcugcgccacugcca

SEQ ID NO: 229911 - RNA, 17 nt, Molluscum contagiosum virus
augaacggcuccuugag

SEQ ID NO: 229912 - RNA, 17 nt, Molluscum contagiosum virus
aucuuuuuuaugcacuu

SEQ ID NO: 229913 - RNA, 18 nt, Molluscum contagiosum virus
aucuuuuuuaugcacuuu

SEQ ID NO: 229914 - RNA, 14 nt, Molluscum contagiosum virus
auaguaccaugacg

SEQ ID NO: 229915 - RNA, 14 nt, Molluscum contagiosum virus
auauacgcaaagga

SEQ ID NO: 229916 - RNA, 21 nt, Molluscum contagiosum virus
auauagacguauacuccaaaa

SEQ ID NO: 229917 - RNA, 17 nt, Molluscum contagiosum virus
aucaccgacacgcgccc

SEQ ID NO: 229918 - RNA, 13 nt, Molluscum contagiosum virus
aucacgccgugac

SEQ ID NO: 229919 - RNA, 20 nt, Molluscum contagiosum virus
aucccgggacacgaggucac

SEQ ID NO: 229920 - RNA, 23 nt, Molluscum contagiosum virus
aucccgccgcugcgcuugcucac

SEQ ID NO: 229921 - RNA, 19 nt, Molluscum contagiosum virus
aucccagaaaacgcacugu

SEQ ID NO: 229922 - RNA, 16 nt, Molluscum contagiosum virus
auccgaccucuuuccg

SEQ ID NO: 229923 - RNA, 20 nt, Molluscum contagiosum virus
aucgagccgcgcuucgagca

SEQ ID NO: 229924 - RNA, 23 nt, Molluscum contagiosum virus
aucgagcugcagagcgugcuggu

SEQ ID NO: 229925 - RNA, 14 nt, Molluscum contagiosum virus
aucgaaacucugca

SEQ ID NO: 229926 - RNA, 15 nt, Molluscum contagiosum virus
cagcaaaagcuuuuu

SEQ ID NO: 229927 - RNA, 22 nt, Molluscum contagiosum virus
cagcaaaagcuuuuucuucaga

SEQ ID NO: 229928 - RNA, 19 nt, Molluscum contagiosum virus
cagcaaacugugcuccuga

SEQ ID NO: 229929 - RNA, 20 nt, Molluscum contagiosum virus
cagagugacgucuuccagac

SEQ ID NO: 229930 - RNA, 22 nt, Molluscum contagiosum virus
cagaggguggcuugcugcagua

SEQ ID NO: 229931 - RNA, 19 nt, Molluscum contagiosum virus
cagaggauacccgugaucu

SEQ ID NO: 229932 - RNA, 15 nt, Molluscum contagiosum virus
cagagggacaacuca

SEQ ID NO: 229933 - RNA, 22 nt, Molluscum contagiosum virus
cagauaguuuggacgagcugcu

SEQ ID NO: 229934 - RNA, 19 nt, Molluscum contagiosum virus
cagaaaacaggcacuucgc

SEQ ID NO: 229935 - RNA, 15 nt, Molluscum contagiosum virus
cacuugcgcguccac

SEQ ID NO: 229936 - RNA, 21 nt, Molluscum contagiosum virus
cacuugcgcguccgcaaagcc

SEQ ID NO: 229937 - RNA, 21 nt, Molluscum contagiosum virus
cacuuccgcgcgcuaggggug

SEQ ID NO: 229938 - RNA, 21 nt, Molluscum contagiosum virus
cacuucucgccgcaccacaac

SEQ ID NO: 229939 - RNA, 22 nt, Molluscum contagiosum virus
cacuucucgccgcaccacaacu

SEQ ID NO: 229940 - RNA, 14 nt, Molluscum contagiosum virus
cacuguugcuuccg

SEQ ID NO: 229941 - RNA, 18 nt, Molluscum contagiosum virus
cacuccgcacagcuucac

SEQ ID NO: 229942 - RNA, 16 nt, Molluscum contagiosum virus
cacucgaccgucuuca

SEQ ID NO: 229943 - RNA, 20 nt, Molluscum contagiosum virus
cacucgauggacgccagcuu

SEQ ID NO: 229944 - RNA, 15 nt, Molluscum contagiosum virus
cacucgcgcguccac

SEQ ID NO: 229945 - RNA, 15 nt, Molluscum contagiosum virus
cagagaagugcuccg

SEQ ID NO: 229946 - RNA, 17 nt, Molluscum contagiosum virus
cagaaaacgcacugucg

SEQ ID NO: 229947 - RNA, 19 nt, Molluscum contagiosum virus
cagagaccgucaaccugcu

SEQ ID NO: 229948 - RNA, 19 nt, Molluscum contagiosum virus
cagagcaguuccggucuca

SEQ ID NO: 229949 - RNA, 20 nt, Molluscum contagiosum virus
cagagcccaaggggagacau

SEQ ID NO: 229950 - RNA, 18 nt, Molluscum contagiosum virus
cagagccccguucacuug

SEQ ID NO: 229951 - RNA, 13 nt, Molluscum contagiosum virus
cagaggacaccgc

SEQ ID NO: 229952 - RNA, 19 nt, Molluscum contagiosum virus
cagaggacuuuaucucuca

SEQ ID NO: 229953 - RNA, 22 nt, Molluscum contagiosum virus
cagagcuccgcgcaugccagac

SEQ ID NO: 229954 - RNA, 18 nt, Molluscum contagiosum virus
cagccaugaggacagcuu

SEQ ID NO: 229955 - RNA, 20 nt, Molluscum contagiosum virus
cagccgcaccgggacgaaga

SEQ ID NO: 229956 - RNA, 11 nt, Molluscum contagiosum virus
cagccaugugu

SEQ ID NO: 229957 - RNA, 13 nt, Molluscum contagiosum virus
cagcccaccagca

SEQ ID NO: 229958 - RNA, 13 nt, Molluscum contagiosum virus
cagcccgacuucu

SEQ ID NO: 229959 - RNA, 19 nt, Molluscum contagiosum virus
cagccugcaccgagugcug

SEQ ID NO: 229960 - RNA, 20 nt, Molluscum contagiosum virus
cagccuccgugcgccagucc

SEQ ID NO: 229961 - RNA, 14 nt, Molluscum contagiosum virus
cagccguggagucc

SEQ ID NO: 229962 - RNA, 17 nt, Molluscum contagiosum virus
cagccgcugcgccgcca

SEQ ID NO: 229963 - RNA, 15 nt, Molluscum contagiosum virus
cagccgcugcugcug

SEQ ID NO: 229964 - RNA, 12 nt, Molluscum contagiosum virus
cagcaggaugcu

SEQ ID NO: 229965 - RNA, 20 nt, Molluscum contagiosum virus
cagcaggugcacgugcugca

SEQ ID NO: 229966 - RNA, 16 nt, Molluscum contagiosum virus
cagcagguugaagcuc

SEQ ID NO: 229967 - RNA, 15 nt, Molluscum contagiosum virus
cagcaguaguugcuc

SEQ ID NO: 229968 - RNA, 16 nt, Molluscum contagiosum virus
cagcaugcgugcaaca

SEQ ID NO: 229969 - RNA, 15 nt, Molluscum contagiosum virus
cagcauccuggaguu

SEQ ID NO: 229970 - RNA, 11 nt, Molluscum contagiosum virus
cagcacaagcc

SEQ ID NO: 229971 - RNA, 23 nt, Molluscum contagiosum virus
cagcagcacaggugcguaaugcu

SEQ ID NO: 229972 - RNA, 22 nt, Molluscum contagiosum virus
cagcagcguugcuauuaccuga

SEQ ID NO: 229973 - RNA, 15 nt, Molluscum contagiosum virus
cagcagcuccuccac

SEQ ID NO: 229974 - RNA, 22 nt, Molluscum contagiosum virus
cagcagcuccugguaguugcag

SEQ ID NO: 229975 - RNA, 19 nt, Molluscum contagiosum virus
cagcugcugcgcuccaugc

SEQ ID NO: 229976 - RNA, 17 nt, Molluscum contagiosum virus
cagcuguccaaggugaa

SEQ ID NO: 229977 - RNA, 12 nt, Molluscum contagiosum virus
caggaaaggcac

SEQ ID NO: 229978 - RNA, 19 nt, Molluscum contagiosum virus
caggaagacgcauagucau

SEQ ID NO: 229979 - RNA, 19 nt, Molluscum contagiosum virus
caggaacgaggaaaggcac

SEQ ID NO: 229980 - RNA, 18 nt, Molluscum contagiosum virus
caggaacgcaccacggcc

SEQ ID NO: 229981 - RNA, 14 nt, Molluscum contagiosum virus
cagcucggguucca

SEQ ID NO: 229982 - RNA, 22 nt, Molluscum contagiosum virus
cagcuccuucuucaaguaccug

SEQ ID NO: 229983 - RNA, 21 nt, Molluscum contagiosum virus
cagcucgacgccauugugaag

SEQ ID NO: 229984 - RNA, 14 nt, Molluscum contagiosum virus
cagcucaagcugcu

SEQ ID NO: 229985 - RNA, 22 nt, Molluscum contagiosum virus
cagcgugcgcaccagcugcaaa

SEQ ID NO: 229986 - RNA, 21 nt, Molluscum contagiosum virus
cagcgagugauccuugccaag

SEQ ID NO: 229987 - RNA, 14 nt, Molluscum contagiosum virus
cagcgcuggagcug

SEQ ID NO: 229988 - RNA, 22 nt, Molluscum contagiosum virus
cagcgcuuuguugccucaguac

SEQ ID NO: 229989 - RNA, 18 nt, Molluscum contagiosum virus
cagcggaagaaacagcca

SEQ ID NO: 229990 - RNA, 23 nt, Molluscum contagiosum virus
cagcggaagaaacagccaugugu

SEQ ID NO: 229991 - RNA, 14 nt, Molluscum contagiosum virus
cagcgcgacuagcc

SEQ ID NO: 229992 - RNA, 23 nt, Molluscum contagiosum virus
cagcgcgagcugugcauugcguc

SEQ ID NO: 229993 - RNA, 22 nt, Molluscum contagiosum virus
cagcgcuagccccagcaccagg

SEQ ID NO: 229994 - RNA, 15 nt, Molluscum contagiosum virus
caccacaacugaaaa

SEQ ID NO: 229995 - RNA, 16 nt, Molluscum contagiosum virus
cacccgcaacaaggaa

SEQ ID NO: 229996 - RNA, 23 nt, Molluscum contagiosum virus
cacccuucugaggggcaguguuc

SEQ ID NO: 229997 - RNA, 14 nt, Molluscum contagiosum virus
caccgccugcugca

SEQ ID NO: 229998 - RNA, 23 nt, Molluscum contagiosum virus
caccgcgacaggggccacaagca

SEQ ID NO: 229999 - RNA, 17 nt, Molluscum contagiosum virus
caccgcgacccagaagc

SEQ ID NO: 230000 - RNA, 17 nt, Molluscum contagiosum virus
caccgccgacaacgcac

SEQ ID NO: 230001 - RNA, 21 nt, Molluscum contagiosum virus
caccgggauggucucgcugcu

SEQ ID NO: 230002 - RNA, 13 nt, Molluscum contagiosum virus
caccuaaauagca

SEQ ID NO: 230003 - RNA, 18 nt, Molluscum contagiosum virus
caccguuggcuaugagga

SEQ ID NO: 230004 - RNA, 15 nt, Molluscum contagiosum virus
cacgaccacgcuggc

SEQ ID NO: 230005 - RNA, 20 nt, Molluscum contagiosum virus
cacgacgggcucaucccggg

SEQ ID NO: 230006 - RNA, 22 nt, Molluscum contagiosum virus
cacgacggucacgcaagcuuug

SEQ ID NO: 230007 - RNA, 23 nt, Molluscum contagiosum virus
cacgacgacggcugcucgcugcc

SEQ ID NO: 230008 - RNA, 15 nt, Molluscum contagiosum virus
cacgauguacuccac

SEQ ID NO: 230009 - RNA, 14 nt, Molluscum contagiosum virus
cacgaucaaggugc

SEQ ID NO: 230010 - RNA, 20 nt, Molluscum contagiosum virus
cacgaugaacggcuccuuga

SEQ ID NO: 230011 - RNA, 20 nt, Molluscum contagiosum virus
cacgauggccggcaacuggc

SEQ ID NO: 230012 - RNA, 21 nt, Molluscum contagiosum virus
cacgauggccggcaacuggcu

SEQ ID NO: 230013 - RNA, 14 nt, Molluscum contagiosum virus
cacgagcugcugua

SEQ ID NO: 230014 - RNA, 15 nt, Molluscum contagiosum virus
cacgagaagaucaac

SEQ ID NO: 230015 - RNA, 19 nt, Molluscum contagiosum virus
cacgagcgccagccugugc

SEQ ID NO: 230016 - RNA, 21 nt, Molluscum contagiosum virus
cacuauggacgcuugcuagca

SEQ ID NO: 230017 - RNA, 16 nt, Molluscum contagiosum virus
cacuacucgucuugcg

SEQ ID NO: 230018 - RNA, 12 nt, Molluscum contagiosum virus
cacuacugggag

SEQ ID NO: 230019 - RNA, 19 nt, Molluscum contagiosum virus
cacggguguacaaagagcu

SEQ ID NO: 230020 - RNA, 20 nt, Molluscum contagiosum virus
cacggcggcgcucaacaucc

SEQ ID NO: 230021 - RNA, 15 nt, Molluscum contagiosum virus
cacggggaagcacgc

SEQ ID NO: 230022 - RNA, 12 nt, Molluscum contagiosum virus
cacggcucugcg

SEQ ID NO: 230023 - RNA, 13 nt, Molluscum contagiosum virus
cacggcugcaagc

SEQ ID NO: 230024 - RNA, 16 nt, Molluscum contagiosum virus
cacgcuugcgcaugug

SEQ ID NO: 230025 - RNA, 15 nt, Molluscum contagiosum virus
cacggaccucaagga

SEQ ID NO: 230026 - RNA, 21 nt, Molluscum contagiosum virus
cacgcuggcgcgcuccaugua

SEQ ID NO: 230027 - RNA, 23 nt, Molluscum contagiosum virus
cacgccugcacgcgcacuugccu

SEQ ID NO: 230028 - RNA, 16 nt, Molluscum contagiosum virus
cacgccuccaagaaga

SEQ ID NO: 230029 - RNA, 18 nt, Molluscum contagiosum virus
cacgccaagcgcuugcuc

SEQ ID NO: 230030 - RNA, 20 nt, Molluscum contagiosum virus
cacgccagcccgacuucucg

SEQ ID NO: 230031 - RNA, 17 nt, Molluscum contagiosum virus
cacgccagccuggagua

SEQ ID NO: 230032 - RNA, 22 nt, Molluscum contagiosum virus
cacgcaaggcaugcgcgcagug

SEQ ID NO: 230033 - RNA, 13 nt, Molluscum contagiosum virus
cacgcacccaaau

SEQ ID NO: 230034 - RNA, 20 nt, Molluscum contagiosum virus
cacgcaggacuggcaccugc

SEQ ID NO: 230035 - RNA, 18 nt, Molluscum contagiosum virus
cacgcucauacuccugcu

SEQ ID NO: 230036 - RNA, 23 nt, Molluscum contagiosum virus
cacgcugagcaagcucaagaagc

SEQ ID NO: 230037 - RNA, 21 nt, Molluscum contagiosum virus
cacgcugcacgagcugcugua

SEQ ID NO: 230038 - RNA, 20 nt, Molluscum contagiosum virus
cacgcugcguucgagcugau

SEQ ID NO: 230039 - RNA, 21 nt, Molluscum contagiosum virus
cacgcugcucgugcugcucug

SEQ ID NO: 230040 - RNA, 21 nt, Molluscum contagiosum virus
cacgcgcacacgcugaguuac

SEQ ID NO: 230041 - RNA, 22 nt, Molluscum contagiosum virus
cacgcgcacgcucucgcuggcu

SEQ ID NO: 230042 - RNA, 14 nt, Molluscum contagiosum virus
cacgcgcacuugcc

SEQ ID NO: 230043 - RNA, 24 nt, Molluscum contagiosum virus
cacgcgccgcgcggcuccuacacg

SEQ ID NO: 230044 - RNA, 17 nt, Molluscum contagiosum virus
cacgcgcgcuuagcaca

SEQ ID NO: 230045 - RNA, 17 nt, Molluscum contagiosum virus
cacgcggaaacaagcac

SEQ ID NO: 230046 - RNA, 17 nt, Molluscum contagiosum virus
cacaauggcacuagccu

SEQ ID NO: 230047 - RNA, 14 nt, Molluscum contagiosum virus
cacacacacacucg

SEQ ID NO: 230048 - RNA, 15 nt, Molluscum contagiosum virus
cacacacuugcucuc

SEQ ID NO: 230049 - RNA, 18 nt, Molluscum contagiosum virus
cacacaccgcgagcacca

SEQ ID NO: 230050 - RNA, 20 nt, Molluscum contagiosum virus
cacaccccuguaacaaggaa

SEQ ID NO: 230051 - RNA, 19 nt, Molluscum contagiosum virus
cacaccgcguggacaacag

SEQ ID NO: 230052 - RNA, 12 nt, Molluscum contagiosum virus
cacacaugcuag

SEQ ID NO: 230053 - RNA, 13 nt, Molluscum contagiosum virus
cacaugugcugcc

SEQ ID NO: 230054 - RNA, 13 nt, Molluscum contagiosum virus
cacauguguuugu

SEQ ID NO: 230055 - RNA, 17 nt, Molluscum contagiosum virus
cacaagggcagcucaag

SEQ ID NO: 230056 - RNA, 17 nt, Molluscum contagiosum virus
cacaacgggcucgugcu

SEQ ID NO: 230057 - RNA, 22 nt, Molluscum contagiosum virus
cacaagcaggaguccgugacag

SEQ ID NO: 230058 - RNA, 23 nt, Molluscum contagiosum virus
cacaagcaggaguccgugacaga

SEQ ID NO: 230059 - RNA, 15 nt, Molluscum contagiosum virus
cacaacgaacauguu

SEQ ID NO: 230060 - RNA, 11 nt, Molluscum contagiosum virus
cacaaaaccuu

SEQ ID NO: 230061 - RNA, 19 nt, Molluscum contagiosum virus
caauugcugggcacaagcu

SEQ ID NO: 230062 - RNA, 22 nt, Molluscum contagiosum virus
caagggcagcucaagcugcuca

SEQ ID NO: 230063 - RNA, 17 nt, Molluscum contagiosum virus
caaggccuacggcaaga

SEQ ID NO: 230064 - RNA, 21 nt, Molluscum contagiosum virus
caaggaggucuagccgugaac

SEQ ID NO: 230065 - RNA, 21 nt, Molluscum contagiosum virus
caaggcguaagagcgugaaca

SEQ ID NO: 230066 - RNA, 13 nt, Molluscum contagiosum virus
caaggaaaggcac

SEQ ID NO: 230067 - RNA, 15 nt, Molluscum contagiosum virus
caaggacuaccagcu

SEQ ID NO: 230068 - RNA, 16 nt, Molluscum contagiosum virus
caaggacuaccagcuc

SEQ ID NO: 230069 - RNA, 18 nt, Molluscum contagiosum virus
caagacggaagacaaggc

SEQ ID NO: 230070 - RNA, 12 nt, Molluscum contagiosum virus
caagcucaucca

SEQ ID NO: 230071 - RNA, 15 nt, Molluscum contagiosum virus
caagcucauccaccu

SEQ ID NO: 230072 - RNA, 15 nt, Molluscum contagiosum virus
caagcugcuggcaca

SEQ ID NO: 230073 - RNA, 13 nt, Molluscum contagiosum virus
auucuuaauccag

SEQ ID NO: 230074 - RNA, 17 nt, Molluscum contagiosum virus
auuucgccuuguucaca

SEQ ID NO: 230075 - RNA, 20 nt, Molluscum contagiosum virus
auuuaccggcgcuugcgcua

SEQ ID NO: 230076 - RNA, 14 nt, Molluscum contagiosum virus
auuccguccaguga

SEQ ID NO: 230077 - RNA, 22 nt, Molluscum contagiosum virus
auuccuucccggaauuccgugu

SEQ ID NO: 230078 - RNA, 18 nt, Molluscum contagiosum virus
auucaaguuugacaaggg

SEQ ID NO: 230079 - RNA, 17 nt, Molluscum contagiosum virus
augcuucgcgcaaacaa

SEQ ID NO: 230080 - RNA, 15 nt, Molluscum contagiosum virus
auggaccacaagcag

SEQ ID NO: 230081 - RNA, 16 nt, Molluscum contagiosum virus
auggacacagcaaaag

SEQ ID NO: 230082 - RNA, 16 nt, Molluscum contagiosum virus
auggacacgcacuggc

SEQ ID NO: 230083 - RNA, 14 nt, Molluscum contagiosum virus
auggacauccucac

SEQ ID NO: 230084 - RNA, 14 nt, Molluscum contagiosum virus
auggacgcuugcua

SEQ ID NO: 230085 - RNA, 17 nt, Molluscum contagiosum virus
auggagcaggagaacua

SEQ ID NO: 230086 - RNA, 18 nt, Molluscum contagiosum virus
auggagcgcccgcugcuc

SEQ ID NO: 230087 - RNA, 20 nt, Molluscum contagiosum virus
auggagcgcccgcugcucua

SEQ ID NO: 230088 - RNA, 18 nt, Molluscum contagiosum virus
auggaggcgcuagugcag

SEQ ID NO: 230089 - RNA, 18 nt, Molluscum contagiosum virus
caaccgcgugcgugcaca

SEQ ID NO: 230090 - RNA, 16 nt, Molluscum contagiosum virus
caaccgaucccggccg

SEQ ID NO: 230091 - RNA, 12 nt, Molluscum contagiosum virus
caacagugaaga

SEQ ID NO: 230092 - RNA, 13 nt, Molluscum contagiosum virus
caacaggagcauu

SEQ ID NO: 230093 - RNA, 17 nt, Molluscum contagiosum virus
caacaggagcauuccuu

SEQ ID NO: 230094 - RNA, 16 nt, Molluscum contagiosum virus
caacagcgcaagcuga

SEQ ID NO: 230095 - RNA, 22 nt, Molluscum contagiosum virus
caaccuguuaaauggacgugcu

SEQ ID NO: 230096 - RNA, 18 nt, Molluscum contagiosum virus
caacgcacaaaacacaaa

SEQ ID NO: 230097 - RNA, 13 nt, Molluscum contagiosum virus
caacgacaaggaa

SEQ ID NO: 230098 - RNA, 17 nt, Molluscum contagiosum virus
caacgacaggaacgcac

SEQ ID NO: 230099 - RNA, 14 nt, Molluscum contagiosum virus
caacgucgcacugg

SEQ ID NO: 230100 - RNA, 16 nt, Molluscum contagiosum virus
caacgucgcacuggcc

SEQ ID NO: 230101 - RNA, 22 nt, Molluscum contagiosum virus
caagaaaaucgccuuugugaca

SEQ ID NO: 230102 - RNA, 23 nt, Molluscum contagiosum virus
caagaaaaucgccuuugugacaa

SEQ ID NO: 230103 - RNA, 14 nt, Molluscum contagiosum virus
caacguggcgcuga

SEQ ID NO: 230104 - RNA, 12 nt, Molluscum contagiosum virus
caacgucuuccg

SEQ ID NO: 230105 - RNA, 13 nt, Molluscum contagiosum virus
caacgugcugcuc

SEQ ID NO: 230106 - RNA, 16 nt, Molluscum contagiosum virus
caacgugcugcucaag

SEQ ID NO: 230107 - RNA, 21 nt, Molluscum contagiosum virus
caagacaacacucgugcucgu

SEQ ID NO: 230108 - RNA, 14 nt, Molluscum contagiosum virus
caagacaagucaca

SEQ ID NO: 230109 - RNA, 20 nt, Molluscum contagiosum virus
caagaacaaccagacgugcu

SEQ ID NO: 230110 - RNA, 18 nt, Molluscum contagiosum virus
caagaacaauuacuccag

SEQ ID NO: 230111 - RNA, 21 nt, Molluscum contagiosum virus
caagaagacgcuccauucucu

SEQ ID NO: 230112 - RNA, 15 nt, Molluscum contagiosum virus
caagaagcccaagga

SEQ ID NO: 230113 - RNA, 23 nt, Molluscum contagiosum virus
caaaugcgcugcucgccgucgca

SEQ ID NO: 230114 - RNA, 19 nt, Molluscum contagiosum virus
caacacuaccacagccauu

SEQ ID NO: 230115 - RNA, 13 nt, Molluscum contagiosum virus
caacagcacgacg

SEQ ID NO: 230116 - RNA, 12 nt, Molluscum contagiosum virus
caacacccggcg

SEQ ID NO: 230117 - RNA, 23 nt, Molluscum contagiosum virus
caacacgcuguugcugcugccgc

SEQ ID NO: 230118 - RNA, 12 nt, Molluscum contagiosum virus
caaagucuuccu

SEQ ID NO: 230119 - RNA, 17 nt, Molluscum contagiosum virus
caaaggugcucacccuu

SEQ ID NO: 230120 - RNA, 20 nt, Molluscum contagiosum virus
caaagacgagggaugcgcac

SEQ ID NO: 230121 - RNA, 19 nt, Molluscum contagiosum virus
caaagagcucaaucucgcc

SEQ ID NO: 230122 - RNA, 20 nt, Molluscum contagiosum virus
caaacugugcuccugaggaa

SEQ ID NO: 230123 - RNA, 22 nt, Molluscum contagiosum virus
caaagcccuccugagaagcaau

SEQ ID NO: 230124 - RNA, 18 nt, Molluscum contagiosum virus
caaaggcgccguccaugu

SEQ ID NO: 230125 - RNA, 22 nt, Molluscum contagiosum virus
caaaccucugagcgagcgcagu

SEQ ID NO: 230126 - RNA, 18 nt, Molluscum contagiosum virus
auuuuuuacuccuucaau

SEQ ID NO: 230127 - RNA, 13 nt, Molluscum contagiosum virus
caaaaaacaacuc

SEQ ID NO: 230128 - RNA, 22 nt, Molluscum contagiosum virus
caaacacgagacugagugcuga

SEQ ID NO: 230129 - RNA, 14 nt, Molluscum contagiosum virus
acauccacaugacc

SEQ ID NO: 230130 - RNA, 19 nt, Molluscum contagiosum virus
acaugaccaagcacauucu

SEQ ID NO: 230131 - RNA, 22 nt, Molluscum contagiosum virus
acaugaccaagcacauucucaa

SEQ ID NO: 230132 - RNA, 15 nt, Molluscum contagiosum virus
acauaaaauggacca

SEQ ID NO: 230133 - RNA, 19 nt, Molluscum contagiosum virus
acauaaaauggaccagaaa

SEQ ID NO: 230134 - RNA, 14 nt, Molluscum contagiosum virus
acagugcgugccag

SEQ ID NO: 230135 - RNA, 14 nt, Molluscum contagiosum virus
acagucuagugcgu

SEQ ID NO: 230136 - RNA, 14 nt, Molluscum contagiosum virus
acagucggugccag

SEQ ID NO: 230137 - RNA, 20 nt, Molluscum contagiosum virus
acagcuccuucuucaaguac

SEQ ID NO: 230138 - RNA, 14 nt, Molluscum contagiosum virus
acagcgcgcugcac

SEQ ID NO: 230139 - RNA, 20 nt, Molluscum contagiosum virus
acagcguguugcuguuccac

SEQ ID NO: 230140 - RNA, 18 nt, Molluscum contagiosum virus
acacauugccguugccag

SEQ ID NO: 230141 - RNA, 23 nt, Molluscum contagiosum virus
acacauugccguugccaguagcg

SEQ ID NO: 230142 - RNA, 19 nt, Molluscum contagiosum virus
acagcccccucuuggcaaa

SEQ ID NO: 230143 - RNA, 20 nt, Molluscum contagiosum virus
acagcaccuugccucuucac

SEQ ID NO: 230144 - RNA, 16 nt, Molluscum contagiosum virus
acagccccugcugcuc

SEQ ID NO: 230145 - RNA, 23 nt, Molluscum contagiosum virus
acagccguggaguccaugcccac

SEQ ID NO: 230146 - RNA, 17 nt, Molluscum contagiosum virus
acagccugcaccgagug

SEQ ID NO: 230147 - RNA, 13 nt, Molluscum contagiosum virus
acagcgcaagcug

SEQ ID NO: 230148 - RNA, 15 nt, Molluscum contagiosum virus
acacacgcacccaaa

SEQ ID NO: 230149 - RNA, 20 nt, Molluscum contagiosum virus
acacaccgcguggacaacag

SEQ ID NO: 230150 - RNA, 17 nt, Molluscum contagiosum virus
acacagaaguugccgca

SEQ ID NO: 230151 - RNA, 21 nt, Molluscum contagiosum virus
acacacucgcgcguccacaag

SEQ ID NO: 230152 - RNA, 15 nt, Molluscum contagiosum virus
acacacucgcucucu

SEQ ID NO: 230153 - RNA, 17 nt, Molluscum contagiosum virus
accaagcacauucucaa

SEQ ID NO: 230154 - RNA, 15 nt, Molluscum contagiosum virus
accagacgugcuacu

SEQ ID NO: 230155 - RNA, 21 nt, Molluscum contagiosum virus
accagacgugcuacuacugua

SEQ ID NO: 230156 - RNA, 22 nt, Molluscum contagiosum virus
accagaggguggcuugcugcag

SEQ ID NO: 230157 - RNA, 22 nt, Molluscum contagiosum virus
accagcuacgagccgcugcucc

SEQ ID NO: 230158 - RNA, 20 nt, Molluscum contagiosum virus
accagcuccgccgggaauac

SEQ ID NO: 230159 - RNA, 17 nt, Molluscum contagiosum virus
accaggcgcgugcccug

SEQ ID NO: 230160 - RNA, 22 nt, Molluscum contagiosum virus
acccaaacauguccguggcuug

SEQ ID NO: 230161 - RNA, 20 nt, Molluscum contagiosum virus
acauuuacuucgggcgcaau

SEQ ID NO: 230162 - RNA, 14 nt, Molluscum contagiosum virus
acaugcagcugcag

SEQ ID NO: 230163 - RNA, 15 nt, Molluscum contagiosum virus
acaugcggagacugu

SEQ ID NO: 230164 - RNA, 16 nt, Molluscum contagiosum virus
acaugccuuucuucca

SEQ ID NO: 230165 - RNA, 14 nt, Molluscum contagiosum virus
acaugcgugcuagc

SEQ ID NO: 230166 - RNA, 17 nt, Molluscum contagiosum virus
acaugcucgcgcucuac

SEQ ID NO: 230167 - RNA, 20 nt, Molluscum contagiosum virus
acauggaccgcgucaagauc

SEQ ID NO: 230168 - RNA, 17 nt, Molluscum contagiosum virus
acauggucaaccucuac

SEQ ID NO: 230169 - RNA, 13 nt, Molluscum contagiosum virus
acaugcacacuca

SEQ ID NO: 230170 - RNA, 15 nt, Molluscum contagiosum virus
acgggugagcucgcc

SEQ ID NO: 230171 - RNA, 15 nt, Molluscum contagiosum virus
acggucacgcaagcu

SEQ ID NO: 230172 - RNA, 17 nt, Molluscum contagiosum virus
acggucacgcaagcuuu

SEQ ID NO: 230173 - RNA, 18 nt, Molluscum contagiosum virus
acgguaccuggcuugcuc

SEQ ID NO: 230174 - RNA, 16 nt, Molluscum contagiosum virus
acgguaaacucuugca

SEQ ID NO: 230175 - RNA, 17 nt, Molluscum contagiosum virus
acgggcaugcacagcug

SEQ ID NO: 230176 - RNA, 19 nt, Molluscum contagiosum virus
acgggcaugcacagcugcu

SEQ ID NO: 230177 - RNA, 12 nt, Molluscum contagiosum virus
acgggcccgcga

SEQ ID NO: 230178 - RNA, 18 nt, Molluscum contagiosum virus
acgggcgccacuggaaga

SEQ ID NO: 230179 - RNA, 14 nt, Molluscum contagiosum virus
acgggcgccagcua

SEQ ID NO: 230180 - RNA, 15 nt, Molluscum contagiosum virus
acgggcgcgcuucuc

SEQ ID NO: 230181 - RNA, 14 nt, Molluscum contagiosum virus
acgggcgggacaga

SEQ ID NO: 230182 - RNA, 16 nt, Molluscum contagiosum virus
acgggcgugcgcagca

SEQ ID NO: 230183 - RNA, 22 nt, Molluscum contagiosum virus
acgggcucugugcggacaugcc

SEQ ID NO: 230184 - RNA, 15 nt, Molluscum contagiosum virus
acggugugcuacugc

SEQ ID NO: 230185 - RNA, 11 nt, Molluscum contagiosum virus
acguacuugag

SEQ ID NO: 230186 - RNA, 16 nt, Molluscum contagiosum virus
acguacuugagcacca

SEQ ID NO: 230187 - RNA, 12 nt, Molluscum contagiosum virus
acguaauccaug

SEQ ID NO: 230188 - RNA, 20 nt, Molluscum contagiosum virus
acggcgcggaucugcgcaca

SEQ ID NO: 230189 - RNA, 21 nt, Molluscum contagiosum virus
acggccguguacaugcucaag

SEQ ID NO: 230190 - RNA, 16 nt, Molluscum contagiosum virus
acggcccgaaggccac

SEQ ID NO: 230191 - RNA, 23 nt, Molluscum contagiosum virus
acggcuaccacgagcacugccug

SEQ ID NO: 230192 - RNA, 19 nt, Molluscum contagiosum virus
acgggcacgccgugggcag

SEQ ID NO: 230193 - RNA, 18 nt, Molluscum contagiosum virus
acggcuugccgcucggca

SEQ ID NO: 230194 - RNA, 23 nt, Molluscum contagiosum virus
acggcuugccgcucggcacaaaa

SEQ ID NO: 230195 - RNA, 15 nt, Molluscum contagiosum virus
acggagauggacaca

SEQ ID NO: 230196 - RNA, 16 nt, Molluscum contagiosum virus
acggaacgagccugcc

SEQ ID NO: 230197 - RNA, 17 nt, Molluscum contagiosum virus
acggacaaaauggcugc

SEQ ID NO: 230198 - RNA, 20 nt, Molluscum contagiosum virus
acgauggccggcaacuggcu

SEQ ID NO: 230199 - RNA, 19 nt, Molluscum contagiosum virus
acgcaacgucgcacuggcc

SEQ ID NO: 230200 - RNA, 12 nt, Molluscum contagiosum virus
acgcaacguugu

SEQ ID NO: 230201 - RNA, 22 nt, Molluscum contagiosum virus
acgcacaaaguucauggggcuc

SEQ ID NO: 230202 - RNA, 12 nt, Molluscum contagiosum virus
acgcaagcuuug

SEQ ID NO: 230203 - RNA, 13 nt, Molluscum contagiosum virus
acgcaaguacaac

SEQ ID NO: 230204 - RNA, 18 nt, Molluscum contagiosum virus
acgcaaguacaacccaaa

SEQ ID NO: 230205 - RNA, 17 nt, Molluscum contagiosum virus
acgaagcugugcaagag

SEQ ID NO: 230206 - RNA, 21 nt, Molluscum contagiosum virus
acgagugcccgcgcgcuguau

SEQ ID NO: 230207 - RNA, 16 nt, Molluscum contagiosum virus
acgaguucugcaucuu

SEQ ID NO: 230208 - RNA, 22 nt, Molluscum contagiosum virus
acgaguucugcaucuucugcca

SEQ ID NO: 230209 - RNA, 23 nt, Molluscum contagiosum virus
acgaggugcgcgcaacacugcag

SEQ ID NO: 230210 - RNA, 13 nt, Molluscum contagiosum virus
acgaggugcugcg

SEQ ID NO: 230211 - RNA, 22 nt, Molluscum contagiosum virus
acgaagucguuccggacgugca

SEQ ID NO: 230212 - RNA, 15 nt, Molluscum contagiosum virus
acgagggacacgcac

SEQ ID NO: 230213 - RNA, 15 nt, Molluscum contagiosum virus
acgagggaugcacac

SEQ ID NO: 230214 - RNA, 15 nt, Molluscum contagiosum virus
acgcuucgacuucuc

SEQ ID NO: 230215 - RNA, 21 nt, Molluscum contagiosum virus
acgcuucggcucgggaacaaa

SEQ ID NO: 230216 - RNA, 23 nt, Molluscum contagiosum virus
acgcuucggcucgggaacaaagg

SEQ ID NO: 230217 - RNA, 18 nt, Molluscum contagiosum virus
acgcuugcgcaugugauu

SEQ ID NO: 230218 - RNA, 11 nt, Molluscum contagiosum virus
acgcuuguccg

SEQ ID NO: 230219 - RNA, 17 nt, Molluscum contagiosum virus
acggaaccgaagguuuu

SEQ ID NO: 230220 - RNA, 14 nt, Molluscum contagiosum virus
acgcugcugcacag

SEQ ID NO: 230221 - RNA, 16 nt, Molluscum contagiosum virus
acgcugcuguccuuca

SEQ ID NO: 230222 - RNA, 11 nt, Molluscum contagiosum virus
acgcugcacau

SEQ ID NO: 230223 - RNA, 20 nt, Molluscum contagiosum virus
acgcugcacgagcugcugua

SEQ ID NO: 230224 - RNA, 14 nt, Molluscum contagiosum virus
acgcggcucuggag

SEQ ID NO: 230225 - RNA, 19 nt, Molluscum contagiosum virus
acgcggcucuggagcggcc

SEQ ID NO: 230226 - RNA, 17 nt, Molluscum contagiosum virus
acgcgggcccgugcuca

SEQ ID NO: 230227 - RNA, 14 nt, Molluscum contagiosum virus
acgcguccacaaag

SEQ ID NO: 230228 - RNA, 18 nt, Molluscum contagiosum virus
acgcucauggacaugcuc

SEQ ID NO: 230229 - RNA, 17 nt, Molluscum contagiosum virus
acgcuagcugugcgcua

SEQ ID NO: 230230 - RNA, 20 nt, Molluscum contagiosum virus
acgcgugcggugacuugccg

SEQ ID NO: 230231 - RNA, 20 nt, Molluscum contagiosum virus
acgcgugugguugcuugcau

SEQ ID NO: 230232 - RNA, 13 nt, Molluscum contagiosum virus
acccaccaggaac

SEQ ID NO: 230233 - RNA, 15 nt, Molluscum contagiosum virus
accgccugcugcagc

SEQ ID NO: 230234 - RNA, 17 nt, Molluscum contagiosum virus
accgcgcagaagccaac

SEQ ID NO: 230235 - RNA, 13 nt, Molluscum contagiosum virus
accgcauguccac

SEQ ID NO: 230236 - RNA, 14 nt, Molluscum contagiosum virus
accgcaagcucaug

SEQ ID NO: 230237 - RNA, 17 nt, Molluscum contagiosum virus
accgucgcguggugcuu

SEQ ID NO: 230238 - RNA, 14 nt, Molluscum contagiosum virus
accgucaaccugcu

SEQ ID NO: 230239 - RNA, 15 nt, Molluscum contagiosum virus
accgucaaccugcug

SEQ ID NO: 230240 - RNA, 13 nt, Molluscum contagiosum virus
accggcucaagaa

SEQ ID NO: 230241 - RNA, 19 nt, Molluscum contagiosum virus
accggcgcuugcgcuacgu

SEQ ID NO: 230242 - RNA, 15 nt, Molluscum contagiosum virus
accggcagugcuugc

SEQ ID NO: 230243 - RNA, 13 nt, Molluscum contagiosum virus
accggccaaggca

SEQ ID NO: 230244 - RNA, 16 nt, Molluscum contagiosum virus
accggagacaccagcu

SEQ ID NO: 230245 - RNA, 22 nt, Molluscum contagiosum virus
accgcugcuauuaccugagauc

SEQ ID NO: 230246 - RNA, 19 nt, Molluscum contagiosum virus
accgcugcuucguaaagcu

SEQ ID NO: 230247 - RNA, 22 nt, Molluscum contagiosum virus
accgcuucgugucuguguuucu

SEQ ID NO: 230248 - RNA, 20 nt, Molluscum contagiosum virus
accggaagcaacgacaagga

SEQ ID NO: 230249 - RNA, 13 nt, Molluscum contagiosum virus
accucugcuucac

SEQ ID NO: 230250 - RNA, 21 nt, Molluscum contagiosum virus
accucugcgcggcccgcgggc

SEQ ID NO: 230251 - RNA, 15 nt, Molluscum contagiosum virus
accuuccuccagggc

SEQ ID NO: 230252 - RNA, 16 nt, Molluscum contagiosum virus
accuucgcggagcgca

SEQ ID NO: 230253 - RNA, 18 nt, Molluscum contagiosum virus
accuugucgagacaggcc

SEQ ID NO: 230254 - RNA, 22 nt, Molluscum contagiosum virus
accuugugcgcgcaucagcaca

SEQ ID NO: 230255 - RNA, 21 nt, Molluscum contagiosum virus
acgaacauguugugcucgugu

SEQ ID NO: 230256 - RNA, 16 nt, Molluscum contagiosum virus
acgaaaucgcaaagca

SEQ ID NO: 230257 - RNA, 13 nt, Molluscum contagiosum virus
accucgcugcuga

SEQ ID NO: 230258 - RNA, 14 nt, Molluscum contagiosum virus
accucgcugcugag

SEQ ID NO: 230259 - RNA, 22 nt, Molluscum contagiosum virus
accucggucaacggcacagucu

SEQ ID NO: 230260 - RNA, 18 nt, Molluscum contagiosum virus
accucgcaugaugaacuu

SEQ ID NO: 230261 - RNA, 18 nt, Molluscum contagiosum virus
accucaccgcgcacaucu

SEQ ID NO: 230262 - RNA, 22 nt, Molluscum contagiosum virus
accucaccuuucucuuucucaa

SEQ ID NO: 230263 - RNA, 19 nt, Molluscum contagiosum virus
agcaaacugugcuccugag

SEQ ID NO: 230264 - RNA, 22 nt, Molluscum contagiosum virus
agcaaacugugcuccugaggaa

SEQ ID NO: 230265 - RNA, 15 nt, Molluscum contagiosum virus
agauucguggcgagc

SEQ ID NO: 230266 - RNA, 10 nt, Molluscum contagiosum virus
agcaagcacg

SEQ ID NO: 230267 - RNA, 14 nt, Molluscum contagiosum virus
agcaacugcacagg

SEQ ID NO: 230268 - RNA, 22 nt, Molluscum contagiosum virus
agcaacgcaacguugugcgcaa

SEQ ID NO: 230269 - RNA, 23 nt, Molluscum contagiosum virus
agcaacggcggcgcaagcgcaag

SEQ ID NO: 230270 - RNA, 22 nt, Molluscum contagiosum virus
agcaaccucgggaagcccucag

SEQ ID NO: 230271 - RNA, 15 nt, Molluscum contagiosum virus
agcaacgacaaggaa

SEQ ID NO: 230272 - RNA, 16 nt, Molluscum contagiosum virus
agcaacgacaaggaaa

SEQ ID NO: 230273 - RNA, 21 nt, Molluscum contagiosum virus
agcaaggcccacuuccgugag

SEQ ID NO: 230274 - RNA, 19 nt, Molluscum contagiosum virus
agcaauacguggcgcuugg

SEQ ID NO: 230275 - RNA, 15 nt, Molluscum contagiosum virus
agcagcaaacugugc

SEQ ID NO: 230276 - RNA, 17 nt, Molluscum contagiosum virus
agcagcaaacugugcuc

SEQ ID NO: 230277 - RNA, 18 nt, Molluscum contagiosum virus
agcagcaaacugugcucc

SEQ ID NO: 230278 - RNA, 19 nt, Molluscum contagiosum virus
agcagccccgacgccagcg

SEQ ID NO: 230279 - RNA, 21 nt, Molluscum contagiosum virus
agcagccgcagcccacgugcc

SEQ ID NO: 230280 - RNA, 20 nt, Molluscum contagiosum virus
agcacgagaaacaagacgaa

SEQ ID NO: 230281 - RNA, 19 nt, Molluscum contagiosum virus
agcacgcaacgucgcacug

SEQ ID NO: 230282 - RNA, 21 nt, Molluscum contagiosum virus
agcacgcaacgucgcacuggc

SEQ ID NO: 230283 - RNA, 16 nt, Molluscum contagiosum virus
agcaccugcaguucca

SEQ ID NO: 230284 - RNA, 16 nt, Molluscum contagiosum virus
agcacgccuccaagaa

SEQ ID NO: 230285 - RNA, 15 nt, Molluscum contagiosum virus
agcacguccguugca

SEQ ID NO: 230286 - RNA, 22 nt, Molluscum contagiosum virus
agcacguccucggucaccacuc

SEQ ID NO: 230287 - RNA, 22 nt, Molluscum contagiosum virus
agcacuacgugcucgaguucaa

SEQ ID NO: 230288 - RNA, 17 nt, Molluscum contagiosum virus
agauaguuuggacgagc

SEQ ID NO: 230289 - RNA, 18 nt, Molluscum contagiosum virus
agauaguuuggacgagcu

SEQ ID NO: 230290 - RNA, 17 nt, Molluscum contagiosum virus
agaucaggcagcugcug

SEQ ID NO: 230291 - RNA, 21 nt, Molluscum contagiosum virus
agaucacggccgggauuugcc

SEQ ID NO: 230292 - RNA, 12 nt, Molluscum contagiosum virus
agaucaagcacg

SEQ ID NO: 230293 - RNA, 19 nt, Molluscum contagiosum virus
agaugcucuacgugcugca

SEQ ID NO: 230294 - RNA, 13 nt, Molluscum contagiosum virus
agaguacuaggug

SEQ ID NO: 230295 - RNA, 21 nt, Molluscum contagiosum virus
agaggacguguacgcacgggg

SEQ ID NO: 230296 - RNA, 17 nt, Molluscum contagiosum virus
agagggccuuucucaga

SEQ ID NO: 230297 - RNA, 13 nt, Molluscum contagiosum virus
agaggcuuugcuu

SEQ ID NO: 230298 - RNA, 18 nt, Molluscum contagiosum virus
agacuucuugguggacag

SEQ ID NO: 230299 - RNA, 14 nt, Molluscum contagiosum virus
agagaaaucccaag

SEQ ID NO: 230300 - RNA, 15 nt, Molluscum contagiosum virus
agagaaaggcaccca

SEQ ID NO: 230301 - RNA, 21 nt, Molluscum contagiosum virus
agagaaaggcacccaccagga

SEQ ID NO: 230302 - RNA, 17 nt, Molluscum contagiosum virus
agagcuuuucuuugugg

SEQ ID NO: 230303 - RNA, 21 nt, Molluscum contagiosum virus
agagcuuuucuuuguggucaa

SEQ ID NO: 230304 - RNA, 17 nt, Molluscum contagiosum virus
agagacaugcacacuca

SEQ ID NO: 230305 - RNA, 15 nt, Molluscum contagiosum virus
agacacgcacacucg

SEQ ID NO: 230306 - RNA, 14 nt, Molluscum contagiosum virus
agacguacgagcag

SEQ ID NO: 230307 - RNA, 15 nt, Molluscum contagiosum virus
agacuacggcacuaa

SEQ ID NO: 230308 - RNA, 15 nt, Molluscum contagiosum virus
agacguggugcucgu

SEQ ID NO: 230309 - RNA, 22 nt, Molluscum contagiosum virus
agacguguguuguuuuguguug

SEQ ID NO: 230310 - RNA, 14 nt, Molluscum contagiosum virus
agacgugcacaaag

SEQ ID NO: 230311 - RNA, 21 nt, Molluscum contagiosum virus
agacuguuaggcaucucgugc

SEQ ID NO: 230312 - RNA, 17 nt, Molluscum contagiosum virus
agacugagugcugagcc

SEQ ID NO: 230313 - RNA, 16 nt, Molluscum contagiosum virus
agacuggagcacggac

SEQ ID NO: 230314 - RNA, 14 nt, Molluscum contagiosum virus
acuccuucaauaua

SEQ ID NO: 230315 - RNA, 22 nt, Molluscum contagiosum virus
acuccuuccggagacaccagcu

SEQ ID NO: 230316 - RNA, 17 nt, Molluscum contagiosum virus
acuccuugaagggcaca

SEQ ID NO: 230317 - RNA, 21 nt, Molluscum contagiosum virus
acuccgcgaggagauucgcac

SEQ ID NO: 230318 - RNA, 22 nt, Molluscum contagiosum virus
acuccgagcgcgacuuguccuc

SEQ ID NO: 230319 - RNA, 18 nt, Molluscum contagiosum virus
acgucaagcaggcaugca

SEQ ID NO: 230320 - RNA, 20 nt, Molluscum contagiosum virus
acuccaaggucgagcugacu

SEQ ID NO: 230321 - RNA, 16 nt, Molluscum contagiosum virus
acucaugcugcucaug

SEQ ID NO: 230322 - RNA, 19 nt, Molluscum contagiosum virus
acgugcacguggcgcacac

SEQ ID NO: 230323 - RNA, 16 nt, Molluscum contagiosum virus
acgucuuccagacgca

SEQ ID NO: 230324 - RNA, 17 nt, Molluscum contagiosum virus
acuguugcuuccggggc

SEQ ID NO: 230325 - RNA, 15 nt, Molluscum contagiosum virus
acugagugcugagcc

SEQ ID NO: 230326 - RNA, 12 nt, Molluscum contagiosum virus
acugugcugacc

SEQ ID NO: 230327 - RNA, 17 nt, Molluscum contagiosum virus
acugagccgcaagcaca

SEQ ID NO: 230328 - RNA, 15 nt, Molluscum contagiosum virus
acugaauaaguauuc

SEQ ID NO: 230329 - RNA, 23 nt, Molluscum contagiosum virus
acugacgguacucaugcugcuca

SEQ ID NO: 230330 - RNA, 19 nt, Molluscum contagiosum virus
acuuacggacgcccuccuc

SEQ ID NO: 230331 - RNA, 20 nt, Molluscum contagiosum virus
acuugcaaacgcuccaugag

SEQ ID NO: 230332 - RNA, 15 nt, Molluscum contagiosum virus
acuugccguguucua

SEQ ID NO: 230333 - RNA, 14 nt, Molluscum contagiosum virus
acuugcgcagccau

SEQ ID NO: 230334 - RNA, 17 nt, Molluscum contagiosum virus
acuugcgcguccacaaa

SEQ ID NO: 230335 - RNA, 14 nt, Molluscum contagiosum virus
acuuuaucucucac

SEQ ID NO: 230336 - RNA, 17 nt, Molluscum contagiosum virus
agaaacagccauguguc

SEQ ID NO: 230337 - RNA, 22 nt, Molluscum contagiosum virus
agaagaacaagaagcgcuucuu

SEQ ID NO: 230338 - RNA, 15 nt, Molluscum contagiosum virus
agaagaacagcacga

SEQ ID NO: 230339 - RNA, 22 nt, Molluscum contagiosum virus
agaagacauugccuuuugcaca

SEQ ID NO: 230340 - RNA, 13 nt, Molluscum contagiosum virus
agacaagucacac

SEQ ID NO: 230341 - RNA, 16 nt, Molluscum contagiosum virus
agacaacacucgugcu

SEQ ID NO: 230342 - RNA, 18 nt, Molluscum contagiosum virus
agacaacaaacauuguga

SEQ ID NO: 230343 - RNA, 21 nt, Molluscum contagiosum virus
agaaacucuccgacgugcugc

SEQ ID NO: 230344 - RNA, 16 nt, Molluscum contagiosum virus
agaaacugggcuucaa

SEQ ID NO: 230345 - RNA, 21 nt, Molluscum contagiosum virus
agaaacgacgggcgcgcuucu

SEQ ID NO: 230346 - RNA, 13 nt, Molluscum contagiosum virus
agaacaugugcuc

SEQ ID NO: 230347 - RNA, 16 nt, Molluscum contagiosum virus
agaacaugcucgccag

SEQ ID NO: 230348 - RNA, 18 nt, Molluscum contagiosum virus
agaacucuacacguggaa

SEQ ID NO: 230349 - RNA, 20 nt, Molluscum contagiosum virus
agaacucuacacguggaauu

SEQ ID NO: 230350 - RNA, 20 nt, Molluscum contagiosum virus
agaacgccaggaacaucagc

SEQ ID NO: 230351 - RNA, 21 nt, Molluscum contagiosum virus
agaaccgccgucaacauuuca

SEQ ID NO: 230352 - RNA, 14 nt, Molluscum contagiosum virus
aacccguauuucca

SEQ ID NO: 230353 - RNA, 18 nt, Molluscum contagiosum virus
aaccgcgugcgugcacag

SEQ ID NO: 230354 - RNA, 19 nt, Molluscum contagiosum virus
aaccgcgugcgugcacagc

SEQ ID NO: 230355 - RNA, 20 nt, Molluscum contagiosum virus
aaccguacgcacgguagcua

SEQ ID NO: 230356 - RNA, 18 nt, Molluscum contagiosum virus
aaccgaggccgcgcucuu

SEQ ID NO: 230357 - RNA, 14 nt, Molluscum contagiosum virus
aacagugcgugcca

SEQ ID NO: 230358 - RNA, 12 nt, Molluscum contagiosum virus
aacacugcagaa

SEQ ID NO: 230359 - RNA, 16 nt, Molluscum contagiosum virus
aacucgaggcucuguu

SEQ ID NO: 230360 - RNA, 14 nt, Molluscum contagiosum virus
aacucguaggacaa

SEQ ID NO: 230361 - RNA, 21 nt, Molluscum contagiosum virus
aacgaggaaaggcacaccccu

SEQ ID NO: 230362 - RNA, 16 nt, Molluscum contagiosum virus
aacgagggaugcacac

SEQ ID NO: 230363 - RNA, 21 nt, Molluscum contagiosum virus
aacgacgggcgcgcuucucau

SEQ ID NO: 230364 - RNA, 13 nt, Molluscum contagiosum virus
aacgcgggccagg

SEQ ID NO: 230365 - RNA, 15 nt, Molluscum contagiosum virus
aacgcgaaacuggac

SEQ ID NO: 230366 - RNA, 20 nt, Molluscum contagiosum virus
aacgcacagccccugcugcu

SEQ ID NO: 230367 - RNA, 19 nt, Molluscum contagiosum virus
aacgcacgcggaaacaagc

SEQ ID NO: 230368 - RNA, 15 nt, Molluscum contagiosum virus
aacgcaggacacugu

SEQ ID NO: 230369 - RNA, 19 nt, Molluscum contagiosum virus
aacgcaggacacuguaauc

SEQ ID NO: 230370 - RNA, 18 nt, Molluscum contagiosum virus
aagaccuuggacacgugc

SEQ ID NO: 230371 - RNA, 16 nt, Molluscum contagiosum virus
aagacgcgagcggcuu

SEQ ID NO: 230372 - RNA, 16 nt, Molluscum contagiosum virus
aagacauuucuccucc

SEQ ID NO: 230373 - RNA, 13 nt, Molluscum contagiosum virus
aagaccacauccu

SEQ ID NO: 230374 - RNA, 15 nt, Molluscum contagiosum virus
aagaggggagccagc

SEQ ID NO: 230375 - RNA, 20 nt, Molluscum contagiosum virus
aagaggccggcacaagccgu

SEQ ID NO: 230376 - RNA, 14 nt, Molluscum contagiosum virus
aagaggccgucaca

SEQ ID NO: 230377 - RNA, 16 nt, Molluscum contagiosum virus
aagaggcuuacugcaa

SEQ ID NO: 230378 - RNA, 23 nt, Molluscum contagiosum virus
aagagccgccggggcccaugcuc

SEQ ID NO: 230379 - RNA, 14 nt, Molluscum contagiosum virus
aagagccggacucu

SEQ ID NO: 230380 - RNA, 17 nt, Molluscum contagiosum virus
aagagcgguuccugcuu

SEQ ID NO: 230381 - RNA, 17 nt, Molluscum contagiosum virus
aagaggacgagcugcua

SEQ ID NO: 230382 - RNA, 14 nt, Molluscum contagiosum virus
aagagcuuacuaga

SEQ ID NO: 230383 - RNA, 17 nt, Molluscum contagiosum virus
aagaacauaugucuccc

SEQ ID NO: 230384 - RNA, 21 nt, Molluscum contagiosum virus
aagaacagagaaaggcaccca

SEQ ID NO: 230385 - RNA, 14 nt, Molluscum contagiosum virus
aacugcaacgugag

SEQ ID NO: 230386 - RNA, 16 nt, Molluscum contagiosum virus
aacuggacugagccgc

SEQ ID NO: 230387 - RNA, 23 nt, Molluscum contagiosum virus
aacuggacugagccgcaagcaca

SEQ ID NO: 230388 - RNA, 23 nt, Molluscum contagiosum virus
aaagucgcuaccaagaacagaga

SEQ ID NO: 230389 - RNA, 12 nt, Molluscum contagiosum virus
aaauaaagacaa

SEQ ID NO: 230390 - RNA, 14 nt, Molluscum contagiosum virus
aaacgcuguuuuca

SEQ ID NO: 230391 - RNA, 22 nt, Molluscum contagiosum virus
aaaccucugagcgagcgcaguu

SEQ ID NO: 230392 - RNA, 15 nt, Molluscum contagiosum virus
aaacgcgaaacugga

SEQ ID NO: 230393 - RNA, 16 nt, Molluscum contagiosum virus
aaacgcgaaacuggac

SEQ ID NO: 230394 - RNA, 22 nt, Molluscum contagiosum virus
aaacgcgcccccguccgugcca

SEQ ID NO: 230395 - RNA, 19 nt, Molluscum contagiosum virus
aacaccuccugcuuugcac

SEQ ID NO: 230396 - RNA, 16 nt, Molluscum contagiosum virus
aacacgagugcuugcg

SEQ ID NO: 230397 - RNA, 20 nt, Molluscum contagiosum virus
aacaaugcugcaucuagccu

SEQ ID NO: 230398 - RNA, 16 nt, Molluscum contagiosum virus
aacaaggccaaagccg

SEQ ID NO: 230399 - RNA, 20 nt, Molluscum contagiosum virus
aaauggcugcgaccaagaca

SEQ ID NO: 230400 - RNA, 18 nt, Molluscum contagiosum virus
aaaucccaagagccaugu

SEQ ID NO: 230401 - RNA, 12 nt, Molluscum contagiosum virus
aaauggccuugc

SEQ ID NO: 230402 - RNA, 15 nt, Molluscum contagiosum virus
aacaagagcuuacua

SEQ ID NO: 230403 - RNA, 14 nt, Molluscum contagiosum virus
aacaagcacaugug

SEQ ID NO: 230404 - RNA, 14 nt, Molluscum contagiosum virus
aacaagcagucuca

SEQ ID NO: 230405 - RNA, 23 nt, Molluscum contagiosum virus
aacaacacgaucaaggugcagaa

SEQ ID NO: 230406 - RNA, 21 nt, Molluscum contagiosum virus
aacaacagcguguugcuguuc

SEQ ID NO: 230407 - RNA, 17 nt, Molluscum contagiosum virus
aacaaccacucuuucac

SEQ ID NO: 230408 - RNA, 16 nt, Molluscum contagiosum virus
acaacccaaacauguc

SEQ ID NO: 230409 - RNA, 15 nt, Molluscum contagiosum virus
acaacacucgugcuc

SEQ ID NO: 230410 - RNA, 14 nt, Molluscum contagiosum virus
acaaggaaaggcac

SEQ ID NO: 230411 - RNA, 21 nt, Molluscum contagiosum virus
acaaggaaaggcacccgcagg

SEQ ID NO: 230412 - RNA, 13 nt, Molluscum contagiosum virus
acaagcggugcag

SEQ ID NO: 230413 - RNA, 13 nt, Molluscum contagiosum virus
acaagcagucuca

SEQ ID NO: 230414 - RNA, 14 nt, Molluscum contagiosum virus
acaacgaccagcuu

SEQ ID NO: 230415 - RNA, 12 nt, Molluscum contagiosum virus
acaacgcgcuac

SEQ ID NO: 230416 - RNA, 14 nt, Molluscum contagiosum virus
acaacgaacauguu

SEQ ID NO: 230417 - RNA, 20 nt, Molluscum contagiosum virus
acaacacgcuguugcugcug

SEQ ID NO: 230418 - RNA, 13 nt, Molluscum contagiosum virus
acacaacaagaaa

SEQ ID NO: 230419 - RNA, 19 nt, Molluscum contagiosum virus
acaauggacacgcacuggc

SEQ ID NO: 230420 - RNA, 14 nt, Molluscum contagiosum virus
acaaggauggacaa

SEQ ID NO: 230421 - RNA, 15 nt, Molluscum contagiosum virus
acaaggauggacaaa

SEQ ID NO: 230422 - RNA, 18 nt, Molluscum contagiosum virus
acaagggcggucccgcga

SEQ ID NO: 230423 - RNA, 13 nt, Molluscum contagiosum virus
acaagguuguguu

SEQ ID NO: 230424 - RNA, 21 nt, Molluscum contagiosum virus
aauuccguccagugaaaugac

SEQ ID NO: 230425 - RNA, 15 nt, Molluscum contagiosum virus
acaaaagccacuagc

SEQ ID NO: 230426 - RNA, 22 nt, Molluscum contagiosum virus
aaucucgccggcuguaaaugga

SEQ ID NO: 230427 - RNA, 21 nt, Molluscum contagiosum virus
aaucacggcuguaaugugcug

SEQ ID NO: 230428 - RNA, 13 nt, Molluscum contagiosum virus
aaucccaagauac

SEQ ID NO: 230429 - RNA, 15 nt, Molluscum contagiosum virus
aaguacaacccaaac

SEQ ID NO: 230430 - RNA, 20 nt, Molluscum contagiosum virus
aaguacaacccaaacauguc

SEQ ID NO: 230431 - RNA, 16 nt, Molluscum contagiosum virus
aaguagccuccguagc

SEQ ID NO: 230432 - RNA, 15 nt, Molluscum contagiosum virus
aaguacgagagcgca

SEQ ID NO: 230433 - RNA, 22 nt, Molluscum contagiosum virus
aagcacgcaacgucgcacuggc

SEQ ID NO: 230434 - RNA, 17 nt, Molluscum contagiosum virus
aagcacaacaagaagac

SEQ ID NO: 230435 - RNA, 12 nt, Molluscum contagiosum virus
aagguacugaac

SEQ ID NO: 230436 - RNA, 19 nt, Molluscum contagiosum virus
aagggcuccuucuucagca

SEQ ID NO: 230437 - RNA, 12 nt, Molluscum contagiosum virus
aagaugaagcuc

SEQ ID NO: 230438 - RNA, 17 nt, Molluscum contagiosum virus
aagaucaccccgcagcu

SEQ ID NO: 230439 - RNA, 19 nt, Molluscum contagiosum virus
aagaucaccccgcagcuca

SEQ ID NO: 230440 - RNA, 18 nt, Molluscum contagiosum virus
aagaucguuuugcacuug

SEQ ID NO: 230441 - RNA, 23 nt, Molluscum contagiosum virus
aagaucggacucagcauguugcu

SEQ ID NO: 230442 - RNA, 11 nt, Molluscum contagiosum virus
aagcaaagccu

SEQ ID NO: 230443 - RNA, 13 nt, Molluscum contagiosum virus
acggacagcaccc

SEQ ID NO: 230444 - RNA, 14 nt, Molluscum contagiosum virus
acggacgcccuccu

SEQ ID NO: 230445 - RNA, 20 nt, Molluscum contagiosum virus
acgcuucggcucgggaacaa

SEQ ID NO: 230446 - RNA, 19 nt, Molluscum contagiosum virus
acgcugccuagguccacau

SEQ ID NO: 230447 - RNA, 14 nt, Molluscum contagiosum virus
acgcugcguuucca

SEQ ID NO: 230448 - RNA, 17 nt, Molluscum contagiosum virus
acgcugcucgugcugcu

SEQ ID NO: 230449 - RNA, 23 nt, Molluscum contagiosum virus
acgcuggcgcucggcguggugcu

SEQ ID NO: 230450 - RNA, 21 nt, Molluscum contagiosum virus
acgcuggugaucacgcacgaa

SEQ ID NO: 230451 - RNA, 22 nt, Molluscum contagiosum virus
acgcccgcgaaagaacacggac

SEQ ID NO: 230452 - RNA, 19 nt, Molluscum contagiosum virus
acgcacuggcgauguccau

SEQ ID NO: 230453 - RNA, 15 nt, Molluscum contagiosum virus
acgcacgguagcuag

SEQ ID NO: 230454 - RNA, 20 nt, Molluscum contagiosum virus
acgcacgguagcuagcucug

SEQ ID NO: 230455 - RNA, 19 nt, Molluscum contagiosum virus
acgcacgugccgugcuguc

SEQ ID NO: 230456 - RNA, 20 nt, Molluscum contagiosum virus
acgcaccgccuggugcugcg

SEQ ID NO: 230457 - RNA, 16 nt, Molluscum contagiosum virus
acgaacggaacacagu

SEQ ID NO: 230458 - RNA, 20 nt, Molluscum contagiosum virus
acgaacggaacacagugcgu

SEQ ID NO: 230459 - RNA, 13 nt, Molluscum contagiosum virus
acgaacauguugu

SEQ ID NO: 230460 - RNA, 16 nt, Molluscum contagiosum virus
acgaacauguugugcu

SEQ ID NO: 230461 - RNA, 17 nt, Molluscum contagiosum virus
acgaacauguugugcuc

SEQ ID NO: 230462 - RNA, 14 nt, Molluscum contagiosum virus
acgccagugcuuug

SEQ ID NO: 230463 - RNA, 14 nt, Molluscum contagiosum virus
acgccaacuucguc

SEQ ID NO: 230464 - RNA, 24 nt, Molluscum contagiosum virus
acgccaagaggacgagcugcuaac

SEQ ID NO: 230465 - RNA, 15 nt, Molluscum contagiosum virus
acgccaaucccaaga

SEQ ID NO: 230466 - RNA, 21 nt, Molluscum contagiosum virus
acgccagcgcgcccaccagca

SEQ ID NO: 230467 - RNA, 18 nt, Molluscum contagiosum virus
acgccagcuguagcagga

SEQ ID NO: 230468 - RNA, 17 nt, Molluscum contagiosum virus
acgccaggaacaucagc

SEQ ID NO: 230469 - RNA, 21 nt, Molluscum contagiosum virus
acgcagcuggcgggcgugccc

SEQ ID NO: 230470 - RNA, 19 nt, Molluscum contagiosum virus
accuuggcgcugcacaguu

SEQ ID NO: 230471 - RNA, 19 nt, Molluscum contagiosum virus
acgaaagucgcuaccaaga

SEQ ID NO: 230472 - RNA, 17 nt, Molluscum contagiosum virus
accuuuugcuccaugac

SEQ ID NO: 230473 - RNA, 22 nt, Molluscum contagiosum virus
accugcacgacguacgagugcu

SEQ ID NO: 230474 - RNA, 22 nt, Molluscum contagiosum virus
accugcacgcggcguacaucga

SEQ ID NO: 230475 - RNA, 16 nt, Molluscum contagiosum virus
accugcaggaaaggca

SEQ ID NO: 230476 - RNA, 18 nt, Molluscum contagiosum virus
accucgugguacugccga

SEQ ID NO: 230477 - RNA, 24 nt, Molluscum contagiosum virus
accucgcgcgccgccgcaacauag

SEQ ID NO: 230478 - RNA, 13 nt, Molluscum contagiosum virus
accucgacauuuc

SEQ ID NO: 230479 - RNA, 15 nt, Molluscum contagiosum virus
accuccugcaccugc

SEQ ID NO: 230480 - RNA, 17 nt, Molluscum contagiosum virus
accuccugcuuugcacg

SEQ ID NO: 230481 - RNA, 14 nt, Molluscum contagiosum virus
accucaucaagccc

SEQ ID NO: 230482 - RNA, 17 nt, Molluscum contagiosum virus
accuaaauagcauguca

SEQ ID NO: 230483 - RNA, 16 nt, Molluscum contagiosum virus
accgucacgacucuca

SEQ ID NO: 230484 - RNA, 18 nt, Molluscum contagiosum virus
accgggagcauagcaaga

SEQ ID NO: 230485 - RNA, 13 nt, Molluscum contagiosum virus
accgggaguguca

SEQ ID NO: 230486 - RNA, 22 nt, Molluscum contagiosum virus
accggccaaggcaaaguucucg

SEQ ID NO: 230487 - RNA, 22 nt, Molluscum contagiosum virus
acccuucugaggggcaguguuc

SEQ ID NO: 230488 - RNA, 23 nt, Molluscum contagiosum virus
acccuucugaggggcaguguucc

SEQ ID NO: 230489 - RNA, 21 nt, Molluscum contagiosum virus
acccgugcgcgcgcugagaua

SEQ ID NO: 230490 - RNA, 17 nt, Molluscum contagiosum virus
accaguugcauauccac

SEQ ID NO: 230491 - RNA, 14 nt, Molluscum contagiosum virus
accagugcgugcuc

SEQ ID NO: 230492 - RNA, 15 nt, Molluscum contagiosum virus
accaggcgcgugccc

SEQ ID NO: 230493 - RNA, 18 nt, Molluscum contagiosum virus
accaucuucaacuuccac

SEQ ID NO: 230494 - RNA, 17 nt, Molluscum contagiosum virus
accauggacacgcugcg

SEQ ID NO: 230495 - RNA, 13 nt, Molluscum contagiosum virus
acccaaacauguc

SEQ ID NO: 230496 - RNA, 17 nt, Molluscum contagiosum virus
acccagguucagcgcuc

SEQ ID NO: 230497 - RNA, 19 nt, Molluscum contagiosum virus
acccaccaggaacagggaa

SEQ ID NO: 230498 - RNA, 19 nt, Molluscum contagiosum virus
accaacgugaguaccguga

SEQ ID NO: 230499 - RNA, 15 nt, Molluscum contagiosum virus
accaccguggaggag

SEQ ID NO: 230500 - RNA, 14 nt, Molluscum contagiosum virus
accaccuccagguc

SEQ ID NO: 230501 - RNA, 21 nt, Molluscum contagiosum virus
accaaagguccaguauuucaa

SEQ ID NO: 230502 - RNA, 16 nt, Molluscum contagiosum virus
accagcggcaggcggc

SEQ ID NO: 230503 - RNA, 14 nt, Molluscum contagiosum virus
accagcgugcccuu

SEQ ID NO: 230504 - RNA, 17 nt, Molluscum contagiosum virus
accagcuccgccgggaa

SEQ ID NO: 230505 - RNA, 18 nt, Molluscum contagiosum virus
accagcugcaaacauugc

SEQ ID NO: 230506 - RNA, 13 nt, Molluscum contagiosum virus
accagcugccgcu

SEQ ID NO: 230507 - RNA, 14 nt, Molluscum contagiosum virus
accagcagccaggc

SEQ ID NO: 230508 - RNA, 18 nt, Molluscum contagiosum virus
accacucuuucacgcugc

SEQ ID NO: 230509 - RNA, 15 nt, Molluscum contagiosum virus
accagaaacugggcu

SEQ ID NO: 230510 - RNA, 20 nt, Molluscum contagiosum virus
accagaaacugggcuucaag

SEQ ID NO: 230511 - RNA, 22 nt, Molluscum contagiosum virus
acaugugcgugcaccucaagaa

SEQ ID NO: 230512 - RNA, 12 nt, Molluscum contagiosum virus
acaugugcugcc

SEQ ID NO: 230513 - RNA, 20 nt, Molluscum contagiosum virus
acaugugcugccggcucaag

SEQ ID NO: 230514 - RNA, 17 nt, Molluscum contagiosum virus
acaugcuguaugucuac

SEQ ID NO: 230515 - RNA, 17 nt, Molluscum contagiosum virus
acaugaugcccugguga

SEQ ID NO: 230516 - RNA, 15 nt, Molluscum contagiosum virus
acaugcccgugcacc

SEQ ID NO: 230517 - RNA, 13 nt, Molluscum contagiosum virus
acaucucucaggg

SEQ ID NO: 230518 - RNA, 23 nt, Molluscum contagiosum virus
acacguagcccaggaacaucugc

SEQ ID NO: 230519 - RNA, 22 nt, Molluscum contagiosum virus
acacggaagcucacaucugucc

SEQ ID NO: 230520 - RNA, 13 nt, Molluscum contagiosum virus
acacgcacuugcg

SEQ ID NO: 230521 - RNA, 15 nt, Molluscum contagiosum virus
acaggagcauuccuu

SEQ ID NO: 230522 - RNA, 15 nt, Molluscum contagiosum virus
acaggauggcgcuga

SEQ ID NO: 230523 - RNA, 12 nt, Molluscum contagiosum virus
acaguccgucuc

SEQ ID NO: 230524 - RNA, 15 nt, Molluscum contagiosum virus
acagucggugccaga

SEQ ID NO: 230525 - RNA, 15 nt, Molluscum contagiosum virus
acagugucuugucac

SEQ ID NO: 230526 - RNA, 19 nt, Molluscum contagiosum virus
acagagccccguucacuug

SEQ ID NO: 230527 - RNA, 14 nt, Molluscum contagiosum virus
acagcuugcugcug

SEQ ID NO: 230528 - RNA, 14 nt, Molluscum contagiosum virus
acagcgcaagcuga

SEQ ID NO: 230529 - RNA, 16 nt, Molluscum contagiosum virus
acagcgcgcugcacac

SEQ ID NO: 230530 - RNA, 13 nt, Molluscum contagiosum virus
acagccuuugugu

SEQ ID NO: 230531 - RNA, 14 nt, Molluscum contagiosum virus
acagccugcaccga

SEQ ID NO: 230532 - RNA, 13 nt, Molluscum contagiosum virus
agaagaacagcac

SEQ ID NO: 230533 - RNA, 15 nt, Molluscum contagiosum virus
agaacuggcgcagca

SEQ ID NO: 230534 - RNA, 22 nt, Molluscum contagiosum virus
agaacucgugccugucucgcaa

SEQ ID NO: 230535 - RNA, 21 nt, Molluscum contagiosum virus
agaacgccaggaacaucagca

SEQ ID NO: 230536 - RNA, 21 nt, Molluscum contagiosum virus
agaacguaaaaaagagggccu

SEQ ID NO: 230537 - RNA, 14 nt, Molluscum contagiosum virus
agaagcccugagaa

SEQ ID NO: 230538 - RNA, 22 nt, Molluscum contagiosum virus
agaagaggccagcacaagccgu

SEQ ID NO: 230539 - RNA, 11 nt, Molluscum contagiosum virus
agaagugcucc

SEQ ID NO: 230540 - RNA, 19 nt, Molluscum contagiosum virus
agaagugcuccgcacgugg

SEQ ID NO: 230541 - RNA, 21 nt, Molluscum contagiosum virus
agaagugcuccgcacguggaa

SEQ ID NO: 230542 - RNA, 17 nt, Molluscum contagiosum virus
agaacaauuacuccagc

SEQ ID NO: 230543 - RNA, 13 nt, Molluscum contagiosum virus
agaaaucccaaga

SEQ ID NO: 230544 - RNA, 20 nt, Molluscum contagiosum virus
agaaaucccaagagccaugu

SEQ ID NO: 230545 - RNA, 13 nt, Molluscum contagiosum virus
agaaaugcgcaca

SEQ ID NO: 230546 - RNA, 16 nt, Molluscum contagiosum virus
agaacagagaaaggca

SEQ ID NO: 230547 - RNA, 14 nt, Molluscum contagiosum virus
agaaacagccaugu

SEQ ID NO: 230548 - RNA, 20 nt, Molluscum contagiosum virus
agaaacagccaugugucuug

SEQ ID NO: 230549 - RNA, 19 nt, Molluscum contagiosum virus
agaaacucuccgacgugcu

SEQ ID NO: 230550 - RNA, 13 nt, Molluscum contagiosum virus
agaaagacaaaga

SEQ ID NO: 230551 - RNA, 11 nt, Molluscum contagiosum virus
agaaagaccuu

SEQ ID NO: 230552 - RNA, 16 nt, Molluscum contagiosum virus
agacaacugcgucuca

SEQ ID NO: 230553 - RNA, 17 nt, Molluscum contagiosum virus
agacaacugcgucucaa

SEQ ID NO: 230554 - RNA, 21 nt, Molluscum contagiosum virus
agacaacaaacauugugacaa

SEQ ID NO: 230555 - RNA, 19 nt, Molluscum contagiosum virus
agacaacaccagcgugccc

SEQ ID NO: 230556 - RNA, 12 nt, Molluscum contagiosum virus
agacaccagcuc

SEQ ID NO: 230557 - RNA, 15 nt, Molluscum contagiosum virus
agacagggugccuac

SEQ ID NO: 230558 - RNA, 14 nt, Molluscum contagiosum virus
agacccacaauggu

SEQ ID NO: 230559 - RNA, 12 nt, Molluscum contagiosum virus
agaccaucaucg

SEQ ID NO: 230560 - RNA, 16 nt, Molluscum contagiosum virus
agaccuacgucaagca

SEQ ID NO: 230561 - RNA, 17 nt, Molluscum contagiosum virus
agaccuacgucaagcag

SEQ ID NO: 230562 - RNA, 20 nt, Molluscum contagiosum virus
agacauugccuuuugcacag

SEQ ID NO: 230563 - RNA, 12 nt, Molluscum contagiosum virus
agacaugcacac

SEQ ID NO: 230564 - RNA, 22 nt, Molluscum contagiosum virus
agagaaagaacaaaaacugaaa

SEQ ID NO: 230565 - RNA, 22 nt, Molluscum contagiosum virus
agagaaaggcacccaccaggaa

SEQ ID NO: 230566 - RNA, 22 nt, Molluscum contagiosum virus
agagaaaucccaagagccaugu

SEQ ID NO: 230567 - RNA, 15 nt, Molluscum contagiosum virus
agaggacgagcugcu

SEQ ID NO: 230568 - RNA, 16 nt, Molluscum contagiosum virus
agaggacgagcugcua

SEQ ID NO: 230569 - RNA, 19 nt, Molluscum contagiosum virus
agaggaaagcgcacacuug

SEQ ID NO: 230570 - RNA, 21 nt, Molluscum contagiosum virus
agaggacagcuccuucuucaa

SEQ ID NO: 230571 - RNA, 11 nt, Molluscum contagiosum virus
agaggacaccg

SEQ ID NO: 230572 - RNA, 22 nt, Molluscum contagiosum virus
agacgaccgucacgacucucaa

SEQ ID NO: 230573 - RNA, 15 nt, Molluscum contagiosum virus
agacgcccggcaccg

SEQ ID NO: 230574 - RNA, 12 nt, Molluscum contagiosum virus
agacgcacuugc

SEQ ID NO: 230575 - RNA, 16 nt, Molluscum contagiosum virus
agacggaaauguuguu

SEQ ID NO: 230576 - RNA, 14 nt, Molluscum contagiosum virus
agacggcagugucc

SEQ ID NO: 230577 - RNA, 22 nt, Molluscum contagiosum virus
agacgucuggcucguacugcug

SEQ ID NO: 230578 - RNA, 13 nt, Molluscum contagiosum virus
acucgcucucuca

SEQ ID NO: 230579 - RNA, 14 nt, Molluscum contagiosum virus
acucgcugcugcuc

SEQ ID NO: 230580 - RNA, 15 nt, Molluscum contagiosum virus
acucgccguuccacu

SEQ ID NO: 230581 - RNA, 18 nt, Molluscum contagiosum virus
acucgcgcugcagcaccu

SEQ ID NO: 230582 - RNA, 18 nt, Molluscum contagiosum virus
acucacgcguccacaaag

SEQ ID NO: 230583 - RNA, 16 nt, Molluscum contagiosum virus
acucagcauguugcuc

SEQ ID NO: 230584 - RNA, 21 nt, Molluscum contagiosum virus
acucagcauguugcucuaccu

SEQ ID NO: 230585 - RNA, 23 nt, Molluscum contagiosum virus
acucuuucacgcugcacgagcug

SEQ ID NO: 230586 - RNA, 17 nt, Molluscum contagiosum virus
acucuacacguggaauu

SEQ ID NO: 230587 - RNA, 18 nt, Molluscum contagiosum virus
acucuacgccgcgcaccu

SEQ ID NO: 230588 - RNA, 17 nt, Molluscum contagiosum virus
acucggcuucugcugca

SEQ ID NO: 230589 - RNA, 11 nt, Molluscum contagiosum virus
acucuccuuca

SEQ ID NO: 230590 - RNA, 12 nt, Molluscum contagiosum virus
acuagaugcaua

SEQ ID NO: 230591 - RNA, 22 nt, Molluscum contagiosum virus
acuagaugcguccuaugcaucu

SEQ ID NO: 230592 - RNA, 16 nt, Molluscum contagiosum virus
acuacucgucuugcgc

SEQ ID NO: 230593 - RNA, 22 nt, Molluscum contagiosum virus
acuacugcuccauggagcgccu

SEQ ID NO: 230594 - RNA, 18 nt, Molluscum contagiosum virus
acuacugggaggacacgc

SEQ ID NO: 230595 - RNA, 16 nt, Molluscum contagiosum virus
acgucagccgcacggc

SEQ ID NO: 230596 - RNA, 20 nt, Molluscum contagiosum virus
acguaaugauugucaagcac

SEQ ID NO: 230597 - RNA, 23 nt, Molluscum contagiosum virus
acguaaacaacguaguacugcag

SEQ ID NO: 230598 - RNA, 19 nt, Molluscum contagiosum virus
acgguaagcucgacguguu

SEQ ID NO: 230599 - RNA, 16 nt, Molluscum contagiosum virus
acggaggugguggcca

SEQ ID NO: 230600 - RNA, 19 nt, Molluscum contagiosum virus
acuucaagcacgagcugcu

SEQ ID NO: 230601 - RNA, 13 nt, Molluscum contagiosum virus
acuugcuaugcua

SEQ ID NO: 230602 - RNA, 19 nt, Molluscum contagiosum virus
acuuggaagagucgcgcua

SEQ ID NO: 230603 - RNA, 18 nt, Molluscum contagiosum virus
acuugcgcgcgugccugu

SEQ ID NO: 230604 - RNA, 13 nt, Molluscum contagiosum virus
acuugcggcgcua

SEQ ID NO: 230605 - RNA, 13 nt, Molluscum contagiosum virus
acuugcaaacgcu

SEQ ID NO: 230606 - RNA, 18 nt, Molluscum contagiosum virus
acugagccgcaagcacac

SEQ ID NO: 230607 - RNA, 19 nt, Molluscum contagiosum virus
acugacgguacucaugcug

SEQ ID NO: 230608 - RNA, 18 nt, Molluscum contagiosum virus
acugagugcugagccaca

SEQ ID NO: 230609 - RNA, 18 nt, Molluscum contagiosum virus
acugggagcuuuccuugc

SEQ ID NO: 230610 - RNA, 12 nt, Molluscum contagiosum virus
acugcacugcag

SEQ ID NO: 230611 - RNA, 12 nt, Molluscum contagiosum virus
acugcagcagcu

SEQ ID NO: 230612 - RNA, 21 nt, Molluscum contagiosum virus
acugcagcagcuccagcaugg

SEQ ID NO: 230613 - RNA, 13 nt, Molluscum contagiosum virus
acuggcaccugcg

SEQ ID NO: 230614 - RNA, 15 nt, Molluscum contagiosum virus
acugggucuguucac

SEQ ID NO: 230615 - RNA, 22 nt, Molluscum contagiosum virus
acuguagcguccgcauccucaa

SEQ ID NO: 230616 - RNA, 16 nt, Molluscum contagiosum virus
aucagagaagugcucc

SEQ ID NO: 230617 - RNA, 22 nt, Molluscum contagiosum virus
aucagcgcggaggcgcuaccuc

SEQ ID NO: 230618 - RNA, 19 nt, Molluscum contagiosum virus
auccaaaccaacgugagua

SEQ ID NO: 230619 - RNA, 16 nt, Molluscum contagiosum virus
aucaugggcgugcuca

SEQ ID NO: 230620 - RNA, 20 nt, Molluscum contagiosum virus
auccaugagagaauggacau

SEQ ID NO: 230621 - RNA, 23 nt, Molluscum contagiosum virus
auccacucgauggacgccagcuu

SEQ ID NO: 230622 - RNA, 21 nt, Molluscum contagiosum virus
auccaccugcgcaacgugcug

SEQ ID NO: 230623 - RNA, 13 nt, Molluscum contagiosum virus
auccgcuaccugg

SEQ ID NO: 230624 - RNA, 20 nt, Molluscum contagiosum virus
aucccggaacgcaaguacaa

SEQ ID NO: 230625 - RNA, 16 nt, Molluscum contagiosum virus
aucccccgccaggaac

SEQ ID NO: 230626 - RNA, 22 nt, Molluscum contagiosum virus
aucccgccgcugcgcuugcuca

SEQ ID NO: 230627 - RNA, 18 nt, Molluscum contagiosum virus
auccugcucaagaucucg

SEQ ID NO: 230628 - RNA, 17 nt, Molluscum contagiosum virus
auccuacgcaaacuuca

SEQ ID NO: 230629 - RNA, 21 nt, Molluscum contagiosum virus
auccucgaugagaacaacagc

SEQ ID NO: 230630 - RNA, 19 nt, Molluscum contagiosum virus
auccuccggaugaacagcu

SEQ ID NO: 230631 - RNA, 19 nt, Molluscum contagiosum virus
auccuugauaaaagcacag

SEQ ID NO: 230632 - RNA, 23 nt, Molluscum contagiosum virus
auccuugauaaaagcacagucca

SEQ ID NO: 230633 - RNA, 19 nt, Molluscum contagiosum virus
aucgaaauucgaacggaca

SEQ ID NO: 230634 - RNA, 17 nt, Molluscum contagiosum virus
aucgagaugcucaagca

SEQ ID NO: 230635 - RNA, 21 nt, Molluscum contagiosum virus
aucgucgcguugcuacucuac

SEQ ID NO: 230636 - RNA, 13 nt, Molluscum contagiosum virus
aucggugggcucg

SEQ ID NO: 230637 - RNA, 21 nt, Molluscum contagiosum virus
aucggacucagcauguugcuc

SEQ ID NO: 230638 - RNA, 16 nt, Molluscum contagiosum virus
aucggagaagugcucc

SEQ ID NO: 230639 - RNA, 17 nt, Molluscum contagiosum virus
aucggagaagugcuccg

SEQ ID NO: 230640 - RNA, 17 nt, Molluscum contagiosum virus
aucggagcgcagcugcc

SEQ ID NO: 230641 - RNA, 18 nt, Molluscum contagiosum virus
aucggagcgcagcugccg

SEQ ID NO: 230642 - RNA, 22 nt, Molluscum contagiosum virus
aucgcuuugccaaagcucucuu

SEQ ID NO: 230643 - RNA, 15 nt, Molluscum contagiosum virus
aucgcgcgcaccugc

SEQ ID NO: 230644 - RNA, 16 nt, Molluscum contagiosum virus
aucgcgcgcaccugca

SEQ ID NO: 230645 - RNA, 23 nt, Molluscum contagiosum virus
aucgcgcucaggaccaguugcau

SEQ ID NO: 230646 - RNA, 17 nt, Molluscum contagiosum virus
aucgccagcaucaaggg

SEQ ID NO: 230647 - RNA, 12 nt, Molluscum contagiosum virus
aucuacuuccug

SEQ ID NO: 230648 - RNA, 17 nt, Molluscum contagiosum virus
aucuagccuccuugucu

SEQ ID NO: 230649 - RNA, 19 nt, Molluscum contagiosum virus
aucuagccuccuugucuuc

SEQ ID NO: 230650 - RNA, 22 nt, Molluscum contagiosum virus
aucuagucagcggcggucucaa

SEQ ID NO: 230651 - RNA, 15 nt, Molluscum contagiosum virus
aucguuuugcacuug

SEQ ID NO: 230652 - RNA, 16 nt, Molluscum contagiosum virus
aucuacugcgacaucc

SEQ ID NO: 230653 - RNA, 19 nt, Molluscum contagiosum virus
aucugccucguggaacaaa

SEQ ID NO: 230654 - RNA, 19 nt, Molluscum contagiosum virus
aucuccacgucgaucagcu

SEQ ID NO: 230655 - RNA, 23 nt, Molluscum contagiosum virus
aucucaccucgcaugaugaacuu

SEQ ID NO: 230656 - RNA, 16 nt, Molluscum contagiosum virus
auagaacacagcuagu

SEQ ID NO: 230657 - RNA, 16 nt, Molluscum contagiosum virus
auacucuguagcaucu

SEQ ID NO: 230658 - RNA, 13 nt, Molluscum contagiosum virus
auaccugugccag

SEQ ID NO: 230659 - RNA, 19 nt, Molluscum contagiosum virus
aucaagaucggacucagca

SEQ ID NO: 230660 - RNA, 19 nt, Molluscum contagiosum virus
aucaacgcgcgcgugcugu

SEQ ID NO: 230661 - RNA, 16 nt, Molluscum contagiosum virus
aucaaccgcaaggaaa

SEQ ID NO: 230662 - RNA, 15 nt, Molluscum contagiosum virus
aucaacaucuacaag

SEQ ID NO: 230663 - RNA, 20 nt, Molluscum contagiosum virus
aucacgcucgcgacgugcgc

SEQ ID NO: 230664 - RNA, 20 nt, Molluscum contagiosum virus
aucacggcuguaaugugcug

SEQ ID NO: 230665 - RNA, 17 nt, Molluscum contagiosum virus
aucaccagccugcucac

SEQ ID NO: 230666 - RNA, 13 nt, Molluscum contagiosum virus
auauucccuugua

SEQ ID NO: 230667 - RNA, 16 nt, Molluscum contagiosum virus
auauucuuuacuacgu

SEQ ID NO: 230668 - RNA, 20 nt, Molluscum contagiosum virus
auauaucuccaacuagacaa

SEQ ID NO: 230669 - RNA, 20 nt, Molluscum contagiosum virus
auagcgcccguaucccgcga

SEQ ID NO: 230670 - RNA, 16 nt, Molluscum contagiosum virus
auagcgcgcuagcucc

SEQ ID NO: 230671 - RNA, 22 nt, Molluscum contagiosum virus
auagcgcgcuagcuccacgugc

SEQ ID NO: 230672 - RNA, 17 nt, Molluscum contagiosum virus
agggcaaucgcgugcuu

SEQ ID NO: 230673 - RNA, 15 nt, Molluscum contagiosum virus
agggcuaguuccgau

SEQ ID NO: 230674 - RNA, 13 nt, Molluscum contagiosum virus
agggcgaggccaa

SEQ ID NO: 230675 - RNA, 15 nt, Molluscum contagiosum virus
agggcgugcuugccu

SEQ ID NO: 230676 - RNA, 16 nt, Molluscum contagiosum virus
agggcgugcuugccug

SEQ ID NO: 230677 - RNA, 16 nt, Molluscum contagiosum virus
agggagcggcauggaa

SEQ ID NO: 230678 - RNA, 21 nt, Molluscum contagiosum virus
agguacugucacguucaagac

SEQ ID NO: 230679 - RNA, 22 nt, Molluscum contagiosum virus
agggugguuugacgcccggugc

SEQ ID NO: 230680 - RNA, 18 nt, Molluscum contagiosum virus
aggucugcuuugucugca

SEQ ID NO: 230681 - RNA, 14 nt, Molluscum contagiosum virus
agguccacauuuca

SEQ ID NO: 230682 - RNA, 18 nt, Molluscum contagiosum virus
aguagcgcucgcccagcu

SEQ ID NO: 230683 - RNA, 21 nt, Molluscum contagiosum virus
aguaguagcgcucgcccagcu

SEQ ID NO: 230684 - RNA, 22 nt, Molluscum contagiosum virus
aguauauucuuuacuacguguu

SEQ ID NO: 230685 - RNA, 17 nt, Molluscum contagiosum virus
aguucgagcugcugcgc

SEQ ID NO: 230686 - RNA, 19 nt, Molluscum contagiosum virus
aguugcgagccagccaggc

SEQ ID NO: 230687 - RNA, 17 nt, Molluscum contagiosum virus
aguuugcggagcagauu

SEQ ID NO: 230688 - RNA, 15 nt, Molluscum contagiosum virus
agugauccuugccaa

SEQ ID NO: 230689 - RNA, 19 nt, Molluscum contagiosum virus
agugcacaccggcgcgcug

SEQ ID NO: 230690 - RNA, 18 nt, Molluscum contagiosum virus
agugcacgcggcgcgugu

SEQ ID NO: 230691 - RNA, 16 nt, Molluscum contagiosum virus
aguaucggcaacauuu

SEQ ID NO: 230692 - RNA, 21 nt, Molluscum contagiosum virus
aguauucgcaagauacacauu

SEQ ID NO: 230693 - RNA, 18 nt, Molluscum contagiosum virus
aguaugaaucuacggcug

SEQ ID NO: 230694 - RNA, 19 nt, Molluscum contagiosum virus
agugggcgucgaccuggaa

SEQ ID NO: 230695 - RNA, 16 nt, Molluscum contagiosum virus
agugcuccgcacgugg

SEQ ID NO: 230696 - RNA, 20 nt, Molluscum contagiosum virus
agugcuccgcacguggaguc

SEQ ID NO: 230697 - RNA, 17 nt, Molluscum contagiosum virus
agugcucgcacacgugc

SEQ ID NO: 230698 - RNA, 19 nt, Molluscum contagiosum virus
agugcugagccacaaacac

SEQ ID NO: 230699 - RNA, 22 nt, Molluscum contagiosum virus
agugcugagccacaaacacucg

SEQ ID NO: 230700 - RNA, 16 nt, Molluscum contagiosum virus
agugcgugcacugucu

SEQ ID NO: 230701 - RNA, 15 nt, Molluscum contagiosum virus
agugcggaugugcua

SEQ ID NO: 230702 - RNA, 17 nt, Molluscum contagiosum virus
agugccuuguacgggug

SEQ ID NO: 230703 - RNA, 14 nt, Molluscum contagiosum virus
agccccugcugcuc

SEQ ID NO: 230704 - RNA, 22 nt, Molluscum contagiosum virus
agcccgcggugcgcacaugccg

SEQ ID NO: 230705 - RNA, 17 nt, Molluscum contagiosum virus
agcccgggcccgugccc

SEQ ID NO: 230706 - RNA, 14 nt, Molluscum contagiosum virus
agccccauggucuu

SEQ ID NO: 230707 - RNA, 23 nt, Molluscum contagiosum virus
agcccccgguucccggugcugcu

SEQ ID NO: 230708 - RNA, 11 nt, Molluscum contagiosum virus
agcccuuccac

SEQ ID NO: 230709 - RNA, 15 nt, Molluscum contagiosum virus
agcccugauguuccg

SEQ ID NO: 230710 - RNA, 22 nt, Molluscum contagiosum virus
agcgaaacacgcuacgcagcgc

SEQ ID NO: 230711 - RNA, 21 nt, Molluscum contagiosum virus
agcgagugauccuugccaagc

SEQ ID NO: 230712 - RNA, 20 nt, Molluscum contagiosum virus
agccuucgcagagaccguca

SEQ ID NO: 230713 - RNA, 20 nt, Molluscum contagiosum virus
agccuucgucauccucggca

SEQ ID NO: 230714 - RNA, 11 nt, Molluscum contagiosum virus
agccgcugcuc

SEQ ID NO: 230715 - RNA, 18 nt, Molluscum contagiosum virus
agccgcaggcgcgcgcca

SEQ ID NO: 230716 - RNA, 14 nt, Molluscum contagiosum virus
agccgccgcugccg

SEQ ID NO: 230717 - RNA, 19 nt, Molluscum contagiosum virus
agccgccggggcccaugcu

SEQ ID NO: 230718 - RNA, 13 nt, Molluscum contagiosum virus
agaggccgucaca

SEQ ID NO: 230719 - RNA, 19 nt, Molluscum contagiosum virus
agaggauacccgugaucuc

SEQ ID NO: 230720 - RNA, 17 nt, Molluscum contagiosum virus
agaggccggcacaagcc

SEQ ID NO: 230721 - RNA, 17 nt, Molluscum contagiosum virus
agaggccagcacaagcc

SEQ ID NO: 230722 - RNA, 14 nt, Molluscum contagiosum virus
agaggggagccagc

SEQ ID NO: 230723 - RNA, 14 nt, Molluscum contagiosum virus
agcccacguugccg

SEQ ID NO: 230724 - RNA, 15 nt, Molluscum contagiosum virus
agcccagaacauguc

SEQ ID NO: 230725 - RNA, 17 nt, Molluscum contagiosum virus
agcccaggaacaucugc

SEQ ID NO: 230726 - RNA, 23 nt, Molluscum contagiosum virus
agaguacgacgcggaggucgagc

SEQ ID NO: 230727 - RNA, 12 nt, Molluscum contagiosum virus
agcccaagcacc

SEQ ID NO: 230728 - RNA, 20 nt, Molluscum contagiosum virus
agcgcggcuuacacacgcac

SEQ ID NO: 230729 - RNA, 12 nt, Molluscum contagiosum virus
agcgcuaccuga

SEQ ID NO: 230730 - RNA, 14 nt, Molluscum contagiosum virus
agcgcaggcacaaa

SEQ ID NO: 230731 - RNA, 16 nt, Molluscum contagiosum virus
agcgcaggcacaaaac

SEQ ID NO: 230732 - RNA, 17 nt, Molluscum contagiosum virus
agcgcgaguacaagcuc

SEQ ID NO: 230733 - RNA, 15 nt, Molluscum contagiosum virus
agcgcgcaguugugc

SEQ ID NO: 230734 - RNA, 19 nt, Molluscum contagiosum virus
agcgcgcccaccagcagcc

SEQ ID NO: 230735 - RNA, 18 nt, Molluscum contagiosum virus
agcgcgccccgaacaaaa

SEQ ID NO: 230736 - RNA, 15 nt, Molluscum contagiosum virus
agcgccuucugcaag

SEQ ID NO: 230737 - RNA, 20 nt, Molluscum contagiosum virus
agcgccuucugcaagcugcc

SEQ ID NO: 230738 - RNA, 14 nt, Molluscum contagiosum virus
agcgcccgcugcuc

SEQ ID NO: 230739 - RNA, 14 nt, Molluscum contagiosum virus
agcgccgccaugcu

SEQ ID NO: 230740 - RNA, 18 nt, Molluscum contagiosum virus
agcgccgccaugcugcgc

SEQ ID NO: 230741 - RNA, 19 nt, Molluscum contagiosum virus
agcuccuagcgcgcgugug

SEQ ID NO: 230742 - RNA, 22 nt, Molluscum contagiosum virus
agcuccggcuuuauuuccggcu

SEQ ID NO: 230743 - RNA, 12 nt, Molluscum contagiosum virus
agcucaagcccg

SEQ ID NO: 230744 - RNA, 13 nt, Molluscum contagiosum virus
agcucacaucugu

SEQ ID NO: 230745 - RNA, 14 nt, Molluscum contagiosum virus
agcucacaucuguc

SEQ ID NO: 230746 - RNA, 13 nt, Molluscum contagiosum virus
agcucgguagcca

SEQ ID NO: 230747 - RNA, 23 nt, Molluscum contagiosum virus
agcucgcgcgcaagaacaaccag

SEQ ID NO: 230748 - RNA, 18 nt, Molluscum contagiosum virus
agcucgccuccuugcccg

SEQ ID NO: 230749 - RNA, 14 nt, Molluscum contagiosum virus
agcucgcaaacaca

SEQ ID NO: 230750 - RNA, 15 nt, Molluscum contagiosum virus
agcucgcaaacacaa

SEQ ID NO: 230751 - RNA, 20 nt, Molluscum contagiosum virus
agcuccugguaguugcagcc

SEQ ID NO: 230752 - RNA, 14 nt, Molluscum contagiosum virus
agcuccuucuucaa

SEQ ID NO: 230753 - RNA, 23 nt, Molluscum contagiosum virus
agcuccuucuucaaguaccuguc

SEQ ID NO: 230754 - RNA, 19 nt, Molluscum contagiosum virus
agcucuucgacagcgugcg

SEQ ID NO: 230755 - RNA, 17 nt, Molluscum contagiosum virus
agcucugcgcaaccugg

SEQ ID NO: 230756 - RNA, 14 nt, Molluscum contagiosum virus
aggcaggagccucu

SEQ ID NO: 230757 - RNA, 23 nt, Molluscum contagiosum virus
aggcauaccagauguucucgcca

SEQ ID NO: 230758 - RNA, 18 nt, Molluscum contagiosum virus
aggcauaccugugccagc

SEQ ID NO: 230759 - RNA, 19 nt, Molluscum contagiosum virus
aggccaaggucuucaggaa

SEQ ID NO: 230760 - RNA, 17 nt, Molluscum contagiosum virus
aggcaaccgcgacgagc

SEQ ID NO: 230761 - RNA, 14 nt, Molluscum contagiosum virus
aggcaacgcacaaa

SEQ ID NO: 230762 - RNA, 14 nt, Molluscum contagiosum virus
aggagccucugucc

SEQ ID NO: 230763 - RNA, 23 nt, Molluscum contagiosum virus
aggcacaccccuguaacaaggaa

SEQ ID NO: 230764 - RNA, 22 nt, Molluscum contagiosum virus
aggcacccaccaggaacaggga

SEQ ID NO: 230765 - RNA, 19 nt, Molluscum contagiosum virus
aggcaccccgaaaggcacc

SEQ ID NO: 230766 - RNA, 16 nt, Molluscum contagiosum virus
aggcaccccgcaggaa

SEQ ID NO: 230767 - RNA, 19 nt, Molluscum contagiosum virus
aggcacccgcaacaaggaa

SEQ ID NO: 230768 - RNA, 15 nt, Molluscum contagiosum virus
aggcacccgcaggaa

SEQ ID NO: 230769 - RNA, 23 nt, Molluscum contagiosum virus
aggcacccgcaggaaagguaccc

SEQ ID NO: 230770 - RNA, 14 nt, Molluscum contagiosum virus
aggcaccugcagga

SEQ ID NO: 230771 - RNA, 22 nt, Molluscum contagiosum virus
aggcaccugcaggaaaggcacc

SEQ ID NO: 230772 - RNA, 22 nt, Molluscum contagiosum virus
aggcucgagcgcgcgccugcug

SEQ ID NO: 230773 - RNA, 14 nt, Molluscum contagiosum virus
aggcucgagcugca

SEQ ID NO: 230774 - RNA, 23 nt, Molluscum contagiosum virus
aggcugcguuagcguugguaaca

SEQ ID NO: 230775 - RNA, 18 nt, Molluscum contagiosum virus
aggcggcuccuacaucga

SEQ ID NO: 230776 - RNA, 13 nt, Molluscum contagiosum virus
aggcuagugccau

SEQ ID NO: 230777 - RNA, 14 nt, Molluscum contagiosum virus
aggcggucuuccag

SEQ ID NO: 230778 - RNA, 18 nt, Molluscum contagiosum virus
aggcguccagcggcugcc

SEQ ID NO: 230779 - RNA, 16 nt, Molluscum contagiosum virus
agcugucaacagugcg

SEQ ID NO: 230780 - RNA, 23 nt, Molluscum contagiosum virus
agcugugccaucucgcacacugc

SEQ ID NO: 230781 - RNA, 23 nt, Molluscum contagiosum virus
agcuguucaacaucguggcgcgc

SEQ ID NO: 230782 - RNA, 20 nt, Molluscum contagiosum virus
agcuggccgaggucuuccac

SEQ ID NO: 230783 - RNA, 15 nt, Molluscum contagiosum virus
agcugcugcgcuaca

SEQ ID NO: 230784 - RNA, 13 nt, Molluscum contagiosum virus
agcugcuggcaca

SEQ ID NO: 230785 - RNA, 20 nt, Molluscum contagiosum virus
agcuggacggugcuggugcu

SEQ ID NO: 230786 - RNA, 14 nt, Molluscum contagiosum virus
agcugagcgcgcug

SEQ ID NO: 230787 - RNA, 19 nt, Molluscum contagiosum virus
agcugacucggacacugga

SEQ ID NO: 230788 - RNA, 23 nt, Molluscum contagiosum virus
agcugcaucuuuuuuaugcacuu

SEQ ID NO: 230789 - RNA, 17 nt, Molluscum contagiosum virus
agcugcagagcgugcug

SEQ ID NO: 230790 - RNA, 17 nt, Molluscum contagiosum virus
agcugccccccucgaau

SEQ ID NO: 230791 - RNA, 21 nt, Molluscum contagiosum virus
agcugcgggcgcgaccuuagc

SEQ ID NO: 230792 - RNA, 13 nt, Molluscum contagiosum virus
agcugcgugcgua

SEQ ID NO: 230793 - RNA, 19 nt, Molluscum contagiosum virus
aggagagagagacaugcac

SEQ ID NO: 230794 - RNA, 19 nt, Molluscum contagiosum virus
aggagaggaaccaggauuu

SEQ ID NO: 230795 - RNA, 21 nt, Molluscum contagiosum virus
aggaccugcugguggugcugg

SEQ ID NO: 230796 - RNA, 14 nt, Molluscum contagiosum virus
aggacgacuucgag

SEQ ID NO: 230797 - RNA, 15 nt, Molluscum contagiosum virus
aggacgagcugcuaa

SEQ ID NO: 230798 - RNA, 22 nt, Molluscum contagiosum virus
aggacuuccgcgcgcucuugca

SEQ ID NO: 230799 - RNA, 23 nt, Molluscum contagiosum virus
aggacuuccgcgcgcucuugcau

SEQ ID NO: 230800 - RNA, 23 nt, Molluscum contagiosum virus
agcuucauggaggccaacuaccu

SEQ ID NO: 230801 - RNA, 17 nt, Molluscum contagiosum virus
ccgaagguuuugugccg

SEQ ID NO: 230802 - RNA, 22 nt, Molluscum contagiosum virus
ccgaacggcagaccccuugcua

SEQ ID NO: 230803 - RNA, 19 nt, Molluscum contagiosum virus
ccgaagacgcguaccagcg

SEQ ID NO: 230804 - RNA, 19 nt, Molluscum contagiosum virus
ccgaauccuuuacugcaag

SEQ ID NO: 230805 - RNA, 16 nt, Molluscum contagiosum virus
ccgacaacgugcugcu

SEQ ID NO: 230806 - RNA, 17 nt, Molluscum contagiosum virus
ccgacaacgugcugcuc

SEQ ID NO: 230807 - RNA, 21 nt, Molluscum contagiosum virus
ccgcgcucgacgcgugcaugg

SEQ ID NO: 230808 - RNA, 15 nt, Molluscum contagiosum virus
ccgcgcgagugccag

SEQ ID NO: 230809 - RNA, 17 nt, Molluscum contagiosum virus
ccgcgcgcgcgcgugag

SEQ ID NO: 230810 - RNA, 14 nt, Molluscum contagiosum virus
ccgcgcggcuccua

SEQ ID NO: 230811 - RNA, 15 nt, Molluscum contagiosum virus
ccgaccccaagaaga

SEQ ID NO: 230812 - RNA, 16 nt, Molluscum contagiosum virus
ccgacgccuuccugcu

SEQ ID NO: 230813 - RNA, 18 nt, Molluscum contagiosum virus
ccgcugcuccugcucugu

SEQ ID NO: 230814 - RNA, 15 nt, Molluscum contagiosum virus
ccgcugcugcugcaa

SEQ ID NO: 230815 - RNA, 13 nt, Molluscum contagiosum virus
ccgcucggcacaa

SEQ ID NO: 230816 - RNA, 14 nt, Molluscum contagiosum virus
ccgcucggcacaaa

SEQ ID NO: 230817 - RNA, 13 nt, Molluscum contagiosum virus
ccgcgucgcgcac

SEQ ID NO: 230818 - RNA, 19 nt, Molluscum contagiosum virus
ccgcuuucgcaaacaagca

SEQ ID NO: 230819 - RNA, 14 nt, Molluscum contagiosum virus
ccgcuugagcagca

SEQ ID NO: 230820 - RNA, 16 nt, Molluscum contagiosum virus
ccgcgucaagaucaac

SEQ ID NO: 230821 - RNA, 13 nt, Molluscum contagiosum virus
ccgcggcguuccc

SEQ ID NO: 230822 - RNA, 12 nt, Molluscum contagiosum virus
ccgcgggcacau

SEQ ID NO: 230823 - RNA, 21 nt, Molluscum contagiosum virus
ccgcggccgccacuguugcuu

SEQ ID NO: 230824 - RNA, 18 nt, Molluscum contagiosum virus
ccgggcgccggcucugcc

SEQ ID NO: 230825 - RNA, 16 nt, Molluscum contagiosum virus
ccggaugacggcaacg

SEQ ID NO: 230826 - RNA, 18 nt, Molluscum contagiosum virus
ccggagccaagcaacggc

SEQ ID NO: 230827 - RNA, 19 nt, Molluscum contagiosum virus
ccggagacaccagcuccgc

SEQ ID NO: 230828 - RNA, 18 nt, Molluscum contagiosum virus
ccuaggcacuccgcgcac

SEQ ID NO: 230829 - RNA, 21 nt, Molluscum contagiosum virus
ccuaggcacuccgcgcaccgc

SEQ ID NO: 230830 - RNA, 18 nt, Molluscum contagiosum virus
ccucaaccgcauguccac

SEQ ID NO: 230831 - RNA, 17 nt, Molluscum contagiosum virus
ccgguugcgcgugugca

SEQ ID NO: 230832 - RNA, 19 nt, Molluscum contagiosum virus
ccguaagucgaagaggguc

SEQ ID NO: 230833 - RNA, 17 nt, Molluscum contagiosum virus
ccgguacguacagugcg

SEQ ID NO: 230834 - RNA, 22 nt, Molluscum contagiosum virus
ccggguuuuuucccaugcucga

SEQ ID NO: 230835 - RNA, 22 nt, Molluscum contagiosum virus
ccgggggaacacgcuugagugg

SEQ ID NO: 230836 - RNA, 22 nt, Molluscum contagiosum virus
ccuagcagacaacugcgucuca

SEQ ID NO: 230837 - RNA, 15 nt, Molluscum contagiosum virus
ccuagcccagcacgc

SEQ ID NO: 230838 - RNA, 22 nt, Molluscum contagiosum virus
ccgucagggaugccagugcagu

SEQ ID NO: 230839 - RNA, 17 nt, Molluscum contagiosum virus
ccguccgugccauuucg

SEQ ID NO: 230840 - RNA, 17 nt, Molluscum contagiosum virus
cccagguggagcugucg

SEQ ID NO: 230841 - RNA, 18 nt, Molluscum contagiosum virus
ccaucaaggccuacggca

SEQ ID NO: 230842 - RNA, 17 nt, Molluscum contagiosum virus
cccgcgugagaacaaga

SEQ ID NO: 230843 - RNA, 22 nt, Molluscum contagiosum virus
cccgcgcgcagcgcgucuuugu

SEQ ID NO: 230844 - RNA, 22 nt, Molluscum contagiosum virus
cccgcgcucgacgcgugcaugg

SEQ ID NO: 230845 - RNA, 20 nt, Molluscum contagiosum virus
cccgcggagcugugccaucu

SEQ ID NO: 230846 - RNA, 18 nt, Molluscum contagiosum virus
cccgcggcgugcccgucu

SEQ ID NO: 230847 - RNA, 14 nt, Molluscum contagiosum virus
cccuccuaucucaa

SEQ ID NO: 230848 - RNA, 16 nt, Molluscum contagiosum virus
cccugccuuugccaag

SEQ ID NO: 230849 - RNA, 14 nt, Molluscum contagiosum virus
cccugauaugcaua

SEQ ID NO: 230850 - RNA, 12 nt, Molluscum contagiosum virus
ccccugcugcuc

SEQ ID NO: 230851 - RNA, 13 nt, Molluscum contagiosum virus
ccccucuuggcaa

SEQ ID NO: 230852 - RNA, 12 nt, Molluscum contagiosum virus
ccccuccaagaa

SEQ ID NO: 230853 - RNA, 15 nt, Molluscum contagiosum virus
ccccuccaagaacga

SEQ ID NO: 230854 - RNA, 18 nt, Molluscum contagiosum virus
cccgccgcgugcccgucu

SEQ ID NO: 230855 - RNA, 23 nt, Molluscum contagiosum virus
cccgcaugaaaagcauccaggcc

SEQ ID NO: 230856 - RNA, 14 nt, Molluscum contagiosum virus
cccgcaaugcaagc

SEQ ID NO: 230857 - RNA, 14 nt, Molluscum contagiosum virus
cccgcaacaaggaa

SEQ ID NO: 230858 - RNA, 21 nt, Molluscum contagiosum virus
cccgcaacaaggaaaggcacc

SEQ ID NO: 230859 - RNA, 18 nt, Molluscum contagiosum virus
cccgaguacgcucuccau

SEQ ID NO: 230860 - RNA, 19 nt, Molluscum contagiosum virus
cccgaccuuggugcucauc

SEQ ID NO: 230861 - RNA, 14 nt, Molluscum contagiosum virus
cccgagcuggugau

SEQ ID NO: 230862 - RNA, 14 nt, Molluscum contagiosum virus
ccuuccgcgcgggc

SEQ ID NO: 230863 - RNA, 14 nt, Molluscum contagiosum virus
ccuuccggagacac

SEQ ID NO: 230864 - RNA, 15 nt, Molluscum contagiosum virus
ccuggggaaccgcug

SEQ ID NO: 230865 - RNA, 19 nt, Molluscum contagiosum virus
ccuggcucgcgagugugca

SEQ ID NO: 230866 - RNA, 21 nt, Molluscum contagiosum virus
ccuggcucgcgagugugcaug

SEQ ID NO: 230867 - RNA, 15 nt, Molluscum contagiosum virus
ccugguggagcacuu

SEQ ID NO: 230868 - RNA, 22 nt, Molluscum contagiosum virus
ccuguaaauggaccacaagcag

SEQ ID NO: 230869 - RNA, 14 nt, Molluscum contagiosum virus
ccuguaacaaggaa

SEQ ID NO: 230870 - RNA, 21 nt, Molluscum contagiosum virus
ccugugcuacgcgagcacugc

SEQ ID NO: 230871 - RNA, 11 nt, Molluscum contagiosum virus
ccugugcugug

SEQ ID NO: 230872 - RNA, 19 nt, Molluscum contagiosum virus
ccuguccgcgggcgcgggc

SEQ ID NO: 230873 - RNA, 16 nt, Molluscum contagiosum virus
ccugucucgcaagcaa

SEQ ID NO: 230874 - RNA, 23 nt, Molluscum contagiosum virus
cgaacgagagacacgcacacucg

SEQ ID NO: 230875 - RNA, 23 nt, Molluscum contagiosum virus
cgaacgagggacacgcacuugcg

SEQ ID NO: 230876 - RNA, 18 nt, Molluscum contagiosum virus
cgaacgagggaugcacac

SEQ ID NO: 230877 - RNA, 23 nt, Molluscum contagiosum virus
cgaacaccuccugcuuugcacgc

SEQ ID NO: 230878 - RNA, 18 nt, Molluscum contagiosum virus
cgaacauguccaaggagc

SEQ ID NO: 230879 - RNA, 15 nt, Molluscum contagiosum virus
cgaaaucgcaaagca

SEQ ID NO: 230880 - RNA, 12 nt, Molluscum contagiosum virus
ccuuuugcacag

SEQ ID NO: 230881 - RNA, 23 nt, Molluscum contagiosum virus
ccuuuuccacgcgggaugacugu

SEQ ID NO: 230882 - RNA, 10 nt, Molluscum contagiosum virus
cgaaaggcac

SEQ ID NO: 230883 - RNA, 20 nt, Molluscum contagiosum virus
cgaaagcugcccugcgauac

SEQ ID NO: 230884 - RNA, 17 nt, Molluscum contagiosum virus
ccuuggcggugcgcaaa

SEQ ID NO: 230885 - RNA, 17 nt, Molluscum contagiosum virus
ccuugcguacuuggaag

SEQ ID NO: 230886 - RNA, 18 nt, Molluscum contagiosum virus
ccuugauuucgcgcagca

SEQ ID NO: 230887 - RNA, 16 nt, Molluscum contagiosum virus
ccuugccucuucacga

SEQ ID NO: 230888 - RNA, 17 nt, Molluscum contagiosum virus
ccuugccuucucgaaaa

SEQ ID NO: 230889 - RNA, 21 nt, Molluscum contagiosum virus
ccuuuagaggggcaacaugcg

SEQ ID NO: 230890 - RNA, 13 nt, Molluscum contagiosum virus
ccugcccucggga

SEQ ID NO: 230891 - RNA, 13 nt, Molluscum contagiosum virus
ccugccuuugcca

SEQ ID NO: 230892 - RNA, 15 nt, Molluscum contagiosum virus
ccugccuuugccaag

SEQ ID NO: 230893 - RNA, 17 nt, Molluscum contagiosum virus
ccugcgggcggcacaca

SEQ ID NO: 230894 - RNA, 22 nt, Molluscum contagiosum virus
ccugcgcuuccucuacaccagc

SEQ ID NO: 230895 - RNA, 15 nt, Molluscum contagiosum virus
ccugcgccauccacg

SEQ ID NO: 230896 - RNA, 16 nt, Molluscum contagiosum virus
ccugcguggacagcau

SEQ ID NO: 230897 - RNA, 13 nt, Molluscum contagiosum virus
ccuggaccuccau

SEQ ID NO: 230898 - RNA, 20 nt, Molluscum contagiosum virus
ccuggaguacuucaagcacg

SEQ ID NO: 230899 - RNA, 22 nt, Molluscum contagiosum virus
ccuggagggguguuuccuugcc

SEQ ID NO: 230900 - RNA, 16 nt, Molluscum contagiosum virus
ccuggcuggcgcucaa

SEQ ID NO: 230901 - RNA, 13 nt, Molluscum contagiosum virus
ccugcacaagcag

SEQ ID NO: 230902 - RNA, 15 nt, Molluscum contagiosum virus
ccugaggaagcaaga

SEQ ID NO: 230903 - RNA, 20 nt, Molluscum contagiosum virus
ccugcacuucggacaccuca

SEQ ID NO: 230904 - RNA, 17 nt, Molluscum contagiosum virus
ccugcaggaaaggcacc

SEQ ID NO: 230905 - RNA, 17 nt, Molluscum contagiosum virus
ccugcacgcgcacuugc

SEQ ID NO: 230906 - RNA, 18 nt, Molluscum contagiosum virus
ccugcacgcgcacuugcc

SEQ ID NO: 230907 - RNA, 21 nt, Molluscum contagiosum virus
ccugacagcguguucggggcc

SEQ ID NO: 230908 - RNA, 13 nt, Molluscum contagiosum virus
ccugauaugcaua

SEQ ID NO: 230909 - RNA, 13 nt, Molluscum contagiosum virus
ccugagaagcaau

SEQ ID NO: 230910 - RNA, 14 nt, Molluscum contagiosum virus
ccugagaagcaaug

SEQ ID NO: 230911 - RNA, 20 nt, Molluscum contagiosum virus
ccugagaagcuguaccuggu

SEQ ID NO: 230912 - RNA, 21 nt, Molluscum contagiosum virus
ccugagaagcuguaccuggug

SEQ ID NO: 230913 - RNA, 22 nt, Molluscum contagiosum virus
ccugaaaggcauccucgccgaa

SEQ ID NO: 230914 - RNA, 22 nt, Molluscum contagiosum virus
ccucugggcgucgcacaguuca

SEQ ID NO: 230915 - RNA, 18 nt, Molluscum contagiosum virus
ccucugagcgagcgcagu

SEQ ID NO: 230916 - RNA, 22 nt, Molluscum contagiosum virus
ccucucgcaugcgccugcacuu

SEQ ID NO: 230917 - RNA, 13 nt, Molluscum contagiosum virus
ccucuacaccagc

SEQ ID NO: 230918 - RNA, 15 nt, Molluscum contagiosum virus
ccucuacaccagcug

SEQ ID NO: 230919 - RNA, 13 nt, Molluscum contagiosum virus
ccucgucuuugcg

SEQ ID NO: 230920 - RNA, 13 nt, Molluscum contagiosum virus
ccucguggaacaa

SEQ ID NO: 230921 - RNA, 17 nt, Molluscum contagiosum virus
ccucgaccugcacgacc

SEQ ID NO: 230922 - RNA, 21 nt, Molluscum contagiosum virus
ccucgacgcgcugcucucggc

SEQ ID NO: 230923 - RNA, 17 nt, Molluscum contagiosum virus
ccucgaggucgugcagg

SEQ ID NO: 230924 - RNA, 19 nt, Molluscum contagiosum virus
ccucgaugagaacaacagc

SEQ ID NO: 230925 - RNA, 16 nt, Molluscum contagiosum virus
ccucgcucgugcucuu

SEQ ID NO: 230926 - RNA, 16 nt, Molluscum contagiosum virus
ccucauguacuucuac

SEQ ID NO: 230927 - RNA, 21 nt, Molluscum contagiosum virus
ccucaucgugagccuggucga

SEQ ID NO: 230928 - RNA, 22 nt, Molluscum contagiosum virus
ccuccgcgaccgcgaacugcaa

SEQ ID NO: 230929 - RNA, 12 nt, Molluscum contagiosum virus
ccuccgcucuga

SEQ ID NO: 230930 - RNA, 18 nt, Molluscum contagiosum virus
ccucaccgcgcacaucuc

SEQ ID NO: 230931 - RNA, 23 nt, Molluscum contagiosum virus
ccucagccgagcgccgccagcuc

SEQ ID NO: 230932 - RNA, 22 nt, Molluscum contagiosum virus
cagcacaccgucgcguggugcu

SEQ ID NO: 230933 - RNA, 21 nt, Molluscum contagiosum virus
cagcacaggugcguaaugcug

SEQ ID NO: 230934 - RNA, 15 nt, Molluscum contagiosum virus
cagcagaccaagaag

SEQ ID NO: 230935 - RNA, 15 nt, Molluscum contagiosum virus
cagcagccucguuca

SEQ ID NO: 230936 - RNA, 21 nt, Molluscum contagiosum virus
cagcagcgcgacuagccugug

SEQ ID NO: 230937 - RNA, 20 nt, Molluscum contagiosum virus
cagcagcggucucggcagca

SEQ ID NO: 230938 - RNA, 16 nt, Molluscum contagiosum virus
cagcaaacugugcucc

SEQ ID NO: 230939 - RNA, 23 nt, Molluscum contagiosum virus
cagcaaacugugcuccugaggaa

SEQ ID NO: 230940 - RNA, 13 nt, Molluscum contagiosum virus
cagcaaacagccu

SEQ ID NO: 230941 - RNA, 22 nt, Molluscum contagiosum virus
cagugccgccgcgcaaaagcac

SEQ ID NO: 230942 - RNA, 23 nt, Molluscum contagiosum virus
cagugccgggcgccggcucugcc

SEQ ID NO: 230943 - RNA, 16 nt, Molluscum contagiosum virus
cagugcggaugugcua

SEQ ID NO: 230944 - RNA, 10 nt, Molluscum contagiosum virus
cagugcucuu

SEQ ID NO: 230945 - RNA, 14 nt, Molluscum contagiosum virus
cagcagcucggggc

SEQ ID NO: 230946 - RNA, 15 nt, Molluscum contagiosum virus
cagcaggcuguguuc

SEQ ID NO: 230947 - RNA, 16 nt, Molluscum contagiosum virus
cauagcaagaugugaa

SEQ ID NO: 230948 - RNA, 14 nt, Molluscum contagiosum virus
cauaaaauggacca

SEQ ID NO: 230949 - RNA, 21 nt, Molluscum contagiosum virus
caucggagagcccggacacgu

SEQ ID NO: 230950 - RNA, 17 nt, Molluscum contagiosum virus
caucuccuugucugcaa

SEQ ID NO: 230951 - RNA, 14 nt, Molluscum contagiosum virus
caucucucagggca

SEQ ID NO: 230952 - RNA, 17 nt, Molluscum contagiosum virus
caucaaagcacaacaag

SEQ ID NO: 230953 - RNA, 20 nt, Molluscum contagiosum virus
caucaauucaaaggugcuca

SEQ ID NO: 230954 - RNA, 18 nt, Molluscum contagiosum virus
caugugcgagaacuggcg

SEQ ID NO: 230955 - RNA, 14 nt, Molluscum contagiosum virus
caugugcgugcacc

SEQ ID NO: 230956 - RNA, 21 nt, Molluscum contagiosum virus
caugugcgugcaccucaagaa

SEQ ID NO: 230957 - RNA, 23 nt, Molluscum contagiosum virus
caugugcgugcaccucaagaaga

SEQ ID NO: 230958 - RNA, 22 nt, Molluscum contagiosum virus
caugucgucaaaggcaaagccu

SEQ ID NO: 230959 - RNA, 17 nt, Molluscum contagiosum virus
caugaccaagcacauuc

SEQ ID NO: 230960 - RNA, 20 nt, Molluscum contagiosum virus
caugguugugcuuguucucu

SEQ ID NO: 230961 - RNA, 21 nt, Molluscum contagiosum virus
caugguugugcuuguucucuu

SEQ ID NO: 230962 - RNA, 19 nt, Molluscum contagiosum virus
ccaaggugaacgaccucaa

SEQ ID NO: 230963 - RNA, 18 nt, Molluscum contagiosum virus
ccaagaggacgagcugcu

SEQ ID NO: 230964 - RNA, 13 nt, Molluscum contagiosum virus
ccaagagccaugu

SEQ ID NO: 230965 - RNA, 17 nt, Molluscum contagiosum virus
ccaaggcgcugaaggca

SEQ ID NO: 230966 - RNA, 19 nt, Molluscum contagiosum virus
ccaaggcgcugaaggcaua

SEQ ID NO: 230967 - RNA, 19 nt, Molluscum contagiosum virus
ccaccgcgcaggaccguca

SEQ ID NO: 230968 - RNA, 23 nt, Molluscum contagiosum virus
ccaccaugcgcacagcacuucuu

SEQ ID NO: 230969 - RNA, 16 nt, Molluscum contagiosum virus
ccaccucgagcucguu

SEQ ID NO: 230970 - RNA, 15 nt, Molluscum contagiosum virus
ccacgacgggcucau

SEQ ID NO: 230971 - RNA, 22 nt, Molluscum contagiosum virus
ccacgcagaucaggagcauggc

SEQ ID NO: 230972 - RNA, 17 nt, Molluscum contagiosum virus
ccacguugggguugucg

SEQ ID NO: 230973 - RNA, 13 nt, Molluscum contagiosum virus
ccacgugcucaag

SEQ ID NO: 230974 - RNA, 15 nt, Molluscum contagiosum virus
ccacgugcucaagug

SEQ ID NO: 230975 - RNA, 19 nt, Molluscum contagiosum virus
ccacgugcuccgugugcca

SEQ ID NO: 230976 - RNA, 18 nt, Molluscum contagiosum virus
ccacgucuccaacaagcu

SEQ ID NO: 230977 - RNA, 13 nt, Molluscum contagiosum virus
ccacguacuugcu

SEQ ID NO: 230978 - RNA, 15 nt, Molluscum contagiosum virus
ccacgcuguacaugc

SEQ ID NO: 230979 - RNA, 15 nt, Molluscum contagiosum virus
ccacgcgcgugagca

SEQ ID NO: 230980 - RNA, 18 nt, Molluscum contagiosum virus
ccacugccacggcugcaa

SEQ ID NO: 230981 - RNA, 22 nt, Molluscum contagiosum virus
ccacugccacggcugcaagcac

SEQ ID NO: 230982 - RNA, 15 nt, Molluscum contagiosum virus
ccacuaccaacucug

SEQ ID NO: 230983 - RNA, 15 nt, Molluscum contagiosum virus
ccagaacauugccac

SEQ ID NO: 230984 - RNA, 21 nt, Molluscum contagiosum virus
ccagcugguccugaacagcau

SEQ ID NO: 230985 - RNA, 13 nt, Molluscum contagiosum virus
ccagcuucagcag

SEQ ID NO: 230986 - RNA, 16 nt, Molluscum contagiosum virus
ccaggaacaucugcaa

SEQ ID NO: 230987 - RNA, 14 nt, Molluscum contagiosum virus
ccagcuggcuacgc

SEQ ID NO: 230988 - RNA, 20 nt, Molluscum contagiosum virus
ccagcucuuggcgggcaccg

SEQ ID NO: 230989 - RNA, 13 nt, Molluscum contagiosum virus
ccagcgagaucaa

SEQ ID NO: 230990 - RNA, 18 nt, Molluscum contagiosum virus
cauucccguggaccucau

SEQ ID NO: 230991 - RNA, 22 nt, Molluscum contagiosum virus
cauucgaugacagcaucgggcu

SEQ ID NO: 230992 - RNA, 17 nt, Molluscum contagiosum virus
cauuccuucacacagac

SEQ ID NO: 230993 - RNA, 22 nt, Molluscum contagiosum virus
cauuuuuguuucgaaguuucac

SEQ ID NO: 230994 - RNA, 15 nt, Molluscum contagiosum virus
cauuuuuuacuccuu

SEQ ID NO: 230995 - RNA, 23 nt, Molluscum contagiosum virus
ccaagaagaggccggcacaagcc

SEQ ID NO: 230996 - RNA, 21 nt, Molluscum contagiosum virus
auguccuuggcggugcgcaaa

SEQ ID NO: 230997 - RNA, 14 nt, Molluscum contagiosum virus
auguccuuucagac

SEQ ID NO: 230998 - RNA, 15 nt, Molluscum contagiosum virus
auggucucgcugcug

SEQ ID NO: 230999 - RNA, 21 nt, Molluscum contagiosum virus
auggucaaccucuacacgcac

SEQ ID NO: 231000 - RNA, 19 nt, Molluscum contagiosum virus
aucuggaggcaaucugucc

SEQ ID NO: 231001 - RNA, 20 nt, Molluscum contagiosum virus
aucuguucgagcaacagggg

SEQ ID NO: 231002 - RNA, 19 nt, Molluscum contagiosum virus
augugacaacaugugaucc

SEQ ID NO: 231003 - RNA, 16 nt, Molluscum contagiosum virus
auuagcagcgaggaac

SEQ ID NO: 231004 - RNA, 19 nt, Molluscum contagiosum virus
auuccgugucguuccacga

SEQ ID NO: 231005 - RNA, 15 nt, Molluscum contagiosum virus
auuccacgcuugcac

SEQ ID NO: 231006 - RNA, 17 nt, Molluscum contagiosum virus
auugcucgcggugccgg

SEQ ID NO: 231007 - RNA, 20 nt, Molluscum contagiosum virus
auuggacguccacaaagccc

SEQ ID NO: 231008 - RNA, 21 nt, Molluscum contagiosum virus
auuggcauccggcacgcacaa

SEQ ID NO: 231009 - RNA, 22 nt, Molluscum contagiosum virus
auuggcauccggcacgcacaaa

SEQ ID NO: 231010 - RNA, 23 nt, Molluscum contagiosum virus
auuggcauccggcacgcacaaag

SEQ ID NO: 231011 - RNA, 21 nt, Molluscum contagiosum virus
auucucguggcguugcugcug

SEQ ID NO: 231012 - RNA, 15 nt, Molluscum contagiosum virus
auucucucgagagac

SEQ ID NO: 231013 - RNA, 20 nt, Molluscum contagiosum virus
auucucugcgcgcaagucac

SEQ ID NO: 231014 - RNA, 17 nt, Molluscum contagiosum virus
caaacgcgaaacuggac

SEQ ID NO: 231015 - RNA, 21 nt, Molluscum contagiosum virus
caaaugccguguauccaagag

SEQ ID NO: 231016 - RNA, 18 nt, Molluscum contagiosum virus
caacaaagaggaaaagaa

SEQ ID NO: 231017 - RNA, 16 nt, Molluscum contagiosum virus
caacaacacgaucaag

SEQ ID NO: 231018 - RNA, 12 nt, Molluscum contagiosum virus
caacaaccacuc

SEQ ID NO: 231019 - RNA, 23 nt, Molluscum contagiosum virus
caacaagaaaaucgccuuuguga

SEQ ID NO: 231020 - RNA, 16 nt, Molluscum contagiosum virus
caacaaggaaaggcac

SEQ ID NO: 231021 - RNA, 16 nt, Molluscum contagiosum virus
caaacaagcagucuca

SEQ ID NO: 231022 - RNA, 17 nt, Molluscum contagiosum virus
caaacaagcagucucau

SEQ ID NO: 231023 - RNA, 16 nt, Molluscum contagiosum virus
caaaccaacgugagua

SEQ ID NO: 231024 - RNA, 14 nt, Molluscum contagiosum virus
caaaacaugcugua

SEQ ID NO: 231025 - RNA, 22 nt, Molluscum contagiosum virus
caaaauggcugcgaccaagaca

SEQ ID NO: 231026 - RNA, 21 nt, Molluscum contagiosum virus
auuguuuuucgggaagcacag

SEQ ID NO: 231027 - RNA, 22 nt, Molluscum contagiosum virus
auuguuuuucgggaagcacagu

SEQ ID NO: 231028 - RNA, 23 nt, Molluscum contagiosum virus
auuguacacgguaaagguacacu

SEQ ID NO: 231029 - RNA, 19 nt, Molluscum contagiosum virus
cagagcaaggcgagucaau

SEQ ID NO: 231030 - RNA, 21 nt, Molluscum contagiosum virus
cagagcaaggcgagucaauga

SEQ ID NO: 231031 - RNA, 14 nt, Molluscum contagiosum virus
cagagccccguuca

SEQ ID NO: 231032 - RNA, 22 nt, Molluscum contagiosum virus
cagaggcccgucuccacaaaga

SEQ ID NO: 231033 - RNA, 14 nt, Molluscum contagiosum virus
cagagaagugcucc

SEQ ID NO: 231034 - RNA, 23 nt, Molluscum contagiosum virus
cagagaagugcuccgcacgugga

SEQ ID NO: 231035 - RNA, 13 nt, Molluscum contagiosum virus
cagagaaaggcac

SEQ ID NO: 231036 - RNA, 21 nt, Molluscum contagiosum virus
cagagaaaucccaagagccau

SEQ ID NO: 231037 - RNA, 16 nt, Molluscum contagiosum virus
cagaaaacgcacuguc

SEQ ID NO: 231038 - RNA, 21 nt, Molluscum contagiosum virus
cacucgcgcguccgcaaagac

SEQ ID NO: 231039 - RNA, 23 nt, Molluscum contagiosum virus
cacucgggugcccggacagagcc

SEQ ID NO: 231040 - RNA, 15 nt, Molluscum contagiosum virus
cacucacgcguccac

SEQ ID NO: 231041 - RNA, 14 nt, Molluscum contagiosum virus
cacuagcacgggcg

SEQ ID NO: 231042 - RNA, 16 nt, Molluscum contagiosum virus
cacuagcgcaggcagu

SEQ ID NO: 231043 - RNA, 17 nt, Molluscum contagiosum virus
cacuagcgcaggcaguu

SEQ ID NO: 231044 - RNA, 18 nt, Molluscum contagiosum virus
cacuagcguagcaugcuc

SEQ ID NO: 231045 - RNA, 13 nt, Molluscum contagiosum virus
cacuuccaguaug

SEQ ID NO: 231046 - RNA, 14 nt, Molluscum contagiosum virus
cacuuccaguauga

SEQ ID NO: 231047 - RNA, 20 nt, Molluscum contagiosum virus
cacuugcgcgcgugccugug

SEQ ID NO: 231048 - RNA, 21 nt, Molluscum contagiosum virus
cacuugcgcguucgcaaagac

SEQ ID NO: 231049 - RNA, 11 nt, Molluscum contagiosum virus
cacucuuucac

SEQ ID NO: 231050 - RNA, 17 nt, Molluscum contagiosum virus
cacucuuucgaacaggu

SEQ ID NO: 231051 - RNA, 22 nt, Molluscum contagiosum virus
cacugcgcgcgcggcgcagugc

SEQ ID NO: 231052 - RNA, 13 nt, Molluscum contagiosum virus
cacugcguacaca

SEQ ID NO: 231053 - RNA, 18 nt, Molluscum contagiosum virus
cacugucguaacaaugga

SEQ ID NO: 231054 - RNA, 20 nt, Molluscum contagiosum virus
cacugucuuuuccucacguc

SEQ ID NO: 231055 - RNA, 16 nt, Molluscum contagiosum virus
cacugggucuguucac

SEQ ID NO: 231056 - RNA, 15 nt, Molluscum contagiosum virus
cacguuccaaaagac

SEQ ID NO: 231057 - RNA, 18 nt, Molluscum contagiosum virus
cacguuccagagcacugc

SEQ ID NO: 231058 - RNA, 15 nt, Molluscum contagiosum virus
cacuacucgucuugc

SEQ ID NO: 231059 - RNA, 13 nt, Molluscum contagiosum virus
cacuacugcucca

SEQ ID NO: 231060 - RNA, 17 nt, Molluscum contagiosum virus
cacggggucguaguccg

SEQ ID NO: 231061 - RNA, 24 nt, Molluscum contagiosum virus
cacguacgagcagcugcugcgcac

SEQ ID NO: 231062 - RNA, 21 nt, Molluscum contagiosum virus
cacgucggaguccgugcaaca

SEQ ID NO: 231063 - RNA, 17 nt, Molluscum contagiosum virus
cacgugcagcggcgcca

SEQ ID NO: 231064 - RNA, 18 nt, Molluscum contagiosum virus
cacgugccagcucauagc

SEQ ID NO: 231065 - RNA, 11 nt, Molluscum contagiosum virus
cacgugcugcg

SEQ ID NO: 231066 - RNA, 12 nt, Molluscum contagiosum virus
cacgugcugcug

SEQ ID NO: 231067 - RNA, 14 nt, Molluscum contagiosum virus
cacguggagucacg

SEQ ID NO: 231068 - RNA, 18 nt, Molluscum contagiosum virus
cacguggccagacauguc

SEQ ID NO: 231069 - RNA, 16 nt, Molluscum contagiosum virus
cacguggcuaugagcg

SEQ ID NO: 231070 - RNA, 24 nt, Molluscum contagiosum virus
cacguggugguuggcgugcucgcu

SEQ ID NO: 231071 - RNA, 16 nt, Molluscum contagiosum virus
cacgcugcacgagcug

SEQ ID NO: 231072 - RNA, 13 nt, Molluscum contagiosum virus
cacgcucaucucg

SEQ ID NO: 231073 - RNA, 23 nt, Molluscum contagiosum virus
cacgcuguuuggaauugugcugc

SEQ ID NO: 231074 - RNA, 17 nt, Molluscum contagiosum virus
cacgggcaugcacagcu

SEQ ID NO: 231075 - RNA, 17 nt, Molluscum contagiosum virus
cacgggcccgcgcguga

SEQ ID NO: 231076 - RNA, 18 nt, Molluscum contagiosum virus
cacggcuguaaugugcug

SEQ ID NO: 231077 - RNA, 17 nt, Molluscum contagiosum virus
cacggcgcuugcuucca

SEQ ID NO: 231078 - RNA, 15 nt, Molluscum contagiosum virus
cacgcgagcaauggc

SEQ ID NO: 231079 - RNA, 17 nt, Molluscum contagiosum virus
cacgcaggaccuggcug

SEQ ID NO: 231080 - RNA, 14 nt, Molluscum contagiosum virus
cacgccuccaagaa

SEQ ID NO: 231081 - RNA, 17 nt, Molluscum contagiosum virus
cacgcguccacaaagac

SEQ ID NO: 231082 - RNA, 15 nt, Molluscum contagiosum virus
cacgcgcgacaucuu

SEQ ID NO: 231083 - RNA, 23 nt, Molluscum contagiosum virus
cacgcggaaacaagcacaugugu

SEQ ID NO: 231084 - RNA, 18 nt, Molluscum contagiosum virus
cacgcgggcccgugcuca

SEQ ID NO: 231085 - RNA, 15 nt, Molluscum contagiosum virus
cacgcacgaccucac

SEQ ID NO: 231086 - RNA, 13 nt, Molluscum contagiosum virus
cacgcaacugccc

SEQ ID NO: 231087 - RNA, 12 nt, Molluscum contagiosum virus
cacgcacacucg

SEQ ID NO: 231088 - RNA, 18 nt, Molluscum contagiosum virus
caccuuuugcuccaugac

SEQ ID NO: 231089 - RNA, 16 nt, Molluscum contagiosum virus
cacgacggacuucuug

SEQ ID NO: 231090 - RNA, 16 nt, Molluscum contagiosum virus
cacgaccacgcuggca

SEQ ID NO: 231091 - RNA, 13 nt, Molluscum contagiosum virus
cacgagagaggcu

SEQ ID NO: 231092 - RNA, 14 nt, Molluscum contagiosum virus
cacgagcacugccu

SEQ ID NO: 231093 - RNA, 15 nt, Molluscum contagiosum virus
cacgagcacugccug

SEQ ID NO: 231094 - RNA, 11 nt, Molluscum contagiosum virus
cacgagcaguc

SEQ ID NO: 231095 - RNA, 19 nt, Molluscum contagiosum virus
cacgacucgcgucugcaag

SEQ ID NO: 231096 - RNA, 12 nt, Molluscum contagiosum virus
cacgacucucaa

SEQ ID NO: 231097 - RNA, 20 nt, Molluscum contagiosum virus
caccugcgccgccucaugcg

SEQ ID NO: 231098 - RNA, 19 nt, Molluscum contagiosum virus
caccugcuggaacgcuugg

SEQ ID NO: 231099 - RNA, 22 nt, Molluscum contagiosum virus
caccuuggcgcugcacaguuca

SEQ ID NO: 231100 - RNA, 21 nt, Molluscum contagiosum virus
caccuuucauucgcuggugcg

SEQ ID NO: 231101 - RNA, 18 nt, Molluscum contagiosum virus
caccggcgcgagaugcuc

SEQ ID NO: 231102 - RNA, 17 nt, Molluscum contagiosum virus
caccgccuggugcugcg

SEQ ID NO: 231103 - RNA, 14 nt, Molluscum contagiosum virus
caccgcguggacaa

SEQ ID NO: 231104 - RNA, 18 nt, Molluscum contagiosum virus
caccgcgcagaagccaac

SEQ ID NO: 231105 - RNA, 19 nt, Molluscum contagiosum virus
caccgcgcaggaccgucac

SEQ ID NO: 231106 - RNA, 22 nt, Molluscum contagiosum virus
caauggagccgcugcugcggua

SEQ ID NO: 231107 - RNA, 15 nt, Molluscum contagiosum virus
caaugcuuucccguu

SEQ ID NO: 231108 - RNA, 15 nt, Molluscum contagiosum virus
caauggacacgcacu

SEQ ID NO: 231109 - RNA, 22 nt, Molluscum contagiosum virus
caaugguagacgacgaugcaaa

SEQ ID NO: 231110 - RNA, 12 nt, Molluscum contagiosum virus
caauuacuccag

SEQ ID NO: 231111 - RNA, 21 nt, Molluscum contagiosum virus
caauguuugcggaugcucgcu

SEQ ID NO: 231112 - RNA, 15 nt, Molluscum contagiosum virus
caauguuggucuccu

SEQ ID NO: 231113 - RNA, 21 nt, Molluscum contagiosum virus
cacaccuuuugcuccaugaca

SEQ ID NO: 231114 - RNA, 13 nt, Molluscum contagiosum virus
cacacgcaccagu

SEQ ID NO: 231115 - RNA, 14 nt, Molluscum contagiosum virus
cacacgcacccaaa

SEQ ID NO: 231116 - RNA, 20 nt, Molluscum contagiosum virus
cacacgcgcgcgugcugcug

SEQ ID NO: 231117 - RNA, 22 nt, Molluscum contagiosum virus
cacacgcgcgcgugcugcugga

SEQ ID NO: 231118 - RNA, 15 nt, Molluscum contagiosum virus
cacacacacacacuc

SEQ ID NO: 231119 - RNA, 14 nt, Molluscum contagiosum virus
cacacacucgcucu

SEQ ID NO: 231120 - RNA, 12 nt, Molluscum contagiosum virus
cacacacuugca

SEQ ID NO: 231121 - RNA, 22 nt, Molluscum contagiosum virus
cacacacggaagcucacaucug

SEQ ID NO: 231122 - RNA, 14 nt, Molluscum contagiosum virus
cacaccagacaaag

SEQ ID NO: 231123 - RNA, 15 nt, Molluscum contagiosum virus
cacagugcuggacac

SEQ ID NO: 231124 - RNA, 15 nt, Molluscum contagiosum virus
cacauccgcuaccug

SEQ ID NO: 231125 - RNA, 16 nt, Molluscum contagiosum virus
cacauccgcuaccugg

SEQ ID NO: 231126 - RNA, 22 nt, Molluscum contagiosum virus
cacauccuugauaaaagcacag

SEQ ID NO: 231127 - RNA, 18 nt, Molluscum contagiosum virus
caccacgugcuccgugug

SEQ ID NO: 231128 - RNA, 21 nt, Molluscum contagiosum virus
caccaucuucaacuuccacau

SEQ ID NO: 231129 - RNA, 17 nt, Molluscum contagiosum virus
caccagcuccgccggga

SEQ ID NO: 231130 - RNA, 20 nt, Molluscum contagiosum virus
caccagcuccgccgggaaua

SEQ ID NO: 231131 - RNA, 15 nt, Molluscum contagiosum virus
caccagcugccgcuu

SEQ ID NO: 231132 - RNA, 18 nt, Molluscum contagiosum virus
cacccagguucagcgcuc

SEQ ID NO: 231133 - RNA, 15 nt, Molluscum contagiosum virus
caccccgaaaggcac

SEQ ID NO: 231134 - RNA, 22 nt, Molluscum contagiosum virus
cacccgugcgcgcgcugagaua

SEQ ID NO: 231135 - RNA, 15 nt, Molluscum contagiosum virus
caaucuucgugcgcu

SEQ ID NO: 231136 - RNA, 12 nt, Molluscum contagiosum virus
caaucuguccag

SEQ ID NO: 231137 - RNA, 13 nt, Molluscum contagiosum virus
caaugcagugcac

SEQ ID NO: 231138 - RNA, 15 nt, Molluscum contagiosum virus
caaugcagugcacca

SEQ ID NO: 231139 - RNA, 18 nt, Molluscum contagiosum virus
caaucugacggugcaacc

SEQ ID NO: 231140 - RNA, 23 nt, Molluscum contagiosum virus
caauaccaggccacgugcucaag

SEQ ID NO: 231141 - RNA, 22 nt, Molluscum contagiosum virus
caauaacaacgaccagcuuagc

SEQ ID NO: 231142 - RNA, 19 nt, Molluscum contagiosum virus
caaggugaacgaccucaac

SEQ ID NO: 231143 - RNA, 23 nt, Molluscum contagiosum virus
caagcaugcgguguguguucuca

SEQ ID NO: 231144 - RNA, 18 nt, Molluscum contagiosum virus
caagcgcgaguacaagcu

SEQ ID NO: 231145 - RNA, 14 nt, Molluscum contagiosum virus
caagcgcuucccuu

SEQ ID NO: 231146 - RNA, 14 nt, Molluscum contagiosum virus
caagcgcuugcucu

SEQ ID NO: 231147 - RNA, 15 nt, Molluscum contagiosum virus
caagcgcuugcucuu

SEQ ID NO: 231148 - RNA, 21 nt, Molluscum contagiosum virus
caagcucaagaagcccaagga

SEQ ID NO: 231149 - RNA, 14 nt, Molluscum contagiosum virus
caagcggugcagcu

SEQ ID NO: 231150 - RNA, 15 nt, Molluscum contagiosum virus
caagcggugcagcua

SEQ ID NO: 231151 - RNA, 17 nt, Molluscum contagiosum virus
caagcucgaugccguuu

SEQ ID NO: 231152 - RNA, 13 nt, Molluscum contagiosum virus
caaggcgagucaa

SEQ ID NO: 231153 - RNA, 19 nt, Molluscum contagiosum virus
caaggcaugcgcgcagugc

SEQ ID NO: 231154 - RNA, 20 nt, Molluscum contagiosum virus
caaggaggucuagccgugaa

SEQ ID NO: 231155 - RNA, 17 nt, Molluscum contagiosum virus
caaggaaaggcacccgc

SEQ ID NO: 231156 - RNA, 11 nt, Molluscum contagiosum virus
caaggacaucu

SEQ ID NO: 231157 - RNA, 12 nt, Molluscum contagiosum virus
caagcuuucuca

SEQ ID NO: 231158 - RNA, 14 nt, Molluscum contagiosum virus
caagcuuugugcuc

SEQ ID NO: 231159 - RNA, 15 nt, Molluscum contagiosum virus
caaggaaaacugcau

SEQ ID NO: 231160 - RNA, 14 nt, Molluscum contagiosum virus
caaggaaaaggcac

SEQ ID NO: 231161 - RNA, 12 nt, Molluscum contagiosum virus
caagaucaaccg

SEQ ID NO: 231162 - RNA, 16 nt, Molluscum contagiosum virus
caagaucguuuugcac

SEQ ID NO: 231163 - RNA, 20 nt, Molluscum contagiosum virus
caagaucguuuugcacuugu

SEQ ID NO: 231164 - RNA, 13 nt, Molluscum contagiosum virus
caacacucgugcu

SEQ ID NO: 231165 - RNA, 16 nt, Molluscum contagiosum virus
caagaguugucuucca

SEQ ID NO: 231166 - RNA, 20 nt, Molluscum contagiosum virus
caagauggcgcagcacuucg

SEQ ID NO: 231167 - RNA, 13 nt, Molluscum contagiosum virus
caagcaguaccug

SEQ ID NO: 231168 - RNA, 21 nt, Molluscum contagiosum virus
caagcagcgcgccaccaccaa

SEQ ID NO: 231169 - RNA, 18 nt, Molluscum contagiosum virus
caagcaggaguccgugac

SEQ ID NO: 231170 - RNA, 13 nt, Molluscum contagiosum virus
caagcacaugugu

SEQ ID NO: 231171 - RNA, 13 nt, Molluscum contagiosum virus
caacacguuuucu

SEQ ID NO: 231172 - RNA, 15 nt, Molluscum contagiosum virus
caagaggacgagcug

SEQ ID NO: 231173 - RNA, 15 nt, Molluscum contagiosum virus
caagaggccgucaca

SEQ ID NO: 231174 - RNA, 19 nt, Molluscum contagiosum virus
caagaggccgucacaugcu

SEQ ID NO: 231175 - RNA, 15 nt, Molluscum contagiosum virus
caagaggggagccag

SEQ ID NO: 231176 - RNA, 12 nt, Molluscum contagiosum virus
caacacuaccac

SEQ ID NO: 231177 - RNA, 17 nt, Molluscum contagiosum virus
caacacuaccacagcca

SEQ ID NO: 231178 - RNA, 17 nt, Molluscum contagiosum virus
cuacaagcggugcagcu

SEQ ID NO: 231179 - RNA, 18 nt, Molluscum contagiosum virus
cuacaagcggugcagcua

SEQ ID NO: 231180 - RNA, 19 nt, Molluscum contagiosum virus
cuacaagcggugcagcuac

SEQ ID NO: 231181 - RNA, 23 nt, Molluscum contagiosum virus
cuacaagcggugcagcuacugcg

SEQ ID NO: 231182 - RNA, 13 nt, Molluscum contagiosum virus
cuacaagugcauc

SEQ ID NO: 231183 - RNA, 23 nt, Molluscum contagiosum virus
cuaaucagcgccaucaauucaaa

SEQ ID NO: 231184 - RNA, 17 nt, Molluscum contagiosum virus
cuacacgacggacuucu

SEQ ID NO: 231185 - RNA, 16 nt, Molluscum contagiosum virus
cuacaucgacaagcac

SEQ ID NO: 231186 - RNA, 22 nt, Molluscum contagiosum virus
cuaccgccugcgggagauccug

SEQ ID NO: 231187 - RNA, 21 nt, Molluscum contagiosum virus
cuaccagcucuucguggccaa

SEQ ID NO: 231188 - RNA, 22 nt, Molluscum contagiosum virus
cuaccagcucuucguggccaaa

SEQ ID NO: 231189 - RNA, 14 nt, Molluscum contagiosum virus
cuaccacagguuuc

SEQ ID NO: 231190 - RNA, 15 nt, Molluscum contagiosum virus
cuacauggacgugcu

SEQ ID NO: 231191 - RNA, 15 nt, Molluscum contagiosum virus
cuacuacguggugcg

SEQ ID NO: 231192 - RNA, 19 nt, Molluscum contagiosum virus
cuaccugcgcaagcucagc

SEQ ID NO: 231193 - RNA, 16 nt, Molluscum contagiosum virus
cuaccuggggcugcuu

SEQ ID NO: 231194 - RNA, 16 nt, Molluscum contagiosum virus
cuacgacgacaugcac

SEQ ID NO: 231195 - RNA, 12 nt, Molluscum contagiosum virus
cuacgcacuuca

SEQ ID NO: 231196 - RNA, 21 nt, Molluscum contagiosum virus
cuacgccgcgcaccuggagua

SEQ ID NO: 231197 - RNA, 17 nt, Molluscum contagiosum virus
cuacgaggagcacggca

SEQ ID NO: 231198 - RNA, 21 nt, Molluscum contagiosum virus
cuacgaggccuacgugcugcg

SEQ ID NO: 231199 - RNA, 15 nt, Molluscum contagiosum virus
cuacugcgacaucca

SEQ ID NO: 231200 - RNA, 16 nt, Molluscum contagiosum virus
cuacugcgacauccac

SEQ ID NO: 231201 - RNA, 20 nt, Molluscum contagiosum virus
cuacugcgacggggagcaug

SEQ ID NO: 231202 - RNA, 14 nt, Molluscum contagiosum virus
cuacucgucuugcg

SEQ ID NO: 231203 - RNA, 17 nt, Molluscum contagiosum virus
cuacuuccacgagcuga

SEQ ID NO: 231204 - RNA, 18 nt, Molluscum contagiosum virus
cuacuggaggagugucgc

SEQ ID NO: 231205 - RNA, 19 nt, Molluscum contagiosum virus
cuacuucacacgucuugca

SEQ ID NO: 231206 - RNA, 17 nt, Molluscum contagiosum virus
cuaguagcgguguugcu

SEQ ID NO: 231207 - RNA, 13 nt, Molluscum contagiosum virus
cuaggauccugcu

SEQ ID NO: 231208 - RNA, 22 nt, Molluscum contagiosum virus
cuagguccacauuucaaaaacg

SEQ ID NO: 231209 - RNA, 14 nt, Molluscum contagiosum virus
cucaagaacaccaa

SEQ ID NO: 231210 - RNA, 20 nt, Molluscum contagiosum virus
cucaagaucguuuugcacuu

SEQ ID NO: 231211 - RNA, 21 nt, Molluscum contagiosum virus
cucaagaucguuuugcacuug

SEQ ID NO: 231212 - RNA, 23 nt, Molluscum contagiosum virus
cucacugcgaucgcagcagugcc

SEQ ID NO: 231213 - RNA, 16 nt, Molluscum contagiosum virus
cucagcggcacugcgc

SEQ ID NO: 231214 - RNA, 14 nt, Molluscum contagiosum virus
cucagcguggagca

SEQ ID NO: 231215 - RNA, 18 nt, Molluscum contagiosum virus
cucagccucuacuccacu

SEQ ID NO: 231216 - RNA, 17 nt, Molluscum contagiosum virus
cucaucggcgagcucuu

SEQ ID NO: 231217 - RNA, 13 nt, Molluscum contagiosum virus
cucaucgagcaug

SEQ ID NO: 231218 - RNA, 23 nt, Molluscum contagiosum virus
cuaguucgagaagacggggcgca

SEQ ID NO: 231219 - RNA, 16 nt, Molluscum contagiosum virus
cuagugccauugugac

SEQ ID NO: 231220 - RNA, 22 nt, Molluscum contagiosum virus
cucaacauccaaaccaacguga

SEQ ID NO: 231221 - RNA, 23 nt, Molluscum contagiosum virus
cucaacaugaauuuuugagacga

SEQ ID NO: 231222 - RNA, 14 nt, Molluscum contagiosum virus
cgugggcaccugca

SEQ ID NO: 231223 - RNA, 20 nt, Molluscum contagiosum virus
cguggcgugcuuguagcgca

SEQ ID NO: 231224 - RNA, 19 nt, Molluscum contagiosum virus
cguggcuugcucggacaca

SEQ ID NO: 231225 - RNA, 16 nt, Molluscum contagiosum virus
cguggcgccauugcuc

SEQ ID NO: 231226 - RNA, 21 nt, Molluscum contagiosum virus
cguggcgcgcgacgugugcuc

SEQ ID NO: 231227 - RNA, 21 nt, Molluscum contagiosum virus
cguggucgcgcgcgcucugcc

SEQ ID NO: 231228 - RNA, 21 nt, Molluscum contagiosum virus
cgugaaaaaagaauccuucuc

SEQ ID NO: 231229 - RNA, 13 nt, Molluscum contagiosum virus
cguggaccucauc

SEQ ID NO: 231230 - RNA, 20 nt, Molluscum contagiosum virus
cguggacgagcgcuaccuga

SEQ ID NO: 231231 - RNA, 17 nt, Molluscum contagiosum virus
cguggacgaggccaacc

SEQ ID NO: 231232 - RNA, 16 nt, Molluscum contagiosum virus
cguggaugaacaccau

SEQ ID NO: 231233 - RNA, 16 nt, Molluscum contagiosum virus
cguggaggaaacaccc

SEQ ID NO: 231234 - RNA, 11 nt, Molluscum contagiosum virus
cguggugcugg

SEQ ID NO: 231235 - RNA, 17 nt, Molluscum contagiosum virus
cguguacguaauccaug

SEQ ID NO: 231236 - RNA, 14 nt, Molluscum contagiosum virus
cguguacgugcuug

SEQ ID NO: 231237 - RNA, 21 nt, Molluscum contagiosum virus
cguguacaacucgguggugcg

SEQ ID NO: 231238 - RNA, 23 nt, Molluscum contagiosum virus
cguguacaugaugcccuggugaa

SEQ ID NO: 231239 - RNA, 16 nt, Molluscum contagiosum virus
cguguacaugcucaag

SEQ ID NO: 231240 - RNA, 20 nt, Molluscum contagiosum virus
cguguacaugcucaagcacc

SEQ ID NO: 231241 - RNA, 17 nt, Molluscum contagiosum virus
cgugugcagcagguagg

SEQ ID NO: 231242 - RNA, 16 nt, Molluscum contagiosum virus
cgugugcguacuggga

SEQ ID NO: 231243 - RNA, 18 nt, Molluscum contagiosum virus
cguguccacuccuggaac

SEQ ID NO: 231244 - RNA, 15 nt, Molluscum contagiosum virus
cuaaauagcauguca

SEQ ID NO: 231245 - RNA, 12 nt, Molluscum contagiosum virus
cggguccgucuu

SEQ ID NO: 231246 - RNA, 20 nt, Molluscum contagiosum virus
cggggcugcuggcggugcuc

SEQ ID NO: 231247 - RNA, 17 nt, Molluscum contagiosum virus
cggugucgguaccugca

SEQ ID NO: 231248 - RNA, 19 nt, Molluscum contagiosum virus
cgguguguguucucaaaua

SEQ ID NO: 231249 - RNA, 18 nt, Molluscum contagiosum virus
cggugguuuacaucggcu

SEQ ID NO: 231250 - RNA, 18 nt, Molluscum contagiosum virus
cguaagaccauggggcua

SEQ ID NO: 231251 - RNA, 22 nt, Molluscum contagiosum virus
cguaacaauggacacgcacugg

SEQ ID NO: 231252 - RNA, 15 nt, Molluscum contagiosum virus
cgucccggaaaaaga

SEQ ID NO: 231253 - RNA, 22 nt, Molluscum contagiosum virus
cguacaucccgcacgugggcua

SEQ ID NO: 231254 - RNA, 16 nt, Molluscum contagiosum virus
cguacguguccaugca

SEQ ID NO: 231255 - RNA, 22 nt, Molluscum contagiosum virus
cguccucucgugcgucgugaau

SEQ ID NO: 231256 - RNA, 19 nt, Molluscum contagiosum virus
cguccgugcgcagggcaau

SEQ ID NO: 231257 - RNA, 20 nt, Molluscum contagiosum virus
cgucgcacuggccugcaaac

SEQ ID NO: 231258 - RNA, 15 nt, Molluscum contagiosum virus
cgucgcacaguucac

SEQ ID NO: 231259 - RNA, 18 nt, Molluscum contagiosum virus
cgucgaagaccaccagca

SEQ ID NO: 231260 - RNA, 21 nt, Molluscum contagiosum virus
cgucgaaguccgucacggaca

SEQ ID NO: 231261 - RNA, 21 nt, Molluscum contagiosum virus
cgucgcugcggacaagacaac

SEQ ID NO: 231262 - RNA, 13 nt, Molluscum contagiosum virus
cgucgucaaggau

SEQ ID NO: 231263 - RNA, 21 nt, Molluscum contagiosum virus
cgucguccggaggcacgggcu

SEQ ID NO: 231264 - RNA, 15 nt, Molluscum contagiosum virus
cgucgugcuguugcc

SEQ ID NO: 231265 - RNA, 14 nt, Molluscum contagiosum virus
cgucgcgcacagaa

SEQ ID NO: 231266 - RNA, 20 nt, Molluscum contagiosum virus
cgucucaagacaagucacac

SEQ ID NO: 231267 - RNA, 16 nt, Molluscum contagiosum virus
cgacaggucagguucu

SEQ ID NO: 231268 - RNA, 15 nt, Molluscum contagiosum virus
cgaccacgcuggcac

SEQ ID NO: 231269 - RNA, 23 nt, Molluscum contagiosum virus
cgacauccacaugaccaagcaca

SEQ ID NO: 231270 - RNA, 18 nt, Molluscum contagiosum virus
cgaccugcacgacccucu

SEQ ID NO: 231271 - RNA, 18 nt, Molluscum contagiosum virus
cgacgacguugugcuccu

SEQ ID NO: 231272 - RNA, 22 nt, Molluscum contagiosum virus
cgacccgcucgugaagcuguca

SEQ ID NO: 231273 - RNA, 16 nt, Molluscum contagiosum virus
cgacauguacauagcc

SEQ ID NO: 231274 - RNA, 19 nt, Molluscum contagiosum virus
cggaaagauauacaccagg

SEQ ID NO: 231275 - RNA, 13 nt, Molluscum contagiosum virus
cggaacuuagccc

SEQ ID NO: 231276 - RNA, 19 nt, Molluscum contagiosum virus
cgacgguaaacucuugcac

SEQ ID NO: 231277 - RNA, 20 nt, Molluscum contagiosum virus
cgacggucacgcaagcuuug

SEQ ID NO: 231278 - RNA, 14 nt, Molluscum contagiosum virus
cgacgcugccuagg

SEQ ID NO: 231279 - RNA, 19 nt, Molluscum contagiosum virus
cgacggagauggacacagc

SEQ ID NO: 231280 - RNA, 24 nt, Molluscum contagiosum virus
cgacggagauggacacagcaaaag

SEQ ID NO: 231281 - RNA, 16 nt, Molluscum contagiosum virus
cgcuugggcacugcua

SEQ ID NO: 231282 - RNA, 17 nt, Molluscum contagiosum virus
cgcuugggcacugcuac

SEQ ID NO: 231283 - RNA, 16 nt, Molluscum contagiosum virus
cgcuuguccucuuggc

SEQ ID NO: 231284 - RNA, 12 nt, Molluscum contagiosum virus
cgacaacaugcu

SEQ ID NO: 231285 - RNA, 16 nt, Molluscum contagiosum virus
cgacaacgugcugcuc

SEQ ID NO: 231286 - RNA, 17 nt, Molluscum contagiosum virus
cgacaaggaaaggcacc

SEQ ID NO: 231287 - RNA, 18 nt, Molluscum contagiosum virus
cgacaauacggugcagcc

SEQ ID NO: 231288 - RNA, 15 nt, Molluscum contagiosum virus
cgaagaccaccagca

SEQ ID NO: 231289 - RNA, 16 nt, Molluscum contagiosum virus
cgaagagggucgugca

SEQ ID NO: 231290 - RNA, 17 nt, Molluscum contagiosum virus
cgaagagggucgugcag

SEQ ID NO: 231291 - RNA, 17 nt, Molluscum contagiosum virus
cgaagccguagucuuuc

SEQ ID NO: 231292 - RNA, 18 nt, Molluscum contagiosum virus
cgaaggcucgagcugcau

SEQ ID NO: 231293 - RNA, 13 nt, Molluscum contagiosum virus
cgaagggcuuuuu

SEQ ID NO: 231294 - RNA, 17 nt, Molluscum contagiosum virus
cgaaggucaucaccagc

SEQ ID NO: 231295 - RNA, 17 nt, Molluscum contagiosum virus
cggcaagcuuugcuuca

SEQ ID NO: 231296 - RNA, 16 nt, Molluscum contagiosum virus
cgggcacguccgccuc

SEQ ID NO: 231297 - RNA, 15 nt, Molluscum contagiosum virus
cgggcaugcacagcu

SEQ ID NO: 231298 - RNA, 16 nt, Molluscum contagiosum virus
cgggcucgugcuggag

SEQ ID NO: 231299 - RNA, 12 nt, Molluscum contagiosum virus
cgggcgccagcu

SEQ ID NO: 231300 - RNA, 18 nt, Molluscum contagiosum virus
cgggcgccgcgcaauagc

SEQ ID NO: 231301 - RNA, 14 nt, Molluscum contagiosum virus
cgggcgcuauugcg

SEQ ID NO: 231302 - RNA, 14 nt, Molluscum contagiosum virus
cggggcccaugcuc

SEQ ID NO: 231303 - RNA, 16 nt, Molluscum contagiosum virus
cggggcccaugcucac

SEQ ID NO: 231304 - RNA, 21 nt, Molluscum contagiosum virus
cggggacggcgugacggugcu

SEQ ID NO: 231305 - RNA, 14 nt, Molluscum contagiosum virus
cggagaagugcgca

SEQ ID NO: 231306 - RNA, 14 nt, Molluscum contagiosum virus
cggagaagugcucc

SEQ ID NO: 231307 - RNA, 15 nt, Molluscum contagiosum virus
cggagaagugcuccg

SEQ ID NO: 231308 - RNA, 23 nt, Molluscum contagiosum virus
cggagaagugcuccgcacgugga

SEQ ID NO: 231309 - RNA, 16 nt, Molluscum contagiosum virus
cggacgcccuccucga

SEQ ID NO: 231310 - RNA, 16 nt, Molluscum contagiosum virus
cggacgugcacgcacg

SEQ ID NO: 231311 - RNA, 20 nt, Molluscum contagiosum virus
cggaagcgcccgugaugcac

SEQ ID NO: 231312 - RNA, 21 nt, Molluscum contagiosum virus
cggaagcgcccgugaugcacc

SEQ ID NO: 231313 - RNA, 19 nt, Molluscum contagiosum virus
cggaagcuccugcugguuc

SEQ ID NO: 231314 - RNA, 13 nt, Molluscum contagiosum virus
cggaaguggugcc

SEQ ID NO: 231315 - RNA, 16 nt, Molluscum contagiosum virus
cggaauguagccuuug

SEQ ID NO: 231316 - RNA, 22 nt, Molluscum contagiosum virus
cggacacguuccagagcacugc

SEQ ID NO: 231317 - RNA, 20 nt, Molluscum contagiosum virus
cggagaguuguuccacgacc

SEQ ID NO: 231318 - RNA, 22 nt, Molluscum contagiosum virus
cggagagcccggacacguagcc

SEQ ID NO: 231319 - RNA, 22 nt, Molluscum contagiosum virus
cggagcggaucgugcuggagau

SEQ ID NO: 231320 - RNA, 22 nt, Molluscum contagiosum virus
cggagcuuaauuuugcacauua

SEQ ID NO: 231321 - RNA, 13 nt, Molluscum contagiosum virus
cggaggcacgggc

SEQ ID NO: 231322 - RNA, 14 nt, Molluscum contagiosum virus
cggaggcgcuaccu

SEQ ID NO: 231323 - RNA, 16 nt, Molluscum contagiosum virus
cggaggcguaugagua

SEQ ID NO: 231324 - RNA, 16 nt, Molluscum contagiosum virus
cggaggugguggccaa

SEQ ID NO: 231325 - RNA, 21 nt, Molluscum contagiosum virus
cugucgcuggaggauucuugu

SEQ ID NO: 231326 - RNA, 23 nt, Molluscum contagiosum virus
cugucguggaggaaacacccgcg

SEQ ID NO: 231327 - RNA, 23 nt, Molluscum contagiosum virus
cuguccaaggugaacgaccucaa

SEQ ID NO: 231328 - RNA, 12 nt, Molluscum contagiosum virus
cuuauaccaugg

SEQ ID NO: 231329 - RNA, 23 nt, Molluscum contagiosum virus
cuuaucccagaaaacgcacuguc

SEQ ID NO: 231330 - RNA, 12 nt, Molluscum contagiosum virus
cuuacugcugca

SEQ ID NO: 231331 - RNA, 14 nt, Molluscum contagiosum virus
cuuacugcugcaau

SEQ ID NO: 231332 - RNA, 15 nt, Molluscum contagiosum virus
cuuacugcugcaauc

SEQ ID NO: 231333 - RNA, 20 nt, Molluscum contagiosum virus
cuuacggacgcccuccucga

SEQ ID NO: 231334 - RNA, 22 nt, Molluscum contagiosum virus
cuuacggacgcccuccucgacc

SEQ ID NO: 231335 - RNA, 17 nt, Molluscum contagiosum virus
cuuaauaaaaaaucaaa

SEQ ID NO: 231336 - RNA, 23 nt, Molluscum contagiosum virus
cuuaacggccaauaaaugaugcu

SEQ ID NO: 231337 - RNA, 14 nt, Molluscum contagiosum virus
cuuacacacgcacc

SEQ ID NO: 231338 - RNA, 11 nt, Molluscum contagiosum virus
cuucuagcucg

SEQ ID NO: 231339 - RNA, 15 nt, Molluscum contagiosum virus
cuucgucuuaacuca

SEQ ID NO: 231340 - RNA, 15 nt, Molluscum contagiosum virus
cuucgugcgcggaga

SEQ ID NO: 231341 - RNA, 21 nt, Molluscum contagiosum virus
cuucguggagcccgugcugga

SEQ ID NO: 231342 - RNA, 12 nt, Molluscum contagiosum virus
cuucguggugcu

SEQ ID NO: 231343 - RNA, 20 nt, Molluscum contagiosum virus
cuucgucaagcagcgcgcca

SEQ ID NO: 231344 - RNA, 13 nt, Molluscum contagiosum virus
cuucucauagcau

SEQ ID NO: 231345 - RNA, 21 nt, Molluscum contagiosum virus
cuucucgaaaacuguucccau

SEQ ID NO: 231346 - RNA, 13 nt, Molluscum contagiosum virus
cuucucgccagaa

SEQ ID NO: 231347 - RNA, 22 nt, Molluscum contagiosum virus
cuucucgcgagcgccacuagca

SEQ ID NO: 231348 - RNA, 15 nt, Molluscum contagiosum virus
cuuccucuacaccag

SEQ ID NO: 231349 - RNA, 17 nt, Molluscum contagiosum virus
cuuccucuacaccagcu

SEQ ID NO: 231350 - RNA, 20 nt, Molluscum contagiosum virus
cuucggacgcgaacugcccg

SEQ ID NO: 231351 - RNA, 20 nt, Molluscum contagiosum virus
cuucgcuugucgugcuuccu

SEQ ID NO: 231352 - RNA, 20 nt, Molluscum contagiosum virus
cuucgcagacgacucgcugc

SEQ ID NO: 231353 - RNA, 22 nt, Molluscum contagiosum virus
cuucgcagacgacucgcugcca

SEQ ID NO: 231354 - RNA, 18 nt, Molluscum contagiosum virus
cuucgccgugugcgugac

SEQ ID NO: 231355 - RNA, 23 nt, Molluscum contagiosum virus
cuucgcgcaaacaagcagucuca

SEQ ID NO: 231356 - RNA, 10 nt, Molluscum contagiosum virus
cuucugcucg

SEQ ID NO: 231357 - RNA, 14 nt, Molluscum contagiosum virus
cuucugcugcacac

SEQ ID NO: 231358 - RNA, 19 nt, Molluscum contagiosum virus
cuucugaggggcaguguuc

SEQ ID NO: 231359 - RNA, 19 nt, Molluscum contagiosum virus
cuucuucgcaagugcacac

SEQ ID NO: 231360 - RNA, 16 nt, Molluscum contagiosum virus
cuucagugugugauca

SEQ ID NO: 231361 - RNA, 16 nt, Molluscum contagiosum virus
cuuccggagacaccag

SEQ ID NO: 231362 - RNA, 17 nt, Molluscum contagiosum virus
cuuccgcgacgagcuca

SEQ ID NO: 231363 - RNA, 12 nt, Molluscum contagiosum virus
cuuccacauccg

SEQ ID NO: 231364 - RNA, 20 nt, Molluscum contagiosum virus
cuuccaggcgccgcaccuca

SEQ ID NO: 231365 - RNA, 21 nt, Molluscum contagiosum virus
cuucacacagacgugcacaaa

SEQ ID NO: 231366 - RNA, 18 nt, Molluscum contagiosum virus
cuucaagcacgagcugcu

SEQ ID NO: 231367 - RNA, 22 nt, Molluscum contagiosum virus
cuucaagcacgagcugcugcgc

SEQ ID NO: 231368 - RNA, 11 nt, Molluscum contagiosum virus
cuuaugcaucc

SEQ ID NO: 231369 - RNA, 14 nt, Molluscum contagiosum virus
cuccgcagcaggac

SEQ ID NO: 231370 - RNA, 18 nt, Molluscum contagiosum virus
cuccgacgugaccucgcu

SEQ ID NO: 231371 - RNA, 23 nt, Molluscum contagiosum virus
cuccgacgugaccucgcugcuga

SEQ ID NO: 231372 - RNA, 15 nt, Molluscum contagiosum virus
cuccgacgugcugcg

SEQ ID NO: 231373 - RNA, 18 nt, Molluscum contagiosum virus
cucccgucgagcacgauu

SEQ ID NO: 231374 - RNA, 17 nt, Molluscum contagiosum virus
cucccgcacgcaccgcg

SEQ ID NO: 231375 - RNA, 17 nt, Molluscum contagiosum virus
cucauggacaugcucga

SEQ ID NO: 231376 - RNA, 19 nt, Molluscum contagiosum virus
cucaugcgcgggaugcugg

SEQ ID NO: 231377 - RNA, 16 nt, Molluscum contagiosum virus
cucugcgcgagcagcu

SEQ ID NO: 231378 - RNA, 18 nt, Molluscum contagiosum virus
cucugccaccaugcgcac

SEQ ID NO: 231379 - RNA, 15 nt, Molluscum contagiosum virus
cucucguggggagga

SEQ ID NO: 231380 - RNA, 18 nt, Molluscum contagiosum virus
cucucgagagacaacaaa

SEQ ID NO: 231381 - RNA, 20 nt, Molluscum contagiosum virus
cucucgagagacaacaaaca

SEQ ID NO: 231382 - RNA, 13 nt, Molluscum contagiosum virus
cucucgagcacuu

SEQ ID NO: 231383 - RNA, 13 nt, Molluscum contagiosum virus
cucucggcagcgu

SEQ ID NO: 231384 - RNA, 14 nt, Molluscum contagiosum virus
cucucggccaugga

SEQ ID NO: 231385 - RNA, 18 nt, Molluscum contagiosum virus
cucuccgacgugcugcgc

SEQ ID NO: 231386 - RNA, 20 nt, Molluscum contagiosum virus
cucuccgacgugcugcgcaa

SEQ ID NO: 231387 - RNA, 13 nt, Molluscum contagiosum virus
cuccggcuuuauu

SEQ ID NO: 231388 - RNA, 22 nt, Molluscum contagiosum virus
cuccgcuggaccccgagcugcg

SEQ ID NO: 231389 - RNA, 22 nt, Molluscum contagiosum virus
cuccgccgggaauaccggagac

SEQ ID NO: 231390 - RNA, 21 nt, Molluscum contagiosum virus
cuccgcggaggccaagcaaac

SEQ ID NO: 231391 - RNA, 15 nt, Molluscum contagiosum virus
cugagugcugagcca

SEQ ID NO: 231392 - RNA, 22 nt, Molluscum contagiosum virus
cugagugcugagccacaaacac

SEQ ID NO: 231393 - RNA, 16 nt, Molluscum contagiosum virus
cugagccacaaacacu

SEQ ID NO: 231394 - RNA, 16 nt, Molluscum contagiosum virus
cugagccgcaagcaca

SEQ ID NO: 231395 - RNA, 18 nt, Molluscum contagiosum virus
cugagcgcagcacacuug

SEQ ID NO: 231396 - RNA, 17 nt, Molluscum contagiosum virus
cugagcaagcucaagaa

SEQ ID NO: 231397 - RNA, 18 nt, Molluscum contagiosum virus
cugagcaagcucaagaag

SEQ ID NO: 231398 - RNA, 14 nt, Molluscum contagiosum virus
cucuugugaggaaa

SEQ ID NO: 231399 - RNA, 23 nt, Molluscum contagiosum virus
cucugcucgugcccgcacacgca

SEQ ID NO: 231400 - RNA, 22 nt, Molluscum contagiosum virus
cucugcguaagcgccugcacac

SEQ ID NO: 231401 - RNA, 22 nt, Molluscum contagiosum virus
cucuuuuugcgccgcaaaauga

SEQ ID NO: 231402 - RNA, 20 nt, Molluscum contagiosum virus
cugaacaucuucgugcccac

SEQ ID NO: 231403 - RNA, 20 nt, Molluscum contagiosum virus
cugaaaggacaugggcacaa

SEQ ID NO: 231404 - RNA, 21 nt, Molluscum contagiosum virus
cugaaaggacaugggcacaag

SEQ ID NO: 231405 - RNA, 22 nt, Molluscum contagiosum virus
cugaagaaggagcccuugccac

SEQ ID NO: 231406 - RNA, 22 nt, Molluscum contagiosum virus
cuggauggccuugggcacuucc

SEQ ID NO: 231407 - RNA, 22 nt, Molluscum contagiosum virus
cuggauugucuuuuucgaggca

SEQ ID NO: 231408 - RNA, 13 nt, Molluscum contagiosum virus
cugggcacaagcu

SEQ ID NO: 231409 - RNA, 19 nt, Molluscum contagiosum virus
cugggcacaagcuuucuca

SEQ ID NO: 231410 - RNA, 20 nt, Molluscum contagiosum virus
cugggccccuacguggucau

SEQ ID NO: 231411 - RNA, 15 nt, Molluscum contagiosum virus
cugggccugccgcaa

SEQ ID NO: 231412 - RNA, 15 nt, Molluscum contagiosum virus
cugggcgagagcuuu

SEQ ID NO: 231413 - RNA, 19 nt, Molluscum contagiosum virus
cuggagggcagugccaagg

SEQ ID NO: 231414 - RNA, 20 nt, Molluscum contagiosum virus
cuggacugagccgcaagcac

SEQ ID NO: 231415 - RNA, 21 nt, Molluscum contagiosum virus
cuggacgugggcgaacugccc

SEQ ID NO: 231416 - RNA, 19 nt, Molluscum contagiosum virus
cuggacggugcuggugcug

SEQ ID NO: 231417 - RNA, 16 nt, Molluscum contagiosum virus
cuggacgggcacgagc

SEQ ID NO: 231418 - RNA, 23 nt, Molluscum contagiosum virus
cuggggcuggacagcaugaacuc

SEQ ID NO: 231419 - RNA, 16 nt, Molluscum contagiosum virus
cuggggcuagcgcugc

SEQ ID NO: 231420 - RNA, 18 nt, Molluscum contagiosum virus
cuggggauggccacggga

SEQ ID NO: 231421 - RNA, 18 nt, Molluscum contagiosum virus
cugucagaggauucuugc

SEQ ID NO: 231422 - RNA, 13 nt, Molluscum contagiosum virus
cuggucacacugg

SEQ ID NO: 231423 - RNA, 14 nt, Molluscum contagiosum virus
cuggucacacuggu

SEQ ID NO: 231424 - RNA, 21 nt, Molluscum contagiosum virus
cuggucaacagcuacaccgag

SEQ ID NO: 231425 - RNA, 23 nt, Molluscum contagiosum virus
cugcgcgcuaggguccaccugcg

SEQ ID NO: 231426 - RNA, 17 nt, Molluscum contagiosum virus
cugcgcggugagccguu

SEQ ID NO: 231427 - RNA, 21 nt, Molluscum contagiosum virus
cugcauccuggggaaccgcug

SEQ ID NO: 231428 - RNA, 17 nt, Molluscum contagiosum virus
cugcaguaugaaucuac

SEQ ID NO: 231429 - RNA, 23 nt, Molluscum contagiosum virus
cugcaccggcgcgagaugcucgc

SEQ ID NO: 231430 - RNA, 13 nt, Molluscum contagiosum virus
cugcacgacccuc

SEQ ID NO: 231431 - RNA, 14 nt, Molluscum contagiosum virus
cugcacacaccgcg

SEQ ID NO: 231432 - RNA, 13 nt, Molluscum contagiosum virus
cugcacagcuucc

SEQ ID NO: 231433 - RNA, 11 nt, Molluscum contagiosum virus
cugcacaguuc

SEQ ID NO: 231434 - RNA, 19 nt, Molluscum contagiosum virus
cugcagcccuuccacgaca

SEQ ID NO: 231435 - RNA, 15 nt, Molluscum contagiosum virus
cugcaggaaaggcac

SEQ ID NO: 231436 - RNA, 14 nt, Molluscum contagiosum virus
cugcaggaccugcu

SEQ ID NO: 231437 - RNA, 19 nt, Molluscum contagiosum virus
cugcaggcagaagcucauu

SEQ ID NO: 231438 - RNA, 19 nt, Molluscum contagiosum virus
cugcggcgcucgcagcaca

SEQ ID NO: 231439 - RNA, 12 nt, Molluscum contagiosum virus
cugcggcugcug

SEQ ID NO: 231440 - RNA, 14 nt, Molluscum contagiosum virus
cugcgguucacgcc

SEQ ID NO: 231441 - RNA, 13 nt, Molluscum contagiosum virus
cugcggcaaccgc

SEQ ID NO: 231442 - RNA, 20 nt, Molluscum contagiosum virus
cugcgcguggaggacaccgc

SEQ ID NO: 231443 - RNA, 21 nt, Molluscum contagiosum virus
cugcgcucgccugcuugucug

SEQ ID NO: 231444 - RNA, 17 nt, Molluscum contagiosum virus
cugcgcuggaugcugcu

SEQ ID NO: 231445 - RNA, 18 nt, Molluscum contagiosum virus
cugcgucacaagcaccgc

SEQ ID NO: 231446 - RNA, 19 nt, Molluscum contagiosum virus
cugcuaacaacaugagggg

SEQ ID NO: 231447 - RNA, 17 nt, Molluscum contagiosum virus
cugcucgugcccgcaca

SEQ ID NO: 231448 - RNA, 21 nt, Molluscum contagiosum virus
cugcucuacuuccacgagcug

SEQ ID NO: 231449 - RNA, 19 nt, Molluscum contagiosum virus
cugcucaucggcgagcucu

SEQ ID NO: 231450 - RNA, 15 nt, Molluscum contagiosum virus
cugcuccgugcccac

SEQ ID NO: 231451 - RNA, 20 nt, Molluscum contagiosum virus
cugcuccgugcccacgagcg

SEQ ID NO: 231452 - RNA, 15 nt, Molluscum contagiosum virus
cugcucgcacccgcg

SEQ ID NO: 231453 - RNA, 23 nt, Molluscum contagiosum virus
cugcucgcacccgcgccgcggcg

SEQ ID NO: 231454 - RNA, 21 nt, Molluscum contagiosum virus
cugcucaaggacuaccagcuc

SEQ ID NO: 231455 - RNA, 13 nt, Molluscum contagiosum virus
cugcuacaugcac

SEQ ID NO: 231456 - RNA, 15 nt, Molluscum contagiosum virus
cugcuacaugcacag

SEQ ID NO: 231457 - RNA, 16 nt, Molluscum contagiosum virus
gccagguguuccugcc

SEQ ID NO: 231458 - RNA, 17 nt, Molluscum contagiosum virus
gccagugcgugcacugu

SEQ ID NO: 231459 - RNA, 15 nt, Molluscum contagiosum virus
gccaggcacuggccc

SEQ ID NO: 231460 - RNA, 22 nt, Molluscum contagiosum virus
gccagcgagugauccuugccaa

SEQ ID NO: 231461 - RNA, 20 nt, Molluscum contagiosum virus
gccagcgcgcccaccagcag

SEQ ID NO: 231462 - RNA, 14 nt, Molluscum contagiosum virus
gccaggaacaucag

SEQ ID NO: 231463 - RNA, 18 nt, Molluscum contagiosum virus
gccaggcaacgcacaaaa

SEQ ID NO: 231464 - RNA, 16 nt, Molluscum contagiosum virus
gccaucuccaagcacg

SEQ ID NO: 231465 - RNA, 17 nt, Molluscum contagiosum virus
gccaugaucauggcgcc

SEQ ID NO: 231466 - RNA, 20 nt, Molluscum contagiosum virus
gccauggaggcgcuagugca

SEQ ID NO: 231467 - RNA, 22 nt, Molluscum contagiosum virus
gccauggaggcgcuagugcaga

SEQ ID NO: 231468 - RNA, 16 nt, Molluscum contagiosum virus
gccaccucgcacgugu

SEQ ID NO: 231469 - RNA, 20 nt, Molluscum contagiosum virus
gccacgaccgcgcacgcagc

SEQ ID NO: 231470 - RNA, 22 nt, Molluscum contagiosum virus
gccacgcgcaugaggcggcgca

SEQ ID NO: 231471 - RNA, 14 nt, Molluscum contagiosum virus
gccagaagugaaau

SEQ ID NO: 231472 - RNA, 17 nt, Molluscum contagiosum virus
gccagaagugaaauuuc

SEQ ID NO: 231473 - RNA, 18 nt, Molluscum contagiosum virus
gccagaagugaaauuuca

SEQ ID NO: 231474 - RNA, 23 nt, Molluscum contagiosum virus
gccagagauccgcccgcgcuucu

SEQ ID NO: 231475 - RNA, 11 nt, Molluscum contagiosum virus
gcauguucucu

SEQ ID NO: 231476 - RNA, 21 nt, Molluscum contagiosum virus
gcauguccuuggcggugcgca

SEQ ID NO: 231477 - RNA, 17 nt, Molluscum contagiosum virus
gcaugguugugcuuguu

SEQ ID NO: 231478 - RNA, 22 nt, Molluscum contagiosum virus
gcaugguugugcuuguucucuu

SEQ ID NO: 231479 - RNA, 22 nt, Molluscum contagiosum virus
gcaugguggcgauccuguccau

SEQ ID NO: 231480 - RNA, 13 nt, Molluscum contagiosum virus
gccacaaacacuc

SEQ ID NO: 231481 - RNA, 16 nt, Molluscum contagiosum virus
gccaauaucacgccgg

SEQ ID NO: 231482 - RNA, 15 nt, Molluscum contagiosum virus
gccaagaacaagcuc

SEQ ID NO: 231483 - RNA, 17 nt, Molluscum contagiosum virus
gccaagaggacgagcug

SEQ ID NO: 231484 - RNA, 18 nt, Molluscum contagiosum virus
gccaaagcucucuuagca

SEQ ID NO: 231485 - RNA, 14 nt, Molluscum contagiosum virus
gccaaagucuuccu

SEQ ID NO: 231486 - RNA, 12 nt, Molluscum contagiosum virus
gccaacaaccac

SEQ ID NO: 231487 - RNA, 20 nt, Molluscum contagiosum virus
gcauccggcacgcacaaagu

SEQ ID NO: 231488 - RNA, 18 nt, Molluscum contagiosum virus
gcaucccugccacaugca

SEQ ID NO: 231489 - RNA, 17 nt, Molluscum contagiosum virus
gcaucuagccuccuugu

SEQ ID NO: 231490 - RNA, 15 nt, Molluscum contagiosum virus
gcauggacauccuca

SEQ ID NO: 231491 - RNA, 22 nt, Molluscum contagiosum virus
gcauggggaacagcuuggcaca

SEQ ID NO: 231492 - RNA, 21 nt, Molluscum contagiosum virus
gcaugcgcccucacgugcuga

SEQ ID NO: 231493 - RNA, 17 nt, Molluscum contagiosum virus
gcaugcgccugcacuuc

SEQ ID NO: 231494 - RNA, 15 nt, Molluscum contagiosum virus
gcaugcgcgcagugc

SEQ ID NO: 231495 - RNA, 18 nt, Molluscum contagiosum virus
gcaugcgguguguguucu

SEQ ID NO: 231496 - RNA, 23 nt, Molluscum contagiosum virus
gcaucuucuuguuguugugacac

SEQ ID NO: 231497 - RNA, 22 nt, Molluscum contagiosum virus
gcaugcagucacgacuguguuc

SEQ ID NO: 231498 - RNA, 16 nt, Molluscum contagiosum virus
gcaucagcaacaagcu

SEQ ID NO: 231499 - RNA, 13 nt, Molluscum contagiosum virus
gcauagucaucaa

SEQ ID NO: 231500 - RNA, 18 nt, Molluscum contagiosum virus
gcauaccagauguucucg

SEQ ID NO: 231501 - RNA, 14 nt, Molluscum contagiosum virus
gcagugcugcgcga

SEQ ID NO: 231502 - RNA, 20 nt, Molluscum contagiosum virus
gcagugccgcugagagacuu

SEQ ID NO: 231503 - RNA, 22 nt, Molluscum contagiosum virus
gcagacaacaccagcgugcccu

SEQ ID NO: 231504 - RNA, 12 nt, Molluscum contagiosum virus
gcagaagccaac

SEQ ID NO: 231505 - RNA, 16 nt, Molluscum contagiosum virus
gcagcagcgugcauag

SEQ ID NO: 231506 - RNA, 23 nt, Molluscum contagiosum virus
gcagcagcuccagcauggcgcca

SEQ ID NO: 231507 - RNA, 23 nt, Molluscum contagiosum virus
gcagcaggugcacgugcugcagc

SEQ ID NO: 231508 - RNA, 21 nt, Molluscum contagiosum virus
gcagcgacuacgcgcugcuag

SEQ ID NO: 231509 - RNA, 22 nt, Molluscum contagiosum virus
gcagcgccgcgcgcgcgcguga

SEQ ID NO: 231510 - RNA, 16 nt, Molluscum contagiosum virus
gcagcgcgaagcucau

SEQ ID NO: 231511 - RNA, 12 nt, Molluscum contagiosum virus
gcagcaugcuca

SEQ ID NO: 231512 - RNA, 23 nt, Molluscum contagiosum virus
gcagccgcacaaccacagcucuc

SEQ ID NO: 231513 - RNA, 20 nt, Molluscum contagiosum virus
gcagccgcugcugcugcaaa

SEQ ID NO: 231514 - RNA, 16 nt, Molluscum contagiosum virus
gcagcuuuuuauucuc

SEQ ID NO: 231515 - RNA, 17 nt, Molluscum contagiosum virus
gcaggaaaggcacccgc

SEQ ID NO: 231516 - RNA, 22 nt, Molluscum contagiosum virus
gcaggaaagguaccccgcagga

SEQ ID NO: 231517 - RNA, 12 nt, Molluscum contagiosum virus
gcagcuacugcg

SEQ ID NO: 231518 - RNA, 19 nt, Molluscum contagiosum virus
gcagcuacugcgugcgauu

SEQ ID NO: 231519 - RNA, 13 nt, Molluscum contagiosum virus
gcagcucacgaga

SEQ ID NO: 231520 - RNA, 14 nt, Molluscum contagiosum virus
gcagcguuccagga

SEQ ID NO: 231521 - RNA, 15 nt, Molluscum contagiosum virus
gcagcguuccaggaa

SEQ ID NO: 231522 - RNA, 12 nt, Molluscum contagiosum virus
gcagcugcgcca

SEQ ID NO: 231523 - RNA, 18 nt, Molluscum contagiosum virus
gcaggaguccgugacaga

SEQ ID NO: 231524 - RNA, 16 nt, Molluscum contagiosum virus
gcaggcacaaaacaca

SEQ ID NO: 231525 - RNA, 13 nt, Molluscum contagiosum virus
gcaggacacugua

SEQ ID NO: 231526 - RNA, 21 nt, Molluscum contagiosum virus
gcaggaccugcugguggugcu

SEQ ID NO: 231527 - RNA, 19 nt, Molluscum contagiosum virus
gcaggaccuggcuggcgcu

SEQ ID NO: 231528 - RNA, 14 nt, Molluscum contagiosum virus
gcaggagcagucuc

SEQ ID NO: 231529 - RNA, 17 nt, Molluscum contagiosum virus
gcaggacgugcacgugg

SEQ ID NO: 231530 - RNA, 14 nt, Molluscum contagiosum virus
gcagucagauugua

SEQ ID NO: 231531 - RNA, 15 nt, Molluscum contagiosum virus
gcagugcaccagcac

SEQ ID NO: 231532 - RNA, 18 nt, Molluscum contagiosum virus
gcagucacgacuguguuc

SEQ ID NO: 231533 - RNA, 14 nt, Molluscum contagiosum virus
gcagguugaagcuc

SEQ ID NO: 231534 - RNA, 22 nt, Molluscum contagiosum virus
gcagguaggccaugaucauggc

SEQ ID NO: 231535 - RNA, 18 nt, Molluscum contagiosum virus
gcaggugcacgugcugca

SEQ ID NO: 231536 - RNA, 13 nt, Molluscum contagiosum virus
gcaguacgugaca

SEQ ID NO: 231537 - RNA, 16 nt, Molluscum contagiosum virus
gcaguaccaguaccug

SEQ ID NO: 231538 - RNA, 17 nt, Molluscum contagiosum virus
gauuuucaccggaacaa

SEQ ID NO: 231539 - RNA, 17 nt, Molluscum contagiosum virus
gauucacaucuugcuau

SEQ ID NO: 231540 - RNA, 22 nt, Molluscum contagiosum virus
gcaacagcacgacgaagaaggu

SEQ ID NO: 231541 - RNA, 18 nt, Molluscum contagiosum virus
gcaacaugcggagacugu

SEQ ID NO: 231542 - RNA, 19 nt, Molluscum contagiosum virus
gcaacgcaggacacuguaa

SEQ ID NO: 231543 - RNA, 15 nt, Molluscum contagiosum virus
gcaacgacaaggaaa

SEQ ID NO: 231544 - RNA, 17 nt, Molluscum contagiosum virus
gcaaacacgagacugag

SEQ ID NO: 231545 - RNA, 18 nt, Molluscum contagiosum virus
gcaaacacgagacugagu

SEQ ID NO: 231546 - RNA, 22 nt, Molluscum contagiosum virus
gcacuucgcagacgacucgcug

SEQ ID NO: 231547 - RNA, 17 nt, Molluscum contagiosum virus
gcacugacgguacucau

SEQ ID NO: 231548 - RNA, 18 nt, Molluscum contagiosum virus
gcacugucguaacaaugg

SEQ ID NO: 231549 - RNA, 22 nt, Molluscum contagiosum virus
gcagaaacagccgugcuccgag

SEQ ID NO: 231550 - RNA, 21 nt, Molluscum contagiosum virus
gcacucaauucaaguuugaca

SEQ ID NO: 231551 - RNA, 14 nt, Molluscum contagiosum virus
gcacucguggcaac

SEQ ID NO: 231552 - RNA, 18 nt, Molluscum contagiosum virus
gcacucguggcaacaaca

SEQ ID NO: 231553 - RNA, 15 nt, Molluscum contagiosum virus
gcacccgcaggaaag

SEQ ID NO: 231554 - RNA, 18 nt, Molluscum contagiosum virus
gcacccgcaggaaaggca

SEQ ID NO: 231555 - RNA, 14 nt, Molluscum contagiosum virus
gcaccagcugcaaa

SEQ ID NO: 231556 - RNA, 21 nt, Molluscum contagiosum virus
gcaccagucucgaugugacaa

SEQ ID NO: 231557 - RNA, 22 nt, Molluscum contagiosum virus
gcaccagucucgaugugacaac

SEQ ID NO: 231558 - RNA, 23 nt, Molluscum contagiosum virus
gcaccagucucgaugugacaaca

SEQ ID NO: 231559 - RNA, 13 nt, Molluscum contagiosum virus
gcaccaucuucaa

SEQ ID NO: 231560 - RNA, 11 nt, Molluscum contagiosum virus
gcacaguccaa

SEQ ID NO: 231561 - RNA, 17 nt, Molluscum contagiosum virus
gcacauccgcuaccugg

SEQ ID NO: 231562 - RNA, 17 nt, Molluscum contagiosum virus
gcacaucggcacugcuc

SEQ ID NO: 231563 - RNA, 15 nt, Molluscum contagiosum virus
gcacaucucucaggg

SEQ ID NO: 231564 - RNA, 20 nt, Molluscum contagiosum virus
gcacaugcgcuucggcuccc

SEQ ID NO: 231565 - RNA, 16 nt, Molluscum contagiosum virus
gcacauucucaaccau

SEQ ID NO: 231566 - RNA, 18 nt, Molluscum contagiosum virus
gcacagccccugcugcuc

SEQ ID NO: 231567 - RNA, 17 nt, Molluscum contagiosum virus
gcaagagcucguggaca

SEQ ID NO: 231568 - RNA, 23 nt, Molluscum contagiosum virus
gcaagaacgacugcuacaugcac

SEQ ID NO: 231569 - RNA, 18 nt, Molluscum contagiosum virus
gcaagaaacgggagucac

SEQ ID NO: 231570 - RNA, 13 nt, Molluscum contagiosum virus
gcaagaacaacca

SEQ ID NO: 231571 - RNA, 14 nt, Molluscum contagiosum virus
gcaagaacaaccag

SEQ ID NO: 231572 - RNA, 16 nt, Molluscum contagiosum virus
gcaacugccugcgcua

SEQ ID NO: 231573 - RNA, 22 nt, Molluscum contagiosum virus
gaguacgccagcgcgcgccuug

SEQ ID NO: 231574 - RNA, 14 nt, Molluscum contagiosum virus
gagguggcggagga

SEQ ID NO: 231575 - RNA, 21 nt, Molluscum contagiosum virus
gaggggagccagccucucucg

SEQ ID NO: 231576 - RNA, 21 nt, Molluscum contagiosum virus
gagggcgauacaaaacaugcu

SEQ ID NO: 231577 - RNA, 17 nt, Molluscum contagiosum virus
gaggguggcuugcugca

SEQ ID NO: 231578 - RNA, 22 nt, Molluscum contagiosum virus
gagguacugccgccaggaaaac

SEQ ID NO: 231579 - RNA, 20 nt, Molluscum contagiosum virus
gaucccggaacgcaaguaca

SEQ ID NO: 231580 - RNA, 21 nt, Molluscum contagiosum virus
gauccgacuccuuccggagac

SEQ ID NO: 231581 - RNA, 17 nt, Molluscum contagiosum virus
gauaguuuggacgagcu

SEQ ID NO: 231582 - RNA, 18 nt, Molluscum contagiosum virus
gauaguuuggacgagcug

SEQ ID NO: 231583 - RNA, 17 nt, Molluscum contagiosum virus
gauggaaggcgaccagc

SEQ ID NO: 231584 - RNA, 22 nt, Molluscum contagiosum virus
gauggaaggcgaccagcugguc

SEQ ID NO: 231585 - RNA, 18 nt, Molluscum contagiosum virus
gauggacaaagaugcagc

SEQ ID NO: 231586 - RNA, 13 nt, Molluscum contagiosum virus
gauggacacagca

SEQ ID NO: 231587 - RNA, 14 nt, Molluscum contagiosum virus
gauggacgccagcu

SEQ ID NO: 231588 - RNA, 15 nt, Molluscum contagiosum virus
gaugcucuacgugcu

SEQ ID NO: 231589 - RNA, 22 nt, Molluscum contagiosum virus
gaugcugcgcguggaguacagc

SEQ ID NO: 231590 - RNA, 13 nt, Molluscum contagiosum virus
gaugcgcacacuu

SEQ ID NO: 231591 - RNA, 17 nt, Molluscum contagiosum virus
gaugcgcacacuugcgc

SEQ ID NO: 231592 - RNA, 14 nt, Molluscum contagiosum virus
gaugcacacacucg

SEQ ID NO: 231593 - RNA, 22 nt, Molluscum contagiosum virus
gaucucgcgcacgaccacgugc

SEQ ID NO: 231594 - RNA, 15 nt, Molluscum contagiosum virus
gaucguuuugcacuu

SEQ ID NO: 231595 - RNA, 17 nt, Molluscum contagiosum virus
gaucggacucagcaugu

SEQ ID NO: 231596 - RNA, 16 nt, Molluscum contagiosum virus
gaacuacuuccugcag

SEQ ID NO: 231597 - RNA, 23 nt, Molluscum contagiosum virus
gaacugcugcgcgcuagggucca

SEQ ID NO: 231598 - RNA, 17 nt, Molluscum contagiosum virus
gaacugcccgaguuccu

SEQ ID NO: 231599 - RNA, 14 nt, Molluscum contagiosum virus
gaacuucuacgcca

SEQ ID NO: 231600 - RNA, 20 nt, Molluscum contagiosum virus
gaacucuacgacaugcucgc

SEQ ID NO: 231601 - RNA, 21 nt, Molluscum contagiosum virus
gaacucucaucgagcaccuca

SEQ ID NO: 231602 - RNA, 14 nt, Molluscum contagiosum virus
gaacugacugcugc

SEQ ID NO: 231603 - RNA, 21 nt, Molluscum contagiosum virus
gaacuccaggcgcaccuugac

SEQ ID NO: 231604 - RNA, 19 nt, Molluscum contagiosum virus
gaacaggugcgcaagcauu

SEQ ID NO: 231605 - RNA, 21 nt, Molluscum contagiosum virus
gaacagcacguuguucuugcg

SEQ ID NO: 231606 - RNA, 16 nt, Molluscum contagiosum virus
gaacagagaaaggcac

SEQ ID NO: 231607 - RNA, 20 nt, Molluscum contagiosum virus
cuugauaaaagcacagucca

SEQ ID NO: 231608 - RNA, 13 nt, Molluscum contagiosum virus
cuugaugcuguua

SEQ ID NO: 231609 - RNA, 20 nt, Molluscum contagiosum virus
cuugaugcuguuacuugcac

SEQ ID NO: 231610 - RNA, 17 nt, Molluscum contagiosum virus
cuugacgcgagacugug

SEQ ID NO: 231611 - RNA, 18 nt, Molluscum contagiosum virus
cuugacgcgagacugugc

SEQ ID NO: 231612 - RNA, 17 nt, Molluscum contagiosum virus
cuuggcgcugcacaguu

SEQ ID NO: 231613 - RNA, 19 nt, Molluscum contagiosum virus
cuuggcgcugcacaguuca

SEQ ID NO: 231614 - RNA, 20 nt, Molluscum contagiosum virus
cuuggcggcgcggcuagcac

SEQ ID NO: 231615 - RNA, 17 nt, Molluscum contagiosum virus
cuuggcgagcgcugccg

SEQ ID NO: 231616 - RNA, 18 nt, Molluscum contagiosum virus
gaaaucccaagagccaug

SEQ ID NO: 231617 - RNA, 17 nt, Molluscum contagiosum virus
cuugguggugaccgaga

SEQ ID NO: 231618 - RNA, 14 nt, Molluscum contagiosum virus
gaaaggcacccgca

SEQ ID NO: 231619 - RNA, 15 nt, Molluscum contagiosum virus
gacagcaaacagccu

SEQ ID NO: 231620 - RNA, 17 nt, Molluscum contagiosum virus
gacacugcgaaggucau

SEQ ID NO: 231621 - RNA, 16 nt, Molluscum contagiosum virus
gacacuguaaucguca

SEQ ID NO: 231622 - RNA, 11 nt, Molluscum contagiosum virus
gacacuugcuc

SEQ ID NO: 231623 - RNA, 23 nt, Molluscum contagiosum virus
gacagucagcggcgugcugcagc

SEQ ID NO: 231624 - RNA, 15 nt, Molluscum contagiosum virus
gacagucuagugcgu

SEQ ID NO: 231625 - RNA, 16 nt, Molluscum contagiosum virus
gacaggggccacaagc

SEQ ID NO: 231626 - RNA, 18 nt, Molluscum contagiosum virus
gacaggggccacaagcac

SEQ ID NO: 231627 - RNA, 20 nt, Molluscum contagiosum virus
gacaggcgcgcaagugcgug

SEQ ID NO: 231628 - RNA, 22 nt, Molluscum contagiosum virus
gacagcucagcaggcuguguuc

SEQ ID NO: 231629 - RNA, 17 nt, Molluscum contagiosum virus
gacagcacggcacgugc

SEQ ID NO: 231630 - RNA, 16 nt, Molluscum contagiosum virus
gacagcggauagcuuu

SEQ ID NO: 231631 - RNA, 15 nt, Molluscum contagiosum virus
gacagcgacgagauc

SEQ ID NO: 231632 - RNA, 19 nt, Molluscum contagiosum virus
gaaugcguguggugacucg

SEQ ID NO: 231633 - RNA, 22 nt, Molluscum contagiosum virus
gaauaaauggacgaggcucagc

SEQ ID NO: 231634 - RNA, 18 nt, Molluscum contagiosum virus
gaaguucaucuacugcga

SEQ ID NO: 231635 - RNA, 22 nt, Molluscum contagiosum virus
gaagucgcagcagcggucucgg

SEQ ID NO: 231636 - RNA, 21 nt, Molluscum contagiosum virus
gaagucguuccggacgugcac

SEQ ID NO: 231637 - RNA, 23 nt, Molluscum contagiosum virus
gaagugcgagccgugaccuucgu

SEQ ID NO: 231638 - RNA, 13 nt, Molluscum contagiosum virus
gaagugcuccgca

SEQ ID NO: 231639 - RNA, 17 nt, Molluscum contagiosum virus
gaagugcuccgcacgug

SEQ ID NO: 231640 - RNA, 19 nt, Molluscum contagiosum virus
gaagugcuccgcacgugga

SEQ ID NO: 231641 - RNA, 19 nt, Molluscum contagiosum virus
gaagaaggagcccuugcca

SEQ ID NO: 231642 - RNA, 14 nt, Molluscum contagiosum virus
gaagaaacagccau

SEQ ID NO: 231643 - RNA, 14 nt, Molluscum contagiosum virus
gaagaccacauccu

SEQ ID NO: 231644 - RNA, 19 nt, Molluscum contagiosum virus
gaagaggccagcacaagcc

SEQ ID NO: 231645 - RNA, 15 nt, Molluscum contagiosum virus
gaagagcgugucagc

SEQ ID NO: 231646 - RNA, 15 nt, Molluscum contagiosum virus
gacccucuucgacuu

SEQ ID NO: 231647 - RNA, 23 nt, Molluscum contagiosum virus
gaccgcgaacugcaacgugagua

SEQ ID NO: 231648 - RNA, 12 nt, Molluscum contagiosum virus
gaccuggcgcgu

SEQ ID NO: 231649 - RNA, 12 nt, Molluscum contagiosum virus
gacgacaugcac

SEQ ID NO: 231650 - RNA, 18 nt, Molluscum contagiosum virus
gacgacaugcacacgcac

SEQ ID NO: 231651 - RNA, 20 nt, Molluscum contagiosum virus
gacgaccgucacgacucuca

SEQ ID NO: 231652 - RNA, 14 nt, Molluscum contagiosum virus
gacgacgagcacua

SEQ ID NO: 231653 - RNA, 18 nt, Molluscum contagiosum virus
gacgacgaugcaaacaug

SEQ ID NO: 231654 - RNA, 19 nt, Molluscum contagiosum virus
gaccucgcugcugagcccu

SEQ ID NO: 231655 - RNA, 19 nt, Molluscum contagiosum virus
gaccucggucaacggcaca

SEQ ID NO: 231656 - RNA, 17 nt, Molluscum contagiosum virus
gacuacuacguggugcg

SEQ ID NO: 231657 - RNA, 23 nt, Molluscum contagiosum virus
gacuagcauuccuucacacagac

SEQ ID NO: 231658 - RNA, 14 nt, Molluscum contagiosum virus
gacuacgcacuggc

SEQ ID NO: 231659 - RNA, 20 nt, Molluscum contagiosum virus
gacuacgcgcugcuagagaa

SEQ ID NO: 231660 - RNA, 14 nt, Molluscum contagiosum virus
gacguuuucuuugc

SEQ ID NO: 231661 - RNA, 17 nt, Molluscum contagiosum virus
gacguguacgugcuugc

SEQ ID NO: 231662 - RNA, 15 nt, Molluscum contagiosum virus
gacgagcugcuaaca

SEQ ID NO: 231663 - RNA, 17 nt, Molluscum contagiosum virus
gacgacuucggcgcaac

SEQ ID NO: 231664 - RNA, 15 nt, Molluscum contagiosum virus
gacgagcgcuaccug

SEQ ID NO: 231665 - RNA, 21 nt, Molluscum contagiosum virus
gacgaacggaacacagugcgu

SEQ ID NO: 231666 - RNA, 16 nt, Molluscum contagiosum virus
gaccuuggacacgugc

SEQ ID NO: 231667 - RNA, 21 nt, Molluscum contagiosum virus
gacgccgucgucaacaacacg

SEQ ID NO: 231668 - RNA, 21 nt, Molluscum contagiosum virus
gacgccuuccugcuggcgcgc

SEQ ID NO: 231669 - RNA, 21 nt, Molluscum contagiosum virus
gacgcccuccucgaccugcac

SEQ ID NO: 231670 - RNA, 15 nt, Molluscum contagiosum virus
gacgcacgcuugccu

SEQ ID NO: 231671 - RNA, 22 nt, Molluscum contagiosum virus
gacgccagcgcgcccaccagca

SEQ ID NO: 231672 - RNA, 16 nt, Molluscum contagiosum virus
gacccagcaaggccca

SEQ ID NO: 231673 - RNA, 22 nt, Molluscum contagiosum virus
gacccaucggagaagugcuccg

SEQ ID NO: 231674 - RNA, 12 nt, Molluscum contagiosum virus
gaccccaagaag

SEQ ID NO: 231675 - RNA, 20 nt, Molluscum contagiosum virus
gaccaguacaucaccgccau

SEQ ID NO: 231676 - RNA, 22 nt, Molluscum contagiosum virus
gaccaaggacuucgagaccuac

SEQ ID NO: 231677 - RNA, 12 nt, Molluscum contagiosum virus
gaccacgugcag

SEQ ID NO: 231678 - RNA, 17 nt, Molluscum contagiosum virus
gaccacgcuggcacggc

SEQ ID NO: 231679 - RNA, 17 nt, Molluscum contagiosum virus
gacauaguaccaugacg

SEQ ID NO: 231680 - RNA, 16 nt, Molluscum contagiosum virus
gacauggucaaccucu

SEQ ID NO: 231681 - RNA, 23 nt, Molluscum contagiosum virus
gacauggucaaccucuacacgca

SEQ ID NO: 231682 - RNA, 22 nt, Molluscum contagiosum virus
gacuccuuccggagacaccagc

SEQ ID NO: 231683 - RNA, 23 nt, Molluscum contagiosum virus
gacuucgacgcgcggcagacgcc

SEQ ID NO: 231684 - RNA, 20 nt, Molluscum contagiosum virus
gagaaaucccaagagccaug

SEQ ID NO: 231685 - RNA, 23 nt, Molluscum contagiosum virus
gacuuugcgaaggaacccgcgga

SEQ ID NO: 231686 - RNA, 23 nt, Molluscum contagiosum virus
gacuuugacuacuacguggugcg

SEQ ID NO: 231687 - RNA, 19 nt, Molluscum contagiosum virus
gacuugcugcggagcgccu

SEQ ID NO: 231688 - RNA, 19 nt, Molluscum contagiosum virus
gagaucaugggcgugcuca

SEQ ID NO: 231689 - RNA, 21 nt, Molluscum contagiosum virus
gagaucccuccgagacgucug

SEQ ID NO: 231690 - RNA, 14 nt, Molluscum contagiosum virus
gagaugauguaguc

SEQ ID NO: 231691 - RNA, 18 nt, Molluscum contagiosum virus
gagaugcgccgcaaaaug

SEQ ID NO: 231692 - RNA, 18 nt, Molluscum contagiosum virus
gagaugcucaagcacugc

SEQ ID NO: 231693 - RNA, 17 nt, Molluscum contagiosum virus
gagcaaagacguguguu

SEQ ID NO: 231694 - RNA, 14 nt, Molluscum contagiosum virus
gagcaagcucaaga

SEQ ID NO: 231695 - RNA, 23 nt, Molluscum contagiosum virus
gagcaauugcugggcacaagcuu

SEQ ID NO: 231696 - RNA, 18 nt, Molluscum contagiosum virus
gagaacucuacacgugga

SEQ ID NO: 231697 - RNA, 23 nt, Molluscum contagiosum virus
gagaaccugugcgcgguggugcu

SEQ ID NO: 231698 - RNA, 14 nt, Molluscum contagiosum virus
gagauacaaccgcu

SEQ ID NO: 231699 - RNA, 18 nt, Molluscum contagiosum virus
gagauacaaccgcugcua

SEQ ID NO: 231700 - RNA, 13 nt, Molluscum contagiosum virus
gagaucaggcagc

SEQ ID NO: 231701 - RNA, 19 nt, Molluscum contagiosum virus
gagaaaugcgcacacuugc

SEQ ID NO: 231702 - RNA, 18 nt, Molluscum contagiosum virus
gagaacaacuacuucgag

SEQ ID NO: 231703 - RNA, 22 nt, Molluscum contagiosum virus
gagcuagcgcgcgccgacgugc

SEQ ID NO: 231704 - RNA, 22 nt, Molluscum contagiosum virus
gagcguugucuugaugcuguua

SEQ ID NO: 231705 - RNA, 17 nt, Molluscum contagiosum virus
gagcuagugccgagcuc

SEQ ID NO: 231706 - RNA, 13 nt, Molluscum contagiosum virus
gagcucacaggua

SEQ ID NO: 231707 - RNA, 13 nt, Molluscum contagiosum virus
gagcucacgccgg

SEQ ID NO: 231708 - RNA, 16 nt, Molluscum contagiosum virus
gagcucacgccggacc

SEQ ID NO: 231709 - RNA, 19 nt, Molluscum contagiosum virus
gagcgugcuggucaacagc

SEQ ID NO: 231710 - RNA, 14 nt, Molluscum contagiosum virus
gagcgcgugcucuu

SEQ ID NO: 231711 - RNA, 13 nt, Molluscum contagiosum virus
gagcgcuaccuga

SEQ ID NO: 231712 - RNA, 21 nt, Molluscum contagiosum virus
gagcgcuaccugaugcgcaug

SEQ ID NO: 231713 - RNA, 21 nt, Molluscum contagiosum virus
gagcggcauucgaaccuggaa

SEQ ID NO: 231714 - RNA, 19 nt, Molluscum contagiosum virus
gagcggcaagccgugcuuu

SEQ ID NO: 231715 - RNA, 18 nt, Molluscum contagiosum virus
gagccuggucgagaacaa

SEQ ID NO: 231716 - RNA, 21 nt, Molluscum contagiosum virus
gagcgcgcuggacuugcgcga

SEQ ID NO: 231717 - RNA, 15 nt, Molluscum contagiosum virus
gagcgcggcaacagc

SEQ ID NO: 231718 - RNA, 18 nt, Molluscum contagiosum virus
gagcagauucacgagcuc

SEQ ID NO: 231719 - RNA, 21 nt, Molluscum contagiosum virus
gagcagcaccgcacgccagca

SEQ ID NO: 231720 - RNA, 17 nt, Molluscum contagiosum virus
gagcagaggcaugcuuu

SEQ ID NO: 231721 - RNA, 21 nt, Molluscum contagiosum virus
gagcagccccguaggcgggcc

SEQ ID NO: 231722 - RNA, 14 nt, Molluscum contagiosum virus
gagcacgccuccaa

SEQ ID NO: 231723 - RNA, 18 nt, Molluscum contagiosum virus
gagcacgccugcacgcgc

SEQ ID NO: 231724 - RNA, 18 nt, Molluscum contagiosum virus
gagcacguggacagcauc

SEQ ID NO: 231725 - RNA, 22 nt, Molluscum contagiosum virus
gagcucgcgcgccagcacgcgc

SEQ ID NO: 231726 - RNA, 17 nt, Molluscum contagiosum virus
gagcucgcgucaucgcu

SEQ ID NO: 231727 - RNA, 17 nt, Molluscum contagiosum virus
gagcugccgcugcgcga

SEQ ID NO: 231728 - RNA, 16 nt, Molluscum contagiosum virus
gagcugcggcgcgugc

SEQ ID NO: 231729 - RNA, 15 nt, Molluscum contagiosum virus
gagcuggccacucuc

SEQ ID NO: 231730 - RNA, 22 nt, Molluscum contagiosum virus
gagcuggccgaagucgcagcag

SEQ ID NO: 231731 - RNA, 20 nt, Molluscum contagiosum virus
gagcugcugcgcgaguaccu

SEQ ID NO: 231732 - RNA, 15 nt, Molluscum contagiosum virus
gagcuucgucuucac

SEQ ID NO: 231733 - RNA, 13 nt, Molluscum contagiosum virus
gagcugugccaac

SEQ ID NO: 231734 - RNA, 22 nt, Molluscum contagiosum virus
gagcugugccgcagcaacccgc

SEQ ID NO: 231735 - RNA, 19 nt, Molluscum contagiosum virus
gagcugugcgagccaguuu

SEQ ID NO: 231736 - RNA, 12 nt, Molluscum contagiosum virus
gaggacuaccug

SEQ ID NO: 231737 - RNA, 21 nt, Molluscum contagiosum virus
gaggaaagcgcacacuugcgc

SEQ ID NO: 231738 - RNA, 14 nt, Molluscum contagiosum virus
gaggaccacgccga

SEQ ID NO: 231739 - RNA, 21 nt, Molluscum contagiosum virus
gaggacgaaaucgcaaagcac

SEQ ID NO: 231740 - RNA, 21 nt, Molluscum contagiosum virus
gaggagauggaacugcagcag

SEQ ID NO: 231741 - RNA, 13 nt, Molluscum contagiosum virus
uacacguggaauu

SEQ ID NO: 231742 - RNA, 14 nt, Molluscum contagiosum virus
uacacgccgggaaa

SEQ ID NO: 231743 - RNA, 14 nt, Molluscum contagiosum virus
uacacuuccugcua

SEQ ID NO: 231744 - RNA, 17 nt, Molluscum contagiosum virus
uacacuuccugcuagaa

SEQ ID NO: 231745 - RNA, 23 nt, Molluscum contagiosum virus
uacacauuccucggcgcacacuc

SEQ ID NO: 231746 - RNA, 13 nt, Molluscum contagiosum virus
uaccagcucguca

SEQ ID NO: 231747 - RNA, 16 nt, Molluscum contagiosum virus
uaccacagccauuaac

SEQ ID NO: 231748 - RNA, 16 nt, Molluscum contagiosum virus
uaccacagguuucuca

SEQ ID NO: 231749 - RNA, 23 nt, Molluscum contagiosum virus
uaccacagguuucucaacaugaa

SEQ ID NO: 231750 - RNA, 21 nt, Molluscum contagiosum virus
uacccuuggcagcaacugcac

SEQ ID NO: 231751 - RNA, 17 nt, Molluscum contagiosum virus
uaccggagacaccagcu

SEQ ID NO: 231752 - RNA, 18 nt, Molluscum contagiosum virus
uaccggagacaccagcuc

SEQ ID NO: 231753 - RNA, 16 nt, Molluscum contagiosum virus
uacgacgacaugcaca

SEQ ID NO: 231754 - RNA, 18 nt, Molluscum contagiosum virus
uaccggcagcaugcucac

SEQ ID NO: 231755 - RNA, 16 nt, Molluscum contagiosum virus
uacgauggaugcugga

SEQ ID NO: 231756 - RNA, 21 nt, Molluscum contagiosum virus
uacgauuuguuugcaccggca

SEQ ID NO: 231757 - RNA, 12 nt, Molluscum contagiosum virus
uaccaugcucuc

SEQ ID NO: 231758 - RNA, 16 nt, Molluscum contagiosum virus
uacucaacaagcugcu

SEQ ID NO: 231759 - RNA, 17 nt, Molluscum contagiosum virus
uacggcgcauccuccac

SEQ ID NO: 231760 - RNA, 17 nt, Molluscum contagiosum virus
uacgucuuucccagaag

SEQ ID NO: 231761 - RNA, 23 nt, Molluscum contagiosum virus
uacgcgccagugcgugcacuguc

SEQ ID NO: 231762 - RNA, 19 nt, Molluscum contagiosum virus
uacgcuggacuuccugcug

SEQ ID NO: 231763 - RNA, 11 nt, Molluscum contagiosum virus
uacgcacgggg

SEQ ID NO: 231764 - RNA, 13 nt, Molluscum contagiosum virus
uacgcgagcacug

SEQ ID NO: 231765 - RNA, 16 nt, Molluscum contagiosum virus
uacaaccgcugcuauu

SEQ ID NO: 231766 - RNA, 14 nt, Molluscum contagiosum virus
uacaacccaaacau

SEQ ID NO: 231767 - RNA, 14 nt, Molluscum contagiosum virus
uacaaaguugacca

SEQ ID NO: 231768 - RNA, 19 nt, Molluscum contagiosum virus
uaaugauugucaagcacua

SEQ ID NO: 231769 - RNA, 22 nt, Molluscum contagiosum virus
uaaugcuggcgcguccguucac

SEQ ID NO: 231770 - RNA, 17 nt, Molluscum contagiosum virus
uaagagcgugaacauac

SEQ ID NO: 231771 - RNA, 18 nt, Molluscum contagiosum virus
uaagggcggacgcacuag

SEQ ID NO: 231772 - RNA, 16 nt, Molluscum contagiosum virus
uaaagucuucaagacu

SEQ ID NO: 231773 - RNA, 18 nt, Molluscum contagiosum virus
uaaagucuucaagacugg

SEQ ID NO: 231774 - RNA, 18 nt, Molluscum contagiosum virus
guuuuucgggaagcacag

SEQ ID NO: 231775 - RNA, 17 nt, Molluscum contagiosum virus
gugggauaggcacacac

SEQ ID NO: 231776 - RNA, 20 nt, Molluscum contagiosum virus
gugggcagccgccuggccga

SEQ ID NO: 231777 - RNA, 17 nt, Molluscum contagiosum virus
gugggcagcuucugcuc

SEQ ID NO: 231778 - RNA, 20 nt, Molluscum contagiosum virus
gugggccgcggcgcggcgga

SEQ ID NO: 231779 - RNA, 14 nt, Molluscum contagiosum virus
gugguccaccagca

SEQ ID NO: 231780 - RNA, 14 nt, Molluscum contagiosum virus
gugguccaccagcu

SEQ ID NO: 231781 - RNA, 23 nt, Molluscum contagiosum virus
gugggucucgagccgcacaaaga

SEQ ID NO: 231782 - RNA, 14 nt, Molluscum contagiosum virus
guggucaagacugg

SEQ ID NO: 231783 - RNA, 13 nt, Molluscum contagiosum virus
gugguacugccga

SEQ ID NO: 231784 - RNA, 15 nt, Molluscum contagiosum virus
uaaaauagcagagca

SEQ ID NO: 231785 - RNA, 15 nt, Molluscum contagiosum virus
uaaaagcacagucca

SEQ ID NO: 231786 - RNA, 19 nt, Molluscum contagiosum virus
ucaacaugccuuucuucca

SEQ ID NO: 231787 - RNA, 17 nt, Molluscum contagiosum virus
ucaacaucuacaaggag

SEQ ID NO: 231788 - RNA, 13 nt, Molluscum contagiosum virus
ucaacauuucaca

SEQ ID NO: 231789 - RNA, 16 nt, Molluscum contagiosum virus
ucaacauuucacaagu

SEQ ID NO: 231790 - RNA, 21 nt, Molluscum contagiosum virus
ucaaccucgagaagaccuguu

SEQ ID NO: 231791 - RNA, 14 nt, Molluscum contagiosum virus
ucaaccgcaaggaa

SEQ ID NO: 231792 - RNA, 16 nt, Molluscum contagiosum virus
ucaaccgcugcaauaa

SEQ ID NO: 231793 - RNA, 22 nt, Molluscum contagiosum virus
ucaaccaguacuucaucuucaa

SEQ ID NO: 231794 - RNA, 16 nt, Molluscum contagiosum virus
ucaagaagcccaagga

SEQ ID NO: 231795 - RNA, 16 nt, Molluscum contagiosum virus
ucaacucguaggacaa

SEQ ID NO: 231796 - RNA, 15 nt, Molluscum contagiosum virus
ucaacuacaaggugc

SEQ ID NO: 231797 - RNA, 21 nt, Molluscum contagiosum virus
ucaacaacacgaucaaggugc

SEQ ID NO: 231798 - RNA, 22 nt, Molluscum contagiosum virus
ucaacaagcugcuggcacaaau

SEQ ID NO: 231799 - RNA, 23 nt, Molluscum contagiosum virus
ucaagugcgucgacguggagccu

SEQ ID NO: 231800 - RNA, 12 nt, Molluscum contagiosum virus
ucaaguaccugu

SEQ ID NO: 231801 - RNA, 12 nt, Molluscum contagiosum virus
ucaaggugcaga

SEQ ID NO: 231802 - RNA, 16 nt, Molluscum contagiosum virus
ucaagcacgagcugcu

SEQ ID NO: 231803 - RNA, 17 nt, Molluscum contagiosum virus
ucaagcacgcuacugcg

SEQ ID NO: 231804 - RNA, 19 nt, Molluscum contagiosum virus
ucaagaucguuuugcacuu

SEQ ID NO: 231805 - RNA, 18 nt, Molluscum contagiosum virus
ucaauucaaaggugcuca

SEQ ID NO: 231806 - RNA, 17 nt, Molluscum contagiosum virus
ucaauucaaguuugaca

SEQ ID NO: 231807 - RNA, 17 nt, Molluscum contagiosum virus
ucaaugcaguaugugaa

SEQ ID NO: 231808 - RNA, 19 nt, Molluscum contagiosum virus
ucaaugcaguaugugaaca

SEQ ID NO: 231809 - RNA, 21 nt, Molluscum contagiosum virus
uauuucaaugcaguaugugaa

SEQ ID NO: 231810 - RNA, 22 nt, Molluscum contagiosum virus
uagcgcgcgccgacgugcgcgu

SEQ ID NO: 231811 - RNA, 16 nt, Molluscum contagiosum virus
uagcgcaccagcugcg

SEQ ID NO: 231812 - RNA, 20 nt, Molluscum contagiosum virus
uagccguccaguaagcgaca

SEQ ID NO: 231813 - RNA, 20 nt, Molluscum contagiosum virus
uacucgagcacggccgccac

SEQ ID NO: 231814 - RNA, 15 nt, Molluscum contagiosum virus
uacucgccguuccac

SEQ ID NO: 231815 - RNA, 13 nt, Molluscum contagiosum virus
uacucgugucaca

SEQ ID NO: 231816 - RNA, 14 nt, Molluscum contagiosum virus
uacucgugucacaa

SEQ ID NO: 231817 - RNA, 12 nt, Molluscum contagiosum virus
uacugcacugca

SEQ ID NO: 231818 - RNA, 15 nt, Molluscum contagiosum virus
uagcauuccuucaca

SEQ ID NO: 231819 - RNA, 20 nt, Molluscum contagiosum virus
uauaaauggcguuaccagga

SEQ ID NO: 231820 - RNA, 20 nt, Molluscum contagiosum virus
uaguuccggcggcauugugg

SEQ ID NO: 231821 - RNA, 16 nt, Molluscum contagiosum virus
uagguccacauuucaa

SEQ ID NO: 231822 - RNA, 16 nt, Molluscum contagiosum virus
uauacaaaguugacca

SEQ ID NO: 231823 - RNA, 19 nt, Molluscum contagiosum virus
uaucaggcgauaggacaug

SEQ ID NO: 231824 - RNA, 15 nt, Molluscum contagiosum virus
uaucgauucuguccg

SEQ ID NO: 231825 - RNA, 14 nt, Molluscum contagiosum virus
uaugcacuuucaac

SEQ ID NO: 231826 - RNA, 15 nt, Molluscum contagiosum virus
uaugcaucuagucag

SEQ ID NO: 231827 - RNA, 19 nt, Molluscum contagiosum virus
ggacugagccgcaagcaca

SEQ ID NO: 231828 - RNA, 21 nt, Molluscum contagiosum virus
ggacgcccuccucgaccugca

SEQ ID NO: 231829 - RNA, 22 nt, Molluscum contagiosum virus
ggacgcccuccucgaccugcac

SEQ ID NO: 231830 - RNA, 13 nt, Molluscum contagiosum virus
ggacgcggaccua

SEQ ID NO: 231831 - RNA, 18 nt, Molluscum contagiosum virus
ggacgcguucuccaggaa

SEQ ID NO: 231832 - RNA, 16 nt, Molluscum contagiosum virus
ggacguccauccucuc

SEQ ID NO: 231833 - RNA, 15 nt, Molluscum contagiosum virus
ggacgugcacguggu

SEQ ID NO: 231834 - RNA, 18 nt, Molluscum contagiosum virus
ggaccucaucaagcccga

SEQ ID NO: 231835 - RNA, 20 nt, Molluscum contagiosum virus
ggaccucaucaagcccgagu

SEQ ID NO: 231836 - RNA, 15 nt, Molluscum contagiosum virus
ggacgcaaaucuguu

SEQ ID NO: 231837 - RNA, 16 nt, Molluscum contagiosum virus
ggacgccacucuccuu

SEQ ID NO: 231838 - RNA, 19 nt, Molluscum contagiosum virus
ggacgagcucgccaugugc

SEQ ID NO: 231839 - RNA, 14 nt, Molluscum contagiosum virus
ggacgagcugcuaa

SEQ ID NO: 231840 - RNA, 12 nt, Molluscum contagiosum virus
ggagagguugcg

SEQ ID NO: 231841 - RNA, 14 nt, Molluscum contagiosum virus
ggagaucaggcagc

SEQ ID NO: 231842 - RNA, 16 nt, Molluscum contagiosum virus
ggagagcagugccgcu

SEQ ID NO: 231843 - RNA, 20 nt, Molluscum contagiosum virus
ggagagcccggacacguagc

SEQ ID NO: 231844 - RNA, 22 nt, Molluscum contagiosum virus
ggagagccgcuccuggucuucc

SEQ ID NO: 231845 - RNA, 19 nt, Molluscum contagiosum virus
ggagccagccucucucgga

SEQ ID NO: 231846 - RNA, 21 nt, Molluscum contagiosum virus
ggagccagccucucucggaga

SEQ ID NO: 231847 - RNA, 15 nt, Molluscum contagiosum virus
ggagcagccuccgaa

SEQ ID NO: 231848 - RNA, 15 nt, Molluscum contagiosum virus
ggagaaagacaaaga

SEQ ID NO: 231849 - RNA, 21 nt, Molluscum contagiosum virus
ggagaacggacaaaauggcug

SEQ ID NO: 231850 - RNA, 15 nt, Molluscum contagiosum virus
ggagaacuccaagug

SEQ ID NO: 231851 - RNA, 19 nt, Molluscum contagiosum virus
ggagaacucuacacgugga

SEQ ID NO: 231852 - RNA, 15 nt, Molluscum contagiosum virus
ggagaagaacagcac

SEQ ID NO: 231853 - RNA, 16 nt, Molluscum contagiosum virus
ggacuugcgcgagcga

SEQ ID NO: 231854 - RNA, 12 nt, Molluscum contagiosum virus
ggagacauaugu

SEQ ID NO: 231855 - RNA, 21 nt, Molluscum contagiosum virus
ggagacauauguucuucgaca

SEQ ID NO: 231856 - RNA, 13 nt, Molluscum contagiosum virus
ggagacaccagcu

SEQ ID NO: 231857 - RNA, 15 nt, Molluscum contagiosum virus
ggaaaagaaaccccu

SEQ ID NO: 231858 - RNA, 19 nt, Molluscum contagiosum virus
gcuuuuuucuucgcuacgg

SEQ ID NO: 231859 - RNA, 23 nt, Molluscum contagiosum virus
ggaaagagcgcgcgaagcauguc

SEQ ID NO: 231860 - RNA, 15 nt, Molluscum contagiosum virus
ggaaaccucaccucu

SEQ ID NO: 231861 - RNA, 21 nt, Molluscum contagiosum virus
ggaaacgcuggcgagcaagau

SEQ ID NO: 231862 - RNA, 14 nt, Molluscum contagiosum virus
ggaaacggaccugg

SEQ ID NO: 231863 - RNA, 20 nt, Molluscum contagiosum virus
ggaaaggcaccugcaggaaa

SEQ ID NO: 231864 - RNA, 23 nt, Molluscum contagiosum virus
ggaaaggccccccgcaacaagga

SEQ ID NO: 231865 - RNA, 17 nt, Molluscum contagiosum virus
ggaauaccggagacacc

SEQ ID NO: 231866 - RNA, 22 nt, Molluscum contagiosum virus
ggaaugcccgcaaugcaagccc

SEQ ID NO: 231867 - RNA, 11 nt, Molluscum contagiosum virus
ggacaccucac

SEQ ID NO: 231868 - RNA, 18 nt, Molluscum contagiosum virus
ggacaccucaccuuucuc

SEQ ID NO: 231869 - RNA, 10 nt, Molluscum contagiosum virus
ggaauuccuu

SEQ ID NO: 231870 - RNA, 23 nt, Molluscum contagiosum virus
ggacagcucagcaggcuguguuc

SEQ ID NO: 231871 - RNA, 11 nt, Molluscum contagiosum virus
ggacagcaccc

SEQ ID NO: 231872 - RNA, 17 nt, Molluscum contagiosum virus
ggacacuggcaccggaa

SEQ ID NO: 231873 - RNA, 21 nt, Molluscum contagiosum virus
ggacacguuccagagcacugc

SEQ ID NO: 231874 - RNA, 15 nt, Molluscum contagiosum virus
ggacacgcacuggcg

SEQ ID NO: 231875 - RNA, 18 nt, Molluscum contagiosum virus
ggcacgcagcucuuccac

SEQ ID NO: 231876 - RNA, 21 nt, Molluscum contagiosum virus
ggcacccuggcugcugcgcga

SEQ ID NO: 231877 - RNA, 15 nt, Molluscum contagiosum virus
ggcaccccgaaggaa

SEQ ID NO: 231878 - RNA, 18 nt, Molluscum contagiosum virus
ggcacccgcaacaaggaa

SEQ ID NO: 231879 - RNA, 14 nt, Molluscum contagiosum virus
ggcacccgcaggaa

SEQ ID NO: 231880 - RNA, 18 nt, Molluscum contagiosum virus
ggcacgcugcacaugugc

SEQ ID NO: 231881 - RNA, 16 nt, Molluscum contagiosum virus
ggcacugcuggcgcgc

SEQ ID NO: 231882 - RNA, 10 nt, Molluscum contagiosum virus
ggcacuggcg

SEQ ID NO: 231883 - RNA, 19 nt, Molluscum contagiosum virus
ggcacuggcgcgcacgcgc

SEQ ID NO: 231884 - RNA, 23 nt, Molluscum contagiosum virus
ggcagacaacaccagcgugcccu

SEQ ID NO: 231885 - RNA, 19 nt, Molluscum contagiosum virus
ggcagcaagcgcaccuuuu

SEQ ID NO: 231886 - RNA, 12 nt, Molluscum contagiosum virus
ggcaggcagugc

SEQ ID NO: 231887 - RNA, 15 nt, Molluscum contagiosum virus
ggagcgcgcgcagga

SEQ ID NO: 231888 - RNA, 19 nt, Molluscum contagiosum virus
ggagcggcauggaaagcuu

SEQ ID NO: 231889 - RNA, 20 nt, Molluscum contagiosum virus
ggagcccgucuacauuuugc

SEQ ID NO: 231890 - RNA, 20 nt, Molluscum contagiosum virus
ggaggaaggacagugucuug

SEQ ID NO: 231891 - RNA, 13 nt, Molluscum contagiosum virus
ggaggacacgcgc

SEQ ID NO: 231892 - RNA, 21 nt, Molluscum contagiosum virus
ggagcuggcguugccgagcga

SEQ ID NO: 231893 - RNA, 14 nt, Molluscum contagiosum virus
ggagcugguccagg

SEQ ID NO: 231894 - RNA, 16 nt, Molluscum contagiosum virus
ggagcuuaauuuugca

SEQ ID NO: 231895 - RNA, 20 nt, Molluscum contagiosum virus
ggaggauucuuguacgggcg

SEQ ID NO: 231896 - RNA, 16 nt, Molluscum contagiosum virus
ggaggcaaucugucca

SEQ ID NO: 231897 - RNA, 22 nt, Molluscum contagiosum virus
ggaguccucgacaaugagcacu

SEQ ID NO: 231898 - RNA, 17 nt, Molluscum contagiosum virus
ggaggcgcuagugcaga

SEQ ID NO: 231899 - RNA, 17 nt, Molluscum contagiosum virus
ggaggcggcacugcuag

SEQ ID NO: 231900 - RNA, 22 nt, Molluscum contagiosum virus
ggagggcaagaacgacugcuac

SEQ ID NO: 231901 - RNA, 22 nt, Molluscum contagiosum virus
ggaggcugcucccucucgagga

SEQ ID NO: 231902 - RNA, 23 nt, Molluscum contagiosum virus
ggcccgcguggcaagggcuccuu

SEQ ID NO: 231903 - RNA, 22 nt, Molluscum contagiosum virus
ggcccuggcggcuuuccuguca

SEQ ID NO: 231904 - RNA, 15 nt, Molluscum contagiosum virus
ggccgagcgugacca

SEQ ID NO: 231905 - RNA, 19 nt, Molluscum contagiosum virus
ggccccgcaccagugccga

SEQ ID NO: 231906 - RNA, 16 nt, Molluscum contagiosum virus
ggccguuggacaucag

SEQ ID NO: 231907 - RNA, 16 nt, Molluscum contagiosum virus
ggccguguacaugcuc

SEQ ID NO: 231908 - RNA, 22 nt, Molluscum contagiosum virus
ggccggcaagcucaagcccggc

SEQ ID NO: 231909 - RNA, 18 nt, Molluscum contagiosum virus
ggccgccgcugacuagau

SEQ ID NO: 231910 - RNA, 17 nt, Molluscum contagiosum virus
ggccgcgcgcgacuuug

SEQ ID NO: 231911 - RNA, 20 nt, Molluscum contagiosum virus
ggccgcggagaagugcgcag

SEQ ID NO: 231912 - RNA, 17 nt, Molluscum contagiosum virus
ggccugcgggcggcaca

SEQ ID NO: 231913 - RNA, 15 nt, Molluscum contagiosum virus
ggcgacgagggcgcc

SEQ ID NO: 231914 - RNA, 22 nt, Molluscum contagiosum virus
ggcgcaaccgcgugcgugcaca

SEQ ID NO: 231915 - RNA, 20 nt, Molluscum contagiosum virus
ggcggugcccgccaagagcu

SEQ ID NO: 231916 - RNA, 23 nt, Molluscum contagiosum virus
ggcguagagcaauacguggcgcu

SEQ ID NO: 231917 - RNA, 20 nt, Molluscum contagiosum virus
ggcguuaaagaguuccagca

SEQ ID NO: 231918 - RNA, 16 nt, Molluscum contagiosum virus
ggcguuacagcaccuu

SEQ ID NO: 231919 - RNA, 13 nt, Molluscum contagiosum virus
ggcguugcugcug

SEQ ID NO: 231920 - RNA, 18 nt, Molluscum contagiosum virus
gcugagcgcagcacacuu

SEQ ID NO: 231921 - RNA, 11 nt, Molluscum contagiosum virus
gcugcacgugc

SEQ ID NO: 231922 - RNA, 14 nt, Molluscum contagiosum virus
gcugcagaacugcc

SEQ ID NO: 231923 - RNA, 15 nt, Molluscum contagiosum virus
gcugcagaacugccu

SEQ ID NO: 231924 - RNA, 22 nt, Molluscum contagiosum virus
gcugcagagcgugcuggucaac

SEQ ID NO: 231925 - RNA, 16 nt, Molluscum contagiosum virus
gcucuucguggccaaa

SEQ ID NO: 231926 - RNA, 20 nt, Molluscum contagiosum virus
gcucuucucgcagcguucca

SEQ ID NO: 231927 - RNA, 20 nt, Molluscum contagiosum virus
gcucuuccgcgagcacgugg

SEQ ID NO: 231928 - RNA, 19 nt, Molluscum contagiosum virus
gcucagcaggcuguguucc

SEQ ID NO: 231929 - RNA, 20 nt, Molluscum contagiosum virus
gcucagcaggcuguguucca

SEQ ID NO: 231930 - RNA, 19 nt, Molluscum contagiosum virus
gcucagcguggagcaccug

SEQ ID NO: 231931 - RNA, 18 nt, Molluscum contagiosum virus
gcucaggccagcaucuug

SEQ ID NO: 231932 - RNA, 15 nt, Molluscum contagiosum virus
gcucaagcacugccu

SEQ ID NO: 231933 - RNA, 12 nt, Molluscum contagiosum virus
gcucaagcugcu

SEQ ID NO: 231934 - RNA, 16 nt, Molluscum contagiosum virus
gcucaaggacaucuac

SEQ ID NO: 231935 - RNA, 21 nt, Molluscum contagiosum virus
gcucaaggacaucuacagccg

SEQ ID NO: 231936 - RNA, 17 nt, Molluscum contagiosum virus
gcucaagaacaccaaga

SEQ ID NO: 231937 - RNA, 18 nt, Molluscum contagiosum virus
gcuuggcacagugcugga

SEQ ID NO: 231938 - RNA, 16 nt, Molluscum contagiosum virus
gcuuggccauggugga

SEQ ID NO: 231939 - RNA, 18 nt, Molluscum contagiosum virus
gcuuggcgagcgcugccg

SEQ ID NO: 231940 - RNA, 22 nt, Molluscum contagiosum virus
gcuugcgcacggaccucaagga

SEQ ID NO: 231941 - RNA, 21 nt, Molluscum contagiosum virus
gcuugagcacacgguagagcu

SEQ ID NO: 231942 - RNA, 17 nt, Molluscum contagiosum virus
gcuuccuggcacuggcg

SEQ ID NO: 231943 - RNA, 15 nt, Molluscum contagiosum virus
gcuucgagugcuccc

SEQ ID NO: 231944 - RNA, 17 nt, Molluscum contagiosum virus
gcuucgggccgcugccg

SEQ ID NO: 231945 - RNA, 23 nt, Molluscum contagiosum virus
gcuucguggacgagcgcuaccug

SEQ ID NO: 231946 - RNA, 19 nt, Molluscum contagiosum virus
gcuuccucuacaccagcug

SEQ ID NO: 231947 - RNA, 19 nt, Molluscum contagiosum virus
gcuuccgacgucaagcauc

SEQ ID NO: 231948 - RNA, 17 nt, Molluscum contagiosum virus
gcuuccgcaccuggucg

SEQ ID NO: 231949 - RNA, 19 nt, Molluscum contagiosum virus
gcuuccgcaccuggucgag

SEQ ID NO: 231950 - RNA, 17 nt, Molluscum contagiosum virus
gcugggagcuugcacga

SEQ ID NO: 231951 - RNA, 22 nt, Molluscum contagiosum virus
gcuggggcaaagaguugcgcga

SEQ ID NO: 231952 - RNA, 18 nt, Molluscum contagiosum virus
gcuggggccugugcugug

SEQ ID NO: 231953 - RNA, 17 nt, Molluscum contagiosum virus
gcuggugcucgccugca

SEQ ID NO: 231954 - RNA, 15 nt, Molluscum contagiosum virus
gcugguggugcugga

SEQ ID NO: 231955 - RNA, 23 nt, Molluscum contagiosum virus
gcuucauggaggccaacuaccug

SEQ ID NO: 231956 - RNA, 17 nt, Molluscum contagiosum virus
gcuggccgaugccuaug

SEQ ID NO: 231957 - RNA, 20 nt, Molluscum contagiosum virus
gcuggcggcgcacgcgagca

SEQ ID NO: 231958 - RNA, 20 nt, Molluscum contagiosum virus
gcugggcacaagcuuucuca

SEQ ID NO: 231959 - RNA, 15 nt, Molluscum contagiosum virus
gcugcagcugcgcga

SEQ ID NO: 231960 - RNA, 13 nt, Molluscum contagiosum virus
gcuggagcacgac

SEQ ID NO: 231961 - RNA, 14 nt, Molluscum contagiosum virus
gcuggacuuccugc

SEQ ID NO: 231962 - RNA, 15 nt, Molluscum contagiosum virus
gcuggacuugcgcga

SEQ ID NO: 231963 - RNA, 19 nt, Molluscum contagiosum virus
gcuggagaaagaagugugc

SEQ ID NO: 231964 - RNA, 21 nt, Molluscum contagiosum virus
gcuggagcugccgcugcgcga

SEQ ID NO: 231965 - RNA, 16 nt, Molluscum contagiosum virus
gcuggccagccucauc

SEQ ID NO: 231966 - RNA, 16 nt, Molluscum contagiosum virus
gccauucuuaauccag

SEQ ID NO: 231967 - RNA, 13 nt, Molluscum contagiosum virus
gcccagcacgcgc

SEQ ID NO: 231968 - RNA, 15 nt, Molluscum contagiosum virus
gcccacuuccgugag

SEQ ID NO: 231969 - RNA, 12 nt, Molluscum contagiosum virus
gcccaccagcag

SEQ ID NO: 231970 - RNA, 14 nt, Molluscum contagiosum virus
gcccaccagcagcc

SEQ ID NO: 231971 - RNA, 14 nt, Molluscum contagiosum virus
gcgcucaacaucca

SEQ ID NO: 231972 - RNA, 15 nt, Molluscum contagiosum virus
gcgcuccaugcugcc

SEQ ID NO: 231973 - RNA, 11 nt, Molluscum contagiosum virus
gcgcucgccuu

SEQ ID NO: 231974 - RNA, 19 nt, Molluscum contagiosum virus
gcgcucgucaaugcgcacg

SEQ ID NO: 231975 - RNA, 19 nt, Molluscum contagiosum virus
gcgcucgugguugcgcacg

SEQ ID NO: 231976 - RNA, 19 nt, Molluscum contagiosum virus
gcgcucuacuaaaguacga

SEQ ID NO: 231977 - RNA, 15 nt, Molluscum contagiosum virus
gcccaugcgcagugc

SEQ ID NO: 231978 - RNA, 12 nt, Molluscum contagiosum virus
gcccaugcucga

SEQ ID NO: 231979 - RNA, 22 nt, Molluscum contagiosum virus
gcgcuuuucgcacgagcgaaaa

SEQ ID NO: 231980 - RNA, 17 nt, Molluscum contagiosum virus
gcgcuuuuuuuguccug

SEQ ID NO: 231981 - RNA, 14 nt, Molluscum contagiosum virus
gcggaaacaagcac

SEQ ID NO: 231982 - RNA, 16 nt, Molluscum contagiosum virus
gcggaaacaagcacau

SEQ ID NO: 231983 - RNA, 22 nt, Molluscum contagiosum virus
gcggacacguuccagagcacug

SEQ ID NO: 231984 - RNA, 20 nt, Molluscum contagiosum virus
gcggaagaaacagccaugug

SEQ ID NO: 231985 - RNA, 21 nt, Molluscum contagiosum virus
gcggaagcuccugcugguuca

SEQ ID NO: 231986 - RNA, 17 nt, Molluscum contagiosum virus
gcggaauaaauggacga

SEQ ID NO: 231987 - RNA, 21 nt, Molluscum contagiosum virus
gcgcugcccgcgcacaacaag

SEQ ID NO: 231988 - RNA, 22 nt, Molluscum contagiosum virus
gcgcugcuacaagcggugcagc

SEQ ID NO: 231989 - RNA, 16 nt, Molluscum contagiosum virus
gcgcuugggcacugcu

SEQ ID NO: 231990 - RNA, 18 nt, Molluscum contagiosum virus
gcgcuucacggagaucag

SEQ ID NO: 231991 - RNA, 17 nt, Molluscum contagiosum virus
gcgcguugccugagaag

SEQ ID NO: 231992 - RNA, 18 nt, Molluscum contagiosum virus
gcgcuagccccagcacca

SEQ ID NO: 231993 - RNA, 20 nt, Molluscum contagiosum virus
gcguucaccuuggcgcugca

SEQ ID NO: 231994 - RNA, 20 nt, Molluscum contagiosum virus
gcguuacagcaccuugccuc

SEQ ID NO: 231995 - RNA, 20 nt, Molluscum contagiosum virus
gcguucuagcagcgugcgca

SEQ ID NO: 231996 - RNA, 21 nt, Molluscum contagiosum virus
gcguuggcaacgcgggggcca

SEQ ID NO: 231997 - RNA, 14 nt, Molluscum contagiosum virus
gcguucgagcugau

SEQ ID NO: 231998 - RNA, 18 nt, Molluscum contagiosum virus
gcguucgcgcgugcugga

SEQ ID NO: 231999 - RNA, 14 nt, Molluscum contagiosum virus
gcguuucucaggua

SEQ ID NO: 232000 - RNA, 15 nt, Molluscum contagiosum virus
gcggggcaggcagug

SEQ ID NO: 232001 - RNA, 16 nt, Molluscum contagiosum virus
gcgggauacgggcgcu

SEQ ID NO: 232002 - RNA, 16 nt, Molluscum contagiosum virus
gcgggccgcgcgcaca

SEQ ID NO: 232003 - RNA, 17 nt, Molluscum contagiosum virus
gcguggcgcaccugcua

SEQ ID NO: 232004 - RNA, 18 nt, Molluscum contagiosum virus
gcguggaggacaccgccg

SEQ ID NO: 232005 - RNA, 23 nt, Molluscum contagiosum virus
gcgugcuuguagcgcaaggcgac

SEQ ID NO: 232006 - RNA, 13 nt, Molluscum contagiosum virus
gcggcacugcuag

SEQ ID NO: 232007 - RNA, 20 nt, Molluscum contagiosum virus
gcggcaggaagcuggcgcgg

SEQ ID NO: 232008 - RNA, 16 nt, Molluscum contagiosum virus
gcggcaggcgcugcgc

SEQ ID NO: 232009 - RNA, 14 nt, Molluscum contagiosum virus
gcggagcuggccga

SEQ ID NO: 232010 - RNA, 18 nt, Molluscum contagiosum virus
gcggagagcagugccgcu

SEQ ID NO: 232011 - RNA, 18 nt, Molluscum contagiosum virus
gcggcaacgagcacgugu

SEQ ID NO: 232012 - RNA, 17 nt, Molluscum contagiosum virus
gcggcaacugccugcgc

SEQ ID NO: 232013 - RNA, 17 nt, Molluscum contagiosum virus
gcggcacacacuugcac

SEQ ID NO: 232014 - RNA, 21 nt, Molluscum contagiosum virus
gcggcacacacuugcacgcgc

SEQ ID NO: 232015 - RNA, 17 nt, Molluscum contagiosum virus
gcggcgacuugcugcgg

SEQ ID NO: 232016 - RNA, 14 nt, Molluscum contagiosum virus
gcggccguggcacu

SEQ ID NO: 232017 - RNA, 16 nt, Molluscum contagiosum virus
gcggccguggcacuga

SEQ ID NO: 232018 - RNA, 19 nt, Molluscum contagiosum virus
gcggcccgcgggcugcaag

SEQ ID NO: 232019 - RNA, 20 nt, Molluscum contagiosum virus
gcgggcacauccgcuaccug

SEQ ID NO: 232020 - RNA, 23 nt, Molluscum contagiosum virus
gcgggcacauccgcuaccuggug

SEQ ID NO: 232021 - RNA, 20 nt, Molluscum contagiosum virus
gcgggcacgcagcucuucca

SEQ ID NO: 232022 - RNA, 14 nt, Molluscum contagiosum virus
gcgggcacgggcac

SEQ ID NO: 232023 - RNA, 14 nt, Molluscum contagiosum virus
gcggcuaagcucug

SEQ ID NO: 232024 - RNA, 21 nt, Molluscum contagiosum virus
gcggcgcaucucgauucacau

SEQ ID NO: 232025 - RNA, 14 nt, Molluscum contagiosum virus
guccaaggugaacg

SEQ ID NO: 232026 - RNA, 17 nt, Molluscum contagiosum virus
guccacggcgcgcaccu

SEQ ID NO: 232027 - RNA, 23 nt, Molluscum contagiosum virus
guccacggcgcgcaccuacauga

SEQ ID NO: 232028 - RNA, 12 nt, Molluscum contagiosum virus
guccacaaagac

SEQ ID NO: 232029 - RNA, 14 nt, Molluscum contagiosum virus
guccacuccuggaa

SEQ ID NO: 232030 - RNA, 19 nt, Molluscum contagiosum virus
gucaucaccccgcugggcc

SEQ ID NO: 232031 - RNA, 20 nt, Molluscum contagiosum virus
gucgcaaccccgcgcugcgc

SEQ ID NO: 232032 - RNA, 20 nt, Molluscum contagiosum virus
gucgagcucgcgcgccagca

SEQ ID NO: 232033 - RNA, 15 nt, Molluscum contagiosum virus
gucgagaugcucuac

SEQ ID NO: 232034 - RNA, 19 nt, Molluscum contagiosum virus
gucgagcagauucacgagc

SEQ ID NO: 232035 - RNA, 12 nt, Molluscum contagiosum virus
gucgcacaguuc

SEQ ID NO: 232036 - RNA, 13 nt, Molluscum contagiosum virus
gucgcacaguuca

SEQ ID NO: 232037 - RNA, 19 nt, Molluscum contagiosum virus
gucgcacaguucacggcgc

SEQ ID NO: 232038 - RNA, 18 nt, Molluscum contagiosum virus
gucgaagagggucgugca

SEQ ID NO: 232039 - RNA, 15 nt, Molluscum contagiosum virus
gucgaagcgcgcagc

SEQ ID NO: 232040 - RNA, 18 nt, Molluscum contagiosum virus
guccucucuccccuucag

SEQ ID NO: 232041 - RNA, 22 nt, Molluscum contagiosum virus
guccucggucaccacuccgucg

SEQ ID NO: 232042 - RNA, 21 nt, Molluscum contagiosum virus
guccucgugggauaggcacac

SEQ ID NO: 232043 - RNA, 14 nt, Molluscum contagiosum virus
guccuucaagaacg

SEQ ID NO: 232044 - RNA, 14 nt, Molluscum contagiosum virus
gucuccaacaagcu

SEQ ID NO: 232045 - RNA, 23 nt, Molluscum contagiosum virus
gucuccaacaagcucauccaccu

SEQ ID NO: 232046 - RNA, 14 nt, Molluscum contagiosum virus
gucguacacgcaga

SEQ ID NO: 232047 - RNA, 15 nt, Molluscum contagiosum virus
gucggaguccgugca

SEQ ID NO: 232048 - RNA, 19 nt, Molluscum contagiosum virus
gucgcgccuggagcgcaaa

SEQ ID NO: 232049 - RNA, 16 nt, Molluscum contagiosum virus
gucgcgggcgcgcuag

SEQ ID NO: 232050 - RNA, 20 nt, Molluscum contagiosum virus
gucgcgacggagauggacac

SEQ ID NO: 232051 - RNA, 17 nt, Molluscum contagiosum virus
gucugcuuugucugcag

SEQ ID NO: 232052 - RNA, 16 nt, Molluscum contagiosum virus
gucuggaaacacgugg

SEQ ID NO: 232053 - RNA, 13 nt, Molluscum contagiosum virus
gucuccacaaaga

SEQ ID NO: 232054 - RNA, 14 nt, Molluscum contagiosum virus
gucuccacaaagac

SEQ ID NO: 232055 - RNA, 23 nt, Molluscum contagiosum virus
gucucgagcuuccucaaggcgca

SEQ ID NO: 232056 - RNA, 12 nt, Molluscum contagiosum virus
gucucgcugcug

SEQ ID NO: 232057 - RNA, 16 nt, Molluscum contagiosum virus
gucucggagaagaaca

SEQ ID NO: 232058 - RNA, 18 nt, Molluscum contagiosum virus
gucucggagaagaacagc

SEQ ID NO: 232059 - RNA, 17 nt, Molluscum contagiosum virus
gucucugugugcuuaua

SEQ ID NO: 232060 - RNA, 17 nt, Molluscum contagiosum virus
gugaacaauacaugcug

SEQ ID NO: 232061 - RNA, 17 nt, Molluscum contagiosum virus
gucuuuuuccugugguu

SEQ ID NO: 232062 - RNA, 22 nt, Molluscum contagiosum virus
gucuuugcgaacgcgcaagugu

SEQ ID NO: 232063 - RNA, 14 nt, Molluscum contagiosum virus
gucuuuccuggcuc

SEQ ID NO: 232064 - RNA, 19 nt, Molluscum contagiosum virus
gucuucaggaacaaggcca

SEQ ID NO: 232065 - RNA, 18 nt, Molluscum contagiosum virus
gucugucguggaggaaac

SEQ ID NO: 232066 - RNA, 20 nt, Molluscum contagiosum virus
gucugucguuuuacaaugac

SEQ ID NO: 232067 - RNA, 19 nt, Molluscum contagiosum virus
gugaguagcaacaaagagg

SEQ ID NO: 232068 - RNA, 17 nt, Molluscum contagiosum virus
gugacccucuucgacuu

SEQ ID NO: 232069 - RNA, 16 nt, Molluscum contagiosum virus
gugaccucgcugcuga

SEQ ID NO: 232070 - RNA, 21 nt, Molluscum contagiosum virus
gugacaaggauggacaaagau

SEQ ID NO: 232071 - RNA, 14 nt, Molluscum contagiosum virus
gugaaucuugccug

SEQ ID NO: 232072 - RNA, 21 nt, Molluscum contagiosum virus
gugacggccguguacaugcuc

SEQ ID NO: 232073 - RNA, 22 nt, Molluscum contagiosum virus
gugacggccguguacaugcuca

SEQ ID NO: 232074 - RNA, 22 nt, Molluscum contagiosum virus
gugacucgccgugugaucaaga

SEQ ID NO: 232075 - RNA, 18 nt, Molluscum contagiosum virus
gugcugcgcgacaugcug

SEQ ID NO: 232076 - RNA, 16 nt, Molluscum contagiosum virus
gugcugcggcgcgugc

SEQ ID NO: 232077 - RNA, 19 nt, Molluscum contagiosum virus
gugcugcggcgcgugccgc

SEQ ID NO: 232078 - RNA, 12 nt, Molluscum contagiosum virus
gugcugcucaag

SEQ ID NO: 232079 - RNA, 12 nt, Molluscum contagiosum virus
gugcuggucaag

SEQ ID NO: 232080 - RNA, 11 nt, Molluscum contagiosum virus
gugcuggucuc

SEQ ID NO: 232081 - RNA, 14 nt, Molluscum contagiosum virus
gugcugucagugga

SEQ ID NO: 232082 - RNA, 15 nt, Molluscum contagiosum virus
gugcuguccuacuuc

SEQ ID NO: 232083 - RNA, 17 nt, Molluscum contagiosum virus
gugcugugccugcgcaa

SEQ ID NO: 232084 - RNA, 17 nt, Molluscum contagiosum virus
gugcuuacugcgggcug

SEQ ID NO: 232085 - RNA, 16 nt, Molluscum contagiosum virus
gugcuuauaccaugga

SEQ ID NO: 232086 - RNA, 15 nt, Molluscum contagiosum virus
gugcuccgcacgugg

SEQ ID NO: 232087 - RNA, 18 nt, Molluscum contagiosum virus
gugcugagcuagugccga

SEQ ID NO: 232088 - RNA, 23 nt, Molluscum contagiosum virus
gugcucguguuguugcaucuucu

SEQ ID NO: 232089 - RNA, 14 nt, Molluscum contagiosum virus
gugcucuucgggga

SEQ ID NO: 232090 - RNA, 19 nt, Molluscum contagiosum virus
gugcucuuuaguacaacgc

SEQ ID NO: 232091 - RNA, 19 nt, Molluscum contagiosum virus
gugcgcgcaacacugcaga

SEQ ID NO: 232092 - RNA, 18 nt, Molluscum contagiosum virus
gugcgcuacguggcgcga

SEQ ID NO: 232093 - RNA, 16 nt, Molluscum contagiosum virus
gugcggcggcgcgugc

SEQ ID NO: 232094 - RNA, 15 nt, Molluscum contagiosum virus
gugcuacugcacugc

SEQ ID NO: 232095 - RNA, 13 nt, Molluscum contagiosum virus
gugcguccgcccu

SEQ ID NO: 232096 - RNA, 12 nt, Molluscum contagiosum virus
gugcgucucucu

SEQ ID NO: 232097 - RNA, 12 nt, Molluscum contagiosum virus
gugcgugacacg

SEQ ID NO: 232098 - RNA, 20 nt, Molluscum contagiosum virus
gugcgagaacuggcgcagca

SEQ ID NO: 232099 - RNA, 14 nt, Molluscum contagiosum virus
gugcgcagggcaau

SEQ ID NO: 232100 - RNA, 11 nt, Molluscum contagiosum virus
gugcgccagcu

SEQ ID NO: 232101 - RNA, 21 nt, Molluscum contagiosum virus
gugcccaagugcgcgugucug

SEQ ID NO: 232102 - RNA, 13 nt, Molluscum contagiosum virus
gugcccacgcugg

SEQ ID NO: 232103 - RNA, 20 nt, Molluscum contagiosum virus
gugcauugcgucuuacugcu

SEQ ID NO: 232104 - RNA, 16 nt, Molluscum contagiosum virus
gugcaagcccagcagc

SEQ ID NO: 232105 - RNA, 17 nt, Molluscum contagiosum virus
gugcaagcccagcagcg

SEQ ID NO: 232106 - RNA, 16 nt, Molluscum contagiosum virus
gugcaauggcaggugc

SEQ ID NO: 232107 - RNA, 16 nt, Molluscum contagiosum virus
gugcacaccagacaaa

SEQ ID NO: 232108 - RNA, 16 nt, Molluscum contagiosum virus
gugcaccucaagaaga

SEQ ID NO: 232109 - RNA, 14 nt, Molluscum contagiosum virus
gugcacgcacgcgc

SEQ ID NO: 232110 - RNA, 20 nt, Molluscum contagiosum virus
gugcacucgagaagaggguc

SEQ ID NO: 232111 - RNA, 22 nt, Molluscum contagiosum virus
gugcagagcaaggcgagucaau

SEQ ID NO: 232112 - RNA, 17 nt, Molluscum contagiosum virus
gugcagccgcugcugcu

SEQ ID NO: 232113 - RNA, 21 nt, Molluscum contagiosum virus
gugcagcgcccggaucugguc

SEQ ID NO: 232114 - RNA, 18 nt, Molluscum contagiosum virus
gguacucaugcugcucau

SEQ ID NO: 232115 - RNA, 14 nt, Molluscum contagiosum virus
gguagcuagcucug

SEQ ID NO: 232116 - RNA, 19 nt, Molluscum contagiosum virus
gggucgugcaggucgagga

SEQ ID NO: 232117 - RNA, 14 nt, Molluscum contagiosum virus
ggcuagcaagcacg

SEQ ID NO: 232118 - RNA, 17 nt, Molluscum contagiosum virus
ggcuagugccauuguga

SEQ ID NO: 232119 - RNA, 17 nt, Molluscum contagiosum virus
ggcuccgcacgugaugg

SEQ ID NO: 232120 - RNA, 21 nt, Molluscum contagiosum virus
ggggcacggcacccgccagcu

SEQ ID NO: 232121 - RNA, 13 nt, Molluscum contagiosum virus
ggcucaagcuggc

SEQ ID NO: 232122 - RNA, 19 nt, Molluscum contagiosum virus
ggggcccaugcucaccgcc

SEQ ID NO: 232123 - RNA, 21 nt, Molluscum contagiosum virus
ggggccggacguccauccucu

SEQ ID NO: 232124 - RNA, 21 nt, Molluscum contagiosum virus
ggggccuguucggcaugcagc

SEQ ID NO: 232125 - RNA, 15 nt, Molluscum contagiosum virus
ggggcuggacagcau

SEQ ID NO: 232126 - RNA, 14 nt, Molluscum contagiosum virus
ggugcaaccgcugc

SEQ ID NO: 232127 - RNA, 17 nt, Molluscum contagiosum virus
ggugcagccgcugcugc

SEQ ID NO: 232128 - RNA, 17 nt, Molluscum contagiosum virus
ggugacucgccguguga

SEQ ID NO: 232129 - RNA, 23 nt, Molluscum contagiosum virus
ggugaauccacucgauggacgcc

SEQ ID NO: 232130 - RNA, 23 nt, Molluscum contagiosum virus
ggucacgcgcuucguggacgagc

SEQ ID NO: 232131 - RNA, 18 nt, Molluscum contagiosum virus
ggucacgucaauggcgcg

SEQ ID NO: 232132 - RNA, 15 nt, Molluscum contagiosum virus
ggugaacgaccucaa

SEQ ID NO: 232133 - RNA, 20 nt, Molluscum contagiosum virus
ggucacacucgacuugcuau

SEQ ID NO: 232134 - RNA, 17 nt, Molluscum contagiosum virus
ggugcgaaauugccaca

SEQ ID NO: 232135 - RNA, 22 nt, Molluscum contagiosum virus
ggugcgagucucuguaacaagc

SEQ ID NO: 232136 - RNA, 23 nt, Molluscum contagiosum virus
ggugcgcauucccguggaccuca

SEQ ID NO: 232137 - RNA, 19 nt, Molluscum contagiosum virus
ggugcgccugcacuacugc

SEQ ID NO: 232138 - RNA, 19 nt, Molluscum contagiosum virus
ggugcgcgucuucuucgac

SEQ ID NO: 232139 - RNA, 21 nt, Molluscum contagiosum virus
guagcccaggaacaucugcaa

SEQ ID NO: 232140 - RNA, 19 nt, Molluscum contagiosum virus
guagggugccgaggcgcug

SEQ ID NO: 232141 - RNA, 15 nt, Molluscum contagiosum virus
guagcgaaugcagug

SEQ ID NO: 232142 - RNA, 22 nt, Molluscum contagiosum virus
guagcuagcguucccaagcaaa

SEQ ID NO: 232143 - RNA, 23 nt, Molluscum contagiosum virus
guauccucgacgcgcugcucucg

SEQ ID NO: 232144 - RNA, 13 nt, Molluscum contagiosum virus
guaugaucugcag

SEQ ID NO: 232145 - RNA, 17 nt, Molluscum contagiosum virus
gucacaagcaccgccug

SEQ ID NO: 232146 - RNA, 16 nt, Molluscum contagiosum virus
gucacgacuguguucc

SEQ ID NO: 232147 - RNA, 17 nt, Molluscum contagiosum virus
gucagagggacaacuca

SEQ ID NO: 232148 - RNA, 14 nt, Molluscum contagiosum virus
guaccccgcaggaa

SEQ ID NO: 232149 - RNA, 15 nt, Molluscum contagiosum virus
guagacgggcuccuu

SEQ ID NO: 232150 - RNA, 17 nt, Molluscum contagiosum virus
guagagggcagaacagu

SEQ ID NO: 232151 - RNA, 20 nt, Molluscum contagiosum virus
guagcagcgccugcacgcac

SEQ ID NO: 232152 - RNA, 21 nt, Molluscum contagiosum virus
guaaauggaccacaagcagua

SEQ ID NO: 232153 - RNA, 19 nt, Molluscum contagiosum virus
uguucgcggagcugugccg

SEQ ID NO: 232154 - RNA, 19 nt, Molluscum contagiosum virus
uguucuucgacaacaugcu

SEQ ID NO: 232155 - RNA, 14 nt, Molluscum contagiosum virus
uguuccacaucaug

SEQ ID NO: 232156 - RNA, 14 nt, Molluscum contagiosum virus
uguucacgugcucc

SEQ ID NO: 232157 - RNA, 24 nt, Molluscum contagiosum virus
ugugcauugcgucuuacugcugca

SEQ ID NO: 232158 - RNA, 21 nt, Molluscum contagiosum virus
ugugccaucucgcacacugca

SEQ ID NO: 232159 - RNA, 23 nt, Molluscum contagiosum virus
uguuucucgcgaaucacaaacac

SEQ ID NO: 232160 - RNA, 15 nt, Molluscum contagiosum virus
uguuguugcaucuuc

SEQ ID NO: 232161 - RNA, 22 nt, Molluscum contagiosum virus
uguuuugugccugcgcuucuag

SEQ ID NO: 232162 - RNA, 18 nt, Molluscum contagiosum virus
uguuuucagggcucgaua

SEQ ID NO: 232163 - RNA, 19 nt, Molluscum contagiosum virus
uguuuuucgggaagcacag

SEQ ID NO: 232164 - RNA, 20 nt, Molluscum contagiosum virus
uguuuuucgggaagcacagu

SEQ ID NO: 232165 - RNA, 12 nt, Molluscum contagiosum virus
uuacugcaagau

SEQ ID NO: 232166 - RNA, 19 nt, Molluscum contagiosum virus
uuacacacgcaccagucuc

SEQ ID NO: 232167 - RNA, 21 nt, Molluscum contagiosum virus
uuaaagaguuccagcagcgcc

SEQ ID NO: 232168 - RNA, 20 nt, Molluscum contagiosum virus
uggaugcgacugcgcaauaa

SEQ ID NO: 232169 - RNA, 12 nt, Molluscum contagiosum virus
uggaugcugcuc

SEQ ID NO: 232170 - RNA, 13 nt, Molluscum contagiosum virus
uggcaaacaggca

SEQ ID NO: 232171 - RNA, 20 nt, Molluscum contagiosum virus
uggcucuagaguacuaggug

SEQ ID NO: 232172 - RNA, 20 nt, Molluscum contagiosum virus
uggcugcugcgcgaccgcac

SEQ ID NO: 232173 - RNA, 14 nt, Molluscum contagiosum virus
uggcuggcgcucaa

SEQ ID NO: 232174 - RNA, 12 nt, Molluscum contagiosum virus
uggcgugacagg

SEQ ID NO: 232175 - RNA, 14 nt, Molluscum contagiosum virus
uggcucacagccgu

SEQ ID NO: 232176 - RNA, 16 nt, Molluscum contagiosum virus
uggcgcugcacaguuc

SEQ ID NO: 232177 - RNA, 15 nt, Molluscum contagiosum virus
uggcggcgcacgcga

SEQ ID NO: 232178 - RNA, 17 nt, Molluscum contagiosum virus
uggcaacgcaaacgcac

SEQ ID NO: 232179 - RNA, 19 nt, Molluscum contagiosum virus
uggcaaggauuacgcugcc

SEQ ID NO: 232180 - RNA, 14 nt, Molluscum contagiosum virus
uggcaagggcuccu

SEQ ID NO: 232181 - RNA, 17 nt, Molluscum contagiosum virus
uggcaagggcuccuucu

SEQ ID NO: 232182 - RNA, 13 nt, Molluscum contagiosum virus
uggggaggacaaa

SEQ ID NO: 232183 - RNA, 16 nt, Molluscum contagiosum virus
ugggcaaggacaucua

SEQ ID NO: 232184 - RNA, 15 nt, Molluscum contagiosum virus
ugggcacaagcuuuc

SEQ ID NO: 232185 - RNA, 20 nt, Molluscum contagiosum virus
ugggcuuggccaugguggac

SEQ ID NO: 232186 - RNA, 18 nt, Molluscum contagiosum virus
ugggcgucgcacaguuca

SEQ ID NO: 232187 - RNA, 20 nt, Molluscum contagiosum virus
uguagcggcgcuugaugucc

SEQ ID NO: 232188 - RNA, 19 nt, Molluscum contagiosum virus
uguagguacccgcaacccc

SEQ ID NO: 232189 - RNA, 12 nt, Molluscum contagiosum virus
ugguuaccaagg

SEQ ID NO: 232190 - RNA, 13 nt, Molluscum contagiosum virus
ugguugcuugcau

SEQ ID NO: 232191 - RNA, 21 nt, Molluscum contagiosum virus
uggugcucacgcuguuuggaa

SEQ ID NO: 232192 - RNA, 16 nt, Molluscum contagiosum virus
uggugcucgccugcau

SEQ ID NO: 232193 - RNA, 15 nt, Molluscum contagiosum virus
uggugcacacacaca

SEQ ID NO: 232194 - RNA, 19 nt, Molluscum contagiosum virus
uggugcgccugcacuacug

SEQ ID NO: 232195 - RNA, 16 nt, Molluscum contagiosum virus
uggugcgcgugacaca

SEQ ID NO: 232196 - RNA, 22 nt, Molluscum contagiosum virus
ugguggccaagauccuguacca

SEQ ID NO: 232197 - RNA, 14 nt, Molluscum contagiosum virus
ugugaucaagagca

SEQ ID NO: 232198 - RNA, 19 nt, Molluscum contagiosum virus
ugucgacagucuagugcgu

SEQ ID NO: 232199 - RNA, 14 nt, Molluscum contagiosum virus
uguccuuucagaca

SEQ ID NO: 232200 - RNA, 15 nt, Molluscum contagiosum virus
ugucgcacgagcaug

SEQ ID NO: 232201 - RNA, 16 nt, Molluscum contagiosum virus
ugucgcgaacgcgucc

SEQ ID NO: 232202 - RNA, 20 nt, Molluscum contagiosum virus
uguccgcggacgcgggccug

SEQ ID NO: 232203 - RNA, 23 nt, Molluscum contagiosum virus
uguccgcgggcgcacgcuugucc

SEQ ID NO: 232204 - RNA, 14 nt, Molluscum contagiosum virus
uguaucucaccucg

SEQ ID NO: 232205 - RNA, 18 nt, Molluscum contagiosum virus
uuguggcgccgaugcagu

SEQ ID NO: 232206 - RNA, 14 nt, Molluscum contagiosum virus
uuguggucaagacu

SEQ ID NO: 232207 - RNA, 16 nt, Molluscum contagiosum virus
uuguugcgcaugcgca

SEQ ID NO: 232208 - RNA, 11 nt, Molluscum contagiosum virus
uugggcacugc

SEQ ID NO: 232209 - RNA, 16 nt, Molluscum contagiosum virus
uugugcuuguucucuu

SEQ ID NO: 232210 - RNA, 13 nt, Molluscum contagiosum virus
uugugcucgcuua

SEQ ID NO: 232211 - RNA, 18 nt, Molluscum contagiosum virus
uugugaaguccucucucc

SEQ ID NO: 232212 - RNA, 22 nt, Molluscum contagiosum virus
uugucgaagaacauaugucucc

SEQ ID NO: 232213 - RNA, 22 nt, Molluscum contagiosum virus
uuucucaagaucguuuugcacu

SEQ ID NO: 232214 - RNA, 16 nt, Molluscum contagiosum virus
uuucgggaagcacagu

SEQ ID NO: 232215 - RNA, 20 nt, Molluscum contagiosum virus
uuucgccccgagaauaccgu

SEQ ID NO: 232216 - RNA, 13 nt, Molluscum contagiosum virus
uuucgacgcugcc

SEQ ID NO: 232217 - RNA, 18 nt, Molluscum contagiosum virus
uuuccugcggcgcugcua

SEQ ID NO: 232218 - RNA, 21 nt, Molluscum contagiosum virus
uuuccuggcucgcgagugugc

SEQ ID NO: 232219 - RNA, 22 nt, Molluscum contagiosum virus
uuuccuggcucgcgagugugca

SEQ ID NO: 232220 - RNA, 17 nt, Molluscum contagiosum virus
uuuaugcacuuucaacu

SEQ ID NO: 232221 - RNA, 12 nt, Molluscum contagiosum virus
uuuaucucucac

SEQ ID NO: 232222 - RNA, 15 nt, Molluscum contagiosum virus
uuccccguccuugcu

SEQ ID NO: 232223 - RNA, 15 nt, Molluscum contagiosum virus
uuccucuacaccagc

SEQ ID NO: 232224 - RNA, 17 nt, Molluscum contagiosum virus
uuccucuacaccagcug

SEQ ID NO: 232225 - RNA, 18 nt, Molluscum contagiosum virus
uuccgcgugagagccauu

SEQ ID NO: 232226 - RNA, 17 nt, Molluscum contagiosum virus
uuccugcaaacuugacu

SEQ ID NO: 232227 - RNA, 21 nt, Molluscum contagiosum virus
uuccuggcucgcgagugugca

SEQ ID NO: 232228 - RNA, 15 nt, Molluscum contagiosum virus
uuccuuuuucacuuu

SEQ ID NO: 232229 - RNA, 23 nt, Molluscum contagiosum virus
uucgccggaggaaggacaguguc

SEQ ID NO: 232230 - RNA, 23 nt, Molluscum contagiosum virus
uucgcgggcccgccuuuguggac

SEQ ID NO: 232231 - RNA, 17 nt, Molluscum contagiosum virus
uucgcgcgugcuggacg

SEQ ID NO: 232232 - RNA, 22 nt, Molluscum contagiosum virus
uucgcaagugcacaccagacaa

SEQ ID NO: 232233 - RNA, 17 nt, Molluscum contagiosum virus
uucaucgcguugucgag

SEQ ID NO: 232234 - RNA, 14 nt, Molluscum contagiosum virus
uucaucuacugcga

SEQ ID NO: 232235 - RNA, 16 nt, Molluscum contagiosum virus
uucaucuacugcgaca

SEQ ID NO: 232236 - RNA, 20 nt, Molluscum contagiosum virus
uucaucuacugcgacaucca

SEQ ID NO: 232237 - RNA, 12 nt, Molluscum contagiosum virus
uucacgcugcuc

SEQ ID NO: 232238 - RNA, 21 nt, Molluscum contagiosum virus
uucaggcaagaggggagccag

SEQ ID NO: 232239 - RNA, 22 nt, Molluscum contagiosum virus
uugcucgcuugccgcuugagca

SEQ ID NO: 232240 - RNA, 14 nt, Molluscum contagiosum virus
uugcuucagcgggc

SEQ ID NO: 232241 - RNA, 16 nt, Molluscum contagiosum virus
uugcuguuccacauca

SEQ ID NO: 232242 - RNA, 23 nt, Molluscum contagiosum virus
uugcauguucucuuuguuccugc

SEQ ID NO: 232243 - RNA, 14 nt, Molluscum contagiosum virus
uugcauggacaucc

SEQ ID NO: 232244 - RNA, 15 nt, Molluscum contagiosum virus
uugcaggccuccuuc

SEQ ID NO: 232245 - RNA, 20 nt, Molluscum contagiosum virus
uugccaggcaacgcacaaaa

SEQ ID NO: 232246 - RNA, 20 nt, Molluscum contagiosum virus
uugccaguagcgaaugcagu

SEQ ID NO: 232247 - RNA, 23 nt, Molluscum contagiosum virus
uugagagcagcggcuacuuggac

SEQ ID NO: 232248 - RNA, 13 nt, Molluscum contagiosum virus
uugcacagugugc

SEQ ID NO: 232249 - RNA, 14 nt, Molluscum contagiosum virus
uugcacgcgugugg

SEQ ID NO: 232250 - RNA, 12 nt, Molluscum contagiosum virus
uugcacuuguca

SEQ ID NO: 232251 - RNA, 16 nt, Molluscum contagiosum virus
uugacaaguacaugca

SEQ ID NO: 232252 - RNA, 13 nt, Molluscum contagiosum virus
uugacacgcucau

SEQ ID NO: 232253 - RNA, 15 nt, Molluscum contagiosum virus
uugacaugcaccagc

SEQ ID NO: 232254 - RNA, 19 nt, Molluscum contagiosum virus
uugacaggcgcgcaagugc

SEQ ID NO: 232255 - RNA, 17 nt, Molluscum contagiosum virus
uugaacaucuaugcacg

SEQ ID NO: 232256 - RNA, 18 nt, Molluscum contagiosum virus
uugaaaugauugguucuu

SEQ ID NO: 232257 - RNA, 17 nt, Molluscum contagiosum virus
uucucgcgaaucacaaa

SEQ ID NO: 232258 - RNA, 20 nt, Molluscum contagiosum virus
uucucguggcguugcugcug

SEQ ID NO: 232259 - RNA, 20 nt, Molluscum contagiosum virus
uugaaaaaacaugugccugc

SEQ ID NO: 232260 - RNA, 16 nt, Molluscum contagiosum virus
ugcaacucgcgcugca

SEQ ID NO: 232261 - RNA, 19 nt, Molluscum contagiosum virus
ugcaacucgcgcugcagca

SEQ ID NO: 232262 - RNA, 18 nt, Molluscum contagiosum virus
ugcaacgcaggacacugu

SEQ ID NO: 232263 - RNA, 22 nt, Molluscum contagiosum virus
ugcagcgagcucgcguaccugu

SEQ ID NO: 232264 - RNA, 19 nt, Molluscum contagiosum virus
ugcagcggaugcagaacag

SEQ ID NO: 232265 - RNA, 18 nt, Molluscum contagiosum virus
ugcagucacgacuguguu

SEQ ID NO: 232266 - RNA, 17 nt, Molluscum contagiosum virus
ugcagguguguaucuca

SEQ ID NO: 232267 - RNA, 22 nt, Molluscum contagiosum virus
ugcaguugagagcagcggcuac

SEQ ID NO: 232268 - RNA, 12 nt, Molluscum contagiosum virus
ugcagugcacca

SEQ ID NO: 232269 - RNA, 13 nt, Molluscum contagiosum virus
ugcagugcaccag

SEQ ID NO: 232270 - RNA, 15 nt, Molluscum contagiosum virus
ugcagugcaccagca

SEQ ID NO: 232271 - RNA, 22 nt, Molluscum contagiosum virus
ugcaggcucuaagcgcacgcgc

SEQ ID NO: 232272 - RNA, 15 nt, Molluscum contagiosum virus
ugcauacacuuccug

SEQ ID NO: 232273 - RNA, 18 nt, Molluscum contagiosum virus
ugccaggcggucuuccag

SEQ ID NO: 232274 - RNA, 19 nt, Molluscum contagiosum virus
ugccaggcaacgcacaaaa

SEQ ID NO: 232275 - RNA, 16 nt, Molluscum contagiosum virus
ugccagcagagcugcc

SEQ ID NO: 232276 - RNA, 15 nt, Molluscum contagiosum virus
ugccagauugccggc

SEQ ID NO: 232277 - RNA, 15 nt, Molluscum contagiosum virus
ugcccaaccuacgcu

SEQ ID NO: 232278 - RNA, 19 nt, Molluscum contagiosum virus
ugcccacgcgcaaggucuu

SEQ ID NO: 232279 - RNA, 23 nt, Molluscum contagiosum virus
ugccaaagcuaugcgcagcugcg

SEQ ID NO: 232280 - RNA, 23 nt, Molluscum contagiosum virus
ugccacggccgcgcgcgacuuug

SEQ ID NO: 232281 - RNA, 14 nt, Molluscum contagiosum virus
ugccacaccagcug

SEQ ID NO: 232282 - RNA, 20 nt, Molluscum contagiosum virus
ugcauccuggggaaccgcug

SEQ ID NO: 232283 - RNA, 22 nt, Molluscum contagiosum virus
ugcaucuuuuuuaugcacuuuc

SEQ ID NO: 232284 - RNA, 22 nt, Molluscum contagiosum virus
ugcauugcgucuuacugcugca

SEQ ID NO: 232285 - RNA, 21 nt, Molluscum contagiosum virus
ugcauucguaacgugauccga

SEQ ID NO: 232286 - RNA, 12 nt, Molluscum contagiosum virus
ugcauguucucu

SEQ ID NO: 232287 - RNA, 13 nt, Molluscum contagiosum virus
ugccucgugccuu

SEQ ID NO: 232288 - RNA, 14 nt, Molluscum contagiosum virus
ugccucgugccuuu

SEQ ID NO: 232289 - RNA, 23 nt, Molluscum contagiosum virus
ugccucgugcucggcgugaucuu

SEQ ID NO: 232290 - RNA, 18 nt, Molluscum contagiosum virus
ugccucguggaacaaaga

SEQ ID NO: 232291 - RNA, 17 nt, Molluscum contagiosum virus
ugccgugcccaucuccu

SEQ ID NO: 232292 - RNA, 16 nt, Molluscum contagiosum virus
ugccuaggaggagaac

SEQ ID NO: 232293 - RNA, 16 nt, Molluscum contagiosum virus
ugccugagaagcugua

SEQ ID NO: 232294 - RNA, 17 nt, Molluscum contagiosum virus
ugccuggagggcagugc

SEQ ID NO: 232295 - RNA, 22 nt, Molluscum contagiosum virus
ugcgaacgcgcaagugugcgca

SEQ ID NO: 232296 - RNA, 14 nt, Molluscum contagiosum virus
ugccuuuugcacag

SEQ ID NO: 232297 - RNA, 18 nt, Molluscum contagiosum virus
ugccuuggcgcccgugcc

SEQ ID NO: 232298 - RNA, 13 nt, Molluscum contagiosum virus
ugccuuucagggg

SEQ ID NO: 232299 - RNA, 20 nt, Molluscum contagiosum virus
ugcccgcacacgcaaacaaa

SEQ ID NO: 232300 - RNA, 22 nt, Molluscum contagiosum virus
ugcccuacgcgcgcgugcugcu

SEQ ID NO: 232301 - RNA, 14 nt, Molluscum contagiosum virus
ugccccguccucgc

SEQ ID NO: 232302 - RNA, 20 nt, Molluscum contagiosum virus
ugcccgaccuuggugcucau

SEQ ID NO: 232303 - RNA, 13 nt, Molluscum contagiosum virus
ugcccgacgugcc

SEQ ID NO: 232304 - RNA, 20 nt, Molluscum contagiosum virus
ugcccccaccgggguccgcu

SEQ ID NO: 232305 - RNA, 21 nt, Molluscum contagiosum virus
ugcccuggaccuccaucuugc

SEQ ID NO: 232306 - RNA, 21 nt, Molluscum contagiosum virus
ugccgcuggcgcuaccuaccg

SEQ ID NO: 232307 - RNA, 21 nt, Molluscum contagiosum virus
ugccgcaguuggucaccgccu

SEQ ID NO: 232308 - RNA, 17 nt, Molluscum contagiosum virus
ugccgaggaggugcucu

SEQ ID NO: 232309 - RNA, 16 nt, Molluscum contagiosum virus
ugcgccugcacuacug

SEQ ID NO: 232310 - RNA, 15 nt, Molluscum contagiosum virus
ugcgccugcacuucg

SEQ ID NO: 232311 - RNA, 22 nt, Molluscum contagiosum virus
ugcgcgcguaugcgaacagccg

SEQ ID NO: 232312 - RNA, 22 nt, Molluscum contagiosum virus
ugcgcggcccgcgggcugcaag

SEQ ID NO: 232313 - RNA, 15 nt, Molluscum contagiosum virus
ugcgcgaccaguaca

SEQ ID NO: 232314 - RNA, 16 nt, Molluscum contagiosum virus
ugcgcgaccaguacau

SEQ ID NO: 232315 - RNA, 18 nt, Molluscum contagiosum virus
ugcgccgugcgucucucu

SEQ ID NO: 232316 - RNA, 14 nt, Molluscum contagiosum virus
ugcgcgugagccaa

SEQ ID NO: 232317 - RNA, 15 nt, Molluscum contagiosum virus
ugcgcgugugcagca

SEQ ID NO: 232318 - RNA, 16 nt, Molluscum contagiosum virus
ugcgcucucagagcau

SEQ ID NO: 232319 - RNA, 19 nt, Molluscum contagiosum virus
ugcgcuuccucuacaccag

SEQ ID NO: 232320 - RNA, 14 nt, Molluscum contagiosum virus
ugcgauaacaucug

SEQ ID NO: 232321 - RNA, 23 nt, Molluscum contagiosum virus
ugcgaccccagugcgagaucgac

SEQ ID NO: 232322 - RNA, 13 nt, Molluscum contagiosum virus
ugcgacacuugcu

SEQ ID NO: 232323 - RNA, 14 nt, Molluscum contagiosum virus
ugcgagaacuggcg

SEQ ID NO: 232324 - RNA, 17 nt, Molluscum contagiosum virus
ugcgagaucguggacga

SEQ ID NO: 232325 - RNA, 11 nt, Molluscum contagiosum virus
ugcgagccagu

SEQ ID NO: 232326 - RNA, 22 nt, Molluscum contagiosum virus
ugcgagcgcggcuuacacacgc

SEQ ID NO: 232327 - RNA, 20 nt, Molluscum contagiosum virus
ugcgcaucccucgucuuugc

SEQ ID NO: 232328 - RNA, 13 nt, Molluscum contagiosum virus
ugcgcaaccugga

SEQ ID NO: 232329 - RNA, 14 nt, Molluscum contagiosum virus
ugcgcaaccuggau

SEQ ID NO: 232330 - RNA, 17 nt, Molluscum contagiosum virus
ugcgcaacgcgggccag

SEQ ID NO: 232331 - RNA, 14 nt, Molluscum contagiosum virus
ugcgcaagcauuuc

SEQ ID NO: 232332 - RNA, 14 nt, Molluscum contagiosum virus
ugcgcaagcucagc

SEQ ID NO: 232333 - RNA, 23 nt, Molluscum contagiosum virus
ugcgcacacuugcgcguccacaa

SEQ ID NO: 232334 - RNA, 15 nt, Molluscum contagiosum virus
ugcgcaccaguaccu

SEQ ID NO: 232335 - RNA, 18 nt, Molluscum contagiosum virus
ugcgcacgcgcgucaugu

SEQ ID NO: 232336 - RNA, 16 nt, Molluscum contagiosum virus
ugcgcacggaccucaa

SEQ ID NO: 232337 - RNA, 19 nt, Molluscum contagiosum virus
ugcgcacggaccucaagga

SEQ ID NO: 232338 - RNA, 19 nt, Molluscum contagiosum virus
ugcgggucucggggcuccg

SEQ ID NO: 232339 - RNA, 15 nt, Molluscum contagiosum virus
ugcggugacuugccg

SEQ ID NO: 232340 - RNA, 23 nt, Molluscum contagiosum virus
ugcggcggcuuucucacgcccgc

SEQ ID NO: 232341 - RNA, 16 nt, Molluscum contagiosum virus
ugcggcucgcacuugc

SEQ ID NO: 232342 - RNA, 16 nt, Molluscum contagiosum virus
ugcggacaccagaacc

SEQ ID NO: 232343 - RNA, 13 nt, Molluscum contagiosum virus
ugcggacgggaag

SEQ ID NO: 232344 - RNA, 14 nt, Molluscum contagiosum virus
ugcggacucgcgag

SEQ ID NO: 232345 - RNA, 17 nt, Molluscum contagiosum virus
ugcgucuuacugcugca

SEQ ID NO: 232346 - RNA, 13 nt, Molluscum contagiosum virus
ugcguacaccuaa

SEQ ID NO: 232347 - RNA, 15 nt, Molluscum contagiosum virus
ugcgucacaagcacc

SEQ ID NO: 232348 - RNA, 16 nt, Molluscum contagiosum virus
ugcguucgcuccgucc

SEQ ID NO: 232349 - RNA, 20 nt, Molluscum contagiosum virus
ugcgugugccggugcugcgg

SEQ ID NO: 232350 - RNA, 13 nt, Molluscum contagiosum virus
ugcgugcacuguc

SEQ ID NO: 232351 - RNA, 14 nt, Molluscum contagiosum virus
ugcgugcacugucu

SEQ ID NO: 232352 - RNA, 14 nt, Molluscum contagiosum virus
ugaccaaaggucca

SEQ ID NO: 232353 - RNA, 14 nt, Molluscum contagiosum virus
ugaccaagcacauu

SEQ ID NO: 232354 - RNA, 22 nt, Molluscum contagiosum virus
ugacgaacggaacacagugcgu

SEQ ID NO: 232355 - RNA, 19 nt, Molluscum contagiosum virus
ugacgcaaagucaucugcc

SEQ ID NO: 232356 - RNA, 13 nt, Molluscum contagiosum virus
ugacgguccugcg

SEQ ID NO: 232357 - RNA, 16 nt, Molluscum contagiosum virus
ugagcgcagcacacuu

SEQ ID NO: 232358 - RNA, 14 nt, Molluscum contagiosum virus
ugagcgccgucucg

SEQ ID NO: 232359 - RNA, 16 nt, Molluscum contagiosum virus
ugagcgccuaccgcaa

SEQ ID NO: 232360 - RNA, 23 nt, Molluscum contagiosum virus
ugagcuagugccgagcucgccuc

SEQ ID NO: 232361 - RNA, 23 nt, Molluscum contagiosum virus
ugaggccgcggagaagugcgcag

SEQ ID NO: 232362 - RNA, 21 nt, Molluscum contagiosum virus
ugaggaagcaagacccagcaa

SEQ ID NO: 232363 - RNA, 22 nt, Molluscum contagiosum virus
ugaggaagaccuuggacacgug

SEQ ID NO: 232364 - RNA, 17 nt, Molluscum contagiosum virus
ugaggaggcggcacugc

SEQ ID NO: 232365 - RNA, 18 nt, Molluscum contagiosum virus
ugaggaggcggcacugcu

SEQ ID NO: 232366 - RNA, 23 nt, Molluscum contagiosum virus
ugauugucaagcacuacauggac

SEQ ID NO: 232367 - RNA, 14 nt, Molluscum contagiosum virus
ugaguaccuguaug

SEQ ID NO: 232368 - RNA, 14 nt, Molluscum contagiosum virus
ugauaaaagcacag

SEQ ID NO: 232369 - RNA, 17 nt, Molluscum contagiosum virus
ugaaaggcauccucgcc

SEQ ID NO: 232370 - RNA, 20 nt, Molluscum contagiosum virus
ucugggcgucgcacaguuca

SEQ ID NO: 232371 - RNA, 21 nt, Molluscum contagiosum virus
ucuggcguacucgugucacaa

SEQ ID NO: 232372 - RNA, 22 nt, Molluscum contagiosum virus
ucuggcguacucgugucacaau

SEQ ID NO: 232373 - RNA, 22 nt, Molluscum contagiosum virus
ucuuuguggucaagacuggccu

SEQ ID NO: 232374 - RNA, 21 nt, Molluscum contagiosum virus
ucugugaccugcgccauccac

SEQ ID NO: 232375 - RNA, 22 nt, Molluscum contagiosum virus
ucuccgaggaaacgcagcacuu

SEQ ID NO: 232376 - RNA, 17 nt, Molluscum contagiosum virus
ucuccuacacauuccuc

SEQ ID NO: 232377 - RNA, 20 nt, Molluscum contagiosum virus
ucuccuccggggcgcaagca

SEQ ID NO: 232378 - RNA, 21 nt, Molluscum contagiosum virus
ucugauccgacauguaccauu

SEQ ID NO: 232379 - RNA, 12 nt, Molluscum contagiosum virus
ucuccacaaaga

SEQ ID NO: 232380 - RNA, 22 nt, Molluscum contagiosum virus
ucuccaugucgucaaaggcaaa

SEQ ID NO: 232381 - RNA, 17 nt, Molluscum contagiosum virus
ucuccccuugggcucug

SEQ ID NO: 232382 - RNA, 13 nt, Molluscum contagiosum virus
ucugcaagcugcc

SEQ ID NO: 232383 - RNA, 18 nt, Molluscum contagiosum virus
ucugcuugcggcacacau

SEQ ID NO: 232384 - RNA, 20 nt, Molluscum contagiosum virus
ucugccucguggaacaaaga

SEQ ID NO: 232385 - RNA, 22 nt, Molluscum contagiosum virus
ucugcguguacgacgugcugcu

SEQ ID NO: 232386 - RNA, 17 nt, Molluscum contagiosum virus
ucuauugccgcgugcuc

SEQ ID NO: 232387 - RNA, 15 nt, Molluscum contagiosum virus
ucucaacgagcgcau

SEQ ID NO: 232388 - RNA, 21 nt, Molluscum contagiosum virus
ucucaagacaagucacacucu

SEQ ID NO: 232389 - RNA, 23 nt, Molluscum contagiosum virus
ucucaagaucguuuugcacuugu

SEQ ID NO: 232390 - RNA, 19 nt, Molluscum contagiosum virus
ucucaccucgcaugaugaa

SEQ ID NO: 232391 - RNA, 17 nt, Molluscum contagiosum virus
ucgugugcguacuggga

SEQ ID NO: 232392 - RNA, 14 nt, Molluscum contagiosum virus
ucguuuugcacuug

SEQ ID NO: 232393 - RNA, 14 nt, Molluscum contagiosum virus
ucguuguccuugcc

SEQ ID NO: 232394 - RNA, 13 nt, Molluscum contagiosum virus
uccugaggaagca

SEQ ID NO: 232395 - RNA, 14 nt, Molluscum contagiosum virus
uccugaggaagcaa

SEQ ID NO: 232396 - RNA, 14 nt, Molluscum contagiosum virus
uccugcgcuccgac

SEQ ID NO: 232397 - RNA, 22 nt, Molluscum contagiosum virus
uccuggagggguguuuccuugc

SEQ ID NO: 232398 - RNA, 15 nt, Molluscum contagiosum virus
uccugcagcugucca

SEQ ID NO: 232399 - RNA, 17 nt, Molluscum contagiosum virus
ucgaacaccuccugcuu

SEQ ID NO: 232400 - RNA, 23 nt, Molluscum contagiosum virus
ucgaaacgcgggcaucgcaguuc

SEQ ID NO: 232401 - RNA, 17 nt, Molluscum contagiosum virus
ucgaagaccaccagcac

SEQ ID NO: 232402 - RNA, 12 nt, Molluscum contagiosum virus
ucgaaccuggaa

SEQ ID NO: 232403 - RNA, 17 nt, Molluscum contagiosum virus
ucgaagcgcgcagcgcc

SEQ ID NO: 232404 - RNA, 17 nt, Molluscum contagiosum virus
ucgacagucuagugcgu

SEQ ID NO: 232405 - RNA, 18 nt, Molluscum contagiosum virus
ucgacauggagcgcauca

SEQ ID NO: 232406 - RNA, 14 nt, Molluscum contagiosum virus
ucgacgcgcugcuc

SEQ ID NO: 232407 - RNA, 20 nt, Molluscum contagiosum virus
ucgcuuagccaacagcgcaa

SEQ ID NO: 232408 - RNA, 22 nt, Molluscum contagiosum virus
ucgcucucucagggugguuuga

SEQ ID NO: 232409 - RNA, 12 nt, Molluscum contagiosum virus
ucgcugcugcuc

SEQ ID NO: 232410 - RNA, 17 nt, Molluscum contagiosum virus
ucgcugcuggcagacac

SEQ ID NO: 232411 - RNA, 19 nt, Molluscum contagiosum virus
ucgcuggaggauucuugua

SEQ ID NO: 232412 - RNA, 15 nt, Molluscum contagiosum virus
ucgcuggugugcacu

SEQ ID NO: 232413 - RNA, 23 nt, Molluscum contagiosum virus
ucgcucgagggcgccgugcugcg

SEQ ID NO: 232414 - RNA, 17 nt, Molluscum contagiosum virus
ucgcucgcggugcagcu

SEQ ID NO: 232415 - RNA, 15 nt, Molluscum contagiosum virus
ucgcucgcucgcuca

SEQ ID NO: 232416 - RNA, 15 nt, Molluscum contagiosum virus
ucggacucagcaugu

SEQ ID NO: 232417 - RNA, 19 nt, Molluscum contagiosum virus
ucggaauuccuugugcaau

SEQ ID NO: 232418 - RNA, 18 nt, Molluscum contagiosum virus
ucggcucgggaacaaagg

SEQ ID NO: 232419 - RNA, 15 nt, Molluscum contagiosum virus
ucggcguggugcugg

SEQ ID NO: 232420 - RNA, 17 nt, Molluscum contagiosum virus
ucgggcuagcaagcacg

SEQ ID NO: 232421 - RNA, 13 nt, Molluscum contagiosum virus
ucgggcaugcacu

SEQ ID NO: 232422 - RNA, 15 nt, Molluscum contagiosum virus
ucgggaagcacaguc

SEQ ID NO: 232423 - RNA, 23 nt, Molluscum contagiosum virus
ucgggagaacucuacacguggaa

SEQ ID NO: 232424 - RNA, 17 nt, Molluscum contagiosum virus
ucgggcaagaccaucau

SEQ ID NO: 232425 - RNA, 17 nt, Molluscum contagiosum virus
ucguccggcgcucgccu

SEQ ID NO: 232426 - RNA, 14 nt, Molluscum contagiosum virus
ucguccccaagagc

SEQ ID NO: 232427 - RNA, 21 nt, Molluscum contagiosum virus
ucgucgugaacgcggacacgu

SEQ ID NO: 232428 - RNA, 12 nt, Molluscum contagiosum virus
ucgugcucucug

SEQ ID NO: 232429 - RNA, 20 nt, Molluscum contagiosum virus
ucgugcucuuggcguucgca

SEQ ID NO: 232430 - RNA, 14 nt, Molluscum contagiosum virus
ucguggaacaaaga

SEQ ID NO: 232431 - RNA, 15 nt, Molluscum contagiosum virus
ucguggcaacaacau

SEQ ID NO: 232432 - RNA, 19 nt, Molluscum contagiosum virus
ucgucaaagagaccuggag

SEQ ID NO: 232433 - RNA, 13 nt, Molluscum contagiosum virus
ucguccagcugcg

SEQ ID NO: 232434 - RNA, 19 nt, Molluscum contagiosum virus
ucccagaaaacgcacuguc

SEQ ID NO: 232435 - RNA, 15 nt, Molluscum contagiosum virus
ucccaagagccaugu

SEQ ID NO: 232436 - RNA, 12 nt, Molluscum contagiosum virus
uccccaacaucc

SEQ ID NO: 232437 - RNA, 18 nt, Molluscum contagiosum virus
ucccgcggccgccacugu

SEQ ID NO: 232438 - RNA, 19 nt, Molluscum contagiosum virus
ucccgaauccuuuacugca

SEQ ID NO: 232439 - RNA, 16 nt, Molluscum contagiosum virus
uccccuagaagaccac

SEQ ID NO: 232440 - RNA, 13 nt, Molluscum contagiosum virus
uccccguccuugc

SEQ ID NO: 232441 - RNA, 17 nt, Molluscum contagiosum virus
uccggccuguaaaugga

SEQ ID NO: 232442 - RNA, 19 nt, Molluscum contagiosum virus
uccggcggcuggaccugcg

SEQ ID NO: 232443 - RNA, 18 nt, Molluscum contagiosum virus
uccggcacgcacaaaguu

SEQ ID NO: 232444 - RNA, 19 nt, Molluscum contagiosum virus
uccgcucguguuugucaag

SEQ ID NO: 232445 - RNA, 15 nt, Molluscum contagiosum virus
uccgcgcgcucucac

SEQ ID NO: 232446 - RNA, 14 nt, Molluscum contagiosum virus
uccgcggaggccaa

SEQ ID NO: 232447 - RNA, 15 nt, Molluscum contagiosum virus
uccgcccccaggugg

SEQ ID NO: 232448 - RNA, 19 nt, Molluscum contagiosum virus
uccgccuaccccuugcuuc

SEQ ID NO: 232449 - RNA, 17 nt, Molluscum contagiosum virus
uccgccgggaauaccgg

SEQ ID NO: 232450 - RNA, 13 nt, Molluscum contagiosum virus
uccgaguccagcu

SEQ ID NO: 232451 - RNA, 15 nt, Molluscum contagiosum virus
uccgcacguggaauc

SEQ ID NO: 232452 - RNA, 23 nt, Molluscum contagiosum virus
uccgcacacgcgcgcgugcugcu

SEQ ID NO: 232453 - RNA, 14 nt, Molluscum contagiosum virus
uccgcacagcuuca

SEQ ID NO: 232454 - RNA, 18 nt, Molluscum contagiosum virus
uccuacuucgucaagcag

SEQ ID NO: 232455 - RNA, 15 nt, Molluscum contagiosum virus
uccucuacaccagcu

SEQ ID NO: 232456 - RNA, 22 nt, Molluscum contagiosum virus
uccucuccaucaucgagcugca

SEQ ID NO: 232457 - RNA, 15 nt, Molluscum contagiosum virus
uccuacacauuccuc

SEQ ID NO: 232458 - RNA, 20 nt, Molluscum contagiosum virus
uccucgugggauaggcacac

SEQ ID NO: 232459 - RNA, 22 nt, Molluscum contagiosum virus
uccucgugggauaggcacacac

SEQ ID NO: 232460 - RNA, 11 nt, Molluscum contagiosum virus
uccgugccauu

SEQ ID NO: 232461 - RNA, 14 nt, Molluscum contagiosum virus
uccgugccauuucg

SEQ ID NO: 232462 - RNA, 17 nt, Molluscum contagiosum virus
uccgugcgcagggcaau

SEQ ID NO: 232463 - RNA, 18 nt, Molluscum contagiosum virus
uccgucacggacagcagc

SEQ ID NO: 232464 - RNA, 23 nt, Molluscum contagiosum virus
uccgucagggaugccagugcagu

SEQ ID NO: 232465 - RNA, 17 nt, Molluscum contagiosum virus
ucacaauggcacuagcc

SEQ ID NO: 232466 - RNA, 16 nt, Molluscum contagiosum virus
ucaucaccagccugcu

SEQ ID NO: 232467 - RNA, 12 nt, Molluscum contagiosum virus
ucaucaagcccg

SEQ ID NO: 232468 - RNA, 13 nt, Molluscum contagiosum virus
ucauccucccugc

SEQ ID NO: 232469 - RNA, 23 nt, Molluscum contagiosum virus
ucaucgggcugcagcccuuccac

SEQ ID NO: 232470 - RNA, 21 nt, Molluscum contagiosum virus
ucaucgagcaugucacgcuca

SEQ ID NO: 232471 - RNA, 19 nt, Molluscum contagiosum virus
ucauggcgcgcaaccagcu

SEQ ID NO: 232472 - RNA, 21 nt, Molluscum contagiosum virus
uccaagaggccgucacaugcu

SEQ ID NO: 232473 - RNA, 19 nt, Molluscum contagiosum virus
uuugcgaacgcgcaagugu

SEQ ID NO: 232474 - RNA, 14 nt, Molluscum contagiosum virus
uuugcgagcacugu

SEQ ID NO: 232475 - RNA, 24 nt, Molluscum contagiosum virus
uuugcgugaggaagaccuuggaca

SEQ ID NO: 232476 - RNA, 16 nt, Molluscum contagiosum virus
uuugcgcggcacuugc

SEQ ID NO: 232477 - RNA, 21 nt, Molluscum contagiosum virus
uuugcggacgcgcgagugugc

SEQ ID NO: 232478 - RNA, 22 nt, Molluscum contagiosum virus
uuugcggacgcgcgagugugcg

SEQ ID NO: 232479 - RNA, 17 nt, Molluscum contagiosum virus
uuugccaaagcucucuu

SEQ ID NO: 232480 - RNA, 19 nt, Molluscum contagiosum virus
uuugccaggcaacgcacaa

SEQ ID NO: 232481 - RNA, 19 nt, Molluscum contagiosum virus
uuugauggcugcucauucu

SEQ ID NO: 232482 - RNA, 19 nt, Molluscum contagiosum virus
uuucugugcucgcgccuga

SEQ ID NO: 232483 - RNA, 15 nt, Molluscum contagiosum virus
aaaaaaaagugccua

SEQ ID NO: 232484 - RNA, 15 nt, Molluscum contagiosum virus
aaaagcacaguccaa

SEQ ID NO: 232485 - RNA, 12 nt, Molluscum contagiosum virus
aaaacgaaaagc

SEQ ID NO: 232486 - RNA, 22 nt, Molluscum contagiosum virus
aaaagacaucgucgcggccgug

SEQ ID NO: 232487 - RNA, 14 nt, Molluscum contagiosum virus
aaaacaugugccug

SEQ ID NO: 232488 - RNA, 15 nt, Molluscum contagiosum virus
aaaacaugugccugc

SEQ ID NO: 232489 - RNA, 13 nt, Molluscum contagiosum virus
aaaacaugcugua

SEQ ID NO: 232490 - RNA, 14 nt, Molluscum contagiosum virus
aaaacaacucugcu

SEQ ID NO: 232491 - RNA, 18 nt, Molluscum contagiosum virus
acaccccuguaacaagga

SEQ ID NO: 232492 - RNA, 19 nt, Molluscum contagiosum virus
acaccaggcgcgugcccug

SEQ ID NO: 232493 - RNA, 10 nt, Molluscum contagiosum virus
acaccagcug

SEQ ID NO: 232494 - RNA, 14 nt, Molluscum contagiosum virus
acaccagcuggacg

SEQ ID NO: 232495 - RNA, 22 nt, Molluscum contagiosum virus
acaccagcuggacggugcuggu

SEQ ID NO: 232496 - RNA, 14 nt, Molluscum contagiosum virus
acaagcacaugugu

SEQ ID NO: 232497 - RNA, 12 nt, Molluscum contagiosum virus
acaagacaacac

SEQ ID NO: 232498 - RNA, 14 nt, Molluscum contagiosum virus
acaacugcgucuca

SEQ ID NO: 232499 - RNA, 16 nt, Molluscum contagiosum virus
acaacugcgucucaag

SEQ ID NO: 232500 - RNA, 13 nt, Molluscum contagiosum virus
acaacgugcugcu

SEQ ID NO: 232501 - RNA, 14 nt, Molluscum contagiosum virus
acaacgugcugcuc

SEQ ID NO: 232502 - RNA, 17 nt, Molluscum contagiosum virus
acaacgugcugcucaag

SEQ ID NO: 232503 - RNA, 18 nt, Molluscum contagiosum virus
acaccgcguggacaacag

SEQ ID NO: 232504 - RNA, 14 nt, Molluscum contagiosum virus
acaccugugcccug

SEQ ID NO: 232505 - RNA, 20 nt, Molluscum contagiosum virus
acaccugugcccuguccaca

SEQ ID NO: 232506 - RNA, 15 nt, Molluscum contagiosum virus
acacgcaaacaaaac

SEQ ID NO: 232507 - RNA, 13 nt, Molluscum contagiosum virus
acacgcacacucg

SEQ ID NO: 232508 - RNA, 14 nt, Molluscum contagiosum virus
acacgcacccaaau

SEQ ID NO: 232509 - RNA, 17 nt, Molluscum contagiosum virus
acacgaggggcaagcuc

SEQ ID NO: 232510 - RNA, 14 nt, Molluscum contagiosum virus
acacgggggcugcc

SEQ ID NO: 232511 - RNA, 22 nt, Molluscum contagiosum virus
acacgugccuucuucgaucucg

SEQ ID NO: 232512 - RNA, 12 nt, Molluscum contagiosum virus
acacguggaauu

SEQ ID NO: 232513 - RNA, 17 nt, Molluscum contagiosum virus
acacgcgugcaugcgag

SEQ ID NO: 232514 - RNA, 19 nt, Molluscum contagiosum virus
acacgcgcgcgugcugcug

SEQ ID NO: 232515 - RNA, 18 nt, Molluscum contagiosum virus
acacucacgcguccacaa

SEQ ID NO: 232516 - RNA, 19 nt, Molluscum contagiosum virus
acacucgcgcguccacaag

SEQ ID NO: 232517 - RNA, 19 nt, Molluscum contagiosum virus
acacucgugcucguguguc

SEQ ID NO: 232518 - RNA, 16 nt, Molluscum contagiosum virus
acacuaccacagccau

SEQ ID NO: 232519 - RNA, 13 nt, Molluscum contagiosum virus
acacuuccugcua

SEQ ID NO: 232520 - RNA, 19 nt, Molluscum contagiosum virus
acacuugcgcguccgcaaa

SEQ ID NO: 232521 - RNA, 13 nt, Molluscum contagiosum virus
acagaaagccaac

SEQ ID NO: 232522 - RNA, 20 nt, Molluscum contagiosum virus
acagguccgguguccacgac

SEQ ID NO: 232523 - RNA, 21 nt, Molluscum contagiosum virus
acaguaacugcugcagugugu

SEQ ID NO: 232524 - RNA, 21 nt, Molluscum contagiosum virus
acagguagugguccaccagcu

SEQ ID NO: 232525 - RNA, 13 nt, Molluscum contagiosum virus
acagcuuggcaca

SEQ ID NO: 232526 - RNA, 13 nt, Molluscum contagiosum virus
acagagaaaggca

SEQ ID NO: 232527 - RNA, 14 nt, Molluscum contagiosum virus
acagagaaaggcac

SEQ ID NO: 232528 - RNA, 15 nt, Molluscum contagiosum virus
acauaguaccaugac

SEQ ID NO: 232529 - RNA, 17 nt, Molluscum contagiosum virus
acauccggcacgugccc

SEQ ID NO: 232530 - RNA, 14 nt, Molluscum contagiosum virus
acauccgcuaccug

SEQ ID NO: 232531 - RNA, 19 nt, Molluscum contagiosum virus
acauccugccacaccagcu

SEQ ID NO: 232532 - RNA, 19 nt, Molluscum contagiosum virus
acaucuacaaggaggucau

SEQ ID NO: 232533 - RNA, 21 nt, Molluscum contagiosum virus
acauacgcacucguggcaaca

SEQ ID NO: 232534 - RNA, 16 nt, Molluscum contagiosum virus
acaucuucgugcccac

SEQ ID NO: 232535 - RNA, 22 nt, Molluscum contagiosum virus
acaucucgagacgcugccugac

SEQ ID NO: 232536 - RNA, 14 nt, Molluscum contagiosum virus
acaucucucagggc

SEQ ID NO: 232537 - RNA, 17 nt, Molluscum contagiosum virus
acauuacgcucguggaa

SEQ ID NO: 232538 - RNA, 15 nt, Molluscum contagiosum virus
acauguugugcucgu

SEQ ID NO: 232539 - RNA, 20 nt, Molluscum contagiosum virus
acauuaacugagaggaccuc

SEQ ID NO: 232540 - RNA, 22 nt, Molluscum contagiosum virus
accccgcugggccgcaugcacc

SEQ ID NO: 232541 - RNA, 23 nt, Molluscum contagiosum virus
accccuguaacaaggaaaaggca

SEQ ID NO: 232542 - RNA, 14 nt, Molluscum contagiosum virus
accccgcaggaaag

SEQ ID NO: 232543 - RNA, 19 nt, Molluscum contagiosum virus
accccgcaggaaaggcacc

SEQ ID NO: 232544 - RNA, 14 nt, Molluscum contagiosum virus
acccgaaagcugcc

SEQ ID NO: 232545 - RNA, 15 nt, Molluscum contagiosum virus
accccuugcuacagg

SEQ ID NO: 232546 - RNA, 15 nt, Molluscum contagiosum virus
accccuagcagacaa

SEQ ID NO: 232547 - RNA, 13 nt, Molluscum contagiosum virus
acccgcaggaaag

SEQ ID NO: 232548 - RNA, 13 nt, Molluscum contagiosum virus
acccgugaucucg

SEQ ID NO: 232549 - RNA, 22 nt, Molluscum contagiosum virus
acccggcgcccgccaccaugcu

SEQ ID NO: 232550 - RNA, 19 nt, Molluscum contagiosum virus
acccaucggagaagugcuc

SEQ ID NO: 232551 - RNA, 21 nt, Molluscum contagiosum virus
acccaucggagaagugcuccg

SEQ ID NO: 232552 - RNA, 21 nt, Molluscum contagiosum virus
accagucucgaugugacaaca

SEQ ID NO: 232553 - RNA, 20 nt, Molluscum contagiosum virus
accacucuuucacgcugcac

SEQ ID NO: 232554 - RNA, 15 nt, Molluscum contagiosum virus
accacguggaccuga

SEQ ID NO: 232555 - RNA, 17 nt, Molluscum contagiosum virus
accacagucggugccag

SEQ ID NO: 232556 - RNA, 22 nt, Molluscum contagiosum virus
accgaccgcuuucgcaaacaag

SEQ ID NO: 232557 - RNA, 17 nt, Molluscum contagiosum virus
acccucuucgacuuacg

SEQ ID NO: 232558 - RNA, 23 nt, Molluscum contagiosum virus
accgagaucaugggcgugcucac

SEQ ID NO: 232559 - RNA, 16 nt, Molluscum contagiosum virus
accucaacuguugccu

SEQ ID NO: 232560 - RNA, 11 nt, Molluscum contagiosum virus
accucaagaag

SEQ ID NO: 232561 - RNA, 13 nt, Molluscum contagiosum virus
accuggaacucua

SEQ ID NO: 232562 - RNA, 16 nt, Molluscum contagiosum virus
accuggucgagcaccu

SEQ ID NO: 232563 - RNA, 18 nt, Molluscum contagiosum virus
accuggugcuggggcuag

SEQ ID NO: 232564 - RNA, 16 nt, Molluscum contagiosum virus
accugguggagcacuu

SEQ ID NO: 232565 - RNA, 17 nt, Molluscum contagiosum virus
accugcggcucgcacuu

SEQ ID NO: 232566 - RNA, 21 nt, Molluscum contagiosum virus
accugcgcuuccucuacacca

SEQ ID NO: 232567 - RNA, 13 nt, Molluscum contagiosum virus
accugcaguucca

SEQ ID NO: 232568 - RNA, 13 nt, Molluscum contagiosum virus
accugcaggaaag

SEQ ID NO: 232569 - RNA, 17 nt, Molluscum contagiosum virus
accugcaggaaaggcac

SEQ ID NO: 232570 - RNA, 20 nt, Molluscum contagiosum virus
acgagcccgcaagauucuuc

SEQ ID NO: 232571 - RNA, 23 nt, Molluscum contagiosum virus
acgagcagcugcugcgcacgugc

SEQ ID NO: 232572 - RNA, 16 nt, Molluscum contagiosum virus
acgagcaguccgccuc

SEQ ID NO: 232573 - RNA, 14 nt, Molluscum contagiosum virus
acgagagacacgca

SEQ ID NO: 232574 - RNA, 18 nt, Molluscum contagiosum virus
acgcauagucaucaaagc

SEQ ID NO: 232575 - RNA, 14 nt, Molluscum contagiosum virus
acgcaggacacugu

SEQ ID NO: 232576 - RNA, 15 nt, Molluscum contagiosum virus
acgcaggacacugua

SEQ ID NO: 232577 - RNA, 12 nt, Molluscum contagiosum virus
acgagcugcuaa

SEQ ID NO: 232578 - RNA, 13 nt, Molluscum contagiosum virus
acgaggaaaggca

SEQ ID NO: 232579 - RNA, 22 nt, Molluscum contagiosum virus
acgcagaaguggcgcugugcgu

SEQ ID NO: 232580 - RNA, 14 nt, Molluscum contagiosum virus
acgacgacaugcac

SEQ ID NO: 232581 - RNA, 19 nt, Molluscum contagiosum virus
acgacgaugcaaacaugua

SEQ ID NO: 232582 - RNA, 20 nt, Molluscum contagiosum virus
acgacuguguucccggcugc

SEQ ID NO: 232583 - RNA, 18 nt, Molluscum contagiosum virus
acgacggucacgcaagcu

SEQ ID NO: 232584 - RNA, 21 nt, Molluscum contagiosum virus
acgacgcggccccgggcugca

SEQ ID NO: 232585 - RNA, 23 nt, Molluscum contagiosum virus
acgacgcggccccgggcugcacg

SEQ ID NO: 232586 - RNA, 15 nt, Molluscum contagiosum virus
acgacaaaggcauuu

SEQ ID NO: 232587 - RNA, 18 nt, Molluscum contagiosum virus
acgacaaggaaaggcacc

SEQ ID NO: 232588 - RNA, 13 nt, Molluscum contagiosum virus
acgacaugcacac

SEQ ID NO: 232589 - RNA, 15 nt, Molluscum contagiosum virus
agacauauguucuuc

SEQ ID NO: 232590 - RNA, 13 nt, Molluscum contagiosum virus
agaccccuugcua

SEQ ID NO: 232591 - RNA, 17 nt, Molluscum contagiosum virus
agacccagcaaggccca

SEQ ID NO: 232592 - RNA, 12 nt, Molluscum contagiosum virus
agaccagccgcg

SEQ ID NO: 232593 - RNA, 13 nt, Molluscum contagiosum virus
agaccaccagcac

SEQ ID NO: 232594 - RNA, 15 nt, Molluscum contagiosum virus
agaccacgcgcgcug

SEQ ID NO: 232595 - RNA, 17 nt, Molluscum contagiosum virus
agacauugccuuuugca

SEQ ID NO: 232596 - RNA, 22 nt, Molluscum contagiosum virus
agaaucgcuuugccaaagcucu

SEQ ID NO: 232597 - RNA, 23 nt, Molluscum contagiosum virus
agaaugggagggggacaaggacc

SEQ ID NO: 232598 - RNA, 22 nt, Molluscum contagiosum virus
agacagaggcccgucuccacaa

SEQ ID NO: 232599 - RNA, 23 nt, Molluscum contagiosum virus
agacagaggcccgucuccacaaa

SEQ ID NO: 232600 - RNA, 20 nt, Molluscum contagiosum virus
agagcacugcgcgucugugc

SEQ ID NO: 232601 - RNA, 23 nt, Molluscum contagiosum virus
agaccgugacggccguguacaug

SEQ ID NO: 232602 - RNA, 19 nt, Molluscum contagiosum virus
agacgcugccggcaacgcu

SEQ ID NO: 232603 - RNA, 16 nt, Molluscum contagiosum virus
agacgacucgcugcca

SEQ ID NO: 232604 - RNA, 17 nt, Molluscum contagiosum virus
agacgagcugugcgagc

SEQ ID NO: 232605 - RNA, 19 nt, Molluscum contagiosum virus
agagugacgccucgagaaa

SEQ ID NO: 232606 - RNA, 18 nt, Molluscum contagiosum virus
agagugacgcugcaagac

SEQ ID NO: 232607 - RNA, 14 nt, Molluscum contagiosum virus
agagugaucuccac

SEQ ID NO: 232608 - RNA, 20 nt, Molluscum contagiosum virus
agaguccgacccgugcugcu

SEQ ID NO: 232609 - RNA, 21 nt, Molluscum contagiosum virus
agaguccgacccgugcugcuu

SEQ ID NO: 232610 - RNA, 13 nt, Molluscum contagiosum virus
agagucgcgcuac

SEQ ID NO: 232611 - RNA, 22 nt, Molluscum contagiosum virus
agagccgggacgcggaugccac

SEQ ID NO: 232612 - RNA, 21 nt, Molluscum contagiosum virus
agagccgcuccuggucuuccc

SEQ ID NO: 232613 - RNA, 17 nt, Molluscum contagiosum virus
agagccccguucacuug

SEQ ID NO: 232614 - RNA, 18 nt, Molluscum contagiosum virus
agagccccguucacuugc

SEQ ID NO: 232615 - RNA, 16 nt, Molluscum contagiosum virus
agagcucguggacagc

SEQ ID NO: 232616 - RNA, 20 nt, Molluscum contagiosum virus
agaagaggccagcacaagcc

SEQ ID NO: 232617 - RNA, 20 nt, Molluscum contagiosum virus
agaagaggccggcacaagcc

SEQ ID NO: 232618 - RNA, 22 nt, Molluscum contagiosum virus
agaagaggccggcacaagccgu

SEQ ID NO: 232619 - RNA, 11 nt, Molluscum contagiosum virus
agaacaaccag

SEQ ID NO: 232620 - RNA, 15 nt, Molluscum contagiosum virus
agaagaccacauccu

SEQ ID NO: 232621 - RNA, 11 nt, Molluscum contagiosum virus
agaaagccaac

SEQ ID NO: 232622 - RNA, 18 nt, Molluscum contagiosum virus
agaaaucccaagagccau

SEQ ID NO: 232623 - RNA, 23 nt, Molluscum contagiosum virus
agaaaucccaagagccauguuuc

SEQ ID NO: 232624 - RNA, 18 nt, Molluscum contagiosum virus
agaaaugcgcacacuugc

SEQ ID NO: 232625 - RNA, 23 nt, Molluscum contagiosum virus
agaagugcuccgcacguggaauc

SEQ ID NO: 232626 - RNA, 21 nt, Molluscum contagiosum virus
agaagugcuccgcacguggag

SEQ ID NO: 232627 - RNA, 13 nt, Molluscum contagiosum virus
agaauaaaauagc

SEQ ID NO: 232628 - RNA, 19 nt, Molluscum contagiosum virus
agaagcucauuuuuuacuc

SEQ ID NO: 232629 - RNA, 14 nt, Molluscum contagiosum virus
agaaggucuacgag

SEQ ID NO: 232630 - RNA, 23 nt, Molluscum contagiosum virus
acuucaagcacgagcugcugcgc

SEQ ID NO: 232631 - RNA, 18 nt, Molluscum contagiosum virus
acuucacacgucuugcag

SEQ ID NO: 232632 - RNA, 19 nt, Molluscum contagiosum virus
acuuccgcgcgcucuugca

SEQ ID NO: 232633 - RNA, 15 nt, Molluscum contagiosum virus
acuucggacaccuca

SEQ ID NO: 232634 - RNA, 16 nt, Molluscum contagiosum virus
acuacuacguggugcg

SEQ ID NO: 232635 - RNA, 13 nt, Molluscum contagiosum virus
acuacguggugcg

SEQ ID NO: 232636 - RNA, 14 nt, Molluscum contagiosum virus
acuacguggugcgc

SEQ ID NO: 232637 - RNA, 15 nt, Molluscum contagiosum virus
acuacucgucuugcg

SEQ ID NO: 232638 - RNA, 17 nt, Molluscum contagiosum virus
acuagcgcuggcugcag

SEQ ID NO: 232639 - RNA, 14 nt, Molluscum contagiosum virus
acuaccacagccau

SEQ ID NO: 232640 - RNA, 14 nt, Molluscum contagiosum virus
acguuuucuuugcg

SEQ ID NO: 232641 - RNA, 20 nt, Molluscum contagiosum virus
acguugccgcgcgcugcucu

SEQ ID NO: 232642 - RNA, 14 nt, Molluscum contagiosum virus
acguuggcccgcaa

SEQ ID NO: 232643 - RNA, 17 nt, Molluscum contagiosum virus
acguuccagagcacugc

SEQ ID NO: 232644 - RNA, 17 nt, Molluscum contagiosum virus
acguguccaugcacgac

SEQ ID NO: 232645 - RNA, 13 nt, Molluscum contagiosum virus
acgugugcucugu

SEQ ID NO: 232646 - RNA, 15 nt, Molluscum contagiosum virus
acgcggaaacaagca

SEQ ID NO: 232647 - RNA, 15 nt, Molluscum contagiosum virus
acgcgcgagugugcg

SEQ ID NO: 232648 - RNA, 16 nt, Molluscum contagiosum virus
acgcgcgcgugcugcu

SEQ ID NO: 232649 - RNA, 19 nt, Molluscum contagiosum virus
acgcgcuaccgcaagcuca

SEQ ID NO: 232650 - RNA, 14 nt, Molluscum contagiosum virus
acgccuccaagaag

SEQ ID NO: 232651 - RNA, 15 nt, Molluscum contagiosum virus
acgcgcaagugugcg

SEQ ID NO: 232652 - RNA, 21 nt, Molluscum contagiosum virus
acgcgcacgccagccuggagu

SEQ ID NO: 232653 - RNA, 18 nt, Molluscum contagiosum virus
acgcgcagggagcugcgg

SEQ ID NO: 232654 - RNA, 18 nt, Molluscum contagiosum virus
acgcgccgacaugcgcac

SEQ ID NO: 232655 - RNA, 10 nt, Molluscum contagiosum virus
acguggugcg

SEQ ID NO: 232656 - RNA, 16 nt, Molluscum contagiosum virus
acguggugcucgugga

SEQ ID NO: 232657 - RNA, 23 nt, Molluscum contagiosum virus
acguggcgcuuggcgagcgcugc

SEQ ID NO: 232658 - RNA, 15 nt, Molluscum contagiosum virus
acguggacagcaucc

SEQ ID NO: 232659 - RNA, 11 nt, Molluscum contagiosum virus
acgugcugcgc

SEQ ID NO: 232660 - RNA, 14 nt, Molluscum contagiosum virus
acgugcugcugcgg

SEQ ID NO: 232661 - RNA, 21 nt, Molluscum contagiosum virus
acgugcugcuggcccugcuag

SEQ ID NO: 232662 - RNA, 19 nt, Molluscum contagiosum virus
acgugcgcaccaucuucaa

SEQ ID NO: 232663 - RNA, 20 nt, Molluscum contagiosum virus
acgugcgcuggcccacgcug

SEQ ID NO: 232664 - RNA, 21 nt, Molluscum contagiosum virus
acgccgagcccgagcccgggc

SEQ ID NO: 232665 - RNA, 17 nt, Molluscum contagiosum virus
acgccgcgcaccuggag

SEQ ID NO: 232666 - RNA, 16 nt, Molluscum contagiosum virus
acgcgagaaagaccuu

SEQ ID NO: 232667 - RNA, 13 nt, Molluscum contagiosum virus
acgcgagacugug

SEQ ID NO: 232668 - RNA, 13 nt, Molluscum contagiosum virus
acgcgagcacugc

SEQ ID NO: 232669 - RNA, 17 nt, Molluscum contagiosum virus
acgcgagcggagcuggc

SEQ ID NO: 232670 - RNA, 16 nt, Molluscum contagiosum virus
acgcgagcggcuuuuc

SEQ ID NO: 232671 - RNA, 23 nt, Molluscum contagiosum virus
acgcgaguugcgucucccgcggc

SEQ ID NO: 232672 - RNA, 21 nt, Molluscum contagiosum virus
acgccaagaggacgagcugcu

SEQ ID NO: 232673 - RNA, 15 nt, Molluscum contagiosum virus
acgccagguguuccu

SEQ ID NO: 232674 - RNA, 23 nt, Molluscum contagiosum virus
acgccccggcgcgaaacaagcgu

SEQ ID NO: 232675 - RNA, 16 nt, Molluscum contagiosum virus
acugcgacauccacau

SEQ ID NO: 232676 - RNA, 17 nt, Molluscum contagiosum virus
acugccacggcugcaag

SEQ ID NO: 232677 - RNA, 22 nt, Molluscum contagiosum virus
acugccacggcugcaagcacaa

SEQ ID NO: 232678 - RNA, 13 nt, Molluscum contagiosum virus
acugcguacacau

SEQ ID NO: 232679 - RNA, 22 nt, Molluscum contagiosum virus
acugcagcagccccgacgccag

SEQ ID NO: 232680 - RNA, 16 nt, Molluscum contagiosum virus
acugcagcagcuccag

SEQ ID NO: 232681 - RNA, 17 nt, Molluscum contagiosum virus
acuggacugagccgcaa

SEQ ID NO: 232682 - RNA, 15 nt, Molluscum contagiosum virus
acuggcgcagcagga

SEQ ID NO: 232683 - RNA, 22 nt, Molluscum contagiosum virus
acucgccguuccacuacaagca

SEQ ID NO: 232684 - RNA, 22 nt, Molluscum contagiosum virus
acucggacacguugcagcagca

SEQ ID NO: 232685 - RNA, 13 nt, Molluscum contagiosum virus
acucggacacugg

SEQ ID NO: 232686 - RNA, 18 nt, Molluscum contagiosum virus
acucgacuugcuaugcua

SEQ ID NO: 232687 - RNA, 16 nt, Molluscum contagiosum virus
acucgagaagaggguc

SEQ ID NO: 232688 - RNA, 19 nt, Molluscum contagiosum virus
acucagcauguugcucuac

SEQ ID NO: 232689 - RNA, 17 nt, Molluscum contagiosum virus
acucacgcguccacaaa

SEQ ID NO: 232690 - RNA, 20 nt, Molluscum contagiosum virus
acucacgcguccacaaagac

SEQ ID NO: 232691 - RNA, 18 nt, Molluscum contagiosum virus
acucuccgacgugcugcg

SEQ ID NO: 232692 - RNA, 13 nt, Molluscum contagiosum virus
acucgugucacaa

SEQ ID NO: 232693 - RNA, 14 nt, Molluscum contagiosum virus
acucgugucacaau

SEQ ID NO: 232694 - RNA, 12 nt, Molluscum contagiosum virus
acucggugcuca

SEQ ID NO: 232695 - RNA, 22 nt, Molluscum contagiosum virus
acucguaggacaaccauugugg

SEQ ID NO: 232696 - RNA, 14 nt, Molluscum contagiosum virus
aagcgcacacuugc

SEQ ID NO: 232697 - RNA, 18 nt, Molluscum contagiosum virus
aagcgcuccaacuuccac

SEQ ID NO: 232698 - RNA, 14 nt, Molluscum contagiosum virus
aagcgcuugcucuu

SEQ ID NO: 232699 - RNA, 15 nt, Molluscum contagiosum virus
aagccacacaacucc

SEQ ID NO: 232700 - RNA, 13 nt, Molluscum contagiosum virus
aagcggugcagcg

SEQ ID NO: 232701 - RNA, 11 nt, Molluscum contagiosum virus
aagcucaagaa

SEQ ID NO: 232702 - RNA, 12 nt, Molluscum contagiosum virus
aagcucaagaag

SEQ ID NO: 232703 - RNA, 13 nt, Molluscum contagiosum virus
aagcucaugguuu

SEQ ID NO: 232704 - RNA, 20 nt, Molluscum contagiosum virus
aagcuuugcuucaggcaaga

SEQ ID NO: 232705 - RNA, 19 nt, Molluscum contagiosum virus
aagcugugcguacaccuaa

SEQ ID NO: 232706 - RNA, 19 nt, Molluscum contagiosum virus
aagcuuccuuuuucacuuu

SEQ ID NO: 232707 - RNA, 13 nt, Molluscum contagiosum virus
aagcuucucgcca

SEQ ID NO: 232708 - RNA, 16 nt, Molluscum contagiosum virus
aacuuccacgucucca

SEQ ID NO: 232709 - RNA, 18 nt, Molluscum contagiosum virus
aagaagcgcuucuuugcg

SEQ ID NO: 232710 - RNA, 13 nt, Molluscum contagiosum virus
aagaaggagccca

SEQ ID NO: 232711 - RNA, 17 nt, Molluscum contagiosum virus
aagaaggagcccaagca

SEQ ID NO: 232712 - RNA, 18 nt, Molluscum contagiosum virus
aagaagaggccagcacaa

SEQ ID NO: 232713 - RNA, 16 nt, Molluscum contagiosum virus
aagcaguaccugcuaa

SEQ ID NO: 232714 - RNA, 12 nt, Molluscum contagiosum virus
aauaccggagac

SEQ ID NO: 232715 - RNA, 18 nt, Molluscum contagiosum virus
aauaccggagacaccagc

SEQ ID NO: 232716 - RNA, 19 nt, Molluscum contagiosum virus
aauaccggagacaccagcu

SEQ ID NO: 232717 - RNA, 20 nt, Molluscum contagiosum virus
aauaccaggccacgugcuca

SEQ ID NO: 232718 - RNA, 10 nt, Molluscum contagiosum virus
aagugcacac

SEQ ID NO: 232719 - RNA, 19 nt, Molluscum contagiosum virus
aagugcuccgcacguggaa

SEQ ID NO: 232720 - RNA, 15 nt, Molluscum contagiosum virus
aaggaaaggcaccca

SEQ ID NO: 232721 - RNA, 17 nt, Molluscum contagiosum virus
aaggaaaggcaccugca

SEQ ID NO: 232722 - RNA, 22 nt, Molluscum contagiosum virus
aaggcaggggccgccgcugacu

SEQ ID NO: 232723 - RNA, 14 nt, Molluscum contagiosum virus
aaggcacccgcagg

SEQ ID NO: 232724 - RNA, 22 nt, Molluscum contagiosum virus
aaggaggcuagugccauuguga

SEQ ID NO: 232725 - RNA, 15 nt, Molluscum contagiosum virus
aaggauggacaaaga

SEQ ID NO: 232726 - RNA, 18 nt, Molluscum contagiosum virus
aaggcgccguccaugugc

SEQ ID NO: 232727 - RNA, 13 nt, Molluscum contagiosum virus
aaggcgacggggu

SEQ ID NO: 232728 - RNA, 17 nt, Molluscum contagiosum virus
aaggcccacuuccguga

SEQ ID NO: 232729 - RNA, 20 nt, Molluscum contagiosum virus
aaggccccccgcaacaagga

SEQ ID NO: 232730 - RNA, 21 nt, Molluscum contagiosum virus
aaggcgugcgccgugcgucuc

SEQ ID NO: 232731 - RNA, 15 nt, Molluscum contagiosum virus
aaggcucgagcugca

SEQ ID NO: 232732 - RNA, 17 nt, Molluscum contagiosum virus
aagucuucaagacuggc

SEQ ID NO: 232733 - RNA, 21 nt, Molluscum contagiosum virus
aagugaaaauaaagaccgugu

SEQ ID NO: 232734 - RNA, 19 nt, Molluscum contagiosum virus
aauugagugcgggucacaa

SEQ ID NO: 232735 - RNA, 18 nt, Molluscum contagiosum virus
acaaaggcgggcccgcga

SEQ ID NO: 232736 - RNA, 19 nt, Molluscum contagiosum virus
acaaaaaaaacacacgaac

SEQ ID NO: 232737 - RNA, 14 nt, Molluscum contagiosum virus
acaaaaaacaacuc

SEQ ID NO: 232738 - RNA, 20 nt, Molluscum contagiosum virus
aauugcugggcacaagcuuu

SEQ ID NO: 232739 - RNA, 15 nt, Molluscum contagiosum virus
aaugcgcaaggccgu

SEQ ID NO: 232740 - RNA, 15 nt, Molluscum contagiosum virus
aaugcccgcaaugca

SEQ ID NO: 232741 - RNA, 12 nt, Molluscum contagiosum virus
aaugauugucaa

SEQ ID NO: 232742 - RNA, 15 nt, Molluscum contagiosum virus
aauggagcgucuucu

SEQ ID NO: 232743 - RNA, 17 nt, Molluscum contagiosum virus
aauggccgagaaaaagc

SEQ ID NO: 232744 - RNA, 22 nt, Molluscum contagiosum virus
aauggcaggugcgcaacugcga

SEQ ID NO: 232745 - RNA, 19 nt, Molluscum contagiosum virus
aaucgucggcacgcugcag

SEQ ID NO: 232746 - RNA, 18 nt, Molluscum contagiosum virus
aaauagcgcgcuagcucc

SEQ ID NO: 232747 - RNA, 17 nt, Molluscum contagiosum virus
aaaggcacccaccagga

SEQ ID NO: 232748 - RNA, 15 nt, Molluscum contagiosum virus
aaaggaugaacguga

SEQ ID NO: 232749 - RNA, 18 nt, Molluscum contagiosum virus
aaagccacuagcguagca

SEQ ID NO: 232750 - RNA, 13 nt, Molluscum contagiosum virus
aaagcacagucca

SEQ ID NO: 232751 - RNA, 17 nt, Molluscum contagiosum virus
aaagcaucgacgugcag

SEQ ID NO: 232752 - RNA, 16 nt, Molluscum contagiosum virus
aaagcccgggugcacg

SEQ ID NO: 232753 - RNA, 19 nt, Molluscum contagiosum virus
aaagcugugcguacaccua

SEQ ID NO: 232754 - RNA, 14 nt, Molluscum contagiosum virus
aaagcuucucgcca

SEQ ID NO: 232755 - RNA, 18 nt, Molluscum contagiosum virus
aaauuccguccccucucc

SEQ ID NO: 232756 - RNA, 15 nt, Molluscum contagiosum virus
aaaagaauccuucuc

SEQ ID NO: 232757 - RNA, 22 nt, Molluscum contagiosum virus
aaaagagggccuuucucagaga

SEQ ID NO: 232758 - RNA, 19 nt, Molluscum contagiosum virus
aaaagacgagcugugcgag

SEQ ID NO: 232759 - RNA, 11 nt, Molluscum contagiosum virus
aaaagcacagu

SEQ ID NO: 232760 - RNA, 15 nt, Molluscum contagiosum virus
aaaagcacgcggcca

SEQ ID NO: 232761 - RNA, 21 nt, Molluscum contagiosum virus
aaaagcugucgcgcagcagcu

SEQ ID NO: 232762 - RNA, 16 nt, Molluscum contagiosum virus
aaacugcuugucgaua

SEQ ID NO: 232763 - RNA, 21 nt, Molluscum contagiosum virus
aaaauggcugcgaccaagaca

SEQ ID NO: 232764 - RNA, 21 nt, Molluscum contagiosum virus
aaaaugggaaaccucaccucu

SEQ ID NO: 232765 - RNA, 22 nt, Molluscum contagiosum virus
aaacuuaucccagaaaacgcac

SEQ ID NO: 232766 - RNA, 19 nt, Molluscum contagiosum virus
aaacuucauccucuaccgc

SEQ ID NO: 232767 - RNA, 21 nt, Molluscum contagiosum virus
aaagaagaaggagcccaagca

SEQ ID NO: 232768 - RNA, 23 nt, Molluscum contagiosum virus
aaagacgagcugugcgagccagu

SEQ ID NO: 232769 - RNA, 21 nt, Molluscum contagiosum virus
aaccauacgccuagccugcag

SEQ ID NO: 232770 - RNA, 14 nt, Molluscum contagiosum virus
aaccacucuuucac

SEQ ID NO: 232771 - RNA, 12 nt, Molluscum contagiosum virus
aacgaaaagcca

SEQ ID NO: 232772 - RNA, 23 nt, Molluscum contagiosum virus
aaccucuacacgcacgaccucac

SEQ ID NO: 232773 - RNA, 17 nt, Molluscum contagiosum virus
aaccuacgcuaccugaa

SEQ ID NO: 232774 - RNA, 19 nt, Molluscum contagiosum virus
aaccucacucacaugugcu

SEQ ID NO: 232775 - RNA, 15 nt, Molluscum contagiosum virus
aacuagggagcggca

SEQ ID NO: 232776 - RNA, 15 nt, Molluscum contagiosum virus
aacuacuuccugcag

SEQ ID NO: 232777 - RNA, 18 nt, Molluscum contagiosum virus
aacuaccuggggcugcuu

SEQ ID NO: 232778 - RNA, 16 nt, Molluscum contagiosum virus
aacgugggcaccugca

SEQ ID NO: 232779 - RNA, 12 nt, Molluscum contagiosum virus
aacgugcugcuc

SEQ ID NO: 232780 - RNA, 15 nt, Molluscum contagiosum virus
aacgugcugcucaag

SEQ ID NO: 232781 - RNA, 17 nt, Molluscum contagiosum virus
aacgugcgaacacggau

SEQ ID NO: 232782 - RNA, 17 nt, Molluscum contagiosum virus
aacgggcucgugcugga

SEQ ID NO: 232783 - RNA, 20 nt, Molluscum contagiosum virus
aacggcgccaucgagaugcu

SEQ ID NO: 232784 - RNA, 18 nt, Molluscum contagiosum virus
aacguacgaacuggcaau

SEQ ID NO: 232785 - RNA, 15 nt, Molluscum contagiosum virus
aacgucgcacuggcc

SEQ ID NO: 232786 - RNA, 20 nt, Molluscum contagiosum virus
aacgucucuccgaguagugu

SEQ ID NO: 232787 - RNA, 15 nt, Molluscum contagiosum virus
aacgucuucuaccgc

SEQ ID NO: 232788 - RNA, 14 nt, Molluscum contagiosum virus
aaccaaucauuuca

SEQ ID NO: 232789 - RNA, 21 nt, Molluscum contagiosum virus
aaccaccacguggaccugauu

SEQ ID NO: 232790 - RNA, 22 nt, Molluscum contagiosum virus
aacaucugcaacucgcgcugca

SEQ ID NO: 232791 - RNA, 18 nt, Molluscum contagiosum virus
aacauugugacaaagacg

SEQ ID NO: 232792 - RNA, 18 nt, Molluscum contagiosum virus
aacaggaaagcuucuguc

SEQ ID NO: 232793 - RNA, 17 nt, Molluscum contagiosum virus
aacaugcggagacuguu

SEQ ID NO: 232794 - RNA, 13 nt, Molluscum contagiosum virus
aacauguugugcu

SEQ ID NO: 232795 - RNA, 21 nt, Molluscum contagiosum virus
aacauguugugcucguguugu

SEQ ID NO: 232796 - RNA, 21 nt, Molluscum contagiosum virus
aacagacuuguccaaugcuuu

SEQ ID NO: 232797 - RNA, 15 nt, Molluscum contagiosum virus
aacaaaaaacaacuc

SEQ ID NO: 232798 - RNA, 24 nt, Molluscum contagiosum virus
aacaaaaagugaacuucuacgcca

SEQ ID NO: 232799 - RNA, 17 nt, Molluscum contagiosum virus
caacucgcgagagacac

SEQ ID NO: 232800 - RNA, 15 nt, Molluscum contagiosum virus
caacuuccacauccg

SEQ ID NO: 232801 - RNA, 16 nt, Molluscum contagiosum virus
caacuucuguguggaa

SEQ ID NO: 232802 - RNA, 14 nt, Molluscum contagiosum virus
caacauccugccac

SEQ ID NO: 232803 - RNA, 13 nt, Molluscum contagiosum virus
caacauccaaacc

SEQ ID NO: 232804 - RNA, 17 nt, Molluscum contagiosum virus
caacaugcggagacugu

SEQ ID NO: 232805 - RNA, 21 nt, Molluscum contagiosum virus
caaccacucuuucacgcugca

SEQ ID NO: 232806 - RNA, 14 nt, Molluscum contagiosum virus
caacuacaaggugc

SEQ ID NO: 232807 - RNA, 20 nt, Molluscum contagiosum virus
caacuaccuggggcugcuuc

SEQ ID NO: 232808 - RNA, 14 nt, Molluscum contagiosum virus
caaacaagcagucu

SEQ ID NO: 232809 - RNA, 18 nt, Molluscum contagiosum virus
caaacaagcagucucaug

SEQ ID NO: 232810 - RNA, 15 nt, Molluscum contagiosum virus
caaaagggcucugcc

SEQ ID NO: 232811 - RNA, 17 nt, Molluscum contagiosum virus
caacaaccacucuuuca

SEQ ID NO: 232812 - RNA, 21 nt, Molluscum contagiosum virus
caacaagcggacuacaucgcu

SEQ ID NO: 232813 - RNA, 15 nt, Molluscum contagiosum virus
caauacggugcagcc

SEQ ID NO: 232814 - RNA, 16 nt, Molluscum contagiosum virus
caagccacacaacucc

SEQ ID NO: 232815 - RNA, 15 nt, Molluscum contagiosum virus
caagcaggcaugcaa

SEQ ID NO: 232816 - RNA, 17 nt, Molluscum contagiosum virus
caagcaggcaugcaagg

SEQ ID NO: 232817 - RNA, 17 nt, Molluscum contagiosum virus
caagcaguaccugcuaa

SEQ ID NO: 232818 - RNA, 15 nt, Molluscum contagiosum virus
caagcagccgcagua

SEQ ID NO: 232819 - RNA, 22 nt, Molluscum contagiosum virus
caagcacgcaacgucgcacugg

SEQ ID NO: 232820 - RNA, 14 nt, Molluscum contagiosum virus
caagcacgcuacug

SEQ ID NO: 232821 - RNA, 16 nt, Molluscum contagiosum virus
caagcacuacauggac

SEQ ID NO: 232822 - RNA, 20 nt, Molluscum contagiosum virus
caaggugugcgcgcugcacg

SEQ ID NO: 232823 - RNA, 18 nt, Molluscum contagiosum virus
caaggucuuccacgccuu

SEQ ID NO: 232824 - RNA, 15 nt, Molluscum contagiosum virus
caagccagcccgcug

SEQ ID NO: 232825 - RNA, 19 nt, Molluscum contagiosum virus
caagagccgccggggccca

SEQ ID NO: 232826 - RNA, 17 nt, Molluscum contagiosum virus
caagaucguuuugcacu

SEQ ID NO: 232827 - RNA, 18 nt, Molluscum contagiosum virus
caagauggcgcagcacuu

SEQ ID NO: 232828 - RNA, 19 nt, Molluscum contagiosum virus
caagauggcgcagcacuuc

SEQ ID NO: 232829 - RNA, 16 nt, Molluscum contagiosum virus
caaguacaacccaaac

SEQ ID NO: 232830 - RNA, 21 nt, Molluscum contagiosum virus
caaguacaacccaaacauguc

SEQ ID NO: 232831 - RNA, 14 nt, Molluscum contagiosum virus
caaguccaccuucu

SEQ ID NO: 232832 - RNA, 15 nt, Molluscum contagiosum virus
caagugaacuacagu

SEQ ID NO: 232833 - RNA, 15 nt, Molluscum contagiosum virus
caagugcacaccaga

SEQ ID NO: 232834 - RNA, 16 nt, Molluscum contagiosum virus
caagugcacaccagac

SEQ ID NO: 232835 - RNA, 12 nt, Molluscum contagiosum virus
caagugugcgca

SEQ ID NO: 232836 - RNA, 16 nt, Molluscum contagiosum virus
caccagguacuccuug

SEQ ID NO: 232837 - RNA, 20 nt, Molluscum contagiosum virus
caccagugccgacgugugcc

SEQ ID NO: 232838 - RNA, 21 nt, Molluscum contagiosum virus
caccagcuacgagccgcugcu

SEQ ID NO: 232839 - RNA, 19 nt, Molluscum contagiosum virus
caccacggugguuuacauc

SEQ ID NO: 232840 - RNA, 21 nt, Molluscum contagiosum virus
cacaucugucccuugauccag

SEQ ID NO: 232841 - RNA, 13 nt, Molluscum contagiosum virus
cacccaccaggaa

SEQ ID NO: 232842 - RNA, 18 nt, Molluscum contagiosum virus
caccaugcgcacagcacu

SEQ ID NO: 232843 - RNA, 13 nt, Molluscum contagiosum virus
cacccccgcugca

SEQ ID NO: 232844 - RNA, 16 nt, Molluscum contagiosum virus
cacagucggugccaga

SEQ ID NO: 232845 - RNA, 17 nt, Molluscum contagiosum virus
cacagacgugcacaaag

SEQ ID NO: 232846 - RNA, 18 nt, Molluscum contagiosum virus
cacagccguggaguccau

SEQ ID NO: 232847 - RNA, 22 nt, Molluscum contagiosum virus
cacagguagugguccaccagcu

SEQ ID NO: 232848 - RNA, 23 nt, Molluscum contagiosum virus
cacagguagugguccaccagcug

SEQ ID NO: 232849 - RNA, 14 nt, Molluscum contagiosum virus
caaugcugcaucua

SEQ ID NO: 232850 - RNA, 22 nt, Molluscum contagiosum virus
caaugcugccguguacgucuuu

SEQ ID NO: 232851 - RNA, 17 nt, Molluscum contagiosum virus
caaugcaguaugugaac

SEQ ID NO: 232852 - RNA, 18 nt, Molluscum contagiosum virus
caaugcagugcaccagca

SEQ ID NO: 232853 - RNA, 18 nt, Molluscum contagiosum virus
caauggcgcgcgagcaca

SEQ ID NO: 232854 - RNA, 17 nt, Molluscum contagiosum virus
caauggacacgcacugg

SEQ ID NO: 232855 - RNA, 14 nt, Molluscum contagiosum virus
caauggcacuagcc

SEQ ID NO: 232856 - RNA, 13 nt, Molluscum contagiosum virus
cacacgucuugca

SEQ ID NO: 232857 - RNA, 20 nt, Molluscum contagiosum virus
cacacgcuugcgcaugugau

SEQ ID NO: 232858 - RNA, 23 nt, Molluscum contagiosum virus
cacacgcgcgcgugcugcuggag

SEQ ID NO: 232859 - RNA, 19 nt, Molluscum contagiosum virus
cacacgacgacggcugcuc

SEQ ID NO: 232860 - RNA, 14 nt, Molluscum contagiosum virus
cacacgcagugcca

SEQ ID NO: 232861 - RNA, 23 nt, Molluscum contagiosum virus
cacacucacgcguccacaaagac

SEQ ID NO: 232862 - RNA, 16 nt, Molluscum contagiosum virus
cacacucgacuugcua

SEQ ID NO: 232863 - RNA, 23 nt, Molluscum contagiosum virus
cacacucgcgcguccgcaaagac

SEQ ID NO: 232864 - RNA, 23 nt, Molluscum contagiosum virus
cacacuugcgcguucgcaaagac

SEQ ID NO: 232865 - RNA, 20 nt, Molluscum contagiosum virus
cacacugcagcacgucuugc

SEQ ID NO: 232866 - RNA, 15 nt, Molluscum contagiosum virus
cacucgcuacugcaa

SEQ ID NO: 232867 - RNA, 15 nt, Molluscum contagiosum virus
cacucuucgcaggcg

SEQ ID NO: 232868 - RNA, 17 nt, Molluscum contagiosum virus
caccuuucucuuucuca

SEQ ID NO: 232869 - RNA, 19 nt, Molluscum contagiosum virus
caccuuucucuuucucaag

SEQ ID NO: 232870 - RNA, 21 nt, Molluscum contagiosum virus
cacgucgaagaccaccagcac

SEQ ID NO: 232871 - RNA, 16 nt, Molluscum contagiosum virus
cacgugccgugcuguc

SEQ ID NO: 232872 - RNA, 16 nt, Molluscum contagiosum virus
cacguggacagcaucc

SEQ ID NO: 232873 - RNA, 20 nt, Molluscum contagiosum virus
caccucaacuguugccugga

SEQ ID NO: 232874 - RNA, 11 nt, Molluscum contagiosum virus
caccucaagaa

SEQ ID NO: 232875 - RNA, 20 nt, Molluscum contagiosum virus
caccucaccgcgcacaucuc

SEQ ID NO: 232876 - RNA, 15 nt, Molluscum contagiosum virus
caccucccugugaac

SEQ ID NO: 232877 - RNA, 16 nt, Molluscum contagiosum virus
caccucgcaugaugaa

SEQ ID NO: 232878 - RNA, 17 nt, Molluscum contagiosum virus
caccugcgcaacgugcu

SEQ ID NO: 232879 - RNA, 19 nt, Molluscum contagiosum virus
caccugugcccuguccaca

SEQ ID NO: 232880 - RNA, 12 nt, Molluscum contagiosum virus
cagaaagccaac

SEQ ID NO: 232881 - RNA, 13 nt, Molluscum contagiosum virus
cagaacagcacgu

SEQ ID NO: 232882 - RNA, 17 nt, Molluscum contagiosum virus
cagaaauacaccggcuu

SEQ ID NO: 232883 - RNA, 23 nt, Molluscum contagiosum virus
cagaaacucuccgacgugcugcg

SEQ ID NO: 232884 - RNA, 19 nt, Molluscum contagiosum virus
cacugucguaacaauggac

SEQ ID NO: 232885 - RNA, 16 nt, Molluscum contagiosum virus
cacugcagaaacagcc

SEQ ID NO: 232886 - RNA, 14 nt, Molluscum contagiosum virus
cacuggccugcaaa

SEQ ID NO: 232887 - RNA, 17 nt, Molluscum contagiosum virus
cacuggccugcaaacgc

SEQ ID NO: 232888 - RNA, 23 nt, Molluscum contagiosum virus
cacugccacggcugcaagcacaa

SEQ ID NO: 232889 - RNA, 16 nt, Molluscum contagiosum virus
cagaaucgcuuugcca

SEQ ID NO: 232890 - RNA, 20 nt, Molluscum contagiosum virus
cagaagcccugagaaggagc

SEQ ID NO: 232891 - RNA, 22 nt, Molluscum contagiosum virus
cagaagugaaauuucagcgaug

SEQ ID NO: 232892 - RNA, 23 nt, Molluscum contagiosum virus
aucuucuuguuguugugacacga

SEQ ID NO: 232893 - RNA, 12 nt, Molluscum contagiosum virus
auggcugcucau

SEQ ID NO: 232894 - RNA, 22 nt, Molluscum contagiosum virus
auggcguccucgcuccgcagca

SEQ ID NO: 232895 - RNA, 20 nt, Molluscum contagiosum virus
auggcgauagcgauggcugu

SEQ ID NO: 232896 - RNA, 15 nt, Molluscum contagiosum virus
augggagggggacaa

SEQ ID NO: 232897 - RNA, 14 nt, Molluscum contagiosum virus
auggggauguggac

SEQ ID NO: 232898 - RNA, 19 nt, Molluscum contagiosum virus
augggcgugcucacgcugc

SEQ ID NO: 232899 - RNA, 11 nt, Molluscum contagiosum virus
auguacuccac

SEQ ID NO: 232900 - RNA, 20 nt, Molluscum contagiosum virus
augguguacgaaaguacuuu

SEQ ID NO: 232901 - RNA, 19 nt, Molluscum contagiosum virus
auuaagaguccacugccaa

SEQ ID NO: 232902 - RNA, 22 nt, Molluscum contagiosum virus
auguuuccugcggcgcugcuac

SEQ ID NO: 232903 - RNA, 17 nt, Molluscum contagiosum virus
augugaacacgacaugu

SEQ ID NO: 232904 - RNA, 15 nt, Molluscum contagiosum virus
augugacaacaugug

SEQ ID NO: 232905 - RNA, 17 nt, Molluscum contagiosum virus
augugcgagaacuggcg

SEQ ID NO: 232906 - RNA, 14 nt, Molluscum contagiosum virus
augugcuagcugcg

SEQ ID NO: 232907 - RNA, 13 nt, Molluscum contagiosum virus
auuaccugagauc

SEQ ID NO: 232908 - RNA, 18 nt, Molluscum contagiosum virus
auucucguggcguugcug

SEQ ID NO: 232909 - RNA, 20 nt, Molluscum contagiosum virus
auucucguggcguugcugcu

SEQ ID NO: 232910 - RNA, 13 nt, Molluscum contagiosum virus
auugcugggcaca

SEQ ID NO: 232911 - RNA, 13 nt, Molluscum contagiosum virus
auuggcagcgcuu

SEQ ID NO: 232912 - RNA, 22 nt, Molluscum contagiosum virus
auugccggcgcgcgcuauucaa

SEQ ID NO: 232913 - RNA, 16 nt, Molluscum contagiosum virus
caaaacugaaaagcua

SEQ ID NO: 232914 - RNA, 13 nt, Molluscum contagiosum virus
caaaacccugaua

SEQ ID NO: 232915 - RNA, 17 nt, Molluscum contagiosum virus
aucuacugcgacaucca

SEQ ID NO: 232916 - RNA, 22 nt, Molluscum contagiosum virus
aucuacggcuguuguacuggag

SEQ ID NO: 232917 - RNA, 16 nt, Molluscum contagiosum virus
auccugccacaccagc

SEQ ID NO: 232918 - RNA, 22 nt, Molluscum contagiosum virus
auccucgaugagaacaacagcg

SEQ ID NO: 232919 - RNA, 23 nt, Molluscum contagiosum virus
auccucuccaucaucgagcugca

SEQ ID NO: 232920 - RNA, 15 nt, Molluscum contagiosum virus
auccggcacgcacaa

SEQ ID NO: 232921 - RNA, 14 nt, Molluscum contagiosum virus
auccgggcgcugca

SEQ ID NO: 232922 - RNA, 22 nt, Molluscum contagiosum virus
aucucaaagaacgcgcgcucua

SEQ ID NO: 232923 - RNA, 15 nt, Molluscum contagiosum virus
aucuaugcacggcac

SEQ ID NO: 232924 - RNA, 23 nt, Molluscum contagiosum virus
aucuaucacgcgucgacuaucag

SEQ ID NO: 232925 - RNA, 24 nt, Molluscum contagiosum virus
aucucgcaacaggaaagcuucugu

SEQ ID NO: 232926 - RNA, 17 nt, Molluscum contagiosum virus
aucucgcagacgcagcg

SEQ ID NO: 232927 - RNA, 24 nt, Molluscum contagiosum virus
aucucugcgccgcgcgcggugcug

SEQ ID NO: 232928 - RNA, 18 nt, Molluscum contagiosum virus
aucugccucguggaacaa

SEQ ID NO: 232929 - RNA, 20 nt, Molluscum contagiosum virus
aucuggaggcaaucugucca

SEQ ID NO: 232930 - RNA, 18 nt, Molluscum contagiosum virus
aucugucgccgcgggcug

SEQ ID NO: 232931 - RNA, 21 nt, Molluscum contagiosum virus
aucaggcgauaggacaugacu

SEQ ID NO: 232932 - RNA, 23 nt, Molluscum contagiosum virus
aucagcgcggaggcgcuaccucg

SEQ ID NO: 232933 - RNA, 17 nt, Molluscum contagiosum virus
aucagagaagugcuccg

SEQ ID NO: 232934 - RNA, 15 nt, Molluscum contagiosum virus
aucagcaacaagcuc

SEQ ID NO: 232935 - RNA, 22 nt, Molluscum contagiosum virus
aucaagaucggacucagcaugu

SEQ ID NO: 232936 - RNA, 13 nt, Molluscum contagiosum virus
auaugcauauaua

SEQ ID NO: 232937 - RNA, 21 nt, Molluscum contagiosum virus
auauggcgcgccgaguacugc

SEQ ID NO: 232938 - RNA, 18 nt, Molluscum contagiosum virus
auaaauggcguuaccagg

SEQ ID NO: 232939 - RNA, 15 nt, Molluscum contagiosum virus
auaaaguccucugaa

SEQ ID NO: 232940 - RNA, 19 nt, Molluscum contagiosum virus
auaaagucuucaagacugg

SEQ ID NO: 232941 - RNA, 22 nt, Molluscum contagiosum virus
auaaagucuucaagacuggcac

SEQ ID NO: 232942 - RNA, 14 nt, Molluscum contagiosum virus
agugaaucuugccu

SEQ ID NO: 232943 - RNA, 14 nt, Molluscum contagiosum virus
aguuuguagcucua

SEQ ID NO: 232944 - RNA, 17 nt, Molluscum contagiosum virus
aguuuggacgagcugcu

SEQ ID NO: 232945 - RNA, 18 nt, Molluscum contagiosum virus
agucucgaugugacaaca

SEQ ID NO: 232946 - RNA, 21 nt, Molluscum contagiosum virus
agucuagaagcgcaggcacaa

SEQ ID NO: 232947 - RNA, 15 nt, Molluscum contagiosum virus
auaaagacaacgaaa

SEQ ID NO: 232948 - RNA, 21 nt, Molluscum contagiosum virus
auacuccagacgcgaugacac

SEQ ID NO: 232949 - RNA, 19 nt, Molluscum contagiosum virus
auacugcgggcuguuccaa

SEQ ID NO: 232950 - RNA, 20 nt, Molluscum contagiosum virus
auagacguauacuccaaaaa

SEQ ID NO: 232951 - RNA, 22 nt, Molluscum contagiosum virus
auaccaugcucucgcugcugcc

SEQ ID NO: 232952 - RNA, 17 nt, Molluscum contagiosum virus
auaccggagacaccagc

SEQ ID NO: 232953 - RNA, 23 nt, Molluscum contagiosum virus
agccaugaggacagcuugcugcu

SEQ ID NO: 232954 - RNA, 17 nt, Molluscum contagiosum virus
agccagacgcagagcca

SEQ ID NO: 232955 - RNA, 12 nt, Molluscum contagiosum virus
agcccuccugag

SEQ ID NO: 232956 - RNA, 18 nt, Molluscum contagiosum virus
agcccuccugagaagcaa

SEQ ID NO: 232957 - RNA, 14 nt, Molluscum contagiosum virus
agcccuuccacgac

SEQ ID NO: 232958 - RNA, 21 nt, Molluscum contagiosum virus
agcccacguugccgcgcgcug

SEQ ID NO: 232959 - RNA, 14 nt, Molluscum contagiosum virus
agcccgacuucucg

SEQ ID NO: 232960 - RNA, 19 nt, Molluscum contagiosum virus
agcccgccucgucguccac

SEQ ID NO: 232961 - RNA, 14 nt, Molluscum contagiosum virus
agcccgcuaugaac

SEQ ID NO: 232962 - RNA, 19 nt, Molluscum contagiosum virus
agccguggaguccaugccc

SEQ ID NO: 232963 - RNA, 18 nt, Molluscum contagiosum virus
agccggccuagagcuggc

SEQ ID NO: 232964 - RNA, 18 nt, Molluscum contagiosum virus
agccggcugcccuguuac

SEQ ID NO: 232965 - RNA, 13 nt, Molluscum contagiosum virus
agccgcaagcaca

SEQ ID NO: 232966 - RNA, 13 nt, Molluscum contagiosum virus
agccgcguaccac

SEQ ID NO: 232967 - RNA, 23 nt, Molluscum contagiosum virus
agccgcgugaaaaacuccgcaca

SEQ ID NO: 232968 - RNA, 15 nt, Molluscum contagiosum virus
agccgcugcugcugc

SEQ ID NO: 232969 - RNA, 20 nt, Molluscum contagiosum virus
agccgccggggcccaugcuc

SEQ ID NO: 232970 - RNA, 22 nt, Molluscum contagiosum virus
agccgccggggcccaugcucac

SEQ ID NO: 232971 - RNA, 22 nt, Molluscum contagiosum virus
agccgccggucuccacguggcc

SEQ ID NO: 232972 - RNA, 21 nt, Molluscum contagiosum virus
agccgcgaaagcgucgugcuc

SEQ ID NO: 232973 - RNA, 20 nt, Molluscum contagiosum virus
agccucuguccugcgugcuu

SEQ ID NO: 232974 - RNA, 20 nt, Molluscum contagiosum virus
agccucuggaaggagcuggg

SEQ ID NO: 232975 - RNA, 19 nt, Molluscum contagiosum virus
agccucgcuggugugcacu

SEQ ID NO: 232976 - RNA, 21 nt, Molluscum contagiosum virus
agccucccccgcgcacugcca

SEQ ID NO: 232977 - RNA, 13 nt, Molluscum contagiosum virus
agccuagccauac

SEQ ID NO: 232978 - RNA, 12 nt, Molluscum contagiosum virus
agccuacguggc

SEQ ID NO: 232979 - RNA, 13 nt, Molluscum contagiosum virus
agauacacauugc

SEQ ID NO: 232980 - RNA, 17 nt, Molluscum contagiosum virus
agaucaugggcgugcuc

SEQ ID NO: 232981 - RNA, 21 nt, Molluscum contagiosum virus
agaucguuuugcacuugucag

SEQ ID NO: 232982 - RNA, 17 nt, Molluscum contagiosum virus
agaugaaaagauagcuc

SEQ ID NO: 232983 - RNA, 15 nt, Molluscum contagiosum virus
agaucggacucagca

SEQ ID NO: 232984 - RNA, 14 nt, Molluscum contagiosum virus
agaugaggcugcuc

SEQ ID NO: 232985 - RNA, 16 nt, Molluscum contagiosum virus
agcauuccuuguccug

SEQ ID NO: 232986 - RNA, 19 nt, Molluscum contagiosum virus
agcuacgaucgcgcucagg

SEQ ID NO: 232987 - RNA, 20 nt, Molluscum contagiosum virus
agcuacgaucgcgcucagga

SEQ ID NO: 232988 - RNA, 15 nt, Molluscum contagiosum virus
agcuacgcgcucuac

SEQ ID NO: 232989 - RNA, 18 nt, Molluscum contagiosum virus
agcuacgcgcucuacgcu

SEQ ID NO: 232990 - RNA, 14 nt, Molluscum contagiosum virus
agcuacgcuccgua

SEQ ID NO: 232991 - RNA, 17 nt, Molluscum contagiosum virus
agcguagcggacgaagc

SEQ ID NO: 232992 - RNA, 18 nt, Molluscum contagiosum virus
agcgugaccagugcgugc

SEQ ID NO: 232993 - RNA, 14 nt, Molluscum contagiosum virus
agcgugcaagaagu

SEQ ID NO: 232994 - RNA, 11 nt, Molluscum contagiosum virus
agcgugcagac

SEQ ID NO: 232995 - RNA, 19 nt, Molluscum contagiosum virus
agcgucgcgcgccgugccu

SEQ ID NO: 232996 - RNA, 12 nt, Molluscum contagiosum virus
agcguggcgcgc

SEQ ID NO: 232997 - RNA, 18 nt, Molluscum contagiosum virus
agcguugguaacaagagc

SEQ ID NO: 232998 - RNA, 14 nt, Molluscum contagiosum virus
agcguuccaggaac

SEQ ID NO: 232999 - RNA, 19 nt, Molluscum contagiosum virus
agcuagcguucccaagcaa

SEQ ID NO: 233000 - RNA, 20 nt, Molluscum contagiosum virus
agcuagcguucccaagcaaa

SEQ ID NO: 233001 - RNA, 22 nt, Molluscum contagiosum virus
agcuagcucuggcagcccgucg

SEQ ID NO: 233002 - RNA, 20 nt, Molluscum contagiosum virus
agcucacgagauggcugcuc

SEQ ID NO: 233003 - RNA, 12 nt, Molluscum contagiosum virus
agcucacgcuca

SEQ ID NO: 233004 - RNA, 21 nt, Molluscum contagiosum virus
agcucacgcucauggacaugc

SEQ ID NO: 233005 - RNA, 14 nt, Molluscum contagiosum virus
agcucaagcugcuc

SEQ ID NO: 233006 - RNA, 18 nt, Molluscum contagiosum virus
agcuccuccacguccagg

SEQ ID NO: 233007 - RNA, 19 nt, Molluscum contagiosum virus
agcuccugcugguucaggu

SEQ ID NO: 233008 - RNA, 16 nt, Molluscum contagiosum virus
agcuccgccgggaaua

SEQ ID NO: 233009 - RNA, 18 nt, Molluscum contagiosum virus
agcuccgcgcaugccaga

SEQ ID NO: 233010 - RNA, 22 nt, Molluscum contagiosum virus
agcuccagcauagaacacagcu

SEQ ID NO: 233011 - RNA, 13 nt, Molluscum contagiosum virus
agcuccagcguuu

SEQ ID NO: 233012 - RNA, 12 nt, Molluscum contagiosum virus
agcucguggaca

SEQ ID NO: 233013 - RNA, 19 nt, Molluscum contagiosum virus
agcggagcgggcacgggug

SEQ ID NO: 233014 - RNA, 23 nt, Molluscum contagiosum virus
agcggauuacgaacaagacgcua

SEQ ID NO: 233015 - RNA, 20 nt, Molluscum contagiosum virus
agcgcuuuguugccucagua

SEQ ID NO: 233016 - RNA, 18 nt, Molluscum contagiosum virus
agcggaagaaacagccau

SEQ ID NO: 233017 - RNA, 17 nt, Molluscum contagiosum virus
agcgcugccugugcuac

SEQ ID NO: 233018 - RNA, 13 nt, Molluscum contagiosum virus
agcgcugcucuac

SEQ ID NO: 233019 - RNA, 21 nt, Molluscum contagiosum virus
agcgcugcucuacgucuccuc

SEQ ID NO: 233020 - RNA, 14 nt, Molluscum contagiosum virus
agcgcgaggacaac

SEQ ID NO: 233021 - RNA, 16 nt, Molluscum contagiosum virus
agcgcgcccaccagca

SEQ ID NO: 233022 - RNA, 18 nt, Molluscum contagiosum virus
agcgcgcccccgagcugc

SEQ ID NO: 233023 - RNA, 19 nt, Molluscum contagiosum virus
agcgcgcgccgacgugcgc

SEQ ID NO: 233024 - RNA, 18 nt, Molluscum contagiosum virus
agcgcggaggcgcuaccu

SEQ ID NO: 233025 - RNA, 15 nt, Molluscum contagiosum virus
agcgcggcaacagca

SEQ ID NO: 233026 - RNA, 13 nt, Molluscum contagiosum virus
agcgcggcgcaca

SEQ ID NO: 233027 - RNA, 18 nt, Molluscum contagiosum virus
agcgcggggguguugcug

SEQ ID NO: 233028 - RNA, 21 nt, Molluscum contagiosum virus
agcgcggggguguugcugaug

SEQ ID NO: 233029 - RNA, 13 nt, Molluscum contagiosum virus
agcgcuaccugau

SEQ ID NO: 233030 - RNA, 17 nt, Molluscum contagiosum virus
agcgcuccaacuuccac

SEQ ID NO: 233031 - RNA, 18 nt, Molluscum contagiosum virus
agcgcgucucugcgcaga

SEQ ID NO: 233032 - RNA, 13 nt, Molluscum contagiosum virus
agcgcgugcucuu

SEQ ID NO: 233033 - RNA, 14 nt, Molluscum contagiosum virus
agcgggccuaucuu

SEQ ID NO: 233034 - RNA, 18 nt, Molluscum contagiosum virus
agcggccuguucuuccag

SEQ ID NO: 233035 - RNA, 21 nt, Molluscum contagiosum virus
agcggcccugcacggugucca

SEQ ID NO: 233036 - RNA, 18 nt, Molluscum contagiosum virus
agccuggcuccugugucg

SEQ ID NO: 233037 - RNA, 20 nt, Molluscum contagiosum virus
agccugugcgccaacaacca

SEQ ID NO: 233038 - RNA, 20 nt, Molluscum contagiosum virus
agcgaaacacgcuacgcagc

SEQ ID NO: 233039 - RNA, 23 nt, Molluscum contagiosum virus
agccuucuucgugcugugccuag

SEQ ID NO: 233040 - RNA, 16 nt, Molluscum contagiosum virus
agcgcccgcugcucua

SEQ ID NO: 233041 - RNA, 23 nt, Molluscum contagiosum virus
agcgcaugcgcgccgcgcugcug

SEQ ID NO: 233042 - RNA, 16 nt, Molluscum contagiosum virus
agcgccaucaauucaa

SEQ ID NO: 233043 - RNA, 12 nt, Molluscum contagiosum virus
agcgcaggcagu

SEQ ID NO: 233044 - RNA, 19 nt, Molluscum contagiosum virus
agcgcaccguugacgagcu

SEQ ID NO: 233045 - RNA, 22 nt, Molluscum contagiosum virus
agcgcacgaagcggcggacagc

SEQ ID NO: 233046 - RNA, 19 nt, Molluscum contagiosum virus
agcgacuacgcgcugcuag

SEQ ID NO: 233047 - RNA, 23 nt, Molluscum contagiosum virus
agcgagaucgaacuuaacggcca

SEQ ID NO: 233048 - RNA, 16 nt, Molluscum contagiosum virus
aggcaugauucaaaac

SEQ ID NO: 233049 - RNA, 17 nt, Molluscum contagiosum virus
aggcaugcgcgcagugc

SEQ ID NO: 233050 - RNA, 18 nt, Molluscum contagiosum virus
aggcaucucgugcaugac

SEQ ID NO: 233051 - RNA, 21 nt, Molluscum contagiosum virus
aggcaccugcggcucgcacuu

SEQ ID NO: 233052 - RNA, 15 nt, Molluscum contagiosum virus
aggcaccccgcagga

SEQ ID NO: 233053 - RNA, 14 nt, Molluscum contagiosum virus
aggcacccgcagga

SEQ ID NO: 233054 - RNA, 19 nt, Molluscum contagiosum virus
aggcagcggaacucgaaga

SEQ ID NO: 233055 - RNA, 15 nt, Molluscum contagiosum virus
aggccacgugcucaa

SEQ ID NO: 233056 - RNA, 22 nt, Molluscum contagiosum virus
aggccaugaucauggcgccgcu

SEQ ID NO: 233057 - RNA, 16 nt, Molluscum contagiosum virus
aggccgcccacgcuca

SEQ ID NO: 233058 - RNA, 15 nt, Molluscum contagiosum virus
aggccggcacaagcc

SEQ ID NO: 233059 - RNA, 21 nt, Molluscum contagiosum virus
aggcccgucuccacaaagacg

SEQ ID NO: 233060 - RNA, 16 nt, Molluscum contagiosum virus
aggccuucaacaagaa

SEQ ID NO: 233061 - RNA, 16 nt, Molluscum contagiosum virus
aggccuacgugcugcg

SEQ ID NO: 233062 - RNA, 15 nt, Molluscum contagiosum virus
aggccgguccugacu

SEQ ID NO: 233063 - RNA, 13 nt, Molluscum contagiosum virus
aggcuguguucca

SEQ ID NO: 233064 - RNA, 21 nt, Molluscum contagiosum virus
aggcgcugccgcgggacgaga

SEQ ID NO: 233065 - RNA, 13 nt, Molluscum contagiosum virus
agggaugcgcaca

SEQ ID NO: 233066 - RNA, 17 nt, Molluscum contagiosum virus
agggaugcgcacacuug

SEQ ID NO: 233067 - RNA, 19 nt, Molluscum contagiosum virus
agggccguuggacaucagc

SEQ ID NO: 233068 - RNA, 22 nt, Molluscum contagiosum virus
agcucguuuucggauagccccu

SEQ ID NO: 233069 - RNA, 22 nt, Molluscum contagiosum virus
agcucgcgcgcaagaacaacca

SEQ ID NO: 233070 - RNA, 22 nt, Molluscum contagiosum virus
agcucgcguccacgaugcgcuc

SEQ ID NO: 233071 - RNA, 18 nt, Molluscum contagiosum virus
agcugacucggacacugg

SEQ ID NO: 233072 - RNA, 17 nt, Molluscum contagiosum virus
agcugcaggaccugcug

SEQ ID NO: 233073 - RNA, 19 nt, Molluscum contagiosum virus
agcugcaggaccugcuggu

SEQ ID NO: 233074 - RNA, 19 nt, Molluscum contagiosum virus
agcugcagagcgugcuggu

SEQ ID NO: 233075 - RNA, 19 nt, Molluscum contagiosum virus
agcugcaaacauugccugg

SEQ ID NO: 233076 - RNA, 20 nt, Molluscum contagiosum virus
agcugcgcgcgcucauggcg

SEQ ID NO: 233077 - RNA, 14 nt, Molluscum contagiosum virus
aggauggacaaaga

SEQ ID NO: 233078 - RNA, 14 nt, Molluscum contagiosum virus
aggauucuugcacg

SEQ ID NO: 233079 - RNA, 15 nt, Molluscum contagiosum virus
aggcaacgcacaaaa

SEQ ID NO: 233080 - RNA, 15 nt, Molluscum contagiosum virus
aggagcccuugccac

SEQ ID NO: 233081 - RNA, 22 nt, Molluscum contagiosum virus
aggagccguggaugaacaccau

SEQ ID NO: 233082 - RNA, 20 nt, Molluscum contagiosum virus
aggaccaguugcauauccac

SEQ ID NO: 233083 - RNA, 14 nt, Molluscum contagiosum virus
aggacuaccagcuc

SEQ ID NO: 233084 - RNA, 16 nt, Molluscum contagiosum virus
aggacaugggcacaag

SEQ ID NO: 233085 - RNA, 14 nt, Molluscum contagiosum virus
agucccuugucaaa

SEQ ID NO: 233086 - RNA, 19 nt, Molluscum contagiosum virus
aguccgugacagagugccu

SEQ ID NO: 233087 - RNA, 19 nt, Molluscum contagiosum virus
agucgaagagggucgugca

SEQ ID NO: 233088 - RNA, 14 nt, Molluscum contagiosum virus
agucguuggcgcgc

SEQ ID NO: 233089 - RNA, 15 nt, Molluscum contagiosum virus
aguaccgugaccaag

SEQ ID NO: 233090 - RNA, 16 nt, Molluscum contagiosum virus
agucacugcuagugcu

SEQ ID NO: 233091 - RNA, 14 nt, Molluscum contagiosum virus
agucacuucucgga

SEQ ID NO: 233092 - RNA, 15 nt, Molluscum contagiosum virus
agucacgacuguguu

SEQ ID NO: 233093 - RNA, 16 nt, Molluscum contagiosum virus
agucacgacuguguuc

SEQ ID NO: 233094 - RNA, 14 nt, Molluscum contagiosum virus
agucacacuacgcu

SEQ ID NO: 233095 - RNA, 19 nt, Molluscum contagiosum virus
agguagagcaacaugcuga

SEQ ID NO: 233096 - RNA, 17 nt, Molluscum contagiosum virus
agguaggccaugaucau

SEQ ID NO: 233097 - RNA, 14 nt, Molluscum contagiosum virus
agguagugguccac

SEQ ID NO: 233098 - RNA, 23 nt, Molluscum contagiosum virus
agguccaguauuucaaugcagua

SEQ ID NO: 233099 - RNA, 15 nt, Molluscum contagiosum virus
agggcucaagaucuc

SEQ ID NO: 233100 - RNA, 22 nt, Molluscum contagiosum virus
agggcgaggccaaggucuucag

SEQ ID NO: 233101 - RNA, 16 nt, Molluscum contagiosum virus
agggcgcaacuccaag

SEQ ID NO: 233102 - RNA, 16 nt, Molluscum contagiosum virus
agggcgccgugcugcg

SEQ ID NO: 233103 - RNA, 20 nt, Molluscum contagiosum virus
agggcgcgaccggcgugccu

SEQ ID NO: 233104 - RNA, 23 nt, Molluscum contagiosum virus
agggcgcggacgccuucuuccug

SEQ ID NO: 233105 - RNA, 12 nt, Molluscum contagiosum virus
agggcgcucgau

SEQ ID NO: 233106 - RNA, 13 nt, Molluscum contagiosum virus
agguacgugucca

SEQ ID NO: 233107 - RNA, 15 nt, Molluscum contagiosum virus
aguacgagagcgcau

SEQ ID NO: 233108 - RNA, 19 nt, Molluscum contagiosum virus
aguacgccaucguggugga

SEQ ID NO: 233109 - RNA, 18 nt, Molluscum contagiosum virus
aguacccgagcugugcca

SEQ ID NO: 233110 - RNA, 17 nt, Molluscum contagiosum virus
aggucagguucuugugg

SEQ ID NO: 233111 - RNA, 12 nt, Molluscum contagiosum virus
uggacagcaucc

SEQ ID NO: 233112 - RNA, 20 nt, Molluscum contagiosum virus
uggacagcaugaacucgcug

SEQ ID NO: 233113 - RNA, 18 nt, Molluscum contagiosum virus
uggacacagcaaaagcuu

SEQ ID NO: 233114 - RNA, 22 nt, Molluscum contagiosum virus
ugcuuucguggucaucaagauc

SEQ ID NO: 233115 - RNA, 21 nt, Molluscum contagiosum virus
uggaagacaacucuuguugcu

SEQ ID NO: 233116 - RNA, 11 nt, Molluscum contagiosum virus
ugcuuugcacg

SEQ ID NO: 233117 - RNA, 22 nt, Molluscum contagiosum virus
uggaagcuuccuuuuucacuuu

SEQ ID NO: 233118 - RNA, 11 nt, Molluscum contagiosum virus
ugcugagccac

SEQ ID NO: 233119 - RNA, 16 nt, Molluscum contagiosum virus
ugcugcagaacugccu

SEQ ID NO: 233120 - RNA, 19 nt, Molluscum contagiosum virus
ugcugcagcguauggaucu

SEQ ID NO: 233121 - RNA, 22 nt, Molluscum contagiosum virus
ugcugcagcguauggaucuucu

SEQ ID NO: 233122 - RNA, 16 nt, Molluscum contagiosum virus
ugcugcacacaccgcg

SEQ ID NO: 233123 - RNA, 22 nt, Molluscum contagiosum virus
ugcuuccuccuccaaucugcau

SEQ ID NO: 233124 - RNA, 14 nt, Molluscum contagiosum virus
ugcuucacgcugcu

SEQ ID NO: 233125 - RNA, 17 nt, Molluscum contagiosum virus
ugcuucacgcugcucgu

SEQ ID NO: 233126 - RNA, 23 nt, Molluscum contagiosum virus
ugcuugcgcacggaccucaagga

SEQ ID NO: 233127 - RNA, 16 nt, Molluscum contagiosum virus
ugcuugcugcgcugca

SEQ ID NO: 233128 - RNA, 22 nt, Molluscum contagiosum virus
ugcucguguguccgcacgcaca

SEQ ID NO: 233129 - RNA, 14 nt, Molluscum contagiosum virus
ugcucgcacacgug

SEQ ID NO: 233130 - RNA, 9 nt, Molluscum contagiosum virus
ugcucgccc

SEQ ID NO: 233131 - RNA, 17 nt, Molluscum contagiosum virus
ugcucgguagcguggag

SEQ ID NO: 233132 - RNA, 22 nt, Molluscum contagiosum virus
ugcucgaagaguuggacagcca

SEQ ID NO: 233133 - RNA, 17 nt, Molluscum contagiosum virus
ugcucgcgcacgcgcac

SEQ ID NO: 233134 - RNA, 16 nt, Molluscum contagiosum virus
ugcucgcgggccuuug

SEQ ID NO: 233135 - RNA, 20 nt, Molluscum contagiosum virus
ugcucgcgggccuuugccgc

SEQ ID NO: 233136 - RNA, 15 nt, Molluscum contagiosum virus
ugcucggacacacgc

SEQ ID NO: 233137 - RNA, 20 nt, Molluscum contagiosum virus
ugcuccgcacguggagucac

SEQ ID NO: 233138 - RNA, 14 nt, Molluscum contagiosum virus
ugcuccgugcccac

SEQ ID NO: 233139 - RNA, 13 nt, Molluscum contagiosum virus
ugcgugucucucg

SEQ ID NO: 233140 - RNA, 22 nt, Molluscum contagiosum virus
ugcgugcaacaggagcauuccu

SEQ ID NO: 233141 - RNA, 16 nt, Molluscum contagiosum virus
ugcgugcaccucaaga

SEQ ID NO: 233142 - RNA, 22 nt, Molluscum contagiosum virus
ugcguuggcaacgcgggggcca

SEQ ID NO: 233143 - RNA, 23 nt, Molluscum contagiosum virus
ugcguuggcaacgcgggggccau

SEQ ID NO: 233144 - RNA, 20 nt, Molluscum contagiosum virus
ugcguguacgacgugcugcu

SEQ ID NO: 233145 - RNA, 11 nt, Molluscum contagiosum virus
ugcgucucucu

SEQ ID NO: 233146 - RNA, 23 nt, Molluscum contagiosum virus
ugcggugacuugccguguucuaa

SEQ ID NO: 233147 - RNA, 20 nt, Molluscum contagiosum virus
ugcgggcggcacacacuugc

SEQ ID NO: 233148 - RNA, 21 nt, Molluscum contagiosum virus
ugcgguccgacucggugcuca

SEQ ID NO: 233149 - RNA, 17 nt, Molluscum contagiosum virus
ugcggucgcgagccacg

SEQ ID NO: 233150 - RNA, 16 nt, Molluscum contagiosum virus
ugcgcacacacuugcu

SEQ ID NO: 233151 - RNA, 14 nt, Molluscum contagiosum virus
ugcgcacacuugcg

SEQ ID NO: 233152 - RNA, 13 nt, Molluscum contagiosum virus
ugcgcaccagcug

SEQ ID NO: 233153 - RNA, 16 nt, Molluscum contagiosum virus
ugcgcaccaucuucaa

SEQ ID NO: 233154 - RNA, 14 nt, Molluscum contagiosum virus
ugcgcaacugcgau

SEQ ID NO: 233155 - RNA, 19 nt, Molluscum contagiosum virus
ugcgcaagcgcuacuugcu

SEQ ID NO: 233156 - RNA, 21 nt, Molluscum contagiosum virus
ugcgcaaggccguccccggaa

SEQ ID NO: 233157 - RNA, 18 nt, Molluscum contagiosum virus
ugcgauaacaucugcuau

SEQ ID NO: 233158 - RNA, 17 nt, Molluscum contagiosum virus
ugcgaccccagugcgag

SEQ ID NO: 233159 - RNA, 15 nt, Molluscum contagiosum virus
ugccccguccucgcu

SEQ ID NO: 233160 - RNA, 19 nt, Molluscum contagiosum virus
ugcccgccagaagugaaau

SEQ ID NO: 233161 - RNA, 22 nt, Molluscum contagiosum virus
ugcccgccuucgacggcuucau

SEQ ID NO: 233162 - RNA, 16 nt, Molluscum contagiosum virus
ugcccgcgcgcuguau

SEQ ID NO: 233163 - RNA, 16 nt, Molluscum contagiosum virus
ugcccuggaccuccau

SEQ ID NO: 233164 - RNA, 14 nt, Molluscum contagiosum virus
ugcccuguccacaa

SEQ ID NO: 233165 - RNA, 23 nt, Molluscum contagiosum virus
ugcccuguccacaaaaccaaaac

SEQ ID NO: 233166 - RNA, 19 nt, Molluscum contagiosum virus
ugcgaaggcucgagcugca

SEQ ID NO: 233167 - RNA, 14 nt, Molluscum contagiosum virus
ugcgaaggucauca

SEQ ID NO: 233168 - RNA, 14 nt, Molluscum contagiosum virus
ugcgaacagccgcc

SEQ ID NO: 233169 - RNA, 13 nt, Molluscum contagiosum virus
ugccuuuugcaca

SEQ ID NO: 233170 - RNA, 21 nt, Molluscum contagiosum virus
ugcccuuuuuuauaugagaac

SEQ ID NO: 233171 - RNA, 13 nt, Molluscum contagiosum virus
ugccacggcugca

SEQ ID NO: 233172 - RNA, 21 nt, Molluscum contagiosum virus
ugcccacgcgcaaggucuucc

SEQ ID NO: 233173 - RNA, 13 nt, Molluscum contagiosum virus
ugcccaaacagcg

SEQ ID NO: 233174 - RNA, 17 nt, Molluscum contagiosum virus
ugccaggcggucuucca

SEQ ID NO: 233175 - RNA, 12 nt, Molluscum contagiosum virus
ugccagugcagu

SEQ ID NO: 233176 - RNA, 19 nt, Molluscum contagiosum virus
ugccaucucgcacacugca

SEQ ID NO: 233177 - RNA, 22 nt, Molluscum contagiosum virus
ugccaucucgcacacugcagca

SEQ ID NO: 233178 - RNA, 22 nt, Molluscum contagiosum virus
ugcauauauagacguauacucc

SEQ ID NO: 233179 - RNA, 19 nt, Molluscum contagiosum virus
ugcauauccacaccgggaa

SEQ ID NO: 233180 - RNA, 19 nt, Molluscum contagiosum virus
ugcagucacgacuguguuc

SEQ ID NO: 233181 - RNA, 20 nt, Molluscum contagiosum virus
ugcaguaugugaacacgaca

SEQ ID NO: 233182 - RNA, 21 nt, Molluscum contagiosum virus
ugcauaggacgcaucuaguca

SEQ ID NO: 233183 - RNA, 14 nt, Molluscum contagiosum virus
ugcauacacuuccu

SEQ ID NO: 233184 - RNA, 18 nt, Molluscum contagiosum virus
ugcacuucggacaccuca

SEQ ID NO: 233185 - RNA, 12 nt, Molluscum contagiosum virus
ugcacuugucag

SEQ ID NO: 233186 - RNA, 15 nt, Molluscum contagiosum virus
ugcacgcgcacgcgc

SEQ ID NO: 233187 - RNA, 16 nt, Molluscum contagiosum virus
ugcacgcgcacuugcc

SEQ ID NO: 233188 - RNA, 13 nt, Molluscum contagiosum virus
ugcacggcacggc

SEQ ID NO: 233189 - RNA, 11 nt, Molluscum contagiosum virus
ugcacgugcag

SEQ ID NO: 233190 - RNA, 17 nt, Molluscum contagiosum virus
ugcacgugcgugcccaa

SEQ ID NO: 233191 - RNA, 13 nt, Molluscum contagiosum virus
ugcacgugcugca

SEQ ID NO: 233192 - RNA, 14 nt, Molluscum contagiosum virus
ugcacuacugcucc

SEQ ID NO: 233193 - RNA, 19 nt, Molluscum contagiosum virus
ugcaccacgugcuccgugu

SEQ ID NO: 233194 - RNA, 12 nt, Molluscum contagiosum virus
ugcacaguucac

SEQ ID NO: 233195 - RNA, 13 nt, Molluscum contagiosum virus
ugcacaguucacg

SEQ ID NO: 233196 - RNA, 20 nt, Molluscum contagiosum virus
ugcacgacccucuucgacuu

SEQ ID NO: 233197 - RNA, 22 nt, Molluscum contagiosum virus
ugcacgacguacgagugcugga

SEQ ID NO: 233198 - RNA, 13 nt, Molluscum contagiosum virus
ugcacagcugcuc

SEQ ID NO: 233199 - RNA, 22 nt, Molluscum contagiosum virus
ugcacagcugcucguguucacu

SEQ ID NO: 233200 - RNA, 18 nt, Molluscum contagiosum virus
ugcacaccagacaaaguc

SEQ ID NO: 233201 - RNA, 13 nt, Molluscum contagiosum virus
ugcacaccgagcg

SEQ ID NO: 233202 - RNA, 17 nt, Molluscum contagiosum virus
ugcacacgcaccgccug

SEQ ID NO: 233203 - RNA, 20 nt, Molluscum contagiosum virus
ugauccaggcccguggcuua

SEQ ID NO: 233204 - RNA, 22 nt, Molluscum contagiosum virus
ugaucccggaacgcaaguacaa

SEQ ID NO: 233205 - RNA, 15 nt, Molluscum contagiosum virus
ugaucgacgaggacc

SEQ ID NO: 233206 - RNA, 21 nt, Molluscum contagiosum virus
ugcaaagacgguacauauucc

SEQ ID NO: 233207 - RNA, 15 nt, Molluscum contagiosum virus
ugcaagaagucucuc

SEQ ID NO: 233208 - RNA, 21 nt, Molluscum contagiosum virus
ugcaauaacaacgaccagcuu

SEQ ID NO: 233209 - RNA, 18 nt, Molluscum contagiosum virus
ugcaauggcaggugcgca

SEQ ID NO: 233210 - RNA, 16 nt, Molluscum contagiosum virus
ugagccagucucgcgc

SEQ ID NO: 233211 - RNA, 22 nt, Molluscum contagiosum virus
ugagaagcuguaccuggugcgc

SEQ ID NO: 233212 - RNA, 14 nt, Molluscum contagiosum virus
ugagaacaacagcg

SEQ ID NO: 233213 - RNA, 14 nt, Molluscum contagiosum virus
ucuuuuuuaugcac

SEQ ID NO: 233214 - RNA, 17 nt, Molluscum contagiosum virus
ucuuuuuuaugcacuuu

SEQ ID NO: 233215 - RNA, 20 nt, Molluscum contagiosum virus
ugagcguucgcuacuucaca

SEQ ID NO: 233216 - RNA, 22 nt, Molluscum contagiosum virus
ugagcucgcgcgcaagaacaac

SEQ ID NO: 233217 - RNA, 20 nt, Molluscum contagiosum virus
ugagcucuuuguacacccgu

SEQ ID NO: 233218 - RNA, 17 nt, Molluscum contagiosum virus
ugaggaggccaacgcca

SEQ ID NO: 233219 - RNA, 15 nt, Molluscum contagiosum virus
ugaggacagcuugcu

SEQ ID NO: 233220 - RNA, 12 nt, Molluscum contagiosum virus
ugaggaagcaag

SEQ ID NO: 233221 - RNA, 14 nt, Molluscum contagiosum virus
ugaggaagcaagac

SEQ ID NO: 233222 - RNA, 16 nt, Molluscum contagiosum virus
ugaguagcaacaaaga

SEQ ID NO: 233223 - RNA, 17 nt, Molluscum contagiosum virus
ugauaaaagcacagucc

SEQ ID NO: 233224 - RNA, 19 nt, Molluscum contagiosum virus
ugauaaaagcacaguccaa

SEQ ID NO: 233225 - RNA, 15 nt, Molluscum contagiosum virus
uucaaauccugguuc

SEQ ID NO: 233226 - RNA, 13 nt, Molluscum contagiosum virus
uuacugcugcaau

SEQ ID NO: 233227 - RNA, 24 nt, Molluscum contagiosum virus
uguuccacgaccgcaagugcacgc

SEQ ID NO: 233228 - RNA, 21 nt, Molluscum contagiosum virus
uguucucgcucgugcucucug

SEQ ID NO: 233229 - RNA, 14 nt, Molluscum contagiosum virus
uguuuucacgcaag

SEQ ID NO: 233230 - RNA, 12 nt, Molluscum contagiosum virus
uguuuuucggga

SEQ ID NO: 233231 - RNA, 23 nt, Molluscum contagiosum virus
uguuuuucgggaagcacagucca

SEQ ID NO: 233232 - RNA, 12 nt, Molluscum contagiosum virus
uggacaucagcg

SEQ ID NO: 233233 - RNA, 21 nt, Molluscum contagiosum virus
uggaccacaagcaguaccugc

SEQ ID NO: 233234 - RNA, 12 nt, Molluscum contagiosum virus
uggcaagcuugc

SEQ ID NO: 233235 - RNA, 15 nt, Molluscum contagiosum virus
uggcaagggccugcg

SEQ ID NO: 233236 - RNA, 19 nt, Molluscum contagiosum virus
uggcacgcgagguuccaga

SEQ ID NO: 233237 - RNA, 18 nt, Molluscum contagiosum virus
uggcaacgcgggggccau

SEQ ID NO: 233238 - RNA, 22 nt, Molluscum contagiosum virus
ugggcuacaagugcauccgcaa

SEQ ID NO: 233239 - RNA, 14 nt, Molluscum contagiosum virus
ugggcgagagcuuu

SEQ ID NO: 233240 - RNA, 20 nt, Molluscum contagiosum virus
uggcacuggcgcgcacgcgc

SEQ ID NO: 233241 - RNA, 16 nt, Molluscum contagiosum virus
ugggcgucgcacaguu

SEQ ID NO: 233242 - RNA, 13 nt, Molluscum contagiosum virus
ugggcgugcucac

SEQ ID NO: 233243 - RNA, 16 nt, Molluscum contagiosum virus
uggugugcacugaugu

SEQ ID NO: 233244 - RNA, 20 nt, Molluscum contagiosum virus
uggugcgcgugacacaccgc

SEQ ID NO: 233245 - RNA, 21 nt, Molluscum contagiosum virus
uggugcagcggaugcagaaca

SEQ ID NO: 233246 - RNA, 11 nt, Molluscum contagiosum virus
uggugcugcgc

SEQ ID NO: 233247 - RNA, 18 nt, Molluscum contagiosum virus
uggucaagaaggcgcugg

SEQ ID NO: 233248 - RNA, 12 nt, Molluscum contagiosum virus
uggucacagaca

SEQ ID NO: 233249 - RNA, 14 nt, Molluscum contagiosum virus
uggucaacagcuac

SEQ ID NO: 233250 - RNA, 14 nt, Molluscum contagiosum virus
uggucaaccucuac

SEQ ID NO: 233251 - RNA, 13 nt, Molluscum contagiosum virus
ugguccaccagcu

SEQ ID NO: 233252 - RNA, 19 nt, Molluscum contagiosum virus
uggucgccggcgcuucuac

SEQ ID NO: 233253 - RNA, 16 nt, Molluscum contagiosum virus
uguccuugaugccgug

SEQ ID NO: 233254 - RNA, 22 nt, Molluscum contagiosum virus
ugucgagcagauucacgagcuc

SEQ ID NO: 233255 - RNA, 19 nt, Molluscum contagiosum virus
ugucgcgcaucaccgagcg

SEQ ID NO: 233256 - RNA, 14 nt, Molluscum contagiosum virus
uguccgcacgcaca

SEQ ID NO: 233257 - RNA, 19 nt, Molluscum contagiosum virus
uguccgcgggcgcacgcuu

SEQ ID NO: 233258 - RNA, 17 nt, Molluscum contagiosum virus
uguccacaaaaccaaaa

SEQ ID NO: 233259 - RNA, 15 nt, Molluscum contagiosum virus
uguccacgacacugg

SEQ ID NO: 233260 - RNA, 14 nt, Molluscum contagiosum virus
uguacaugcucaag

SEQ ID NO: 233261 - RNA, 20 nt, Molluscum contagiosum virus
uguacucgccguuccacuac

SEQ ID NO: 233262 - RNA, 14 nt, Molluscum contagiosum virus
uguacguaauccau

SEQ ID NO: 233263 - RNA, 13 nt, Molluscum contagiosum virus
uguacgugcugcc

SEQ ID NO: 233264 - RNA, 17 nt, Molluscum contagiosum virus
ugugaggaaacacccag

SEQ ID NO: 233265 - RNA, 14 nt, Molluscum contagiosum virus
ugugcuuguucucu

SEQ ID NO: 233266 - RNA, 18 nt, Molluscum contagiosum virus
ugugcgcgguggugcugg

SEQ ID NO: 233267 - RNA, 15 nt, Molluscum contagiosum virus
ugugcgugucucucg

SEQ ID NO: 233268 - RNA, 16 nt, Molluscum contagiosum virus
ugugcuccugaggaag

SEQ ID NO: 233269 - RNA, 18 nt, Molluscum contagiosum virus
ugugugaucacgucuuuc

SEQ ID NO: 233270 - RNA, 13 nt, Molluscum contagiosum virus
uguguguucucaa

SEQ ID NO: 233271 - RNA, 17 nt, Molluscum contagiosum virus
uguggacgcgcaagugu

SEQ ID NO: 233272 - RNA, 15 nt, Molluscum contagiosum virus
aacacggccuccagc

SEQ ID NO: 233273 - RNA, 20 nt, Molluscum contagiosum virus
aacacuaccacagccauuaa

SEQ ID NO: 233274 - RNA, 13 nt, Molluscum contagiosum virus
aacacccagguuc

SEQ ID NO: 233275 - RNA, 16 nt, Molluscum contagiosum virus
aacacgacauguacau

SEQ ID NO: 233276 - RNA, 23 nt, Molluscum contagiosum virus
aacacgagacugagugcugagcc

SEQ ID NO: 233277 - RNA, 14 nt, Molluscum contagiosum virus
aacaccauccugcg

SEQ ID NO: 233278 - RNA, 14 nt, Molluscum contagiosum virus
uugccagaagcccu

SEQ ID NO: 233279 - RNA, 16 nt, Molluscum contagiosum virus
uugccaaagcucucuu

SEQ ID NO: 233280 - RNA, 15 nt, Molluscum contagiosum virus
uugcagcccaccagc

SEQ ID NO: 233281 - RNA, 15 nt, Molluscum contagiosum virus
uugcagacaaggaga

SEQ ID NO: 233282 - RNA, 17 nt, Molluscum contagiosum virus
uugcucuucgaccucug

SEQ ID NO: 233283 - RNA, 13 nt, Molluscum contagiosum virus
uugcucuacuggc

SEQ ID NO: 233284 - RNA, 14 nt, Molluscum contagiosum virus
uugcugcaguauga

SEQ ID NO: 233285 - RNA, 14 nt, Molluscum contagiosum virus
uugcguacuuggaa

SEQ ID NO: 233286 - RNA, 18 nt, Molluscum contagiosum virus
uugcggcgagucaguaca

SEQ ID NO: 233287 - RNA, 22 nt, Molluscum contagiosum virus
uugcgcggccauggucacgcgc

SEQ ID NO: 233288 - RNA, 22 nt, Molluscum contagiosum virus
uugcgcacacacuugcucucuu

SEQ ID NO: 233289 - RNA, 20 nt, Molluscum contagiosum virus
uugcgcacggaccucaagga

SEQ ID NO: 233290 - RNA, 23 nt, Molluscum contagiosum virus
uugccgucgcgcauagugccgua

SEQ ID NO: 233291 - RNA, 23 nt, Molluscum contagiosum virus
uugccgugcccaucuccuugucu

SEQ ID NO: 233292 - RNA, 17 nt, Molluscum contagiosum virus
uugcgaccccagugcga

SEQ ID NO: 233293 - RNA, 14 nt, Molluscum contagiosum virus
uuggcagcggcaaa

SEQ ID NO: 233294 - RNA, 22 nt, Molluscum contagiosum virus
uuggcauccggcacgcacaaag

SEQ ID NO: 233295 - RNA, 16 nt, Molluscum contagiosum virus
uuggaauugugcugcu

SEQ ID NO: 233296 - RNA, 15 nt, Molluscum contagiosum virus
uucacgauccaugag

SEQ ID NO: 233297 - RNA, 22 nt, Molluscum contagiosum virus
uucacgaugaaaagcgugaugu

SEQ ID NO: 233298 - RNA, 14 nt, Molluscum contagiosum virus
uucaacuuccacau

SEQ ID NO: 233299 - RNA, 14 nt, Molluscum contagiosum virus
uucacguacuugag

SEQ ID NO: 233300 - RNA, 21 nt, Molluscum contagiosum virus
uucagagugacgcugcaagac

SEQ ID NO: 233301 - RNA, 17 nt, Molluscum contagiosum virus
uugaaggacgcguucuc

SEQ ID NO: 233302 - RNA, 21 nt, Molluscum contagiosum virus
uugaugacuaugcgucuuccu

SEQ ID NO: 233303 - RNA, 14 nt, Molluscum contagiosum virus
aacacagcuagucu

SEQ ID NO: 233304 - RNA, 18 nt, Molluscum contagiosum virus
uugacaaguacaugcacg

SEQ ID NO: 233305 - RNA, 23 nt, Molluscum contagiosum virus
uugagcgcgccgcgcaugacagc

SEQ ID NO: 233306 - RNA, 22 nt, Molluscum contagiosum virus
uugagagcagcggcuacuugga

SEQ ID NO: 233307 - RNA, 23 nt, Molluscum contagiosum virus
uuucuccgcucucgagcucacag

SEQ ID NO: 233308 - RNA, 15 nt, Molluscum contagiosum virus
uuucgggaagcacag

SEQ ID NO: 233309 - RNA, 22 nt, Molluscum contagiosum virus
uuucgcgggcgccgcgcaauag

SEQ ID NO: 233310 - RNA, 20 nt, Molluscum contagiosum virus
uuucaaugcaguaugugaac

SEQ ID NO: 233311 - RNA, 15 nt, Molluscum contagiosum virus
uuuggcgugaccaug

SEQ ID NO: 233312 - RNA, 18 nt, Molluscum contagiosum virus
uuucucggccgccgucac

SEQ ID NO: 233313 - RNA, 21 nt, Molluscum contagiosum virus
aacaguaacgguaccuggcuu

SEQ ID NO: 233314 - RNA, 17 nt, Molluscum contagiosum virus
uuuuccaaccuguuaaa

SEQ ID NO: 233315 - RNA, 18 nt, Molluscum contagiosum virus
aacagcauuagcgccaag

SEQ ID NO: 233316 - RNA, 18 nt, Molluscum contagiosum virus
aacagcccccucuuggca

SEQ ID NO: 233317 - RNA, 15 nt, Molluscum contagiosum virus
aacagccgugcuccg

SEQ ID NO: 233318 - RNA, 14 nt, Molluscum contagiosum virus
uuggugcagaucuc

SEQ ID NO: 233319 - RNA, 13 nt, Molluscum contagiosum virus
uuggcgucucuuc

SEQ ID NO: 233320 - RNA, 13 nt, Molluscum contagiosum virus
uugugcgccugug

SEQ ID NO: 233321 - RNA, 14 nt, Molluscum contagiosum virus
uugugcggggcucg

SEQ ID NO: 233322 - RNA, 15 nt, Molluscum contagiosum virus
uuucaaaaacgcgcc

SEQ ID NO: 233323 - RNA, 13 nt, Molluscum contagiosum virus
uuuacugcaagau

SEQ ID NO: 233324 - RNA, 16 nt, Molluscum contagiosum virus
uuuacuacguguucuc

SEQ ID NO: 233325 - RNA, 19 nt, Molluscum contagiosum virus
uuguguugccgagcucugu

SEQ ID NO: 233326 - RNA, 12 nt, Molluscum contagiosum virus
uuguugugacac

SEQ ID NO: 233327 - RNA, 17 nt, Molluscum contagiosum virus
uuguucucgggggcucg

SEQ ID NO: 233328 - RNA, 15 nt, Molluscum contagiosum virus
aagucgaagaggguc

SEQ ID NO: 233329 - RNA, 20 nt, Molluscum contagiosum virus
aagucguggccguagugcuc

SEQ ID NO: 233330 - RNA, 17 nt, Molluscum contagiosum virus
aaggucucgagcuccag

SEQ ID NO: 233331 - RNA, 23 nt, Molluscum contagiosum virus
aaggucuucaggaacaaggccaa

SEQ ID NO: 233332 - RNA, 11 nt, Molluscum contagiosum virus
aaggugcuguc

SEQ ID NO: 233333 - RNA, 17 nt, Molluscum contagiosum virus
aaggaaaggcacccacc

SEQ ID NO: 233334 - RNA, 14 nt, Molluscum contagiosum virus
aagguacccgcagg

SEQ ID NO: 233335 - RNA, 20 nt, Molluscum contagiosum virus
aaggguguggccuacguggc

SEQ ID NO: 233336 - RNA, 15 nt, Molluscum contagiosum virus
aaggacuaccagcuc

SEQ ID NO: 233337 - RNA, 15 nt, Molluscum contagiosum virus
aagcacgagcugcug

SEQ ID NO: 233338 - RNA, 22 nt, Molluscum contagiosum virus
aagcacgcggccauuuacuucg

SEQ ID NO: 233339 - RNA, 14 nt, Molluscum contagiosum virus
aagcacguagcucg

SEQ ID NO: 233340 - RNA, 19 nt, Molluscum contagiosum virus
aagcacuacauggacgugc

SEQ ID NO: 233341 - RNA, 12 nt, Molluscum contagiosum virus
aagcagucucau

SEQ ID NO: 233342 - RNA, 18 nt, Molluscum contagiosum virus
aagcaggaguccgugaca

SEQ ID NO: 233343 - RNA, 21 nt, Molluscum contagiosum virus
aagcccgagcgcguccaugag

SEQ ID NO: 233344 - RNA, 13 nt, Molluscum contagiosum virus
aagcuuuagucca

SEQ ID NO: 233345 - RNA, 14 nt, Molluscum contagiosum virus
aagcuugcucagca

SEQ ID NO: 233346 - RNA, 15 nt, Molluscum contagiosum virus
aagcucucuuagcag

SEQ ID NO: 233347 - RNA, 21 nt, Molluscum contagiosum virus
aagcuggccgaggucuuccac

SEQ ID NO: 233348 - RNA, 17 nt, Molluscum contagiosum virus
aagugcgucgacgugga

SEQ ID NO: 233349 - RNA, 18 nt, Molluscum contagiosum virus
aagugcuccgcacgugga

SEQ ID NO: 233350 - RNA, 12 nt, Molluscum contagiosum virus
aauaaagaggcu

SEQ ID NO: 233351 - RNA, 23 nt, Molluscum contagiosum virus
aaucgcgugcuugcugcgcugca

SEQ ID NO: 233352 - RNA, 23 nt, Molluscum contagiosum virus
aacgcugccgcuggcgcuaccua

SEQ ID NO: 233353 - RNA, 11 nt, Molluscum contagiosum virus
aacgugcugcg

SEQ ID NO: 233354 - RNA, 12 nt, Molluscum contagiosum virus
aacgugcaugca

SEQ ID NO: 233355 - RNA, 23 nt, Molluscum contagiosum virus
aacguugugcgcaacgucuuccg

SEQ ID NO: 233356 - RNA, 14 nt, Molluscum contagiosum virus
aacgucgcacuggc

SEQ ID NO: 233357 - RNA, 16 nt, Molluscum contagiosum virus
aacucuacacguggaa

SEQ ID NO: 233358 - RNA, 17 nt, Molluscum contagiosum virus
aacucuacgacaugcuc

SEQ ID NO: 233359 - RNA, 16 nt, Molluscum contagiosum virus
aacucuccgacgugcu

SEQ ID NO: 233360 - RNA, 17 nt, Molluscum contagiosum virus
aacucuccgacgugcug

SEQ ID NO: 233361 - RNA, 20 nt, Molluscum contagiosum virus
aacucgugccugucucgcaa

SEQ ID NO: 233362 - RNA, 15 nt, Molluscum contagiosum virus
aacucgcgugccuug

SEQ ID NO: 233363 - RNA, 15 nt, Molluscum contagiosum virus
aacucgcugcugcuc

SEQ ID NO: 233364 - RNA, 22 nt, Molluscum contagiosum virus
aacauacgcacucguggcaaca

SEQ ID NO: 233365 - RNA, 19 nt, Molluscum contagiosum virus
aacauccugccacaccagc

SEQ ID NO: 233366 - RNA, 20 nt, Molluscum contagiosum virus
aacauccugccacaccagcu

SEQ ID NO: 233367 - RNA, 18 nt, Molluscum contagiosum virus
aacgccaggaacaucagc

SEQ ID NO: 233368 - RNA, 15 nt, Molluscum contagiosum virus
aacgccagugcuuug

SEQ ID NO: 233369 - RNA, 22 nt, Molluscum contagiosum virus
aacgcgcccccguccgugccau

SEQ ID NO: 233370 - RNA, 22 nt, Molluscum contagiosum virus
aacgcaaggugugcgcgcugca

SEQ ID NO: 233371 - RNA, 13 nt, Molluscum contagiosum virus
aacgcacgcggaa

SEQ ID NO: 233372 - RNA, 21 nt, Molluscum contagiosum virus
aacgcacgcggaaacaagcac

SEQ ID NO: 233373 - RNA, 12 nt, Molluscum contagiosum virus
aacgcacugucg

SEQ ID NO: 233374 - RNA, 15 nt, Molluscum contagiosum virus
aagacaguccgucuc

SEQ ID NO: 233375 - RNA, 19 nt, Molluscum contagiosum virus
aagacgcauagucaucaaa

SEQ ID NO: 233376 - RNA, 19 nt, Molluscum contagiosum virus
aagacauugccuuuugcac

SEQ ID NO: 233377 - RNA, 13 nt, Molluscum contagiosum virus
aagaccaccagca

SEQ ID NO: 233378 - RNA, 21 nt, Molluscum contagiosum virus
aagaccaucaucgcgcugcuc

SEQ ID NO: 233379 - RNA, 22 nt, Molluscum contagiosum virus
aagagggccuuucucagagaaa

SEQ ID NO: 233380 - RNA, 19 nt, Molluscum contagiosum virus
aagagcccgccgggcaccg

SEQ ID NO: 233381 - RNA, 18 nt, Molluscum contagiosum virus
aagaggccagcacaagcc

SEQ ID NO: 233382 - RNA, 20 nt, Molluscum contagiosum virus
aagaggccagcacaagccgu

SEQ ID NO: 233383 - RNA, 18 nt, Molluscum contagiosum virus
aagaggccggcacaagcc

SEQ ID NO: 233384 - RNA, 17 nt, Molluscum contagiosum virus
aagaucguuuugcacuu

SEQ ID NO: 233385 - RNA, 18 nt, Molluscum contagiosum virus
aagaguggcucacagccg

SEQ ID NO: 233386 - RNA, 23 nt, Molluscum contagiosum virus
aagcacaacgggcucgugcugga

SEQ ID NO: 233387 - RNA, 12 nt, Molluscum contagiosum virus
aagcacagucca

SEQ ID NO: 233388 - RNA, 17 nt, Molluscum contagiosum virus
aagcaccgccugcugca

SEQ ID NO: 233389 - RNA, 17 nt, Molluscum contagiosum virus
aagcaccugcgcuuccu

SEQ ID NO: 233390 - RNA, 21 nt, Molluscum contagiosum virus
aagauggcgcagcacuucgac

SEQ ID NO: 233391 - RNA, 20 nt, Molluscum contagiosum virus
uacauaaaauggaccagaaa

SEQ ID NO: 233392 - RNA, 17 nt, Molluscum contagiosum virus
uacaagcggugcagcua

SEQ ID NO: 233393 - RNA, 17 nt, Molluscum contagiosum virus
uacaacccaaacauguc

SEQ ID NO: 233394 - RNA, 13 nt, Molluscum contagiosum virus
uacgugcacgugg

SEQ ID NO: 233395 - RNA, 21 nt, Molluscum contagiosum virus
uacguggucauggugcccaug

SEQ ID NO: 233396 - RNA, 17 nt, Molluscum contagiosum virus
uacguguccaugcacga

SEQ ID NO: 233397 - RNA, 14 nt, Molluscum contagiosum virus
uacggacgcccucc

SEQ ID NO: 233398 - RNA, 17 nt, Molluscum contagiosum virus
uacucaacaagcugcug

SEQ ID NO: 233399 - RNA, 11 nt, Molluscum contagiosum virus
uacugcaagau

SEQ ID NO: 233400 - RNA, 19 nt, Molluscum contagiosum virus
aacaagagcuuacuagacu

SEQ ID NO: 233401 - RNA, 16 nt, Molluscum contagiosum virus
aacaaccacucuuuca

SEQ ID NO: 233402 - RNA, 17 nt, Molluscum contagiosum virus
uacucaugcugcucaug

SEQ ID NO: 233403 - RNA, 13 nt, Molluscum contagiosum virus
uaccugaugcgca

SEQ ID NO: 233404 - RNA, 12 nt, Molluscum contagiosum virus
uaccuguaugau

SEQ ID NO: 233405 - RNA, 20 nt, Molluscum contagiosum virus
uacgacaaaggcauuuuccu

SEQ ID NO: 233406 - RNA, 14 nt, Molluscum contagiosum virus
uacgacgacaugca

SEQ ID NO: 233407 - RNA, 16 nt, Molluscum contagiosum virus
uacgagaauuucgaca

SEQ ID NO: 233408 - RNA, 22 nt, Molluscum contagiosum virus
uaccuguguuucguacgcggag

SEQ ID NO: 233409 - RNA, 14 nt, Molluscum contagiosum virus
uacgaggugcugcg

SEQ ID NO: 233410 - RNA, 18 nt, Molluscum contagiosum virus
uacgauggaugcuggaug

SEQ ID NO: 233411 - RNA, 22 nt, Molluscum contagiosum virus
uacgccaagaggacgagcugcu

SEQ ID NO: 233412 - RNA, 15 nt, Molluscum contagiosum virus
uacgcuacagcagcc

SEQ ID NO: 233413 - RNA, 17 nt, Molluscum contagiosum virus
uacgcgcgcgugcugcu

SEQ ID NO: 233414 - RNA, 12 nt, Molluscum contagiosum virus
uacaugcucaag

SEQ ID NO: 233415 - RNA, 20 nt, Molluscum contagiosum virus
uacaugcccggccucgccuc

SEQ ID NO: 233416 - RNA, 22 nt, Molluscum contagiosum virus
uacaugcaacgcaggacacugu

SEQ ID NO: 233417 - RNA, 15 nt, Molluscum contagiosum virus
uaccuaggcacuccg

SEQ ID NO: 233418 - RNA, 15 nt, Molluscum contagiosum virus
uaagagcgugaacau

SEQ ID NO: 233419 - RNA, 21 nt, Molluscum contagiosum virus
uaacaauggacacgcacuggc

SEQ ID NO: 233420 - RNA, 22 nt, Molluscum contagiosum virus
uaacaauggacacgcacuggcg

SEQ ID NO: 233421 - RNA, 18 nt, Molluscum contagiosum virus
uaacugagaggaccuccc

SEQ ID NO: 233422 - RNA, 17 nt, Molluscum contagiosum virus
guugcagcccaccagca

SEQ ID NO: 233423 - RNA, 15 nt, Molluscum contagiosum virus
guugcccgccugccg

SEQ ID NO: 233424 - RNA, 12 nt, Molluscum contagiosum virus
guugccugagaa

SEQ ID NO: 233425 - RNA, 16 nt, Molluscum contagiosum virus
uaaaagacuggcucag

SEQ ID NO: 233426 - RNA, 15 nt, Molluscum contagiosum virus
guucugcacagcaca

SEQ ID NO: 233427 - RNA, 20 nt, Molluscum contagiosum virus
gggucgaucccgacacugcg

SEQ ID NO: 233428 - RNA, 13 nt, Molluscum contagiosum virus
ggggggcgccaag

SEQ ID NO: 233429 - RNA, 18 nt, Molluscum contagiosum virus
ggggcuagcgcugcucua

SEQ ID NO: 233430 - RNA, 22 nt, Molluscum contagiosum virus
ggggcucgccggcgagaugcga

SEQ ID NO: 233431 - RNA, 13 nt, Molluscum contagiosum virus
ggggcuggcagaa

SEQ ID NO: 233432 - RNA, 15 nt, Molluscum contagiosum virus
ggggccacaagcacg

SEQ ID NO: 233433 - RNA, 14 nt, Molluscum contagiosum virus
ggggcgcgugcugg

SEQ ID NO: 233434 - RNA, 23 nt, Molluscum contagiosum virus
gggugccgugccccugcuagucc

SEQ ID NO: 233435 - RNA, 17 nt, Molluscum contagiosum virus
gggugcacggugaucau

SEQ ID NO: 233436 - RNA, 17 nt, Molluscum contagiosum virus
guacuacuacacugucg

SEQ ID NO: 233437 - RNA, 19 nt, Molluscum contagiosum virus
guacguguccaugcacgac

SEQ ID NO: 233438 - RNA, 22 nt, Molluscum contagiosum virus
guaguccgacggaacgagccug

SEQ ID NO: 233439 - RNA, 22 nt, Molluscum contagiosum virus
guagcccaggaacaucugcaac

SEQ ID NO: 233440 - RNA, 13 nt, Molluscum contagiosum virus
guagccuagccau

SEQ ID NO: 233441 - RNA, 17 nt, Molluscum contagiosum virus
guagcgguugaccagcu

SEQ ID NO: 233442 - RNA, 18 nt, Molluscum contagiosum virus
guagcgguugaccagcuc

SEQ ID NO: 233443 - RNA, 21 nt, Molluscum contagiosum virus
guagcuagcguucccaagcaa

SEQ ID NO: 233444 - RNA, 17 nt, Molluscum contagiosum virus
guagagcaacaugcuga

SEQ ID NO: 233445 - RNA, 22 nt, Molluscum contagiosum virus
guacuucaagcacgagcugcug

SEQ ID NO: 233446 - RNA, 16 nt, Molluscum contagiosum virus
guauauucuuuacuac

SEQ ID NO: 233447 - RNA, 23 nt, Molluscum contagiosum virus
guauucgcaagauacacauugcg

SEQ ID NO: 233448 - RNA, 11 nt, Molluscum contagiosum virus
gucaagacugg

SEQ ID NO: 233449 - RNA, 12 nt, Molluscum contagiosum virus
gucaagacuggc

SEQ ID NO: 233450 - RNA, 18 nt, Molluscum contagiosum virus
gucaagcacuacauggac

SEQ ID NO: 233451 - RNA, 22 nt, Molluscum contagiosum virus
gucaagcacuacauggacgugc

SEQ ID NO: 233452 - RNA, 23 nt, Molluscum contagiosum virus
gucaauacucuguagcaucugcg

SEQ ID NO: 233453 - RNA, 21 nt, Molluscum contagiosum virus
gucaacaacacgaucaaggug

SEQ ID NO: 233454 - RNA, 16 nt, Molluscum contagiosum virus
gucaaacugcuugucg

SEQ ID NO: 233455 - RNA, 23 nt, Molluscum contagiosum virus
gucacgaccgacccaucggagaa

SEQ ID NO: 233456 - RNA, 15 nt, Molluscum contagiosum virus
gucacgacuguguuc

SEQ ID NO: 233457 - RNA, 21 nt, Molluscum contagiosum virus
gucacgcgcuucguggacgag

SEQ ID NO: 233458 - RNA, 20 nt, Molluscum contagiosum virus
gucacagacacgcuggucag

SEQ ID NO: 233459 - RNA, 23 nt, Molluscum contagiosum virus
gucacagacacgcuggucagcuu

SEQ ID NO: 233460 - RNA, 18 nt, Molluscum contagiosum virus
gucagauuguacacggua

SEQ ID NO: 233461 - RNA, 14 nt, Molluscum contagiosum virus
gucagccgcacggc

SEQ ID NO: 233462 - RNA, 19 nt, Molluscum contagiosum virus
gucaucgacgagcacgagc

SEQ ID NO: 233463 - RNA, 21 nt, Molluscum contagiosum virus
guccaaggugaacgaccucaa

SEQ ID NO: 233464 - RNA, 23 nt, Molluscum contagiosum virus
guccacgcaggacuggcaccugc

SEQ ID NO: 233465 - RNA, 23 nt, Molluscum contagiosum virus
guccacggguaccgugcgcguga

SEQ ID NO: 233466 - RNA, 14 nt, Molluscum contagiosum virus
guccacgacacugg

SEQ ID NO: 233467 - RNA, 11 nt, Molluscum contagiosum virus
guccaccagcu

SEQ ID NO: 233468 - RNA, 20 nt, Molluscum contagiosum virus
guccacaaagcccuccugag

SEQ ID NO: 233469 - RNA, 18 nt, Molluscum contagiosum virus
gucuucaagacuggcacu

SEQ ID NO: 233470 - RNA, 20 nt, Molluscum contagiosum virus
gucuucgagagccuucguca

SEQ ID NO: 233471 - RNA, 19 nt, Molluscum contagiosum virus
gucuucuucgcaagugcac

SEQ ID NO: 233472 - RNA, 22 nt, Molluscum contagiosum virus
gucuugacaggcgcgcaagugc

SEQ ID NO: 233473 - RNA, 21 nt, Molluscum contagiosum virus
gucuugcgcacacacuugcuc

SEQ ID NO: 233474 - RNA, 21 nt, Molluscum contagiosum virus
gucuuggcaugcgugcuucac

SEQ ID NO: 233475 - RNA, 23 nt, Molluscum contagiosum virus
gucuugcagagugaaucuugccu

SEQ ID NO: 233476 - RNA, 23 nt, Molluscum contagiosum virus
gucuuguggcgccgaugcagugc

SEQ ID NO: 233477 - RNA, 17 nt, Molluscum contagiosum virus
gugagcguucgcuacuu

SEQ ID NO: 233478 - RNA, 18 nt, Molluscum contagiosum virus
gugaggaggcggcacugc

SEQ ID NO: 233479 - RNA, 21 nt, Molluscum contagiosum virus
gugaggaggcggcacugcuag

SEQ ID NO: 233480 - RNA, 13 nt, Molluscum contagiosum virus
gucccuugucaaa

SEQ ID NO: 233481 - RNA, 22 nt, Molluscum contagiosum virus
guccgcacgcacggagcacaac

SEQ ID NO: 233482 - RNA, 13 nt, Molluscum contagiosum virus
guccgcaguaccg

SEQ ID NO: 233483 - RNA, 19 nt, Molluscum contagiosum virus
guccgcggcucugacaaca

SEQ ID NO: 233484 - RNA, 20 nt, Molluscum contagiosum virus
guccguaagucgaagagggu

SEQ ID NO: 233485 - RNA, 13 nt, Molluscum contagiosum virus
guccgucuuugcg

SEQ ID NO: 233486 - RNA, 14 nt, Molluscum contagiosum virus
guccuacguuuuca

SEQ ID NO: 233487 - RNA, 17 nt, Molluscum contagiosum virus
gugcagacgaccgucac

SEQ ID NO: 233488 - RNA, 22 nt, Molluscum contagiosum virus
gugcagacgaccgucacgacuc

SEQ ID NO: 233489 - RNA, 14 nt, Molluscum contagiosum virus
gugcagacgcucaa

SEQ ID NO: 233490 - RNA, 21 nt, Molluscum contagiosum virus
gugcagaugaggcugcucucc

SEQ ID NO: 233491 - RNA, 18 nt, Molluscum contagiosum virus
gugcagccgcugcugcug

SEQ ID NO: 233492 - RNA, 22 nt, Molluscum contagiosum virus
gugcaggaacgcgcgcucguca

SEQ ID NO: 233493 - RNA, 16 nt, Molluscum contagiosum virus
gugcacaugcccgugc

SEQ ID NO: 233494 - RNA, 23 nt, Molluscum contagiosum virus
gugcaaauugaaaaaacaugugc

SEQ ID NO: 233495 - RNA, 22 nt, Molluscum contagiosum virus
gugaugauuugauggcugcuca

SEQ ID NO: 233496 - RNA, 23 nt, Molluscum contagiosum virus
gugaugauuugauggcugcucau

SEQ ID NO: 233497 - RNA, 23 nt, Molluscum contagiosum virus
gugcgcaccaucuucaacuucca

SEQ ID NO: 233498 - RNA, 13 nt, Molluscum contagiosum virus
gugcgagcuuugu

SEQ ID NO: 233499 - RNA, 14 nt, Molluscum contagiosum virus
gugcgacaaaguac

SEQ ID NO: 233500 - RNA, 12 nt, Molluscum contagiosum virus
guggaacaaaga

SEQ ID NO: 233501 - RNA, 19 nt, Molluscum contagiosum virus
gugccagcgccucugcgag

SEQ ID NO: 233502 - RNA, 15 nt, Molluscum contagiosum virus
gugccgggcuugcuc

SEQ ID NO: 233503 - RNA, 19 nt, Molluscum contagiosum virus
gugcccaugcucgagccug

SEQ ID NO: 233504 - RNA, 16 nt, Molluscum contagiosum virus
gugcccgcaguuugca

SEQ ID NO: 233505 - RNA, 22 nt, Molluscum contagiosum virus
gugcccgcggcguucccgcuca

SEQ ID NO: 233506 - RNA, 17 nt, Molluscum contagiosum virus
guucguuguccuugcca

SEQ ID NO: 233507 - RNA, 14 nt, Molluscum contagiosum virus
guucgcagugcccg

SEQ ID NO: 233508 - RNA, 14 nt, Molluscum contagiosum virus
guucgagcugcugc

SEQ ID NO: 233509 - RNA, 16 nt, Molluscum contagiosum virus
guuccuggugugccag

SEQ ID NO: 233510 - RNA, 15 nt, Molluscum contagiosum virus
guuccaaaagacaga

SEQ ID NO: 233511 - RNA, 12 nt, Molluscum contagiosum virus
guuccaguacca

SEQ ID NO: 233512 - RNA, 20 nt, Molluscum contagiosum virus
guggcacugacgguacucau

SEQ ID NO: 233513 - RNA, 13 nt, Molluscum contagiosum virus
guggucuuugucu

SEQ ID NO: 233514 - RNA, 14 nt, Molluscum contagiosum virus
guggugcgccugca

SEQ ID NO: 233515 - RNA, 19 nt, Molluscum contagiosum virus
gugguguccacgcgcguga

SEQ ID NO: 233516 - RNA, 16 nt, Molluscum contagiosum virus
gugguguucgccggca

SEQ ID NO: 233517 - RNA, 14 nt, Molluscum contagiosum virus
guggagcacuuccg

SEQ ID NO: 233518 - RNA, 16 nt, Molluscum contagiosum virus
guggaccuuggcgcgc

SEQ ID NO: 233519 - RNA, 21 nt, Molluscum contagiosum virus
guggacgcgcgagugugugca

SEQ ID NO: 233520 - RNA, 14 nt, Molluscum contagiosum virus
guggacgcuccgag

SEQ ID NO: 233521 - RNA, 19 nt, Molluscum contagiosum virus
guggaucgcgcgcaccugc

SEQ ID NO: 233522 - RNA, 14 nt, Molluscum contagiosum virus
guguuuccuugccu

SEQ ID NO: 233523 - RNA, 17 nt, Molluscum contagiosum virus
guguugugaaguccucu

SEQ ID NO: 233524 - RNA, 16 nt, Molluscum contagiosum virus
guguauccaggaucac

SEQ ID NO: 233525 - RNA, 22 nt, Molluscum contagiosum virus
gugucgagcuucggacgagcuc

SEQ ID NO: 233526 - RNA, 14 nt, Molluscum contagiosum virus
guguacgucuuucc

SEQ ID NO: 233527 - RNA, 14 nt, Molluscum contagiosum virus
uauuaccugagauc

SEQ ID NO: 233528 - RNA, 23 nt, Molluscum contagiosum virus
uauuguuuuucgggaagcacagu

SEQ ID NO: 233529 - RNA, 17 nt, Molluscum contagiosum virus
ucaacucguaggacaac

SEQ ID NO: 233530 - RNA, 13 nt, Molluscum contagiosum virus
ucaacggugcgcu

SEQ ID NO: 233531 - RNA, 15 nt, Molluscum contagiosum virus
ucaagaacaccaaga

SEQ ID NO: 233532 - RNA, 23 nt, Molluscum contagiosum virus
ucaagaaguucaucuacugcgac

SEQ ID NO: 233533 - RNA, 17 nt, Molluscum contagiosum virus
uauuucaaugcaguaug

SEQ ID NO: 233534 - RNA, 18 nt, Molluscum contagiosum virus
ucaccgccuguaccugcu

SEQ ID NO: 233535 - RNA, 19 nt, Molluscum contagiosum virus
ucaccgcgcagaagccaac

SEQ ID NO: 233536 - RNA, 15 nt, Molluscum contagiosum virus
ucaccaucaacaucu

SEQ ID NO: 233537 - RNA, 19 nt, Molluscum contagiosum virus
ucaauucaaaggugcucac

SEQ ID NO: 233538 - RNA, 22 nt, Molluscum contagiosum virus
ucaaugcaguaugugaacacga

SEQ ID NO: 233539 - RNA, 19 nt, Molluscum contagiosum virus
ucaagcgcgaguacaagcu

SEQ ID NO: 233540 - RNA, 18 nt, Molluscum contagiosum virus
ucaagaucguuuugcacu

SEQ ID NO: 233541 - RNA, 16 nt, Molluscum contagiosum virus
ucaagcacuacaugga

SEQ ID NO: 233542 - RNA, 19 nt, Molluscum contagiosum virus
ucagggaugccagugcagu

SEQ ID NO: 233543 - RNA, 15 nt, Molluscum contagiosum virus
ucaggggcucuccua

SEQ ID NO: 233544 - RNA, 23 nt, Molluscum contagiosum virus
ucagagaaaucccaagagccaug

SEQ ID NO: 233545 - RNA, 18 nt, Molluscum contagiosum virus
ucagcgccaucaauucaa

SEQ ID NO: 233546 - RNA, 15 nt, Molluscum contagiosum virus
ucagagaagugcucc

SEQ ID NO: 233547 - RNA, 23 nt, Molluscum contagiosum virus
ucagagaagugcuccgcacgugg

SEQ ID NO: 233548 - RNA, 17 nt, Molluscum contagiosum virus
ucagacagcggauagcu

SEQ ID NO: 233549 - RNA, 19 nt, Molluscum contagiosum virus
uaugacuugcgagcgccaa

SEQ ID NO: 233550 - RNA, 12 nt, Molluscum contagiosum virus
uaugcacuuuca

SEQ ID NO: 233551 - RNA, 15 nt, Molluscum contagiosum virus
uauggacgcuugcua

SEQ ID NO: 233552 - RNA, 21 nt, Molluscum contagiosum virus
uaucccagaaaacgcacuguc

SEQ ID NO: 233553 - RNA, 13 nt, Molluscum contagiosum virus
uaucuacacuccg

SEQ ID NO: 233554 - RNA, 14 nt, Molluscum contagiosum virus
uacugcgacaucca

SEQ ID NO: 233555 - RNA, 13 nt, Molluscum contagiosum virus
uacuggugcccac

SEQ ID NO: 233556 - RNA, 19 nt, Molluscum contagiosum virus
uagaacgccaggaacauca

SEQ ID NO: 233557 - RNA, 15 nt, Molluscum contagiosum virus
uagaaaugcuugcuu

SEQ ID NO: 233558 - RNA, 13 nt, Molluscum contagiosum virus
uccgagguagcuc

SEQ ID NO: 233559 - RNA, 17 nt, Molluscum contagiosum virus
uccgacccgugcugcuu

SEQ ID NO: 233560 - RNA, 21 nt, Molluscum contagiosum virus
uccgacuccuuccggagacac

SEQ ID NO: 233561 - RNA, 15 nt, Molluscum contagiosum virus
uccgagcuguucaac

SEQ ID NO: 233562 - RNA, 15 nt, Molluscum contagiosum virus
uccgacauguaccau

SEQ ID NO: 233563 - RNA, 19 nt, Molluscum contagiosum virus
uccucgucgaucaugucca

SEQ ID NO: 233564 - RNA, 16 nt, Molluscum contagiosum virus
uccugaacaagcugca

SEQ ID NO: 233565 - RNA, 19 nt, Molluscum contagiosum virus
uccucggcgcacacuccuc

SEQ ID NO: 233566 - RNA, 14 nt, Molluscum contagiosum virus
uccucgaccugcac

SEQ ID NO: 233567 - RNA, 16 nt, Molluscum contagiosum virus
uccucgaccugcacga

SEQ ID NO: 233568 - RNA, 17 nt, Molluscum contagiosum virus
uccucgaccugcacgac

SEQ ID NO: 233569 - RNA, 16 nt, Molluscum contagiosum virus
uccucgacgcguucua

SEQ ID NO: 233570 - RNA, 16 nt, Molluscum contagiosum virus
uccugugagcauguuc

SEQ ID NO: 233571 - RNA, 21 nt, Molluscum contagiosum virus
uccuuagacaaaagccacuag

SEQ ID NO: 233572 - RNA, 12 nt, Molluscum contagiosum virus
uccugagaagca

SEQ ID NO: 233573 - RNA, 17 nt, Molluscum contagiosum virus
uccugcaccugcuggaa

SEQ ID NO: 233574 - RNA, 17 nt, Molluscum contagiosum virus
uccugcggcgcugcuac

SEQ ID NO: 233575 - RNA, 19 nt, Molluscum contagiosum virus
uccugcgggagcaacgaac

SEQ ID NO: 233576 - RNA, 18 nt, Molluscum contagiosum virus
uccugcugcgcagcaucc

SEQ ID NO: 233577 - RNA, 21 nt, Molluscum contagiosum virus
uccuggaguaccggcucaaga

SEQ ID NO: 233578 - RNA, 22 nt, Molluscum contagiosum virus
uccuggcucgcgagugugcaug

SEQ ID NO: 233579 - RNA, 20 nt, Molluscum contagiosum virus
ucgacgacgaugacaucugg

SEQ ID NO: 233580 - RNA, 23 nt, Molluscum contagiosum virus
ucgagagacaacaaacauuguga

SEQ ID NO: 233581 - RNA, 16 nt, Molluscum contagiosum virus
ucgacgcugacggccu

SEQ ID NO: 233582 - RNA, 13 nt, Molluscum contagiosum virus
ucgacgcugccua

SEQ ID NO: 233583 - RNA, 14 nt, Molluscum contagiosum virus
ucgacgcugccuag

SEQ ID NO: 233584 - RNA, 17 nt, Molluscum contagiosum virus
ucgaggugugccuguuu

SEQ ID NO: 233585 - RNA, 21 nt, Molluscum contagiosum virus
ucgaggcgcuugggcacugcu

SEQ ID NO: 233586 - RNA, 20 nt, Molluscum contagiosum virus
ucgagggcgaggccaagguc

SEQ ID NO: 233587 - RNA, 17 nt, Molluscum contagiosum virus
ucgagcgcccucaguca

SEQ ID NO: 233588 - RNA, 22 nt, Molluscum contagiosum virus
ucgagcugacucggacacugga

SEQ ID NO: 233589 - RNA, 18 nt, Molluscum contagiosum virus
ucgagcacguagugcucg

SEQ ID NO: 233590 - RNA, 13 nt, Molluscum contagiosum virus
ucgauucuguccg

SEQ ID NO: 233591 - RNA, 17 nt, Molluscum contagiosum virus
uccuuggcaacgcaaac

SEQ ID NO: 233592 - RNA, 18 nt, Molluscum contagiosum virus
uccuugcgccgccaaaag

SEQ ID NO: 233593 - RNA, 11 nt, Molluscum contagiosum virus
uccuuguccug

SEQ ID NO: 233594 - RNA, 15 nt, Molluscum contagiosum virus
uccuuuacugcaaga

SEQ ID NO: 233595 - RNA, 21 nt, Molluscum contagiosum virus
uccuucccggaauuccguguc

SEQ ID NO: 233596 - RNA, 16 nt, Molluscum contagiosum virus
uccuuccggagacacc

SEQ ID NO: 233597 - RNA, 20 nt, Molluscum contagiosum virus
uccuugauaaaagcacaguc

SEQ ID NO: 233598 - RNA, 22 nt, Molluscum contagiosum virus
uccuugauaaaagcacagucca

SEQ ID NO: 233599 - RNA, 23 nt, Molluscum contagiosum virus
uccuugauaaaagcacaguccaa

SEQ ID NO: 233600 - RNA, 16 nt, Molluscum contagiosum virus
ucgaagaccaccagca

SEQ ID NO: 233601 - RNA, 23 nt, Molluscum contagiosum virus
ucgaaguacuucgcgaugugcac

SEQ ID NO: 233602 - RNA, 18 nt, Molluscum contagiosum virus
ucgaacaccgacaaggag

SEQ ID NO: 233603 - RNA, 15 nt, Molluscum contagiosum virus
ucgaacgcaaggugu

SEQ ID NO: 233604 - RNA, 14 nt, Molluscum contagiosum virus
uccuuuuucacuuu

SEQ ID NO: 233605 - RNA, 17 nt, Molluscum contagiosum virus
uccuuugcgagcacugu

SEQ ID NO: 233606 - RNA, 13 nt, Molluscum contagiosum virus
uccagcacugcgc

SEQ ID NO: 233607 - RNA, 17 nt, Molluscum contagiosum virus
uccagcgcaucaugcgc

SEQ ID NO: 233608 - RNA, 21 nt, Molluscum contagiosum virus
uccaccugcgcaacgugcugc

SEQ ID NO: 233609 - RNA, 19 nt, Molluscum contagiosum virus
uccacacagaaguugccgc

SEQ ID NO: 233610 - RNA, 18 nt, Molluscum contagiosum virus
uccacaugccgcgcugcu

SEQ ID NO: 233611 - RNA, 17 nt, Molluscum contagiosum virus
uccacagccgugagcuc

SEQ ID NO: 233612 - RNA, 12 nt, Molluscum contagiosum virus
uccacaaagacg

SEQ ID NO: 233613 - RNA, 19 nt, Molluscum contagiosum virus
ucaucgccagcaucaaggg

SEQ ID NO: 233614 - RNA, 13 nt, Molluscum contagiosum virus
ucaucgggcugca

SEQ ID NO: 233615 - RNA, 19 nt, Molluscum contagiosum virus
ucaucuacugcgacaucca

SEQ ID NO: 233616 - RNA, 22 nt, Molluscum contagiosum virus
ucaucuacugcgacauccacau

SEQ ID NO: 233617 - RNA, 15 nt, Molluscum contagiosum virus
ucccuucgcguccac

SEQ ID NO: 233618 - RNA, 15 nt, Molluscum contagiosum virus
ucccugcauacacuu

SEQ ID NO: 233619 - RNA, 18 nt, Molluscum contagiosum virus
ucccagaaaacgcacugu

SEQ ID NO: 233620 - RNA, 18 nt, Molluscum contagiosum virus
uccaggcgcaccuugacg

SEQ ID NO: 233621 - RNA, 16 nt, Molluscum contagiosum virus
ucuucaacuuccacau

SEQ ID NO: 233622 - RNA, 21 nt, Molluscum contagiosum virus
ucuucaagacuggcacuugcg

SEQ ID NO: 233623 - RNA, 20 nt, Molluscum contagiosum virus
ucuuugcgcucaucaagaag

SEQ ID NO: 233624 - RNA, 19 nt, Molluscum contagiosum virus
ucuggaggcaaucugucca

SEQ ID NO: 233625 - RNA, 14 nt, Molluscum contagiosum virus
ucuggcaaacgcac

SEQ ID NO: 233626 - RNA, 17 nt, Molluscum contagiosum virus
ucuggcaaacgcacugu

SEQ ID NO: 233627 - RNA, 16 nt, Molluscum contagiosum virus
ucugggcgagagcuuu

SEQ ID NO: 233628 - RNA, 20 nt, Molluscum contagiosum virus
ucuggcguacucgugucaca

SEQ ID NO: 233629 - RNA, 12 nt, Molluscum contagiosum virus
ucuguaacaagc

SEQ ID NO: 233630 - RNA, 13 nt, Molluscum contagiosum virus
ucuccacaaagac

SEQ ID NO: 233631 - RNA, 16 nt, Molluscum contagiosum virus
ucuccaacaagcucau

SEQ ID NO: 233632 - RNA, 19 nt, Molluscum contagiosum virus
ucucccucgcgcgcaugua

SEQ ID NO: 233633 - RNA, 21 nt, Molluscum contagiosum virus
ucucccgcggccgccacuguu

SEQ ID NO: 233634 - RNA, 23 nt, Molluscum contagiosum virus
ucucccgcggccgccacuguugc

SEQ ID NO: 233635 - RNA, 15 nt, Molluscum contagiosum virus
ucuccgacgugcugc

SEQ ID NO: 233636 - RNA, 16 nt, Molluscum contagiosum virus
ucuccgacgugcugcg

SEQ ID NO: 233637 - RNA, 14 nt, Molluscum contagiosum virus
ucuccuccugaugc

SEQ ID NO: 233638 - RNA, 17 nt, Molluscum contagiosum virus
ucuccucgcgcacagac

SEQ ID NO: 233639 - RNA, 18 nt, Molluscum contagiosum virus
ucucgcguucgcguucga

SEQ ID NO: 233640 - RNA, 18 nt, Molluscum contagiosum virus
ucucgcucgugcucucug

SEQ ID NO: 233641 - RNA, 18 nt, Molluscum contagiosum virus
ucucuaggagcuccgugc

SEQ ID NO: 233642 - RNA, 19 nt, Molluscum contagiosum virus
ucucguggcguugcugcug

SEQ ID NO: 233643 - RNA, 17 nt, Molluscum contagiosum virus
ucuagcgcgaggacaac

SEQ ID NO: 233644 - RNA, 21 nt, Molluscum contagiosum virus
ucggauagguccgacaccagc

SEQ ID NO: 233645 - RNA, 16 nt, Molluscum contagiosum virus
ucggcacgcugcagaa

SEQ ID NO: 233646 - RNA, 22 nt, Molluscum contagiosum virus
ucggcggcaugcgcgcgcagca

SEQ ID NO: 233647 - RNA, 17 nt, Molluscum contagiosum virus
ucggcgaacaucucggc

SEQ ID NO: 233648 - RNA, 13 nt, Molluscum contagiosum virus
ucgggaacaaagg

SEQ ID NO: 233649 - RNA, 13 nt, Molluscum contagiosum virus
ucgggaagcacag

SEQ ID NO: 233650 - RNA, 17 nt, Molluscum contagiosum virus
ucgggaagcacagucca

SEQ ID NO: 233651 - RNA, 18 nt, Molluscum contagiosum virus
ucgggaagcacaguccag

SEQ ID NO: 233652 - RNA, 22 nt, Molluscum contagiosum virus
ucgggaaggaacaaugcugcau

SEQ ID NO: 233653 - RNA, 11 nt, Molluscum contagiosum virus
ucggggcuccg

SEQ ID NO: 233654 - RNA, 17 nt, Molluscum contagiosum virus
ucgcacuggccugcaaa

SEQ ID NO: 233655 - RNA, 14 nt, Molluscum contagiosum virus
ucgcacaguucacg

SEQ ID NO: 233656 - RNA, 17 nt, Molluscum contagiosum virus
ucgcaagugcacaccag

SEQ ID NO: 233657 - RNA, 19 nt, Molluscum contagiosum virus
ucgcaagugcacaccagac

SEQ ID NO: 233658 - RNA, 19 nt, Molluscum contagiosum virus
ucgcaagauacacauugcg

SEQ ID NO: 233659 - RNA, 14 nt, Molluscum contagiosum virus
ucgcaacaaaagag

SEQ ID NO: 233660 - RNA, 18 nt, Molluscum contagiosum virus
ucgcaugcgccugcacuu

SEQ ID NO: 233661 - RNA, 17 nt, Molluscum contagiosum virus
cagacaacugcgucuca

SEQ ID NO: 233662 - RNA, 21 nt, Molluscum contagiosum virus
cagacaggcuccgacccgcuc

SEQ ID NO: 233663 - RNA, 23 nt, Molluscum contagiosum virus
cagacacgcuggucagcuucaug

SEQ ID NO: 233664 - RNA, 13 nt, Molluscum contagiosum virus
cagaccccugaaa

SEQ ID NO: 233665 - RNA, 18 nt, Molluscum contagiosum virus
cagacccgaaagcugccc

SEQ ID NO: 233666 - RNA, 17 nt, Molluscum contagiosum virus
cagacguaugcguagua

SEQ ID NO: 233667 - RNA, 14 nt, Molluscum contagiosum virus
caggcaugcaaggc

SEQ ID NO: 233668 - RNA, 13 nt, Molluscum contagiosum virus
cagacuaggcaau

SEQ ID NO: 233669 - RNA, 22 nt, Molluscum contagiosum virus
cagagaaaucccaagagccaug

SEQ ID NO: 233670 - RNA, 15 nt, Molluscum contagiosum virus
caggcuaggcgcgac

SEQ ID NO: 233671 - RNA, 16 nt, Molluscum contagiosum virus
caggggccacaagcac

SEQ ID NO: 233672 - RNA, 20 nt, Molluscum contagiosum virus
cagguacguguccacuccug

SEQ ID NO: 233673 - RNA, 14 nt, Molluscum contagiosum virus
cagguaguggucca

SEQ ID NO: 233674 - RNA, 20 nt, Molluscum contagiosum virus
cagguagugguccaccagcu

SEQ ID NO: 233675 - RNA, 14 nt, Molluscum contagiosum virus
cagggagcugcgga

SEQ ID NO: 233676 - RNA, 20 nt, Molluscum contagiosum virus
caguaacaccgccaaauacc

SEQ ID NO: 233677 - RNA, 18 nt, Molluscum contagiosum virus
caggugcacgugcugcag

SEQ ID NO: 233678 - RNA, 17 nt, Molluscum contagiosum virus
caggugcguaaugcugg

SEQ ID NO: 233679 - RNA, 22 nt, Molluscum contagiosum virus
caggugcguaaugcuggcgcgu

SEQ ID NO: 233680 - RNA, 14 nt, Molluscum contagiosum virus
caggugcugggcga

SEQ ID NO: 233681 - RNA, 19 nt, Molluscum contagiosum virus
caguacgacaaaggcauuu

SEQ ID NO: 233682 - RNA, 14 nt, Molluscum contagiosum virus
caguaguugcucua

SEQ ID NO: 233683 - RNA, 16 nt, Molluscum contagiosum virus
caguaugugaacacga

SEQ ID NO: 233684 - RNA, 21 nt, Molluscum contagiosum virus
caguaugugaacacgacaugu

SEQ ID NO: 233685 - RNA, 14 nt, Molluscum contagiosum virus
cauaccugugccag

SEQ ID NO: 233686 - RNA, 15 nt, Molluscum contagiosum virus
caguuccggucucau

SEQ ID NO: 233687 - RNA, 14 nt, Molluscum contagiosum virus
cagugucuugucac

SEQ ID NO: 233688 - RNA, 14 nt, Molluscum contagiosum virus
cagugugaugccgc

SEQ ID NO: 233689 - RNA, 15 nt, Molluscum contagiosum virus
cagugcgugcacugu

SEQ ID NO: 233690 - RNA, 16 nt, Molluscum contagiosum virus
cagugcgugcacuguc

SEQ ID NO: 233691 - RNA, 17 nt, Molluscum contagiosum virus
cagugcgugcacugucu

SEQ ID NO: 233692 - RNA, 16 nt, Molluscum contagiosum virus
cagugcgugccaggcg

SEQ ID NO: 233693 - RNA, 20 nt, Molluscum contagiosum virus
cagugcucuuuaguacaacg

SEQ ID NO: 233694 - RNA, 18 nt, Molluscum contagiosum virus
cagucagcggcgugcugc

SEQ ID NO: 233695 - RNA, 15 nt, Molluscum contagiosum virus
caugcgccugcacuu

SEQ ID NO: 233696 - RNA, 16 nt, Molluscum contagiosum virus
caugcgccugcacuuc

SEQ ID NO: 233697 - RNA, 22 nt, Molluscum contagiosum virus
caugcgcgcgcgauugcguguu

SEQ ID NO: 233698 - RNA, 22 nt, Molluscum contagiosum virus
caugcgcguggcucgcgaccgc

SEQ ID NO: 233699 - RNA, 15 nt, Molluscum contagiosum virus
caugcgcaagcagcu

SEQ ID NO: 233700 - RNA, 14 nt, Molluscum contagiosum virus
caugcgcacagcac

SEQ ID NO: 233701 - RNA, 16 nt, Molluscum contagiosum virus
caugcgcacagcacuu

SEQ ID NO: 233702 - RNA, 14 nt, Molluscum contagiosum virus
caugcggagacugu

SEQ ID NO: 233703 - RNA, 13 nt, Molluscum contagiosum virus
cauggacaugcuc

SEQ ID NO: 233704 - RNA, 15 nt, Molluscum contagiosum virus
cauggaaagcuucuc

SEQ ID NO: 233705 - RNA, 21 nt, Molluscum contagiosum virus
cauggaggccaacuaccuggg

SEQ ID NO: 233706 - RNA, 18 nt, Molluscum contagiosum virus
cauggaggcgcuagugca

SEQ ID NO: 233707 - RNA, 20 nt, Molluscum contagiosum virus
cauggaggcgcuagugcaga

SEQ ID NO: 233708 - RNA, 14 nt, Molluscum contagiosum virus
caugcuguaugucu

SEQ ID NO: 233709 - RNA, 12 nt, Molluscum contagiosum virus
caugcugucaac

SEQ ID NO: 233710 - RNA, 23 nt, Molluscum contagiosum virus
caugcuggcgggcgcgguacggu

SEQ ID NO: 233711 - RNA, 17 nt, Molluscum contagiosum virus
caugcucgacgugaucg

SEQ ID NO: 233712 - RNA, 21 nt, Molluscum contagiosum virus
caugucgagcccugauguucc

SEQ ID NO: 233713 - RNA, 16 nt, Molluscum contagiosum virus
cauguccgcaagcacg

SEQ ID NO: 233714 - RNA, 20 nt, Molluscum contagiosum virus
cauguccuuggcggugcgca

SEQ ID NO: 233715 - RNA, 21 nt, Molluscum contagiosum virus
caugucgaacaccuccugcuu

SEQ ID NO: 233716 - RNA, 11 nt, Molluscum contagiosum virus
caugugcugcc

SEQ ID NO: 233717 - RNA, 18 nt, Molluscum contagiosum virus
caugugcugccggcucaa

SEQ ID NO: 233718 - RNA, 17 nt, Molluscum contagiosum virus
caugugcgagaacuggc

SEQ ID NO: 233719 - RNA, 18 nt, Molluscum contagiosum virus
caugugcgugcaccucaa

SEQ ID NO: 233720 - RNA, 10 nt, Molluscum contagiosum virus
cauguucucu

SEQ ID NO: 233721 - RNA, 11 nt, Molluscum contagiosum virus
cauguucucuu

SEQ ID NO: 233722 - RNA, 19 nt, Molluscum contagiosum virus
cauaguacgauggaugcug

SEQ ID NO: 233723 - RNA, 20 nt, Molluscum contagiosum virus
cauaguacgauggaugcugg

SEQ ID NO: 233724 - RNA, 14 nt, Molluscum contagiosum virus
caucucgauucaca

SEQ ID NO: 233725 - RNA, 22 nt, Molluscum contagiosum virus
caucgucgcguugcuacucuac

SEQ ID NO: 233726 - RNA, 12 nt, Molluscum contagiosum virus
caucgugcucuu

SEQ ID NO: 233727 - RNA, 13 nt, Molluscum contagiosum virus
caucguggcgcgc

SEQ ID NO: 233728 - RNA, 15 nt, Molluscum contagiosum virus
cauuuauagucuggg

SEQ ID NO: 233729 - RNA, 14 nt, Molluscum contagiosum virus
ccaaagguccagua

SEQ ID NO: 233730 - RNA, 13 nt, Molluscum contagiosum virus
ccaaagucuuccu

SEQ ID NO: 233731 - RNA, 19 nt, Molluscum contagiosum virus
ccaagaagaggccagcaca

SEQ ID NO: 233732 - RNA, 22 nt, Molluscum contagiosum virus
ccaagaacagagaaaggcaccc

SEQ ID NO: 233733 - RNA, 17 nt, Molluscum contagiosum virus
ccaagaagaagcagcag

SEQ ID NO: 233734 - RNA, 13 nt, Molluscum contagiosum virus
ccaagccgugacg

SEQ ID NO: 233735 - RNA, 13 nt, Molluscum contagiosum virus
ccaagcgcuugcu

SEQ ID NO: 233736 - RNA, 12 nt, Molluscum contagiosum virus
ccaagagccaug

SEQ ID NO: 233737 - RNA, 19 nt, Molluscum contagiosum virus
ccaagaggacgagcugcua

SEQ ID NO: 233738 - RNA, 22 nt, Molluscum contagiosum virus
ccaagaggacgagcugcuaaca

SEQ ID NO: 233739 - RNA, 16 nt, Molluscum contagiosum virus
ccaaggggagacauau

SEQ ID NO: 233740 - RNA, 15 nt, Molluscum contagiosum virus
ccaaggucuucagga

SEQ ID NO: 233741 - RNA, 16 nt, Molluscum contagiosum virus
ccaauaaaugaugcua

SEQ ID NO: 233742 - RNA, 17 nt, Molluscum contagiosum virus
ccuacaucgacaagcac

SEQ ID NO: 233743 - RNA, 17 nt, Molluscum contagiosum virus
ccuacgucaagcaggca

SEQ ID NO: 233744 - RNA, 17 nt, Molluscum contagiosum virus
ccuacuucgucaagcag

SEQ ID NO: 233745 - RNA, 14 nt, Molluscum contagiosum virus
ccuacgcuaccuga

SEQ ID NO: 233746 - RNA, 19 nt, Molluscum contagiosum virus
ccuacgcgcgcgugcugcu

SEQ ID NO: 233747 - RNA, 13 nt, Molluscum contagiosum virus
ccuagccauacag

SEQ ID NO: 233748 - RNA, 18 nt, Molluscum contagiosum virus
ccuagguccacauuucaa

SEQ ID NO: 233749 - RNA, 13 nt, Molluscum contagiosum virus
ccguuccacuaca

SEQ ID NO: 233750 - RNA, 12 nt, Molluscum contagiosum virus
ccggcucaagaa

SEQ ID NO: 233751 - RNA, 17 nt, Molluscum contagiosum virus
ccggcggcgcaagcacc

SEQ ID NO: 233752 - RNA, 17 nt, Molluscum contagiosum virus
ccggcgccgcuaccagc

SEQ ID NO: 233753 - RNA, 20 nt, Molluscum contagiosum virus
ccggcagcuggagcugccgc

SEQ ID NO: 233754 - RNA, 15 nt, Molluscum contagiosum virus
ccggcaggcucccgc

SEQ ID NO: 233755 - RNA, 13 nt, Molluscum contagiosum virus
ccggccuagagcu

SEQ ID NO: 233756 - RNA, 13 nt, Molluscum contagiosum virus
cccuccuaucuca

SEQ ID NO: 233757 - RNA, 16 nt, Molluscum contagiosum virus
cccuaucgcaaucuga

SEQ ID NO: 233758 - RNA, 14 nt, Molluscum contagiosum virus
cccugccacaugca

SEQ ID NO: 233759 - RNA, 17 nt, Molluscum contagiosum virus
cccugccacaugcagua

SEQ ID NO: 233760 - RNA, 14 nt, Molluscum contagiosum virus
cccugcccgcguga

SEQ ID NO: 233761 - RNA, 19 nt, Molluscum contagiosum virus
cccugcgcaccugcacgac

SEQ ID NO: 233762 - RNA, 18 nt, Molluscum contagiosum virus
cccugguuugcgcucuca

SEQ ID NO: 233763 - RNA, 19 nt, Molluscum contagiosum virus
cccugguuugcgcucucag

SEQ ID NO: 233764 - RNA, 23 nt, Molluscum contagiosum virus
cccuguaacaaggaaaaggcaca

SEQ ID NO: 233765 - RNA, 16 nt, Molluscum contagiosum virus
ccgcuggagcacgacu

SEQ ID NO: 233766 - RNA, 16 nt, Molluscum contagiosum virus
ccgcuggcgcuaccua

SEQ ID NO: 233767 - RNA, 22 nt, Molluscum contagiosum virus
ccggcaacagcgcgacgccauc

SEQ ID NO: 233768 - RNA, 14 nt, Molluscum contagiosum virus
ccggcacgcacaaa

SEQ ID NO: 233769 - RNA, 15 nt, Molluscum contagiosum virus
ccggcacgcacaaag

SEQ ID NO: 233770 - RNA, 22 nt, Molluscum contagiosum virus
ccggacagagccccguucacuu

SEQ ID NO: 233771 - RNA, 16 nt, Molluscum contagiosum virus
ccggaacaacuuggga

SEQ ID NO: 233772 - RNA, 20 nt, Molluscum contagiosum virus
ccggagaagcuuuaguccau

SEQ ID NO: 233773 - RNA, 14 nt, Molluscum contagiosum virus
ccggagacaccagc

SEQ ID NO: 233774 - RNA, 16 nt, Molluscum contagiosum virus
ccggagacaccagcuc

SEQ ID NO: 233775 - RNA, 14 nt, Molluscum contagiosum virus
ccuccggggcgcaa

SEQ ID NO: 233776 - RNA, 16 nt, Molluscum contagiosum virus
ccugcacgacccucuu

SEQ ID NO: 233777 - RNA, 15 nt, Molluscum contagiosum virus
ccugcacgcgcacuu

SEQ ID NO: 233778 - RNA, 21 nt, Molluscum contagiosum virus
ccugcacgcggcguacaucga

SEQ ID NO: 233779 - RNA, 14 nt, Molluscum contagiosum virus
ccugccacaccagc

SEQ ID NO: 233780 - RNA, 16 nt, Molluscum contagiosum virus
ccugcacggcuaccgc

SEQ ID NO: 233781 - RNA, 14 nt, Molluscum contagiosum virus
ccugcgccuggcau

SEQ ID NO: 233782 - RNA, 14 nt, Molluscum contagiosum virus
ccugcgugcuuccc

SEQ ID NO: 233783 - RNA, 23 nt, Molluscum contagiosum virus
ccugcuagugcgcgccaagaaca

SEQ ID NO: 233784 - RNA, 16 nt, Molluscum contagiosum virus
ccuccgcgaccgcgaa

SEQ ID NO: 233785 - RNA, 16 nt, Molluscum contagiosum virus
ccucccugguaguccu

SEQ ID NO: 233786 - RNA, 13 nt, Molluscum contagiosum virus
ccuccacguccag

SEQ ID NO: 233787 - RNA, 13 nt, Molluscum contagiosum virus
ccugugccugcaa

SEQ ID NO: 233788 - RNA, 21 nt, Molluscum contagiosum virus
ccugugcgccaacaaccacuc

SEQ ID NO: 233789 - RNA, 18 nt, Molluscum contagiosum virus
ccugugcgcgguggugcu

SEQ ID NO: 233790 - RNA, 19 nt, Molluscum contagiosum virus
ccuguccgcggacgcgggc

SEQ ID NO: 233791 - RNA, 18 nt, Molluscum contagiosum virus
ccugucgcgcgagcgcua

SEQ ID NO: 233792 - RNA, 20 nt, Molluscum contagiosum virus
ccuguaugaucugcaguucc

SEQ ID NO: 233793 - RNA, 16 nt, Molluscum contagiosum virus
ccuguaguagcagcuu

SEQ ID NO: 233794 - RNA, 15 nt, Molluscum contagiosum virus
aaacaagcagucuca

SEQ ID NO: 233795 - RNA, 16 nt, Molluscum contagiosum virus
aaacaaaaaaaacaca

SEQ ID NO: 233796 - RNA, 14 nt, Molluscum contagiosum virus
cccgagguggccaa

SEQ ID NO: 233797 - RNA, 21 nt, Molluscum contagiosum virus
cccgagcacguuccaaaagac

SEQ ID NO: 233798 - RNA, 15 nt, Molluscum contagiosum virus
cccgcaccgccuuuc

SEQ ID NO: 233799 - RNA, 12 nt, Molluscum contagiosum virus
cccgcaaaagau

SEQ ID NO: 233800 - RNA, 13 nt, Molluscum contagiosum virus
cccgaacaaaaag

SEQ ID NO: 233801 - RNA, 15 nt, Molluscum contagiosum virus
cccgaccccaagaag

SEQ ID NO: 233802 - RNA, 13 nt, Molluscum contagiosum virus
cccccucuuggca

SEQ ID NO: 233803 - RNA, 21 nt, Molluscum contagiosum virus
ccccuacacgcaacuagggag

SEQ ID NO: 233804 - RNA, 19 nt, Molluscum contagiosum virus
ccccgcgcgcccgcugcgc

SEQ ID NO: 233805 - RNA, 22 nt, Molluscum contagiosum virus
ccccgcugggccgcaugcaccu

SEQ ID NO: 233806 - RNA, 20 nt, Molluscum contagiosum virus
ccccuacguggucauggugc

SEQ ID NO: 233807 - RNA, 20 nt, Molluscum contagiosum virus
ccccucgaauuucgagagaa

SEQ ID NO: 233808 - RNA, 19 nt, Molluscum contagiosum virus
cccguccgugccauuucgu

SEQ ID NO: 233809 - RNA, 22 nt, Molluscum contagiosum virus
cccggcaugggcaaggacaucu

SEQ ID NO: 233810 - RNA, 22 nt, Molluscum contagiosum virus
cccgggaacgaggaaaggcacc

SEQ ID NO: 233811 - RNA, 23 nt, Molluscum contagiosum virus
cccgcguccgugcgcagggcaau

SEQ ID NO: 233812 - RNA, 17 nt, Molluscum contagiosum virus
cccggaugacggcaacg

SEQ ID NO: 233813 - RNA, 16 nt, Molluscum contagiosum virus
cccgcggcgcgaaaag

SEQ ID NO: 233814 - RNA, 19 nt, Molluscum contagiosum virus
cccgcacaagggcagcuca

SEQ ID NO: 233815 - RNA, 21 nt, Molluscum contagiosum virus
cccgcagugugcccccggagg

SEQ ID NO: 233816 - RNA, 18 nt, Molluscum contagiosum virus
cccauguaggagcagggu

SEQ ID NO: 233817 - RNA, 14 nt, Molluscum contagiosum virus
cccauuccuuguga

SEQ ID NO: 233818 - RNA, 22 nt, Molluscum contagiosum virus
cccauacucgaacgcaaggugu

SEQ ID NO: 233819 - RNA, 17 nt, Molluscum contagiosum virus
cccagugcgagaucgac

SEQ ID NO: 233820 - RNA, 16 nt, Molluscum contagiosum virus
ccagaaaacgcacugu

SEQ ID NO: 233821 - RNA, 14 nt, Molluscum contagiosum virus
ccagacgcacuugc

SEQ ID NO: 233822 - RNA, 21 nt, Molluscum contagiosum virus
ccaggaaaacggaaacagcac

SEQ ID NO: 233823 - RNA, 16 nt, Molluscum contagiosum virus
ccaggcaacgcacaaa

SEQ ID NO: 233824 - RNA, 17 nt, Molluscum contagiosum virus
ccaggcaacgcacaaaa

SEQ ID NO: 233825 - RNA, 15 nt, Molluscum contagiosum virus
ccagcuaagccggag

SEQ ID NO: 233826 - RNA, 15 nt, Molluscum contagiosum virus
ccagcucgcgcaguu

SEQ ID NO: 233827 - RNA, 20 nt, Molluscum contagiosum virus
ccagcugguccugaacagca

SEQ ID NO: 233828 - RNA, 12 nt, Molluscum contagiosum virus
ccagagcacugc

SEQ ID NO: 233829 - RNA, 13 nt, Molluscum contagiosum virus
ccagagcacugcg

SEQ ID NO: 233830 - RNA, 22 nt, Molluscum contagiosum virus
ccauuaacgaagaguggcucac

SEQ ID NO: 233831 - RNA, 14 nt, Molluscum contagiosum virus
ccaugugcgaagac

SEQ ID NO: 233832 - RNA, 16 nt, Molluscum contagiosum virus
ccauucucucgagaga

SEQ ID NO: 233833 - RNA, 17 nt, Molluscum contagiosum virus
ccaguaccugcugccga

SEQ ID NO: 233834 - RNA, 14 nt, Molluscum contagiosum virus
cuccacgcgcagcu

SEQ ID NO: 233835 - RNA, 15 nt, Molluscum contagiosum virus
cuccacgcgcagcuu

SEQ ID NO: 233836 - RNA, 18 nt, Molluscum contagiosum virus
cuccacgcgugcgcgcca

SEQ ID NO: 233837 - RNA, 23 nt, Molluscum contagiosum virus
cucagugugccguucacgcacac

SEQ ID NO: 233838 - RNA, 15 nt, Molluscum contagiosum virus
cuccagcgugguguu

SEQ ID NO: 233839 - RNA, 19 nt, Molluscum contagiosum virus
cuccagggcucaagaucuc

SEQ ID NO: 233840 - RNA, 17 nt, Molluscum contagiosum virus
cucaaucucgcccagca

SEQ ID NO: 233841 - RNA, 21 nt, Molluscum contagiosum virus
cucaagucguuugcucggggc

SEQ ID NO: 233842 - RNA, 15 nt, Molluscum contagiosum virus
cucacaugugcugcc

SEQ ID NO: 233843 - RNA, 22 nt, Molluscum contagiosum virus
cucagccgagcgccgccagcuc

SEQ ID NO: 233844 - RNA, 16 nt, Molluscum contagiosum virus
cucagccucuacucca

SEQ ID NO: 233845 - RNA, 16 nt, Molluscum contagiosum virus
cucagcaggcuguguu

SEQ ID NO: 233846 - RNA, 12 nt, Molluscum contagiosum virus
cuacgugcugcg

SEQ ID NO: 233847 - RNA, 14 nt, Molluscum contagiosum virus
cuacguggcgcgaa

SEQ ID NO: 233848 - RNA, 12 nt, Molluscum contagiosum virus
cuacguggugcg

SEQ ID NO: 233849 - RNA, 23 nt, Molluscum contagiosum virus
cuacgucaagcaggcaugcaagg

SEQ ID NO: 233850 - RNA, 18 nt, Molluscum contagiosum virus
cuacgcgcgcgugcugcu

SEQ ID NO: 233851 - RNA, 14 nt, Molluscum contagiosum virus
cuacgcgcugcuag

SEQ ID NO: 233852 - RNA, 23 nt, Molluscum contagiosum virus
cuacgacgcgcuggugaccuuca

SEQ ID NO: 233853 - RNA, 23 nt, Molluscum contagiosum virus
cuauucucguggcguugcugcug

SEQ ID NO: 233854 - RNA, 16 nt, Molluscum contagiosum virus
cucaagaacaccaaga

SEQ ID NO: 233855 - RNA, 17 nt, Molluscum contagiosum virus
cucaagaacaccaagag

SEQ ID NO: 233856 - RNA, 18 nt, Molluscum contagiosum virus
cucaagaacaccaagagc

SEQ ID NO: 233857 - RNA, 20 nt, Molluscum contagiosum virus
cucaagaacaccaagagcau

SEQ ID NO: 233858 - RNA, 16 nt, Molluscum contagiosum virus
cucaagaagcccaagg

SEQ ID NO: 233859 - RNA, 17 nt, Molluscum contagiosum virus
cucaagaagcccaagga

SEQ ID NO: 233860 - RNA, 20 nt, Molluscum contagiosum virus
cucaagcaccugcgcuuccu

SEQ ID NO: 233861 - RNA, 13 nt, Molluscum contagiosum virus
cucaagcuggcaa

SEQ ID NO: 233862 - RNA, 17 nt, Molluscum contagiosum virus
cucaagcuggcaacgca

SEQ ID NO: 233863 - RNA, 16 nt, Molluscum contagiosum virus
cucaaggacuaccagc

SEQ ID NO: 233864 - RNA, 17 nt, Molluscum contagiosum virus
cucaaggacuaccagcu

SEQ ID NO: 233865 - RNA, 20 nt, Molluscum contagiosum virus
cucaacgagcgcaucagcaa

SEQ ID NO: 233866 - RNA, 15 nt, Molluscum contagiosum virus
cucaagacaagucac

SEQ ID NO: 233867 - RNA, 19 nt, Molluscum contagiosum virus
cuccugccgucgcccguga

SEQ ID NO: 233868 - RNA, 16 nt, Molluscum contagiosum virus
cuccugagaagcaaug

SEQ ID NO: 233869 - RNA, 16 nt, Molluscum contagiosum virus
cuccuuagacaaaagc

SEQ ID NO: 233870 - RNA, 16 nt, Molluscum contagiosum virus
cucgagagacaacaaa

SEQ ID NO: 233871 - RNA, 14 nt, Molluscum contagiosum virus
cucgaaggugcuca

SEQ ID NO: 233872 - RNA, 16 nt, Molluscum contagiosum virus
cucgaccugcacgacc

SEQ ID NO: 233873 - RNA, 20 nt, Molluscum contagiosum virus
cucgagggcgccgugcugcg

SEQ ID NO: 233874 - RNA, 15 nt, Molluscum contagiosum virus
cucgagcugcaucuu

SEQ ID NO: 233875 - RNA, 15 nt, Molluscum contagiosum virus
cucgagcuuccucaa

SEQ ID NO: 233876 - RNA, 21 nt, Molluscum contagiosum virus
cuccuuuccaucggaacuagc

SEQ ID NO: 233877 - RNA, 23 nt, Molluscum contagiosum virus
cucgaagaguuggacagccauga

SEQ ID NO: 233878 - RNA, 14 nt, Molluscum contagiosum virus
cuccuuccggagac

SEQ ID NO: 233879 - RNA, 16 nt, Molluscum contagiosum virus
cuccuuccggagacac

SEQ ID NO: 233880 - RNA, 18 nt, Molluscum contagiosum virus
cucgggcuagcaagcacg

SEQ ID NO: 233881 - RNA, 19 nt, Molluscum contagiosum virus
cucgggcuagcaagcacgc

SEQ ID NO: 233882 - RNA, 22 nt, Molluscum contagiosum virus
cucgggcaugguggugagaaag

SEQ ID NO: 233883 - RNA, 14 nt, Molluscum contagiosum virus
cucggcguggugcu

SEQ ID NO: 233884 - RNA, 19 nt, Molluscum contagiosum virus
cucgggaagcccucagggg

SEQ ID NO: 233885 - RNA, 16 nt, Molluscum contagiosum virus
cucgggagacaucauc

SEQ ID NO: 233886 - RNA, 15 nt, Molluscum contagiosum virus
cucggcaacacaaau

SEQ ID NO: 233887 - RNA, 15 nt, Molluscum contagiosum virus
cucggcgcacacucc

SEQ ID NO: 233888 - RNA, 18 nt, Molluscum contagiosum virus
cucggaggaaaagcacgc

SEQ ID NO: 233889 - RNA, 14 nt, Molluscum contagiosum virus
cucggaggggcucc

SEQ ID NO: 233890 - RNA, 19 nt, Molluscum contagiosum virus
cucgcugccuggugcacac

SEQ ID NO: 233891 - RNA, 21 nt, Molluscum contagiosum virus
cucgcugcugggcaucgugcu

SEQ ID NO: 233892 - RNA, 17 nt, Molluscum contagiosum virus
cucgcuggugugcacug

SEQ ID NO: 233893 - RNA, 16 nt, Molluscum contagiosum virus
cucgcgugccccggga

SEQ ID NO: 233894 - RNA, 15 nt, Molluscum contagiosum virus
cucgcgcgcaagaac

SEQ ID NO: 233895 - RNA, 20 nt, Molluscum contagiosum virus
cucgccgugugaucaagagc

SEQ ID NO: 233896 - RNA, 23 nt, Molluscum contagiosum virus
cucgccguuccacuacaagcagc

SEQ ID NO: 233897 - RNA, 13 nt, Molluscum contagiosum virus
cucgccuccgggc

SEQ ID NO: 233898 - RNA, 19 nt, Molluscum contagiosum virus
cucgcaugcgccugcacuu

SEQ ID NO: 233899 - RNA, 16 nt, Molluscum contagiosum virus
cucgcaaacacaaccu

SEQ ID NO: 233900 - RNA, 19 nt, Molluscum contagiosum virus
cucgaugugacaacaugug

SEQ ID NO: 233901 - RNA, 12 nt, Molluscum contagiosum virus
cucgcacgggcg

SEQ ID NO: 233902 - RNA, 17 nt, Molluscum contagiosum virus
cucugagcgagcgcagu

SEQ ID NO: 233903 - RNA, 16 nt, Molluscum contagiosum virus
cucuccaucaucgagc

SEQ ID NO: 233904 - RNA, 21 nt, Molluscum contagiosum virus
cucucgcaugcgccugcacuu

SEQ ID NO: 233905 - RNA, 13 nt, Molluscum contagiosum virus
cucucguucuucc

SEQ ID NO: 233906 - RNA, 14 nt, Molluscum contagiosum virus
cucucgcaaaagag

SEQ ID NO: 233907 - RNA, 19 nt, Molluscum contagiosum virus
cucuacacgcacgaccuca

SEQ ID NO: 233908 - RNA, 20 nt, Molluscum contagiosum virus
cucuacacgcacgaccucac

SEQ ID NO: 233909 - RNA, 20 nt, Molluscum contagiosum virus
cucuaguucccauggaugcg

SEQ ID NO: 233910 - RNA, 22 nt, Molluscum contagiosum virus
cucgugucacaauggcacuagc

SEQ ID NO: 233911 - RNA, 15 nt, Molluscum contagiosum virus
cucguacugcugcag

SEQ ID NO: 233912 - RNA, 15 nt, Molluscum contagiosum virus
cucguggaacaaaga

SEQ ID NO: 233913 - RNA, 18 nt, Molluscum contagiosum virus
cucgugggauaggcacac

SEQ ID NO: 233914 - RNA, 20 nt, Molluscum contagiosum virus
cucgugggauaggcacacac

SEQ ID NO: 233915 - RNA, 20 nt, Molluscum contagiosum virus
cucguggggaggacaaaacu

SEQ ID NO: 233916 - RNA, 12 nt, Molluscum contagiosum virus
cucgugaagcug

SEQ ID NO: 233917 - RNA, 22 nt, Molluscum contagiosum virus
cucugucccugcauacacuucc

SEQ ID NO: 233918 - RNA, 22 nt, Molluscum contagiosum virus
cucugucguugucgccgugaac

SEQ ID NO: 233919 - RNA, 15 nt, Molluscum contagiosum virus
cugcagaacugccug

SEQ ID NO: 233920 - RNA, 24 nt, Molluscum contagiosum virus
cugcaccggcgcgagaugcucgcc

SEQ ID NO: 233921 - RNA, 14 nt, Molluscum contagiosum virus
cugcaccugcugga

SEQ ID NO: 233922 - RNA, 17 nt, Molluscum contagiosum virus
cugcacgagcugcugua

SEQ ID NO: 233923 - RNA, 16 nt, Molluscum contagiosum virus
cugcacuacaaccaug

SEQ ID NO: 233924 - RNA, 20 nt, Molluscum contagiosum virus
cugccggcucaagcuggcaa

SEQ ID NO: 233925 - RNA, 16 nt, Molluscum contagiosum virus
cugccgucgcccguga

SEQ ID NO: 233926 - RNA, 19 nt, Molluscum contagiosum virus
cugccucguggaacaaaga

SEQ ID NO: 233927 - RNA, 21 nt, Molluscum contagiosum virus
cugccucguggaacaaagagg

SEQ ID NO: 233928 - RNA, 20 nt, Molluscum contagiosum virus
cugcacagcuuccuggagua

SEQ ID NO: 233929 - RNA, 13 nt, Molluscum contagiosum virus
cugcacaguucac

SEQ ID NO: 233930 - RNA, 21 nt, Molluscum contagiosum virus
cuggacugagccgcaagcaca

SEQ ID NO: 233931 - RNA, 13 nt, Molluscum contagiosum virus
cuggacugugcuu

SEQ ID NO: 233932 - RNA, 18 nt, Molluscum contagiosum virus
cuggaccuccaucuugcc

SEQ ID NO: 233933 - RNA, 18 nt, Molluscum contagiosum virus
cugcuccgcggaggccaa

SEQ ID NO: 233934 - RNA, 13 nt, Molluscum contagiosum virus
cugcucaucggcg

SEQ ID NO: 233935 - RNA, 23 nt, Molluscum contagiosum virus
cugcuccccgccagcaccaugcg

SEQ ID NO: 233936 - RNA, 18 nt, Molluscum contagiosum virus
cugcucgagauucguggc

SEQ ID NO: 233937 - RNA, 22 nt, Molluscum contagiosum virus
cugcucgugcccgcacacgcaa

SEQ ID NO: 233938 - RNA, 22 nt, Molluscum contagiosum virus
cugcugcgguaucuacacuccg

SEQ ID NO: 233939 - RNA, 21 nt, Molluscum contagiosum virus
cugcugaagaaggagcccuug

SEQ ID NO: 233940 - RNA, 15 nt, Molluscum contagiosum virus
cugcgcuccaugcug

SEQ ID NO: 233941 - RNA, 15 nt, Molluscum contagiosum virus
cugcgcgagcucguc

SEQ ID NO: 233942 - RNA, 16 nt, Molluscum contagiosum virus
cugcgcgcggggagcu

SEQ ID NO: 233943 - RNA, 14 nt, Molluscum contagiosum virus
cugcgccacugcca

SEQ ID NO: 233944 - RNA, 15 nt, Molluscum contagiosum virus
cugcgcccgcggaga

SEQ ID NO: 233945 - RNA, 16 nt, Molluscum contagiosum virus
cugcgcuggaugcugc

SEQ ID NO: 233946 - RNA, 21 nt, Molluscum contagiosum virus
cugcgcuuccucuacaccagc

SEQ ID NO: 233947 - RNA, 23 nt, Molluscum contagiosum virus
cugcgcuuccucuacaccagcug

SEQ ID NO: 233948 - RNA, 16 nt, Molluscum contagiosum virus
cugcggcgcugcuaca

SEQ ID NO: 233949 - RNA, 19 nt, Molluscum contagiosum virus
cugcgcuuuuuuuguccug

SEQ ID NO: 233950 - RNA, 15 nt, Molluscum contagiosum virus
cugcggacaagacaa

SEQ ID NO: 233951 - RNA, 13 nt, Molluscum contagiosum virus
cugcgcagcaucc

SEQ ID NO: 233952 - RNA, 17 nt, Molluscum contagiosum virus
cugcgaguggcgcgcau

SEQ ID NO: 233953 - RNA, 21 nt, Molluscum contagiosum virus
cugcgaucgcgggcacgagca

SEQ ID NO: 233954 - RNA, 14 nt, Molluscum contagiosum virus
cugcgagagcaugc

SEQ ID NO: 233955 - RNA, 12 nt, Molluscum contagiosum virus
cugccugcucaa

SEQ ID NO: 233956 - RNA, 13 nt, Molluscum contagiosum virus
cugccugcucaac

SEQ ID NO: 233957 - RNA, 14 nt, Molluscum contagiosum virus
cugccuuugccaag

SEQ ID NO: 233958 - RNA, 18 nt, Molluscum contagiosum virus
cugcguguacgacgugcu

SEQ ID NO: 233959 - RNA, 15 nt, Molluscum contagiosum virus
cugcgucacaagcac

SEQ ID NO: 233960 - RNA, 24 nt, Molluscum contagiosum virus
cugcgucgccugagcuucuuuggc

SEQ ID NO: 233961 - RNA, 18 nt, Molluscum contagiosum virus
cugcuauuaccugagauc

SEQ ID NO: 233962 - RNA, 16 nt, Molluscum contagiosum virus
cugcuagcggccuguu

SEQ ID NO: 233963 - RNA, 17 nt, Molluscum contagiosum virus
cugcuagagcauauccu

SEQ ID NO: 233964 - RNA, 20 nt, Molluscum contagiosum virus
cugcuacaagcggugcagcu

SEQ ID NO: 233965 - RNA, 12 nt, Molluscum contagiosum virus
cuguuugccacg

SEQ ID NO: 233966 - RNA, 23 nt, Molluscum contagiosum virus
cuguugcgcgagcgcgugcucuu

SEQ ID NO: 233967 - RNA, 17 nt, Molluscum contagiosum virus
cugugcgcgguggugcu

SEQ ID NO: 233968 - RNA, 15 nt, Molluscum contagiosum virus
cuguuccacaucaug

SEQ ID NO: 233969 - RNA, 21 nt, Molluscum contagiosum virus
cuguuaaauggacgugcuccg

SEQ ID NO: 233970 - RNA, 23 nt, Molluscum contagiosum virus
cuguguuucucgcgaaucacaaa

SEQ ID NO: 233971 - RNA, 13 nt, Molluscum contagiosum virus
cugucucuguccc

SEQ ID NO: 233972 - RNA, 18 nt, Molluscum contagiosum virus
cugugcccuguccacaaa

SEQ ID NO: 233973 - RNA, 14 nt, Molluscum contagiosum virus
cugugccugcgcaa

SEQ ID NO: 233974 - RNA, 17 nt, Molluscum contagiosum virus
cugugcagaacuucucg

SEQ ID NO: 233975 - RNA, 21 nt, Molluscum contagiosum virus
cuguacucgccguuccacuac

SEQ ID NO: 233976 - RNA, 22 nt, Molluscum contagiosum virus
cuguacucgccguuccacuaca

SEQ ID NO: 233977 - RNA, 14 nt, Molluscum contagiosum virus
cugguuaccaaggg

SEQ ID NO: 233978 - RNA, 16 nt, Molluscum contagiosum virus
cuggugugcacugaug

SEQ ID NO: 233979 - RNA, 21 nt, Molluscum contagiosum virus
cuguaaauggaccacaagcag

SEQ ID NO: 233980 - RNA, 21 nt, Molluscum contagiosum virus
cuggugcgcgugacacaccgc

SEQ ID NO: 233981 - RNA, 17 nt, Molluscum contagiosum virus
cuggugcuggucaagaa

SEQ ID NO: 233982 - RNA, 14 nt, Molluscum contagiosum virus
cuggcagacacaga

SEQ ID NO: 233983 - RNA, 14 nt, Molluscum contagiosum virus
cuggcagccgagcc

SEQ ID NO: 233984 - RNA, 11 nt, Molluscum contagiosum virus
cgcaucccucg

SEQ ID NO: 233985 - RNA, 20 nt, Molluscum contagiosum virus
cgcaugcacagccgcuuucu

SEQ ID NO: 233986 - RNA, 17 nt, Molluscum contagiosum virus
cgcauagugccguagac

SEQ ID NO: 233987 - RNA, 22 nt, Molluscum contagiosum virus
cgcaugguugugcuuguucucu

SEQ ID NO: 233988 - RNA, 20 nt, Molluscum contagiosum virus
cgcaugccggggaugaacgc

SEQ ID NO: 233989 - RNA, 17 nt, Molluscum contagiosum virus
cgccaagcgcuugcucu

SEQ ID NO: 233990 - RNA, 20 nt, Molluscum contagiosum virus
cgccaacgcuuggcaagcuu

SEQ ID NO: 233991 - RNA, 14 nt, Molluscum contagiosum virus
cgccagcgagauca

SEQ ID NO: 233992 - RNA, 16 nt, Molluscum contagiosum virus
cgccagcuugagcaca

SEQ ID NO: 233993 - RNA, 23 nt, Molluscum contagiosum virus
cgccaggaacgaggaaaggcaca

SEQ ID NO: 233994 - RNA, 19 nt, Molluscum contagiosum virus
cgccaucgcgcgugacuac

SEQ ID NO: 233995 - RNA, 18 nt, Molluscum contagiosum virus
cgccagugcgugcacugu

SEQ ID NO: 233996 - RNA, 19 nt, Molluscum contagiosum virus
cgccagugcgugcacuguc

SEQ ID NO: 233997 - RNA, 16 nt, Molluscum contagiosum virus
cgccccaaaagugaag

SEQ ID NO: 233998 - RNA, 18 nt, Molluscum contagiosum virus
cgcccgcagcgcgcaaaa

SEQ ID NO: 233999 - RNA, 13 nt, Molluscum contagiosum virus
cgcccccgcaaaa

SEQ ID NO: 234000 - RNA, 18 nt, Molluscum contagiosum virus
cgcccgcugcucuacuuc

SEQ ID NO: 234001 - RNA, 16 nt, Molluscum contagiosum virus
cgccgagcgggcaaug

SEQ ID NO: 234002 - RNA, 12 nt, Molluscum contagiosum virus
cgccgaugcagu

SEQ ID NO: 234003 - RNA, 14 nt, Molluscum contagiosum virus
cgccgaugcagugc

SEQ ID NO: 234004 - RNA, 13 nt, Molluscum contagiosum virus
cgcccuuguggac

SEQ ID NO: 234005 - RNA, 16 nt, Molluscum contagiosum virus
cgccgacaacagugaa

SEQ ID NO: 234006 - RNA, 14 nt, Molluscum contagiosum virus
cgccgcgcgcgcca

SEQ ID NO: 234007 - RNA, 21 nt, Molluscum contagiosum virus
cgccgguagcgucugggugcc

SEQ ID NO: 234008 - RNA, 14 nt, Molluscum contagiosum virus
cgccgcugcuggaa

SEQ ID NO: 234009 - RNA, 22 nt, Molluscum contagiosum virus
cgccuccgguacguacagugcg

SEQ ID NO: 234010 - RNA, 19 nt, Molluscum contagiosum virus
cgccucgagcgcgcuggac

SEQ ID NO: 234011 - RNA, 12 nt, Molluscum contagiosum virus
cgccuccaagaa

SEQ ID NO: 234012 - RNA, 13 nt, Molluscum contagiosum virus
cgccuccaagaag

SEQ ID NO: 234013 - RNA, 13 nt, Molluscum contagiosum virus
ccuguucuuccag

SEQ ID NO: 234014 - RNA, 12 nt, Molluscum contagiosum virus
ccuguugcgcga

SEQ ID NO: 234015 - RNA, 17 nt, Molluscum contagiosum virus
ccuuaaauggauuucau

SEQ ID NO: 234016 - RNA, 12 nt, Molluscum contagiosum virus
cgcaagugcgug

SEQ ID NO: 234017 - RNA, 18 nt, Molluscum contagiosum virus
cgcaagcucagccucuac

SEQ ID NO: 234018 - RNA, 21 nt, Molluscum contagiosum virus
cgcaaggccgcgcccaagaag

SEQ ID NO: 234019 - RNA, 16 nt, Molluscum contagiosum virus
cgcacuggccugcaaa

SEQ ID NO: 234020 - RNA, 13 nt, Molluscum contagiosum virus
cgcagaagccaac

SEQ ID NO: 234021 - RNA, 15 nt, Molluscum contagiosum virus
cgcaccuuuuccacg

SEQ ID NO: 234022 - RNA, 22 nt, Molluscum contagiosum virus
cgcacuauggacgcuugcuagc

SEQ ID NO: 234023 - RNA, 20 nt, Molluscum contagiosum virus
cgcacucguggcaacaacau

SEQ ID NO: 234024 - RNA, 14 nt, Molluscum contagiosum virus
cgcacgugcugcgc

SEQ ID NO: 234025 - RNA, 19 nt, Molluscum contagiosum virus
cgcacgugcugcgcuacca

SEQ ID NO: 234026 - RNA, 13 nt, Molluscum contagiosum virus
cgcacguggaauc

SEQ ID NO: 234027 - RNA, 21 nt, Molluscum contagiosum virus
cgcacgcggaaacaagcacau

SEQ ID NO: 234028 - RNA, 14 nt, Molluscum contagiosum virus
cgcacgcuugccuu

SEQ ID NO: 234029 - RNA, 17 nt, Molluscum contagiosum virus
cgcacggcgacucuggc

SEQ ID NO: 234030 - RNA, 14 nt, Molluscum contagiosum virus
cgcaccguacucgc

SEQ ID NO: 234031 - RNA, 10 nt, Molluscum contagiosum virus
cgcacaguuc

SEQ ID NO: 234032 - RNA, 12 nt, Molluscum contagiosum virus
cgcacaguucac

SEQ ID NO: 234033 - RNA, 12 nt, Molluscum contagiosum virus
cgcaggaugcug

SEQ ID NO: 234034 - RNA, 15 nt, Molluscum contagiosum virus
cgcaggcucuggcaa

SEQ ID NO: 234035 - RNA, 16 nt, Molluscum contagiosum virus
cgcaguucgagcugcu

SEQ ID NO: 234036 - RNA, 21 nt, Molluscum contagiosum virus
cgcagucgucgccgaucucca

SEQ ID NO: 234037 - RNA, 19 nt, Molluscum contagiosum virus
cgcagcccacgugccagcu

SEQ ID NO: 234038 - RNA, 22 nt, Molluscum contagiosum virus
cgcagcaggugcacgugcugca

SEQ ID NO: 234039 - RNA, 23 nt, Molluscum contagiosum virus
cgcagcaggugcacgugcugcag

SEQ ID NO: 234040 - RNA, 15 nt, Molluscum contagiosum virus
cgcagagccaugccc

SEQ ID NO: 234041 - RNA, 13 nt, Molluscum contagiosum virus
cgcaggacacugu

SEQ ID NO: 234042 - RNA, 16 nt, Molluscum contagiosum virus
cgcagccgguacucgu

SEQ ID NO: 234043 - RNA, 18 nt, Molluscum contagiosum virus
cgcagccgguacucgugc

SEQ ID NO: 234044 - RNA, 15 nt, Molluscum contagiosum virus
cgcagcgcgcaaaag

SEQ ID NO: 234045 - RNA, 14 nt, Molluscum contagiosum virus
cgcgcaugccuugc

SEQ ID NO: 234046 - RNA, 13 nt, Molluscum contagiosum virus
cgcgccagcagcg

SEQ ID NO: 234047 - RNA, 23 nt, Molluscum contagiosum virus
cgcgccagggcggagccccgaga

SEQ ID NO: 234048 - RNA, 23 nt, Molluscum contagiosum virus
cgcgcaaggccgcgcccaagaag

SEQ ID NO: 234049 - RNA, 17 nt, Molluscum contagiosum virus
cgcgcacagaaagccaa

SEQ ID NO: 234050 - RNA, 14 nt, Molluscum contagiosum virus
cgcgcagaagccaa

SEQ ID NO: 234051 - RNA, 14 nt, Molluscum contagiosum virus
cgcgcagcaccgcg

SEQ ID NO: 234052 - RNA, 17 nt, Molluscum contagiosum virus
aaacagccaugugucuu

SEQ ID NO: 234053 - RNA, 18 nt, Molluscum contagiosum virus
cgcgauguuuugaacaga

SEQ ID NO: 234054 - RNA, 20 nt, Molluscum contagiosum virus
cgcgcaaacaagcagucuca

SEQ ID NO: 234055 - RNA, 16 nt, Molluscum contagiosum virus
cgcgagacuugugccc

SEQ ID NO: 234056 - RNA, 16 nt, Molluscum contagiosum virus
cgcgagugugugcauc

SEQ ID NO: 234057 - RNA, 20 nt, Molluscum contagiosum virus
cgcgaaagaggaaagcgcac

SEQ ID NO: 234058 - RNA, 15 nt, Molluscum contagiosum virus
cgccuuguucacaag

SEQ ID NO: 234059 - RNA, 20 nt, Molluscum contagiosum virus
cgccuuuccggccuguaaau

SEQ ID NO: 234060 - RNA, 11 nt, Molluscum contagiosum virus
cgccugugcug

SEQ ID NO: 234061 - RNA, 14 nt, Molluscum contagiosum virus
cgccugcgggagau

SEQ ID NO: 234062 - RNA, 14 nt, Molluscum contagiosum virus
cgccucugcgagau

SEQ ID NO: 234063 - RNA, 20 nt, Molluscum contagiosum virus
cgcugcucgacauuaacuga

SEQ ID NO: 234064 - RNA, 20 nt, Molluscum contagiosum virus
cgcugccagagauccgcccg

SEQ ID NO: 234065 - RNA, 23 nt, Molluscum contagiosum virus
cgcuccgacgcgguggugaaauc

SEQ ID NO: 234066 - RNA, 15 nt, Molluscum contagiosum virus
cgcugcacaguucac

SEQ ID NO: 234067 - RNA, 19 nt, Molluscum contagiosum virus
cgcuaccgcaagcucaugg

SEQ ID NO: 234068 - RNA, 19 nt, Molluscum contagiosum virus
cgcuaccugguggagcacu

SEQ ID NO: 234069 - RNA, 20 nt, Molluscum contagiosum virus
cgcuacuucacacgucuugc

SEQ ID NO: 234070 - RNA, 12 nt, Molluscum contagiosum virus
cgcuccaugcug

SEQ ID NO: 234071 - RNA, 22 nt, Molluscum contagiosum virus
cgcucauggcgcgcaaccagcu

SEQ ID NO: 234072 - RNA, 12 nt, Molluscum contagiosum virus
cgcugcugcaca

SEQ ID NO: 234073 - RNA, 11 nt, Molluscum contagiosum virus
cgcugcugcgg

SEQ ID NO: 234074 - RNA, 19 nt, Molluscum contagiosum virus
cgcugcugggcaucgugcu

SEQ ID NO: 234075 - RNA, 15 nt, Molluscum contagiosum virus
cgcuggcgcuaccua

SEQ ID NO: 234076 - RNA, 21 nt, Molluscum contagiosum virus
cgcuggcgcucggcguggugc

SEQ ID NO: 234077 - RNA, 20 nt, Molluscum contagiosum virus
cgcugccuggugcacacaca

SEQ ID NO: 234078 - RNA, 12 nt, Molluscum contagiosum virus
cgcuggugcgaa

SEQ ID NO: 234079 - RNA, 19 nt, Molluscum contagiosum virus
cgcuggugcgaaauugcca

SEQ ID NO: 234080 - RNA, 14 nt, Molluscum contagiosum virus
cgcuggugugcacu

SEQ ID NO: 234081 - RNA, 16 nt, Molluscum contagiosum virus
cgcuguacgugcugcc

SEQ ID NO: 234082 - RNA, 20 nt, Molluscum contagiosum virus
cgcuggcuucuuguugucug

SEQ ID NO: 234083 - RNA, 19 nt, Molluscum contagiosum virus
cgcuuagccaacagcgcaa

SEQ ID NO: 234084 - RNA, 22 nt, Molluscum contagiosum virus
cgcuuagccaacagcgcaagcu

SEQ ID NO: 234085 - RNA, 19 nt, Molluscum contagiosum virus
cgcggcagacaacaccagc

SEQ ID NO: 234086 - RNA, 23 nt, Molluscum contagiosum virus
cgcggccaugcuccugaucugcg

SEQ ID NO: 234087 - RNA, 13 nt, Molluscum contagiosum virus
cgcggcgcagugc

SEQ ID NO: 234088 - RNA, 18 nt, Molluscum contagiosum virus
cgcggcggaaguggugcc

SEQ ID NO: 234089 - RNA, 17 nt, Molluscum contagiosum virus
cgcggccguggcacuga

SEQ ID NO: 234090 - RNA, 15 nt, Molluscum contagiosum virus
cgcggagagcagugc

SEQ ID NO: 234091 - RNA, 16 nt, Molluscum contagiosum virus
cgcggaaacaagcaca

SEQ ID NO: 234092 - RNA, 13 nt, Molluscum contagiosum virus
cgcgcgugcugcu

SEQ ID NO: 234093 - RNA, 17 nt, Molluscum contagiosum virus
cgcgcucgcgcucggga

SEQ ID NO: 234094 - RNA, 14 nt, Molluscum contagiosum virus
cgcgcccaccagca

SEQ ID NO: 234095 - RNA, 15 nt, Molluscum contagiosum virus
cgcgcccaccagcag

SEQ ID NO: 234096 - RNA, 17 nt, Molluscum contagiosum virus
cgcgcggcggagaugac

SEQ ID NO: 234097 - RNA, 19 nt, Molluscum contagiosum virus
cgcgcccccguccgugcca

SEQ ID NO: 234098 - RNA, 13 nt, Molluscum contagiosum virus
cgcgcgagcugcu

SEQ ID NO: 234099 - RNA, 19 nt, Molluscum contagiosum virus
cgcgcgccucgccaaagag

SEQ ID NO: 234100 - RNA, 13 nt, Molluscum contagiosum virus
cgcgggagcggcc

SEQ ID NO: 234101 - RNA, 18 nt, Molluscum contagiosum virus
cgcgggcacgcagcucuu

SEQ ID NO: 234102 - RNA, 20 nt, Molluscum contagiosum virus
cgcguuuuuucuugguugcc

SEQ ID NO: 234103 - RNA, 23 nt, Molluscum contagiosum virus
cgcgugcggcggcgcgugcugcg

SEQ ID NO: 234104 - RNA, 16 nt, Molluscum contagiosum virus
cgcgugucgcggagca

SEQ ID NO: 234105 - RNA, 14 nt, Molluscum contagiosum virus
cgcguccacaaaga

SEQ ID NO: 234106 - RNA, 15 nt, Molluscum contagiosum virus
cgcgugaacaauaca

SEQ ID NO: 234107 - RNA, 21 nt, Molluscum contagiosum virus
cuaccgcgaccgggaguguca

SEQ ID NO: 234108 - RNA, 21 nt, Molluscum contagiosum virus
cuaccaacucugugaccugcg

SEQ ID NO: 234109 - RNA, 23 nt, Molluscum contagiosum virus
cuaccaagaacagagaaaggcac

SEQ ID NO: 234110 - RNA, 15 nt, Molluscum contagiosum virus
cuacaucgacauggu

SEQ ID NO: 234111 - RNA, 15 nt, Molluscum contagiosum virus
cuacaccgagaucau

SEQ ID NO: 234112 - RNA, 15 nt, Molluscum contagiosum virus
cuacaccagcuggac

SEQ ID NO: 234113 - RNA, 14 nt, Molluscum contagiosum virus
cuacacgcacgacc

SEQ ID NO: 234114 - RNA, 18 nt, Molluscum contagiosum virus
cuacacgcacgaccucac

SEQ ID NO: 234115 - RNA, 14 nt, Molluscum contagiosum virus
cuacacguggaauu

SEQ ID NO: 234116 - RNA, 15 nt, Molluscum contagiosum virus
cuaagcuaaaagagc

SEQ ID NO: 234117 - RNA, 16 nt, Molluscum contagiosum virus
cuacaaggaggucaug

SEQ ID NO: 234118 - RNA, 16 nt, Molluscum contagiosum virus
cgugcugcucaaggac

SEQ ID NO: 234119 - RNA, 13 nt, Molluscum contagiosum virus
cgugcugcugcgg

SEQ ID NO: 234120 - RNA, 18 nt, Molluscum contagiosum virus
cgugcuggccagccucau

SEQ ID NO: 234121 - RNA, 19 nt, Molluscum contagiosum virus
cgugcuggccagccucauc

SEQ ID NO: 234122 - RNA, 15 nt, Molluscum contagiosum virus
cguggcgaugucgcc

SEQ ID NO: 234123 - RNA, 13 nt, Molluscum contagiosum virus
cguggcgccauug

SEQ ID NO: 234124 - RNA, 17 nt, Molluscum contagiosum virus
cguggaugaacaccauc

SEQ ID NO: 234125 - RNA, 15 nt, Molluscum contagiosum virus
cguggaguccaugcc

SEQ ID NO: 234126 - RNA, 16 nt, Molluscum contagiosum virus
cguggccaaggucucg

SEQ ID NO: 234127 - RNA, 23 nt, Molluscum contagiosum virus
cguggccagcuucaucaagcacg

SEQ ID NO: 234128 - RNA, 20 nt, Molluscum contagiosum virus
cguguaagcccgcuaugaac

SEQ ID NO: 234129 - RNA, 24 nt, Molluscum contagiosum virus
cgugguguucgccggcaucgcgcu

SEQ ID NO: 234130 - RNA, 19 nt, Molluscum contagiosum virus
cguggugcuggccaacacu

SEQ ID NO: 234131 - RNA, 22 nt, Molluscum contagiosum virus
cguggugcuggccaacacuacc

SEQ ID NO: 234132 - RNA, 15 nt, Molluscum contagiosum virus
cgugguccaccagca

SEQ ID NO: 234133 - RNA, 18 nt, Molluscum contagiosum virus
cguguacgacgugcugcu

SEQ ID NO: 234134 - RNA, 14 nt, Molluscum contagiosum virus
cguguacgucuuuc

SEQ ID NO: 234135 - RNA, 17 nt, Molluscum contagiosum virus
cguuuugcacuugucag

SEQ ID NO: 234136 - RNA, 22 nt, Molluscum contagiosum virus
cguuucucagguacguguccac

SEQ ID NO: 234137 - RNA, 16 nt, Molluscum contagiosum virus
cggagaaagacaaaga

SEQ ID NO: 234138 - RNA, 18 nt, Molluscum contagiosum virus
cggagaaagacaaagacc

SEQ ID NO: 234139 - RNA, 18 nt, Molluscum contagiosum virus
cggagaagaacagcacga

SEQ ID NO: 234140 - RNA, 20 nt, Molluscum contagiosum virus
cggagaaaaggaagcuugcc

SEQ ID NO: 234141 - RNA, 17 nt, Molluscum contagiosum virus
cggaagcucacaucugu

SEQ ID NO: 234142 - RNA, 14 nt, Molluscum contagiosum virus
cggacacuggcacc

SEQ ID NO: 234143 - RNA, 18 nt, Molluscum contagiosum virus
cggacagcaaacagccug

SEQ ID NO: 234144 - RNA, 14 nt, Molluscum contagiosum virus
cggaaacaagcaca

SEQ ID NO: 234145 - RNA, 16 nt, Molluscum contagiosum virus
cgcuuuuuuuguccug

SEQ ID NO: 234146 - RNA, 13 nt, Molluscum contagiosum virus
cgcuucuagcucg

SEQ ID NO: 234147 - RNA, 22 nt, Molluscum contagiosum virus
cgcuucuuuacgggcgccagcu

SEQ ID NO: 234148 - RNA, 15 nt, Molluscum contagiosum virus
cgcuugcacggggaa

SEQ ID NO: 234149 - RNA, 22 nt, Molluscum contagiosum virus
cgcuucgccgcgcgcgccagcu

SEQ ID NO: 234150 - RNA, 21 nt, Molluscum contagiosum virus
cggagagaacaacgaaaacug

SEQ ID NO: 234151 - RNA, 13 nt, Molluscum contagiosum virus
cggagacaccagc

SEQ ID NO: 234152 - RNA, 14 nt, Molluscum contagiosum virus
cggagacaccagcu

SEQ ID NO: 234153 - RNA, 15 nt, Molluscum contagiosum virus
cggagacaccagcuc

SEQ ID NO: 234154 - RNA, 15 nt, Molluscum contagiosum virus
cggagcgacauagcg

SEQ ID NO: 234155 - RNA, 17 nt, Molluscum contagiosum virus
cggagcgcuucuagcuc

SEQ ID NO: 234156 - RNA, 18 nt, Molluscum contagiosum virus
cggagcgcuucuagcucg

SEQ ID NO: 234157 - RNA, 13 nt, Molluscum contagiosum virus
cggagcuggccga

SEQ ID NO: 234158 - RNA, 15 nt, Molluscum contagiosum virus
cgguagcuagcucug

SEQ ID NO: 234159 - RNA, 21 nt, Molluscum contagiosum virus
cggucuuccagcacugcgcca

SEQ ID NO: 234160 - RNA, 13 nt, Molluscum contagiosum virus
cgguccuugcucc

SEQ ID NO: 234161 - RNA, 16 nt, Molluscum contagiosum virus
cguaccaagccgugac

SEQ ID NO: 234162 - RNA, 17 nt, Molluscum contagiosum virus
cggugagccguuccaca

SEQ ID NO: 234163 - RNA, 18 nt, Molluscum contagiosum virus
cggugccggccgccggcg

SEQ ID NO: 234164 - RNA, 16 nt, Molluscum contagiosum virus
cggugccguccccgcg

SEQ ID NO: 234165 - RNA, 16 nt, Molluscum contagiosum virus
cguagacgauuuugcc

SEQ ID NO: 234166 - RNA, 17 nt, Molluscum contagiosum virus
cguacuugcugguugcc

SEQ ID NO: 234167 - RNA, 15 nt, Molluscum contagiosum virus
cguacgugcacgugg

SEQ ID NO: 234168 - RNA, 21 nt, Molluscum contagiosum virus
cgucaaccugcugccucccaa

SEQ ID NO: 234169 - RNA, 14 nt, Molluscum contagiosum virus
cguauacuccaaaa

SEQ ID NO: 234170 - RNA, 23 nt, Molluscum contagiosum virus
cguauacuccaaaaaggugcgag

SEQ ID NO: 234171 - RNA, 16 nt, Molluscum contagiosum virus
cguauggaucuucuca

SEQ ID NO: 234172 - RNA, 21 nt, Molluscum contagiosum virus
cgucagggaugccagugcagu

SEQ ID NO: 234173 - RNA, 21 nt, Molluscum contagiosum virus
cguccagcugcgcgagcucgu

SEQ ID NO: 234174 - RNA, 14 nt, Molluscum contagiosum virus
cguccacaaagacg

SEQ ID NO: 234175 - RNA, 14 nt, Molluscum contagiosum virus
cguccgcaaagacg

SEQ ID NO: 234176 - RNA, 14 nt, Molluscum contagiosum virus
cguccgcacgcacg

SEQ ID NO: 234177 - RNA, 18 nt, Molluscum contagiosum virus
cgucgcgcgcuaccugcg

SEQ ID NO: 234178 - RNA, 20 nt, Molluscum contagiosum virus
cgucguccggaggcacgggc

SEQ ID NO: 234179 - RNA, 14 nt, Molluscum contagiosum virus
cgucucaagacaag

SEQ ID NO: 234180 - RNA, 14 nt, Molluscum contagiosum virus
cgucuucaccugca

SEQ ID NO: 234181 - RNA, 18 nt, Molluscum contagiosum virus
cgucuccaacaagcucau

SEQ ID NO: 234182 - RNA, 14 nt, Molluscum contagiosum virus
cgucuccacaaaga

SEQ ID NO: 234183 - RNA, 14 nt, Molluscum contagiosum virus
cgucucguaguccg

SEQ ID NO: 234184 - RNA, 18 nt, Molluscum contagiosum virus
cgucucucgaacaccgac

SEQ ID NO: 234185 - RNA, 13 nt, Molluscum contagiosum virus
ggccacaagcacg

SEQ ID NO: 234186 - RNA, 19 nt, Molluscum contagiosum virus
ggccaaggcaaaguucucg

SEQ ID NO: 234187 - RNA, 17 nt, Molluscum contagiosum virus
ggcauucgaaccuggaa

SEQ ID NO: 234188 - RNA, 20 nt, Molluscum contagiosum virus
ggcauucucggacagugccu

SEQ ID NO: 234189 - RNA, 14 nt, Molluscum contagiosum virus
ggcaugcacagcug

SEQ ID NO: 234190 - RNA, 18 nt, Molluscum contagiosum virus
ggcaucgcgcugcuggug

SEQ ID NO: 234191 - RNA, 23 nt, Molluscum contagiosum virus
ggccauggaggcgcuagugcaga

SEQ ID NO: 234192 - RNA, 12 nt, Molluscum contagiosum virus
ggccguggcacu

SEQ ID NO: 234193 - RNA, 19 nt, Molluscum contagiosum virus
ggccguguacaugcucaag

SEQ ID NO: 234194 - RNA, 17 nt, Molluscum contagiosum virus
ggccguuggacaucagc

SEQ ID NO: 234195 - RNA, 13 nt, Molluscum contagiosum virus
ggcagcgccagcg

SEQ ID NO: 234196 - RNA, 17 nt, Molluscum contagiosum virus
ggcagcagcgugcauag

SEQ ID NO: 234197 - RNA, 23 nt, Molluscum contagiosum virus
ggcagcugcugcgcuccaugcug

SEQ ID NO: 234198 - RNA, 24 nt, Molluscum contagiosum virus
ggcagcugcugcgcuccaugcugc

SEQ ID NO: 234199 - RNA, 15 nt, Molluscum contagiosum virus
ggcacgggcacgcgc

SEQ ID NO: 234200 - RNA, 19 nt, Molluscum contagiosum virus
ggcacgaugucggaaccca

SEQ ID NO: 234201 - RNA, 13 nt, Molluscum contagiosum virus
ggcacgcacaaag

SEQ ID NO: 234202 - RNA, 15 nt, Molluscum contagiosum virus
ggcacgcacaaaguu

SEQ ID NO: 234203 - RNA, 22 nt, Molluscum contagiosum virus
ggcacgcucauacuccugcugg

SEQ ID NO: 234204 - RNA, 24 nt, Molluscum contagiosum virus
ggcagaaacucuccgacgugcugc

SEQ ID NO: 234205 - RNA, 17 nt, Molluscum contagiosum virus
ggcacugcucacggugc

SEQ ID NO: 234206 - RNA, 13 nt, Molluscum contagiosum virus
ggcagaagcucau

SEQ ID NO: 234207 - RNA, 14 nt, Molluscum contagiosum virus
ggcagacgccagcg

SEQ ID NO: 234208 - RNA, 18 nt, Molluscum contagiosum virus
ggaugcagaacagcacgu

SEQ ID NO: 234209 - RNA, 18 nt, Molluscum contagiosum virus
ggacgccguugcgcguga

SEQ ID NO: 234210 - RNA, 15 nt, Molluscum contagiosum virus
ggacgcgcaagugug

SEQ ID NO: 234211 - RNA, 17 nt, Molluscum contagiosum virus
ggacgcguucuccagga

SEQ ID NO: 234212 - RNA, 16 nt, Molluscum contagiosum virus
ggacgcaggaugcugg

SEQ ID NO: 234213 - RNA, 20 nt, Molluscum contagiosum virus
ggacucagcauguugcucua

SEQ ID NO: 234214 - RNA, 13 nt, Molluscum contagiosum virus
ggacuaccagcuc

SEQ ID NO: 234215 - RNA, 16 nt, Molluscum contagiosum virus
ggacggcgcgcagcgc

SEQ ID NO: 234216 - RNA, 18 nt, Molluscum contagiosum virus
ggacguccacaaagcccu

SEQ ID NO: 234217 - RNA, 13 nt, Molluscum contagiosum virus
ggauggacaaaga

SEQ ID NO: 234218 - RNA, 11 nt, Molluscum contagiosum virus
ggaugcugcuc

SEQ ID NO: 234219 - RNA, 21 nt, Molluscum contagiosum virus
ggaccugcugguggugcugga

SEQ ID NO: 234220 - RNA, 17 nt, Molluscum contagiosum virus
ggacacagcaaaagcuu

SEQ ID NO: 234221 - RNA, 15 nt, Molluscum contagiosum virus
ggacacguagcccag

SEQ ID NO: 234222 - RNA, 19 nt, Molluscum contagiosum virus
ggacagcauccccaacauc

SEQ ID NO: 234223 - RNA, 24 nt, Molluscum contagiosum virus
gggagcuuuccuugcgcuuguccu

SEQ ID NO: 234224 - RNA, 16 nt, Molluscum contagiosum virus
gggagcggcauggaaa

SEQ ID NO: 234225 - RNA, 14 nt, Molluscum contagiosum virus
gggagcuggagcga

SEQ ID NO: 234226 - RNA, 19 nt, Molluscum contagiosum virus
ggcuuacacacgcaccagu

SEQ ID NO: 234227 - RNA, 15 nt, Molluscum contagiosum virus
ggcucguacugcugc

SEQ ID NO: 234228 - RNA, 21 nt, Molluscum contagiosum virus
ggcugcaagcacaacgggcuc

SEQ ID NO: 234229 - RNA, 17 nt, Molluscum contagiosum virus
ggcugcagcccuuccac

SEQ ID NO: 234230 - RNA, 17 nt, Molluscum contagiosum virus
ggcugcugccugcucaa

SEQ ID NO: 234231 - RNA, 16 nt, Molluscum contagiosum virus
ggcugcuuccgcaccu

SEQ ID NO: 234232 - RNA, 17 nt, Molluscum contagiosum virus
ggcucgaggugugccug

SEQ ID NO: 234233 - RNA, 16 nt, Molluscum contagiosum virus
ggcucgcgagugugca

SEQ ID NO: 234234 - RNA, 14 nt, Molluscum contagiosum virus
ggcucgcgcaauac

SEQ ID NO: 234235 - RNA, 16 nt, Molluscum contagiosum virus
ggcucgggaacaaagg

SEQ ID NO: 234236 - RNA, 15 nt, Molluscum contagiosum virus
ggcgauguccauguc

SEQ ID NO: 234237 - RNA, 19 nt, Molluscum contagiosum virus
ggcgaugucgccgcagugc

SEQ ID NO: 234238 - RNA, 14 nt, Molluscum contagiosum virus
ggcgauacaaaaca

SEQ ID NO: 234239 - RNA, 16 nt, Molluscum contagiosum virus
ggcgacuuguagugcc

SEQ ID NO: 234240 - RNA, 19 nt, Molluscum contagiosum virus
ggcgaccagcugguccuga

SEQ ID NO: 234241 - RNA, 15 nt, Molluscum contagiosum virus
ggccuguaccugcga

SEQ ID NO: 234242 - RNA, 22 nt, Molluscum contagiosum virus
ggggaacucggcuucugcugca

SEQ ID NO: 234243 - RNA, 15 nt, Molluscum contagiosum virus
gggcuggacugugcu

SEQ ID NO: 234244 - RNA, 15 nt, Molluscum contagiosum virus
gggcgcgcgccagca

SEQ ID NO: 234245 - RNA, 20 nt, Molluscum contagiosum virus
gggcgcggcgucgucgugaa

SEQ ID NO: 234246 - RNA, 18 nt, Molluscum contagiosum virus
gggcgccagcuaagccgg

SEQ ID NO: 234247 - RNA, 20 nt, Molluscum contagiosum virus
gggcgccagcuaagccggag

SEQ ID NO: 234248 - RNA, 17 nt, Molluscum contagiosum virus
gggcgccgcggcugccu

SEQ ID NO: 234249 - RNA, 17 nt, Molluscum contagiosum virus
gggcugccggcgcguga

SEQ ID NO: 234250 - RNA, 14 nt, Molluscum contagiosum virus
gggcucgccaugcu

SEQ ID NO: 234251 - RNA, 21 nt, Molluscum contagiosum virus
gggcuacgacgcgcuggugac

SEQ ID NO: 234252 - RNA, 15 nt, Molluscum contagiosum virus
gggcuagcaagcacg

SEQ ID NO: 234253 - RNA, 22 nt, Molluscum contagiosum virus
gggcuagcaagcacgccaggug

SEQ ID NO: 234254 - RNA, 12 nt, Molluscum contagiosum virus
gggcguccguaa

SEQ ID NO: 234255 - RNA, 21 nt, Molluscum contagiosum virus
gggcguccguaagucgaagag

SEQ ID NO: 234256 - RNA, 15 nt, Molluscum contagiosum virus
gggcgucgcacaguu

SEQ ID NO: 234257 - RNA, 21 nt, Molluscum contagiosum virus
gggcagggaaagagcacgcgc

SEQ ID NO: 234258 - RNA, 14 nt, Molluscum contagiosum virus
gggcagugccaagg

SEQ ID NO: 234259 - RNA, 19 nt, Molluscum contagiosum virus
gggcaucccgccgcugcgc

SEQ ID NO: 234260 - RNA, 22 nt, Molluscum contagiosum virus
gggcgagucucccguggcgcgc

SEQ ID NO: 234261 - RNA, 13 nt, Molluscum contagiosum virus
gggccugugcugu

SEQ ID NO: 234262 - RNA, 21 nt, Molluscum contagiosum virus
gggccggacguccauccucuc

SEQ ID NO: 234263 - RNA, 23 nt, Molluscum contagiosum virus
gggauacagcgcggagagaacaa

SEQ ID NO: 234264 - RNA, 16 nt, Molluscum contagiosum virus
gggaugccagugcagu

SEQ ID NO: 234265 - RNA, 18 nt, Molluscum contagiosum virus
gggcacgcagcucuucca

SEQ ID NO: 234266 - RNA, 15 nt, Molluscum contagiosum virus
gggcacgcugcacau

SEQ ID NO: 234267 - RNA, 11 nt, Molluscum contagiosum virus
ggaacaucagc

SEQ ID NO: 234268 - RNA, 16 nt, Molluscum contagiosum virus
ggaacgcaaguacaac

SEQ ID NO: 234269 - RNA, 20 nt, Molluscum contagiosum virus
ggaacgcaaguacaacccaa

SEQ ID NO: 234270 - RNA, 23 nt, Molluscum contagiosum virus
ggaaauagcgcgcuagcuccacg

SEQ ID NO: 234271 - RNA, 18 nt, Molluscum contagiosum virus
ggaacaacuugggagcaa

SEQ ID NO: 234272 - RNA, 17 nt, Molluscum contagiosum virus
ggaaagcgcacacuugc

SEQ ID NO: 234273 - RNA, 22 nt, Molluscum contagiosum virus
ggaaaggcacccgcaacaagga

SEQ ID NO: 234274 - RNA, 20 nt, Molluscum contagiosum virus
ggaaaggcacccgcaggaaa

SEQ ID NO: 234275 - RNA, 15 nt, Molluscum contagiosum virus
ggaaagagcacgcgc

SEQ ID NO: 234276 - RNA, 21 nt, Molluscum contagiosum virus
ggaaagguaccccgcaggaaa

SEQ ID NO: 234277 - RNA, 20 nt, Molluscum contagiosum virus
ggaaagguacccgcaggaaa

SEQ ID NO: 234278 - RNA, 22 nt, Molluscum contagiosum virus
ggaaagaagggcucgccaugcu

SEQ ID NO: 234279 - RNA, 23 nt, Molluscum contagiosum virus
ggaaugaucgacucgagcauuug

SEQ ID NO: 234280 - RNA, 13 nt, Molluscum contagiosum virus
ggaauuaugugua

SEQ ID NO: 234281 - RNA, 20 nt, Molluscum contagiosum virus
ggaauuauguguaguuaaau

SEQ ID NO: 234282 - RNA, 15 nt, Molluscum contagiosum virus
ggaagcugcacgugc

SEQ ID NO: 234283 - RNA, 17 nt, Molluscum contagiosum virus
ggaaggcguuaaagagu

SEQ ID NO: 234284 - RNA, 22 nt, Molluscum contagiosum virus
ggaagacguggacgaggccaac

SEQ ID NO: 234285 - RNA, 13 nt, Molluscum contagiosum virus
ggaagaauuccuu

SEQ ID NO: 234286 - RNA, 11 nt, Molluscum contagiosum virus
gcuuuuugccg

SEQ ID NO: 234287 - RNA, 23 nt, Molluscum contagiosum virus
gcuuucagagugacgcugcaaga

SEQ ID NO: 234288 - RNA, 23 nt, Molluscum contagiosum virus
gcuuucucgcacuuaaaugggaa

SEQ ID NO: 234289 - RNA, 19 nt, Molluscum contagiosum virus
gcuuugccaaagcucucuu

SEQ ID NO: 234290 - RNA, 16 nt, Molluscum contagiosum virus
gcuuaauuuugcacau

SEQ ID NO: 234291 - RNA, 12 nt, Molluscum contagiosum virus
gcuuguucucuu

SEQ ID NO: 234292 - RNA, 15 nt, Molluscum contagiosum virus
gcuugucugccucaa

SEQ ID NO: 234293 - RNA, 16 nt, Molluscum contagiosum virus
gcuugggcacugcuac

SEQ ID NO: 234294 - RNA, 15 nt, Molluscum contagiosum virus
gcuugcucacgcugc

SEQ ID NO: 234295 - RNA, 20 nt, Molluscum contagiosum virus
gcuacuucacacgucuugca

SEQ ID NO: 234296 - RNA, 13 nt, Molluscum contagiosum virus
gcgcgcgccagcu

SEQ ID NO: 234297 - RNA, 14 nt, Molluscum contagiosum virus
gcgcgcgcgcucac

SEQ ID NO: 234298 - RNA, 11 nt, Molluscum contagiosum virus
gcuacuuuucg

SEQ ID NO: 234299 - RNA, 17 nt, Molluscum contagiosum virus
gcuagucguuggcgcgc

SEQ ID NO: 234300 - RNA, 19 nt, Molluscum contagiosum virus
gcuaggauccugcucaaga

SEQ ID NO: 234301 - RNA, 16 nt, Molluscum contagiosum virus
gcuagcugcgugcgua

SEQ ID NO: 234302 - RNA, 15 nt, Molluscum contagiosum virus
gcucguacugcugca

SEQ ID NO: 234303 - RNA, 20 nt, Molluscum contagiosum virus
gcucguggcgcgggagcuca

SEQ ID NO: 234304 - RNA, 16 nt, Molluscum contagiosum virus
gcgccgcgcgagugcc

SEQ ID NO: 234305 - RNA, 18 nt, Molluscum contagiosum virus
gcgccgcgcgagugccag

SEQ ID NO: 234306 - RNA, 23 nt, Molluscum contagiosum virus
gcgccgugcugcgucacaagcac

SEQ ID NO: 234307 - RNA, 22 nt, Molluscum contagiosum virus
gcgccuccgacuaccuaggcac

SEQ ID NO: 234308 - RNA, 22 nt, Molluscum contagiosum virus
gcgcgagacgcugcugcacagc

SEQ ID NO: 234309 - RNA, 13 nt, Molluscum contagiosum virus
gcgcgagagcuac

SEQ ID NO: 234310 - RNA, 18 nt, Molluscum contagiosum virus
gcgcgcccccgugcugug

SEQ ID NO: 234311 - RNA, 14 nt, Molluscum contagiosum virus
gcgcgcaacacugc

SEQ ID NO: 234312 - RNA, 22 nt, Molluscum contagiosum virus
gcgcgcaagaacaaccagacgu

SEQ ID NO: 234313 - RNA, 15 nt, Molluscum contagiosum virus
gcgcgcccaccagca

SEQ ID NO: 234314 - RNA, 13 nt, Molluscum contagiosum virus
gcgcgacuccauc

SEQ ID NO: 234315 - RNA, 14 nt, Molluscum contagiosum virus
gcgcgaaacaagcg

SEQ ID NO: 234316 - RNA, 16 nt, Molluscum contagiosum virus
gcgccagcacgcgcuc

SEQ ID NO: 234317 - RNA, 23 nt, Molluscum contagiosum virus
gcgcaugguugugcuuguucucu

SEQ ID NO: 234318 - RNA, 14 nt, Molluscum contagiosum virus
gcgccaucaauuca

SEQ ID NO: 234319 - RNA, 12 nt, Molluscum contagiosum virus
gcgcccaccagc

SEQ ID NO: 234320 - RNA, 23 nt, Molluscum contagiosum virus
gcgcccccgcuugcgaguuugca

SEQ ID NO: 234321 - RNA, 15 nt, Molluscum contagiosum virus
gcgccgcaaaaugaa

SEQ ID NO: 234322 - RNA, 12 nt, Molluscum contagiosum virus
gcgcccuugcac

SEQ ID NO: 234323 - RNA, 14 nt, Molluscum contagiosum virus
gcgcccuugcacuc

SEQ ID NO: 234324 - RNA, 14 nt, Molluscum contagiosum virus
gcucucgagcacuu

SEQ ID NO: 234325 - RNA, 15 nt, Molluscum contagiosum virus
gcucucggccaugga

SEQ ID NO: 234326 - RNA, 18 nt, Molluscum contagiosum virus
gcucucgggcaugcacuu

SEQ ID NO: 234327 - RNA, 13 nt, Molluscum contagiosum virus
gcucuacgugcug

SEQ ID NO: 234328 - RNA, 15 nt, Molluscum contagiosum virus
gcucucagagcauua

SEQ ID NO: 234329 - RNA, 20 nt, Molluscum contagiosum virus
gcucuuguuguucguacuca

SEQ ID NO: 234330 - RNA, 22 nt, Molluscum contagiosum virus
gcucuuuuuccugaacaagcug

SEQ ID NO: 234331 - RNA, 19 nt, Molluscum contagiosum virus
gcugccaauaccaggccac

SEQ ID NO: 234332 - RNA, 22 nt, Molluscum contagiosum virus
gcugucaacagugcgugccagg

SEQ ID NO: 234333 - RNA, 22 nt, Molluscum contagiosum virus
gcugugccaucucgcacacugc

SEQ ID NO: 234334 - RNA, 21 nt, Molluscum contagiosum virus
gcugugcgcuacguggcgcga

SEQ ID NO: 234335 - RNA, 16 nt, Molluscum contagiosum virus
gcugugcguacaccua

SEQ ID NO: 234336 - RNA, 13 nt, Molluscum contagiosum virus
gcugagcgcagca

SEQ ID NO: 234337 - RNA, 14 nt, Molluscum contagiosum virus
gcugagcgcagcac

SEQ ID NO: 234338 - RNA, 13 nt, Molluscum contagiosum virus
gcugagccacaaa

SEQ ID NO: 234339 - RNA, 18 nt, Molluscum contagiosum virus
gcugacucggacacugga

SEQ ID NO: 234340 - RNA, 22 nt, Molluscum contagiosum virus
gcugaguccgaucuugaugacc

SEQ ID NO: 234341 - RNA, 23 nt, Molluscum contagiosum virus
gcugcacuacaaccauggcgcgc

SEQ ID NO: 234342 - RNA, 18 nt, Molluscum contagiosum virus
gcugcagagcgugcuggu

SEQ ID NO: 234343 - RNA, 13 nt, Molluscum contagiosum virus
gcugcagcaccug

SEQ ID NO: 234344 - RNA, 23 nt, Molluscum contagiosum virus
gcugcagcguauggaucuucuca

SEQ ID NO: 234345 - RNA, 18 nt, Molluscum contagiosum virus
gcugcaaacauugccugg

SEQ ID NO: 234346 - RNA, 22 nt, Molluscum contagiosum virus
gcugcaagccagcccgcugcgc

SEQ ID NO: 234347 - RNA, 13 nt, Molluscum contagiosum virus
gcugcacaguuca

SEQ ID NO: 234348 - RNA, 19 nt, Molluscum contagiosum virus
gcugcacaguucacggcgc

SEQ ID NO: 234349 - RNA, 18 nt, Molluscum contagiosum virus
gcugcacaugugcgugca

SEQ ID NO: 234350 - RNA, 20 nt, Molluscum contagiosum virus
gcacugcgcgcaugccuugc

SEQ ID NO: 234351 - RNA, 23 nt, Molluscum contagiosum virus
gcacugcgcgcgcggcgcagugc

SEQ ID NO: 234352 - RNA, 21 nt, Molluscum contagiosum virus
gcacugggugcccgagcuacu

SEQ ID NO: 234353 - RNA, 22 nt, Molluscum contagiosum virus
gcacuugcgcgccugucaagac

SEQ ID NO: 234354 - RNA, 23 nt, Molluscum contagiosum virus
gcacuagcacgggcgggacagac

SEQ ID NO: 234355 - RNA, 18 nt, Molluscum contagiosum virus
gcacucgagaagaggguc

SEQ ID NO: 234356 - RNA, 22 nt, Molluscum contagiosum virus
gcacucgccgcggaacugacug

SEQ ID NO: 234357 - RNA, 18 nt, Molluscum contagiosum virus
gcacugcagcgagcucgc

SEQ ID NO: 234358 - RNA, 18 nt, Molluscum contagiosum virus
gcacggugugcuacugca

SEQ ID NO: 234359 - RNA, 23 nt, Molluscum contagiosum virus
gcacggcuuccggcaccacgugc

SEQ ID NO: 234360 - RNA, 20 nt, Molluscum contagiosum virus
gcacgggcgggacagacauc

SEQ ID NO: 234361 - RNA, 14 nt, Molluscum contagiosum virus
gcacgugcgugccc

SEQ ID NO: 234362 - RNA, 12 nt, Molluscum contagiosum virus
gcacgugcugca

SEQ ID NO: 234363 - RNA, 12 nt, Molluscum contagiosum virus
gcacgugcugcg

SEQ ID NO: 234364 - RNA, 15 nt, Molluscum contagiosum virus
gcacguuccaaaaga

SEQ ID NO: 234365 - RNA, 16 nt, Molluscum contagiosum virus
gcacguccucggucac

SEQ ID NO: 234366 - RNA, 16 nt, Molluscum contagiosum virus
gcacgccagguguucc

SEQ ID NO: 234367 - RNA, 21 nt, Molluscum contagiosum virus
gcacgccgcagcgcuggagcu

SEQ ID NO: 234368 - RNA, 17 nt, Molluscum contagiosum virus
gcacgccuccaagaaga

SEQ ID NO: 234369 - RNA, 16 nt, Molluscum contagiosum virus
gcacgcgcacuugccu

SEQ ID NO: 234370 - RNA, 14 nt, Molluscum contagiosum virus
gcacgcgcgcagac

SEQ ID NO: 234371 - RNA, 17 nt, Molluscum contagiosum virus
gcacgcgcgucaugugc

SEQ ID NO: 234372 - RNA, 19 nt, Molluscum contagiosum virus
gcacgcggaaacaagcaca

SEQ ID NO: 234373 - RNA, 14 nt, Molluscum contagiosum virus
gcacgcucuucgag

SEQ ID NO: 234374 - RNA, 19 nt, Molluscum contagiosum virus
gcacggcacccgccagcuu

SEQ ID NO: 234375 - RNA, 21 nt, Molluscum contagiosum virus
gcacgcaacgucgcacuggcc

SEQ ID NO: 234376 - RNA, 22 nt, Molluscum contagiosum virus
gcacgagcgcgggcgcccggug

SEQ ID NO: 234377 - RNA, 16 nt, Molluscum contagiosum virus
gcacgagcugcugcgc

SEQ ID NO: 234378 - RNA, 15 nt, Molluscum contagiosum virus
gcacuuucaacucuc

SEQ ID NO: 234379 - RNA, 13 nt, Molluscum contagiosum virus
gcagaccaagaag

SEQ ID NO: 234380 - RNA, 12 nt, Molluscum contagiosum virus
gcagacaaagac

SEQ ID NO: 234381 - RNA, 22 nt, Molluscum contagiosum virus
gcagacaaagacaguccgucuc

SEQ ID NO: 234382 - RNA, 13 nt, Molluscum contagiosum virus
gcagcaccugcag

SEQ ID NO: 234383 - RNA, 14 nt, Molluscum contagiosum virus
gcagcagaccaaga

SEQ ID NO: 234384 - RNA, 17 nt, Molluscum contagiosum virus
gcagaugaggcugcucu

SEQ ID NO: 234385 - RNA, 21 nt, Molluscum contagiosum virus
gcagcaaacugugcuccugag

SEQ ID NO: 234386 - RNA, 20 nt, Molluscum contagiosum virus
gcagagaccgucaaccugcu

SEQ ID NO: 234387 - RNA, 13 nt, Molluscum contagiosum virus
gcagagcacgaga

SEQ ID NO: 234388 - RNA, 16 nt, Molluscum contagiosum virus
gcagagcgagggcgac

SEQ ID NO: 234389 - RNA, 20 nt, Molluscum contagiosum virus
gcagagcgucgaacuucucc

SEQ ID NO: 234390 - RNA, 15 nt, Molluscum contagiosum virus
gcagagcgugcuggu

SEQ ID NO: 234391 - RNA, 19 nt, Molluscum contagiosum virus
gcagcgcgacuagccugug

SEQ ID NO: 234392 - RNA, 18 nt, Molluscum contagiosum virus
gcagcggcuacuuggacg

SEQ ID NO: 234393 - RNA, 17 nt, Molluscum contagiosum virus
gcagccuccgugcgcca

SEQ ID NO: 234394 - RNA, 22 nt, Molluscum contagiosum virus
gcagcugcgcgagccgcugcac

SEQ ID NO: 234395 - RNA, 15 nt, Molluscum contagiosum virus
gcagcucaagcugcu

SEQ ID NO: 234396 - RNA, 14 nt, Molluscum contagiosum virus
gcagcucugcagcg

SEQ ID NO: 234397 - RNA, 12 nt, Molluscum contagiosum virus
gcagcucuucca

SEQ ID NO: 234398 - RNA, 17 nt, Molluscum contagiosum virus
gcaggccccuacacgca

SEQ ID NO: 234399 - RNA, 17 nt, Molluscum contagiosum virus
gcaggaagcuggcgcgg

SEQ ID NO: 234400 - RNA, 14 nt, Molluscum contagiosum virus
gcagcuucugcucg

SEQ ID NO: 234401 - RNA, 12 nt, Molluscum contagiosum virus
gcaggacacugu

SEQ ID NO: 234402 - RNA, 14 nt, Molluscum contagiosum virus
gcaggacacuguaa

SEQ ID NO: 234403 - RNA, 16 nt, Molluscum contagiosum virus
gcaggacacuguaauc

SEQ ID NO: 234404 - RNA, 17 nt, Molluscum contagiosum virus
gcaggacuggcaccugc

SEQ ID NO: 234405 - RNA, 14 nt, Molluscum contagiosum virus
gcaggagaugcgcc

SEQ ID NO: 234406 - RNA, 14 nt, Molluscum contagiosum virus
gcaguacggcgcga

SEQ ID NO: 234407 - RNA, 22 nt, Molluscum contagiosum virus
gcaggugcgggcuagcacgcau

SEQ ID NO: 234408 - RNA, 19 nt, Molluscum contagiosum virus
gcagggcgugcuugccugg

SEQ ID NO: 234409 - RNA, 14 nt, Molluscum contagiosum virus
gcaggcgcgcgcga

SEQ ID NO: 234410 - RNA, 14 nt, Molluscum contagiosum virus
gcaggcuguguucc

SEQ ID NO: 234411 - RNA, 15 nt, Molluscum contagiosum virus
gcaggcuguguucca

SEQ ID NO: 234412 - RNA, 18 nt, Molluscum contagiosum virus
gcaggcggccgcguugca

SEQ ID NO: 234413 - RNA, 19 nt, Molluscum contagiosum virus
gcagucacgacuguguucc

SEQ ID NO: 234414 - RNA, 13 nt, Molluscum contagiosum virus
gcagugcaccagc

SEQ ID NO: 234415 - RNA, 14 nt, Molluscum contagiosum virus
gcagugcaccagca

SEQ ID NO: 234416 - RNA, 11 nt, Molluscum contagiosum virus
gcagugcucuu

SEQ ID NO: 234417 - RNA, 13 nt, Molluscum contagiosum virus
gcagugcucuuua

SEQ ID NO: 234418 - RNA, 21 nt, Molluscum contagiosum virus
gcagugcuugagcaucucgau

SEQ ID NO: 234419 - RNA, 15 nt, Molluscum contagiosum virus
gcaacuugugcgccc

SEQ ID NO: 234420 - RNA, 15 nt, Molluscum contagiosum virus
gcaagaggggagcca

SEQ ID NO: 234421 - RNA, 17 nt, Molluscum contagiosum virus
gcaagaggggagccagc

SEQ ID NO: 234422 - RNA, 18 nt, Molluscum contagiosum virus
gaucaagcacgcuacugc

SEQ ID NO: 234423 - RNA, 19 nt, Molluscum contagiosum virus
gaucaagcacgcuacugcg

SEQ ID NO: 234424 - RNA, 23 nt, Molluscum contagiosum virus
gaucaccacuggacacgugccuu

SEQ ID NO: 234425 - RNA, 19 nt, Molluscum contagiosum virus
gaucacgcucgcgacgugc

SEQ ID NO: 234426 - RNA, 22 nt, Molluscum contagiosum virus
gcaagggccugcgggcggcaca

SEQ ID NO: 234427 - RNA, 21 nt, Molluscum contagiosum virus
gcaagcuuugugcucgcuuag

SEQ ID NO: 234428 - RNA, 23 nt, Molluscum contagiosum virus
gcaagauucuucgcgaaggcaac

SEQ ID NO: 234429 - RNA, 17 nt, Molluscum contagiosum virus
gcaaguacaacccaaac

SEQ ID NO: 234430 - RNA, 20 nt, Molluscum contagiosum virus
gcaagugcacaccagacaaa

SEQ ID NO: 234431 - RNA, 14 nt, Molluscum contagiosum virus
gcaccgcaugggcc

SEQ ID NO: 234432 - RNA, 16 nt, Molluscum contagiosum virus
gcaccccgcaggaaag

SEQ ID NO: 234433 - RNA, 14 nt, Molluscum contagiosum virus
gcacccgcaacaag

SEQ ID NO: 234434 - RNA, 22 nt, Molluscum contagiosum virus
gcacccgcaacaaggaaaggca

SEQ ID NO: 234435 - RNA, 14 nt, Molluscum contagiosum virus
gcacccaccaggaa

SEQ ID NO: 234436 - RNA, 16 nt, Molluscum contagiosum virus
gcaccacgugcgcugg

SEQ ID NO: 234437 - RNA, 13 nt, Molluscum contagiosum virus
gcaccaccagugc

SEQ ID NO: 234438 - RNA, 23 nt, Molluscum contagiosum virus
gcacaugugcgugcaccucaaga

SEQ ID NO: 234439 - RNA, 20 nt, Molluscum contagiosum virus
gcaccggaagcaacgacaag

SEQ ID NO: 234440 - RNA, 13 nt, Molluscum contagiosum virus
gcaccggcgcgag

SEQ ID NO: 234441 - RNA, 16 nt, Molluscum contagiosum virus
gcaccucccugugaac

SEQ ID NO: 234442 - RNA, 22 nt, Molluscum contagiosum virus
gcaccugucgcgcgagcgcuac

SEQ ID NO: 234443 - RNA, 15 nt, Molluscum contagiosum virus
gcaccuggaguacuu

SEQ ID NO: 234444 - RNA, 14 nt, Molluscum contagiosum virus
gcaccugcuggaac

SEQ ID NO: 234445 - RNA, 21 nt, Molluscum contagiosum virus
gcacaagauggcgcagcacuu

SEQ ID NO: 234446 - RNA, 12 nt, Molluscum contagiosum virus
gcacaaaaccuu

SEQ ID NO: 234447 - RNA, 18 nt, Molluscum contagiosum virus
gcacaaaacacaaaaaga

SEQ ID NO: 234448 - RNA, 19 nt, Molluscum contagiosum virus
gcaauugcugggcacaagc

SEQ ID NO: 234449 - RNA, 20 nt, Molluscum contagiosum virus
gcaauuccguccagugaaau

SEQ ID NO: 234450 - RNA, 21 nt, Molluscum contagiosum virus
gcacacuugcgcguccacaaa

SEQ ID NO: 234451 - RNA, 23 nt, Molluscum contagiosum virus
gcacacuugcgcguucgcaaaga

SEQ ID NO: 234452 - RNA, 12 nt, Molluscum contagiosum virus
gcacaguucacg

SEQ ID NO: 234453 - RNA, 23 nt, Molluscum contagiosum virus
gcacaguucacggcgcucgccuc

SEQ ID NO: 234454 - RNA, 20 nt, Molluscum contagiosum virus
gcacauccgcuaccuggugg

SEQ ID NO: 234455 - RNA, 19 nt, Molluscum contagiosum virus
gcacaucggcacugcucac

SEQ ID NO: 234456 - RNA, 16 nt, Molluscum contagiosum virus
gcacacgcaaacaaaa

SEQ ID NO: 234457 - RNA, 18 nt, Molluscum contagiosum virus
gcacacgcgcgcgugcug

SEQ ID NO: 234458 - RNA, 11 nt, Molluscum contagiosum virus
gcacaccagac

SEQ ID NO: 234459 - RNA, 17 nt, Molluscum contagiosum virus
gcacaccagacaaaguc

SEQ ID NO: 234460 - RNA, 20 nt, Molluscum contagiosum virus
gcacacggacgagcccuucg

SEQ ID NO: 234461 - RNA, 15 nt, Molluscum contagiosum virus
gcacaccccgggaac

SEQ ID NO: 234462 - RNA, 22 nt, Molluscum contagiosum virus
gcacaccccuguaacaaggaaa

SEQ ID NO: 234463 - RNA, 10 nt, Molluscum contagiosum virus
gccagcagcg

SEQ ID NO: 234464 - RNA, 15 nt, Molluscum contagiosum virus
gccagcgagaucaac

SEQ ID NO: 234465 - RNA, 15 nt, Molluscum contagiosum virus
gccagcguacggccc

SEQ ID NO: 234466 - RNA, 22 nt, Molluscum contagiosum virus
gccagcuugagcacacgguaga

SEQ ID NO: 234467 - RNA, 16 nt, Molluscum contagiosum virus
gccaggcaacgcacaa

SEQ ID NO: 234468 - RNA, 17 nt, Molluscum contagiosum virus
gccaggcacacgcagug

SEQ ID NO: 234469 - RNA, 20 nt, Molluscum contagiosum virus
gccaggaacgaggaaaggca

SEQ ID NO: 234470 - RNA, 16 nt, Molluscum contagiosum virus
gccauggaggcgcuag

SEQ ID NO: 234471 - RNA, 24 nt, Molluscum contagiosum virus
gccauggaggcgcuagugcagaug

SEQ ID NO: 234472 - RNA, 18 nt, Molluscum contagiosum virus
gccaugcuccugaucugc

SEQ ID NO: 234473 - RNA, 16 nt, Molluscum contagiosum virus
gccaugguuuccgugu

SEQ ID NO: 234474 - RNA, 23 nt, Molluscum contagiosum virus
gccauuucguugauuugcgcacc

SEQ ID NO: 234475 - RNA, 17 nt, Molluscum contagiosum virus
gcccgucuacauuuugc

SEQ ID NO: 234476 - RNA, 22 nt, Molluscum contagiosum virus
gcccgugcaccucccugugaac

SEQ ID NO: 234477 - RNA, 18 nt, Molluscum contagiosum virus
gcccuccucgaccugcac

SEQ ID NO: 234478 - RNA, 17 nt, Molluscum contagiosum virus
gcccgggugcacgguga

SEQ ID NO: 234479 - RNA, 14 nt, Molluscum contagiosum virus
gcccggcaugggca

SEQ ID NO: 234480 - RNA, 16 nt, Molluscum contagiosum virus
gcccgcgggcugcaag

SEQ ID NO: 234481 - RNA, 20 nt, Molluscum contagiosum virus
gcccgccucgucguccacag

SEQ ID NO: 234482 - RNA, 15 nt, Molluscum contagiosum virus
gcccgccgagcucuu

SEQ ID NO: 234483 - RNA, 20 nt, Molluscum contagiosum virus
gcccaagggcguagagcaau

SEQ ID NO: 234484 - RNA, 18 nt, Molluscum contagiosum virus
gcccaaggagcugcgcga

SEQ ID NO: 234485 - RNA, 20 nt, Molluscum contagiosum virus
gcccacgagcgccagccugu

SEQ ID NO: 234486 - RNA, 13 nt, Molluscum contagiosum virus
gcccacgcucaac

SEQ ID NO: 234487 - RNA, 17 nt, Molluscum contagiosum virus
gcccaccagcagccagg

SEQ ID NO: 234488 - RNA, 16 nt, Molluscum contagiosum virus
gcccacggcggcaccc

SEQ ID NO: 234489 - RNA, 19 nt, Molluscum contagiosum virus
gcccagaacaugucgagac

SEQ ID NO: 234490 - RNA, 16 nt, Molluscum contagiosum virus
gcccgaccccaagaag

SEQ ID NO: 234491 - RNA, 15 nt, Molluscum contagiosum virus
gcccgaggugcgcau

SEQ ID NO: 234492 - RNA, 17 nt, Molluscum contagiosum virus
gcccgcaaugcaagccc

SEQ ID NO: 234493 - RNA, 20 nt, Molluscum contagiosum virus
gcccgcaaugcagugcacca

SEQ ID NO: 234494 - RNA, 18 nt, Molluscum contagiosum virus
gcaucagagaagugcucc

SEQ ID NO: 234495 - RNA, 14 nt, Molluscum contagiosum virus
gcaucagcaacaag

SEQ ID NO: 234496 - RNA, 15 nt, Molluscum contagiosum virus
gcaucagcacacguc

SEQ ID NO: 234497 - RNA, 22 nt, Molluscum contagiosum virus
gcauagucaucaaagcacaaca

SEQ ID NO: 234498 - RNA, 23 nt, Molluscum contagiosum virus
gcauacaccuaaauagcauguca

SEQ ID NO: 234499 - RNA, 14 nt, Molluscum contagiosum virus
gccagcaccaugcg

SEQ ID NO: 234500 - RNA, 17 nt, Molluscum contagiosum virus
gccagaagcccugagaa

SEQ ID NO: 234501 - RNA, 12 nt, Molluscum contagiosum virus
gccaaggucucg

SEQ ID NO: 234502 - RNA, 20 nt, Molluscum contagiosum virus
gccaaggucuucaggaacaa

SEQ ID NO: 234503 - RNA, 20 nt, Molluscum contagiosum virus
gccaacacuaccacagccau

SEQ ID NO: 234504 - RNA, 16 nt, Molluscum contagiosum virus
gccaacaaccacucuu

SEQ ID NO: 234505 - RNA, 21 nt, Molluscum contagiosum virus
gccaacuaccuggggcugcuu

SEQ ID NO: 234506 - RNA, 14 nt, Molluscum contagiosum virus
gccaagaacaagcu

SEQ ID NO: 234507 - RNA, 14 nt, Molluscum contagiosum virus
gccgucaacauuuc

SEQ ID NO: 234508 - RNA, 18 nt, Molluscum contagiosum virus
gccguagacgauuuugcc

SEQ ID NO: 234509 - RNA, 14 nt, Molluscum contagiosum virus
gccguagugcucau

SEQ ID NO: 234510 - RNA, 19 nt, Molluscum contagiosum virus
gccggggccggacguccau

SEQ ID NO: 234511 - RNA, 18 nt, Molluscum contagiosum virus
gccgguugcgcgugugca

SEQ ID NO: 234512 - RNA, 22 nt, Molluscum contagiosum virus
gccucgugcucggcgugaucuu

SEQ ID NO: 234513 - RNA, 17 nt, Molluscum contagiosum virus
gccucguggaacaaaga

SEQ ID NO: 234514 - RNA, 14 nt, Molluscum contagiosum virus
gccucgccaaagag

SEQ ID NO: 234515 - RNA, 15 nt, Molluscum contagiosum virus
gccucgagcacgccu

SEQ ID NO: 234516 - RNA, 21 nt, Molluscum contagiosum virus
gccucgagcacgccuccaaga

SEQ ID NO: 234517 - RNA, 22 nt, Molluscum contagiosum virus
gccucgagcacgccuccaagaa

SEQ ID NO: 234518 - RNA, 23 nt, Molluscum contagiosum virus
gccugagcuucuuuggcauugac

SEQ ID NO: 234519 - RNA, 22 nt, Molluscum contagiosum virus
gccugcaaacgcgaaacuggac

SEQ ID NO: 234520 - RNA, 22 nt, Molluscum contagiosum virus
gccugagaagcuguaccuggug

SEQ ID NO: 234521 - RNA, 20 nt, Molluscum contagiosum virus
gccugcccaucuugugauga

SEQ ID NO: 234522 - RNA, 19 nt, Molluscum contagiosum virus
gccugccgcgagcacuggc

SEQ ID NO: 234523 - RNA, 19 nt, Molluscum contagiosum virus
gccugcgcgagcaagcgcc

SEQ ID NO: 234524 - RNA, 14 nt, Molluscum contagiosum virus
gccugcacaagcag

SEQ ID NO: 234525 - RNA, 16 nt, Molluscum contagiosum virus
gccugcacaagcagga

SEQ ID NO: 234526 - RNA, 13 nt, Molluscum contagiosum virus
gccugcacuacug

SEQ ID NO: 234527 - RNA, 13 nt, Molluscum contagiosum virus
gcccuuauacaaa

SEQ ID NO: 234528 - RNA, 21 nt, Molluscum contagiosum virus
gcccuguccacaaaaccaaaa

SEQ ID NO: 234529 - RNA, 23 nt, Molluscum contagiosum virus
gcccuguccacaaaaccaaaacc

SEQ ID NO: 234530 - RNA, 13 nt, Molluscum contagiosum virus
gcccucucgaggc

SEQ ID NO: 234531 - RNA, 12 nt, Molluscum contagiosum virus
gccgcucgcugu

SEQ ID NO: 234532 - RNA, 19 nt, Molluscum contagiosum virus
gccgcugacuagaugcaua

SEQ ID NO: 234533 - RNA, 12 nt, Molluscum contagiosum virus
gccgcugcgcga

SEQ ID NO: 234534 - RNA, 21 nt, Molluscum contagiosum virus
gccgcugcgcuggaugcugcu

SEQ ID NO: 234535 - RNA, 15 nt, Molluscum contagiosum virus
gccgcugcugcugca

SEQ ID NO: 234536 - RNA, 20 nt, Molluscum contagiosum virus
gccgcgccgcacgugcugcg

SEQ ID NO: 234537 - RNA, 15 nt, Molluscum contagiosum virus
gccgcgcgaacaaaa

SEQ ID NO: 234538 - RNA, 15 nt, Molluscum contagiosum virus
gccgcgcuggcgcgc

SEQ ID NO: 234539 - RNA, 13 nt, Molluscum contagiosum virus
gccgcggcagugg

SEQ ID NO: 234540 - RNA, 13 nt, Molluscum contagiosum virus
gcccuuccuggag

SEQ ID NO: 234541 - RNA, 19 nt, Molluscum contagiosum virus
gccggaaacggaccuggag

SEQ ID NO: 234542 - RNA, 17 nt, Molluscum contagiosum virus
gccggaaguagaucucg

SEQ ID NO: 234543 - RNA, 18 nt, Molluscum contagiosum virus
gccgcuggcgcuaccuac

SEQ ID NO: 234544 - RNA, 20 nt, Molluscum contagiosum virus
gccgcuuccuggcacuggcg

SEQ ID NO: 234545 - RNA, 13 nt, Molluscum contagiosum virus
gccgcuucuugac

SEQ ID NO: 234546 - RNA, 23 nt, Molluscum contagiosum virus
gccgcuugaaggacgcguucucc

SEQ ID NO: 234547 - RNA, 22 nt, Molluscum contagiosum virus
gccggcaucuucggcguguuca

SEQ ID NO: 234548 - RNA, 17 nt, Molluscum contagiosum virus
gccggcacgagcagucc

SEQ ID NO: 234549 - RNA, 19 nt, Molluscum contagiosum virus
gccggaguuuguagcucua

SEQ ID NO: 234550 - RNA, 14 nt, Molluscum contagiosum virus
gccggcaacuggcu

SEQ ID NO: 234551 - RNA, 16 nt, Molluscum contagiosum virus
gccggcaccacggugg

SEQ ID NO: 234552 - RNA, 15 nt, Molluscum contagiosum virus
gccgggaaugcugcg

SEQ ID NO: 234553 - RNA, 18 nt, Molluscum contagiosum virus
gccggcggcgcaagcacc

SEQ ID NO: 234554 - RNA, 17 nt, Molluscum contagiosum virus
gcgacaggggccacaag

SEQ ID NO: 234555 - RNA, 21 nt, Molluscum contagiosum virus
gcgacaggggccacaagcacg

SEQ ID NO: 234556 - RNA, 16 nt, Molluscum contagiosum virus
gcgaccggcgugccuu

SEQ ID NO: 234557 - RNA, 17 nt, Molluscum contagiosum virus
gcgacgagcagcugcuu

SEQ ID NO: 234558 - RNA, 22 nt, Molluscum contagiosum virus
gcgacuccuuugcgagcacugu

SEQ ID NO: 234559 - RNA, 18 nt, Molluscum contagiosum virus
gcgaacgagggacacgca

SEQ ID NO: 234560 - RNA, 18 nt, Molluscum contagiosum virus
gcgaacucgcggcagugc

SEQ ID NO: 234561 - RNA, 19 nt, Molluscum contagiosum virus
gcgaaacuggacugagccg

SEQ ID NO: 234562 - RNA, 21 nt, Molluscum contagiosum virus
gccugcugaagaaggagcccu

SEQ ID NO: 234563 - RNA, 19 nt, Molluscum contagiosum virus
gcgagagacagcacggcac

SEQ ID NO: 234564 - RNA, 15 nt, Molluscum contagiosum virus
gcgagaacuggcgca

SEQ ID NO: 234565 - RNA, 17 nt, Molluscum contagiosum virus
gcgagccacucgcauug

SEQ ID NO: 234566 - RNA, 18 nt, Molluscum contagiosum virus
gcgagcaaagacgugugu

SEQ ID NO: 234567 - RNA, 20 nt, Molluscum contagiosum virus
gcgagucucccguggcgcgc

SEQ ID NO: 234568 - RNA, 13 nt, Molluscum contagiosum virus
gcgaguggcgcgc

SEQ ID NO: 234569 - RNA, 13 nt, Molluscum contagiosum virus
gcgaucgcggcca

SEQ ID NO: 234570 - RNA, 23 nt, Molluscum contagiosum virus
gcgcagggagcugcggacgcggg

SEQ ID NO: 234571 - RNA, 17 nt, Molluscum contagiosum virus
gcgcaguucgagcugcu

SEQ ID NO: 234572 - RNA, 23 nt, Molluscum contagiosum virus
gcgcagcgcccgcguacacgugc

SEQ ID NO: 234573 - RNA, 17 nt, Molluscum contagiosum virus
gcgcauccucuccauca

SEQ ID NO: 234574 - RNA, 19 nt, Molluscum contagiosum virus
gcgcacuacucgucuugcg

SEQ ID NO: 234575 - RNA, 21 nt, Molluscum contagiosum virus
gcgcacugcucgcgcacgcgc

SEQ ID NO: 234576 - RNA, 13 nt, Molluscum contagiosum virus
gcgcagacguggu

SEQ ID NO: 234577 - RNA, 23 nt, Molluscum contagiosum virus
gcgcacggacuuuucgcgcgugc

SEQ ID NO: 234578 - RNA, 17 nt, Molluscum contagiosum virus
gcgcaaccgcgugcgug

SEQ ID NO: 234579 - RNA, 21 nt, Molluscum contagiosum virus
gcgcaaccgcgugcgugcaca

SEQ ID NO: 234580 - RNA, 15 nt, Molluscum contagiosum virus
gcgcaagaacaacca

SEQ ID NO: 234581 - RNA, 13 nt, Molluscum contagiosum virus
gcgcacacgcuga

SEQ ID NO: 234582 - RNA, 16 nt, Molluscum contagiosum virus
gcgcacacggacgagc

SEQ ID NO: 234583 - RNA, 12 nt, Molluscum contagiosum virus
gcgcacaugccg

SEQ ID NO: 234584 - RNA, 15 nt, Molluscum contagiosum virus
gcgcaccaucuucaa

SEQ ID NO: 234585 - RNA, 19 nt, Molluscum contagiosum virus
gcgcaccguugacgagcug

SEQ ID NO: 234586 - RNA, 12 nt, Molluscum contagiosum virus
gcgcacgagcug

SEQ ID NO: 234587 - RNA, 10 nt, Molluscum contagiosum virus
gaggacaaaa

SEQ ID NO: 234588 - RNA, 20 nt, Molluscum contagiosum virus
gaggaaagcgcacacuugcg

SEQ ID NO: 234589 - RNA, 22 nt, Molluscum contagiosum virus
gagcuuggccggaacgccgugc

SEQ ID NO: 234590 - RNA, 17 nt, Molluscum contagiosum virus
gagcuuuccuugcgcuu

SEQ ID NO: 234591 - RNA, 19 nt, Molluscum contagiosum virus
gagcugacucggacacugg

SEQ ID NO: 234592 - RNA, 20 nt, Molluscum contagiosum virus
gagcugaaccuggucuucgg

SEQ ID NO: 234593 - RNA, 18 nt, Molluscum contagiosum virus
gagcucuucucgcagcgg

SEQ ID NO: 234594 - RNA, 15 nt, Molluscum contagiosum virus
gagcuggugauccug

SEQ ID NO: 234595 - RNA, 19 nt, Molluscum contagiosum virus
gagcugugccaucucgcac

SEQ ID NO: 234596 - RNA, 19 nt, Molluscum contagiosum virus
gagcugcuaacaacaugag

SEQ ID NO: 234597 - RNA, 22 nt, Molluscum contagiosum virus
gagcuggagcgagugcgcgugc

SEQ ID NO: 234598 - RNA, 23 nt, Molluscum contagiosum virus
gagcuggccacucucgcgcguga

SEQ ID NO: 234599 - RNA, 17 nt, Molluscum contagiosum virus
gaguacuacuacacugu

SEQ ID NO: 234600 - RNA, 20 nt, Molluscum contagiosum virus
gaguacgccaucguggugga

SEQ ID NO: 234601 - RNA, 14 nt, Molluscum contagiosum virus
gagugacgcugcaa

SEQ ID NO: 234602 - RNA, 14 nt, Molluscum contagiosum virus
gagugaaucuugcc

SEQ ID NO: 234603 - RNA, 20 nt, Molluscum contagiosum virus
gagucgcgccuggagcgcaa

SEQ ID NO: 234604 - RNA, 15 nt, Molluscum contagiosum virus
gaguccgaucuugau

SEQ ID NO: 234605 - RNA, 18 nt, Molluscum contagiosum virus
gagugcugagccacaaac

SEQ ID NO: 234606 - RNA, 22 nt, Molluscum contagiosum virus
gauaacaggcgugcgcucggag

SEQ ID NO: 234607 - RNA, 21 nt, Molluscum contagiosum virus
gagaugcgguccgacucggug

SEQ ID NO: 234608 - RNA, 21 nt, Molluscum contagiosum virus
gagaugcucaagcacugccuc

SEQ ID NO: 234609 - RNA, 18 nt, Molluscum contagiosum virus
gagaccgacgaaggcaag

SEQ ID NO: 234610 - RNA, 19 nt, Molluscum contagiosum virus
gagauacaaccgcugcuau

SEQ ID NO: 234611 - RNA, 15 nt, Molluscum contagiosum virus
gagacauaguaccau

SEQ ID NO: 234612 - RNA, 14 nt, Molluscum contagiosum virus
gagacauauguucu

SEQ ID NO: 234613 - RNA, 17 nt, Molluscum contagiosum virus
gagacacgcacacucgc

SEQ ID NO: 234614 - RNA, 16 nt, Molluscum contagiosum virus
gagacagggugccuac

SEQ ID NO: 234615 - RNA, 24 nt, Molluscum contagiosum virus
gagcaucuucuuguuguugugaca

SEQ ID NO: 234616 - RNA, 21 nt, Molluscum contagiosum virus
gagcauguccgacuccaagga

SEQ ID NO: 234617 - RNA, 17 nt, Molluscum contagiosum virus
gagccacaaacacucgc

SEQ ID NO: 234618 - RNA, 20 nt, Molluscum contagiosum virus
gagccagucucgcgcuucca

SEQ ID NO: 234619 - RNA, 21 nt, Molluscum contagiosum virus
gagccccuaucgauucugucc

SEQ ID NO: 234620 - RNA, 13 nt, Molluscum contagiosum virus
gagccauguuucc

SEQ ID NO: 234621 - RNA, 17 nt, Molluscum contagiosum virus
gagccauucuuaaucca

SEQ ID NO: 234622 - RNA, 17 nt, Molluscum contagiosum virus
gagcccaauccacuggu

SEQ ID NO: 234623 - RNA, 18 nt, Molluscum contagiosum virus
gagcagacguacgagcag

SEQ ID NO: 234624 - RNA, 21 nt, Molluscum contagiosum virus
gagcagcugcugcgcacgugc

SEQ ID NO: 234625 - RNA, 12 nt, Molluscum contagiosum virus
gagcaggacgac

SEQ ID NO: 234626 - RNA, 20 nt, Molluscum contagiosum virus
gagcaggacgugcacguggu

SEQ ID NO: 234627 - RNA, 14 nt, Molluscum contagiosum virus
gagcaggagaacua

SEQ ID NO: 234628 - RNA, 13 nt, Molluscum contagiosum virus
gagcagugccgcu

SEQ ID NO: 234629 - RNA, 17 nt, Molluscum contagiosum virus
gagcaccugucgcgcga

SEQ ID NO: 234630 - RNA, 16 nt, Molluscum contagiosum virus
gagcacgccuccaaga

SEQ ID NO: 234631 - RNA, 17 nt, Molluscum contagiosum virus
gagcacgccuccaagaa

SEQ ID NO: 234632 - RNA, 19 nt, Molluscum contagiosum virus
gagcacgccuccaagaaga

SEQ ID NO: 234633 - RNA, 15 nt, Molluscum contagiosum virus
gagcacguggacagc

SEQ ID NO: 234634 - RNA, 17 nt, Molluscum contagiosum virus
gagcacguggacagcau

SEQ ID NO: 234635 - RNA, 16 nt, Molluscum contagiosum virus
gagcacauacacgcgc

SEQ ID NO: 234636 - RNA, 22 nt, Molluscum contagiosum virus
gagcaagcgcguucgcgcgugc

SEQ ID NO: 234637 - RNA, 16 nt, Molluscum contagiosum virus
gagcaaggccuggccu

SEQ ID NO: 234638 - RNA, 15 nt, Molluscum contagiosum virus
gacggucacgcaagc

SEQ ID NO: 234639 - RNA, 12 nt, Molluscum contagiosum virus
gacggugcaacc

SEQ ID NO: 234640 - RNA, 13 nt, Molluscum contagiosum virus
gacggcacgcuga

SEQ ID NO: 234641 - RNA, 23 nt, Molluscum contagiosum virus
gacggcgccucgagcgcgcugga

SEQ ID NO: 234642 - RNA, 22 nt, Molluscum contagiosum virus
aacaaaugcagagugaucucca

SEQ ID NO: 234643 - RNA, 13 nt, Molluscum contagiosum virus
aacaaagaggcaa

SEQ ID NO: 234644 - RNA, 21 nt, Molluscum contagiosum virus
gagaaccgccgucaacauuuc

SEQ ID NO: 234645 - RNA, 22 nt, Molluscum contagiosum virus
gagaaccgccgucaacauuuca

SEQ ID NO: 234646 - RNA, 12 nt, Molluscum contagiosum virus
gacgugcugcgc

SEQ ID NO: 234647 - RNA, 17 nt, Molluscum contagiosum virus
gacgugcugcugcagaa

SEQ ID NO: 234648 - RNA, 17 nt, Molluscum contagiosum virus
gacguauacuccaaaaa

SEQ ID NO: 234649 - RNA, 17 nt, Molluscum contagiosum virus
gacgugcagacgcucaa

SEQ ID NO: 234650 - RNA, 21 nt, Molluscum contagiosum virus
gacgucacgcuggucacgcgc

SEQ ID NO: 234651 - RNA, 15 nt, Molluscum contagiosum virus
gagaauggacauugg

SEQ ID NO: 234652 - RNA, 18 nt, Molluscum contagiosum virus
gagaaugggagggggaca

SEQ ID NO: 234653 - RNA, 20 nt, Molluscum contagiosum virus
gagaauaccgucgaggaaua

SEQ ID NO: 234654 - RNA, 17 nt, Molluscum contagiosum virus
gagaagagggucgugca

SEQ ID NO: 234655 - RNA, 14 nt, Molluscum contagiosum virus
gagaagaacagcac

SEQ ID NO: 234656 - RNA, 18 nt, Molluscum contagiosum virus
gagaacgaguacuacuuc

SEQ ID NO: 234657 - RNA, 21 nt, Molluscum contagiosum virus
gagaacggacaaaauggcugc

SEQ ID NO: 234658 - RNA, 13 nt, Molluscum contagiosum virus
gagaacucgugcc

SEQ ID NO: 234659 - RNA, 21 nt, Molluscum contagiosum virus
gagaacucgugccugucucgc

SEQ ID NO: 234660 - RNA, 14 nt, Molluscum contagiosum virus
gacgcgggccuguc

SEQ ID NO: 234661 - RNA, 17 nt, Molluscum contagiosum virus
gacgcgcggcggcgcga

SEQ ID NO: 234662 - RNA, 18 nt, Molluscum contagiosum virus
gacgcgcguucuuugugc

SEQ ID NO: 234663 - RNA, 16 nt, Molluscum contagiosum virus
gacgcuccauucucuc

SEQ ID NO: 234664 - RNA, 16 nt, Molluscum contagiosum virus
gacggagacagugaca

SEQ ID NO: 234665 - RNA, 19 nt, Molluscum contagiosum virus
gacggagacagugacagac

SEQ ID NO: 234666 - RNA, 19 nt, Molluscum contagiosum virus
gacggagauggacacagca

SEQ ID NO: 234667 - RNA, 21 nt, Molluscum contagiosum virus
gacggaggucuacaacgagcu

SEQ ID NO: 234668 - RNA, 23 nt, Molluscum contagiosum virus
gacggaguccucgacaaugagca

SEQ ID NO: 234669 - RNA, 15 nt, Molluscum contagiosum virus
gacgcugcuggcgca

SEQ ID NO: 234670 - RNA, 14 nt, Molluscum contagiosum virus
aacaaaaacugaaa

SEQ ID NO: 234671 - RNA, 23 nt, Molluscum contagiosum virus
gacgccccggcgcgaaacaagcg

SEQ ID NO: 234672 - RNA, 19 nt, Molluscum contagiosum virus
gacgccgucgucaacaaca

SEQ ID NO: 234673 - RNA, 21 nt, Molluscum contagiosum virus
gacgauuacaucgaaaccauc

SEQ ID NO: 234674 - RNA, 13 nt, Molluscum contagiosum virus
gacgacgagcacu

SEQ ID NO: 234675 - RNA, 22 nt, Molluscum contagiosum virus
gacgagggaugcgcacacuugc

SEQ ID NO: 234676 - RNA, 16 nt, Molluscum contagiosum virus
gacgagcgcuaccuga

SEQ ID NO: 234677 - RNA, 18 nt, Molluscum contagiosum virus
gacgagcgcuaccugaug

SEQ ID NO: 234678 - RNA, 19 nt, Molluscum contagiosum virus
aaauuaaccaacaguaucc

SEQ ID NO: 234679 - RNA, 22 nt, Molluscum contagiosum virus
aaaucuguucgagcaacagggg

SEQ ID NO: 234680 - RNA, 16 nt, Molluscum contagiosum virus
gaccuggucacacugg

SEQ ID NO: 234681 - RNA, 17 nt, Molluscum contagiosum virus
gaccuggucacacuggu

SEQ ID NO: 234682 - RNA, 15 nt, Molluscum contagiosum virus
gacagugacagacua

SEQ ID NO: 234683 - RNA, 17 nt, Molluscum contagiosum virus
gacaucuggaggcaauc

SEQ ID NO: 234684 - RNA, 21 nt, Molluscum contagiosum virus
gacaucuggaggcaaucuguc

SEQ ID NO: 234685 - RNA, 16 nt, Molluscum contagiosum virus
gacaucuacagccgcc

SEQ ID NO: 234686 - RNA, 18 nt, Molluscum contagiosum virus
gacaugcccuucuacgag

SEQ ID NO: 234687 - RNA, 15 nt, Molluscum contagiosum virus
gacaugcgcacgcgc

SEQ ID NO: 234688 - RNA, 18 nt, Molluscum contagiosum virus
gacaugcucgcgcucuac

SEQ ID NO: 234689 - RNA, 13 nt, Molluscum contagiosum virus
gaauugugcugcu

SEQ ID NO: 234690 - RNA, 13 nt, Molluscum contagiosum virus
gacaaaauggcug

SEQ ID NO: 234691 - RNA, 19 nt, Molluscum contagiosum virus
gacaacacucggcaugugc

SEQ ID NO: 234692 - RNA, 20 nt, Molluscum contagiosum virus
gacaacaccagcgugcccuu

SEQ ID NO: 234693 - RNA, 16 nt, Molluscum contagiosum virus
gacaacaaacauugug

SEQ ID NO: 234694 - RNA, 17 nt, Molluscum contagiosum virus
gacaacaaacauuguga

SEQ ID NO: 234695 - RNA, 18 nt, Molluscum contagiosum virus
gacaacgugcugcucaag

SEQ ID NO: 234696 - RNA, 16 nt, Molluscum contagiosum virus
aaauaaugaaccugca

SEQ ID NO: 234697 - RNA, 14 nt, Molluscum contagiosum virus
gaccaccagcacca

SEQ ID NO: 234698 - RNA, 16 nt, Molluscum contagiosum virus
gaccaaaugcgcgugc

SEQ ID NO: 234699 - RNA, 18 nt, Molluscum contagiosum virus
gaccacaagcaguaccug

SEQ ID NO: 234700 - RNA, 15 nt, Molluscum contagiosum virus
gaaaacgcacugucg

SEQ ID NO: 234701 - RNA, 15 nt, Molluscum contagiosum virus
gaaaaaucccccgcc

SEQ ID NO: 234702 - RNA, 13 nt, Molluscum contagiosum virus
gaaaaaguucuug

SEQ ID NO: 234703 - RNA, 10 nt, Molluscum contagiosum virus
gaaacaagca

SEQ ID NO: 234704 - RNA, 10 nt, Molluscum contagiosum virus
gaaacaagcg

SEQ ID NO: 234705 - RNA, 22 nt, Molluscum contagiosum virus
gaaacacguggccaaggucucg

SEQ ID NO: 234706 - RNA, 21 nt, Molluscum contagiosum virus
gaaagaggaaagcgcacacuu

SEQ ID NO: 234707 - RNA, 16 nt, Molluscum contagiosum virus
gaaagauauacaccag

SEQ ID NO: 234708 - RNA, 19 nt, Molluscum contagiosum virus
gaaagcagcaaacugugcu

SEQ ID NO: 234709 - RNA, 14 nt, Molluscum contagiosum virus
gaaacuggacugag

SEQ ID NO: 234710 - RNA, 18 nt, Molluscum contagiosum virus
gaaacgcgcccgagcuaa

SEQ ID NO: 234711 - RNA, 21 nt, Molluscum contagiosum virus
gaaacgcuggcgagcaagaug

SEQ ID NO: 234712 - RNA, 19 nt, Molluscum contagiosum virus
gaaacgaacgcugcagcua

SEQ ID NO: 234713 - RNA, 18 nt, Molluscum contagiosum virus
cuuugccaaagcucucuu

SEQ ID NO: 234714 - RNA, 22 nt, Molluscum contagiosum virus
cuuugcccccgagguggccaag

SEQ ID NO: 234715 - RNA, 13 nt, Molluscum contagiosum virus
cuuuguuccugcg

SEQ ID NO: 234716 - RNA, 23 nt, Molluscum contagiosum virus
cuuuguucuuagcagcgccgcca

SEQ ID NO: 234717 - RNA, 22 nt, Molluscum contagiosum virus
cuuuguggacgcgcaagugugc

SEQ ID NO: 234718 - RNA, 20 nt, Molluscum contagiosum virus
cuuuucgcgccgcgggcaca

SEQ ID NO: 234719 - RNA, 15 nt, Molluscum contagiosum virus
cuuuuccgacccgug

SEQ ID NO: 234720 - RNA, 17 nt, Molluscum contagiosum virus
cuuacacacgcaccagu

SEQ ID NO: 234721 - RNA, 23 nt, Molluscum contagiosum virus
cuuucucacgcccgcgcugcgca

SEQ ID NO: 234722 - RNA, 13 nt, Molluscum contagiosum virus
cuuacgcuacagc

SEQ ID NO: 234723 - RNA, 21 nt, Molluscum contagiosum virus
cuuucacacacggaagcucac

SEQ ID NO: 234724 - RNA, 19 nt, Molluscum contagiosum virus
cuuucacgcugcacgagcu

SEQ ID NO: 234725 - RNA, 15 nt, Molluscum contagiosum virus
cuuuccaucggaacu

SEQ ID NO: 234726 - RNA, 15 nt, Molluscum contagiosum virus
aaagagcguccagcc

SEQ ID NO: 234727 - RNA, 14 nt, Molluscum contagiosum virus
aaagaugaagcucu

SEQ ID NO: 234728 - RNA, 13 nt, Molluscum contagiosum virus
aaagcacaacaag

SEQ ID NO: 234729 - RNA, 14 nt, Molluscum contagiosum virus
aaagcacaacaaga

SEQ ID NO: 234730 - RNA, 15 nt, Molluscum contagiosum virus
gaauggacauugggu

SEQ ID NO: 234731 - RNA, 18 nt, Molluscum contagiosum virus
gaaugacuuagccacugu

SEQ ID NO: 234732 - RNA, 20 nt, Molluscum contagiosum virus
gaauccuuuacugcaagauc

SEQ ID NO: 234733 - RNA, 15 nt, Molluscum contagiosum virus
gaaguagaucacggc

SEQ ID NO: 234734 - RNA, 20 nt, Molluscum contagiosum virus
gaauguccggcgcuggagaa

SEQ ID NO: 234735 - RNA, 21 nt, Molluscum contagiosum virus
gaauuccgugucguuccacga

SEQ ID NO: 234736 - RNA, 17 nt, Molluscum contagiosum virus
gaaagucgcuaccaaga

SEQ ID NO: 234737 - RNA, 23 nt, Molluscum contagiosum virus
gaaaguccacgugguccaccagc

SEQ ID NO: 234738 - RNA, 14 nt, Molluscum contagiosum virus
gaaaggcacacccc

SEQ ID NO: 234739 - RNA, 20 nt, Molluscum contagiosum virus
gaaaggcacccaccaggaac

SEQ ID NO: 234740 - RNA, 21 nt, Molluscum contagiosum virus
gaaaggcaccccgaaaggcac

SEQ ID NO: 234741 - RNA, 14 nt, Molluscum contagiosum virus
gaaaggcaccccgc

SEQ ID NO: 234742 - RNA, 14 nt, Molluscum contagiosum virus
gaaagggcugcuug

SEQ ID NO: 234743 - RNA, 14 nt, Molluscum contagiosum virus
gaaagguaccccgc

SEQ ID NO: 234744 - RNA, 21 nt, Molluscum contagiosum virus
gaaagguaccccgcaggaaag

SEQ ID NO: 234745 - RNA, 15 nt, Molluscum contagiosum virus
gaaaucccaagagcc

SEQ ID NO: 234746 - RNA, 17 nt, Molluscum contagiosum virus
gaaaucccaagagccau

SEQ ID NO: 234747 - RNA, 20 nt, Molluscum contagiosum virus
gaaaucccaagagccauguu

SEQ ID NO: 234748 - RNA, 23 nt, Molluscum contagiosum virus
gaacugcugggcguggcgcaccu

SEQ ID NO: 234749 - RNA, 19 nt, Molluscum contagiosum virus
gaacucuacacguggaauu

SEQ ID NO: 234750 - RNA, 16 nt, Molluscum contagiosum virus
gaacucgcugcugcuc

SEQ ID NO: 234751 - RNA, 13 nt, Molluscum contagiosum virus
gaagaccuuggac

SEQ ID NO: 234752 - RNA, 15 nt, Molluscum contagiosum virus
gaagacgcauaguca

SEQ ID NO: 234753 - RNA, 12 nt, Molluscum contagiosum virus
gaagaacagcac

SEQ ID NO: 234754 - RNA, 20 nt, Molluscum contagiosum virus
gaagaacgucuucuaccgcc

SEQ ID NO: 234755 - RNA, 20 nt, Molluscum contagiosum virus
gaagcuuccuuuuucacuuu

SEQ ID NO: 234756 - RNA, 13 nt, Molluscum contagiosum virus
gaagcugugcaag

SEQ ID NO: 234757 - RNA, 21 nt, Molluscum contagiosum virus
gaaggaucccugcccgcguga

SEQ ID NO: 234758 - RNA, 21 nt, Molluscum contagiosum virus
gaaggagagagagacaugcac

SEQ ID NO: 234759 - RNA, 16 nt, Molluscum contagiosum virus
gaaggagcccaagcac

SEQ ID NO: 234760 - RNA, 19 nt, Molluscum contagiosum virus
gaagaggccggcacaagcc

SEQ ID NO: 234761 - RNA, 12 nt, Molluscum contagiosum virus
gaagaggucucu

SEQ ID NO: 234762 - RNA, 16 nt, Molluscum contagiosum virus
gaagcucacaucuguc

SEQ ID NO: 234763 - RNA, 22 nt, Molluscum contagiosum virus
ggccaagcgcuccaacuuccac

SEQ ID NO: 234764 - RNA, 19 nt, Molluscum contagiosum virus
ggcgccgugcugcgucaca

SEQ ID NO: 234765 - RNA, 13 nt, Molluscum contagiosum virus
ggcgcccgugccg

SEQ ID NO: 234766 - RNA, 14 nt, Molluscum contagiosum virus
ggcgccgaugcagu

SEQ ID NO: 234767 - RNA, 22 nt, Molluscum contagiosum virus
ggcgccggguguugaccaaagg

SEQ ID NO: 234768 - RNA, 17 nt, Molluscum contagiosum virus
ggcgcaucucgauucac

SEQ ID NO: 234769 - RNA, 22 nt, Molluscum contagiosum virus
ggcgccacuggaagaacaggcc

SEQ ID NO: 234770 - RNA, 14 nt, Molluscum contagiosum virus
ggcgcagugcucuu

SEQ ID NO: 234771 - RNA, 16 nt, Molluscum contagiosum virus
ggcgcacgcuuguccg

SEQ ID NO: 234772 - RNA, 14 nt, Molluscum contagiosum virus
ggcgcaacgcuggc

SEQ ID NO: 234773 - RNA, 12 nt, Molluscum contagiosum virus
ggcgcaagcacc

SEQ ID NO: 234774 - RNA, 22 nt, Molluscum contagiosum virus
ggcgcgaacucgcggcagugcu

SEQ ID NO: 234775 - RNA, 16 nt, Molluscum contagiosum virus
ggcgcgcacuaccgca

SEQ ID NO: 234776 - RNA, 19 nt, Molluscum contagiosum virus
ggcgcgcgacgugugcucu

SEQ ID NO: 234777 - RNA, 16 nt, Molluscum contagiosum virus
ggcgcgcuccauguac

SEQ ID NO: 234778 - RNA, 14 nt, Molluscum contagiosum virus
ggcgcuagugcaga

SEQ ID NO: 234779 - RNA, 13 nt, Molluscum contagiosum virus
ggcgcucgcgaga

SEQ ID NO: 234780 - RNA, 14 nt, Molluscum contagiosum virus
ggcugcgaccaaga

SEQ ID NO: 234781 - RNA, 18 nt, Molluscum contagiosum virus
ggcugcagguguguaucu

SEQ ID NO: 234782 - RNA, 21 nt, Molluscum contagiosum virus
ggcuguuguacuggagaccug

SEQ ID NO: 234783 - RNA, 17 nt, Molluscum contagiosum virus
ggcugguguuaccgggu

SEQ ID NO: 234784 - RNA, 14 nt, Molluscum contagiosum virus
ggcucguacugcug

SEQ ID NO: 234785 - RNA, 21 nt, Molluscum contagiosum virus
ggcggcaaaagggcucugcca

SEQ ID NO: 234786 - RNA, 13 nt, Molluscum contagiosum virus
ggcggagagcucc

SEQ ID NO: 234787 - RNA, 18 nt, Molluscum contagiosum virus
ggcgcuugggcacugcua

SEQ ID NO: 234788 - RNA, 15 nt, Molluscum contagiosum virus
ggcggaaguggugcc

SEQ ID NO: 234789 - RNA, 15 nt, Molluscum contagiosum virus
ggcggacagcaaaca

SEQ ID NO: 234790 - RNA, 17 nt, Molluscum contagiosum virus
gggaugccagugcagug

SEQ ID NO: 234791 - RNA, 16 nt, Molluscum contagiosum virus
gggagcuuuccuugcg

SEQ ID NO: 234792 - RNA, 15 nt, Molluscum contagiosum virus
gggcagcuucugcuc

SEQ ID NO: 234793 - RNA, 16 nt, Molluscum contagiosum virus
gggcagcuucugcucg

SEQ ID NO: 234794 - RNA, 18 nt, Molluscum contagiosum virus
gggcagccgccuggccga

SEQ ID NO: 234795 - RNA, 19 nt, Molluscum contagiosum virus
gggcagccgccuggccgaa

SEQ ID NO: 234796 - RNA, 22 nt, Molluscum contagiosum virus
gggcacgccgugggcagcuucu

SEQ ID NO: 234797 - RNA, 15 nt, Molluscum contagiosum virus
ggcuuugacaugcac

SEQ ID NO: 234798 - RNA, 16 nt, Molluscum contagiosum virus
ggcuugcucggacaca

SEQ ID NO: 234799 - RNA, 22 nt, Molluscum contagiosum virus
gggaaaaaucccccgccaggaa

SEQ ID NO: 234800 - RNA, 20 nt, Molluscum contagiosum virus
gggaacagcuuggcacagug

SEQ ID NO: 234801 - RNA, 18 nt, Molluscum contagiosum virus
ggcuucggggacacaagg

SEQ ID NO: 234802 - RNA, 22 nt, Molluscum contagiosum virus
ggcuucgcgacgacgagcacua

SEQ ID NO: 234803 - RNA, 11 nt, Molluscum contagiosum virus
gggaagcacag

SEQ ID NO: 234804 - RNA, 22 nt, Molluscum contagiosum virus
gggaauaccggagacaccagcu

SEQ ID NO: 234805 - RNA, 11 nt, Molluscum contagiosum virus
gggacacaagg

SEQ ID NO: 234806 - RNA, 16 nt, Molluscum contagiosum virus
gggacacgcacuugcg

SEQ ID NO: 234807 - RNA, 16 nt, Molluscum contagiosum virus
gggaagcccucagggg

SEQ ID NO: 234808 - RNA, 12 nt, Molluscum contagiosum virus
ggaucuucucaa

SEQ ID NO: 234809 - RNA, 16 nt, Molluscum contagiosum virus
ggaugcacacacucgc

SEQ ID NO: 234810 - RNA, 19 nt, Molluscum contagiosum virus
ggauguccuugaugccgug

SEQ ID NO: 234811 - RNA, 13 nt, Molluscum contagiosum virus
ggcaaacgcugac

SEQ ID NO: 234812 - RNA, 19 nt, Molluscum contagiosum virus
ggcaacgcacaaaacacaa

SEQ ID NO: 234813 - RNA, 21 nt, Molluscum contagiosum virus
ggcaacuggcuuuucaugugc

SEQ ID NO: 234814 - RNA, 15 nt, Molluscum contagiosum virus
ggcaagaccaucauc

SEQ ID NO: 234815 - RNA, 19 nt, Molluscum contagiosum virus
ggcaugcgcccucacgugc

SEQ ID NO: 234816 - RNA, 16 nt, Molluscum contagiosum virus
ggcaugcgcgcagugc

SEQ ID NO: 234817 - RNA, 14 nt, Molluscum contagiosum virus
ggcauggaaagcuu

SEQ ID NO: 234818 - RNA, 18 nt, Molluscum contagiosum virus
ggcacauccgcuaccugg

SEQ ID NO: 234819 - RNA, 18 nt, Molluscum contagiosum virus
gcuuugucggugugcuuu

SEQ ID NO: 234820 - RNA, 15 nt, Molluscum contagiosum virus
ggaagcacguagcuc

SEQ ID NO: 234821 - RNA, 16 nt, Molluscum contagiosum virus
ggaagcucacaucugu

SEQ ID NO: 234822 - RNA, 18 nt, Molluscum contagiosum virus
ggaagcaacgacaaggaa

SEQ ID NO: 234823 - RNA, 16 nt, Molluscum contagiosum virus
ggaagaaacagccaug

SEQ ID NO: 234824 - RNA, 21 nt, Molluscum contagiosum virus
ggaagaaacagccaugugucu

SEQ ID NO: 234825 - RNA, 15 nt, Molluscum contagiosum virus
ggaacugcagcagcu

SEQ ID NO: 234826 - RNA, 20 nt, Molluscum contagiosum virus
ggaacccgcggaagugcgag

SEQ ID NO: 234827 - RNA, 22 nt, Molluscum contagiosum virus
guauuucaaugcaguaugugaa

SEQ ID NO: 234828 - RNA, 14 nt, Molluscum contagiosum virus
guacgugcacgugg

SEQ ID NO: 234829 - RNA, 14 nt, Molluscum contagiosum virus
guacguaauccaug

SEQ ID NO: 234830 - RNA, 16 nt, Molluscum contagiosum virus
guagugguccaccagc

SEQ ID NO: 234831 - RNA, 16 nt, Molluscum contagiosum virus
guagucuucgugcgug

SEQ ID NO: 234832 - RNA, 18 nt, Molluscum contagiosum virus
guagucgcccccgugccg

SEQ ID NO: 234833 - RNA, 14 nt, Molluscum contagiosum virus
guaguacugcagca

SEQ ID NO: 234834 - RNA, 14 nt, Molluscum contagiosum virus
guaagucgaagagg

SEQ ID NO: 234835 - RNA, 19 nt, Molluscum contagiosum virus
guaaugauugucaagcacu

SEQ ID NO: 234836 - RNA, 20 nt, Molluscum contagiosum virus
guaaugauugucaagcacua

SEQ ID NO: 234837 - RNA, 11 nt, Molluscum contagiosum virus
gguucugcucg

SEQ ID NO: 234838 - RNA, 17 nt, Molluscum contagiosum virus
gguugcgcgugugcagc

SEQ ID NO: 234839 - RNA, 17 nt, Molluscum contagiosum virus
ggguuucggaacgcuau

SEQ ID NO: 234840 - RNA, 14 nt, Molluscum contagiosum virus
gguacaugcugucc

SEQ ID NO: 234841 - RNA, 15 nt, Molluscum contagiosum virus
ggguguuuccuugcc

SEQ ID NO: 234842 - RNA, 12 nt, Molluscum contagiosum virus
gggugucugggc

SEQ ID NO: 234843 - RNA, 13 nt, Molluscum contagiosum virus
gggcucgaggugu

SEQ ID NO: 234844 - RNA, 12 nt, Molluscum contagiosum virus
gggcuggcagaa

SEQ ID NO: 234845 - RNA, 23 nt, Molluscum contagiosum virus
gggcugccguuuuacacagggcu

SEQ ID NO: 234846 - RNA, 14 nt, Molluscum contagiosum virus
gggccuuucucaga

SEQ ID NO: 234847 - RNA, 17 nt, Molluscum contagiosum virus
gggcgccggcucugccu

SEQ ID NO: 234848 - RNA, 23 nt, Molluscum contagiosum virus
gggcgcgaaccuagacacgagcg

SEQ ID NO: 234849 - RNA, 15 nt, Molluscum contagiosum virus
gggcgcauccucucc

SEQ ID NO: 234850 - RNA, 12 nt, Molluscum contagiosum virus
gggccaugucug

SEQ ID NO: 234851 - RNA, 15 nt, Molluscum contagiosum virus
gggccggacguccau

SEQ ID NO: 234852 - RNA, 11 nt, Molluscum contagiosum virus
gguuaccaagg

SEQ ID NO: 234853 - RNA, 22 nt, Molluscum contagiosum virus
gguucacgcccgcaaugcagug

SEQ ID NO: 234854 - RNA, 17 nt, Molluscum contagiosum virus
gguguccacgacacugg

SEQ ID NO: 234855 - RNA, 17 nt, Molluscum contagiosum virus
gguguccacgcgcguga

SEQ ID NO: 234856 - RNA, 14 nt, Molluscum contagiosum virus
gguguauccaggau

SEQ ID NO: 234857 - RNA, 16 nt, Molluscum contagiosum virus
ggugucgguaccugca

SEQ ID NO: 234858 - RNA, 15 nt, Molluscum contagiosum virus
ggucaucgggcugca

SEQ ID NO: 234859 - RNA, 13 nt, Molluscum contagiosum virus
gguccuugcuccu

SEQ ID NO: 234860 - RNA, 22 nt, Molluscum contagiosum virus
gguccaguauuucaaugcagua

SEQ ID NO: 234861 - RNA, 23 nt, Molluscum contagiosum virus
ggucucgcugcugggcaucgugc

SEQ ID NO: 234862 - RNA, 19 nt, Molluscum contagiosum virus
ggucgacgggaacgagguc

SEQ ID NO: 234863 - RNA, 19 nt, Molluscum contagiosum virus
ggucgaucccgacacugcg

SEQ ID NO: 234864 - RNA, 20 nt, Molluscum contagiosum virus
ggucgaucccgacacugcga

SEQ ID NO: 234865 - RNA, 15 nt, Molluscum contagiosum virus
gguggcuugcugcag

SEQ ID NO: 234866 - RNA, 20 nt, Molluscum contagiosum virus
gcuccgcaagaagcgaaaca

SEQ ID NO: 234867 - RNA, 13 nt, Molluscum contagiosum virus
gcuccgcacguga

SEQ ID NO: 234868 - RNA, 21 nt, Molluscum contagiosum virus
gcuccuacaucgacaagcacg

SEQ ID NO: 234869 - RNA, 21 nt, Molluscum contagiosum virus
gcucccucgcgcgcagcuuua

SEQ ID NO: 234870 - RNA, 11 nt, Molluscum contagiosum virus
gcucccgcugc

SEQ ID NO: 234871 - RNA, 16 nt, Molluscum contagiosum virus
gcuccugaggaagcaa

SEQ ID NO: 234872 - RNA, 17 nt, Molluscum contagiosum virus
gcucgaguucaacacgc

SEQ ID NO: 234873 - RNA, 17 nt, Molluscum contagiosum virus
gcucgacauuaacugag

SEQ ID NO: 234874 - RNA, 16 nt, Molluscum contagiosum virus
gcuccacgcgcagcuu

SEQ ID NO: 234875 - RNA, 21 nt, Molluscum contagiosum virus
gcucauggcgcgcaaccagcu

SEQ ID NO: 234876 - RNA, 19 nt, Molluscum contagiosum virus
gcucauggacaugcucgac

SEQ ID NO: 234877 - RNA, 19 nt, Molluscum contagiosum virus
gcucucgagcucacaggua

SEQ ID NO: 234878 - RNA, 19 nt, Molluscum contagiosum virus
gcucuacuuccacgagcug

SEQ ID NO: 234879 - RNA, 14 nt, Molluscum contagiosum virus
gcucugcauugugu

SEQ ID NO: 234880 - RNA, 21 nt, Molluscum contagiosum virus
gcucggacacacgcacccaaa

SEQ ID NO: 234881 - RNA, 13 nt, Molluscum contagiosum virus
gcucgcugccugg

SEQ ID NO: 234882 - RNA, 12 nt, Molluscum contagiosum virus
gcucgcuugccg

SEQ ID NO: 234883 - RNA, 15 nt, Molluscum contagiosum virus
gcucgccaugugcga

SEQ ID NO: 234884 - RNA, 15 nt, Molluscum contagiosum virus
gcucgcgcacuacuc

SEQ ID NO: 234885 - RNA, 20 nt, Molluscum contagiosum virus
gcucgcgcucuacgccagcg

SEQ ID NO: 234886 - RNA, 15 nt, Molluscum contagiosum virus
gcucgcagcacaugc

SEQ ID NO: 234887 - RNA, 16 nt, Molluscum contagiosum virus
gcucgcagcacaugca

SEQ ID NO: 234888 - RNA, 17 nt, Molluscum contagiosum virus
gcucgcagcacaugcag

SEQ ID NO: 234889 - RNA, 13 nt, Molluscum contagiosum virus
gcucguccagcug

SEQ ID NO: 234890 - RNA, 17 nt, Molluscum contagiosum virus
gcucguguucguguguu

SEQ ID NO: 234891 - RNA, 23 nt, Molluscum contagiosum virus
gcucgugaagcugucaacagugc

SEQ ID NO: 234892 - RNA, 14 nt, Molluscum contagiosum virus
gcucgugcgacaaa

SEQ ID NO: 234893 - RNA, 16 nt, Molluscum contagiosum virus
gcucggcgugaucuuc

SEQ ID NO: 234894 - RNA, 15 nt, Molluscum contagiosum virus
gcucggcguggugcu

SEQ ID NO: 234895 - RNA, 21 nt, Molluscum contagiosum virus
gcugcccuuuagcguggcgcg

SEQ ID NO: 234896 - RNA, 17 nt, Molluscum contagiosum virus
gcugccgggagaggaaa

SEQ ID NO: 234897 - RNA, 24 nt, Molluscum contagiosum virus
gcugccgggagaggaaaggcgcac

SEQ ID NO: 234898 - RNA, 14 nt, Molluscum contagiosum virus
gcugccccucgggg

SEQ ID NO: 234899 - RNA, 15 nt, Molluscum contagiosum virus
gcugcaucuagccuc

SEQ ID NO: 234900 - RNA, 15 nt, Molluscum contagiosum virus
gcugcgccgccagcg

SEQ ID NO: 234901 - RNA, 17 nt, Molluscum contagiosum virus
gcugcgcaggugcacgc

SEQ ID NO: 234902 - RNA, 20 nt, Molluscum contagiosum virus
gcugccugacgucgcagggg

SEQ ID NO: 234903 - RNA, 21 nt, Molluscum contagiosum virus
gcugcguuuccagggcaguac

SEQ ID NO: 234904 - RNA, 16 nt, Molluscum contagiosum virus
gcugcgcgaguaccug

SEQ ID NO: 234905 - RNA, 15 nt, Molluscum contagiosum virus
gcugcgcuacaugua

SEQ ID NO: 234906 - RNA, 16 nt, Molluscum contagiosum virus
gcugcgcuacauguau

SEQ ID NO: 234907 - RNA, 18 nt, Molluscum contagiosum virus
gcugcgcuccaugcugcc

SEQ ID NO: 234908 - RNA, 20 nt, Molluscum contagiosum virus
gcugcuggaacaggugcgca

SEQ ID NO: 234909 - RNA, 18 nt, Molluscum contagiosum virus
gcugcuggcggugcucuu

SEQ ID NO: 234910 - RNA, 21 nt, Molluscum contagiosum virus
gcugcugggcaucgugcucuu

SEQ ID NO: 234911 - RNA, 15 nt, Molluscum contagiosum virus
gcugcugguucugcu

SEQ ID NO: 234912 - RNA, 19 nt, Molluscum contagiosum virus
gcugcuuccgcaccugguc

SEQ ID NO: 234913 - RNA, 18 nt, Molluscum contagiosum virus
gcugcuagagaaccugug

SEQ ID NO: 234914 - RNA, 22 nt, Molluscum contagiosum virus
gcugcucaaggacuaccagcuc

SEQ ID NO: 234915 - RNA, 20 nt, Molluscum contagiosum virus
gcugcuccccgccagcacca

SEQ ID NO: 234916 - RNA, 12 nt, Molluscum contagiosum virus
gcugcugcacag

SEQ ID NO: 234917 - RNA, 12 nt, Molluscum contagiosum virus
gcugugccuagg

SEQ ID NO: 234918 - RNA, 15 nt, Molluscum contagiosum virus
gcugugcgagccagu

SEQ ID NO: 234919 - RNA, 18 nt, Molluscum contagiosum virus
gcuggaccugcgccagcg

SEQ ID NO: 234920 - RNA, 19 nt, Molluscum contagiosum virus
gcuguccaaggugaacgac

SEQ ID NO: 234921 - RNA, 17 nt, Molluscum contagiosum virus
gcuguccuacuucguca

SEQ ID NO: 234922 - RNA, 22 nt, Molluscum contagiosum virus
gcuucacggagaucaggcagcu

SEQ ID NO: 234923 - RNA, 15 nt, Molluscum contagiosum virus
gcuuggugcagcgga

SEQ ID NO: 234924 - RNA, 22 nt, Molluscum contagiosum virus
gcuugucugccucaaggcgcca

SEQ ID NO: 234925 - RNA, 15 nt, Molluscum contagiosum virus
gcuugggcacugcua

SEQ ID NO: 234926 - RNA, 12 nt, Molluscum contagiosum virus
gcuguugcugcu

SEQ ID NO: 234927 - RNA, 13 nt, Molluscum contagiosum virus
gcuacgcacuuca

SEQ ID NO: 234928 - RNA, 13 nt, Molluscum contagiosum virus
gcuacguggcgcg

SEQ ID NO: 234929 - RNA, 22 nt, Molluscum contagiosum virus
gcuacaggacguccuugucgaa

SEQ ID NO: 234930 - RNA, 15 nt, Molluscum contagiosum virus
gcgugcugucagugg

SEQ ID NO: 234931 - RNA, 15 nt, Molluscum contagiosum virus
gcgugcgaguguucc

SEQ ID NO: 234932 - RNA, 16 nt, Molluscum contagiosum virus
gcgugcgaguguuccc

SEQ ID NO: 234933 - RNA, 15 nt, Molluscum contagiosum virus
gcgugcgcaccagcu

SEQ ID NO: 234934 - RNA, 18 nt, Molluscum contagiosum virus
gcgucuuacugcugcaau

SEQ ID NO: 234935 - RNA, 21 nt, Molluscum contagiosum virus
gcgugacacaccgcguggaca

SEQ ID NO: 234936 - RNA, 15 nt, Molluscum contagiosum virus
gcgugaccagugcgu

SEQ ID NO: 234937 - RNA, 14 nt, Molluscum contagiosum virus
gcgugagagccauu

SEQ ID NO: 234938 - RNA, 17 nt, Molluscum contagiosum virus
gcgugagcguucgcuac

SEQ ID NO: 234939 - RNA, 23 nt, Molluscum contagiosum virus
gcgugagcguucgcuacuucaca

SEQ ID NO: 234940 - RNA, 15 nt, Molluscum contagiosum virus
gcuagcgcugcucua

SEQ ID NO: 234941 - RNA, 18 nt, Molluscum contagiosum virus
gcuagcgugagagcaaag

SEQ ID NO: 234942 - RNA, 19 nt, Molluscum contagiosum virus
gcuagcguucccaagcaaa

SEQ ID NO: 234943 - RNA, 23 nt, Molluscum contagiosum virus
gcuagugcagaugaggcugcucu

SEQ ID NO: 234944 - RNA, 20 nt, Molluscum contagiosum virus
gcuagugcgcgccaagaaca

SEQ ID NO: 234945 - RNA, 13 nt, Molluscum contagiosum virus
gcuagcaagcacg

SEQ ID NO: 234946 - RNA, 18 nt, Molluscum contagiosum virus
gcgcgcagacgcggugga

SEQ ID NO: 234947 - RNA, 15 nt, Molluscum contagiosum virus
gcgcggcucgcgcac

SEQ ID NO: 234948 - RNA, 22 nt, Molluscum contagiosum virus
gcgcgccgcugcucgcuugccc

SEQ ID NO: 234949 - RNA, 14 nt, Molluscum contagiosum virus
gcgcgcgagcacag

SEQ ID NO: 234950 - RNA, 13 nt, Molluscum contagiosum virus
gcgcgcgcaauuc

SEQ ID NO: 234951 - RNA, 22 nt, Molluscum contagiosum virus
gcgcgcggcaguggcgugacag

SEQ ID NO: 234952 - RNA, 14 nt, Molluscum contagiosum virus
gcgcgcucgcucgc

SEQ ID NO: 234953 - RNA, 21 nt, Molluscum contagiosum virus
gcgcgcugcugguucugcucg

SEQ ID NO: 234954 - RNA, 14 nt, Molluscum contagiosum virus
gcgcggaggcgcua

SEQ ID NO: 234955 - RNA, 16 nt, Molluscum contagiosum virus
gcgcgugagcacgggc

SEQ ID NO: 234956 - RNA, 13 nt, Molluscum contagiosum virus
gcgcgugccgggc

SEQ ID NO: 234957 - RNA, 15 nt, Molluscum contagiosum virus
gcgcguugccugaga

SEQ ID NO: 234958 - RNA, 14 nt, Molluscum contagiosum virus
gcgcguccacaaag

SEQ ID NO: 234959 - RNA, 23 nt, Molluscum contagiosum virus
gcggugagccguuccacacagaa

SEQ ID NO: 234960 - RNA, 16 nt, Molluscum contagiosum virus
gcggugcgcacaugcc

SEQ ID NO: 234961 - RNA, 14 nt, Molluscum contagiosum virus
gcguacugggagcu

SEQ ID NO: 234962 - RNA, 23 nt, Molluscum contagiosum virus
gcguacugggagcuuuccuugcg

SEQ ID NO: 234963 - RNA, 18 nt, Molluscum contagiosum virus
gcguccacgacgagccug

SEQ ID NO: 234964 - RNA, 17 nt, Molluscum contagiosum virus
gcguccgcaaagacgga

SEQ ID NO: 234965 - RNA, 23 nt, Molluscum contagiosum virus
gcguccguaagucgaagaggguc

SEQ ID NO: 234966 - RNA, 19 nt, Molluscum contagiosum virus
gcgucugugcgcgcuacag

SEQ ID NO: 234967 - RNA, 22 nt, Molluscum contagiosum virus
gcgucgaaggagcccgucuaca

SEQ ID NO: 234968 - RNA, 14 nt, Molluscum contagiosum virus
gcgucggcaagacc

SEQ ID NO: 234969 - RNA, 22 nt, Molluscum contagiosum virus
gcgccaucaauucaaaggugcu

SEQ ID NO: 234970 - RNA, 20 nt, Molluscum contagiosum virus
gcgcccagcgccacgaagaa

SEQ ID NO: 234971 - RNA, 16 nt, Molluscum contagiosum virus
gcgccaggugcgaagg

SEQ ID NO: 234972 - RNA, 15 nt, Molluscum contagiosum virus
gcgcagccacgacuc

SEQ ID NO: 234973 - RNA, 14 nt, Molluscum contagiosum virus
gcgcagggagcugc

SEQ ID NO: 234974 - RNA, 13 nt, Molluscum contagiosum virus
gcgcaggugcacg

SEQ ID NO: 234975 - RNA, 18 nt, Molluscum contagiosum virus
gcgcaugaaaggcaccug

SEQ ID NO: 234976 - RNA, 13 nt, Molluscum contagiosum virus
gcgccaacaacca

SEQ ID NO: 234977 - RNA, 14 nt, Molluscum contagiosum virus
gcgccaacaaccac

SEQ ID NO: 234978 - RNA, 16 nt, Molluscum contagiosum virus
gcgcagugcugcgcga

SEQ ID NO: 234979 - RNA, 16 nt, Molluscum contagiosum virus
gcgcgacuccaucugc

SEQ ID NO: 234980 - RNA, 14 nt, Molluscum contagiosum virus
gcgcgagcaaagac

SEQ ID NO: 234981 - RNA, 15 nt, Molluscum contagiosum virus
gcgcgagugugcgug

SEQ ID NO: 234982 - RNA, 20 nt, Molluscum contagiosum virus
gcgcgaaccuagacacgagc

SEQ ID NO: 234983 - RNA, 12 nt, Molluscum contagiosum virus
gcgccugcgcga

SEQ ID NO: 234984 - RNA, 14 nt, Molluscum contagiosum virus
gcgccgcggcugcc

SEQ ID NO: 234985 - RNA, 13 nt, Molluscum contagiosum virus
gcgccgcuccaac

SEQ ID NO: 234986 - RNA, 22 nt, Molluscum contagiosum virus
gcgccugcacuucggacaccuc

SEQ ID NO: 234987 - RNA, 17 nt, Molluscum contagiosum virus
gcgccgcgcaugacagc

SEQ ID NO: 234988 - RNA, 15 nt, Molluscum contagiosum virus
gcgccgaaacacggc

SEQ ID NO: 234989 - RNA, 15 nt, Molluscum contagiosum virus
gcgcccgacgagcuu

SEQ ID NO: 234990 - RNA, 17 nt, Molluscum contagiosum virus
gcgcccgccaccaugcu

SEQ ID NO: 234991 - RNA, 14 nt, Molluscum contagiosum virus
gcgcccaccagcag

SEQ ID NO: 234992 - RNA, 18 nt, Molluscum contagiosum virus
gcgacuccaucugcgcga

SEQ ID NO: 234993 - RNA, 21 nt, Molluscum contagiosum virus
gcgagaaguucugcacagcac

SEQ ID NO: 234994 - RNA, 22 nt, Molluscum contagiosum virus
gcgagaauugaacaucuaugca

SEQ ID NO: 234995 - RNA, 12 nt, Molluscum contagiosum virus
gcgagcacgugg

SEQ ID NO: 234996 - RNA, 11 nt, Molluscum contagiosum virus
gcgagcacugg

SEQ ID NO: 234997 - RNA, 16 nt, Molluscum contagiosum virus
gcgagcgcgugcucuu

SEQ ID NO: 234998 - RNA, 18 nt, Molluscum contagiosum virus
gcgagcuacgcgcucuac

SEQ ID NO: 234999 - RNA, 14 nt, Molluscum contagiosum virus
gcgagcuagugcac

SEQ ID NO: 235000 - RNA, 12 nt, Molluscum contagiosum virus
gcgagcugcuag

SEQ ID NO: 235001 - RNA, 12 nt, Molluscum contagiosum virus
gcgagugucucg

SEQ ID NO: 235002 - RNA, 15 nt, Molluscum contagiosum virus
gcgagucucccgugg

SEQ ID NO: 235003 - RNA, 19 nt, Molluscum contagiosum virus
gcgagucucuguaacaagc

SEQ ID NO: 235004 - RNA, 15 nt, Molluscum contagiosum virus
gcgagagcuacagca

SEQ ID NO: 235005 - RNA, 22 nt, Molluscum contagiosum virus
gcgagaguucgaggaacucuac

SEQ ID NO: 235006 - RNA, 22 nt, Molluscum contagiosum virus
gcgaggccugcguggacagcau

SEQ ID NO: 235007 - RNA, 20 nt, Molluscum contagiosum virus
gcgcaaacaagcagucucau

SEQ ID NO: 235008 - RNA, 17 nt, Molluscum contagiosum virus
gcgauccuguccaucuu

SEQ ID NO: 235009 - RNA, 16 nt, Molluscum contagiosum virus
gcgauagcgauggcug

SEQ ID NO: 235010 - RNA, 17 nt, Molluscum contagiosum virus
gcgauaggacaugacug

SEQ ID NO: 235011 - RNA, 18 nt, Molluscum contagiosum virus
gcgaugucgccgcagugc

SEQ ID NO: 235012 - RNA, 14 nt, Molluscum contagiosum virus
gcgcagaagccaac

SEQ ID NO: 235013 - RNA, 17 nt, Molluscum contagiosum virus
gcgcacaagauggcgca

SEQ ID NO: 235014 - RNA, 13 nt, Molluscum contagiosum virus
gcgcacacuugcg

SEQ ID NO: 235015 - RNA, 21 nt, Molluscum contagiosum virus
gcgcaccuggaguacuucaag

SEQ ID NO: 235016 - RNA, 18 nt, Molluscum contagiosum virus
gcgcacgauguacuccac

SEQ ID NO: 235017 - RNA, 22 nt, Molluscum contagiosum virus
gcgcacgcugcuguccuucaag

SEQ ID NO: 235018 - RNA, 21 nt, Molluscum contagiosum virus
gcgcaacacggccuucuccuc

SEQ ID NO: 235019 - RNA, 13 nt, Molluscum contagiosum virus
gcgcaacaugucc

SEQ ID NO: 235020 - RNA, 16 nt, Molluscum contagiosum virus
gcgcaagaacaaccag

SEQ ID NO: 235021 - RNA, 20 nt, Molluscum contagiosum virus
gcgcaaggccgcgcccaaga

SEQ ID NO: 235022 - RNA, 13 nt, Molluscum contagiosum virus
gcgcaagugcgug

SEQ ID NO: 235023 - RNA, 16 nt, Molluscum contagiosum virus
gcgcaagugugcgcau

SEQ ID NO: 235024 - RNA, 16 nt, Molluscum contagiosum virus
gccgaggacuaccugg

SEQ ID NO: 235025 - RNA, 14 nt, Molluscum contagiosum virus
gccgaggucuucca

SEQ ID NO: 235026 - RNA, 18 nt, Molluscum contagiosum virus
gccgagguggcacccugg

SEQ ID NO: 235027 - RNA, 15 nt, Molluscum contagiosum virus
gccgaguacugcugc

SEQ ID NO: 235028 - RNA, 15 nt, Molluscum contagiosum virus
gccgcaacauaguca

SEQ ID NO: 235029 - RNA, 21 nt, Molluscum contagiosum virus
gccgcaguacgugacagucag

SEQ ID NO: 235030 - RNA, 22 nt, Molluscum contagiosum virus
gccgcagugcucgcacacgugc

SEQ ID NO: 235031 - RNA, 17 nt, Molluscum contagiosum virus
gccgccaugcugcgcga

SEQ ID NO: 235032 - RNA, 18 nt, Molluscum contagiosum virus
gccgcacgugcugcgcua

SEQ ID NO: 235033 - RNA, 17 nt, Molluscum contagiosum virus
gccgcagcgcuggagcu

SEQ ID NO: 235034 - RNA, 19 nt, Molluscum contagiosum virus
gccgcuucgcguacauccc

SEQ ID NO: 235035 - RNA, 19 nt, Molluscum contagiosum virus
gccgcuucgugcgcggaga

SEQ ID NO: 235036 - RNA, 20 nt, Molluscum contagiosum virus
gccgcugacuagaugcauag

SEQ ID NO: 235037 - RNA, 22 nt, Molluscum contagiosum virus
gccgcugagagacuucuugcac

SEQ ID NO: 235038 - RNA, 16 nt, Molluscum contagiosum virus
gccgcgccgcacgugc

SEQ ID NO: 235039 - RNA, 17 nt, Molluscum contagiosum virus
gccgcgcgucaccucuu

SEQ ID NO: 235040 - RNA, 14 nt, Molluscum contagiosum virus
gccgcgagcacugg

SEQ ID NO: 235041 - RNA, 15 nt, Molluscum contagiosum virus
gccgcgcaccuggag

SEQ ID NO: 235042 - RNA, 22 nt, Molluscum contagiosum virus
gccgaagagugcgcaacauguc

SEQ ID NO: 235043 - RNA, 23 nt, Molluscum contagiosum virus
gccgaagagugcgcaacaugucc

SEQ ID NO: 235044 - RNA, 18 nt, Molluscum contagiosum virus
gccgacaacgugcugcuc

SEQ ID NO: 235045 - RNA, 21 nt, Molluscum contagiosum virus
gccgacaacgugcugcucaag

SEQ ID NO: 235046 - RNA, 17 nt, Molluscum contagiosum virus
gccgagcuucgucuuca

SEQ ID NO: 235047 - RNA, 21 nt, Molluscum contagiosum virus
gcccgugcaccucccugugaa

SEQ ID NO: 235048 - RNA, 19 nt, Molluscum contagiosum virus
gcccuaaauaaugaaccug

SEQ ID NO: 235049 - RNA, 20 nt, Molluscum contagiosum virus
gcccgugcccgaguuugccc

SEQ ID NO: 235050 - RNA, 17 nt, Molluscum contagiosum virus
gcccucgagcaaugcga

SEQ ID NO: 235051 - RNA, 21 nt, Molluscum contagiosum virus
gcagcagaccaagaagcccga

SEQ ID NO: 235052 - RNA, 18 nt, Molluscum contagiosum virus
gccccggcgcgaaacaag

SEQ ID NO: 235053 - RNA, 16 nt, Molluscum contagiosum virus
gcagcacuucgcagac

SEQ ID NO: 235054 - RNA, 18 nt, Molluscum contagiosum virus
gcagcaccugcaguucca

SEQ ID NO: 235055 - RNA, 18 nt, Molluscum contagiosum virus
gcccgcggacucgugcac

SEQ ID NO: 235056 - RNA, 20 nt, Molluscum contagiosum virus
gcccgcugcgcgcucuggag

SEQ ID NO: 235057 - RNA, 12 nt, Molluscum contagiosum virus
gcccgcugcucu

SEQ ID NO: 235058 - RNA, 19 nt, Molluscum contagiosum virus
gcccgccaccaugcuuguu

SEQ ID NO: 235059 - RNA, 17 nt, Molluscum contagiosum virus
gcccgcaguuugcaugg

SEQ ID NO: 235060 - RNA, 15 nt, Molluscum contagiosum virus
gcccgcaaugcagug

SEQ ID NO: 235061 - RNA, 18 nt, Molluscum contagiosum virus
gcccgagcccggccagac

SEQ ID NO: 235062 - RNA, 20 nt, Molluscum contagiosum virus
gcccgagggcgggcacgugc

SEQ ID NO: 235063 - RNA, 12 nt, Molluscum contagiosum virus
gccccugcgcga

SEQ ID NO: 235064 - RNA, 15 nt, Molluscum contagiosum virus
gcagaggcaugcuuu

SEQ ID NO: 235065 - RNA, 13 nt, Molluscum contagiosum virus
gcagacgcucaac

SEQ ID NO: 235066 - RNA, 20 nt, Molluscum contagiosum virus
gcagacguggugcucgugga

SEQ ID NO: 235067 - RNA, 19 nt, Molluscum contagiosum virus
gcagagcgucgaacuucuc

SEQ ID NO: 235068 - RNA, 15 nt, Molluscum contagiosum virus
gcacgcgucggucac

SEQ ID NO: 235069 - RNA, 14 nt, Molluscum contagiosum virus
gcacgcgugugcga

SEQ ID NO: 235070 - RNA, 18 nt, Molluscum contagiosum virus
gcacgguagcuagcucug

SEQ ID NO: 235071 - RNA, 21 nt, Molluscum contagiosum virus
gcacgucgaagaccaccagca

SEQ ID NO: 235072 - RNA, 22 nt, Molluscum contagiosum virus
gcacgucgaagaccaccagcac

SEQ ID NO: 235073 - RNA, 12 nt, Molluscum contagiosum virus
gcacgugcugcu

SEQ ID NO: 235074 - RNA, 17 nt, Molluscum contagiosum virus
gcacguggacagcaucc

SEQ ID NO: 235075 - RNA, 21 nt, Molluscum contagiosum virus
gcacgugugcaggaacugccc

SEQ ID NO: 235076 - RNA, 21 nt, Molluscum contagiosum virus
gcacguuaaucacgaugauga

SEQ ID NO: 235077 - RNA, 17 nt, Molluscum contagiosum virus
gcacgugccgugcuguc

SEQ ID NO: 235078 - RNA, 21 nt, Molluscum contagiosum virus
gcacuaccgcaaccagcugcu

SEQ ID NO: 235079 - RNA, 21 nt, Molluscum contagiosum virus
gcacuacgugcucgaguucaa

SEQ ID NO: 235080 - RNA, 13 nt, Molluscum contagiosum virus
gccggcucugccu

SEQ ID NO: 235081 - RNA, 22 nt, Molluscum contagiosum virus
gccgggaauaccggagacacca

SEQ ID NO: 235082 - RNA, 16 nt, Molluscum contagiosum virus
gccgggaaugcugcgc

SEQ ID NO: 235083 - RNA, 19 nt, Molluscum contagiosum virus
gccggagcugaaccugguc

SEQ ID NO: 235084 - RNA, 15 nt, Molluscum contagiosum virus
gccggcaaggggcca

SEQ ID NO: 235085 - RNA, 18 nt, Molluscum contagiosum virus
gccggcgaaccgacugcc

SEQ ID NO: 235086 - RNA, 19 nt, Molluscum contagiosum virus
gccggguguugaccaaagg

SEQ ID NO: 235087 - RNA, 17 nt, Molluscum contagiosum virus
gccggggccggacgucc

SEQ ID NO: 235088 - RNA, 16 nt, Molluscum contagiosum virus
gccgggauuugccggu

SEQ ID NO: 235089 - RNA, 19 nt, Molluscum contagiosum virus
gccgggcaccggcgcucac

SEQ ID NO: 235090 - RNA, 21 nt, Molluscum contagiosum virus
gccgguugcgcgugugcagca

SEQ ID NO: 235091 - RNA, 20 nt, Molluscum contagiosum virus
gccguagucuuucuccaugu

SEQ ID NO: 235092 - RNA, 19 nt, Molluscum contagiosum virus
gccgugcccaucuccuugu

SEQ ID NO: 235093 - RNA, 19 nt, Molluscum contagiosum virus
gccguggaugaacaccauc

SEQ ID NO: 235094 - RNA, 22 nt, Molluscum contagiosum virus
gccguguaagcccgcuaugaac

SEQ ID NO: 235095 - RNA, 18 nt, Molluscum contagiosum virus
gccguguacaugcucaag

SEQ ID NO: 235096 - RNA, 22 nt, Molluscum contagiosum virus
gccguguacaugcucaagcacc

SEQ ID NO: 235097 - RNA, 23 nt, Molluscum contagiosum virus
gccguguacgucuuucccagaag

SEQ ID NO: 235098 - RNA, 17 nt, Molluscum contagiosum virus
gccuacgaggugcgcga

SEQ ID NO: 235099 - RNA, 14 nt, Molluscum contagiosum virus
gccguuggacauca

SEQ ID NO: 235100 - RNA, 12 nt, Molluscum contagiosum virus
gccgugcugcgu

SEQ ID NO: 235101 - RNA, 23 nt, Molluscum contagiosum virus
gccucgagcacgccuccaagaag

SEQ ID NO: 235102 - RNA, 24 nt, Molluscum contagiosum virus
gccucgagcacgccuccaagaaga

SEQ ID NO: 235103 - RNA, 16 nt, Molluscum contagiosum virus
gccucgagcgccgugc

SEQ ID NO: 235104 - RNA, 20 nt, Molluscum contagiosum virus
gccucgagcgccgugcaguu

SEQ ID NO: 235105 - RNA, 23 nt, Molluscum contagiosum virus
gccucguucacggcuagaccucc

SEQ ID NO: 235106 - RNA, 19 nt, Molluscum contagiosum virus
gccucgaugccaacagacu

SEQ ID NO: 235107 - RNA, 16 nt, Molluscum contagiosum virus
gccucgcgcgcacugc

SEQ ID NO: 235108 - RNA, 17 nt, Molluscum contagiosum virus
gccucgcgcgcacugcg

SEQ ID NO: 235109 - RNA, 21 nt, Molluscum contagiosum virus
gccucggacggaggucugcuu

SEQ ID NO: 235110 - RNA, 16 nt, Molluscum contagiosum virus
gccucugccagccgcu

SEQ ID NO: 235111 - RNA, 23 nt, Molluscum contagiosum virus
gccucucucguggggaggacaaa

SEQ ID NO: 235112 - RNA, 20 nt, Molluscum contagiosum virus
gccugcaaacgcgaaacugg

SEQ ID NO: 235113 - RNA, 13 nt, Molluscum contagiosum virus
gccugcacaagca

SEQ ID NO: 235114 - RNA, 22 nt, Molluscum contagiosum virus
gccuuggcggcgcggcuagcac

SEQ ID NO: 235115 - RNA, 23 nt, Molluscum contagiosum virus
gccuuggcggcgcggcuagcacc

SEQ ID NO: 235116 - RNA, 16 nt, Molluscum contagiosum virus
gccuugggcacuuccu

SEQ ID NO: 235117 - RNA, 16 nt, Molluscum contagiosum virus
gccuuugcgcugucuc

SEQ ID NO: 235118 - RNA, 22 nt, Molluscum contagiosum virus
gccuuuguggacgcgcaagugu

SEQ ID NO: 235119 - RNA, 19 nt, Molluscum contagiosum virus
gcgaaacacgcuacgcagc

SEQ ID NO: 235120 - RNA, 18 nt, Molluscum contagiosum virus
gcgaacgagagacacgca

SEQ ID NO: 235121 - RNA, 19 nt, Molluscum contagiosum virus
gcgaacgagggaugcacac

SEQ ID NO: 235122 - RNA, 14 nt, Molluscum contagiosum virus
gcgaagggcuuuuu

SEQ ID NO: 235123 - RNA, 16 nt, Molluscum contagiosum virus
gcgaaguccugggcga

SEQ ID NO: 235124 - RNA, 20 nt, Molluscum contagiosum virus
gcgaccuacgaggugcugcg

SEQ ID NO: 235125 - RNA, 20 nt, Molluscum contagiosum virus
gcgacccccguuuguucaca

SEQ ID NO: 235126 - RNA, 20 nt, Molluscum contagiosum virus
gcgacauagcgcaccagcug

SEQ ID NO: 235127 - RNA, 14 nt, Molluscum contagiosum virus
gccuuagugccgua

SEQ ID NO: 235128 - RNA, 23 nt, Molluscum contagiosum virus
gccuucguggagcccgugcugga

SEQ ID NO: 235129 - RNA, 16 nt, Molluscum contagiosum virus
gccuugcgagaauuga

SEQ ID NO: 235130 - RNA, 19 nt, Molluscum contagiosum virus
gccuguaguagcagcuucu

SEQ ID NO: 235131 - RNA, 17 nt, Molluscum contagiosum virus
gccugucggcacaucuc

SEQ ID NO: 235132 - RNA, 13 nt, Molluscum contagiosum virus
gccuggugcugcg

SEQ ID NO: 235133 - RNA, 16 nt, Molluscum contagiosum virus
gccuggugcugcgcga

SEQ ID NO: 235134 - RNA, 16 nt, Molluscum contagiosum virus
gccuguaccugcgaca

SEQ ID NO: 235135 - RNA, 15 nt, Molluscum contagiosum virus
gccugcccugcucau

SEQ ID NO: 235136 - RNA, 15 nt, Molluscum contagiosum virus
gccugcugcagcucc

SEQ ID NO: 235137 - RNA, 11 nt, Molluscum contagiosum virus
gccugcugcgc

SEQ ID NO: 235138 - RNA, 14 nt, Molluscum contagiosum virus
gccugcaggcaaaa

SEQ ID NO: 235139 - RNA, 14 nt, Molluscum contagiosum virus
gccugcacugagaa

SEQ ID NO: 235140 - RNA, 18 nt, Molluscum contagiosum virus
gccugcaccgagugcugg

SEQ ID NO: 235141 - RNA, 12 nt, Molluscum contagiosum virus
gugucgacuuca

SEQ ID NO: 235142 - RNA, 15 nt, Molluscum contagiosum virus
guguggcuacaugca

SEQ ID NO: 235143 - RNA, 21 nt, Molluscum contagiosum virus
guguggcucuucucgcagcgu

SEQ ID NO: 235144 - RNA, 22 nt, Molluscum contagiosum virus
guguggcuugcgggacagagcu

SEQ ID NO: 235145 - RNA, 15 nt, Molluscum contagiosum virus
gugugcguacuggga

SEQ ID NO: 235146 - RNA, 13 nt, Molluscum contagiosum virus
guguguaucucac

SEQ ID NO: 235147 - RNA, 15 nt, Molluscum contagiosum virus
guguugaccaaaggu

SEQ ID NO: 235148 - RNA, 17 nt, Molluscum contagiosum virus
guguaucaugcacaugc

SEQ ID NO: 235149 - RNA, 15 nt, Molluscum contagiosum virus
guguacaugcucaag

SEQ ID NO: 235150 - RNA, 15 nt, Molluscum contagiosum virus
guggcguugcugcug

SEQ ID NO: 235151 - RNA, 21 nt, Molluscum contagiosum virus
gugguugcuugcauguucucu

SEQ ID NO: 235152 - RNA, 14 nt, Molluscum contagiosum virus
guggcgauccuguc

SEQ ID NO: 235153 - RNA, 17 nt, Molluscum contagiosum virus
guggcgauccuguccau

SEQ ID NO: 235154 - RNA, 21 nt, Molluscum contagiosum virus
guggcgccauugcucgcggug

SEQ ID NO: 235155 - RNA, 18 nt, Molluscum contagiosum virus
guggcgcgcgagcugcua

SEQ ID NO: 235156 - RNA, 17 nt, Molluscum contagiosum virus
guggcgcgggagcucac

SEQ ID NO: 235157 - RNA, 20 nt, Molluscum contagiosum virus
gucaacaugccuuucuucca

SEQ ID NO: 235158 - RNA, 16 nt, Molluscum contagiosum virus
gucaaugcgcacgugc

SEQ ID NO: 235159 - RNA, 19 nt, Molluscum contagiosum virus
guccaugucgcgcaucacc

SEQ ID NO: 235160 - RNA, 19 nt, Molluscum contagiosum virus
guccgcauccucaaccgcu

SEQ ID NO: 235161 - RNA, 22 nt, Molluscum contagiosum virus
guccgcggacgcgggccugucc

SEQ ID NO: 235162 - RNA, 19 nt, Molluscum contagiosum virus
guccgcgggcgcacgcuug

SEQ ID NO: 235163 - RNA, 14 nt, Molluscum contagiosum virus
guccccugagcgag

SEQ ID NO: 235164 - RNA, 18 nt, Molluscum contagiosum virus
guggacgaugguggcgcu

SEQ ID NO: 235165 - RNA, 12 nt, Molluscum contagiosum virus
guggaccucauc

SEQ ID NO: 235166 - RNA, 19 nt, Molluscum contagiosum virus
guggaggaucgcuacgugc

SEQ ID NO: 235167 - RNA, 23 nt, Molluscum contagiosum virus
guuccuguugcgcgagcgcgugc

SEQ ID NO: 235168 - RNA, 13 nt, Molluscum contagiosum virus
guucgacagcucu

SEQ ID NO: 235169 - RNA, 14 nt, Molluscum contagiosum virus
guucgcgcgugcug

SEQ ID NO: 235170 - RNA, 21 nt, Molluscum contagiosum virus
guucgcggguccgucuuugcg

SEQ ID NO: 235171 - RNA, 18 nt, Molluscum contagiosum virus
guucguccgcucgugcca

SEQ ID NO: 235172 - RNA, 19 nt, Molluscum contagiosum virus
guucuucgacaacaugcuc

SEQ ID NO: 235173 - RNA, 21 nt, Molluscum contagiosum virus
guucaucuacugcgacaucca

SEQ ID NO: 235174 - RNA, 11 nt, Molluscum contagiosum virus
guuccaggaac

SEQ ID NO: 235175 - RNA, 16 nt, Molluscum contagiosum virus
guuccacuccugugag

SEQ ID NO: 235176 - RNA, 15 nt, Molluscum contagiosum virus
guucccggugcugcu

SEQ ID NO: 235177 - RNA, 17 nt, Molluscum contagiosum virus
guuccgacaucgugccg

SEQ ID NO: 235178 - RNA, 17 nt, Molluscum contagiosum virus
guuccggcggcauugug

SEQ ID NO: 235179 - RNA, 19 nt, Molluscum contagiosum virus
guuaaagaguuccagcagc

SEQ ID NO: 235180 - RNA, 20 nt, Molluscum contagiosum virus
guuagcaucauuuauuggcc

SEQ ID NO: 235181 - RNA, 13 nt, Molluscum contagiosum virus
guugcaucuucuu

SEQ ID NO: 235182 - RNA, 20 nt, Molluscum contagiosum virus
guugaccaaagguccaguau

SEQ ID NO: 235183 - RNA, 18 nt, Molluscum contagiosum virus
guugaccaccaccuccuu

SEQ ID NO: 235184 - RNA, 13 nt, Molluscum contagiosum virus
guuggacaucagc

SEQ ID NO: 235185 - RNA, 21 nt, Molluscum contagiosum virus
guugcuggggccugugcugug

SEQ ID NO: 235186 - RNA, 12 nt, Molluscum contagiosum virus
guugccugcacu

SEQ ID NO: 235187 - RNA, 19 nt, Molluscum contagiosum virus
guuggcuucugcgcgguga

SEQ ID NO: 235188 - RNA, 13 nt, Molluscum contagiosum virus
guuggcgccagcc

SEQ ID NO: 235189 - RNA, 12 nt, Molluscum contagiosum virus
guuguccuugcc

SEQ ID NO: 235190 - RNA, 17 nt, Molluscum contagiosum virus
guuuucggauagccccu

SEQ ID NO: 235191 - RNA, 17 nt, Molluscum contagiosum virus
guuuugaugagggcgau

SEQ ID NO: 235192 - RNA, 23 nt, Molluscum contagiosum virus
guuuucaagcgcgaguacaagcu

SEQ ID NO: 235193 - RNA, 17 nt, Molluscum contagiosum virus
guuugcgcucucagagc

SEQ ID NO: 235194 - RNA, 22 nt, Molluscum contagiosum virus
guuugccagaagcccugagaag

SEQ ID NO: 235195 - RNA, 14 nt, Molluscum contagiosum virus
guuugccaggcaac

SEQ ID NO: 235196 - RNA, 20 nt, Molluscum contagiosum virus
guuugacgcccggugccugg

SEQ ID NO: 235197 - RNA, 15 nt, Molluscum contagiosum virus
uaacaacgaccagcu

SEQ ID NO: 235198 - RNA, 15 nt, Molluscum contagiosum virus
uacguggugcgcgac

SEQ ID NO: 235199 - RNA, 14 nt, Molluscum contagiosum virus
uacguguccaugca

SEQ ID NO: 235200 - RNA, 18 nt, Molluscum contagiosum virus
uacguguccaugcacgac

SEQ ID NO: 235201 - RNA, 11 nt, Molluscum contagiosum virus
uacgugcugcg

SEQ ID NO: 235202 - RNA, 21 nt, Molluscum contagiosum virus
uacuaaaguacgagagcgcau

SEQ ID NO: 235203 - RNA, 13 nt, Molluscum contagiosum virus
uacugggagcuuu

SEQ ID NO: 235204 - RNA, 20 nt, Molluscum contagiosum virus
uacugcggacaccagaaccu

SEQ ID NO: 235205 - RNA, 17 nt, Molluscum contagiosum virus
uacugcgcacccgccac

SEQ ID NO: 235206 - RNA, 17 nt, Molluscum contagiosum virus
uacugcgacauccacau

SEQ ID NO: 235207 - RNA, 20 nt, Molluscum contagiosum virus
uacuucaagcacgagcugcu

SEQ ID NO: 235208 - RNA, 15 nt, Molluscum contagiosum virus
uacuuccacgagcug

SEQ ID NO: 235209 - RNA, 14 nt, Molluscum contagiosum virus
uacuuccugcagcu

SEQ ID NO: 235210 - RNA, 11 nt, Molluscum contagiosum virus
uaccugagauc

SEQ ID NO: 235211 - RNA, 16 nt, Molluscum contagiosum virus
uaccugaagcuggacg

SEQ ID NO: 235212 - RNA, 17 nt, Molluscum contagiosum virus
uaccuguaugaucugca

SEQ ID NO: 235213 - RNA, 21 nt, Molluscum contagiosum virus
uaccuguaugaucugcaguuc

SEQ ID NO: 235214 - RNA, 16 nt, Molluscum contagiosum virus
uaccugcgcaagcuca

SEQ ID NO: 235215 - RNA, 22 nt, Molluscum contagiosum virus
uacaugcacagacagcacgggc

SEQ ID NO: 235216 - RNA, 21 nt, Molluscum contagiosum virus
uacaugccgcaguacgugaca

SEQ ID NO: 235217 - RNA, 15 nt, Molluscum contagiosum virus
uacaucgaaaccauc

SEQ ID NO: 235218 - RNA, 18 nt, Molluscum contagiosum virus
uacagcaugcgugcaaca

SEQ ID NO: 235219 - RNA, 20 nt, Molluscum contagiosum virus
uacaaggaggucaugaccaa

SEQ ID NO: 235220 - RNA, 16 nt, Molluscum contagiosum virus
uacaaaacaugcugua

SEQ ID NO: 235221 - RNA, 23 nt, Molluscum contagiosum virus
uaaggagcgagaagacauugccu

SEQ ID NO: 235222 - RNA, 14 nt, Molluscum contagiosum virus
uagcugugcgcuac

SEQ ID NO: 235223 - RNA, 23 nt, Molluscum contagiosum virus
uaguccagcgcguccaugcugau

SEQ ID NO: 235224 - RNA, 14 nt, Molluscum contagiosum virus
uagugccauuguga

SEQ ID NO: 235225 - RNA, 22 nt, Molluscum contagiosum virus
uagugcgcgccaagaacaagcu

SEQ ID NO: 235226 - RNA, 21 nt, Molluscum contagiosum virus
uauagacguauacuccaaaaa

SEQ ID NO: 235227 - RNA, 23 nt, Molluscum contagiosum virus
uauauagacguauacuccaaaaa

SEQ ID NO: 235228 - RNA, 11 nt, Molluscum contagiosum virus
uaucccagaaa

SEQ ID NO: 235229 - RNA, 20 nt, Molluscum contagiosum virus
uaucccagaaaacgcacugu

SEQ ID NO: 235230 - RNA, 21 nt, Molluscum contagiosum virus
uacuuugucgcacgagcaugu

SEQ ID NO: 235231 - RNA, 19 nt, Molluscum contagiosum virus
uagaagagcgguuccugcu

SEQ ID NO: 235232 - RNA, 12 nt, Molluscum contagiosum virus
uagaagaccaca

SEQ ID NO: 235233 - RNA, 15 nt, Molluscum contagiosum virus
uagaaugcguguggu

SEQ ID NO: 235234 - RNA, 23 nt, Molluscum contagiosum virus
uagacacgagcgcggcaacagca

SEQ ID NO: 235235 - RNA, 23 nt, Molluscum contagiosum virus
uagcguggcgcgcgagcugcuag

SEQ ID NO: 235236 - RNA, 19 nt, Molluscum contagiosum virus
uagcguugguaacaagagc

SEQ ID NO: 235237 - RNA, 23 nt, Molluscum contagiosum virus
uagcagacaacugcgucucaaga

SEQ ID NO: 235238 - RNA, 19 nt, Molluscum contagiosum virus
uagcgguguugcuguuucc

SEQ ID NO: 235239 - RNA, 14 nt, Molluscum contagiosum virus
uagcaaaugcgcug

SEQ ID NO: 235240 - RNA, 20 nt, Molluscum contagiosum virus
uagcacguuaaucacgauga

SEQ ID NO: 235241 - RNA, 14 nt, Molluscum contagiosum virus
cucuucaugaaaua

SEQ ID NO: 235242 - RNA, 19 nt, Molluscum contagiosum virus
cucuucaagcggucaggcc

SEQ ID NO: 235243 - RNA, 15 nt, Molluscum contagiosum virus
cugacaacacgagcc

SEQ ID NO: 235244 - RNA, 19 nt, Molluscum contagiosum virus
cugaucugcccgaccacca

SEQ ID NO: 235245 - RNA, 16 nt, Molluscum contagiosum virus
cugaucggaugcaaag

SEQ ID NO: 235246 - RNA, 14 nt, Molluscum contagiosum virus
cugaucguagucca

SEQ ID NO: 235247 - RNA, 21 nt, Molluscum contagiosum virus
cucugggcgucgcacaguuca

SEQ ID NO: 235248 - RNA, 22 nt, Molluscum contagiosum virus
cucugggcgucgcacaguucac

SEQ ID NO: 235249 - RNA, 19 nt, Molluscum contagiosum virus
cucuggucgagaugcucua

SEQ ID NO: 235250 - RNA, 17 nt, Molluscum contagiosum virus
cucugucccugcauaca

SEQ ID NO: 235251 - RNA, 16 nt, Molluscum contagiosum virus
cucucagagcauuagc

SEQ ID NO: 235252 - RNA, 23 nt, Molluscum contagiosum virus
cucuggcaaggauuacgcugccg

SEQ ID NO: 235253 - RNA, 13 nt, Molluscum contagiosum virus
cucuacaccagcu

SEQ ID NO: 235254 - RNA, 14 nt, Molluscum contagiosum virus
cucuacaccagcug

SEQ ID NO: 235255 - RNA, 14 nt, Molluscum contagiosum virus
cucuacgugcugca

SEQ ID NO: 235256 - RNA, 21 nt, Molluscum contagiosum virus
cucguguguccgcacgcacac

SEQ ID NO: 235257 - RNA, 21 nt, Molluscum contagiosum virus
cucguucgcgggcccgccuuu

SEQ ID NO: 235258 - RNA, 22 nt, Molluscum contagiosum virus
cucguugccgugcccaucuccu

SEQ ID NO: 235259 - RNA, 17 nt, Molluscum contagiosum virus
cucgucgaucaugucca

SEQ ID NO: 235260 - RNA, 20 nt, Molluscum contagiosum virus
cucgugcucggcgugaucuu

SEQ ID NO: 235261 - RNA, 13 nt, Molluscum contagiosum virus
cucgugcucucug

SEQ ID NO: 235262 - RNA, 11 nt, Molluscum contagiosum virus
cucgugcucuu

SEQ ID NO: 235263 - RNA, 19 nt, Molluscum contagiosum virus
cucguggcaacaacaugaa

SEQ ID NO: 235264 - RNA, 14 nt, Molluscum contagiosum virus
cucguacugcugca

SEQ ID NO: 235265 - RNA, 22 nt, Molluscum contagiosum virus
cucggcguggugcuggccaaca

SEQ ID NO: 235266 - RNA, 21 nt, Molluscum contagiosum virus
cucggacacacgcacccaaau

SEQ ID NO: 235267 - RNA, 12 nt, Molluscum contagiosum virus
cucggacacugg

SEQ ID NO: 235268 - RNA, 14 nt, Molluscum contagiosum virus
cucggcacaaaacc

SEQ ID NO: 235269 - RNA, 21 nt, Molluscum contagiosum virus
cucggcggccggauugccgca

SEQ ID NO: 235270 - RNA, 14 nt, Molluscum contagiosum virus
cucggcgugaucuu

SEQ ID NO: 235271 - RNA, 20 nt, Molluscum contagiosum virus
cugccgcgcaauacggugga

SEQ ID NO: 235272 - RNA, 21 nt, Molluscum contagiosum virus
cugccggggccggacguccau

SEQ ID NO: 235273 - RNA, 20 nt, Molluscum contagiosum virus
cugccuagguccacauuuca

SEQ ID NO: 235274 - RNA, 15 nt, Molluscum contagiosum virus
cugccucccaagcag

SEQ ID NO: 235275 - RNA, 18 nt, Molluscum contagiosum virus
cugcccgcgcacaacaag

SEQ ID NO: 235276 - RNA, 21 nt, Molluscum contagiosum virus
cugcccgcgcgcgacuacgca

SEQ ID NO: 235277 - RNA, 19 nt, Molluscum contagiosum virus
cugccagccgcucguccag

SEQ ID NO: 235278 - RNA, 18 nt, Molluscum contagiosum virus
cugccaggcggucuucca

SEQ ID NO: 235279 - RNA, 16 nt, Molluscum contagiosum virus
cugccacggcugcaag

SEQ ID NO: 235280 - RNA, 20 nt, Molluscum contagiosum virus
cugcaagcgugacucaccuc

SEQ ID NO: 235281 - RNA, 15 nt, Molluscum contagiosum virus
cugcaacguggcgcc

SEQ ID NO: 235282 - RNA, 12 nt, Molluscum contagiosum virus
cugcuggagcua

SEQ ID NO: 235283 - RNA, 16 nt, Molluscum contagiosum virus
cugcuggaguauggca

SEQ ID NO: 235284 - RNA, 15 nt, Molluscum contagiosum virus
cugcgcacacgucag

SEQ ID NO: 235285 - RNA, 14 nt, Molluscum contagiosum virus
cugcucugcgugua

SEQ ID NO: 235286 - RNA, 13 nt, Molluscum contagiosum virus
cugccuuugccaa

SEQ ID NO: 235287 - RNA, 19 nt, Molluscum contagiosum virus
cugccugugcccaguuauu

SEQ ID NO: 235288 - RNA, 21 nt, Molluscum contagiosum virus
cugcgaaggucaucaccagcc

SEQ ID NO: 235289 - RNA, 15 nt, Molluscum contagiosum virus
cugcgcagcauccuc

SEQ ID NO: 235290 - RNA, 23 nt, Molluscum contagiosum virus
cugcgccgcgcgcggugcugcgc

SEQ ID NO: 235291 - RNA, 13 nt, Molluscum contagiosum virus
cugcugcaggcaa

SEQ ID NO: 235292 - RNA, 15 nt, Molluscum contagiosum virus
cugcugcgcgaccgc

SEQ ID NO: 235293 - RNA, 17 nt, Molluscum contagiosum virus
cugcugcgcuacaugua

SEQ ID NO: 235294 - RNA, 17 nt, Molluscum contagiosum virus
cugcugggagcuugcac

SEQ ID NO: 235295 - RNA, 18 nt, Molluscum contagiosum virus
cugcugggagcuugcacg

SEQ ID NO: 235296 - RNA, 13 nt, Molluscum contagiosum virus
cugcuguccuuca

SEQ ID NO: 235297 - RNA, 22 nt, Molluscum contagiosum virus
cugcuggugcucgccugcaucu

SEQ ID NO: 235298 - RNA, 15 nt, Molluscum contagiosum virus
cugcugguggugcug

SEQ ID NO: 235299 - RNA, 13 nt, Molluscum contagiosum virus
cuggcugcugcgc

SEQ ID NO: 235300 - RNA, 12 nt, Molluscum contagiosum virus
cuggccugcaaa

SEQ ID NO: 235301 - RNA, 23 nt, Molluscum contagiosum virus
cuggcgcgcggagagcagugccg

SEQ ID NO: 235302 - RNA, 16 nt, Molluscum contagiosum virus
cuggcgcguccguuca

SEQ ID NO: 235303 - RNA, 21 nt, Molluscum contagiosum virus
cuggcgcucggcguggugcug

SEQ ID NO: 235304 - RNA, 15 nt, Molluscum contagiosum virus
cuggccaucgagcuu

SEQ ID NO: 235305 - RNA, 21 nt, Molluscum contagiosum virus
cuggccgaagucgcagcagcg

SEQ ID NO: 235306 - RNA, 13 nt, Molluscum contagiosum virus
cuggcccugcuag

SEQ ID NO: 235307 - RNA, 14 nt, Molluscum contagiosum virus
cuggccaacacuac

SEQ ID NO: 235308 - RNA, 18 nt, Molluscum contagiosum virus
cuggccaacccucgcaag

SEQ ID NO: 235309 - RNA, 18 nt, Molluscum contagiosum virus
cuggaaacacguggccaa

SEQ ID NO: 235310 - RNA, 20 nt, Molluscum contagiosum virus
cuggaaacacguggccaagg

SEQ ID NO: 235311 - RNA, 13 nt, Molluscum contagiosum virus
cugguucugcucg

SEQ ID NO: 235312 - RNA, 11 nt, Molluscum contagiosum virus
cuggugcugcg

SEQ ID NO: 235313 - RNA, 13 nt, Molluscum contagiosum virus
cuggugcacacac

SEQ ID NO: 235314 - RNA, 15 nt, Molluscum contagiosum virus
cuguacaugccgcag

SEQ ID NO: 235315 - RNA, 14 nt, Molluscum contagiosum virus
cuguacgugcugcc

SEQ ID NO: 235316 - RNA, 18 nt, Molluscum contagiosum virus
cuccaucaucgagcugca

SEQ ID NO: 235317 - RNA, 12 nt, Molluscum contagiosum virus
cuccaugucguc

SEQ ID NO: 235318 - RNA, 17 nt, Molluscum contagiosum virus
cuccguccuuucacaca

SEQ ID NO: 235319 - RNA, 21 nt, Molluscum contagiosum virus
cuccgggcagauagcaaccuc

SEQ ID NO: 235320 - RNA, 14 nt, Molluscum contagiosum virus
cuccugagaagcaa

SEQ ID NO: 235321 - RNA, 17 nt, Molluscum contagiosum virus
cuccugagaagcaaugc

SEQ ID NO: 235322 - RNA, 15 nt, Molluscum contagiosum virus
cuccugaggaagcaa

SEQ ID NO: 235323 - RNA, 18 nt, Molluscum contagiosum virus
cuccugaggaagcaagac

SEQ ID NO: 235324 - RNA, 23 nt, Molluscum contagiosum virus
cuccuggaacgagagugugcaug

SEQ ID NO: 235325 - RNA, 23 nt, Molluscum contagiosum virus
cuccuacacgacggacuucuugc

SEQ ID NO: 235326 - RNA, 14 nt, Molluscum contagiosum virus
cuccucgaccugca

SEQ ID NO: 235327 - RNA, 16 nt, Molluscum contagiosum virus
cucgcagcacaugcag

SEQ ID NO: 235328 - RNA, 23 nt, Molluscum contagiosum virus
cucgccgaagacgcguaccagcg

SEQ ID NO: 235329 - RNA, 17 nt, Molluscum contagiosum virus
cucgccgcaccacaacu

SEQ ID NO: 235330 - RNA, 13 nt, Molluscum contagiosum virus
cucgccggcacca

SEQ ID NO: 235331 - RNA, 18 nt, Molluscum contagiosum virus
cucgccggcgagaugcga

SEQ ID NO: 235332 - RNA, 18 nt, Molluscum contagiosum virus
cucgagcuccagggcuca

SEQ ID NO: 235333 - RNA, 14 nt, Molluscum contagiosum virus
cucgagcugcaucu

SEQ ID NO: 235334 - RNA, 21 nt, Molluscum contagiosum virus
cucgagggcgccgugcugcgu

SEQ ID NO: 235335 - RNA, 18 nt, Molluscum contagiosum virus
cucgagccgcacaaagaa

SEQ ID NO: 235336 - RNA, 21 nt, Molluscum contagiosum virus
cucgcugcugcccauacucga

SEQ ID NO: 235337 - RNA, 12 nt, Molluscum contagiosum virus
cucgccaugcug

SEQ ID NO: 235338 - RNA, 16 nt, Molluscum contagiosum virus
cucgcgagugugcaug

SEQ ID NO: 235339 - RNA, 19 nt, Molluscum contagiosum virus
cucgcgcacgaccacgugc

SEQ ID NO: 235340 - RNA, 19 nt, Molluscum contagiosum virus
cucgcgcguccgcaaagac

SEQ ID NO: 235341 - RNA, 15 nt, Molluscum contagiosum virus
cucgcgcugcuuccc

SEQ ID NO: 235342 - RNA, 18 nt, Molluscum contagiosum virus
cucgcgcuuccaguacga

SEQ ID NO: 235343 - RNA, 17 nt, Molluscum contagiosum virus
cucgcgggagagcacuu

SEQ ID NO: 235344 - RNA, 16 nt, Molluscum contagiosum virus
cucgaacgcaaggugu

SEQ ID NO: 235345 - RNA, 18 nt, Molluscum contagiosum virus
cuccuuccggagacacca

SEQ ID NO: 235346 - RNA, 21 nt, Molluscum contagiosum virus
cuccuuccggagacaccagcu

SEQ ID NO: 235347 - RNA, 22 nt, Molluscum contagiosum virus
cuccuuccggagacaccagcuc

SEQ ID NO: 235348 - RNA, 23 nt, Molluscum contagiosum virus
cucgagcacgccuccaagaagag

SEQ ID NO: 235349 - RNA, 17 nt, Molluscum contagiosum virus
cucgagcacguagugcu

SEQ ID NO: 235350 - RNA, 21 nt, Molluscum contagiosum virus
cucgagcacguagugcucguc

SEQ ID NO: 235351 - RNA, 15 nt, Molluscum contagiosum virus
cucgagcaggucauc

SEQ ID NO: 235352 - RNA, 20 nt, Molluscum contagiosum virus
cucgagcaggucaucgggcu

SEQ ID NO: 235353 - RNA, 17 nt, Molluscum contagiosum virus
cucgacaacgacaggaa

SEQ ID NO: 235354 - RNA, 19 nt, Molluscum contagiosum virus
cucgacgaggccuacagcg

SEQ ID NO: 235355 - RNA, 21 nt, Molluscum contagiosum virus
cucgacgaggccuacagcgcg

SEQ ID NO: 235356 - RNA, 23 nt, Molluscum contagiosum virus
cuccagcgccagcgggaccuggu

SEQ ID NO: 235357 - RNA, 22 nt, Molluscum contagiosum virus
cuccagggcacgaucgcgagac

SEQ ID NO: 235358 - RNA, 15 nt, Molluscum contagiosum virus
cuccagggcucaaga

SEQ ID NO: 235359 - RNA, 22 nt, Molluscum contagiosum virus
cuccaagaagaggccggcacaa

SEQ ID NO: 235360 - RNA, 13 nt, Molluscum contagiosum virus
cuccacaaagacg

SEQ ID NO: 235361 - RNA, 14 nt, Molluscum contagiosum virus
cuccaacaagcuca

SEQ ID NO: 235362 - RNA, 15 nt, Molluscum contagiosum virus
cuccaacaagcucau

SEQ ID NO: 235363 - RNA, 21 nt, Molluscum contagiosum virus
cucaccuuucucuuucucaag

SEQ ID NO: 235364 - RNA, 16 nt, Molluscum contagiosum virus
cucacgcgcuaccgca

SEQ ID NO: 235365 - RNA, 16 nt, Molluscum contagiosum virus
cucacgcguccacaaa

SEQ ID NO: 235366 - RNA, 18 nt, Molluscum contagiosum virus
cucacgcguccacaaaga

SEQ ID NO: 235367 - RNA, 19 nt, Molluscum contagiosum virus
cucacgcguccacaaagac

SEQ ID NO: 235368 - RNA, 12 nt, Molluscum contagiosum virus
cucacgcugccc

SEQ ID NO: 235369 - RNA, 12 nt, Molluscum contagiosum virus
cucacgugcuga

SEQ ID NO: 235370 - RNA, 22 nt, Molluscum contagiosum virus
cucacaugugcugccggcucaa

SEQ ID NO: 235371 - RNA, 12 nt, Molluscum contagiosum virus
cucacagguagu

SEQ ID NO: 235372 - RNA, 15 nt, Molluscum contagiosum virus
cucacagccguggag

SEQ ID NO: 235373 - RNA, 17 nt, Molluscum contagiosum virus
cucacagccguggaguc

SEQ ID NO: 235374 - RNA, 23 nt, Molluscum contagiosum virus
cucacagccguggaguccaugcc

SEQ ID NO: 235375 - RNA, 19 nt, Molluscum contagiosum virus
cucaauucaaguuugacaa

SEQ ID NO: 235376 - RNA, 14 nt, Molluscum contagiosum virus
cuauucaguguuuu

SEQ ID NO: 235377 - RNA, 20 nt, Molluscum contagiosum virus
cuagacuucuugguggacag

SEQ ID NO: 235378 - RNA, 18 nt, Molluscum contagiosum virus
cuagagcgcggcgcacaa

SEQ ID NO: 235379 - RNA, 11 nt, Molluscum contagiosum virus
cuagacacgag

SEQ ID NO: 235380 - RNA, 13 nt, Molluscum contagiosum virus
cuagacacgagcg

SEQ ID NO: 235381 - RNA, 23 nt, Molluscum contagiosum virus
cuaaggagcgagaagacauugcc

SEQ ID NO: 235382 - RNA, 22 nt, Molluscum contagiosum virus
cguuugccaggcaacgcacaaa

SEQ ID NO: 235383 - RNA, 14 nt, Molluscum contagiosum virus
cguuuuuucuuggu

SEQ ID NO: 235384 - RNA, 13 nt, Molluscum contagiosum virus
cguuuugcacuug

SEQ ID NO: 235385 - RNA, 16 nt, Molluscum contagiosum virus
cguuuugcacuuguca

SEQ ID NO: 235386 - RNA, 22 nt, Molluscum contagiosum virus
cuaucaggcgauaggacaugac

SEQ ID NO: 235387 - RNA, 15 nt, Molluscum contagiosum virus
cuagcaacuugcucu

SEQ ID NO: 235388 - RNA, 16 nt, Molluscum contagiosum virus
cuagcacgcauguacg

SEQ ID NO: 235389 - RNA, 22 nt, Molluscum contagiosum virus
cuagcagcgugcgcaccagcug

SEQ ID NO: 235390 - RNA, 14 nt, Molluscum contagiosum virus
cuagcuccacgugc

SEQ ID NO: 235391 - RNA, 18 nt, Molluscum contagiosum virus
ccuacaucgacaagcacg

SEQ ID NO: 235392 - RNA, 12 nt, Molluscum contagiosum virus
ccguugcugcgc

SEQ ID NO: 235393 - RNA, 14 nt, Molluscum contagiosum virus
ccguuggacaucag

SEQ ID NO: 235394 - RNA, 21 nt, Molluscum contagiosum virus
ccguucacgauccaugagaga

SEQ ID NO: 235395 - RNA, 11 nt, Molluscum contagiosum virus
ccguucacuug

SEQ ID NO: 235396 - RNA, 12 nt, Molluscum contagiosum virus
cgagacgcugcu

SEQ ID NO: 235397 - RNA, 19 nt, Molluscum contagiosum virus
cgagacggaaauguuguuu

SEQ ID NO: 235398 - RNA, 21 nt, Molluscum contagiosum virus
cgagacggaaauguuguuuga

SEQ ID NO: 235399 - RNA, 22 nt, Molluscum contagiosum virus
cgagaugcgguccgacucggug

SEQ ID NO: 235400 - RNA, 22 nt, Molluscum contagiosum virus
cgagacugacgccgauguccug

SEQ ID NO: 235401 - RNA, 12 nt, Molluscum contagiosum virus
cgagacugagug

SEQ ID NO: 235402 - RNA, 19 nt, Molluscum contagiosum virus
cgagacugagugcugagcc

SEQ ID NO: 235403 - RNA, 13 nt, Molluscum contagiosum virus
cgagagacaacaa

SEQ ID NO: 235404 - RNA, 14 nt, Molluscum contagiosum virus
cgacuuggggcucg

SEQ ID NO: 235405 - RNA, 20 nt, Molluscum contagiosum virus
cgagaagagggucgugcagg

SEQ ID NO: 235406 - RNA, 22 nt, Molluscum contagiosum virus
cgacgugcugcgcaaccucacu

SEQ ID NO: 235407 - RNA, 13 nt, Molluscum contagiosum virus
cgacuaucaggcg

SEQ ID NO: 235408 - RNA, 14 nt, Molluscum contagiosum virus
cgacucgcugccag

SEQ ID NO: 235409 - RNA, 19 nt, Molluscum contagiosum virus
cgacucggaugcgcugccg

SEQ ID NO: 235410 - RNA, 15 nt, Molluscum contagiosum virus
cgacucuggcuucuc

SEQ ID NO: 235411 - RNA, 17 nt, Molluscum contagiosum virus
ccuagaaacgacgggcg

SEQ ID NO: 235412 - RNA, 22 nt, Molluscum contagiosum virus
ccuacuccuuucgacgcugccu

SEQ ID NO: 235413 - RNA, 13 nt, Molluscum contagiosum virus
ccuacgcuaccug

SEQ ID NO: 235414 - RNA, 15 nt, Molluscum contagiosum virus
ccuacgcuaccugaa

SEQ ID NO: 235415 - RNA, 13 nt, Molluscum contagiosum virus
ccuacgugcugcg

SEQ ID NO: 235416 - RNA, 19 nt, Molluscum contagiosum virus
cgagggccguuggacauca

SEQ ID NO: 235417 - RNA, 21 nt, Molluscum contagiosum virus
cgagggaugcgcacacuugcg

SEQ ID NO: 235418 - RNA, 20 nt, Molluscum contagiosum virus
cgaggccugcguggacagca

SEQ ID NO: 235419 - RNA, 19 nt, Molluscum contagiosum virus
cgagucaaugacacgagcc

SEQ ID NO: 235420 - RNA, 21 nt, Molluscum contagiosum virus
cgagggcgggcacgugcugcu

SEQ ID NO: 235421 - RNA, 14 nt, Molluscum contagiosum virus
cgagugugugcauc

SEQ ID NO: 235422 - RNA, 17 nt, Molluscum contagiosum virus
cgaguccuacguuuuca

SEQ ID NO: 235423 - RNA, 22 nt, Molluscum contagiosum virus
cgaggucacucgcuacugcaac

SEQ ID NO: 235424 - RNA, 19 nt, Molluscum contagiosum virus
cgauacaaaacaugcugua

SEQ ID NO: 235425 - RNA, 15 nt, Molluscum contagiosum virus
cgagcguugucuuga

SEQ ID NO: 235426 - RNA, 17 nt, Molluscum contagiosum virus
cgagcucaaggacaucu

SEQ ID NO: 235427 - RNA, 16 nt, Molluscum contagiosum virus
cgagcgccgccagcuc

SEQ ID NO: 235428 - RNA, 15 nt, Molluscum contagiosum virus
cgagcgcgggcaaug

SEQ ID NO: 235429 - RNA, 15 nt, Molluscum contagiosum virus
cgagcgcgugcucuu

SEQ ID NO: 235430 - RNA, 19 nt, Molluscum contagiosum virus
cgagcgcuacaugcacgua

SEQ ID NO: 235431 - RNA, 14 nt, Molluscum contagiosum virus
cgagcgcuaccuga

SEQ ID NO: 235432 - RNA, 13 nt, Molluscum contagiosum virus
cgagcgcucugca

SEQ ID NO: 235433 - RNA, 23 nt, Molluscum contagiosum virus
cgagcugcaucuuuuuuaugcac

SEQ ID NO: 235434 - RNA, 22 nt, Molluscum contagiosum virus
cgagcugcccccgccaugccaa

SEQ ID NO: 235435 - RNA, 15 nt, Molluscum contagiosum virus
cgagcucuugcggaa

SEQ ID NO: 235436 - RNA, 13 nt, Molluscum contagiosum virus
cgaggaaaggcac

SEQ ID NO: 235437 - RNA, 14 nt, Molluscum contagiosum virus
cgaggaauaccugc

SEQ ID NO: 235438 - RNA, 21 nt, Molluscum contagiosum virus
cgaugucggaacccagaaaga

SEQ ID NO: 235439 - RNA, 21 nt, Molluscum contagiosum virus
cgaugugacaacaugugaucc

SEQ ID NO: 235440 - RNA, 12 nt, Molluscum contagiosum virus
cgaugugcaccu

SEQ ID NO: 235441 - RNA, 19 nt, Molluscum contagiosum virus
cgaugugcgcgcgacgugu

SEQ ID NO: 235442 - RNA, 17 nt, Molluscum contagiosum virus
cgauucacaucuugcua

SEQ ID NO: 235443 - RNA, 13 nt, Molluscum contagiosum virus
cgaugacaucugg

SEQ ID NO: 235444 - RNA, 18 nt, Molluscum contagiosum virus
cgauguacgcgugcagga

SEQ ID NO: 235445 - RNA, 16 nt, Molluscum contagiosum virus
cgaucaaggugcagaa

SEQ ID NO: 235446 - RNA, 17 nt, Molluscum contagiosum virus
cgaucgcggccaugcgc

SEQ ID NO: 235447 - RNA, 23 nt, Molluscum contagiosum virus
cgaucauguccacagccgugagc

SEQ ID NO: 235448 - RNA, 15 nt, Molluscum contagiosum virus
cgaucuuacaggcca

SEQ ID NO: 235449 - RNA, 19 nt, Molluscum contagiosum virus
cgaucucgcuagaguuaaa

SEQ ID NO: 235450 - RNA, 17 nt, Molluscum contagiosum virus
cgcccccguccgugcca

SEQ ID NO: 235451 - RNA, 22 nt, Molluscum contagiosum virus
cgcccgugcucgcgggccuuug

SEQ ID NO: 235452 - RNA, 18 nt, Molluscum contagiosum virus
cgcccgugucgggcugca

SEQ ID NO: 235453 - RNA, 22 nt, Molluscum contagiosum virus
cgcccgcgaaaaacgugacuga

SEQ ID NO: 235454 - RNA, 15 nt, Molluscum contagiosum virus
cgcccgcgcugcgca

SEQ ID NO: 235455 - RNA, 19 nt, Molluscum contagiosum virus
cgccgagcgcaaaugcauu

SEQ ID NO: 235456 - RNA, 16 nt, Molluscum contagiosum virus
cgccgaguacugcugc

SEQ ID NO: 235457 - RNA, 18 nt, Molluscum contagiosum virus
cgcccuccucgaccugca

SEQ ID NO: 235458 - RNA, 22 nt, Molluscum contagiosum virus
cgcccuuauacaaaguugacca

SEQ ID NO: 235459 - RNA, 19 nt, Molluscum contagiosum virus
cgccgcuccggucaccgcg

SEQ ID NO: 235460 - RNA, 17 nt, Molluscum contagiosum virus
cgccgcucgucgcugcg

SEQ ID NO: 235461 - RNA, 15 nt, Molluscum contagiosum virus
cgccgcuucuugacg

SEQ ID NO: 235462 - RNA, 15 nt, Molluscum contagiosum virus
cgccgcgcaccugga

SEQ ID NO: 235463 - RNA, 16 nt, Molluscum contagiosum virus
cgccgcaacauaguca

SEQ ID NO: 235464 - RNA, 12 nt, Molluscum contagiosum virus
cgcagugcucuu

SEQ ID NO: 235465 - RNA, 22 nt, Molluscum contagiosum virus
cgccaagaggacgagcugcuaa

SEQ ID NO: 235466 - RNA, 19 nt, Molluscum contagiosum virus
cgccacugggucuguucac

SEQ ID NO: 235467 - RNA, 21 nt, Molluscum contagiosum virus
cgccagaaaacaggcacuucg

SEQ ID NO: 235468 - RNA, 16 nt, Molluscum contagiosum virus
cgccagaacauugcca

SEQ ID NO: 235469 - RNA, 17 nt, Molluscum contagiosum virus
cgccagaacauugccac

SEQ ID NO: 235470 - RNA, 15 nt, Molluscum contagiosum virus
cgccagaagugaaau

SEQ ID NO: 235471 - RNA, 22 nt, Molluscum contagiosum virus
cgccaggaaaacggaaacagca

SEQ ID NO: 235472 - RNA, 13 nt, Molluscum contagiosum virus
cgcccaccagcag

SEQ ID NO: 235473 - RNA, 14 nt, Molluscum contagiosum virus
cgccugaaccuggg

SEQ ID NO: 235474 - RNA, 13 nt, Molluscum contagiosum virus
cgccugcacuucg

SEQ ID NO: 235475 - RNA, 15 nt, Molluscum contagiosum virus
cgccuggugcugcgc

SEQ ID NO: 235476 - RNA, 15 nt, Molluscum contagiosum virus
cgccuucguggagcc

SEQ ID NO: 235477 - RNA, 18 nt, Molluscum contagiosum virus
cgccuuuccggccuguaa

SEQ ID NO: 235478 - RNA, 13 nt, Molluscum contagiosum virus
cgccuuuguggac

SEQ ID NO: 235479 - RNA, 23 nt, Molluscum contagiosum virus
cgccuccguguccgacgccgcca

SEQ ID NO: 235480 - RNA, 14 nt, Molluscum contagiosum virus
cgccuccaagaaga

SEQ ID NO: 235481 - RNA, 18 nt, Molluscum contagiosum virus
cgccgugugcgugacacg

SEQ ID NO: 235482 - RNA, 19 nt, Molluscum contagiosum virus
cgccgugggcagcuucugc

SEQ ID NO: 235483 - RNA, 15 nt, Molluscum contagiosum virus
cgccgggcaccggcg

SEQ ID NO: 235484 - RNA, 14 nt, Molluscum contagiosum virus
cgccgcggcugccu

SEQ ID NO: 235485 - RNA, 18 nt, Molluscum contagiosum virus
cgcgaaaaacgugacuga

SEQ ID NO: 235486 - RNA, 20 nt, Molluscum contagiosum virus
cgcgaaagcgucgugcucca

SEQ ID NO: 235487 - RNA, 20 nt, Molluscum contagiosum virus
cgcgacaggggccacaagca

SEQ ID NO: 235488 - RNA, 23 nt, Molluscum contagiosum virus
cgcgacaggggccacaagcacgc

SEQ ID NO: 235489 - RNA, 16 nt, Molluscum contagiosum virus
cgcgaccaguacauca

SEQ ID NO: 235490 - RNA, 22 nt, Molluscum contagiosum virus
cgcgaacgagagacacgcacac

SEQ ID NO: 235491 - RNA, 20 nt, Molluscum contagiosum virus
cgcgaacgagggaugcacac

SEQ ID NO: 235492 - RNA, 22 nt, Molluscum contagiosum virus
cgcgagcaaagacguguguugu

SEQ ID NO: 235493 - RNA, 11 nt, Molluscum contagiosum virus
cgcgagcugcu

SEQ ID NO: 235494 - RNA, 17 nt, Molluscum contagiosum virus
cgcgccaagaacaagcu

SEQ ID NO: 235495 - RNA, 14 nt, Molluscum contagiosum virus
cgcgcaccuacaug

SEQ ID NO: 235496 - RNA, 15 nt, Molluscum contagiosum virus
cgcgcccgccgccca

SEQ ID NO: 235497 - RNA, 13 nt, Molluscum contagiosum virus
cgcgccgcugccc

SEQ ID NO: 235498 - RNA, 14 nt, Molluscum contagiosum virus
cgcgccagugcgug

SEQ ID NO: 235499 - RNA, 13 nt, Molluscum contagiosum virus
cgcgagugccagc

SEQ ID NO: 235500 - RNA, 14 nt, Molluscum contagiosum virus
cgcgagugugcaug

SEQ ID NO: 235501 - RNA, 14 nt, Molluscum contagiosum virus
cgcgagugugcgug

SEQ ID NO: 235502 - RNA, 14 nt, Molluscum contagiosum virus
cgcaucugccgcga

SEQ ID NO: 235503 - RNA, 21 nt, Molluscum contagiosum virus
cgcauucccguggaccucauc

SEQ ID NO: 235504 - RNA, 14 nt, Molluscum contagiosum virus
cgccaacacgagcg

SEQ ID NO: 235505 - RNA, 17 nt, Molluscum contagiosum virus
cgccaacacguuuucuu

SEQ ID NO: 235506 - RNA, 13 nt, Molluscum contagiosum virus
cgcaggagcaguc

SEQ ID NO: 235507 - RNA, 13 nt, Molluscum contagiosum virus
cgcaggaugcugg

SEQ ID NO: 235508 - RNA, 17 nt, Molluscum contagiosum virus
cgcagcccacgugccag

SEQ ID NO: 235509 - RNA, 18 nt, Molluscum contagiosum virus
cgcaggcacaaaacacaa

SEQ ID NO: 235510 - RNA, 14 nt, Molluscum contagiosum virus
cgcagggagcugcg

SEQ ID NO: 235511 - RNA, 21 nt, Molluscum contagiosum virus
cgcagggcgcgaaccuagaca

SEQ ID NO: 235512 - RNA, 17 nt, Molluscum contagiosum virus
cgcagucccagcaccgc

SEQ ID NO: 235513 - RNA, 18 nt, Molluscum contagiosum virus
cgcaacgucgcacuggcc

SEQ ID NO: 235514 - RNA, 17 nt, Molluscum contagiosum virus
cgcaaugcagugcacca

SEQ ID NO: 235515 - RNA, 10 nt, Molluscum contagiosum virus
cgcaagcacc

SEQ ID NO: 235516 - RNA, 18 nt, Molluscum contagiosum virus
cgcaagcgcugcucguag

SEQ ID NO: 235517 - RNA, 23 nt, Molluscum contagiosum virus
cgcaaguacaacccaaacauguc

SEQ ID NO: 235518 - RNA, 14 nt, Molluscum contagiosum virus
cgcaagugugcgca

SEQ ID NO: 235519 - RNA, 12 nt, Molluscum contagiosum virus
cgcaacgcuggc

SEQ ID NO: 235520 - RNA, 22 nt, Molluscum contagiosum virus
cgcaccagcugcaaacauugcc

SEQ ID NO: 235521 - RNA, 14 nt, Molluscum contagiosum virus
cgcacguggaguca

SEQ ID NO: 235522 - RNA, 16 nt, Molluscum contagiosum virus
cgcacguggagucacg

SEQ ID NO: 235523 - RNA, 15 nt, Molluscum contagiosum virus
cgcacaaaacacaaa

SEQ ID NO: 235524 - RNA, 12 nt, Molluscum contagiosum virus
cgcacacuugcg

SEQ ID NO: 235525 - RNA, 22 nt, Molluscum contagiosum virus
cgcacacuugcgcguccacaaa

SEQ ID NO: 235526 - RNA, 16 nt, Molluscum contagiosum virus
cgcacagaaagccaac

SEQ ID NO: 235527 - RNA, 18 nt, Molluscum contagiosum virus
cgcacagccccugcugcu

SEQ ID NO: 235528 - RNA, 16 nt, Molluscum contagiosum virus
cgcacuggcgcugcua

SEQ ID NO: 235529 - RNA, 18 nt, Molluscum contagiosum virus
cgcacuggcgcugcuaua

SEQ ID NO: 235530 - RNA, 20 nt, Molluscum contagiosum virus
cgcagaacacgggggcugcc

SEQ ID NO: 235531 - RNA, 15 nt, Molluscum contagiosum virus
cgggugccgccgugg

SEQ ID NO: 235532 - RNA, 15 nt, Molluscum contagiosum virus
cggugcgcaaagcaa

SEQ ID NO: 235533 - RNA, 23 nt, Molluscum contagiosum virus
cgguggcggcucugccgcgcaau

SEQ ID NO: 235534 - RNA, 22 nt, Molluscum contagiosum virus
cggugcucgccccuccccggcg

SEQ ID NO: 235535 - RNA, 15 nt, Molluscum contagiosum virus
cggugcugcugccaa

SEQ ID NO: 235536 - RNA, 21 nt, Molluscum contagiosum virus
cgucaacaugccuuucuucca

SEQ ID NO: 235537 - RNA, 22 nt, Molluscum contagiosum virus
cgucagggaugccagugcagug

SEQ ID NO: 235538 - RNA, 16 nt, Molluscum contagiosum virus
cguagccuagccauac

SEQ ID NO: 235539 - RNA, 15 nt, Molluscum contagiosum virus
cguacucgugucaca

SEQ ID NO: 235540 - RNA, 22 nt, Molluscum contagiosum virus
cguucacuugcgcgcgugccug

SEQ ID NO: 235541 - RNA, 19 nt, Molluscum contagiosum virus
cguugucuugaugcuguua

SEQ ID NO: 235542 - RNA, 22 nt, Molluscum contagiosum virus
cguugguaacaagagcuuacua

SEQ ID NO: 235543 - RNA, 17 nt, Molluscum contagiosum virus
cguugccggagcugaac

SEQ ID NO: 235544 - RNA, 22 nt, Molluscum contagiosum virus
cgugcgcaguuuuuuuccgcaa

SEQ ID NO: 235545 - RNA, 18 nt, Molluscum contagiosum virus
cgugcgaugaacccgcau

SEQ ID NO: 235546 - RNA, 20 nt, Molluscum contagiosum virus
cgugccccgcgcgugcaguu

SEQ ID NO: 235547 - RNA, 15 nt, Molluscum contagiosum virus
cgugcccgucuuucc

SEQ ID NO: 235548 - RNA, 18 nt, Molluscum contagiosum virus
cgugcccuggaccuccau

SEQ ID NO: 235549 - RNA, 13 nt, Molluscum contagiosum virus
cgugccgccggcg

SEQ ID NO: 235550 - RNA, 19 nt, Molluscum contagiosum virus
cgugccgcggacgccggcg

SEQ ID NO: 235551 - RNA, 14 nt, Molluscum contagiosum virus
cgugccagcucaua

SEQ ID NO: 235552 - RNA, 22 nt, Molluscum contagiosum virus
cgugcagagcaaggcgagucaa

SEQ ID NO: 235553 - RNA, 18 nt, Molluscum contagiosum virus
cgugcaagcccagcagcg

SEQ ID NO: 235554 - RNA, 16 nt, Molluscum contagiosum virus
cgugcaccucaagaag

SEQ ID NO: 235555 - RNA, 19 nt, Molluscum contagiosum virus
cgugcaccucccugugaac

SEQ ID NO: 235556 - RNA, 15 nt, Molluscum contagiosum virus
cgugcacgccgucuu

SEQ ID NO: 235557 - RNA, 17 nt, Molluscum contagiosum virus
cgugcacguccuccaau

SEQ ID NO: 235558 - RNA, 14 nt, Molluscum contagiosum virus
cgugcacugucuuu

SEQ ID NO: 235559 - RNA, 21 nt, Molluscum contagiosum virus
cgugugcguacugggagcuuu

SEQ ID NO: 235560 - RNA, 18 nt, Molluscum contagiosum virus
cgugcugucaguggacaa

SEQ ID NO: 235561 - RNA, 15 nt, Molluscum contagiosum virus
cgugcucguguuguu

SEQ ID NO: 235562 - RNA, 23 nt, Molluscum contagiosum virus
cgugcuggagggcacgcugcaca

SEQ ID NO: 235563 - RNA, 16 nt, Molluscum contagiosum virus
cgugcugcgcuaccac

SEQ ID NO: 235564 - RNA, 13 nt, Molluscum contagiosum virus
cgugcugcucaag

SEQ ID NO: 235565 - RNA, 14 nt, Molluscum contagiosum virus
cgugcugcucugcg

SEQ ID NO: 235566 - RNA, 17 nt, Molluscum contagiosum virus
cgugcggugacuugccg

SEQ ID NO: 235567 - RNA, 22 nt, Molluscum contagiosum virus
cgugcgcgacggcgagcucuuu

SEQ ID NO: 235568 - RNA, 21 nt, Molluscum contagiosum virus
cgugcgcgagacuuguguuga

SEQ ID NO: 235569 - RNA, 13 nt, Molluscum contagiosum virus
cgugcuacuacug

SEQ ID NO: 235570 - RNA, 16 nt, Molluscum contagiosum virus
cgugcucacgcugccc

SEQ ID NO: 235571 - RNA, 18 nt, Molluscum contagiosum virus
cgcucaaccgaucccggc

SEQ ID NO: 235572 - RNA, 17 nt, Molluscum contagiosum virus
cgcuccgagacugcuac

SEQ ID NO: 235573 - RNA, 15 nt, Molluscum contagiosum virus
cgcuccuucucaggg

SEQ ID NO: 235574 - RNA, 18 nt, Molluscum contagiosum virus
cgcuacccguugcugcgc

SEQ ID NO: 235575 - RNA, 17 nt, Molluscum contagiosum virus
cgcuaccugguggagca

SEQ ID NO: 235576 - RNA, 12 nt, Molluscum contagiosum virus
cgcuagugcaga

SEQ ID NO: 235577 - RNA, 15 nt, Molluscum contagiosum virus
cgcucugcucuugau

SEQ ID NO: 235578 - RNA, 14 nt, Molluscum contagiosum virus
cgcugcacaguuca

SEQ ID NO: 235579 - RNA, 19 nt, Molluscum contagiosum virus
cgcugagagacuucuugca

SEQ ID NO: 235580 - RNA, 19 nt, Molluscum contagiosum virus
cgcugagcaagcucaagaa

SEQ ID NO: 235581 - RNA, 14 nt, Molluscum contagiosum virus
cgcugaugcuagcg

SEQ ID NO: 235582 - RNA, 21 nt, Molluscum contagiosum virus
cgcugccuggugcacacacac

SEQ ID NO: 235583 - RNA, 16 nt, Molluscum contagiosum virus
cgcugcggacaagaca

SEQ ID NO: 235584 - RNA, 23 nt, Molluscum contagiosum virus
cgcugcuacaagcggugcagcua

SEQ ID NO: 235585 - RNA, 19 nt, Molluscum contagiosum virus
cgcugcuagagaaccugug

SEQ ID NO: 235586 - RNA, 18 nt, Molluscum contagiosum virus
cgcugcuauuaccugaga

SEQ ID NO: 235587 - RNA, 21 nt, Molluscum contagiosum virus
cgcugcucgcuugcccggagc

SEQ ID NO: 235588 - RNA, 17 nt, Molluscum contagiosum virus
cgcugcugcucuuccag

SEQ ID NO: 235589 - RNA, 14 nt, Molluscum contagiosum virus
cgcugcugcugcaa

SEQ ID NO: 235590 - RNA, 19 nt, Molluscum contagiosum virus
cgcugcuguccuucaagaa

SEQ ID NO: 235591 - RNA, 20 nt, Molluscum contagiosum virus
cgcugcuguccuucaagaac

SEQ ID NO: 235592 - RNA, 17 nt, Molluscum contagiosum virus
cgcuggcccacgcuggc

SEQ ID NO: 235593 - RNA, 22 nt, Molluscum contagiosum virus
cgcuggccgacguacuggugcc

SEQ ID NO: 235594 - RNA, 15 nt, Molluscum contagiosum virus
cgcgcugaugcuagc

SEQ ID NO: 235595 - RNA, 18 nt, Molluscum contagiosum virus
cgcgcugcacaccgagcg

SEQ ID NO: 235596 - RNA, 13 nt, Molluscum contagiosum virus
cgcgcugcuuccc

SEQ ID NO: 235597 - RNA, 16 nt, Molluscum contagiosum virus
cgcggcacugggugcc

SEQ ID NO: 235598 - RNA, 16 nt, Molluscum contagiosum virus
cgcgggagagcacuuc

SEQ ID NO: 235599 - RNA, 17 nt, Molluscum contagiosum virus
cgcgcucuacgccagcg

SEQ ID NO: 235600 - RNA, 15 nt, Molluscum contagiosum virus
cgcggcgcacggugu

SEQ ID NO: 235601 - RNA, 20 nt, Molluscum contagiosum virus
cgcggcgccgcagcacgcgu

SEQ ID NO: 235602 - RNA, 17 nt, Molluscum contagiosum virus
cgcggcguucccgcuca

SEQ ID NO: 235603 - RNA, 22 nt, Molluscum contagiosum virus
cgcggcucuggucgagaugcuc

SEQ ID NO: 235604 - RNA, 19 nt, Molluscum contagiosum virus
cgcgcggcagacgccagcg

SEQ ID NO: 235605 - RNA, 17 nt, Molluscum contagiosum virus
cgcgcgccucgccaaag

SEQ ID NO: 235606 - RNA, 15 nt, Molluscum contagiosum virus
cgcgcgacacgagcg

SEQ ID NO: 235607 - RNA, 12 nt, Molluscum contagiosum virus
cgcgcucaggac

SEQ ID NO: 235608 - RNA, 14 nt, Molluscum contagiosum virus
cgcgcggcgcagug

SEQ ID NO: 235609 - RNA, 18 nt, Molluscum contagiosum virus
cgcgcggcuaagcucugc

SEQ ID NO: 235610 - RNA, 14 nt, Molluscum contagiosum virus
cgcgcgguccgcca

SEQ ID NO: 235611 - RNA, 13 nt, Molluscum contagiosum virus
cgcgcgugcaguu

SEQ ID NO: 235612 - RNA, 15 nt, Molluscum contagiosum virus
cgcggugcagcugcc

SEQ ID NO: 235613 - RNA, 21 nt, Molluscum contagiosum virus
cgcggggcccucgagcaaugc

SEQ ID NO: 235614 - RNA, 14 nt, Molluscum contagiosum virus
cgcguacacgugca

SEQ ID NO: 235615 - RNA, 15 nt, Molluscum contagiosum virus
cgcguccgcaaagac

SEQ ID NO: 235616 - RNA, 17 nt, Molluscum contagiosum virus
cgcgucaagaucaaccg

SEQ ID NO: 235617 - RNA, 14 nt, Molluscum contagiosum virus
cgcguccacaaagg

SEQ ID NO: 235618 - RNA, 15 nt, Molluscum contagiosum virus
cgcguccaugcugau

SEQ ID NO: 235619 - RNA, 13 nt, Molluscum contagiosum virus
cgcgugugcagca

SEQ ID NO: 235620 - RNA, 18 nt, Molluscum contagiosum virus
cgcgugugguugcuugca

SEQ ID NO: 235621 - RNA, 15 nt, Molluscum contagiosum virus
cgcguucgcaaagac

SEQ ID NO: 235622 - RNA, 22 nt, Molluscum contagiosum virus
cgcguucuucguggcgcugggc

SEQ ID NO: 235623 - RNA, 14 nt, Molluscum contagiosum virus
cgcgugcuguccua

SEQ ID NO: 235624 - RNA, 15 nt, Molluscum contagiosum virus
cgcgugccccgggaa

SEQ ID NO: 235625 - RNA, 17 nt, Molluscum contagiosum virus
cgcgucuauccugucag

SEQ ID NO: 235626 - RNA, 23 nt, Molluscum contagiosum virus
cgcgugaggaggcggcacugcua

SEQ ID NO: 235627 - RNA, 20 nt, Molluscum contagiosum virus
cggccaugcuccugaucugc

SEQ ID NO: 235628 - RNA, 12 nt, Molluscum contagiosum virus
cggcacugcuag

SEQ ID NO: 235629 - RNA, 16 nt, Molluscum contagiosum virus
cgcuugcuuccaggcg

SEQ ID NO: 235630 - RNA, 11 nt, Molluscum contagiosum virus
cggcacaagcc

SEQ ID NO: 235631 - RNA, 17 nt, Molluscum contagiosum virus
cgcuugcgcaugugauu

SEQ ID NO: 235632 - RNA, 17 nt, Molluscum contagiosum virus
cggcagaccccuugcua

SEQ ID NO: 235633 - RNA, 15 nt, Molluscum contagiosum virus
cggcagcaugcucac

SEQ ID NO: 235634 - RNA, 17 nt, Molluscum contagiosum virus
cgcugggccgcaugcac

SEQ ID NO: 235635 - RNA, 18 nt, Molluscum contagiosum virus
cgcugggccgcaugcacc

SEQ ID NO: 235636 - RNA, 21 nt, Molluscum contagiosum virus
cgcuggugaccuucaccauca

SEQ ID NO: 235637 - RNA, 15 nt, Molluscum contagiosum virus
cgcuucgauaccgac

SEQ ID NO: 235638 - RNA, 20 nt, Molluscum contagiosum virus
cgcuucgugcgcggagacuu

SEQ ID NO: 235639 - RNA, 20 nt, Molluscum contagiosum virus
cgcuuagccaacagcgcaag

SEQ ID NO: 235640 - RNA, 16 nt, Molluscum contagiosum virus
cggcugugcccgcggc

SEQ ID NO: 235641 - RNA, 15 nt, Molluscum contagiosum virus
cggcuuacacacgca

SEQ ID NO: 235642 - RNA, 16 nt, Molluscum contagiosum virus
cggcuucgagaaugac

SEQ ID NO: 235643 - RNA, 21 nt, Molluscum contagiosum virus
cgggaauaccggagacaccag

SEQ ID NO: 235644 - RNA, 15 nt, Molluscum contagiosum virus
cgggaagcacagucc

SEQ ID NO: 235645 - RNA, 17 nt, Molluscum contagiosum virus
cgggaaggaacaaugcu

SEQ ID NO: 235646 - RNA, 20 nt, Molluscum contagiosum virus
cgggagcggccuccggagaa

SEQ ID NO: 235647 - RNA, 17 nt, Molluscum contagiosum virus
cgggacgacgaagaccu

SEQ ID NO: 235648 - RNA, 21 nt, Molluscum contagiosum virus
cgggagaacucuacacgugga

SEQ ID NO: 235649 - RNA, 12 nt, Molluscum contagiosum virus
cggcguggugcu

SEQ ID NO: 235650 - RNA, 15 nt, Molluscum contagiosum virus
cggcguucccgcuca

SEQ ID NO: 235651 - RNA, 15 nt, Molluscum contagiosum virus
cggcguuggcuuucu

SEQ ID NO: 235652 - RNA, 14 nt, Molluscum contagiosum virus
cggccuguucuucc

SEQ ID NO: 235653 - RNA, 13 nt, Molluscum contagiosum virus
cggcgcaagcacc

SEQ ID NO: 235654 - RNA, 18 nt, Molluscum contagiosum virus
cggcgcaaggacaccgcg

SEQ ID NO: 235655 - RNA, 12 nt, Molluscum contagiosum virus
cggcgcacaauc

SEQ ID NO: 235656 - RNA, 14 nt, Molluscum contagiosum virus
cggcgccacgagcg

SEQ ID NO: 235657 - RNA, 14 nt, Molluscum contagiosum virus
cggcggggcugcug

SEQ ID NO: 235658 - RNA, 14 nt, Molluscum contagiosum virus
cggcgcgugcugag

SEQ ID NO: 235659 - RNA, 16 nt, Molluscum contagiosum virus
cggcgcucaacaucca

SEQ ID NO: 235660 - RNA, 22 nt, Molluscum contagiosum virus
cggcgcucgccuuuccccggcg

SEQ ID NO: 235661 - RNA, 21 nt, Molluscum contagiosum virus
gaaaaaucccccgccaggaac

SEQ ID NO: 235662 - RNA, 22 nt, Molluscum contagiosum virus
cuuuuucuucagaggacaccgc

SEQ ID NO: 235663 - RNA, 19 nt, Molluscum contagiosum virus
cuuuuuccugaacaagcug

SEQ ID NO: 235664 - RNA, 21 nt, Molluscum contagiosum virus
cuuugacuacuacguggugcg

SEQ ID NO: 235665 - RNA, 22 nt, Molluscum contagiosum virus
cuuugcgaacgcgcaagugugc

SEQ ID NO: 235666 - RNA, 24 nt, Molluscum contagiosum virus
cuuucucacgcccgcgcugcgcaa

SEQ ID NO: 235667 - RNA, 13 nt, Molluscum contagiosum virus
cuuucucuauuca

SEQ ID NO: 235668 - RNA, 19 nt, Molluscum contagiosum virus
cuuucucuuucucaagauc

SEQ ID NO: 235669 - RNA, 21 nt, Molluscum contagiosum virus
cuuuggcgugaccauggacac

SEQ ID NO: 235670 - RNA, 19 nt, Molluscum contagiosum virus
cuuuguguuuuuguguaag

SEQ ID NO: 235671 - RNA, 16 nt, Molluscum contagiosum virus
cuuugugcgaccugcu

SEQ ID NO: 235672 - RNA, 18 nt, Molluscum contagiosum virus
cuuuguggucaagacugg

SEQ ID NO: 235673 - RNA, 16 nt, Molluscum contagiosum virus
cuuuguccugagccuu

SEQ ID NO: 235674 - RNA, 18 nt, Molluscum contagiosum virus
cuugugcaauuccgucca

SEQ ID NO: 235675 - RNA, 21 nt, Molluscum contagiosum virus
cuugugcgccugugcuggcga

SEQ ID NO: 235676 - RNA, 21 nt, Molluscum contagiosum virus
cuugugcgcgcaucagcacac

SEQ ID NO: 235677 - RNA, 15 nt, Molluscum contagiosum virus
cuuguuguugugaca

SEQ ID NO: 235678 - RNA, 16 nt, Molluscum contagiosum virus
cuuguuguugugacac

SEQ ID NO: 235679 - RNA, 17 nt, Molluscum contagiosum virus
cuuguuuguugucccac

SEQ ID NO: 235680 - RNA, 13 nt, Molluscum contagiosum virus
cuuucagagugac

SEQ ID NO: 235681 - RNA, 20 nt, Molluscum contagiosum virus
cuuucagagugacgcugcaa

SEQ ID NO: 235682 - RNA, 21 nt, Molluscum contagiosum virus
cuuucagagugacgcugcaag

SEQ ID NO: 235683 - RNA, 23 nt, Molluscum contagiosum virus
cuuucagagugacgcugcaagac

SEQ ID NO: 235684 - RNA, 12 nt, Molluscum contagiosum virus
cuuuacugcaag

SEQ ID NO: 235685 - RNA, 14 nt, Molluscum contagiosum virus
cuuuacugcaagau

SEQ ID NO: 235686 - RNA, 21 nt, Molluscum contagiosum virus
cuuuacugcaagaucuaucac

SEQ ID NO: 235687 - RNA, 23 nt, Molluscum contagiosum virus
cuugccacgcgggcccgugcuca

SEQ ID NO: 235688 - RNA, 17 nt, Molluscum contagiosum virus
cuugcagcgcagcagcg

SEQ ID NO: 235689 - RNA, 14 nt, Molluscum contagiosum virus
cuugcauguucucu

SEQ ID NO: 235690 - RNA, 18 nt, Molluscum contagiosum virus
cuugcacgggcaugcaca

SEQ ID NO: 235691 - RNA, 20 nt, Molluscum contagiosum virus
cuugcaagauggggucugau

SEQ ID NO: 235692 - RNA, 14 nt, Molluscum contagiosum virus
cuugcguacuugga

SEQ ID NO: 235693 - RNA, 22 nt, Molluscum contagiosum virus
cuugccgucgcgcauagugccg

SEQ ID NO: 235694 - RNA, 19 nt, Molluscum contagiosum virus
cuugcgcacacacuugcuc

SEQ ID NO: 235695 - RNA, 17 nt, Molluscum contagiosum virus
cuugcgcacgauguacu

SEQ ID NO: 235696 - RNA, 18 nt, Molluscum contagiosum virus
cuugcgcacggaccucaa

SEQ ID NO: 235697 - RNA, 22 nt, Molluscum contagiosum virus
cuugcgcacggaccucaaggag

SEQ ID NO: 235698 - RNA, 15 nt, Molluscum contagiosum virus
cuugcgcaugugauu

SEQ ID NO: 235699 - RNA, 18 nt, Molluscum contagiosum virus
cuugcgcguccacaaagg

SEQ ID NO: 235700 - RNA, 16 nt, Molluscum contagiosum virus
cuugcguguugaacuc

SEQ ID NO: 235701 - RNA, 20 nt, Molluscum contagiosum virus
cuugcucggacacacgcacc

SEQ ID NO: 235702 - RNA, 13 nt, Molluscum contagiosum virus
cuguauccuuggc

SEQ ID NO: 235703 - RNA, 12 nt, Molluscum contagiosum virus
cugucuugaaac

SEQ ID NO: 235704 - RNA, 19 nt, Molluscum contagiosum virus
cugugcuacgcgagcacug

SEQ ID NO: 235705 - RNA, 23 nt, Molluscum contagiosum virus
cugugcugacccccuccccagcg

SEQ ID NO: 235706 - RNA, 15 nt, Molluscum contagiosum virus
cugugcuucccgaaa

SEQ ID NO: 235707 - RNA, 14 nt, Molluscum contagiosum virus
cugugcgagccagu

SEQ ID NO: 235708 - RNA, 17 nt, Molluscum contagiosum virus
cugugcgccaacaacca

SEQ ID NO: 235709 - RNA, 16 nt, Molluscum contagiosum virus
gaacccagaaagaaga

SEQ ID NO: 235710 - RNA, 13 nt, Molluscum contagiosum virus
gaaccgcugcuuc

SEQ ID NO: 235711 - RNA, 16 nt, Molluscum contagiosum virus
gaaccgugcgagcuuu

SEQ ID NO: 235712 - RNA, 21 nt, Molluscum contagiosum virus
gaacgagaaaugcgcacacuu

SEQ ID NO: 235713 - RNA, 23 nt, Molluscum contagiosum virus
gaacgagaaaugcgcacacuugc

SEQ ID NO: 235714 - RNA, 17 nt, Molluscum contagiosum virus
gaacgagagacacgcac

SEQ ID NO: 235715 - RNA, 13 nt, Molluscum contagiosum virus
gaacacgacaugu

SEQ ID NO: 235716 - RNA, 21 nt, Molluscum contagiosum virus
gaacaccuccugcuuugcacg

SEQ ID NO: 235717 - RNA, 12 nt, Molluscum contagiosum virus
gaacaaggccaa

SEQ ID NO: 235718 - RNA, 14 nt, Molluscum contagiosum virus
gaacaauacaugcu

SEQ ID NO: 235719 - RNA, 19 nt, Molluscum contagiosum virus
gaacaacagcguguugcug

SEQ ID NO: 235720 - RNA, 15 nt, Molluscum contagiosum virus
gaacaacauggugcu

SEQ ID NO: 235721 - RNA, 16 nt, Molluscum contagiosum virus
gaacaacauggugcug

SEQ ID NO: 235722 - RNA, 21 nt, Molluscum contagiosum virus
gaacaacauggugcuggccau

SEQ ID NO: 235723 - RNA, 22 nt, Molluscum contagiosum virus
gaacaagaagcgcuucuuugcg

SEQ ID NO: 235724 - RNA, 15 nt, Molluscum contagiosum virus
gaaagcuucucgcca

SEQ ID NO: 235725 - RNA, 15 nt, Molluscum contagiosum virus
gaaauguaguucucg

SEQ ID NO: 235726 - RNA, 16 nt, Molluscum contagiosum virus
gaaagacaaagaccac

SEQ ID NO: 235727 - RNA, 15 nt, Molluscum contagiosum virus
gaaagcagcaaacug

SEQ ID NO: 235728 - RNA, 16 nt, Molluscum contagiosum virus
gaaagcgcacacuugc

SEQ ID NO: 235729 - RNA, 13 nt, Molluscum contagiosum virus
gaaagaugaagcu

SEQ ID NO: 235730 - RNA, 11 nt, Molluscum contagiosum virus
gaaacagccau

SEQ ID NO: 235731 - RNA, 12 nt, Molluscum contagiosum virus
gaaacagccaug

SEQ ID NO: 235732 - RNA, 15 nt, Molluscum contagiosum virus
gaaacagccaugugu

SEQ ID NO: 235733 - RNA, 21 nt, Molluscum contagiosum virus
gaaacucuccgacgugcugcg

SEQ ID NO: 235734 - RNA, 19 nt, Molluscum contagiosum virus
gaaacgcuggcgagcaaga

SEQ ID NO: 235735 - RNA, 21 nt, Molluscum contagiosum virus
gaaacacguggccaaggucuc

SEQ ID NO: 235736 - RNA, 13 nt, Molluscum contagiosum virus
gaagcacagucca

SEQ ID NO: 235737 - RNA, 13 nt, Molluscum contagiosum virus
gaacggacacggg

SEQ ID NO: 235738 - RNA, 20 nt, Molluscum contagiosum virus
gaacggcgugcgaguguucc

SEQ ID NO: 235739 - RNA, 13 nt, Molluscum contagiosum virus
gaacgaucucuga

SEQ ID NO: 235740 - RNA, 16 nt, Molluscum contagiosum virus
gaacgaggaaaggcac

SEQ ID NO: 235741 - RNA, 17 nt, Molluscum contagiosum virus
gaacgagggacacgcac

SEQ ID NO: 235742 - RNA, 19 nt, Molluscum contagiosum virus
gaacgagggacacgcacuu

SEQ ID NO: 235743 - RNA, 18 nt, Molluscum contagiosum virus
gaacgcgcgcucuacuaa

SEQ ID NO: 235744 - RNA, 22 nt, Molluscum contagiosum virus
gaacgcgcugcgccacugccac

SEQ ID NO: 235745 - RNA, 14 nt, Molluscum contagiosum virus
gaacgcggacacgu

SEQ ID NO: 235746 - RNA, 12 nt, Molluscum contagiosum virus
gaaggcaaccgc

SEQ ID NO: 235747 - RNA, 16 nt, Molluscum contagiosum virus
gaaggcucgagcugca

SEQ ID NO: 235748 - RNA, 19 nt, Molluscum contagiosum virus
gaaggcucgagcugcaucu

SEQ ID NO: 235749 - RNA, 16 nt, Molluscum contagiosum virus
gaagcgcuucuuugcg

SEQ ID NO: 235750 - RNA, 18 nt, Molluscum contagiosum virus
gaagcggcggacagcaaa

SEQ ID NO: 235751 - RNA, 22 nt, Molluscum contagiosum virus
gaagcggcggacagcaaacagc

SEQ ID NO: 235752 - RNA, 18 nt, Molluscum contagiosum virus
gaagcucacaucuguccc

SEQ ID NO: 235753 - RNA, 19 nt, Molluscum contagiosum virus
gaagcucacaucugucccu

SEQ ID NO: 235754 - RNA, 17 nt, Molluscum contagiosum virus
gaagcuggcgcggucca

SEQ ID NO: 235755 - RNA, 23 nt, Molluscum contagiosum virus
gaaucuacggcuguuguacugga

SEQ ID NO: 235756 - RNA, 11 nt, Molluscum contagiosum virus
gacaacaugug

SEQ ID NO: 235757 - RNA, 14 nt, Molluscum contagiosum virus
gacaacgugcugcu

SEQ ID NO: 235758 - RNA, 16 nt, Molluscum contagiosum virus
gacaagcgcgucugca

SEQ ID NO: 235759 - RNA, 18 nt, Molluscum contagiosum virus
gacaaggauggacaaaga

SEQ ID NO: 235760 - RNA, 19 nt, Molluscum contagiosum virus
gaucagccccgcgccagca

SEQ ID NO: 235761 - RNA, 17 nt, Molluscum contagiosum virus
gaucagcuccgacguga

SEQ ID NO: 235762 - RNA, 20 nt, Molluscum contagiosum virus
gaucaccacuggacacgugc

SEQ ID NO: 235763 - RNA, 19 nt, Molluscum contagiosum virus
gauacaguacgacaaaggc

SEQ ID NO: 235764 - RNA, 16 nt, Molluscum contagiosum virus
gaugaacgcgcugcgc

SEQ ID NO: 235765 - RNA, 19 nt, Molluscum contagiosum virus
gaucuuccgcgacgagcuc

SEQ ID NO: 235766 - RNA, 13 nt, Molluscum contagiosum virus
gaucuucucaaga

SEQ ID NO: 235767 - RNA, 20 nt, Molluscum contagiosum virus
gaucuucuucuugcgcaccu

SEQ ID NO: 235768 - RNA, 23 nt, Molluscum contagiosum virus
gauggagcucacgcucauggaca

SEQ ID NO: 235769 - RNA, 17 nt, Molluscum contagiosum virus
gaugagggcgauacaaa

SEQ ID NO: 235770 - RNA, 13 nt, Molluscum contagiosum virus
gaugugcuagcug

SEQ ID NO: 235771 - RNA, 18 nt, Molluscum contagiosum virus
gauguccuugaugccgug

SEQ ID NO: 235772 - RNA, 18 nt, Molluscum contagiosum virus
gauucgcacgaccacgcu

SEQ ID NO: 235773 - RNA, 21 nt, Molluscum contagiosum virus
gauguuccgcgugagagccau

SEQ ID NO: 235774 - RNA, 18 nt, Molluscum contagiosum virus
gauggcgcagcacuucga

SEQ ID NO: 235775 - RNA, 16 nt, Molluscum contagiosum virus
gauggcgcagcuccua

SEQ ID NO: 235776 - RNA, 23 nt, Molluscum contagiosum virus
gauguagaacgccaggaacauca

SEQ ID NO: 235777 - RNA, 15 nt, Molluscum contagiosum virus
gcaaggcgagucaau

SEQ ID NO: 235778 - RNA, 20 nt, Molluscum contagiosum virus
gcaaggccgcgcccaagaag

SEQ ID NO: 235779 - RNA, 18 nt, Molluscum contagiosum virus
gcaaguacaacccaaaca

SEQ ID NO: 235780 - RNA, 14 nt, Molluscum contagiosum virus
gcaagcgcaccuuu

SEQ ID NO: 235781 - RNA, 17 nt, Molluscum contagiosum virus
gcaagcucagccucuac

SEQ ID NO: 235782 - RNA, 21 nt, Molluscum contagiosum virus
gcaagcucgaugccguuuucu

SEQ ID NO: 235783 - RNA, 17 nt, Molluscum contagiosum virus
gcaaggaaaacugcauc

SEQ ID NO: 235784 - RNA, 15 nt, Molluscum contagiosum virus
gcaaggaagcaacaa

SEQ ID NO: 235785 - RNA, 23 nt, Molluscum contagiosum virus
gcaaggaccgggagcauagcaag

SEQ ID NO: 235786 - RNA, 21 nt, Molluscum contagiosum virus
gcaagcccggaagcuugcuca

SEQ ID NO: 235787 - RNA, 22 nt, Molluscum contagiosum virus
gcaaggcguaagagcgugaaca

SEQ ID NO: 235788 - RNA, 15 nt, Molluscum contagiosum virus
gcaagggcuccuucu

SEQ ID NO: 235789 - RNA, 17 nt, Molluscum contagiosum virus
gcaauggcaggugcgca

SEQ ID NO: 235790 - RNA, 14 nt, Molluscum contagiosum virus
gcaaugcagugcac

SEQ ID NO: 235791 - RNA, 20 nt, Molluscum contagiosum virus
gcaaucacggcuguaaugug

SEQ ID NO: 235792 - RNA, 23 nt, Molluscum contagiosum virus
gcaaucacggcuguaaugugcug

SEQ ID NO: 235793 - RNA, 13 nt, Molluscum contagiosum virus
gcacacacuugca

SEQ ID NO: 235794 - RNA, 18 nt, Molluscum contagiosum virus
gcacacgcaccgccuggu

SEQ ID NO: 235795 - RNA, 20 nt, Molluscum contagiosum virus
gcacacgcgcgcgugcugcu

SEQ ID NO: 235796 - RNA, 21 nt, Molluscum contagiosum virus
gcacacucacgcguccacaaa

SEQ ID NO: 235797 - RNA, 23 nt, Molluscum contagiosum virus
gcacacucacgcguccacaaaga

SEQ ID NO: 235798 - RNA, 23 nt, Molluscum contagiosum virus
gcacacucgcgcguccgcaaaga

SEQ ID NO: 235799 - RNA, 22 nt, Molluscum contagiosum virus
gcaccuuuggugcagaucucgc

SEQ ID NO: 235800 - RNA, 18 nt, Molluscum contagiosum virus
gcacgcgcuggugcgcga

SEQ ID NO: 235801 - RNA, 15 nt, Molluscum contagiosum virus
gcacgcggaaacaag

SEQ ID NO: 235802 - RNA, 15 nt, Molluscum contagiosum virus
gcacgcgcacuugcc

SEQ ID NO: 235803 - RNA, 23 nt, Molluscum contagiosum virus
gcacgauguacuccaccaugggc

SEQ ID NO: 235804 - RNA, 21 nt, Molluscum contagiosum virus
gcacgcacgcgucggucacca

SEQ ID NO: 235805 - RNA, 17 nt, Molluscum contagiosum virus
gcacgcacggagcacaa

SEQ ID NO: 235806 - RNA, 20 nt, Molluscum contagiosum virus
gcacgccgcucucgugcaaa

SEQ ID NO: 235807 - RNA, 15 nt, Molluscum contagiosum virus
gcacagaaagccaac

SEQ ID NO: 235808 - RNA, 18 nt, Molluscum contagiosum virus
gcaccgagugcuggccga

SEQ ID NO: 235809 - RNA, 18 nt, Molluscum contagiosum virus
gcaccgccuggugcugcg

SEQ ID NO: 235810 - RNA, 20 nt, Molluscum contagiosum virus
gcaccggcgcgagaugcucg

SEQ ID NO: 235811 - RNA, 23 nt, Molluscum contagiosum virus
gcaccgcgggcuggacugugcuu

SEQ ID NO: 235812 - RNA, 15 nt, Molluscum contagiosum virus
gcaccugcaggaaag

SEQ ID NO: 235813 - RNA, 16 nt, Molluscum contagiosum virus
gauucggccaaugugu

SEQ ID NO: 235814 - RNA, 18 nt, Molluscum contagiosum virus
gauugagccggacuugua

SEQ ID NO: 235815 - RNA, 14 nt, Molluscum contagiosum virus
gauugucaagcacu

SEQ ID NO: 235816 - RNA, 12 nt, Molluscum contagiosum virus
gcaaaguucucg

SEQ ID NO: 235817 - RNA, 17 nt, Molluscum contagiosum virus
gcaaagccucucucgug

SEQ ID NO: 235818 - RNA, 16 nt, Molluscum contagiosum virus
gcaagauacacauugc

SEQ ID NO: 235819 - RNA, 13 nt, Molluscum contagiosum virus
gcaagaugacgac

SEQ ID NO: 235820 - RNA, 20 nt, Molluscum contagiosum virus
gcaacaagaguugucuucca

SEQ ID NO: 235821 - RNA, 16 nt, Molluscum contagiosum virus
gacacacgcacccaaa

SEQ ID NO: 235822 - RNA, 21 nt, Molluscum contagiosum virus
gacacacgcuugcgcauguga

SEQ ID NO: 235823 - RNA, 17 nt, Molluscum contagiosum virus
gacacgagcgcggcaac

SEQ ID NO: 235824 - RNA, 12 nt, Molluscum contagiosum virus
gacacggagcgg

SEQ ID NO: 235825 - RNA, 14 nt, Molluscum contagiosum virus
gacacgcacacucg

SEQ ID NO: 235826 - RNA, 15 nt, Molluscum contagiosum virus
gacacgcucaucucg

SEQ ID NO: 235827 - RNA, 18 nt, Molluscum contagiosum virus
gacggagacagugacaga

SEQ ID NO: 235828 - RNA, 23 nt, Molluscum contagiosum virus
gacacguagcccaggaacaucug

SEQ ID NO: 235829 - RNA, 14 nt, Molluscum contagiosum virus
gacgcgagacugug

SEQ ID NO: 235830 - RNA, 22 nt, Molluscum contagiosum virus
gacgcuccgagcgaggacgaaa

SEQ ID NO: 235831 - RNA, 17 nt, Molluscum contagiosum virus
gacggaggugguggcca

SEQ ID NO: 235832 - RNA, 21 nt, Molluscum contagiosum virus
gacggaguccucgacaaugag

SEQ ID NO: 235833 - RNA, 18 nt, Molluscum contagiosum virus
gacggcgcugcgcgugga

SEQ ID NO: 235834 - RNA, 15 nt, Molluscum contagiosum virus
gacgggaaccgugcu

SEQ ID NO: 235835 - RNA, 21 nt, Molluscum contagiosum virus
gacggugcaaccgcugcucga

SEQ ID NO: 235836 - RNA, 17 nt, Molluscum contagiosum virus
gacgucggggcgcgugc

SEQ ID NO: 235837 - RNA, 21 nt, Molluscum contagiosum virus
gacgucuggcucguacugcug

SEQ ID NO: 235838 - RNA, 17 nt, Molluscum contagiosum virus
gacgugcacgcacgcgc

SEQ ID NO: 235839 - RNA, 21 nt, Molluscum contagiosum virus
gacgugcacgugguuugcucg

SEQ ID NO: 235840 - RNA, 15 nt, Molluscum contagiosum virus
gacgugcuacuacug

SEQ ID NO: 235841 - RNA, 17 nt, Molluscum contagiosum virus
gacgugcuacuacugua

SEQ ID NO: 235842 - RNA, 22 nt, Molluscum contagiosum virus
gacucgcgggaccgcagacaaa

SEQ ID NO: 235843 - RNA, 22 nt, Molluscum contagiosum virus
gacuccuuugcgagcacuguac

SEQ ID NO: 235844 - RNA, 17 nt, Molluscum contagiosum virus
gagaccuuccuccaggg

SEQ ID NO: 235845 - RNA, 16 nt, Molluscum contagiosum virus
gagacgcugcugcaca

SEQ ID NO: 235846 - RNA, 19 nt, Molluscum contagiosum virus
gagacguugccggagcuga

SEQ ID NO: 235847 - RNA, 12 nt, Molluscum contagiosum virus
gagacaccagcu

SEQ ID NO: 235848 - RNA, 18 nt, Molluscum contagiosum virus
gagacaccagcuccgccg

SEQ ID NO: 235849 - RNA, 15 nt, Molluscum contagiosum virus
gagacacgaguuucu

SEQ ID NO: 235850 - RNA, 20 nt, Molluscum contagiosum virus
gagacacgaguuucuucacg

SEQ ID NO: 235851 - RNA, 21 nt, Molluscum contagiosum virus
gagaccuacgucaagcaggca

SEQ ID NO: 235852 - RNA, 13 nt, Molluscum contagiosum virus
gagacaugcacac

SEQ ID NO: 235853 - RNA, 17 nt, Molluscum contagiosum virus
gacugagccgcaagcac

SEQ ID NO: 235854 - RNA, 13 nt, Molluscum contagiosum virus
gacugagggcgcu

SEQ ID NO: 235855 - RNA, 14 nt, Molluscum contagiosum virus
gacucggacacugg

SEQ ID NO: 235856 - RNA, 12 nt, Molluscum contagiosum virus
gacuguguuccc

SEQ ID NO: 235857 - RNA, 13 nt, Molluscum contagiosum virus
gagaagugcuccg

SEQ ID NO: 235858 - RNA, 20 nt, Molluscum contagiosum virus
gagaagugcuccgcacgugg

SEQ ID NO: 235859 - RNA, 21 nt, Molluscum contagiosum virus
gagaagugcuccgcacgugga

SEQ ID NO: 235860 - RNA, 19 nt, Molluscum contagiosum virus
gagaaguucugcacagcac

SEQ ID NO: 235861 - RNA, 20 nt, Molluscum contagiosum virus
gagaaugggagggggacaag

SEQ ID NO: 235862 - RNA, 22 nt, Molluscum contagiosum virus
gagaaugggagggggacaagga

SEQ ID NO: 235863 - RNA, 21 nt, Molluscum contagiosum virus
gaggaguagcgugcgccugca

SEQ ID NO: 235864 - RNA, 14 nt, Molluscum contagiosum virus
gaggaggugcucug

SEQ ID NO: 235865 - RNA, 16 nt, Molluscum contagiosum virus
gagccguggaugaaca

SEQ ID NO: 235866 - RNA, 22 nt, Molluscum contagiosum virus
gagcccuugaucgacauggagc

SEQ ID NO: 235867 - RNA, 16 nt, Molluscum contagiosum virus
gagccgcugcuccugc

SEQ ID NO: 235868 - RNA, 14 nt, Molluscum contagiosum virus
gagccgcuggccga

SEQ ID NO: 235869 - RNA, 20 nt, Molluscum contagiosum virus
gagcccuaucgcaaucugac

SEQ ID NO: 235870 - RNA, 11 nt, Molluscum contagiosum virus
gagccggcugc

SEQ ID NO: 235871 - RNA, 19 nt, Molluscum contagiosum virus
gaggccggagacguaccca

SEQ ID NO: 235872 - RNA, 17 nt, Molluscum contagiosum virus
gaggccuacgugcugcg

SEQ ID NO: 235873 - RNA, 21 nt, Molluscum contagiosum virus
gaggcgcgcucuacgagacuc

SEQ ID NO: 235874 - RNA, 16 nt, Molluscum contagiosum virus
gaggcgcuagugcaga

SEQ ID NO: 235875 - RNA, 16 nt, Molluscum contagiosum virus
gaggcaaucuguccag

SEQ ID NO: 235876 - RNA, 15 nt, Molluscum contagiosum virus
gaggcccaggccaug

SEQ ID NO: 235877 - RNA, 19 nt, Molluscum contagiosum virus
gaggccaaggucuucagga

SEQ ID NO: 235878 - RNA, 21 nt, Molluscum contagiosum virus
gaggccaaggucuucaggaac

SEQ ID NO: 235879 - RNA, 14 nt, Molluscum contagiosum virus
gaggccagcacaag

SEQ ID NO: 235880 - RNA, 13 nt, Molluscum contagiosum virus
gagcaggacgugc

SEQ ID NO: 235881 - RNA, 19 nt, Molluscum contagiosum virus
gagcaggacgugcacgugg

SEQ ID NO: 235882 - RNA, 18 nt, Molluscum contagiosum virus
gagcagggcuacgaguuc

SEQ ID NO: 235883 - RNA, 17 nt, Molluscum contagiosum virus
gagcaggucggccagca

SEQ ID NO: 235884 - RNA, 15 nt, Molluscum contagiosum virus
gagcauagcaagaug

SEQ ID NO: 235885 - RNA, 16 nt, Molluscum contagiosum virus
gagcaucugcgcgugc

SEQ ID NO: 235886 - RNA, 16 nt, Molluscum contagiosum virus
gagcauuagcagcgag

SEQ ID NO: 235887 - RNA, 15 nt, Molluscum contagiosum virus
gagagacaugcacac

SEQ ID NO: 235888 - RNA, 19 nt, Molluscum contagiosum virus
gagagcacuucucgccgca

SEQ ID NO: 235889 - RNA, 14 nt, Molluscum contagiosum virus
gagagcagugccgc

SEQ ID NO: 235890 - RNA, 14 nt, Molluscum contagiosum virus
gagagcaugcuguc

SEQ ID NO: 235891 - RNA, 22 nt, Molluscum contagiosum virus
gagagcaugcugucucuguccc

SEQ ID NO: 235892 - RNA, 23 nt, Molluscum contagiosum virus
gagagcuccggcugcuccucgag

SEQ ID NO: 235893 - RNA, 19 nt, Molluscum contagiosum virus
gagagccgccuuugcgcug

SEQ ID NO: 235894 - RNA, 13 nt, Molluscum contagiosum virus
gagggcacgcugc

SEQ ID NO: 235895 - RNA, 16 nt, Molluscum contagiosum virus
gagggcacgcugcaca

SEQ ID NO: 235896 - RNA, 19 nt, Molluscum contagiosum virus
gagggacacgcacuugcgc

SEQ ID NO: 235897 - RNA, 20 nt, Molluscum contagiosum virus
gaggcuagugccauugugac

SEQ ID NO: 235898 - RNA, 14 nt, Molluscum contagiosum virus
gaguccacugccaa

SEQ ID NO: 235899 - RNA, 17 nt, Molluscum contagiosum virus
gagucacgaccgaccca

SEQ ID NO: 235900 - RNA, 15 nt, Molluscum contagiosum virus
gagggcgaggccaag

SEQ ID NO: 235901 - RNA, 20 nt, Molluscum contagiosum virus
gaguccccgagcagcgggga

SEQ ID NO: 235902 - RNA, 15 nt, Molluscum contagiosum virus
gagucgcgccuggag

SEQ ID NO: 235903 - RNA, 20 nt, Molluscum contagiosum virus
gagucuccacgucgucccug

SEQ ID NO: 235904 - RNA, 21 nt, Molluscum contagiosum virus
gagugaucuccacaugccuuc

SEQ ID NO: 235905 - RNA, 15 nt, Molluscum contagiosum virus
gagugacgcugcaag

SEQ ID NO: 235906 - RNA, 23 nt, Molluscum contagiosum virus
gagugucgagcuucggacgagcu

SEQ ID NO: 235907 - RNA, 20 nt, Molluscum contagiosum virus
gagugcugagccacaaacac

SEQ ID NO: 235908 - RNA, 16 nt, Molluscum contagiosum virus
gagugcgggucacaag

SEQ ID NO: 235909 - RNA, 15 nt, Molluscum contagiosum virus
gauaacaucugcuau

SEQ ID NO: 235910 - RNA, 13 nt, Molluscum contagiosum virus
gauaaaagcacag

SEQ ID NO: 235911 - RNA, 14 nt, Molluscum contagiosum virus
gauaaaagcacagu

SEQ ID NO: 235912 - RNA, 15 nt, Molluscum contagiosum virus
gauaaaagcacaguc

SEQ ID NO: 235913 - RNA, 17 nt, Molluscum contagiosum virus
gauaaaagcacagucca

SEQ ID NO: 235914 - RNA, 17 nt, Molluscum contagiosum virus
acugugcuccugaggaa

SEQ ID NO: 235915 - RNA, 20 nt, Molluscum contagiosum virus
acugucguaacaauggacac

SEQ ID NO: 235916 - RNA, 21 nt, Molluscum contagiosum virus
acuguucggaacuuagcccca

SEQ ID NO: 235917 - RNA, 17 nt, Molluscum contagiosum virus
acuucacacgucuugca

SEQ ID NO: 235918 - RNA, 20 nt, Molluscum contagiosum virus
acuucuccgcgcugcacuac

SEQ ID NO: 235919 - RNA, 12 nt, Molluscum contagiosum virus
acucaacaagcu

SEQ ID NO: 235920 - RNA, 13 nt, Molluscum contagiosum virus
acucaacaagcug

SEQ ID NO: 235921 - RNA, 14 nt, Molluscum contagiosum virus
acuccguacagcuc

SEQ ID NO: 235922 - RNA, 15 nt, Molluscum contagiosum virus
acuccguacagcucc

SEQ ID NO: 235923 - RNA, 14 nt, Molluscum contagiosum virus
acuccagcguggug

SEQ ID NO: 235924 - RNA, 17 nt, Molluscum contagiosum virus
acuccagcgugguguuc

SEQ ID NO: 235925 - RNA, 13 nt, Molluscum contagiosum virus
acuggacugagcc

SEQ ID NO: 235926 - RNA, 15 nt, Molluscum contagiosum virus
acuggaggugaguca

SEQ ID NO: 235927 - RNA, 21 nt, Molluscum contagiosum virus
acugcggacgggaagcuuuca

SEQ ID NO: 235928 - RNA, 13 nt, Molluscum contagiosum virus
acugcguugucuc

SEQ ID NO: 235929 - RNA, 19 nt, Molluscum contagiosum virus
acugcagcagcuccuccac

SEQ ID NO: 235930 - RNA, 21 nt, Molluscum contagiosum virus
acuccuuccggagacaccagc

SEQ ID NO: 235931 - RNA, 23 nt, Molluscum contagiosum virus
acuccuuccggagacaccagcuc

SEQ ID NO: 235932 - RNA, 19 nt, Molluscum contagiosum virus
acuccuuucgacgcugccu

SEQ ID NO: 235933 - RNA, 20 nt, Molluscum contagiosum virus
acuccuuugcgagcacugua

SEQ ID NO: 235934 - RNA, 21 nt, Molluscum contagiosum virus
acucgagaagagggucgugca

SEQ ID NO: 235935 - RNA, 18 nt, Molluscum contagiosum virus
acucgauggacgccagcu

SEQ ID NO: 235936 - RNA, 17 nt, Molluscum contagiosum virus
acuaccuggggcugcuu

SEQ ID NO: 235937 - RNA, 20 nt, Molluscum contagiosum virus
acuacgugcucgaguucaac

SEQ ID NO: 235938 - RNA, 14 nt, Molluscum contagiosum virus
acuacgcgcugcua

SEQ ID NO: 235939 - RNA, 15 nt, Molluscum contagiosum virus
acuacgcgcugcuag

SEQ ID NO: 235940 - RNA, 11 nt, Molluscum contagiosum virus
acuaccacagc

SEQ ID NO: 235941 - RNA, 17 nt, Molluscum contagiosum virus
acuaccacagccauuaa

SEQ ID NO: 235942 - RNA, 15 nt, Molluscum contagiosum virus
acuacaucgcucucu

SEQ ID NO: 235943 - RNA, 21 nt, Molluscum contagiosum virus
acgugccccgcgcgugcaguu

SEQ ID NO: 235944 - RNA, 11 nt, Molluscum contagiosum virus
acgugcccuac

SEQ ID NO: 235945 - RNA, 19 nt, Molluscum contagiosum virus
acgugcuccgaguccagcu

SEQ ID NO: 235946 - RNA, 16 nt, Molluscum contagiosum virus
acgugcucgaguucaa

SEQ ID NO: 235947 - RNA, 22 nt, Molluscum contagiosum virus
acgugcugcgccgccugcucuc

SEQ ID NO: 235948 - RNA, 23 nt, Molluscum contagiosum virus
acgugggcgaacugcccggcggc

SEQ ID NO: 235949 - RNA, 22 nt, Molluscum contagiosum virus
acguggucgcgcgcgcucugcc

SEQ ID NO: 235950 - RNA, 13 nt, Molluscum contagiosum virus
acguggugcucgu

SEQ ID NO: 235951 - RNA, 22 nt, Molluscum contagiosum virus
acgugcugcugcagaacugccu

SEQ ID NO: 235952 - RNA, 14 nt, Molluscum contagiosum virus
acgugcugcucaag

SEQ ID NO: 235953 - RNA, 13 nt, Molluscum contagiosum virus
acguguccaugca

SEQ ID NO: 235954 - RNA, 12 nt, Molluscum contagiosum virus
acgugugcucug

SEQ ID NO: 235955 - RNA, 15 nt, Molluscum contagiosum virus
acguuuucuuucaug

SEQ ID NO: 235956 - RNA, 21 nt, Molluscum contagiosum virus
acggcggcgcucaacauccaa

SEQ ID NO: 235957 - RNA, 18 nt, Molluscum contagiosum virus
acgggaagcugcacgugc

SEQ ID NO: 235958 - RNA, 14 nt, Molluscum contagiosum virus
acgggagucacuuc

SEQ ID NO: 235959 - RNA, 13 nt, Molluscum contagiosum virus
acgggcgccagcu

SEQ ID NO: 235960 - RNA, 17 nt, Molluscum contagiosum virus
acgguaaacucuugcac

SEQ ID NO: 235961 - RNA, 17 nt, Molluscum contagiosum virus
acguccguugcacgugc

SEQ ID NO: 235962 - RNA, 14 nt, Molluscum contagiosum virus
acgucgcacuggcc

SEQ ID NO: 235963 - RNA, 18 nt, Molluscum contagiosum virus
acgucgcacuggccugca

SEQ ID NO: 235964 - RNA, 15 nt, Molluscum contagiosum virus
accgagcgcuacgac

SEQ ID NO: 235965 - RNA, 12 nt, Molluscum contagiosum virus
acccgccagcuu

SEQ ID NO: 235966 - RNA, 20 nt, Molluscum contagiosum virus
acccgcucgugaagcuguca

SEQ ID NO: 235967 - RNA, 18 nt, Molluscum contagiosum virus
acccgcaggaaaggcacc

SEQ ID NO: 235968 - RNA, 23 nt, Molluscum contagiosum virus
acccgcgaacgagggaugcacac

SEQ ID NO: 235969 - RNA, 13 nt, Molluscum contagiosum virus
accgccugcucuc

SEQ ID NO: 235970 - RNA, 15 nt, Molluscum contagiosum virus
accgcguggacaaca

SEQ ID NO: 235971 - RNA, 19 nt, Molluscum contagiosum virus
accgcgcccgccagcaugg

SEQ ID NO: 235972 - RNA, 14 nt, Molluscum contagiosum virus
accuacgaggugcu

SEQ ID NO: 235973 - RNA, 14 nt, Molluscum contagiosum virus
accuacgcuaccug

SEQ ID NO: 235974 - RNA, 16 nt, Molluscum contagiosum virus
accuacuugcucgugu

SEQ ID NO: 235975 - RNA, 17 nt, Molluscum contagiosum virus
accggagacaccagcuc

SEQ ID NO: 235976 - RNA, 23 nt, Molluscum contagiosum virus
accgcugcuauuaccugagaucc

SEQ ID NO: 235977 - RNA, 23 nt, Molluscum contagiosum virus
accgcguuuguggcgacacggag

SEQ ID NO: 235978 - RNA, 22 nt, Molluscum contagiosum virus
acauuuacuucgggcgcaauca

SEQ ID NO: 235979 - RNA, 22 nt, Molluscum contagiosum virus
accaagaacagagaaaggcacc

SEQ ID NO: 235980 - RNA, 23 nt, Molluscum contagiosum virus
acauuucuccuccggggcgcaag

SEQ ID NO: 235981 - RNA, 13 nt, Molluscum contagiosum virus
accacaacugaaa

SEQ ID NO: 235982 - RNA, 20 nt, Molluscum contagiosum virus
accacaagcaguaccugcua

SEQ ID NO: 235983 - RNA, 15 nt, Molluscum contagiosum virus
accccgaaaggcacc

SEQ ID NO: 235984 - RNA, 13 nt, Molluscum contagiosum virus
accaccagcacca

SEQ ID NO: 235985 - RNA, 16 nt, Molluscum contagiosum virus
accacagucggugcca

SEQ ID NO: 235986 - RNA, 18 nt, Molluscum contagiosum virus
accacagucggugccaga

SEQ ID NO: 235987 - RNA, 24 nt, Molluscum contagiosum virus
accccguacggcgcauccuccacg

SEQ ID NO: 235988 - RNA, 17 nt, Molluscum contagiosum virus
accccuguaacaaggaa

SEQ ID NO: 235989 - RNA, 18 nt, Molluscum contagiosum virus
accccuguaacaaggaaa

SEQ ID NO: 235990 - RNA, 13 nt, Molluscum contagiosum virus
accccuugcuuca

SEQ ID NO: 235991 - RNA, 16 nt, Molluscum contagiosum virus
acccgcaacaaggaaa

SEQ ID NO: 235992 - RNA, 15 nt, Molluscum contagiosum virus
acccgagcugugcca

SEQ ID NO: 235993 - RNA, 18 nt, Molluscum contagiosum virus
accugugcccuguccaca

SEQ ID NO: 235994 - RNA, 19 nt, Molluscum contagiosum virus
accugugcccuguccacaa

SEQ ID NO: 235995 - RNA, 20 nt, Molluscum contagiosum virus
accugugcccuguccacaaa

SEQ ID NO: 235996 - RNA, 14 nt, Molluscum contagiosum virus
accuguaugaucug

SEQ ID NO: 235997 - RNA, 22 nt, Molluscum contagiosum virus
accugggcgccgcgcugaugcu

SEQ ID NO: 235998 - RNA, 14 nt, Molluscum contagiosum virus
accuguucuuucag

SEQ ID NO: 235999 - RNA, 18 nt, Molluscum contagiosum virus
accugcaggaaaggcacc

SEQ ID NO: 236000 - RNA, 15 nt, Molluscum contagiosum virus
accugcggcucgcac

SEQ ID NO: 236001 - RNA, 18 nt, Molluscum contagiosum virus
acgacgguaaacucuugc

SEQ ID NO: 236002 - RNA, 15 nt, Molluscum contagiosum virus
acgacgcgaucuucc

SEQ ID NO: 236003 - RNA, 13 nt, Molluscum contagiosum virus
acgacgagcacua

SEQ ID NO: 236004 - RNA, 13 nt, Molluscum contagiosum virus
acgacgaugcaaa

SEQ ID NO: 236005 - RNA, 14 nt, Molluscum contagiosum virus
acgacgaugcaaac

SEQ ID NO: 236006 - RNA, 14 nt, Molluscum contagiosum virus
acgacagaccccug

SEQ ID NO: 236007 - RNA, 16 nt, Molluscum contagiosum virus
acgagcgaguugagca

SEQ ID NO: 236008 - RNA, 17 nt, Molluscum contagiosum virus
acgagccgcugcuccug

SEQ ID NO: 236009 - RNA, 16 nt, Molluscum contagiosum virus
acgagcaccgaacaaa

SEQ ID NO: 236010 - RNA, 14 nt, Molluscum contagiosum virus
acgagcagcugcug

SEQ ID NO: 236011 - RNA, 15 nt, Molluscum contagiosum virus
acgagcgcuaccuga

SEQ ID NO: 236012 - RNA, 14 nt, Molluscum contagiosum virus
acgaggaaaggcac

SEQ ID NO: 236013 - RNA, 21 nt, Molluscum contagiosum virus
acgaggacugggaacccgugg

SEQ ID NO: 236014 - RNA, 14 nt, Molluscum contagiosum virus
acgacgucuucgac

SEQ ID NO: 236015 - RNA, 14 nt, Molluscum contagiosum virus
acgacgugcugcug

SEQ ID NO: 236016 - RNA, 18 nt, Molluscum contagiosum virus
acgacuguauccuuggca

SEQ ID NO: 236017 - RNA, 13 nt, Molluscum contagiosum virus
acgagagcgcaug

SEQ ID NO: 236018 - RNA, 15 nt, Molluscum contagiosum virus
acgagagacacgcac

SEQ ID NO: 236019 - RNA, 20 nt, Molluscum contagiosum virus
acgagagacacgcacacucg

SEQ ID NO: 236020 - RNA, 15 nt, Molluscum contagiosum virus
acgauuuuuucgugu

SEQ ID NO: 236021 - RNA, 23 nt, Molluscum contagiosum virus
acgauuccgcuguacgugcugcc

SEQ ID NO: 236022 - RNA, 20 nt, Molluscum contagiosum virus
acgcaacugcccgccauuuc

SEQ ID NO: 236023 - RNA, 23 nt, Molluscum contagiosum virus
acgcaaggugugcgcgcugcacg

SEQ ID NO: 236024 - RNA, 19 nt, Molluscum contagiosum virus
acgcaaguacaacccaaac

SEQ ID NO: 236025 - RNA, 16 nt, Molluscum contagiosum virus
acgcacaaaacacaaa

SEQ ID NO: 236026 - RNA, 20 nt, Molluscum contagiosum virus
acgcacagccccugcugcuc

SEQ ID NO: 236027 - RNA, 16 nt, Molluscum contagiosum virus
acgccgacaacaguga

SEQ ID NO: 236028 - RNA, 23 nt, Molluscum contagiosum virus
acgccgugggcagcuucugcucg

SEQ ID NO: 236029 - RNA, 17 nt, Molluscum contagiosum virus
acgccuagccugcagua

SEQ ID NO: 236030 - RNA, 13 nt, Molluscum contagiosum virus
acgccuccaagaa

SEQ ID NO: 236031 - RNA, 22 nt, Molluscum contagiosum virus
acgaggucacucgcuacugcaa

SEQ ID NO: 236032 - RNA, 21 nt, Molluscum contagiosum virus
acgaggugcgcgcaacacugc

SEQ ID NO: 236033 - RNA, 23 nt, Molluscum contagiosum virus
acgaggccuacagcgcgcugcac

SEQ ID NO: 236034 - RNA, 19 nt, Molluscum contagiosum virus
acgaggccuacgugcugcg

SEQ ID NO: 236035 - RNA, 14 nt, Molluscum contagiosum virus
acgagggacacgca

SEQ ID NO: 236036 - RNA, 19 nt, Molluscum contagiosum virus
acgagggacacgcacuugc

SEQ ID NO: 236037 - RNA, 21 nt, Molluscum contagiosum virus
acgagggaugcgcacacuugc

SEQ ID NO: 236038 - RNA, 14 nt, Molluscum contagiosum virus
acgauguacuccac

SEQ ID NO: 236039 - RNA, 16 nt, Molluscum contagiosum virus
acgauggccacgcaga

SEQ ID NO: 236040 - RNA, 14 nt, Molluscum contagiosum virus
acgcgcgacaucuu

SEQ ID NO: 236041 - RNA, 21 nt, Molluscum contagiosum virus
acgccugcuagcggccuguuc

SEQ ID NO: 236042 - RNA, 18 nt, Molluscum contagiosum virus
acgcgcuggugaccuuca

SEQ ID NO: 236043 - RNA, 17 nt, Molluscum contagiosum virus
acgcgcguucuuugugc

SEQ ID NO: 236044 - RNA, 20 nt, Molluscum contagiosum virus
acgcgccagugcgugcacug

SEQ ID NO: 236045 - RNA, 20 nt, Molluscum contagiosum virus
acgcgccgcgcgagugccag

SEQ ID NO: 236046 - RNA, 17 nt, Molluscum contagiosum virus
acgcgacgccccggcgc

SEQ ID NO: 236047 - RNA, 16 nt, Molluscum contagiosum virus
acgcgacggugugccg

SEQ ID NO: 236048 - RNA, 14 nt, Molluscum contagiosum virus
acgcgagacugugc

SEQ ID NO: 236049 - RNA, 20 nt, Molluscum contagiosum virus
acgcgagcucuugcggaaaa

SEQ ID NO: 236050 - RNA, 20 nt, Molluscum contagiosum virus
acgcgaaacuggacugagcc

SEQ ID NO: 236051 - RNA, 16 nt, Molluscum contagiosum virus
acgcgaaguuccugca

SEQ ID NO: 236052 - RNA, 16 nt, Molluscum contagiosum virus
acggcacccgccagcu

SEQ ID NO: 236053 - RNA, 15 nt, Molluscum contagiosum virus
acggcagaccccuug

SEQ ID NO: 236054 - RNA, 23 nt, Molluscum contagiosum virus
acggccggcgggcgcgugcucac

SEQ ID NO: 236055 - RNA, 21 nt, Molluscum contagiosum virus
acgcgucgcgcgccgcaaaag

SEQ ID NO: 236056 - RNA, 13 nt, Molluscum contagiosum virus
acggcaaacgcca

SEQ ID NO: 236057 - RNA, 12 nt, Molluscum contagiosum virus
acaaucucugcg

SEQ ID NO: 236058 - RNA, 20 nt, Molluscum contagiosum virus
acaaguccgcggcucugaca

SEQ ID NO: 236059 - RNA, 19 nt, Molluscum contagiosum virus
acaagaaaaaacaacaaga

SEQ ID NO: 236060 - RNA, 14 nt, Molluscum contagiosum virus
acaagagcuuacua

SEQ ID NO: 236061 - RNA, 16 nt, Molluscum contagiosum virus
acaagaucaaggucac

SEQ ID NO: 236062 - RNA, 19 nt, Molluscum contagiosum virus
acaagauggcgcagcacuu

SEQ ID NO: 236063 - RNA, 22 nt, Molluscum contagiosum virus
acaagcucauccaccugcgcaa

SEQ ID NO: 236064 - RNA, 13 nt, Molluscum contagiosum virus
acaagcucgaggc

SEQ ID NO: 236065 - RNA, 21 nt, Molluscum contagiosum virus
acaagcuuucucacgcgcuac

SEQ ID NO: 236066 - RNA, 15 nt, Molluscum contagiosum virus
acaaggaaaaggcac

SEQ ID NO: 236067 - RNA, 22 nt, Molluscum contagiosum virus
acaagcaccgccugcugcagcu

SEQ ID NO: 236068 - RNA, 16 nt, Molluscum contagiosum virus
acaagccguccgccuc

SEQ ID NO: 236069 - RNA, 15 nt, Molluscum contagiosum virus
acaagcggugcagcu

SEQ ID NO: 236070 - RNA, 14 nt, Molluscum contagiosum virus
acaaggcugcguua

SEQ ID NO: 236071 - RNA, 17 nt, Molluscum contagiosum virus
acaaggauggacaaaga

SEQ ID NO: 236072 - RNA, 13 nt, Molluscum contagiosum virus
acaaggaaaggca

SEQ ID NO: 236073 - RNA, 15 nt, Molluscum contagiosum virus
acaaggaggcuuucu

SEQ ID NO: 236074 - RNA, 19 nt, Molluscum contagiosum virus
acaaggaggucaugaccaa

SEQ ID NO: 236075 - RNA, 22 nt, Molluscum contagiosum virus
acaaggaggucaugaccaagga

SEQ ID NO: 236076 - RNA, 17 nt, Molluscum contagiosum virus
acaaccagacgugcuac

SEQ ID NO: 236077 - RNA, 12 nt, Molluscum contagiosum virus
acaacaugugau

SEQ ID NO: 236078 - RNA, 19 nt, Molluscum contagiosum virus
acaacacucgugcucgugu

SEQ ID NO: 236079 - RNA, 14 nt, Molluscum contagiosum virus
acaacgagcucucc

SEQ ID NO: 236080 - RNA, 13 nt, Molluscum contagiosum virus
acaacucugcucg

SEQ ID NO: 236081 - RNA, 18 nt, Molluscum contagiosum virus
acaaaaaacaacucugcu

SEQ ID NO: 236082 - RNA, 13 nt, Molluscum contagiosum virus
acaaacgugcaug

SEQ ID NO: 236083 - RNA, 12 nt, Molluscum contagiosum virus
acaaaacaugcu

SEQ ID NO: 236084 - RNA, 21 nt, Molluscum contagiosum virus
acaaaauggcugcgaccaaga

SEQ ID NO: 236085 - RNA, 22 nt, Molluscum contagiosum virus
acaaaauggcugcgaccaagac

SEQ ID NO: 236086 - RNA, 16 nt, Molluscum contagiosum virus
acaaacauugugacaa

SEQ ID NO: 236087 - RNA, 17 nt, Molluscum contagiosum virus
acaaacauugugacaaa

SEQ ID NO: 236088 - RNA, 19 nt, Molluscum contagiosum virus
acaaacauugugacaaaga

SEQ ID NO: 236089 - RNA, 21 nt, Molluscum contagiosum virus
acaacacgcuguugcugcugc

SEQ ID NO: 236090 - RNA, 23 nt, Molluscum contagiosum virus
acaccagcuggcuacgcuggacu

SEQ ID NO: 236091 - RNA, 22 nt, Molluscum contagiosum virus
acacauugccguugccaguagc

SEQ ID NO: 236092 - RNA, 11 nt, Molluscum contagiosum virus
acacacuugca

SEQ ID NO: 236093 - RNA, 22 nt, Molluscum contagiosum virus
acacacucgcgcguccacaagg

SEQ ID NO: 236094 - RNA, 13 nt, Molluscum contagiosum virus
acaauuacuccag

SEQ ID NO: 236095 - RNA, 11 nt, Molluscum contagiosum virus
acacacacucg

SEQ ID NO: 236096 - RNA, 18 nt, Molluscum contagiosum virus
acacugcgaaggucauca

SEQ ID NO: 236097 - RNA, 20 nt, Molluscum contagiosum virus
acacuggugcgcgugacaca

SEQ ID NO: 236098 - RNA, 16 nt, Molluscum contagiosum virus
acacuuccugcuagaa

SEQ ID NO: 236099 - RNA, 18 nt, Molluscum contagiosum virus
acacuugcgcguccacaa

SEQ ID NO: 236100 - RNA, 21 nt, Molluscum contagiosum virus
acacuugcgcguccacaaagg

SEQ ID NO: 236101 - RNA, 22 nt, Molluscum contagiosum virus
acacuugcgcguucgcaaagac

SEQ ID NO: 236102 - RNA, 21 nt, Molluscum contagiosum virus
acagaggcccgucuccacaaa

SEQ ID NO: 236103 - RNA, 13 nt, Molluscum contagiosum virus
acacccagguuca

SEQ ID NO: 236104 - RNA, 19 nt, Molluscum contagiosum virus
acaccggcgcgcugaucac

SEQ ID NO: 236105 - RNA, 23 nt, Molluscum contagiosum virus
acacccggcgcccgccaccaugc

SEQ ID NO: 236106 - RNA, 22 nt, Molluscum contagiosum virus
acaccugugcccuguccacaaa

SEQ ID NO: 236107 - RNA, 13 nt, Molluscum contagiosum virus
acaccuccugcuu

SEQ ID NO: 236108 - RNA, 22 nt, Molluscum contagiosum virus
acacucacgcguccacaaagac

SEQ ID NO: 236109 - RNA, 18 nt, Molluscum contagiosum virus
acacucgcgcguccacaa

SEQ ID NO: 236110 - RNA, 22 nt, Molluscum contagiosum virus
acacucgcgcguccgcaaagac

SEQ ID NO: 236111 - RNA, 17 nt, Molluscum contagiosum virus
acacucgacuugcuaug

SEQ ID NO: 236112 - RNA, 20 nt, Molluscum contagiosum virus
acacucgacuugcuaugcua

SEQ ID NO: 236113 - RNA, 12 nt, Molluscum contagiosum virus
acagcagccgca

SEQ ID NO: 236114 - RNA, 16 nt, Molluscum contagiosum virus
acagcacggcacgugc

SEQ ID NO: 236115 - RNA, 12 nt, Molluscum contagiosum virus
acagcaugaacu

SEQ ID NO: 236116 - RNA, 10 nt, Molluscum contagiosum virus
acagccaugu

SEQ ID NO: 236117 - RNA, 22 nt, Molluscum contagiosum virus
acaggguuccgcgccugcccau

SEQ ID NO: 236118 - RNA, 18 nt, Molluscum contagiosum virus
acaggggccacaagcacg

SEQ ID NO: 236119 - RNA, 18 nt, Molluscum contagiosum virus
acauacgcacucguggca

SEQ ID NO: 236120 - RNA, 20 nt, Molluscum contagiosum virus
acaguaacugcugcagugug

SEQ ID NO: 236121 - RNA, 19 nt, Molluscum contagiosum virus
acauugccguugccaguag

SEQ ID NO: 236122 - RNA, 20 nt, Molluscum contagiosum virus
acauuccucggcgcacacuc

SEQ ID NO: 236123 - RNA, 15 nt, Molluscum contagiosum virus
acauccgcuaccugg

SEQ ID NO: 236124 - RNA, 15 nt, Molluscum contagiosum virus
acauccggcacgugc

SEQ ID NO: 236125 - RNA, 22 nt, Molluscum contagiosum virus
acauccacaugaccaagcacau

SEQ ID NO: 236126 - RNA, 21 nt, Molluscum contagiosum virus
acauccuugauaaaagcacag

SEQ ID NO: 236127 - RNA, 18 nt, Molluscum contagiosum virus
aggauuuaaauggcgcgc

SEQ ID NO: 236128 - RNA, 15 nt, Molluscum contagiosum virus
aggccagcacaagcc

SEQ ID NO: 236129 - RNA, 12 nt, Molluscum contagiosum virus
aggccgugcuca

SEQ ID NO: 236130 - RNA, 23 nt, Molluscum contagiosum virus
aggccguccccggaaagcagcaa

SEQ ID NO: 236131 - RNA, 18 nt, Molluscum contagiosum virus
aggccgcgugaacaauac

SEQ ID NO: 236132 - RNA, 22 nt, Molluscum contagiosum virus
aggccggagacguacccaugau

SEQ ID NO: 236133 - RNA, 20 nt, Molluscum contagiosum virus
aggccggccguggcgugcuu

SEQ ID NO: 236134 - RNA, 18 nt, Molluscum contagiosum virus
aggaagcaacaacagcgu

SEQ ID NO: 236135 - RNA, 14 nt, Molluscum contagiosum virus
aggaaguagaucac

SEQ ID NO: 236136 - RNA, 17 nt, Molluscum contagiosum virus
aggacagcuugcugcug

SEQ ID NO: 236137 - RNA, 13 nt, Molluscum contagiosum virus
aggacagugucuu

SEQ ID NO: 236138 - RNA, 17 nt, Molluscum contagiosum virus
aggacagugucuuguca

SEQ ID NO: 236139 - RNA, 18 nt, Molluscum contagiosum virus
aggaggcggcacugcuag

SEQ ID NO: 236140 - RNA, 12 nt, Molluscum contagiosum virus
agcuugcugcug

SEQ ID NO: 236141 - RNA, 16 nt, Molluscum contagiosum virus
agcuaaucagcgccau

SEQ ID NO: 236142 - RNA, 15 nt, Molluscum contagiosum virus
agcuucggacgagcu

SEQ ID NO: 236143 - RNA, 13 nt, Molluscum contagiosum virus
agcuugagcacac

SEQ ID NO: 236144 - RNA, 16 nt, Molluscum contagiosum virus
agcuaaaagagcugcu

SEQ ID NO: 236145 - RNA, 19 nt, Molluscum contagiosum virus
agcguggcgcgcgagcugc

SEQ ID NO: 236146 - RNA, 21 nt, Molluscum contagiosum virus
agcguggcgcgcgagcugcua

SEQ ID NO: 236147 - RNA, 22 nt, Molluscum contagiosum virus
agcguggcgcgcgagcugcuag

SEQ ID NO: 236148 - RNA, 15 nt, Molluscum contagiosum virus
agcgguugaccagcu

SEQ ID NO: 236149 - RNA, 16 nt, Molluscum contagiosum virus
agcgugcauagugggc

SEQ ID NO: 236150 - RNA, 15 nt, Molluscum contagiosum virus
agcgugcgcaccagc

SEQ ID NO: 236151 - RNA, 19 nt, Molluscum contagiosum virus
agcgugcgcaccagcugca

SEQ ID NO: 236152 - RNA, 18 nt, Molluscum contagiosum virus
agcggcgacuugcugcgg

SEQ ID NO: 236153 - RNA, 23 nt, Molluscum contagiosum virus
agcggcgccgacaacgugcugcu

SEQ ID NO: 236154 - RNA, 18 nt, Molluscum contagiosum virus
agcggcgccgcagcuuuu

SEQ ID NO: 236155 - RNA, 16 nt, Molluscum contagiosum virus
agcggcgcuugauguc

SEQ ID NO: 236156 - RNA, 14 nt, Molluscum contagiosum virus
agcggccacucucc

SEQ ID NO: 236157 - RNA, 11 nt, Molluscum contagiosum virus
agcgcuugcuc

SEQ ID NO: 236158 - RNA, 13 nt, Molluscum contagiosum virus
agcgcuugcucuu

SEQ ID NO: 236159 - RNA, 23 nt, Molluscum contagiosum virus
agcggagaaaaggaagcuugcca

SEQ ID NO: 236160 - RNA, 20 nt, Molluscum contagiosum virus
agcggaagaaacagccaugu

SEQ ID NO: 236161 - RNA, 21 nt, Molluscum contagiosum virus
aggaaaggcacccgcaggaaa

SEQ ID NO: 236162 - RNA, 17 nt, Molluscum contagiosum virus
aggaaaggcgcacccuc

SEQ ID NO: 236163 - RNA, 13 nt, Molluscum contagiosum virus
aggaaagguaccc

SEQ ID NO: 236164 - RNA, 21 nt, Molluscum contagiosum virus
aggaaagguacccgcaggaaa

SEQ ID NO: 236165 - RNA, 14 nt, Molluscum contagiosum virus
aggaacaaggccaa

SEQ ID NO: 236166 - RNA, 22 nt, Molluscum contagiosum virus
aggaacaaugcugcaucuagcc

SEQ ID NO: 236167 - RNA, 18 nt, Molluscum contagiosum virus
aggaacgcgcgcucguca

SEQ ID NO: 236168 - RNA, 22 nt, Molluscum contagiosum virus
agcuuugcacgcacgcgcucuc

SEQ ID NO: 236169 - RNA, 18 nt, Molluscum contagiosum virus
aggaaacgcagcacuucg

SEQ ID NO: 236170 - RNA, 24 nt, Molluscum contagiosum virus
agccucaucgugagccuggucgag

SEQ ID NO: 236171 - RNA, 18 nt, Molluscum contagiosum virus
agccguggaguccaugcc

SEQ ID NO: 236172 - RNA, 15 nt, Molluscum contagiosum virus
agccguggaugaaca

SEQ ID NO: 236173 - RNA, 21 nt, Molluscum contagiosum virus
agccguggaugaacaccaucc

SEQ ID NO: 236174 - RNA, 19 nt, Molluscum contagiosum virus
agccguucucguggcaagc

SEQ ID NO: 236175 - RNA, 15 nt, Molluscum contagiosum virus
agccugcaccgagug

SEQ ID NO: 236176 - RNA, 18 nt, Molluscum contagiosum virus
agccugcaccgagugcug

SEQ ID NO: 236177 - RNA, 10 nt, Molluscum contagiosum virus
agcgcugccg

SEQ ID NO: 236178 - RNA, 21 nt, Molluscum contagiosum virus
agccugugcgccaacaaccac

SEQ ID NO: 236179 - RNA, 16 nt, Molluscum contagiosum virus
agcgcuaucucuggau

SEQ ID NO: 236180 - RNA, 15 nt, Molluscum contagiosum virus
agccucgcuggugug

SEQ ID NO: 236181 - RNA, 21 nt, Molluscum contagiosum virus
agccugacggcagcaagcgca

SEQ ID NO: 236182 - RNA, 20 nt, Molluscum contagiosum virus
agccaugaggacagcuugcu

SEQ ID NO: 236183 - RNA, 14 nt, Molluscum contagiosum virus
agccauucuuaauc

SEQ ID NO: 236184 - RNA, 17 nt, Molluscum contagiosum virus
agccaauggacgccggg

SEQ ID NO: 236185 - RNA, 14 nt, Molluscum contagiosum virus
agcagaccaagaag

SEQ ID NO: 236186 - RNA, 12 nt, Molluscum contagiosum virus
agcacugcgcca

SEQ ID NO: 236187 - RNA, 22 nt, Molluscum contagiosum virus
agcacuuccuuuccgugcuuga

SEQ ID NO: 236188 - RNA, 17 nt, Molluscum contagiosum virus
agcacguggacagcauc

SEQ ID NO: 236189 - RNA, 11 nt, Molluscum contagiosum virus
agcacguagcu

SEQ ID NO: 236190 - RNA, 20 nt, Molluscum contagiosum virus
agcagcuucuuggagcccuu

SEQ ID NO: 236191 - RNA, 16 nt, Molluscum contagiosum virus
agcaggagaacuacaa

SEQ ID NO: 236192 - RNA, 14 nt, Molluscum contagiosum virus
agcaggcacuccag

SEQ ID NO: 236193 - RNA, 13 nt, Molluscum contagiosum virus
agcagcgcgccac

SEQ ID NO: 236194 - RNA, 20 nt, Molluscum contagiosum virus
agcagcgugcauagugggcu

SEQ ID NO: 236195 - RNA, 14 nt, Molluscum contagiosum virus
agcagcugcugcgc

SEQ ID NO: 236196 - RNA, 17 nt, Molluscum contagiosum virus
agcaggucaucgggcug

SEQ ID NO: 236197 - RNA, 17 nt, Molluscum contagiosum virus
agcaggcgucgcgcaca

SEQ ID NO: 236198 - RNA, 13 nt, Molluscum contagiosum virus
agcaggcuguguu

SEQ ID NO: 236199 - RNA, 14 nt, Molluscum contagiosum virus
agcaggcuguguuc

SEQ ID NO: 236200 - RNA, 22 nt, Molluscum contagiosum virus
agcaucgacgugcagacgcuca

SEQ ID NO: 236201 - RNA, 19 nt, Molluscum contagiosum virus
agcauccccaacauccugc

SEQ ID NO: 236202 - RNA, 15 nt, Molluscum contagiosum virus
agcaucccugccaca

SEQ ID NO: 236203 - RNA, 22 nt, Molluscum contagiosum virus
agcaugaacucgcugcugcucu

SEQ ID NO: 236204 - RNA, 19 nt, Molluscum contagiosum virus
agcaucugcgacacgcugg

SEQ ID NO: 236205 - RNA, 22 nt, Molluscum contagiosum virus
agcaucugcgcgugcugucagu

SEQ ID NO: 236206 - RNA, 15 nt, Molluscum contagiosum virus
agaucacggcgugcg

SEQ ID NO: 236207 - RNA, 20 nt, Molluscum contagiosum virus
agaucaacgcgcgcgugcug

SEQ ID NO: 236208 - RNA, 16 nt, Molluscum contagiosum virus
agaucguuuugcacuu

SEQ ID NO: 236209 - RNA, 18 nt, Molluscum contagiosum virus
agauacaaccgcugcuau

SEQ ID NO: 236210 - RNA, 18 nt, Molluscum contagiosum virus
agaguuguuccacgaccg

SEQ ID NO: 236211 - RNA, 17 nt, Molluscum contagiosum virus
agauaaaguccucugaa

SEQ ID NO: 236212 - RNA, 20 nt, Molluscum contagiosum virus
agagccugcugcucuucgug

SEQ ID NO: 236213 - RNA, 16 nt, Molluscum contagiosum virus
agagcuccggcugcuc

SEQ ID NO: 236214 - RNA, 16 nt, Molluscum contagiosum virus
agagcguccagccgca

SEQ ID NO: 236215 - RNA, 20 nt, Molluscum contagiosum virus
agagcggcgccccuccuauc

SEQ ID NO: 236216 - RNA, 22 nt, Molluscum contagiosum virus
agagcggcgccccuccuaucuc

SEQ ID NO: 236217 - RNA, 15 nt, Molluscum contagiosum virus
agagugacgcugcaa

SEQ ID NO: 236218 - RNA, 18 nt, Molluscum contagiosum virus
agagugcgcaacaugucc

SEQ ID NO: 236219 - RNA, 14 nt, Molluscum contagiosum virus
agagacaugcacac

SEQ ID NO: 236220 - RNA, 19 nt, Molluscum contagiosum virus
agagagacaugcacacuca

SEQ ID NO: 236221 - RNA, 15 nt, Molluscum contagiosum virus
agagcagcgcuagcc

SEQ ID NO: 236222 - RNA, 23 nt, Molluscum contagiosum virus
agagacaacaaacauugugacaa

SEQ ID NO: 236223 - RNA, 19 nt, Molluscum contagiosum virus
agagaauggagcgucuucu

SEQ ID NO: 236224 - RNA, 12 nt, Molluscum contagiosum virus
acuuuuccugcg

SEQ ID NO: 236225 - RNA, 21 nt, Molluscum contagiosum virus
agcaacggcggcgcaagcgca

SEQ ID NO: 236226 - RNA, 13 nt, Molluscum contagiosum virus
agcaacuugcucu

SEQ ID NO: 236227 - RNA, 14 nt, Molluscum contagiosum virus
agcaacuugcucua

SEQ ID NO: 236228 - RNA, 15 nt, Molluscum contagiosum virus
agcaacuugcucuac

SEQ ID NO: 236229 - RNA, 22 nt, Molluscum contagiosum virus
agcaacgacaaggaaaggcacc

SEQ ID NO: 236230 - RNA, 23 nt, Molluscum contagiosum virus
agcaaaccauucucaaccaccug

SEQ ID NO: 236231 - RNA, 12 nt, Molluscum contagiosum virus
agcaaacagccu

SEQ ID NO: 236232 - RNA, 18 nt, Molluscum contagiosum virus
agcaaugcgcaaggccgu

SEQ ID NO: 236233 - RNA, 19 nt, Molluscum contagiosum virus
agcacaccgucgcguggug

SEQ ID NO: 236234 - RNA, 20 nt, Molluscum contagiosum virus
agcacaacgggcucgugcug

SEQ ID NO: 236235 - RNA, 22 nt, Molluscum contagiosum virus
agcaauugcugggcacaagcuu

SEQ ID NO: 236236 - RNA, 18 nt, Molluscum contagiosum virus
agcacgacggucuuccag

SEQ ID NO: 236237 - RNA, 13 nt, Molluscum contagiosum virus
agcacgagcugcu

SEQ ID NO: 236238 - RNA, 15 nt, Molluscum contagiosum virus
agcacgagcugcugc

SEQ ID NO: 236239 - RNA, 18 nt, Molluscum contagiosum virus
agcacgauuccgcuguac

SEQ ID NO: 236240 - RNA, 15 nt, Molluscum contagiosum virus
agcacgcaacugccc

SEQ ID NO: 236241 - RNA, 13 nt, Molluscum contagiosum virus
agcacgccuccaa

SEQ ID NO: 236242 - RNA, 14 nt, Molluscum contagiosum virus
agcacgcuacugcg

SEQ ID NO: 236243 - RNA, 14 nt, Molluscum contagiosum virus
agcacggacagcac

SEQ ID NO: 236244 - RNA, 11 nt, Molluscum contagiosum virus
agcacagucca

SEQ ID NO: 236245 - RNA, 12 nt, Molluscum contagiosum virus
agcacaguccag

SEQ ID NO: 236246 - RNA, 15 nt, Molluscum contagiosum virus
agcacauguguuugu

SEQ ID NO: 236247 - RNA, 20 nt, Molluscum contagiosum virus
agcaagcgcaccuuuuccac

SEQ ID NO: 236248 - RNA, 16 nt, Molluscum contagiosum virus
agcaagcugcaagcca

SEQ ID NO: 236249 - RNA, 17 nt, Molluscum contagiosum virus
agcaagcugcaagccag

SEQ ID NO: 236250 - RNA, 20 nt, Molluscum contagiosum virus
agcaaggcccacuuccguga

SEQ ID NO: 236251 - RNA, 16 nt, Molluscum contagiosum virus
agcaaggcgagucaau

SEQ ID NO: 236252 - RNA, 22 nt, Molluscum contagiosum virus
agaugaguaccgcgggcgcaga

SEQ ID NO: 236253 - RNA, 14 nt, Molluscum contagiosum virus
agaugaagcucucg

SEQ ID NO: 236254 - RNA, 18 nt, Molluscum contagiosum virus
agauggcgcagcacuucg

SEQ ID NO: 236255 - RNA, 13 nt, Molluscum contagiosum virus
agauucacgagcu

SEQ ID NO: 236256 - RNA, 23 nt, Molluscum contagiosum virus
auaccagauguucucgccagugg

SEQ ID NO: 236257 - RNA, 20 nt, Molluscum contagiosum virus
auaccaggccacgugcucaa

SEQ ID NO: 236258 - RNA, 16 nt, Molluscum contagiosum virus
aucaagggcaagggcu

SEQ ID NO: 236259 - RNA, 13 nt, Molluscum contagiosum virus
auaccggagacac

SEQ ID NO: 236260 - RNA, 19 nt, Molluscum contagiosum virus
auaccggagacaccagcuc

SEQ ID NO: 236261 - RNA, 22 nt, Molluscum contagiosum virus
agucucgaugugacaacaugug

SEQ ID NO: 236262 - RNA, 16 nt, Molluscum contagiosum virus
agucuccacgcgugcg

SEQ ID NO: 236263 - RNA, 16 nt, Molluscum contagiosum virus
agugacagacuaggca

SEQ ID NO: 236264 - RNA, 21 nt, Molluscum contagiosum virus
aguguugugaaguccucucuc

SEQ ID NO: 236265 - RNA, 17 nt, Molluscum contagiosum virus
agugugcgugucucucg

SEQ ID NO: 236266 - RNA, 22 nt, Molluscum contagiosum virus
aguuggcgcgcaagcgcugcuc

SEQ ID NO: 236267 - RNA, 13 nt, Molluscum contagiosum virus
auaaaagcacagu

SEQ ID NO: 236268 - RNA, 20 nt, Molluscum contagiosum virus
agguucuccagaaucgcuuu

SEQ ID NO: 236269 - RNA, 13 nt, Molluscum contagiosum virus
aguacaacccaaa

SEQ ID NO: 236270 - RNA, 19 nt, Molluscum contagiosum virus
aguacaacccaaacauguc

SEQ ID NO: 236271 - RNA, 14 nt, Molluscum contagiosum virus
aggugugccuguuu

SEQ ID NO: 236272 - RNA, 14 nt, Molluscum contagiosum virus
aguacgcucuccau

SEQ ID NO: 236273 - RNA, 17 nt, Molluscum contagiosum virus
aguacccgagcugugcc

SEQ ID NO: 236274 - RNA, 18 nt, Molluscum contagiosum virus
aguaccggcucaagaaca

SEQ ID NO: 236275 - RNA, 12 nt, Molluscum contagiosum virus
aggcgagucaau

SEQ ID NO: 236276 - RNA, 17 nt, Molluscum contagiosum virus
aggcgcaaccgcgugcg

SEQ ID NO: 236277 - RNA, 14 nt, Molluscum contagiosum virus
aggcgcgacugcac

SEQ ID NO: 236278 - RNA, 14 nt, Molluscum contagiosum virus
aggcgcgcaagugc

SEQ ID NO: 236279 - RNA, 18 nt, Molluscum contagiosum virus
aggcgcuagugcagauga

SEQ ID NO: 236280 - RNA, 16 nt, Molluscum contagiosum virus
aggugcacgugcugca

SEQ ID NO: 236281 - RNA, 19 nt, Molluscum contagiosum virus
aggcgcuugggcacugcua

SEQ ID NO: 236282 - RNA, 20 nt, Molluscum contagiosum virus
aggcgcuugggcacugcuac

SEQ ID NO: 236283 - RNA, 18 nt, Molluscum contagiosum virus
aggugggaaugcccgcaa

SEQ ID NO: 236284 - RNA, 18 nt, Molluscum contagiosum virus
agguggccaacggcgcca

SEQ ID NO: 236285 - RNA, 19 nt, Molluscum contagiosum virus
aguacuucgcgaugugcac

SEQ ID NO: 236286 - RNA, 15 nt, Molluscum contagiosum virus
aguacuucuacggga

SEQ ID NO: 236287 - RNA, 16 nt, Molluscum contagiosum virus
agucagcggcgugcug

SEQ ID NO: 236288 - RNA, 12 nt, Molluscum contagiosum virus
aguccccagacu

SEQ ID NO: 236289 - RNA, 22 nt, Molluscum contagiosum virus
aguccucgacaaugagcacuug

SEQ ID NO: 236290 - RNA, 18 nt, Molluscum contagiosum virus
aguccgacccgugcugcu

SEQ ID NO: 236291 - RNA, 19 nt, Molluscum contagiosum virus
aguccgacccgugcugcuu

SEQ ID NO: 236292 - RNA, 22 nt, Molluscum contagiosum virus
aguccgcccccagguggagcug

SEQ ID NO: 236293 - RNA, 22 nt, Molluscum contagiosum virus
agucguggccguagugcucauc

SEQ ID NO: 236294 - RNA, 15 nt, Molluscum contagiosum virus
caucaucgagcugca

SEQ ID NO: 236295 - RNA, 16 nt, Molluscum contagiosum virus
caucaucgccagcauc

SEQ ID NO: 236296 - RNA, 12 nt, Molluscum contagiosum virus
caucgaguccau

SEQ ID NO: 236297 - RNA, 15 nt, Molluscum contagiosum virus
cauccggcacgcaca

SEQ ID NO: 236298 - RNA, 15 nt, Molluscum contagiosum virus
cauccucaaccgcug

SEQ ID NO: 236299 - RNA, 14 nt, Molluscum contagiosum virus
cauccugcugagua

SEQ ID NO: 236300 - RNA, 21 nt, Molluscum contagiosum virus
cauccuggaguuuaaugacgc

SEQ ID NO: 236301 - RNA, 17 nt, Molluscum contagiosum virus
caucuucagcaccauca

SEQ ID NO: 236302 - RNA, 18 nt, Molluscum contagiosum virus
caucuuuuuuaugcacuu

SEQ ID NO: 236303 - RNA, 17 nt, Molluscum contagiosum virus
caucugcgcgugcuguc

SEQ ID NO: 236304 - RNA, 19 nt, Molluscum contagiosum virus
caucugccucguggaacaa

SEQ ID NO: 236305 - RNA, 22 nt, Molluscum contagiosum virus
caucugccucguggaacaaaga

SEQ ID NO: 236306 - RNA, 14 nt, Molluscum contagiosum virus
caucggaacuagcc

SEQ ID NO: 236307 - RNA, 15 nt, Molluscum contagiosum virus
cauacacuuccugcu

SEQ ID NO: 236308 - RNA, 13 nt, Molluscum contagiosum virus
cagugcaccagca

SEQ ID NO: 236309 - RNA, 17 nt, Molluscum contagiosum virus
cagucucgaugugacaa

SEQ ID NO: 236310 - RNA, 20 nt, Molluscum contagiosum virus
cagucucgaugugacaacau

SEQ ID NO: 236311 - RNA, 23 nt, Molluscum contagiosum virus
cagucucgaugugacaacaugug

SEQ ID NO: 236312 - RNA, 16 nt, Molluscum contagiosum virus
cagucccuugucaaac

SEQ ID NO: 236313 - RNA, 17 nt, Molluscum contagiosum virus
cagucgcaguacccgag

SEQ ID NO: 236314 - RNA, 15 nt, Molluscum contagiosum virus
caguagcgaaugcag

SEQ ID NO: 236315 - RNA, 18 nt, Molluscum contagiosum virus
caguagcgaaugcagugc

SEQ ID NO: 236316 - RNA, 23 nt, Molluscum contagiosum virus
caguacuucaucuucaagccgca

SEQ ID NO: 236317 - RNA, 12 nt, Molluscum contagiosum virus
caguaccagcuc

SEQ ID NO: 236318 - RNA, 17 nt, Molluscum contagiosum virus
caguaccaguaccugcu

SEQ ID NO: 236319 - RNA, 17 nt, Molluscum contagiosum virus
cagucacgacuguguuc

SEQ ID NO: 236320 - RNA, 22 nt, Molluscum contagiosum virus
caguauuucaaugcaguaugug

SEQ ID NO: 236321 - RNA, 15 nt, Molluscum contagiosum virus
caguauccgugacgc

SEQ ID NO: 236322 - RNA, 17 nt, Molluscum contagiosum virus
caggggccacaagcacg

SEQ ID NO: 236323 - RNA, 18 nt, Molluscum contagiosum virus
caggggccacaagcacgc

SEQ ID NO: 236324 - RNA, 14 nt, Molluscum contagiosum virus
caggucagguucuu

SEQ ID NO: 236325 - RNA, 23 nt, Molluscum contagiosum virus
caggucaucgacgagcacgagca

SEQ ID NO: 236326 - RNA, 20 nt, Molluscum contagiosum virus
cagguccgguguccacgaca

SEQ ID NO: 236327 - RNA, 22 nt, Molluscum contagiosum virus
caggucgaggagggcguccgua

SEQ ID NO: 236328 - RNA, 21 nt, Molluscum contagiosum virus
cagguagugguccaccagcug

SEQ ID NO: 236329 - RNA, 17 nt, Molluscum contagiosum virus
caggugcacgugcugca

SEQ ID NO: 236330 - RNA, 18 nt, Molluscum contagiosum virus
caggugcgcaacugcgau

SEQ ID NO: 236331 - RNA, 17 nt, Molluscum contagiosum virus
caggaugcuggggcucg

SEQ ID NO: 236332 - RNA, 22 nt, Molluscum contagiosum virus
caggaucggagcgcagcugccg

SEQ ID NO: 236333 - RNA, 14 nt, Molluscum contagiosum virus
caggcaacgcacaa

SEQ ID NO: 236334 - RNA, 17 nt, Molluscum contagiosum virus
caggcacacgcagugcc

SEQ ID NO: 236335 - RNA, 20 nt, Molluscum contagiosum virus
caggaggaccgcgagcgcau

SEQ ID NO: 236336 - RNA, 18 nt, Molluscum contagiosum virus
caggagaacuacaaaacu

SEQ ID NO: 236337 - RNA, 16 nt, Molluscum contagiosum virus
caggacuggcaccugc

SEQ ID NO: 236338 - RNA, 17 nt, Molluscum contagiosum virus
caggacuggcaccugcg

SEQ ID NO: 236339 - RNA, 18 nt, Molluscum contagiosum virus
cagggaugccagugcagu

SEQ ID NO: 236340 - RNA, 16 nt, Molluscum contagiosum virus
caggcagcugcugcgc

SEQ ID NO: 236341 - RNA, 14 nt, Molluscum contagiosum virus
caggccauggagcg

SEQ ID NO: 236342 - RNA, 20 nt, Molluscum contagiosum virus
caggcgauaggacaugacug

SEQ ID NO: 236343 - RNA, 20 nt, Molluscum contagiosum virus
caggcggccgcguugcagca

SEQ ID NO: 236344 - RNA, 14 nt, Molluscum contagiosum virus
caggcggugggcgc

SEQ ID NO: 236345 - RNA, 18 nt, Molluscum contagiosum virus
caggcgcgcgccauccag

SEQ ID NO: 236346 - RNA, 15 nt, Molluscum contagiosum virus
cagcugcugucgcuc

SEQ ID NO: 236347 - RNA, 17 nt, Molluscum contagiosum virus
cagcugcaaacauugcc

SEQ ID NO: 236348 - RNA, 18 nt, Molluscum contagiosum virus
cagcugcaggaccugcug

SEQ ID NO: 236349 - RNA, 17 nt, Molluscum contagiosum virus
cagcuggcuacgcugga

SEQ ID NO: 236350 - RNA, 14 nt, Molluscum contagiosum virus
caggaacaucugca

SEQ ID NO: 236351 - RNA, 15 nt, Molluscum contagiosum virus
caggaacaucugcaa

SEQ ID NO: 236352 - RNA, 13 nt, Molluscum contagiosum virus
cagcuucugcucg

SEQ ID NO: 236353 - RNA, 13 nt, Molluscum contagiosum virus
cagcuugcugcug

SEQ ID NO: 236354 - RNA, 22 nt, Molluscum contagiosum virus
cagcucagcaggcuguguucca

SEQ ID NO: 236355 - RNA, 22 nt, Molluscum contagiosum virus
cagcuccgccgggaauaccgga

SEQ ID NO: 236356 - RNA, 23 nt, Molluscum contagiosum virus
cagcuccgccgggaauaccggag

SEQ ID NO: 236357 - RNA, 13 nt, Molluscum contagiosum virus
cagcuccugguag

SEQ ID NO: 236358 - RNA, 21 nt, Molluscum contagiosum virus
cagcuccugguaguugcagcc

SEQ ID NO: 236359 - RNA, 14 nt, Molluscum contagiosum virus
cagcuccuucuuca

SEQ ID NO: 236360 - RNA, 15 nt, Molluscum contagiosum virus
cagcucgaugggcuc

SEQ ID NO: 236361 - RNA, 19 nt, Molluscum contagiosum virus
cagcguauggaucuucuca

SEQ ID NO: 236362 - RNA, 17 nt, Molluscum contagiosum virus
cagcgcgcccaccagca

SEQ ID NO: 236363 - RNA, 16 nt, Molluscum contagiosum virus
cagcgcgcgacugucu

SEQ ID NO: 236364 - RNA, 19 nt, Molluscum contagiosum virus
cagcgcgcgacugucuuga

SEQ ID NO: 236365 - RNA, 18 nt, Molluscum contagiosum virus
cagcgcgucuuugucaca

SEQ ID NO: 236366 - RNA, 21 nt, Molluscum contagiosum virus
cagccucuacuccacuaccaa

SEQ ID NO: 236367 - RNA, 12 nt, Molluscum contagiosum virus
cagcgagaucaa

SEQ ID NO: 236368 - RNA, 14 nt, Molluscum contagiosum virus
caccaccuccaggu

SEQ ID NO: 236369 - RNA, 15 nt, Molluscum contagiosum virus
cacauugcgaggcac

SEQ ID NO: 236370 - RNA, 17 nt, Molluscum contagiosum virus
cacaugcagcugcagga

SEQ ID NO: 236371 - RNA, 14 nt, Molluscum contagiosum virus
cacaugugcgugca

SEQ ID NO: 236372 - RNA, 17 nt, Molluscum contagiosum virus
cacauguguuuguagcc

SEQ ID NO: 236373 - RNA, 15 nt, Molluscum contagiosum virus
cagaaucgcuuugcc

SEQ ID NO: 236374 - RNA, 22 nt, Molluscum contagiosum virus
cagaaggcguaugcgccaagcc

SEQ ID NO: 236375 - RNA, 11 nt, Molluscum contagiosum virus
cagaagccaac

SEQ ID NO: 236376 - RNA, 14 nt, Molluscum contagiosum virus
cagaagguacugaa

SEQ ID NO: 236377 - RNA, 23 nt, Molluscum contagiosum virus
cagauaguuuggacgagcugcuu

SEQ ID NO: 236378 - RNA, 15 nt, Molluscum contagiosum virus
cagccccugcugcuc

SEQ ID NO: 236379 - RNA, 12 nt, Molluscum contagiosum virus
cagccauguguc

SEQ ID NO: 236380 - RNA, 20 nt, Molluscum contagiosum virus
cagcccacgugccagcucau

SEQ ID NO: 236381 - RNA, 21 nt, Molluscum contagiosum virus
cagccgcggcgcccggugcca

SEQ ID NO: 236382 - RNA, 18 nt, Molluscum contagiosum virus
cagccgcugcugcugcaa

SEQ ID NO: 236383 - RNA, 18 nt, Molluscum contagiosum virus
cagcccuggacgacguaa

SEQ ID NO: 236384 - RNA, 21 nt, Molluscum contagiosum virus
cagcccgucggccacagugaa

SEQ ID NO: 236385 - RNA, 23 nt, Molluscum contagiosum virus
cagcccgcggugcgcacaugccg

SEQ ID NO: 236386 - RNA, 14 nt, Molluscum contagiosum virus
cagacguggugcuc

SEQ ID NO: 236387 - RNA, 21 nt, Molluscum contagiosum virus
cagacguggugcucguggaaa

SEQ ID NO: 236388 - RNA, 22 nt, Molluscum contagiosum virus
cagacgaccgucacgacucuca

SEQ ID NO: 236389 - RNA, 17 nt, Molluscum contagiosum virus
cagacgacucgcugcca

SEQ ID NO: 236390 - RNA, 16 nt, Molluscum contagiosum virus
cagagugacgcugcaa

SEQ ID NO: 236391 - RNA, 20 nt, Molluscum contagiosum virus
ccaugcucucgcugcugccc

SEQ ID NO: 236392 - RNA, 11 nt, Molluscum contagiosum virus
ccaugcugcgc

SEQ ID NO: 236393 - RNA, 22 nt, Molluscum contagiosum virus
ccauggaggcgcuagugcagau

SEQ ID NO: 236394 - RNA, 17 nt, Molluscum contagiosum virus
ccauucuuaauccagua

SEQ ID NO: 236395 - RNA, 18 nt, Molluscum contagiosum virus
ccauucuuaauccaguag

SEQ ID NO: 236396 - RNA, 12 nt, Molluscum contagiosum virus
ccauugugaagg

SEQ ID NO: 236397 - RNA, 23 nt, Molluscum contagiosum virus
cccaaaagugaagaucaagcacg

SEQ ID NO: 236398 - RNA, 12 nt, Molluscum contagiosum virus
cccaaacauguc

SEQ ID NO: 236399 - RNA, 17 nt, Molluscum contagiosum virus
cccacgugccagcucau

SEQ ID NO: 236400 - RNA, 18 nt, Molluscum contagiosum virus
cccagaaaacgcacuguc

SEQ ID NO: 236401 - RNA, 19 nt, Molluscum contagiosum virus
cccggcgggcacauccgcu

SEQ ID NO: 236402 - RNA, 23 nt, Molluscum contagiosum virus
cccggcgugaucuugguggugac

SEQ ID NO: 236403 - RNA, 17 nt, Molluscum contagiosum virus
cccggaaagcagcaaac

SEQ ID NO: 236404 - RNA, 18 nt, Molluscum contagiosum virus
cccgcugcacuuccagua

SEQ ID NO: 236405 - RNA, 19 nt, Molluscum contagiosum virus
ccccgugcacgauagcuuc

SEQ ID NO: 236406 - RNA, 21 nt, Molluscum contagiosum virus
ccccgcugggccgcaugcacc

SEQ ID NO: 236407 - RNA, 17 nt, Molluscum contagiosum virus
cccccgcgcacugccac

SEQ ID NO: 236408 - RNA, 19 nt, Molluscum contagiosum virus
ccgagccgggggaacacgc

SEQ ID NO: 236409 - RNA, 20 nt, Molluscum contagiosum virus
ccgaggaaacgcagcacuuc

SEQ ID NO: 236410 - RNA, 10 nt, Molluscum contagiosum virus
ccgagcaauu

SEQ ID NO: 236411 - RNA, 17 nt, Molluscum contagiosum virus
ccgacguuuucuuugcg

SEQ ID NO: 236412 - RNA, 15 nt, Molluscum contagiosum virus
cccggguuugugccc

SEQ ID NO: 236413 - RNA, 16 nt, Molluscum contagiosum virus
cccgucuccacaaaga

SEQ ID NO: 236414 - RNA, 23 nt, Molluscum contagiosum virus
cccguccgugccauuucguugau

SEQ ID NO: 236415 - RNA, 15 nt, Molluscum contagiosum virus
ccgaggcgcugccgc

SEQ ID NO: 236416 - RNA, 17 nt, Molluscum contagiosum virus
ccgcaacguggcgcuga

SEQ ID NO: 236417 - RNA, 18 nt, Molluscum contagiosum virus
ccgcaacguggcgcugac

SEQ ID NO: 236418 - RNA, 20 nt, Molluscum contagiosum virus
ccgcaacaaggaaaggcacc

SEQ ID NO: 236419 - RNA, 14 nt, Molluscum contagiosum virus
ccgcacguggaauc

SEQ ID NO: 236420 - RNA, 21 nt, Molluscum contagiosum virus
ccgcacuauggacgcuugcua

SEQ ID NO: 236421 - RNA, 23 nt, Molluscum contagiosum virus
ccgcacaagggcagcucaagcug

SEQ ID NO: 236422 - RNA, 12 nt, Molluscum contagiosum virus
ccgcaccugguc

SEQ ID NO: 236423 - RNA, 17 nt, Molluscum contagiosum virus
ccgcagcgcgcaaaagg

SEQ ID NO: 236424 - RNA, 11 nt, Molluscum contagiosum virus
ccgcaugucca

SEQ ID NO: 236425 - RNA, 23 nt, Molluscum contagiosum virus
ccguguaccgccgcggccgcgag

SEQ ID NO: 236426 - RNA, 15 nt, Molluscum contagiosum virus
ccguguacgcauuca

SEQ ID NO: 236427 - RNA, 16 nt, Molluscum contagiosum virus
ccguguacgucuuucc

SEQ ID NO: 236428 - RNA, 12 nt, Molluscum contagiosum virus
ccguggcacuga

SEQ ID NO: 236429 - RNA, 23 nt, Molluscum contagiosum virus
ccgugcuugcgcacggaccucaa

SEQ ID NO: 236430 - RNA, 17 nt, Molluscum contagiosum virus
ccgugcgcgcgcugaga

SEQ ID NO: 236431 - RNA, 19 nt, Molluscum contagiosum virus
ccgugcgcgcgcugagaua

SEQ ID NO: 236432 - RNA, 22 nt, Molluscum contagiosum virus
ccgugacggccguguacaugcu

SEQ ID NO: 236433 - RNA, 19 nt, Molluscum contagiosum virus
ccgggaauaccggagacac

SEQ ID NO: 236434 - RNA, 22 nt, Molluscum contagiosum virus
ccgggcaccggcgcucacugcg

SEQ ID NO: 236435 - RNA, 23 nt, Molluscum contagiosum virus
ccgucguacuuucacgacuguau

SEQ ID NO: 236436 - RNA, 23 nt, Molluscum contagiosum virus
ccggcaucgcgcugcuggugcuc

SEQ ID NO: 236437 - RNA, 15 nt, Molluscum contagiosum virus
ccggcacgagcaguc

SEQ ID NO: 236438 - RNA, 14 nt, Molluscum contagiosum virus
ccgcgccgaaacac

SEQ ID NO: 236439 - RNA, 16 nt, Molluscum contagiosum virus
ccggcaacgcugccgc

SEQ ID NO: 236440 - RNA, 17 nt, Molluscum contagiosum virus
ccggcaagccgagccaa

SEQ ID NO: 236441 - RNA, 19 nt, Molluscum contagiosum virus
ccggcgccgcuaccagcuc

SEQ ID NO: 236442 - RNA, 17 nt, Molluscum contagiosum virus
ccggcaugggcaaggac

SEQ ID NO: 236443 - RNA, 19 nt, Molluscum contagiosum virus
ccggcaugggcaaggacau

SEQ ID NO: 236444 - RNA, 15 nt, Molluscum contagiosum virus
ccggccagcgagucu

SEQ ID NO: 236445 - RNA, 16 nt, Molluscum contagiosum virus
ccgccagaagugaaau

SEQ ID NO: 236446 - RNA, 22 nt, Molluscum contagiosum virus
ccgccaggaaaacggaaacagc

SEQ ID NO: 236447 - RNA, 14 nt, Molluscum contagiosum virus
ccgccgaguaccgc

SEQ ID NO: 236448 - RNA, 17 nt, Molluscum contagiosum virus
ccgccgcacuauggacg

SEQ ID NO: 236449 - RNA, 13 nt, Molluscum contagiosum virus
ccgcgagcacugg

SEQ ID NO: 236450 - RNA, 17 nt, Molluscum contagiosum virus
ccgcgcaaaagcacagc

SEQ ID NO: 236451 - RNA, 14 nt, Molluscum contagiosum virus
ccgccugcaggcaa

SEQ ID NO: 236452 - RNA, 16 nt, Molluscum contagiosum virus
ccgcgaacugcaacgu

SEQ ID NO: 236453 - RNA, 22 nt, Molluscum contagiosum virus
ccgcgacaggggccacaagcac

SEQ ID NO: 236454 - RNA, 15 nt, Molluscum contagiosum virus
ccagccucucucgga

SEQ ID NO: 236455 - RNA, 16 nt, Molluscum contagiosum virus
ccagccugugcgccaa

SEQ ID NO: 236456 - RNA, 15 nt, Molluscum contagiosum virus
ccagcccgacuucuc

SEQ ID NO: 236457 - RNA, 19 nt, Molluscum contagiosum virus
ccagcccgcugcgcauggc

SEQ ID NO: 236458 - RNA, 21 nt, Molluscum contagiosum virus
ccagcauggcgccacaccagu

SEQ ID NO: 236459 - RNA, 19 nt, Molluscum contagiosum virus
ccagcagcgcgaagcucau

SEQ ID NO: 236460 - RNA, 14 nt, Molluscum contagiosum virus
ccagcagcguugcu

SEQ ID NO: 236461 - RNA, 19 nt, Molluscum contagiosum virus
ccagcagcguugcuauuac

SEQ ID NO: 236462 - RNA, 20 nt, Molluscum contagiosum virus
ccagguucucgcgguuguag

SEQ ID NO: 236463 - RNA, 17 nt, Molluscum contagiosum virus
ccagugcgugcacuguc

SEQ ID NO: 236464 - RNA, 13 nt, Molluscum contagiosum virus
ccaucuccaagca

SEQ ID NO: 236465 - RNA, 18 nt, Molluscum contagiosum virus
ccaucuccuugucugcaa

SEQ ID NO: 236466 - RNA, 19 nt, Molluscum contagiosum virus
ccaucucgcacacugcagc

SEQ ID NO: 236467 - RNA, 20 nt, Molluscum contagiosum virus
ccaucucgcacacugcagca

SEQ ID NO: 236468 - RNA, 15 nt, Molluscum contagiosum virus
ccaucgaaacucugc

SEQ ID NO: 236469 - RNA, 20 nt, Molluscum contagiosum virus
ccaugacagaaaaaacacaa

SEQ ID NO: 236470 - RNA, 17 nt, Molluscum contagiosum virus
ccacaaagcccuccuga

SEQ ID NO: 236471 - RNA, 18 nt, Molluscum contagiosum virus
ccacaagcaguaccugcu

SEQ ID NO: 236472 - RNA, 22 nt, Molluscum contagiosum virus
ccacaccugugcccuguccaca

SEQ ID NO: 236473 - RNA, 21 nt, Molluscum contagiosum virus
ccacaccuuuugcuccaugac

SEQ ID NO: 236474 - RNA, 20 nt, Molluscum contagiosum virus
ccacacagaaguugccgcag

SEQ ID NO: 236475 - RNA, 15 nt, Molluscum contagiosum virus
ccaccagguacuccu

SEQ ID NO: 236476 - RNA, 16 nt, Molluscum contagiosum virus
ccacagucggugccag

SEQ ID NO: 236477 - RNA, 23 nt, Molluscum contagiosum virus
ccacauccuugauaaaagcacag

SEQ ID NO: 236478 - RNA, 12 nt, Molluscum contagiosum virus
ccagcacaagcc

SEQ ID NO: 236479 - RNA, 13 nt, Molluscum contagiosum virus
ccagcacaagccg

SEQ ID NO: 236480 - RNA, 23 nt, Molluscum contagiosum virus
ccagaggguggcuugcugcagua

SEQ ID NO: 236481 - RNA, 14 nt, Molluscum contagiosum virus
caugcgcgcagugc

SEQ ID NO: 236482 - RNA, 15 nt, Molluscum contagiosum virus
caugcgcgcgcagca

SEQ ID NO: 236483 - RNA, 15 nt, Molluscum contagiosum virus
caugcgcgggaugcu

SEQ ID NO: 236484 - RNA, 13 nt, Molluscum contagiosum virus
caugcgugcaaca

SEQ ID NO: 236485 - RNA, 15 nt, Molluscum contagiosum virus
caugccuucaggaac

SEQ ID NO: 236486 - RNA, 23 nt, Molluscum contagiosum virus
caugcugaguccgaucuugauga

SEQ ID NO: 236487 - RNA, 14 nt, Molluscum contagiosum virus
caugcucaagcacc

SEQ ID NO: 236488 - RNA, 19 nt, Molluscum contagiosum virus
caugcuggaguccgcgguu

SEQ ID NO: 236489 - RNA, 13 nt, Molluscum contagiosum virus
caugcugucaacg

SEQ ID NO: 236490 - RNA, 22 nt, Molluscum contagiosum virus
caugcugucucugucccugcau

SEQ ID NO: 236491 - RNA, 12 nt, Molluscum contagiosum virus
caugcacacuca

SEQ ID NO: 236492 - RNA, 21 nt, Molluscum contagiosum virus
caugcagcugcaggaccugcu

SEQ ID NO: 236493 - RNA, 14 nt, Molluscum contagiosum virus
caugcacagcugcu

SEQ ID NO: 236494 - RNA, 19 nt, Molluscum contagiosum virus
caugaacucgcugcugcuc

SEQ ID NO: 236495 - RNA, 20 nt, Molluscum contagiosum virus
caugcaacgcaggacacugu

SEQ ID NO: 236496 - RNA, 19 nt, Molluscum contagiosum virus
cauggaggccaacuaccug

SEQ ID NO: 236497 - RNA, 17 nt, Molluscum contagiosum virus
cauggcgagcuagugca

SEQ ID NO: 236498 - RNA, 20 nt, Molluscum contagiosum virus
cauggcgagcuagugcacac

SEQ ID NO: 236499 - RNA, 20 nt, Molluscum contagiosum virus
cauggaccgcgucaagauca

SEQ ID NO: 236500 - RNA, 19 nt, Molluscum contagiosum virus
caugcuucgcgcaaacaag

SEQ ID NO: 236501 - RNA, 22 nt, Molluscum contagiosum virus
caugggcucgggcaagaccauc

SEQ ID NO: 236502 - RNA, 12 nt, Molluscum contagiosum virus
caugggcacaag

SEQ ID NO: 236503 - RNA, 18 nt, Molluscum contagiosum virus
cauuucgccuuguucaca

SEQ ID NO: 236504 - RNA, 18 nt, Molluscum contagiosum virus
ccaacaaccacucuuuca

SEQ ID NO: 236505 - RNA, 23 nt, Molluscum contagiosum virus
ccaaccaccacguggaccugauu

SEQ ID NO: 236506 - RNA, 20 nt, Molluscum contagiosum virus
augggguuucggaacgcuau

SEQ ID NO: 236507 - RNA, 17 nt, Molluscum contagiosum virus
augggcaaggacaucua

SEQ ID NO: 236508 - RNA, 23 nt, Molluscum contagiosum virus
auguacgcggugugcacaugccc

SEQ ID NO: 236509 - RNA, 21 nt, Molluscum contagiosum virus
augcuuucccguuagagacac

SEQ ID NO: 236510 - RNA, 18 nt, Molluscum contagiosum virus
auggacaaagaugcagcc

SEQ ID NO: 236511 - RNA, 15 nt, Molluscum contagiosum virus
auggcgcagcacuuc

SEQ ID NO: 236512 - RNA, 14 nt, Molluscum contagiosum virus
auggcgcgcgagca

SEQ ID NO: 236513 - RNA, 17 nt, Molluscum contagiosum virus
auggcgcgcgagcacag

SEQ ID NO: 236514 - RNA, 23 nt, Molluscum contagiosum virus
auggccgcgagacauaguaccau

SEQ ID NO: 236515 - RNA, 21 nt, Molluscum contagiosum virus
auugagcucgcgcgcaagaac

SEQ ID NO: 236516 - RNA, 19 nt, Molluscum contagiosum virus
auugagugcgggucacaag

SEQ ID NO: 236517 - RNA, 23 nt, Molluscum contagiosum virus
auucuggcguacucgugucacaa

SEQ ID NO: 236518 - RNA, 15 nt, Molluscum contagiosum virus
auucuucuccgaugu

SEQ ID NO: 236519 - RNA, 21 nt, Molluscum contagiosum virus
auucuucuccgaugugagcaa

SEQ ID NO: 236520 - RNA, 22 nt, Molluscum contagiosum virus
auucacaucuugcuaugcuccc

SEQ ID NO: 236521 - RNA, 14 nt, Molluscum contagiosum virus
aucuucaacuucca

SEQ ID NO: 236522 - RNA, 17 nt, Molluscum contagiosum virus
aucuuccgcgacgagcu

SEQ ID NO: 236523 - RNA, 19 nt, Molluscum contagiosum virus
aucuuccgcgacgagcuca

SEQ ID NO: 236524 - RNA, 21 nt, Molluscum contagiosum virus
aucuucuucgggaaggaacaa

SEQ ID NO: 236525 - RNA, 12 nt, Molluscum contagiosum virus
augaacaccauc

SEQ ID NO: 236526 - RNA, 21 nt, Molluscum contagiosum virus
aucuuuuuuaugcacuuucaa

SEQ ID NO: 236527 - RNA, 20 nt, Molluscum contagiosum virus
augaguaccuguaugaucug

SEQ ID NO: 236528 - RNA, 19 nt, Molluscum contagiosum virus
augaggaggccaacgccag

SEQ ID NO: 236529 - RNA, 16 nt, Molluscum contagiosum virus
augagcggcacgggaa

SEQ ID NO: 236530 - RNA, 16 nt, Molluscum contagiosum virus
augaccaaggagggag

SEQ ID NO: 236531 - RNA, 19 nt, Molluscum contagiosum virus
augacgcgcacgccagccu

SEQ ID NO: 236532 - RNA, 22 nt, Molluscum contagiosum virus
augcacuucucgagaccucgcg

SEQ ID NO: 236533 - RNA, 18 nt, Molluscum contagiosum virus
augcacacgcaccgccug

SEQ ID NO: 236534 - RNA, 16 nt, Molluscum contagiosum virus
augcacagccgcuuuc

SEQ ID NO: 236535 - RNA, 22 nt, Molluscum contagiosum virus
augcagucacgacuguguuccc

SEQ ID NO: 236536 - RNA, 16 nt, Molluscum contagiosum virus
augaugcuaacggacg

SEQ ID NO: 236537 - RNA, 20 nt, Molluscum contagiosum virus
augauuugauggcugcucau

SEQ ID NO: 236538 - RNA, 15 nt, Molluscum contagiosum virus
augauugucaagcac

SEQ ID NO: 236539 - RNA, 24 nt, Molluscum contagiosum virus
augcaaggcggacgccgucgucaa

SEQ ID NO: 236540 - RNA, 14 nt, Molluscum contagiosum virus
augcuguuacuugc

SEQ ID NO: 236541 - RNA, 17 nt, Molluscum contagiosum virus
augcuguuacuugcacu

SEQ ID NO: 236542 - RNA, 18 nt, Molluscum contagiosum virus
augcugcaucuagccucc

SEQ ID NO: 236543 - RNA, 22 nt, Molluscum contagiosum virus
augcugccguguacgucuuucc

SEQ ID NO: 236544 - RNA, 17 nt, Molluscum contagiosum virus
augcucuacgugcugca

SEQ ID NO: 236545 - RNA, 12 nt, Molluscum contagiosum virus
augcgucuuccu

SEQ ID NO: 236546 - RNA, 14 nt, Molluscum contagiosum virus
augccagugcagug

SEQ ID NO: 236547 - RNA, 13 nt, Molluscum contagiosum virus
augccacgcagcu

SEQ ID NO: 236548 - RNA, 22 nt, Molluscum contagiosum virus
augccagacccgaaagcugccc

SEQ ID NO: 236549 - RNA, 12 nt, Molluscum contagiosum virus
augccuucagga

SEQ ID NO: 236550 - RNA, 20 nt, Molluscum contagiosum virus
augccuuuccgagcucgcaa

SEQ ID NO: 236551 - RNA, 15 nt, Molluscum contagiosum virus
augcgcacacuugcg

SEQ ID NO: 236552 - RNA, 18 nt, Molluscum contagiosum virus
augcgcgccgcgcugcug

SEQ ID NO: 236553 - RNA, 14 nt, Molluscum contagiosum virus
augccgcgcugcuc

SEQ ID NO: 236554 - RNA, 15 nt, Molluscum contagiosum virus
auuucgccuuguuca

SEQ ID NO: 236555 - RNA, 19 nt, Molluscum contagiosum virus
auuucgcgcagcaggcacu

SEQ ID NO: 236556 - RNA, 15 nt, Molluscum contagiosum virus
auugcauggacaucc

SEQ ID NO: 236557 - RNA, 18 nt, Molluscum contagiosum virus
auugcauggacauccuca

SEQ ID NO: 236558 - RNA, 21 nt, Molluscum contagiosum virus
auugccuuuugcacagugugc

SEQ ID NO: 236559 - RNA, 13 nt, Molluscum contagiosum virus
auuuucucuggag

SEQ ID NO: 236560 - RNA, 20 nt, Molluscum contagiosum virus
auuuucgugcgcgucuucgg

SEQ ID NO: 236561 - RNA, 17 nt, Molluscum contagiosum virus
auuuuuuacuccuucaa

SEQ ID NO: 236562 - RNA, 13 nt, Molluscum contagiosum virus
caacauccugcca

SEQ ID NO: 236563 - RNA, 18 nt, Molluscum contagiosum virus
caacaugccuuucuucca

SEQ ID NO: 236564 - RNA, 18 nt, Molluscum contagiosum virus
caacaugcggagacuguu

SEQ ID NO: 236565 - RNA, 19 nt, Molluscum contagiosum virus
caacaugcggagacuguua

SEQ ID NO: 236566 - RNA, 12 nt, Molluscum contagiosum virus
caacaugcugag

SEQ ID NO: 236567 - RNA, 14 nt, Molluscum contagiosum virus
caacauggugcugg

SEQ ID NO: 236568 - RNA, 19 nt, Molluscum contagiosum virus
caacauggugcuggccauc

SEQ ID NO: 236569 - RNA, 18 nt, Molluscum contagiosum virus
caaagguccaguauuuca

SEQ ID NO: 236570 - RNA, 14 nt, Molluscum contagiosum virus
caacagcgcaagcu

SEQ ID NO: 236571 - RNA, 20 nt, Molluscum contagiosum virus
caacagcuacaccgagauca

SEQ ID NO: 236572 - RNA, 17 nt, Molluscum contagiosum virus
caaagcccuccugagaa

SEQ ID NO: 236573 - RNA, 19 nt, Molluscum contagiosum virus
caaagcaucgacgugcaga

SEQ ID NO: 236574 - RNA, 13 nt, Molluscum contagiosum virus
caaagcacaacaa

SEQ ID NO: 236575 - RNA, 15 nt, Molluscum contagiosum virus
caaaagcgaucacaa

SEQ ID NO: 236576 - RNA, 20 nt, Molluscum contagiosum virus
caacugcgauaacaucugcu

SEQ ID NO: 236577 - RNA, 17 nt, Molluscum contagiosum virus
caacugcgucucaagac

SEQ ID NO: 236578 - RNA, 18 nt, Molluscum contagiosum virus
caacuagacaaggggcca

SEQ ID NO: 236579 - RNA, 23 nt, Molluscum contagiosum virus
caacgugaguaccgugaccaagg

SEQ ID NO: 236580 - RNA, 22 nt, Molluscum contagiosum virus
caacgugaguaucggcaacauu

SEQ ID NO: 236581 - RNA, 17 nt, Molluscum contagiosum virus
caacgugggcaccugca

SEQ ID NO: 236582 - RNA, 20 nt, Molluscum contagiosum virus
caacgugggugaggacguga

SEQ ID NO: 236583 - RNA, 20 nt, Molluscum contagiosum virus
caacgaggcggccguguccu

SEQ ID NO: 236584 - RNA, 21 nt, Molluscum contagiosum virus
caacgagcagcccgugcgccu

SEQ ID NO: 236585 - RNA, 19 nt, Molluscum contagiosum virus
caacgacaaggaaaggcac

SEQ ID NO: 236586 - RNA, 15 nt, Molluscum contagiosum virus
caacgggcucgugcu

SEQ ID NO: 236587 - RNA, 10 nt, Molluscum contagiosum virus
caacgcugcc

SEQ ID NO: 236588 - RNA, 22 nt, Molluscum contagiosum virus
caaccucgggaagcccucaggg

SEQ ID NO: 236589 - RNA, 19 nt, Molluscum contagiosum virus
caacgaacauguugugcuc

SEQ ID NO: 236590 - RNA, 20 nt, Molluscum contagiosum virus
caaccgcaaggaaaacugca

SEQ ID NO: 236591 - RNA, 22 nt, Molluscum contagiosum virus
caaccgcaaggaaaacugcauc

SEQ ID NO: 236592 - RNA, 19 nt, Molluscum contagiosum virus
caagugugcgcaucccucg

SEQ ID NO: 236593 - RNA, 19 nt, Molluscum contagiosum virus
caagugcacaccagacaaa

SEQ ID NO: 236594 - RNA, 13 nt, Molluscum contagiosum virus
caaguacaugcac

SEQ ID NO: 236595 - RNA, 16 nt, Molluscum contagiosum virus
caagagcaucgagcug

SEQ ID NO: 236596 - RNA, 22 nt, Molluscum contagiosum virus
caagagccgccggggcccaugc

SEQ ID NO: 236597 - RNA, 14 nt, Molluscum contagiosum virus
caagaacaccaaga

SEQ ID NO: 236598 - RNA, 16 nt, Molluscum contagiosum virus
caagaacaccaagagc

SEQ ID NO: 236599 - RNA, 15 nt, Molluscum contagiosum virus
caagaacaugugcuc

SEQ ID NO: 236600 - RNA, 12 nt, Molluscum contagiosum virus
caacuugcucua

SEQ ID NO: 236601 - RNA, 18 nt, Molluscum contagiosum virus
caagaagaggccagcaca

SEQ ID NO: 236602 - RNA, 23 nt, Molluscum contagiosum virus
caagaagaggccggcacaagccg

SEQ ID NO: 236603 - RNA, 19 nt, Molluscum contagiosum virus
caagaagcccaaggagcug

SEQ ID NO: 236604 - RNA, 24 nt, Molluscum contagiosum virus
caagacaucaucgcccccggucug

SEQ ID NO: 236605 - RNA, 18 nt, Molluscum contagiosum virus
caagacaagucacacucu

SEQ ID NO: 236606 - RNA, 20 nt, Molluscum contagiosum virus
cacaagauggcgcagcacuu

SEQ ID NO: 236607 - RNA, 20 nt, Molluscum contagiosum virus
cacaagcaggaguccgugac

SEQ ID NO: 236608 - RNA, 22 nt, Molluscum contagiosum virus
cacaagggcagcucaagcugcu

SEQ ID NO: 236609 - RNA, 11 nt, Molluscum contagiosum virus
cacaagcuuuc

SEQ ID NO: 236610 - RNA, 20 nt, Molluscum contagiosum virus
cacacgugcacguccugcga

SEQ ID NO: 236611 - RNA, 16 nt, Molluscum contagiosum virus
cacaaagcccuccuga

SEQ ID NO: 236612 - RNA, 18 nt, Molluscum contagiosum virus
cacagcugcucguguuca

SEQ ID NO: 236613 - RNA, 19 nt, Molluscum contagiosum virus
cacagcuucacguacuuga

SEQ ID NO: 236614 - RNA, 23 nt, Molluscum contagiosum virus
cacagcuucacguacuugagcac

SEQ ID NO: 236615 - RNA, 17 nt, Molluscum contagiosum virus
cacagcuuccuggagua

SEQ ID NO: 236616 - RNA, 14 nt, Molluscum contagiosum virus
cacagaaagccaac

SEQ ID NO: 236617 - RNA, 22 nt, Molluscum contagiosum virus
cacacucacgcguccacaaaga

SEQ ID NO: 236618 - RNA, 22 nt, Molluscum contagiosum virus
caauugcugggcacaagcuuuc

SEQ ID NO: 236619 - RNA, 17 nt, Molluscum contagiosum virus
caauucaaaggugcuca

SEQ ID NO: 236620 - RNA, 16 nt, Molluscum contagiosum virus
caauuccguccaguga

SEQ ID NO: 236621 - RNA, 22 nt, Molluscum contagiosum virus
caaucacggcuguaaugugcug

SEQ ID NO: 236622 - RNA, 19 nt, Molluscum contagiosum virus
ugugugcuuauaccaugga

SEQ ID NO: 236623 - RNA, 14 nt, Molluscum contagiosum virus
uguguguucucaaa

SEQ ID NO: 236624 - RNA, 21 nt, Molluscum contagiosum virus
uuaacucagcgggcagacagg

SEQ ID NO: 236625 - RNA, 21 nt, Molluscum contagiosum virus
uuaccaagucgcgcucuucaa

SEQ ID NO: 236626 - RNA, 12 nt, Molluscum contagiosum virus
uuaccugagauc

SEQ ID NO: 236627 - RNA, 17 nt, Molluscum contagiosum virus
uuacggacgcccuccuc

SEQ ID NO: 236628 - RNA, 16 nt, Molluscum contagiosum virus
uuacgcuacagcagcc

SEQ ID NO: 236629 - RNA, 17 nt, Molluscum contagiosum virus
uuaaucacgaugaugau

SEQ ID NO: 236630 - RNA, 16 nt, Molluscum contagiosum virus
uuacgggcgccagcua

SEQ ID NO: 236631 - RNA, 14 nt, Molluscum contagiosum virus
uuagcgaggugcgc

SEQ ID NO: 236632 - RNA, 21 nt, Molluscum contagiosum virus
uuagcgaggugcgcuaucgcu

SEQ ID NO: 236633 - RNA, 16 nt, Molluscum contagiosum virus
uuccagagcacugcgc

SEQ ID NO: 236634 - RNA, 23 nt, Molluscum contagiosum virus
uucgcuggugcgaaauugccaca

SEQ ID NO: 236635 - RNA, 14 nt, Molluscum contagiosum virus
uucgggaagcacag

SEQ ID NO: 236636 - RNA, 18 nt, Molluscum contagiosum virus
uucgggaagcacagucca

SEQ ID NO: 236637 - RNA, 20 nt, Molluscum contagiosum virus
uucuaaggagcgagaagaca

SEQ ID NO: 236638 - RNA, 21 nt, Molluscum contagiosum virus
uucguggagcccgugcuggag

SEQ ID NO: 236639 - RNA, 17 nt, Molluscum contagiosum virus
uucgucucgagcuuccu

SEQ ID NO: 236640 - RNA, 16 nt, Molluscum contagiosum virus
uucgucaacaugccuu

SEQ ID NO: 236641 - RNA, 22 nt, Molluscum contagiosum virus
uucguccguccgcggggcuccu

SEQ ID NO: 236642 - RNA, 20 nt, Molluscum contagiosum virus
uucucuuuguuccugcggaa

SEQ ID NO: 236643 - RNA, 20 nt, Molluscum contagiosum virus
uuccacgaccgcaagugcac

SEQ ID NO: 236644 - RNA, 13 nt, Molluscum contagiosum virus
uucaccauccagc

SEQ ID NO: 236645 - RNA, 20 nt, Molluscum contagiosum virus
uucacgcccgcaaugcagug

SEQ ID NO: 236646 - RNA, 17 nt, Molluscum contagiosum virus
uucaaugcaguauguga

SEQ ID NO: 236647 - RNA, 19 nt, Molluscum contagiosum virus
uucaaugcaguaugugaac

SEQ ID NO: 236648 - RNA, 13 nt, Molluscum contagiosum virus
uucaaaggugcuc

SEQ ID NO: 236649 - RNA, 13 nt, Molluscum contagiosum virus
uucaaguuugaca

SEQ ID NO: 236650 - RNA, 16 nt, Molluscum contagiosum virus
uucaacuacaaggugc

SEQ ID NO: 236651 - RNA, 17 nt, Molluscum contagiosum virus
uucaacuacaaggugcu

SEQ ID NO: 236652 - RNA, 13 nt, Molluscum contagiosum virus
uucaacuuccaca

SEQ ID NO: 236653 - RNA, 19 nt, Molluscum contagiosum virus
uucaagcacgagcugcugc

SEQ ID NO: 236654 - RNA, 20 nt, Molluscum contagiosum virus
uuggcaagcuuccuuuucuc

SEQ ID NO: 236655 - RNA, 16 nt, Molluscum contagiosum virus
uuggcccgcaaacacg

SEQ ID NO: 236656 - RNA, 15 nt, Molluscum contagiosum virus
uugcgcgcgcccucg

SEQ ID NO: 236657 - RNA, 17 nt, Molluscum contagiosum virus
uugcgcguucgcaaaga

SEQ ID NO: 236658 - RNA, 17 nt, Molluscum contagiosum virus
uugcggaugcucgcuug

SEQ ID NO: 236659 - RNA, 14 nt, Molluscum contagiosum virus
uugcgucaagguga

SEQ ID NO: 236660 - RNA, 18 nt, Molluscum contagiosum virus
uugcgucuuacugcugca

SEQ ID NO: 236661 - RNA, 19 nt, Molluscum contagiosum virus
uugcuagcaacuugcucua

SEQ ID NO: 236662 - RNA, 14 nt, Molluscum contagiosum virus
uugcuccaugacag

SEQ ID NO: 236663 - RNA, 17 nt, Molluscum contagiosum virus
uugccugagaagcugua

SEQ ID NO: 236664 - RNA, 18 nt, Molluscum contagiosum virus
uugcgaacgcgcaagugu

SEQ ID NO: 236665 - RNA, 14 nt, Molluscum contagiosum virus
uugccuuuugcaca

SEQ ID NO: 236666 - RNA, 12 nt, Molluscum contagiosum virus
uugcgcauguga

SEQ ID NO: 236667 - RNA, 14 nt, Molluscum contagiosum virus
uugcgcaugugauu

SEQ ID NO: 236668 - RNA, 17 nt, Molluscum contagiosum virus
uugcgcauuggcagcgc

SEQ ID NO: 236669 - RNA, 17 nt, Molluscum contagiosum virus
uugagugcgggucacaa

SEQ ID NO: 236670 - RNA, 22 nt, Molluscum contagiosum virus
uucuucgggaaggaacaaugcu

SEQ ID NO: 236671 - RNA, 13 nt, Molluscum contagiosum virus
uucuuguacgggc

SEQ ID NO: 236672 - RNA, 22 nt, Molluscum contagiosum virus
uucuugcggcacccucagacca

SEQ ID NO: 236673 - RNA, 22 nt, Molluscum contagiosum virus
uucuucuuucuggguuccgaca

SEQ ID NO: 236674 - RNA, 13 nt, Molluscum contagiosum virus
uucuugcacgggc

SEQ ID NO: 236675 - RNA, 21 nt, Molluscum contagiosum virus
uucuggcguacucgugucaca

SEQ ID NO: 236676 - RNA, 18 nt, Molluscum contagiosum virus
uucuguccgucuugcgca

SEQ ID NO: 236677 - RNA, 19 nt, Molluscum contagiosum virus
uggucaagaacaugugcuc

SEQ ID NO: 236678 - RNA, 15 nt, Molluscum contagiosum virus
uggucgagaugcucu

SEQ ID NO: 236679 - RNA, 17 nt, Molluscum contagiosum virus
ugguugugcuuguucuc

SEQ ID NO: 236680 - RNA, 18 nt, Molluscum contagiosum virus
ugguagacgacgaugcaa

SEQ ID NO: 236681 - RNA, 15 nt, Molluscum contagiosum virus
ugggagcuuuccuug

SEQ ID NO: 236682 - RNA, 18 nt, Molluscum contagiosum virus
uggcagauaguuuggacg

SEQ ID NO: 236683 - RNA, 14 nt, Molluscum contagiosum virus
uggcagcaacugca

SEQ ID NO: 236684 - RNA, 18 nt, Molluscum contagiosum virus
uggcacuugcgcagccau

SEQ ID NO: 236685 - RNA, 16 nt, Molluscum contagiosum virus
uggcauugacacucgc

SEQ ID NO: 236686 - RNA, 23 nt, Molluscum contagiosum virus
uggccaagcgcuccaacuuccac

SEQ ID NO: 236687 - RNA, 22 nt, Molluscum contagiosum virus
uggccaacacuaccacagccau

SEQ ID NO: 236688 - RNA, 16 nt, Molluscum contagiosum virus
uggccacgcagaucag

SEQ ID NO: 236689 - RNA, 19 nt, Molluscum contagiosum virus
uggccagcuucaucaagca

SEQ ID NO: 236690 - RNA, 18 nt, Molluscum contagiosum virus
uggcgcgccgaguacugc

SEQ ID NO: 236691 - RNA, 15 nt, Molluscum contagiosum virus
uggcgcgccgcugcc

SEQ ID NO: 236692 - RNA, 22 nt, Molluscum contagiosum virus
uggcgaauuucggcuucgagaa

SEQ ID NO: 236693 - RNA, 22 nt, Molluscum contagiosum virus
uggcgagcuagugcacaccggc

SEQ ID NO: 236694 - RNA, 16 nt, Molluscum contagiosum virus
uggcgccacaccagug

SEQ ID NO: 236695 - RNA, 19 nt, Molluscum contagiosum virus
uggcgcacauuaguagcga

SEQ ID NO: 236696 - RNA, 23 nt, Molluscum contagiosum virus
uggccuguaguagcagcuucuug

SEQ ID NO: 236697 - RNA, 15 nt, Molluscum contagiosum virus
uggccgaacugcucu

SEQ ID NO: 236698 - RNA, 16 nt, Molluscum contagiosum virus
uggccgagaaaaagcu

SEQ ID NO: 236699 - RNA, 21 nt, Molluscum contagiosum virus
uggccguagugcucaucgugc

SEQ ID NO: 236700 - RNA, 14 nt, Molluscum contagiosum virus
ugucagaggauucu

SEQ ID NO: 236701 - RNA, 17 nt, Molluscum contagiosum virus
ugucagaggauucuugc

SEQ ID NO: 236702 - RNA, 18 nt, Molluscum contagiosum virus
ugucagaggauucuugca

SEQ ID NO: 236703 - RNA, 17 nt, Molluscum contagiosum virus
ugucacggcaaacgcca

SEQ ID NO: 236704 - RNA, 22 nt, Molluscum contagiosum virus
uguaccacccgaaagucccgcu

SEQ ID NO: 236705 - RNA, 14 nt, Molluscum contagiosum virus
ugugacaacaugug

SEQ ID NO: 236706 - RNA, 15 nt, Molluscum contagiosum virus
ugugcgccugugcug

SEQ ID NO: 236707 - RNA, 13 nt, Molluscum contagiosum virus
ugugcgagccagu

SEQ ID NO: 236708 - RNA, 18 nt, Molluscum contagiosum virus
ugugcguacugggagcuu

SEQ ID NO: 236709 - RNA, 19 nt, Molluscum contagiosum virus
ugugcguacugggagcuuu

SEQ ID NO: 236710 - RNA, 13 nt, Molluscum contagiosum virus
ugugcuacugcac

SEQ ID NO: 236711 - RNA, 22 nt, Molluscum contagiosum virus
uguggacgcgcaagugugcgca

SEQ ID NO: 236712 - RNA, 19 nt, Molluscum contagiosum virus
uguggacgcgcgagugugu

SEQ ID NO: 236713 - RNA, 22 nt, Molluscum contagiosum virus
ugucugaaaggacaugggcaca

SEQ ID NO: 236714 - RNA, 17 nt, Molluscum contagiosum virus
ugucucugugugcuuau

SEQ ID NO: 236715 - RNA, 15 nt, Molluscum contagiosum virus
ugucuuacggagcua

SEQ ID NO: 236716 - RNA, 23 nt, Molluscum contagiosum virus
uguccaaggugaacgaccucaac

SEQ ID NO: 236717 - RNA, 19 nt, Molluscum contagiosum virus
uguccacaaaaccaaaacc

SEQ ID NO: 236718 - RNA, 13 nt, Molluscum contagiosum virus
ugucuccuccuga

SEQ ID NO: 236719 - RNA, 19 nt, Molluscum contagiosum virus
ugucccugcauacacuucc

SEQ ID NO: 236720 - RNA, 14 nt, Molluscum contagiosum virus
ugcugcgcacgugc

SEQ ID NO: 236721 - RNA, 17 nt, Molluscum contagiosum virus
ugcugcgcgaguaccug

SEQ ID NO: 236722 - RNA, 17 nt, Molluscum contagiosum virus
ugcugcagaacugccug

SEQ ID NO: 236723 - RNA, 16 nt, Molluscum contagiosum virus
ugcugaagacgcuggc

SEQ ID NO: 236724 - RNA, 16 nt, Molluscum contagiosum virus
ugcucucggccaugga

SEQ ID NO: 236725 - RNA, 15 nt, Molluscum contagiosum virus
ugcugggcacaagcu

SEQ ID NO: 236726 - RNA, 15 nt, Molluscum contagiosum virus
ugcugggcaucgugc

SEQ ID NO: 236727 - RNA, 16 nt, Molluscum contagiosum virus
ugcuggcgcgcugcgu

SEQ ID NO: 236728 - RNA, 19 nt, Molluscum contagiosum virus
ugcuggcggggcuggcaga

SEQ ID NO: 236729 - RNA, 16 nt, Molluscum contagiosum virus
ugcuggcgagcacguc

SEQ ID NO: 236730 - RNA, 22 nt, Molluscum contagiosum virus
ugcugucaacgugggugaggac

SEQ ID NO: 236731 - RNA, 17 nt, Molluscum contagiosum virus
ugcugcggcugcuggag

SEQ ID NO: 236732 - RNA, 17 nt, Molluscum contagiosum virus
ugcuggagaucgacaag

SEQ ID NO: 236733 - RNA, 19 nt, Molluscum contagiosum virus
ugcuggagggcacgcugca

SEQ ID NO: 236734 - RNA, 12 nt, Molluscum contagiosum virus
ugcugcugcaga

SEQ ID NO: 236735 - RNA, 12 nt, Molluscum contagiosum virus
ugcugcugccaa

SEQ ID NO: 236736 - RNA, 13 nt, Molluscum contagiosum virus
ugcuggcagacac

SEQ ID NO: 236737 - RNA, 23 nt, Molluscum contagiosum virus
ugcuugcgcacgauguacuccac

SEQ ID NO: 236738 - RNA, 17 nt, Molluscum contagiosum virus
ugcuugcuuccggugcc

SEQ ID NO: 236739 - RNA, 21 nt, Molluscum contagiosum virus
ugcuugacaaguacaugcacg

SEQ ID NO: 236740 - RNA, 13 nt, Molluscum contagiosum virus
ugcuucccgcuga

SEQ ID NO: 236741 - RNA, 18 nt, Molluscum contagiosum virus
ugcuucgcgcaaacaagc

SEQ ID NO: 236742 - RNA, 19 nt, Molluscum contagiosum virus
ugcuucggcggcugugccc

SEQ ID NO: 236743 - RNA, 16 nt, Molluscum contagiosum virus
ugcuuacggacaggau

SEQ ID NO: 236744 - RNA, 16 nt, Molluscum contagiosum virus
ugcuuauaccauggag

SEQ ID NO: 236745 - RNA, 15 nt, Molluscum contagiosum virus
ugcuguuacuugcac

SEQ ID NO: 236746 - RNA, 15 nt, Molluscum contagiosum virus
ugcucacgcccuuca

SEQ ID NO: 236747 - RNA, 16 nt, Molluscum contagiosum virus
ugcucagcaccaagga

SEQ ID NO: 236748 - RNA, 22 nt, Molluscum contagiosum virus
ugcucauucuccaaaugccgug

SEQ ID NO: 236749 - RNA, 19 nt, Molluscum contagiosum virus
ugcucccgucgagcacgau

SEQ ID NO: 236750 - RNA, 15 nt, Molluscum contagiosum virus
ugcuccgcacgugga

SEQ ID NO: 236751 - RNA, 16 nt, Molluscum contagiosum virus
ugcuccgcacguggaa

SEQ ID NO: 236752 - RNA, 22 nt, Molluscum contagiosum virus
ugcucgcuuagccaacagcgca

SEQ ID NO: 236753 - RNA, 19 nt, Molluscum contagiosum virus
ugcucgccugcaucuuugc

SEQ ID NO: 236754 - RNA, 18 nt, Molluscum contagiosum virus
ugcucggcgugaucuucu

SEQ ID NO: 236755 - RNA, 16 nt, Molluscum contagiosum virus
ugcucuacgugcugca

SEQ ID NO: 236756 - RNA, 23 nt, Molluscum contagiosum virus
ugcuauacgcgccagugcgugca

SEQ ID NO: 236757 - RNA, 17 nt, Molluscum contagiosum virus
ugcuauuaccugagauc

SEQ ID NO: 236758 - RNA, 22 nt, Molluscum contagiosum virus
ugcucaagcaccugcgcuuccu

SEQ ID NO: 236759 - RNA, 19 nt, Molluscum contagiosum virus
ugcucaaggacuaccagcu

SEQ ID NO: 236760 - RNA, 20 nt, Molluscum contagiosum virus
ugcucaaggacuaccagcuc

SEQ ID NO: 236761 - RNA, 15 nt, Molluscum contagiosum virus
ugcacgcgcacuugc

SEQ ID NO: 236762 - RNA, 13 nt, Molluscum contagiosum virus
ugcacgagcugcu

SEQ ID NO: 236763 - RNA, 21 nt, Molluscum contagiosum virus
ugcacgucgaagaccaccagc

SEQ ID NO: 236764 - RNA, 23 nt, Molluscum contagiosum virus
ugcacgucgaagaccaccagcac

SEQ ID NO: 236765 - RNA, 14 nt, Molluscum contagiosum virus
ugcacgugcugcag

SEQ ID NO: 236766 - RNA, 23 nt, Molluscum contagiosum virus
ugcacuuucaacucucuaccucu

SEQ ID NO: 236767 - RNA, 14 nt, Molluscum contagiosum virus
ugcagaacugccug

SEQ ID NO: 236768 - RNA, 14 nt, Molluscum contagiosum virus
ugcagacgcucaac

SEQ ID NO: 236769 - RNA, 20 nt, Molluscum contagiosum virus
ugcagagugaaucuugccug

SEQ ID NO: 236770 - RNA, 14 nt, Molluscum contagiosum virus
ugcagcccuuccac

SEQ ID NO: 236771 - RNA, 19 nt, Molluscum contagiosum virus
ugcagccgcugcugcugca

SEQ ID NO: 236772 - RNA, 16 nt, Molluscum contagiosum virus
ugcuagcggccuguuc

SEQ ID NO: 236773 - RNA, 18 nt, Molluscum contagiosum virus
ugcuagcgggcaagcgcu

SEQ ID NO: 236774 - RNA, 17 nt, Molluscum contagiosum virus
ugcuagcugcgugcgua

SEQ ID NO: 236775 - RNA, 18 nt, Molluscum contagiosum virus
uggagggguguuuccuug

SEQ ID NO: 236776 - RNA, 22 nt, Molluscum contagiosum virus
uggagaucgacaagaucaaggu

SEQ ID NO: 236777 - RNA, 21 nt, Molluscum contagiosum virus
uggaggcgcuagugcagauga

SEQ ID NO: 236778 - RNA, 13 nt, Molluscum contagiosum virus
uggaggacaccgc

SEQ ID NO: 236779 - RNA, 15 nt, Molluscum contagiosum virus
uggaggauucuugua

SEQ ID NO: 236780 - RNA, 17 nt, Molluscum contagiosum virus
uggaggcaaucugucca

SEQ ID NO: 236781 - RNA, 18 nt, Molluscum contagiosum virus
uggacgagcgcuaccuga

SEQ ID NO: 236782 - RNA, 20 nt, Molluscum contagiosum virus
uggacgaggccaaccuccug

SEQ ID NO: 236783 - RNA, 18 nt, Molluscum contagiosum virus
uggacgcgcaagugugcg

SEQ ID NO: 236784 - RNA, 22 nt, Molluscum contagiosum virus
uggacgcgcgagugugugcauc

SEQ ID NO: 236785 - RNA, 19 nt, Molluscum contagiosum virus
uggaccgcgucaagaucaa

SEQ ID NO: 236786 - RNA, 14 nt, Molluscum contagiosum virus
uggaccugauuuuc

SEQ ID NO: 236787 - RNA, 20 nt, Molluscum contagiosum virus
uggaccacaagcaguaccug

SEQ ID NO: 236788 - RNA, 15 nt, Molluscum contagiosum virus
uggaagaacaggccg

SEQ ID NO: 236789 - RNA, 14 nt, Molluscum contagiosum virus
uggaagcacgcaac

SEQ ID NO: 236790 - RNA, 18 nt, Molluscum contagiosum virus
uggaagcacgcaacugcc

SEQ ID NO: 236791 - RNA, 22 nt, Molluscum contagiosum virus
uggaagagcccgcacacgccgc

SEQ ID NO: 236792 - RNA, 12 nt, Molluscum contagiosum virus
ugcuuguucucu

SEQ ID NO: 236793 - RNA, 17 nt, Molluscum contagiosum virus
ugcuuugucgcaacccc

SEQ ID NO: 236794 - RNA, 13 nt, Molluscum contagiosum virus
ugcuuugucugca

SEQ ID NO: 236795 - RNA, 21 nt, Molluscum contagiosum virus
ugcuuuuuuuuuuucguugcc

SEQ ID NO: 236796 - RNA, 11 nt, Molluscum contagiosum virus
uggaacaaaga

SEQ ID NO: 236797 - RNA, 16 nt, Molluscum contagiosum virus
uggaacaaagaggcaa

SEQ ID NO: 236798 - RNA, 15 nt, Molluscum contagiosum virus
ugcaagaucuaucac

SEQ ID NO: 236799 - RNA, 23 nt, Molluscum contagiosum virus
ugcaagauuguagagacgcugcc

SEQ ID NO: 236800 - RNA, 22 nt, Molluscum contagiosum virus
ugcaagcacaacgggcucgugc

SEQ ID NO: 236801 - RNA, 21 nt, Molluscum contagiosum virus
ugcaagacggaagacaaggcu

SEQ ID NO: 236802 - RNA, 16 nt, Molluscum contagiosum virus
ugcaagcccagcagcg

SEQ ID NO: 236803 - RNA, 14 nt, Molluscum contagiosum virus
ugcaagcgugacuc

SEQ ID NO: 236804 - RNA, 12 nt, Molluscum contagiosum virus
ugcacacacucg

SEQ ID NO: 236805 - RNA, 23 nt, Molluscum contagiosum virus
ugcacacacucgcgcguccacaa

SEQ ID NO: 236806 - RNA, 13 nt, Molluscum contagiosum virus
ugcacaaagccaa

SEQ ID NO: 236807 - RNA, 14 nt, Molluscum contagiosum virus
ugcacaccagacaa

SEQ ID NO: 236808 - RNA, 16 nt, Molluscum contagiosum virus
ugcacaugugcgugca

SEQ ID NO: 236809 - RNA, 16 nt, Molluscum contagiosum virus
ugcacacgcaccgccu

SEQ ID NO: 236810 - RNA, 21 nt, Molluscum contagiosum virus
ugcacacucacgcguccacaa

SEQ ID NO: 236811 - RNA, 22 nt, Molluscum contagiosum virus
ugaugauuugauggcugcucau

SEQ ID NO: 236812 - RNA, 23 nt, Molluscum contagiosum virus
ugaugauuugauggcugcucauu

SEQ ID NO: 236813 - RNA, 21 nt, Molluscum contagiosum virus
ugaugcuguuacuugcacuac

SEQ ID NO: 236814 - RNA, 15 nt, Molluscum contagiosum virus
ugaucguuccuggcc

SEQ ID NO: 236815 - RNA, 17 nt, Molluscum contagiosum virus
ugaucugcccgaccacc

SEQ ID NO: 236816 - RNA, 13 nt, Molluscum contagiosum virus
ugauccuugccaa

SEQ ID NO: 236817 - RNA, 15 nt, Molluscum contagiosum virus
ugauccuugccaagc

SEQ ID NO: 236818 - RNA, 21 nt, Molluscum contagiosum virus
ugaucggaugcaaagacggua

SEQ ID NO: 236819 - RNA, 14 nt, Molluscum contagiosum virus
ugagcgagcgcagu

SEQ ID NO: 236820 - RNA, 15 nt, Molluscum contagiosum virus
ugagccgcaagcaca

SEQ ID NO: 236821 - RNA, 12 nt, Molluscum contagiosum virus
ugauaugcauau

SEQ ID NO: 236822 - RNA, 21 nt, Molluscum contagiosum virus
ugauaugcauauauagacgua

SEQ ID NO: 236823 - RNA, 13 nt, Molluscum contagiosum virus
ugagagcaaagaa

SEQ ID NO: 236824 - RNA, 20 nt, Molluscum contagiosum virus
ugagauacaaccgcugcuau

SEQ ID NO: 236825 - RNA, 11 nt, Molluscum contagiosum virus
ugagaagcaau

SEQ ID NO: 236826 - RNA, 17 nt, Molluscum contagiosum virus
ugagccacaaacacucg

SEQ ID NO: 236827 - RNA, 21 nt, Molluscum contagiosum virus
ugagcaggucggccagcagcu

SEQ ID NO: 236828 - RNA, 14 nt, Molluscum contagiosum virus
ugaacacgacaugu

SEQ ID NO: 236829 - RNA, 16 nt, Molluscum contagiosum virus
ugaacaucuaugcacg

SEQ ID NO: 236830 - RNA, 19 nt, Molluscum contagiosum virus
ugaacaucuaugcacggca

SEQ ID NO: 236831 - RNA, 18 nt, Molluscum contagiosum virus
ugaacagcuucacgauga

SEQ ID NO: 236832 - RNA, 19 nt, Molluscum contagiosum virus
ugaacagcuucacgaugaa

SEQ ID NO: 236833 - RNA, 17 nt, Molluscum contagiosum virus
ucuuucacgcugcacga

SEQ ID NO: 236834 - RNA, 19 nt, Molluscum contagiosum virus
ucuuucguccccaagagcc

SEQ ID NO: 236835 - RNA, 16 nt, Molluscum contagiosum virus
ugaacggcuccuugag

SEQ ID NO: 236836 - RNA, 18 nt, Molluscum contagiosum virus
ugaacggcuccuugagaa

SEQ ID NO: 236837 - RNA, 22 nt, Molluscum contagiosum virus
ugaacgcgcugcgccacugcca

SEQ ID NO: 236838 - RNA, 20 nt, Molluscum contagiosum virus
ugacagaaaaaacacaacaa

SEQ ID NO: 236839 - RNA, 16 nt, Molluscum contagiosum virus
ugacagacuaggcaau

SEQ ID NO: 236840 - RNA, 20 nt, Molluscum contagiosum virus
ugacagacuaggcaaugacu

SEQ ID NO: 236841 - RNA, 14 nt, Molluscum contagiosum virus
ugacucgccgugug

SEQ ID NO: 236842 - RNA, 21 nt, Molluscum contagiosum virus
ugacucgccgugugaucaaga

SEQ ID NO: 236843 - RNA, 12 nt, Molluscum contagiosum virus
ugacaacaugug

SEQ ID NO: 236844 - RNA, 20 nt, Molluscum contagiosum virus
ugaauugagugcgggucaca

SEQ ID NO: 236845 - RNA, 13 nt, Molluscum contagiosum virus
ugaagcucucgcg

SEQ ID NO: 236846 - RNA, 23 nt, Molluscum contagiosum virus
ugaaggacgcguucuccaggaac

SEQ ID NO: 236847 - RNA, 15 nt, Molluscum contagiosum virus
ucuacaacgagcucu

SEQ ID NO: 236848 - RNA, 19 nt, Molluscum contagiosum virus
ucuacacgcacgaccucac

SEQ ID NO: 236849 - RNA, 14 nt, Molluscum contagiosum virus
ucuaccacagguuu

SEQ ID NO: 236850 - RNA, 19 nt, Molluscum contagiosum virus
ucuagaagcgcaggcacaa

SEQ ID NO: 236851 - RNA, 19 nt, Molluscum contagiosum virus
ucgcaugcgccugcacuuc

SEQ ID NO: 236852 - RNA, 14 nt, Molluscum contagiosum virus
ucgcaggcgugcuc

SEQ ID NO: 236853 - RNA, 17 nt, Molluscum contagiosum virus
ucgccaauggagccgcu

SEQ ID NO: 236854 - RNA, 15 nt, Molluscum contagiosum virus
ucgccagaagucaga

SEQ ID NO: 236855 - RNA, 16 nt, Molluscum contagiosum virus
ucgcagaggacagcuc

SEQ ID NO: 236856 - RNA, 17 nt, Molluscum contagiosum virus
ucgcacuuaaaugggaa

SEQ ID NO: 236857 - RNA, 13 nt, Molluscum contagiosum virus
ucgcacaguucac

SEQ ID NO: 236858 - RNA, 15 nt, Molluscum contagiosum virus
ucgccuuugugacaa

SEQ ID NO: 236859 - RNA, 21 nt, Molluscum contagiosum virus
ucgccgcaccacaacugaaaa

SEQ ID NO: 236860 - RNA, 13 nt, Molluscum contagiosum virus
ucgcgaugugcac

SEQ ID NO: 236861 - RNA, 21 nt, Molluscum contagiosum virus
ucgcgcaaacaagcagucuca

SEQ ID NO: 236862 - RNA, 18 nt, Molluscum contagiosum virus
ucgcgcacagaaagccaa

SEQ ID NO: 236863 - RNA, 22 nt, Molluscum contagiosum virus
ucgcgcacgaccacgugcagga

SEQ ID NO: 236864 - RNA, 21 nt, Molluscum contagiosum virus
ucgcgcacuacucgucuugcg

SEQ ID NO: 236865 - RNA, 22 nt, Molluscum contagiosum virus
ucgcgcgagcgcuacaugcacg

SEQ ID NO: 236866 - RNA, 20 nt, Molluscum contagiosum virus
ucgcgcgcggccguggcaaa

SEQ ID NO: 236867 - RNA, 23 nt, Molluscum contagiosum virus
ucgcgcgcggccguggcaaacag

SEQ ID NO: 236868 - RNA, 17 nt, Molluscum contagiosum virus
ucgcgcguccgcaaaga

SEQ ID NO: 236869 - RNA, 19 nt, Molluscum contagiosum virus
ucgcgcguccgcaaagacg

SEQ ID NO: 236870 - RNA, 17 nt, Molluscum contagiosum virus
ucgcgcuccgcaagaag

SEQ ID NO: 236871 - RNA, 22 nt, Molluscum contagiosum virus
ucgcccaucaucgccagcauca

SEQ ID NO: 236872 - RNA, 12 nt, Molluscum contagiosum virus
ucgcccccgugc

SEQ ID NO: 236873 - RNA, 22 nt, Molluscum contagiosum virus
ucgccgaagacgcguaccagcg

SEQ ID NO: 236874 - RNA, 17 nt, Molluscum contagiosum virus
ucgcccgccgagcucuu

SEQ ID NO: 236875 - RNA, 17 nt, Molluscum contagiosum virus
ucucgaugugacaacau

SEQ ID NO: 236876 - RNA, 18 nt, Molluscum contagiosum virus
ucucgauucacaucuugc

SEQ ID NO: 236877 - RNA, 15 nt, Molluscum contagiosum virus
ucuccuucagugugu

SEQ ID NO: 236878 - RNA, 18 nt, Molluscum contagiosum virus
ucucgguggacgcacagg

SEQ ID NO: 236879 - RNA, 17 nt, Molluscum contagiosum virus
ucucgcgcgacacgagc

SEQ ID NO: 236880 - RNA, 16 nt, Molluscum contagiosum virus
ucucugucgacagucu

SEQ ID NO: 236881 - RNA, 13 nt, Molluscum contagiosum virus
ucuucgugcccac

SEQ ID NO: 236882 - RNA, 16 nt, Molluscum contagiosum virus
ucuucggcacgauguc

SEQ ID NO: 236883 - RNA, 20 nt, Molluscum contagiosum virus
ucuucgacuuugcgaaggaa

SEQ ID NO: 236884 - RNA, 21 nt, Molluscum contagiosum virus
ucuuccgcgagcacguggaca

SEQ ID NO: 236885 - RNA, 13 nt, Molluscum contagiosum virus
ucuucaacuucca

SEQ ID NO: 236886 - RNA, 15 nt, Molluscum contagiosum virus
ucuucaagacuggca

SEQ ID NO: 236887 - RNA, 22 nt, Molluscum contagiosum virus
ucuucaggaacaaggccaaagc

SEQ ID NO: 236888 - RNA, 20 nt, Molluscum contagiosum virus
ucuuguggcgccgaugcagu

SEQ ID NO: 236889 - RNA, 17 nt, Molluscum contagiosum virus
ucuugacgcgagacugu

SEQ ID NO: 236890 - RNA, 18 nt, Molluscum contagiosum virus
ucuugcgcacacacuugc

SEQ ID NO: 236891 - RNA, 20 nt, Molluscum contagiosum virus
ucuugcgugccuucgccaau

SEQ ID NO: 236892 - RNA, 22 nt, Molluscum contagiosum virus
ucuugcgugccuucgccaauga

SEQ ID NO: 236893 - RNA, 16 nt, Molluscum contagiosum virus
ucugagcgagcgcagu

SEQ ID NO: 236894 - RNA, 21 nt, Molluscum contagiosum virus
ucugugugcuuauaccaugga

SEQ ID NO: 236895 - RNA, 13 nt, Molluscum contagiosum virus
ucaguacaugccc

SEQ ID NO: 236896 - RNA, 16 nt, Molluscum contagiosum virus
ucagugugccguucac

SEQ ID NO: 236897 - RNA, 20 nt, Molluscum contagiosum virus
ucaguguuuuaauuuuccaa

SEQ ID NO: 236898 - RNA, 14 nt, Molluscum contagiosum virus
ucaggccagcaucu

SEQ ID NO: 236899 - RNA, 21 nt, Molluscum contagiosum virus
ucagcgcggaggcgcuaccuc

SEQ ID NO: 236900 - RNA, 18 nt, Molluscum contagiosum virus
ucagcgcuucgacuucca

SEQ ID NO: 236901 - RNA, 13 nt, Molluscum contagiosum virus
ucaggaacaaggc

SEQ ID NO: 236902 - RNA, 18 nt, Molluscum contagiosum virus
ucagagacaggggggaga

SEQ ID NO: 236903 - RNA, 14 nt, Molluscum contagiosum virus
ucagagaagugcuc

SEQ ID NO: 236904 - RNA, 18 nt, Molluscum contagiosum virus
ucagagaagugcuccgca

SEQ ID NO: 236905 - RNA, 21 nt, Molluscum contagiosum virus
ucagauuuugcgucaagguga

SEQ ID NO: 236906 - RNA, 21 nt, Molluscum contagiosum virus
ucagcaggcuguguuccagcu

SEQ ID NO: 236907 - RNA, 21 nt, Molluscum contagiosum virus
ucagagaaaucccaagagcca

SEQ ID NO: 236908 - RNA, 22 nt, Molluscum contagiosum virus
ucagagaaaucccaagagccau

SEQ ID NO: 236909 - RNA, 21 nt, Molluscum contagiosum virus
ucacaugcuucgcgcaaacaa

SEQ ID NO: 236910 - RNA, 14 nt, Molluscum contagiosum virus
ucacaugugcugcc

SEQ ID NO: 236911 - RNA, 22 nt, Molluscum contagiosum virus
ucacagccguggaguccaugcc

SEQ ID NO: 236912 - RNA, 14 nt, Molluscum contagiosum virus
ucacacgucuugca

SEQ ID NO: 236913 - RNA, 14 nt, Molluscum contagiosum virus
uauggaucuucuca

SEQ ID NO: 236914 - RNA, 16 nt, Molluscum contagiosum virus
uaugcccacugggaac

SEQ ID NO: 236915 - RNA, 22 nt, Molluscum contagiosum virus
uaucgacgacgaugacaucugg

SEQ ID NO: 236916 - RNA, 18 nt, Molluscum contagiosum virus
ucaccacuggacacgugc

SEQ ID NO: 236917 - RNA, 19 nt, Molluscum contagiosum virus
ucaccacuggacacgugcc

SEQ ID NO: 236918 - RNA, 22 nt, Molluscum contagiosum virus
ucaccggaacaacuugggagca

SEQ ID NO: 236919 - RNA, 18 nt, Molluscum contagiosum virus
ucaccgcgcagaagccaa

SEQ ID NO: 236920 - RNA, 21 nt, Molluscum contagiosum virus
ucacccuuaauaaaaaaucaa

SEQ ID NO: 236921 - RNA, 14 nt, Molluscum contagiosum virus
ucacugcagcagcc

SEQ ID NO: 236922 - RNA, 15 nt, Molluscum contagiosum virus
ucacgaugaugauga

SEQ ID NO: 236923 - RNA, 14 nt, Molluscum contagiosum virus
ucacgcaagcuuug

SEQ ID NO: 236924 - RNA, 23 nt, Molluscum contagiosum virus
ucacgcaaggaagcaacaacagc

SEQ ID NO: 236925 - RNA, 22 nt, Molluscum contagiosum virus
ucacgcugcacgagcugcugua

SEQ ID NO: 236926 - RNA, 13 nt, Molluscum contagiosum virus
ucacgcuggucac

SEQ ID NO: 236927 - RNA, 16 nt, Molluscum contagiosum virus
ucacgcguccacaaag

SEQ ID NO: 236928 - RNA, 13 nt, Molluscum contagiosum virus
ucgaugggcucca

SEQ ID NO: 236929 - RNA, 12 nt, Molluscum contagiosum virus
ucgaugugacaa

SEQ ID NO: 236930 - RNA, 16 nt, Molluscum contagiosum virus
ucgaugugacaacaug

SEQ ID NO: 236931 - RNA, 15 nt, Molluscum contagiosum virus
ucgagcccuaucgca

SEQ ID NO: 236932 - RNA, 14 nt, Molluscum contagiosum virus
ucgagccgcacaaa

SEQ ID NO: 236933 - RNA, 19 nt, Molluscum contagiosum virus
ucgaucauguccacagccg

SEQ ID NO: 236934 - RNA, 19 nt, Molluscum contagiosum virus
uccuugauaaaagcacagu

SEQ ID NO: 236935 - RNA, 19 nt, Molluscum contagiosum virus
uccuugugcaauuccgucc

SEQ ID NO: 236936 - RNA, 20 nt, Molluscum contagiosum virus
ucgagaccuacgucaagcag

SEQ ID NO: 236937 - RNA, 13 nt, Molluscum contagiosum virus
ucgagacgcugcg

SEQ ID NO: 236938 - RNA, 16 nt, Molluscum contagiosum virus
ucgagcacgccuccaa

SEQ ID NO: 236939 - RNA, 18 nt, Molluscum contagiosum virus
ucgagcacgccuccaaga

SEQ ID NO: 236940 - RNA, 19 nt, Molluscum contagiosum virus
ucgagcacgccuccaagaa

SEQ ID NO: 236941 - RNA, 17 nt, Molluscum contagiosum virus
uccugguaguugcagcc

SEQ ID NO: 236942 - RNA, 14 nt, Molluscum contagiosum virus
uccucccuccggcc

SEQ ID NO: 236943 - RNA, 13 nt, Molluscum contagiosum virus
uccucgaccugca

SEQ ID NO: 236944 - RNA, 18 nt, Molluscum contagiosum virus
uccucgacgcgcugcucu

SEQ ID NO: 236945 - RNA, 18 nt, Molluscum contagiosum virus
uccuuccggagacaccag

SEQ ID NO: 236946 - RNA, 20 nt, Molluscum contagiosum virus
uccuuccggagacaccagcu

SEQ ID NO: 236947 - RNA, 21 nt, Molluscum contagiosum virus
uccuuccggagacaccagcuc

SEQ ID NO: 236948 - RNA, 13 nt, Molluscum contagiosum virus
uccuucuucagca

SEQ ID NO: 236949 - RNA, 16 nt, Molluscum contagiosum virus
uccuugccuucucgaa

SEQ ID NO: 236950 - RNA, 21 nt, Molluscum contagiosum virus
uccuuggccaggaacgaucac

SEQ ID NO: 236951 - RNA, 18 nt, Molluscum contagiosum virus
uccgaagagcagaaggcg

SEQ ID NO: 236952 - RNA, 14 nt, Molluscum contagiosum virus
ucccucgucuuugc

SEQ ID NO: 236953 - RNA, 15 nt, Molluscum contagiosum virus
ucccucgucuuugcg

SEQ ID NO: 236954 - RNA, 21 nt, Molluscum contagiosum virus
uccgacgcguguaucaugcac

SEQ ID NO: 236955 - RNA, 20 nt, Molluscum contagiosum virus
uccaguauuucaaugcagua

SEQ ID NO: 236956 - RNA, 23 nt, Molluscum contagiosum virus
uccaucuucgucuuaugcauccu

SEQ ID NO: 236957 - RNA, 21 nt, Molluscum contagiosum virus
uccaugacagaaaaaacacaa

SEQ ID NO: 236958 - RNA, 17 nt, Molluscum contagiosum virus
uccaucaucgagcugca

SEQ ID NO: 236959 - RNA, 14 nt, Molluscum contagiosum virus
uccaggccuucggg

SEQ ID NO: 236960 - RNA, 20 nt, Molluscum contagiosum virus
uccagggcucaagaucuccu

SEQ ID NO: 236961 - RNA, 22 nt, Molluscum contagiosum virus
uccacgcaggacuggcaccugc

SEQ ID NO: 236962 - RNA, 18 nt, Molluscum contagiosum virus
uccaaaccaacgugagua

SEQ ID NO: 236963 - RNA, 20 nt, Molluscum contagiosum virus
uuuuuguauuuaaagcuagc

SEQ ID NO: 236964 - RNA, 21 nt, Molluscum contagiosum virus
uuuuucugugcucgcgccuga

SEQ ID NO: 236965 - RNA, 22 nt, Molluscum contagiosum virus
uuuuucguugccugcacugaga

SEQ ID NO: 236966 - RNA, 22 nt, Molluscum contagiosum virus
uuuuucggagacagggugccua

SEQ ID NO: 236967 - RNA, 18 nt, Molluscum contagiosum virus
uuuuaccccgagguucuc

SEQ ID NO: 236968 - RNA, 21 nt, Molluscum contagiosum virus
uuuuaccccgagguucuccag

SEQ ID NO: 236969 - RNA, 19 nt, Molluscum contagiosum virus
uuuguggacgcgcaagugu

SEQ ID NO: 236970 - RNA, 19 nt, Molluscum contagiosum virus
uuguagccgcgcgaacaaa

SEQ ID NO: 236971 - RNA, 11 nt, Molluscum contagiosum virus
uuguagcucua

SEQ ID NO: 236972 - RNA, 13 nt, Molluscum contagiosum virus
uuguacuugcuuc

SEQ ID NO: 236973 - RNA, 12 nt, Molluscum contagiosum virus
uugucaagcacu

SEQ ID NO: 236974 - RNA, 20 nt, Molluscum contagiosum virus
uugucaagcacuacauggac

SEQ ID NO: 236975 - RNA, 14 nt, Molluscum contagiosum virus
uguacgugcugccc

SEQ ID NO: 236976 - RNA, 18 nt, Molluscum contagiosum virus
ugguguccacgcgcguga

SEQ ID NO: 236977 - RNA, 13 nt, Molluscum contagiosum virus
uggugcacacaca

SEQ ID NO: 236978 - RNA, 17 nt, Molluscum contagiosum virus
uggugcgcgacgacggc

SEQ ID NO: 236979 - RNA, 14 nt, Molluscum contagiosum virus
uggacgagcagagc

SEQ ID NO: 236980 - RNA, 19 nt, Molluscum contagiosum virus
uggacgaugguggcgcugc

SEQ ID NO: 236981 - RNA, 20 nt, Molluscum contagiosum virus
uggacacgcacuggcgcugc

SEQ ID NO: 236982 - RNA, 17 nt, Molluscum contagiosum virus
uggacagcaagcagcgc

SEQ ID NO: 236983 - RNA, 21 nt, Molluscum contagiosum virus
uggacagcaagcagcgcgcgc

SEQ ID NO: 236984 - RNA, 22 nt, Molluscum contagiosum virus
ugcgugaggaagaccuuggaca

SEQ ID NO: 236985 - RNA, 21 nt, Molluscum contagiosum virus
ugcgugguguccacgcgcgug

SEQ ID NO: 236986 - RNA, 16 nt, Molluscum contagiosum virus
ugcggccaccagcgcg

SEQ ID NO: 236987 - RNA, 17 nt, Molluscum contagiosum virus
ugcuagcgacgcggaca

SEQ ID NO: 236988 - RNA, 16 nt, Molluscum contagiosum virus
ugcucgcaggcggugg

SEQ ID NO: 236989 - RNA, 17 nt, Molluscum contagiosum virus
ugcucggacacacgcac

SEQ ID NO: 236990 - RNA, 21 nt, Molluscum contagiosum virus
ugcucgguagcguggagcugg

SEQ ID NO: 236991 - RNA, 18 nt, Molluscum contagiosum virus
ugcucuaccuggugcugg

SEQ ID NO: 236992 - RNA, 22 nt, Molluscum contagiosum virus
ugcucuacuggcggcgcccgug

SEQ ID NO: 236993 - RNA, 15 nt, Molluscum contagiosum virus
ugcugaagacgcugg

SEQ ID NO: 236994 - RNA, 15 nt, Molluscum contagiosum virus
ugcugcagcugcgcg

SEQ ID NO: 236995 - RNA, 22 nt, Molluscum contagiosum virus
ugcugcaguaugaaucuacggc

SEQ ID NO: 236996 - RNA, 20 nt, Molluscum contagiosum virus
ugcugcccgccuucgacggc

SEQ ID NO: 236997 - RNA, 14 nt, Molluscum contagiosum virus
ugcugcgcagcauc

SEQ ID NO: 236998 - RNA, 19 nt, Molluscum contagiosum virus
ugcugcggcaaccgcgccc

SEQ ID NO: 236999 - RNA, 15 nt, Molluscum contagiosum virus
ugcugcggcugcugg

SEQ ID NO: 237000 - RNA, 14 nt, Molluscum contagiosum virus
ugcugcucgacggg

SEQ ID NO: 237001 - RNA, 15 nt, Molluscum contagiosum virus
ugcuggcggggcugg

SEQ ID NO: 237002 - RNA, 12 nt, Molluscum contagiosum virus
ugcugggcgugg

SEQ ID NO: 237003 - RNA, 20 nt, Molluscum contagiosum virus
ugcuggucaagaaggcgcug

SEQ ID NO: 237004 - RNA, 15 nt, Molluscum contagiosum virus
ugcugguggugcugg

SEQ ID NO: 237005 - RNA, 15 nt, Molluscum contagiosum virus
ugcugugccugcgca

SEQ ID NO: 237006 - RNA, 19 nt, Molluscum contagiosum virus
ugcuguugccgcgcucgug

SEQ ID NO: 237007 - RNA, 14 nt, Molluscum contagiosum virus
ugcuucugcgcugg

SEQ ID NO: 237008 - RNA, 16 nt, Molluscum contagiosum virus
ugcuugugcgccugug

SEQ ID NO: 237009 - RNA, 13 nt, Molluscum contagiosum virus
uggaaaggaggcu

SEQ ID NO: 237010 - RNA, 12 nt, Molluscum contagiosum virus
ugcggcgcgugc

SEQ ID NO: 237011 - RNA, 20 nt, Molluscum contagiosum virus
ugcggcgcgugccgcugcgc

SEQ ID NO: 237012 - RNA, 21 nt, Molluscum contagiosum virus
ugcggcgcgugccgcugcgcg

SEQ ID NO: 237013 - RNA, 18 nt, Molluscum contagiosum virus
ucggacagugccuccgcg

SEQ ID NO: 237014 - RNA, 22 nt, Molluscum contagiosum virus
ucgcggucgacgagugcgccgc

SEQ ID NO: 237015 - RNA, 20 nt, Molluscum contagiosum virus
ucgcguaccaagccgugacg

SEQ ID NO: 237016 - RNA, 22 nt, Molluscum contagiosum virus
ucgcguagcagcgccugcacgc

SEQ ID NO: 237017 - RNA, 15 nt, Molluscum contagiosum virus
ucgcggagcugcgcg

SEQ ID NO: 237018 - RNA, 18 nt, Molluscum contagiosum virus
ucgccuuugugacaagga

SEQ ID NO: 237019 - RNA, 13 nt, Molluscum contagiosum virus
ucgcgaccuggcg

SEQ ID NO: 237020 - RNA, 18 nt, Molluscum contagiosum virus
ucgcgaccuggcgcgugc

SEQ ID NO: 237021 - RNA, 17 nt, Molluscum contagiosum virus
ucgcgacgacgagcacu

SEQ ID NO: 237022 - RNA, 14 nt, Molluscum contagiosum virus
ucgcgacgugcgcg

SEQ ID NO: 237023 - RNA, 22 nt, Molluscum contagiosum virus
ucgcgagcacuuuggccucgcg

SEQ ID NO: 237024 - RNA, 18 nt, Molluscum contagiosum virus
ucgcgcaaguccagcgcg

SEQ ID NO: 237025 - RNA, 14 nt, Molluscum contagiosum virus
ucgcgcagcagcua

SEQ ID NO: 237026 - RNA, 14 nt, Molluscum contagiosum virus
ucgcgcccugcgcg

SEQ ID NO: 237027 - RNA, 15 nt, Molluscum contagiosum virus
ucgcgccgcucggaa

SEQ ID NO: 237028 - RNA, 19 nt, Molluscum contagiosum virus
ucgcgccugaaccugggcg

SEQ ID NO: 237029 - RNA, 13 nt, Molluscum contagiosum virus
ucgcgccugcgcu

SEQ ID NO: 237030 - RNA, 17 nt, Molluscum contagiosum virus
ucgcgcgcaccugcacg

SEQ ID NO: 237031 - RNA, 14 nt, Molluscum contagiosum virus
ucgcgcgccugccg

SEQ ID NO: 237032 - RNA, 13 nt, Molluscum contagiosum virus
ucgcgcgccugcg

SEQ ID NO: 237033 - RNA, 15 nt, Molluscum contagiosum virus
ucgcgcgccugcgcg

SEQ ID NO: 237034 - RNA, 18 nt, Molluscum contagiosum virus
ucgcgcgcuaccugcgca

SEQ ID NO: 237035 - RNA, 13 nt, Molluscum contagiosum virus
uggcgugacaggu

SEQ ID NO: 237036 - RNA, 12 nt, Molluscum contagiosum virus
uggcggcgcugg

SEQ ID NO: 237037 - RNA, 14 nt, Molluscum contagiosum virus
uggcgggcgugccc

SEQ ID NO: 237038 - RNA, 16 nt, Molluscum contagiosum virus
uggcgcaccugcuaga

SEQ ID NO: 237039 - RNA, 16 nt, Molluscum contagiosum virus
uggcgccagccuggcg

SEQ ID NO: 237040 - RNA, 17 nt, Molluscum contagiosum virus
ugggauaacaggcgugc

SEQ ID NO: 237041 - RNA, 17 nt, Molluscum contagiosum virus
ugggcacgcucuacggc

SEQ ID NO: 237042 - RNA, 15 nt, Molluscum contagiosum virus
ugggcacugcuacga

SEQ ID NO: 237043 - RNA, 17 nt, Molluscum contagiosum virus
ugggccgaaucgucggc

SEQ ID NO: 237044 - RNA, 11 nt, Molluscum contagiosum virus
ugggcgcgugc

SEQ ID NO: 237045 - RNA, 20 nt, Molluscum contagiosum virus
ugggcucggaguccgcgccc

SEQ ID NO: 237046 - RNA, 14 nt, Molluscum contagiosum virus
uggggcucgccggc

SEQ ID NO: 237047 - RNA, 22 nt, Molluscum contagiosum virus
ugggcgucgcacaguucacggc

SEQ ID NO: 237048 - RNA, 15 nt, Molluscum contagiosum virus
uggcgagcgcugccg

SEQ ID NO: 237049 - RNA, 17 nt, Molluscum contagiosum virus
uggccgagccgcuggcc

SEQ ID NO: 237050 - RNA, 23 nt, Molluscum contagiosum virus
uggccgcgcccucgcucgagggc

SEQ ID NO: 237051 - RNA, 15 nt, Molluscum contagiosum virus
uggcgcgccgcugcc

SEQ ID NO: 237052 - RNA, 15 nt, Molluscum contagiosum virus
uggcgcgccggcgcg

SEQ ID NO: 237053 - RNA, 17 nt, Molluscum contagiosum virus
uggcgcgcgcgcugcgc

SEQ ID NO: 237054 - RNA, 20 nt, Molluscum contagiosum virus
uggcgcgcgcggucgacggg

SEQ ID NO: 237055 - RNA, 21 nt, Molluscum contagiosum virus
uggcgcugcacaguucacggc

SEQ ID NO: 237056 - RNA, 21 nt, Molluscum contagiosum virus
uggcgcugggcgcgccgcgcg

SEQ ID NO: 237057 - RNA, 14 nt, Molluscum contagiosum virus
uggcggaugucacg

SEQ ID NO: 237058 - RNA, 19 nt, Molluscum contagiosum virus
uggacgccguugcgcguga

SEQ ID NO: 237059 - RNA, 20 nt, Molluscum contagiosum virus
uggacgcgccgcgcgagugc

SEQ ID NO: 237060 - RNA, 19 nt, Molluscum contagiosum virus
uggauuucggcgcgcgugc

SEQ ID NO: 237061 - RNA, 21 nt, Molluscum contagiosum virus
uggcacccuggcugcugcgcg

SEQ ID NO: 237062 - RNA, 16 nt, Molluscum contagiosum virus
uggcacgcgccgcgcg

SEQ ID NO: 237063 - RNA, 19 nt, Molluscum contagiosum virus
uggccacucucgcgcguga

SEQ ID NO: 237064 - RNA, 15 nt, Molluscum contagiosum virus
uggagaacggcgugc

SEQ ID NO: 237065 - RNA, 17 nt, Molluscum contagiosum virus
uggagcacuuccgcgcg

SEQ ID NO: 237066 - RNA, 21 nt, Molluscum contagiosum virus
uggagcccacguugccgcgcg

SEQ ID NO: 237067 - RNA, 14 nt, Molluscum contagiosum virus
uggagcgagugcgc

SEQ ID NO: 237068 - RNA, 18 nt, Molluscum contagiosum virus
uggagcgagugcgcgugc

SEQ ID NO: 237069 - RNA, 16 nt, Molluscum contagiosum virus
uggagcuagcgcgcgc

SEQ ID NO: 237070 - RNA, 18 nt, Molluscum contagiosum virus
uggagcugccgcugcgcg

SEQ ID NO: 237071 - RNA, 21 nt, Molluscum contagiosum virus
gucaagacucgcccgcgcgcg

SEQ ID NO: 237072 - RNA, 18 nt, Molluscum contagiosum virus
gucaagcagcgcgccacc

SEQ ID NO: 237073 - RNA, 18 nt, Molluscum contagiosum virus
guauacucgacgcgcgcg

SEQ ID NO: 237074 - RNA, 20 nt, Molluscum contagiosum virus
guauauacuccccgcgcgcg

SEQ ID NO: 237075 - RNA, 21 nt, Molluscum contagiosum virus
guacgcgccggggcgcgcgcu

SEQ ID NO: 237076 - RNA, 22 nt, Molluscum contagiosum virus
guacgcucuccaugcgcgcgcg

SEQ ID NO: 237077 - RNA, 14 nt, Molluscum contagiosum virus
guagccgcgacgca

SEQ ID NO: 237078 - RNA, 12 nt, Molluscum contagiosum virus
guagccgcgcga

SEQ ID NO: 237079 - RNA, 12 nt, Molluscum contagiosum virus
guaccgcgcgca

SEQ ID NO: 237080 - RNA, 22 nt, Molluscum contagiosum virus
guaccugggcaggccgcccacg

SEQ ID NO: 237081 - RNA, 22 nt, Molluscum contagiosum virus
guacgagcagcugcugcgcacg

SEQ ID NO: 237082 - RNA, 14 nt, Molluscum contagiosum virus
gucaugcgcgcgcg

SEQ ID NO: 237083 - RNA, 16 nt, Molluscum contagiosum virus
guccaacccgcggcgc

SEQ ID NO: 237084 - RNA, 20 nt, Molluscum contagiosum virus
guccagccgcaccgggacga

SEQ ID NO: 237085 - RNA, 13 nt, Molluscum contagiosum virus
guccaugcccacg

SEQ ID NO: 237086 - RNA, 19 nt, Molluscum contagiosum virus
gucccagcaccgcgccgcg

SEQ ID NO: 237087 - RNA, 21 nt, Molluscum contagiosum virus
guccgacaccggacgaaaggu

SEQ ID NO: 237088 - RNA, 18 nt, Molluscum contagiosum virus
guccgcagcggcgccacc

SEQ ID NO: 237089 - RNA, 14 nt, Molluscum contagiosum virus
guaacagcgcgcga

SEQ ID NO: 237090 - RNA, 19 nt, Molluscum contagiosum virus
guaaccaugaagaugucgc

SEQ ID NO: 237091 - RNA, 19 nt, Molluscum contagiosum virus
guacacauggccgcgcgcu

SEQ ID NO: 237092 - RNA, 17 nt, Molluscum contagiosum virus
guacagcuccccgcgca

SEQ ID NO: 237093 - RNA, 14 nt, Molluscum contagiosum virus
guacagugcgcgca

SEQ ID NO: 237094 - RNA, 15 nt, Molluscum contagiosum virus
guacauccgcgagca

SEQ ID NO: 237095 - RNA, 23 nt, Molluscum contagiosum virus
ggugucgagcucgcgcgccagca

SEQ ID NO: 237096 - RNA, 22 nt, Molluscum contagiosum virus
gguugcccgccugccgcgagca

SEQ ID NO: 237097 - RNA, 14 nt, Molluscum contagiosum virus
gguugccgcucgca

SEQ ID NO: 237098 - RNA, 19 nt, Molluscum contagiosum virus
ggugccguccccgcgcuca

SEQ ID NO: 237099 - RNA, 21 nt, Molluscum contagiosum virus
ggugccuggcguccgcacgca

SEQ ID NO: 237100 - RNA, 15 nt, Molluscum contagiosum virus
ggugcgcccgcggca

SEQ ID NO: 237101 - RNA, 14 nt, Molluscum contagiosum virus
ggugcgcgcgcgcg

SEQ ID NO: 237102 - RNA, 20 nt, Molluscum contagiosum virus
ggugcugcgccacgugcgca

SEQ ID NO: 237103 - RNA, 14 nt, Molluscum contagiosum virus
gguggccaagcgcu

SEQ ID NO: 237104 - RNA, 14 nt, Molluscum contagiosum virus
gguggccgcgcgcg

SEQ ID NO: 237105 - RNA, 13 nt, Molluscum contagiosum virus
gggcccgcgcgcg

SEQ ID NO: 237106 - RNA, 12 nt, Molluscum contagiosum virus
gggccgcgcgca

SEQ ID NO: 237107 - RNA, 12 nt, Molluscum contagiosum virus
gggccgcggcgc

SEQ ID NO: 237108 - RNA, 18 nt, Molluscum contagiosum virus
ggcggugggcgccgcggc

SEQ ID NO: 237109 - RNA, 18 nt, Molluscum contagiosum virus
ggcguacgugcgccagcu

SEQ ID NO: 237110 - RNA, 19 nt, Molluscum contagiosum virus
ggcgugcauuuuuccgcuu

SEQ ID NO: 237111 - RNA, 13 nt, Molluscum contagiosum virus
ggcgugcgcagca

SEQ ID NO: 237112 - RNA, 22 nt, Molluscum contagiosum virus
ggcgugcgccgugcgucucucu

SEQ ID NO: 237113 - RNA, 13 nt, Molluscum contagiosum virus
ggcuccgcuggac

SEQ ID NO: 237114 - RNA, 14 nt, Molluscum contagiosum virus
ggcuccugugucgc

SEQ ID NO: 237115 - RNA, 15 nt, Molluscum contagiosum virus
ggcucgaggugugcc

SEQ ID NO: 237116 - RNA, 18 nt, Molluscum contagiosum virus
ggcugauccugcgcgugu

SEQ ID NO: 237117 - RNA, 20 nt, Molluscum contagiosum virus
ggcugccggcgcgugagcgc

SEQ ID NO: 237118 - RNA, 19 nt, Molluscum contagiosum virus
ggcuggaccugcgccagcg

SEQ ID NO: 237119 - RNA, 13 nt, Molluscum contagiosum virus
ggcuucugcgcgg

SEQ ID NO: 237120 - RNA, 14 nt, Molluscum contagiosum virus
gggaacccguggcc

SEQ ID NO: 237121 - RNA, 22 nt, Molluscum contagiosum virus
ggcggucuuccagcacugcgcc

SEQ ID NO: 237122 - RNA, 22 nt, Molluscum contagiosum virus
gggauuugccgguugcgcgugu

SEQ ID NO: 237123 - RNA, 14 nt, Molluscum contagiosum virus
gggcaacgcgcgcg

SEQ ID NO: 237124 - RNA, 15 nt, Molluscum contagiosum virus
gggcacgccgugggc

SEQ ID NO: 237125 - RNA, 13 nt, Molluscum contagiosum virus
gggcacgcgcgcg

SEQ ID NO: 237126 - RNA, 17 nt, Molluscum contagiosum virus
gggcacuucucgcgcga

SEQ ID NO: 237127 - RNA, 16 nt, Molluscum contagiosum virus
ggcagcgccgcgcgcg

SEQ ID NO: 237128 - RNA, 23 nt, Molluscum contagiosum virus
ggcagcgccgcgcgcgcgcguga

SEQ ID NO: 237129 - RNA, 21 nt, Molluscum contagiosum virus
ggcagcgucgcggagcgcgca

SEQ ID NO: 237130 - RNA, 17 nt, Molluscum contagiosum virus
ggcagcuaccgcgcgcg

SEQ ID NO: 237131 - RNA, 16 nt, Molluscum contagiosum virus
ggcgcgcugugagcgc

SEQ ID NO: 237132 - RNA, 18 nt, Molluscum contagiosum virus
ggcacccgugcgcgcgcu

SEQ ID NO: 237133 - RNA, 21 nt, Molluscum contagiosum virus
ggcacccuggcugcugcgcga

SEQ ID NO: 237134 - RNA, 21 nt, Molluscum contagiosum virus
ggcacgaggcagccgcggcgc

SEQ ID NO: 237135 - RNA, 19 nt, Molluscum contagiosum virus
ggcacggcacccgccagcu

SEQ ID NO: 237136 - RNA, 20 nt, Molluscum contagiosum virus
ggcacgggcucgaucugcgc

SEQ ID NO: 237137 - RNA, 15 nt, Molluscum contagiosum virus
ggcacuccagcgcgc

SEQ ID NO: 237138 - RNA, 19 nt, Molluscum contagiosum virus
ggcacugcuggcgcgcgcg

SEQ ID NO: 237139 - RNA, 14 nt, Molluscum contagiosum virus
ggcacuucucgcgc

SEQ ID NO: 237140 - RNA, 14 nt, Molluscum contagiosum virus
ggcagacgccagcg

SEQ ID NO: 237141 - RNA, 14 nt, Molluscum contagiosum virus
ggcagauagcucgc

SEQ ID NO: 237142 - RNA, 22 nt, Molluscum contagiosum virus
ggcggcauccugaugacggcag

SEQ ID NO: 237143 - RNA, 20 nt, Molluscum contagiosum virus
ggcggccucccucgucgcgc

SEQ ID NO: 237144 - RNA, 21 nt, Molluscum contagiosum virus
ggcgcguugcucccgucgagc

SEQ ID NO: 237145 - RNA, 14 nt, Molluscum contagiosum virus
ggcgcucgcgcgca

SEQ ID NO: 237146 - RNA, 18 nt, Molluscum contagiosum virus
ggcgggccugcgcccgca

SEQ ID NO: 237147 - RNA, 13 nt, Molluscum contagiosum virus
ggcggcgucgcgc

SEQ ID NO: 237148 - RNA, 16 nt, Molluscum contagiosum virus
ggcggcgucgcgcgcg

SEQ ID NO: 237149 - RNA, 22 nt, Molluscum contagiosum virus
ggaggucugcuuugucugcagg

SEQ ID NO: 237150 - RNA, 16 nt, Molluscum contagiosum virus
ggagucacgaccgacc

SEQ ID NO: 237151 - RNA, 13 nt, Molluscum contagiosum virus
gcgcggagcucgc

SEQ ID NO: 237152 - RNA, 16 nt, Molluscum contagiosum virus
gcgcggaucugcgcac

SEQ ID NO: 237153 - RNA, 20 nt, Molluscum contagiosum virus
ggaggaucgcuacgugcgca

SEQ ID NO: 237154 - RNA, 20 nt, Molluscum contagiosum virus
ggaucacgaugugcgcgcga

SEQ ID NO: 237155 - RNA, 17 nt, Molluscum contagiosum virus
ggaucagccccgcgcca

SEQ ID NO: 237156 - RNA, 15 nt, Molluscum contagiosum virus
ggaugaacgcgcugc

SEQ ID NO: 237157 - RNA, 22 nt, Molluscum contagiosum virus
ggcaaagccugcugcgcgcgcc

SEQ ID NO: 237158 - RNA, 20 nt, Molluscum contagiosum virus
ggcaaagcggggcgcgcgcc

SEQ ID NO: 237159 - RNA, 20 nt, Molluscum contagiosum virus
ggcaaccgcgcccgcgcgcu

SEQ ID NO: 237160 - RNA, 18 nt, Molluscum contagiosum virus
ggcaaugccgaugcuagc

SEQ ID NO: 237161 - RNA, 20 nt, Molluscum contagiosum virus
ggcacacacuugcacgcgca

SEQ ID NO: 237162 - RNA, 14 nt, Molluscum contagiosum virus
ggaggacacgcgca

SEQ ID NO: 237163 - RNA, 17 nt, Molluscum contagiosum virus
ggaggaccgcgagcgca

SEQ ID NO: 237164 - RNA, 20 nt, Molluscum contagiosum virus
ggaggaccgcgagcgcaugc

SEQ ID NO: 237165 - RNA, 13 nt, Molluscum contagiosum virus
gcgcggcacgccc

SEQ ID NO: 237166 - RNA, 22 nt, Molluscum contagiosum virus
gcgcggccauggucacgcgcac

SEQ ID NO: 237167 - RNA, 18 nt, Molluscum contagiosum virus
gcgcggcccgagcaggac

SEQ ID NO: 237168 - RNA, 22 nt, Molluscum contagiosum virus
gcgcggcgcgugccagucgcgc

SEQ ID NO: 237169 - RNA, 17 nt, Molluscum contagiosum virus
ggacguggucgcgcgcg

SEQ ID NO: 237170 - RNA, 16 nt, Molluscum contagiosum virus
ggacucgccgcgcgcc

SEQ ID NO: 237171 - RNA, 15 nt, Molluscum contagiosum virus
ggacuuccgcgcgcu

SEQ ID NO: 237172 - RNA, 13 nt, Molluscum contagiosum virus
ggacuucuugcgc

SEQ ID NO: 237173 - RNA, 17 nt, Molluscum contagiosum virus
ggacuuuucgcgcgugc

SEQ ID NO: 237174 - RNA, 20 nt, Molluscum contagiosum virus
ggagaacaugcucgccagca

SEQ ID NO: 237175 - RNA, 22 nt, Molluscum contagiosum virus
gcgcgcguucauuugcgugagg

SEQ ID NO: 237176 - RNA, 12 nt, Molluscum contagiosum virus
gcgcgcguugcc

SEQ ID NO: 237177 - RNA, 21 nt, Molluscum contagiosum virus
gcgcgcguuugucgcgggcgc

SEQ ID NO: 237178 - RNA, 16 nt, Molluscum contagiosum virus
gcgcgcuacugcgcgc

SEQ ID NO: 237179 - RNA, 19 nt, Molluscum contagiosum virus
gcgcgcuagagcgcggcgc

SEQ ID NO: 237180 - RNA, 20 nt, Molluscum contagiosum virus
gcgcgcuauucucguggcgu

SEQ ID NO: 237181 - RNA, 22 nt, Molluscum contagiosum virus
gcgcgcucgaacgcgcgugcgc

SEQ ID NO: 237182 - RNA, 15 nt, Molluscum contagiosum virus
gcgcgcucgaggcgc

SEQ ID NO: 237183 - RNA, 20 nt, Molluscum contagiosum virus
gcgcgcucgccaccgcgccc

SEQ ID NO: 237184 - RNA, 15 nt, Molluscum contagiosum virus
gcgcgcucgcgcagg

SEQ ID NO: 237185 - RNA, 22 nt, Molluscum contagiosum virus
gcgcgcucugccgcccgcgccc

SEQ ID NO: 237186 - RNA, 13 nt, Molluscum contagiosum virus
gcgcgcugcacac

SEQ ID NO: 237187 - RNA, 13 nt, Molluscum contagiosum virus
gcgcgcugcgaac

SEQ ID NO: 237188 - RNA, 13 nt, Molluscum contagiosum virus
gcgcgcugcgcac

SEQ ID NO: 237189 - RNA, 12 nt, Molluscum contagiosum virus
gcgcgcugcgcc

SEQ ID NO: 237190 - RNA, 13 nt, Molluscum contagiosum virus
gcgcgcugcgcgc

SEQ ID NO: 237191 - RNA, 15 nt, Molluscum contagiosum virus
gcgcgcugcgggcgc

SEQ ID NO: 237192 - RNA, 16 nt, Molluscum contagiosum virus
gcgcgcuggcgugcgc

SEQ ID NO: 237193 - RNA, 15 nt, Molluscum contagiosum virus
gcgcgcuuagcacac

SEQ ID NO: 237194 - RNA, 22 nt, Molluscum contagiosum virus
gcgcgcuuuuugccgcucacag

SEQ ID NO: 237195 - RNA, 14 nt, Molluscum contagiosum virus
ggagagcgcgcggc

SEQ ID NO: 237196 - RNA, 15 nt, Molluscum contagiosum virus
ggagaggacgcgugc

SEQ ID NO: 237197 - RNA, 15 nt, Molluscum contagiosum virus
ggagaucgccgcgca

SEQ ID NO: 237198 - RNA, 21 nt, Molluscum contagiosum virus
ggagcaccgcguggcgcgcga

SEQ ID NO: 237199 - RNA, 18 nt, Molluscum contagiosum virus
ggagcacuuccgcgcgcu

SEQ ID NO: 237200 - RNA, 20 nt, Molluscum contagiosum virus
ggagcagacguacgagcagg

SEQ ID NO: 237201 - RNA, 22 nt, Molluscum contagiosum virus
ggagccaagcaacggcggcgca

SEQ ID NO: 237202 - RNA, 22 nt, Molluscum contagiosum virus
ggagcccacguugccgcgcgcu

SEQ ID NO: 237203 - RNA, 12 nt, Molluscum contagiosum virus
ggagccgcggca

SEQ ID NO: 237204 - RNA, 17 nt, Molluscum contagiosum virus
ggagccucccccgcgca

SEQ ID NO: 237205 - RNA, 21 nt, Molluscum contagiosum virus
ggagcgcaaaugccgagcgca

SEQ ID NO: 237206 - RNA, 14 nt, Molluscum contagiosum virus
ggagcgcgcgcagg

SEQ ID NO: 237207 - RNA, 23 nt, Molluscum contagiosum virus
ggagcgcuucuagcucgcgcgcg

SEQ ID NO: 237208 - RNA, 17 nt, Molluscum contagiosum virus
ggagcugcgcgagacgc

SEQ ID NO: 237209 - RNA, 15 nt, Molluscum contagiosum virus
ggagcugcgcgcgcu

SEQ ID NO: 237210 - RNA, 14 nt, Molluscum contagiosum virus
ggagcugcggacgc

SEQ ID NO: 237211 - RNA, 14 nt, Molluscum contagiosum virus
gcgcgcacgcgcac

SEQ ID NO: 237212 - RNA, 17 nt, Molluscum contagiosum virus
gcgcgcacugcgggacc

SEQ ID NO: 237213 - RNA, 17 nt, Molluscum contagiosum virus
gcgcgcagacguggugc

SEQ ID NO: 237214 - RNA, 13 nt, Molluscum contagiosum virus
gcgcgcagcacac

SEQ ID NO: 237215 - RNA, 13 nt, Molluscum contagiosum virus
gcgcgcagcgccc

SEQ ID NO: 237216 - RNA, 15 nt, Molluscum contagiosum virus
gcgcgcaggaaaggu

SEQ ID NO: 237217 - RNA, 19 nt, Molluscum contagiosum virus
gcgcgcaucgcgggcacgc

SEQ ID NO: 237218 - RNA, 14 nt, Molluscum contagiosum virus
gcgcgcaugcucgc

SEQ ID NO: 237219 - RNA, 16 nt, Molluscum contagiosum virus
gcgcgccagcagcgcc

SEQ ID NO: 237220 - RNA, 17 nt, Molluscum contagiosum virus
gcgcgcccgcugcgcgc

SEQ ID NO: 237221 - RNA, 16 nt, Molluscum contagiosum virus
gcgcgccgacgugcgc

SEQ ID NO: 237222 - RNA, 13 nt, Molluscum contagiosum virus
gcgcgccgccgca

SEQ ID NO: 237223 - RNA, 15 nt, Molluscum contagiosum virus
gcgcgccgcgccgca

SEQ ID NO: 237224 - RNA, 17 nt, Molluscum contagiosum virus
gcgcgccgcgcuggcgc

SEQ ID NO: 237225 - RNA, 16 nt, Molluscum contagiosum virus
gcgcgccgcgggccgc

SEQ ID NO: 237226 - RNA, 14 nt, Molluscum contagiosum virus
gcgcgccgggccgc

SEQ ID NO: 237227 - RNA, 18 nt, Molluscum contagiosum virus
gcgcgccugccgccugca

SEQ ID NO: 237228 - RNA, 22 nt, Molluscum contagiosum virus
gcgcgcgacgacguugugcucc

SEQ ID NO: 237229 - RNA, 19 nt, Molluscum contagiosum virus
gcgcgcgagcacagcgcgc

SEQ ID NO: 237230 - RNA, 15 nt, Molluscum contagiosum virus
gcgcgcgcagcgcgc

SEQ ID NO: 237231 - RNA, 13 nt, Molluscum contagiosum virus
gcgcgcgccagcu

SEQ ID NO: 237232 - RNA, 21 nt, Molluscum contagiosum virus
gcgcgcgccauccagcgcauc

SEQ ID NO: 237233 - RNA, 19 nt, Molluscum contagiosum virus
gcgcgcgugccuguggcgc

SEQ ID NO: 237234 - RNA, 16 nt, Molluscum contagiosum virus
gcgcgcgugcggacgc

SEQ ID NO: 237235 - RNA, 20 nt, Molluscum contagiosum virus
gcgcgcacaaacgcgcgcac

SEQ ID NO: 237236 - RNA, 23 nt, Molluscum contagiosum virus
gcgcgcacaucggcacugcucac

SEQ ID NO: 237237 - RNA, 20 nt, Molluscum contagiosum virus
gcgcgagacgcugcugcaca

SEQ ID NO: 237238 - RNA, 15 nt, Molluscum contagiosum virus
gcgcgagaugcucgc

SEQ ID NO: 237239 - RNA, 15 nt, Molluscum contagiosum virus
gcgcgagcaugccgc

SEQ ID NO: 237240 - RNA, 15 nt, Molluscum contagiosum virus
gcgcgagcgacggca

SEQ ID NO: 237241 - RNA, 12 nt, Molluscum contagiosum virus
gcgcgcgccgca

SEQ ID NO: 237242 - RNA, 14 nt, Molluscum contagiosum virus
gcgcgcgcgcaagu

SEQ ID NO: 237243 - RNA, 16 nt, Molluscum contagiosum virus
gcgcgcgcgcgccgga

SEQ ID NO: 237244 - RNA, 15 nt, Molluscum contagiosum virus
gcgcgcgcgcggcgc

SEQ ID NO: 237245 - RNA, 13 nt, Molluscum contagiosum virus
gcgcgcgcggcgc

SEQ ID NO: 237246 - RNA, 15 nt, Molluscum contagiosum virus
gcgcgcggcgcgccc

SEQ ID NO: 237247 - RNA, 16 nt, Molluscum contagiosum virus
gcgcgcggugcugcgc

SEQ ID NO: 237248 - RNA, 14 nt, Molluscum contagiosum virus
gcgcgacaugcugc

SEQ ID NO: 237249 - RNA, 24 nt, Molluscum contagiosum virus
gcgcgacgucgucaaggauguagc

SEQ ID NO: 237250 - RNA, 14 nt, Molluscum contagiosum virus
gcgcgacuacgcac

SEQ ID NO: 237251 - RNA, 21 nt, Molluscum contagiosum virus
gcgcgacuccaucugcgcgac

SEQ ID NO: 237252 - RNA, 14 nt, Molluscum contagiosum virus
gcgccugcuugcgc

SEQ ID NO: 237253 - RNA, 17 nt, Molluscum contagiosum virus
gcgccgugcugcgucac

SEQ ID NO: 237254 - RNA, 16 nt, Molluscum contagiosum virus
gcgccuacucuugcgc

SEQ ID NO: 237255 - RNA, 14 nt, Molluscum contagiosum virus
gcgccuagcuccag

SEQ ID NO: 237256 - RNA, 20 nt, Molluscum contagiosum virus
gcgccggcacccgugcgcgc

SEQ ID NO: 237257 - RNA, 12 nt, Molluscum contagiosum virus
gcgccgcggcgg

SEQ ID NO: 237258 - RNA, 18 nt, Molluscum contagiosum virus
gcgccgccucgcgcgcac

SEQ ID NO: 237259 - RNA, 13 nt, Molluscum contagiosum virus
gcgccgcuaccag

SEQ ID NO: 237260 - RNA, 13 nt, Molluscum contagiosum virus
gcgccgcucgcac

SEQ ID NO: 237261 - RNA, 21 nt, Molluscum contagiosum virus
gcgccgcucgucgcugcggac

SEQ ID NO: 237262 - RNA, 13 nt, Molluscum contagiosum virus
gcgccgcugcgcc

SEQ ID NO: 237263 - RNA, 15 nt, Molluscum contagiosum virus
gcgcccucgcgcgcg

SEQ ID NO: 237264 - RNA, 22 nt, Molluscum contagiosum virus
gcgcccuggagcgcagucccag

SEQ ID NO: 237265 - RNA, 16 nt, Molluscum contagiosum virus
gcgccgacaugcgcac

SEQ ID NO: 237266 - RNA, 13 nt, Molluscum contagiosum virus
gcgccgaggacua

SEQ ID NO: 237267 - RNA, 23 nt, Molluscum contagiosum virus
gcgccgcacgcugcugcgugcgc

SEQ ID NO: 237268 - RNA, 18 nt, Molluscum contagiosum virus
gcgccgcacgugcugcgc

SEQ ID NO: 237269 - RNA, 12 nt, Molluscum contagiosum virus
gcgccgccagcg

SEQ ID NO: 237270 - RNA, 16 nt, Molluscum contagiosum virus
gcgccgccgacgccuu

SEQ ID NO: 237271 - RNA, 20 nt, Molluscum contagiosum virus
gcgccgccgcgccgcugcgc

SEQ ID NO: 237272 - RNA, 14 nt, Molluscum contagiosum virus
gugggccgcggcgc

SEQ ID NO: 237273 - RNA, 20 nt, Molluscum contagiosum virus
gugggcgacgugaagacgcu

SEQ ID NO: 237274 - RNA, 17 nt, Molluscum contagiosum virus
gugcgcuggcgcgcgcg

SEQ ID NO: 237275 - RNA, 19 nt, Molluscum contagiosum virus
gugcggccaccagcgcggc

SEQ ID NO: 237276 - RNA, 15 nt, Molluscum contagiosum virus
gugcgugcgcugcgc

SEQ ID NO: 237277 - RNA, 16 nt, Molluscum contagiosum virus
gugcucguguguccgc

SEQ ID NO: 237278 - RNA, 22 nt, Molluscum contagiosum virus
gugcucguguguccgcacgcac

SEQ ID NO: 237279 - RNA, 15 nt, Molluscum contagiosum virus
gugcucugugcgcgc

SEQ ID NO: 237280 - RNA, 18 nt, Molluscum contagiosum virus
gugcugaagacgcuggcc

SEQ ID NO: 237281 - RNA, 21 nt, Molluscum contagiosum virus
gugcuggagggcacgcugcac

SEQ ID NO: 237282 - RNA, 20 nt, Molluscum contagiosum virus
gugcuggucaagaaggcgcu

SEQ ID NO: 237283 - RNA, 14 nt, Molluscum contagiosum virus
guggaccuuggcgc

SEQ ID NO: 237284 - RNA, 19 nt, Molluscum contagiosum virus
guggaccuuggcgcgccgc

SEQ ID NO: 237285 - RNA, 17 nt, Molluscum contagiosum virus
guggacgaugguggcgc

SEQ ID NO: 237286 - RNA, 14 nt, Molluscum contagiosum virus
guggaucgcgcgca

SEQ ID NO: 237287 - RNA, 16 nt, Molluscum contagiosum virus
guggccuacguggcgu

SEQ ID NO: 237288 - RNA, 13 nt, Molluscum contagiosum virus
gugcgccgcgccc

SEQ ID NO: 237289 - RNA, 21 nt, Molluscum contagiosum virus
gugcgccucggacuucgacgc

SEQ ID NO: 237290 - RNA, 13 nt, Molluscum contagiosum virus
gugcgcgcugcgc

SEQ ID NO: 237291 - RNA, 18 nt, Molluscum contagiosum virus
gugcgcgcugcgcgcgcu

SEQ ID NO: 237292 - RNA, 16 nt, Molluscum contagiosum virus
gugcgagaucgacugc

SEQ ID NO: 237293 - RNA, 13 nt, Molluscum contagiosum virus
gugcgagcacgag

SEQ ID NO: 237294 - RNA, 12 nt, Molluscum contagiosum virus
gugcgcaccauc

SEQ ID NO: 237295 - RNA, 13 nt, Molluscum contagiosum virus
guuccccgugagc

SEQ ID NO: 237296 - RNA, 19 nt, Molluscum contagiosum virus
guuccggacgugcacgcac

SEQ ID NO: 237297 - RNA, 17 nt, Molluscum contagiosum virus
guuccggcagcgccgcg

SEQ ID NO: 237298 - RNA, 22 nt, Molluscum contagiosum virus
guucgagaagacggggcgcacg

SEQ ID NO: 237299 - RNA, 13 nt, Molluscum contagiosum virus
guucgcgcgccag

SEQ ID NO: 237300 - RNA, 15 nt, Molluscum contagiosum virus
guuccagcagcgcca

SEQ ID NO: 237301 - RNA, 16 nt, Molluscum contagiosum virus
guuccagcagcgccag

SEQ ID NO: 237302 - RNA, 20 nt, Molluscum contagiosum virus
guuccaggaacgccgccacg

SEQ ID NO: 237303 - RNA, 13 nt, Molluscum contagiosum virus
guguucugcgcgc

SEQ ID NO: 237304 - RNA, 18 nt, Molluscum contagiosum virus
guugcguuggcgccagcc

SEQ ID NO: 237305 - RNA, 22 nt, Molluscum contagiosum virus
guugcugcugccgcgcggcacg

SEQ ID NO: 237306 - RNA, 15 nt, Molluscum contagiosum virus
guuugcacccgcgca

SEQ ID NO: 237307 - RNA, 20 nt, Molluscum contagiosum virus
guuugccacggccgcgcgcg

SEQ ID NO: 237308 - RNA, 22 nt, Molluscum contagiosum virus
guucaacaucguggcgcgcgcg

SEQ ID NO: 237309 - RNA, 19 nt, Molluscum contagiosum virus
guugcgcacguuggccacg

SEQ ID NO: 237310 - RNA, 12 nt, Molluscum contagiosum virus
guugcgcgcgcc

SEQ ID NO: 237311 - RNA, 13 nt, Molluscum contagiosum virus
gugcaauuccguc

SEQ ID NO: 237312 - RNA, 19 nt, Molluscum contagiosum virus
gugcacgcacgcgcgggca

SEQ ID NO: 237313 - RNA, 20 nt, Molluscum contagiosum virus
gugcacgcggcgcgugucgc

SEQ ID NO: 237314 - RNA, 16 nt, Molluscum contagiosum virus
gugcagcgcgugcgca

SEQ ID NO: 237315 - RNA, 16 nt, Molluscum contagiosum virus
gugcagcggcgccacg

SEQ ID NO: 237316 - RNA, 17 nt, Molluscum contagiosum virus
gugcaggaacgcgcgcu

SEQ ID NO: 237317 - RNA, 18 nt, Molluscum contagiosum virus
gugcauggcacgcgagca

SEQ ID NO: 237318 - RNA, 20 nt, Molluscum contagiosum virus
gugccuccgcggacgcgccc

SEQ ID NO: 237319 - RNA, 15 nt, Molluscum contagiosum virus
gugccuggcuugcgc

SEQ ID NO: 237320 - RNA, 20 nt, Molluscum contagiosum virus
gugccuggcuugcgcgcgcc

SEQ ID NO: 237321 - RNA, 18 nt, Molluscum contagiosum virus
gugccuguggcgcacacg

SEQ ID NO: 237322 - RNA, 12 nt, Molluscum contagiosum virus
gugcgaagggcu

SEQ ID NO: 237323 - RNA, 13 nt, Molluscum contagiosum virus
gugcccgcgcgcu

SEQ ID NO: 237324 - RNA, 16 nt, Molluscum contagiosum virus
gugcccuacgcgcgcg

SEQ ID NO: 237325 - RNA, 15 nt, Molluscum contagiosum virus
gugccgacgugugcc

SEQ ID NO: 237326 - RNA, 16 nt, Molluscum contagiosum virus
gugccgccgugggcgc

SEQ ID NO: 237327 - RNA, 20 nt, Molluscum contagiosum virus
gugccgccgugggcgccgcg

SEQ ID NO: 237328 - RNA, 16 nt, Molluscum contagiosum virus
gugccgcucgcugucc

SEQ ID NO: 237329 - RNA, 15 nt, Molluscum contagiosum virus
guccgcgggcgcacg

SEQ ID NO: 237330 - RNA, 19 nt, Molluscum contagiosum virus
guccgcgggcgcgcgccag

SEQ ID NO: 237331 - RNA, 15 nt, Molluscum contagiosum virus
guccggcgcucgccc

SEQ ID NO: 237332 - RNA, 15 nt, Molluscum contagiosum virus
guccggcgcuugccc

SEQ ID NO: 237333 - RNA, 15 nt, Molluscum contagiosum virus
gucgagcgcgccgcg

SEQ ID NO: 237334 - RNA, 19 nt, Molluscum contagiosum virus
gucgaggagggcguccgua

SEQ ID NO: 237335 - RNA, 19 nt, Molluscum contagiosum virus
gucgaggccuucgcgcccg

SEQ ID NO: 237336 - RNA, 19 nt, Molluscum contagiosum virus
gucgcacaguucacggcgc

SEQ ID NO: 237337 - RNA, 16 nt, Molluscum contagiosum virus
gucgcgccgaggacgc

SEQ ID NO: 237338 - RNA, 13 nt, Molluscum contagiosum virus
gucgcgcgccgca

SEQ ID NO: 237339 - RNA, 23 nt, Molluscum contagiosum virus
gucucgagcuuccucaaggcgca

SEQ ID NO: 237340 - RNA, 13 nt, Molluscum contagiosum virus
gucugcaaggccu

SEQ ID NO: 237341 - RNA, 20 nt, Molluscum contagiosum virus
gucgugcgcguucggaacgc

SEQ ID NO: 237342 - RNA, 16 nt, Molluscum contagiosum virus
gucgcgggcgcgcgcg

SEQ ID NO: 237343 - RNA, 15 nt, Molluscum contagiosum virus
uagcacacgcgcgcg

SEQ ID NO: 237344 - RNA, 22 nt, Molluscum contagiosum virus
uagcaccgcaugggcccuggcg

SEQ ID NO: 237345 - RNA, 16 nt, Molluscum contagiosum virus
uagcagcgccugcacg

SEQ ID NO: 237346 - RNA, 14 nt, Molluscum contagiosum virus
uagcagcgugcgca

SEQ ID NO: 237347 - RNA, 21 nt, Molluscum contagiosum virus
uagcagggcggcgccugcgcc

SEQ ID NO: 237348 - RNA, 23 nt, Molluscum contagiosum virus
uagcaugucacgcgucgcgcgcc

SEQ ID NO: 237349 - RNA, 14 nt, Molluscum contagiosum virus
uagccgccgcugcc

SEQ ID NO: 237350 - RNA, 21 nt, Molluscum contagiosum virus
uagaccuuuacgucgcgcgcu

SEQ ID NO: 237351 - RNA, 16 nt, Molluscum contagiosum virus
uagcgcccguggcgcc

SEQ ID NO: 237352 - RNA, 12 nt, Molluscum contagiosum virus
uagcgcgcgugu

SEQ ID NO: 237353 - RNA, 16 nt, Molluscum contagiosum virus
uaggcgggccugcgcc

SEQ ID NO: 237354 - RNA, 22 nt, Molluscum contagiosum virus
uagcggcggcguaggccugcgg

SEQ ID NO: 237355 - RNA, 15 nt, Molluscum contagiosum virus
uagcuggcgcccgua

SEQ ID NO: 237356 - RNA, 19 nt, Molluscum contagiosum virus
uaaagaguuccagcagcgc

SEQ ID NO: 237357 - RNA, 15 nt, Molluscum contagiosum virus
uaaauggcgcgcgcg

SEQ ID NO: 237358 - RNA, 15 nt, Molluscum contagiosum virus
uacagccgccugccg

SEQ ID NO: 237359 - RNA, 13 nt, Molluscum contagiosum virus
uacgagcaggcgc

SEQ ID NO: 237360 - RNA, 19 nt, Molluscum contagiosum virus
uacgagcccaucaaggcgc

SEQ ID NO: 237361 - RNA, 19 nt, Molluscum contagiosum virus
uacgaggugcugcgccacg

SEQ ID NO: 237362 - RNA, 17 nt, Molluscum contagiosum virus
uacuuggaagagucgcg

SEQ ID NO: 237363 - RNA, 21 nt, Molluscum contagiosum virus
uacgcacgcacguggcgcugc

SEQ ID NO: 237364 - RNA, 14 nt, Molluscum contagiosum virus
uacgcgcagggagc

SEQ ID NO: 237365 - RNA, 15 nt, Molluscum contagiosum virus
uacgcgccggggcgc

SEQ ID NO: 237366 - RNA, 13 nt, Molluscum contagiosum virus
ucaacgcgcgugc

SEQ ID NO: 237367 - RNA, 20 nt, Molluscum contagiosum virus
uauacuccccgcgcgcgugc

SEQ ID NO: 237368 - RNA, 22 nt, Molluscum contagiosum virus
uauaguccccggcgccggcacc

SEQ ID NO: 237369 - RNA, 22 nt, Molluscum contagiosum virus
ucaagaacagucgcgcgccugc

SEQ ID NO: 237370 - RNA, 15 nt, Molluscum contagiosum virus
ucaagaggugcgugc

SEQ ID NO: 237371 - RNA, 15 nt, Molluscum contagiosum virus
ucaagcaccugcgcu

SEQ ID NO: 237372 - RNA, 19 nt, Molluscum contagiosum virus
ucaagcaccugcgcuuccu

SEQ ID NO: 237373 - RNA, 21 nt, Molluscum contagiosum virus
ucaagcacggcuuccggcacc

SEQ ID NO: 237374 - RNA, 19 nt, Molluscum contagiosum virus
ucaagcagguggccgcgcg

SEQ ID NO: 237375 - RNA, 20 nt, Molluscum contagiosum virus
ucaccgccuguaccugcucg

SEQ ID NO: 237376 - RNA, 13 nt, Molluscum contagiosum virus
ucagaacgacacc

SEQ ID NO: 237377 - RNA, 13 nt, Molluscum contagiosum virus
ucagccgagcgcc

SEQ ID NO: 237378 - RNA, 12 nt, Molluscum contagiosum virus
ucagcgcgcgca

SEQ ID NO: 237379 - RNA, 15 nt, Molluscum contagiosum virus
ucacuuucgcgcgca

SEQ ID NO: 237380 - RNA, 16 nt, Molluscum contagiosum virus
ucgagcaccugucgcg

SEQ ID NO: 237381 - RNA, 15 nt, Molluscum contagiosum virus
ucaucgacgagcacg

SEQ ID NO: 237382 - RNA, 13 nt, Molluscum contagiosum virus
ucgagaccucgcg

SEQ ID NO: 237383 - RNA, 19 nt, Molluscum contagiosum virus
ucgagaccucgcgcuuccg

SEQ ID NO: 237384 - RNA, 15 nt, Molluscum contagiosum virus
ucgagacgcugcgcg

SEQ ID NO: 237385 - RNA, 20 nt, Molluscum contagiosum virus
ucgcaaccccgcgcugcgcg

SEQ ID NO: 237386 - RNA, 18 nt, Molluscum contagiosum virus
ucgcaagucucccucgcg

SEQ ID NO: 237387 - RNA, 22 nt, Molluscum contagiosum virus
ucgcaagucucccucgcgcgca

SEQ ID NO: 237388 - RNA, 19 nt, Molluscum contagiosum virus
ucgcacgcuagcgagcgcc

SEQ ID NO: 237389 - RNA, 18 nt, Molluscum contagiosum virus
ucgcagaacugcugcgcg

SEQ ID NO: 237390 - RNA, 16 nt, Molluscum contagiosum virus
ucgcagacgacucgcu

SEQ ID NO: 237391 - RNA, 20 nt, Molluscum contagiosum virus
ucgcagacgacucgcugcca

SEQ ID NO: 237392 - RNA, 19 nt, Molluscum contagiosum virus
ucgcagacgcagcgcgagc

SEQ ID NO: 237393 - RNA, 19 nt, Molluscum contagiosum virus
ucgccgcgcgccgcugcuc

SEQ ID NO: 237394 - RNA, 19 nt, Molluscum contagiosum virus
ucgccgggccccugucgcg

SEQ ID NO: 237395 - RNA, 16 nt, Molluscum contagiosum virus
ucgcccugcccgcgcg

SEQ ID NO: 237396 - RNA, 14 nt, Molluscum contagiosum virus
ucgagcccgagccc

SEQ ID NO: 237397 - RNA, 20 nt, Molluscum contagiosum virus
ucgagccgcgcuucgagcac

SEQ ID NO: 237398 - RNA, 16 nt, Molluscum contagiosum virus
ucgagcgcgccgcgcg

SEQ ID NO: 237399 - RNA, 22 nt, Molluscum contagiosum virus
ucgagcgcgcuggacuugcgcg

SEQ ID NO: 237400 - RNA, 14 nt, Molluscum contagiosum virus
ucgaggccuucgcg

SEQ ID NO: 237401 - RNA, 23 nt, Molluscum contagiosum virus
ucgagggggacgugcccuacgcg

SEQ ID NO: 237402 - RNA, 23 nt, Molluscum contagiosum virus
gacagggugccuacucgcgacgc

SEQ ID NO: 237403 - RNA, 13 nt, Molluscum contagiosum virus
gaccacgcgcgcu

SEQ ID NO: 237404 - RNA, 16 nt, Molluscum contagiosum virus
gaccagauccgggcgc

SEQ ID NO: 237405 - RNA, 23 nt, Molluscum contagiosum virus
gaccgucagccucugugcggcgc

SEQ ID NO: 237406 - RNA, 15 nt, Molluscum contagiosum virus
gaccuuggugcucau

SEQ ID NO: 237407 - RNA, 13 nt, Molluscum contagiosum virus
gacgaagcugugc

SEQ ID NO: 237408 - RNA, 21 nt, Molluscum contagiosum virus
gaccgcaagugcacgcggcgc

SEQ ID NO: 237409 - RNA, 14 nt, Molluscum contagiosum virus
cuggcccugcuagu

SEQ ID NO: 237410 - RNA, 16 nt, Molluscum contagiosum virus
cuggcccugcuugacg

SEQ ID NO: 237411 - RNA, 13 nt, Molluscum contagiosum virus
cuggcgagcacgu

SEQ ID NO: 237412 - RNA, 20 nt, Molluscum contagiosum virus
cuggcgauguccaugucgcg

SEQ ID NO: 237413 - RNA, 18 nt, Molluscum contagiosum virus
cuggcagugccgggcgcc

SEQ ID NO: 237414 - RNA, 11 nt, Molluscum contagiosum virus
cuggccaacac

SEQ ID NO: 237415 - RNA, 20 nt, Molluscum contagiosum virus
gacagcacaaacacgcgcgc

SEQ ID NO: 237416 - RNA, 13 nt, Molluscum contagiosum virus
gacagcgcgcgca

SEQ ID NO: 237417 - RNA, 20 nt, Molluscum contagiosum virus
gacagcgugcgcgggcacgc

SEQ ID NO: 237418 - RNA, 17 nt, Molluscum contagiosum virus
gacacgcgugucugcgc

SEQ ID NO: 237419 - RNA, 21 nt, Molluscum contagiosum virus
cuggcgcgcggagagcagugc

SEQ ID NO: 237420 - RNA, 19 nt, Molluscum contagiosum virus
cuggacgggcacgagcacg

SEQ ID NO: 237421 - RNA, 18 nt, Molluscum contagiosum virus
cuggaguuuaaugacgcg

SEQ ID NO: 237422 - RNA, 17 nt, Molluscum contagiosum virus
cuggaagaacaggccgc

SEQ ID NO: 237423 - RNA, 17 nt, Molluscum contagiosum virus
cugcucucgcgcgccag

SEQ ID NO: 237424 - RNA, 18 nt, Molluscum contagiosum virus
cugcucuugaugcugaac

SEQ ID NO: 237425 - RNA, 20 nt, Molluscum contagiosum virus
cugcugcgguaucuacacuc

SEQ ID NO: 237426 - RNA, 22 nt, Molluscum contagiosum virus
cugcugcugcaaagcgcggccg

SEQ ID NO: 237427 - RNA, 16 nt, Molluscum contagiosum virus
cugcuccccgccagca

SEQ ID NO: 237428 - RNA, 13 nt, Molluscum contagiosum virus
gacgacggcacgc

SEQ ID NO: 237429 - RNA, 22 nt, Molluscum contagiosum virus
gacgacaugcugugcggcacgc

SEQ ID NO: 237430 - RNA, 19 nt, Molluscum contagiosum virus
gaccuacgaggugcugcgc

SEQ ID NO: 237431 - RNA, 15 nt, Molluscum contagiosum virus
gaccucacagcgccg

SEQ ID NO: 237432 - RNA, 16 nt, Molluscum contagiosum virus
gacgagugcgccgcgc

SEQ ID NO: 237433 - RNA, 20 nt, Molluscum contagiosum virus
gacgagcagagccgggacgc

SEQ ID NO: 237434 - RNA, 24 nt, Molluscum contagiosum virus
gacgcacagucuccacgcgugcgc

SEQ ID NO: 237435 - RNA, 18 nt, Molluscum contagiosum virus
gacgcaggacgcggucgc

SEQ ID NO: 237436 - RNA, 20 nt, Molluscum contagiosum virus
gacgccaagcgucgcgacgc

SEQ ID NO: 237437 - RNA, 20 nt, Molluscum contagiosum virus
gacgcccggcaccgcggcgg

SEQ ID NO: 237438 - RNA, 13 nt, Molluscum contagiosum virus
gacgcggucgcgc

SEQ ID NO: 237439 - RNA, 23 nt, Molluscum contagiosum virus
gacgcgugcauggcacgcgagca

SEQ ID NO: 237440 - RNA, 16 nt, Molluscum contagiosum virus
gacgcuagcugugcgc

SEQ ID NO: 237441 - RNA, 17 nt, Molluscum contagiosum virus
gacgcgcaagugugcgc

SEQ ID NO: 237442 - RNA, 18 nt, Molluscum contagiosum virus
gacgcgcacgcgggacgc

SEQ ID NO: 237443 - RNA, 17 nt, Molluscum contagiosum virus
gacgcgccucgagcagg

SEQ ID NO: 237444 - RNA, 15 nt, Molluscum contagiosum virus
gacgcgcgagugugc

SEQ ID NO: 237445 - RNA, 17 nt, Molluscum contagiosum virus
gacgcgcgagugugcgu

SEQ ID NO: 237446 - RNA, 24 nt, Molluscum contagiosum virus
gacgcgcguggagcgcgcggacgc

SEQ ID NO: 237447 - RNA, 19 nt, Molluscum contagiosum virus
gacuacgcacggcggacgc

SEQ ID NO: 237448 - RNA, 18 nt, Molluscum contagiosum virus
gacuacgcgcugcggcgc

SEQ ID NO: 237449 - RNA, 17 nt, Molluscum contagiosum virus
gacucgcgcccgcuccc

SEQ ID NO: 237450 - RNA, 19 nt, Molluscum contagiosum virus
gacgugaucgcgcaggcgc

SEQ ID NO: 237451 - RNA, 18 nt, Molluscum contagiosum virus
gacgugcccuacgcgcgc

SEQ ID NO: 237452 - RNA, 14 nt, Molluscum contagiosum virus
gacgugcggcacgc

SEQ ID NO: 237453 - RNA, 23 nt, Molluscum contagiosum virus
gacggcugguguuaccgggucgc

SEQ ID NO: 237454 - RNA, 19 nt, Molluscum contagiosum virus
gacggcuucauccgcgcgc

SEQ ID NO: 237455 - RNA, 22 nt, Molluscum contagiosum virus
gacgggagagguugcgcggggc

SEQ ID NO: 237456 - RNA, 22 nt, Molluscum contagiosum virus
gacguacgagcaggcgcagcgc

SEQ ID NO: 237457 - RNA, 15 nt, Molluscum contagiosum virus
gacggugcugcgcac

SEQ ID NO: 237458 - RNA, 17 nt, Molluscum contagiosum virus
gacgcucgggccggcgc

SEQ ID NO: 237459 - RNA, 16 nt, Molluscum contagiosum virus
gacgcugcggcggcgc

SEQ ID NO: 237460 - RNA, 14 nt, Molluscum contagiosum virus
gacgcuggcggcgc

SEQ ID NO: 237461 - RNA, 15 nt, Molluscum contagiosum virus
gacgcuggugaucac

SEQ ID NO: 237462 - RNA, 23 nt, Molluscum contagiosum virus
gacgcuggugaucacgcacgaag

SEQ ID NO: 237463 - RNA, 17 nt, Molluscum contagiosum virus
gacggaauuugcggcgc

SEQ ID NO: 237464 - RNA, 23 nt, Molluscum contagiosum virus
gacgccgucgaugaaggcgcggc

SEQ ID NO: 237465 - RNA, 15 nt, Molluscum contagiosum virus
gacgcgagacugugc

SEQ ID NO: 237466 - RNA, 21 nt, Molluscum contagiosum virus
gacggacuucuugcgcggcgg

SEQ ID NO: 237467 - RNA, 19 nt, Molluscum contagiosum virus
gacggagagcgcgcggcgc

SEQ ID NO: 237468 - RNA, 16 nt, Molluscum contagiosum virus
gacggcacgggcacgc

SEQ ID NO: 237469 - RNA, 20 nt, Molluscum contagiosum virus
gacggcacgggcacgcgcgc

SEQ ID NO: 237470 - RNA, 16 nt, Molluscum contagiosum virus
gacggccggcgggcgc

SEQ ID NO: 237471 - RNA, 15 nt, Molluscum contagiosum virus
gacggcgcgcagcgc

SEQ ID NO: 237472 - RNA, 12 nt, Molluscum contagiosum virus
gacggcgcgcgc

SEQ ID NO: 237473 - RNA, 14 nt, Molluscum contagiosum virus
gacggcgcgggcgc

SEQ ID NO: 237474 - RNA, 17 nt, Molluscum contagiosum virus
cgggccccugcgcgagc

SEQ ID NO: 237475 - RNA, 17 nt, Molluscum contagiosum virus
cgggccgccgcccgcga

SEQ ID NO: 237476 - RNA, 21 nt, Molluscum contagiosum virus
cgggauggucucgcugcuggg

SEQ ID NO: 237477 - RNA, 15 nt, Molluscum contagiosum virus
cgggcacgagcacgu

SEQ ID NO: 237478 - RNA, 23 nt, Molluscum contagiosum virus
cgggcacgccgcagcgcuggagc

SEQ ID NO: 237479 - RNA, 16 nt, Molluscum contagiosum virus
cgggcacuucucgcgc

SEQ ID NO: 237480 - RNA, 20 nt, Molluscum contagiosum virus
cgggcguguccgcgggcgcg

SEQ ID NO: 237481 - RNA, 15 nt, Molluscum contagiosum virus
cgggcgcugcaccgc

SEQ ID NO: 237482 - RNA, 18 nt, Molluscum contagiosum virus
cgggcgaaagcgccgcgc

SEQ ID NO: 237483 - RNA, 17 nt, Molluscum contagiosum virus
cgggccuguccgcgggc

SEQ ID NO: 237484 - RNA, 13 nt, Molluscum contagiosum virus
cgggcucgggcag

SEQ ID NO: 237485 - RNA, 17 nt, Molluscum contagiosum virus
cgggcucgugcuggagc

SEQ ID NO: 237486 - RNA, 19 nt, Molluscum contagiosum virus
cgggcucuuccaccggcag

SEQ ID NO: 237487 - RNA, 14 nt, Molluscum contagiosum virus
cgggcugcgcggcg

SEQ ID NO: 237488 - RNA, 18 nt, Molluscum contagiosum virus
cgggcugucgcccggcag

SEQ ID NO: 237489 - RNA, 23 nt, Molluscum contagiosum virus
cgggcuugcucccucgcgcgcag

SEQ ID NO: 237490 - RNA, 18 nt, Molluscum contagiosum virus
cucggaggcuugccccgc

SEQ ID NO: 237491 - RNA, 23 nt, Molluscum contagiosum virus
cucggcguuggccacgaacacgg

SEQ ID NO: 237492 - RNA, 21 nt, Molluscum contagiosum virus
cucggagaagaacagcacgaa

SEQ ID NO: 237493 - RNA, 20 nt, Molluscum contagiosum virus
cucugcgcgcaagucaccgc

SEQ ID NO: 237494 - RNA, 24 nt, Molluscum contagiosum virus
cucugcguaagcgccugcacacgc

SEQ ID NO: 237495 - RNA, 17 nt, Molluscum contagiosum virus
cucuggagccucccccg

SEQ ID NO: 237496 - RNA, 19 nt, Molluscum contagiosum virus
cucuggcuugcgcuuagac

SEQ ID NO: 237497 - RNA, 17 nt, Molluscum contagiosum virus
cucugggcgucgcacag

SEQ ID NO: 237498 - RNA, 18 nt, Molluscum contagiosum virus
cucuacgccguguaccgc

SEQ ID NO: 237499 - RNA, 15 nt, Molluscum contagiosum virus
cucgugccgccugcg

SEQ ID NO: 237500 - RNA, 21 nt, Molluscum contagiosum virus
cucguggacagccugcaccga

SEQ ID NO: 237501 - RNA, 23 nt, Molluscum contagiosum virus
cucgcguuagcgcuggcccgugc

SEQ ID NO: 237502 - RNA, 24 nt, Molluscum contagiosum virus
cucgcucaucaccgacacgcgccc

SEQ ID NO: 237503 - RNA, 19 nt, Molluscum contagiosum virus
cucgcucauccacgcggag

SEQ ID NO: 237504 - RNA, 19 nt, Molluscum contagiosum virus
cucggacagugccuccgcg

SEQ ID NO: 237505 - RNA, 21 nt, Molluscum contagiosum virus
cucgcgggcguggggagcugg

SEQ ID NO: 237506 - RNA, 22 nt, Molluscum contagiosum virus
cucgcgagaaguucugcacagc

SEQ ID NO: 237507 - RNA, 16 nt, Molluscum contagiosum virus
cucgcgagggcucguc

SEQ ID NO: 237508 - RNA, 17 nt, Molluscum contagiosum virus
cucgcgcaucugccgcg

SEQ ID NO: 237509 - RNA, 14 nt, Molluscum contagiosum virus
cucugucucccgcc

SEQ ID NO: 237510 - RNA, 21 nt, Molluscum contagiosum virus
cugagauauacaaagaagcgc

SEQ ID NO: 237511 - RNA, 20 nt, Molluscum contagiosum virus
cugagcgugucgaagcgcgc

SEQ ID NO: 237512 - RNA, 15 nt, Molluscum contagiosum virus
cugcaacucgcgcug

SEQ ID NO: 237513 - RNA, 20 nt, Molluscum contagiosum virus
cugcaagaggcgcugucgcg

SEQ ID NO: 237514 - RNA, 21 nt, Molluscum contagiosum virus
cugcagcccgacgcgggcgcg

SEQ ID NO: 237515 - RNA, 18 nt, Molluscum contagiosum virus
cugcacgugcagcggcgc

SEQ ID NO: 237516 - RNA, 21 nt, Molluscum contagiosum virus
cugaucaccgaggagccgcgc

SEQ ID NO: 237517 - RNA, 17 nt, Molluscum contagiosum virus
cugcgagaucguggacg

SEQ ID NO: 237518 - RNA, 12 nt, Molluscum contagiosum virus
cugcgagcagcc

SEQ ID NO: 237519 - RNA, 15 nt, Molluscum contagiosum virus
cugcgaucgcagcag

SEQ ID NO: 237520 - RNA, 17 nt, Molluscum contagiosum virus
cugcgcaccugcacgac

SEQ ID NO: 237521 - RNA, 13 nt, Molluscum contagiosum virus
cugcccgcggaga

SEQ ID NO: 237522 - RNA, 21 nt, Molluscum contagiosum virus
cugccgcgccuccgagcgcgc

SEQ ID NO: 237523 - RNA, 19 nt, Molluscum contagiosum virus
cugcgccgccucaugcgcg

SEQ ID NO: 237524 - RNA, 20 nt, Molluscum contagiosum virus
cugcgcgacaugcugcccgc

SEQ ID NO: 237525 - RNA, 18 nt, Molluscum contagiosum virus
cugcgcgagacgcugcug

SEQ ID NO: 237526 - RNA, 20 nt, Molluscum contagiosum virus
cugcgcgagccgcugcacgc

SEQ ID NO: 237527 - RNA, 16 nt, Molluscum contagiosum virus
cugcgcgccgccgacg

SEQ ID NO: 237528 - RNA, 14 nt, Molluscum contagiosum virus
cugcgcgcgcggcg

SEQ ID NO: 237529 - RNA, 18 nt, Molluscum contagiosum virus
cugcgcgcguugccugag

SEQ ID NO: 237530 - RNA, 14 nt, Molluscum contagiosum virus
cugccucguggaac

SEQ ID NO: 237531 - RNA, 20 nt, Molluscum contagiosum virus
cugcgccacugccacggcug

SEQ ID NO: 237532 - RNA, 14 nt, Molluscum contagiosum virus
cugcgccagucgcg

SEQ ID NO: 237533 - RNA, 14 nt, Molluscum contagiosum virus
cugcgcccgcggag

SEQ ID NO: 237534 - RNA, 23 nt, Molluscum contagiosum virus
cugcgcguggaguacagccgcgc

SEQ ID NO: 237535 - RNA, 15 nt, Molluscum contagiosum virus
cugcgcuccaugcug

SEQ ID NO: 237536 - RNA, 20 nt, Molluscum contagiosum virus
cugcggcaaccgcgcccgcg

SEQ ID NO: 237537 - RNA, 13 nt, Molluscum contagiosum virus
cugcggcucgcac

SEQ ID NO: 237538 - RNA, 14 nt, Molluscum contagiosum virus
cugcggcugcugga

SEQ ID NO: 237539 - RNA, 22 nt, Molluscum contagiosum virus
cugcggcugcuggagcuagcgc

SEQ ID NO: 237540 - RNA, 18 nt, Molluscum contagiosum virus
cugcgucacaagcaccgc

SEQ ID NO: 237541 - RNA, 16 nt, Molluscum contagiosum virus
cugcgucucgcggccg

SEQ ID NO: 237542 - RNA, 18 nt, Molluscum contagiosum virus
cugcguuuugcgcggcac

SEQ ID NO: 237543 - RNA, 22 nt, Molluscum contagiosum virus
gccgugcugucucucgcccgac

SEQ ID NO: 237544 - RNA, 16 nt, Molluscum contagiosum virus
gccgugguacacguag

SEQ ID NO: 237545 - RNA, 13 nt, Molluscum contagiosum virus
gccuacguggcgg

SEQ ID NO: 237546 - RNA, 14 nt, Molluscum contagiosum virus
gccguagugcucau

SEQ ID NO: 237547 - RNA, 13 nt, Molluscum contagiosum virus
gccgucacggccg

SEQ ID NO: 237548 - RNA, 22 nt, Molluscum contagiosum virus
gccguccaugugcccgcggcgc

SEQ ID NO: 237549 - RNA, 17 nt, Molluscum contagiosum virus
gccguccccgcgcucac

SEQ ID NO: 237550 - RNA, 20 nt, Molluscum contagiosum virus
gccguccccggaaagcagca

SEQ ID NO: 237551 - RNA, 19 nt, Molluscum contagiosum virus
gccgucgcccggcaggcuc

SEQ ID NO: 237552 - RNA, 14 nt, Molluscum contagiosum virus
gccgugagcacgag

SEQ ID NO: 237553 - RNA, 15 nt, Molluscum contagiosum virus
gccgugcccgccgac

SEQ ID NO: 237554 - RNA, 19 nt, Molluscum contagiosum virus
gccuucucgucgagagcgc

SEQ ID NO: 237555 - RNA, 22 nt, Molluscum contagiosum virus
gccuuuguucuuagcagcgccg

SEQ ID NO: 237556 - RNA, 15 nt, Molluscum contagiosum virus
gcgaaccgcggcagc

SEQ ID NO: 237557 - RNA, 16 nt, Molluscum contagiosum virus
gccucgagcacgccuc

SEQ ID NO: 237558 - RNA, 14 nt, Molluscum contagiosum virus
gccucgucguccac

SEQ ID NO: 237559 - RNA, 16 nt, Molluscum contagiosum virus
gccucguucacggcua

SEQ ID NO: 237560 - RNA, 12 nt, Molluscum contagiosum virus
gcgcccgcggac

SEQ ID NO: 237561 - RNA, 13 nt, Molluscum contagiosum virus
gcgcccgcggaga

SEQ ID NO: 237562 - RNA, 13 nt, Molluscum contagiosum virus
gcgcccgcggcgc

SEQ ID NO: 237563 - RNA, 20 nt, Molluscum contagiosum virus
gcgcccgugcuugcgcacgg

SEQ ID NO: 237564 - RNA, 15 nt, Molluscum contagiosum virus
gcgcccgcagcgcgc

SEQ ID NO: 237565 - RNA, 17 nt, Molluscum contagiosum virus
gcgcccgccgcccaagg

SEQ ID NO: 237566 - RNA, 14 nt, Molluscum contagiosum virus
gcgccauugcucgc

SEQ ID NO: 237567 - RNA, 13 nt, Molluscum contagiosum virus
gcgccaaggcgcu

SEQ ID NO: 237568 - RNA, 22 nt, Molluscum contagiosum virus
gcgccacgagcgccgcgugcgc

SEQ ID NO: 237569 - RNA, 18 nt, Molluscum contagiosum virus
gcgacaugccucgcggcc

SEQ ID NO: 237570 - RNA, 16 nt, Molluscum contagiosum virus
gcgaccagcucuuggc

SEQ ID NO: 237571 - RNA, 13 nt, Molluscum contagiosum virus
gcgaacgccggcg

SEQ ID NO: 237572 - RNA, 14 nt, Molluscum contagiosum virus
gcgaacgcgcaagu

SEQ ID NO: 237573 - RNA, 17 nt, Molluscum contagiosum virus
gcgacgcgaucgugcgc

SEQ ID NO: 237574 - RNA, 20 nt, Molluscum contagiosum virus
gcgcaucgcgggcacgcagc

SEQ ID NO: 237575 - RNA, 16 nt, Molluscum contagiosum virus
gcgcauggccacgccc

SEQ ID NO: 237576 - RNA, 15 nt, Molluscum contagiosum virus
gcgcauucgcgcgcc

SEQ ID NO: 237577 - RNA, 16 nt, Molluscum contagiosum virus
gcgcauucgcgcgccc

SEQ ID NO: 237578 - RNA, 23 nt, Molluscum contagiosum virus
gcgacgacgacuucggcgcaacg

SEQ ID NO: 237579 - RNA, 16 nt, Molluscum contagiosum virus
gcgacgacgagcacua

SEQ ID NO: 237580 - RNA, 19 nt, Molluscum contagiosum virus
gcgacgagcucacgccgga

SEQ ID NO: 237581 - RNA, 20 nt, Molluscum contagiosum virus
gcgacgccauuuucgugcgc

SEQ ID NO: 237582 - RNA, 22 nt, Molluscum contagiosum virus
gccaggcacacgcagugccacg

SEQ ID NO: 237583 - RNA, 22 nt, Molluscum contagiosum virus
gccaguagcgaaugcagugccc

SEQ ID NO: 237584 - RNA, 15 nt, Molluscum contagiosum virus
gccaguccgcggcgc

SEQ ID NO: 237585 - RNA, 21 nt, Molluscum contagiosum virus
gcccaggccauggagcgcccg

SEQ ID NO: 237586 - RNA, 17 nt, Molluscum contagiosum virus
gcccaccuucuugucgc

SEQ ID NO: 237587 - RNA, 14 nt, Molluscum contagiosum virus
gcccacgcgcaagg

SEQ ID NO: 237588 - RNA, 22 nt, Molluscum contagiosum virus
gccacgaagagucgcgccugga

SEQ ID NO: 237589 - RNA, 13 nt, Molluscum contagiosum virus
gccaccgcggcgc

SEQ ID NO: 237590 - RNA, 16 nt, Molluscum contagiosum virus
gccagcgacgcgacgc

SEQ ID NO: 237591 - RNA, 20 nt, Molluscum contagiosum virus
gccagcgagucucgcgcgcc

SEQ ID NO: 237592 - RNA, 23 nt, Molluscum contagiosum virus
gccagcgagucucgcgcgccacc

SEQ ID NO: 237593 - RNA, 16 nt, Molluscum contagiosum virus
gccagcgucgcgcgcc

SEQ ID NO: 237594 - RNA, 18 nt, Molluscum contagiosum virus
gccagcuccgcgcggcgc

SEQ ID NO: 237595 - RNA, 15 nt, Molluscum contagiosum virus
gccccgacgccagcg

SEQ ID NO: 237596 - RNA, 14 nt, Molluscum contagiosum virus
gcccgaagccguag

SEQ ID NO: 237597 - RNA, 15 nt, Molluscum contagiosum virus
gcccgacgcgggcgc

SEQ ID NO: 237598 - RNA, 19 nt, Molluscum contagiosum virus
gcccgacuuuucgcgccgc

SEQ ID NO: 237599 - RNA, 17 nt, Molluscum contagiosum virus
gcccgaguucgcggcgc

SEQ ID NO: 237600 - RNA, 23 nt, Molluscum contagiosum virus
gcccgccgggcaccggcgcucac

SEQ ID NO: 237601 - RNA, 14 nt, Molluscum contagiosum virus
gccccgcgccagca

SEQ ID NO: 237602 - RNA, 13 nt, Molluscum contagiosum virus
gcccgcgcggaga

SEQ ID NO: 237603 - RNA, 16 nt, Molluscum contagiosum virus
gcccgcgucgcgcgcc

SEQ ID NO: 237604 - RNA, 19 nt, Molluscum contagiosum virus
gccgguacucgugcgucac

SEQ ID NO: 237605 - RNA, 15 nt, Molluscum contagiosum virus
gccgguacugcggac

SEQ ID NO: 237606 - RNA, 16 nt, Molluscum contagiosum virus
gccgguacugcggaca

SEQ ID NO: 237607 - RNA, 18 nt, Molluscum contagiosum virus
gccggucuccacguggcc

SEQ ID NO: 237608 - RNA, 14 nt, Molluscum contagiosum virus
gccgguggaagagc

SEQ ID NO: 237609 - RNA, 15 nt, Molluscum contagiosum virus
gccgggcaccggcgc

SEQ ID NO: 237610 - RNA, 19 nt, Molluscum contagiosum virus
gccgggccugcggcggcgc

SEQ ID NO: 237611 - RNA, 18 nt, Molluscum contagiosum virus
gccggcucagcguggagc

SEQ ID NO: 237612 - RNA, 15 nt, Molluscum contagiosum virus
gccggcugcgccacc

SEQ ID NO: 237613 - RNA, 22 nt, Molluscum contagiosum virus
gcagcacaccgucgcguggugc

SEQ ID NO: 237614 - RNA, 15 nt, Molluscum contagiosum virus
gaucacggcgugcgc

SEQ ID NO: 237615 - RNA, 17 nt, Molluscum contagiosum virus
gaucagccccgcgccag

SEQ ID NO: 237616 - RNA, 16 nt, Molluscum contagiosum virus
gaugcuagcgugugcc

SEQ ID NO: 237617 - RNA, 18 nt, Molluscum contagiosum virus
gaugaguaccgcgggcgc

SEQ ID NO: 237618 - RNA, 15 nt, Molluscum contagiosum virus
gcagccgcuggacgc

SEQ ID NO: 237619 - RNA, 22 nt, Molluscum contagiosum virus
gcagccuccgguuuucgcggga

SEQ ID NO: 237620 - RNA, 17 nt, Molluscum contagiosum virus
gcagcgcccggugcggc

SEQ ID NO: 237621 - RNA, 13 nt, Molluscum contagiosum virus
gcagcgccgcgcg

SEQ ID NO: 237622 - RNA, 21 nt, Molluscum contagiosum virus
gcagcgcgcaaaaggcacgag

SEQ ID NO: 237623 - RNA, 15 nt, Molluscum contagiosum virus
gcagcgcgcgcguag

SEQ ID NO: 237624 - RNA, 23 nt, Molluscum contagiosum virus
gcagcgcgugacgcucacggccu

SEQ ID NO: 237625 - RNA, 14 nt, Molluscum contagiosum virus
gcagcgcuugcgcg

SEQ ID NO: 237626 - RNA, 14 nt, Molluscum contagiosum virus
gcagcggcgcgugc

SEQ ID NO: 237627 - RNA, 22 nt, Molluscum contagiosum virus
gcagcggcgcgugcuccucgcg

SEQ ID NO: 237628 - RNA, 13 nt, Molluscum contagiosum virus
gcagcgugcgcac

SEQ ID NO: 237629 - RNA, 14 nt, Molluscum contagiosum virus
gcagcuaccgcgcg

SEQ ID NO: 237630 - RNA, 18 nt, Molluscum contagiosum virus
gcagcucggcgagagcgc

SEQ ID NO: 237631 - RNA, 17 nt, Molluscum contagiosum virus
gcagcucugcagcgccg

SEQ ID NO: 237632 - RNA, 15 nt, Molluscum contagiosum virus
gcagcugcugcgcac

SEQ ID NO: 237633 - RNA, 18 nt, Molluscum contagiosum virus
gcagcugcugcgcacgug

SEQ ID NO: 237634 - RNA, 15 nt, Molluscum contagiosum virus
gcagcugcugcgcuc

SEQ ID NO: 237635 - RNA, 16 nt, Molluscum contagiosum virus
gcagcuggcgcgcgcc

SEQ ID NO: 237636 - RNA, 20 nt, Molluscum contagiosum virus
gcaucgugcucuucgcggga

SEQ ID NO: 237637 - RNA, 20 nt, Molluscum contagiosum virus
gccaagcguuggcgcccgag

SEQ ID NO: 237638 - RNA, 12 nt, Molluscum contagiosum virus
gccaaagccgcg

SEQ ID NO: 237639 - RNA, 21 nt, Molluscum contagiosum virus
gccaacacgcaaucgcgcgcg

SEQ ID NO: 237640 - RNA, 19 nt, Molluscum contagiosum virus
gcaguccgccgucgcccgg

SEQ ID NO: 237641 - RNA, 19 nt, Molluscum contagiosum virus
gcagucgccuuccugcgcc

SEQ ID NO: 237642 - RNA, 13 nt, Molluscum contagiosum virus
gcagugcucgcac

SEQ ID NO: 237643 - RNA, 22 nt, Molluscum contagiosum virus
gcagugcucgcacacgugcacg

SEQ ID NO: 237644 - RNA, 16 nt, Molluscum contagiosum virus
gcaguggccgucgggc

SEQ ID NO: 237645 - RNA, 22 nt, Molluscum contagiosum virus
gcaucagagaagugcuccgcac

SEQ ID NO: 237646 - RNA, 22 nt, Molluscum contagiosum virus
gcaguucggcgacacgcccgcg

SEQ ID NO: 237647 - RNA, 15 nt, Molluscum contagiosum virus
gcaggcgucgcgcac

SEQ ID NO: 237648 - RNA, 14 nt, Molluscum contagiosum virus
gcaggcgugcucag

SEQ ID NO: 237649 - RNA, 16 nt, Molluscum contagiosum virus
gcagggagcugcggac

SEQ ID NO: 237650 - RNA, 18 nt, Molluscum contagiosum virus
gcaggcaaagcggggcgc

SEQ ID NO: 237651 - RNA, 17 nt, Molluscum contagiosum virus
gcaggaaccgcgugcgc

SEQ ID NO: 237652 - RNA, 18 nt, Molluscum contagiosum virus
gcaggaccuggcuggcgc

SEQ ID NO: 237653 - RNA, 21 nt, Molluscum contagiosum virus
gcagcauucccggcgcgcgcg

SEQ ID NO: 237654 - RNA, 20 nt, Molluscum contagiosum virus
gcagccccgacgccagcgcg

SEQ ID NO: 237655 - RNA, 18 nt, Molluscum contagiosum virus
gcagcccgacgcgggcgc

SEQ ID NO: 237656 - RNA, 19 nt, Molluscum contagiosum virus
gcagcccgugcgccugccg

SEQ ID NO: 237657 - RNA, 14 nt, Molluscum contagiosum virus
gaucaacgcgcgcg

SEQ ID NO: 237658 - RNA, 15 nt, Molluscum contagiosum virus
gaucacgaugugcgc

SEQ ID NO: 237659 - RNA, 16 nt, Molluscum contagiosum virus
gaugaacgcgcugcgc

SEQ ID NO: 237660 - RNA, 16 nt, Molluscum contagiosum virus
gagugaaggguguggc

SEQ ID NO: 237661 - RNA, 12 nt, Molluscum contagiosum virus
gagugacgccuc

SEQ ID NO: 237662 - RNA, 22 nt, Molluscum contagiosum virus
gagugcgggagcaagucugcgc

SEQ ID NO: 237663 - RNA, 15 nt, Molluscum contagiosum virus
gagggucacgcgcac

SEQ ID NO: 237664 - RNA, 14 nt, Molluscum contagiosum virus
gagggucgugcagg

SEQ ID NO: 237665 - RNA, 18 nt, Molluscum contagiosum virus
gaggucaagggugugggc

SEQ ID NO: 237666 - RNA, 18 nt, Molluscum contagiosum virus
gaggcgcgcacgcugcgc

SEQ ID NO: 237667 - RNA, 17 nt, Molluscum contagiosum virus
gaggcgcguccgcggcc

SEQ ID NO: 237668 - RNA, 19 nt, Molluscum contagiosum virus
gaggcgcuaccucgcggga

SEQ ID NO: 237669 - RNA, 20 nt, Molluscum contagiosum virus
gaggcgcugccgcgggacga

SEQ ID NO: 237670 - RNA, 21 nt, Molluscum contagiosum virus
gaggcguacuccguggugcgc

SEQ ID NO: 237671 - RNA, 18 nt, Molluscum contagiosum virus
gaggcguccugcgggagc

SEQ ID NO: 237672 - RNA, 17 nt, Molluscum contagiosum virus
gaggcucgagcgcgcgc

SEQ ID NO: 237673 - RNA, 17 nt, Molluscum contagiosum virus
gaggucgagcgcgccgc

SEQ ID NO: 237674 - RNA, 22 nt, Molluscum contagiosum virus
gaguaccgcgcgcacgcggcgc

SEQ ID NO: 237675 - RNA, 16 nt, Molluscum contagiosum virus
gaguacgacgcggagg

SEQ ID NO: 237676 - RNA, 13 nt, Molluscum contagiosum virus
gaguccgcggcga

SEQ ID NO: 237677 - RNA, 18 nt, Molluscum contagiosum virus
gagaagcaaugcgcaagg

SEQ ID NO: 237678 - RNA, 18 nt, Molluscum contagiosum virus
gagacaucaucgcggagc

SEQ ID NO: 237679 - RNA, 20 nt, Molluscum contagiosum virus
gacuugcugcggagcgccuu

SEQ ID NO: 237680 - RNA, 18 nt, Molluscum contagiosum virus
gacuuuguccugagccuu

SEQ ID NO: 237681 - RNA, 13 nt, Molluscum contagiosum virus
gacugcgcccgug

SEQ ID NO: 237682 - RNA, 17 nt, Molluscum contagiosum virus
gacugcuacgucgcggc

SEQ ID NO: 237683 - RNA, 19 nt, Molluscum contagiosum virus
gacugcuacgucgcggcgc

SEQ ID NO: 237684 - RNA, 23 nt, Molluscum contagiosum virus
gacugcugcccccgccgcggcgc

SEQ ID NO: 237685 - RNA, 16 nt, Molluscum contagiosum virus
gacuggcacgcgccgc

SEQ ID NO: 237686 - RNA, 14 nt, Molluscum contagiosum virus
gagacguugccgga

SEQ ID NO: 237687 - RNA, 14 nt, Molluscum contagiosum virus
gagacuucuugcac

SEQ ID NO: 237688 - RNA, 13 nt, Molluscum contagiosum virus
gagagcgcgcgca

SEQ ID NO: 237689 - RNA, 15 nt, Molluscum contagiosum virus
gaggacggcgcgggc

SEQ ID NO: 237690 - RNA, 17 nt, Molluscum contagiosum virus
gaggacggcgcgggcgc

SEQ ID NO: 237691 - RNA, 15 nt, Molluscum contagiosum virus
gaggacggcgugcgc

SEQ ID NO: 237692 - RNA, 19 nt, Molluscum contagiosum virus
gaggacuaccuggcggcgc

SEQ ID NO: 237693 - RNA, 16 nt, Molluscum contagiosum virus
gaggacuuccgcgcgc

SEQ ID NO: 237694 - RNA, 20 nt, Molluscum contagiosum virus
gaggccuacgugcugcgcac

SEQ ID NO: 237695 - RNA, 18 nt, Molluscum contagiosum virus
gagaccagccgcgagcgc

SEQ ID NO: 237696 - RNA, 14 nt, Molluscum contagiosum virus
gaggagagcggcgc

SEQ ID NO: 237697 - RNA, 16 nt, Molluscum contagiosum virus
gaggcacucgucgcgc

SEQ ID NO: 237698 - RNA, 16 nt, Molluscum contagiosum virus
gaggcagccgcggcgc

SEQ ID NO: 237699 - RNA, 17 nt, Molluscum contagiosum virus
gaggcaugucgcggugc

SEQ ID NO: 237700 - RNA, 23 nt, Molluscum contagiosum virus
gaggcccugcuugcccgcgccgc

SEQ ID NO: 237701 - RNA, 17 nt, Molluscum contagiosum virus
gagggccuuggcggcgc

SEQ ID NO: 237702 - RNA, 20 nt, Molluscum contagiosum virus
gagggccuuggcggcgcggc

SEQ ID NO: 237703 - RNA, 22 nt, Molluscum contagiosum virus
gagggcgagucucccguggcgc

SEQ ID NO: 237704 - RNA, 15 nt, Molluscum contagiosum virus
gagggcgccgggcgc

SEQ ID NO: 237705 - RNA, 13 nt, Molluscum contagiosum virus
cgacaacucgcgc

SEQ ID NO: 237706 - RNA, 19 nt, Molluscum contagiosum virus
cgaagacgcguaccagcgc

SEQ ID NO: 237707 - RNA, 18 nt, Molluscum contagiosum virus
cgaagagcgagaacacgg

SEQ ID NO: 237708 - RNA, 18 nt, Molluscum contagiosum virus
cgaagcugcgcuugcgcg

SEQ ID NO: 237709 - RNA, 17 nt, Molluscum contagiosum virus
caguucggccgcacgug

SEQ ID NO: 237710 - RNA, 14 nt, Molluscum contagiosum virus
cagugccgccgcgc

SEQ ID NO: 237711 - RNA, 15 nt, Molluscum contagiosum virus
cauacuccugcuggc

SEQ ID NO: 237712 - RNA, 14 nt, Molluscum contagiosum virus
caggcgccggcgcg

SEQ ID NO: 237713 - RNA, 20 nt, Molluscum contagiosum virus
caggcgcgaacucgcggcag

SEQ ID NO: 237714 - RNA, 20 nt, Molluscum contagiosum virus
caggcgcggucgcccgccga

SEQ ID NO: 237715 - RNA, 18 nt, Molluscum contagiosum virus
caggcgcugcgcggcgcg

SEQ ID NO: 237716 - RNA, 13 nt, Molluscum contagiosum virus
caggccgcggcag

SEQ ID NO: 237717 - RNA, 17 nt, Molluscum contagiosum virus
caggccggucgcggaag

SEQ ID NO: 237718 - RNA, 21 nt, Molluscum contagiosum virus
caggccucuuuugcgucgcga

SEQ ID NO: 237719 - RNA, 18 nt, Molluscum contagiosum virus
caggcagugccgccgcgc

SEQ ID NO: 237720 - RNA, 21 nt, Molluscum contagiosum virus
caggcagugccgccgcgcgcg

SEQ ID NO: 237721 - RNA, 18 nt, Molluscum contagiosum virus
caggcauggcauggcgcg

SEQ ID NO: 237722 - RNA, 21 nt, Molluscum contagiosum virus
cagggaaaaaucccccgccag

SEQ ID NO: 237723 - RNA, 16 nt, Molluscum contagiosum virus
cagggaaagagcacgc

SEQ ID NO: 237724 - RNA, 22 nt, Molluscum contagiosum virus
caggcggucuuccagcacugcg

SEQ ID NO: 237725 - RNA, 19 nt, Molluscum contagiosum virus
caggcggugggcgccgcgg

SEQ ID NO: 237726 - RNA, 18 nt, Molluscum contagiosum virus
cagggagcugcggacgcg

SEQ ID NO: 237727 - RNA, 20 nt, Molluscum contagiosum virus
cagguagugguccaccagcu

SEQ ID NO: 237728 - RNA, 20 nt, Molluscum contagiosum virus
cagguggccgcgcgcgcacg

SEQ ID NO: 237729 - RNA, 14 nt, Molluscum contagiosum virus
cgacagcgugcgcg

SEQ ID NO: 237730 - RNA, 17 nt, Molluscum contagiosum virus
cgacgugaucgcgcagg

SEQ ID NO: 237731 - RNA, 19 nt, Molluscum contagiosum virus
cgacucggugcucaugcgc

SEQ ID NO: 237732 - RNA, 13 nt, Molluscum contagiosum virus
cgacuucucgcgc

SEQ ID NO: 237733 - RNA, 18 nt, Molluscum contagiosum virus
cgacuuuucgcgccgcgg

SEQ ID NO: 237734 - RNA, 19 nt, Molluscum contagiosum virus
cgagaaaaagcugucgcgc

SEQ ID NO: 237735 - RNA, 13 nt, Molluscum contagiosum virus
cgagaacuggcgc

SEQ ID NO: 237736 - RNA, 15 nt, Molluscum contagiosum virus
cgagaagacggggcg

SEQ ID NO: 237737 - RNA, 22 nt, Molluscum contagiosum virus
cgacgcgcgcggcaagcagcgu

SEQ ID NO: 237738 - RNA, 18 nt, Molluscum contagiosum virus
cgacgaggccuacagcgc

SEQ ID NO: 237739 - RNA, 19 nt, Molluscum contagiosum virus
cgacgcguucuagcagcgu

SEQ ID NO: 237740 - RNA, 23 nt, Molluscum contagiosum virus
cgacggcgccucgagcgcgcugg

SEQ ID NO: 237741 - RNA, 20 nt, Molluscum contagiosum virus
cgagcacagcgcgcggaagc

SEQ ID NO: 237742 - RNA, 20 nt, Molluscum contagiosum virus
cgagcacccccgcugcacgc

SEQ ID NO: 237743 - RNA, 16 nt, Molluscum contagiosum virus
cgagcaccugucgcgc

SEQ ID NO: 237744 - RNA, 18 nt, Molluscum contagiosum virus
cgagcacgccuccaagaa

SEQ ID NO: 237745 - RNA, 16 nt, Molluscum contagiosum virus
cgagcacgccugcacg

SEQ ID NO: 237746 - RNA, 17 nt, Molluscum contagiosum virus
cgagcacgccugcacgc

SEQ ID NO: 237747 - RNA, 14 nt, Molluscum contagiosum virus
cgagcacgggcgcc

SEQ ID NO: 237748 - RNA, 16 nt, Molluscum contagiosum virus
cgagcacugccugccg

SEQ ID NO: 237749 - RNA, 14 nt, Molluscum contagiosum virus
cgagcacugcgcgc

SEQ ID NO: 237750 - RNA, 17 nt, Molluscum contagiosum virus
cgagcacugcgcgcgcg

SEQ ID NO: 237751 - RNA, 19 nt, Molluscum contagiosum virus
cgagcagagccgggacgcg

SEQ ID NO: 237752 - RNA, 24 nt, Molluscum contagiosum virus
cgagcagagccgggacgcggaugc

SEQ ID NO: 237753 - RNA, 22 nt, Molluscum contagiosum virus
cgagcaguccgccucgagcacg

SEQ ID NO: 237754 - RNA, 16 nt, Molluscum contagiosum virus
cgagcaguucgcgcgc

SEQ ID NO: 237755 - RNA, 14 nt, Molluscum contagiosum virus
cgagcaucugcgcg

SEQ ID NO: 237756 - RNA, 15 nt, Molluscum contagiosum virus
cgagcaucugcgcgu

SEQ ID NO: 237757 - RNA, 23 nt, Molluscum contagiosum virus
cgagccaaggaugccugccagca

SEQ ID NO: 237758 - RNA, 14 nt, Molluscum contagiosum virus
cgagcccgcggcgc

SEQ ID NO: 237759 - RNA, 16 nt, Molluscum contagiosum virus
cgagcccgcggcgcgc

SEQ ID NO: 237760 - RNA, 21 nt, Molluscum contagiosum virus
cgagcccuucuuuccggcgcg

SEQ ID NO: 237761 - RNA, 17 nt, Molluscum contagiosum virus
cgagccgcgcgagcgcg

SEQ ID NO: 237762 - RNA, 19 nt, Molluscum contagiosum virus
cgagcgacuacaccuggcg

SEQ ID NO: 237763 - RNA, 13 nt, Molluscum contagiosum virus
cgagcgagcacgc

SEQ ID NO: 237764 - RNA, 22 nt, Molluscum contagiosum virus
cgagcgccacuagcaaggcgcc

SEQ ID NO: 237765 - RNA, 21 nt, Molluscum contagiosum virus
cgagcgccgccagcuccgcgc

SEQ ID NO: 237766 - RNA, 17 nt, Molluscum contagiosum virus
cgagcgccgcgugcgcg

SEQ ID NO: 237767 - RNA, 14 nt, Molluscum contagiosum virus
cgagcgccugcgag

SEQ ID NO: 237768 - RNA, 14 nt, Molluscum contagiosum virus
cgagcgcgggcgcc

SEQ ID NO: 237769 - RNA, 20 nt, Molluscum contagiosum virus
cgagcgcguccaugagcauc

SEQ ID NO: 237770 - RNA, 23 nt, Molluscum contagiosum virus
cgagcgcugccgcuucgugcgcg

SEQ ID NO: 237771 - RNA, 15 nt, Molluscum contagiosum virus
cgagcgcuucuuccg

SEQ ID NO: 237772 - RNA, 17 nt, Molluscum contagiosum virus
cgagcggagcgggcacg

SEQ ID NO: 237773 - RNA, 14 nt, Molluscum contagiosum virus
cgagcggcgcgcgc

SEQ ID NO: 237774 - RNA, 21 nt, Molluscum contagiosum virus
cgagcgcgagauucuggcgcg

SEQ ID NO: 237775 - RNA, 16 nt, Molluscum contagiosum virus
cgagcgcgccgcgcgc

SEQ ID NO: 237776 - RNA, 13 nt, Molluscum contagiosum virus
cgagcgcgcgcgc

SEQ ID NO: 237777 - RNA, 22 nt, Molluscum contagiosum virus
cgagacugcuacgucgcggcgc

SEQ ID NO: 237778 - RNA, 13 nt, Molluscum contagiosum virus
cgagagcgcgcgc

SEQ ID NO: 237779 - RNA, 14 nt, Molluscum contagiosum virus
cgagacacgcgagc

SEQ ID NO: 237780 - RNA, 17 nt, Molluscum contagiosum virus
cgagaccagccgcgagc

SEQ ID NO: 237781 - RNA, 15 nt, Molluscum contagiosum virus
cgagacgcugcgcga

SEQ ID NO: 237782 - RNA, 17 nt, Molluscum contagiosum virus
cgaugagaacaacagcg

SEQ ID NO: 237783 - RNA, 19 nt, Molluscum contagiosum virus
cgauguacgcgugcaggaa

SEQ ID NO: 237784 - RNA, 16 nt, Molluscum contagiosum virus
cgagggaugcgcacac

SEQ ID NO: 237785 - RNA, 15 nt, Molluscum contagiosum virus
cgagauucguggcga

SEQ ID NO: 237786 - RNA, 17 nt, Molluscum contagiosum virus
cgagggcgccgggcgca

SEQ ID NO: 237787 - RNA, 15 nt, Molluscum contagiosum virus
cgauccuguccaucu

SEQ ID NO: 237788 - RNA, 15 nt, Molluscum contagiosum virus
cgaucgcagcagugc

SEQ ID NO: 237789 - RNA, 14 nt, Molluscum contagiosum virus
cgagcuacugcgcg

SEQ ID NO: 237790 - RNA, 15 nt, Molluscum contagiosum virus
cgagcuacugcgcgc

SEQ ID NO: 237791 - RNA, 22 nt, Molluscum contagiosum virus
cgagcucuuccccgcgggccgc

SEQ ID NO: 237792 - RNA, 14 nt, Molluscum contagiosum virus
cgagcugcggcgcg

SEQ ID NO: 237793 - RNA, 15 nt, Molluscum contagiosum virus
cgagcugcgggcgcg

SEQ ID NO: 237794 - RNA, 14 nt, Molluscum contagiosum virus
cgagcugcugcgcg

SEQ ID NO: 237795 - RNA, 23 nt, Molluscum contagiosum virus
cgagcuuugugcgaccugcugcg

SEQ ID NO: 237796 - RNA, 17 nt, Molluscum contagiosum virus
cgaggacgacgccgagc

SEQ ID NO: 237797 - RNA, 17 nt, Molluscum contagiosum virus
cgaggacuuccgcgcgc

SEQ ID NO: 237798 - RNA, 19 nt, Molluscum contagiosum virus
cgaggaggcgcccucgcgc

SEQ ID NO: 237799 - RNA, 14 nt, Molluscum contagiosum virus
cgaguaccgcgcgc

SEQ ID NO: 237800 - RNA, 22 nt, Molluscum contagiosum virus
cgaguacgcucuccaugcgcgc

SEQ ID NO: 237801 - RNA, 16 nt, Molluscum contagiosum virus
cgaguacugcugcggc

SEQ ID NO: 237802 - RNA, 20 nt, Molluscum contagiosum virus
cgaguauacucgacgcgcgc

SEQ ID NO: 237803 - RNA, 20 nt, Molluscum contagiosum virus
cgaguccccagacuucucca

SEQ ID NO: 237804 - RNA, 15 nt, Molluscum contagiosum virus
cgagucgcgggcgcg

SEQ ID NO: 237805 - RNA, 12 nt, Molluscum contagiosum virus
cgagugugcaug

SEQ ID NO: 237806 - RNA, 14 nt, Molluscum contagiosum virus
cgagugugugcauc

SEQ ID NO: 237807 - RNA, 20 nt, Molluscum contagiosum virus
cgcacgcgaacgccuacgcg

SEQ ID NO: 237808 - RNA, 13 nt, Molluscum contagiosum virus
cgcacgcgagcac

SEQ ID NO: 237809 - RNA, 15 nt, Molluscum contagiosum virus
cgcacggcagcggcg

SEQ ID NO: 237810 - RNA, 14 nt, Molluscum contagiosum virus
cgcacggccugcgg

SEQ ID NO: 237811 - RNA, 16 nt, Molluscum contagiosum virus
cgcacgggccugcgcg

SEQ ID NO: 237812 - RNA, 12 nt, Molluscum contagiosum virus
cgcacgggcgca

SEQ ID NO: 237813 - RNA, 17 nt, Molluscum contagiosum virus
cgcagaaguggcgcugu

SEQ ID NO: 237814 - RNA, 18 nt, Molluscum contagiosum virus
cgcagacgcagcgcgagc

SEQ ID NO: 237815 - RNA, 15 nt, Molluscum contagiosum virus
cgcagagccagcgcg

SEQ ID NO: 237816 - RNA, 22 nt, Molluscum contagiosum virus
cgcagagcuccccgcgcgcagc

SEQ ID NO: 237817 - RNA, 21 nt, Molluscum contagiosum virus
cgcaccgccuggugcugcgcg

SEQ ID NO: 237818 - RNA, 15 nt, Molluscum contagiosum virus
cgcaccuccuucgcg

SEQ ID NO: 237819 - RNA, 19 nt, Molluscum contagiosum virus
cgcaccuugacgccgcgcg

SEQ ID NO: 237820 - RNA, 23 nt, Molluscum contagiosum virus
cgcacacgaaucgcucgcggugc

SEQ ID NO: 237821 - RNA, 20 nt, Molluscum contagiosum virus
cgcacacgagugcccgcgcg

SEQ ID NO: 237822 - RNA, 14 nt, Molluscum contagiosum virus
cgcacacgccgcgu

SEQ ID NO: 237823 - RNA, 14 nt, Molluscum contagiosum virus
cgcacacuugcgcg

SEQ ID NO: 237824 - RNA, 21 nt, Molluscum contagiosum virus
cgcacagacauggcccgcgcg

SEQ ID NO: 237825 - RNA, 20 nt, Molluscum contagiosum virus
cgcacaguucacggcgcuug

SEQ ID NO: 237826 - RNA, 14 nt, Molluscum contagiosum virus
cgcaaccccgcgcg

SEQ ID NO: 237827 - RNA, 20 nt, Molluscum contagiosum virus
cgcaaccccgcgcugcgcgg

SEQ ID NO: 237828 - RNA, 14 nt, Molluscum contagiosum virus
cgcaagagccgccg

SEQ ID NO: 237829 - RNA, 23 nt, Molluscum contagiosum virus
cgcaagcuuugugcucgcuuagc

SEQ ID NO: 237830 - RNA, 18 nt, Molluscum contagiosum virus
cgcaagucaccgcuccgc

SEQ ID NO: 237831 - RNA, 21 nt, Molluscum contagiosum virus
cgcaaguccagcgcgcucgag

SEQ ID NO: 237832 - RNA, 17 nt, Molluscum contagiosum virus
cgcccggcaggcucccg

SEQ ID NO: 237833 - RNA, 12 nt, Molluscum contagiosum virus
cgcccgcggcac

SEQ ID NO: 237834 - RNA, 14 nt, Molluscum contagiosum virus
cgcccgcggcgcac

SEQ ID NO: 237835 - RNA, 16 nt, Molluscum contagiosum virus
cgccaugccaacgcac

SEQ ID NO: 237836 - RNA, 15 nt, Molluscum contagiosum virus
cgccaugcugcgcga

SEQ ID NO: 237837 - RNA, 23 nt, Molluscum contagiosum virus
cgccauuuccgagcgcgcacgag

SEQ ID NO: 237838 - RNA, 17 nt, Molluscum contagiosum virus
cgcccagcaccuggaac

SEQ ID NO: 237839 - RNA, 14 nt, Molluscum contagiosum virus
cgccauccgcgagc

SEQ ID NO: 237840 - RNA, 23 nt, Molluscum contagiosum virus
cgccaguggccagcgcgcggcgc

SEQ ID NO: 237841 - RNA, 20 nt, Molluscum contagiosum virus
cgccagggcggagccccgag

SEQ ID NO: 237842 - RNA, 16 nt, Molluscum contagiosum virus
cgccaguccgcggcgc

SEQ ID NO: 237843 - RNA, 18 nt, Molluscum contagiosum virus
cgcagcauucccggcgcg

SEQ ID NO: 237844 - RNA, 15 nt, Molluscum contagiosum virus
cgcagcccgagcgcg

SEQ ID NO: 237845 - RNA, 12 nt, Molluscum contagiosum virus
cgcacccgccac

SEQ ID NO: 237846 - RNA, 18 nt, Molluscum contagiosum virus
cgcagugcucgcacacgu

SEQ ID NO: 237847 - RNA, 17 nt, Molluscum contagiosum virus
cgcaggcgucaugcgcg

SEQ ID NO: 237848 - RNA, 16 nt, Molluscum contagiosum virus
cgcagcuccuagcgcg

SEQ ID NO: 237849 - RNA, 16 nt, Molluscum contagiosum virus
cgcagcucgccgcgcg

SEQ ID NO: 237850 - RNA, 21 nt, Molluscum contagiosum virus
cgcagcuguggcgccugcgcg

SEQ ID NO: 237851 - RNA, 20 nt, Molluscum contagiosum virus
cgcaggacuggcaccugcgg

SEQ ID NO: 237852 - RNA, 18 nt, Molluscum contagiosum virus
cgccagcuaagccggagc

SEQ ID NO: 237853 - RNA, 19 nt, Molluscum contagiosum virus
cgccagcuccgcgcggcgc

SEQ ID NO: 237854 - RNA, 18 nt, Molluscum contagiosum virus
cgccaccucggcguuggc

SEQ ID NO: 237855 - RNA, 21 nt, Molluscum contagiosum virus
cgccacgagcgccgcgacgcc

SEQ ID NO: 237856 - RNA, 15 nt, Molluscum contagiosum virus
cgccagcgacgcgac

SEQ ID NO: 237857 - RNA, 16 nt, Molluscum contagiosum virus
cgcaugcaccuacgcg

SEQ ID NO: 237858 - RNA, 14 nt, Molluscum contagiosum virus
cgccaaccgcgagc

SEQ ID NO: 237859 - RNA, 17 nt, Molluscum contagiosum virus
cggaucugcgcacacgu

SEQ ID NO: 237860 - RNA, 14 nt, Molluscum contagiosum virus
cggcaaaggcccgc

SEQ ID NO: 237861 - RNA, 18 nt, Molluscum contagiosum virus
cggcaaaggcccgcgagc

SEQ ID NO: 237862 - RNA, 14 nt, Molluscum contagiosum virus
cggagccgcggcag

SEQ ID NO: 237863 - RNA, 16 nt, Molluscum contagiosum virus
cggagcuggcguugcc

SEQ ID NO: 237864 - RNA, 18 nt, Molluscum contagiosum virus
cggaggccgcucccgcga

SEQ ID NO: 237865 - RNA, 14 nt, Molluscum contagiosum virus
cggaaagagcgcgc

SEQ ID NO: 237866 - RNA, 20 nt, Molluscum contagiosum virus
cggacuucgacgcgcggcag

SEQ ID NO: 237867 - RNA, 20 nt, Molluscum contagiosum virus
cggacuuuucgcgcgugcgc

SEQ ID NO: 237868 - RNA, 19 nt, Molluscum contagiosum virus
cggacgcggugaccggagc

SEQ ID NO: 237869 - RNA, 17 nt, Molluscum contagiosum virus
cggacggcgcgcagcgc

SEQ ID NO: 237870 - RNA, 13 nt, Molluscum contagiosum virus
cggacucgcgagc

SEQ ID NO: 237871 - RNA, 21 nt, Molluscum contagiosum virus
cggacagcaccccgaagacgu

SEQ ID NO: 237872 - RNA, 20 nt, Molluscum contagiosum virus
cggacagugccuccgcggac

SEQ ID NO: 237873 - RNA, 22 nt, Molluscum contagiosum virus
cggacagugccuccgcggacgc

SEQ ID NO: 237874 - RNA, 16 nt, Molluscum contagiosum virus
cgcuguacaugccgca

SEQ ID NO: 237875 - RNA, 14 nt, Molluscum contagiosum virus
cgcuucgagcacgc

SEQ ID NO: 237876 - RNA, 15 nt, Molluscum contagiosum virus
cgcuuggcgagcgcu

SEQ ID NO: 237877 - RNA, 16 nt, Molluscum contagiosum virus
cgcugcuggcgcacau

SEQ ID NO: 237878 - RNA, 15 nt, Molluscum contagiosum virus
cgcugcuguccuuca

SEQ ID NO: 237879 - RNA, 18 nt, Molluscum contagiosum virus
cgcuggacuugcgcgagc

SEQ ID NO: 237880 - RNA, 16 nt, Molluscum contagiosum virus
cgcuggccgugcccgc

SEQ ID NO: 237881 - RNA, 21 nt, Molluscum contagiosum virus
cgcugcucgcuugcccggagc

SEQ ID NO: 237882 - RNA, 22 nt, Molluscum contagiosum virus
cgcugcucuacgucuccucgcg

SEQ ID NO: 237883 - RNA, 14 nt, Molluscum contagiosum virus
cgcugcugcacagc

SEQ ID NO: 237884 - RNA, 16 nt, Molluscum contagiosum virus
cgcugcugcgugcgcg

SEQ ID NO: 237885 - RNA, 12 nt, Molluscum contagiosum virus
cggcacgcgagc

SEQ ID NO: 237886 - RNA, 17 nt, Molluscum contagiosum virus
cggcacgcugcguuucc

SEQ ID NO: 237887 - RNA, 21 nt, Molluscum contagiosum virus
cggcacgugcguacgcggcgc

SEQ ID NO: 237888 - RNA, 13 nt, Molluscum contagiosum virus
cggcacugcgcgc

SEQ ID NO: 237889 - RNA, 13 nt, Molluscum contagiosum virus
cggcacugcuagc

SEQ ID NO: 237890 - RNA, 15 nt, Molluscum contagiosum virus
cggcacugcuggcgc

SEQ ID NO: 237891 - RNA, 15 nt, Molluscum contagiosum virus
cggcguccgcggcac

SEQ ID NO: 237892 - RNA, 19 nt, Molluscum contagiosum virus
cggcguccgcggcacgcga

SEQ ID NO: 237893 - RNA, 13 nt, Molluscum contagiosum virus
cggcacccgccag

SEQ ID NO: 237894 - RNA, 18 nt, Molluscum contagiosum virus
cggcacccgccgcggugc

SEQ ID NO: 237895 - RNA, 14 nt, Molluscum contagiosum virus
cggcacccgugcgc

SEQ ID NO: 237896 - RNA, 16 nt, Molluscum contagiosum virus
cggcacccgugcgcgc

SEQ ID NO: 237897 - RNA, 22 nt, Molluscum contagiosum virus
cggcgugagcucgucgcggaag

SEQ ID NO: 237898 - RNA, 16 nt, Molluscum contagiosum virus
cggcguguuccggcag

SEQ ID NO: 237899 - RNA, 19 nt, Molluscum contagiosum virus
cggcguguuuugugucgcg

SEQ ID NO: 237900 - RNA, 14 nt, Molluscum contagiosum virus
cggcguucgcggag

SEQ ID NO: 237901 - RNA, 16 nt, Molluscum contagiosum virus
cggcucagcguggagc

SEQ ID NO: 237902 - RNA, 15 nt, Molluscum contagiosum virus
cggcucugcguugcg

SEQ ID NO: 237903 - RNA, 15 nt, Molluscum contagiosum virus
cggcuaggcgcggcg

SEQ ID NO: 237904 - RNA, 15 nt, Molluscum contagiosum virus
cggcaacgcugccgc

SEQ ID NO: 237905 - RNA, 15 nt, Molluscum contagiosum virus
cggcaccacgugcgc

SEQ ID NO: 237906 - RNA, 13 nt, Molluscum contagiosum virus
cgggacgcgugcc

SEQ ID NO: 237907 - RNA, 17 nt, Molluscum contagiosum virus
cgggagcaacgaaccgu

SEQ ID NO: 237908 - RNA, 19 nt, Molluscum contagiosum virus
cgggaggcucucgagcacu

SEQ ID NO: 237909 - RNA, 17 nt, Molluscum contagiosum virus
cggcugugcccgcggcg

SEQ ID NO: 237910 - RNA, 17 nt, Molluscum contagiosum virus
cgggaaaacgcgcggca

SEQ ID NO: 237911 - RNA, 19 nt, Molluscum contagiosum virus
cgcgcgccgcagaacacgg

SEQ ID NO: 237912 - RNA, 12 nt, Molluscum contagiosum virus
cgcgcgccgcgc

SEQ ID NO: 237913 - RNA, 13 nt, Molluscum contagiosum virus
cgcgcgccgcgcg

SEQ ID NO: 237914 - RNA, 12 nt, Molluscum contagiosum virus
cgcgcgccgcgg

SEQ ID NO: 237915 - RNA, 13 nt, Molluscum contagiosum virus
cgcgcgccugcug

SEQ ID NO: 237916 - RNA, 17 nt, Molluscum contagiosum virus
cgcgcgccuugcagcgc

SEQ ID NO: 237917 - RNA, 15 nt, Molluscum contagiosum virus
cgcgcgcgagcacgu

SEQ ID NO: 237918 - RNA, 14 nt, Molluscum contagiosum virus
cgcgcgcgccgcag

SEQ ID NO: 237919 - RNA, 16 nt, Molluscum contagiosum virus
cgcgcgcgcgcggcgc

SEQ ID NO: 237920 - RNA, 13 nt, Molluscum contagiosum virus
cgcgcgcgcggcg

SEQ ID NO: 237921 - RNA, 14 nt, Molluscum contagiosum virus
cgcgcgcgcucugc

SEQ ID NO: 237922 - RNA, 12 nt, Molluscum contagiosum virus
cgcgcgcggcaa

SEQ ID NO: 237923 - RNA, 12 nt, Molluscum contagiosum virus
cgcgcgcggcac

SEQ ID NO: 237924 - RNA, 12 nt, Molluscum contagiosum virus
cgcgcgcgugcc

SEQ ID NO: 237925 - RNA, 20 nt, Molluscum contagiosum virus
cgcgcgcguuugucgcgggc

SEQ ID NO: 237926 - RNA, 17 nt, Molluscum contagiosum virus
cgcgcgcucgcucgcgc

SEQ ID NO: 237927 - RNA, 19 nt, Molluscum contagiosum virus
cgcgcgcugagcgcggagc

SEQ ID NO: 237928 - RNA, 13 nt, Molluscum contagiosum virus
cgcgcgcugcgcg

SEQ ID NO: 237929 - RNA, 14 nt, Molluscum contagiosum virus
cgcgcgcugcgcgc

SEQ ID NO: 237930 - RNA, 18 nt, Molluscum contagiosum virus
cgcgcgcugcgcgcggac

SEQ ID NO: 237931 - RNA, 12 nt, Molluscum contagiosum virus
cgcgcggcagca

SEQ ID NO: 237932 - RNA, 15 nt, Molluscum contagiosum virus
cgcgcggcgcucugc

SEQ ID NO: 237933 - RNA, 18 nt, Molluscum contagiosum virus
cgcgcggcuaagcucugc

SEQ ID NO: 237934 - RNA, 21 nt, Molluscum contagiosum virus
cgcgcggcuuggcgcccuucc

SEQ ID NO: 237935 - RNA, 15 nt, Molluscum contagiosum virus
cgcgccugcgcgagc

SEQ ID NO: 237936 - RNA, 13 nt, Molluscum contagiosum virus
cgcgccugcuggc

SEQ ID NO: 237937 - RNA, 15 nt, Molluscum contagiosum virus
cgcgccuuccgcgcg

SEQ ID NO: 237938 - RNA, 18 nt, Molluscum contagiosum virus
cgcgccuuccgcgcgggc

SEQ ID NO: 237939 - RNA, 13 nt, Molluscum contagiosum virus
cgcgcgcacugcg

SEQ ID NO: 237940 - RNA, 15 nt, Molluscum contagiosum virus
cgcgcgcagcaccgc

SEQ ID NO: 237941 - RNA, 22 nt, Molluscum contagiosum virus
cgcgcgcagcaggugcacgugc

SEQ ID NO: 237942 - RNA, 17 nt, Molluscum contagiosum virus
cgcgcgcaugcucgcgc

SEQ ID NO: 237943 - RNA, 12 nt, Molluscum contagiosum virus
cgcgcgccagca

SEQ ID NO: 237944 - RNA, 22 nt, Molluscum contagiosum virus
cgcgcgccagcaagcucgaugc

SEQ ID NO: 237945 - RNA, 13 nt, Molluscum contagiosum virus
cgcgcucgcgcag

SEQ ID NO: 237946 - RNA, 15 nt, Molluscum contagiosum virus
cgcgcucgcgcuucc

SEQ ID NO: 237947 - RNA, 20 nt, Molluscum contagiosum virus
cgcgcucgcgugccgcggac

SEQ ID NO: 237948 - RNA, 14 nt, Molluscum contagiosum virus
cgcgcgugcucgac

SEQ ID NO: 237949 - RNA, 22 nt, Molluscum contagiosum virus
cgcgcuacugcgcgcacugcuc

SEQ ID NO: 237950 - RNA, 17 nt, Molluscum contagiosum virus
cgcgcucacccugcacg

SEQ ID NO: 237951 - RNA, 14 nt, Molluscum contagiosum virus
cgcgcucacugcag

SEQ ID NO: 237952 - RNA, 16 nt, Molluscum contagiosum virus
cgcgcuuugcgcggcg

SEQ ID NO: 237953 - RNA, 21 nt, Molluscum contagiosum virus
cgcgcgacgugugcucugugc

SEQ ID NO: 237954 - RNA, 20 nt, Molluscum contagiosum virus
cgcgcgagaugcgcggacag

SEQ ID NO: 237955 - RNA, 16 nt, Molluscum contagiosum virus
cgcgcugagcgcggag

SEQ ID NO: 237956 - RNA, 20 nt, Molluscum contagiosum virus
cgcgcugaucaccgaggagc

SEQ ID NO: 237957 - RNA, 21 nt, Molluscum contagiosum virus
cgcgcugcacgccgccagcga

SEQ ID NO: 237958 - RNA, 20 nt, Molluscum contagiosum virus
cgcgcugcuucccgcugagc

SEQ ID NO: 237959 - RNA, 24 nt, Molluscum contagiosum virus
cgcgcuuagcacacgcgcgcgcag

SEQ ID NO: 237960 - RNA, 21 nt, Molluscum contagiosum virus
cgcggacagagcccgcggcgc

SEQ ID NO: 237961 - RNA, 17 nt, Molluscum contagiosum virus
cgcggaucugcgcacac

SEQ ID NO: 237962 - RNA, 13 nt, Molluscum contagiosum virus
cgcggacgcgggc

SEQ ID NO: 237963 - RNA, 17 nt, Molluscum contagiosum virus
cgcggacggcgcgcagc

SEQ ID NO: 237964 - RNA, 22 nt, Molluscum contagiosum virus
cgcggagcgcuagcagggcggc

SEQ ID NO: 237965 - RNA, 15 nt, Molluscum contagiosum virus
cgcggagcugcgcgc

SEQ ID NO: 237966 - RNA, 22 nt, Molluscum contagiosum virus
cgcugaucaccgaggagccgcg

SEQ ID NO: 237967 - RNA, 16 nt, Molluscum contagiosum virus
cgcugccaacgcggac

SEQ ID NO: 237968 - RNA, 23 nt, Molluscum contagiosum virus
cgcugccgcuucgugcgcggaga

SEQ ID NO: 237969 - RNA, 13 nt, Molluscum contagiosum virus
cgcugcgggcgcc

SEQ ID NO: 237970 - RNA, 21 nt, Molluscum contagiosum virus
cgcugcuagagaaccugugcg

SEQ ID NO: 237971 - RNA, 18 nt, Molluscum contagiosum virus
cgcugcuauacgcgccag

SEQ ID NO: 237972 - RNA, 16 nt, Molluscum contagiosum virus
cgcugcuccccgccag

SEQ ID NO: 237973 - RNA, 17 nt, Molluscum contagiosum virus
cgcggcgagucgcgggc

SEQ ID NO: 237974 - RNA, 14 nt, Molluscum contagiosum virus
cgcggccgcggagg

SEQ ID NO: 237975 - RNA, 19 nt, Molluscum contagiosum virus
cgcggccguggcacugacg

SEQ ID NO: 237976 - RNA, 23 nt, Molluscum contagiosum virus
cgccggccagcgagucucgcgcg

SEQ ID NO: 237977 - RNA, 20 nt, Molluscum contagiosum virus
cgccucggacuucgacgcgc

SEQ ID NO: 237978 - RNA, 23 nt, Molluscum contagiosum virus
cgccucgggaaaacgcgcggcag

SEQ ID NO: 237979 - RNA, 24 nt, Molluscum contagiosum virus
cgccucgggaaaacgcgcggcagc

SEQ ID NO: 237980 - RNA, 14 nt, Molluscum contagiosum virus
cgccuccgggcgca

SEQ ID NO: 237981 - RNA, 18 nt, Molluscum contagiosum virus
cgccugacucccgucagc

SEQ ID NO: 237982 - RNA, 14 nt, Molluscum contagiosum virus
cgccugcacuacug

SEQ ID NO: 237983 - RNA, 22 nt, Molluscum contagiosum virus
cgccugccgcgagcacuggcug

SEQ ID NO: 237984 - RNA, 15 nt, Molluscum contagiosum virus
cgccugcucucgcgc

SEQ ID NO: 237985 - RNA, 21 nt, Molluscum contagiosum virus
cgccugcucucgcgcgccagc

SEQ ID NO: 237986 - RNA, 18 nt, Molluscum contagiosum virus
cgccgaucuccacgucga

SEQ ID NO: 237987 - RNA, 23 nt, Molluscum contagiosum virus
cgccgaucuccacgucgaucagc

SEQ ID NO: 237988 - RNA, 16 nt, Molluscum contagiosum virus
cgccgcaaauuccguc

SEQ ID NO: 237989 - RNA, 17 nt, Molluscum contagiosum virus
cgccgccaugcugcgcg

SEQ ID NO: 237990 - RNA, 22 nt, Molluscum contagiosum virus
cgccgacugccgccgccgcgag

SEQ ID NO: 237991 - RNA, 19 nt, Molluscum contagiosum virus
cgccgacaacgcacccgcg

SEQ ID NO: 237992 - RNA, 15 nt, Molluscum contagiosum virus
cgcccucgcgcgcag

SEQ ID NO: 237993 - RNA, 17 nt, Molluscum contagiosum virus
cgcccgugcucgcgggc

SEQ ID NO: 237994 - RNA, 18 nt, Molluscum contagiosum virus
cgcccguguucgcggagc

SEQ ID NO: 237995 - RNA, 16 nt, Molluscum contagiosum virus
cgccgcgcgcgccagc

SEQ ID NO: 237996 - RNA, 16 nt, Molluscum contagiosum virus
cgccgcggcgguugcc

SEQ ID NO: 237997 - RNA, 15 nt, Molluscum contagiosum virus
cgccgcugccgcgcg

SEQ ID NO: 237998 - RNA, 16 nt, Molluscum contagiosum virus
cgccgcugucacgcga

SEQ ID NO: 237999 - RNA, 16 nt, Molluscum contagiosum virus
cgccggacagcucagc

SEQ ID NO: 238000 - RNA, 19 nt, Molluscum contagiosum virus
cgcgaacgugcgaacacgg

SEQ ID NO: 238001 - RNA, 16 nt, Molluscum contagiosum virus
cgcgacaggggccaca

SEQ ID NO: 238002 - RNA, 15 nt, Molluscum contagiosum virus
cgcgaaagaacacgg

SEQ ID NO: 238003 - RNA, 13 nt, Molluscum contagiosum virus
cgccuuccugcug

SEQ ID NO: 238004 - RNA, 15 nt, Molluscum contagiosum virus
cgccuuccugcuggc

SEQ ID NO: 238005 - RNA, 18 nt, Molluscum contagiosum virus
cgccuugcagcgcagcag

SEQ ID NO: 238006 - RNA, 13 nt, Molluscum contagiosum virus
cgcgagaugcgcg

SEQ ID NO: 238007 - RNA, 15 nt, Molluscum contagiosum virus
cgcgaccggcgugcc

SEQ ID NO: 238008 - RNA, 21 nt, Molluscum contagiosum virus
cgcgacgacggcacgcugagc

SEQ ID NO: 238009 - RNA, 17 nt, Molluscum contagiosum virus
cgcgacgcgcguggagc

SEQ ID NO: 238010 - RNA, 22 nt, Molluscum contagiosum virus
cgcgacggcgugcuggccagcc

SEQ ID NO: 238011 - RNA, 15 nt, Molluscum contagiosum virus
cgcgacgggaaccgu

SEQ ID NO: 238012 - RNA, 23 nt, Molluscum contagiosum virus
cgcgauuuacuucgacgcggugc

SEQ ID NO: 238013 - RNA, 15 nt, Molluscum contagiosum virus
cgcgcaacacugcag

SEQ ID NO: 238014 - RNA, 18 nt, Molluscum contagiosum virus
cgcgcaaccagcuggcgc

SEQ ID NO: 238015 - RNA, 17 nt, Molluscum contagiosum virus
cgcgcaaggccgcgccc

SEQ ID NO: 238016 - RNA, 18 nt, Molluscum contagiosum virus
cgcgcaaguccagcgcgc

SEQ ID NO: 238017 - RNA, 16 nt, Molluscum contagiosum virus
cgcgcaagucgcgcgc

SEQ ID NO: 238018 - RNA, 18 nt, Molluscum contagiosum virus
cgcgcaagugugcgcauc

SEQ ID NO: 238019 - RNA, 15 nt, Molluscum contagiosum virus
cgcgcaauagcgccc

SEQ ID NO: 238020 - RNA, 13 nt, Molluscum contagiosum virus
cgcgcacacgcug

SEQ ID NO: 238021 - RNA, 20 nt, Molluscum contagiosum virus
cgcgcacaucggcacugcuc

SEQ ID NO: 238022 - RNA, 17 nt, Molluscum contagiosum virus
cgcgcacgagcgcgggc

SEQ ID NO: 238023 - RNA, 15 nt, Molluscum contagiosum virus
cgcgcacgcgcgagc

SEQ ID NO: 238024 - RNA, 13 nt, Molluscum contagiosum virus
cgcgcacgcgcgc

SEQ ID NO: 238025 - RNA, 13 nt, Molluscum contagiosum virus
cgcgcacgcggcg

SEQ ID NO: 238026 - RNA, 14 nt, Molluscum contagiosum virus
cgcgcacgcggcgc

SEQ ID NO: 238027 - RNA, 16 nt, Molluscum contagiosum virus
cgcgcacgcugcgcac

SEQ ID NO: 238028 - RNA, 22 nt, Molluscum contagiosum virus
cgcgcacguaccuucgcggagc

SEQ ID NO: 238029 - RNA, 20 nt, Molluscum contagiosum virus
cgcgcacugccacgcggagc

SEQ ID NO: 238030 - RNA, 14 nt, Molluscum contagiosum virus
cgcgcacugcucgc

SEQ ID NO: 238031 - RNA, 15 nt, Molluscum contagiosum virus
cgcgcagcgcgucuu

SEQ ID NO: 238032 - RNA, 13 nt, Molluscum contagiosum virus
cgcgcagcgugcc

SEQ ID NO: 238033 - RNA, 24 nt, Molluscum contagiosum virus
cgcgcagguugagcgcgcggaugc

SEQ ID NO: 238034 - RNA, 22 nt, Molluscum contagiosum virus
cgcgcaguucgagcugcugcgc

SEQ ID NO: 238035 - RNA, 19 nt, Molluscum contagiosum virus
cgcgcauacgcgccgcgcg

SEQ ID NO: 238036 - RNA, 20 nt, Molluscum contagiosum virus
cgcgcauacgcgccgcgcgc

SEQ ID NO: 238037 - RNA, 13 nt, Molluscum contagiosum virus
cgcgcccugcacg

SEQ ID NO: 238038 - RNA, 22 nt, Molluscum contagiosum virus
cgcgcccugcacgaccgcggac

SEQ ID NO: 238039 - RNA, 14 nt, Molluscum contagiosum virus
cgcgcccugcgcgc

SEQ ID NO: 238040 - RNA, 20 nt, Molluscum contagiosum virus
cgcgcccugcgcgcgagagc

SEQ ID NO: 238041 - RNA, 21 nt, Molluscum contagiosum virus
cgcgccgaggacuaccuggcg

SEQ ID NO: 238042 - RNA, 16 nt, Molluscum contagiosum virus
cgcgccgcacgugcug

SEQ ID NO: 238043 - RNA, 15 nt, Molluscum contagiosum virus
cgcgccgcgcugcug

SEQ ID NO: 238044 - RNA, 12 nt, Molluscum contagiosum virus
cgcgccgcggcg

SEQ ID NO: 238045 - RNA, 12 nt, Molluscum contagiosum virus
cgcgccgcgggc

SEQ ID NO: 238046 - RNA, 20 nt, Molluscum contagiosum virus
cgcgccgcugucacgcgagc

SEQ ID NO: 238047 - RNA, 15 nt, Molluscum contagiosum virus
cgcgccggcgcggcg

SEQ ID NO: 238048 - RNA, 20 nt, Molluscum contagiosum virus
cgcgccggcguucgcggagc

SEQ ID NO: 238049 - RNA, 13 nt, Molluscum contagiosum virus
cgcgccgggcgcc

SEQ ID NO: 238050 - RNA, 18 nt, Molluscum contagiosum virus
cgcgccgucucgcggggc

SEQ ID NO: 238051 - RNA, 15 nt, Molluscum contagiosum virus
cgcgcccgcugcgcg

SEQ ID NO: 238052 - RNA, 12 nt, Molluscum contagiosum virus
cgcgcccucgcg

SEQ ID NO: 238053 - RNA, 15 nt, Molluscum contagiosum virus
cgcgccuaccgcgcg

SEQ ID NO: 238054 - RNA, 20 nt, Molluscum contagiosum virus
cgcgccucucgaggccggca

SEQ ID NO: 238055 - RNA, 13 nt, Molluscum contagiosum virus
cgcgagcgcgggc

SEQ ID NO: 238056 - RNA, 20 nt, Molluscum contagiosum virus
cgcgaggcaugucgcggugc

SEQ ID NO: 238057 - RNA, 20 nt, Molluscum contagiosum virus
cgcgaguugcgucucccgcg

SEQ ID NO: 238058 - RNA, 14 nt, Molluscum contagiosum virus
cgcgcaucgcgggc

SEQ ID NO: 238059 - RNA, 18 nt, Molluscum contagiosum virus
cgcgagcacgccugcacg

SEQ ID NO: 238060 - RNA, 14 nt, Molluscum contagiosum virus
cgcgccagcagcgc

SEQ ID NO: 238061 - RNA, 19 nt, Molluscum contagiosum virus
cgcgcccaaggccgcgggc

SEQ ID NO: 238062 - RNA, 14 nt, Molluscum contagiosum virus
cgcgcaucugccgc

SEQ ID NO: 238063 - RNA, 16 nt, Molluscum contagiosum virus
cgcgcaugaggcggcg

SEQ ID NO: 238064 - RNA, 15 nt, Molluscum contagiosum virus
cgcgcaugcucgcgc

SEQ ID NO: 238065 - RNA, 22 nt, Molluscum contagiosum virus
cgcgccaacacguuuucuuuca

SEQ ID NO: 238066 - RNA, 14 nt, Molluscum contagiosum virus
caaaacgcgacgcc

SEQ ID NO: 238067 - RNA, 20 nt, Molluscum contagiosum virus
auuucguugauuugcgcacc

SEQ ID NO: 238068 - RNA, 14 nt, Molluscum contagiosum virus
caaagucgcgcgcg

SEQ ID NO: 238069 - RNA, 18 nt, Molluscum contagiosum virus
caaaggcccgcgagcacg

SEQ ID NO: 238070 - RNA, 14 nt, Molluscum contagiosum virus
caaaggcgggcccg

SEQ ID NO: 238071 - RNA, 15 nt, Molluscum contagiosum virus
caaagaaugcaugcg

SEQ ID NO: 238072 - RNA, 14 nt, Molluscum contagiosum virus
caaagacgggcccg

SEQ ID NO: 238073 - RNA, 23 nt, Molluscum contagiosum virus
caaagaucgcgguggcaggcgcg

SEQ ID NO: 238074 - RNA, 12 nt, Molluscum contagiosum virus
caaagcggggcg

SEQ ID NO: 238075 - RNA, 15 nt, Molluscum contagiosum virus
auggccgcgccgcgc

SEQ ID NO: 238076 - RNA, 19 nt, Molluscum contagiosum virus
augggcacaagucucgcgc

SEQ ID NO: 238077 - RNA, 13 nt, Molluscum contagiosum virus
auucccguggacc

SEQ ID NO: 238078 - RNA, 12 nt, Molluscum contagiosum virus
augagcagcacc

SEQ ID NO: 238079 - RNA, 17 nt, Molluscum contagiosum virus
augagccagucucgcgc

SEQ ID NO: 238080 - RNA, 18 nt, Molluscum contagiosum virus
augaguaccgcgggcgca

SEQ ID NO: 238081 - RNA, 21 nt, Molluscum contagiosum virus
augacacgcgugucugcgcuc

SEQ ID NO: 238082 - RNA, 13 nt, Molluscum contagiosum virus
augcggcaggcgc

SEQ ID NO: 238083 - RNA, 18 nt, Molluscum contagiosum virus
augcucacguacgacugc

SEQ ID NO: 238084 - RNA, 18 nt, Molluscum contagiosum virus
augcugcucgacgggcgc

SEQ ID NO: 238085 - RNA, 19 nt, Molluscum contagiosum virus
augcugcucgacgggcgca

SEQ ID NO: 238086 - RNA, 15 nt, Molluscum contagiosum virus
auggacacgcugcgc

SEQ ID NO: 238087 - RNA, 15 nt, Molluscum contagiosum virus
auggacgcgccgcgc

SEQ ID NO: 238088 - RNA, 18 nt, Molluscum contagiosum virus
auauggccgugcgcgacg

SEQ ID NO: 238089 - RNA, 15 nt, Molluscum contagiosum virus
auccaaacccccgag

SEQ ID NO: 238090 - RNA, 21 nt, Molluscum contagiosum virus
auccagcgcaucaugcgcuuc

SEQ ID NO: 238091 - RNA, 20 nt, Molluscum contagiosum virus
aucccggaacgcaaguacaa

SEQ ID NO: 238092 - RNA, 15 nt, Molluscum contagiosum virus
aucgacgagcacgag

SEQ ID NO: 238093 - RNA, 16 nt, Molluscum contagiosum virus
aucgagcugguggccu

SEQ ID NO: 238094 - RNA, 19 nt, Molluscum contagiosum virus
aguucugcacagcacaggc

SEQ ID NO: 238095 - RNA, 16 nt, Molluscum contagiosum virus
auaucugucgccgcgg

SEQ ID NO: 238096 - RNA, 20 nt, Molluscum contagiosum virus
aucucgcacacugcagcacg

SEQ ID NO: 238097 - RNA, 12 nt, Molluscum contagiosum virus
aucucugcgccg

SEQ ID NO: 238098 - RNA, 13 nt, Molluscum contagiosum virus
aucgcgcaggcgc

SEQ ID NO: 238099 - RNA, 16 nt, Molluscum contagiosum virus
aucgcgcugcuggugc

SEQ ID NO: 238100 - RNA, 18 nt, Molluscum contagiosum virus
aucgcggagcugcgcgcg

SEQ ID NO: 238101 - RNA, 17 nt, Molluscum contagiosum virus
aucgugggcaucgaccc

SEQ ID NO: 238102 - RNA, 16 nt, Molluscum contagiosum virus
aucggcacugcucacg

SEQ ID NO: 238103 - RNA, 15 nt, Molluscum contagiosum virus
agcuuggugcgcucg

SEQ ID NO: 238104 - RNA, 17 nt, Molluscum contagiosum virus
agugcacaccggcgcgc

SEQ ID NO: 238105 - RNA, 18 nt, Molluscum contagiosum virus
aguccgccucgagcacgc

SEQ ID NO: 238106 - RNA, 22 nt, Molluscum contagiosum virus
agucgcaguacccgagcugugc

SEQ ID NO: 238107 - RNA, 15 nt, Molluscum contagiosum virus
agcugcuagcggcag

SEQ ID NO: 238108 - RNA, 17 nt, Molluscum contagiosum virus
agcugguagagaacgac

SEQ ID NO: 238109 - RNA, 17 nt, Molluscum contagiosum virus
agcuguaccuggugcgc

SEQ ID NO: 238110 - RNA, 18 nt, Molluscum contagiosum virus
agcuucaucaagcacggc

SEQ ID NO: 238111 - RNA, 19 nt, Molluscum contagiosum virus
agcuuccucaaggcgcacg

SEQ ID NO: 238112 - RNA, 15 nt, Molluscum contagiosum virus
agcugcagagcgugc

SEQ ID NO: 238113 - RNA, 21 nt, Molluscum contagiosum virus
agcugcccuuuagcguggcgc

SEQ ID NO: 238114 - RNA, 14 nt, Molluscum contagiosum virus
agcucuucgacagc

SEQ ID NO: 238115 - RNA, 16 nt, Molluscum contagiosum virus
agcucuucguggccaa

SEQ ID NO: 238116 - RNA, 15 nt, Molluscum contagiosum virus
agcucucgcgcgcag

SEQ ID NO: 238117 - RNA, 23 nt, Molluscum contagiosum virus
agcucgcguccacgaugcgcucg

SEQ ID NO: 238118 - RNA, 12 nt, Molluscum contagiosum virus
agcucguggaca

SEQ ID NO: 238119 - RNA, 19 nt, Molluscum contagiosum virus
agcgugucgaagcgcgcag

SEQ ID NO: 238120 - RNA, 17 nt, Molluscum contagiosum virus
agcuagcucugcgcgcg

SEQ ID NO: 238121 - RNA, 17 nt, Molluscum contagiosum virus
agcucaaucucgcccag

SEQ ID NO: 238122 - RNA, 21 nt, Molluscum contagiosum virus
agcuccgcgacgaacucgaca

SEQ ID NO: 238123 - RNA, 22 nt, Molluscum contagiosum virus
agcucgccaaagcgcgccuucc

SEQ ID NO: 238124 - RNA, 14 nt, Molluscum contagiosum virus
agcgugcagacgac

SEQ ID NO: 238125 - RNA, 14 nt, Molluscum contagiosum virus
cagccccgcgccag

SEQ ID NO: 238126 - RNA, 22 nt, Molluscum contagiosum virus
cagccuccgguuuucgcgggag

SEQ ID NO: 238127 - RNA, 20 nt, Molluscum contagiosum virus
cagcgagaucaacgcgcgcg

SEQ ID NO: 238128 - RNA, 19 nt, Molluscum contagiosum virus
cagcgauugcccgcgcgcg

SEQ ID NO: 238129 - RNA, 24 nt, Molluscum contagiosum virus
cagcgauugcccgcgcgcggacag

SEQ ID NO: 238130 - RNA, 16 nt, Molluscum contagiosum virus
cagcgccagccugcug

SEQ ID NO: 238131 - RNA, 20 nt, Molluscum contagiosum virus
cagcgccagccugcuggcac

SEQ ID NO: 238132 - RNA, 18 nt, Molluscum contagiosum virus
cagcgccugcuugcgcac

SEQ ID NO: 238133 - RNA, 12 nt, Molluscum contagiosum virus
cagcgcgcgcac

SEQ ID NO: 238134 - RNA, 22 nt, Molluscum contagiosum virus
cagcgcgcgcagcaccgcggcg

SEQ ID NO: 238135 - RNA, 13 nt, Molluscum contagiosum virus
cagcgcgcggaag

SEQ ID NO: 238136 - RNA, 12 nt, Molluscum contagiosum virus
cagcgcgcggcg

SEQ ID NO: 238137 - RNA, 24 nt, Molluscum contagiosum virus
cagccaggcuaggcgcgacugcac

SEQ ID NO: 238138 - RNA, 20 nt, Molluscum contagiosum virus
cacgccgguggcgcgcgagc

SEQ ID NO: 238139 - RNA, 14 nt, Molluscum contagiosum virus
cagccgcgcggcag

SEQ ID NO: 238140 - RNA, 22 nt, Molluscum contagiosum virus
cacgcgcgugagcacgggcgag

SEQ ID NO: 238141 - RNA, 13 nt, Molluscum contagiosum virus
cacgcgcucgcgc

SEQ ID NO: 238142 - RNA, 11 nt, Molluscum contagiosum virus
cacgcgcuucg

SEQ ID NO: 238143 - RNA, 21 nt, Molluscum contagiosum virus
cacgcggcgcgugucgcggag

SEQ ID NO: 238144 - RNA, 12 nt, Molluscum contagiosum virus
cacgcgggcgcc

SEQ ID NO: 238145 - RNA, 17 nt, Molluscum contagiosum virus
cacgcuacgcagcgcgc

SEQ ID NO: 238146 - RNA, 21 nt, Molluscum contagiosum virus
cacgcuagcgagcgcccgugc

SEQ ID NO: 238147 - RNA, 22 nt, Molluscum contagiosum virus
cacgcuagucguuggcgcgccc

SEQ ID NO: 238148 - RNA, 19 nt, Molluscum contagiosum virus
cacgcucauacuccugcug

SEQ ID NO: 238149 - RNA, 19 nt, Molluscum contagiosum virus
cacgcugcgcacgggcgcg

SEQ ID NO: 238150 - RNA, 18 nt, Molluscum contagiosum virus
cacgcugcgcucggcgcg

SEQ ID NO: 238151 - RNA, 14 nt, Molluscum contagiosum virus
caggaccugcuggu

SEQ ID NO: 238152 - RNA, 19 nt, Molluscum contagiosum virus
cagcugcugucgcucgugg

SEQ ID NO: 238153 - RNA, 14 nt, Molluscum contagiosum virus
caggaacgccgcca

SEQ ID NO: 238154 - RNA, 16 nt, Molluscum contagiosum virus
caggaacgcgccgcgg

SEQ ID NO: 238155 - RNA, 18 nt, Molluscum contagiosum virus
caggaacugcccgcgucg

SEQ ID NO: 238156 - RNA, 15 nt, Molluscum contagiosum virus
caggaagcuggcgcg

SEQ ID NO: 238157 - RNA, 21 nt, Molluscum contagiosum virus
cagcgugacaaucucugcgcc

SEQ ID NO: 238158 - RNA, 16 nt, Molluscum contagiosum virus
cagcgugccgcggcac

SEQ ID NO: 238159 - RNA, 23 nt, Molluscum contagiosum virus
cagcgugcgcgggcacgccgcag

SEQ ID NO: 238160 - RNA, 14 nt, Molluscum contagiosum virus
cagcguuccaggaa

SEQ ID NO: 238161 - RNA, 18 nt, Molluscum contagiosum virus
cagcucaagacgcugcug

SEQ ID NO: 238162 - RNA, 16 nt, Molluscum contagiosum virus
cagcucauagcccaug

SEQ ID NO: 238163 - RNA, 15 nt, Molluscum contagiosum virus
cagcuccgcgcggcg

SEQ ID NO: 238164 - RNA, 13 nt, Molluscum contagiosum virus
cagcucgccgcgc

SEQ ID NO: 238165 - RNA, 12 nt, Molluscum contagiosum virus
cagcucgcgcag

SEQ ID NO: 238166 - RNA, 18 nt, Molluscum contagiosum virus
cagcucgcgccgccgcgc

SEQ ID NO: 238167 - RNA, 21 nt, Molluscum contagiosum virus
cagcucggcgagagcgcgcag

SEQ ID NO: 238168 - RNA, 18 nt, Molluscum contagiosum virus
cagcugcaggaccugcug

SEQ ID NO: 238169 - RNA, 22 nt, Molluscum contagiosum virus
cagcugcugcgcuucgccgcgc

SEQ ID NO: 238170 - RNA, 19 nt, Molluscum contagiosum virus
cagcggcaaaggcccgcga

SEQ ID NO: 238171 - RNA, 20 nt, Molluscum contagiosum virus
cagcggcaaaggcccgcgag

SEQ ID NO: 238172 - RNA, 16 nt, Molluscum contagiosum virus
cagcggcacugcgcgc

SEQ ID NO: 238173 - RNA, 14 nt, Molluscum contagiosum virus
cagcggcgccgcag

SEQ ID NO: 238174 - RNA, 13 nt, Molluscum contagiosum virus
cagcggcgcgugc

SEQ ID NO: 238175 - RNA, 18 nt, Molluscum contagiosum virus
cagcggcugcccgcggag

SEQ ID NO: 238176 - RNA, 16 nt, Molluscum contagiosum virus
cagcgcguccaugcug

SEQ ID NO: 238177 - RNA, 18 nt, Molluscum contagiosum virus
cagcgucgcgcgccgugc

SEQ ID NO: 238178 - RNA, 13 nt, Molluscum contagiosum virus
cagcgucgcggag

SEQ ID NO: 238179 - RNA, 17 nt, Molluscum contagiosum virus
cagcgucgcggagcgcg

SEQ ID NO: 238180 - RNA, 22 nt, Molluscum contagiosum virus
cagcgguggucuccgcgggcag

SEQ ID NO: 238181 - RNA, 21 nt, Molluscum contagiosum virus
cagcggacguggucgcgcgcg

SEQ ID NO: 238182 - RNA, 22 nt, Molluscum contagiosum virus
cacgccgacuuccgacgggccg

SEQ ID NO: 238183 - RNA, 13 nt, Molluscum contagiosum virus
cacgccgcucggc

SEQ ID NO: 238184 - RNA, 15 nt, Molluscum contagiosum virus
cacgcacgcgcgggc

SEQ ID NO: 238185 - RNA, 19 nt, Molluscum contagiosum virus
cacgcacggcccgggugcg

SEQ ID NO: 238186 - RNA, 19 nt, Molluscum contagiosum virus
cacgcagcuggcgggcgug

SEQ ID NO: 238187 - RNA, 15 nt, Molluscum contagiosum virus
cacgcgcgagcggag

SEQ ID NO: 238188 - RNA, 14 nt, Molluscum contagiosum virus
cacgcgcgggcgca

SEQ ID NO: 238189 - RNA, 16 nt, Molluscum contagiosum virus
cacgccuucguggagc

SEQ ID NO: 238190 - RNA, 22 nt, Molluscum contagiosum virus
cacgccuucguggagcccgugc

SEQ ID NO: 238191 - RNA, 17 nt, Molluscum contagiosum virus
cacgcgcacgcgcacac

SEQ ID NO: 238192 - RNA, 22 nt, Molluscum contagiosum virus
cacgacggaacguuggcccgca

SEQ ID NO: 238193 - RNA, 21 nt, Molluscum contagiosum virus
cacgacguacgagugcuggag

SEQ ID NO: 238194 - RNA, 21 nt, Molluscum contagiosum virus
cacgagaugggcccgcgcgcg

SEQ ID NO: 238195 - RNA, 14 nt, Molluscum contagiosum virus
cacgagcgcggcaa

SEQ ID NO: 238196 - RNA, 20 nt, Molluscum contagiosum virus
cacgaggacugggaacccgu

SEQ ID NO: 238197 - RNA, 20 nt, Molluscum contagiosum virus
cacgcaaggcaugcgcgcag

SEQ ID NO: 238198 - RNA, 16 nt, Molluscum contagiosum virus
cacgcaaucgcgcgcg

SEQ ID NO: 238199 - RNA, 15 nt, Molluscum contagiosum virus
cacgcacacgacgac

SEQ ID NO: 238200 - RNA, 13 nt, Molluscum contagiosum virus
caccugcgacgcc

SEQ ID NO: 238201 - RNA, 11 nt, Molluscum contagiosum virus
caccugcgcaa

SEQ ID NO: 238202 - RNA, 18 nt, Molluscum contagiosum virus
caccuucggaacugcgga

SEQ ID NO: 238203 - RNA, 16 nt, Molluscum contagiosum virus
caccgcaucccccgcg

SEQ ID NO: 238204 - RNA, 20 nt, Molluscum contagiosum virus
caccgcgagcaccacuacug

SEQ ID NO: 238205 - RNA, 15 nt, Molluscum contagiosum virus
caccgcggcgcggag

SEQ ID NO: 238206 - RNA, 20 nt, Molluscum contagiosum virus
caacacugacgcucgggccg

SEQ ID NO: 238207 - RNA, 20 nt, Molluscum contagiosum virus
caacauuuacuucgggcgca

SEQ ID NO: 238208 - RNA, 20 nt, Molluscum contagiosum virus
caacgucgcacuggccugca

SEQ ID NO: 238209 - RNA, 19 nt, Molluscum contagiosum virus
caacgggcucgugcuggag

SEQ ID NO: 238210 - RNA, 22 nt, Molluscum contagiosum virus
caacguaguacugcagcagcuc

SEQ ID NO: 238211 - RNA, 19 nt, Molluscum contagiosum virus
caaccuccugcaccugcug

SEQ ID NO: 238212 - RNA, 21 nt, Molluscum contagiosum virus
caaccuccugcaccugcugga

SEQ ID NO: 238213 - RNA, 19 nt, Molluscum contagiosum virus
caacgacuagcgugcgcag

SEQ ID NO: 238214 - RNA, 20 nt, Molluscum contagiosum virus
caacgagcacgugugcggag

SEQ ID NO: 238215 - RNA, 15 nt, Molluscum contagiosum virus
caacgagcgcaucag

SEQ ID NO: 238216 - RNA, 14 nt, Molluscum contagiosum virus
caacgccgggcacg

SEQ ID NO: 238217 - RNA, 13 nt, Molluscum contagiosum virus
caacgcgcgcgcg

SEQ ID NO: 238218 - RNA, 13 nt, Molluscum contagiosum virus
caacgcggacgcg

SEQ ID NO: 238219 - RNA, 17 nt, Molluscum contagiosum virus
caccguugccgcggcag

SEQ ID NO: 238220 - RNA, 16 nt, Molluscum contagiosum virus
caccuagagcacgaag

SEQ ID NO: 238221 - RNA, 15 nt, Molluscum contagiosum virus
caccucaccgcgcac

SEQ ID NO: 238222 - RNA, 13 nt, Molluscum contagiosum virus
caccucgcacgug

SEQ ID NO: 238223 - RNA, 16 nt, Molluscum contagiosum virus
caccugcacgacguac

SEQ ID NO: 238224 - RNA, 19 nt, Molluscum contagiosum virus
caccgagcgcuacgacgac

SEQ ID NO: 238225 - RNA, 15 nt, Molluscum contagiosum virus
caagaagacggcgcg

SEQ ID NO: 238226 - RNA, 15 nt, Molluscum contagiosum virus
caagacgcugcuggc

SEQ ID NO: 238227 - RNA, 13 nt, Molluscum contagiosum virus
caagacgggcacg

SEQ ID NO: 238228 - RNA, 19 nt, Molluscum contagiosum virus
caagacucgcccgcgcgcg

SEQ ID NO: 238229 - RNA, 15 nt, Molluscum contagiosum virus
acgaugcgcucgugg

SEQ ID NO: 238230 - RNA, 14 nt, Molluscum contagiosum virus
acgcaaaugcgcgc

SEQ ID NO: 238231 - RNA, 14 nt, Molluscum contagiosum virus
acgcaacugcccgc

SEQ ID NO: 238232 - RNA, 16 nt, Molluscum contagiosum virus
acgcaagcccgcgcgc

SEQ ID NO: 238233 - RNA, 17 nt, Molluscum contagiosum virus
acgcaaggcaugcgcgc

SEQ ID NO: 238234 - RNA, 17 nt, Molluscum contagiosum virus
acgcaaggugugcgcgc

SEQ ID NO: 238235 - RNA, 14 nt, Molluscum contagiosum virus
acgcaaucgcgcgc

SEQ ID NO: 238236 - RNA, 15 nt, Molluscum contagiosum virus
acgcacaaaacacaa

SEQ ID NO: 238237 - RNA, 22 nt, Molluscum contagiosum virus
acgcacacgagugcccgcgcgc

SEQ ID NO: 238238 - RNA, 14 nt, Molluscum contagiosum virus
acgcacacucgcgc

SEQ ID NO: 238239 - RNA, 15 nt, Molluscum contagiosum virus
acgacaugcucgcgc

SEQ ID NO: 238240 - RNA, 23 nt, Molluscum contagiosum virus
acgaacaugggguuucggaacgc

SEQ ID NO: 238241 - RNA, 12 nt, Molluscum contagiosum virus
acgcacgcgcgc

SEQ ID NO: 238242 - RNA, 14 nt, Molluscum contagiosum virus
acgcacgcgcgggc

SEQ ID NO: 238243 - RNA, 14 nt, Molluscum contagiosum virus
acgcacuugcgcgc

SEQ ID NO: 238244 - RNA, 15 nt, Molluscum contagiosum virus
acgacggcugcucgc

SEQ ID NO: 238245 - RNA, 23 nt, Molluscum contagiosum virus
acgacugcuuugacacgcucauc

SEQ ID NO: 238246 - RNA, 16 nt, Molluscum contagiosum virus
acgacuuccgcggcgu

SEQ ID NO: 238247 - RNA, 12 nt, Molluscum contagiosum virus
acgagagggcgc

SEQ ID NO: 238248 - RNA, 19 nt, Molluscum contagiosum virus
acgagaugggcccgcgcgc

SEQ ID NO: 238249 - RNA, 18 nt, Molluscum contagiosum virus
acgagcacugccugccgc

SEQ ID NO: 238250 - RNA, 19 nt, Molluscum contagiosum virus
acgagcagcgcuugcgcgc

SEQ ID NO: 238251 - RNA, 17 nt, Molluscum contagiosum virus
acgagcagcugcugcgc

SEQ ID NO: 238252 - RNA, 14 nt, Molluscum contagiosum virus
acgagcgcaucagc

SEQ ID NO: 238253 - RNA, 20 nt, Molluscum contagiosum virus
acgagcgccagccugugcgc

SEQ ID NO: 238254 - RNA, 16 nt, Molluscum contagiosum virus
acgagcugcugcccgc

SEQ ID NO: 238255 - RNA, 16 nt, Molluscum contagiosum virus
acgagcugcugcgcgc

SEQ ID NO: 238256 - RNA, 14 nt, Molluscum contagiosum virus
acgagcugugcgag

SEQ ID NO: 238257 - RNA, 22 nt, Molluscum contagiosum virus
acgaggccuacgugcugcgcac

SEQ ID NO: 238258 - RNA, 23 nt, Molluscum contagiosum virus
acgaggucgcguccacgcaggac

SEQ ID NO: 238259 - RNA, 13 nt, Molluscum contagiosum virus
acgaggugcgcgc

SEQ ID NO: 238260 - RNA, 16 nt, Molluscum contagiosum virus
acgagugcccgcgcgc

SEQ ID NO: 238261 - RNA, 15 nt, Molluscum contagiosum virus
acgagugcgccgcgc

SEQ ID NO: 238262 - RNA, 17 nt, Molluscum contagiosum virus
accugucggagcaggac

SEQ ID NO: 238263 - RNA, 20 nt, Molluscum contagiosum virus
acgaaucgccgucuuuacgu

SEQ ID NO: 238264 - RNA, 13 nt, Molluscum contagiosum virus
acgacacuggcgc

SEQ ID NO: 238265 - RNA, 22 nt, Molluscum contagiosum virus
accugcaggcucuaagcgcacg

SEQ ID NO: 238266 - RNA, 19 nt, Molluscum contagiosum virus
accugcauugagcucgcgc

SEQ ID NO: 238267 - RNA, 19 nt, Molluscum contagiosum virus
accugcucgggcugcgcgg

SEQ ID NO: 238268 - RNA, 13 nt, Molluscum contagiosum virus
accucgcgcuucc

SEQ ID NO: 238269 - RNA, 17 nt, Molluscum contagiosum virus
accucaccucugcgcgg

SEQ ID NO: 238270 - RNA, 14 nt, Molluscum contagiosum virus
accuagagcacgaa

SEQ ID NO: 238271 - RNA, 20 nt, Molluscum contagiosum virus
accgggcacuucucgcgcga

SEQ ID NO: 238272 - RNA, 22 nt, Molluscum contagiosum virus
accgcuggggcgugacucggcc

SEQ ID NO: 238273 - RNA, 21 nt, Molluscum contagiosum virus
accgccuguaccugcucgggc

SEQ ID NO: 238274 - RNA, 20 nt, Molluscum contagiosum virus
accgcgucaagaucaaccgc

SEQ ID NO: 238275 - RNA, 16 nt, Molluscum contagiosum virus
accgcgugcgugcaca

SEQ ID NO: 238276 - RNA, 22 nt, Molluscum contagiosum virus
accgcguggacaacagcacgac

SEQ ID NO: 238277 - RNA, 15 nt, Molluscum contagiosum virus
agaaacgacgggcgc

SEQ ID NO: 238278 - RNA, 17 nt, Molluscum contagiosum virus
agccugaggccgcggag

SEQ ID NO: 238279 - RNA, 15 nt, Molluscum contagiosum virus
agcgccgccaugcug

SEQ ID NO: 238280 - RNA, 15 nt, Molluscum contagiosum virus
agcgccgcucgcacg

SEQ ID NO: 238281 - RNA, 19 nt, Molluscum contagiosum virus
agcgccgcucgcacggcga

SEQ ID NO: 238282 - RNA, 18 nt, Molluscum contagiosum virus
agcgccgucucgcggaag

SEQ ID NO: 238283 - RNA, 14 nt, Molluscum contagiosum virus
agcgcgagcugugc

SEQ ID NO: 238284 - RNA, 13 nt, Molluscum contagiosum virus
agcgcgagcuugc

SEQ ID NO: 238285 - RNA, 20 nt, Molluscum contagiosum virus
agcgcgaguacaagcucgac

SEQ ID NO: 238286 - RNA, 15 nt, Molluscum contagiosum virus
agcgcgcaguugugc

SEQ ID NO: 238287 - RNA, 17 nt, Molluscum contagiosum virus
agcgcguucgcgcgugc

SEQ ID NO: 238288 - RNA, 20 nt, Molluscum contagiosum virus
agcgcguucgcgcgugcugg

SEQ ID NO: 238289 - RNA, 12 nt, Molluscum contagiosum virus
agcgcgccgcgc

SEQ ID NO: 238290 - RNA, 13 nt, Molluscum contagiosum virus
agcgcgcugcaca

SEQ ID NO: 238291 - RNA, 14 nt, Molluscum contagiosum virus
agcgcggagcuggc

SEQ ID NO: 238292 - RNA, 19 nt, Molluscum contagiosum virus
agcgcggcaacagcacgac

SEQ ID NO: 238293 - RNA, 18 nt, Molluscum contagiosum virus
agcgcggccgcgcucguc

SEQ ID NO: 238294 - RNA, 17 nt, Molluscum contagiosum virus
agcgcuucuuccggcag

SEQ ID NO: 238295 - RNA, 17 nt, Molluscum contagiosum virus
agcggacguggucgcgc

SEQ ID NO: 238296 - RNA, 21 nt, Molluscum contagiosum virus
agcggagaaaaggaagcuugc

SEQ ID NO: 238297 - RNA, 15 nt, Molluscum contagiosum virus
agcggcaagccgugc

SEQ ID NO: 238298 - RNA, 14 nt, Molluscum contagiosum virus
agcggcggacagca

SEQ ID NO: 238299 - RNA, 17 nt, Molluscum contagiosum virus
acuucauccucuaccgc

SEQ ID NO: 238300 - RNA, 13 nt, Molluscum contagiosum virus
acuucccgaggac

SEQ ID NO: 238301 - RNA, 23 nt, Molluscum contagiosum virus
acuuccguugcgagaacgggcgc

SEQ ID NO: 238302 - RNA, 20 nt, Molluscum contagiosum virus
acuucgacgcggugcgcgcg

SEQ ID NO: 238303 - RNA, 15 nt, Molluscum contagiosum virus
acuugcacgcgcacg

SEQ ID NO: 238304 - RNA, 14 nt, Molluscum contagiosum virus
acugcucgcgcacg

SEQ ID NO: 238305 - RNA, 14 nt, Molluscum contagiosum virus
acuggagcacggac

SEQ ID NO: 238306 - RNA, 15 nt, Molluscum contagiosum virus
acuggcaccugcggc

SEQ ID NO: 238307 - RNA, 17 nt, Molluscum contagiosum virus
acuggcacgcgccgcgc

SEQ ID NO: 238308 - RNA, 20 nt, Molluscum contagiosum virus
acugcgcgcacugcucgcgc

SEQ ID NO: 238309 - RNA, 21 nt, Molluscum contagiosum virus
acugcuacgucgcggcgcacg

SEQ ID NO: 238310 - RNA, 18 nt, Molluscum contagiosum virus
acugcuagcgacgcggac

SEQ ID NO: 238311 - RNA, 15 nt, Molluscum contagiosum virus
acuacacugucgcgc

SEQ ID NO: 238312 - RNA, 15 nt, Molluscum contagiosum virus
acuacgcacuggcga

SEQ ID NO: 238313 - RNA, 14 nt, Molluscum contagiosum virus
acuagcacgggcgg

SEQ ID NO: 238314 - RNA, 18 nt, Molluscum contagiosum virus
acuagcacgggcgggaca

SEQ ID NO: 238315 - RNA, 19 nt, Molluscum contagiosum virus
acucgcagaacugcugcgc

SEQ ID NO: 238316 - RNA, 22 nt, Molluscum contagiosum virus
acucgcuacugcaacguggcgc

SEQ ID NO: 238317 - RNA, 15 nt, Molluscum contagiosum virus
acucggcaugugcgc

SEQ ID NO: 238318 - RNA, 15 nt, Molluscum contagiosum virus
acucggugcucaugc

SEQ ID NO: 238319 - RNA, 23 nt, Molluscum contagiosum virus
acugacugcugcccccgccgcgg

SEQ ID NO: 238320 - RNA, 13 nt, Molluscum contagiosum virus
acugcagcacguc

SEQ ID NO: 238321 - RNA, 20 nt, Molluscum contagiosum virus
acuagcguagcaugcucguc

SEQ ID NO: 238322 - RNA, 20 nt, Molluscum contagiosum virus
acugccaaagcuaugcgcag

SEQ ID NO: 238323 - RNA, 21 nt, Molluscum contagiosum virus
acugccacgcggagcucgcca

SEQ ID NO: 238324 - RNA, 21 nt, Molluscum contagiosum virus
acugcccgcgcccugcacgac

SEQ ID NO: 238325 - RNA, 14 nt, Molluscum contagiosum virus
acugccgccaggaa

SEQ ID NO: 238326 - RNA, 16 nt, Molluscum contagiosum virus
acugccgccgccgcga

SEQ ID NO: 238327 - RNA, 13 nt, Molluscum contagiosum virus
acuccacgcccgg

SEQ ID NO: 238328 - RNA, 15 nt, Molluscum contagiosum virus
acuccaucugcgcga

SEQ ID NO: 238329 - RNA, 14 nt, Molluscum contagiosum virus
acuccgagcgcgac

SEQ ID NO: 238330 - RNA, 24 nt, Molluscum contagiosum virus
acuccguggaggaucgcuacgugc

SEQ ID NO: 238331 - RNA, 23 nt, Molluscum contagiosum virus
acuccguuuuucugugcucgcgc

SEQ ID NO: 238332 - RNA, 21 nt, Molluscum contagiosum virus
acucgaacgcaaggugugcgc

SEQ ID NO: 238333 - RNA, 22 nt, Molluscum contagiosum virus
acucgagcacguagugcucguc

SEQ ID NO: 238334 - RNA, 23 nt, Molluscum contagiosum virus
acucgagccccagaaggucgugc

SEQ ID NO: 238335 - RNA, 17 nt, Molluscum contagiosum virus
acgcucggcugccgugc

SEQ ID NO: 238336 - RNA, 20 nt, Molluscum contagiosum virus
acguugcgcguucagcgcac

SEQ ID NO: 238337 - RNA, 21 nt, Molluscum contagiosum virus
acguugcgcguucagcgcacg

SEQ ID NO: 238338 - RNA, 14 nt, Molluscum contagiosum virus
acgcgggccugucc

SEQ ID NO: 238339 - RNA, 13 nt, Molluscum contagiosum virus
acgugcugcgccg

SEQ ID NO: 238340 - RNA, 15 nt, Molluscum contagiosum virus
acgugcugcugcggc

SEQ ID NO: 238341 - RNA, 14 nt, Molluscum contagiosum virus
acgugcuugcgcgc

SEQ ID NO: 238342 - RNA, 15 nt, Molluscum contagiosum virus
acgcggugagugcgc

SEQ ID NO: 238343 - RNA, 17 nt, Molluscum contagiosum virus
acgcggugcgcgcgugc

SEQ ID NO: 238344 - RNA, 23 nt, Molluscum contagiosum virus
acgcggugugcacaugcccgugc

SEQ ID NO: 238345 - RNA, 16 nt, Molluscum contagiosum virus
acgcguacguguccau

SEQ ID NO: 238346 - RNA, 23 nt, Molluscum contagiosum virus
acgcguacguguccaugcacgac

SEQ ID NO: 238347 - RNA, 23 nt, Molluscum contagiosum virus
acgcguccgccucuuccucgugc

SEQ ID NO: 238348 - RNA, 15 nt, Molluscum contagiosum virus
acgcgugcugcgcgg

SEQ ID NO: 238349 - RNA, 19 nt, Molluscum contagiosum virus
acgcggcgcgugucgcgga

SEQ ID NO: 238350 - RNA, 15 nt, Molluscum contagiosum virus
acgcggacgcgcagc

SEQ ID NO: 238351 - RNA, 20 nt, Molluscum contagiosum virus
acgcgcgcguaacagcgcgc

SEQ ID NO: 238352 - RNA, 13 nt, Molluscum contagiosum virus
acgcgcgcuuagc

SEQ ID NO: 238353 - RNA, 19 nt, Molluscum contagiosum virus
acgccuucuuccugcgcgu

SEQ ID NO: 238354 - RNA, 23 nt, Molluscum contagiosum virus
acgcgaccuucacucgcucgcgc

SEQ ID NO: 238355 - RNA, 17 nt, Molluscum contagiosum virus
acgcgacuucgcccgug

SEQ ID NO: 238356 - RNA, 23 nt, Molluscum contagiosum virus
acgcgagcggcuuuucgccggag

SEQ ID NO: 238357 - RNA, 21 nt, Molluscum contagiosum virus
acgcgcaaggccgcgcccaag

SEQ ID NO: 238358 - RNA, 20 nt, Molluscum contagiosum virus
acgcgcacgggccugcgcgc

SEQ ID NO: 238359 - RNA, 14 nt, Molluscum contagiosum virus
acgcgcagcucgac

SEQ ID NO: 238360 - RNA, 21 nt, Molluscum contagiosum virus
acgcgcagcuguuucugccgc

SEQ ID NO: 238361 - RNA, 19 nt, Molluscum contagiosum virus
acgcgccgacaugcgcacg

SEQ ID NO: 238362 - RNA, 18 nt, Molluscum contagiosum virus
acgcgccggggcgcgcgc

SEQ ID NO: 238363 - RNA, 22 nt, Molluscum contagiosum virus
acgcccgagggcgggcacgugc

SEQ ID NO: 238364 - RNA, 16 nt, Molluscum contagiosum virus
acgccguccgcgcagc

SEQ ID NO: 238365 - RNA, 15 nt, Molluscum contagiosum virus
acgccgugcgcgugc

SEQ ID NO: 238366 - RNA, 23 nt, Molluscum contagiosum virus
acgccuccaagaagaggccagca

SEQ ID NO: 238367 - RNA, 23 nt, Molluscum contagiosum virus
acgccuccaagaagaggccggca

SEQ ID NO: 238368 - RNA, 23 nt, Molluscum contagiosum virus
acgcaccgccuggugcugcgcga

SEQ ID NO: 238369 - RNA, 17 nt, Molluscum contagiosum virus
acgcacgcacguggcgc

SEQ ID NO: 238370 - RNA, 23 nt, Molluscum contagiosum virus
acgcagcuguggcgccugcgcgc

SEQ ID NO: 238371 - RNA, 20 nt, Molluscum contagiosum virus
acgcaggaccuggcuggcgc

SEQ ID NO: 238372 - RNA, 17 nt, Molluscum contagiosum virus
acgcauguacgcggcgg

SEQ ID NO: 238373 - RNA, 21 nt, Molluscum contagiosum virus
uuugcgagcacuguacgcacg

SEQ ID NO: 238374 - RNA, 20 nt, Molluscum contagiosum virus
uucguguucgcggacggcgc

SEQ ID NO: 238375 - RNA, 15 nt, Molluscum contagiosum virus
uugaacucgagcacg

SEQ ID NO: 238376 - RNA, 18 nt, Molluscum contagiosum virus
uugcacgcgcacgcgccc

SEQ ID NO: 238377 - RNA, 16 nt, Molluscum contagiosum virus
uugcacgugcgugccc

SEQ ID NO: 238378 - RNA, 16 nt, Molluscum contagiosum virus
uugccgcgcgcugcuc

SEQ ID NO: 238379 - RNA, 12 nt, Molluscum contagiosum virus
uugcgcgcgccc

SEQ ID NO: 238380 - RNA, 20 nt, Molluscum contagiosum virus
uugcugcugccgcgcggcac

SEQ ID NO: 238381 - RNA, 18 nt, Molluscum contagiosum virus
uuccagcacugcgccaag

SEQ ID NO: 238382 - RNA, 17 nt, Molluscum contagiosum virus
uuccgugcuugacaagu

SEQ ID NO: 238383 - RNA, 21 nt, Molluscum contagiosum virus
uuccuggcacuggcgcgcacg

SEQ ID NO: 238384 - RNA, 19 nt, Molluscum contagiosum virus
uucgagacgcugcgcgacg

SEQ ID NO: 238385 - RNA, 19 nt, Molluscum contagiosum virus
ugucgaggccuucgcgccc

SEQ ID NO: 238386 - RNA, 19 nt, Molluscum contagiosum virus
ugcgccuucugccugcccg

SEQ ID NO: 238387 - RNA, 20 nt, Molluscum contagiosum virus
ugcgcgacuccaucugcgcg

SEQ ID NO: 238388 - RNA, 16 nt, Molluscum contagiosum virus
uguagucgcccccgug

SEQ ID NO: 238389 - RNA, 22 nt, Molluscum contagiosum virus
ugugucgcgagugugcgcgccc

SEQ ID NO: 238390 - RNA, 16 nt, Molluscum contagiosum virus
ugugcgcacgcugacc

SEQ ID NO: 238391 - RNA, 13 nt, Molluscum contagiosum virus
ugugcggacaugc

SEQ ID NO: 238392 - RNA, 14 nt, Molluscum contagiosum virus
ugugcgugcaccuc

SEQ ID NO: 238393 - RNA, 16 nt, Molluscum contagiosum virus
uucccgcggcgugccc

SEQ ID NO: 238394 - RNA, 21 nt, Molluscum contagiosum virus
uuccgacaacucgcgcuggcc

SEQ ID NO: 238395 - RNA, 15 nt, Molluscum contagiosum virus
uuccgagcgcgcacg

SEQ ID NO: 238396 - RNA, 13 nt, Molluscum contagiosum virus
uuccggcaccacg

SEQ ID NO: 238397 - RNA, 23 nt, Molluscum contagiosum virus
uuccggcaccacgugcgcuggcc

SEQ ID NO: 238398 - RNA, 21 nt, Molluscum contagiosum virus
uuccggcgcggccuggccacg

SEQ ID NO: 238399 - RNA, 13 nt, Molluscum contagiosum virus
uuaaucacgauga

SEQ ID NO: 238400 - RNA, 21 nt, Molluscum contagiosum virus
ugccagauugccggcgcgcgc

SEQ ID NO: 238401 - RNA, 18 nt, Molluscum contagiosum virus
ugcccccgagguggccaa

SEQ ID NO: 238402 - RNA, 13 nt, Molluscum contagiosum virus
ugccccgcgcgcc

SEQ ID NO: 238403 - RNA, 17 nt, Molluscum contagiosum virus
ugcaugacggcgcgagc

SEQ ID NO: 238404 - RNA, 15 nt, Molluscum contagiosum virus
ugcaugcggagcugg

SEQ ID NO: 238405 - RNA, 20 nt, Molluscum contagiosum virus
ugcauguuuguucgcgcgcc

SEQ ID NO: 238406 - RNA, 14 nt, Molluscum contagiosum virus
ugccgaggcgcugc

SEQ ID NO: 238407 - RNA, 14 nt, Molluscum contagiosum virus
ugccgcggcacugg

SEQ ID NO: 238408 - RNA, 14 nt, Molluscum contagiosum virus
ugccgcugcgcugg

SEQ ID NO: 238409 - RNA, 16 nt, Molluscum contagiosum virus
ugcccgcgcgcggaca

SEQ ID NO: 238410 - RNA, 22 nt, Molluscum contagiosum virus
ugcaagcacaacgggcucgugc

SEQ ID NO: 238411 - RNA, 14 nt, Molluscum contagiosum virus
ugcaaggcgcgcgc

SEQ ID NO: 238412 - RNA, 14 nt, Molluscum contagiosum virus
ugcacaccggcgcg

SEQ ID NO: 238413 - RNA, 18 nt, Molluscum contagiosum virus
ugcagcacgucuugcgcg

SEQ ID NO: 238414 - RNA, 12 nt, Molluscum contagiosum virus
ugcagcgcccgg

SEQ ID NO: 238415 - RNA, 14 nt, Molluscum contagiosum virus
ugcagcgccgcgcg

SEQ ID NO: 238416 - RNA, 17 nt, Molluscum contagiosum virus
ugcaggauuuccucgcg

SEQ ID NO: 238417 - RNA, 16 nt, Molluscum contagiosum virus
ugcacgcggcgcgugu

SEQ ID NO: 238418 - RNA, 14 nt, Molluscum contagiosum virus
ugcacgcgggcgcc

SEQ ID NO: 238419 - RNA, 15 nt, Molluscum contagiosum virus
ugcacguccugcgag

SEQ ID NO: 238420 - RNA, 15 nt, Molluscum contagiosum virus
ugcacgucgacaagu

SEQ ID NO: 238421 - RNA, 17 nt, Molluscum contagiosum virus
ugcagaaacagccgugc

SEQ ID NO: 238422 - RNA, 14 nt, Molluscum contagiosum virus
ugcagaaccugcgg

SEQ ID NO: 238423 - RNA, 19 nt, Molluscum contagiosum virus
ugccugcaagaggcgcugu

SEQ ID NO: 238424 - RNA, 14 nt, Molluscum contagiosum virus
ugccgucgcccgug

SEQ ID NO: 238425 - RNA, 21 nt, Molluscum contagiosum virus
ugccggcaacgcugccgcugg

SEQ ID NO: 238426 - RNA, 13 nt, Molluscum contagiosum virus
ugccggcgcguga

SEQ ID NO: 238427 - RNA, 19 nt, Molluscum contagiosum virus
ugccggggaugaacgcgcu

SEQ ID NO: 238428 - RNA, 23 nt, Molluscum contagiosum virus
ugccggggaugaacgcgcugcgc

SEQ ID NO: 238429 - RNA, 14 nt, Molluscum contagiosum virus
ugcgcacgugcgcg

SEQ ID NO: 238430 - RNA, 19 nt, Molluscum contagiosum virus
ugcgcccgugcgaggagca

SEQ ID NO: 238431 - RNA, 13 nt, Molluscum contagiosum virus
ugcgccucggacu

SEQ ID NO: 238432 - RNA, 16 nt, Molluscum contagiosum virus
ugccuuggcgcccgug

SEQ ID NO: 238433 - RNA, 19 nt, Molluscum contagiosum virus
ugcgaagacgagcgcgugc

SEQ ID NO: 238434 - RNA, 17 nt, Molluscum contagiosum virus
ugcgagaacucgcgugc

SEQ ID NO: 238435 - RNA, 18 nt, Molluscum contagiosum virus
ugcgcaauaaggcggugg

SEQ ID NO: 238436 - RNA, 17 nt, Molluscum contagiosum virus
ugcgcgagccgcugcac

SEQ ID NO: 238437 - RNA, 20 nt, Molluscum contagiosum virus
ugcgcgagcgcgcgcugcgc

SEQ ID NO: 238438 - RNA, 13 nt, Molluscum contagiosum virus
ugcgcgagucgcg

SEQ ID NO: 238439 - RNA, 21 nt, Molluscum contagiosum virus
ugcgcgcacggcuaggcgcgg

SEQ ID NO: 238440 - RNA, 18 nt, Molluscum contagiosum virus
ugcgcgcgcucauggcgc

SEQ ID NO: 238441 - RNA, 11 nt, Molluscum contagiosum virus
ugcgcgcgugc

SEQ ID NO: 238442 - RNA, 22 nt, Molluscum contagiosum virus
ugcgcggggcaggcagugccgc

SEQ ID NO: 238443 - RNA, 17 nt, Molluscum contagiosum virus
ugcgcgugcgccugccg

SEQ ID NO: 238444 - RNA, 20 nt, Molluscum contagiosum virus
ugcgcguguagcggcgcuug

SEQ ID NO: 238445 - RNA, 18 nt, Molluscum contagiosum virus
ugcgcuacguuccgcgcg

SEQ ID NO: 238446 - RNA, 16 nt, Molluscum contagiosum virus
ugcgcuucgccgcgcg

SEQ ID NO: 238447 - RNA, 21 nt, Molluscum contagiosum virus
ugcggcaaccgcgcccgcgcg

SEQ ID NO: 238448 - RNA, 19 nt, Molluscum contagiosum virus
ugcggcaacugccugcgcu

SEQ ID NO: 238449 - RNA, 19 nt, Molluscum contagiosum virus
ugcggcaggaagcuggcgc

SEQ ID NO: 238450 - RNA, 21 nt, Molluscum contagiosum virus
ugcggcaggaagcuggcgcgg

SEQ ID NO: 238451 - RNA, 13 nt, Molluscum contagiosum virus
ugcggcaggcgcu

SEQ ID NO: 238452 - RNA, 14 nt, Molluscum contagiosum virus
ugcggcaggcgcug

SEQ ID NO: 238453 - RNA, 18 nt, Molluscum contagiosum virus
ugcggcaggcgcugcgcg

SEQ ID NO: 238454 - RNA, 16 nt, Molluscum contagiosum virus
uguagagacgcugccg

SEQ ID NO: 238455 - RNA, 14 nt, Molluscum contagiosum virus
ggugagugcgcgca

SEQ ID NO: 238456 - RNA, 24 nt, Molluscum contagiosum virus
uccagguggccaacggcgccaucg

SEQ ID NO: 238457 - RNA, 21 nt, Molluscum contagiosum virus
uccgaggacgacgccgagccc

SEQ ID NO: 238458 - RNA, 18 nt, Molluscum contagiosum virus
uccgcaauuacgugcgcg

SEQ ID NO: 238459 - RNA, 18 nt, Molluscum contagiosum virus
uccgcgaaguccugggcg

SEQ ID NO: 238460 - RNA, 18 nt, Molluscum contagiosum virus
uccgcgacgaacucgaca

SEQ ID NO: 238461 - RNA, 14 nt, Molluscum contagiosum virus
ucccgucgagcacg

SEQ ID NO: 238462 - RNA, 18 nt, Molluscum contagiosum virus
ucccgcgccacgagcgcc

SEQ ID NO: 238463 - RNA, 20 nt, Molluscum contagiosum virus
ggucgagcgcgccgcgcgcu

SEQ ID NO: 238464 - RNA, 17 nt, Molluscum contagiosum virus
ggucgaguucacggcga

SEQ ID NO: 238465 - RNA, 19 nt, Molluscum contagiosum virus
ggucgccuacgaggugcgc

SEQ ID NO: 238466 - RNA, 17 nt, Molluscum contagiosum virus
ggucgacgacgcgcgca

SEQ ID NO: 238467 - RNA, 15 nt, Molluscum contagiosum virus
ggucgacgagugcgc

SEQ ID NO: 238468 - RNA, 12 nt, Molluscum contagiosum virus
uccaccugcgca

SEQ ID NO: 238469 - RNA, 18 nt, Molluscum contagiosum virus
uccacgacgagccugcgg

SEQ ID NO: 238470 - RNA, 14 nt, Molluscum contagiosum virus
uccacgcgugcgcg

SEQ ID NO: 238471 - RNA, 17 nt, Molluscum contagiosum virus
uccacgcgugcugcgcg

SEQ ID NO: 238472 - RNA, 13 nt, Molluscum contagiosum virus
uccacggacaugg

SEQ ID NO: 238473 - RNA, 19 nt, Molluscum contagiosum virus
uccacggguaccgugcgcg

SEQ ID NO: 238474 - RNA, 20 nt, Molluscum contagiosum virus
uccagccgucgccgcgcccg

SEQ ID NO: 238475 - RNA, 19 nt, Molluscum contagiosum virus
uccagcgcgcucgaggcgc

SEQ ID NO: 238476 - RNA, 13 nt, Molluscum contagiosum virus
gguaacgcgcgcg

SEQ ID NO: 238477 - RNA, 22 nt, Molluscum contagiosum virus
gguacccgcaaccccgcgcgua

SEQ ID NO: 238478 - RNA, 16 nt, Molluscum contagiosum virus
gguaccgugcgcguga

SEQ ID NO: 238479 - RNA, 14 nt, Molluscum contagiosum virus
gguagcgcgccgca

SEQ ID NO: 238480 - RNA, 21 nt, Molluscum contagiosum virus
ggucaacuccgagcgcgcgcg

SEQ ID NO: 238481 - RNA, 23 nt, Molluscum contagiosum virus
ggucacgcgcaaggccgcgccca

SEQ ID NO: 238482 - RNA, 13 nt, Molluscum contagiosum virus
ggucacgcgcaca

SEQ ID NO: 238483 - RNA, 13 nt, Molluscum contagiosum virus
ggguaccgugcgc

SEQ ID NO: 238484 - RNA, 14 nt, Molluscum contagiosum virus
gggcugcgcggcgg

SEQ ID NO: 238485 - RNA, 22 nt, Molluscum contagiosum virus
ggggacgcgacgcgcguggagc

SEQ ID NO: 238486 - RNA, 21 nt, Molluscum contagiosum virus
ggggacucucccgucgccgga

SEQ ID NO: 238487 - RNA, 13 nt, Molluscum contagiosum virus
gggcgcgugcugg

SEQ ID NO: 238488 - RNA, 11 nt, Molluscum contagiosum virus
gggcgccagcu

SEQ ID NO: 238489 - RNA, 23 nt, Molluscum contagiosum virus
gggcguguccgcgggcgcgcgcc

SEQ ID NO: 238490 - RNA, 14 nt, Molluscum contagiosum virus
ggccgcccacgcuc

SEQ ID NO: 238491 - RNA, 13 nt, Molluscum contagiosum virus
ggccggucgcgga

SEQ ID NO: 238492 - RNA, 22 nt, Molluscum contagiosum virus
ggccguagugcucaucgugccc

SEQ ID NO: 238493 - RNA, 18 nt, Molluscum contagiosum virus
ggccgucgggcgccaaca

SEQ ID NO: 238494 - RNA, 13 nt, Molluscum contagiosum virus
ggcgagucgcggg

SEQ ID NO: 238495 - RNA, 14 nt, Molluscum contagiosum virus
ggcgaucugcucgc

SEQ ID NO: 238496 - RNA, 14 nt, Molluscum contagiosum virus
ggcgcacgcgagca

SEQ ID NO: 238497 - RNA, 20 nt, Molluscum contagiosum virus
ggcgcacggccugcggcagg

SEQ ID NO: 238498 - RNA, 16 nt, Molluscum contagiosum virus
ggcgcaggccgcgccc

SEQ ID NO: 238499 - RNA, 23 nt, Molluscum contagiosum virus
ggccuucuaccacagguuucuca

SEQ ID NO: 238500 - RNA, 16 nt, Molluscum contagiosum virus
ggcgccggcgcgcgcg

SEQ ID NO: 238501 - RNA, 19 nt, Molluscum contagiosum virus
ggcgccuucgucgcgcgcu

SEQ ID NO: 238502 - RNA, 20 nt, Molluscum contagiosum virus
ggcgcgagaugcucgccggc

SEQ ID NO: 238503 - RNA, 21 nt, Molluscum contagiosum virus
ggcgcgagaugcucgccggca

SEQ ID NO: 238504 - RNA, 15 nt, Molluscum contagiosum virus
ggcgcgccgcgcgcg

SEQ ID NO: 238505 - RNA, 14 nt, Molluscum contagiosum virus
ggcgcgcgccagca

SEQ ID NO: 238506 - RNA, 19 nt, Molluscum contagiosum virus
ggcgcgcucgcgugcuagg

SEQ ID NO: 238507 - RNA, 19 nt, Molluscum contagiosum virus
ugagguacuccacgcccgg

SEQ ID NO: 238508 - RNA, 13 nt, Molluscum contagiosum virus
ugcaaagcgcggc

SEQ ID NO: 238509 - RNA, 18 nt, Molluscum contagiosum virus
ugacggcgcugcgcgugg

SEQ ID NO: 238510 - RNA, 19 nt, Molluscum contagiosum virus
ugacggcgucucucgaaca

SEQ ID NO: 238511 - RNA, 15 nt, Molluscum contagiosum virus
ugacgguccugcgcg

SEQ ID NO: 238512 - RNA, 14 nt, Molluscum contagiosum virus
ugagcgcgcugcgc

SEQ ID NO: 238513 - RNA, 21 nt, Molluscum contagiosum virus
ugagcucuuuguacacccgug

SEQ ID NO: 238514 - RNA, 12 nt, Molluscum contagiosum virus
ugaaggcgcggc

SEQ ID NO: 238515 - RNA, 23 nt, Molluscum contagiosum virus
ucuugcuggcgcucgcgcgcacg

SEQ ID NO: 238516 - RNA, 14 nt, Molluscum contagiosum virus
ugacgagcgcgugc

SEQ ID NO: 238517 - RNA, 21 nt, Molluscum contagiosum virus
ugacggccggcgggcgcgugc

SEQ ID NO: 238518 - RNA, 14 nt, Molluscum contagiosum virus
ugacgaagcugcgc

SEQ ID NO: 238519 - RNA, 18 nt, Molluscum contagiosum virus
ugacgaagcugcgcuugc

SEQ ID NO: 238520 - RNA, 14 nt, Molluscum contagiosum virus
ucuuuccggcgcgg

SEQ ID NO: 238521 - RNA, 18 nt, Molluscum contagiosum virus
ugaacaccauccugcgcu

SEQ ID NO: 238522 - RNA, 18 nt, Molluscum contagiosum virus
ugaacagcuucacgauga

SEQ ID NO: 238523 - RNA, 14 nt, Molluscum contagiosum virus
ucuuguugcgcaug

SEQ ID NO: 238524 - RNA, 18 nt, Molluscum contagiosum virus
ucuuguugucugcggacg

SEQ ID NO: 238525 - RNA, 15 nt, Molluscum contagiosum virus
ucuuccuggggcugg

SEQ ID NO: 238526 - RNA, 19 nt, Molluscum contagiosum virus
ucugguuccugcgcuccga

SEQ ID NO: 238527 - RNA, 15 nt, Molluscum contagiosum virus
ucugucccgcccgug

SEQ ID NO: 238528 - RNA, 19 nt, Molluscum contagiosum virus
ucuguccgucuugcgcaca

SEQ ID NO: 238529 - RNA, 20 nt, Molluscum contagiosum virus
ucugacacuugcggcgcuag

SEQ ID NO: 238530 - RNA, 14 nt, Molluscum contagiosum virus
ucugcgcgagcagc

SEQ ID NO: 238531 - RNA, 18 nt, Molluscum contagiosum virus
ucugccaccgcggcgcgg

SEQ ID NO: 238532 - RNA, 16 nt, Molluscum contagiosum virus
ucugccgcccgcgccc

SEQ ID NO: 238533 - RNA, 18 nt, Molluscum contagiosum virus
ucucagcggcacugcgcg

SEQ ID NO: 238534 - RNA, 14 nt, Molluscum contagiosum virus
ucuccgcgcugcac

SEQ ID NO: 238535 - RNA, 17 nt, Molluscum contagiosum virus
ucucccgccgcgugccc

SEQ ID NO: 238536 - RNA, 15 nt, Molluscum contagiosum virus
ucuccgaccgugccc

SEQ ID NO: 238537 - RNA, 21 nt, Molluscum contagiosum virus
ucgugcaaagcaucgacgugc

SEQ ID NO: 238538 - RNA, 17 nt, Molluscum contagiosum virus
ucgugcccgcacacgca

SEQ ID NO: 238539 - RNA, 21 nt, Molluscum contagiosum virus
ucgugcucguguguccgcacg

SEQ ID NO: 238540 - RNA, 21 nt, Molluscum contagiosum virus
ucguggcguugcugcugcgcg

SEQ ID NO: 238541 - RNA, 20 nt, Molluscum contagiosum virus
ucgugggauaggcacacacg

SEQ ID NO: 238542 - RNA, 15 nt, Molluscum contagiosum virus
ucgugguugcgcacg

SEQ ID NO: 238543 - RNA, 19 nt, Molluscum contagiosum virus
ucguguguccgcacgcaca

SEQ ID NO: 238544 - RNA, 16 nt, Molluscum contagiosum virus
ucguuggcgcgcccgg

SEQ ID NO: 238545 - RNA, 22 nt, Molluscum contagiosum virus
ucggugccagauugccggcgcg

SEQ ID NO: 238546 - RNA, 22 nt, Molluscum contagiosum virus
ucgucgaucgccucgacgcugg

SEQ ID NO: 238547 - RNA, 16 nt, Molluscum contagiosum virus
ucggugcucaugcgcg

SEQ ID NO: 238548 - RNA, 15 nt, Molluscum contagiosum virus
ucguaguccagcgcg

SEQ ID NO: 238549 - RNA, 15 nt, Molluscum contagiosum virus
ucgucaaugcgcacg

SEQ ID NO: 238550 - RNA, 17 nt, Molluscum contagiosum virus
ucgucacggccuucgcg

SEQ ID NO: 238551 - RNA, 15 nt, Molluscum contagiosum virus
ucgggccccugcgcg

SEQ ID NO: 238552 - RNA, 15 nt, Molluscum contagiosum virus
ucggggcugacggcc

SEQ ID NO: 238553 - RNA, 12 nt, Molluscum contagiosum virus
uccgggcgcugc

SEQ ID NO: 238554 - RNA, 17 nt, Molluscum contagiosum virus
ucgaacgcgcgugcgcg

SEQ ID NO: 238555 - RNA, 22 nt, Molluscum contagiosum virus
ucgaagacgucggggcgcgugc

SEQ ID NO: 238556 - RNA, 19 nt, Molluscum contagiosum virus
ucgaaggcgugcgccgugc

SEQ ID NO: 238557 - RNA, 18 nt, Molluscum contagiosum virus
ucgaccaaaugcgcgugc

SEQ ID NO: 238558 - RNA, 18 nt, Molluscum contagiosum virus
uccugcauuucaugcgcg

SEQ ID NO: 238559 - RNA, 13 nt, Molluscum contagiosum virus
uccugcggcgcug

SEQ ID NO: 238560 - RNA, 22 nt, Molluscum contagiosum virus
ucgaaaaggcugauccugcgcg

SEQ ID NO: 238561 - RNA, 19 nt, Molluscum contagiosum virus
ucgagaccacgcgcgcugc

SEQ ID NO: 238562 - RNA, 20 nt, Molluscum contagiosum virus
ucgacggcuucauccgcgcg

SEQ ID NO: 238563 - RNA, 12 nt, Molluscum contagiosum virus
ucgacguggacc

SEQ ID NO: 238564 - RNA, 15 nt, Molluscum contagiosum virus
ucggcggcaugcgcg

SEQ ID NO: 238565 - RNA, 17 nt, Molluscum contagiosum virus
ucggcggcugugcccgc

SEQ ID NO: 238566 - RNA, 22 nt, Molluscum contagiosum virus
ucggcgcuacgcacuucacggc

SEQ ID NO: 238567 - RNA, 18 nt, Molluscum contagiosum virus
gcuagcaggcgucgcgca

SEQ ID NO: 238568 - RNA, 17 nt, Molluscum contagiosum virus
gcuagcucuggcagccc

SEQ ID NO: 238569 - RNA, 19 nt, Molluscum contagiosum virus
gcuaggguccaccugcgac

SEQ ID NO: 238570 - RNA, 14 nt, Molluscum contagiosum virus
gcucaagaucucgc

SEQ ID NO: 238571 - RNA, 18 nt, Molluscum contagiosum virus
gcucauggacaugcucga

SEQ ID NO: 238572 - RNA, 19 nt, Molluscum contagiosum virus
gcuccagcauggcgccaca

SEQ ID NO: 238573 - RNA, 14 nt, Molluscum contagiosum virus
gcuccccgccagca

SEQ ID NO: 238574 - RNA, 22 nt, Molluscum contagiosum virus
gcuccuauaaauggccgcgccc

SEQ ID NO: 238575 - RNA, 17 nt, Molluscum contagiosum virus
gcuccucgcacgggcgc

SEQ ID NO: 238576 - RNA, 12 nt, Molluscum contagiosum virus
gcucgagaacga

SEQ ID NO: 238577 - RNA, 15 nt, Molluscum contagiosum virus
gcucgagcgcgcgcc

SEQ ID NO: 238578 - RNA, 19 nt, Molluscum contagiosum virus
gcucgcacuugccgggcga

SEQ ID NO: 238579 - RNA, 22 nt, Molluscum contagiosum virus
gcucgcagccuccgugcgccag

SEQ ID NO: 238580 - RNA, 19 nt, Molluscum contagiosum virus
gcucgcaggcggugggcgc

SEQ ID NO: 238581 - RNA, 17 nt, Molluscum contagiosum virus
gcguucuccaggaacgc

SEQ ID NO: 238582 - RNA, 16 nt, Molluscum contagiosum virus
gcguucuucguggcgc

SEQ ID NO: 238583 - RNA, 19 nt, Molluscum contagiosum virus
gcguguuccggcagcgccg

SEQ ID NO: 238584 - RNA, 15 nt, Molluscum contagiosum virus
gcguuccaggaacgc

SEQ ID NO: 238585 - RNA, 17 nt, Molluscum contagiosum virus
gcgugguguucgccggc

SEQ ID NO: 238586 - RNA, 22 nt, Molluscum contagiosum virus
gcguguacucgaaggugcucag

SEQ ID NO: 238587 - RNA, 15 nt, Molluscum contagiosum virus
gcuaccugcgcaagc

SEQ ID NO: 238588 - RNA, 19 nt, Molluscum contagiosum virus
gcuaccugguggagcacuu

SEQ ID NO: 238589 - RNA, 15 nt, Molluscum contagiosum virus
gcuacgcgagcacug

SEQ ID NO: 238590 - RNA, 18 nt, Molluscum contagiosum virus
gcuacugcaacguggcgc

SEQ ID NO: 238591 - RNA, 16 nt, Molluscum contagiosum virus
gcuaccagcucgcgca

SEQ ID NO: 238592 - RNA, 15 nt, Molluscum contagiosum virus
gcgugcaguuucucc

SEQ ID NO: 238593 - RNA, 15 nt, Molluscum contagiosum virus
gcgugccgcggacgc

SEQ ID NO: 238594 - RNA, 15 nt, Molluscum contagiosum virus
gcgugccuguggcgc

SEQ ID NO: 238595 - RNA, 22 nt, Molluscum contagiosum virus
gcgugcgcgccaggugcgaagg

SEQ ID NO: 238596 - RNA, 13 nt, Molluscum contagiosum virus
gcgucgugugcgc

SEQ ID NO: 238597 - RNA, 23 nt, Molluscum contagiosum virus
gcgugacaaucucugcgccgcgc

SEQ ID NO: 238598 - RNA, 20 nt, Molluscum contagiosum virus
gcgugacucggccgcggggc

SEQ ID NO: 238599 - RNA, 19 nt, Molluscum contagiosum virus
gcgugcuuguagcgcaagg

SEQ ID NO: 238600 - RNA, 22 nt, Molluscum contagiosum virus
gcguggacagcaucccugccac

SEQ ID NO: 238601 - RNA, 14 nt, Molluscum contagiosum virus
gcgugcucacgccc

SEQ ID NO: 238602 - RNA, 21 nt, Molluscum contagiosum virus
gcgugcucgguagcguggagc

SEQ ID NO: 238603 - RNA, 16 nt, Molluscum contagiosum virus
gcgugcugcgcggcgc

SEQ ID NO: 238604 - RNA, 17 nt, Molluscum contagiosum virus
gcgucguagacgcgccc

SEQ ID NO: 238605 - RNA, 12 nt, Molluscum contagiosum virus
gcgucgcgcagg

SEQ ID NO: 238606 - RNA, 17 nt, Molluscum contagiosum virus
gcgucgcgcaggcgccc

SEQ ID NO: 238607 - RNA, 19 nt, Molluscum contagiosum virus
gcgucgcgcgccgcgcugg

SEQ ID NO: 238608 - RNA, 20 nt, Molluscum contagiosum virus
gcgucgcggagcgcgcacgg

SEQ ID NO: 238609 - RNA, 14 nt, Molluscum contagiosum virus
gcguccggcgcucg

SEQ ID NO: 238610 - RNA, 14 nt, Molluscum contagiosum virus
gcguccggcgcuug

SEQ ID NO: 238611 - RNA, 21 nt, Molluscum contagiosum virus
gcgucaagaucaaccgcaagg

SEQ ID NO: 238612 - RNA, 16 nt, Molluscum contagiosum virus
gcgucgagggcgccgg

SEQ ID NO: 238613 - RNA, 19 nt, Molluscum contagiosum virus
gcguacgugcacguggcgc

SEQ ID NO: 238614 - RNA, 21 nt, Molluscum contagiosum virus
gcguacucaacgcgauggcgc

SEQ ID NO: 238615 - RNA, 16 nt, Molluscum contagiosum virus
gcguacuccguggugc

SEQ ID NO: 238616 - RNA, 21 nt, Molluscum contagiosum virus
gcguagagcaauacguggcgc

SEQ ID NO: 238617 - RNA, 15 nt, Molluscum contagiosum virus
gcguagcaugcucgu

SEQ ID NO: 238618 - RNA, 18 nt, Molluscum contagiosum virus
gcguagcuagcucugcgc

SEQ ID NO: 238619 - RNA, 22 nt, Molluscum contagiosum virus
gcgguguaugcucgucgccggg

SEQ ID NO: 238620 - RNA, 19 nt, Molluscum contagiosum virus
gcguaccaagccgugacgc

SEQ ID NO: 238621 - RNA, 18 nt, Molluscum contagiosum virus
gcguacgcgccggggcgc

SEQ ID NO: 238622 - RNA, 14 nt, Molluscum contagiosum virus
gcguacgcgugcgc

SEQ ID NO: 238623 - RNA, 20 nt, Molluscum contagiosum virus
gcguacgcgugcgcuggcgc

SEQ ID NO: 238624 - RNA, 20 nt, Molluscum contagiosum virus
gcguacacauggccgcgcgc

SEQ ID NO: 238625 - RNA, 20 nt, Molluscum contagiosum virus
gcguacagcgcgcgugccgc

SEQ ID NO: 238626 - RNA, 21 nt, Molluscum contagiosum virus
gcguacaucccgcacgugggc

SEQ ID NO: 238627 - RNA, 18 nt, Molluscum contagiosum virus
gcgggugccgccgugggc

SEQ ID NO: 238628 - RNA, 17 nt, Molluscum contagiosum virus
gcggucaggccgggcgc

SEQ ID NO: 238629 - RNA, 19 nt, Molluscum contagiosum virus
gcggucaggccgggcgcgg

SEQ ID NO: 238630 - RNA, 21 nt, Molluscum contagiosum virus
gcgguccgacucggugcucau

SEQ ID NO: 238631 - RNA, 14 nt, Molluscum contagiosum virus
gcgguggcaggcgc

SEQ ID NO: 238632 - RNA, 20 nt, Molluscum contagiosum virus
gcgguggccgcgccgggcgc

SEQ ID NO: 238633 - RNA, 20 nt, Molluscum contagiosum virus
gcgguccuguccgcggacgc

SEQ ID NO: 238634 - RNA, 24 nt, Molluscum contagiosum virus
gcggucuuggcaugcgugcuucac

SEQ ID NO: 238635 - RNA, 13 nt, Molluscum contagiosum virus
gcggugcagcgcc

SEQ ID NO: 238636 - RNA, 14 nt, Molluscum contagiosum virus
gcggugcagcgccc

SEQ ID NO: 238637 - RNA, 15 nt, Molluscum contagiosum virus
gcgggcgccgggcgc

SEQ ID NO: 238638 - RNA, 12 nt, Molluscum contagiosum virus
gcgggcgcgcac

SEQ ID NO: 238639 - RNA, 22 nt, Molluscum contagiosum virus
gcgggccaguacuacucggcgc

SEQ ID NO: 238640 - RNA, 16 nt, Molluscum contagiosum virus
gcgggcaagcagggcc

SEQ ID NO: 238641 - RNA, 21 nt, Molluscum contagiosum virus
gcggggcucguccucgggcgc

SEQ ID NO: 238642 - RNA, 14 nt, Molluscum contagiosum virus
gcgggcggcggccc

SEQ ID NO: 238643 - RNA, 16 nt, Molluscum contagiosum virus
gcgggcggcgucgcgc

SEQ ID NO: 238644 - RNA, 20 nt, Molluscum contagiosum virus
gcgggcguguccgcgggcgc

SEQ ID NO: 238645 - RNA, 19 nt, Molluscum contagiosum virus
gcgggcucuuccaccggca

SEQ ID NO: 238646 - RNA, 19 nt, Molluscum contagiosum virus
gcggcugugcccgcggcgu

SEQ ID NO: 238647 - RNA, 22 nt, Molluscum contagiosum virus
gcgggaccugguucaugcuggc

SEQ ID NO: 238648 - RNA, 21 nt, Molluscum contagiosum virus
gcggcuuuaacguuagcacua

SEQ ID NO: 238649 - RNA, 17 nt, Molluscum contagiosum virus
gcggcuuucucacgccc

SEQ ID NO: 238650 - RNA, 20 nt, Molluscum contagiosum virus
gcgggaagaggacgccggca

SEQ ID NO: 238651 - RNA, 13 nt, Molluscum contagiosum virus
gcgggccugcgcc

SEQ ID NO: 238652 - RNA, 14 nt, Molluscum contagiosum virus
gcgggccugcgccc

SEQ ID NO: 238653 - RNA, 17 nt, Molluscum contagiosum virus
gcgggccugcgcccgca

SEQ ID NO: 238654 - RNA, 19 nt, Molluscum contagiosum virus
gcgggccuguaccugcgac

SEQ ID NO: 238655 - RNA, 18 nt, Molluscum contagiosum virus
gcgggccuguccgcgggc

SEQ ID NO: 238656 - RNA, 20 nt, Molluscum contagiosum virus
gcgggccuguccgcgggcgc

SEQ ID NO: 238657 - RNA, 19 nt, Molluscum contagiosum virus
gcgggcgaaagcgccgcgc

SEQ ID NO: 238658 - RNA, 13 nt, Molluscum contagiosum virus
gcgggcgcaggcc

SEQ ID NO: 238659 - RNA, 14 nt, Molluscum contagiosum virus
gcgggcgcaggccc

SEQ ID NO: 238660 - RNA, 21 nt, Molluscum contagiosum virus
ggcaucgucucgcucuuccgc

SEQ ID NO: 238661 - RNA, 17 nt, Molluscum contagiosum virus
ggcaucgugcucuucgc

SEQ ID NO: 238662 - RNA, 17 nt, Molluscum contagiosum virus
ggccacgcucgcgcgca

SEQ ID NO: 238663 - RNA, 14 nt, Molluscum contagiosum virus
ggacacucgcggca

SEQ ID NO: 238664 - RNA, 19 nt, Molluscum contagiosum virus
ggacagagcccgcggcgca

SEQ ID NO: 238665 - RNA, 13 nt, Molluscum contagiosum virus
ggcaggucgcggu

SEQ ID NO: 238666 - RNA, 16 nt, Molluscum contagiosum virus
ggcaguacgcgcgugg

SEQ ID NO: 238667 - RNA, 21 nt, Molluscum contagiosum virus
ggcauaccugugccagcgccu

SEQ ID NO: 238668 - RNA, 17 nt, Molluscum contagiosum virus
ggcccaccgcgccagcg

SEQ ID NO: 238669 - RNA, 23 nt, Molluscum contagiosum virus
ggcccaccuucuugucgcgcgcc

SEQ ID NO: 238670 - RNA, 16 nt, Molluscum contagiosum virus
ggcccgcgcgugaagg

SEQ ID NO: 238671 - RNA, 20 nt, Molluscum contagiosum virus
ggcccgugcucaggccagca

SEQ ID NO: 238672 - RNA, 19 nt, Molluscum contagiosum virus
gcuugcucccucgcgcgca

SEQ ID NO: 238673 - RNA, 15 nt, Molluscum contagiosum virus
gcuuggccggaacgc

SEQ ID NO: 238674 - RNA, 16 nt, Molluscum contagiosum virus
gcuuugucgcgaacgc

SEQ ID NO: 238675 - RNA, 21 nt, Molluscum contagiosum virus
ggaaaacgcccgagcgcgugu

SEQ ID NO: 238676 - RNA, 22 nt, Molluscum contagiosum virus
ggaaaauccgcgcccgcgcggc

SEQ ID NO: 238677 - RNA, 22 nt, Molluscum contagiosum virus
ggaaaccucaccucugcgcggc

SEQ ID NO: 238678 - RNA, 19 nt, Molluscum contagiosum virus
ggaacaccacacgcgcggc

SEQ ID NO: 238679 - RNA, 24 nt, Molluscum contagiosum virus
ggaacaucugcaacucgcgcugca

SEQ ID NO: 238680 - RNA, 16 nt, Molluscum contagiosum virus
gcuucauccgcgcgcu

SEQ ID NO: 238681 - RNA, 15 nt, Molluscum contagiosum virus
gcuucccgaguacua

SEQ ID NO: 238682 - RNA, 23 nt, Molluscum contagiosum virus
gcuuccggcaccacgugcgcugg

SEQ ID NO: 238683 - RNA, 18 nt, Molluscum contagiosum virus
ggaagugcgagccgugac

SEQ ID NO: 238684 - RNA, 17 nt, Molluscum contagiosum virus
ggacaaagucgcgcgcg

SEQ ID NO: 238685 - RNA, 15 nt, Molluscum contagiosum virus
ggaagcugcacgugc

SEQ ID NO: 238686 - RNA, 14 nt, Molluscum contagiosum virus
ggaacucgcgcgcg

SEQ ID NO: 238687 - RNA, 21 nt, Molluscum contagiosum virus
ggaacucuacgacaugcucgc

SEQ ID NO: 238688 - RNA, 19 nt, Molluscum contagiosum virus
ggaagagcguccgcggugc

SEQ ID NO: 238689 - RNA, 19 nt, Molluscum contagiosum virus
ggacgagagggcgcgcguc

SEQ ID NO: 238690 - RNA, 12 nt, Molluscum contagiosum virus
ggacgcgcaagu

SEQ ID NO: 238691 - RNA, 13 nt, Molluscum contagiosum virus
ggacgcgcggagc

SEQ ID NO: 238692 - RNA, 21 nt, Molluscum contagiosum virus
ggacgcggaauuggcgucagg

SEQ ID NO: 238693 - RNA, 20 nt, Molluscum contagiosum virus
ggacggcgcgcagcgcguga

SEQ ID NO: 238694 - RNA, 16 nt, Molluscum contagiosum virus
ggcagcuucugcucgc

SEQ ID NO: 238695 - RNA, 19 nt, Molluscum contagiosum virus
ggcagcuucugcucgcgca

SEQ ID NO: 238696 - RNA, 23 nt, Molluscum contagiosum virus
ggcaggcagugccgccgcgcgcg

SEQ ID NO: 238697 - RNA, 16 nt, Molluscum contagiosum virus
gcugccgucgcgcgcu

SEQ ID NO: 238698 - RNA, 14 nt, Molluscum contagiosum virus
gcugcccgcgcgcg

SEQ ID NO: 238699 - RNA, 20 nt, Molluscum contagiosum virus
gcugcccuuuagcguggcgc

SEQ ID NO: 238700 - RNA, 15 nt, Molluscum contagiosum virus
gcugccgcgcgcgcc

SEQ ID NO: 238701 - RNA, 16 nt, Molluscum contagiosum virus
gcugccgcugcgcgac

SEQ ID NO: 238702 - RNA, 23 nt, Molluscum contagiosum virus
gcugcaagccagcccgcugcgca

SEQ ID NO: 238703 - RNA, 19 nt, Molluscum contagiosum virus
gcugcaaggcgcgcgcugg

SEQ ID NO: 238704 - RNA, 19 nt, Molluscum contagiosum virus
gcugcacacaccgcgagca

SEQ ID NO: 238705 - RNA, 18 nt, Molluscum contagiosum virus
gcugcacgugcagcggcg

SEQ ID NO: 238706 - RNA, 21 nt, Molluscum contagiosum virus
gcugcacuacaaccauggcgc

SEQ ID NO: 238707 - RNA, 17 nt, Molluscum contagiosum virus
gcugaccgagcgugggc

SEQ ID NO: 238708 - RNA, 19 nt, Molluscum contagiosum virus
gcugacggccggcgggcgc

SEQ ID NO: 238709 - RNA, 20 nt, Molluscum contagiosum virus
gcucugucccgcaagccaca

SEQ ID NO: 238710 - RNA, 17 nt, Molluscum contagiosum virus
gcucgggaagcacguag

SEQ ID NO: 238711 - RNA, 20 nt, Molluscum contagiosum virus
gcucgugcucucugcgcagg

SEQ ID NO: 238712 - RNA, 20 nt, Molluscum contagiosum virus
gcucgugguugcgcacguug

SEQ ID NO: 238713 - RNA, 14 nt, Molluscum contagiosum virus
gcucucgagcacuu

SEQ ID NO: 238714 - RNA, 23 nt, Molluscum contagiosum virus
gcucucggccauggaggcgcuag

SEQ ID NO: 238715 - RNA, 14 nt, Molluscum contagiosum virus
gcucuacgccagcg

SEQ ID NO: 238716 - RNA, 23 nt, Molluscum contagiosum virus
gcucgcuugccggcggcgcaagc

SEQ ID NO: 238717 - RNA, 14 nt, Molluscum contagiosum virus
gcucgccgcgcgcc

SEQ ID NO: 238718 - RNA, 13 nt, Molluscum contagiosum virus
gcucgcgcgcaag

SEQ ID NO: 238719 - RNA, 17 nt, Molluscum contagiosum virus
gcucccgucgagcacga

SEQ ID NO: 238720 - RNA, 22 nt, Molluscum contagiosum virus
gcuggaccccgagcugcggcgc

SEQ ID NO: 238721 - RNA, 22 nt, Molluscum contagiosum virus
gcuggacgggcacgagcacguc

SEQ ID NO: 238722 - RNA, 17 nt, Molluscum contagiosum virus
gcuggcgcucggcgugg

SEQ ID NO: 238723 - RNA, 20 nt, Molluscum contagiosum virus
gcuggcgcucggcguggugc

SEQ ID NO: 238724 - RNA, 15 nt, Molluscum contagiosum virus
gcuggcgagcacguc

SEQ ID NO: 238725 - RNA, 14 nt, Molluscum contagiosum virus
gcuguucgcggcgc

SEQ ID NO: 238726 - RNA, 20 nt, Molluscum contagiosum virus
gcuguucaacaucguggcgc

SEQ ID NO: 238727 - RNA, 14 nt, Molluscum contagiosum virus
gcugggcguggcgc

SEQ ID NO: 238728 - RNA, 15 nt, Molluscum contagiosum virus
gcugcugcgcgcgcu

SEQ ID NO: 238729 - RNA, 14 nt, Molluscum contagiosum virus
gcugcugcucgcac

SEQ ID NO: 238730 - RNA, 19 nt, Molluscum contagiosum virus
gcugcuguuucugugucac

SEQ ID NO: 238731 - RNA, 16 nt, Molluscum contagiosum virus
gcugcgccacugccac

SEQ ID NO: 238732 - RNA, 18 nt, Molluscum contagiosum virus
gcugcgcgagcgcgcgcu

SEQ ID NO: 238733 - RNA, 22 nt, Molluscum contagiosum virus
gcugcgcggcgccgcagcacgc

SEQ ID NO: 238734 - RNA, 19 nt, Molluscum contagiosum virus
gcugcgcucggcgcgcgcc

SEQ ID NO: 238735 - RNA, 20 nt, Molluscum contagiosum virus
gcugcgcuucgccgcgcgcg

SEQ ID NO: 238736 - RNA, 13 nt, Molluscum contagiosum virus
gcugcggcgcucg

SEQ ID NO: 238737 - RNA, 13 nt, Molluscum contagiosum virus
gcuggacgugggc

SEQ ID NO: 238738 - RNA, 21 nt, Molluscum contagiosum virus
gcuggacuuccugcugcgcag

SEQ ID NO: 238739 - RNA, 13 nt, Molluscum contagiosum virus
gcuggagcacgac

SEQ ID NO: 238740 - RNA, 12 nt, Molluscum contagiosum virus
gcuggagcagac

SEQ ID NO: 238741 - RNA, 22 nt, Molluscum contagiosum virus
gcuggagcgagugcgcgugcgc

SEQ ID NO: 238742 - RNA, 15 nt, Molluscum contagiosum virus
gcuggcaccgggcgc

SEQ ID NO: 238743 - RNA, 23 nt, Molluscum contagiosum virus
gcuggcacggccggcgccgcgca

SEQ ID NO: 238744 - RNA, 13 nt, Molluscum contagiosum virus
gcacacgcgcgcg

SEQ ID NO: 238745 - RNA, 23 nt, Molluscum contagiosum virus
gcacacugcagcacgucuugcgc

SEQ ID NO: 238746 - RNA, 23 nt, Molluscum contagiosum virus
gcaaacgcuguuuucacgcaagg

SEQ ID NO: 238747 - RNA, 20 nt, Molluscum contagiosum virus
gcaacgagcagcccgugcgc

SEQ ID NO: 238748 - RNA, 22 nt, Molluscum contagiosum virus
gcaacgcaaacgcacgcgcgcg

SEQ ID NO: 238749 - RNA, 16 nt, Molluscum contagiosum virus
gcaacggcggcgcaag

SEQ ID NO: 238750 - RNA, 12 nt, Molluscum contagiosum virus
gcaacguggcgc

SEQ ID NO: 238751 - RNA, 18 nt, Molluscum contagiosum virus
gcaacguugugcgcaacg

SEQ ID NO: 238752 - RNA, 21 nt, Molluscum contagiosum virus
gcaagaccaucaucgcgcugc

SEQ ID NO: 238753 - RNA, 16 nt, Molluscum contagiosum virus
gcaagcagcgcgcgca

SEQ ID NO: 238754 - RNA, 20 nt, Molluscum contagiosum virus
gcaagcgcguucgcgcgugc

SEQ ID NO: 238755 - RNA, 22 nt, Molluscum contagiosum virus
gcaagcgggcuucgccgccgga

SEQ ID NO: 238756 - RNA, 16 nt, Molluscum contagiosum virus
gcaagcuucgggccgc

SEQ ID NO: 238757 - RNA, 17 nt, Molluscum contagiosum virus
gcaagcuuugugcucgc

SEQ ID NO: 238758 - RNA, 15 nt, Molluscum contagiosum virus
gcaauagcgcccgua

SEQ ID NO: 238759 - RNA, 13 nt, Molluscum contagiosum virus
gcaccugcaggaa

SEQ ID NO: 238760 - RNA, 18 nt, Molluscum contagiosum virus
gcacgaccacgcuggcac

SEQ ID NO: 238761 - RNA, 21 nt, Molluscum contagiosum virus
gcacgaccucacagcgccgga

SEQ ID NO: 238762 - RNA, 18 nt, Molluscum contagiosum virus
gcacgcuagcgagcgccc

SEQ ID NO: 238763 - RNA, 19 nt, Molluscum contagiosum virus
gcacggacccgggcgcggc

SEQ ID NO: 238764 - RNA, 22 nt, Molluscum contagiosum virus
gcacggcacgugcguacgcggc

SEQ ID NO: 238765 - RNA, 17 nt, Molluscum contagiosum virus
gcacggcuaggcgcggc

SEQ ID NO: 238766 - RNA, 20 nt, Molluscum contagiosum virus
gcacgggcucgaucugcgcc

SEQ ID NO: 238767 - RNA, 12 nt, Molluscum contagiosum virus
gcaccgcggcga

SEQ ID NO: 238768 - RNA, 14 nt, Molluscum contagiosum virus
gcaccgcguggcgc

SEQ ID NO: 238769 - RNA, 20 nt, Molluscum contagiosum virus
gcacagccccugcugcucgc

SEQ ID NO: 238770 - RNA, 17 nt, Molluscum contagiosum virus
gcacaguccagcccgcg

SEQ ID NO: 238771 - RNA, 14 nt, Molluscum contagiosum virus
gcaccccgcaggaa

SEQ ID NO: 238772 - RNA, 13 nt, Molluscum contagiosum virus
gcacccgcaggaa

SEQ ID NO: 238773 - RNA, 16 nt, Molluscum contagiosum virus
gcaccgccgacaacgc

SEQ ID NO: 238774 - RNA, 22 nt, Molluscum contagiosum virus
gcaccgccuggugcugcgcgac

SEQ ID NO: 238775 - RNA, 15 nt, Molluscum contagiosum virus
gccgacagcgcgcgc

SEQ ID NO: 238776 - RNA, 20 nt, Molluscum contagiosum virus
gccgacuuccgacgggccgc

SEQ ID NO: 238777 - RNA, 22 nt, Molluscum contagiosum virus
gccgacgccuuccugcuggcgc

SEQ ID NO: 238778 - RNA, 13 nt, Molluscum contagiosum virus
gcccgcugcgcau

SEQ ID NO: 238779 - RNA, 18 nt, Molluscum contagiosum virus
gcccuggagcgcaguccc

SEQ ID NO: 238780 - RNA, 14 nt, Molluscum contagiosum virus
gcccuucuugacgc

SEQ ID NO: 238781 - RNA, 15 nt, Molluscum contagiosum virus
gccgaaucgucggca

SEQ ID NO: 238782 - RNA, 14 nt, Molluscum contagiosum virus
gcacuggcgcgcac

SEQ ID NO: 238783 - RNA, 14 nt, Molluscum contagiosum virus
gcacggugugcuac

SEQ ID NO: 238784 - RNA, 15 nt, Molluscum contagiosum virus
gcacgcacguggcgc

SEQ ID NO: 238785 - RNA, 16 nt, Molluscum contagiosum virus
gcacgcgcacgcgcac

SEQ ID NO: 238786 - RNA, 19 nt, Molluscum contagiosum virus
gcacgugccccgcgcgugc

SEQ ID NO: 238787 - RNA, 19 nt, Molluscum contagiosum virus
gcacguggaaucacggcca

SEQ ID NO: 238788 - RNA, 21 nt, Molluscum contagiosum virus
gcacguuguucuugcgcgugg

SEQ ID NO: 238789 - RNA, 15 nt, Molluscum contagiosum virus
gcgagcucgucgcgc

SEQ ID NO: 238790 - RNA, 15 nt, Molluscum contagiosum virus
gcgagcugcgggcgc

SEQ ID NO: 238791 - RNA, 12 nt, Molluscum contagiosum virus
gcgaggccaagg

SEQ ID NO: 238792 - RNA, 13 nt, Molluscum contagiosum virus
gcgaggcgcgcac

SEQ ID NO: 238793 - RNA, 22 nt, Molluscum contagiosum virus
gcgagucgcccguguucgcgga

SEQ ID NO: 238794 - RNA, 15 nt, Molluscum contagiosum virus
gcgagucgcgggcgc

SEQ ID NO: 238795 - RNA, 18 nt, Molluscum contagiosum virus
gcgagucucccguggcgc

SEQ ID NO: 238796 - RNA, 20 nt, Molluscum contagiosum virus
gcgcaacauguccgcaagca

SEQ ID NO: 238797 - RNA, 15 nt, Molluscum contagiosum virus
gcgcaaccagcuggc

SEQ ID NO: 238798 - RNA, 13 nt, Molluscum contagiosum virus
gcgcaacgcgggc

SEQ ID NO: 238799 - RNA, 21 nt, Molluscum contagiosum virus
gcgcaacgucuuccgcgcgcu

SEQ ID NO: 238800 - RNA, 19 nt, Molluscum contagiosum virus
gcgcaagcauggucuucgc

SEQ ID NO: 238801 - RNA, 19 nt, Molluscum contagiosum virus
gcgcaaggacaccgcgggc

SEQ ID NO: 238802 - RNA, 23 nt, Molluscum contagiosum virus
gcgcaagugggcgucgaccugga

SEQ ID NO: 238803 - RNA, 12 nt, Molluscum contagiosum virus
gcgcaagugugc

SEQ ID NO: 238804 - RNA, 20 nt, Molluscum contagiosum virus
gcgagaccgcuagagugcgc

SEQ ID NO: 238805 - RNA, 15 nt, Molluscum contagiosum virus
gcgagacgggcacgc

SEQ ID NO: 238806 - RNA, 14 nt, Molluscum contagiosum virus
gcgagcacgggcgc

SEQ ID NO: 238807 - RNA, 22 nt, Molluscum contagiosum virus
gcgagcacugcgcgcgcggcgc

SEQ ID NO: 238808 - RNA, 19 nt, Molluscum contagiosum virus
gcgagcccggaucagcccc

SEQ ID NO: 238809 - RNA, 20 nt, Molluscum contagiosum virus
gcgagcggcuuuucgccgga

SEQ ID NO: 238810 - RNA, 18 nt, Molluscum contagiosum virus
gcgagcguuucugccgga

SEQ ID NO: 238811 - RNA, 16 nt, Molluscum contagiosum virus
gcgagcuagugcacac

SEQ ID NO: 238812 - RNA, 23 nt, Molluscum contagiosum virus
gccggcaacgcugccgcuggcgc

SEQ ID NO: 238813 - RNA, 20 nt, Molluscum contagiosum virus
gccggcacccgugcgcgcgc

SEQ ID NO: 238814 - RNA, 14 nt, Molluscum contagiosum virus
gccggccgccggcg

SEQ ID NO: 238815 - RNA, 15 nt, Molluscum contagiosum virus
gccggccgccggcgc

SEQ ID NO: 238816 - RNA, 22 nt, Molluscum contagiosum virus
gccggcgcgcgcgcgcaggcuc

SEQ ID NO: 238817 - RNA, 13 nt, Molluscum contagiosum virus
gccggcgcggcga

SEQ ID NO: 238818 - RNA, 16 nt, Molluscum contagiosum virus
gccggcgcgugagcgc

SEQ ID NO: 238819 - RNA, 19 nt, Molluscum contagiosum virus
gccggcguccgcggcacgc

SEQ ID NO: 238820 - RNA, 17 nt, Molluscum contagiosum virus
gccggcguucgcggagc

SEQ ID NO: 238821 - RNA, 14 nt, Molluscum contagiosum virus
gcgacggcaggccc

SEQ ID NO: 238822 - RNA, 16 nt, Molluscum contagiosum virus
gcgacuccaucugcgc

SEQ ID NO: 238823 - RNA, 21 nt, Molluscum contagiosum virus
gcgacuccaucugcgcgacgc

SEQ ID NO: 238824 - RNA, 21 nt, Molluscum contagiosum virus
gcgacuccuuugcgagcacug

SEQ ID NO: 238825 - RNA, 17 nt, Molluscum contagiosum virus
gccgagcgccgccagcu

SEQ ID NO: 238826 - RNA, 21 nt, Molluscum contagiosum virus
gccgcacgcugcugcgugcgc

SEQ ID NO: 238827 - RNA, 14 nt, Molluscum contagiosum virus
gccgcacggcgccc

SEQ ID NO: 238828 - RNA, 16 nt, Molluscum contagiosum virus
gccgcaggcgcgcgcc

SEQ ID NO: 238829 - RNA, 17 nt, Molluscum contagiosum virus
gccgcagugcucgcaca

SEQ ID NO: 238830 - RNA, 13 nt, Molluscum contagiosum virus
gccgccgcaggcc

SEQ ID NO: 238831 - RNA, 14 nt, Molluscum contagiosum virus
gccgccgcaggccc

SEQ ID NO: 238832 - RNA, 16 nt, Molluscum contagiosum virus
gccgcugcccgcgcac

SEQ ID NO: 238833 - RNA, 18 nt, Molluscum contagiosum virus
gccgcugcgcuugcucac

SEQ ID NO: 238834 - RNA, 15 nt, Molluscum contagiosum virus
gccgcuucuugacgc

SEQ ID NO: 238835 - RNA, 16 nt, Molluscum contagiosum virus
gccggaacucgcgcgc

SEQ ID NO: 238836 - RNA, 20 nt, Molluscum contagiosum virus
gccggaccagauccgggcgc

SEQ ID NO: 238837 - RNA, 15 nt, Molluscum contagiosum virus
gccgccucgcgcgca

SEQ ID NO: 238838 - RNA, 21 nt, Molluscum contagiosum virus
gccgcgaaagcgucgugcucc

SEQ ID NO: 238839 - RNA, 21 nt, Molluscum contagiosum virus
gccgccggggcccaugcucac

SEQ ID NO: 238840 - RNA, 19 nt, Molluscum contagiosum virus
gccgcgagacgcagacgac

SEQ ID NO: 238841 - RNA, 18 nt, Molluscum contagiosum virus
gccgcgcccgcggcgcac

SEQ ID NO: 238842 - RNA, 18 nt, Molluscum contagiosum virus
gccgcgccgggcgccaga

SEQ ID NO: 238843 - RNA, 13 nt, Molluscum contagiosum virus
gccgcgcgcgcac

SEQ ID NO: 238844 - RNA, 19 nt, Molluscum contagiosum virus
gccgcggacgccggcgccc

SEQ ID NO: 238845 - RNA, 19 nt, Molluscum contagiosum virus
gcggagggugcacgcgggc

SEQ ID NO: 238846 - RNA, 23 nt, Molluscum contagiosum virus
gcggcagcucugcagcgccgcgc

SEQ ID NO: 238847 - RNA, 16 nt, Molluscum contagiosum virus
gcggcaggcgcugcgc

SEQ ID NO: 238848 - RNA, 15 nt, Molluscum contagiosum virus
gcggcaugcgcgcgc

SEQ ID NO: 238849 - RNA, 18 nt, Molluscum contagiosum virus
gcggccaccagcgcggcc

SEQ ID NO: 238850 - RNA, 18 nt, Molluscum contagiosum virus
gcggccacgcucgcgcgc

SEQ ID NO: 238851 - RNA, 15 nt, Molluscum contagiosum virus
gcggcaaccgcgccc

SEQ ID NO: 238852 - RNA, 21 nt, Molluscum contagiosum virus
gcggcaaccgcgcccgcgcgc

SEQ ID NO: 238853 - RNA, 16 nt, Molluscum contagiosum virus
gcggcaacgagcacgu

SEQ ID NO: 238854 - RNA, 19 nt, Molluscum contagiosum virus
gcggcacccgccgcggugc

SEQ ID NO: 238855 - RNA, 18 nt, Molluscum contagiosum virus
gcggcacgccgcucggca

SEQ ID NO: 238856 - RNA, 15 nt, Molluscum contagiosum virus
gcggcacgcgagcgc

SEQ ID NO: 238857 - RNA, 21 nt, Molluscum contagiosum virus
gcggagacuuccuugcgcagg

SEQ ID NO: 238858 - RNA, 16 nt, Molluscum contagiosum virus
gcggagaucgccgcgc

SEQ ID NO: 238859 - RNA, 17 nt, Molluscum contagiosum virus
gcggagaucgccgcgca

SEQ ID NO: 238860 - RNA, 20 nt, Molluscum contagiosum virus
gcggagaucgccgcgcaagu

SEQ ID NO: 238861 - RNA, 12 nt, Molluscum contagiosum virus
gcggagcugugc

SEQ ID NO: 238862 - RNA, 20 nt, Molluscum contagiosum virus
gcggagcugugccaucucgc

SEQ ID NO: 238863 - RNA, 19 nt, Molluscum contagiosum virus
gcggagcugugccgcagca

SEQ ID NO: 238864 - RNA, 20 nt, Molluscum contagiosum virus
gcggacagagcccgcggcgc

SEQ ID NO: 238865 - RNA, 22 nt, Molluscum contagiosum virus
gcggaacuggacgccguugcgc

SEQ ID NO: 238866 - RNA, 23 nt, Molluscum contagiosum virus
gcggacgaaagcgucgugugcgc

SEQ ID NO: 238867 - RNA, 13 nt, Molluscum contagiosum virus
gcggacgccggcg

SEQ ID NO: 238868 - RNA, 14 nt, Molluscum contagiosum virus
gcggacgccggcgc

SEQ ID NO: 238869 - RNA, 12 nt, Molluscum contagiosum virus
gcggacgcgggc

SEQ ID NO: 238870 - RNA, 14 nt, Molluscum contagiosum virus
gcggacguggucgc

SEQ ID NO: 238871 - RNA, 18 nt, Molluscum contagiosum virus
gcggacguggucgcgcgc

SEQ ID NO: 238872 - RNA, 15 nt, Molluscum contagiosum virus
gcggccguugccgga

SEQ ID NO: 238873 - RNA, 19 nt, Molluscum contagiosum virus
gcggccucccucgucgcgc

SEQ ID NO: 238874 - RNA, 23 nt, Molluscum contagiosum virus
gcggccuguucuuccaguggcgc

SEQ ID NO: 238875 - RNA, 21 nt, Molluscum contagiosum virus
gcggcccuucguguucgcgga

SEQ ID NO: 238876 - RNA, 17 nt, Molluscum contagiosum virus
gcggccgagucacgccc

SEQ ID NO: 238877 - RNA, 14 nt, Molluscum contagiosum virus
gcggcccgcggcgc

SEQ ID NO: 238878 - RNA, 13 nt, Molluscum contagiosum virus
gcggcccgcgggc

SEQ ID NO: 238879 - RNA, 14 nt, Molluscum contagiosum virus
gcggcgcgccgcgc

SEQ ID NO: 238880 - RNA, 14 nt, Molluscum contagiosum virus
gcggcgcgccggcc

SEQ ID NO: 238881 - RNA, 15 nt, Molluscum contagiosum virus
gcggcgcgccggccc

SEQ ID NO: 238882 - RNA, 23 nt, Molluscum contagiosum virus
gcggcgcgcgcugagcgcggagc

SEQ ID NO: 238883 - RNA, 14 nt, Molluscum contagiosum virus
gcggcgcgugccgc

SEQ ID NO: 238884 - RNA, 19 nt, Molluscum contagiosum virus
gcggcgcgugccgcugcgc

SEQ ID NO: 238885 - RNA, 14 nt, Molluscum contagiosum virus
gcggcgcgugucgc

SEQ ID NO: 238886 - RNA, 17 nt, Molluscum contagiosum virus
gcggcgcgugucgcgga

SEQ ID NO: 238887 - RNA, 19 nt, Molluscum contagiosum virus
gcggcgcguuuucgcggcc

SEQ ID NO: 238888 - RNA, 16 nt, Molluscum contagiosum virus
gcggcgcucguggcgc

SEQ ID NO: 238889 - RNA, 23 nt, Molluscum contagiosum virus
gcggcgcucugccaccgcggcgc

SEQ ID NO: 238890 - RNA, 22 nt, Molluscum contagiosum virus
gcggcgcuuucgcccgccgcgc

SEQ ID NO: 238891 - RNA, 15 nt, Molluscum contagiosum virus
gcggccgcgagacgc

SEQ ID NO: 238892 - RNA, 14 nt, Molluscum contagiosum virus
gcggccguggcugc

SEQ ID NO: 238893 - RNA, 21 nt, Molluscum contagiosum virus
gcggcgagcgcauucgcgcgc

SEQ ID NO: 238894 - RNA, 15 nt, Molluscum contagiosum virus
gcggcgccguggcgc

SEQ ID NO: 238895 - RNA, 18 nt, Molluscum contagiosum virus
gcggcgcgacggcgacgc

SEQ ID NO: 238896 - RNA, 14 nt, Molluscum contagiosum virus
gcggcuccgcgcgc

SEQ ID NO: 238897 - RNA, 15 nt, Molluscum contagiosum virus
gcggcucucgcggcc

SEQ ID NO: 238898 - RNA, 13 nt, Molluscum contagiosum virus
gcggcugcggcgc

SEQ ID NO: 238899 - RNA, 14 nt, Molluscum contagiosum virus
gcggcgucgcgcgc

SEQ ID NO: 238900 - RNA, 20 nt, Molluscum contagiosum virus
gcgcacuacucgucuugcgc

SEQ ID NO: 238901 - RNA, 13 nt, Molluscum contagiosum virus
gcgcacugcucgc

SEQ ID NO: 238902 - RNA, 15 nt, Molluscum contagiosum virus
gcgcagacgccgagc

SEQ ID NO: 238903 - RNA, 23 nt, Molluscum contagiosum virus
gcgcagagcuccccgcgcgcagc

SEQ ID NO: 238904 - RNA, 14 nt, Molluscum contagiosum virus
gcgcagucccagca

SEQ ID NO: 238905 - RNA, 19 nt, Molluscum contagiosum virus
gcgcaguucgagcugcugc

SEQ ID NO: 238906 - RNA, 20 nt, Molluscum contagiosum virus
gcgcauacgcgccgcgcgcu

SEQ ID NO: 238907 - RNA, 13 nt, Molluscum contagiosum virus
gcgcaucaugcgc

SEQ ID NO: 238908 - RNA, 17 nt, Molluscum contagiosum virus
gcgcggcgcucugccac

SEQ ID NO: 238909 - RNA, 20 nt, Molluscum contagiosum virus
gcgcggcgguguaugcucgu

SEQ ID NO: 238910 - RNA, 14 nt, Molluscum contagiosum virus
gcgcgggagcucac

SEQ ID NO: 238911 - RNA, 16 nt, Molluscum contagiosum virus
gcgcgggcacgccgca

SEQ ID NO: 238912 - RNA, 18 nt, Molluscum contagiosum virus
gcgcggggcacugcgcac

SEQ ID NO: 238913 - RNA, 16 nt, Molluscum contagiosum virus
gcgcgguccagccgca

SEQ ID NO: 238914 - RNA, 15 nt, Molluscum contagiosum virus
gcgcggugcugcgcc

SEQ ID NO: 238915 - RNA, 19 nt, Molluscum contagiosum virus
gcgcggugcugcgccagga

SEQ ID NO: 238916 - RNA, 17 nt, Molluscum contagiosum virus
gcgacuugcugcggagc

SEQ ID NO: 238917 - RNA, 18 nt, Molluscum contagiosum virus
gcgagaacuggcgcagca

SEQ ID NO: 238918 - RNA, 23 nt, Molluscum contagiosum virus
gccgcguagcuagcucugcgcgc

SEQ ID NO: 238919 - RNA, 16 nt, Molluscum contagiosum virus
gcgcacaaacgcgcgc

SEQ ID NO: 238920 - RNA, 18 nt, Molluscum contagiosum virus
gcgcacacuccucggcgc

SEQ ID NO: 238921 - RNA, 14 nt, Molluscum contagiosum virus
gcgcacacuugcgc

SEQ ID NO: 238922 - RNA, 20 nt, Molluscum contagiosum virus
gcgcacccgagggcgugcgc

SEQ ID NO: 238923 - RNA, 13 nt, Molluscum contagiosum virus
gcgcaccgcgggc

SEQ ID NO: 238924 - RNA, 22 nt, Molluscum contagiosum virus
gcgcaccugcacgagccggcgc

SEQ ID NO: 238925 - RNA, 19 nt, Molluscum contagiosum virus
gcgcaccugcuagagcaua

SEQ ID NO: 238926 - RNA, 16 nt, Molluscum contagiosum virus
gcgcacgagcgcgggc

SEQ ID NO: 238927 - RNA, 18 nt, Molluscum contagiosum virus
gcgcacgagcgcgggcgc

SEQ ID NO: 238928 - RNA, 20 nt, Molluscum contagiosum virus
gcgcacgcaagcccgcgcgc

SEQ ID NO: 238929 - RNA, 24 nt, Molluscum contagiosum virus
gcgcacgcaagcccgcgcgcgagc

SEQ ID NO: 238930 - RNA, 21 nt, Molluscum contagiosum virus
gcgcacgcuagucguuggcgc

SEQ ID NO: 238931 - RNA, 17 nt, Molluscum contagiosum virus
gcgcacgcugcgcacgg

SEQ ID NO: 238932 - RNA, 21 nt, Molluscum contagiosum virus
gcgcacgcugcgcacgggcgc

SEQ ID NO: 238933 - RNA, 20 nt, Molluscum contagiosum virus
gcgcacgcuuguccgcggac

SEQ ID NO: 238934 - RNA, 22 nt, Molluscum contagiosum virus
gcgcacgcuuguccgcggacgc

SEQ ID NO: 238935 - RNA, 16 nt, Molluscum contagiosum virus
gcgcgucucugcgcag

SEQ ID NO: 238936 - RNA, 19 nt, Molluscum contagiosum virus
gcgcgucugcaucgugggc

SEQ ID NO: 238937 - RNA, 19 nt, Molluscum contagiosum virus
gcgcgucugcgaguggcgc

SEQ ID NO: 238938 - RNA, 13 nt, Molluscum contagiosum virus
gcgcgugcgcagg

SEQ ID NO: 238939 - RNA, 21 nt, Molluscum contagiosum virus
gcgcgugcguacgugcacgug

SEQ ID NO: 238940 - RNA, 23 nt, Molluscum contagiosum virus
gcgcgugcucgacucggaugcgc

SEQ ID NO: 238941 - RNA, 19 nt, Molluscum contagiosum virus
gcgcgugcuggacgcgcac

SEQ ID NO: 238942 - RNA, 19 nt, Molluscum contagiosum virus
gcgcgugugcagcagguag

SEQ ID NO: 238943 - RNA, 15 nt, Molluscum contagiosum virus
gcgcguucagcgcac

SEQ ID NO: 238944 - RNA, 16 nt, Molluscum contagiosum virus
gcgcguuugucgcggg

SEQ ID NO: 238945 - RNA, 14 nt, Molluscum contagiosum virus
gcgcuacguggcgc

SEQ ID NO: 238946 - RNA, 17 nt, Molluscum contagiosum virus
gcgcuacuugcuggcgc

SEQ ID NO: 238947 - RNA, 16 nt, Molluscum contagiosum virus
gcgcuagugaaccgca

SEQ ID NO: 238948 - RNA, 16 nt, Molluscum contagiosum virus
gcgcuauugcgcggcg

SEQ ID NO: 238949 - RNA, 19 nt, Molluscum contagiosum virus
gcgcucacugcagcagccc

SEQ ID NO: 238950 - RNA, 20 nt, Molluscum contagiosum virus
gcgcucgaacgcgcgugcgc

SEQ ID NO: 238951 - RNA, 16 nt, Molluscum contagiosum virus
gcgcucgagcuccgag

SEQ ID NO: 238952 - RNA, 17 nt, Molluscum contagiosum virus
gcgcucucagagcauua

SEQ ID NO: 238953 - RNA, 20 nt, Molluscum contagiosum virus
gcgcucuucguggugcucac

SEQ ID NO: 238954 - RNA, 14 nt, Molluscum contagiosum virus
gcgcugcucuucgc

SEQ ID NO: 238955 - RNA, 20 nt, Molluscum contagiosum virus
gcgcugcugguucugcucgc

SEQ ID NO: 238956 - RNA, 22 nt, Molluscum contagiosum virus
gcgcuggagaaagaagugugcc

SEQ ID NO: 238957 - RNA, 16 nt, Molluscum contagiosum virus
gcgcuggcccacgcug

SEQ ID NO: 238958 - RNA, 14 nt, Molluscum contagiosum virus
gcgcuggcgugcgc

SEQ ID NO: 238959 - RNA, 16 nt, Molluscum contagiosum virus
gcgcugguggaggagc

SEQ ID NO: 238960 - RNA, 14 nt, Molluscum contagiosum virus
gcgcugucgcgcag

SEQ ID NO: 238961 - RNA, 21 nt, Molluscum contagiosum virus
gcgcuucguggacgagcgcua

SEQ ID NO: 238962 - RNA, 14 nt, Molluscum contagiosum virus
gcgcuucuuugcgc

SEQ ID NO: 238963 - RNA, 17 nt, Molluscum contagiosum virus
gcgcuugggcacugcua

SEQ ID NO: 238964 - RNA, 19 nt, Molluscum contagiosum virus
gcggaaaaaaacugcgcac

SEQ ID NO: 238965 - RNA, 13 nt, Molluscum contagiosum virus
gcgcagcugcgcc

SEQ ID NO: 238966 - RNA, 17 nt, Molluscum contagiosum virus
gcgcagcugcgccugca

SEQ ID NO: 238967 - RNA, 13 nt, Molluscum contagiosum virus
gcgcugcgcaagc

SEQ ID NO: 238968 - RNA, 13 nt, Molluscum contagiosum virus
gcgcugcgccacu

SEQ ID NO: 238969 - RNA, 14 nt, Molluscum contagiosum virus
gcgcugcgcggcgg

SEQ ID NO: 238970 - RNA, 22 nt, Molluscum contagiosum virus
cgguggccgcgccgggcgccag

SEQ ID NO: 238971 - RNA, 14 nt, Molluscum contagiosum virus
cgguggacgcacag

SEQ ID NO: 238972 - RNA, 21 nt, Molluscum contagiosum virus
cguaauccaugucgagcccug

SEQ ID NO: 238973 - RNA, 17 nt, Molluscum contagiosum virus
cguacagcgcgcgugcc

SEQ ID NO: 238974 - RNA, 20 nt, Molluscum contagiosum virus
cguacagcuccccgcgcaag

SEQ ID NO: 238975 - RNA, 13 nt, Molluscum contagiosum virus
cguacgagcaggc

SEQ ID NO: 238976 - RNA, 14 nt, Molluscum contagiosum virus
cguacgagcaggcg

SEQ ID NO: 238977 - RNA, 12 nt, Molluscum contagiosum virus
cguacgcggagg

SEQ ID NO: 238978 - RNA, 21 nt, Molluscum contagiosum virus
cguagcaaaugcgcugcucgc

SEQ ID NO: 238979 - RNA, 19 nt, Molluscum contagiosum virus
cguagcagcgccugcacgc

SEQ ID NO: 238980 - RNA, 13 nt, Molluscum contagiosum virus
cguagcgcgucuc

SEQ ID NO: 238981 - RNA, 13 nt, Molluscum contagiosum virus
cggugagcgccgu

SEQ ID NO: 238982 - RNA, 14 nt, Molluscum contagiosum virus
cggcggcaugcgcg

SEQ ID NO: 238983 - RNA, 20 nt, Molluscum contagiosum virus
cggguaccgugcgcgugagc

SEQ ID NO: 238984 - RNA, 16 nt, Molluscum contagiosum virus
cggcggugcccgccaa

SEQ ID NO: 238985 - RNA, 19 nt, Molluscum contagiosum virus
cggcgcgacggcgacgcga

SEQ ID NO: 238986 - RNA, 16 nt, Molluscum contagiosum virus
cggcgcgcgcgcgcag

SEQ ID NO: 238987 - RNA, 14 nt, Molluscum contagiosum virus
cggcgcgcgcggcg

SEQ ID NO: 238988 - RNA, 14 nt, Molluscum contagiosum virus
cggcgcggcuagca

SEQ ID NO: 238989 - RNA, 15 nt, Molluscum contagiosum virus
cggcgcgggcaagca

SEQ ID NO: 238990 - RNA, 19 nt, Molluscum contagiosum virus
cggcgcguuucggccugca

SEQ ID NO: 238991 - RNA, 15 nt, Molluscum contagiosum virus
cggcgcuaugccgcg

SEQ ID NO: 238992 - RNA, 14 nt, Molluscum contagiosum virus
cggcgcucacugcg

SEQ ID NO: 238993 - RNA, 18 nt, Molluscum contagiosum virus
cggcgcaagcaccggcag

SEQ ID NO: 238994 - RNA, 15 nt, Molluscum contagiosum virus
cggcgcaaucucgcg

SEQ ID NO: 238995 - RNA, 15 nt, Molluscum contagiosum virus
cggcgccaccggcag

SEQ ID NO: 238996 - RNA, 17 nt, Molluscum contagiosum virus
cggcgcccaggaacagu

SEQ ID NO: 238997 - RNA, 19 nt, Molluscum contagiosum virus
cggcgauguacgcgugcag

SEQ ID NO: 238998 - RNA, 17 nt, Molluscum contagiosum virus
cggccuagagcuggcac

SEQ ID NO: 238999 - RNA, 15 nt, Molluscum contagiosum virus
cggccuguucuucca

SEQ ID NO: 239000 - RNA, 22 nt, Molluscum contagiosum virus
cgucucgcggaagaauuccuuc

SEQ ID NO: 239001 - RNA, 19 nt, Molluscum contagiosum virus
cgugcucugcuccgcggag

SEQ ID NO: 239002 - RNA, 20 nt, Molluscum contagiosum virus
cgugcucugcuccgcggagg

SEQ ID NO: 239003 - RNA, 19 nt, Molluscum contagiosum virus
cgugcuggagggcacgcug

SEQ ID NO: 239004 - RNA, 14 nt, Molluscum contagiosum virus
cgugcuugcgcacg

SEQ ID NO: 239005 - RNA, 16 nt, Molluscum contagiosum virus
cgugggcgagcgcacg

SEQ ID NO: 239006 - RNA, 23 nt, Molluscum contagiosum virus
cguggcgcuuggcgagcgcugcc

SEQ ID NO: 239007 - RNA, 22 nt, Molluscum contagiosum virus
cguggcgugcuuguagcgcaag

SEQ ID NO: 239008 - RNA, 14 nt, Molluscum contagiosum virus
cgugcgcugcgcgc

SEQ ID NO: 239009 - RNA, 14 nt, Molluscum contagiosum virus
cgugcgugcacagc

SEQ ID NO: 239010 - RNA, 13 nt, Molluscum contagiosum virus
cgugcucacgcug

SEQ ID NO: 239011 - RNA, 16 nt, Molluscum contagiosum virus
cgugcuccacgcgcag

SEQ ID NO: 239012 - RNA, 17 nt, Molluscum contagiosum virus
cgugcuccacgcgcagc

SEQ ID NO: 239013 - RNA, 17 nt, Molluscum contagiosum virus
cgugcuccucgcguagc

SEQ ID NO: 239014 - RNA, 20 nt, Molluscum contagiosum virus
cgugcucgguagcguggagc

SEQ ID NO: 239015 - RNA, 17 nt, Molluscum contagiosum virus
cgugcaggaacgcgcgc

SEQ ID NO: 239016 - RNA, 19 nt, Molluscum contagiosum virus
cgugcagggcgugcuugcc

SEQ ID NO: 239017 - RNA, 18 nt, Molluscum contagiosum virus
cgugcauggcacgcgagc

SEQ ID NO: 239018 - RNA, 13 nt, Molluscum contagiosum virus
cgugccgccggcg

SEQ ID NO: 239019 - RNA, 15 nt, Molluscum contagiosum virus
cgugccgcugcgcgg

SEQ ID NO: 239020 - RNA, 18 nt, Molluscum contagiosum virus
cgugccgcugcgcggagc

SEQ ID NO: 239021 - RNA, 17 nt, Molluscum contagiosum virus
cgucgggaaguguugcc

SEQ ID NO: 239022 - RNA, 20 nt, Molluscum contagiosum virus
cgugacagagugccuggcgc

SEQ ID NO: 239023 - RNA, 19 nt, Molluscum contagiosum virus
cgugacucggccgcggggc

SEQ ID NO: 239024 - RNA, 23 nt, Molluscum contagiosum virus
cgugaggaagaccuuggacacgu

SEQ ID NO: 239025 - RNA, 21 nt, Molluscum contagiosum virus
cgucuugacaggcgcgcaagu

SEQ ID NO: 239026 - RNA, 14 nt, Molluscum contagiosum virus
cgguugagcgccgu

SEQ ID NO: 239027 - RNA, 14 nt, Molluscum contagiosum virus
cgucacggccuucg

SEQ ID NO: 239028 - RNA, 13 nt, Molluscum contagiosum virus
ccucggcgcacac

SEQ ID NO: 239029 - RNA, 19 nt, Molluscum contagiosum virus
ccucucgaggccggcacga

SEQ ID NO: 239030 - RNA, 22 nt, Molluscum contagiosum virus
ccugcaggaaaggcacccgcag

SEQ ID NO: 239031 - RNA, 15 nt, Molluscum contagiosum virus
ccugccacaccagcu

SEQ ID NO: 239032 - RNA, 22 nt, Molluscum contagiosum virus
ccugcgcaacgugcugcgccgc

SEQ ID NO: 239033 - RNA, 19 nt, Molluscum contagiosum virus
ccugcgcgagcaagcgccc

SEQ ID NO: 239034 - RNA, 20 nt, Molluscum contagiosum virus
ccugcgcuuccucuacacca

SEQ ID NO: 239035 - RNA, 12 nt, Molluscum contagiosum virus
ccugcgggcgcu

SEQ ID NO: 239036 - RNA, 16 nt, Molluscum contagiosum virus
ccugcugcagcuccgc

SEQ ID NO: 239037 - RNA, 14 nt, Molluscum contagiosum virus
ccugcuggcaccgc

SEQ ID NO: 239038 - RNA, 13 nt, Molluscum contagiosum virus
ccugcuugcccgc

SEQ ID NO: 239039 - RNA, 20 nt, Molluscum contagiosum virus
ccuggaacgcgaccuucacu

SEQ ID NO: 239040 - RNA, 18 nt, Molluscum contagiosum virus
ccuggaacucuacgccgc

SEQ ID NO: 239041 - RNA, 21 nt, Molluscum contagiosum virus
ccuggagggucacgcgcacau

SEQ ID NO: 239042 - RNA, 14 nt, Molluscum contagiosum virus
ccuugcagcgcagc

SEQ ID NO: 239043 - RNA, 14 nt, Molluscum contagiosum virus
ccuggcggcgcugg

SEQ ID NO: 239044 - RNA, 23 nt, Molluscum contagiosum virus
ccuggugcuggggcuagcgcugc

SEQ ID NO: 239045 - RNA, 18 nt, Molluscum contagiosum virus
ccuguucuuucagcgcgc

SEQ ID NO: 239046 - RNA, 18 nt, Molluscum contagiosum virus
cgaacucgugcgccgcgc

SEQ ID NO: 239047 - RNA, 12 nt, Molluscum contagiosum virus
cgaacugcuggg

SEQ ID NO: 239048 - RNA, 15 nt, Molluscum contagiosum virus
cgaagaccaccagca

SEQ ID NO: 239049 - RNA, 18 nt, Molluscum contagiosum virus
cgaagacgagcgcgugcc

SEQ ID NO: 239050 - RNA, 20 nt, Molluscum contagiosum virus
cgcggcgagugcggccacca

SEQ ID NO: 239051 - RNA, 16 nt, Molluscum contagiosum virus
ccuuggcgcugcacag

SEQ ID NO: 239052 - RNA, 18 nt, Molluscum contagiosum virus
ccuuggcggugcgcaaag

SEQ ID NO: 239053 - RNA, 22 nt, Molluscum contagiosum virus
ccuuuguucuuagcagcgccgc

SEQ ID NO: 239054 - RNA, 22 nt, Molluscum contagiosum virus
ccuugcccgaggagagcggcgc

SEQ ID NO: 239055 - RNA, 16 nt, Molluscum contagiosum virus
cgcggcgggggcagca

SEQ ID NO: 239056 - RNA, 22 nt, Molluscum contagiosum virus
cgcggcgguugcccgccugccg

SEQ ID NO: 239057 - RNA, 23 nt, Molluscum contagiosum virus
cgcggcuaccacgggcccgcgcg

SEQ ID NO: 239058 - RNA, 22 nt, Molluscum contagiosum virus
cgcgggccuguccgcgggcgca

SEQ ID NO: 239059 - RNA, 22 nt, Molluscum contagiosum virus
cgcgggccuguccgcgggcgcg

SEQ ID NO: 239060 - RNA, 19 nt, Molluscum contagiosum virus
cgcgguccuguccgcggac

SEQ ID NO: 239061 - RNA, 18 nt, Molluscum contagiosum virus
cgcggucgcccgccgagc

SEQ ID NO: 239062 - RNA, 13 nt, Molluscum contagiosum virus
cgcggucgcggag

SEQ ID NO: 239063 - RNA, 18 nt, Molluscum contagiosum virus
cgcggugagugcgcgcac

SEQ ID NO: 239064 - RNA, 15 nt, Molluscum contagiosum virus
cgcggugcgggcgcg

SEQ ID NO: 239065 - RNA, 16 nt, Molluscum contagiosum virus
cgcguaaagagcgucc

SEQ ID NO: 239066 - RNA, 14 nt, Molluscum contagiosum virus
cgcguacagcgcgc

SEQ ID NO: 239067 - RNA, 17 nt, Molluscum contagiosum virus
cgcguacauccgcgagc

SEQ ID NO: 239068 - RNA, 15 nt, Molluscum contagiosum virus
cgcguaccagcgccu

SEQ ID NO: 239069 - RNA, 13 nt, Molluscum contagiosum virus
cgcguagcagcgc

SEQ ID NO: 239070 - RNA, 14 nt, Molluscum contagiosum virus
cgcguagcagcgcc

SEQ ID NO: 239071 - RNA, 19 nt, Molluscum contagiosum virus
cgcgggcguguccgcgggc

SEQ ID NO: 239072 - RNA, 20 nt, Molluscum contagiosum virus
cgcgucaucgcugcacgcga

SEQ ID NO: 239073 - RNA, 22 nt, Molluscum contagiosum virus
cgcguccacgaacgacagcgcc

SEQ ID NO: 239074 - RNA, 12 nt, Molluscum contagiosum virus
cgcguccacgca

SEQ ID NO: 239075 - RNA, 22 nt, Molluscum contagiosum virus
cgcguccacggguagcagcgcc

SEQ ID NO: 239076 - RNA, 13 nt, Molluscum contagiosum virus
cgcguccgcgcag

SEQ ID NO: 239077 - RNA, 12 nt, Molluscum contagiosum virus
cgcgucgcgcag

SEQ ID NO: 239078 - RNA, 19 nt, Molluscum contagiosum virus
cgcgucgcggucgcggagc

SEQ ID NO: 239079 - RNA, 16 nt, Molluscum contagiosum virus
cgcgugacacaccgcg

SEQ ID NO: 239080 - RNA, 23 nt, Molluscum contagiosum virus
cgcgugaggaggcggcacugcua

SEQ ID NO: 239081 - RNA, 17 nt, Molluscum contagiosum virus
cgcgugaguccgcggcg

SEQ ID NO: 239082 - RNA, 17 nt, Molluscum contagiosum virus
cgaacacggcgcggauc

SEQ ID NO: 239083 - RNA, 12 nt, Molluscum contagiosum virus
cgaacagagcgc

SEQ ID NO: 239084 - RNA, 14 nt, Molluscum contagiosum virus
cgcgugcgcgccag

SEQ ID NO: 239085 - RNA, 18 nt, Molluscum contagiosum virus
cgcgugcauggcacgcga

SEQ ID NO: 239086 - RNA, 15 nt, Molluscum contagiosum virus
cgcgugccgcccgag

SEQ ID NO: 239087 - RNA, 19 nt, Molluscum contagiosum virus
cgcucacagcuucgcgagc

SEQ ID NO: 239088 - RNA, 18 nt, Molluscum contagiosum virus
cgcucauccacgcggagg

SEQ ID NO: 239089 - RNA, 15 nt, Molluscum contagiosum virus
cgcgugcucgcgagc

SEQ ID NO: 239090 - RNA, 14 nt, Molluscum contagiosum virus
cgcguggugcuuac

SEQ ID NO: 239091 - RNA, 19 nt, Molluscum contagiosum virus
cgcguuugucgcgggcgcg

SEQ ID NO: 239092 - RNA, 22 nt, Molluscum contagiosum virus
cgcuacgacgacaugcacacgc

SEQ ID NO: 239093 - RNA, 23 nt, Molluscum contagiosum virus
cgcuacuugcuggcgcgcggaga

SEQ ID NO: 239094 - RNA, 17 nt, Molluscum contagiosum virus
cggcagcgucgcggagc

SEQ ID NO: 239095 - RNA, 17 nt, Molluscum contagiosum virus
cggcagcuaccgcgcgc

SEQ ID NO: 239096 - RNA, 17 nt, Molluscum contagiosum virus
cggcagcucugcagcgc

SEQ ID NO: 239097 - RNA, 19 nt, Molluscum contagiosum virus
cggcagcuggagcugccgc

SEQ ID NO: 239098 - RNA, 16 nt, Molluscum contagiosum virus
cgcuccgcagccggag

SEQ ID NO: 239099 - RNA, 13 nt, Molluscum contagiosum virus
cgcucgcgcuucc

SEQ ID NO: 239100 - RNA, 16 nt, Molluscum contagiosum virus
cgcucgcucgcucagc

SEQ ID NO: 239101 - RNA, 22 nt, Molluscum contagiosum virus
cggcagacaacaccagcgugcc

SEQ ID NO: 239102 - RNA, 14 nt, Molluscum contagiosum virus
cggcagacgccagc

SEQ ID NO: 239103 - RNA, 16 nt, Molluscum contagiosum virus
cggcagacgccagcga

SEQ ID NO: 239104 - RNA, 17 nt, Molluscum contagiosum virus
cggcagcgacuacgcgc

SEQ ID NO: 239105 - RNA, 13 nt, Molluscum contagiosum virus
cggcagcgccagc

SEQ ID NO: 239106 - RNA, 16 nt, Molluscum contagiosum virus
cggcagcgccgcgcgc

SEQ ID NO: 239107 - RNA, 18 nt, Molluscum contagiosum virus
cgcucggcguggugcugg

SEQ ID NO: 239108 - RNA, 16 nt, Molluscum contagiosum virus
cgcucuacgccagcga

SEQ ID NO: 239109 - RNA, 17 nt, Molluscum contagiosum virus
cggcaggcgcugcgcgg

SEQ ID NO: 239110 - RNA, 20 nt, Molluscum contagiosum virus
cggcaggcgcugcgcggcgc

SEQ ID NO: 239111 - RNA, 22 nt, Molluscum contagiosum virus
cggcaggcucccgcugucgcgc

SEQ ID NO: 239112 - RNA, 22 nt, Molluscum contagiosum virus
cggcagguuugcacccgcgcag

SEQ ID NO: 239113 - RNA, 23 nt, Molluscum contagiosum virus
cggcagguuugcacccgcgcagc

SEQ ID NO: 239114 - RNA, 14 nt, Molluscum contagiosum virus
cggcaugcgcgcgc

SEQ ID NO: 239115 - RNA, 17 nt, Molluscum contagiosum virus
cggcaugcgcgcgcagc

SEQ ID NO: 239116 - RNA, 12 nt, Molluscum contagiosum virus
cggcccgcggac

SEQ ID NO: 239117 - RNA, 13 nt, Molluscum contagiosum virus
cggcccgcggcgc

SEQ ID NO: 239118 - RNA, 12 nt, Molluscum contagiosum virus
cggcccgcgggc

SEQ ID NO: 239119 - RNA, 19 nt, Molluscum contagiosum virus
cggcccgcgggcugcaaga

SEQ ID NO: 239120 - RNA, 14 nt, Molluscum contagiosum virus
cuagcucugcgcgc

SEQ ID NO: 239121 - RNA, 23 nt, Molluscum contagiosum virus
cuagcugugcgcuacguggcgcg

SEQ ID NO: 239122 - RNA, 16 nt, Molluscum contagiosum virus
cucaacucguaggaca

SEQ ID NO: 239123 - RNA, 17 nt, Molluscum contagiosum virus
cucacgcuucguggcca

SEQ ID NO: 239124 - RNA, 19 nt, Molluscum contagiosum virus
cucacggccuucgcguucc

SEQ ID NO: 239125 - RNA, 16 nt, Molluscum contagiosum virus
cucacggcgagcgcgc

SEQ ID NO: 239126 - RNA, 13 nt, Molluscum contagiosum virus
cuccagcgccagc

SEQ ID NO: 239127 - RNA, 20 nt, Molluscum contagiosum virus
cuccagcgcgcccucgcgcg

SEQ ID NO: 239128 - RNA, 12 nt, Molluscum contagiosum virus
cucccgucgagc

SEQ ID NO: 239129 - RNA, 14 nt, Molluscum contagiosum virus
cucccgucgagcac

SEQ ID NO: 239130 - RNA, 21 nt, Molluscum contagiosum virus
cuagagcuggcaccgggcgcc

SEQ ID NO: 239131 - RNA, 13 nt, Molluscum contagiosum virus
cuagcacgggcgg

SEQ ID NO: 239132 - RNA, 21 nt, Molluscum contagiosum virus
cuagcagcgugcgcaccagcu

SEQ ID NO: 239133 - RNA, 20 nt, Molluscum contagiosum virus
cuacgcgcgcguaacagcgc

SEQ ID NO: 239134 - RNA, 15 nt, Molluscum contagiosum virus
cuacgcgcugcuaga

SEQ ID NO: 239135 - RNA, 21 nt, Molluscum contagiosum virus
cuacggcgugcugugccugcg

SEQ ID NO: 239136 - RNA, 15 nt, Molluscum contagiosum virus
cuacgucaagcaggc

SEQ ID NO: 239137 - RNA, 14 nt, Molluscum contagiosum virus
cuaccgucgccggu

SEQ ID NO: 239138 - RNA, 18 nt, Molluscum contagiosum virus
cuaccuggcggcgcugga

SEQ ID NO: 239139 - RNA, 13 nt, Molluscum contagiosum virus
cuacgcagcgcgc

SEQ ID NO: 239140 - RNA, 17 nt, Molluscum contagiosum virus
cguugcacgugcgugcc

SEQ ID NO: 239141 - RNA, 16 nt, Molluscum contagiosum virus
cguugcugcugcgcgc

SEQ ID NO: 239142 - RNA, 20 nt, Molluscum contagiosum virus
cguucacuugcgcgcgugcc

SEQ ID NO: 239143 - RNA, 18 nt, Molluscum contagiosum virus
cguguccuacacgccgcu

SEQ ID NO: 239144 - RNA, 22 nt, Molluscum contagiosum virus
cgugucuggagcccacguugcc

SEQ ID NO: 239145 - RNA, 21 nt, Molluscum contagiosum virus
cgugucugguguauccaggau

SEQ ID NO: 239146 - RNA, 14 nt, Molluscum contagiosum virus
cgugugcgagcacg

SEQ ID NO: 239147 - RNA, 23 nt, Molluscum contagiosum virus
cuucguggcgcugggcgcgccgc

SEQ ID NO: 239148 - RNA, 19 nt, Molluscum contagiosum virus
cuucgcgggauacgggcgc

SEQ ID NO: 239149 - RNA, 20 nt, Molluscum contagiosum virus
cuuccuuuccgugcuugaca

SEQ ID NO: 239150 - RNA, 16 nt, Molluscum contagiosum virus
cuucgacuucuccgcg

SEQ ID NO: 239151 - RNA, 19 nt, Molluscum contagiosum virus
cuucgaggaacuugcacgc

SEQ ID NO: 239152 - RNA, 21 nt, Molluscum contagiosum virus
cuucgaggugcgcgagucgcg

SEQ ID NO: 239153 - RNA, 21 nt, Molluscum contagiosum virus
cuguguggaacggcucaccgc

SEQ ID NO: 239154 - RNA, 18 nt, Molluscum contagiosum virus
cuguucggcaugcagcgc

SEQ ID NO: 239155 - RNA, 23 nt, Molluscum contagiosum virus
cugucuuuuccucacgucgcugg

SEQ ID NO: 239156 - RNA, 12 nt, Molluscum contagiosum virus
cugugagcgcgc

SEQ ID NO: 239157 - RNA, 14 nt, Molluscum contagiosum virus
cugugccugcaaga

SEQ ID NO: 239158 - RNA, 16 nt, Molluscum contagiosum virus
cugugcgcgacgccug

SEQ ID NO: 239159 - RNA, 19 nt, Molluscum contagiosum virus
cugugcggagggugcacgc

SEQ ID NO: 239160 - RNA, 18 nt, Molluscum contagiosum virus
cugugcuacgcgagcacu

SEQ ID NO: 239161 - RNA, 21 nt, Molluscum contagiosum virus
cugugcuacgcgagcacugcg

SEQ ID NO: 239162 - RNA, 20 nt, Molluscum contagiosum virus
cuggucgagcaccugucgcg

SEQ ID NO: 239163 - RNA, 12 nt, Molluscum contagiosum virus
cuguccgaggac

SEQ ID NO: 239164 - RNA, 12 nt, Molluscum contagiosum virus
cuguccgcggac

SEQ ID NO: 239165 - RNA, 17 nt, Molluscum contagiosum virus
cugucgcgcagcugcgc

SEQ ID NO: 239166 - RNA, 21 nt, Molluscum contagiosum virus
cugggcaacgcgcgcgcgcug

SEQ ID NO: 239167 - RNA, 15 nt, Molluscum contagiosum virus
cugggcgcgccgcgc

SEQ ID NO: 239168 - RNA, 21 nt, Molluscum contagiosum virus
cugggcgcgugcgagcggcgc

SEQ ID NO: 239169 - RNA, 16 nt, Molluscum contagiosum virus
cuggcucguacugcug

SEQ ID NO: 239170 - RNA, 24 nt, Molluscum contagiosum virus
cuccgcgcggcgcucugccaccgc

SEQ ID NO: 239171 - RNA, 20 nt, Molluscum contagiosum virus
cuccggaggccgcucccgcg

SEQ ID NO: 239172 - RNA, 22 nt, Molluscum contagiosum virus
cuccgcacacgcgcgcgugcug

SEQ ID NO: 239173 - RNA, 14 nt, Molluscum contagiosum virus
cuccguuucccgcg

SEQ ID NO: 239174 - RNA, 18 nt, Molluscum contagiosum virus
cuccucggcgcuacgcac

SEQ ID NO: 239175 - RNA, 22 nt, Molluscum contagiosum virus
cucgaacgcgcgugcgcgugcc

SEQ ID NO: 239176 - RNA, 18 nt, Molluscum contagiosum virus
cucgacauuucgcgccug

SEQ ID NO: 239177 - RNA, 19 nt, Molluscum contagiosum virus
cucgaccugcacgacccuc

SEQ ID NO: 239178 - RNA, 11 nt, Molluscum contagiosum virus
cucgagcacgu

SEQ ID NO: 239179 - RNA, 12 nt, Molluscum contagiosum virus
cucgagcagcgg

SEQ ID NO: 239180 - RNA, 17 nt, Molluscum contagiosum virus
gaaccugcacgcggcgu

SEQ ID NO: 239181 - RNA, 20 nt, Molluscum contagiosum virus
gaacgccgugcgcgugcggc

SEQ ID NO: 239182 - RNA, 16 nt, Molluscum contagiosum virus
gaaagcgccgcgcgcg

SEQ ID NO: 239183 - RNA, 22 nt, Molluscum contagiosum virus
gaaacagcaccguugccgcggc

SEQ ID NO: 239184 - RNA, 22 nt, Molluscum contagiosum virus
gaaacaguaggacauguccggc

SEQ ID NO: 239185 - RNA, 20 nt, Molluscum contagiosum virus
cuugguguucugcgcgccgc

SEQ ID NO: 239186 - RNA, 13 nt, Molluscum contagiosum virus
cuuguccgcggac

SEQ ID NO: 239187 - RNA, 16 nt, Molluscum contagiosum virus
cuuuuugcggcgccgc

SEQ ID NO: 239188 - RNA, 16 nt, Molluscum contagiosum virus
gaaaaaagagccggcu

SEQ ID NO: 239189 - RNA, 19 nt, Molluscum contagiosum virus
cuugcucacgcugcgcucg

SEQ ID NO: 239190 - RNA, 12 nt, Molluscum contagiosum virus
cuugcuggcacg

SEQ ID NO: 239191 - RNA, 15 nt, Molluscum contagiosum virus
cuuggaagagucgcg

SEQ ID NO: 239192 - RNA, 21 nt, Molluscum contagiosum virus
cuuggacagcaagcagcgcgc

SEQ ID NO: 239193 - RNA, 20 nt, Molluscum contagiosum virus
cuuggccaagcuuugcacgc

SEQ ID NO: 239194 - RNA, 20 nt, Molluscum contagiosum virus
cuuggcgcgccgcugcccgc

SEQ ID NO: 239195 - RNA, 23 nt, Molluscum contagiosum virus
cuuggcggcgcggcuagcaccgc

SEQ ID NO: 239196 - RNA, 22 nt, Molluscum contagiosum virus
gacaaucucugcgccgcgcgcg

SEQ ID NO: 239197 - RNA, 18 nt, Molluscum contagiosum virus
gaaguggccgucgcgagc

SEQ ID NO: 239198 - RNA, 15 nt, Molluscum contagiosum virus
gaagcccgucggggc

SEQ ID NO: 239199 - RNA, 16 nt, Molluscum contagiosum virus
gaagcucucgcgcgca

SEQ ID NO: 239200 - RNA, 16 nt, Molluscum contagiosum virus
gaagcugcacgugcag

SEQ ID NO: 239201 - RNA, 17 nt, Molluscum contagiosum virus
gaagaugcugcgcgugg

SEQ ID NO: 239202 - RNA, 23 nt, Molluscum contagiosum virus
gaagcaggcgccaucgcgcguga

SEQ ID NO: 239203 - RNA, 15 nt, Molluscum contagiosum virus
gaagacggcgcgcgc

SEQ ID NO: 239204 - RNA, 16 nt, Molluscum contagiosum virus
gaagacggcgcgcgcg

SEQ ID NO: 239205 - RNA, 16 nt, Molluscum contagiosum virus
gaagacgucggggcgc

SEQ ID NO: 239206 - RNA, 23 nt, Molluscum contagiosum virus
gaagagacgccaagcgucgcgac

SEQ ID NO: 239207 - RNA, 18 nt, Molluscum contagiosum virus
gaacgcgcaagugugcgc

SEQ ID NO: 239208 - RNA, 11 nt, Molluscum contagiosum virus
gaacgcgcgcu

SEQ ID NO: 239209 - RNA, 16 nt, Molluscum contagiosum virus
gaacucgagcacguag

SEQ ID NO: 239210 - RNA, 19 nt, Molluscum contagiosum virus
gaacuggacgccguugcgc

SEQ ID NO: 239211 - RNA, 14 nt, Molluscum contagiosum virus
gaagaacgcggcgu

SEQ ID NO: 239212 - RNA, 22 nt, Molluscum contagiosum virus
gaagacgcguaccagcgccugc

SEQ ID NO: 239213 - RNA, 14 nt, Molluscum contagiosum virus
gagcaaggccuggc

SEQ ID NO: 239214 - RNA, 20 nt, Molluscum contagiosum virus
gagcacaaagagacgcggcc

SEQ ID NO: 239215 - RNA, 17 nt, Molluscum contagiosum virus
gagcacauacacgcgca

SEQ ID NO: 239216 - RNA, 16 nt, Molluscum contagiosum virus
gagcaccgcguggcgc

SEQ ID NO: 239217 - RNA, 17 nt, Molluscum contagiosum virus
gagcaccugucgcgcga

SEQ ID NO: 239218 - RNA, 12 nt, Molluscum contagiosum virus
gagcacgcgcga

SEQ ID NO: 239219 - RNA, 17 nt, Molluscum contagiosum virus
gagcacgcgcucgcgca

SEQ ID NO: 239220 - RNA, 18 nt, Molluscum contagiosum virus
gagcacguggacagcauc

SEQ ID NO: 239221 - RNA, 15 nt, Molluscum contagiosum virus
gagcacugcgcgcgc

SEQ ID NO: 239222 - RNA, 16 nt, Molluscum contagiosum virus
gagcacugcgcgcgcg

SEQ ID NO: 239223 - RNA, 21 nt, Molluscum contagiosum virus
gagcacugcgcgucugugcgc

SEQ ID NO: 239224 - RNA, 18 nt, Molluscum contagiosum virus
gagcacuguacgcacgca

SEQ ID NO: 239225 - RNA, 16 nt, Molluscum contagiosum virus
gagcacuuccgcgcgc

SEQ ID NO: 239226 - RNA, 15 nt, Molluscum contagiosum virus
gagcagaaggugcgc

SEQ ID NO: 239227 - RNA, 22 nt, Molluscum contagiosum virus
gagcagcccgugcgccugccgc

SEQ ID NO: 239228 - RNA, 18 nt, Molluscum contagiosum virus
gagcaggcgcagcgcggc

SEQ ID NO: 239229 - RNA, 13 nt, Molluscum contagiosum virus
gagcccgcggcgc

SEQ ID NO: 239230 - RNA, 19 nt, Molluscum contagiosum virus
gagccgcgcgagcgcgccc

SEQ ID NO: 239231 - RNA, 18 nt, Molluscum contagiosum virus
gagcagugccgccgcgca

SEQ ID NO: 239232 - RNA, 16 nt, Molluscum contagiosum virus
gagcaguuccggucuc

SEQ ID NO: 239233 - RNA, 16 nt, Molluscum contagiosum virus
gagcaguucgcgcgcc

SEQ ID NO: 239234 - RNA, 14 nt, Molluscum contagiosum virus
gagagugcgggagc

SEQ ID NO: 239235 - RNA, 20 nt, Molluscum contagiosum virus
gagauccacgcgugcugcgc

SEQ ID NO: 239236 - RNA, 12 nt, Molluscum contagiosum virus
gacaccgcgggc

SEQ ID NO: 239237 - RNA, 19 nt, Molluscum contagiosum virus
gagagcguacucgggccgc

SEQ ID NO: 239238 - RNA, 15 nt, Molluscum contagiosum virus
gauugcccgcgcgcg

SEQ ID NO: 239239 - RNA, 18 nt, Molluscum contagiosum virus
gaggaaaagcacgcggcc

SEQ ID NO: 239240 - RNA, 20 nt, Molluscum contagiosum virus
gagcggcacgggaaggcucu

SEQ ID NO: 239241 - RNA, 14 nt, Molluscum contagiosum virus
gagcggcgcgcgcu

SEQ ID NO: 239242 - RNA, 15 nt, Molluscum contagiosum virus
gaggaccgcgagcgc

SEQ ID NO: 239243 - RNA, 18 nt, Molluscum contagiosum virus
gaggaccucgcgcgccgc

SEQ ID NO: 239244 - RNA, 22 nt, Molluscum contagiosum virus
gaggacgagccccgcgccggcg

SEQ ID NO: 239245 - RNA, 12 nt, Molluscum contagiosum virus
gaggacgcgggc

SEQ ID NO: 239246 - RNA, 20 nt, Molluscum contagiosum virus
gauggaccgguuccgugcgc

SEQ ID NO: 239247 - RNA, 14 nt, Molluscum contagiosum virus
gauggacgccagcu

SEQ ID NO: 239248 - RNA, 13 nt, Molluscum contagiosum virus
gauggcguggcgg

SEQ ID NO: 239249 - RNA, 14 nt, Molluscum contagiosum virus
gauggcucgcgggc

SEQ ID NO: 239250 - RNA, 14 nt, Molluscum contagiosum virus
gauguucucgccag

SEQ ID NO: 239251 - RNA, 16 nt, Molluscum contagiosum virus
gagcuccccgcgcgca

SEQ ID NO: 239252 - RNA, 16 nt, Molluscum contagiosum virus
gagcucgucgcgcgcg

SEQ ID NO: 239253 - RNA, 21 nt, Molluscum contagiosum virus
gagcucuucgacagcgugcgc

SEQ ID NO: 239254 - RNA, 14 nt, Molluscum contagiosum virus
gagcugcgugugcc

SEQ ID NO: 239255 - RNA, 15 nt, Molluscum contagiosum virus
gagcugcugcgcuac

SEQ ID NO: 239256 - RNA, 18 nt, Molluscum contagiosum virus
gagcuggagcgagugcgc

SEQ ID NO: 239257 - RNA, 20 nt, Molluscum contagiosum virus
gagcuggccgaagucgcagc

SEQ ID NO: 239258 - RNA, 15 nt, Molluscum contagiosum virus
gagcuggcugggcac

SEQ ID NO: 239259 - RNA, 23 nt, Molluscum contagiosum virus
gagcugggauaacaggcgugcgc

SEQ ID NO: 239260 - RNA, 22 nt, Molluscum contagiosum virus
gagcuguucaacaucguggcgc

SEQ ID NO: 239261 - RNA, 12 nt, Molluscum contagiosum virus
gagcgcgcgcac

SEQ ID NO: 239262 - RNA, 12 nt, Molluscum contagiosum virus
gagcgcgcgugc

SEQ ID NO: 239263 - RNA, 21 nt, Molluscum contagiosum virus
gagcgcggcuuacacacgcac

SEQ ID NO: 239264 - RNA, 20 nt, Molluscum contagiosum virus
gagcgcccgugcuugcgcac

SEQ ID NO: 239265 - RNA, 15 nt, Molluscum contagiosum virus
gagcgccgcgugcgc

SEQ ID NO: 239266 - RNA, 14 nt, Molluscum contagiosum virus
gagcgagcacgcca

SEQ ID NO: 239267 - RNA, 15 nt, Molluscum contagiosum virus
accagccgcugcgcc

SEQ ID NO: 239268 - RNA, 16 nt, Molluscum contagiosum virus
accaguacaucaccgc

SEQ ID NO: 239269 - RNA, 22 nt, Molluscum contagiosum virus
accccagugcgagaucgacugc

SEQ ID NO: 239270 - RNA, 17 nt, Molluscum contagiosum virus
acauguugugcucgugu

SEQ ID NO: 239271 - RNA, 15 nt, Molluscum contagiosum virus
accaagaagcccgag

SEQ ID NO: 239272 - RNA, 19 nt, Molluscum contagiosum virus
accaagguggggcgcaucc

SEQ ID NO: 239273 - RNA, 17 nt, Molluscum contagiosum virus
acccgugcccgcuccgc

SEQ ID NO: 239274 - RNA, 22 nt, Molluscum contagiosum virus
acccuggcugcugcgcgaccgc

SEQ ID NO: 239275 - RNA, 13 nt, Molluscum contagiosum virus
acccggcacgugc

SEQ ID NO: 239276 - RNA, 16 nt, Molluscum contagiosum virus
acccggcucgcucauc

SEQ ID NO: 239277 - RNA, 21 nt, Molluscum contagiosum virus
accccgagcugcggcgcgugc

SEQ ID NO: 239278 - RNA, 15 nt, Molluscum contagiosum virus
acauccggcacgugc

SEQ ID NO: 239279 - RNA, 17 nt, Molluscum contagiosum virus
acaugaucgacgaggac

SEQ ID NO: 239280 - RNA, 16 nt, Molluscum contagiosum virus
acaugcaacgcaggac

SEQ ID NO: 239281 - RNA, 22 nt, Molluscum contagiosum virus
acaucaucgcggagcugcgcgc

SEQ ID NO: 239282 - RNA, 16 nt, Molluscum contagiosum virus
acacucgugcucgugu

SEQ ID NO: 239283 - RNA, 15 nt, Molluscum contagiosum virus
acacucuucgcaggc

SEQ ID NO: 239284 - RNA, 21 nt, Molluscum contagiosum virus
acacugcagaaacagccgugc

SEQ ID NO: 239285 - RNA, 17 nt, Molluscum contagiosum virus
acacugucucugcgcga

SEQ ID NO: 239286 - RNA, 13 nt, Molluscum contagiosum virus
acagacggcgcgc

SEQ ID NO: 239287 - RNA, 16 nt, Molluscum contagiosum virus
acagagugccuggcgc

SEQ ID NO: 239288 - RNA, 16 nt, Molluscum contagiosum virus
acagcaagcagcgcgc

SEQ ID NO: 239289 - RNA, 16 nt, Molluscum contagiosum virus
acagcacggcacgugc

SEQ ID NO: 239290 - RNA, 18 nt, Molluscum contagiosum virus
acagccccugcugcucgc

SEQ ID NO: 239291 - RNA, 15 nt, Molluscum contagiosum virus
acagccgccugccgc

SEQ ID NO: 239292 - RNA, 19 nt, Molluscum contagiosum virus
acagccgcuuucugggcgc

SEQ ID NO: 239293 - RNA, 22 nt, Molluscum contagiosum virus
acagccuagaaacgacgggcgc

SEQ ID NO: 239294 - RNA, 18 nt, Molluscum contagiosum virus
acagccuguguugcgcgc

SEQ ID NO: 239295 - RNA, 13 nt, Molluscum contagiosum virus
acagcgcgcgugc

SEQ ID NO: 239296 - RNA, 21 nt, Molluscum contagiosum virus
acagcguguucggggccgcga

SEQ ID NO: 239297 - RNA, 23 nt, Molluscum contagiosum virus
acacgacgacggcugcucgcugc

SEQ ID NO: 239298 - RNA, 21 nt, Molluscum contagiosum virus
acacgaggggcaagcucgcgc

SEQ ID NO: 239299 - RNA, 14 nt, Molluscum contagiosum virus
acacgcgcgcgugc

SEQ ID NO: 239300 - RNA, 13 nt, Molluscum contagiosum virus
acacgcgcggcgg

SEQ ID NO: 239301 - RNA, 20 nt, Molluscum contagiosum virus
acaccuggcgagcgcucugc

SEQ ID NO: 239302 - RNA, 16 nt, Molluscum contagiosum virus
acacauggccgcgcgc

SEQ ID NO: 239303 - RNA, 16 nt, Molluscum contagiosum virus
aaggcacccgcaggaa

SEQ ID NO: 239304 - RNA, 12 nt, Molluscum contagiosum virus
aaggcgccgcgu

SEQ ID NO: 239305 - RNA, 15 nt, Molluscum contagiosum virus
aaggcgggcccgcga

SEQ ID NO: 239306 - RNA, 19 nt, Molluscum contagiosum virus
aaggcgguggcggcucugc

SEQ ID NO: 239307 - RNA, 16 nt, Molluscum contagiosum virus
aaggcgugcgccgugc

SEQ ID NO: 239308 - RNA, 16 nt, Molluscum contagiosum virus
aagggcggucccgcga

SEQ ID NO: 239309 - RNA, 12 nt, Molluscum contagiosum virus
aagugcgcgugu

SEQ ID NO: 239310 - RNA, 17 nt, Molluscum contagiosum virus
aagguaccccgcaggaa

SEQ ID NO: 239311 - RNA, 16 nt, Molluscum contagiosum virus
aagguacccgcaggaa

SEQ ID NO: 239312 - RNA, 23 nt, Molluscum contagiosum virus
aaguaccagccgcugcgccgcca

SEQ ID NO: 239313 - RNA, 22 nt, Molluscum contagiosum virus
aagauauacaccaggcgcgugc

SEQ ID NO: 239314 - RNA, 15 nt, Molluscum contagiosum virus
aagauccaagcgcaa

SEQ ID NO: 239315 - RNA, 14 nt, Molluscum contagiosum virus
aagaugcugcgcgu

SEQ ID NO: 239316 - RNA, 18 nt, Molluscum contagiosum virus
aagcagguggccgcgcgc

SEQ ID NO: 239317 - RNA, 17 nt, Molluscum contagiosum virus
aagcauggucuucgcgc

SEQ ID NO: 239318 - RNA, 17 nt, Molluscum contagiosum virus
aagccaccgcgcaggac

SEQ ID NO: 239319 - RNA, 14 nt, Molluscum contagiosum virus
aagcgccgcgcgcg

SEQ ID NO: 239320 - RNA, 14 nt, Molluscum contagiosum virus
aagcgcgcucgggc

SEQ ID NO: 239321 - RNA, 13 nt, Molluscum contagiosum virus
aagcgcggccgcg

SEQ ID NO: 239322 - RNA, 19 nt, Molluscum contagiosum virus
acaacucauagcgccacga

SEQ ID NO: 239323 - RNA, 15 nt, Molluscum contagiosum virus
acaagaagcgcuucu

SEQ ID NO: 239324 - RNA, 23 nt, Molluscum contagiosum virus
acaagaagcgcuucuuugcgcgc

SEQ ID NO: 239325 - RNA, 16 nt, Molluscum contagiosum virus
acaagcguguucgugc

SEQ ID NO: 239326 - RNA, 19 nt, Molluscum contagiosum virus
acaagcugcaccggcgcga

SEQ ID NO: 239327 - RNA, 21 nt, Molluscum contagiosum virus
acaagucgucgaucgccucga

SEQ ID NO: 239328 - RNA, 18 nt, Molluscum contagiosum virus
acaaucucugcgccgcgc

SEQ ID NO: 239329 - RNA, 12 nt, Molluscum contagiosum virus
acacacucgcgc

SEQ ID NO: 239330 - RNA, 18 nt, Molluscum contagiosum virus
aaugcaugcggagcuggc

SEQ ID NO: 239331 - RNA, 22 nt, Molluscum contagiosum virus
aaugcgguucacuagcgcaggc

SEQ ID NO: 239332 - RNA, 13 nt, Molluscum contagiosum virus
agaccacgcgcgc

SEQ ID NO: 239333 - RNA, 20 nt, Molluscum contagiosum virus
agacgcagcgcgagcugugc

SEQ ID NO: 239334 - RNA, 14 nt, Molluscum contagiosum virus
agacgcgcucgcgc

SEQ ID NO: 239335 - RNA, 15 nt, Molluscum contagiosum virus
agacgcuagcugugc

SEQ ID NO: 239336 - RNA, 15 nt, Molluscum contagiosum virus
acguacagugcgcgc

SEQ ID NO: 239337 - RNA, 22 nt, Molluscum contagiosum virus
agacaucaucgcggagcugcgc

SEQ ID NO: 239338 - RNA, 14 nt, Molluscum contagiosum virus
acgucuucuaccgc

SEQ ID NO: 239339 - RNA, 16 nt, Molluscum contagiosum virus
acgugacgcgccucga

SEQ ID NO: 239340 - RNA, 14 nt, Molluscum contagiosum virus
acgugcagcggcgc

SEQ ID NO: 239341 - RNA, 15 nt, Molluscum contagiosum virus
acgugcccuacgcgc

SEQ ID NO: 239342 - RNA, 21 nt, Molluscum contagiosum virus
acgugcgccagcucugggcgc

SEQ ID NO: 239343 - RNA, 19 nt, Molluscum contagiosum virus
acgugcugcagcugcgcga

SEQ ID NO: 239344 - RNA, 15 nt, Molluscum contagiosum virus
acggugcugcgcacg

SEQ ID NO: 239345 - RNA, 22 nt, Molluscum contagiosum virus
acggcgugacggugcugcgcac

SEQ ID NO: 239346 - RNA, 17 nt, Molluscum contagiosum virus
acggcuaggcgcggcgg

SEQ ID NO: 239347 - RNA, 18 nt, Molluscum contagiosum virus
acggcuucauccgcgcgc

SEQ ID NO: 239348 - RNA, 15 nt, Molluscum contagiosum virus
acgggcacgccgcgg

SEQ ID NO: 239349 - RNA, 14 nt, Molluscum contagiosum virus
acgggcacgcgcgc

SEQ ID NO: 239350 - RNA, 21 nt, Molluscum contagiosum virus
acgggcgcuauugcgcggcgc

SEQ ID NO: 239351 - RNA, 18 nt, Molluscum contagiosum virus
acgggcucgaucugcgcc

SEQ ID NO: 239352 - RNA, 19 nt, Molluscum contagiosum virus
acggcggcacccgccgcgg

SEQ ID NO: 239353 - RNA, 15 nt, Molluscum contagiosum virus
acggcggcgcucaac

SEQ ID NO: 239354 - RNA, 17 nt, Molluscum contagiosum virus
acggcccgggugcgcgc

SEQ ID NO: 239355 - RNA, 19 nt, Molluscum contagiosum virus
acggcccgggugcgcgcgc

SEQ ID NO: 239356 - RNA, 12 nt, Molluscum contagiosum virus
acggccgcgcgc

SEQ ID NO: 239357 - RNA, 16 nt, Molluscum contagiosum virus
acggccggcgccgcgc

SEQ ID NO: 239358 - RNA, 12 nt, Molluscum contagiosum virus
acggccugcggc

SEQ ID NO: 239359 - RNA, 13 nt, Molluscum contagiosum virus
acggccuucgcgc

SEQ ID NO: 239360 - RNA, 18 nt, Molluscum contagiosum virus
acggcgacgcgaucgugc

SEQ ID NO: 239361 - RNA, 14 nt, Molluscum contagiosum virus
acggcgcccaggaa

SEQ ID NO: 239362 - RNA, 20 nt, Molluscum contagiosum virus
acggcgccuucgucgcgcgc

SEQ ID NO: 239363 - RNA, 13 nt, Molluscum contagiosum virus
acggcgcgcgcgc

SEQ ID NO: 239364 - RNA, 19 nt, Molluscum contagiosum virus
acggcgcggaucugcgcac

SEQ ID NO: 239365 - RNA, 20 nt, Molluscum contagiosum virus
acggcgcggaucugcgcaca

SEQ ID NO: 239366 - RNA, 14 nt, Molluscum contagiosum virus
acggcgcugcgcgu

SEQ ID NO: 239367 - RNA, 15 nt, Molluscum contagiosum virus
acgcuggcgcucggc

SEQ ID NO: 239368 - RNA, 12 nt, Molluscum contagiosum virus
acggacccgcga

SEQ ID NO: 239369 - RNA, 19 nt, Molluscum contagiosum virus
acggacgcccuccucgacc

SEQ ID NO: 239370 - RNA, 12 nt, Molluscum contagiosum virus
acggacgcggcc

SEQ ID NO: 239371 - RNA, 20 nt, Molluscum contagiosum virus
acggcaaacgccacuggguc

SEQ ID NO: 239372 - RNA, 14 nt, Molluscum contagiosum virus
acggcacgcugagc

SEQ ID NO: 239373 - RNA, 22 nt, Molluscum contagiosum virus
acggcacgugcguacgcggcgc

SEQ ID NO: 239374 - RNA, 20 nt, Molluscum contagiosum virus
acggcacuaaggccgucagc

SEQ ID NO: 239375 - RNA, 15 nt, Molluscum contagiosum virus
acggacucgccgcgc

SEQ ID NO: 239376 - RNA, 21 nt, Molluscum contagiosum virus
acggacuuuucgcgcgugcgc

SEQ ID NO: 239377 - RNA, 18 nt, Molluscum contagiosum virus
aggcaaagccugcugcgc

SEQ ID NO: 239378 - RNA, 20 nt, Molluscum contagiosum virus
aggcaaagcggggcgcgcgc

SEQ ID NO: 239379 - RNA, 20 nt, Molluscum contagiosum virus
aggcaccugcggcucgcacu

SEQ ID NO: 239380 - RNA, 16 nt, Molluscum contagiosum virus
aggcacuccagcgcgc

SEQ ID NO: 239381 - RNA, 13 nt, Molluscum contagiosum virus
aggcacuccgcgc

SEQ ID NO: 239382 - RNA, 15 nt, Molluscum contagiosum virus
aggcagcugcugcgc

SEQ ID NO: 239383 - RNA, 19 nt, Molluscum contagiosum virus
aggagcuccgugcugcggc

SEQ ID NO: 239384 - RNA, 13 nt, Molluscum contagiosum virus
aggagagcggcgc

SEQ ID NO: 239385 - RNA, 21 nt, Molluscum contagiosum virus
aggagccucuguccugcgugc

SEQ ID NO: 239386 - RNA, 17 nt, Molluscum contagiosum virus
aggacaaagucgcgcgc

SEQ ID NO: 239387 - RNA, 21 nt, Molluscum contagiosum virus
aggaccucgcgcgccgccgca

SEQ ID NO: 239388 - RNA, 14 nt, Molluscum contagiosum virus
aggacgcgcggagc

SEQ ID NO: 239389 - RNA, 19 nt, Molluscum contagiosum virus
aggacgcguucuccaggaa

SEQ ID NO: 239390 - RNA, 22 nt, Molluscum contagiosum virus
agccgccgcuacuacggagcga

SEQ ID NO: 239391 - RNA, 18 nt, Molluscum contagiosum virus
agccgcugcgccgccagc

SEQ ID NO: 239392 - RNA, 18 nt, Molluscum contagiosum virus
agccgcuucgggcucagc

SEQ ID NO: 239393 - RNA, 21 nt, Molluscum contagiosum virus
agccguccgccucgagcacgc

SEQ ID NO: 239394 - RNA, 18 nt, Molluscum contagiosum virus
agacgucccgcagugugc

SEQ ID NO: 239395 - RNA, 17 nt, Molluscum contagiosum virus
agacguggugcucgugg

SEQ ID NO: 239396 - RNA, 13 nt, Molluscum contagiosum virus
agagaaccugugc

SEQ ID NO: 239397 - RNA, 15 nt, Molluscum contagiosum virus
agagaaccugugcgc

SEQ ID NO: 239398 - RNA, 14 nt, Molluscum contagiosum virus
agaucaacgcgcgc

SEQ ID NO: 239399 - RNA, 18 nt, Molluscum contagiosum virus
agaucaggcagcugcugc

SEQ ID NO: 239400 - RNA, 17 nt, Molluscum contagiosum virus
agagcacgcgcucgcgc

SEQ ID NO: 239401 - RNA, 14 nt, Molluscum contagiosum virus
agagcacugcgcgu

SEQ ID NO: 239402 - RNA, 16 nt, Molluscum contagiosum virus
agagcuccccgcgcgc

SEQ ID NO: 239403 - RNA, 18 nt, Molluscum contagiosum virus
agagcuggcaccgggcgc

SEQ ID NO: 239404 - RNA, 14 nt, Molluscum contagiosum virus
agcaagcgcccgcg

SEQ ID NO: 239405 - RNA, 15 nt, Molluscum contagiosum virus
agcaccugcgcuucc

SEQ ID NO: 239406 - RNA, 16 nt, Molluscum contagiosum virus
agcacgacggucuucc

SEQ ID NO: 239407 - RNA, 15 nt, Molluscum contagiosum virus
agcacgcgugugcga

SEQ ID NO: 239408 - RNA, 19 nt, Molluscum contagiosum virus
agcagcuccagcauggcgc

SEQ ID NO: 239409 - RNA, 18 nt, Molluscum contagiosum virus
agcagcugcugcgcuucg

SEQ ID NO: 239410 - RNA, 15 nt, Molluscum contagiosum virus
agcagugccgcucgc

SEQ ID NO: 239411 - RNA, 18 nt, Molluscum contagiosum virus
agccccgcggacggacga

SEQ ID NO: 239412 - RNA, 17 nt, Molluscum contagiosum virus
agcccgcggcgcgcagc

SEQ ID NO: 239413 - RNA, 14 nt, Molluscum contagiosum virus
agcccgcggugcgc

SEQ ID NO: 239414 - RNA, 20 nt, Molluscum contagiosum virus
agcccggaagcuugcucagc

SEQ ID NO: 239415 - RNA, 19 nt, Molluscum contagiosum virus
aacgcgaggccggccgugc

SEQ ID NO: 239416 - RNA, 14 nt, Molluscum contagiosum virus
aacgcgcgcucguc

SEQ ID NO: 239417 - RNA, 17 nt, Molluscum contagiosum virus
aacgcggcgugugcggg

SEQ ID NO: 239418 - RNA, 13 nt, Molluscum contagiosum virus
aacgggcucgugc

SEQ ID NO: 239419 - RNA, 17 nt, Molluscum contagiosum virus
aaccuacuugcucgugu

SEQ ID NO: 239420 - RNA, 13 nt, Molluscum contagiosum virus
aacgacgggcgcg

SEQ ID NO: 239421 - RNA, 14 nt, Molluscum contagiosum virus
aacgacuagcgugc

SEQ ID NO: 239422 - RNA, 16 nt, Molluscum contagiosum virus
aacugcagcagcuggc

SEQ ID NO: 239423 - RNA, 14 nt, Molluscum contagiosum virus
aacucugcucgugc

SEQ ID NO: 239424 - RNA, 15 nt, Molluscum contagiosum virus
aagacgggcccgcga

SEQ ID NO: 239425 - RNA, 15 nt, Molluscum contagiosum virus
aagacggggccgcga

SEQ ID NO: 239426 - RNA, 22 nt, Molluscum contagiosum virus
aagacguggacgaggccaaccu

SEQ ID NO: 239427 - RNA, 22 nt, Molluscum contagiosum virus
aagaagaggccagcacaagccg

SEQ ID NO: 239428 - RNA, 22 nt, Molluscum contagiosum virus
aagaagaggccggcacaagccg

SEQ ID NO: 239429 - RNA, 22 nt, Molluscum contagiosum virus
aacagcuuggcacagugcugga

SEQ ID NO: 239430 - RNA, 18 nt, Molluscum contagiosum virus
agguucguccgcucgugc

SEQ ID NO: 239431 - RNA, 16 nt, Molluscum contagiosum virus
aggucacgacgagcga

SEQ ID NO: 239432 - RNA, 18 nt, Molluscum contagiosum virus
aggucgagcgcgccgcgc

SEQ ID NO: 239433 - RNA, 15 nt, Molluscum contagiosum virus
agggucacgcgcaca

SEQ ID NO: 239434 - RNA, 19 nt, Molluscum contagiosum virus
aggggugauggcggugagc

SEQ ID NO: 239435 - RNA, 24 nt, Molluscum contagiosum virus
aggcgcgccauggcgagcuagugc

SEQ ID NO: 239436 - RNA, 14 nt, Molluscum contagiosum virus
aggccgagaugagc

SEQ ID NO: 239437 - RNA, 18 nt, Molluscum contagiosum virus
aggccgcccacgcucaac

SEQ ID NO: 239438 - RNA, 17 nt, Molluscum contagiosum virus
aggccuucgcgcccgac

SEQ ID NO: 239439 - RNA, 23 nt, Molluscum contagiosum virus
aggcgcaccuugacgccgcgcgc

SEQ ID NO: 239440 - RNA, 15 nt, Molluscum contagiosum virus
agggcacgcugcaca

SEQ ID NO: 239441 - RNA, 16 nt, Molluscum contagiosum virus
agggcucgccaugcug

SEQ ID NO: 239442 - RNA, 20 nt, Molluscum contagiosum virus
agggcuuccccccacggcag

SEQ ID NO: 239443 - RNA, 16 nt, Molluscum contagiosum virus
aggggcaagcucgcgc

SEQ ID NO: 239444 - RNA, 22 nt, Molluscum contagiosum virus
aguacgagcgcguaagaccaug

SEQ ID NO: 239445 - RNA, 14 nt, Molluscum contagiosum virus
caagauucugcgga

SEQ ID NO: 239446 - RNA, 17 nt, Molluscum contagiosum virus
caagcacaacgggcucg

SEQ ID NO: 239447 - RNA, 15 nt, Molluscum contagiosum virus
caagcaggcaugcaa

SEQ ID NO: 239448 - RNA, 20 nt, Molluscum contagiosum virus
caagcagguggccgcgcgcg

SEQ ID NO: 239449 - RNA, 15 nt, Molluscum contagiosum virus
caagcccagcagcga

SEQ ID NO: 239450 - RNA, 21 nt, Molluscum contagiosum virus
caagcccgaguucgcggcgcg

SEQ ID NO: 239451 - RNA, 15 nt, Molluscum contagiosum virus
caagccgcaggcgcg

SEQ ID NO: 239452 - RNA, 22 nt, Molluscum contagiosum virus
caagccguccgccucgagcacg

SEQ ID NO: 239453 - RNA, 14 nt, Molluscum contagiosum virus
caagcgcccgcgag

SEQ ID NO: 239454 - RNA, 21 nt, Molluscum contagiosum virus
caagcgcuacuugcuggcgcg

SEQ ID NO: 239455 - RNA, 21 nt, Molluscum contagiosum virus
caagcggucaggccgggcgcg

SEQ ID NO: 239456 - RNA, 17 nt, Molluscum contagiosum virus
caagcugcaccggcgcg

SEQ ID NO: 239457 - RNA, 18 nt, Molluscum contagiosum virus
caaugcagugcaccagca

SEQ ID NO: 239458 - RNA, 21 nt, Molluscum contagiosum virus
caauggcgcgcgagcacagcg

SEQ ID NO: 239459 - RNA, 13 nt, Molluscum contagiosum virus
caaggacaccgcg

SEQ ID NO: 239460 - RNA, 21 nt, Molluscum contagiosum virus
caagucggggcccucggcgcg

SEQ ID NO: 239461 - RNA, 17 nt, Molluscum contagiosum virus
caagguuugcgggcgca

SEQ ID NO: 239462 - RNA, 20 nt, Molluscum contagiosum virus
caaguacaugcacgucgaca

SEQ ID NO: 239463 - RNA, 13 nt, Molluscum contagiosum virus
caagucacugcua

SEQ ID NO: 239464 - RNA, 16 nt, Molluscum contagiosum virus
caaggccgcgggcgcg

SEQ ID NO: 239465 - RNA, 22 nt, Molluscum contagiosum virus
caaggcgcgcaucgcgggcacg

SEQ ID NO: 239466 - RNA, 17 nt, Molluscum contagiosum virus
caagggccugcgggcgg

SEQ ID NO: 239467 - RNA, 17 nt, Molluscum contagiosum virus
cacacuugcacgcgcac

SEQ ID NO: 239468 - RNA, 21 nt, Molluscum contagiosum virus
cacaguccaacccgcggcgcg

SEQ ID NO: 239469 - RNA, 10 nt, Molluscum contagiosum virus
cacacacacu

SEQ ID NO: 239470 - RNA, 14 nt, Molluscum contagiosum virus
cacacaccgcgagc

SEQ ID NO: 239471 - RNA, 15 nt, Molluscum contagiosum virus
cacacacgaacgcac

SEQ ID NO: 239472 - RNA, 13 nt, Molluscum contagiosum virus
cacauccgcuacc

SEQ ID NO: 239473 - RNA, 15 nt, Molluscum contagiosum virus
cacauugcugcugca

SEQ ID NO: 239474 - RNA, 18 nt, Molluscum contagiosum virus
caccacggccgacggcac

SEQ ID NO: 239475 - RNA, 20 nt, Molluscum contagiosum virus
caccagacaaagucgacgac

SEQ ID NO: 239476 - RNA, 18 nt, Molluscum contagiosum virus
cacgcugcugcgugcgcg

SEQ ID NO: 239477 - RNA, 16 nt, Molluscum contagiosum virus
cacgcuggcgcucggc

SEQ ID NO: 239478 - RNA, 19 nt, Molluscum contagiosum virus
cacgcuugugcgcacgcug

SEQ ID NO: 239479 - RNA, 16 nt, Molluscum contagiosum virus
cacggacccgggcgcg

SEQ ID NO: 239480 - RNA, 20 nt, Molluscum contagiosum virus
cacggacccgggcgcggcac

SEQ ID NO: 239481 - RNA, 15 nt, Molluscum contagiosum virus
cacggauacgcgcac

SEQ ID NO: 239482 - RNA, 17 nt, Molluscum contagiosum virus
cacggauacgcgcacac

SEQ ID NO: 239483 - RNA, 22 nt, Molluscum contagiosum virus
cacucgcgaacuacgagcgcac

SEQ ID NO: 239484 - RNA, 20 nt, Molluscum contagiosum virus
cacgugccccgcgcgugcag

SEQ ID NO: 239485 - RNA, 19 nt, Molluscum contagiosum virus
cacguuccagagcacugcg

SEQ ID NO: 239486 - RNA, 22 nt, Molluscum contagiosum virus
cacguugggguugucgggcgcu

SEQ ID NO: 239487 - RNA, 19 nt, Molluscum contagiosum virus
cacguuuuucgcgggcgcc

SEQ ID NO: 239488 - RNA, 18 nt, Molluscum contagiosum virus
cacugcggcaacgagcac

SEQ ID NO: 239489 - RNA, 15 nt, Molluscum contagiosum virus
cagaagcgagagcgc

SEQ ID NO: 239490 - RNA, 15 nt, Molluscum contagiosum virus
cagaccaagaagccc

SEQ ID NO: 239491 - RNA, 18 nt, Molluscum contagiosum virus
cacggcuugccgcucggc

SEQ ID NO: 239492 - RNA, 17 nt, Molluscum contagiosum virus
caccccgcugggccgca

SEQ ID NO: 239493 - RNA, 23 nt, Molluscum contagiosum virus
cacggugugcuacugcacugcag

SEQ ID NO: 239494 - RNA, 22 nt, Molluscum contagiosum virus
cacggcguucaccuuggcgcug

SEQ ID NO: 239495 - RNA, 18 nt, Molluscum contagiosum virus
cacggccuccagcagcgg

SEQ ID NO: 239496 - RNA, 20 nt, Molluscum contagiosum virus
ccaacucugugaccugcgcc

SEQ ID NO: 239497 - RNA, 16 nt, Molluscum contagiosum virus
ccaccguggaggagcc

SEQ ID NO: 239498 - RNA, 14 nt, Molluscum contagiosum virus
ccaccgcggcgcgg

SEQ ID NO: 239499 - RNA, 17 nt, Molluscum contagiosum virus
ccagauccgggcgcugc

SEQ ID NO: 239500 - RNA, 17 nt, Molluscum contagiosum virus
ccagauguucucgccag

SEQ ID NO: 239501 - RNA, 15 nt, Molluscum contagiosum virus
ccagacgcagagcca

SEQ ID NO: 239502 - RNA, 18 nt, Molluscum contagiosum virus
ccacgcgcaugaggcggc

SEQ ID NO: 239503 - RNA, 13 nt, Molluscum contagiosum virus
ccacgagcgccgc

SEQ ID NO: 239504 - RNA, 13 nt, Molluscum contagiosum virus
ccacgugcgcugg

SEQ ID NO: 239505 - RNA, 20 nt, Molluscum contagiosum virus
ccagcagagcugcccgccag

SEQ ID NO: 239506 - RNA, 15 nt, Molluscum contagiosum virus
ccagcggcugcccgc

SEQ ID NO: 239507 - RNA, 15 nt, Molluscum contagiosum virus
ccagcgugugaccgc

SEQ ID NO: 239508 - RNA, 13 nt, Molluscum contagiosum virus
ccagcuccgcgcg

SEQ ID NO: 239509 - RNA, 19 nt, Molluscum contagiosum virus
ccagccaggcgccggcgcg

SEQ ID NO: 239510 - RNA, 16 nt, Molluscum contagiosum virus
ccagccaucgugcgcg

SEQ ID NO: 239511 - RNA, 23 nt, Molluscum contagiosum virus
ccagccgcucguccagcugcgcg

SEQ ID NO: 239512 - RNA, 19 nt, Molluscum contagiosum virus
ccagccgcugcgccgccag

SEQ ID NO: 239513 - RNA, 21 nt, Molluscum contagiosum virus
ccagccugcuggcaccgcgcg

SEQ ID NO: 239514 - RNA, 15 nt, Molluscum contagiosum virus
ccagcgauugcccgc

SEQ ID NO: 239515 - RNA, 18 nt, Molluscum contagiosum virus
ccagcgauugcccgcgcg

SEQ ID NO: 239516 - RNA, 16 nt, Molluscum contagiosum virus
ccagcgccgccucgcg

SEQ ID NO: 239517 - RNA, 14 nt, Molluscum contagiosum virus
ccagcgccuccgcg

SEQ ID NO: 239518 - RNA, 16 nt, Molluscum contagiosum virus
ccagcgcgcccaccag

SEQ ID NO: 239519 - RNA, 18 nt, Molluscum contagiosum virus
ccagcgcgcccaccagca

SEQ ID NO: 239520 - RNA, 19 nt, Molluscum contagiosum virus
cccaaggccgcgggcgcgg

SEQ ID NO: 239521 - RNA, 15 nt, Molluscum contagiosum virus
ccauggaggcgcuag

SEQ ID NO: 239522 - RNA, 17 nt, Molluscum contagiosum virus
ccauggucacgcgcacg

SEQ ID NO: 239523 - RNA, 21 nt, Molluscum contagiosum virus
ccauguuuccugcggcgcugc

SEQ ID NO: 239524 - RNA, 17 nt, Molluscum contagiosum virus
cagagcauuagcagcga

SEQ ID NO: 239525 - RNA, 20 nt, Molluscum contagiosum virus
cagagccaugcccgggcgug

SEQ ID NO: 239526 - RNA, 19 nt, Molluscum contagiosum virus
cagagcuccccgcgcgcag

SEQ ID NO: 239527 - RNA, 23 nt, Molluscum contagiosum virus
cagcacaaagagcacggacagca

SEQ ID NO: 239528 - RNA, 14 nt, Molluscum contagiosum virus
cagcacgcgcgggc

SEQ ID NO: 239529 - RNA, 23 nt, Molluscum contagiosum virus
cagcacgcgcucguccgccgcgu

SEQ ID NO: 239530 - RNA, 12 nt, Molluscum contagiosum virus
cagcacugcgcc

SEQ ID NO: 239531 - RNA, 16 nt, Molluscum contagiosum virus
cagcagagcugcccgc

SEQ ID NO: 239532 - RNA, 16 nt, Molluscum contagiosum virus
cagcagccccgacgcc

SEQ ID NO: 239533 - RNA, 18 nt, Molluscum contagiosum virus
cagcagccgcagcccacg

SEQ ID NO: 239534 - RNA, 15 nt, Molluscum contagiosum virus
caucgacgagcacga

SEQ ID NO: 239535 - RNA, 14 nt, Molluscum contagiosum virus
cauccuccacgcug

SEQ ID NO: 239536 - RNA, 16 nt, Molluscum contagiosum virus
caucuacugcgacauc

SEQ ID NO: 239537 - RNA, 15 nt, Molluscum contagiosum virus
caugacgacgccgga

SEQ ID NO: 239538 - RNA, 15 nt, Molluscum contagiosum virus
caucgcgcugcuggu

SEQ ID NO: 239539 - RNA, 21 nt, Molluscum contagiosum virus
caucggagaagugcuccgcac

SEQ ID NO: 239540 - RNA, 20 nt, Molluscum contagiosum virus
cagcagucaguuccgcggcg

SEQ ID NO: 239541 - RNA, 16 nt, Molluscum contagiosum virus
cagcauucccggcgcg

SEQ ID NO: 239542 - RNA, 17 nt, Molluscum contagiosum virus
cagcauucccggcgcgc

SEQ ID NO: 239543 - RNA, 14 nt, Molluscum contagiosum virus
cauccggcacgcac

SEQ ID NO: 239544 - RNA, 14 nt, Molluscum contagiosum virus
cagcagcuggcgcg

SEQ ID NO: 239545 - RNA, 18 nt, Molluscum contagiosum virus
caugucaggccggucgcg

SEQ ID NO: 239546 - RNA, 14 nt, Molluscum contagiosum virus
caugugcgugcacc

SEQ ID NO: 239547 - RNA, 16 nt, Molluscum contagiosum virus
ccaacagcagcuggcg

SEQ ID NO: 239548 - RNA, 15 nt, Molluscum contagiosum virus
ccaacgauggcgugg

SEQ ID NO: 239549 - RNA, 21 nt, Molluscum contagiosum virus
ccaacgcaccggcagggaaau

SEQ ID NO: 239550 - RNA, 22 nt, Molluscum contagiosum virus
caugccuccguuucccgcggcg

SEQ ID NO: 239551 - RNA, 14 nt, Molluscum contagiosum virus
caugcgcgccgcgc

SEQ ID NO: 239552 - RNA, 16 nt, Molluscum contagiosum virus
caugcgcgcgcagcag

SEQ ID NO: 239553 - RNA, 18 nt, Molluscum contagiosum virus
caugcgcuugcggucgcg

SEQ ID NO: 239554 - RNA, 17 nt, Molluscum contagiosum virus
caugcugcccgcgcgcg

SEQ ID NO: 239555 - RNA, 17 nt, Molluscum contagiosum virus
caugcugcgcgagcgcg

SEQ ID NO: 239556 - RNA, 16 nt, Molluscum contagiosum virus
caugcuggcgggcgcg

SEQ ID NO: 239557 - RNA, 22 nt, Molluscum contagiosum virus
cauggaggacggcgcgggcgcg

SEQ ID NO: 239558 - RNA, 19 nt, Molluscum contagiosum virus
caugcgcaagcagcucggc

SEQ ID NO: 239559 - RNA, 22 nt, Molluscum contagiosum virus
cauggcucccgcacgcaccgcg

SEQ ID NO: 239560 - RNA, 15 nt, Molluscum contagiosum virus
ccgaagucgcagcag

SEQ ID NO: 239561 - RNA, 14 nt, Molluscum contagiosum virus
ccgagcccggccag

SEQ ID NO: 239562 - RNA, 22 nt, Molluscum contagiosum virus
ccgagcugcggcgcgugcugag

SEQ ID NO: 239563 - RNA, 18 nt, Molluscum contagiosum virus
ccgaguauucgcccauca

SEQ ID NO: 239564 - RNA, 20 nt, Molluscum contagiosum virus
ccgagcagaaggaagggccc

SEQ ID NO: 239565 - RNA, 16 nt, Molluscum contagiosum virus
ccgaugcagugcggau

SEQ ID NO: 239566 - RNA, 18 nt, Molluscum contagiosum virus
ccgauuuggacgcggcac

SEQ ID NO: 239567 - RNA, 19 nt, Molluscum contagiosum virus
ccgcaagugcacgcggcgc

SEQ ID NO: 239568 - RNA, 22 nt, Molluscum contagiosum virus
ccgcaggaaaggcaccccgcag

SEQ ID NO: 239569 - RNA, 21 nt, Molluscum contagiosum virus
ccgcaggaaagguacccgcag

SEQ ID NO: 239570 - RNA, 18 nt, Molluscum contagiosum virus
ccgcacucgccgcggaac

SEQ ID NO: 239571 - RNA, 16 nt, Molluscum contagiosum virus
ccgcagcccacgugcc

SEQ ID NO: 239572 - RNA, 16 nt, Molluscum contagiosum virus
ccgcauugggccuuga

SEQ ID NO: 239573 - RNA, 20 nt, Molluscum contagiosum virus
cccucacaccuagagcacga

SEQ ID NO: 239574 - RNA, 17 nt, Molluscum contagiosum virus
cccucguccggcgcucg

SEQ ID NO: 239575 - RNA, 16 nt, Molluscum contagiosum virus
cccucgucgcgcuucc

SEQ ID NO: 239576 - RNA, 20 nt, Molluscum contagiosum virus
cccugcuaguccgcguacag

SEQ ID NO: 239577 - RNA, 22 nt, Molluscum contagiosum virus
cccguggugggccgcggcgcgg

SEQ ID NO: 239578 - RNA, 16 nt, Molluscum contagiosum virus
cccgugcuugcgcacg

SEQ ID NO: 239579 - RNA, 20 nt, Molluscum contagiosum virus
cccguggcgcgccggcgcgg

SEQ ID NO: 239580 - RNA, 14 nt, Molluscum contagiosum virus
cccggaauuccgug

SEQ ID NO: 239581 - RNA, 17 nt, Molluscum contagiosum virus
cccggaucagccccgcg

SEQ ID NO: 239582 - RNA, 17 nt, Molluscum contagiosum virus
cccgccagaagugaaau

SEQ ID NO: 239583 - RNA, 15 nt, Molluscum contagiosum virus
cccgggggcgcuucc

SEQ ID NO: 239584 - RNA, 18 nt, Molluscum contagiosum virus
cccggcacgugccccgcg

SEQ ID NO: 239585 - RNA, 17 nt, Molluscum contagiosum virus
cccggcaggcucccgcu

SEQ ID NO: 239586 - RNA, 19 nt, Molluscum contagiosum virus
cccgcgcgcgacuacgcac

SEQ ID NO: 239587 - RNA, 18 nt, Molluscum contagiosum virus
cccgcgcggcucgcgcac

SEQ ID NO: 239588 - RNA, 16 nt, Molluscum contagiosum virus
cccgcgcucgccgcac

SEQ ID NO: 239589 - RNA, 22 nt, Molluscum contagiosum virus
cccgccgaguaccgcgcgcacg

SEQ ID NO: 239590 - RNA, 13 nt, Molluscum contagiosum virus
cccgccgcgugcc

SEQ ID NO: 239591 - RNA, 13 nt, Molluscum contagiosum virus
cccgcggcgcacg

SEQ ID NO: 239592 - RNA, 13 nt, Molluscum contagiosum virus
cccgcggcgugcc

SEQ ID NO: 239593 - RNA, 23 nt, Molluscum contagiosum virus
cccgcguccgugcgcagggcaau

SEQ ID NO: 239594 - RNA, 23 nt, Molluscum contagiosum virus
cccgagggcgcgaccggcgugcc

SEQ ID NO: 239595 - RNA, 19 nt, Molluscum contagiosum virus
ccccugcugcucgcggagg

SEQ ID NO: 239596 - RNA, 19 nt, Molluscum contagiosum virus
ccccggcguccggcgcucg

SEQ ID NO: 239597 - RNA, 12 nt, Molluscum contagiosum virus
cccccgcggagc

SEQ ID NO: 239598 - RNA, 20 nt, Molluscum contagiosum virus
ccccgaacugcugggcgugg

SEQ ID NO: 239599 - RNA, 17 nt, Molluscum contagiosum virus
ccgguggaagagcccgc

SEQ ID NO: 239600 - RNA, 19 nt, Molluscum contagiosum virus
ccguccgccucgagcacgc

SEQ ID NO: 239601 - RNA, 12 nt, Molluscum contagiosum virus
ccgggcgcacaa

SEQ ID NO: 239602 - RNA, 15 nt, Molluscum contagiosum virus
ccgggaaacgcacag

SEQ ID NO: 239603 - RNA, 20 nt, Molluscum contagiosum virus
ccggccuuguucgcgcuucu

SEQ ID NO: 239604 - RNA, 18 nt, Molluscum contagiosum virus
ccggcagcuggagcugcc

SEQ ID NO: 239605 - RNA, 13 nt, Molluscum contagiosum virus
ccgugaacucgac

SEQ ID NO: 239606 - RNA, 12 nt, Molluscum contagiosum virus
ccgugagcgcgc

SEQ ID NO: 239607 - RNA, 14 nt, Molluscum contagiosum virus
ccguguaccgccgc

SEQ ID NO: 239608 - RNA, 23 nt, Molluscum contagiosum virus
ccgugcugcgucacaagcaccgc

SEQ ID NO: 239609 - RNA, 13 nt, Molluscum contagiosum virus
ccgugggcgccgc

SEQ ID NO: 239610 - RNA, 18 nt, Molluscum contagiosum virus
ccguguccuacacgccgc

SEQ ID NO: 239611 - RNA, 20 nt, Molluscum contagiosum virus
ccuacguggcgucgcgccgc

SEQ ID NO: 239612 - RNA, 14 nt, Molluscum contagiosum virus
ccuagacacgagcg

SEQ ID NO: 239613 - RNA, 20 nt, Molluscum contagiosum virus
ccuagaggaugcggauccuc

SEQ ID NO: 239614 - RNA, 15 nt, Molluscum contagiosum virus
ccucaccgcgcacau

SEQ ID NO: 239615 - RNA, 17 nt, Molluscum contagiosum virus
ccucagccgagcgccgc

SEQ ID NO: 239616 - RNA, 14 nt, Molluscum contagiosum virus
ccuccagggcacga

SEQ ID NO: 239617 - RNA, 12 nt, Molluscum contagiosum virus
ccucgagcacgc

SEQ ID NO: 239618 - RNA, 13 nt, Molluscum contagiosum virus
ccucgagcgccgc

SEQ ID NO: 239619 - RNA, 20 nt, Molluscum contagiosum virus
ccucgcguagcagcgccugc

SEQ ID NO: 239620 - RNA, 23 nt, Molluscum contagiosum virus
ccgcgaaagaggaaagcgcacac

SEQ ID NO: 239621 - RNA, 23 nt, Molluscum contagiosum virus
ccgcgaacgagaaaugcgcacac

SEQ ID NO: 239622 - RNA, 19 nt, Molluscum contagiosum virus
ccgcgcccaagaagaagca

SEQ ID NO: 239623 - RNA, 14 nt, Molluscum contagiosum virus
ccgcgccgggcgcc

SEQ ID NO: 239624 - RNA, 15 nt, Molluscum contagiosum virus
ccgcgcgagcgcgcc

SEQ ID NO: 239625 - RNA, 13 nt, Molluscum contagiosum virus
ccgcgcgcgccag

SEQ ID NO: 239626 - RNA, 11 nt, Molluscum contagiosum virus
ccgcgcgucug

SEQ ID NO: 239627 - RNA, 12 nt, Molluscum contagiosum virus
ccgcgcguugcu

SEQ ID NO: 239628 - RNA, 22 nt, Molluscum contagiosum virus
ccgcgcguuuucccgaggcguc

SEQ ID NO: 239629 - RNA, 12 nt, Molluscum contagiosum virus
ccgcgcucgaca

SEQ ID NO: 239630 - RNA, 17 nt, Molluscum contagiosum virus
ccgcggcugccucgugc

SEQ ID NO: 239631 - RNA, 22 nt, Molluscum contagiosum virus
ccgcgggcacauggacggcgcc

SEQ ID NO: 239632 - RNA, 13 nt, Molluscum contagiosum virus
ccgcgggcgcacg

SEQ ID NO: 239633 - RNA, 14 nt, Molluscum contagiosum virus
ccgcggacucgugc

SEQ ID NO: 239634 - RNA, 14 nt, Molluscum contagiosum virus
ccgcggagcugugc

SEQ ID NO: 239635 - RNA, 20 nt, Molluscum contagiosum virus
ccgcggagggaggcucgagc

SEQ ID NO: 239636 - RNA, 20 nt, Molluscum contagiosum virus
ccgcgguguccuugcgccgc

SEQ ID NO: 239637 - RNA, 12 nt, Molluscum contagiosum virus
ccgcgugcaccc

SEQ ID NO: 239638 - RNA, 13 nt, Molluscum contagiosum virus
ccgcgugcgccgc

SEQ ID NO: 239639 - RNA, 14 nt, Molluscum contagiosum virus
ccgcgugcucgugu

SEQ ID NO: 239640 - RNA, 13 nt, Molluscum contagiosum virus
ccgcgugcucugc

SEQ ID NO: 239641 - RNA, 18 nt, Molluscum contagiosum virus
ccgcgugcucugcuccgc

SEQ ID NO: 239642 - RNA, 21 nt, Molluscum contagiosum virus
ccgcguucuucguggcgcugg

SEQ ID NO: 239643 - RNA, 14 nt, Molluscum contagiosum virus
ccggacguccaucc

SEQ ID NO: 239644 - RNA, 15 nt, Molluscum contagiosum virus
ccggagacaccagcu

SEQ ID NO: 239645 - RNA, 17 nt, Molluscum contagiosum virus
ccgcuucgugcgcggag

SEQ ID NO: 239646 - RNA, 20 nt, Molluscum contagiosum virus
ccggaaagauauacaccagg

SEQ ID NO: 239647 - RNA, 19 nt, Molluscum contagiosum virus
ccgcuagagugcgcggaag

SEQ ID NO: 239648 - RNA, 16 nt, Molluscum contagiosum virus
ccgcucggcacugcug

SEQ ID NO: 239649 - RNA, 18 nt, Molluscum contagiosum virus
ccgcucggcacugcuggc

SEQ ID NO: 239650 - RNA, 22 nt, Molluscum contagiosum virus
ccgcucguccagcugcgcgagc

SEQ ID NO: 239651 - RNA, 23 nt, Molluscum contagiosum virus
ccgcgcaauacgguggaggcgac

SEQ ID NO: 239652 - RNA, 13 nt, Molluscum contagiosum virus
ccgcugcgcggag

SEQ ID NO: 239653 - RNA, 19 nt, Moloney murine sarcoma virus
aaacaggauaucuguggua

SEQ ID NO: 239654 - RNA, 14 nt, Moloney murine sarcoma virus
aaacaggauaucug

SEQ ID NO: 239655 - RNA, 15 nt, Moloney murine sarcoma virus
aaacaggauaucugu

SEQ ID NO: 239656 - RNA, 16 nt, Moloney murine sarcoma virus
aaacaggauaucugug

SEQ ID NO: 239657 - RNA, 17 nt, Moloney murine sarcoma virus
aagaaacagcugaauac

SEQ ID NO: 239658 - RNA, 20 nt, Moloney murine sarcoma virus
aagaaacagcugaauaccaa

SEQ ID NO: 239659 - RNA, 14 nt, Moloney murine sarcoma virus
aacaggauaucugu

SEQ ID NO: 239660 - RNA, 15 nt, Moloney murine sarcoma virus
aacaggauaucugug

SEQ ID NO: 239661 - RNA, 19 nt, Moloney murine sarcoma virus
aacaggauaucugugguaa

SEQ ID NO: 239662 - RNA, 23 nt, Moloney murine sarcoma virus
agaaacagcugaauaccaaacag

SEQ ID NO: 239663 - RNA, 17 nt, Moloney murine sarcoma virus
agaaaaguucagaucaa

SEQ ID NO: 239664 - RNA, 20 nt, Moloney murine sarcoma virus
agaucaaggucaggaacaaa

SEQ ID NO: 239665 - RNA, 16 nt, Moloney murine sarcoma virus
accuuauuugaacuaa

SEQ ID NO: 239666 - RNA, 15 nt, Moloney murine sarcoma virus
acagcugagugaugg

SEQ ID NO: 239667 - RNA, 21 nt, Moloney murine sarcoma virus
acagcugagugaugggccaaa

SEQ ID NO: 239668 - RNA, 19 nt, Moloney murine sarcoma virus
acagcugaauaccaaacag

SEQ ID NO: 239669 - RNA, 12 nt, Moloney murine sarcoma virus
caaacaggauau

SEQ ID NO: 239670 - RNA, 20 nt, Moloney murine sarcoma virus
caaacaggauaucuguggua

SEQ ID NO: 239671 - RNA, 21 nt, Moloney murine sarcoma virus
caaacaggauaucugugguaa

SEQ ID NO: 239672 - RNA, 13 nt, Moloney murine sarcoma virus
caagaacagaugg

SEQ ID NO: 239673 - RNA, 23 nt, Moloney murine sarcoma virus
cagcugagugaugggccaaacag

SEQ ID NO: 239674 - RNA, 22 nt, Moloney murine sarcoma virus
caggaacaaagaaacagcugaa

SEQ ID NO: 239675 - RNA, 20 nt, Moloney murine sarcoma virus
cagcaguuucuagugaauca

SEQ ID NO: 239676 - RNA, 20 nt, Moloney murine sarcoma virus
cagcccucagcaguuucuag

SEQ ID NO: 239677 - RNA, 16 nt, Moloney murine sarcoma virus
cagaugagacagcuga

SEQ ID NO: 239678 - RNA, 13 nt, Moloney murine sarcoma virus
aggauaucugugg

SEQ ID NO: 239679 - RNA, 17 nt, Moloney murine sarcoma virus
agugaugggccaaacag

SEQ ID NO: 239680 - RNA, 20 nt, Moloney murine sarcoma virus
agugaugggccaaacaggau

SEQ ID NO: 239681 - RNA, 22 nt, Moloney murine sarcoma virus
uuaaguaacgccacuuugcaag

SEQ ID NO: 239682 - RNA, 16 nt, Moloney murine sarcoma virus
aagaacagaugguccc

SEQ ID NO: 239683 - RNA, 11 nt, Moloney murine sarcoma virus
aagaacagaug

SEQ ID NO: 239684 - RNA, 14 nt, Moloney murine sarcoma virus
aagcgguuccugcc

SEQ ID NO: 239685 - RNA, 14 nt, Moloney murine sarcoma virus
ugaauaccaaacag

SEQ ID NO: 239686 - RNA, 15 nt, Moloney murine sarcoma virus
ugaauaccaaacagg

SEQ ID NO: 239687 - RNA, 16 nt, Moloney murine sarcoma virus
ugaauaccaaacagga

SEQ ID NO: 239688 - RNA, 23 nt, Moloney murine sarcoma virus
ucacucggcgcgccagucuuccg

SEQ ID NO: 239689 - RNA, 16 nt, Moloney murine sarcoma virus
ucaucagauguuucca

SEQ ID NO: 239690 - RNA, 22 nt, Moloney murine sarcoma virus
cugccccggcucagggccaaga

SEQ ID NO: 239691 - RNA, 16 nt, Moloney murine sarcoma virus
cugagugaugggccaa

SEQ ID NO: 239692 - RNA, 21 nt, Moloney murine sarcoma virus
cugagugaugggccaaacagg

SEQ ID NO: 239693 - RNA, 14 nt, Moloney murine sarcoma virus
cugaauaccaaaca

SEQ ID NO: 239694 - RNA, 16 nt, Moloney murine sarcoma virus
cugaauaccaaacagg

SEQ ID NO: 239695 - RNA, 17 nt, Moloney murine sarcoma virus
cgguuccugccccggcu

SEQ ID NO: 239696 - RNA, 14 nt, Moloney murine sarcoma virus
cggcucggggccaa

SEQ ID NO: 239697 - RNA, 17 nt, Moloney murine sarcoma virus
cggcucggggccaagaa

SEQ ID NO: 239698 - RNA, 16 nt, Moloney murine sarcoma virus
caucagauguuuccag

SEQ ID NO: 239699 - RNA, 16 nt, Moloney murine sarcoma virus
caggauaucuguggua

SEQ ID NO: 239700 - RNA, 17 nt, Moloney murine sarcoma virus
ccagcccucagcaguuu

SEQ ID NO: 239701 - RNA, 19 nt, Moloney murine sarcoma virus
ccagcccucagcaguuucu

SEQ ID NO: 239702 - RNA, 18 nt, Moloney murine sarcoma virus
ccggcucggggccaagaa

SEQ ID NO: 239703 - RNA, 15 nt, Moloney murine sarcoma virus
ccggcucagggccaa

SEQ ID NO: 239704 - RNA, 21 nt, Moloney murine sarcoma virus
gauguuuccagggugccccaa

SEQ ID NO: 239705 - RNA, 18 nt, Moloney murine sarcoma virus
gaugcgguccagcccuca

SEQ ID NO: 239706 - RNA, 18 nt, Moloney murine sarcoma virus
gaugggccaaacaggaua

SEQ ID NO: 239707 - RNA, 13 nt, Moloney murine sarcoma virus
gaauaccaaacag

SEQ ID NO: 239708 - RNA, 16 nt, Moloney murine sarcoma virus
gaauaccaaacaggau
